United States Patent Application Publication US 2019/0048337 A1 - sequence listing, part 16

SEQ ID NO: 519204 - RNA, 22 nt, Artificial Sequence
  Synthetic
gagccuaugugugucucugcac

SEQ ID NO: 519205 - RNA, 23 nt, Artificial Sequence
  Synthetic
ugagccuaugugugucucugcac

SEQ ID NO: 519206 - RNA, 24 nt, Artificial Sequence
  Synthetic
uugagccuaugugugucucugcac

SEQ ID NO: 519207 - RNA, 18 nt, Artificial Sequence
  Synthetic
uuggaugagguucugcac

SEQ ID NO: 519208 - RNA, 19 nt, Artificial Sequence
  Synthetic
guuggaugagguucugcac

SEQ ID NO: 519209 - RNA, 20 nt, Artificial Sequence
  Synthetic
aguuggaugagguucugcac

SEQ ID NO: 519210 - RNA, 21 nt, Artificial Sequence
  Synthetic
uaguuggaugagguucugcac

SEQ ID NO: 519211 - RNA, 22 nt, Artificial Sequence
  Synthetic
uuaguuggaugagguucugcac

SEQ ID NO: 519212 - RNA, 23 nt, Artificial Sequence
  Synthetic
auuaguuggaugagguucugcac

SEQ ID NO: 519213 - RNA, 24 nt, Artificial Sequence
  Synthetic
aauuaguuggaugagguucugcac

SEQ ID NO: 519214 - RNA, 18 nt, Artificial Sequence
  Synthetic
gcuaaacauugagugcac

SEQ ID NO: 519215 - RNA, 19 nt, Artificial Sequence
  Synthetic
agcuaaacauugagugcac

SEQ ID NO: 519216 - RNA, 20 nt, Artificial Sequence
  Synthetic
gagcuaaacauugagugcac

SEQ ID NO: 519217 - RNA, 21 nt, Artificial Sequence
  Synthetic
ggagcuaaacauugagugcac

SEQ ID NO: 519218 - RNA, 22 nt, Artificial Sequence
  Synthetic
gggagcuaaacauugagugcac

SEQ ID NO: 519219 - RNA, 23 nt, Artificial Sequence
  Synthetic
ugggagcuaaacauugagugcac

SEQ ID NO: 519220 - RNA, 24 nt, Artificial Sequence
  Synthetic
gugggagcuaaacauugagugcac

SEQ ID NO: 519221 - RNA, 18 nt, Artificial Sequence
  Synthetic
auuaaaacacaggugcac

SEQ ID NO: 519222 - RNA, 19 nt, Artificial Sequence
  Synthetic
uauuaaaacacaggugcac

SEQ ID NO: 519223 - RNA, 20 nt, Artificial Sequence
  Synthetic
uuauuaaaacacaggugcac

SEQ ID NO: 519224 - RNA, 21 nt, Artificial Sequence
  Synthetic
cuuauuaaaacacaggugcac

SEQ ID NO: 519225 - RNA, 22 nt, Artificial Sequence
  Synthetic
ucuuauuaaaacacaggugcac

SEQ ID NO: 519226 - RNA, 23 nt, Artificial Sequence
  Synthetic
aucuuauuaaaacacaggugcac

SEQ ID NO: 519227 - RNA, 24 nt, Artificial Sequence
  Synthetic
uaucuuauuaaaacacaggugcac

SEQ ID NO: 519228 - RNA, 18 nt, Artificial Sequence
  Synthetic
uguuuccuuccugugcac

SEQ ID NO: 519229 - RNA, 19 nt, Artificial Sequence
  Synthetic
uuguuuccuuccugugcac

SEQ ID NO: 519230 - RNA, 20 nt, Artificial Sequence
  Synthetic
uuuguuuccuuccugugcac

SEQ ID NO: 519231 - RNA, 21 nt, Artificial Sequence
  Synthetic
auuuguuuccuuccugugcac

SEQ ID NO: 519232 - RNA, 22 nt, Artificial Sequence
  Synthetic
gauuuguuuccuuccugugcac

SEQ ID NO: 519233 - RNA, 23 nt, Artificial Sequence
  Synthetic
cgauuuguuuccuuccugugcac

SEQ ID NO: 519234 - RNA, 24 nt, Artificial Sequence
  Synthetic
ucgauuuguuuccuuccugugcac

SEQ ID NO: 519235 - RNA, 18 nt, Artificial Sequence
  Synthetic
uucuuuauuugugugcac

SEQ ID NO: 519236 - RNA, 19 nt, Artificial Sequence
  Synthetic
cuucuuuauuugugugcac

SEQ ID NO: 519237 - RNA, 20 nt, Artificial Sequence
  Synthetic
ccuucuuuauuugugugcac

SEQ ID NO: 519238 - RNA, 21 nt, Artificial Sequence
  Synthetic
cccuucuuuauuugugugcac

SEQ ID NO: 519239 - RNA, 22 nt, Artificial Sequence
  Synthetic
acccuucuuuauuugugugcac

SEQ ID NO: 519240 - RNA, 23 nt, Artificial Sequence
  Synthetic
uacccuucuuuauuugugugcac

SEQ ID NO: 519241 - RNA, 24 nt, Artificial Sequence
  Synthetic
cuacccuucuuuauuugugugcac

SEQ ID NO: 519242 - RNA, 18 nt, Artificial Sequence
  Synthetic
augugcuagauauugcac

SEQ ID NO: 519243 - RNA, 19 nt, Artificial Sequence
  Synthetic
uaugugcuagauauugcac

SEQ ID NO: 519244 - RNA, 20 nt, Artificial Sequence
  Synthetic
cuaugugcuagauauugcac

SEQ ID NO: 519245 - RNA, 21 nt, Artificial Sequence
  Synthetic
ccuaugugcuagauauugcac

SEQ ID NO: 519246 - RNA, 22 nt, Artificial Sequence
  Synthetic
uccuaugugcuagauauugcac

SEQ ID NO: 519247 - RNA, 23 nt, Artificial Sequence
  Synthetic
uuccuaugugcuagauauugcac

SEQ ID NO: 519248 - RNA, 24 nt, Artificial Sequence
  Synthetic
uuuccuaugugcuagauauugcac

SEQ ID NO: 519249 - RNA, 18 nt, Artificial Sequence
  Synthetic
acuuuauaacuauugcac

SEQ ID NO: 519250 - RNA, 19 nt, Artificial Sequence
  Synthetic
uacuuuauaacuauugcac

SEQ ID NO: 519251 - RNA, 20 nt, Artificial Sequence
  Synthetic
guacuuuauaacuauugcac

SEQ ID NO: 519252 - RNA, 21 nt, Artificial Sequence
  Synthetic
gguacuuuauaacuauugcac

SEQ ID NO: 519253 - RNA, 22 nt, Artificial Sequence
  Synthetic
agguacuuuauaacuauugcac

SEQ ID NO: 519254 - RNA, 23 nt, Artificial Sequence
  Synthetic
cagguacuuuauaacuauugcac

SEQ ID NO: 519255 - RNA, 24 nt, Artificial Sequence
  Synthetic
ucagguacuuuauaacuauugcac

SEQ ID NO: 519256 - RNA, 18 nt, Artificial Sequence
  Synthetic
auaacuguaugcuugcac

SEQ ID NO: 519257 - RNA, 19 nt, Artificial Sequence
  Synthetic
aauaacuguaugcuugcac

SEQ ID NO: 519258 - RNA, 20 nt, Artificial Sequence
  Synthetic
aaauaacuguaugcuugcac

SEQ ID NO: 519259 - RNA, 21 nt, Artificial Sequence
  Synthetic
uaaauaacuguaugcuugcac

SEQ ID NO: 519260 - RNA, 22 nt, Artificial Sequence
  Synthetic
auaaauaacuguaugcuugcac

SEQ ID NO: 519261 - RNA, 23 nt, Artificial Sequence
  Synthetic
gauaaauaacuguaugcuugcac

SEQ ID NO: 519262 - RNA, 24 nt, Artificial Sequence
  Synthetic
ggauaaauaacuguaugcuugcac

SEQ ID NO: 519263 - RNA, 18 nt, Artificial Sequence
  Synthetic
aaggaaaguuucuugcac

SEQ ID NO: 519264 - RNA, 19 nt, Artificial Sequence
  Synthetic
uaaggaaaguuucuugcac

SEQ ID NO: 519265 - RNA, 20 nt, Artificial Sequence
  Synthetic
uuaaggaaaguuucuugcac

SEQ ID NO: 519266 - RNA, 21 nt, Artificial Sequence
  Synthetic
uuuaaggaaaguuucuugcac

SEQ ID NO: 519267 - RNA, 22 nt, Artificial Sequence
  Synthetic
cuuuaaggaaaguuucuugcac

SEQ ID NO: 519268 - RNA, 23 nt, Artificial Sequence
  Synthetic
ccuuuaaggaaaguuucuugcac

SEQ ID NO: 519269 - RNA, 24 nt, Artificial Sequence
  Synthetic
uccuuuaaggaaaguuucuugcac

SEQ ID NO: 519270 - RNA, 18 nt, Artificial Sequence
  Synthetic
uauccacauaaaaaucac

SEQ ID NO: 519271 - RNA, 19 nt, Artificial Sequence
  Synthetic
uuauccacauaaaaaucac

SEQ ID NO: 519272 - RNA, 20 nt, Artificial Sequence
  Synthetic
auuauccacauaaaaaucac

SEQ ID NO: 519273 - RNA, 21 nt, Artificial Sequence
  Synthetic
uauuauccacauaaaaaucac

SEQ ID NO: 519274 - RNA, 22 nt, Artificial Sequence
  Synthetic
auauuauccacauaaaaaucac

SEQ ID NO: 519275 - RNA, 23 nt, Artificial Sequence
  Synthetic
gauauuauccacauaaaaaucac

SEQ ID NO: 519276 - RNA, 24 nt, Artificial Sequence
  Synthetic
ggauauuauccacauaaaaaucac

SEQ ID NO: 519277 - RNA, 18 nt, Artificial Sequence
  Synthetic
ggaguauuucaaaaucac

SEQ ID NO: 519278 - RNA, 19 nt, Artificial Sequence
  Synthetic
gggaguauuucaaaaucac

SEQ ID NO: 519279 - RNA, 20 nt, Artificial Sequence
  Synthetic
ugggaguauuucaaaaucac

SEQ ID NO: 519280 - RNA, 21 nt, Artificial Sequence
  Synthetic
cugggaguauuucaaaaucac

SEQ ID NO: 519281 - RNA, 22 nt, Artificial Sequence
  Synthetic
gcugggaguauuucaaaaucac

SEQ ID NO: 519282 - RNA, 23 nt, Artificial Sequence
  Synthetic
ugcugggaguauuucaaaaucac

SEQ ID NO: 519283 - RNA, 24 nt, Artificial Sequence
  Synthetic
uugcugggaguauuucaaaaucac

SEQ ID NO: 519284 - RNA, 18 nt, Artificial Sequence
  Synthetic
ugcacccuauaaaaucac

SEQ ID NO: 519285 - RNA, 19 nt, Artificial Sequence
  Synthetic
augcacccuauaaaaucac

SEQ ID NO: 519286 - RNA, 20 nt, Artificial Sequence
  Synthetic
caugcacccuauaaaaucac

SEQ ID NO: 519287 - RNA, 21 nt, Artificial Sequence
  Synthetic
acaugcacccuauaaaaucac

SEQ ID NO: 519288 - RNA, 22 nt, Artificial Sequence
  Synthetic
aacaugcacccuauaaaaucac

SEQ ID NO: 519289 - RNA, 23 nt, Artificial Sequence
  Synthetic
aaacaugcacccuauaaaaucac

SEQ ID NO: 519290 - RNA, 24 nt, Artificial Sequence
  Synthetic
aaaacaugcacccuauaaaaucac

SEQ ID NO: 519291 - RNA, 18 nt, Artificial Sequence
  Synthetic
auuaaaggaaacaaucac

SEQ ID NO: 519292 - RNA, 19 nt, Artificial Sequence
  Synthetic
aauuaaaggaaacaaucac

SEQ ID NO: 519293 - RNA, 20 nt, Artificial Sequence
  Synthetic
gaauuaaaggaaacaaucac

SEQ ID NO: 519294 - RNA, 21 nt, Artificial Sequence
  Synthetic
agaauuaaaggaaacaaucac

SEQ ID NO: 519295 - RNA, 22 nt, Artificial Sequence
  Synthetic
aagaauuaaaggaaacaaucac

SEQ ID NO: 519296 - RNA, 23 nt, Artificial Sequence
  Synthetic
aaagaauuaaaggaaacaaucac

SEQ ID NO: 519297 - RNA, 24 nt, Artificial Sequence
  Synthetic
aaaagaauuaaaggaaacaaucac

SEQ ID NO: 519298 - RNA, 18 nt, Artificial Sequence
  Synthetic
gcugcuuccaacaaucac

SEQ ID NO: 519299 - RNA, 19 nt, Artificial Sequence
  Synthetic
ggcugcuuccaacaaucac

SEQ ID NO: 519300 - RNA, 20 nt, Artificial Sequence
  Synthetic
gggcugcuuccaacaaucac

SEQ ID NO: 519301 - RNA, 21 nt, Artificial Sequence
  Synthetic
ugggcugcuuccaacaaucac

SEQ ID NO: 519302 - RNA, 22 nt, Artificial Sequence
  Synthetic
cugggcugcuuccaacaaucac

SEQ ID NO: 519303 - RNA, 23 nt, Artificial Sequence
  Synthetic
gcugggcugcuuccaacaaucac

SEQ ID NO: 519304 - RNA, 24 nt, Artificial Sequence
  Synthetic
ggcugggcugcuuccaacaaucac

SEQ ID NO: 519305 - RNA, 18 nt, Artificial Sequence
  Synthetic
uuuuuccuacccaaucac

SEQ ID NO: 519306 - RNA, 19 nt, Artificial Sequence
  Synthetic
guuuuuccuacccaaucac

SEQ ID NO: 519307 - RNA, 20 nt, Artificial Sequence
  Synthetic
uguuuuuccuacccaaucac

SEQ ID NO: 519308 - RNA, 21 nt, Artificial Sequence
  Synthetic
cuguuuuuccuacccaaucac

SEQ ID NO: 519309 - RNA, 22 nt, Artificial Sequence
  Synthetic
gcuguuuuuccuacccaaucac

SEQ ID NO: 519310 - RNA, 23 nt, Artificial Sequence
  Synthetic
ugcuguuuuuccuacccaaucac

SEQ ID NO: 519311 - RNA, 24 nt, Artificial Sequence
  Synthetic
uugcuguuuuuccuacccaaucac

SEQ ID NO: 519312 - RNA, 18 nt, Artificial Sequence
  Synthetic
ccgaggcacaagaaucac

SEQ ID NO: 519313 - RNA, 19 nt, Artificial Sequence
  Synthetic
gccgaggcacaagaaucac

SEQ ID NO: 519314 - RNA, 20 nt, Artificial Sequence
  Synthetic
ggccgaggcacaagaaucac

SEQ ID NO: 519315 - RNA, 21 nt, Artificial Sequence
  Synthetic
aggccgaggcacaagaaucac

SEQ ID NO: 519316 - RNA, 22 nt, Artificial Sequence
  Synthetic
gaggccgaggcacaagaaucac

SEQ ID NO: 519317 - RNA, 23 nt, Artificial Sequence
  Synthetic
ggaggccgaggcacaagaaucac

SEQ ID NO: 519318 - RNA, 24 nt, Artificial Sequence
  Synthetic
gggaggccgaggcacaagaaucac

SEQ ID NO: 519319 - RNA, 18 nt, Artificial Sequence
  Synthetic
cugaggcagaagaaucac

SEQ ID NO: 519320 - RNA, 19 nt, Artificial Sequence
  Synthetic
gcugaggcagaagaaucac

SEQ ID NO: 519321 - RNA, 20 nt, Artificial Sequence
  Synthetic
ggcugaggcagaagaaucac

SEQ ID NO: 519322 - RNA, 21 nt, Artificial Sequence
  Synthetic
aggcugaggcagaagaaucac

SEQ ID NO: 519323 - RNA, 22 nt, Artificial Sequence
  Synthetic
gaggcugaggcagaagaaucac

SEQ ID NO: 519324 - RNA, 23 nt, Artificial Sequence
  Synthetic
agaggcugaggcagaagaaucac

SEQ ID NO: 519325 - RNA, 24 nt, Artificial Sequence
  Synthetic
gagaggcugaggcagaagaaucac

SEQ ID NO: 519326 - RNA, 18 nt, Artificial Sequence
  Synthetic
uugaggcagaagaaucac

SEQ ID NO: 519327 - RNA, 19 nt, Artificial Sequence
  Synthetic
uuugaggcagaagaaucac

SEQ ID NO: 519328 - RNA, 20 nt, Artificial Sequence
  Synthetic
guuugaggcagaagaaucac

SEQ ID NO: 519329 - RNA, 21 nt, Artificial Sequence
  Synthetic
aguuugaggcagaagaaucac

SEQ ID NO: 519330 - RNA, 22 nt, Artificial Sequence
  Synthetic
gaguuugaggcagaagaaucac

SEQ ID NO: 519331 - RNA, 23 nt, Artificial Sequence
  Synthetic
ggaguuugaggcagaagaaucac

SEQ ID NO: 519332 - RNA, 24 nt, Artificial Sequence
  Synthetic
gggaguuugaggcagaagaaucac

SEQ ID NO: 519333 - RNA, 18 nt, Artificial Sequence
  Synthetic
gacaugaauaagaaucac

SEQ ID NO: 519334 - RNA, 19 nt, Artificial Sequence
  Synthetic
ugacaugaauaagaaucac

SEQ ID NO: 519335 - RNA, 20 nt, Artificial Sequence
  Synthetic
uugacaugaauaagaaucac

SEQ ID NO: 519336 - RNA, 21 nt, Artificial Sequence
  Synthetic
uuugacaugaauaagaaucac

SEQ ID NO: 519337 - RNA, 22 nt, Artificial Sequence
  Synthetic
uuuugacaugaauaagaaucac

SEQ ID NO: 519338 - RNA, 23 nt, Artificial Sequence
  Synthetic
auuuugacaugaauaagaaucac

SEQ ID NO: 519339 - RNA, 24 nt, Artificial Sequence
  Synthetic
aauuuugacaugaauaagaaucac

SEQ ID NO: 519340 - RNA, 18 nt, Artificial Sequence
  Synthetic
uaggaucaacagaaucac

SEQ ID NO: 519341 - RNA, 19 nt, Artificial Sequence
  Synthetic
uuaggaucaacagaaucac

SEQ ID NO: 519342 - RNA, 20 nt, Artificial Sequence
  Synthetic
uuuaggaucaacagaaucac

SEQ ID NO: 519343 - RNA, 21 nt, Artificial Sequence
  Synthetic
cuuuaggaucaacagaaucac

SEQ ID NO: 519344 - RNA, 22 nt, Artificial Sequence
  Synthetic
acuuuaggaucaacagaaucac

SEQ ID NO: 519345 - RNA, 23 nt, Artificial Sequence
  Synthetic
uacuuuaggaucaacagaaucac

SEQ ID NO: 519346 - RNA, 24 nt, Artificial Sequence
  Synthetic
auacuuuaggaucaacagaaucac

SEQ ID NO: 519347 - RNA, 18 nt, Artificial Sequence
  Synthetic
agggagcagcagaaucac

SEQ ID NO: 519348 - RNA, 19 nt, Artificial Sequence
  Synthetic
gagggagcagcagaaucac

SEQ ID NO: 519349 - RNA, 20 nt, Artificial Sequence
  Synthetic
ugagggagcagcagaaucac

SEQ ID NO: 519350 - RNA, 21 nt, Artificial Sequence
  Synthetic
augagggagcagcagaaucac

SEQ ID NO: 519351 - RNA, 22 nt, Artificial Sequence
  Synthetic
aaugagggagcagcagaaucac

SEQ ID NO: 519352 - RNA, 23 nt, Artificial Sequence
  Synthetic
gaaugagggagcagcagaaucac

SEQ ID NO: 519353 - RNA, 24 nt, Artificial Sequence
  Synthetic
ugaaugagggagcagcagaaucac

SEQ ID NO: 519354 - RNA, 21 nt, Artificial Sequence
  Synthetic
aggcugaggcaggagaaucac

SEQ ID NO: 519355 - RNA, 22 nt, Artificial Sequence
  Synthetic
gaggcugaggcaggagaaucac

SEQ ID NO: 519356 - RNA, 23 nt, Artificial Sequence
  Synthetic
agaggcugaggcaggagaaucac

SEQ ID NO: 519357 - RNA, 24 nt, Artificial Sequence
  Synthetic
aagaggcugaggcaggagaaucac

SEQ ID NO: 519358 - RNA, 23 nt, Artificial Sequence
  Synthetic
ggaggcugaggcaggagaaucac

SEQ ID NO: 519359 - RNA, 24 nt, Artificial Sequence
  Synthetic
gggaggcugaggcaggagaaucac

SEQ ID NO: 519360 - RNA, 18 nt, Artificial Sequence
  Synthetic
uugaggcaggagaaucac

SEQ ID NO: 519361 - RNA, 19 nt, Artificial Sequence
  Synthetic
guugaggcaggagaaucac

SEQ ID NO: 519362 - RNA, 20 nt, Artificial Sequence
  Synthetic
gguugaggcaggagaaucac

SEQ ID NO: 519363 - RNA, 21 nt, Artificial Sequence
  Synthetic
agguugaggcaggagaaucac

SEQ ID NO: 519364 - RNA, 22 nt, Artificial Sequence
  Synthetic
gagguugaggcaggagaaucac

SEQ ID NO: 519365 - RNA, 23 nt, Artificial Sequence
  Synthetic
ggagguugaggcaggagaaucac

SEQ ID NO: 519366 - RNA, 24 nt, Artificial Sequence
  Synthetic
uggagguugaggcaggagaaucac

SEQ ID NO: 519367 - RNA, 18 nt, Artificial Sequence
  Synthetic
cuguggcaugagaaucac

SEQ ID NO: 519368 - RNA, 19 nt, Artificial Sequence
  Synthetic
gcuguggcaugagaaucac

SEQ ID NO: 519369 - RNA, 20 nt, Artificial Sequence
  Synthetic
ggcuguggcaugagaaucac

SEQ ID NO: 519370 - RNA, 21 nt, Artificial Sequence
  Synthetic
aggcuguggcaugagaaucac

SEQ ID NO: 519371 - RNA, 22 nt, Artificial Sequence
  Synthetic
gaggcuguggcaugagaaucac

SEQ ID NO: 519372 - RNA, 23 nt, Artificial Sequence
  Synthetic
ggaggcuguggcaugagaaucac

SEQ ID NO: 519373 - RNA, 24 nt, Artificial Sequence
  Synthetic
gggaggcuguggcaugagaaucac

SEQ ID NO: 519374 - RNA, 18 nt, Artificial Sequence
  Synthetic
guggcacacuagaaucac

SEQ ID NO: 519375 - RNA, 19 nt, Artificial Sequence
  Synthetic
gguggcacacuagaaucac

SEQ ID NO: 519376 - RNA, 20 nt, Artificial Sequence
  Synthetic
agguggcacacuagaaucac

SEQ ID NO: 519377 - RNA, 21 nt, Artificial Sequence
  Synthetic
uagguggcacacuagaaucac

SEQ ID NO: 519378 - RNA, 22 nt, Artificial Sequence
  Synthetic
cuagguggcacacuagaaucac

SEQ ID NO: 519379 - RNA, 23 nt, Artificial Sequence
  Synthetic
ccuagguggcacacuagaaucac

SEQ ID NO: 519380 - RNA, 24 nt, Artificial Sequence
  Synthetic
accuagguggcacacuagaaucac

SEQ ID NO: 519381 - RNA, 18 nt, Artificial Sequence
  Synthetic
cugaggcaggggaaucac

SEQ ID NO: 519382 - RNA, 19 nt, Artificial Sequence
  Synthetic
gcugaggcaggggaaucac

SEQ ID NO: 519383 - RNA, 20 nt, Artificial Sequence
  Synthetic
ggcugaggcaggggaaucac

SEQ ID NO: 519384 - RNA, 21 nt, Artificial Sequence
  Synthetic
aggcugaggcaggggaaucac

SEQ ID NO: 519385 - RNA, 22 nt, Artificial Sequence
  Synthetic
gaggcugaggcaggggaaucac

SEQ ID NO: 519386 - RNA, 23 nt, Artificial Sequence
  Synthetic
ggaggcugaggcaggggaaucac

SEQ ID NO: 519387 - RNA, 24 nt, Artificial Sequence
  Synthetic
cggaggcugaggcaggggaaucac

SEQ ID NO: 519388 - RNA, 18 nt, Artificial Sequence
  Synthetic
aaugugcccaugaaucac

SEQ ID NO: 519389 - RNA, 19 nt, Artificial Sequence
  Synthetic
uaaugugcccaugaaucac

SEQ ID NO: 519390 - RNA, 20 nt, Artificial Sequence
  Synthetic
uuaaugugcccaugaaucac

SEQ ID NO: 519391 - RNA, 21 nt, Artificial Sequence
  Synthetic
uuuaaugugcccaugaaucac

SEQ ID NO: 519392 - RNA, 22 nt, Artificial Sequence
  Synthetic
cuuuaaugugcccaugaaucac

SEQ ID NO: 519393 - RNA, 23 nt, Artificial Sequence
  Synthetic
acuuuaaugugcccaugaaucac

SEQ ID NO: 519394 - RNA, 24 nt, Artificial Sequence
  Synthetic
aacuuuaaugugcccaugaaucac

SEQ ID NO: 519395 - RNA, 18 nt, Artificial Sequence
  Synthetic
caaaguggagauaaucac

SEQ ID NO: 519396 - RNA, 19 nt, Artificial Sequence
  Synthetic
acaaaguggagauaaucac

SEQ ID NO: 519397 - RNA, 20 nt, Artificial Sequence
  Synthetic
aacaaaguggagauaaucac

SEQ ID NO: 519398 - RNA, 21 nt, Artificial Sequence
  Synthetic
gaacaaaguggagauaaucac

SEQ ID NO: 519399 - RNA, 22 nt, Artificial Sequence
  Synthetic
agaacaaaguggagauaaucac

SEQ ID NO: 519400 - RNA, 23 nt, Artificial Sequence
  Synthetic
gagaacaaaguggagauaaucac

SEQ ID NO: 519401 - RNA, 24 nt, Artificial Sequence
  Synthetic
ugagaacaaaguggagauaaucac

SEQ ID NO: 519402 - RNA, 18 nt, Artificial Sequence
  Synthetic
cuuaauguguguaaucac

SEQ ID NO: 519403 - RNA, 19 nt, Artificial Sequence
  Synthetic
ucuuaauguguguaaucac

SEQ ID NO: 519404 - RNA, 20 nt, Artificial Sequence
  Synthetic
uucuuaauguguguaaucac

SEQ ID NO: 519405 - RNA, 21 nt, Artificial Sequence
  Synthetic
uuucuuaauguguguaaucac

SEQ ID NO: 519406 - RNA, 22 nt, Artificial Sequence
  Synthetic
cuuucuuaauguguguaaucac

SEQ ID NO: 519407 - RNA, 23 nt, Artificial Sequence
  Synthetic
acuuucuuaauguguguaaucac

SEQ ID NO: 519408 - RNA, 24 nt, Artificial Sequence
  Synthetic
gacuuucuuaauguguguaaucac

SEQ ID NO: 519409 - RNA, 18 nt, Artificial Sequence
  Synthetic
aauaagaaucuuaaucac

SEQ ID NO: 519410 - RNA, 19 nt, Artificial Sequence
  Synthetic
aaauaagaaucuuaaucac

SEQ ID NO: 519411 - RNA, 20 nt, Artificial Sequence
  Synthetic
uaaauaagaaucuuaaucac

SEQ ID NO: 519412 - RNA, 21 nt, Artificial Sequence
  Synthetic
uuaaauaagaaucuuaaucac

SEQ ID NO: 519413 - RNA, 22 nt, Artificial Sequence
  Synthetic
cuuaaauaagaaucuuaaucac

SEQ ID NO: 519414 - RNA, 23 nt, Artificial Sequence
  Synthetic
acuuaaauaagaaucuuaaucac

SEQ ID NO: 519415 - RNA, 24 nt, Artificial Sequence
  Synthetic
gacuuaaauaagaaucuuaaucac

SEQ ID NO: 519416 - RNA, 18 nt, Artificial Sequence
  Synthetic
uggauucugugacaucac

SEQ ID NO: 519417 - RNA, 19 nt, Artificial Sequence
  Synthetic
uuggauucugugacaucac

SEQ ID NO: 519418 - RNA, 20 nt, Artificial Sequence
  Synthetic
cuuggauucugugacaucac

SEQ ID NO: 519419 - RNA, 21 nt, Artificial Sequence
  Synthetic
ccuuggauucugugacaucac

SEQ ID NO: 519420 - RNA, 22 nt, Artificial Sequence
  Synthetic
cccuuggauucugugacaucac

SEQ ID NO: 519421 - RNA, 23 nt, Artificial Sequence
  Synthetic
ucccuuggauucugugacaucac

SEQ ID NO: 519422 - RNA, 24 nt, Artificial Sequence
  Synthetic
uucccuuggauucugugacaucac

SEQ ID NO: 519423 - RNA, 18 nt, Artificial Sequence
  Synthetic
ucauaauguuuccaucac

SEQ ID NO: 519424 - RNA, 19 nt, Artificial Sequence
  Synthetic
cucauaauguuuccaucac

SEQ ID NO: 519425 - RNA, 20 nt, Artificial Sequence
  Synthetic
ccucauaauguuuccaucac

SEQ ID NO: 519426 - RNA, 21 nt, Artificial Sequence
  Synthetic
cccucauaauguuuccaucac

SEQ ID NO: 519427 - RNA, 22 nt, Artificial Sequence
  Synthetic
ccccucauaauguuuccaucac

SEQ ID NO: 519428 - RNA, 23 nt, Artificial Sequence
  Synthetic
gccccucauaauguuuccaucac

SEQ ID NO: 519429 - RNA, 24 nt, Artificial Sequence
  Synthetic
agccccucauaauguuuccaucac

SEQ ID NO: 519430 - RNA, 18 nt, Artificial Sequence
  Synthetic
ugacagcagcagcaucac

SEQ ID NO: 519431 - RNA, 19 nt, Artificial Sequence
  Synthetic
cugacagcagcagcaucac

SEQ ID NO: 519432 - RNA, 20 nt, Artificial Sequence
  Synthetic
acugacagcagcagcaucac

SEQ ID NO: 519433 - RNA, 21 nt, Artificial Sequence
  Synthetic
gacugacagcagcagcaucac

SEQ ID NO: 519434 - RNA, 22 nt, Artificial Sequence
  Synthetic
agacugacagcagcagcaucac

SEQ ID NO: 519435 - RNA, 23 nt, Artificial Sequence
  Synthetic
gagacugacagcagcagcaucac

SEQ ID NO: 519436 - RNA, 24 nt, Artificial Sequence
  Synthetic
agagacugacagcagcagcaucac

SEQ ID NO: 519437 - RNA, 18 nt, Artificial Sequence
  Synthetic
ccggggcgggcgcaucac

SEQ ID NO: 519438 - RNA, 19 nt, Artificial Sequence
  Synthetic
gccggggcgggcgcaucac

SEQ ID NO: 519439 - RNA, 20 nt, Artificial Sequence
  Synthetic
ggccggggcgggcgcaucac

SEQ ID NO: 519440 - RNA, 21 nt, Artificial Sequence
  Synthetic
aggccggggcgggcgcaucac

SEQ ID NO: 519441 - RNA, 22 nt, Artificial Sequence
  Synthetic
gaggccggggcgggcgcaucac

SEQ ID NO: 519442 - RNA, 23 nt, Artificial Sequence
  Synthetic
ggaggccggggcgggcgcaucac

SEQ ID NO: 519443 - RNA, 24 nt, Artificial Sequence
  Synthetic
gggaggccggggcgggcgcaucac

SEQ ID NO: 519444 - RNA, 18 nt, Artificial Sequence
  Synthetic
cacaguggauugcaucac

SEQ ID NO: 519445 - RNA, 19 nt, Artificial Sequence
  Synthetic
acacaguggauugcaucac

SEQ ID NO: 519446 - RNA, 20 nt, Artificial Sequence
  Synthetic
cacacaguggauugcaucac

SEQ ID NO: 519447 - RNA, 21 nt, Artificial Sequence
  Synthetic
acacacaguggauugcaucac

SEQ ID NO: 519448 - RNA, 22 nt, Artificial Sequence
  Synthetic
uacacacaguggauugcaucac

SEQ ID NO: 519449 - RNA, 23 nt, Artificial Sequence
  Synthetic
guacacacaguggauugcaucac

SEQ ID NO: 519450 - RNA, 24 nt, Artificial Sequence
  Synthetic
uguacacacaguggauugcaucac

SEQ ID NO: 519451 - RNA, 18 nt, Artificial Sequence
  Synthetic
aacuugcuaucucaucac

SEQ ID NO: 519452 - RNA, 19 nt, Artificial Sequence
  Synthetic
aaacuugcuaucucaucac

SEQ ID NO: 519453 - RNA, 20 nt, Artificial Sequence
  Synthetic
caaacuugcuaucucaucac

SEQ ID NO: 519454 - RNA, 21 nt, Artificial Sequence
  Synthetic
ucaaacuugcuaucucaucac

SEQ ID NO: 519455 - RNA, 22 nt, Artificial Sequence
  Synthetic
uucaaacuugcuaucucaucac

SEQ ID NO: 519456 - RNA, 23 nt, Artificial Sequence
  Synthetic
uuucaaacuugcuaucucaucac

SEQ ID NO: 519457 - RNA, 24 nt, Artificial Sequence
  Synthetic
uuuucaaacuugcuaucucaucac

SEQ ID NO: 519458 - RNA, 18 nt, Artificial Sequence
  Synthetic
cagcaugagugucaucac

SEQ ID NO: 519459 - RNA, 19 nt, Artificial Sequence
  Synthetic
ccagcaugagugucaucac

SEQ ID NO: 519460 - RNA, 20 nt, Artificial Sequence
  Synthetic
gccagcaugagugucaucac

SEQ ID NO: 519461 - RNA, 21 nt, Artificial Sequence
  Synthetic
ugccagcaugagugucaucac

SEQ ID NO: 519462 - RNA, 22 nt, Artificial Sequence
  Synthetic
uugccagcaugagugucaucac

SEQ ID NO: 519463 - RNA, 23 nt, Artificial Sequence
  Synthetic
guugccagcaugagugucaucac

SEQ ID NO: 519464 - RNA, 24 nt, Artificial Sequence
  Synthetic
gguugccagcaugagugucaucac

SEQ ID NO: 519465 - RNA, 18 nt, Artificial Sequence
  Synthetic
uuugacccuugucaucac

SEQ ID NO: 519466 - RNA, 19 nt, Artificial Sequence
  Synthetic
uuuugacccuugucaucac

SEQ ID NO: 519467 - RNA, 20 nt, Artificial Sequence
  Synthetic
auuuugacccuugucaucac

SEQ ID NO: 519468 - RNA, 21 nt, Artificial Sequence
  Synthetic
cauuuugacccuugucaucac

SEQ ID NO: 519469 - RNA, 22 nt, Artificial Sequence
  Synthetic
ccauuuugacccuugucaucac

SEQ ID NO: 519470 - RNA, 23 nt, Artificial Sequence
  Synthetic
uccauuuugacccuugucaucac

SEQ ID NO: 519471 - RNA, 24 nt, Artificial Sequence
  Synthetic
cuccauuuugacccuugucaucac

SEQ ID NO: 519472 - RNA, 18 nt, Artificial Sequence
  Synthetic
cauauuggcauucaucac

SEQ ID NO: 519473 - RNA, 19 nt, Artificial Sequence
  Synthetic
ucauauuggcauucaucac

SEQ ID NO: 519474 - RNA, 20 nt, Artificial Sequence
  Synthetic
uucauauuggcauucaucac

SEQ ID NO: 519475 - RNA, 21 nt, Artificial Sequence
  Synthetic
cuucauauuggcauucaucac

SEQ ID NO: 519476 - RNA, 22 nt, Artificial Sequence
  Synthetic
gcuucauauuggcauucaucac

SEQ ID NO: 519477 - RNA, 23 nt, Artificial Sequence
  Synthetic
ugcuucauauuggcauucaucac

SEQ ID NO: 519478 - RNA, 24 nt, Artificial Sequence
  Synthetic
gugcuucauauuggcauucaucac

SEQ ID NO: 519479 - RNA, 18 nt, Artificial Sequence
  Synthetic
aauauguuugaagaucac

SEQ ID NO: 519480 - RNA, 19 nt, Artificial Sequence
  Synthetic
aaauauguuugaagaucac

SEQ ID NO: 519481 - RNA, 20 nt, Artificial Sequence
  Synthetic
gaaauauguuugaagaucac

SEQ ID NO: 519482 - RNA, 21 nt, Artificial Sequence
  Synthetic
ggaaauauguuugaagaucac

SEQ ID NO: 519483 - RNA, 22 nt, Artificial Sequence
  Synthetic
uggaaauauguuugaagaucac

SEQ ID NO: 519484 - RNA, 23 nt, Artificial Sequence
  Synthetic
uuggaaauauguuugaagaucac

SEQ ID NO: 519485 - RNA, 24 nt, Artificial Sequence
  Synthetic
cuuggaaauauguuugaagaucac

SEQ ID NO: 519486 - RNA, 18 nt, Artificial Sequence
  Synthetic
ccguggagggcagaucac

SEQ ID NO: 519487 - RNA, 19 nt, Artificial Sequence
  Synthetic
gccguggagggcagaucac

SEQ ID NO: 519488 - RNA, 20 nt, Artificial Sequence
  Synthetic
ggccguggagggcagaucac

SEQ ID NO: 519489 - RNA, 21 nt, Artificial Sequence
  Synthetic
aggccguggagggcagaucac

SEQ ID NO: 519490 - RNA, 22 nt, Artificial Sequence
  Synthetic
gaggccguggagggcagaucac

SEQ ID NO: 519491 - RNA, 23 nt, Artificial Sequence
  Synthetic
ggaggccguggagggcagaucac

SEQ ID NO: 519492 - RNA, 24 nt, Artificial Sequence
  Synthetic
gggaggccguggagggcagaucac

SEQ ID NO: 519493 - RNA, 18 nt, Artificial Sequence
  Synthetic
ggaaagcgggcagaucac

SEQ ID NO: 519494 - RNA, 19 nt, Artificial Sequence
  Synthetic
aggaaagcgggcagaucac

SEQ ID NO: 519495 - RNA, 20 nt, Artificial Sequence
  Synthetic
aaggaaagcgggcagaucac

SEQ ID NO: 519496 - RNA, 21 nt, Artificial Sequence
  Synthetic
aaaggaaagcgggcagaucac

SEQ ID NO: 519497 - RNA, 22 nt, Artificial Sequence
  Synthetic
caaaggaaagcgggcagaucac

SEQ ID NO: 519498 - RNA, 23 nt, Artificial Sequence
  Synthetic
ccaaaggaaagcgggcagaucac

SEQ ID NO: 519499 - RNA, 24 nt, Artificial Sequence
  Synthetic
gccaaaggaaagcgggcagaucac

SEQ ID NO: 519500 - RNA, 23 nt, Artificial Sequence
  Synthetic
ggaggccgaggugggcagaucac

SEQ ID NO: 519501 - RNA, 24 nt, Artificial Sequence
  Synthetic
gggaggccgaggugggcagaucac

SEQ ID NO: 519502 - RNA, 18 nt, Artificial Sequence
  Synthetic
ggugggagggaggaucac

SEQ ID NO: 519503 - RNA, 19 nt, Artificial Sequence
  Synthetic
aggugggagggaggaucac

SEQ ID NO: 519504 - RNA, 20 nt, Artificial Sequence
  Synthetic
gaggugggagggaggaucac

SEQ ID NO: 519505 - RNA, 21 nt, Artificial Sequence
  Synthetic
ugaggugggagggaggaucac

SEQ ID NO: 519506 - RNA, 22 nt, Artificial Sequence
  Synthetic
cugaggugggagggaggaucac

SEQ ID NO: 519507 - RNA, 23 nt, Artificial Sequence
  Synthetic
gcugaggugggagggaggaucac

SEQ ID NO: 519508 - RNA, 24 nt, Artificial Sequence
  Synthetic
ggcugaggugggagggaggaucac

SEQ ID NO: 519509 - RNA, 18 nt, Artificial Sequence
  Synthetic
cugaggugggaggaucac

SEQ ID NO: 519510 - RNA, 19 nt, Artificial Sequence
  Synthetic
gcugaggugggaggaucac

SEQ ID NO: 519511 - RNA, 20 nt, Artificial Sequence
  Synthetic
ggcugaggugggaggaucac

SEQ ID NO: 519512 - RNA, 21 nt, Artificial Sequence
  Synthetic
aggcugaggugggaggaucac

SEQ ID NO: 519513 - RNA, 22 nt, Artificial Sequence
  Synthetic
gaggcugaggugggaggaucac

SEQ ID NO: 519514 - RNA, 23 nt, Artificial Sequence
  Synthetic
ggaggcugaggugggaggaucac

SEQ ID NO: 519515 - RNA, 24 nt, Artificial Sequence
  Synthetic
gggaggcugaggugggaggaucac

SEQ ID NO: 519516 - RNA, 18 nt, Artificial Sequence
  Synthetic
ccaaggugaacggaucac

SEQ ID NO: 519517 - RNA, 19 nt, Artificial Sequence
  Synthetic
gccaaggugaacggaucac

SEQ ID NO: 519518 - RNA, 20 nt, Artificial Sequence
  Synthetic
ggccaaggugaacggaucac

SEQ ID NO: 519519 - RNA, 21 nt, Artificial Sequence
  Synthetic
aggccaaggugaacggaucac

SEQ ID NO: 519520 - RNA, 22 nt, Artificial Sequence
  Synthetic
gaggccaaggugaacggaucac

SEQ ID NO: 519521 - RNA, 23 nt, Artificial Sequence
  Synthetic
ggaggccaaggugaacggaucac

SEQ ID NO: 519522 - RNA, 24 nt, Artificial Sequence
  Synthetic
gggaggccaaggugaacggaucac

SEQ ID NO: 519523 - RNA, 18 nt, Artificial Sequence
  Synthetic
cugaggcugacggaucac

SEQ ID NO: 519524 - RNA, 19 nt, Artificial Sequence
  Synthetic
gcugaggcugacggaucac

SEQ ID NO: 519525 - RNA, 20 nt, Artificial Sequence
  Synthetic
ugcugaggcugacggaucac

SEQ ID NO: 519526 - RNA, 21 nt, Artificial Sequence
  Synthetic
augcugaggcugacggaucac

SEQ ID NO: 519527 - RNA, 22 nt, Artificial Sequence
  Synthetic
gaugcugaggcugacggaucac

SEQ ID NO: 519528 - RNA, 23 nt, Artificial Sequence
  Synthetic
ggaugcugaggcugacggaucac

SEQ ID NO: 519529 - RNA, 24 nt, Artificial Sequence
  Synthetic
cggaugcugaggcugacggaucac

SEQ ID NO: 519530 - RNA, 18 nt, Artificial Sequence
  Synthetic
cugaggcaggcggaucac

SEQ ID NO: 519531 - RNA, 19 nt, Artificial Sequence
  Synthetic
gcugaggcaggcggaucac

SEQ ID NO: 519532 - RNA, 20 nt, Artificial Sequence
  Synthetic
ggcugaggcaggcggaucac

SEQ ID NO: 519533 - RNA, 21 nt, Artificial Sequence
  Synthetic
aggcugaggcaggcggaucac

SEQ ID NO: 519534 - RNA, 22 nt, Artificial Sequence
  Synthetic
gaggcugaggcaggcggaucac

SEQ ID NO: 519535 - RNA, 23 nt, Artificial Sequence
  Synthetic
agaggcugaggcaggcggaucac

SEQ ID NO: 519536 - RNA, 24 nt, Artificial Sequence
  Synthetic
gagaggcugaggcaggcggaucac

SEQ ID NO: 519537 - RNA, 18 nt, Artificial Sequence
  Synthetic
ccaaggcgggcggaucac

SEQ ID NO: 519538 - RNA, 19 nt, Artificial Sequence
  Synthetic
gccaaggcgggcggaucac

SEQ ID NO: 519539 - RNA, 20 nt, Artificial Sequence
  Synthetic
ggccaaggcgggcggaucac

SEQ ID NO: 519540 - RNA, 21 nt, Artificial Sequence
  Synthetic
aggccaaggcgggcggaucac

SEQ ID NO: 519541 - RNA, 22 nt, Artificial Sequence
  Synthetic
gaggccaaggcgggcggaucac

SEQ ID NO: 519542 - RNA, 23 nt, Artificial Sequence
  Synthetic
ggaggccaaggcgggcggaucac

SEQ ID NO: 519543 - RNA, 24 nt, Artificial Sequence
  Synthetic
gggaggccaaggcgggcggaucac

SEQ ID NO: 519544 - RNA, 19 nt, Artificial Sequence
  Synthetic
uccaaggugggcggaucac

SEQ ID NO: 519545 - RNA, 20 nt, Artificial Sequence
  Synthetic
guccaaggugggcggaucac

SEQ ID NO: 519546 - RNA, 21 nt, Artificial Sequence
  Synthetic
aguccaaggugggcggaucac

SEQ ID NO: 519547 - RNA, 22 nt, Artificial Sequence
  Synthetic
gaguccaaggugggcggaucac

SEQ ID NO: 519548 - RNA, 23 nt, Artificial Sequence
  Synthetic
ggaguccaaggugggcggaucac

SEQ ID NO: 519549 - RNA, 24 nt, Artificial Sequence
  Synthetic
gggaguccaaggugggcggaucac

SEQ ID NO: 519550 - RNA, 18 nt, Artificial Sequence
  Synthetic
ccgaugugggcggaucac

SEQ ID NO: 519551 - RNA, 19 nt, Artificial Sequence
  Synthetic
gccgaugugggcggaucac

SEQ ID NO: 519552 - RNA, 20 nt, Artificial Sequence
  Synthetic
ggccgaugugggcggaucac

SEQ ID NO: 519553 - RNA, 21 nt, Artificial Sequence
  Synthetic
aggccgaugugggcggaucac

SEQ ID NO: 519554 - RNA, 22 nt, Artificial Sequence
  Synthetic
gaggccgaugugggcggaucac

SEQ ID NO: 519555 - RNA, 23 nt, Artificial Sequence
  Synthetic
ggaggccgaugugggcggaucac

SEQ ID NO: 519556 - RNA, 24 nt, Artificial Sequence
  Synthetic
gggaggccgaugugggcggaucac

SEQ ID NO: 519557 - RNA, 18 nt, Artificial Sequence
  Synthetic
ugagguuggggggaucac

SEQ ID NO: 519558 - RNA, 19 nt, Artificial Sequence
  Synthetic
cugagguuggggggaucac

SEQ ID NO: 519559 - RNA, 20 nt, Artificial Sequence
  Synthetic
gcugagguuggggggaucac

SEQ ID NO: 519560 - RNA, 21 nt, Artificial Sequence
  Synthetic
ggcugagguuggggggaucac

SEQ ID NO: 519561 - RNA, 22 nt, Artificial Sequence
  Synthetic
aggcugagguuggggggaucac

SEQ ID NO: 519562 - RNA, 23 nt, Artificial Sequence
  Synthetic
gaggcugagguuggggggaucac

SEQ ID NO: 519563 - RNA, 24 nt, Artificial Sequence
  Synthetic
ggaggcugagguuggggggaucac

SEQ ID NO: 519564 - RNA, 18 nt, Artificial Sequence
  Synthetic
ccaaggugaguggaucac

SEQ ID NO: 519565 - RNA, 19 nt, Artificial Sequence
  Synthetic
gccaaggugaguggaucac

SEQ ID NO: 519566 - RNA, 20 nt, Artificial Sequence
  Synthetic
ggccaaggugaguggaucac

SEQ ID NO: 519567 - RNA, 21 nt, Artificial Sequence
  Synthetic
aggccaaggugaguggaucac

SEQ ID NO: 519568 - RNA, 22 nt, Artificial Sequence
  Synthetic
gaggccaaggugaguggaucac

SEQ ID NO: 519569 - RNA, 23 nt, Artificial Sequence
  Synthetic
ggaggccaaggugaguggaucac

SEQ ID NO: 519570 - RNA, 24 nt, Artificial Sequence
  Synthetic
gggaggccaaggugaguggaucac

SEQ ID NO: 519571 - RNA, 21 nt, Artificial Sequence
  Synthetic
aggcugaggcagguggaucac

SEQ ID NO: 519572 - RNA, 22 nt, Artificial Sequence
  Synthetic
gaggcugaggcagguggaucac

SEQ ID NO: 519573 - RNA, 23 nt, Artificial Sequence
  Synthetic
ggaggcugaggcagguggaucac

SEQ ID NO: 519574 - RNA, 24 nt, Artificial Sequence
  Synthetic
gggaggcugaggcagguggaucac

SEQ ID NO: 519575 - RNA, 18 nt, Artificial Sequence
  Synthetic
ccgaaguagguggaucac

SEQ ID NO: 519576 - RNA, 19 nt, Artificial Sequence
  Synthetic
gccgaaguagguggaucac

SEQ ID NO: 519577 - RNA, 20 nt, Artificial Sequence
  Synthetic
ggccgaaguagguggaucac

SEQ ID NO: 519578 - RNA, 21 nt, Artificial Sequence
  Synthetic
aggccgaaguagguggaucac

SEQ ID NO: 519579 - RNA, 22 nt, Artificial Sequence
  Synthetic
gaggccgaaguagguggaucac

SEQ ID NO: 519580 - RNA, 23 nt, Artificial Sequence
  Synthetic
ggaggccgaaguagguggaucac

SEQ ID NO: 519581 - RNA, 24 nt, Artificial Sequence
  Synthetic
gggaggccgaaguagguggaucac

SEQ ID NO: 519582 - RNA, 18 nt, Artificial Sequence
  Synthetic
cugaggaggguggaucac

SEQ ID NO: 519583 - RNA, 19 nt, Artificial Sequence
  Synthetic
gcugaggaggguggaucac

SEQ ID NO: 519584 - RNA, 20 nt, Artificial Sequence
  Synthetic
agcugaggaggguggaucac

SEQ ID NO: 519585 - RNA, 21 nt, Artificial Sequence
  Synthetic
aagcugaggaggguggaucac

SEQ ID NO: 519586 - RNA, 22 nt, Artificial Sequence
  Synthetic
gaagcugaggaggguggaucac

SEQ ID NO: 519587 - RNA, 23 nt, Artificial Sequence
  Synthetic
ggaagcugaggaggguggaucac

SEQ ID NO: 519588 - RNA, 24 nt, Artificial Sequence
  Synthetic
gggaagcugaggaggguggaucac

SEQ ID NO: 519589 - RNA, 18 nt, Artificial Sequence
  Synthetic
gguggauggguggaucac

SEQ ID NO: 519590 - RNA, 19 nt, Artificial Sequence
  Synthetic
ggguggauggguggaucac

SEQ ID NO: 519591 - RNA, 20 nt, Artificial Sequence
  Synthetic
uggguggauggguggaucac

SEQ ID NO: 519592 - RNA, 21 nt, Artificial Sequence
  Synthetic
guggguggauggguggaucac

SEQ ID NO: 519593 - RNA, 22 nt, Artificial Sequence
  Synthetic
gguggguggauggguggaucac

SEQ ID NO: 519594 - RNA, 23 nt, Artificial Sequence
  Synthetic
agguggguggauggguggaucac

SEQ ID NO: 519595 - RNA, 24 nt, Artificial Sequence
  Synthetic
gagguggguggauggguggaucac

SEQ ID NO: 519596 - RNA, 18 nt, Artificial Sequence
  Synthetic
cagaaguggguggaucac

SEQ ID NO: 519597 - RNA, 19 nt, Artificial Sequence
  Synthetic
gcagaaguggguggaucac

SEQ ID NO: 519598 - RNA, 20 nt, Artificial Sequence
  Synthetic
ggcagaaguggguggaucac

SEQ ID NO: 519599 - RNA, 21 nt, Artificial Sequence
  Synthetic
aggcagaaguggguggaucac

SEQ ID NO: 519600 - RNA, 22 nt, Artificial Sequence
  Synthetic
gaggcagaaguggguggaucac

SEQ ID NO: 519601 - RNA, 23 nt, Artificial Sequence
  Synthetic
ggaggcagaaguggguggaucac

SEQ ID NO: 519602 - RNA, 24 nt, Artificial Sequence
  Synthetic
gggaggcagaaguggguggaucac

SEQ ID NO: 519603 - RNA, 18 nt, Artificial Sequence
  Synthetic
cugagguggguggaucac

SEQ ID NO: 519604 - RNA, 19 nt, Artificial Sequence
  Synthetic
gcugagguggguggaucac

SEQ ID NO: 519605 - RNA, 20 nt, Artificial Sequence
  Synthetic
ggcugagguggguggaucac

SEQ ID NO: 519606 - RNA, 21 nt, Artificial Sequence
  Synthetic
aggcugagguggguggaucac

SEQ ID NO: 519607 - RNA, 22 nt, Artificial Sequence
  Synthetic
gaggcugagguggguggaucac

SEQ ID NO: 519608 - RNA, 23 nt, Artificial Sequence
  Synthetic
ggaggcugagguggguggaucac

SEQ ID NO: 519609 - RNA, 24 nt, Artificial Sequence
  Synthetic
gggaggcugagguggguggaucac

SEQ ID NO: 519610 - RNA, 18 nt, Artificial Sequence
  Synthetic
auuagucauuaugaucac

SEQ ID NO: 519611 - RNA, 19 nt, Artificial Sequence
  Synthetic
uauuagucauuaugaucac

SEQ ID NO: 519612 - RNA, 20 nt, Artificial Sequence
  Synthetic
uuauuagucauuaugaucac

SEQ ID NO: 519613 - RNA, 21 nt, Artificial Sequence
  Synthetic
auuauuagucauuaugaucac

SEQ ID NO: 519614 - RNA, 22 nt, Artificial Sequence
  Synthetic
aauuauuagucauuaugaucac

SEQ ID NO: 519615 - RNA, 23 nt, Artificial Sequence
  Synthetic
uaauuauuagucauuaugaucac

SEQ ID NO: 519616 - RNA, 24 nt, Artificial Sequence
  Synthetic
uuaauuauuagucauuaugaucac

SEQ ID NO: 519617 - RNA, 18 nt, Artificial Sequence
  Synthetic
ccgaggcagccugaucac

SEQ ID NO: 519618 - RNA, 19 nt, Artificial Sequence
  Synthetic
gccgaggcagccugaucac

SEQ ID NO: 519619 - RNA, 20 nt, Artificial Sequence
  Synthetic
ggccgaggcagccugaucac

SEQ ID NO: 519620 - RNA, 21 nt, Artificial Sequence
  Synthetic
aggccgaggcagccugaucac

SEQ ID NO: 519621 - RNA, 22 nt, Artificial Sequence
  Synthetic
gaggccgaggcagccugaucac

SEQ ID NO: 519622 - RNA, 23 nt, Artificial Sequence
  Synthetic
ggaggccgaggcagccugaucac

SEQ ID NO: 519623 - RNA, 24 nt, Artificial Sequence
  Synthetic
gggaggccgaggcagccugaucac

SEQ ID NO: 519624 - RNA, 18 nt, Artificial Sequence
  Synthetic
agagacucacuugaucac

SEQ ID NO: 519625 - RNA, 19 nt, Artificial Sequence
  Synthetic
gagagacucacuugaucac

SEQ ID NO: 519626 - RNA, 20 nt, Artificial Sequence
  Synthetic
ugagagacucacuugaucac

SEQ ID NO: 519627 - RNA, 21 nt, Artificial Sequence
  Synthetic
cugagagacucacuugaucac

SEQ ID NO: 519628 - RNA, 22 nt, Artificial Sequence
  Synthetic
gcugagagacucacuugaucac

SEQ ID NO: 519629 - RNA, 23 nt, Artificial Sequence
  Synthetic
ugcugagagacucacuugaucac

SEQ ID NO: 519630 - RNA, 24 nt, Artificial Sequence
  Synthetic
augcugagagacucacuugaucac

SEQ ID NO: 519631 - RNA, 18 nt, Artificial Sequence
  Synthetic
uucaugacaucauaucac

SEQ ID NO: 519632 - RNA, 19 nt, Artificial Sequence
  Synthetic
uuucaugacaucauaucac

SEQ ID NO: 519633 - RNA, 20 nt, Artificial Sequence
  Synthetic
uuuucaugacaucauaucac

SEQ ID NO: 519634 - RNA, 21 nt, Artificial Sequence
  Synthetic
cuuuucaugacaucauaucac

SEQ ID NO: 519635 - RNA, 22 nt, Artificial Sequence
  Synthetic
ccuuuucaugacaucauaucac

SEQ ID NO: 519636 - RNA, 23 nt, Artificial Sequence
  Synthetic
uccuuuucaugacaucauaucac

SEQ ID NO: 519637 - RNA, 24 nt, Artificial Sequence
  Synthetic
guccuuuucaugacaucauaucac

SEQ ID NO: 519638 - RNA, 18 nt, Artificial Sequence
  Synthetic
auauggcaaagauaucac

SEQ ID NO: 519639 - RNA, 19 nt, Artificial Sequence
  Synthetic
cauauggcaaagauaucac

SEQ ID NO: 519640 - RNA, 20 nt, Artificial Sequence
  Synthetic
gcauauggcaaagauaucac

SEQ ID NO: 519641 - RNA, 21 nt, Artificial Sequence
  Synthetic
agcauauggcaaagauaucac

SEQ ID NO: 519642 - RNA, 22 nt, Artificial Sequence
  Synthetic
gagcauauggcaaagauaucac

SEQ ID NO: 519643 - RNA, 23 nt, Artificial Sequence
  Synthetic
agagcauauggcaaagauaucac

SEQ ID NO: 519644 - RNA, 24 nt, Artificial Sequence
  Synthetic
cagagcauauggcaaagauaucac

SEQ ID NO: 519645 - RNA, 18 nt, Artificial Sequence
  Synthetic
uucucagcaaacuaucac

SEQ ID NO: 519646 - RNA, 19 nt, Artificial Sequence
  Synthetic
uuucucagcaaacuaucac

SEQ ID NO: 519647 - RNA, 20 nt, Artificial Sequence
  Synthetic
cuuucucagcaaacuaucac

SEQ ID NO: 519648 - RNA, 21 nt, Artificial Sequence
  Synthetic
ucuuucucagcaaacuaucac

SEQ ID NO: 519649 - RNA, 22 nt, Artificial Sequence
  Synthetic
aucuuucucagcaaacuaucac

SEQ ID NO: 519650 - RNA, 23 nt, Artificial Sequence
  Synthetic
caucuuucucagcaaacuaucac

SEQ ID NO: 519651 - RNA, 24 nt, Artificial Sequence
  Synthetic
ucaucuuucucagcaaacuaucac

SEQ ID NO: 519652 - RNA, 21 nt, Artificial Sequence
  Synthetic
acauucugagcaaacuaucac

SEQ ID NO: 519653 - RNA, 22 nt, Artificial Sequence
  Synthetic
aacauucugagcaaacuaucac

SEQ ID NO: 519654 - RNA, 23 nt, Artificial Sequence
  Synthetic
caacauucugagcaaacuaucac

SEQ ID NO: 519655 - RNA, 24 nt, Artificial Sequence
  Synthetic
ccaacauucugagcaaacuaucac

SEQ ID NO: 519656 - RNA, 18 nt, Artificial Sequence
  Synthetic
gucauuauuaucuaucac

SEQ ID NO: 519657 - RNA, 19 nt, Artificial Sequence
  Synthetic
ggucauuauuaucuaucac

SEQ ID NO: 519658 - RNA, 20 nt, Artificial Sequence
  Synthetic
aggucauuauuaucuaucac

SEQ ID NO: 519659 - RNA, 21 nt, Artificial Sequence
  Synthetic
uaggucauuauuaucuaucac

SEQ ID NO: 519660 - RNA, 22 nt, Artificial Sequence
  Synthetic
uuaggucauuauuaucuaucac

SEQ ID NO: 519661 - RNA, 23 nt, Artificial Sequence
  Synthetic
uuuaggucauuauuaucuaucac

SEQ ID NO: 519662 - RNA, 24 nt, Artificial Sequence
  Synthetic
guuuaggucauuauuaucuaucac

SEQ ID NO: 519663 - RNA, 18 nt, Artificial Sequence
  Synthetic
cuuaaaucuaguuaucac

SEQ ID NO: 519664 - RNA, 19 nt, Artificial Sequence
  Synthetic
acuuaaaucuaguuaucac

SEQ ID NO: 519665 - RNA, 20 nt, Artificial Sequence
  Synthetic
uacuuaaaucuaguuaucac

SEQ ID NO: 519666 - RNA, 21 nt, Artificial Sequence
  Synthetic
uuacuuaaaucuaguuaucac

SEQ ID NO: 519667 - RNA, 22 nt, Artificial Sequence
  Synthetic
cuuacuuaaaucuaguuaucac

SEQ ID NO: 519668 - RNA, 23 nt, Artificial Sequence
  Synthetic
ucuuacuuaaaucuaguuaucac

SEQ ID NO: 519669 - RNA, 24 nt, Artificial Sequence
  Synthetic
uucuuacuuaaaucuaguuaucac

SEQ ID NO: 519670 - RNA, 18 nt, Artificial Sequence
  Synthetic
gguuuugaauuuuaucac

SEQ ID NO: 519671 - RNA, 19 nt, Artificial Sequence
  Synthetic
agguuuugaauuuuaucac

SEQ ID NO: 519672 - RNA, 20 nt, Artificial Sequence
  Synthetic
gagguuuugaauuuuaucac

SEQ ID NO: 519673 - RNA, 21 nt, Artificial Sequence
  Synthetic
ugagguuuugaauuuuaucac

SEQ ID NO: 519674 - RNA, 22 nt, Artificial Sequence
  Synthetic
uugagguuuugaauuuuaucac

SEQ ID NO: 519675 - RNA, 23 nt, Artificial Sequence
  Synthetic
uuugagguuuugaauuuuaucac

SEQ ID NO: 519676 - RNA, 24 nt, Artificial Sequence
  Synthetic
guuugagguuuugaauuuuaucac

SEQ ID NO: 519677 - RNA, 18 nt, Artificial Sequence
  Synthetic
cuuaauuguuuuuaucac

SEQ ID NO: 519678 - RNA, 19 nt, Artificial Sequence
  Synthetic
gcuuaauuguuuuuaucac

SEQ ID NO: 519679 - RNA, 20 nt, Artificial Sequence
  Synthetic
ggcuuaauuguuuuuaucac

SEQ ID NO: 519680 - RNA, 21 nt, Artificial Sequence
  Synthetic
gggcuuaauuguuuuuaucac

SEQ ID NO: 519681 - RNA, 22 nt, Artificial Sequence
  Synthetic
ugggcuuaauuguuuuuaucac

SEQ ID NO: 519682 - RNA, 23 nt, Artificial Sequence
  Synthetic
gugggcuuaauuguuuuuaucac

SEQ ID NO: 519683 - RNA, 24 nt, Artificial Sequence
  Synthetic
agugggcuuaauuguuuuuaucac

SEQ ID NO: 519684 - RNA, 18 nt, Artificial Sequence
  Synthetic
uuccuauuauaaacucac

SEQ ID NO: 519685 - RNA, 19 nt, Artificial Sequence
  Synthetic
uuuccuauuauaaacucac

SEQ ID NO: 519686 - RNA, 20 nt, Artificial Sequence
  Synthetic
uuuuccuauuauaaacucac

SEQ ID NO: 519687 - RNA, 21 nt, Artificial Sequence
  Synthetic
uuuuuccuauuauaaacucac

SEQ ID NO: 519688 - RNA, 22 nt, Artificial Sequence
  Synthetic
auuuuuccuauuauaaacucac

SEQ ID NO: 519689 - RNA, 23 nt, Artificial Sequence
  Synthetic
uauuuuuccuauuauaaacucac

SEQ ID NO: 519690 - RNA, 24 nt, Artificial Sequence
  Synthetic
auauuuuuccuauuauaaacucac

SEQ ID NO: 519691 - RNA, 18 nt, Artificial Sequence
  Synthetic
acuaagacaacaacucac

SEQ ID NO: 519692 - RNA, 19 nt, Artificial Sequence
  Synthetic
uacuaagacaacaacucac

SEQ ID NO: 519693 - RNA, 20 nt, Artificial Sequence
  Synthetic
guacuaagacaacaacucac

SEQ ID NO: 519694 - RNA, 21 nt, Artificial Sequence
  Synthetic
aguacuaagacaacaacucac

SEQ ID NO: 519695 - RNA, 22 nt, Artificial Sequence
  Synthetic
aaguacuaagacaacaacucac

SEQ ID NO: 519696 - RNA, 23 nt, Artificial Sequence
  Synthetic
aaaguacuaagacaacaacucac

SEQ ID NO: 519697 - RNA, 24 nt, Artificial Sequence
  Synthetic
aaaaguacuaagacaacaacucac

SEQ ID NO: 519698 - RNA, 18 nt, Artificial Sequence
  Synthetic
gaauuuggaacaacucac

SEQ ID NO: 519699 - RNA, 19 nt, Artificial Sequence
  Synthetic
ggaauuuggaacaacucac

SEQ ID NO: 519700 - RNA, 20 nt, Artificial Sequence
  Synthetic
aggaauuuggaacaacucac

SEQ ID NO: 519701 - RNA, 21 nt, Artificial Sequence
  Synthetic
gaggaauuuggaacaacucac

SEQ ID NO: 519702 - RNA, 22 nt, Artificial Sequence
  Synthetic
cgaggaauuuggaacaacucac

SEQ ID NO: 519703 - RNA, 23 nt, Artificial Sequence
  Synthetic
ccgaggaauuuggaacaacucac

SEQ ID NO: 519704 - RNA, 24 nt, Artificial Sequence
  Synthetic
uccgaggaauuuggaacaacucac

SEQ ID NO: 519705 - RNA, 18 nt, Artificial Sequence
  Synthetic
guauaguguguaacucac

SEQ ID NO: 519706 - RNA, 19 nt, Artificial Sequence
  Synthetic
gguauaguguguaacucac

SEQ ID NO: 519707 - RNA, 20 nt, Artificial Sequence
  Synthetic
cgguauaguguguaacucac

SEQ ID NO: 519708 - RNA, 21 nt, Artificial Sequence
  Synthetic
ucgguauaguguguaacucac

SEQ ID NO: 519709 - RNA, 22 nt, Artificial Sequence
  Synthetic
uucgguauaguguguaacucac

SEQ ID NO: 519710 - RNA, 23 nt, Artificial Sequence
  Synthetic
auucgguauaguguguaacucac

SEQ ID NO: 519711 - RNA, 24 nt, Artificial Sequence
  Synthetic
uauucgguauaguguguaacucac

SEQ ID NO: 519712 - RNA, 18 nt, Artificial Sequence
  Synthetic
agacacauaaacacucac

SEQ ID NO: 519713 - RNA, 19 nt, Artificial Sequence
  Synthetic
uagacacauaaacacucac

SEQ ID NO: 519714 - RNA, 20 nt, Artificial Sequence
  Synthetic
guagacacauaaacacucac

SEQ ID NO: 519715 - RNA, 21 nt, Artificial Sequence
  Synthetic
cguagacacauaaacacucac

SEQ ID NO: 519716 - RNA, 22 nt, Artificial Sequence
  Synthetic
ucguagacacauaaacacucac

SEQ ID NO: 519717 - RNA, 23 nt, Artificial Sequence
  Synthetic
gucguagacacauaaacacucac

SEQ ID NO: 519718 - RNA, 24 nt, Artificial Sequence
  Synthetic
agucguagacacauaaacacucac

SEQ ID NO: 519719 - RNA, 18 nt, Artificial Sequence
  Synthetic
caaagguaggacacucac

SEQ ID NO: 519720 - RNA, 19 nt, Artificial Sequence
  Synthetic
acaaagguaggacacucac

SEQ ID NO: 519721 - RNA, 20 nt, Artificial Sequence
  Synthetic
aacaaagguaggacacucac

SEQ ID NO: 519722 - RNA, 21 nt, Artificial Sequence
  Synthetic
aaacaaagguaggacacucac

SEQ ID NO: 519723 - RNA, 22 nt, Artificial Sequence
  Synthetic
uaaacaaagguaggacacucac

SEQ ID NO: 519724 - RNA, 23 nt, Artificial Sequence
  Synthetic
guaaacaaagguaggacacucac

SEQ ID NO: 519725 - RNA, 24 nt, Artificial Sequence
  Synthetic
uguaaacaaagguaggacacucac

SEQ ID NO: 519726 - RNA, 18 nt, Artificial Sequence
  Synthetic
aguuggauacagacucac

SEQ ID NO: 519727 - RNA, 19 nt, Artificial Sequence
  Synthetic
caguuggauacagacucac

SEQ ID NO: 519728 - RNA, 20 nt, Artificial Sequence
  Synthetic
gcaguuggauacagacucac

SEQ ID NO: 519729 - RNA, 21 nt, Artificial Sequence
  Synthetic
ugcaguuggauacagacucac

SEQ ID NO: 519730 - RNA, 22 nt, Artificial Sequence
  Synthetic
augcaguuggauacagacucac

SEQ ID NO: 519731 - RNA, 23 nt, Artificial Sequence
  Synthetic
aaugcaguuggauacagacucac

SEQ ID NO: 519732 - RNA, 24 nt, Artificial Sequence
  Synthetic
aaaugcaguuggauacagacucac

SEQ ID NO: 519733 - RNA, 18 nt, Artificial Sequence
  Synthetic
caaugggggaggacucac

SEQ ID NO: 519734 - RNA, 19 nt, Artificial Sequence
  Synthetic
ccaaugggggaggacucac

SEQ ID NO: 519735 - RNA, 20 nt, Artificial Sequence
  Synthetic
gccaaugggggaggacucac

SEQ ID NO: 519736 - RNA, 21 nt, Artificial Sequence
  Synthetic
agccaaugggggaggacucac

SEQ ID NO: 519737 - RNA, 22 nt, Artificial Sequence
  Synthetic
aagccaaugggggaggacucac

SEQ ID NO: 519738 - RNA, 23 nt, Artificial Sequence
  Synthetic
caagccaaugggggaggacucac

SEQ ID NO: 519739 - RNA, 24 nt, Artificial Sequence
  Synthetic
gcaagccaaugggggaggacucac

SEQ ID NO: 519740 - RNA, 18 nt, Artificial Sequence
  Synthetic
auuuaaaaagugacucac

SEQ ID NO: 519741 - RNA, 19 nt, Artificial Sequence
  Synthetic
uauuuaaaaagugacucac

SEQ ID NO: 519742 - RNA, 20 nt, Artificial Sequence
  Synthetic
auauuuaaaaagugacucac

SEQ ID NO: 519743 - RNA, 21 nt, Artificial Sequence
  Synthetic
aauauuuaaaaagugacucac

SEQ ID NO: 519744 - RNA, 22 nt, Artificial Sequence
  Synthetic
aaauauuuaaaaagugacucac

SEQ ID NO: 519745 - RNA, 23 nt, Artificial Sequence
  Synthetic
caaauauuuaaaaagugacucac

SEQ ID NO: 519746 - RNA, 24 nt, Artificial Sequence
  Synthetic
acaaauauuuaaaaagugacucac

SEQ ID NO: 519747 - RNA, 18 nt, Artificial Sequence
  Synthetic
gauuuaauuacuacucac

SEQ ID NO: 519748 - RNA, 19 nt, Artificial Sequence
  Synthetic
agauuuaauuacuacucac

SEQ ID NO: 519749 - RNA, 20 nt, Artificial Sequence
  Synthetic
uagauuuaauuacuacucac

SEQ ID NO: 519750 - RNA, 21 nt, Artificial Sequence
  Synthetic
uuagauuuaauuacuacucac

SEQ ID NO: 519751 - RNA, 22 nt, Artificial Sequence
  Synthetic
cuuagauuuaauuacuacucac

SEQ ID NO: 519752 - RNA, 23 nt, Artificial Sequence
  Synthetic
ucuuagauuuaauuacuacucac

SEQ ID NO: 519753 - RNA, 24 nt, Artificial Sequence
  Synthetic
cucuuagauuuaauuacuacucac

SEQ ID NO: 519754 - RNA, 18 nt, Artificial Sequence
  Synthetic
acuaucaucauuacucac

SEQ ID NO: 519755 - RNA, 19 nt, Artificial Sequence
  Synthetic
cacuaucaucauuacucac

SEQ ID NO: 519756 - RNA, 20 nt, Artificial Sequence
  Synthetic
acacuaucaucauuacucac

SEQ ID NO: 519757 - RNA, 21 nt, Artificial Sequence
  Synthetic
uacacuaucaucauuacucac

SEQ ID NO: 519758 - RNA, 22 nt, Artificial Sequence
  Synthetic
uuacacuaucaucauuacucac

SEQ ID NO: 519759 - RNA, 23 nt, Artificial Sequence
  Synthetic
guuacacuaucaucauuacucac

SEQ ID NO: 519760 - RNA, 24 nt, Artificial Sequence
  Synthetic
aguuacacuaucaucauuacucac

SEQ ID NO: 519761 - RNA, 18 nt, Artificial Sequence
  Synthetic
uuccaaaguaaaccucac

SEQ ID NO: 519762 - RNA, 19 nt, Artificial Sequence
  Synthetic
uuuccaaaguaaaccucac

SEQ ID NO: 519763 - RNA, 20 nt, Artificial Sequence
  Synthetic
auuuccaaaguaaaccucac

SEQ ID NO: 519764 - RNA, 21 nt, Artificial Sequence
  Synthetic
cauuuccaaaguaaaccucac

SEQ ID NO: 519765 - RNA, 22 nt, Artificial Sequence
  Synthetic
ucauuuccaaaguaaaccucac

SEQ ID NO: 519766 - RNA, 23 nt, Artificial Sequence
  Synthetic
cucauuuccaaaguaaaccucac

SEQ ID NO: 519767 - RNA, 24 nt, Artificial Sequence
  Synthetic
ccucauuuccaaaguaaaccucac

SEQ ID NO: 519768 - RNA, 18 nt, Artificial Sequence
  Synthetic
agcaauuaaacaccucac

SEQ ID NO: 519769 - RNA, 19 nt, Artificial Sequence
  Synthetic
aagcaauuaaacaccucac

SEQ ID NO: 519770 - RNA, 20 nt, Artificial Sequence
  Synthetic
gaagcaauuaaacaccucac

SEQ ID NO: 519771 - RNA, 21 nt, Artificial Sequence
  Synthetic
ggaagcaauuaaacaccucac

SEQ ID NO: 519772 - RNA, 22 nt, Artificial Sequence
  Synthetic
gggaagcaauuaaacaccucac

SEQ ID NO: 519773 - RNA, 23 nt, Artificial Sequence
  Synthetic
ugggaagcaauuaaacaccucac

SEQ ID NO: 519774 - RNA, 24 nt, Artificial Sequence
  Synthetic
uugggaagcaauuaaacaccucac

SEQ ID NO: 519775 - RNA, 18 nt, Artificial Sequence
  Synthetic
aacuccucacacccucac

SEQ ID NO: 519776 - RNA, 19 nt, Artificial Sequence
  Synthetic
aaacuccucacacccucac

SEQ ID NO: 519777 - RNA, 20 nt, Artificial Sequence
  Synthetic
caaacuccucacacccucac

SEQ ID NO: 519778 - RNA, 21 nt, Artificial Sequence
  Synthetic
acaaacuccucacacccucac

SEQ ID NO: 519779 - RNA, 22 nt, Artificial Sequence
  Synthetic
aacaaacuccucacacccucac

SEQ ID NO: 519780 - RNA, 23 nt, Artificial Sequence
  Synthetic
uaacaaacuccucacacccucac

SEQ ID NO: 519781 - RNA, 24 nt, Artificial Sequence
  Synthetic
cuaacaaacuccucacacccucac

SEQ ID NO: 519782 - RNA, 18 nt, Artificial Sequence
  Synthetic
ugguaaaauaucccucac

SEQ ID NO: 519783 - RNA, 19 nt, Artificial Sequence
  Synthetic
gugguaaaauaucccucac

SEQ ID NO: 519784 - RNA, 20 nt, Artificial Sequence
  Synthetic
cgugguaaaauaucccucac

SEQ ID NO: 519785 - RNA, 21 nt, Artificial Sequence
  Synthetic
ucgugguaaaauaucccucac

SEQ ID NO: 519786 - RNA, 22 nt, Artificial Sequence
  Synthetic
cucgugguaaaauaucccucac

SEQ ID NO: 519787 - RNA, 23 nt, Artificial Sequence
  Synthetic
ucucgugguaaaauaucccucac

SEQ ID NO: 519788 - RNA, 24 nt, Artificial Sequence
  Synthetic
gucucgugguaaaauaucccucac

SEQ ID NO: 519789 - RNA, 18 nt, Artificial Sequence
  Synthetic
aaguuguuucagccucac

SEQ ID NO: 519790 - RNA, 19 nt, Artificial Sequence
  Synthetic
aaaguuguuucagccucac

SEQ ID NO: 519791 - RNA, 20 nt, Artificial Sequence
  Synthetic
aaaaguuguuucagccucac

SEQ ID NO: 519792 - RNA, 21 nt, Artificial Sequence
  Synthetic
caaaaguuguuucagccucac

SEQ ID NO: 519793 - RNA, 22 nt, Artificial Sequence
  Synthetic
ccaaaaguuguuucagccucac

SEQ ID NO: 519794 - RNA, 23 nt, Artificial Sequence
  Synthetic
gccaaaaguuguuucagccucac

SEQ ID NO: 519795 - RNA, 24 nt, Artificial Sequence
  Synthetic
ugccaaaaguuguuucagccucac

SEQ ID NO: 519796 - RNA, 18 nt, Artificial Sequence
  Synthetic
cugcucucaacuccucac

SEQ ID NO: 519797 - RNA, 19 nt, Artificial Sequence
  Synthetic
acugcucucaacuccucac

SEQ ID NO: 519798 - RNA, 20 nt, Artificial Sequence
  Synthetic
cacugcucucaacuccucac

SEQ ID NO: 519799 - RNA, 21 nt, Artificial Sequence
  Synthetic
ccacugcucucaacuccucac

SEQ ID NO: 519800 - RNA, 22 nt, Artificial Sequence
  Synthetic
cccacugcucucaacuccucac

SEQ ID NO: 519801 - RNA, 23 nt, Artificial Sequence
  Synthetic
gcccacugcucucaacuccucac

SEQ ID NO: 519802 - RNA, 24 nt, Artificial Sequence
  Synthetic
agcccacugcucucaacuccucac

SEQ ID NO: 519803 - RNA, 18 nt, Artificial Sequence
  Synthetic
ccuuuguccaguccucac

SEQ ID NO: 519804 - RNA, 19 nt, Artificial Sequence
  Synthetic
accuuuguccaguccucac

SEQ ID NO: 519805 - RNA, 20 nt, Artificial Sequence
  Synthetic
aaccuuuguccaguccucac

SEQ ID NO: 519806 - RNA, 21 nt, Artificial Sequence
  Synthetic
aaaccuuuguccaguccucac

SEQ ID NO: 519807 - RNA, 22 nt, Artificial Sequence
  Synthetic
aaaaccuuuguccaguccucac

SEQ ID NO: 519808 - RNA, 23 nt, Artificial Sequence
  Synthetic
uaaaaccuuuguccaguccucac

SEQ ID NO: 519809 - RNA, 24 nt, Artificial Sequence
  Synthetic
auaaaaccuuuguccaguccucac

SEQ ID NO: 519810 - RNA, 18 nt, Artificial Sequence
  Synthetic
cuucuggauaguccucac

SEQ ID NO: 519811 - RNA, 19 nt, Artificial Sequence
  Synthetic
ucuucuggauaguccucac

SEQ ID NO: 519812 - RNA, 20 nt, Artificial Sequence
  Synthetic
gucuucuggauaguccucac

SEQ ID NO: 519813 - RNA, 21 nt, Artificial Sequence
  Synthetic
ggucuucuggauaguccucac

SEQ ID NO: 519814 - RNA, 22 nt, Artificial Sequence
  Synthetic
uggucuucuggauaguccucac

SEQ ID NO: 519815 - RNA, 23 nt, Artificial Sequence
  Synthetic
uuggucuucuggauaguccucac

SEQ ID NO: 519816 - RNA, 24 nt, Artificial Sequence
  Synthetic
uuuggucuucuggauaguccucac

SEQ ID NO: 519817 - RNA, 18 nt, Artificial Sequence
  Synthetic
aauauccacaaagcucac

SEQ ID NO: 519818 - RNA, 19 nt, Artificial Sequence
  Synthetic
aaauauccacaaagcucac

SEQ ID NO: 519819 - RNA, 20 nt, Artificial Sequence
  Synthetic
aaaauauccacaaagcucac

SEQ ID NO: 519820 - RNA, 21 nt, Artificial Sequence
  Synthetic
uaaaauauccacaaagcucac

SEQ ID NO: 519821 - RNA, 22 nt, Artificial Sequence
  Synthetic
auaaaauauccacaaagcucac

SEQ ID NO: 519822 - RNA, 23 nt, Artificial Sequence
  Synthetic
aauaaaauauccacaaagcucac

SEQ ID NO: 519823 - RNA, 24 nt, Artificial Sequence
  Synthetic
aaauaaaauauccacaaagcucac

SEQ ID NO: 519824 - RNA, 18 nt, Artificial Sequence
  Synthetic
ccaagccaacaugcucac

SEQ ID NO: 519825 - RNA, 19 nt, Artificial Sequence
  Synthetic
accaagccaacaugcucac

SEQ ID NO: 519826 - RNA, 20 nt, Artificial Sequence
  Synthetic
gaccaagccaacaugcucac

SEQ ID NO: 519827 - RNA, 21 nt, Artificial Sequence
  Synthetic
ggaccaagccaacaugcucac

SEQ ID NO: 519828 - RNA, 22 nt, Artificial Sequence
  Synthetic
aggaccaagccaacaugcucac

SEQ ID NO: 519829 - RNA, 23 nt, Artificial Sequence
  Synthetic
uaggaccaagccaacaugcucac

SEQ ID NO: 519830 - RNA, 24 nt, Artificial Sequence
  Synthetic
guaggaccaagccaacaugcucac

SEQ ID NO: 519831 - RNA, 18 nt, Artificial Sequence
  Synthetic
gcaaauuacccaucucac

SEQ ID NO: 519832 - RNA, 19 nt, Artificial Sequence
  Synthetic
ugcaaauuacccaucucac

SEQ ID NO: 519833 - RNA, 20 nt, Artificial Sequence
  Synthetic
uugcaaauuacccaucucac

SEQ ID NO: 519834 - RNA, 21 nt, Artificial Sequence
  Synthetic
uuugcaaauuacccaucucac

SEQ ID NO: 519835 - RNA, 22 nt, Artificial Sequence
  Synthetic
auuugcaaauuacccaucucac

SEQ ID NO: 519836 - RNA, 23 nt, Artificial Sequence
  Synthetic
uauuugcaaauuacccaucucac

SEQ ID NO: 519837 - RNA, 24 nt, Artificial Sequence
  Synthetic
auauuugcaaauuacccaucucac

SEQ ID NO: 519838 - RNA, 18 nt, Artificial Sequence
  Synthetic
auuuaaaaaugaucucac

SEQ ID NO: 519839 - RNA, 19 nt, Artificial Sequence
  Synthetic
uauuuaaaaaugaucucac

SEQ ID NO: 519840 - RNA, 20 nt, Artificial Sequence
  Synthetic
auauuuaaaaaugaucucac

SEQ ID NO: 519841 - RNA, 21 nt, Artificial Sequence
  Synthetic
gauauuuaaaaaugaucucac

SEQ ID NO: 519842 - RNA, 22 nt, Artificial Sequence
  Synthetic
ugauauuuaaaaaugaucucac

SEQ ID NO: 519843 - RNA, 23 nt, Artificial Sequence
  Synthetic
augauauuuaaaaaugaucucac

SEQ ID NO: 519844 - RNA, 24 nt, Artificial Sequence
  Synthetic
uaugauauuuaaaaaugaucucac

SEQ ID NO: 519845 - RNA, 18 nt, Artificial Sequence
  Synthetic
cuucuguguugaucucac

SEQ ID NO: 519846 - RNA, 19 nt, Artificial Sequence
  Synthetic
ccuucuguguugaucucac

SEQ ID NO: 519847 - RNA, 20 nt, Artificial Sequence
  Synthetic
accuucuguguugaucucac

SEQ ID NO: 519848 - RNA, 21 nt, Artificial Sequence
  Synthetic
caccuucuguguugaucucac

SEQ ID NO: 519849 - RNA, 22 nt, Artificial Sequence
  Synthetic
ccaccuucuguguugaucucac

SEQ ID NO: 519850 - RNA, 23 nt, Artificial Sequence
  Synthetic
cccaccuucuguguugaucucac

SEQ ID NO: 519851 - RNA, 24 nt, Artificial Sequence
  Synthetic
acccaccuucuguguugaucucac

SEQ ID NO: 519852 - RNA, 18 nt, Artificial Sequence
  Synthetic
uaaaugcauuuaucucac

SEQ ID NO: 519853 - RNA, 19 nt, Artificial Sequence
  Synthetic
guaaaugcauuuaucucac

SEQ ID NO: 519854 - RNA, 20 nt, Artificial Sequence
  Synthetic
uguaaaugcauuuaucucac

SEQ ID NO: 519855 - RNA, 21 nt, Artificial Sequence
  Synthetic
auguaaaugcauuuaucucac

SEQ ID NO: 519856 - RNA, 22 nt, Artificial Sequence
  Synthetic
aauguaaaugcauuuaucucac

SEQ ID NO: 519857 - RNA, 23 nt, Artificial Sequence
  Synthetic
aaauguaaaugcauuuaucucac

SEQ ID NO: 519858 - RNA, 24 nt, Artificial Sequence
  Synthetic
aaaauguaaaugcauuuaucucac

SEQ ID NO: 519859 - RNA, 18 nt, Artificial Sequence
  Synthetic
auuuucugaugcucucac

SEQ ID NO: 519860 - RNA, 19 nt, Artificial Sequence
  Synthetic
uauuuucugaugcucucac

SEQ ID NO: 519861 - RNA, 20 nt, Artificial Sequence
  Synthetic
uuauuuucugaugcucucac

SEQ ID NO: 519862 - RNA, 21 nt, Artificial Sequence
  Synthetic
auuauuuucugaugcucucac

SEQ ID NO: 519863 - RNA, 22 nt, Artificial Sequence
  Synthetic
aauuauuuucugaugcucucac

SEQ ID NO: 519864 - RNA, 23 nt, Artificial Sequence
  Synthetic
aaauuauuuucugaugcucucac

SEQ ID NO: 519865 - RNA, 24 nt, Artificial Sequence
  Synthetic
uaaauuauuuucugaugcucucac

SEQ ID NO: 519866 - RNA, 18 nt, Artificial Sequence
  Synthetic
gccacuaucaucucucac

SEQ ID NO: 519867 - RNA, 19 nt, Artificial Sequence
  Synthetic
agccacuaucaucucucac

SEQ ID NO: 519868 - RNA, 20 nt, Artificial Sequence
  Synthetic
aagccacuaucaucucucac

SEQ ID NO: 519869 - RNA, 21 nt, Artificial Sequence
  Synthetic
caagccacuaucaucucucac

SEQ ID NO: 519870 - RNA, 22 nt, Artificial Sequence
  Synthetic
ccaagccacuaucaucucucac

SEQ ID NO: 519871 - RNA, 23 nt, Artificial Sequence
  Synthetic
uccaagccacuaucaucucucac

SEQ ID NO: 519872 - RNA, 24 nt, Artificial Sequence
  Synthetic
guccaagccacuaucaucucucac

SEQ ID NO: 519873 - RNA, 18 nt, Artificial Sequence
  Synthetic
gacgcuagcgggucucac

SEQ ID NO: 519874 - RNA, 19 nt, Artificial Sequence
  Synthetic
agacgcuagcgggucucac

SEQ ID NO: 519875 - RNA, 20 nt, Artificial Sequence
  Synthetic
aagacgcuagcgggucucac

SEQ ID NO: 519876 - RNA, 21 nt, Artificial Sequence
  Synthetic
gaagacgcuagcgggucucac

SEQ ID NO: 519877 - RNA, 22 nt, Artificial Sequence
  Synthetic
ggaagacgcuagcgggucucac

SEQ ID NO: 519878 - RNA, 23 nt, Artificial Sequence
  Synthetic
gggaagacgcuagcgggucucac

SEQ ID NO: 519879 - RNA, 24 nt, Artificial Sequence
  Synthetic
agggaagacgcuagcgggucucac

SEQ ID NO: 519880 - RNA, 18 nt, Artificial Sequence
  Synthetic
uuguugucacauucucac

SEQ ID NO: 519881 - RNA, 19 nt, Artificial Sequence
  Synthetic
uuuguugucacauucucac

SEQ ID NO: 519882 - RNA, 20 nt, Artificial Sequence
  Synthetic
guuuguugucacauucucac

SEQ ID NO: 519883 - RNA, 21 nt, Artificial Sequence
  Synthetic
gguuuguugucacauucucac

SEQ ID NO: 519884 - RNA, 22 nt, Artificial Sequence
  Synthetic
agguuuguugucacauucucac

SEQ ID NO: 519885 - RNA, 23 nt, Artificial Sequence
  Synthetic
cagguuuguugucacauucucac

SEQ ID NO: 519886 - RNA, 24 nt, Artificial Sequence
  Synthetic
ucagguuuguugucacauucucac

SEQ ID NO: 519887 - RNA, 18 nt, Artificial Sequence
  Synthetic
caagaagaagguucucac

SEQ ID NO: 519888 - RNA, 19 nt, Artificial Sequence
  Synthetic
gcaagaagaagguucucac

SEQ ID NO: 519889 - RNA, 20 nt, Artificial Sequence
  Synthetic
agcaagaagaagguucucac

SEQ ID NO: 519890 - RNA, 21 nt, Artificial Sequence
  Synthetic
cagcaagaagaagguucucac

SEQ ID NO: 519891 - RNA, 22 nt, Artificial Sequence
  Synthetic
acagcaagaagaagguucucac

SEQ ID NO: 519892 - RNA, 23 nt, Artificial Sequence
  Synthetic
uacagcaagaagaagguucucac

SEQ ID NO: 519893 - RNA, 24 nt, Artificial Sequence
  Synthetic
auacagcaagaagaagguucucac

SEQ ID NO: 519894 - RNA, 18 nt, Artificial Sequence
  Synthetic
uuaaaaagugaaagucac

SEQ ID NO: 519895 - RNA, 19 nt, Artificial Sequence
  Synthetic
uuuaaaaagugaaagucac

SEQ ID NO: 519896 - RNA, 20 nt, Artificial Sequence
  Synthetic
uuuuaaaaagugaaagucac

SEQ ID NO: 519897 - RNA, 21 nt, Artificial Sequence
  Synthetic
uuuuuaaaaagugaaagucac

SEQ ID NO: 519898 - RNA, 22 nt, Artificial Sequence
  Synthetic
uuuuuuaaaaagugaaagucac

SEQ ID NO: 519899 - RNA, 23 nt, Artificial Sequence
  Synthetic
auuuuuuaaaaagugaaagucac

SEQ ID NO: 519900 - RNA, 24 nt, Artificial Sequence
  Synthetic
cauuuuuuaaaaagugaaagucac

SEQ ID NO: 519901 - RNA, 18 nt, Artificial Sequence
  Synthetic
uacuuaguugaaagucac

SEQ ID NO: 519902 - RNA, 19 nt, Artificial Sequence
  Synthetic
cuacuuaguugaaagucac

SEQ ID NO: 519903 - RNA, 20 nt, Artificial Sequence
  Synthetic
ucuacuuaguugaaagucac

SEQ ID NO: 519904 - RNA, 21 nt, Artificial Sequence
  Synthetic
uucuacuuaguugaaagucac

SEQ ID NO: 519905 - RNA, 22 nt, Artificial Sequence
  Synthetic
uuucuacuuaguugaaagucac

SEQ ID NO: 519906 - RNA, 23 nt, Artificial Sequence
  Synthetic
uuuucuacuuaguugaaagucac

SEQ ID NO: 519907 - RNA, 24 nt, Artificial Sequence
  Synthetic
auuuucuacuuaguugaaagucac

SEQ ID NO: 519908 - RNA, 18 nt, Artificial Sequence
  Synthetic
uauaaauuugagagucac

SEQ ID NO: 519909 - RNA, 19 nt, Artificial Sequence
  Synthetic
auauaaauuugagagucac

SEQ ID NO: 519910 - RNA, 20 nt, Artificial Sequence
  Synthetic
gauauaaauuugagagucac

SEQ ID NO: 519911 - RNA, 21 nt, Artificial Sequence
  Synthetic
agauauaaauuugagagucac

SEQ ID NO: 519912 - RNA, 22 nt, Artificial Sequence
  Synthetic
gagauauaaauuugagagucac

SEQ ID NO: 519913 - RNA, 23 nt, Artificial Sequence
  Synthetic
agagauauaaauuugagagucac

SEQ ID NO: 519914 - RNA, 24 nt, Artificial Sequence
  Synthetic
uagagauauaaauuugagagucac

SEQ ID NO: 519915 - RNA, 18 nt, Artificial Sequence
  Synthetic
aguauuuuaaugagucac

SEQ ID NO: 519916 - RNA, 19 nt, Artificial Sequence
  Synthetic
caguauuuuaaugagucac

SEQ ID NO: 519917 - RNA, 20 nt, Artificial Sequence
  Synthetic
ucaguauuuuaaugagucac

SEQ ID NO: 519918 - RNA, 21 nt, Artificial Sequence
  Synthetic
aucaguauuuuaaugagucac

SEQ ID NO: 519919 - RNA, 22 nt, Artificial Sequence
  Synthetic
aaucaguauuuuaaugagucac

SEQ ID NO: 519920 - RNA, 23 nt, Artificial Sequence
  Synthetic
caaucaguauuuuaaugagucac

SEQ ID NO: 519921 - RNA, 24 nt, Artificial Sequence
  Synthetic
gcaaucaguauuuuaaugagucac

SEQ ID NO: 519922 - RNA, 18 nt, Artificial Sequence
  Synthetic
uggacaugaaauagucac

SEQ ID NO: 519923 - RNA, 19 nt, Artificial Sequence
  Synthetic
cuggacaugaaauagucac

SEQ ID NO: 519924 - RNA, 20 nt, Artificial Sequence
  Synthetic
ucuggacaugaaauagucac

SEQ ID NO: 519925 - RNA, 21 nt, Artificial Sequence
  Synthetic
cucuggacaugaaauagucac

SEQ ID NO: 519926 - RNA, 22 nt, Artificial Sequence
  Synthetic
ccucuggacaugaaauagucac

SEQ ID NO: 519927 - RNA, 23 nt, Artificial Sequence
  Synthetic
uccucuggacaugaaauagucac

SEQ ID NO: 519928 - RNA, 24 nt, Artificial Sequence
  Synthetic
uuccucuggacaugaaauagucac

SEQ ID NO: 519929 - RNA, 18 nt, Artificial Sequence
  Synthetic
aaaauaaucuauagucac

SEQ ID NO: 519930 - RNA, 19 nt, Artificial Sequence
  Synthetic
uaaaauaaucuauagucac

SEQ ID NO: 519931 - RNA, 20 nt, Artificial Sequence
  Synthetic
uuaaaauaaucuauagucac

SEQ ID NO: 519932 - RNA, 21 nt, Artificial Sequence
  Synthetic
uuuaaaauaaucuauagucac

SEQ ID NO: 519933 - RNA, 22 nt, Artificial Sequence
  Synthetic
uuuuaaaauaaucuauagucac

SEQ ID NO: 519934 - RNA, 23 nt, Artificial Sequence
  Synthetic
auuuuaaaauaaucuauagucac

SEQ ID NO: 519935 - RNA, 24 nt, Artificial Sequence
  Synthetic
aauuuuaaaauaaucuauagucac

SEQ ID NO: 519936 - RNA, 18 nt, Artificial Sequence
  Synthetic
auacauacguauagucac

SEQ ID NO: 519937 - RNA, 19 nt, Artificial Sequence
  Synthetic
gauacauacguauagucac

SEQ ID NO: 519938 - RNA, 20 nt, Artificial Sequence
  Synthetic
ugauacauacguauagucac

SEQ ID NO: 519939 - RNA, 21 nt, Artificial Sequence
  Synthetic
uugauacauacguauagucac

SEQ ID NO: 519940 - RNA, 22 nt, Artificial Sequence
  Synthetic
cuugauacauacguauagucac

SEQ ID NO: 519941 - RNA, 23 nt, Artificial Sequence
  Synthetic
acuugauacauacguauagucac

SEQ ID NO: 519942 - RNA, 24 nt, Artificial Sequence
  Synthetic
aacuugauacauacguauagucac

SEQ ID NO: 519943 - RNA, 18 nt, Artificial Sequence
  Synthetic
aaauuccgauguagucac

SEQ ID NO: 519944 - RNA, 19 nt, Artificial Sequence
  Synthetic
aaaauuccgauguagucac

SEQ ID NO: 519945 - RNA, 20 nt, Artificial Sequence
  Synthetic
caaaauuccgauguagucac

SEQ ID NO: 519946 - RNA, 21 nt, Artificial Sequence
  Synthetic
gcaaaauuccgauguagucac

SEQ ID NO: 519947 - RNA, 22 nt, Artificial Sequence
  Synthetic
agcaaaauuccgauguagucac

SEQ ID NO: 519948 - RNA, 23 nt, Artificial Sequence
  Synthetic
aagcaaaauuccgauguagucac

SEQ ID NO: 519949 - RNA, 24 nt, Artificial Sequence
  Synthetic
caagcaaaauuccgauguagucac

SEQ ID NO: 519950 - RNA, 18 nt, Artificial Sequence
  Synthetic
uuagagccuuguagucac

SEQ ID NO: 519951 - RNA, 19 nt, Artificial Sequence
  Synthetic
cuuagagccuuguagucac

SEQ ID NO: 519952 - RNA, 20 nt, Artificial Sequence
  Synthetic
acuuagagccuuguagucac

SEQ ID NO: 519953 - RNA, 21 nt, Artificial Sequence
  Synthetic
uacuuagagccuuguagucac

SEQ ID NO: 519954 - RNA, 22 nt, Artificial Sequence
  Synthetic
auacuuagagccuuguagucac

SEQ ID NO: 519955 - RNA, 23 nt, Artificial Sequence
  Synthetic
aauacuuagagccuuguagucac

SEQ ID NO: 519956 - RNA, 24 nt, Artificial Sequence
  Synthetic
aaauacuuagagccuuguagucac

SEQ ID NO: 519957 - RNA, 18 nt, Artificial Sequence
  Synthetic
augucaguuuuuagucac

SEQ ID NO: 519958 - RNA, 19 nt, Artificial Sequence
  Synthetic
caugucaguuuuuagucac

SEQ ID NO: 519959 - RNA, 20 nt, Artificial Sequence
  Synthetic
ucaugucaguuuuuagucac

SEQ ID NO: 519960 - RNA, 21 nt, Artificial Sequence
  Synthetic
cucaugucaguuuuuagucac

SEQ ID NO: 519961 - RNA, 22 nt, Artificial Sequence
  Synthetic
ucucaugucaguuuuuagucac

SEQ ID NO: 519962 - RNA, 23 nt, Artificial Sequence
  Synthetic
uucucaugucaguuuuuagucac

SEQ ID NO: 519963 - RNA, 24 nt, Artificial Sequence
  Synthetic
uuucucaugucaguuuuuagucac

SEQ ID NO: 519964 - RNA, 18 nt, Artificial Sequence
  Synthetic
gacucacaaacccgucac

SEQ ID NO: 519965 - RNA, 19 nt, Artificial Sequence
  Synthetic
ggacucacaaacccgucac

SEQ ID NO: 519966 - RNA, 20 nt, Artificial Sequence
  Synthetic
uggacucacaaacccgucac

SEQ ID NO: 519967 - RNA, 21 nt, Artificial Sequence
  Synthetic
cuggacucacaaacccgucac

SEQ ID NO: 519968 - RNA, 22 nt, Artificial Sequence
  Synthetic
gcuggacucacaaacccgucac

SEQ ID NO: 519969 - RNA, 23 nt, Artificial Sequence
  Synthetic
ugcuggacucacaaacccgucac

SEQ ID NO: 519970 - RNA, 24 nt, Artificial Sequence
  Synthetic
augcuggacucacaaacccgucac

SEQ ID NO: 519971 - RNA, 18 nt, Artificial Sequence
  Synthetic
uagggaaaaugaggucac

SEQ ID NO: 519972 - RNA, 19 nt, Artificial Sequence
  Synthetic
cuagggaaaaugaggucac

SEQ ID NO: 519973 - RNA, 20 nt, Artificial Sequence
  Synthetic
ucuagggaaaaugaggucac

SEQ ID NO: 519974 - RNA, 21 nt, Artificial Sequence
  Synthetic
aucuagggaaaaugaggucac

SEQ ID NO: 519975 - RNA, 22 nt, Artificial Sequence
  Synthetic
caucuagggaaaaugaggucac

SEQ ID NO: 519976 - RNA, 23 nt, Artificial Sequence
  Synthetic
gcaucuagggaaaaugaggucac

SEQ ID NO: 519977 - RNA, 24 nt, Artificial Sequence
  Synthetic
agcaucuagggaaaaugaggucac

SEQ ID NO: 519978 - RNA, 18 nt, Artificial Sequence
  Synthetic
gccuguugaugaggucac

SEQ ID NO: 519979 - RNA, 19 nt, Artificial Sequence
  Synthetic
ugccuguugaugaggucac

SEQ ID NO: 519980 - RNA, 20 nt, Artificial Sequence
  Synthetic
cugccuguugaugaggucac

SEQ ID NO: 519981 - RNA, 21 nt, Artificial Sequence
  Synthetic
ccugccuguugaugaggucac

SEQ ID NO: 519982 - RNA, 22 nt, Artificial Sequence
  Synthetic
accugccuguugaugaggucac

SEQ ID NO: 519983 - RNA, 23 nt, Artificial Sequence
  Synthetic
caccugccuguugaugaggucac

SEQ ID NO: 519984 - RNA, 24 nt, Artificial Sequence
  Synthetic
ccaccugccuguugaugaggucac

SEQ ID NO: 519985 - RNA, 18 nt, Artificial Sequence
  Synthetic
ucaaugaagaugggucac

SEQ ID NO: 519986 - RNA, 19 nt, Artificial Sequence
  Synthetic
aucaaugaagaugggucac

SEQ ID NO: 519987 - RNA, 20 nt, Artificial Sequence
  Synthetic
gaucaaugaagaugggucac

SEQ ID NO: 519988 - RNA, 21 nt, Artificial Sequence
  Synthetic
ugaucaaugaagaugggucac

SEQ ID NO: 519989 - RNA, 22 nt, Artificial Sequence
  Synthetic
cugaucaaugaagaugggucac

SEQ ID NO: 519990 - RNA, 23 nt, Artificial Sequence
  Synthetic
acugaucaaugaagaugggucac

SEQ ID NO: 519991 - RNA, 24 nt, Artificial Sequence
  Synthetic
uacugaucaaugaagaugggucac

SEQ ID NO: 519992 - RNA, 18 nt, Artificial Sequence
  Synthetic
augagaacacauggucac

SEQ ID NO: 519993 - RNA, 19 nt, Artificial Sequence
  Synthetic
aaugagaacacauggucac

SEQ ID NO: 519994 - RNA, 20 nt, Artificial Sequence
  Synthetic
caaugagaacacauggucac

SEQ ID NO: 519995 - RNA, 21 nt, Artificial Sequence
  Synthetic
acaaugagaacacauggucac

SEQ ID NO: 519996 - RNA, 22 nt, Artificial Sequence
  Synthetic
aacaaugagaacacauggucac

SEQ ID NO: 519997 - RNA, 23 nt, Artificial Sequence
  Synthetic
gaacaaugagaacacauggucac

SEQ ID NO: 519998 - RNA, 24 nt, Artificial Sequence
  Synthetic
ugaacaaugagaacacauggucac

SEQ ID NO: 519999 - RNA, 18 nt, Artificial Sequence
  Synthetic
uaaggcuugaguggucac

SEQ ID NO: 520000 - RNA, 19 nt, Artificial Sequence
  Synthetic
auaaggcuugaguggucac

SEQ ID NO: 520001 - RNA, 20 nt, Artificial Sequence
  Synthetic
gauaaggcuugaguggucac

SEQ ID NO: 520002 - RNA, 21 nt, Artificial Sequence
  Synthetic
ggauaaggcuugaguggucac

SEQ ID NO: 520003 - RNA, 22 nt, Artificial Sequence
  Synthetic
gggauaaggcuugaguggucac

SEQ ID NO: 520004 - RNA, 23 nt, Artificial Sequence
  Synthetic
agggauaaggcuugaguggucac

SEQ ID NO: 520005 - RNA, 24 nt, Artificial Sequence
  Synthetic
gagggauaaggcuugaguggucac

SEQ ID NO: 520006 - RNA, 18 nt, Artificial Sequence
  Synthetic
acaauaaauuaaugucac

SEQ ID NO: 520007 - RNA, 19 nt, Artificial Sequence
  Synthetic
aacaauaaauuaaugucac

SEQ ID NO: 520008 - RNA, 20 nt, Artificial Sequence
  Synthetic
caacaauaaauuaaugucac

SEQ ID NO: 520009 - RNA, 21 nt, Artificial Sequence
  Synthetic
acaacaauaaauuaaugucac

SEQ ID NO: 520010 - RNA, 22 nt, Artificial Sequence
  Synthetic
aacaacaauaaauuaaugucac

SEQ ID NO: 520011 - RNA, 23 nt, Artificial Sequence
  Synthetic
uaacaacaauaaauuaaugucac

SEQ ID NO: 520012 - RNA, 24 nt, Artificial Sequence
  Synthetic
uuaacaacaauaaauuaaugucac

SEQ ID NO: 520013 - RNA, 18 nt, Artificial Sequence
  Synthetic
acagaaaagcacugucac

SEQ ID NO: 520014 - RNA, 19 nt, Artificial Sequence
  Synthetic
gacagaaaagcacugucac

SEQ ID NO: 520015 - RNA, 20 nt, Artificial Sequence
  Synthetic
agacagaaaagcacugucac

SEQ ID NO: 520016 - RNA, 21 nt, Artificial Sequence
  Synthetic
cagacagaaaagcacugucac

SEQ ID NO: 520017 - RNA, 22 nt, Artificial Sequence
  Synthetic
gcagacagaaaagcacugucac

SEQ ID NO: 520018 - RNA, 23 nt, Artificial Sequence
  Synthetic
agcagacagaaaagcacugucac

SEQ ID NO: 520019 - RNA, 24 nt, Artificial Sequence
  Synthetic
gagcagacagaaaagcacugucac

SEQ ID NO: 520020 - RNA, 18 nt, Artificial Sequence
  Synthetic
agauggaaugacugucac

SEQ ID NO: 520021 - RNA, 19 nt, Artificial Sequence
  Synthetic
cagauggaaugacugucac

SEQ ID NO: 520022 - RNA, 20 nt, Artificial Sequence
  Synthetic
ucagauggaaugacugucac

SEQ ID NO: 520023 - RNA, 21 nt, Artificial Sequence
  Synthetic
gucagauggaaugacugucac

SEQ ID NO: 520024 - RNA, 22 nt, Artificial Sequence
  Synthetic
agucagauggaaugacugucac

SEQ ID NO: 520025 - RNA, 23 nt, Artificial Sequence
  Synthetic
gagucagauggaaugacugucac

SEQ ID NO: 520026 - RNA, 24 nt, Artificial Sequence
  Synthetic
agagucagauggaaugacugucac

SEQ ID NO: 520027 - RNA, 18 nt, Artificial Sequence
  Synthetic
cuccagugucccugucac

SEQ ID NO: 520028 - RNA, 19 nt, Artificial Sequence
  Synthetic
gcuccagugucccugucac

SEQ ID NO: 520029 - RNA, 20 nt, Artificial Sequence
  Synthetic
agcuccagugucccugucac

SEQ ID NO: 520030 - RNA, 21 nt, Artificial Sequence
  Synthetic
cagcuccagugucccugucac

SEQ ID NO: 520031 - RNA, 22 nt, Artificial Sequence
  Synthetic
ccagcuccagugucccugucac

SEQ ID NO: 520032 - RNA, 23 nt, Artificial Sequence
  Synthetic
cccagcuccagugucccugucac

SEQ ID NO: 520033 - RNA, 24 nt, Artificial Sequence
  Synthetic
ucccagcuccagugucccugucac

SEQ ID NO: 520034 - RNA, 18 nt, Artificial Sequence
  Synthetic
aagagugacuccugucac

SEQ ID NO: 520035 - RNA, 19 nt, Artificial Sequence
  Synthetic
aaagagugacuccugucac

SEQ ID NO: 520036 - RNA, 20 nt, Artificial Sequence
  Synthetic
uaaagagugacuccugucac

SEQ ID NO: 520037 - RNA, 21 nt, Artificial Sequence
  Synthetic
guaaagagugacuccugucac

SEQ ID NO: 520038 - RNA, 22 nt, Artificial Sequence
  Synthetic
gguaaagagugacuccugucac

SEQ ID NO: 520039 - RNA, 23 nt, Artificial Sequence
  Synthetic
ggguaaagagugacuccugucac

SEQ ID NO: 520040 - RNA, 24 nt, Artificial Sequence
  Synthetic
gggguaaagagugacuccugucac

SEQ ID NO: 520041 - RNA, 18 nt, Artificial Sequence
  Synthetic
accacagagagcugucac

SEQ ID NO: 520042 - RNA, 19 nt, Artificial Sequence
  Synthetic
aaccacagagagcugucac

SEQ ID NO: 520043 - RNA, 20 nt, Artificial Sequence
  Synthetic
caaccacagagagcugucac

SEQ ID NO: 520044 - RNA, 21 nt, Artificial Sequence
  Synthetic
gcaaccacagagagcugucac

SEQ ID NO: 520045 - RNA, 22 nt, Artificial Sequence
  Synthetic
ggcaaccacagagagcugucac

SEQ ID NO: 520046 - RNA, 23 nt, Artificial Sequence
  Synthetic
aggcaaccacagagagcugucac

SEQ ID NO: 520047 - RNA, 24 nt, Artificial Sequence
  Synthetic
aaggcaaccacagagagcugucac

SEQ ID NO: 520048 - RNA, 18 nt, Artificial Sequence
  Synthetic
cuguaaauaaagugucac

SEQ ID NO: 520049 - RNA, 19 nt, Artificial Sequence
  Synthetic
ucuguaaauaaagugucac

SEQ ID NO: 520050 - RNA, 20 nt, Artificial Sequence
  Synthetic
uucuguaaauaaagugucac

SEQ ID NO: 520051 - RNA, 21 nt, Artificial Sequence
  Synthetic
uuucuguaaauaaagugucac

SEQ ID NO: 520052 - RNA, 22 nt, Artificial Sequence
  Synthetic
guuucuguaaauaaagugucac

SEQ ID NO: 520053 - RNA, 23 nt, Artificial Sequence
  Synthetic
cguuucuguaaauaaagugucac

SEQ ID NO: 520054 - RNA, 24 nt, Artificial Sequence
  Synthetic
ucguuucuguaaauaaagugucac

SEQ ID NO: 520055 - RNA, 18 nt, Artificial Sequence
  Synthetic
uucacugugacuugucac

SEQ ID NO: 520056 - RNA, 19 nt, Artificial Sequence
  Synthetic
uuucacugugacuugucac

SEQ ID NO: 520057 - RNA, 20 nt, Artificial Sequence
  Synthetic
uuuucacugugacuugucac

SEQ ID NO: 520058 - RNA, 21 nt, Artificial Sequence
  Synthetic
auuuucacugugacuugucac

SEQ ID NO: 520059 - RNA, 22 nt, Artificial Sequence
  Synthetic
cauuuucacugugacuugucac

SEQ ID NO: 520060 - RNA, 23 nt, Artificial Sequence
  Synthetic
gcauuuucacugugacuugucac

SEQ ID NO: 520061 - RNA, 24 nt, Artificial Sequence
  Synthetic
ugcauuuucacugugacuugucac

SEQ ID NO: 520062 - RNA, 18 nt, Artificial Sequence
  Synthetic
gucaacugcccaauucac

SEQ ID NO: 520063 - RNA, 19 nt, Artificial Sequence
  Synthetic
ggucaacugcccaauucac

SEQ ID NO: 520064 - RNA, 20 nt, Artificial Sequence
  Synthetic
uggucaacugcccaauucac

SEQ ID NO: 520065 - RNA, 21 nt, Artificial Sequence
  Synthetic
guggucaacugcccaauucac

SEQ ID NO: 520066 - RNA, 22 nt, Artificial Sequence
  Synthetic
uguggucaacugcccaauucac

SEQ ID NO: 520067 - RNA, 23 nt, Artificial Sequence
  Synthetic
uuguggucaacugcccaauucac

SEQ ID NO: 520068 - RNA, 24 nt, Artificial Sequence
  Synthetic
auuguggucaacugcccaauucac

SEQ ID NO: 520069 - RNA, 18 nt, Artificial Sequence
  Synthetic
aagcauuaaagaauucac

SEQ ID NO: 520070 - RNA, 19 nt, Artificial Sequence
  Synthetic
uaagcauuaaagaauucac

SEQ ID NO: 520071 - RNA, 20 nt, Artificial Sequence
  Synthetic
guaagcauuaaagaauucac

SEQ ID NO: 520072 - RNA, 21 nt, Artificial Sequence
  Synthetic
uguaagcauuaaagaauucac

SEQ ID NO: 520073 - RNA, 22 nt, Artificial Sequence
  Synthetic
uuguaagcauuaaagaauucac

SEQ ID NO: 520074 - RNA, 23 nt, Artificial Sequence
  Synthetic
guuguaagcauuaaagaauucac

SEQ ID NO: 520075 - RNA, 24 nt, Artificial Sequence
  Synthetic
uguuguaagcauuaaagaauucac

SEQ ID NO: 520076 - RNA, 18 nt, Artificial Sequence
  Synthetic
cuuaagucaggaauucac

SEQ ID NO: 520077 - RNA, 19 nt, Artificial Sequence
  Synthetic
acuuaagucaggaauucac

SEQ ID NO: 520078 - RNA, 20 nt, Artificial Sequence
  Synthetic
uacuuaagucaggaauucac

SEQ ID NO: 520079 - RNA, 21 nt, Artificial Sequence
  Synthetic
uuacuuaagucaggaauucac

SEQ ID NO: 520080 - RNA, 22 nt, Artificial Sequence
  Synthetic
guuacuuaagucaggaauucac

SEQ ID NO: 520081 - RNA, 23 nt, Artificial Sequence
  Synthetic
aguuacuuaagucaggaauucac

SEQ ID NO: 520082 - RNA, 24 nt, Artificial Sequence
  Synthetic
caguuacuuaagucaggaauucac

SEQ ID NO: 520083 - RNA, 18 nt, Artificial Sequence
  Synthetic
agaugauaacuaauucac

SEQ ID NO: 520084 - RNA, 19 nt, Artificial Sequence
  Synthetic
cagaugauaacuaauucac

SEQ ID NO: 520085 - RNA, 20 nt, Artificial Sequence
  Synthetic
ucagaugauaacuaauucac

SEQ ID NO: 520086 - RNA, 21 nt, Artificial Sequence
  Synthetic
cucagaugauaacuaauucac

SEQ ID NO: 520087 - RNA, 22 nt, Artificial Sequence
  Synthetic
ucucagaugauaacuaauucac

SEQ ID NO: 520088 - RNA, 23 nt, Artificial Sequence
  Synthetic
cucucagaugauaacuaauucac

SEQ ID NO: 520089 - RNA, 24 nt, Artificial Sequence
  Synthetic
acucucagaugauaacuaauucac

SEQ ID NO: 520090 - RNA, 18 nt, Artificial Sequence
  Synthetic
guaucagacuuaauucac

SEQ ID NO: 520091 - RNA, 19 nt, Artificial Sequence
  Synthetic
uguaucagacuuaauucac

SEQ ID NO: 520092 - RNA, 20 nt, Artificial Sequence
  Synthetic
uuguaucagacuuaauucac

SEQ ID NO: 520093 - RNA, 21 nt, Artificial Sequence
  Synthetic
uuuguaucagacuuaauucac

SEQ ID NO: 520094 - RNA, 22 nt, Artificial Sequence
  Synthetic
auuuguaucagacuuaauucac

SEQ ID NO: 520095 - RNA, 23 nt, Artificial Sequence
  Synthetic
aauuuguaucagacuuaauucac

SEQ ID NO: 520096 - RNA, 24 nt, Artificial Sequence
  Synthetic
uaauuuguaucagacuuaauucac

SEQ ID NO: 520097 - RNA, 18 nt, Artificial Sequence
  Synthetic
uuuuaaccugccauucac

SEQ ID NO: 520098 - RNA, 19 nt, Artificial Sequence
  Synthetic
auuuuaaccugccauucac

SEQ ID NO: 520099 - RNA, 20 nt, Artificial Sequence
  Synthetic
cauuuuaaccugccauucac

SEQ ID NO: 520100 - RNA, 21 nt, Artificial Sequence
  Synthetic
ccauuuuaaccugccauucac

SEQ ID NO: 520101 - RNA, 22 nt, Artificial Sequence
  Synthetic
cccauuuuaaccugccauucac

SEQ ID NO: 520102 - RNA, 23 nt, Artificial Sequence
  Synthetic
ucccauuuuaaccugccauucac

SEQ ID NO: 520103 - RNA, 24 nt, Artificial Sequence
  Synthetic
uucccauuuuaaccugccauucac

SEQ ID NO: 520104 - RNA, 18 nt, Artificial Sequence
  Synthetic
caggcaucaugcauucac

SEQ ID NO: 520105 - RNA, 19 nt, Artificial Sequence
  Synthetic
ccaggcaucaugcauucac

SEQ ID NO: 520106 - RNA, 20 nt, Artificial Sequence
  Synthetic
accaggcaucaugcauucac

SEQ ID NO: 520107 - RNA, 21 nt, Artificial Sequence
  Synthetic
gaccaggcaucaugcauucac

SEQ ID NO: 520108 - RNA, 22 nt, Artificial Sequence
  Synthetic
ugaccaggcaucaugcauucac

SEQ ID NO: 520109 - RNA, 23 nt, Artificial Sequence
  Synthetic
gugaccaggcaucaugcauucac

SEQ ID NO: 520110 - RNA, 24 nt, Artificial Sequence
  Synthetic
ggugaccaggcaucaugcauucac

SEQ ID NO: 520111 - RNA, 18 nt, Artificial Sequence
  Synthetic
agugugcacaggauucac

SEQ ID NO: 520112 - RNA, 19 nt, Artificial Sequence
  Synthetic
cagugugcacaggauucac

SEQ ID NO: 520113 - RNA, 20 nt, Artificial Sequence
  Synthetic
ucagugugcacaggauucac

SEQ ID NO: 520114 - RNA, 21 nt, Artificial Sequence
  Synthetic
gucagugugcacaggauucac

SEQ ID NO: 520115 - RNA, 22 nt, Artificial Sequence
  Synthetic
ugucagugugcacaggauucac

SEQ ID NO: 520116 - RNA, 23 nt, Artificial Sequence
  Synthetic
augucagugugcacaggauucac

SEQ ID NO: 520117 - RNA, 24 nt, Artificial Sequence
  Synthetic
aaugucagugugcacaggauucac

SEQ ID NO: 520118 - RNA, 18 nt, Artificial Sequence
  Synthetic
ugugaauggaugauucac

SEQ ID NO: 520119 - RNA, 19 nt, Artificial Sequence
  Synthetic
augugaauggaugauucac

SEQ ID NO: 520120 - RNA, 20 nt, Artificial Sequence
  Synthetic
gaugugaauggaugauucac

SEQ ID NO: 520121 - RNA, 21 nt, Artificial Sequence
  Synthetic
ugaugugaauggaugauucac

SEQ ID NO: 520122 - RNA, 22 nt, Artificial Sequence
  Synthetic
uugaugugaauggaugauucac

SEQ ID NO: 520123 - RNA, 23 nt, Artificial Sequence
  Synthetic
cuugaugugaauggaugauucac

SEQ ID NO: 520124 - RNA, 24 nt, Artificial Sequence
  Synthetic
ucuugaugugaauggaugauucac

SEQ ID NO: 520125 - RNA, 18 nt, Artificial Sequence
  Synthetic
aguuuuggaccuauucac

SEQ ID NO: 520126 - RNA, 19 nt, Artificial Sequence
  Synthetic
caguuuuggaccuauucac

SEQ ID NO: 520127 - RNA, 20 nt, Artificial Sequence
  Synthetic
ucaguuuuggaccuauucac

SEQ ID NO: 520128 - RNA, 21 nt, Artificial Sequence
  Synthetic
uucaguuuuggaccuauucac

SEQ ID NO: 520129 - RNA, 22 nt, Artificial Sequence
  Synthetic
guucaguuuuggaccuauucac

SEQ ID NO: 520130 - RNA, 23 nt, Artificial Sequence
  Synthetic
aguucaguuuuggaccuauucac

SEQ ID NO: 520131 - RNA, 24 nt, Artificial Sequence
  Synthetic
gaguucaguuuuggaccuauucac

SEQ ID NO: 520132 - RNA, 18 nt, Artificial Sequence
  Synthetic
gucauuauuuuuauucac

SEQ ID NO: 520133 - RNA, 19 nt, Artificial Sequence
  Synthetic
agucauuauuuuuauucac

SEQ ID NO: 520134 - RNA, 20 nt, Artificial Sequence
  Synthetic
gagucauuauuuuuauucac

SEQ ID NO: 520135 - RNA, 21 nt, Artificial Sequence
  Synthetic
ggagucauuauuuuuauucac

SEQ ID NO: 520136 - RNA, 22 nt, Artificial Sequence
  Synthetic
aggagucauuauuuuuauucac

SEQ ID NO: 520137 - RNA, 23 nt, Artificial Sequence
  Synthetic
caggagucauuauuuuuauucac

SEQ ID NO: 520138 - RNA, 24 nt, Artificial Sequence
  Synthetic
ucaggagucauuauuuuuauucac

SEQ ID NO: 520139 - RNA, 18 nt, Artificial Sequence
  Synthetic
cagcuaccccaacuucac

SEQ ID NO: 520140 - RNA, 19 nt, Artificial Sequence
  Synthetic
acagcuaccccaacuucac

SEQ ID NO: 520141 - RNA, 20 nt, Artificial Sequence
  Synthetic
aacagcuaccccaacuucac

SEQ ID NO: 520142 - RNA, 21 nt, Artificial Sequence
  Synthetic
caacagcuaccccaacuucac

SEQ ID NO: 520143 - RNA, 22 nt, Artificial Sequence
  Synthetic
ucaacagcuaccccaacuucac

SEQ ID NO: 520144 - RNA, 23 nt, Artificial Sequence
  Synthetic
uucaacagcuaccccaacuucac

SEQ ID NO: 520145 - RNA, 24 nt, Artificial Sequence
  Synthetic
guucaacagcuaccccaacuucac

SEQ ID NO: 520146 - RNA, 18 nt, Artificial Sequence
  Synthetic
aaugucagugaacuucac

SEQ ID NO: 520147 - RNA, 19 nt, Artificial Sequence
  Synthetic
aaaugucagugaacuucac

SEQ ID NO: 520148 - RNA, 20 nt, Artificial Sequence
  Synthetic
caaaugucagugaacuucac

SEQ ID NO: 520149 - RNA, 21 nt, Artificial Sequence
  Synthetic
ucaaaugucagugaacuucac

SEQ ID NO: 520150 - RNA, 22 nt, Artificial Sequence
  Synthetic
aucaaaugucagugaacuucac

SEQ ID NO: 520151 - RNA, 23 nt, Artificial Sequence
  Synthetic
aaucaaaugucagugaacuucac

SEQ ID NO: 520152 - RNA, 24 nt, Artificial Sequence
  Synthetic
caaucaaaugucagugaacuucac

SEQ ID NO: 520153 - RNA, 18 nt, Artificial Sequence
  Synthetic
aaaauuguuugacuucac

SEQ ID NO: 520154 - RNA, 19 nt, Artificial Sequence
  Synthetic
uaaaauuguuugacuucac

SEQ ID NO: 520155 - RNA, 20 nt, Artificial Sequence
  Synthetic
uuaaaauuguuugacuucac

SEQ ID NO: 520156 - RNA, 21 nt, Artificial Sequence
  Synthetic
auuaaaauuguuugacuucac

SEQ ID NO: 520157 - RNA, 22 nt, Artificial Sequence
  Synthetic
uauuaaaauuguuugacuucac

SEQ ID NO: 520158 - RNA, 23 nt, Artificial Sequence
  Synthetic
cuauuaaaauuguuugacuucac

SEQ ID NO: 520159 - RNA, 24 nt, Artificial Sequence
  Synthetic
ccuauuaaaauuguuugacuucac

SEQ ID NO: 520160 - RNA, 18 nt, Artificial Sequence
  Synthetic
cgaaucacauuacuucac

SEQ ID NO: 520161 - RNA, 19 nt, Artificial Sequence
  Synthetic
acgaaucacauuacuucac

SEQ ID NO: 520162 - RNA, 20 nt, Artificial Sequence
  Synthetic
cacgaaucacauuacuucac

SEQ ID NO: 520163 - RNA, 21 nt, Artificial Sequence
  Synthetic
ccacgaaucacauuacuucac

SEQ ID NO: 520164 - RNA, 22 nt, Artificial Sequence
  Synthetic
cccacgaaucacauuacuucac

SEQ ID NO: 520165 - RNA, 23 nt, Artificial Sequence
  Synthetic
acccacgaaucacauuacuucac

SEQ ID NO: 520166 - RNA, 24 nt, Artificial Sequence
  Synthetic
aacccacgaaucacauuacuucac

SEQ ID NO: 520167 - RNA, 18 nt, Artificial Sequence
  Synthetic
caauuucuuaaccuucac

SEQ ID NO: 520168 - RNA, 19 nt, Artificial Sequence
  Synthetic
gcaauuucuuaaccuucac

SEQ ID NO: 520169 - RNA, 20 nt, Artificial Sequence
  Synthetic
agcaauuucuuaaccuucac

SEQ ID NO: 520170 - RNA, 21 nt, Artificial Sequence
  Synthetic
aagcaauuucuuaaccuucac

SEQ ID NO: 520171 - RNA, 22 nt, Artificial Sequence
  Synthetic
uaagcaauuucuuaaccuucac

SEQ ID NO: 520172 - RNA, 23 nt, Artificial Sequence
  Synthetic
auaagcaauuucuuaaccuucac

SEQ ID NO: 520173 - RNA, 24 nt, Artificial Sequence
  Synthetic
aauaagcaauuucuuaaccuucac

SEQ ID NO: 520174 - RNA, 18 nt, Artificial Sequence
  Synthetic
ggagcucucugccuucac

SEQ ID NO: 520175 - RNA, 19 nt, Artificial Sequence
  Synthetic
aggagcucucugccuucac

SEQ ID NO: 520176 - RNA, 20 nt, Artificial Sequence
  Synthetic
aaggagcucucugccuucac

SEQ ID NO: 520177 - RNA, 21 nt, Artificial Sequence
  Synthetic
gaaggagcucucugccuucac

SEQ ID NO: 520178 - RNA, 22 nt, Artificial Sequence
  Synthetic
agaaggagcucucugccuucac

SEQ ID NO: 520179 - RNA, 23 nt, Artificial Sequence
  Synthetic
uagaaggagcucucugccuucac

SEQ ID NO: 520180 - RNA, 24 nt, Artificial Sequence
  Synthetic
uuagaaggagcucucugccuucac

SEQ ID NO: 520181 - RNA, 18 nt, Artificial Sequence
  Synthetic
agaaaacuaauccuucac

SEQ ID NO: 520182 - RNA, 19 nt, Artificial Sequence
  Synthetic
aagaaaacuaauccuucac

SEQ ID NO: 520183 - RNA, 20 nt, Artificial Sequence
  Synthetic
uaagaaaacuaauccuucac

SEQ ID NO: 520184 - RNA, 21 nt, Artificial Sequence
  Synthetic
uuaagaaaacuaauccuucac

SEQ ID NO: 520185 - RNA, 22 nt, Artificial Sequence
  Synthetic
uuuaagaaaacuaauccuucac

SEQ ID NO: 520186 - RNA, 23 nt, Artificial Sequence
  Synthetic
cuuuaagaaaacuaauccuucac

SEQ ID NO: 520187 - RNA, 24 nt, Artificial Sequence
  Synthetic
ucuuuaagaaaacuaauccuucac

SEQ ID NO: 520188 - RNA, 18 nt, Artificial Sequence
  Synthetic
cauucuccagagcuucac

SEQ ID NO: 520189 - RNA, 19 nt, Artificial Sequence
  Synthetic
ucauucuccagagcuucac

SEQ ID NO: 520190 - RNA, 20 nt, Artificial Sequence
  Synthetic
cucauucuccagagcuucac

SEQ ID NO: 520191 - RNA, 21 nt, Artificial Sequence
  Synthetic
ccucauucuccagagcuucac

SEQ ID NO: 520192 - RNA, 22 nt, Artificial Sequence
  Synthetic
accucauucuccagagcuucac

SEQ ID NO: 520193 - RNA, 23 nt, Artificial Sequence
  Synthetic
caccucauucuccagagcuucac

SEQ ID NO: 520194 - RNA, 24 nt, Artificial Sequence
  Synthetic
acaccucauucuccagagcuucac

SEQ ID NO: 520195 - RNA, 18 nt, Artificial Sequence
  Synthetic
ucuugcgucacucuucac

SEQ ID NO: 520196 - RNA, 19 nt, Artificial Sequence
  Synthetic
cucuugcgucacucuucac

SEQ ID NO: 520197 - RNA, 20 nt, Artificial Sequence
  Synthetic
ccucuugcgucacucuucac

SEQ ID NO: 520198 - RNA, 21 nt, Artificial Sequence
  Synthetic
uccucuugcgucacucuucac

SEQ ID NO: 520199 - RNA, 22 nt, Artificial Sequence
  Synthetic
uuccucuugcgucacucuucac

SEQ ID NO: 520200 - RNA, 23 nt, Artificial Sequence
  Synthetic
auuccucuugcgucacucuucac

SEQ ID NO: 520201 - RNA, 24 nt, Artificial Sequence
  Synthetic
cauuccucuugcgucacucuucac

SEQ ID NO: 520202 - RNA, 18 nt, Artificial Sequence
  Synthetic
uuauuuuaucaaguucac

SEQ ID NO: 520203 - RNA, 19 nt, Artificial Sequence
  Synthetic
uuuauuuuaucaaguucac

SEQ ID NO: 520204 - RNA, 20 nt, Artificial Sequence
  Synthetic
uuuuauuuuaucaaguucac

SEQ ID NO: 520205 - RNA, 21 nt, Artificial Sequence
  Synthetic
cuuuuauuuuaucaaguucac

SEQ ID NO: 520206 - RNA, 22 nt, Artificial Sequence
  Synthetic
ccuuuuauuuuaucaaguucac

SEQ ID NO: 520207 - RNA, 23 nt, Artificial Sequence
  Synthetic
uccuuuuauuuuaucaaguucac

SEQ ID NO: 520208 - RNA, 24 nt, Artificial Sequence
  Synthetic
cuccuuuuauuuuaucaaguucac

SEQ ID NO: 520209 - RNA, 18 nt, Artificial Sequence
  Synthetic
cuaaauauagaaguucac

SEQ ID NO: 520210 - RNA, 19 nt, Artificial Sequence
  Synthetic
ucuaaauauagaaguucac

SEQ ID NO: 520211 - RNA, 20 nt, Artificial Sequence
  Synthetic
gucuaaauauagaaguucac

SEQ ID NO: 520212 - RNA, 21 nt, Artificial Sequence
  Synthetic
ggucuaaauauagaaguucac

SEQ ID NO: 520213 - RNA, 22 nt, Artificial Sequence
  Synthetic
uggucuaaauauagaaguucac

SEQ ID NO: 520214 - RNA, 23 nt, Artificial Sequence
  Synthetic
guggucuaaauauagaaguucac

SEQ ID NO: 520215 - RNA, 24 nt, Artificial Sequence
  Synthetic
uguggucuaaauauagaaguucac

SEQ ID NO: 520216 - RNA, 18 nt, Artificial Sequence
  Synthetic
uuaauucuuucaguucac

SEQ ID NO: 520217 - RNA, 19 nt, Artificial Sequence
  Synthetic
auuaauucuuucaguucac

SEQ ID NO: 520218 - RNA, 20 nt, Artificial Sequence
  Synthetic
cauuaauucuuucaguucac

SEQ ID NO: 520219 - RNA, 21 nt, Artificial Sequence
  Synthetic
gcauuaauucuuucaguucac

SEQ ID NO: 520220 - RNA, 22 nt, Artificial Sequence
  Synthetic
ggcauuaauucuuucaguucac

SEQ ID NO: 520221 - RNA, 23 nt, Artificial Sequence
  Synthetic
gggcauuaauucuuucaguucac

SEQ ID NO: 520222 - RNA, 24 nt, Artificial Sequence
  Synthetic
ggggcauuaauucuuucaguucac

SEQ ID NO: 520223 - RNA, 18 nt, Artificial Sequence
  Synthetic
cuaauccuaaagguucac

SEQ ID NO: 520224 - RNA, 19 nt, Artificial Sequence
  Synthetic
ccuaauccuaaagguucac

SEQ ID NO: 520225 - RNA, 20 nt, Artificial Sequence
  Synthetic
gccuaauccuaaagguucac

SEQ ID NO: 520226 - RNA, 21 nt, Artificial Sequence
  Synthetic
ugccuaauccuaaagguucac

SEQ ID NO: 520227 - RNA, 22 nt, Artificial Sequence
  Synthetic
uugccuaauccuaaagguucac

SEQ ID NO: 520228 - RNA, 23 nt, Artificial Sequence
  Synthetic
uuugccuaauccuaaagguucac

SEQ ID NO: 520229 - RNA, 24 nt, Artificial Sequence
  Synthetic
auuugccuaauccuaaagguucac

SEQ ID NO: 520230 - RNA, 18 nt, Artificial Sequence
  Synthetic
ucaucuuuuaauguucac

SEQ ID NO: 520231 - RNA, 19 nt, Artificial Sequence
  Synthetic
gucaucuuuuaauguucac

SEQ ID NO: 520232 - RNA, 20 nt, Artificial Sequence
  Synthetic
agucaucuuuuaauguucac

SEQ ID NO: 520233 - RNA, 21 nt, Artificial Sequence
  Synthetic
aagucaucuuuuaauguucac

SEQ ID NO: 520234 - RNA, 22 nt, Artificial Sequence
  Synthetic
uaagucaucuuuuaauguucac

SEQ ID NO: 520235 - RNA, 23 nt, Artificial Sequence
  Synthetic
uuaagucaucuuuuaauguucac

SEQ ID NO: 520236 - RNA, 24 nt, Artificial Sequence
  Synthetic
auuaagucaucuuuuaauguucac

SEQ ID NO: 520237 - RNA, 18 nt, Artificial Sequence
  Synthetic
auaaaauccacauuucac

SEQ ID NO: 520238 - RNA, 19 nt, Artificial Sequence
  Synthetic
uauaaaauccacauuucac

SEQ ID NO: 520239 - RNA, 20 nt, Artificial Sequence
  Synthetic
cuauaaaauccacauuucac

SEQ ID NO: 520240 - RNA, 21 nt, Artificial Sequence
  Synthetic
gcuauaaaauccacauuucac

SEQ ID NO: 520241 - RNA, 22 nt, Artificial Sequence
  Synthetic
ugcuauaaaauccacauuucac

SEQ ID NO: 520242 - RNA, 23 nt, Artificial Sequence
  Synthetic
gugcuauaaaauccacauuucac

SEQ ID NO: 520243 - RNA, 24 nt, Artificial Sequence
  Synthetic
ugugcuauaaaauccacauuucac

SEQ ID NO: 520244 - RNA, 18 nt, Artificial Sequence
  Synthetic
aguuuguuggcauuucac

SEQ ID NO: 520245 - RNA, 19 nt, Artificial Sequence
  Synthetic
aaguuuguuggcauuucac

SEQ ID NO: 520246 - RNA, 20 nt, Artificial Sequence
  Synthetic
uaaguuuguuggcauuucac

SEQ ID NO: 520247 - RNA, 21 nt, Artificial Sequence
  Synthetic
cuaaguuuguuggcauuucac

SEQ ID NO: 520248 - RNA, 22 nt, Artificial Sequence
  Synthetic
ucuaaguuuguuggcauuucac

SEQ ID NO: 520249 - RNA, 23 nt, Artificial Sequence
  Synthetic
cucuaaguuuguuggcauuucac

SEQ ID NO: 520250 - RNA, 24 nt, Artificial Sequence
  Synthetic
gcucuaaguuuguuggcauuucac

SEQ ID NO: 520251 - RNA, 18 nt, Artificial Sequence
  Synthetic
uuaaaguagagauuucac

SEQ ID NO: 520252 - RNA, 19 nt, Artificial Sequence
  Synthetic
cuuaaaguagagauuucac

SEQ ID NO: 520253 - RNA, 20 nt, Artificial Sequence
  Synthetic
acuuaaaguagagauuucac

SEQ ID NO: 520254 - RNA, 21 nt, Artificial Sequence
  Synthetic
aacuuaaaguagagauuucac

SEQ ID NO: 520255 - RNA, 22 nt, Artificial Sequence
  Synthetic
aaacuuaaaguagagauuucac

SEQ ID NO: 520256 - RNA, 23 nt, Artificial Sequence
  Synthetic
uaaacuuaaaguagagauuucac

SEQ ID NO: 520257 - RNA, 24 nt, Artificial Sequence
  Synthetic
auaaacuuaaaguagagauuucac

SEQ ID NO: 520258 - RNA, 18 nt, Artificial Sequence
  Synthetic
aacucugcaauauuucac

SEQ ID NO: 520259 - RNA, 19 nt, Artificial Sequence
  Synthetic
caacucugcaauauuucac

SEQ ID NO: 520260 - RNA, 20 nt, Artificial Sequence
  Synthetic
ucaacucugcaauauuucac

SEQ ID NO: 520261 - RNA, 21 nt, Artificial Sequence
  Synthetic
aucaacucugcaauauuucac

SEQ ID NO: 520262 - RNA, 22 nt, Artificial Sequence
  Synthetic
aaucaacucugcaauauuucac

SEQ ID NO: 520263 - RNA, 23 nt, Artificial Sequence
  Synthetic
gaaucaacucugcaauauuucac

SEQ ID NO: 520264 - RNA, 24 nt, Artificial Sequence
  Synthetic
agaaucaacucugcaauauuucac

SEQ ID NO: 520265 - RNA, 18 nt, Artificial Sequence
  Synthetic
auucuccugauauuucac

SEQ ID NO: 520266 - RNA, 19 nt, Artificial Sequence
  Synthetic
gauucuccugauauuucac

SEQ ID NO: 520267 - RNA, 20 nt, Artificial Sequence
  Synthetic
ugauucuccugauauuucac

SEQ ID NO: 520268 - RNA, 21 nt, Artificial Sequence
  Synthetic
cugauucuccugauauuucac

SEQ ID NO: 520269 - RNA, 22 nt, Artificial Sequence
  Synthetic
gcugauucuccugauauuucac

SEQ ID NO: 520270 - RNA, 23 nt, Artificial Sequence
  Synthetic
agcugauucuccugauauuucac

SEQ ID NO: 520271 - RNA, 24 nt, Artificial Sequence
  Synthetic
aagcugauucuccugauauuucac

SEQ ID NO: 520272 - RNA, 18 nt, Artificial Sequence
  Synthetic
aauuguggauuauuucac

SEQ ID NO: 520273 - RNA, 19 nt, Artificial Sequence
  Synthetic
aaauuguggauuauuucac

SEQ ID NO: 520274 - RNA, 20 nt, Artificial Sequence
  Synthetic
aaaauuguggauuauuucac

SEQ ID NO: 520275 - RNA, 21 nt, Artificial Sequence
  Synthetic
gaaaauuguggauuauuucac

SEQ ID NO: 520276 - RNA, 22 nt, Artificial Sequence
  Synthetic
ugaaaauuguggauuauuucac

SEQ ID NO: 520277 - RNA, 23 nt, Artificial Sequence
  Synthetic
uugaaaauuguggauuauuucac

SEQ ID NO: 520278 - RNA, 24 nt, Artificial Sequence
  Synthetic
guugaaaauuguggauuauuucac

SEQ ID NO: 520279 - RNA, 18 nt, Artificial Sequence
  Synthetic
uuaauaaggaccuuucac

SEQ ID NO: 520280 - RNA, 19 nt, Artificial Sequence
  Synthetic
auuaauaaggaccuuucac

SEQ ID NO: 520281 - RNA, 20 nt, Artificial Sequence
  Synthetic
aauuaauaaggaccuuucac

SEQ ID NO: 520282 - RNA, 21 nt, Artificial Sequence
  Synthetic
aaauuaauaaggaccuuucac

SEQ ID NO: 520283 - RNA, 22 nt, Artificial Sequence
  Synthetic
aaaauuaauaaggaccuuucac

SEQ ID NO: 520284 - RNA, 23 nt, Artificial Sequence
  Synthetic
uaaaauuaauaaggaccuuucac

SEQ ID NO: 520285 - RNA, 24 nt, Artificial Sequence
  Synthetic
auaaaauuaauaaggaccuuucac

SEQ ID NO: 520286 - RNA, 18 nt, Artificial Sequence
  Synthetic
uaagcccuguucuuucac

SEQ ID NO: 520287 - RNA, 19 nt, Artificial Sequence
  Synthetic
uuaagcccuguucuuucac

SEQ ID NO: 520288 - RNA, 20 nt, Artificial Sequence
  Synthetic
uuuaagcccuguucuuucac

SEQ ID NO: 520289 - RNA, 21 nt, Artificial Sequence
  Synthetic
auuuaagcccuguucuuucac

SEQ ID NO: 520290 - RNA, 22 nt, Artificial Sequence
  Synthetic
aauuuaagcccuguucuuucac

SEQ ID NO: 520291 - RNA, 23 nt, Artificial Sequence
  Synthetic
gaauuuaagcccuguucuuucac

SEQ ID NO: 520292 - RNA, 24 nt, Artificial Sequence
  Synthetic
ugaauuuaagcccuguucuuucac

SEQ ID NO: 520293 - RNA, 18 nt, Artificial Sequence
  Synthetic
agaagagaguaguuucac

SEQ ID NO: 520294 - RNA, 19 nt, Artificial Sequence
  Synthetic
aagaagagaguaguuucac

SEQ ID NO: 520295 - RNA, 20 nt, Artificial Sequence
  Synthetic
caagaagagaguaguuucac

SEQ ID NO: 520296 - RNA, 21 nt, Artificial Sequence
  Synthetic
ucaagaagagaguaguuucac

SEQ ID NO: 520297 - RNA, 22 nt, Artificial Sequence
  Synthetic
cucaagaagagaguaguuucac

SEQ ID NO: 520298 - RNA, 23 nt, Artificial Sequence
  Synthetic
ccucaagaagagaguaguuucac

SEQ ID NO: 520299 - RNA, 24 nt, Artificial Sequence
  Synthetic
accucaagaagagaguaguuucac

SEQ ID NO: 520300 - RNA, 18 nt, Artificial Sequence
  Synthetic
cacaaugugagguuucac

SEQ ID NO: 520301 - RNA, 19 nt, Artificial Sequence
  Synthetic
acacaaugugagguuucac

SEQ ID NO: 520302 - RNA, 20 nt, Artificial Sequence
  Synthetic
gacacaaugugagguuucac

SEQ ID NO: 520303 - RNA, 21 nt, Artificial Sequence
  Synthetic
agacacaaugugagguuucac

SEQ ID NO: 520304 - RNA, 22 nt, Artificial Sequence
  Synthetic
cagacacaaugugagguuucac

SEQ ID NO: 520305 - RNA, 23 nt, Artificial Sequence
  Synthetic
ucagacacaaugugagguuucac

SEQ ID NO: 520306 - RNA, 24 nt, Artificial Sequence
  Synthetic
aucagacacaaugugagguuucac

SEQ ID NO: 520307 - RNA, 18 nt, Artificial Sequence
  Synthetic
gcaauuccuugguuucac

SEQ ID NO: 520308 - RNA, 19 nt, Artificial Sequence
  Synthetic
agcaauuccuugguuucac

SEQ ID NO: 520309 - RNA, 20 nt, Artificial Sequence
  Synthetic
uagcaauuccuugguuucac

SEQ ID NO: 520310 - RNA, 21 nt, Artificial Sequence
  Synthetic
guagcaauuccuugguuucac

SEQ ID NO: 520311 - RNA, 22 nt, Artificial Sequence
  Synthetic
aguagcaauuccuugguuucac

SEQ ID NO: 520312 - RNA, 23 nt, Artificial Sequence
  Synthetic
caguagcaauuccuugguuucac

SEQ ID NO: 520313 - RNA, 24 nt, Artificial Sequence
  Synthetic
gcaguagcaauuccuugguuucac

SEQ ID NO: 520314 - RNA, 18 nt, Artificial Sequence
  Synthetic
cuagagguaauguuucac

SEQ ID NO: 520315 - RNA, 19 nt, Artificial Sequence
  Synthetic
ucuagagguaauguuucac

SEQ ID NO: 520316 - RNA, 20 nt, Artificial Sequence
  Synthetic
aucuagagguaauguuucac

SEQ ID NO: 520317 - RNA, 21 nt, Artificial Sequence
  Synthetic
aaucuagagguaauguuucac

SEQ ID NO: 520318 - RNA, 22 nt, Artificial Sequence
  Synthetic
gaaucuagagguaauguuucac

SEQ ID NO: 520319 - RNA, 23 nt, Artificial Sequence
  Synthetic
ugaaucuagagguaauguuucac

SEQ ID NO: 520320 - RNA, 24 nt, Artificial Sequence
  Synthetic
cugaaucuagagguaauguuucac

SEQ ID NO: 520321 - RNA, 18 nt, Artificial Sequence
  Synthetic
ccagcuagucuguuucac

SEQ ID NO: 520322 - RNA, 19 nt, Artificial Sequence
  Synthetic
gccagcuagucuguuucac

SEQ ID NO: 520323 - RNA, 20 nt, Artificial Sequence
  Synthetic
ugccagcuagucuguuucac

SEQ ID NO: 520324 - RNA, 21 nt, Artificial Sequence
  Synthetic
gugccagcuagucuguuucac

SEQ ID NO: 520325 - RNA, 22 nt, Artificial Sequence
  Synthetic
ggugccagcuagucuguuucac

SEQ ID NO: 520326 - RNA, 23 nt, Artificial Sequence
  Synthetic
uggugccagcuagucuguuucac

SEQ ID NO: 520327 - RNA, 24 nt, Artificial Sequence
  Synthetic
uuggugccagcuagucuguuucac

SEQ ID NO: 520328 - RNA, 18 nt, Artificial Sequence
  Synthetic
auuacucugaauuuucac

SEQ ID NO: 520329 - RNA, 19 nt, Artificial Sequence
  Synthetic
uauuacucugaauuuucac

SEQ ID NO: 520330 - RNA, 20 nt, Artificial Sequence
  Synthetic
uuauuacucugaauuuucac

SEQ ID NO: 520331 - RNA, 21 nt, Artificial Sequence
  Synthetic
uuuauuacucugaauuuucac

SEQ ID NO: 520332 - RNA, 22 nt, Artificial Sequence
  Synthetic
auuuauuacucugaauuuucac

SEQ ID NO: 520333 - RNA, 23 nt, Artificial Sequence
  Synthetic
aauuuauuacucugaauuuucac

SEQ ID NO: 520334 - RNA, 24 nt, Artificial Sequence
  Synthetic
uaauuuauuacucugaauuuucac

SEQ ID NO: 520335 - RNA, 18 nt, Artificial Sequence
  Synthetic
ugcaguuuugauuuucac

SEQ ID NO: 520336 - RNA, 19 nt, Artificial Sequence
  Synthetic
gugcaguuuugauuuucac

SEQ ID NO: 520337 - RNA, 20 nt, Artificial Sequence
  Synthetic
agugcaguuuugauuuucac

SEQ ID NO: 520338 - RNA, 21 nt, Artificial Sequence
  Synthetic
aagugcaguuuugauuuucac

SEQ ID NO: 520339 - RNA, 22 nt, Artificial Sequence
  Synthetic
aaagugcaguuuugauuuucac

SEQ ID NO: 520340 - RNA, 23 nt, Artificial Sequence
  Synthetic
gaaagugcaguuuugauuuucac

SEQ ID NO: 520341 - RNA, 24 nt, Artificial Sequence
  Synthetic
ggaaagugcaguuuugauuuucac

SEQ ID NO: 520342 - RNA, 18 nt, Artificial Sequence
  Synthetic
gauuuuagcuauuuucac

SEQ ID NO: 520343 - RNA, 19 nt, Artificial Sequence
  Synthetic
ugauuuuagcuauuuucac

SEQ ID NO: 520344 - RNA, 20 nt, Artificial Sequence
  Synthetic
gugauuuuagcuauuuucac

SEQ ID NO: 520345 - RNA, 21 nt, Artificial Sequence
  Synthetic
ggugauuuuagcuauuuucac

SEQ ID NO: 520346 - RNA, 22 nt, Artificial Sequence
  Synthetic
aggugauuuuagcuauuuucac

SEQ ID NO: 520347 - RNA, 23 nt, Artificial Sequence
  Synthetic
uaggugauuuuagcuauuuucac

SEQ ID NO: 520348 - RNA, 24 nt, Artificial Sequence
  Synthetic
uuaggugauuuuagcuauuuucac

SEQ ID NO: 520349 - RNA, 18 nt, Artificial Sequence
  Synthetic
ggccauuugucuuuucac

SEQ ID NO: 520350 - RNA, 19 nt, Artificial Sequence
  Synthetic
gggccauuugucuuuucac

SEQ ID NO: 520351 - RNA, 20 nt, Artificial Sequence
  Synthetic
ugggccauuugucuuuucac

SEQ ID NO: 520352 - RNA, 21 nt, Artificial Sequence
  Synthetic
gugggccauuugucuuuucac

SEQ ID NO: 520353 - RNA, 22 nt, Artificial Sequence
  Synthetic
agugggccauuugucuuuucac

SEQ ID NO: 520354 - RNA, 23 nt, Artificial Sequence
  Synthetic
cagugggccauuugucuuuucac

SEQ ID NO: 520355 - RNA, 24 nt, Artificial Sequence
  Synthetic
ucagugggccauuugucuuuucac

SEQ ID NO: 520356 - RNA, 18 nt, Artificial Sequence
  Synthetic
aauuuuucacaaaaagac

SEQ ID NO: 520357 - RNA, 19 nt, Artificial Sequence
  Synthetic
aaauuuuucacaaaaagac

SEQ ID NO: 520358 - RNA, 20 nt, Artificial Sequence
  Synthetic
gaaauuuuucacaaaaagac

SEQ ID NO: 520359 - RNA, 21 nt, Artificial Sequence
  Synthetic
ugaaauuuuucacaaaaagac

SEQ ID NO: 520360 - RNA, 22 nt, Artificial Sequence
  Synthetic
uugaaauuuuucacaaaaagac

SEQ ID NO: 520361 - RNA, 23 nt, Artificial Sequence
  Synthetic
uuugaaauuuuucacaaaaagac

SEQ ID NO: 520362 - RNA, 24 nt, Artificial Sequence
  Synthetic
guuugaaauuuuucacaaaaagac

SEQ ID NO: 520363 - RNA, 18 nt, Artificial Sequence
  Synthetic
uuacuuugagaaaaagac

SEQ ID NO: 520364 - RNA, 19 nt, Artificial Sequence
  Synthetic
auuacuuugagaaaaagac

SEQ ID NO: 520365 - RNA, 20 nt, Artificial Sequence
  Synthetic
aauuacuuugagaaaaagac

SEQ ID NO: 520366 - RNA, 21 nt, Artificial Sequence
  Synthetic
caauuacuuugagaaaaagac

SEQ ID NO: 520367 - RNA, 22 nt, Artificial Sequence
  Synthetic
ucaauuacuuugagaaaaagac

SEQ ID NO: 520368 - RNA, 23 nt, Artificial Sequence
  Synthetic
uucaauuacuuugagaaaaagac

SEQ ID NO: 520369 - RNA, 24 nt, Artificial Sequence
  Synthetic
guucaauuacuuugagaaaaagac

SEQ ID NO: 520370 - RNA, 18 nt, Artificial Sequence
  Synthetic
gacacaaaauaaaaagac

SEQ ID NO: 520371 - RNA, 19 nt, Artificial Sequence
  Synthetic
ggacacaaaauaaaaagac

SEQ ID NO: 520372 - RNA, 20 nt, Artificial Sequence
  Synthetic
gggacacaaaauaaaaagac

SEQ ID NO: 520373 - RNA, 21 nt, Artificial Sequence
  Synthetic
ggggacacaaaauaaaaagac

SEQ ID NO: 520374 - RNA, 22 nt, Artificial Sequence
  Synthetic
aggggacacaaaauaaaaagac

SEQ ID NO: 520375 - RNA, 23 nt, Artificial Sequence
  Synthetic
aaggggacacaaaauaaaaagac

SEQ ID NO: 520376 - RNA, 24 nt, Artificial Sequence
  Synthetic
aaaggggacacaaaauaaaaagac

SEQ ID NO: 520377 - RNA, 18 nt, Artificial Sequence
  Synthetic
ugagaggaagcaaaagac

SEQ ID NO: 520378 - RNA, 19 nt, Artificial Sequence
  Synthetic
cugagaggaagcaaaagac

SEQ ID NO: 520379 - RNA, 20 nt, Artificial Sequence
  Synthetic
ucugagaggaagcaaaagac

SEQ ID NO: 520380 - RNA, 21 nt, Artificial Sequence
  Synthetic
aucugagaggaagcaaaagac

SEQ ID NO: 520381 - RNA, 22 nt, Artificial Sequence
  Synthetic
aaucugagaggaagcaaaagac

SEQ ID NO: 520382 - RNA, 23 nt, Artificial Sequence
  Synthetic
aaaucugagaggaagcaaaagac

SEQ ID NO: 520383 - RNA, 24 nt, Artificial Sequence
  Synthetic
aaaaucugagaggaagcaaaagac

SEQ ID NO: 520384 - RNA, 18 nt, Artificial Sequence
  Synthetic
gaaucaaaaggaaaagac

SEQ ID NO: 520385 - RNA, 19 nt, Artificial Sequence
  Synthetic
agaaucaaaaggaaaagac

SEQ ID NO: 520386 - RNA, 20 nt, Artificial Sequence
  Synthetic
uagaaucaaaaggaaaagac

SEQ ID NO: 520387 - RNA, 21 nt, Artificial Sequence
  Synthetic
cuagaaucaaaaggaaaagac

SEQ ID NO: 520388 - RNA, 22 nt, Artificial Sequence
  Synthetic
ccuagaaucaaaaggaaaagac

SEQ ID NO: 520389 - RNA, 23 nt, Artificial Sequence
  Synthetic
accuagaaucaaaaggaaaagac

SEQ ID NO: 520390 - RNA, 24 nt, Artificial Sequence
  Synthetic
aaccuagaaucaaaaggaaaagac

SEQ ID NO: 520391 - RNA, 18 nt, Artificial Sequence
  Synthetic
aagacccauggaaaagac

SEQ ID NO: 520392 - RNA, 19 nt, Artificial Sequence
  Synthetic
aaagacccauggaaaagac

SEQ ID NO: 520393 - RNA, 20 nt, Artificial Sequence
  Synthetic
caaagacccauggaaaagac

SEQ ID NO: 520394 - RNA, 21 nt, Artificial Sequence
  Synthetic
acaaagacccauggaaaagac

SEQ ID NO: 520395 - RNA, 22 nt, Artificial Sequence
  Synthetic
cacaaagacccauggaaaagac

SEQ ID NO: 520396 - RNA, 23 nt, Artificial Sequence
  Synthetic
acacaaagacccauggaaaagac

SEQ ID NO: 520397 - RNA, 24 nt, Artificial Sequence
  Synthetic
gacacaaagacccauggaaaagac

SEQ ID NO: 520398 - RNA, 18 nt, Artificial Sequence
  Synthetic
auuuacauaugaaaagac

SEQ ID NO: 520399 - RNA, 19 nt, Artificial Sequence
  Synthetic
uauuuacauaugaaaagac

SEQ ID NO: 520400 - RNA, 20 nt, Artificial Sequence
  Synthetic
auauuuacauaugaaaagac

SEQ ID NO: 520401 - RNA, 21 nt, Artificial Sequence
  Synthetic
aauauuuacauaugaaaagac

SEQ ID NO: 520402 - RNA, 22 nt, Artificial Sequence
  Synthetic
aaauauuuacauaugaaaagac

SEQ ID NO: 520403 - RNA, 23 nt, Artificial Sequence
  Synthetic
aaaauauuuacauaugaaaagac

SEQ ID NO: 520404 - RNA, 24 nt, Artificial Sequence
  Synthetic
aaaaauauuuacauaugaaaagac

SEQ ID NO: 520405 - RNA, 18 nt, Artificial Sequence
  Synthetic
caauuucaaauaaaagac

SEQ ID NO: 520406 - RNA, 19 nt, Artificial Sequence
  Synthetic
ccaauuucaaauaaaagac

SEQ ID NO: 520407 - RNA, 20 nt, Artificial Sequence
  Synthetic
cccaauuucaaauaaaagac

SEQ ID NO: 520408 - RNA, 21 nt, Artificial Sequence
  Synthetic
ccccaauuucaaauaaaagac

SEQ ID NO: 520409 - RNA, 22 nt, Artificial Sequence
  Synthetic
accccaauuucaaauaaaagac

SEQ ID NO: 520410 - RNA, 23 nt, Artificial Sequence
  Synthetic
gaccccaauuucaaauaaaagac

SEQ ID NO: 520411 - RNA, 24 nt, Artificial Sequence
  Synthetic
ggaccccaauuucaaauaaaagac

SEQ ID NO: 520412 - RNA, 18 nt, Artificial Sequence
  Synthetic
auucccaauaccaaagac

SEQ ID NO: 520413 - RNA, 19 nt, Artificial Sequence
  Synthetic
uauucccaauaccaaagac

SEQ ID NO: 520414 - RNA, 20 nt, Artificial Sequence
  Synthetic
cuauucccaauaccaaagac

SEQ ID NO: 520415 - RNA, 21 nt, Artificial Sequence
  Synthetic
acuauucccaauaccaaagac

SEQ ID NO: 520416 - RNA, 22 nt, Artificial Sequence
  Synthetic
cacuauucccaauaccaaagac

SEQ ID NO: 520417 - RNA, 23 nt, Artificial Sequence
  Synthetic
gcacuauucccaauaccaaagac

SEQ ID NO: 520418 - RNA, 24 nt, Artificial Sequence
  Synthetic
ugcacuauucccaauaccaaagac

SEQ ID NO: 520419 - RNA, 21 nt, Artificial Sequence
  Synthetic
acuauucacaauagcaaagac

SEQ ID NO: 520420 - RNA, 22 nt, Artificial Sequence
  Synthetic
cacuauucacaauagcaaagac

SEQ ID NO: 520421 - RNA, 23 nt, Artificial Sequence
  Synthetic
gcacuauucacaauagcaaagac

SEQ ID NO: 520422 - RNA, 24 nt, Artificial Sequence
  Synthetic
agcacuauucacaauagcaaagac

SEQ ID NO: 520423 - RNA, 24 nt, Artificial Sequence
  Synthetic
ugcacuauucacaauagcaaagac

SEQ ID NO: 520424 - RNA, 21 nt, Artificial Sequence
  Synthetic
gcuauucacaauagcaaagac

SEQ ID NO: 520425 - RNA, 22 nt, Artificial Sequence
  Synthetic
ugcuauucacaauagcaaagac

SEQ ID NO: 520426 - RNA, 23 nt, Artificial Sequence
  Synthetic
gugcuauucacaauagcaaagac

SEQ ID NO: 520427 - RNA, 24 nt, Artificial Sequence
  Synthetic
ugugcuauucacaauagcaaagac

SEQ ID NO: 520428 - RNA, 21 nt, Artificial Sequence
  Synthetic
ucuauucacaauagcaaagac

SEQ ID NO: 520429 - RNA, 22 nt, Artificial Sequence
  Synthetic
cucuauucacaauagcaaagac

SEQ ID NO: 520430 - RNA, 23 nt, Artificial Sequence
  Synthetic
gcucuauucacaauagcaaagac

SEQ ID NO: 520431 - RNA, 24 nt, Artificial Sequence
  Synthetic
ggcucuauucacaauagcaaagac

SEQ ID NO: 520432 - RNA, 21 nt, Artificial Sequence
  Synthetic
acuauuuacaauagcaaagac

SEQ ID NO: 520433 - RNA, 22 nt, Artificial Sequence
  Synthetic
cacuauuuacaauagcaaagac

SEQ ID NO: 520434 - RNA, 23 nt, Artificial Sequence
  Synthetic
gcacuauuuacaauagcaaagac

SEQ ID NO: 520435 - RNA, 24 nt, Artificial Sequence
  Synthetic
agcacuauuuacaauagcaaagac

SEQ ID NO: 520436 - RNA, 18 nt, Artificial Sequence
  Synthetic
cauggaacaugcaaagac

SEQ ID NO: 520437 - RNA, 19 nt, Artificial Sequence
  Synthetic
acauggaacaugcaaagac

SEQ ID NO: 520438 - RNA, 20 nt, Artificial Sequence
  Synthetic
aacauggaacaugcaaagac

SEQ ID NO: 520439 - RNA, 21 nt, Artificial Sequence
  Synthetic
gaacauggaacaugcaaagac

SEQ ID NO: 520440 - RNA, 22 nt, Artificial Sequence
  Synthetic
ggaacauggaacaugcaaagac

SEQ ID NO: 520441 - RNA, 23 nt, Artificial Sequence
  Synthetic
gggaacauggaacaugcaaagac

SEQ ID NO: 520442 - RNA, 24 nt, Artificial Sequence
  Synthetic
agggaacauggaacaugcaaagac

SEQ ID NO: 520443 - RNA, 18 nt, Artificial Sequence
  Synthetic
cauccagagaagaaagac

SEQ ID NO: 520444 - RNA, 19 nt, Artificial Sequence
  Synthetic
acauccagagaagaaagac

SEQ ID NO: 520445 - RNA, 20 nt, Artificial Sequence
  Synthetic
uacauccagagaagaaagac

SEQ ID NO: 520446 - RNA, 21 nt, Artificial Sequence
  Synthetic
auacauccagagaagaaagac

SEQ ID NO: 520447 - RNA, 22 nt, Artificial Sequence
  Synthetic
uauacauccagagaagaaagac

SEQ ID NO: 520448 - RNA, 23 nt, Artificial Sequence
  Synthetic
cuauacauccagagaagaaagac

SEQ ID NO: 520449 - RNA, 24 nt, Artificial Sequence
  Synthetic
acuauacauccagagaagaaagac

SEQ ID NO: 520450 - RNA, 18 nt, Artificial Sequence
  Synthetic
uuagccuuuaagaaagac

SEQ ID NO: 520451 - RNA, 19 nt, Artificial Sequence
  Synthetic
cuuagccuuuaagaaagac

SEQ ID NO: 520452 - RNA, 20 nt, Artificial Sequence
  Synthetic
acuuagccuuuaagaaagac

SEQ ID NO: 520453 - RNA, 21 nt, Artificial Sequence
  Synthetic
cacuuagccuuuaagaaagac

SEQ ID NO: 520454 - RNA, 22 nt, Artificial Sequence
  Synthetic
ucacuuagccuuuaagaaagac

SEQ ID NO: 520455 - RNA, 23 nt, Artificial Sequence
  Synthetic
uucacuuagccuuuaagaaagac

SEQ ID NO: 520456 - RNA, 24 nt, Artificial Sequence
  Synthetic
cuucacuuagccuuuaagaaagac

SEQ ID NO: 520457 - RNA, 18 nt, Artificial Sequence
  Synthetic
guguaaguggggaaagac

SEQ ID NO: 520458 - RNA, 19 nt, Artificial Sequence
  Synthetic
gguguaaguggggaaagac

SEQ ID NO: 520459 - RNA, 20 nt, Artificial Sequence
  Synthetic
ugguguaaguggggaaagac

SEQ ID NO: 520460 - RNA, 21 nt, Artificial Sequence
  Synthetic
augguguaaguggggaaagac

SEQ ID NO: 520461 - RNA, 22 nt, Artificial Sequence
  Synthetic
uaugguguaaguggggaaagac

SEQ ID NO: 520462 - RNA, 23 nt, Artificial Sequence
  Synthetic
auaugguguaaguggggaaagac

SEQ ID NO: 520463 - RNA, 24 nt, Artificial Sequence
  Synthetic
aauaugguguaaguggggaaagac

SEQ ID NO: 520464 - RNA, 18 nt, Artificial Sequence
  Synthetic
aaggucaguuggaaagac

SEQ ID NO: 520465 - RNA, 19 nt, Artificial Sequence
  Synthetic
gaaggucaguuggaaagac

SEQ ID NO: 520466 - RNA, 20 nt, Artificial Sequence
  Synthetic
agaaggucaguuggaaagac

SEQ ID NO: 520467 - RNA, 21 nt, Artificial Sequence
  Synthetic
cagaaggucaguuggaaagac

SEQ ID NO: 520468 - RNA, 22 nt, Artificial Sequence
  Synthetic
acagaaggucaguuggaaagac

SEQ ID NO: 520469 - RNA, 23 nt, Artificial Sequence
  Synthetic
cacagaaggucaguuggaaagac

SEQ ID NO: 520470 - RNA, 24 nt, Artificial Sequence
  Synthetic
gcacagaaggucaguuggaaagac

SEQ ID NO: 520471 - RNA, 18 nt, Artificial Sequence
  Synthetic
auguaaaaaaugaaagac

SEQ ID NO: 520472 - RNA, 19 nt, Artificial Sequence
  Synthetic
aauguaaaaaaugaaagac

SEQ ID NO: 520473 - RNA, 20 nt, Artificial Sequence
  Synthetic
gaauguaaaaaaugaaagac

SEQ ID NO: 520474 - RNA, 21 nt, Artificial Sequence
  Synthetic
agaauguaaaaaaugaaagac

SEQ ID NO: 520475 - RNA, 22 nt, Artificial Sequence
  Synthetic
aagaauguaaaaaaugaaagac

SEQ ID NO: 520476 - RNA, 23 nt, Artificial Sequence
  Synthetic
aaagaauguaaaaaaugaaagac

SEQ ID NO: 520477 - RNA, 24 nt, Artificial Sequence
  Synthetic
caaagaauguaaaaaaugaaagac

SEQ ID NO: 520478 - RNA, 18 nt, Artificial Sequence
  Synthetic
auaagaugaaugaaagac

SEQ ID NO: 520479 - RNA, 19 nt, Artificial Sequence
  Synthetic
aauaagaugaaugaaagac

SEQ ID NO: 520480 - RNA, 20 nt, Artificial Sequence
  Synthetic
aaauaagaugaaugaaagac

SEQ ID NO: 520481 - RNA, 21 nt, Artificial Sequence
  Synthetic
caaauaagaugaaugaaagac

SEQ ID NO: 520482 - RNA, 22 nt, Artificial Sequence
  Synthetic
gcaaauaagaugaaugaaagac

SEQ ID NO: 520483 - RNA, 23 nt, Artificial Sequence
  Synthetic
agcaaauaagaugaaugaaagac

SEQ ID NO: 520484 - RNA, 24 nt, Artificial Sequence
  Synthetic
gagcaaauaagaugaaugaaagac

SEQ ID NO: 520485 - RNA, 18 nt, Artificial Sequence
  Synthetic
gcacauggacauaaagac

SEQ ID NO: 520486 - RNA, 19 nt, Artificial Sequence
  Synthetic
ugcacauggacauaaagac

SEQ ID NO: 520487 - RNA, 20 nt, Artificial Sequence
  Synthetic
gugcacauggacauaaagac

SEQ ID NO: 520488 - RNA, 21 nt, Artificial Sequence
  Synthetic
agugcacauggacauaaagac

SEQ ID NO: 520489 - RNA, 22 nt, Artificial Sequence
  Synthetic
gagugcacauggacauaaagac

SEQ ID NO: 520490 - RNA, 23 nt, Artificial Sequence
  Synthetic
ugagugcacauggacauaaagac

SEQ ID NO: 520491 - RNA, 24 nt, Artificial Sequence
  Synthetic
uugagugcacauggacauaaagac

SEQ ID NO: 520492 - RNA, 18 nt, Artificial Sequence
  Synthetic
uaguuucagcauaaagac

SEQ ID NO: 520493 - RNA, 19 nt, Artificial Sequence
  Synthetic
cuaguuucagcauaaagac

SEQ ID NO: 520494 - RNA, 20 nt, Artificial Sequence
  Synthetic
ucuaguuucagcauaaagac

SEQ ID NO: 520495 - RNA, 21 nt, Artificial Sequence
  Synthetic
uucuaguuucagcauaaagac

SEQ ID NO: 520496 - RNA, 22 nt, Artificial Sequence
  Synthetic
auucuaguuucagcauaaagac

SEQ ID NO: 520497 - RNA, 23 nt, Artificial Sequence
  Synthetic
cauucuaguuucagcauaaagac

SEQ ID NO: 520498 - RNA, 24 nt, Artificial Sequence
  Synthetic
gcauucuaguuucagcauaaagac

SEQ ID NO: 520499 - RNA, 18 nt, Artificial Sequence
  Synthetic
uuuucacuaucuaaagac

SEQ ID NO: 520500 - RNA, 19 nt, Artificial Sequence
  Synthetic
auuuucacuaucuaaagac

SEQ ID NO: 520501 - RNA, 20 nt, Artificial Sequence
  Synthetic
gauuuucacuaucuaaagac

SEQ ID NO: 520502 - RNA, 21 nt, Artificial Sequence
  Synthetic
ugauuuucacuaucuaaagac

SEQ ID NO: 520503 - RNA, 22 nt, Artificial Sequence
  Synthetic
uugauuuucacuaucuaaagac

SEQ ID NO: 520504 - RNA, 23 nt, Artificial Sequence
  Synthetic
auugauuuucacuaucuaaagac

SEQ ID NO: 520505 - RNA, 24 nt, Artificial Sequence
  Synthetic
aauugauuuucacuaucuaaagac

SEQ ID NO: 520506 - RNA, 18 nt, Artificial Sequence
  Synthetic
uauuccuaggguaaagac

SEQ ID NO: 520507 - RNA, 19 nt, Artificial Sequence
  Synthetic
uuauuccuaggguaaagac

SEQ ID NO: 520508 - RNA, 20 nt, Artificial Sequence
  Synthetic
auuauuccuaggguaaagac

SEQ ID NO: 520509 - RNA, 21 nt, Artificial Sequence
  Synthetic
uauuauuccuaggguaaagac

SEQ ID NO: 520510 - RNA, 22 nt, Artificial Sequence
  Synthetic
uuauuauuccuaggguaaagac

SEQ ID NO: 520511 - RNA, 23 nt, Artificial Sequence
  Synthetic
guuauuauuccuaggguaaagac

SEQ ID NO: 520512 - RNA, 24 nt, Artificial Sequence
  Synthetic
uguuauuauuccuaggguaaagac

SEQ ID NO: 520513 - RNA, 18 nt, Artificial Sequence
  Synthetic
aagguagcugguaaagac

SEQ ID NO: 520514 - RNA, 19 nt, Artificial Sequence
  Synthetic
aaagguagcugguaaagac

SEQ ID NO: 520515 - RNA, 20 nt, Artificial Sequence
  Synthetic
uaaagguagcugguaaagac

SEQ ID NO: 520516 - RNA, 21 nt, Artificial Sequence
  Synthetic
auaaagguagcugguaaagac

SEQ ID NO: 520517 - RNA, 22 nt, Artificial Sequence
  Synthetic
cauaaagguagcugguaaagac

SEQ ID NO: 520518 - RNA, 23 nt, Artificial Sequence
  Synthetic
ucauaaagguagcugguaaagac

SEQ ID NO: 520519 - RNA, 24 nt, Artificial Sequence
  Synthetic
gucauaaagguagcugguaaagac

SEQ ID NO: 520520 - RNA, 18 nt, Artificial Sequence
  Synthetic
acauguugcuguaaagac

SEQ ID NO: 520521 - RNA, 19 nt, Artificial Sequence
  Synthetic
aacauguugcuguaaagac

SEQ ID NO: 520522 - RNA, 20 nt, Artificial Sequence
  Synthetic
caacauguugcuguaaagac

SEQ ID NO: 520523 - RNA, 21 nt, Artificial Sequence
  Synthetic
ucaacauguugcuguaaagac

SEQ ID NO: 520524 - RNA, 22 nt, Artificial Sequence
  Synthetic
uucaacauguugcuguaaagac

SEQ ID NO: 520525 - RNA, 23 nt, Artificial Sequence
  Synthetic
uuucaacauguugcuguaaagac

SEQ ID NO: 520526 - RNA, 24 nt, Artificial Sequence
  Synthetic
auuucaacauguugcuguaaagac

SEQ ID NO: 520527 - RNA, 18 nt, Artificial Sequence
  Synthetic
agucuauuaauuaaagac

SEQ ID NO: 520528 - RNA, 19 nt, Artificial Sequence
  Synthetic
gagucuauuaauuaaagac

SEQ ID NO: 520529 - RNA, 20 nt, Artificial Sequence
  Synthetic
ggagucuauuaauuaaagac

SEQ ID NO: 520530 - RNA, 21 nt, Artificial Sequence
  Synthetic
uggagucuauuaauuaaagac

SEQ ID NO: 520531 - RNA, 22 nt, Artificial Sequence
  Synthetic
auggagucuauuaauuaaagac

SEQ ID NO: 520532 - RNA, 23 nt, Artificial Sequence
  Synthetic
aauggagucuauuaauuaaagac

SEQ ID NO: 520533 - RNA, 24 nt, Artificial Sequence
  Synthetic
uaauggagucuauuaauuaaagac

SEQ ID NO: 520534 - RNA, 18 nt, Artificial Sequence
  Synthetic
aucucgauuuuuaaagac

SEQ ID NO: 520535 - RNA, 19 nt, Artificial Sequence
  Synthetic
caucucgauuuuuaaagac

SEQ ID NO: 520536 - RNA, 20 nt, Artificial Sequence
  Synthetic
ucaucucgauuuuuaaagac

SEQ ID NO: 520537 - RNA, 21 nt, Artificial Sequence
  Synthetic
gucaucucgauuuuuaaagac

SEQ ID NO: 520538 - RNA, 22 nt, Artificial Sequence
  Synthetic
ugucaucucgauuuuuaaagac

SEQ ID NO: 520539 - RNA, 23 nt, Artificial Sequence
  Synthetic
augucaucucgauuuuuaaagac

SEQ ID NO: 520540 - RNA, 24 nt, Artificial Sequence
  Synthetic
aaugucaucucgauuuuuaaagac

SEQ ID NO: 520541 - RNA, 18 nt, Artificial Sequence
  Synthetic
ucauuugcagaacaagac

SEQ ID NO: 520542 - RNA, 19 nt, Artificial Sequence
  Synthetic
gucauuugcagaacaagac

SEQ ID NO: 520543 - RNA, 20 nt, Artificial Sequence
  Synthetic
agucauuugcagaacaagac

SEQ ID NO: 520544 - RNA, 21 nt, Artificial Sequence
  Synthetic
cagucauuugcagaacaagac

SEQ ID NO: 520545 - RNA, 22 nt, Artificial Sequence
  Synthetic
ucagucauuugcagaacaagac

SEQ ID NO: 520546 - RNA, 23 nt, Artificial Sequence
  Synthetic
aucagucauuugcagaacaagac

SEQ ID NO: 520547 - RNA, 24 nt, Artificial Sequence
  Synthetic
caucagucauuugcagaacaagac

SEQ ID NO: 520548 - RNA, 18 nt, Artificial Sequence
  Synthetic
ucuguuccuucccaagac

SEQ ID NO: 520549 - RNA, 19 nt, Artificial Sequence
  Synthetic
gucuguuccuucccaagac

SEQ ID NO: 520550 - RNA, 20 nt, Artificial Sequence
  Synthetic
ugucuguuccuucccaagac

SEQ ID NO: 520551 - RNA, 21 nt, Artificial Sequence
  Synthetic
uugucuguuccuucccaagac

SEQ ID NO: 520552 - RNA, 22 nt, Artificial Sequence
  Synthetic
auugucuguuccuucccaagac

SEQ ID NO: 520553 - RNA, 23 nt, Artificial Sequence
  Synthetic
cauugucuguuccuucccaagac

SEQ ID NO: 520554 - RNA, 24 nt, Artificial Sequence
  Synthetic
ucauugucuguuccuucccaagac

SEQ ID NO: 520555 - RNA, 18 nt, Artificial Sequence
  Synthetic
gaaaagggaaagcaagac

SEQ ID NO: 520556 - RNA, 19 nt, Artificial Sequence
  Synthetic
ggaaaagggaaagcaagac

SEQ ID NO: 520557 - RNA, 20 nt, Artificial Sequence
  Synthetic
gggaaaagggaaagcaagac

SEQ ID NO: 520558 - RNA, 21 nt, Artificial Sequence
  Synthetic
ggggaaaagggaaagcaagac

SEQ ID NO: 520559 - RNA, 22 nt, Artificial Sequence
  Synthetic
uggggaaaagggaaagcaagac

SEQ ID NO: 520560 - RNA, 23 nt, Artificial Sequence
  Synthetic
auggggaaaagggaaagcaagac

SEQ ID NO: 520561 - RNA, 24 nt, Artificial Sequence
  Synthetic
gauggggaaaagggaaagcaagac

SEQ ID NO: 520562 - RNA, 18 nt, Artificial Sequence
  Synthetic
uauugggugugucaagac

SEQ ID NO: 520563 - RNA, 19 nt, Artificial Sequence
  Synthetic
auauugggugugucaagac

SEQ ID NO: 520564 - RNA, 20 nt, Artificial Sequence
  Synthetic
cauauugggugugucaagac

SEQ ID NO: 520565 - RNA, 21 nt, Artificial Sequence
  Synthetic
gcauauugggugugucaagac

SEQ ID NO: 520566 - RNA, 22 nt, Artificial Sequence
  Synthetic
ugcauauugggugugucaagac

SEQ ID NO: 520567 - RNA, 23 nt, Artificial Sequence
  Synthetic
cugcauauugggugugucaagac

SEQ ID NO: 520568 - RNA, 24 nt, Artificial Sequence
  Synthetic
ccugcauauugggugugucaagac

SEQ ID NO: 520569 - RNA, 18 nt, Artificial Sequence
  Synthetic
gaggacucagaagaagac

SEQ ID NO: 520570 - RNA, 19 nt, Artificial Sequence
  Synthetic
ggaggacucagaagaagac

SEQ ID NO: 520571 - RNA, 20 nt, Artificial Sequence
  Synthetic
gggaggacucagaagaagac

SEQ ID NO: 520572 - RNA, 21 nt, Artificial Sequence
  Synthetic
ugggaggacucagaagaagac

SEQ ID NO: 520573 - RNA, 22 nt, Artificial Sequence
  Synthetic
uugggaggacucagaagaagac

SEQ ID NO: 520574 - RNA, 23 nt, Artificial Sequence
  Synthetic
guugggaggacucagaagaagac

SEQ ID NO: 520575 - RNA, 24 nt, Artificial Sequence
  Synthetic
aguugggaggacucagaagaagac

SEQ ID NO: 520576 - RNA, 18 nt, Artificial Sequence
  Synthetic
ggaggcucagaagaagac

SEQ ID NO: 520577 - RNA, 19 nt, Artificial Sequence
  Synthetic
aggaggcucagaagaagac

SEQ ID NO: 520578 - RNA, 20 nt, Artificial Sequence
  Synthetic
uaggaggcucagaagaagac

SEQ ID NO: 520579 - RNA, 21 nt, Artificial Sequence
  Synthetic
uuaggaggcucagaagaagac

SEQ ID NO: 520580 - RNA, 22 nt, Artificial Sequence
  Synthetic
guuaggaggcucagaagaagac

SEQ ID NO: 520581 - RNA, 23 nt, Artificial Sequence
  Synthetic
aguuaggaggcucagaagaagac

SEQ ID NO: 520582 - RNA, 24 nt, Artificial Sequence
  Synthetic
caguuaggaggcucagaagaagac

SEQ ID NO: 520583 - RNA, 18 nt, Artificial Sequence
  Synthetic
aaacagaacuaagaagac

SEQ ID NO: 520584 - RNA, 19 nt, Artificial Sequence
  Synthetic
uaaacagaacuaagaagac

SEQ ID NO: 520585 - RNA, 20 nt, Artificial Sequence
  Synthetic
uuaaacagaacuaagaagac

SEQ ID NO: 520586 - RNA, 21 nt, Artificial Sequence
  Synthetic
uuuaaacagaacuaagaagac

SEQ ID NO: 520587 - RNA, 22 nt, Artificial Sequence
  Synthetic
auuuaaacagaacuaagaagac

SEQ ID NO: 520588 - RNA, 23 nt, Artificial Sequence
  Synthetic
aauuuaaacagaacuaagaagac

SEQ ID NO: 520589 - RNA, 24 nt, Artificial Sequence
  Synthetic
aaauuuaaacagaacuaagaagac

SEQ ID NO: 520590 - RNA, 18 nt, Artificial Sequence
  Synthetic
uuuguggaggcagaagac

SEQ ID NO: 520591 - RNA, 19 nt, Artificial Sequence
  Synthetic
guuuguggaggcagaagac

SEQ ID NO: 520592 - RNA, 20 nt, Artificial Sequence
  Synthetic
gguuuguggaggcagaagac

SEQ ID NO: 520593 - RNA, 21 nt, Artificial Sequence
  Synthetic
ggguuuguggaggcagaagac

SEQ ID NO: 520594 - RNA, 22 nt, Artificial Sequence
  Synthetic
gggguuuguggaggcagaagac

SEQ ID NO: 520595 - RNA, 23 nt, Artificial Sequence
  Synthetic
agggguuuguggaggcagaagac

SEQ ID NO: 520596 - RNA, 24 nt, Artificial Sequence
  Synthetic
cagggguuuguggaggcagaagac

SEQ ID NO: 520597 - RNA, 18 nt, Artificial Sequence
  Synthetic
cagcccagugcagaagac

SEQ ID NO: 520598 - RNA, 19 nt, Artificial Sequence
  Synthetic
gcagcccagugcagaagac

SEQ ID NO: 520599 - RNA, 20 nt, Artificial Sequence
  Synthetic
ggcagcccagugcagaagac

SEQ ID NO: 520600 - RNA, 21 nt, Artificial Sequence
  Synthetic
aggcagcccagugcagaagac

SEQ ID NO: 520601 - RNA, 22 nt, Artificial Sequence
  Synthetic
uaggcagcccagugcagaagac

SEQ ID NO: 520602 - RNA, 23 nt, Artificial Sequence
  Synthetic
guaggcagcccagugcagaagac

SEQ ID NO: 520603 - RNA, 24 nt, Artificial Sequence
  Synthetic
aguaggcagcccagugcagaagac

SEQ ID NO: 520604 - RNA, 18 nt, Artificial Sequence
  Synthetic
uuggaggggucagaagac

SEQ ID NO: 520605 - RNA, 19 nt, Artificial Sequence
  Synthetic
auuggaggggucagaagac

SEQ ID NO: 520606 - RNA, 20 nt, Artificial Sequence
  Synthetic
aauuggaggggucagaagac

SEQ ID NO: 520607 - RNA, 21 nt, Artificial Sequence
  Synthetic
gaauuggaggggucagaagac

SEQ ID NO: 520608 - RNA, 22 nt, Artificial Sequence
  Synthetic
agaauuggaggggucagaagac

SEQ ID NO: 520609 - RNA, 23 nt, Artificial Sequence
  Synthetic
gagaauuggaggggucagaagac

SEQ ID NO: 520610 - RNA, 24 nt, Artificial Sequence
  Synthetic
agagaauuggaggggucagaagac

SEQ ID NO: 520611 - RNA, 18 nt, Artificial Sequence
  Synthetic
uucaugacuggagaagac

SEQ ID NO: 520612 - RNA, 19 nt, Artificial Sequence
  Synthetic
guucaugacuggagaagac

SEQ ID NO: 520613 - RNA, 20 nt, Artificial Sequence
  Synthetic
uguucaugacuggagaagac

SEQ ID NO: 520614 - RNA, 21 nt, Artificial Sequence
  Synthetic
auguucaugacuggagaagac

SEQ ID NO: 520615 - RNA, 22 nt, Artificial Sequence
  Synthetic
aauguucaugacuggagaagac

SEQ ID NO: 520616 - RNA, 23 nt, Artificial Sequence
  Synthetic
aaauguucaugacuggagaagac

SEQ ID NO: 520617 - RNA, 24 nt, Artificial Sequence
  Synthetic
gaaauguucaugacuggagaagac

SEQ ID NO: 520618 - RNA, 18 nt, Artificial Sequence
  Synthetic
agguuacagugagaagac

SEQ ID NO: 520619 - RNA, 19 nt, Artificial Sequence
  Synthetic
gagguuacagugagaagac

SEQ ID NO: 520620 - RNA, 20 nt, Artificial Sequence
  Synthetic
ugagguuacagugagaagac

SEQ ID NO: 520621 - RNA, 21 nt, Artificial Sequence
  Synthetic
gugagguuacagugagaagac

SEQ ID NO: 520622 - RNA, 22 nt, Artificial Sequence
  Synthetic
ugugagguuacagugagaagac

SEQ ID NO: 520623 - RNA, 23 nt, Artificial Sequence
  Synthetic
uugugagguuacagugagaagac

SEQ ID NO: 520624 - RNA, 24 nt, Artificial Sequence
  Synthetic
cuugugagguuacagugagaagac

SEQ ID NO: 520625 - RNA, 18 nt, Artificial Sequence
  Synthetic
aacgagaauugagaagac

SEQ ID NO: 520626 - RNA, 19 nt, Artificial Sequence
  Synthetic
uaacgagaauugagaagac

SEQ ID NO: 520627 - RNA, 20 nt, Artificial Sequence
  Synthetic
cuaacgagaauugagaagac

SEQ ID NO: 520628 - RNA, 21 nt, Artificial Sequence
  Synthetic
acuaacgagaauugagaagac

SEQ ID NO: 520629 - RNA, 22 nt, Artificial Sequence
  Synthetic
cacuaacgagaauugagaagac

SEQ ID NO: 520630 - RNA, 23 nt, Artificial Sequence
  Synthetic
acacuaacgagaauugagaagac

SEQ ID NO: 520631 - RNA, 24 nt, Artificial Sequence
  Synthetic
aacacuaacgagaauugagaagac

SEQ ID NO: 520632 - RNA, 18 nt, Artificial Sequence
  Synthetic
auaagcagauucgaagac

SEQ ID NO: 520633 - RNA, 19 nt, Artificial Sequence
  Synthetic
uauaagcagauucgaagac

SEQ ID NO: 520634 - RNA, 20 nt, Artificial Sequence
  Synthetic
cuauaagcagauucgaagac

SEQ ID NO: 520635 - RNA, 21 nt, Artificial Sequence
  Synthetic
ccuauaagcagauucgaagac

SEQ ID NO: 520636 - RNA, 22 nt, Artificial Sequence
  Synthetic
cccuauaagcagauucgaagac

SEQ ID NO: 520637 - RNA, 23 nt, Artificial Sequence
  Synthetic
ccccuauaagcagauucgaagac

SEQ ID NO: 520638 - RNA, 24 nt, Artificial Sequence
  Synthetic
uccccuauaagcagauucgaagac

SEQ ID NO: 520639 - RNA, 18 nt, Artificial Sequence
  Synthetic
gaggaaaaggaggaagac

SEQ ID NO: 520640 - RNA, 19 nt, Artificial Sequence
  Synthetic
ugaggaaaaggaggaagac

SEQ ID NO: 520641 - RNA, 20 nt, Artificial Sequence
  Synthetic
augaggaaaaggaggaagac

SEQ ID NO: 520642 - RNA, 21 nt, Artificial Sequence
  Synthetic
uaugaggaaaaggaggaagac

SEQ ID NO: 520643 - RNA, 22 nt, Artificial Sequence
  Synthetic
guaugaggaaaaggaggaagac

SEQ ID NO: 520644 - RNA, 23 nt, Artificial Sequence
  Synthetic
uguaugaggaaaaggaggaagac

SEQ ID NO: 520645 - RNA, 24 nt, Artificial Sequence
  Synthetic
auguaugaggaaaaggaggaagac

SEQ ID NO: 520646 - RNA, 18 nt, Artificial Sequence
  Synthetic
gaaagacuuugggaagac

SEQ ID NO: 520647 - RNA, 19 nt, Artificial Sequence
  Synthetic
ugaaagacuuugggaagac

SEQ ID NO: 520648 - RNA, 20 nt, Artificial Sequence
  Synthetic
augaaagacuuugggaagac

SEQ ID NO: 520649 - RNA, 21 nt, Artificial Sequence
  Synthetic
gaugaaagacuuugggaagac

SEQ ID NO: 520650 - RNA, 22 nt, Artificial Sequence
  Synthetic
ugaugaaagacuuugggaagac

SEQ ID NO: 520651 - RNA, 23 nt, Artificial Sequence
  Synthetic
uugaugaaagacuuugggaagac

SEQ ID NO: 520652 - RNA, 24 nt, Artificial Sequence
  Synthetic
cuugaugaaagacuuugggaagac

SEQ ID NO: 520653 - RNA, 18 nt, Artificial Sequence
  Synthetic
gugguuacucaugaagac

SEQ ID NO: 520654 - RNA, 19 nt, Artificial Sequence
  Synthetic
ugugguuacucaugaagac

SEQ ID NO: 520655 - RNA, 20 nt, Artificial Sequence
  Synthetic
uugugguuacucaugaagac

SEQ ID NO: 520656 - RNA, 21 nt, Artificial Sequence
  Synthetic
auugugguuacucaugaagac

SEQ ID NO: 520657 - RNA, 22 nt, Artificial Sequence
  Synthetic
cauugugguuacucaugaagac

SEQ ID NO: 520658 - RNA, 23 nt, Artificial Sequence
  Synthetic
ccauugugguuacucaugaagac

SEQ ID NO: 520659 - RNA, 24 nt, Artificial Sequence
  Synthetic
accauugugguuacucaugaagac

SEQ ID NO: 520660 - RNA, 18 nt, Artificial Sequence
  Synthetic
aucuuuauuagugaagac

SEQ ID NO: 520661 - RNA, 19 nt, Artificial Sequence
  Synthetic
aaucuuuauuagugaagac

SEQ ID NO: 520662 - RNA, 20 nt, Artificial Sequence
  Synthetic
uaaucuuuauuagugaagac

SEQ ID NO: 520663 - RNA, 21 nt, Artificial Sequence
  Synthetic
uuaaucuuuauuagugaagac

SEQ ID NO: 520664 - RNA, 22 nt, Artificial Sequence
  Synthetic
auuaaucuuuauuagugaagac

SEQ ID NO: 520665 - RNA, 23 nt, Artificial Sequence
  Synthetic
uauuaaucuuuauuagugaagac

SEQ ID NO: 520666 - RNA, 24 nt, Artificial Sequence
  Synthetic
cuauuaaucuuuauuagugaagac

SEQ ID NO: 520667 - RNA, 18 nt, Artificial Sequence
  Synthetic
ugugauguugaauaagac

SEQ ID NO: 520668 - RNA, 19 nt, Artificial Sequence
  Synthetic
gugugauguugaauaagac

SEQ ID NO: 520669 - RNA, 20 nt, Artificial Sequence
  Synthetic
ugugugauguugaauaagac

SEQ ID NO: 520670 - RNA, 21 nt, Artificial Sequence
  Synthetic
gugugugauguugaauaagac

SEQ ID NO: 520671 - RNA, 22 nt, Artificial Sequence
  Synthetic
ugugugugauguugaauaagac

SEQ ID NO: 520672 - RNA, 23 nt, Artificial Sequence
  Synthetic
augugugugauguugaauaagac

SEQ ID NO: 520673 - RNA, 24 nt, Artificial Sequence
  Synthetic
aaugugugugauguugaauaagac

SEQ ID NO: 520674 - RNA, 18 nt, Artificial Sequence
  Synthetic
ugauuuaaguaauaagac

SEQ ID NO: 520675 - RNA, 19 nt, Artificial Sequence
  Synthetic
augauuuaaguaauaagac

SEQ ID NO: 520676 - RNA, 20 nt, Artificial Sequence
  Synthetic
uaugauuuaaguaauaagac

SEQ ID NO: 520677 - RNA, 21 nt, Artificial Sequence
  Synthetic
guaugauuuaaguaauaagac

SEQ ID NO: 520678 - RNA, 22 nt, Artificial Sequence
  Synthetic
uguaugauuuaaguaauaagac

SEQ ID NO: 520679 - RNA, 23 nt, Artificial Sequence
  Synthetic
auguaugauuuaaguaauaagac

SEQ ID NO: 520680 - RNA, 24 nt, Artificial Sequence
  Synthetic
aauguaugauuuaaguaauaagac

SEQ ID NO: 520681 - RNA, 18 nt, Artificial Sequence
  Synthetic
accaagaacagauaagac

SEQ ID NO: 520682 - RNA, 19 nt, Artificial Sequence
  Synthetic
gaccaagaacagauaagac

SEQ ID NO: 520683 - RNA, 20 nt, Artificial Sequence
  Synthetic
agaccaagaacagauaagac

SEQ ID NO: 520684 - RNA, 21 nt, Artificial Sequence
  Synthetic
aagaccaagaacagauaagac

SEQ ID NO: 520685 - RNA, 22 nt, Artificial Sequence
  Synthetic
uaagaccaagaacagauaagac

SEQ ID NO: 520686 - RNA, 23 nt, Artificial Sequence
  Synthetic
uuaagaccaagaacagauaagac

SEQ ID NO: 520687 - RNA, 24 nt, Artificial Sequence
  Synthetic
cuuaagaccaagaacagauaagac

SEQ ID NO: 520688 - RNA, 18 nt, Artificial Sequence
  Synthetic
cacgaaaaggacuaagac

SEQ ID NO: 520689 - RNA, 19 nt, Artificial Sequence
  Synthetic
gcacgaaaaggacuaagac

SEQ ID NO: 520690 - RNA, 20 nt, Artificial Sequence
  Synthetic
agcacgaaaaggacuaagac

SEQ ID NO: 520691 - RNA, 21 nt, Artificial Sequence
  Synthetic
aagcacgaaaaggacuaagac

SEQ ID NO: 520692 - RNA, 22 nt, Artificial Sequence
  Synthetic
gaagcacgaaaaggacuaagac

SEQ ID NO: 520693 - RNA, 23 nt, Artificial Sequence
  Synthetic
ggaagcacgaaaaggacuaagac

SEQ ID NO: 520694 - RNA, 24 nt, Artificial Sequence
  Synthetic
cggaagcacgaaaaggacuaagac

SEQ ID NO: 520695 - RNA, 18 nt, Artificial Sequence
  Synthetic
aagacuuaaaccuaagac

SEQ ID NO: 520696 - RNA, 19 nt, Artificial Sequence
  Synthetic
aaagacuuaaaccuaagac

SEQ ID NO: 520697 - RNA, 20 nt, Artificial Sequence
  Synthetic
uaaagacuuaaaccuaagac

SEQ ID NO: 520698 - RNA, 21 nt, Artificial Sequence
  Synthetic
uuaaagacuuaaaccuaagac

SEQ ID NO: 520699 - RNA, 22 nt, Artificial Sequence
  Synthetic
auuaaagacuuaaaccuaagac

SEQ ID NO: 520700 - RNA, 23 nt, Artificial Sequence
  Synthetic
gauuaaagacuuaaaccuaagac

SEQ ID NO: 520701 - RNA, 24 nt, Artificial Sequence
  Synthetic
ggauuaaagacuuaaaccuaagac

SEQ ID NO: 520702 - RNA, 18 nt, Artificial Sequence
  Synthetic
auggccaaccccuaagac

SEQ ID NO: 520703 - RNA, 19 nt, Artificial Sequence
  Synthetic
cauggccaaccccuaagac

SEQ ID NO: 520704 - RNA, 20 nt, Artificial Sequence
  Synthetic
acauggccaaccccuaagac

SEQ ID NO: 520705 - RNA, 21 nt, Artificial Sequence
  Synthetic
cacauggccaaccccuaagac

SEQ ID NO: 520706 - RNA, 22 nt, Artificial Sequence
  Synthetic
ucacauggccaaccccuaagac

SEQ ID NO: 520707 - RNA, 23 nt, Artificial Sequence
  Synthetic
aucacauggccaaccccuaagac

SEQ ID NO: 520708 - RNA, 24 nt, Artificial Sequence
  Synthetic
aaucacauggccaaccccuaagac

SEQ ID NO: 520709 - RNA, 18 nt, Artificial Sequence
  Synthetic
acugcagguaucuaagac

SEQ ID NO: 520710 - RNA, 19 nt, Artificial Sequence
  Synthetic
uacugcagguaucuaagac

SEQ ID NO: 520711 - RNA, 20 nt, Artificial Sequence
  Synthetic
cuacugcagguaucuaagac

SEQ ID NO: 520712 - RNA, 21 nt, Artificial Sequence
  Synthetic
ccuacugcagguaucuaagac

SEQ ID NO: 520713 - RNA, 22 nt, Artificial Sequence
  Synthetic
uccuacugcagguaucuaagac

SEQ ID NO: 520714 - RNA, 23 nt, Artificial Sequence
  Synthetic
guccuacugcagguaucuaagac

SEQ ID NO: 520715 - RNA, 24 nt, Artificial Sequence
  Synthetic
uguccuacugcagguaucuaagac

SEQ ID NO: 520716 - RNA, 18 nt, Artificial Sequence
  Synthetic
uuagaggcaaauuaagac

SEQ ID NO: 520717 - RNA, 19 nt, Artificial Sequence
  Synthetic
uuuagaggcaaauuaagac

SEQ ID NO: 520718 - RNA, 20 nt, Artificial Sequence
  Synthetic
guuuagaggcaaauuaagac

SEQ ID NO: 520719 - RNA, 21 nt, Artificial Sequence
  Synthetic
aguuuagaggcaaauuaagac

SEQ ID NO: 520720 - RNA, 22 nt, Artificial Sequence
  Synthetic
aaguuuagaggcaaauuaagac

SEQ ID NO: 520721 - RNA, 23 nt, Artificial Sequence
  Synthetic
aaaguuuagaggcaaauuaagac

SEQ ID NO: 520722 - RNA, 24 nt, Artificial Sequence
  Synthetic
aaaaguuuagaggcaaauuaagac

SEQ ID NO: 520723 - RNA, 18 nt, Artificial Sequence
  Synthetic
guuuucuaucauuaagac

SEQ ID NO: 520724 - RNA, 19 nt, Artificial Sequence
  Synthetic
uguuuucuaucauuaagac

SEQ ID NO: 520725 - RNA, 20 nt, Artificial Sequence
  Synthetic
auguuuucuaucauuaagac

SEQ ID NO: 520726 - RNA, 21 nt, Artificial Sequence
  Synthetic
uauguuuucuaucauuaagac

SEQ ID NO: 520727 - RNA, 22 nt, Artificial Sequence
  Synthetic
uuauguuuucuaucauuaagac

SEQ ID NO: 520728 - RNA, 23 nt, Artificial Sequence
  Synthetic
uuuauguuuucuaucauuaagac

SEQ ID NO: 520729 - RNA, 24 nt, Artificial Sequence
  Synthetic
uuuuauguuuucuaucauuaagac

SEQ ID NO: 520730 - RNA, 18 nt, Artificial Sequence
  Synthetic
cuuccauuuuuuuaagac

SEQ ID NO: 520731 - RNA, 19 nt, Artificial Sequence
  Synthetic
ccuuccauuuuuuuaagac

SEQ ID NO: 520732 - RNA, 20 nt, Artificial Sequence
  Synthetic
uccuuccauuuuuuuaagac

SEQ ID NO: 520733 - RNA, 21 nt, Artificial Sequence
  Synthetic
cuccuuccauuuuuuuaagac

SEQ ID NO: 520734 - RNA, 22 nt, Artificial Sequence
  Synthetic
acuccuuccauuuuuuuaagac

SEQ ID NO: 520735 - RNA, 23 nt, Artificial Sequence
  Synthetic
aacuccuuccauuuuuuuaagac

SEQ ID NO: 520736 - RNA, 24 nt, Artificial Sequence
  Synthetic
aaacuccuuccauuuuuuuaagac

SEQ ID NO: 520737 - RNA, 18 nt, Artificial Sequence
  Synthetic
gauuaggcaaaaacagac

SEQ ID NO: 520738 - RNA, 19 nt, Artificial Sequence
  Synthetic
agauuaggcaaaaacagac

SEQ ID NO: 520739 - RNA, 20 nt, Artificial Sequence
  Synthetic
aagauuaggcaaaaacagac

SEQ ID NO: 520740 - RNA, 21 nt, Artificial Sequence
  Synthetic
caagauuaggcaaaaacagac

SEQ ID NO: 520741 - RNA, 22 nt, Artificial Sequence
  Synthetic
ccaagauuaggcaaaaacagac

SEQ ID NO: 520742 - RNA, 23 nt, Artificial Sequence
  Synthetic
accaagauuaggcaaaaacagac

SEQ ID NO: 520743 - RNA, 24 nt, Artificial Sequence
  Synthetic
aaccaagauuaggcaaaaacagac

SEQ ID NO: 520744 - RNA, 18 nt, Artificial Sequence
  Synthetic
cagagaggaacaacagac

SEQ ID NO: 520745 - RNA, 19 nt, Artificial Sequence
  Synthetic
acagagaggaacaacagac

SEQ ID NO: 520746 - RNA, 20 nt, Artificial Sequence
  Synthetic
cacagagaggaacaacagac

SEQ ID NO: 520747 - RNA, 21 nt, Artificial Sequence
  Synthetic
acacagagaggaacaacagac

SEQ ID NO: 520748 - RNA, 22 nt, Artificial Sequence
  Synthetic
gacacagagaggaacaacagac

SEQ ID NO: 520749 - RNA, 23 nt, Artificial Sequence
  Synthetic
ggacacagagaggaacaacagac

SEQ ID NO: 520750 - RNA, 24 nt, Artificial Sequence
  Synthetic
uggacacagagaggaacaacagac

SEQ ID NO: 520751 - RNA, 18 nt, Artificial Sequence
  Synthetic
cuugcaguauuaacagac

SEQ ID NO: 520752 - RNA, 19 nt, Artificial Sequence
  Synthetic
ccuugcaguauuaacagac

SEQ ID NO: 520753 - RNA, 20 nt, Artificial Sequence
  Synthetic
gccuugcaguauuaacagac

SEQ ID NO: 520754 - RNA, 21 nt, Artificial Sequence
  Synthetic
ugccuugcaguauuaacagac

SEQ ID NO: 520755 - RNA, 22 nt, Artificial Sequence
  Synthetic
augccuugcaguauuaacagac

SEQ ID NO: 520756 - RNA, 23 nt, Artificial Sequence
  Synthetic
uaugccuugcaguauuaacagac

SEQ ID NO: 520757 - RNA, 24 nt, Artificial Sequence
  Synthetic
uuaugccuugcaguauuaacagac

SEQ ID NO: 520758 - RNA, 18 nt, Artificial Sequence
  Synthetic
auaaagcuacacacagac

SEQ ID NO: 520759 - RNA, 19 nt, Artificial Sequence
  Synthetic
uauaaagcuacacacagac

SEQ ID NO: 520760 - RNA, 20 nt, Artificial Sequence
  Synthetic
cuauaaagcuacacacagac

SEQ ID NO: 520761 - RNA, 21 nt, Artificial Sequence
  Synthetic
ccuauaaagcuacacacagac

SEQ ID NO: 520762 - RNA, 22 nt, Artificial Sequence
  Synthetic
accuauaaagcuacacacagac

SEQ ID NO: 520763 - RNA, 23 nt, Artificial Sequence
  Synthetic
caccuauaaagcuacacacagac

SEQ ID NO: 520764 - RNA, 24 nt, Artificial Sequence
  Synthetic
ucaccuauaaagcuacacacagac

SEQ ID NO: 520765 - RNA, 18 nt, Artificial Sequence
  Synthetic
uccaaaagcuacacagac

SEQ ID NO: 520766 - RNA, 19 nt, Artificial Sequence
  Synthetic
cuccaaaagcuacacagac

SEQ ID NO: 520767 - RNA, 20 nt, Artificial Sequence
  Synthetic
ucuccaaaagcuacacagac

SEQ ID NO: 520768 - RNA, 21 nt, Artificial Sequence
  Synthetic
cucuccaaaagcuacacagac

SEQ ID NO: 520769 - RNA, 22 nt, Artificial Sequence
  Synthetic
ccucuccaaaagcuacacagac

SEQ ID NO: 520770 - RNA, 23 nt, Artificial Sequence
  Synthetic
gccucuccaaaagcuacacagac

SEQ ID NO: 520771 - RNA, 24 nt, Artificial Sequence
  Synthetic
ggccucuccaaaagcuacacagac

SEQ ID NO: 520772 - RNA, 18 nt, Artificial Sequence
  Synthetic
aacugugguuccacagac

SEQ ID NO: 520773 - RNA, 19 nt, Artificial Sequence
  Synthetic
aaacugugguuccacagac

SEQ ID NO: 520774 - RNA, 20 nt, Artificial Sequence
  Synthetic
caaacugugguuccacagac

SEQ ID NO: 520775 - RNA, 21 nt, Artificial Sequence
  Synthetic
ucaaacugugguuccacagac

SEQ ID NO: 520776 - RNA, 22 nt, Artificial Sequence
  Synthetic
uucaaacugugguuccacagac

SEQ ID NO: 520777 - RNA, 23 nt, Artificial Sequence
  Synthetic
uuucaaacugugguuccacagac

SEQ ID NO: 520778 - RNA, 24 nt, Artificial Sequence
  Synthetic
uuuucaaacugugguuccacagac

SEQ ID NO: 520779 - RNA, 18 nt, Artificial Sequence
  Synthetic
auuccggggggcacagac

SEQ ID NO: 520780 - RNA, 19 nt, Artificial Sequence
  Synthetic
cauuccggggggcacagac

SEQ ID NO: 520781 - RNA, 20 nt, Artificial Sequence
  Synthetic
ccauuccggggggcacagac

SEQ ID NO: 520782 - RNA, 21 nt, Artificial Sequence
  Synthetic
accauuccggggggcacagac

SEQ ID NO: 520783 - RNA, 22 nt, Artificial Sequence
  Synthetic
aaccauuccggggggcacagac

SEQ ID NO: 520784 - RNA, 23 nt, Artificial Sequence
  Synthetic
aaaccauuccggggggcacagac

SEQ ID NO: 520785 - RNA, 24 nt, Artificial Sequence
  Synthetic
aaaaccauuccggggggcacagac

SEQ ID NO: 520786 - RNA, 18 nt, Artificial Sequence
  Synthetic
uauaagggaaagacagac

SEQ ID NO: 520787 - RNA, 19 nt, Artificial Sequence
  Synthetic
uuauaagggaaagacagac

SEQ ID NO: 520788 - RNA, 20 nt, Artificial Sequence
  Synthetic
auuauaagggaaagacagac

SEQ ID NO: 520789 - RNA, 21 nt, Artificial Sequence
  Synthetic
cauuauaagggaaagacagac

SEQ ID NO: 520790 - RNA, 22 nt, Artificial Sequence
  Synthetic
gcauuauaagggaaagacagac

SEQ ID NO: 520791 - RNA, 23 nt, Artificial Sequence
  Synthetic
agcauuauaagggaaagacagac

SEQ ID NO: 520792 - RNA, 24 nt, Artificial Sequence
  Synthetic
gagcauuauaagggaaagacagac

SEQ ID NO: 520793 - RNA, 18 nt, Artificial Sequence
  Synthetic
gguggaugaaggacagac

SEQ ID NO: 520794 - RNA, 19 nt, Artificial Sequence
  Synthetic
agguggaugaaggacagac

SEQ ID NO: 520795 - RNA, 20 nt, Artificial Sequence
  Synthetic
cagguggaugaaggacagac

SEQ ID NO: 520796 - RNA, 21 nt, Artificial Sequence
  Synthetic
ucagguggaugaaggacagac

SEQ ID NO: 520797 - RNA, 22 nt, Artificial Sequence
  Synthetic
aucagguggaugaaggacagac

SEQ ID NO: 520798 - RNA, 23 nt, Artificial Sequence
  Synthetic
gaucagguggaugaaggacagac

SEQ ID NO: 520799 - RNA, 24 nt, Artificial Sequence
  Synthetic
agaucagguggaugaaggacagac

SEQ ID NO: 520800 - RNA, 18 nt, Artificial Sequence
  Synthetic
ugaaucuauuugacagac

SEQ ID NO: 520801 - RNA, 19 nt, Artificial Sequence
  Synthetic
augaaucuauuugacagac

SEQ ID NO: 520802 - RNA, 20 nt, Artificial Sequence
  Synthetic
aaugaaucuauuugacagac

SEQ ID NO: 520803 - RNA, 21 nt, Artificial Sequence
  Synthetic
aaaugaaucuauuugacagac

SEQ ID NO: 520804 - RNA, 22 nt, Artificial Sequence
  Synthetic
caaaugaaucuauuugacagac

SEQ ID NO: 520805 - RNA, 23 nt, Artificial Sequence
  Synthetic
ucaaaugaaucuauuugacagac

SEQ ID NO: 520806 - RNA, 24 nt, Artificial Sequence
  Synthetic
cucaaaugaaucuauuugacagac

SEQ ID NO: 520807 - RNA, 24 nt, Artificial Sequence
  Synthetic
ucccaaagugcugggauuacagac

SEQ ID NO: 520808 - RNA, 18 nt, Artificial Sequence
  Synthetic
aguccuaggguuacagac

SEQ ID NO: 520809 - RNA, 19 nt, Artificial Sequence
  Synthetic
aaguccuaggguuacagac

SEQ ID NO: 520810 - RNA, 20 nt, Artificial Sequence
  Synthetic
aaaguccuaggguuacagac

SEQ ID NO: 520811 - RNA, 21 nt, Artificial Sequence
  Synthetic
caaaguccuaggguuacagac

SEQ ID NO: 520812 - RNA, 22 nt, Artificial Sequence
  Synthetic
ccaaaguccuaggguuacagac

SEQ ID NO: 520813 - RNA, 23 nt, Artificial Sequence
  Synthetic
cccaaaguccuaggguuacagac

SEQ ID NO: 520814 - RNA, 24 nt, Artificial Sequence
  Synthetic
ucccaaaguccuaggguuacagac

SEQ ID NO: 520815 - RNA, 18 nt, Artificial Sequence
  Synthetic
aaaaaagcaaaaccagac

SEQ ID NO: 520816 - RNA, 19 nt, Artificial Sequence
  Synthetic
aaaaaaagcaaaaccagac

SEQ ID NO: 520817 - RNA, 20 nt, Artificial Sequence
  Synthetic
aaaaaaaagcaaaaccagac

SEQ ID NO: 520818 - RNA, 21 nt, Artificial Sequence
  Synthetic
aaaaaaaaagcaaaaccagac

SEQ ID NO: 520819 - RNA, 22 nt, Artificial Sequence
  Synthetic
aaaaaaaaaagcaaaaccagac

SEQ ID NO: 520820 - RNA, 23 nt, Artificial Sequence
  Synthetic
aaaaaaaaaaagcaaaaccagac

SEQ ID NO: 520821 - RNA, 24 nt, Artificial Sequence
  Synthetic
aaaaaaaaaaaagcaaaaccagac

SEQ ID NO: 520822 - RNA, 18 nt, Artificial Sequence
  Synthetic
ucuauuuagaaaccagac

SEQ ID NO: 520823 - RNA, 19 nt, Artificial Sequence
  Synthetic
cucuauuuagaaaccagac

SEQ ID NO: 520824 - RNA, 20 nt, Artificial Sequence
  Synthetic
ccucuauuuagaaaccagac

SEQ ID NO: 520825 - RNA, 21 nt, Artificial Sequence
  Synthetic
uccucuauuuagaaaccagac

SEQ ID NO: 520826 - RNA, 22 nt, Artificial Sequence
  Synthetic
uuccucuauuuagaaaccagac

SEQ ID NO: 520827 - RNA, 23 nt, Artificial Sequence
  Synthetic
auuccucuauuuagaaaccagac

SEQ ID NO: 520828 - RNA, 24 nt, Artificial Sequence
  Synthetic
uauuccucuauuuagaaaccagac

SEQ ID NO: 520829 - RNA, 18 nt, Artificial Sequence
  Synthetic
caacucagagcaccagac

SEQ ID NO: 520830 - RNA, 19 nt, Artificial Sequence
  Synthetic
gcaacucagagcaccagac

SEQ ID NO: 520831 - RNA, 20 nt, Artificial Sequence
  Synthetic
ggcaacucagagcaccagac

SEQ ID NO: 520832 - RNA, 21 nt, Artificial Sequence
  Synthetic
uggcaacucagagcaccagac

SEQ ID NO: 520833 - RNA, 22 nt, Artificial Sequence
  Synthetic
cuggcaacucagagcaccagac

SEQ ID NO: 520834 - RNA, 23 nt, Artificial Sequence
  Synthetic
ccuggcaacucagagcaccagac

SEQ ID NO: 520835 - RNA, 24 nt, Artificial Sequence
  Synthetic
uccuggcaacucagagcaccagac

SEQ ID NO: 520836 - RNA, 18 nt, Artificial Sequence
  Synthetic
cguagcuaaaguccagac

SEQ ID NO: 520837 - RNA, 19 nt, Artificial Sequence
  Synthetic
ccguagcuaaaguccagac

SEQ ID NO: 520838 - RNA, 20 nt, Artificial Sequence
  Synthetic
accguagcuaaaguccagac

SEQ ID NO: 520839 - RNA, 21 nt, Artificial Sequence
  Synthetic
aaccguagcuaaaguccagac

SEQ ID NO: 520840 - RNA, 22 nt, Artificial Sequence
  Synthetic
aaaccguagcuaaaguccagac

SEQ ID NO: 520841 - RNA, 23 nt, Artificial Sequence
  Synthetic
aaaaccguagcuaaaguccagac

SEQ ID NO: 520842 - RNA, 24 nt, Artificial Sequence
  Synthetic
uaaaaccguagcuaaaguccagac

SEQ ID NO: 520843 - RNA, 18 nt, Artificial Sequence
  Synthetic
aaucgaaguagagcagac

SEQ ID NO: 520844 - RNA, 19 nt, Artificial Sequence
  Synthetic
caaucgaaguagagcagac

SEQ ID NO: 520845 - RNA, 20 nt, Artificial Sequence
  Synthetic
ccaaucgaaguagagcagac

SEQ ID NO: 520846 - RNA, 21 nt, Artificial Sequence
  Synthetic
uccaaucgaaguagagcagac

SEQ ID NO: 520847 - RNA, 22 nt, Artificial Sequence
  Synthetic
uuccaaucgaaguagagcagac

SEQ ID NO: 520848 - RNA, 23 nt, Artificial Sequence
  Synthetic
guuccaaucgaaguagagcagac

SEQ ID NO: 520849 - RNA, 24 nt, Artificial Sequence
  Synthetic
aguuccaaucgaaguagagcagac

SEQ ID NO: 520850 - RNA, 18 nt, Artificial Sequence
  Synthetic
cuagcucccaaggcagac

SEQ ID NO: 520851 - RNA, 19 nt, Artificial Sequence
  Synthetic
ccuagcucccaaggcagac

SEQ ID NO: 520852 - RNA, 20 nt, Artificial Sequence
  Synthetic
gccuagcucccaaggcagac

SEQ ID NO: 520853 - RNA, 21 nt, Artificial Sequence
  Synthetic
ugccuagcucccaaggcagac

SEQ ID NO: 520854 - RNA, 22 nt, Artificial Sequence
  Synthetic
augccuagcucccaaggcagac

SEQ ID NO: 520855 - RNA, 23 nt, Artificial Sequence
  Synthetic
uaugccuagcucccaaggcagac

SEQ ID NO: 520856 - RNA, 24 nt, Artificial Sequence
  Synthetic
auaugccuagcucccaaggcagac

SEQ ID NO: 520857 - RNA, 18 nt, Artificial Sequence
  Synthetic
gagugaaagaaggcagac

SEQ ID NO: 520858 - RNA, 19 nt, Artificial Sequence
  Synthetic
ugagugaaagaaggcagac

SEQ ID NO: 520859 - RNA, 20 nt, Artificial Sequence
  Synthetic
gugagugaaagaaggcagac

SEQ ID NO: 520860 - RNA, 21 nt, Artificial Sequence
  Synthetic
ugugagugaaagaaggcagac

SEQ ID NO: 520861 - RNA, 22 nt, Artificial Sequence
  Synthetic
uugugagugaaagaaggcagac

SEQ ID NO: 520862 - RNA, 23 nt, Artificial Sequence
  Synthetic
uuugugagugaaagaaggcagac

SEQ ID NO: 520863 - RNA, 24 nt, Artificial Sequence
  Synthetic
guuugugagugaaagaaggcagac

SEQ ID NO: 520864 - RNA, 18 nt, Artificial Sequence
  Synthetic
gagacuuaucaggcagac

SEQ ID NO: 520865 - RNA, 19 nt, Artificial Sequence
  Synthetic
agagacuuaucaggcagac

SEQ ID NO: 520866 - RNA, 20 nt, Artificial Sequence
  Synthetic
uagagacuuaucaggcagac

SEQ ID NO: 520867 - RNA, 21 nt, Artificial Sequence
  Synthetic
guagagacuuaucaggcagac

SEQ ID NO: 520868 - RNA, 22 nt, Artificial Sequence
  Synthetic
gguagagacuuaucaggcagac

SEQ ID NO: 520869 - RNA, 23 nt, Artificial Sequence
  Synthetic
ggguagagacuuaucaggcagac

SEQ ID NO: 520870 - RNA, 24 nt, Artificial Sequence
  Synthetic
aggguagagacuuaucaggcagac

SEQ ID NO: 520871 - RNA, 18 nt, Artificial Sequence
  Synthetic
ugcccaucaguggcagac

SEQ ID NO: 520872 - RNA, 19 nt, Artificial Sequence
  Synthetic
gugcccaucaguggcagac

SEQ ID NO: 520873 - RNA, 20 nt, Artificial Sequence
  Synthetic
ggugcccaucaguggcagac

SEQ ID NO: 520874 - RNA, 21 nt, Artificial Sequence
  Synthetic
aggugcccaucaguggcagac

SEQ ID NO: 520875 - RNA, 22 nt, Artificial Sequence
  Synthetic
uaggugcccaucaguggcagac

SEQ ID NO: 520876 - RNA, 23 nt, Artificial Sequence
  Synthetic
cuaggugcccaucaguggcagac

SEQ ID NO: 520877 - RNA, 24 nt, Artificial Sequence
  Synthetic
ccuaggugcccaucaguggcagac

SEQ ID NO: 520878 - RNA, 18 nt, Artificial Sequence
  Synthetic
ccauagagcaaugcagac

SEQ ID NO: 520879 - RNA, 19 nt, Artificial Sequence
  Synthetic
gccauagagcaaugcagac

SEQ ID NO: 520880 - RNA, 20 nt, Artificial Sequence
  Synthetic
ggccauagagcaaugcagac

SEQ ID NO: 520881 - RNA, 21 nt, Artificial Sequence
  Synthetic
uggccauagagcaaugcagac

SEQ ID NO: 520882 - RNA, 22 nt, Artificial Sequence
  Synthetic
cuggccauagagcaaugcagac

SEQ ID NO: 520883 - RNA, 23 nt, Artificial Sequence
  Synthetic
gcuggccauagagcaaugcagac

SEQ ID NO: 520884 - RNA, 24 nt, Artificial Sequence
  Synthetic
ugcuggccauagagcaaugcagac

SEQ ID NO: 520885 - RNA, 18 nt, Artificial Sequence
  Synthetic
gcggaugacagugcagac

SEQ ID NO: 520886 - RNA, 19 nt, Artificial Sequence
  Synthetic
agcggaugacagugcagac

SEQ ID NO: 520887 - RNA, 20 nt, Artificial Sequence
  Synthetic
aagcggaugacagugcagac

SEQ ID NO: 520888 - RNA, 21 nt, Artificial Sequence
  Synthetic
uaagcggaugacagugcagac

SEQ ID NO: 520889 - RNA, 22 nt, Artificial Sequence
  Synthetic
cuaagcggaugacagugcagac

SEQ ID NO: 520890 - RNA, 23 nt, Artificial Sequence
  Synthetic
ucuaagcggaugacagugcagac

SEQ ID NO: 520891 - RNA, 24 nt, Artificial Sequence
  Synthetic
uucuaagcggaugacagugcagac

SEQ ID NO: 520892 - RNA, 18 nt, Artificial Sequence
  Synthetic
aguccgagucaaucagac

SEQ ID NO: 520893 - RNA, 19 nt, Artificial Sequence
  Synthetic
uaguccgagucaaucagac

SEQ ID NO: 520894 - RNA, 20 nt, Artificial Sequence
  Synthetic
cuaguccgagucaaucagac

SEQ ID NO: 520895 - RNA, 21 nt, Artificial Sequence
  Synthetic
gcuaguccgagucaaucagac

SEQ ID NO: 520896 - RNA, 22 nt, Artificial Sequence
  Synthetic
cgcuaguccgagucaaucagac

SEQ ID NO: 520897 - RNA, 23 nt, Artificial Sequence
  Synthetic
ccgcuaguccgagucaaucagac

SEQ ID NO: 520898 - RNA, 24 nt, Artificial Sequence
  Synthetic
cccgcuaguccgagucaaucagac

SEQ ID NO: 520899 - RNA, 18 nt, Artificial Sequence
  Synthetic
ccacucuggacaucagac

SEQ ID NO: 520900 - RNA, 19 nt, Artificial Sequence
  Synthetic
accacucuggacaucagac

SEQ ID NO: 520901 - RNA, 20 nt, Artificial Sequence
  Synthetic
caccacucuggacaucagac

SEQ ID NO: 520902 - RNA, 21 nt, Artificial Sequence
  Synthetic
acaccacucuggacaucagac

SEQ ID NO: 520903 - RNA, 22 nt, Artificial Sequence
  Synthetic
aacaccacucuggacaucagac

SEQ ID NO: 520904 - RNA, 23 nt, Artificial Sequence
  Synthetic
aaacaccacucuggacaucagac

SEQ ID NO: 520905 - RNA, 24 nt, Artificial Sequence
  Synthetic
gaaacaccacucuggacaucagac

SEQ ID NO: 520906 - RNA, 18 nt, Artificial Sequence
  Synthetic
ggagaauguucaucagac

SEQ ID NO: 520907 - RNA, 19 nt, Artificial Sequence
  Synthetic
aggagaauguucaucagac

SEQ ID NO: 520908 - RNA, 20 nt, Artificial Sequence
  Synthetic
aaggagaauguucaucagac

SEQ ID NO: 520909 - RNA, 21 nt, Artificial Sequence
  Synthetic
caaggagaauguucaucagac

SEQ ID NO: 520910 - RNA, 22 nt, Artificial Sequence
  Synthetic
ucaaggagaauguucaucagac

SEQ ID NO: 520911 - RNA, 23 nt, Artificial Sequence
  Synthetic
gucaaggagaauguucaucagac

SEQ ID NO: 520912 - RNA, 24 nt, Artificial Sequence
  Synthetic
ugucaaggagaauguucaucagac

SEQ ID NO: 520913 - RNA, 18 nt, Artificial Sequence
  Synthetic
gagagguagggcucagac

SEQ ID NO: 520914 - RNA, 19 nt, Artificial Sequence
  Synthetic
agagagguagggcucagac

SEQ ID NO: 520915 - RNA, 20 nt, Artificial Sequence
  Synthetic
gagagagguagggcucagac

SEQ ID NO: 520916 - RNA, 21 nt, Artificial Sequence
  Synthetic
ggagagagguagggcucagac

SEQ ID NO: 520917 - RNA, 22 nt, Artificial Sequence
  Synthetic
uggagagagguagggcucagac

SEQ ID NO: 520918 - RNA, 23 nt, Artificial Sequence
  Synthetic
guggagagagguagggcucagac

SEQ ID NO: 520919 - RNA, 24 nt, Artificial Sequence
  Synthetic
gguggagagagguagggcucagac

SEQ ID NO: 520920 - RNA, 18 nt, Artificial Sequence
  Synthetic
uauauuacauagucagac

SEQ ID NO: 520921 - RNA, 19 nt, Artificial Sequence
  Synthetic
auauauuacauagucagac

SEQ ID NO: 520922 - RNA, 20 nt, Artificial Sequence
  Synthetic
uauauauuacauagucagac

SEQ ID NO: 520923 - RNA, 21 nt, Artificial Sequence
  Synthetic
cuauauauuacauagucagac

SEQ ID NO: 520924 - RNA, 22 nt, Artificial Sequence
  Synthetic
ucuauauauuacauagucagac

SEQ ID NO: 520925 - RNA, 23 nt, Artificial Sequence
  Synthetic
uucuauauauuacauagucagac

SEQ ID NO: 520926 - RNA, 24 nt, Artificial Sequence
  Synthetic
auucuauauauuacauagucagac

SEQ ID NO: 520927 - RNA, 18 nt, Artificial Sequence
  Synthetic
auucagguauggucagac

SEQ ID NO: 520928 - RNA, 19 nt, Artificial Sequence
  Synthetic
uauucagguauggucagac

SEQ ID NO: 520929 - RNA, 20 nt, Artificial Sequence
  Synthetic
auauucagguauggucagac

SEQ ID NO: 520930 - RNA, 21 nt, Artificial Sequence
  Synthetic
gauauucagguauggucagac

SEQ ID NO: 520931 - RNA, 22 nt, Artificial Sequence
  Synthetic
agauauucagguauggucagac

SEQ ID NO: 520932 - RNA, 23 nt, Artificial Sequence
  Synthetic
uagauauucagguauggucagac

SEQ ID NO: 520933 - RNA, 24 nt, Artificial Sequence
  Synthetic
auagauauucagguauggucagac

SEQ ID NO: 520934 - RNA, 18 nt, Artificial Sequence
  Synthetic
uaguagcaguggucagac

SEQ ID NO: 520935 - RNA, 19 nt, Artificial Sequence
  Synthetic
guaguagcaguggucagac

SEQ ID NO: 520936 - RNA, 20 nt, Artificial Sequence
  Synthetic
aguaguagcaguggucagac

SEQ ID NO: 520937 - RNA, 21 nt, Artificial Sequence
  Synthetic
uaguaguagcaguggucagac

SEQ ID NO: 520938 - RNA, 22 nt, Artificial Sequence
  Synthetic
auaguaguagcaguggucagac

SEQ ID NO: 520939 - RNA, 23 nt, Artificial Sequence
  Synthetic
cauaguaguagcaguggucagac

SEQ ID NO: 520940 - RNA, 24 nt, Artificial Sequence
  Synthetic
acauaguaguagcaguggucagac

SEQ ID NO: 520941 - RNA, 18 nt, Artificial Sequence
  Synthetic
uucaaagaacauucagac

SEQ ID NO: 520942 - RNA, 19 nt, Artificial Sequence
  Synthetic
cuucaaagaacauucagac

SEQ ID NO: 520943 - RNA, 20 nt, Artificial Sequence
  Synthetic
acuucaaagaacauucagac

SEQ ID NO: 520944 - RNA, 21 nt, Artificial Sequence
  Synthetic
aacuucaaagaacauucagac

SEQ ID NO: 520945 - RNA, 22 nt, Artificial Sequence
  Synthetic
caacuucaaagaacauucagac

SEQ ID NO: 520946 - RNA, 23 nt, Artificial Sequence
  Synthetic
ucaacuucaaagaacauucagac

SEQ ID NO: 520947 - RNA, 24 nt, Artificial Sequence
  Synthetic
uucaacuucaaagaacauucagac

SEQ ID NO: 520948 - RNA, 18 nt, Artificial Sequence
  Synthetic
aaugagucauuuucagac

SEQ ID NO: 520949 - RNA, 19 nt, Artificial Sequence
  Synthetic
aaaugagucauuuucagac

SEQ ID NO: 520950 - RNA, 20 nt, Artificial Sequence
  Synthetic
uaaaugagucauuuucagac

SEQ ID NO: 520951 - RNA, 21 nt, Artificial Sequence
  Synthetic
auaaaugagucauuuucagac

SEQ ID NO: 520952 - RNA, 22 nt, Artificial Sequence
  Synthetic
aauaaaugagucauuuucagac

SEQ ID NO: 520953 - RNA, 23 nt, Artificial Sequence
  Synthetic
aaauaaaugagucauuuucagac

SEQ ID NO: 520954 - RNA, 24 nt, Artificial Sequence
  Synthetic
uaaauaaaugagucauuuucagac

SEQ ID NO: 520955 - RNA, 18 nt, Artificial Sequence
  Synthetic
gugauauagaaaagagac

SEQ ID NO: 520956 - RNA, 19 nt, Artificial Sequence
  Synthetic
ugugauauagaaaagagac

SEQ ID NO: 520957 - RNA, 20 nt, Artificial Sequence
  Synthetic
uugugauauagaaaagagac

SEQ ID NO: 520958 - RNA, 21 nt, Artificial Sequence
  Synthetic
auugugauauagaaaagagac

SEQ ID NO: 520959 - RNA, 22 nt, Artificial Sequence
  Synthetic
uauugugauauagaaaagagac

SEQ ID NO: 520960 - RNA, 23 nt, Artificial Sequence
  Synthetic
auauugugauauagaaaagagac

SEQ ID NO: 520961 - RNA, 24 nt, Artificial Sequence
  Synthetic
uauauugugauauagaaaagagac

SEQ ID NO: 520962 - RNA, 18 nt, Artificial Sequence
  Synthetic
cuagcucugugaagagac

SEQ ID NO: 520963 - RNA, 19 nt, Artificial Sequence
  Synthetic
acuagcucugugaagagac

SEQ ID NO: 520964 - RNA, 20 nt, Artificial Sequence
  Synthetic
gacuagcucugugaagagac

SEQ ID NO: 520965 - RNA, 21 nt, Artificial Sequence
  Synthetic
agacuagcucugugaagagac

SEQ ID NO: 520966 - RNA, 22 nt, Artificial Sequence
  Synthetic
gagacuagcucugugaagagac

SEQ ID NO: 520967 - RNA, 23 nt, Artificial Sequence
  Synthetic
agagacuagcucugugaagagac

SEQ ID NO: 520968 - RNA, 24 nt, Artificial Sequence
  Synthetic
aagagacuagcucugugaagagac

SEQ ID NO: 520969 - RNA, 18 nt, Artificial Sequence
  Synthetic
aaaagagauguaagagac

SEQ ID NO: 520970 - RNA, 19 nt, Artificial Sequence
  Synthetic
gaaaagagauguaagagac

SEQ ID NO: 520971 - RNA, 20 nt, Artificial Sequence
  Synthetic
ggaaaagagauguaagagac

SEQ ID NO: 520972 - RNA, 21 nt, Artificial Sequence
  Synthetic
aggaaaagagauguaagagac

SEQ ID NO: 520973 - RNA, 22 nt, Artificial Sequence
  Synthetic
aaggaaaagagauguaagagac

SEQ ID NO: 520974 - RNA, 23 nt, Artificial Sequence
  Synthetic
caaggaaaagagauguaagagac

SEQ ID NO: 520975 - RNA, 24 nt, Artificial Sequence
  Synthetic
acaaggaaaagagauguaagagac

SEQ ID NO: 520976 - RNA, 18 nt, Artificial Sequence
  Synthetic
aaggagagugacagagac

SEQ ID NO: 520977 - RNA, 19 nt, Artificial Sequence
  Synthetic
aaaggagagugacagagac

SEQ ID NO: 520978 - RNA, 20 nt, Artificial Sequence
  Synthetic
uaaaggagagugacagagac

SEQ ID NO: 520979 - RNA, 21 nt, Artificial Sequence
  Synthetic
guaaaggagagugacagagac

SEQ ID NO: 520980 - RNA, 22 nt, Artificial Sequence
  Synthetic
aguaaaggagagugacagagac

SEQ ID NO: 520981 - RNA, 23 nt, Artificial Sequence
  Synthetic
aaguaaaggagagugacagagac

SEQ ID NO: 520982 - RNA, 24 nt, Artificial Sequence
  Synthetic
uaaguaaaggagagugacagagac

SEQ ID NO: 520983 - RNA, 18 nt, Artificial Sequence
  Synthetic
ucaaauaagagcagagac

SEQ ID NO: 520984 - RNA, 19 nt, Artificial Sequence
  Synthetic
cucaaauaagagcagagac

SEQ ID NO: 520985 - RNA, 20 nt, Artificial Sequence
  Synthetic
ccucaaauaagagcagagac

SEQ ID NO: 520986 - RNA, 21 nt, Artificial Sequence
  Synthetic
cccucaaauaagagcagagac

SEQ ID NO: 520987 - RNA, 22 nt, Artificial Sequence
  Synthetic
acccucaaauaagagcagagac

SEQ ID NO: 520988 - RNA, 23 nt, Artificial Sequence
  Synthetic
gacccucaaauaagagcagagac

SEQ ID NO: 520989 - RNA, 24 nt, Artificial Sequence
  Synthetic
ugacccucaaauaagagcagagac

SEQ ID NO: 520990 - RNA, 18 nt, Artificial Sequence
  Synthetic
guguuuguaugcagagac

SEQ ID NO: 520991 - RNA, 19 nt, Artificial Sequence
  Synthetic
aguguuuguaugcagagac

SEQ ID NO: 520992 - RNA, 20 nt, Artificial Sequence
  Synthetic
gaguguuuguaugcagagac

SEQ ID NO: 520993 - RNA, 21 nt, Artificial Sequence
  Synthetic
agaguguuuguaugcagagac

SEQ ID NO: 520994 - RNA, 22 nt, Artificial Sequence
  Synthetic
cagaguguuuguaugcagagac

SEQ ID NO: 520995 - RNA, 23 nt, Artificial Sequence
  Synthetic
acagaguguuuguaugcagagac

SEQ ID NO: 520996 - RNA, 24 nt, Artificial Sequence
  Synthetic
cacagaguguuuguaugcagagac

SEQ ID NO: 520997 - RNA, 18 nt, Artificial Sequence
  Synthetic
agaagagaaaucagagac

SEQ ID NO: 520998 - RNA, 19 nt, Artificial Sequence
  Synthetic
gagaagagaaaucagagac

SEQ ID NO: 520999 - RNA, 20 nt, Artificial Sequence
  Synthetic
agagaagagaaaucagagac

SEQ ID NO: 521000 - RNA, 21 nt, Artificial Sequence
  Synthetic
uagagaagagaaaucagagac

SEQ ID NO: 521001 - RNA, 22 nt, Artificial Sequence
  Synthetic
uuagagaagagaaaucagagac

SEQ ID NO: 521002 - RNA, 23 nt, Artificial Sequence
  Synthetic
uuuagagaagagaaaucagagac

SEQ ID NO: 521003 - RNA, 24 nt, Artificial Sequence
  Synthetic
uuuuagagaagagaaaucagagac

SEQ ID NO: 521004 - RNA, 18 nt, Artificial Sequence
  Synthetic
uaagauauguucagagac

SEQ ID NO: 521005 - RNA, 19 nt, Artificial Sequence
  Synthetic
uuaagauauguucagagac

SEQ ID NO: 521006 - RNA, 20 nt, Artificial Sequence
  Synthetic
uuuaagauauguucagagac

SEQ ID NO: 521007 - RNA, 21 nt, Artificial Sequence
  Synthetic
cuuuaagauauguucagagac

SEQ ID NO: 521008 - RNA, 22 nt, Artificial Sequence
  Synthetic
gcuuuaagauauguucagagac

SEQ ID NO: 521009 - RNA, 23 nt, Artificial Sequence
  Synthetic
ggcuuuaagauauguucagagac

SEQ ID NO: 521010 - RNA, 24 nt, Artificial Sequence
  Synthetic
uggcuuuaagauauguucagagac

SEQ ID NO: 521011 - RNA, 18 nt, Artificial Sequence
  Synthetic
uuuagaagaaagagagac

SEQ ID NO: 521012 - RNA, 19 nt, Artificial Sequence
  Synthetic
uuuuagaagaaagagagac

SEQ ID NO: 521013 - RNA, 20 nt, Artificial Sequence
  Synthetic
auuuuagaagaaagagagac

SEQ ID NO: 521014 - RNA, 21 nt, Artificial Sequence
  Synthetic
cauuuuagaagaaagagagac

SEQ ID NO: 521015 - RNA, 22 nt, Artificial Sequence
  Synthetic
acauuuuagaagaaagagagac

SEQ ID NO: 521016 - RNA, 23 nt, Artificial Sequence
  Synthetic
cacauuuuagaagaaagagagac

SEQ ID NO: 521017 - RNA, 24 nt, Artificial Sequence
  Synthetic
acacauuuuagaagaaagagagac

SEQ ID NO: 521018 - RNA, 18 nt, Artificial Sequence
  Synthetic
aagaacaggaagagagac

SEQ ID NO: 521019 - RNA, 19 nt, Artificial Sequence
  Synthetic
uaagaacaggaagagagac

SEQ ID NO: 521020 - RNA, 20 nt, Artificial Sequence
  Synthetic
auaagaacaggaagagagac

SEQ ID NO: 521021 - RNA, 21 nt, Artificial Sequence
  Synthetic
uauaagaacaggaagagagac

SEQ ID NO: 521022 - RNA, 22 nt, Artificial Sequence
  Synthetic
uuauaagaacaggaagagagac

SEQ ID NO: 521023 - RNA, 23 nt, Artificial Sequence
  Synthetic
uuuauaagaacaggaagagagac

SEQ ID NO: 521024 - RNA, 24 nt, Artificial Sequence
  Synthetic
uuuuauaagaacaggaagagagac

SEQ ID NO: 521025 - RNA, 18 nt, Artificial Sequence
  Synthetic
auaggaaauaagagagac

SEQ ID NO: 521026 - RNA, 19 nt, Artificial Sequence
  Synthetic
aauaggaaauaagagagac

SEQ ID NO: 521027 - RNA, 20 nt, Artificial Sequence
  Synthetic
aaauaggaaauaagagagac

SEQ ID NO: 521028 - RNA, 21 nt, Artificial Sequence
  Synthetic
gaaauaggaaauaagagagac

SEQ ID NO: 521029 - RNA, 22 nt, Artificial Sequence
  Synthetic
agaaauaggaaauaagagagac

SEQ ID NO: 521030 - RNA, 23 nt, Artificial Sequence
  Synthetic
aagaaauaggaaauaagagagac

SEQ ID NO: 521031 - RNA, 24 nt, Artificial Sequence
  Synthetic
aaagaaauaggaaauaagagagac

SEQ ID NO: 521032 - RNA, 18 nt, Artificial Sequence
  Synthetic
augagugcuuagagagac

SEQ ID NO: 521033 - RNA, 19 nt, Artificial Sequence
  Synthetic
aaugagugcuuagagagac

SEQ ID NO: 521034 - RNA, 20 nt, Artificial Sequence
  Synthetic
gaaugagugcuuagagagac

SEQ ID NO: 521035 - RNA, 21 nt, Artificial Sequence
  Synthetic
ggaaugagugcuuagagagac

SEQ ID NO: 521036 - RNA, 22 nt, Artificial Sequence
  Synthetic
aggaaugagugcuuagagagac

SEQ ID NO: 521037 - RNA, 23 nt, Artificial Sequence
  Synthetic
aaggaaugagugcuuagagagac

SEQ ID NO: 521038 - RNA, 24 nt, Artificial Sequence
  Synthetic
gaaggaaugagugcuuagagagac

SEQ ID NO: 521039 - RNA, 18 nt, Artificial Sequence
  Synthetic
cccaugaccacgagagac

SEQ ID NO: 521040 - RNA, 19 nt, Artificial Sequence
  Synthetic
ucccaugaccacgagagac

SEQ ID NO: 521041 - RNA, 20 nt, Artificial Sequence
  Synthetic
gucccaugaccacgagagac

SEQ ID NO: 521042 - RNA, 21 nt, Artificial Sequence
  Synthetic
agucccaugaccacgagagac

SEQ ID NO: 521043 - RNA, 22 nt, Artificial Sequence
  Synthetic
uagucccaugaccacgagagac

SEQ ID NO: 521044 - RNA, 23 nt, Artificial Sequence
  Synthetic
auagucccaugaccacgagagac

SEQ ID NO: 521045 - RNA, 24 nt, Artificial Sequence
  Synthetic
aauagucccaugaccacgagagac

SEQ ID NO: 521046 - RNA, 18 nt, Artificial Sequence
  Synthetic
gagaaagaauggagagac

SEQ ID NO: 521047 - RNA, 19 nt, Artificial Sequence
  Synthetic
ggagaaagaauggagagac

SEQ ID NO: 521048 - RNA, 20 nt, Artificial Sequence
  Synthetic
uggagaaagaauggagagac

SEQ ID NO: 521049 - RNA, 21 nt, Artificial Sequence
  Synthetic
cuggagaaagaauggagagac

SEQ ID NO: 521050 - RNA, 22 nt, Artificial Sequence
  Synthetic
ccuggagaaagaauggagagac

SEQ ID NO: 521051 - RNA, 23 nt, Artificial Sequence
  Synthetic
uccuggagaaagaauggagagac

SEQ ID NO: 521052 - RNA, 24 nt, Artificial Sequence
  Synthetic
cuccuggagaaagaauggagagac

SEQ ID NO: 521053 - RNA, 18 nt, Artificial Sequence
  Synthetic
aauaaaugaaauagagac

SEQ ID NO: 521054 - RNA, 19 nt, Artificial Sequence
  Synthetic
aaauaaaugaaauagagac

SEQ ID NO: 521055 - RNA, 20 nt, Artificial Sequence
  Synthetic
gaaauaaaugaaauagagac

SEQ ID NO: 521056 - RNA, 21 nt, Artificial Sequence
  Synthetic
agaaauaaaugaaauagagac

SEQ ID NO: 521057 - RNA, 22 nt, Artificial Sequence
  Synthetic
cagaaauaaaugaaauagagac

SEQ ID NO: 521058 - RNA, 23 nt, Artificial Sequence
  Synthetic
gcagaaauaaaugaaauagagac

SEQ ID NO: 521059 - RNA, 24 nt, Artificial Sequence
  Synthetic
agcagaaauaaaugaaauagagac

SEQ ID NO: 521060 - RNA, 18 nt, Artificial Sequence
  Synthetic
uuuguuauuauuagagac

SEQ ID NO: 521061 - RNA, 19 nt, Artificial Sequence
  Synthetic
uuuuguuauuauuagagac

SEQ ID NO: 521062 - RNA, 20 nt, Artificial Sequence
  Synthetic
auuuuguuauuauuagagac

SEQ ID NO: 521063 - RNA, 21 nt, Artificial Sequence
  Synthetic
aauuuuguuauuauuagagac

SEQ ID NO: 521064 - RNA, 22 nt, Artificial Sequence
  Synthetic
aaauuuuguuauuauuagagac

SEQ ID NO: 521065 - RNA, 23 nt, Artificial Sequence
  Synthetic
uaaauuuuguuauuauuagagac

SEQ ID NO: 521066 - RNA, 24 nt, Artificial Sequence
  Synthetic
uuaaauuuuguuauuauuagagac

SEQ ID NO: 521067 - RNA, 18 nt, Artificial Sequence
  Synthetic
guguaaguucuacgagac

SEQ ID NO: 521068 - RNA, 19 nt, Artificial Sequence
  Synthetic
aguguaaguucuacgagac

SEQ ID NO: 521069 - RNA, 20 nt, Artificial Sequence
  Synthetic
gaguguaaguucuacgagac

SEQ ID NO: 521070 - RNA, 21 nt, Artificial Sequence
  Synthetic
agaguguaaguucuacgagac

SEQ ID NO: 521071 - RNA, 22 nt, Artificial Sequence
  Synthetic
uagaguguaaguucuacgagac

SEQ ID NO: 521072 - RNA, 23 nt, Artificial Sequence
  Synthetic
cuagaguguaaguucuacgagac

SEQ ID NO: 521073 - RNA, 24 nt, Artificial Sequence
  Synthetic
acuagaguguaaguucuacgagac

SEQ ID NO: 521074 - RNA, 18 nt, Artificial Sequence
  Synthetic
ccuucacacuuccgagac

SEQ ID NO: 521075 - RNA, 19 nt, Artificial Sequence
  Synthetic
accuucacacuuccgagac

SEQ ID NO: 521076 - RNA, 20 nt, Artificial Sequence
  Synthetic
aaccuucacacuuccgagac

SEQ ID NO: 521077 - RNA, 21 nt, Artificial Sequence
  Synthetic
caaccuucacacuuccgagac

SEQ ID NO: 521078 - RNA, 22 nt, Artificial Sequence
  Synthetic
ucaaccuucacacuuccgagac

SEQ ID NO: 521079 - RNA, 23 nt, Artificial Sequence
  Synthetic
uucaaccuucacacuuccgagac

SEQ ID NO: 521080 - RNA, 24 nt, Artificial Sequence
  Synthetic
uuucaaccuucacacuuccgagac

SEQ ID NO: 521081 - RNA, 18 nt, Artificial Sequence
  Synthetic
aagagauauaugcgagac

SEQ ID NO: 521082 - RNA, 19 nt, Artificial Sequence
  Synthetic
aaagagauauaugcgagac

SEQ ID NO: 521083 - RNA, 20 nt, Artificial Sequence
  Synthetic
uaaagagauauaugcgagac

SEQ ID NO: 521084 - RNA, 21 nt, Artificial Sequence
  Synthetic
uuaaagagauauaugcgagac

SEQ ID NO: 521085 - RNA, 22 nt, Artificial Sequence
  Synthetic
auuaaagagauauaugcgagac

SEQ ID NO: 521086 - RNA, 23 nt, Artificial Sequence
  Synthetic
uauuaaagagauauaugcgagac

SEQ ID NO: 521087 - RNA, 24 nt, Artificial Sequence
  Synthetic
auauuaaagagauauaugcgagac

SEQ ID NO: 521088 - RNA, 18 nt, Artificial Sequence
  Synthetic
uguaaagaccaucgagac

SEQ ID NO: 521089 - RNA, 19 nt, Artificial Sequence
  Synthetic
auguaaagaccaucgagac

SEQ ID NO: 521090 - RNA, 20 nt, Artificial Sequence
  Synthetic
aauguaaagaccaucgagac

SEQ ID NO: 521091 - RNA, 21 nt, Artificial Sequence
  Synthetic
aaauguaaagaccaucgagac

SEQ ID NO: 521092 - RNA, 22 nt, Artificial Sequence
  Synthetic
aaaauguaaagaccaucgagac

SEQ ID NO: 521093 - RNA, 23 nt, Artificial Sequence
  Synthetic
caaaauguaaagaccaucgagac

SEQ ID NO: 521094 - RNA, 24 nt, Artificial Sequence
  Synthetic
ccaaaauguaaagaccaucgagac

SEQ ID NO: 521095 - RNA, 18 nt, Artificial Sequence
  Synthetic
augauaucccaaggagac

SEQ ID NO: 521096 - RNA, 19 nt, Artificial Sequence
  Synthetic
aaugauaucccaaggagac

SEQ ID NO: 521097 - RNA, 20 nt, Artificial Sequence
  Synthetic
uaaugauaucccaaggagac

SEQ ID NO: 521098 - RNA, 21 nt, Artificial Sequence
  Synthetic
uuaaugauaucccaaggagac

SEQ ID NO: 521099 - RNA, 22 nt, Artificial Sequence
  Synthetic
cuuaaugauaucccaaggagac

SEQ ID NO: 521100 - RNA, 23 nt, Artificial Sequence
  Synthetic
ucuuaaugauaucccaaggagac

SEQ ID NO: 521101 - RNA, 24 nt, Artificial Sequence
  Synthetic
cucuuaaugauaucccaaggagac

SEQ ID NO: 521102 - RNA, 18 nt, Artificial Sequence
  Synthetic
cccauuucaacaggagac

SEQ ID NO: 521103 - RNA, 19 nt, Artificial Sequence
  Synthetic
ccccauuucaacaggagac

SEQ ID NO: 521104 - RNA, 20 nt, Artificial Sequence
  Synthetic
accccauuucaacaggagac

SEQ ID NO: 521105 - RNA, 21 nt, Artificial Sequence
  Synthetic
aaccccauuucaacaggagac

SEQ ID NO: 521106 - RNA, 22 nt, Artificial Sequence
  Synthetic
uaaccccauuucaacaggagac

SEQ ID NO: 521107 - RNA, 23 nt, Artificial Sequence
  Synthetic
auaaccccauuucaacaggagac

SEQ ID NO: 521108 - RNA, 24 nt, Artificial Sequence
  Synthetic
cauaaccccauuucaacaggagac

SEQ ID NO: 521109 - RNA, 18 nt, Artificial Sequence
  Synthetic
gaauaauuuccaggagac

SEQ ID NO: 521110 - RNA, 19 nt, Artificial Sequence
  Synthetic
ugaauaauuuccaggagac

SEQ ID NO: 521111 - RNA, 20 nt, Artificial Sequence
  Synthetic
uugaauaauuuccaggagac

SEQ ID NO: 521112 - RNA, 21 nt, Artificial Sequence
  Synthetic
uuugaauaauuuccaggagac

SEQ ID NO: 521113 - RNA, 22 nt, Artificial Sequence
  Synthetic
auuugaauaauuuccaggagac

SEQ ID NO: 521114 - RNA, 23 nt, Artificial Sequence
  Synthetic
aauuugaauaauuuccaggagac

SEQ ID NO: 521115 - RNA, 24 nt, Artificial Sequence
  Synthetic
uaauuugaauaauuuccaggagac

SEQ ID NO: 521116 - RNA, 18 nt, Artificial Sequence
  Synthetic
uuaauauuuccaggagac

SEQ ID NO: 521117 - RNA, 19 nt, Artificial Sequence
  Synthetic
uuuaauauuuccaggagac

SEQ ID NO: 521118 - RNA, 20 nt, Artificial Sequence
  Synthetic
guuuaauauuuccaggagac

SEQ ID NO: 521119 - RNA, 21 nt, Artificial Sequence
  Synthetic
uguuuaauauuuccaggagac

SEQ ID NO: 521120 - RNA, 22 nt, Artificial Sequence
  Synthetic
auguuuaauauuuccaggagac

SEQ ID NO: 521121 - RNA, 23 nt, Artificial Sequence
  Synthetic
cauguuuaauauuuccaggagac

SEQ ID NO: 521122 - RNA, 24 nt, Artificial Sequence
  Synthetic
ucauguuuaauauuuccaggagac

SEQ ID NO: 521123 - RNA, 18 nt, Artificial Sequence
  Synthetic
uacugaggagcaggagac

SEQ ID NO: 521124 - RNA, 19 nt, Artificial Sequence
  Synthetic
auacugaggagcaggagac

SEQ ID NO: 521125 - RNA, 20 nt, Artificial Sequence
  Synthetic
aauacugaggagcaggagac

SEQ ID NO: 521126 - RNA, 21 nt, Artificial Sequence
  Synthetic
aaauacugaggagcaggagac

SEQ ID NO: 521127 - RNA, 22 nt, Artificial Sequence
  Synthetic
aaaauacugaggagcaggagac

SEQ ID NO: 521128 - RNA, 23 nt, Artificial Sequence
  Synthetic
aaaaauacugaggagcaggagac

SEQ ID NO: 521129 - RNA, 24 nt, Artificial Sequence
  Synthetic
gaaaaauacugaggagcaggagac

SEQ ID NO: 521130 - RNA, 18 nt, Artificial Sequence
  Synthetic
uuaguaaaaaugggagac

SEQ ID NO: 521131 - RNA, 19 nt, Artificial Sequence
  Synthetic
uuuaguaaaaaugggagac

SEQ ID NO: 521132 - RNA, 20 nt, Artificial Sequence
  Synthetic
cuuuaguaaaaaugggagac

SEQ ID NO: 521133 - RNA, 21 nt, Artificial Sequence
  Synthetic
ucuuuaguaaaaaugggagac

SEQ ID NO: 521134 - RNA, 22 nt, Artificial Sequence
  Synthetic
aucuuuaguaaaaaugggagac

SEQ ID NO: 521135 - RNA, 23 nt, Artificial Sequence
  Synthetic
caucuuuaguaaaaaugggagac

SEQ ID NO: 521136 - RNA, 24 nt, Artificial Sequence
  Synthetic
ccaucuuuaguaaaaaugggagac

SEQ ID NO: 521137 - RNA, 18 nt, Artificial Sequence
  Synthetic
gagccuuccuugggagac

SEQ ID NO: 521138 - RNA, 19 nt, Artificial Sequence
  Synthetic
agagccuuccuugggagac

SEQ ID NO: 521139 - RNA, 20 nt, Artificial Sequence
  Synthetic
gagagccuuccuugggagac

SEQ ID NO: 521140 - RNA, 21 nt, Artificial Sequence
  Synthetic
agagagccuuccuugggagac

SEQ ID NO: 521141 - RNA, 22 nt, Artificial Sequence
  Synthetic
cagagagccuuccuugggagac

SEQ ID NO: 521142 - RNA, 23 nt, Artificial Sequence
  Synthetic
gcagagagccuuccuugggagac

SEQ ID NO: 521143 - RNA, 24 nt, Artificial Sequence
  Synthetic
ggcagagagccuuccuugggagac

SEQ ID NO: 521144 - RNA, 18 nt, Artificial Sequence
  Synthetic
aacaagcaagcuggagac

SEQ ID NO: 521145 - RNA, 19 nt, Artificial Sequence
  Synthetic
gaacaagcaagcuggagac

SEQ ID NO: 521146 - RNA, 20 nt, Artificial Sequence
  Synthetic
ugaacaagcaagcuggagac

SEQ ID NO: 521147 - RNA, 21 nt, Artificial Sequence
  Synthetic
gugaacaagcaagcuggagac

SEQ ID NO: 521148 - RNA, 22 nt, Artificial Sequence
  Synthetic
ggugaacaagcaagcuggagac

SEQ ID NO: 521149 - RNA, 23 nt, Artificial Sequence
  Synthetic
gggugaacaagcaagcuggagac

SEQ ID NO: 521150 - RNA, 24 nt, Artificial Sequence
  Synthetic
agggugaacaagcaagcuggagac

SEQ ID NO: 521151 - RNA, 18 nt, Artificial Sequence
  Synthetic
ugagggagaucuggagac

SEQ ID NO: 521152 - RNA, 19 nt, Artificial Sequence
  Synthetic
cugagggagaucuggagac

SEQ ID NO: 521153 - RNA, 20 nt, Artificial Sequence
  Synthetic
gcugagggagaucuggagac

SEQ ID NO: 521154 - RNA, 21 nt, Artificial Sequence
  Synthetic
agcugagggagaucuggagac

SEQ ID NO: 521155 - RNA, 22 nt, Artificial Sequence
  Synthetic
uagcugagggagaucuggagac

SEQ ID NO: 521156 - RNA, 23 nt, Artificial Sequence
  Synthetic
uuagcugagggagaucuggagac

SEQ ID NO: 521157 - RNA, 24 nt, Artificial Sequence
  Synthetic
cuuagcugagggagaucuggagac

SEQ ID NO: 521158 - RNA, 18 nt, Artificial Sequence
  Synthetic
ucguccccaguuggagac

SEQ ID NO: 521159 - RNA, 19 nt, Artificial Sequence
  Synthetic
cucguccccaguuggagac

SEQ ID NO: 521160 - RNA, 20 nt, Artificial Sequence
  Synthetic
acucguccccaguuggagac

SEQ ID NO: 521161 - RNA, 21 nt, Artificial Sequence
  Synthetic
aacucguccccaguuggagac

SEQ ID NO: 521162 - RNA, 22 nt, Artificial Sequence
  Synthetic
caacucguccccaguuggagac

SEQ ID NO: 521163 - RNA, 23 nt, Artificial Sequence
  Synthetic
ccaacucguccccaguuggagac

SEQ ID NO: 521164 - RNA, 24 nt, Artificial Sequence
  Synthetic
gccaacucguccccaguuggagac

SEQ ID NO: 521165 - RNA, 18 nt, Artificial Sequence
  Synthetic
acaaugggcuuuggagac

SEQ ID NO: 521166 - RNA, 19 nt, Artificial Sequence
  Synthetic
uacaaugggcuuuggagac

SEQ ID NO: 521167 - RNA, 20 nt, Artificial Sequence
  Synthetic
auacaaugggcuuuggagac

SEQ ID NO: 521168 - RNA, 21 nt, Artificial Sequence
  Synthetic
gauacaaugggcuuuggagac

SEQ ID NO: 521169 - RNA, 22 nt, Artificial Sequence
  Synthetic
ugauacaaugggcuuuggagac

SEQ ID NO: 521170 - RNA, 23 nt, Artificial Sequence
  Synthetic
augauacaaugggcuuuggagac

SEQ ID NO: 521171 - RNA, 24 nt, Artificial Sequence
  Synthetic
aaugauacaaugggcuuuggagac

SEQ ID NO: 521172 - RNA, 18 nt, Artificial Sequence
  Synthetic
accacaauggaaugagac

SEQ ID NO: 521173 - RNA, 19 nt, Artificial Sequence
  Synthetic
gaccacaauggaaugagac

SEQ ID NO: 521174 - RNA, 20 nt, Artificial Sequence
  Synthetic
ugaccacaauggaaugagac

SEQ ID NO: 521175 - RNA, 21 nt, Artificial Sequence
  Synthetic
cugaccacaauggaaugagac

SEQ ID NO: 521176 - RNA, 22 nt, Artificial Sequence
  Synthetic
ucugaccacaauggaaugagac

SEQ ID NO: 521177 - RNA, 23 nt, Artificial Sequence
  Synthetic
cucugaccacaauggaaugagac

SEQ ID NO: 521178 - RNA, 24 nt, Artificial Sequence
  Synthetic
ucucugaccacaauggaaugagac

SEQ ID NO: 521179 - RNA, 18 nt, Artificial Sequence
  Synthetic
cuauuuugacuaugagac

SEQ ID NO: 521180 - RNA, 19 nt, Artificial Sequence
  Synthetic
ccuauuuugacuaugagac

SEQ ID NO: 521181 - RNA, 20 nt, Artificial Sequence
  Synthetic
accuauuuugacuaugagac

SEQ ID NO: 521182 - RNA, 21 nt, Artificial Sequence
  Synthetic
aaccuauuuugacuaugagac

SEQ ID NO: 521183 - RNA, 22 nt, Artificial Sequence
  Synthetic
uaaccuauuuugacuaugagac

SEQ ID NO: 521184 - RNA, 23 nt, Artificial Sequence
  Synthetic
uuaaccuauuuugacuaugagac

SEQ ID NO: 521185 - RNA, 24 nt, Artificial Sequence
  Synthetic
uuuaaccuauuuugacuaugagac

SEQ ID NO: 521186 - RNA, 18 nt, Artificial Sequence
  Synthetic
uaacauuugagcugagac

SEQ ID NO: 521187 - RNA, 19 nt, Artificial Sequence
  Synthetic
auaacauuugagcugagac

SEQ ID NO: 521188 - RNA, 20 nt, Artificial Sequence
  Synthetic
uauaacauuugagcugagac

SEQ ID NO: 521189 - RNA, 21 nt, Artificial Sequence
  Synthetic
guauaacauuugagcugagac

SEQ ID NO: 521190 - RNA, 22 nt, Artificial Sequence
  Synthetic
aguauaacauuugagcugagac

SEQ ID NO: 521191 - RNA, 23 nt, Artificial Sequence
  Synthetic
gaguauaacauuugagcugagac

SEQ ID NO: 521192 - RNA, 24 nt, Artificial Sequence
  Synthetic
ugaguauaacauuugagcugagac

SEQ ID NO: 521193 - RNA, 18 nt, Artificial Sequence
  Synthetic
caacaucugaagugagac

SEQ ID NO: 521194 - RNA, 19 nt, Artificial Sequence
  Synthetic
acaacaucugaagugagac

SEQ ID NO: 521195 - RNA, 20 nt, Artificial Sequence
  Synthetic
gacaacaucugaagugagac

SEQ ID NO: 521196 - RNA, 21 nt, Artificial Sequence
  Synthetic
agacaacaucugaagugagac

SEQ ID NO: 521197 - RNA, 22 nt, Artificial Sequence
  Synthetic
aagacaacaucugaagugagac

SEQ ID NO: 521198 - RNA, 23 nt, Artificial Sequence
  Synthetic
aaagacaacaucugaagugagac

SEQ ID NO: 521199 - RNA, 24 nt, Artificial Sequence
  Synthetic
aaaagacaacaucugaagugagac

SEQ ID NO: 521200 - RNA, 18 nt, Artificial Sequence
  Synthetic
gacacauuugggugagac

SEQ ID NO: 521201 - RNA, 19 nt, Artificial Sequence
  Synthetic
agacacauuugggugagac

SEQ ID NO: 521202 - RNA, 20 nt, Artificial Sequence
  Synthetic
aagacacauuugggugagac

SEQ ID NO: 521203 - RNA, 21 nt, Artificial Sequence
  Synthetic
gaagacacauuugggugagac

SEQ ID NO: 521204 - RNA, 22 nt, Artificial Sequence
  Synthetic
ugaagacacauuugggugagac

SEQ ID NO: 521205 - RNA, 23 nt, Artificial Sequence
  Synthetic
cugaagacacauuugggugagac

SEQ ID NO: 521206 - RNA, 24 nt, Artificial Sequence
  Synthetic
ucugaagacacauuugggugagac

SEQ ID NO: 521207 - RNA, 18 nt, Artificial Sequence
  Synthetic
uaaagacauacuugagac

SEQ ID NO: 521208 - RNA, 19 nt, Artificial Sequence
  Synthetic
auaaagacauacuugagac

SEQ ID NO: 521209 - RNA, 20 nt, Artificial Sequence
  Synthetic
gauaaagacauacuugagac

SEQ ID NO: 521210 - RNA, 21 nt, Artificial Sequence
  Synthetic
ugauaaagacauacuugagac

SEQ ID NO: 521211 - RNA, 22 nt, Artificial Sequence
  Synthetic
gugauaaagacauacuugagac

SEQ ID NO: 521212 - RNA, 23 nt, Artificial Sequence
  Synthetic
ugugauaaagacauacuugagac

SEQ ID NO: 521213 - RNA, 24 nt, Artificial Sequence
  Synthetic
cugugauaaagacauacuugagac

SEQ ID NO: 521214 - RNA, 18 nt, Artificial Sequence
  Synthetic
gggcagacugcuugagac

SEQ ID NO: 521215 - RNA, 19 nt, Artificial Sequence
  Synthetic
agggcagacugcuugagac

SEQ ID NO: 521216 - RNA, 20 nt, Artificial Sequence
  Synthetic
uagggcagacugcuugagac

SEQ ID NO: 521217 - RNA, 21 nt, Artificial Sequence
  Synthetic
guagggcagacugcuugagac

SEQ ID NO: 521218 - RNA, 22 nt, Artificial Sequence
  Synthetic
aguagggcagacugcuugagac

SEQ ID NO: 521219 - RNA, 23 nt, Artificial Sequence
  Synthetic
gaguagggcagacugcuugagac

SEQ ID NO: 521220 - RNA, 24 nt, Artificial Sequence
  Synthetic
cgaguagggcagacugcuugagac

SEQ ID NO: 521221 - RNA, 18 nt, Artificial Sequence
  Synthetic
cauauggaagaaauagac

SEQ ID NO: 521222 - RNA, 19 nt, Artificial Sequence
  Synthetic
ccauauggaagaaauagac

SEQ ID NO: 521223 - RNA, 20 nt, Artificial Sequence
  Synthetic
cccauauggaagaaauagac

SEQ ID NO: 521224 - RNA, 21 nt, Artificial Sequence
  Synthetic
ucccauauggaagaaauagac

SEQ ID NO: 521225 - RNA, 22 nt, Artificial Sequence
  Synthetic
uucccauauggaagaaauagac

SEQ ID NO: 521226 - RNA, 23 nt, Artificial Sequence
  Synthetic
uuucccauauggaagaaauagac

SEQ ID NO: 521227 - RNA, 24 nt, Artificial Sequence
  Synthetic
auuucccauauggaagaaauagac

SEQ ID NO: 521228 - RNA, 18 nt, Artificial Sequence
  Synthetic
uccaaggcuaggauagac

SEQ ID NO: 521229 - RNA, 19 nt, Artificial Sequence
  Synthetic
uuccaaggcuaggauagac

SEQ ID NO: 521230 - RNA, 20 nt, Artificial Sequence
  Synthetic
uuuccaaggcuaggauagac

SEQ ID NO: 521231 - RNA, 21 nt, Artificial Sequence
  Synthetic
guuuccaaggcuaggauagac

SEQ ID NO: 521232 - RNA, 22 nt, Artificial Sequence
  Synthetic
uguuuccaaggcuaggauagac

SEQ ID NO: 521233 - RNA, 23 nt, Artificial Sequence
  Synthetic
cuguuuccaaggcuaggauagac

SEQ ID NO: 521234 - RNA, 24 nt, Artificial Sequence
  Synthetic
gcuguuuccaaggcuaggauagac

SEQ ID NO: 521235 - RNA, 18 nt, Artificial Sequence
  Synthetic
uaagcaaaauggauagac

SEQ ID NO: 521236 - RNA, 19 nt, Artificial Sequence
  Synthetic
auaagcaaaauggauagac

SEQ ID NO: 521237 - RNA, 20 nt, Artificial Sequence
  Synthetic
uauaagcaaaauggauagac

SEQ ID NO: 521238 - RNA, 21 nt, Artificial Sequence
  Synthetic
guauaagcaaaauggauagac

SEQ ID NO: 521239 - RNA, 22 nt, Artificial Sequence
  Synthetic
uguauaagcaaaauggauagac

SEQ ID NO: 521240 - RNA, 23 nt, Artificial Sequence
  Synthetic
uuguauaagcaaaauggauagac

SEQ ID NO: 521241 - RNA, 24 nt, Artificial Sequence
  Synthetic
guuguauaagcaaaauggauagac

SEQ ID NO: 521242 - RNA, 18 nt, Artificial Sequence
  Synthetic
gaaguuaaauugauagac

SEQ ID NO: 521243 - RNA, 19 nt, Artificial Sequence
  Synthetic
ugaaguuaaauugauagac

SEQ ID NO: 521244 - RNA, 20 nt, Artificial Sequence
  Synthetic
uugaaguuaaauugauagac

SEQ ID NO: 521245 - RNA, 21 nt, Artificial Sequence
  Synthetic
guugaaguuaaauugauagac

SEQ ID NO: 521246 - RNA, 22 nt, Artificial Sequence
  Synthetic
uguugaaguuaaauugauagac

SEQ ID NO: 521247 - RNA, 23 nt, Artificial Sequence
  Synthetic
uuguugaaguuaaauugauagac

SEQ ID NO: 521248 - RNA, 24 nt, Artificial Sequence
  Synthetic
uuuguugaaguuaaauugauagac

SEQ ID NO: 521249 - RNA, 18 nt, Artificial Sequence
  Synthetic
cuuuuguguuugauagac

SEQ ID NO: 521250 - RNA, 19 nt, Artificial Sequence
  Synthetic
acuuuuguguuugauagac

SEQ ID NO: 521251 - RNA, 20 nt, Artificial Sequence
  Synthetic
cacuuuuguguuugauagac

SEQ ID NO: 521252 - RNA, 21 nt, Artificial Sequence
  Synthetic
ucacuuuuguguuugauagac

SEQ ID NO: 521253 - RNA, 22 nt, Artificial Sequence
  Synthetic
aucacuuuuguguuugauagac

SEQ ID NO: 521254 - RNA, 23 nt, Artificial Sequence
  Synthetic
gaucacuuuuguguuugauagac

SEQ ID NO: 521255 - RNA, 24 nt, Artificial Sequence
  Synthetic
ugaucacuuuuguguuugauagac

SEQ ID NO: 521256 - RNA, 18 nt, Artificial Sequence
  Synthetic
cuuuaaaaucauauagac

SEQ ID NO: 521257 - RNA, 19 nt, Artificial Sequence
  Synthetic
gcuuuaaaaucauauagac

SEQ ID NO: 521258 - RNA, 20 nt, Artificial Sequence
  Synthetic
ggcuuuaaaaucauauagac

SEQ ID NO: 521259 - RNA, 21 nt, Artificial Sequence
  Synthetic
gggcuuuaaaaucauauagac

SEQ ID NO: 521260 - RNA, 22 nt, Artificial Sequence
  Synthetic
cgggcuuuaaaaucauauagac

SEQ ID NO: 521261 - RNA, 23 nt, Artificial Sequence
  Synthetic
ucgggcuuuaaaaucauauagac

SEQ ID NO: 521262 - RNA, 24 nt, Artificial Sequence
  Synthetic
cucgggcuuuaaaaucauauagac

SEQ ID NO: 521263 - RNA, 18 nt, Artificial Sequence
  Synthetic
cuaaaagucuauauagac

SEQ ID NO: 521264 - RNA, 19 nt, Artificial Sequence
  Synthetic
ucuaaaagucuauauagac

SEQ ID NO: 521265 - RNA, 20 nt, Artificial Sequence
  Synthetic
aucuaaaagucuauauagac

SEQ ID NO: 521266 - RNA, 21 nt, Artificial Sequence
  Synthetic
uaucuaaaagucuauauagac

SEQ ID NO: 521267 - RNA, 22 nt, Artificial Sequence
  Synthetic
uuaucuaaaagucuauauagac

SEQ ID NO: 521268 - RNA, 23 nt, Artificial Sequence
  Synthetic
uuuaucuaaaagucuauauagac

SEQ ID NO: 521269 - RNA, 24 nt, Artificial Sequence
  Synthetic
cuuuaucuaaaagucuauauagac

SEQ ID NO: 521270 - RNA, 18 nt, Artificial Sequence
  Synthetic
uagcaaaaaucuauagac

SEQ ID NO: 521271 - RNA, 19 nt, Artificial Sequence
  Synthetic
uuagcaaaaaucuauagac

SEQ ID NO: 521272 - RNA, 20 nt, Artificial Sequence
  Synthetic
uuuagcaaaaaucuauagac

SEQ ID NO: 521273 - RNA, 21 nt, Artificial Sequence
  Synthetic
uuuuagcaaaaaucuauagac

SEQ ID NO: 521274 - RNA, 22 nt, Artificial Sequence
  Synthetic
auuuuagcaaaaaucuauagac

SEQ ID NO: 521275 - RNA, 23 nt, Artificial Sequence
  Synthetic
uauuuuagcaaaaaucuauagac

SEQ ID NO: 521276 - RNA, 24 nt, Artificial Sequence
  Synthetic
uuauuuuagcaaaaaucuauagac

SEQ ID NO: 521277 - RNA, 18 nt, Artificial Sequence
  Synthetic
aaaauaugugguauagac

SEQ ID NO: 521278 - RNA, 19 nt, Artificial Sequence
  Synthetic
gaaaauaugugguauagac

SEQ ID NO: 521279 - RNA, 20 nt, Artificial Sequence
  Synthetic
agaaaauaugugguauagac

SEQ ID NO: 521280 - RNA, 21 nt, Artificial Sequence
  Synthetic
aagaaaauaugugguauagac

SEQ ID NO: 521281 - RNA, 22 nt, Artificial Sequence
  Synthetic
gaagaaaauaugugguauagac

SEQ ID NO: 521282 - RNA, 23 nt, Artificial Sequence
  Synthetic
agaagaaaauaugugguauagac

SEQ ID NO: 521283 - RNA, 24 nt, Artificial Sequence
  Synthetic
cagaagaaaauaugugguauagac

SEQ ID NO: 521284 - RNA, 18 nt, Artificial Sequence
  Synthetic
aauuauaaaauuauagac

SEQ ID NO: 521285 - RNA, 19 nt, Artificial Sequence
  Synthetic
gaauuauaaaauuauagac

SEQ ID NO: 521286 - RNA, 20 nt, Artificial Sequence
  Synthetic
ugaauuauaaaauuauagac

SEQ ID NO: 521287 - RNA, 21 nt, Artificial Sequence
  Synthetic
augaauuauaaaauuauagac

SEQ ID NO: 521288 - RNA, 22 nt, Artificial Sequence
  Synthetic
gaugaauuauaaaauuauagac

SEQ ID NO: 521289 - RNA, 23 nt, Artificial Sequence
  Synthetic
ugaugaauuauaaaauuauagac

SEQ ID NO: 521290 - RNA, 24 nt, Artificial Sequence
  Synthetic
augaugaauuauaaaauuauagac

SEQ ID NO: 521291 - RNA, 18 nt, Artificial Sequence
  Synthetic
guauucagauuuauagac

SEQ ID NO: 521292 - RNA, 19 nt, Artificial Sequence
  Synthetic
aguauucagauuuauagac

SEQ ID NO: 521293 - RNA, 20 nt, Artificial Sequence
  Synthetic
gaguauucagauuuauagac

SEQ ID NO: 521294 - RNA, 21 nt, Artificial Sequence
  Synthetic
ugaguauucagauuuauagac

SEQ ID NO: 521295 - RNA, 22 nt, Artificial Sequence
  Synthetic
augaguauucagauuuauagac

SEQ ID NO: 521296 - RNA, 23 nt, Artificial Sequence
  Synthetic
aaugaguauucagauuuauagac

SEQ ID NO: 521297 - RNA, 24 nt, Artificial Sequence
  Synthetic
aaaugaguauucagauuuauagac

SEQ ID NO: 521298 - RNA, 18 nt, Artificial Sequence
  Synthetic
uuacacccuuuuauagac

SEQ ID NO: 521299 - RNA, 19 nt, Artificial Sequence
  Synthetic
cuuacacccuuuuauagac

SEQ ID NO: 521300 - RNA, 20 nt, Artificial Sequence
  Synthetic
acuuacacccuuuuauagac

SEQ ID NO: 521301 - RNA, 21 nt, Artificial Sequence
  Synthetic
uacuuacacccuuuuauagac

SEQ ID NO: 521302 - RNA, 22 nt, Artificial Sequence
  Synthetic
guacuuacacccuuuuauagac

SEQ ID NO: 521303 - RNA, 23 nt, Artificial Sequence
  Synthetic
uguacuuacacccuuuuauagac

SEQ ID NO: 521304 - RNA, 24 nt, Artificial Sequence
  Synthetic
cuguacuuacacccuuuuauagac

SEQ ID NO: 521305 - RNA, 18 nt, Artificial Sequence
  Synthetic
auaaugacaucacuagac

SEQ ID NO: 521306 - RNA, 19 nt, Artificial Sequence
  Synthetic
uauaaugacaucacuagac

SEQ ID NO: 521307 - RNA, 20 nt, Artificial Sequence
  Synthetic
auauaaugacaucacuagac

SEQ ID NO: 521308 - RNA, 21 nt, Artificial Sequence
  Synthetic
aauauaaugacaucacuagac

SEQ ID NO: 521309 - RNA, 22 nt, Artificial Sequence
  Synthetic
aaauauaaugacaucacuagac

SEQ ID NO: 521310 - RNA, 23 nt, Artificial Sequence
  Synthetic
aaaauauaaugacaucacuagac

SEQ ID NO: 521311 - RNA, 24 nt, Artificial Sequence
  Synthetic
uaaaauauaaugacaucacuagac

SEQ ID NO: 521312 - RNA, 18 nt, Artificial Sequence
  Synthetic
gcuuuaaaagagcuagac

SEQ ID NO: 521313 - RNA, 19 nt, Artificial Sequence
  Synthetic
ugcuuuaaaagagcuagac

SEQ ID NO: 521314 - RNA, 20 nt, Artificial Sequence
  Synthetic
augcuuuaaaagagcuagac

SEQ ID NO: 521315 - RNA, 21 nt, Artificial Sequence
  Synthetic
aaugcuuuaaaagagcuagac

SEQ ID NO: 521316 - RNA, 22 nt, Artificial Sequence
  Synthetic
uaaugcuuuaaaagagcuagac

SEQ ID NO: 521317 - RNA, 23 nt, Artificial Sequence
  Synthetic
guaaugcuuuaaaagagcuagac

SEQ ID NO: 521318 - RNA, 24 nt, Artificial Sequence
  Synthetic
gguaaugcuuuaaaagagcuagac

SEQ ID NO: 521319 - RNA, 18 nt, Artificial Sequence
  Synthetic
guugcaacggaaguagac

SEQ ID NO: 521320 - RNA, 19 nt, Artificial Sequence
  Synthetic
aguugcaacggaaguagac

SEQ ID NO: 521321 - RNA, 20 nt, Artificial Sequence
  Synthetic
caguugcaacggaaguagac

SEQ ID NO: 521322 - RNA, 21 nt, Artificial Sequence
  Synthetic
acaguugcaacggaaguagac

SEQ ID NO: 521323 - RNA, 22 nt, Artificial Sequence
  Synthetic
aacaguugcaacggaaguagac

SEQ ID NO: 521324 - RNA, 23 nt, Artificial Sequence
  Synthetic
caacaguugcaacggaaguagac

SEQ ID NO: 521325 - RNA, 24 nt, Artificial Sequence
  Synthetic
acaacaguugcaacggaaguagac

SEQ ID NO: 521326 - RNA, 18 nt, Artificial Sequence
  Synthetic
guuauagaaagaguagac

SEQ ID NO: 521327 - RNA, 19 nt, Artificial Sequence
  Synthetic
uguuauagaaagaguagac

SEQ ID NO: 521328 - RNA, 20 nt, Artificial Sequence
  Synthetic
uuguuauagaaagaguagac

SEQ ID NO: 521329 - RNA, 21 nt, Artificial Sequence
  Synthetic
auuguuauagaaagaguagac

SEQ ID NO: 521330 - RNA, 22 nt, Artificial Sequence
  Synthetic
aauuguuauagaaagaguagac

SEQ ID NO: 521331 - RNA, 23 nt, Artificial Sequence
  Synthetic
uaauuguuauagaaagaguagac

SEQ ID NO: 521332 - RNA, 24 nt, Artificial Sequence
  Synthetic
uuaauuguuauagaaagaguagac

SEQ ID NO: 521333 - RNA, 18 nt, Artificial Sequence
  Synthetic
ugaauuuuccagguagac

SEQ ID NO: 521334 - RNA, 19 nt, Artificial Sequence
  Synthetic
uugaauuuuccagguagac

SEQ ID NO: 521335 - RNA, 20 nt, Artificial Sequence
  Synthetic
guugaauuuuccagguagac

SEQ ID NO: 521336 - RNA, 21 nt, Artificial Sequence
  Synthetic
aguugaauuuuccagguagac

SEQ ID NO: 521337 - RNA, 22 nt, Artificial Sequence
  Synthetic
gaguugaauuuuccagguagac

SEQ ID NO: 521338 - RNA, 23 nt, Artificial Sequence
  Synthetic
agaguugaauuuuccagguagac

SEQ ID NO: 521339 - RNA, 24 nt, Artificial Sequence
  Synthetic
aagaguugaauuuuccagguagac

SEQ ID NO: 521340 - RNA, 18 nt, Artificial Sequence
  Synthetic
cauugauaauugguagac

SEQ ID NO: 521341 - RNA, 19 nt, Artificial Sequence
  Synthetic
ucauugauaauugguagac

SEQ ID NO: 521342 - RNA, 20 nt, Artificial Sequence
  Synthetic
aucauugauaauugguagac

SEQ ID NO: 521343 - RNA, 21 nt, Artificial Sequence
  Synthetic
caucauugauaauugguagac

SEQ ID NO: 521344 - RNA, 22 nt, Artificial Sequence
  Synthetic
acaucauugauaauugguagac

SEQ ID NO: 521345 - RNA, 23 nt, Artificial Sequence
  Synthetic
cacaucauugauaauugguagac

SEQ ID NO: 521346 - RNA, 24 nt, Artificial Sequence
  Synthetic
ccacaucauugauaauugguagac

SEQ ID NO: 521347 - RNA, 18 nt, Artificial Sequence
  Synthetic
acacaauuucaauuagac

SEQ ID NO: 521348 - RNA, 19 nt, Artificial Sequence
  Synthetic
aacacaauuucaauuagac

SEQ ID NO: 521349 - RNA, 20 nt, Artificial Sequence
  Synthetic
aaacacaauuucaauuagac

SEQ ID NO: 521350 - RNA, 21 nt, Artificial Sequence
  Synthetic
gaaacacaauuucaauuagac

SEQ ID NO: 521351 - RNA, 22 nt, Artificial Sequence
  Synthetic
ggaaacacaauuucaauuagac

SEQ ID NO: 521352 - RNA, 23 nt, Artificial Sequence
  Synthetic
aggaaacacaauuucaauuagac

SEQ ID NO: 521353 - RNA, 24 nt, Artificial Sequence
  Synthetic
aaggaaacacaauuucaauuagac

SEQ ID NO: 521354 - RNA, 18 nt, Artificial Sequence
  Synthetic
agaaccacuguauuagac

SEQ ID NO: 521355 - RNA, 19 nt, Artificial Sequence
  Synthetic
gagaaccacuguauuagac

SEQ ID NO: 521356 - RNA, 20 nt, Artificial Sequence
  Synthetic
ugagaaccacuguauuagac

SEQ ID NO: 521357 - RNA, 21 nt, Artificial Sequence
  Synthetic
cugagaaccacuguauuagac

SEQ ID NO: 521358 - RNA, 22 nt, Artificial Sequence
  Synthetic
gcugagaaccacuguauuagac

SEQ ID NO: 521359 - RNA, 23 nt, Artificial Sequence
  Synthetic
ggcugagaaccacuguauuagac

SEQ ID NO: 521360 - RNA, 24 nt, Artificial Sequence
  Synthetic
uggcugagaaccacuguauuagac

SEQ ID NO: 521361 - RNA, 18 nt, Artificial Sequence
  Synthetic
auuuuagugcacuuagac

SEQ ID NO: 521362 - RNA, 19 nt, Artificial Sequence
  Synthetic
cauuuuagugcacuuagac

SEQ ID NO: 521363 - RNA, 20 nt, Artificial Sequence
  Synthetic
acauuuuagugcacuuagac

SEQ ID NO: 521364 - RNA, 21 nt, Artificial Sequence
  Synthetic
aacauuuuagugcacuuagac

SEQ ID NO: 521365 - RNA, 22 nt, Artificial Sequence
  Synthetic
aaacauuuuagugcacuuagac

SEQ ID NO: 521366 - RNA, 23 nt, Artificial Sequence
  Synthetic
aaaacauuuuagugcacuuagac

SEQ ID NO: 521367 - RNA, 24 nt, Artificial Sequence
  Synthetic
uaaaacauuuuagugcacuuagac

SEQ ID NO: 521368 - RNA, 18 nt, Artificial Sequence
  Synthetic
acaaaguuccaguuagac

SEQ ID NO: 521369 - RNA, 19 nt, Artificial Sequence
  Synthetic
uacaaaguuccaguuagac

SEQ ID NO: 521370 - RNA, 20 nt, Artificial Sequence
  Synthetic
guacaaaguuccaguuagac

SEQ ID NO: 521371 - RNA, 21 nt, Artificial Sequence
  Synthetic
gguacaaaguuccaguuagac

SEQ ID NO: 521372 - RNA, 22 nt, Artificial Sequence
  Synthetic
ggguacaaaguuccaguuagac

SEQ ID NO: 521373 - RNA, 23 nt, Artificial Sequence
  Synthetic
uggguacaaaguuccaguuagac

SEQ ID NO: 521374 - RNA, 24 nt, Artificial Sequence
  Synthetic
auggguacaaaguuccaguuagac

SEQ ID NO: 521375 - RNA, 18 nt, Artificial Sequence
  Synthetic
uuacuuuaaauguuagac

SEQ ID NO: 521376 - RNA, 19 nt, Artificial Sequence
  Synthetic
cuuacuuuaaauguuagac

SEQ ID NO: 521377 - RNA, 20 nt, Artificial Sequence
  Synthetic
ccuuacuuuaaauguuagac

SEQ ID NO: 521378 - RNA, 21 nt, Artificial Sequence
  Synthetic
cccuuacuuuaaauguuagac

SEQ ID NO: 521379 - RNA, 22 nt, Artificial Sequence
  Synthetic
acccuuacuuuaaauguuagac

SEQ ID NO: 521380 - RNA, 23 nt, Artificial Sequence
  Synthetic
aacccuuacuuuaaauguuagac

SEQ ID NO: 521381 - RNA, 24 nt, Artificial Sequence
  Synthetic
uaacccuuacuuuaaauguuagac

SEQ ID NO: 521382 - RNA, 18 nt, Artificial Sequence
  Synthetic
uaguuuuucuauuuagac

SEQ ID NO: 521383 - RNA, 19 nt, Artificial Sequence
  Synthetic
guaguuuuucuauuuagac

SEQ ID NO: 521384 - RNA, 20 nt, Artificial Sequence
  Synthetic
aguaguuuuucuauuuagac

SEQ ID NO: 521385 - RNA, 21 nt, Artificial Sequence
  Synthetic
uaguaguuuuucuauuuagac

SEQ ID NO: 521386 - RNA, 22 nt, Artificial Sequence
  Synthetic
uuaguaguuuuucuauuuagac

SEQ ID NO: 521387 - RNA, 23 nt, Artificial Sequence
  Synthetic
guuaguaguuuuucuauuuagac

SEQ ID NO: 521388 - RNA, 24 nt, Artificial Sequence
  Synthetic
aguuaguaguuuuucuauuuagac

SEQ ID NO: 521389 - RNA, 21 nt, Artificial Sequence
  Synthetic
auugcuuuugguguuuuagac

SEQ ID NO: 521390 - RNA, 22 nt, Artificial Sequence
  Synthetic
cauugcuuuugguguuuuagac

SEQ ID NO: 521391 - RNA, 23 nt, Artificial Sequence
  Synthetic
ccauugcuuuugguguuuuagac

SEQ ID NO: 521392 - RNA, 24 nt, Artificial Sequence
  Synthetic
gccauugcuuuugguguuuuagac

SEQ ID NO: 521393 - RNA, 21 nt, Artificial Sequence
  Synthetic
cuugcuuuugguguuuuagac

SEQ ID NO: 521394 - RNA, 22 nt, Artificial Sequence
  Synthetic
ccuugcuuuugguguuuuagac

SEQ ID NO: 521395 - RNA, 23 nt, Artificial Sequence
  Synthetic
cccuugcuuuugguguuuuagac

SEQ ID NO: 521396 - RNA, 24 nt, Artificial Sequence
  Synthetic
gcccuugcuuuugguguuuuagac

SEQ ID NO: 521397 - RNA, 18 nt, Artificial Sequence
  Synthetic
gguuuugguguuuuagac

SEQ ID NO: 521398 - RNA, 19 nt, Artificial Sequence
  Synthetic
ugguuuugguguuuuagac

SEQ ID NO: 521399 - RNA, 20 nt, Artificial Sequence
  Synthetic
uugguuuugguguuuuagac

SEQ ID NO: 521400 - RNA, 21 nt, Artificial Sequence
  Synthetic
auugguuuugguguuuuagac

SEQ ID NO: 521401 - RNA, 22 nt, Artificial Sequence
  Synthetic
cauugguuuugguguuuuagac

SEQ ID NO: 521402 - RNA, 23 nt, Artificial Sequence
  Synthetic
ccauugguuuugguguuuuagac

SEQ ID NO: 521403 - RNA, 24 nt, Artificial Sequence
  Synthetic
gccauugguuuugguguuuuagac

SEQ ID NO: 521404 - RNA, 18 nt, Artificial Sequence
  Synthetic
aaaagaggaagacacgac

SEQ ID NO: 521405 - RNA, 19 nt, Artificial Sequence
  Synthetic
gaaaagaggaagacacgac

SEQ ID NO: 521406 - RNA, 20 nt, Artificial Sequence
  Synthetic
ggaaaagaggaagacacgac

SEQ ID NO: 521407 - RNA, 21 nt, Artificial Sequence
  Synthetic
aggaaaagaggaagacacgac

SEQ ID NO: 521408 - RNA, 22 nt, Artificial Sequence
  Synthetic
aaggaaaagaggaagacacgac

SEQ ID NO: 521409 - RNA, 23 nt, Artificial Sequence
  Synthetic
gaaggaaaagaggaagacacgac

SEQ ID NO: 521410 - RNA, 24 nt, Artificial Sequence
  Synthetic
agaaggaaaagaggaagacacgac

SEQ ID NO: 521411 - RNA, 18 nt, Artificial Sequence
  Synthetic
ucugccuucugccacgac

SEQ ID NO: 521412 - RNA, 19 nt, Artificial Sequence
  Synthetic
uucugccuucugccacgac

SEQ ID NO: 521413 - RNA, 20 nt, Artificial Sequence
  Synthetic
guucugccuucugccacgac

SEQ ID NO: 521414 - RNA, 21 nt, Artificial Sequence
  Synthetic
cguucugccuucugccacgac

SEQ ID NO: 521415 - RNA, 22 nt, Artificial Sequence
  Synthetic
ccguucugccuucugccacgac

SEQ ID NO: 521416 - RNA, 23 nt, Artificial Sequence
  Synthetic
cccguucugccuucugccacgac

SEQ ID NO: 521417 - RNA, 24 nt, Artificial Sequence
  Synthetic
ucccguucugccuucugccacgac

SEQ ID NO: 521418 - RNA, 18 nt, Artificial Sequence
  Synthetic
uuuauuuugaaagacgac

SEQ ID NO: 521419 - RNA, 19 nt, Artificial Sequence
  Synthetic
auuuauuuugaaagacgac

SEQ ID NO: 521420 - RNA, 20 nt, Artificial Sequence
  Synthetic
aauuuauuuugaaagacgac

SEQ ID NO: 521421 - RNA, 21 nt, Artificial Sequence
  Synthetic
gaauuuauuuugaaagacgac

SEQ ID NO: 521422 - RNA, 22 nt, Artificial Sequence
  Synthetic
ugaauuuauuuugaaagacgac

SEQ ID NO: 521423 - RNA, 23 nt, Artificial Sequence
  Synthetic
uugaauuuauuuugaaagacgac

SEQ ID NO: 521424 - RNA, 24 nt, Artificial Sequence
  Synthetic
uuugaauuuauuuugaaagacgac

SEQ ID NO: 521425 - RNA, 18 nt, Artificial Sequence
  Synthetic
gauucaaugaaaaucgac

SEQ ID NO: 521426 - RNA, 19 nt, Artificial Sequence
  Synthetic
ggauucaaugaaaaucgac

SEQ ID NO: 521427 - RNA, 20 nt, Artificial Sequence
  Synthetic
gggauucaaugaaaaucgac

SEQ ID NO: 521428 - RNA, 21 nt, Artificial Sequence
  Synthetic
ggggauucaaugaaaaucgac

SEQ ID NO: 521429 - RNA, 22 nt, Artificial Sequence
  Synthetic
uggggauucaaugaaaaucgac

SEQ ID NO: 521430 - RNA, 23 nt, Artificial Sequence
  Synthetic
auggggauucaaugaaaaucgac

SEQ ID NO: 521431 - RNA, 24 nt, Artificial Sequence
  Synthetic
aauggggauucaaugaaaaucgac

SEQ ID NO: 521432 - RNA, 18 nt, Artificial Sequence
  Synthetic
gaggacauuugaaucgac

SEQ ID NO: 521433 - RNA, 19 nt, Artificial Sequence
  Synthetic
agaggacauuugaaucgac

SEQ ID NO: 521434 - RNA, 20 nt, Artificial Sequence
  Synthetic
aagaggacauuugaaucgac

SEQ ID NO: 521435 - RNA, 21 nt, Artificial Sequence
  Synthetic
uaagaggacauuugaaucgac

SEQ ID NO: 521436 - RNA, 22 nt, Artificial Sequence
  Synthetic
uuaagaggacauuugaaucgac

SEQ ID NO: 521437 - RNA, 23 nt, Artificial Sequence
  Synthetic
uuuaagaggacauuugaaucgac

SEQ ID NO: 521438 - RNA, 24 nt, Artificial Sequence
  Synthetic
cuuuaagaggacauuugaaucgac

SEQ ID NO: 521439 - RNA, 18 nt, Artificial Sequence
  Synthetic
auaugaggauacaucgac

SEQ ID NO: 521440 - RNA, 19 nt, Artificial Sequence
  Synthetic
aauaugaggauacaucgac

SEQ ID NO: 521441 - RNA, 20 nt, Artificial Sequence
  Synthetic
gaauaugaggauacaucgac

SEQ ID NO: 521442 - RNA, 21 nt, Artificial Sequence
  Synthetic
ugaauaugaggauacaucgac

SEQ ID NO: 521443 - RNA, 22 nt, Artificial Sequence
  Synthetic
gugaauaugaggauacaucgac

SEQ ID NO: 521444 - RNA, 23 nt, Artificial Sequence
  Synthetic
agugaauaugaggauacaucgac

SEQ ID NO: 521445 - RNA, 24 nt, Artificial Sequence
  Synthetic
uagugaauaugaggauacaucgac

SEQ ID NO: 521446 - RNA, 18 nt, Artificial Sequence
  Synthetic
cgguauaagacaaaggac

SEQ ID NO: 521447 - RNA, 19 nt, Artificial Sequence
  Synthetic
ucgguauaagacaaaggac

SEQ ID NO: 521448 - RNA, 20 nt, Artificial Sequence
  Synthetic
cucgguauaagacaaaggac

SEQ ID NO: 521449 - RNA, 21 nt, Artificial Sequence
  Synthetic
acucgguauaagacaaaggac

SEQ ID NO: 521450 - RNA, 22 nt, Artificial Sequence
  Synthetic
cacucgguauaagacaaaggac

SEQ ID NO: 521451 - RNA, 23 nt, Artificial Sequence
  Synthetic
acacucgguauaagacaaaggac

SEQ ID NO: 521452 - RNA, 24 nt, Artificial Sequence
  Synthetic
aacacucgguauaagacaaaggac

SEQ ID NO: 521453 - RNA, 18 nt, Artificial Sequence
  Synthetic
cacgucccuacaaaggac

SEQ ID NO: 521454 - RNA, 19 nt, Artificial Sequence
  Synthetic
ccacgucccuacaaaggac

SEQ ID NO: 521455 - RNA, 20 nt, Artificial Sequence
  Synthetic
uccacgucccuacaaaggac

SEQ ID NO: 521456 - RNA, 21 nt, Artificial Sequence
  Synthetic
auccacgucccuacaaaggac

SEQ ID NO: 521457 - RNA, 22 nt, Artificial Sequence
  Synthetic
cauccacgucccuacaaaggac

SEQ ID NO: 521458 - RNA, 23 nt, Artificial Sequence
  Synthetic
ucauccacgucccuacaaaggac

SEQ ID NO: 521459 - RNA, 24 nt, Artificial Sequence
  Synthetic
uucauccacgucccuacaaaggac

SEQ ID NO: 521460 - RNA, 18 nt, Artificial Sequence
  Synthetic
caugugccuacaaaggac

SEQ ID NO: 521461 - RNA, 19 nt, Artificial Sequence
  Synthetic
ccaugugccuacaaaggac

SEQ ID NO: 521462 - RNA, 20 nt, Artificial Sequence
  Synthetic
cccaugugccuacaaaggac

SEQ ID NO: 521463 - RNA, 21 nt, Artificial Sequence
  Synthetic
acccaugugccuacaaaggac

SEQ ID NO: 521464 - RNA, 22 nt, Artificial Sequence
  Synthetic
cacccaugugccuacaaaggac

SEQ ID NO: 521465 - RNA, 23 nt, Artificial Sequence
  Synthetic
ucacccaugugccuacaaaggac

SEQ ID NO: 521466 - RNA, 24 nt, Artificial Sequence
  Synthetic
uucacccaugugccuacaaaggac

SEQ ID NO: 521467 - RNA, 18 nt, Artificial Sequence
  Synthetic
cauguccuuacaaaggac

SEQ ID NO: 521468 - RNA, 19 nt, Artificial Sequence
  Synthetic
ccauguccuuacaaaggac

SEQ ID NO: 521469 - RNA, 20 nt, Artificial Sequence
  Synthetic
uccauguccuuacaaaggac

SEQ ID NO: 521470 - RNA, 21 nt, Artificial Sequence
  Synthetic
auccauguccuuacaaaggac

SEQ ID NO: 521471 - RNA, 22 nt, Artificial Sequence
  Synthetic
cauccauguccuuacaaaggac

SEQ ID NO: 521472 - RNA, 23 nt, Artificial Sequence
  Synthetic
ucauccauguccuuacaaaggac

SEQ ID NO: 521473 - RNA, 24 nt, Artificial Sequence
  Synthetic
uucauccauguccuuacaaaggac

SEQ ID NO: 521474 - RNA, 18 nt, Artificial Sequence
  Synthetic
auauaugcagcaaaggac

SEQ ID NO: 521475 - RNA, 19 nt, Artificial Sequence
  Synthetic
cauauaugcagcaaaggac

SEQ ID NO: 521476 - RNA, 20 nt, Artificial Sequence
  Synthetic
acauauaugcagcaaaggac

SEQ ID NO: 521477 - RNA, 21 nt, Artificial Sequence
  Synthetic
uacauauaugcagcaaaggac

SEQ ID NO: 521478 - RNA, 22 nt, Artificial Sequence
  Synthetic
auacauauaugcagcaaaggac

SEQ ID NO: 521479 - RNA, 23 nt, Artificial Sequence
  Synthetic
uauacauauaugcagcaaaggac

SEQ ID NO: 521480 - RNA, 24 nt, Artificial Sequence
  Synthetic
auauacauauaugcagcaaaggac

SEQ ID NO: 521481 - RNA, 18 nt, Artificial Sequence
  Synthetic
aagguugagucaaaggac

SEQ ID NO: 521482 - RNA, 19 nt, Artificial Sequence
  Synthetic
gaagguugagucaaaggac

SEQ ID NO: 521483 - RNA, 20 nt, Artificial Sequence
  Synthetic
agaagguugagucaaaggac

SEQ ID NO: 521484 - RNA, 21 nt, Artificial Sequence
  Synthetic
uagaagguugagucaaaggac

SEQ ID NO: 521485 - RNA, 22 nt, Artificial Sequence
  Synthetic
guagaagguugagucaaaggac

SEQ ID NO: 521486 - RNA, 23 nt, Artificial Sequence
  Synthetic
aguagaagguugagucaaaggac

SEQ ID NO: 521487 - RNA, 24 nt, Artificial Sequence
  Synthetic
caguagaagguugagucaaaggac

SEQ ID NO: 521488 - RNA, 18 nt, Artificial Sequence
  Synthetic
caugucccuucaaaggac

SEQ ID NO: 521489 - RNA, 19 nt, Artificial Sequence
  Synthetic
ccaugucccuucaaaggac

SEQ ID NO: 521490 - RNA, 20 nt, Artificial Sequence
  Synthetic
uccaugucccuucaaaggac

SEQ ID NO: 521491 - RNA, 21 nt, Artificial Sequence
  Synthetic
auccaugucccuucaaaggac

SEQ ID NO: 521492 - RNA, 22 nt, Artificial Sequence
  Synthetic
uauccaugucccuucaaaggac

SEQ ID NO: 521493 - RNA, 23 nt, Artificial Sequence
  Synthetic
uuauccaugucccuucaaaggac

SEQ ID NO: 521494 - RNA, 24 nt, Artificial Sequence
  Synthetic
uuuauccaugucccuucaaaggac

SEQ ID NO: 521495 - RNA, 18 nt, Artificial Sequence
  Synthetic
acuauuaagcuaaaggac

SEQ ID NO: 521496 - RNA, 19 nt, Artificial Sequence
  Synthetic
aacuauuaagcuaaaggac

SEQ ID NO: 521497 - RNA, 20 nt, Artificial Sequence
  Synthetic
caacuauuaagcuaaaggac

SEQ ID NO: 521498 - RNA, 21 nt, Artificial Sequence
  Synthetic
acaacuauuaagcuaaaggac

SEQ ID NO: 521499 - RNA, 22 nt, Artificial Sequence
  Synthetic
uacaacuauuaagcuaaaggac

SEQ ID NO: 521500 - RNA, 23 nt, Artificial Sequence
  Synthetic
cuacaacuauuaagcuaaaggac

SEQ ID NO: 521501 - RNA, 24 nt, Artificial Sequence
  Synthetic
ucuacaacuauuaagcuaaaggac

SEQ ID NO: 521502 - RNA, 18 nt, Artificial Sequence
  Synthetic
caugucccugccaaggac

SEQ ID NO: 521503 - RNA, 19 nt, Artificial Sequence
  Synthetic
ccaugucccugccaaggac

SEQ ID NO: 521504 - RNA, 20 nt, Artificial Sequence
  Synthetic
uccaugucccugccaaggac

SEQ ID NO: 521505 - RNA, 21 nt, Artificial Sequence
  Synthetic
auccaugucccugccaaggac

SEQ ID NO: 521506 - RNA, 22 nt, Artificial Sequence
  Synthetic
cauccaugucccugccaaggac

SEQ ID NO: 521507 - RNA, 23 nt, Artificial Sequence
  Synthetic
ucauccaugucccugccaaggac

SEQ ID NO: 521508 - RNA, 24 nt, Artificial Sequence
  Synthetic
uucauccaugucccugccaaggac

SEQ ID NO: 521509 - RNA, 18 nt, Artificial Sequence
  Synthetic
ugucucucacucaaggac

SEQ ID NO: 521510 - RNA, 19 nt, Artificial Sequence
  Synthetic
gugucucucacucaaggac

SEQ ID NO: 521511 - RNA, 20 nt, Artificial Sequence
  Synthetic
agugucucucacucaaggac

SEQ ID NO: 521512 - RNA, 21 nt, Artificial Sequence
  Synthetic
aagugucucucacucaaggac

SEQ ID NO: 521513 - RNA, 22 nt, Artificial Sequence
  Synthetic
gaagugucucucacucaaggac

SEQ ID NO: 521514 - RNA, 23 nt, Artificial Sequence
  Synthetic
agaagugucucucacucaaggac

SEQ ID NO: 521515 - RNA, 24 nt, Artificial Sequence
  Synthetic
cagaagugucucucacucaaggac

SEQ ID NO: 521516 - RNA, 18 nt, Artificial Sequence
  Synthetic
auaaacuuucucaaggac

SEQ ID NO: 521517 - RNA, 19 nt, Artificial Sequence
  Synthetic
aauaaacuuucucaaggac

SEQ ID NO: 521518 - RNA, 20 nt, Artificial Sequence
  Synthetic
gaauaaacuuucucaaggac

SEQ ID NO: 521519 - RNA, 21 nt, Artificial Sequence
  Synthetic
ggaauaaacuuucucaaggac

SEQ ID NO: 521520 - RNA, 22 nt, Artificial Sequence
  Synthetic
aggaauaaacuuucucaaggac

SEQ ID NO: 521521 - RNA, 23 nt, Artificial Sequence
  Synthetic
caggaauaaacuuucucaaggac

SEQ ID NO: 521522 - RNA, 24 nt, Artificial Sequence
  Synthetic
ucaggaauaaacuuucucaaggac

SEQ ID NO: 521523 - RNA, 18 nt, Artificial Sequence
  Synthetic
uuguuuaaauagaaggac

SEQ ID NO: 521524 - RNA, 19 nt, Artificial Sequence
  Synthetic
auuguuuaaauagaaggac

SEQ ID NO: 521525 - RNA, 20 nt, Artificial Sequence
  Synthetic
cauuguuuaaauagaaggac

SEQ ID NO: 521526 - RNA, 21 nt, Artificial Sequence
  Synthetic
ucauuguuuaaauagaaggac

SEQ ID NO: 521527 - RNA, 22 nt, Artificial Sequence
  Synthetic
cucauuguuuaaauagaaggac

SEQ ID NO: 521528 - RNA, 23 nt, Artificial Sequence
  Synthetic
acucauuguuuaaauagaaggac

SEQ ID NO: 521529 - RNA, 24 nt, Artificial Sequence
  Synthetic
aacucauuguuuaaauagaaggac

SEQ ID NO: 521530 - RNA, 21 nt, Artificial Sequence
  Synthetic
aucaaaaagugggugaaggac

SEQ ID NO: 521531 - RNA, 22 nt, Artificial Sequence
  Synthetic
caucaaaaagugggugaaggac

SEQ ID NO: 521532 - RNA, 23 nt, Artificial Sequence
  Synthetic
ccaucaaaaagugggugaaggac

SEQ ID NO: 521533 - RNA, 24 nt, Artificial Sequence
  Synthetic
cccaucaaaaagugggugaaggac

SEQ ID NO: 521534 - RNA, 18 nt, Artificial Sequence
  Synthetic
uacaguagaucuaaggac

SEQ ID NO: 521535 - RNA, 19 nt, Artificial Sequence
  Synthetic
auacaguagaucuaaggac

SEQ ID NO: 521536 - RNA, 20 nt, Artificial Sequence
  Synthetic
aauacaguagaucuaaggac

SEQ ID NO: 521537 - RNA, 21 nt, Artificial Sequence
  Synthetic
gaauacaguagaucuaaggac

SEQ ID NO: 521538 - RNA, 22 nt, Artificial Sequence
  Synthetic
ggaauacaguagaucuaaggac

SEQ ID NO: 521539 - RNA, 23 nt, Artificial Sequence
  Synthetic
gggaauacaguagaucuaaggac

SEQ ID NO: 521540 - RNA, 24 nt, Artificial Sequence
  Synthetic
agggaauacaguagaucuaaggac

SEQ ID NO: 521541 - RNA, 18 nt, Artificial Sequence
  Synthetic
aaaaacucccaacaggac

SEQ ID NO: 521542 - RNA, 19 nt, Artificial Sequence
  Synthetic
aaaaaacucccaacaggac

SEQ ID NO: 521543 - RNA, 20 nt, Artificial Sequence
  Synthetic
gaaaaaacucccaacaggac

SEQ ID NO: 521544 - RNA, 21 nt, Artificial Sequence
  Synthetic
agaaaaaacucccaacaggac

SEQ ID NO: 521545 - RNA, 22 nt, Artificial Sequence
  Synthetic
gagaaaaaacucccaacaggac

SEQ ID NO: 521546 - RNA, 23 nt, Artificial Sequence
  Synthetic
agagaaaaaacucccaacaggac

SEQ ID NO: 521547 - RNA, 24 nt, Artificial Sequence
  Synthetic
cagagaaaaaacucccaacaggac

SEQ ID NO: 521548 - RNA, 18 nt, Artificial Sequence
  Synthetic
ggcagacaucuacaggac

SEQ ID NO: 521549 - RNA, 19 nt, Artificial Sequence
  Synthetic
aggcagacaucuacaggac

SEQ ID NO: 521550 - RNA, 20 nt, Artificial Sequence
  Synthetic
aaggcagacaucuacaggac

SEQ ID NO: 521551 - RNA, 21 nt, Artificial Sequence
  Synthetic
gaaggcagacaucuacaggac

SEQ ID NO: 521552 - RNA, 22 nt, Artificial Sequence
  Synthetic
ugaaggcagacaucuacaggac

SEQ ID NO: 521553 - RNA, 23 nt, Artificial Sequence
  Synthetic
augaaggcagacaucuacaggac

SEQ ID NO: 521554 - RNA, 24 nt, Artificial Sequence
  Synthetic
aaugaaggcagacaucuacaggac

SEQ ID NO: 521555 - RNA, 18 nt, Artificial Sequence
  Synthetic
acaguccuggaccaggac

SEQ ID NO: 521556 - RNA, 19 nt, Artificial Sequence
  Synthetic
gacaguccuggaccaggac

SEQ ID NO: 521557 - RNA, 20 nt, Artificial Sequence
  Synthetic
agacaguccuggaccaggac

SEQ ID NO: 521558 - RNA, 21 nt, Artificial Sequence
  Synthetic
cagacaguccuggaccaggac

SEQ ID NO: 521559 - RNA, 22 nt, Artificial Sequence
  Synthetic
ccagacaguccuggaccaggac

SEQ ID NO: 521560 - RNA, 23 nt, Artificial Sequence
  Synthetic
uccagacaguccuggaccaggac

SEQ ID NO: 521561 - RNA, 24 nt, Artificial Sequence
  Synthetic
cuccagacaguccuggaccaggac

SEQ ID NO: 521562 - RNA, 18 nt, Artificial Sequence
  Synthetic
gucagaugcagccaggac

SEQ ID NO: 521563 - RNA, 19 nt, Artificial Sequence
  Synthetic
agucagaugcagccaggac

SEQ ID NO: 521564 - RNA, 20 nt, Artificial Sequence
  Synthetic
aagucagaugcagccaggac

SEQ ID NO: 521565 - RNA, 21 nt, Artificial Sequence
  Synthetic
caagucagaugcagccaggac

SEQ ID NO: 521566 - RNA, 22 nt, Artificial Sequence
  Synthetic
acaagucagaugcagccaggac

SEQ ID NO: 521567 - RNA, 23 nt, Artificial Sequence
  Synthetic
aacaagucagaugcagccaggac

SEQ ID NO: 521568 - RNA, 24 nt, Artificial Sequence
  Synthetic
caacaagucagaugcagccaggac

SEQ ID NO: 521569 - RNA, 18 nt, Artificial Sequence
  Synthetic
ugaagaagcugccaggac

SEQ ID NO: 521570 - RNA, 19 nt, Artificial Sequence
  Synthetic
gugaagaagcugccaggac

SEQ ID NO: 521571 - RNA, 20 nt, Artificial Sequence
  Synthetic
agugaagaagcugccaggac

SEQ ID NO: 521572 - RNA, 21 nt, Artificial Sequence
  Synthetic
uagugaagaagcugccaggac

SEQ ID NO: 521573 - RNA, 22 nt, Artificial Sequence
  Synthetic
auagugaagaagcugccaggac

SEQ ID NO: 521574 - RNA, 23 nt, Artificial Sequence
  Synthetic
cauagugaagaagcugccaggac

SEQ ID NO: 521575 - RNA, 24 nt, Artificial Sequence
  Synthetic
acauagugaagaagcugccaggac

SEQ ID NO: 521576 - RNA, 18 nt, Artificial Sequence
  Synthetic
aagauaacaaggcaggac

SEQ ID NO: 521577 - RNA, 19 nt, Artificial Sequence
  Synthetic
caagauaacaaggcaggac

SEQ ID NO: 521578 - RNA, 20 nt, Artificial Sequence
  Synthetic
gcaagauaacaaggcaggac

SEQ ID NO: 521579 - RNA, 21 nt, Artificial Sequence
  Synthetic
ggcaagauaacaaggcaggac

SEQ ID NO: 521580 - RNA, 22 nt, Artificial Sequence
  Synthetic
uggcaagauaacaaggcaggac

SEQ ID NO: 521581 - RNA, 23 nt, Artificial Sequence
  Synthetic
auggcaagauaacaaggcaggac

SEQ ID NO: 521582 - RNA, 24 nt, Artificial Sequence
  Synthetic
aauggcaagauaacaaggcaggac

SEQ ID NO: 521583 - RNA, 18 nt, Artificial Sequence
  Synthetic
guaaauaagcaucaggac

SEQ ID NO: 521584 - RNA, 19 nt, Artificial Sequence
  Synthetic
uguaaauaagcaucaggac

SEQ ID NO: 521585 - RNA, 20 nt, Artificial Sequence
  Synthetic
uuguaaauaagcaucaggac

SEQ ID NO: 521586 - RNA, 21 nt, Artificial Sequence
  Synthetic
uuuguaaauaagcaucaggac

SEQ ID NO: 521587 - RNA, 22 nt, Artificial Sequence
  Synthetic
uuuuguaaauaagcaucaggac

SEQ ID NO: 521588 - RNA, 23 nt, Artificial Sequence
  Synthetic
auuuuguaaauaagcaucaggac

SEQ ID NO: 521589 - RNA, 24 nt, Artificial Sequence
  Synthetic
uauuuuguaaauaagcaucaggac

SEQ ID NO: 521590 - RNA, 18 nt, Artificial Sequence
  Synthetic
agggugcucguucaggac

SEQ ID NO: 521591 - RNA, 19 nt, Artificial Sequence
  Synthetic
gagggugcucguucaggac

SEQ ID NO: 521592 - RNA, 20 nt, Artificial Sequence
  Synthetic
ugagggugcucguucaggac

SEQ ID NO: 521593 - RNA, 21 nt, Artificial Sequence
  Synthetic
gugagggugcucguucaggac

SEQ ID NO: 521594 - RNA, 22 nt, Artificial Sequence
  Synthetic
ggugagggugcucguucaggac

SEQ ID NO: 521595 - RNA, 23 nt, Artificial Sequence
  Synthetic
aggugagggugcucguucaggac

SEQ ID NO: 521596 - RNA, 24 nt, Artificial Sequence
  Synthetic
gaggugagggugcucguucaggac

SEQ ID NO: 521597 - RNA, 18 nt, Artificial Sequence
  Synthetic
uaucacgugguucaggac

SEQ ID NO: 521598 - RNA, 19 nt, Artificial Sequence
  Synthetic
auaucacgugguucaggac

SEQ ID NO: 521599 - RNA, 20 nt, Artificial Sequence
  Synthetic
uauaucacgugguucaggac

SEQ ID NO: 521600 - RNA, 21 nt, Artificial Sequence
  Synthetic
uuauaucacgugguucaggac

SEQ ID NO: 521601 - RNA, 22 nt, Artificial Sequence
  Synthetic
auuauaucacgugguucaggac

SEQ ID NO: 521602 - RNA, 23 nt, Artificial Sequence
  Synthetic
uauuauaucacgugguucaggac

SEQ ID NO: 521603 - RNA, 24 nt, Artificial Sequence
  Synthetic
cuauuauaucacgugguucaggac

SEQ ID NO: 521604 - RNA, 18 nt, Artificial Sequence
  Synthetic
gagaaggaauuucaggac

SEQ ID NO: 521605 - RNA, 19 nt, Artificial Sequence
  Synthetic
ggagaaggaauuucaggac

SEQ ID NO: 521606 - RNA, 20 nt, Artificial Sequence
  Synthetic
gggagaaggaauuucaggac

SEQ ID NO: 521607 - RNA, 21 nt, Artificial Sequence
  Synthetic
ugggagaaggaauuucaggac

SEQ ID NO: 521608 - RNA, 22 nt, Artificial Sequence
  Synthetic
augggagaaggaauuucaggac

SEQ ID NO: 521609 - RNA, 23 nt, Artificial Sequence
  Synthetic
aaugggagaaggaauuucaggac

SEQ ID NO: 521610 - RNA, 24 nt, Artificial Sequence
  Synthetic
uaaugggagaaggaauuucaggac

SEQ ID NO: 521611 - RNA, 18 nt, Artificial Sequence
  Synthetic
aagcauuuaaaagaggac

SEQ ID NO: 521612 - RNA, 19 nt, Artificial Sequence
  Synthetic
gaagcauuuaaaagaggac

SEQ ID NO: 521613 - RNA, 20 nt, Artificial Sequence
  Synthetic
ugaagcauuuaaaagaggac

SEQ ID NO: 521614 - RNA, 21 nt, Artificial Sequence
  Synthetic
cugaagcauuuaaaagaggac

SEQ ID NO: 521615 - RNA, 22 nt, Artificial Sequence
  Synthetic
ucugaagcauuuaaaagaggac

SEQ ID NO: 521616 - RNA, 23 nt, Artificial Sequence
  Synthetic
uucugaagcauuuaaaagaggac

SEQ ID NO: 521617 - RNA, 24 nt, Artificial Sequence
  Synthetic
auucugaagcauuuaaaagaggac

SEQ ID NO: 521618 - RNA, 18 nt, Artificial Sequence
  Synthetic
accugaacucaagaggac

SEQ ID NO: 521619 - RNA, 19 nt, Artificial Sequence
  Synthetic
aaccugaacucaagaggac

SEQ ID NO: 521620 - RNA, 20 nt, Artificial Sequence
  Synthetic
aaaccugaacucaagaggac

SEQ ID NO: 521621 - RNA, 21 nt, Artificial Sequence
  Synthetic
aaaaccugaacucaagaggac

SEQ ID NO: 521622 - RNA, 22 nt, Artificial Sequence
  Synthetic
aaaaaccugaacucaagaggac

SEQ ID NO: 521623 - RNA, 23 nt, Artificial Sequence
  Synthetic
aaaaaaccugaacucaagaggac

SEQ ID NO: 521624 - RNA, 24 nt, Artificial Sequence
  Synthetic
caaaaaaccugaacucaagaggac

SEQ ID NO: 521625 - RNA, 18 nt, Artificial Sequence
  Synthetic
ccccaaagcuaagaggac

SEQ ID NO: 521626 - RNA, 19 nt, Artificial Sequence
  Synthetic
accccaaagcuaagaggac

SEQ ID NO: 521627 - RNA, 20 nt, Artificial Sequence
  Synthetic
caccccaaagcuaagaggac

SEQ ID NO: 521628 - RNA, 21 nt, Artificial Sequence
  Synthetic
ccaccccaaagcuaagaggac

SEQ ID NO: 521629 - RNA, 22 nt, Artificial Sequence
  Synthetic
accaccccaaagcuaagaggac

SEQ ID NO: 521630 - RNA, 23 nt, Artificial Sequence
  Synthetic
uaccaccccaaagcuaagaggac

SEQ ID NO: 521631 - RNA, 24 nt, Artificial Sequence
  Synthetic
cuaccaccccaaagcuaagaggac

SEQ ID NO: 521632 - RNA, 18 nt, Artificial Sequence
  Synthetic
uaaauuuauuucgaggac

SEQ ID NO: 521633 - RNA, 19 nt, Artificial Sequence
  Synthetic
uuaaauuuauuucgaggac

SEQ ID NO: 521634 - RNA, 20 nt, Artificial Sequence
  Synthetic
uuuaaauuuauuucgaggac

SEQ ID NO: 521635 - RNA, 21 nt, Artificial Sequence
  Synthetic
auuuaaauuuauuucgaggac

SEQ ID NO: 521636 - RNA, 22 nt, Artificial Sequence
  Synthetic
aauuuaaauuuauuucgaggac

SEQ ID NO: 521637 - RNA, 23 nt, Artificial Sequence
  Synthetic
aaauuuaaauuuauuucgaggac

SEQ ID NO: 521638 - RNA, 24 nt, Artificial Sequence
  Synthetic
gaaauuuaaauuuauuucgaggac

SEQ ID NO: 521639 - RNA, 18 nt, Artificial Sequence
  Synthetic
acuaauacaacugaggac

SEQ ID NO: 521640 - RNA, 19 nt, Artificial Sequence
  Synthetic
aacuaauacaacugaggac

SEQ ID NO: 521641 - RNA, 20 nt, Artificial Sequence
  Synthetic
uaacuaauacaacugaggac

SEQ ID NO: 521642 - RNA, 21 nt, Artificial Sequence
  Synthetic
guaacuaauacaacugaggac

SEQ ID NO: 521643 - RNA, 22 nt, Artificial Sequence
  Synthetic
uguaacuaauacaacugaggac

SEQ ID NO: 521644 - RNA, 23 nt, Artificial Sequence
  Synthetic
guguaacuaauacaacugaggac

SEQ ID NO: 521645 - RNA, 24 nt, Artificial Sequence
  Synthetic
aguguaacuaauacaacugaggac

SEQ ID NO: 521646 - RNA, 18 nt, Artificial Sequence
  Synthetic
acuugagccugugaggac

SEQ ID NO: 521647 - RNA, 19 nt, Artificial Sequence
  Synthetic
aacuugagccugugaggac

SEQ ID NO: 521648 - RNA, 20 nt, Artificial Sequence
  Synthetic
uaacuugagccugugaggac

SEQ ID NO: 521649 - RNA, 21 nt, Artificial Sequence
  Synthetic
uuaacuugagccugugaggac

SEQ ID NO: 521650 - RNA, 22 nt, Artificial Sequence
  Synthetic
auuaacuugagccugugaggac

SEQ ID NO: 521651 - RNA, 23 nt, Artificial Sequence
  Synthetic
gauuaacuugagccugugaggac

SEQ ID NO: 521652 - RNA, 24 nt, Artificial Sequence
  Synthetic
agauuaacuugagccugugaggac

SEQ ID NO: 521653 - RNA, 18 nt, Artificial Sequence
  Synthetic
uuaggcuuggcauaggac

SEQ ID NO: 521654 - RNA, 19 nt, Artificial Sequence
  Synthetic
guuaggcuuggcauaggac

SEQ ID NO: 521655 - RNA, 20 nt, Artificial Sequence
  Synthetic
gguuaggcuuggcauaggac

SEQ ID NO: 521656 - RNA, 21 nt, Artificial Sequence
  Synthetic
ugguuaggcuuggcauaggac

SEQ ID NO: 521657 - RNA, 22 nt, Artificial Sequence
  Synthetic
uugguuaggcuuggcauaggac

SEQ ID NO: 521658 - RNA, 23 nt, Artificial Sequence
  Synthetic
auugguuaggcuuggcauaggac

SEQ ID NO: 521659 - RNA, 24 nt, Artificial Sequence
  Synthetic
aauugguuaggcuuggcauaggac

SEQ ID NO: 521660 - RNA, 18 nt, Artificial Sequence
  Synthetic
ccccucccaucauaggac

SEQ ID NO: 521661 - RNA, 19 nt, Artificial Sequence
  Synthetic
gccccucccaucauaggac

SEQ ID NO: 521662 - RNA, 20 nt, Artificial Sequence
  Synthetic
agccccucccaucauaggac

SEQ ID NO: 521663 - RNA, 21 nt, Artificial Sequence
  Synthetic
cagccccucccaucauaggac

SEQ ID NO: 521664 - RNA, 22 nt, Artificial Sequence
  Synthetic
gcagccccucccaucauaggac

SEQ ID NO: 521665 - RNA, 23 nt, Artificial Sequence
  Synthetic
ggcagccccucccaucauaggac

SEQ ID NO: 521666 - RNA, 24 nt, Artificial Sequence
  Synthetic
uggcagccccucccaucauaggac

SEQ ID NO: 521667 - RNA, 18 nt, Artificial Sequence
  Synthetic
uaugggacuuaguaggac

SEQ ID NO: 521668 - RNA, 19 nt, Artificial Sequence
  Synthetic
guaugggacuuaguaggac

SEQ ID NO: 521669 - RNA, 20 nt, Artificial Sequence
  Synthetic
uguaugggacuuaguaggac

SEQ ID NO: 521670 - RNA, 21 nt, Artificial Sequence
  Synthetic
uuguaugggacuuaguaggac

SEQ ID NO: 521671 - RNA, 22 nt, Artificial Sequence
  Synthetic
auuguaugggacuuaguaggac

SEQ ID NO: 521672 - RNA, 23 nt, Artificial Sequence
  Synthetic
cauuguaugggacuuaguaggac

SEQ ID NO: 521673 - RNA, 24 nt, Artificial Sequence
  Synthetic
ccauuguaugggacuuaguaggac

SEQ ID NO: 521674 - RNA, 18 nt, Artificial Sequence
  Synthetic
guguguguaagguaggac

SEQ ID NO: 521675 - RNA, 19 nt, Artificial Sequence
  Synthetic
aguguguguaagguaggac

SEQ ID NO: 521676 - RNA, 20 nt, Artificial Sequence
  Synthetic
aaguguguguaagguaggac

SEQ ID NO: 521677 - RNA, 21 nt, Artificial Sequence
  Synthetic
aaaguguguguaagguaggac

SEQ ID NO: 521678 - RNA, 22 nt, Artificial Sequence
  Synthetic
uaaaguguguguaagguaggac

SEQ ID NO: 521679 - RNA, 23 nt, Artificial Sequence
  Synthetic
guaaaguguguguaagguaggac

SEQ ID NO: 521680 - RNA, 24 nt, Artificial Sequence
  Synthetic
aguaaaguguguguaagguaggac

SEQ ID NO: 521681 - RNA, 18 nt, Artificial Sequence
  Synthetic
ugaagaggugauuaggac

SEQ ID NO: 521682 - RNA, 19 nt, Artificial Sequence
  Synthetic
uugaagaggugauuaggac

SEQ ID NO: 521683 - RNA, 20 nt, Artificial Sequence
  Synthetic
cuugaagaggugauuaggac

SEQ ID NO: 521684 - RNA, 21 nt, Artificial Sequence
  Synthetic
ccuugaagaggugauuaggac

SEQ ID NO: 521685 - RNA, 22 nt, Artificial Sequence
  Synthetic
accuugaagaggugauuaggac

SEQ ID NO: 521686 - RNA, 23 nt, Artificial Sequence
  Synthetic
gaccuugaagaggugauuaggac

SEQ ID NO: 521687 - RNA, 24 nt, Artificial Sequence
  Synthetic
ugaccuugaagaggugauuaggac

SEQ ID NO: 521688 - RNA, 18 nt, Artificial Sequence
  Synthetic
caugucccuacaacggac

SEQ ID NO: 521689 - RNA, 19 nt, Artificial Sequence
  Synthetic
ccaugucccuacaacggac

SEQ ID NO: 521690 - RNA, 20 nt, Artificial Sequence
  Synthetic
uccaugucccuacaacggac

SEQ ID NO: 521691 - RNA, 21 nt, Artificial Sequence
  Synthetic
auccaugucccuacaacggac

SEQ ID NO: 521692 - RNA, 22 nt, Artificial Sequence
  Synthetic
cauccaugucccuacaacggac

SEQ ID NO: 521693 - RNA, 23 nt, Artificial Sequence
  Synthetic
ucauccaugucccuacaacggac

SEQ ID NO: 521694 - RNA, 24 nt, Artificial Sequence
  Synthetic
uucauccaugucccuacaacggac

SEQ ID NO: 521695 - RNA, 18 nt, Artificial Sequence
  Synthetic
cagcagcagaagacggac

SEQ ID NO: 521696 - RNA, 19 nt, Artificial Sequence
  Synthetic
acagcagcagaagacggac

SEQ ID NO: 521697 - RNA, 20 nt, Artificial Sequence
  Synthetic
uacagcagcagaagacggac

SEQ ID NO: 521698 - RNA, 21 nt, Artificial Sequence
  Synthetic
auacagcagcagaagacggac

SEQ ID NO: 521699 - RNA, 22 nt, Artificial Sequence
  Synthetic
aauacagcagcagaagacggac

SEQ ID NO: 521700 - RNA, 23 nt, Artificial Sequence
  Synthetic
uaauacagcagcagaagacggac

SEQ ID NO: 521701 - RNA, 24 nt, Artificial Sequence
  Synthetic
cuaauacagcagcagaagacggac

SEQ ID NO: 521702 - RNA, 18 nt, Artificial Sequence
  Synthetic
cagaagagagaugcggac

SEQ ID NO: 521703 - RNA, 19 nt, Artificial Sequence
  Synthetic
ucagaagagagaugcggac

SEQ ID NO: 521704 - RNA, 20 nt, Artificial Sequence
  Synthetic
aucagaagagagaugcggac

SEQ ID NO: 521705 - RNA, 21 nt, Artificial Sequence
  Synthetic
gaucagaagagagaugcggac

SEQ ID NO: 521706 - RNA, 22 nt, Artificial Sequence
  Synthetic
agaucagaagagagaugcggac

SEQ ID NO: 521707 - RNA, 23 nt, Artificial Sequence
  Synthetic
gagaucagaagagagaugcggac

SEQ ID NO: 521708 - RNA, 24 nt, Artificial Sequence
  Synthetic
agagaucagaagagagaugcggac

SEQ ID NO: 521709 - RNA, 18 nt, Artificial Sequence
  Synthetic
uugaaaugugaaagggac

SEQ ID NO: 521710 - RNA, 19 nt, Artificial Sequence
  Synthetic
uuugaaaugugaaagggac

SEQ ID NO: 521711 - RNA, 20 nt, Artificial Sequence
  Synthetic
uuuugaaaugugaaagggac

SEQ ID NO: 521712 - RNA, 21 nt, Artificial Sequence
  Synthetic
guuuugaaaugugaaagggac

SEQ ID NO: 521713 - RNA, 22 nt, Artificial Sequence
  Synthetic
gguuuugaaaugugaaagggac

SEQ ID NO: 521714 - RNA, 23 nt, Artificial Sequence
  Synthetic
ugguuuugaaaugugaaagggac

SEQ ID NO: 521715 - RNA, 24 nt, Artificial Sequence
  Synthetic
uugguuuugaaaugugaaagggac

SEQ ID NO: 521716 - RNA, 18 nt, Artificial Sequence
  Synthetic
uauuuucacugaagggac

SEQ ID NO: 521717 - RNA, 19 nt, Artificial Sequence
  Synthetic
cuauuuucacugaagggac

SEQ ID NO: 521718 - RNA, 20 nt, Artificial Sequence
  Synthetic
ccuauuuucacugaagggac

SEQ ID NO: 521719 - RNA, 21 nt, Artificial Sequence
  Synthetic
uccuauuuucacugaagggac

SEQ ID NO: 521720 - RNA, 22 nt, Artificial Sequence
  Synthetic
uuccuauuuucacugaagggac

SEQ ID NO: 521721 - RNA, 23 nt, Artificial Sequence
  Synthetic
uuuccuauuuucacugaagggac

SEQ ID NO: 521722 - RNA, 24 nt, Artificial Sequence
  Synthetic
cuuuccuauuuucacugaagggac

SEQ ID NO: 521723 - RNA, 18 nt, Artificial Sequence
  Synthetic
aacauuacacccagggac

SEQ ID NO: 521724 - RNA, 19 nt, Artificial Sequence
  Synthetic
uaacauuacacccagggac

SEQ ID NO: 521725 - RNA, 20 nt, Artificial Sequence
  Synthetic
auaacauuacacccagggac

SEQ ID NO: 521726 - RNA, 21 nt, Artificial Sequence
  Synthetic
aauaacauuacacccagggac

SEQ ID NO: 521727 - RNA, 22 nt, Artificial Sequence
  Synthetic
caauaacauuacacccagggac

SEQ ID NO: 521728 - RNA, 23 nt, Artificial Sequence
  Synthetic
ccaauaacauuacacccagggac

SEQ ID NO: 521729 - RNA, 24 nt, Artificial Sequence
  Synthetic
uccaauaacauuacacccagggac

SEQ ID NO: 521730 - RNA, 18 nt, Artificial Sequence
  Synthetic
guauuccaguucagggac

SEQ ID NO: 521731 - RNA, 19 nt, Artificial Sequence
  Synthetic
cguauuccaguucagggac

SEQ ID NO: 521732 - RNA, 20 nt, Artificial Sequence
  Synthetic
acguauuccaguucagggac

SEQ ID NO: 521733 - RNA, 21 nt, Artificial Sequence
  Synthetic
cacguauuccaguucagggac

SEQ ID NO: 521734 - RNA, 22 nt, Artificial Sequence
  Synthetic
ccacguauuccaguucagggac

SEQ ID NO: 521735 - RNA, 23 nt, Artificial Sequence
  Synthetic
gccacguauuccaguucagggac

SEQ ID NO: 521736 - RNA, 24 nt, Artificial Sequence
  Synthetic
agccacguauuccaguucagggac

SEQ ID NO: 521737 - RNA, 18 nt, Artificial Sequence
  Synthetic
uaggugaggaggagggac

SEQ ID NO: 521738 - RNA, 19 nt, Artificial Sequence
  Synthetic
uuaggugaggaggagggac

SEQ ID NO: 521739 - RNA, 20 nt, Artificial Sequence
  Synthetic
auuaggugaggaggagggac

SEQ ID NO: 521740 - RNA, 21 nt, Artificial Sequence
  Synthetic
gauuaggugaggaggagggac

SEQ ID NO: 521741 - RNA, 22 nt, Artificial Sequence
  Synthetic
ugauuaggugaggaggagggac

SEQ ID NO: 521742 - RNA, 23 nt, Artificial Sequence
  Synthetic
uugauuaggugaggaggagggac

SEQ ID NO: 521743 - RNA, 24 nt, Artificial Sequence
  Synthetic
uuugauuaggugaggaggagggac

SEQ ID NO: 521744 - RNA, 18 nt, Artificial Sequence
  Synthetic
gaaguagagcaaggggac

SEQ ID NO: 521745 - RNA, 19 nt, Artificial Sequence
  Synthetic
agaaguagagcaaggggac

SEQ ID NO: 521746 - RNA, 20 nt, Artificial Sequence
  Synthetic
aagaaguagagcaaggggac

SEQ ID NO: 521747 - RNA, 21 nt, Artificial Sequence
  Synthetic
uaagaaguagagcaaggggac

SEQ ID NO: 521748 - RNA, 22 nt, Artificial Sequence
  Synthetic
uuaagaaguagagcaaggggac

SEQ ID NO: 521749 - RNA, 23 nt, Artificial Sequence
  Synthetic
uuuaagaaguagagcaaggggac

SEQ ID NO: 521750 - RNA, 24 nt, Artificial Sequence
  Synthetic
auuuaagaaguagagcaaggggac

SEQ ID NO: 521751 - RNA, 18 nt, Artificial Sequence
  Synthetic
gucguggggugaggggac

SEQ ID NO: 521752 - RNA, 19 nt, Artificial Sequence
  Synthetic
ugucguggggugaggggac

SEQ ID NO: 521753 - RNA, 20 nt, Artificial Sequence
  Synthetic
cugucguggggugaggggac

SEQ ID NO: 521754 - RNA, 21 nt, Artificial Sequence
  Synthetic
ccugucguggggugaggggac

SEQ ID NO: 521755 - RNA, 22 nt, Artificial Sequence
  Synthetic
gccugucguggggugaggggac

SEQ ID NO: 521756 - RNA, 23 nt, Artificial Sequence
  Synthetic
ggccugucguggggugaggggac

SEQ ID NO: 521757 - RNA, 24 nt, Artificial Sequence
  Synthetic
gggccugucguggggugaggggac

SEQ ID NO: 521758 - RNA, 18 nt, Artificial Sequence
  Synthetic
uuagagucaaagggggac

SEQ ID NO: 521759 - RNA, 19 nt, Artificial Sequence
  Synthetic
auuagagucaaagggggac

SEQ ID NO: 521760 - RNA, 20 nt, Artificial Sequence
  Synthetic
gauuagagucaaagggggac

SEQ ID NO: 521761 - RNA, 21 nt, Artificial Sequence
  Synthetic
ggauuagagucaaagggggac

SEQ ID NO: 521762 - RNA, 22 nt, Artificial Sequence
  Synthetic
aggauuagagucaaagggggac

SEQ ID NO: 521763 - RNA, 23 nt, Artificial Sequence
  Synthetic
aaggauuagagucaaagggggac

SEQ ID NO: 521764 - RNA, 24 nt, Artificial Sequence
  Synthetic
gaaggauuagagucaaagggggac

SEQ ID NO: 521765 - RNA, 18 nt, Artificial Sequence
  Synthetic
cacuccagccugggggac

SEQ ID NO: 521766 - RNA, 19 nt, Artificial Sequence
  Synthetic
gcacuccagccugggggac

SEQ ID NO: 521767 - RNA, 20 nt, Artificial Sequence
  Synthetic
ugcacuccagccugggggac

SEQ ID NO: 521768 - RNA, 21 nt, Artificial Sequence
  Synthetic
uugcacuccagccugggggac

SEQ ID NO: 521769 - RNA, 22 nt, Artificial Sequence
  Synthetic
auugcacuccagccugggggac

SEQ ID NO: 521770 - RNA, 23 nt, Artificial Sequence
  Synthetic
cauugcacuccagccugggggac

SEQ ID NO: 521771 - RNA, 24 nt, Artificial Sequence
  Synthetic
ccauugcacuccagccugggggac

SEQ ID NO: 521772 - RNA, 18 nt, Artificial Sequence
  Synthetic
uguuaauuuuauggggac

SEQ ID NO: 521773 - RNA, 19 nt, Artificial Sequence
  Synthetic
uuguuaauuuuauggggac

SEQ ID NO: 521774 - RNA, 20 nt, Artificial Sequence
  Synthetic
uuuguuaauuuuauggggac

SEQ ID NO: 521775 - RNA, 21 nt, Artificial Sequence
  Synthetic
auuuguuaauuuuauggggac

SEQ ID NO: 521776 - RNA, 22 nt, Artificial Sequence
  Synthetic
cauuuguuaauuuuauggggac

SEQ ID NO: 521777 - RNA, 23 nt, Artificial Sequence
  Synthetic
ccauuuguuaauuuuauggggac

SEQ ID NO: 521778 - RNA, 24 nt, Artificial Sequence
  Synthetic
gccauuuguuaauuuuauggggac

SEQ ID NO: 521779 - RNA, 18 nt, Artificial Sequence
  Synthetic
guuguaaccacuggggac

SEQ ID NO: 521780 - RNA, 19 nt, Artificial Sequence
  Synthetic
uguuguaaccacuggggac

SEQ ID NO: 521781 - RNA, 20 nt, Artificial Sequence
  Synthetic
auguuguaaccacuggggac

SEQ ID NO: 521782 - RNA, 21 nt, Artificial Sequence
  Synthetic
cauguuguaaccacuggggac

SEQ ID NO: 521783 - RNA, 22 nt, Artificial Sequence
  Synthetic
acauguuguaaccacuggggac

SEQ ID NO: 521784 - RNA, 23 nt, Artificial Sequence
  Synthetic
gacauguuguaaccacuggggac

SEQ ID NO: 521785 - RNA, 24 nt, Artificial Sequence
  Synthetic
agacauguuguaaccacuggggac

SEQ ID NO: 521786 - RNA, 18 nt, Artificial Sequence
  Synthetic
cuacccugagcuggggac

SEQ ID NO: 521787 - RNA, 19 nt, Artificial Sequence
  Synthetic
acuacccugagcuggggac

SEQ ID NO: 521788 - RNA, 20 nt, Artificial Sequence
  Synthetic
aacuacccugagcuggggac

SEQ ID NO: 521789 - RNA, 21 nt, Artificial Sequence
  Synthetic
uaacuacccugagcuggggac

SEQ ID NO: 521790 - RNA, 22 nt, Artificial Sequence
  Synthetic
uuaacuacccugagcuggggac

SEQ ID NO: 521791 - RNA, 23 nt, Artificial Sequence
  Synthetic
auuaacuacccugagcuggggac

SEQ ID NO: 521792 - RNA, 24 nt, Artificial Sequence
  Synthetic
aauuaacuacccugagcuggggac

SEQ ID NO: 521793 - RNA, 18 nt, Artificial Sequence
  Synthetic
ucugggucgaguggggac

SEQ ID NO: 521794 - RNA, 19 nt, Artificial Sequence
  Synthetic
uucugggucgaguggggac

SEQ ID NO: 521795 - RNA, 20 nt, Artificial Sequence
  Synthetic
uuucugggucgaguggggac

SEQ ID NO: 521796 - RNA, 21 nt, Artificial Sequence
  Synthetic
cuuucugggucgaguggggac

SEQ ID NO: 521797 - RNA, 22 nt, Artificial Sequence
  Synthetic
acuuucugggucgaguggggac

SEQ ID NO: 521798 - RNA, 23 nt, Artificial Sequence
  Synthetic
gacuuucugggucgaguggggac

SEQ ID NO: 521799 - RNA, 24 nt, Artificial Sequence
  Synthetic
ggacuuucugggucgaguggggac

SEQ ID NO: 521800 - RNA, 18 nt, Artificial Sequence
  Synthetic
caagcugggaguggggac

SEQ ID NO: 521801 - RNA, 19 nt, Artificial Sequence
  Synthetic
ccaagcugggaguggggac

SEQ ID NO: 521802 - RNA, 20 nt, Artificial Sequence
  Synthetic
accaagcugggaguggggac

SEQ ID NO: 521803 - RNA, 21 nt, Artificial Sequence
  Synthetic
gaccaagcugggaguggggac

SEQ ID NO: 521804 - RNA, 22 nt, Artificial Sequence
  Synthetic
ugaccaagcugggaguggggac

SEQ ID NO: 521805 - RNA, 23 nt, Artificial Sequence
  Synthetic
uugaccaagcugggaguggggac

SEQ ID NO: 521806 - RNA, 24 nt, Artificial Sequence
  Synthetic
cuugaccaagcugggaguggggac

SEQ ID NO: 521807 - RNA, 18 nt, Artificial Sequence
  Synthetic
cuggcuuccaaaugggac

SEQ ID NO: 521808 - RNA, 19 nt, Artificial Sequence
  Synthetic
acuggcuuccaaaugggac

SEQ ID NO: 521809 - RNA, 20 nt, Artificial Sequence
  Synthetic
aacuggcuuccaaaugggac

SEQ ID NO: 521810 - RNA, 21 nt, Artificial Sequence
  Synthetic
gaacuggcuuccaaaugggac

SEQ ID NO: 521811 - RNA, 22 nt, Artificial Sequence
  Synthetic
agaacuggcuuccaaaugggac

SEQ ID NO: 521812 - RNA, 23 nt, Artificial Sequence
  Synthetic
cagaacuggcuuccaaaugggac

SEQ ID NO: 521813 - RNA, 24 nt, Artificial Sequence
  Synthetic
ucagaacuggcuuccaaaugggac

SEQ ID NO: 521814 - RNA, 18 nt, Artificial Sequence
  Synthetic
auuguuugcaaaugggac

SEQ ID NO: 521815 - RNA, 19 nt, Artificial Sequence
  Synthetic
aauuguuugcaaaugggac

SEQ ID NO: 521816 - RNA, 20 nt, Artificial Sequence
  Synthetic
aaauuguuugcaaaugggac

SEQ ID NO: 521817 - RNA, 21 nt, Artificial Sequence
  Synthetic
uaaauuguuugcaaaugggac

SEQ ID NO: 521818 - RNA, 22 nt, Artificial Sequence
  Synthetic
uuaaauuguuugcaaaugggac

SEQ ID NO: 521819 - RNA, 23 nt, Artificial Sequence
  Synthetic
cuuaaauuguuugcaaaugggac

SEQ ID NO: 521820 - RNA, 24 nt, Artificial Sequence
  Synthetic
ucuuaaauuguuugcaaaugggac

SEQ ID NO: 521821 - RNA, 18 nt, Artificial Sequence
  Synthetic
ucaagggggcaaugggac

SEQ ID NO: 521822 - RNA, 19 nt, Artificial Sequence
  Synthetic
uucaagggggcaaugggac

SEQ ID NO: 521823 - RNA, 20 nt, Artificial Sequence
  Synthetic
cuucaagggggcaaugggac

SEQ ID NO: 521824 - RNA, 21 nt, Artificial Sequence
  Synthetic
ucuucaagggggcaaugggac

SEQ ID NO: 521825 - RNA, 22 nt, Artificial Sequence
  Synthetic
gucuucaagggggcaaugggac

SEQ ID NO: 521826 - RNA, 23 nt, Artificial Sequence
  Synthetic
ggucuucaagggggcaaugggac

SEQ ID NO: 521827 - RNA, 24 nt, Artificial Sequence
  Synthetic
aggucuucaagggggcaaugggac

SEQ ID NO: 521828 - RNA, 18 nt, Artificial Sequence
  Synthetic
uuuauauauauaugggac

SEQ ID NO: 521829 - RNA, 19 nt, Artificial Sequence
  Synthetic
cuuuauauauauaugggac

SEQ ID NO: 521830 - RNA, 20 nt, Artificial Sequence
  Synthetic
acuuuauauauauaugggac

SEQ ID NO: 521831 - RNA, 21 nt, Artificial Sequence
  Synthetic
gacuuuauauauauaugggac

SEQ ID NO: 521832 - RNA, 22 nt, Artificial Sequence
  Synthetic
ugacuuuauauauauaugggac

SEQ ID NO: 521833 - RNA, 23 nt, Artificial Sequence
  Synthetic
augacuuuauauauauaugggac

SEQ ID NO: 521834 - RNA, 24 nt, Artificial Sequence
  Synthetic
gaugacuuuauauauauaugggac

SEQ ID NO: 521835 - RNA, 18 nt, Artificial Sequence
  Synthetic
aucaccugaaccugggac

SEQ ID NO: 521836 - RNA, 19 nt, Artificial Sequence
  Synthetic
aaucaccugaaccugggac

SEQ ID NO: 521837 - RNA, 20 nt, Artificial Sequence
  Synthetic
gaaucaccugaaccugggac

SEQ ID NO: 521838 - RNA, 21 nt, Artificial Sequence
  Synthetic
agaaucaccugaaccugggac

SEQ ID NO: 521839 - RNA, 22 nt, Artificial Sequence
  Synthetic
gagaaucaccugaaccugggac

SEQ ID NO: 521840 - RNA, 23 nt, Artificial Sequence
  Synthetic
ugagaaucaccugaaccugggac

SEQ ID NO: 521841 - RNA, 24 nt, Artificial Sequence
  Synthetic
augagaaucaccugaaccugggac

SEQ ID NO: 521842 - RNA, 18 nt, Artificial Sequence
  Synthetic
aaggaccuggccugggac

SEQ ID NO: 521843 - RNA, 19 nt, Artificial Sequence
  Synthetic
gaaggaccuggccugggac

SEQ ID NO: 521844 - RNA, 20 nt, Artificial Sequence
  Synthetic
ugaaggaccuggccugggac

SEQ ID NO: 521845 - RNA, 21 nt, Artificial Sequence
  Synthetic
uugaaggaccuggccugggac

SEQ ID NO: 521846 - RNA, 22 nt, Artificial Sequence
  Synthetic
guugaaggaccuggccugggac

SEQ ID NO: 521847 - RNA, 23 nt, Artificial Sequence
  Synthetic
uguugaaggaccuggccugggac

SEQ ID NO: 521848 - RNA, 24 nt, Artificial Sequence
  Synthetic
uuguugaaggaccuggccugggac

SEQ ID NO: 521849 - RNA, 18 nt, Artificial Sequence
  Synthetic
uuuaaucuugccugggac

SEQ ID NO: 521850 - RNA, 19 nt, Artificial Sequence
  Synthetic
uuuuaaucuugccugggac

SEQ ID NO: 521851 - RNA, 20 nt, Artificial Sequence
  Synthetic
uuuuuaaucuugccugggac

SEQ ID NO: 521852 - RNA, 21 nt, Artificial Sequence
  Synthetic
cuuuuuaaucuugccugggac

SEQ ID NO: 521853 - RNA, 22 nt, Artificial Sequence
  Synthetic
ucuuuuuaaucuugccugggac

SEQ ID NO: 521854 - RNA, 23 nt, Artificial Sequence
  Synthetic
gucuuuuuaaucuugccugggac

SEQ ID NO: 521855 - RNA, 24 nt, Artificial Sequence
  Synthetic
agucuuuuuaaucuugccugggac

SEQ ID NO: 521856 - RNA, 18 nt, Artificial Sequence
  Synthetic
guuagaagaaaaauggac

SEQ ID NO: 521857 - RNA, 19 nt, Artificial Sequence
  Synthetic
aguuagaagaaaaauggac

SEQ ID NO: 521858 - RNA, 20 nt, Artificial Sequence
  Synthetic
uaguuagaagaaaaauggac

SEQ ID NO: 521859 - RNA, 21 nt, Artificial Sequence
  Synthetic
guaguuagaagaaaaauggac

SEQ ID NO: 521860 - RNA, 22 nt, Artificial Sequence
  Synthetic
uguaguuagaagaaaaauggac

SEQ ID NO: 521861 - RNA, 23 nt, Artificial Sequence
  Synthetic
cuguaguuagaagaaaaauggac

SEQ ID NO: 521862 - RNA, 24 nt, Artificial Sequence
  Synthetic
acuguaguuagaagaaaaauggac

SEQ ID NO: 521863 - RNA, 18 nt, Artificial Sequence
  Synthetic
ugaacaccuaauauggac

SEQ ID NO: 521864 - RNA, 19 nt, Artificial Sequence
  Synthetic
uugaacaccuaauauggac

SEQ ID NO: 521865 - RNA, 20 nt, Artificial Sequence
  Synthetic
auugaacaccuaauauggac

SEQ ID NO: 521866 - RNA, 21 nt, Artificial Sequence
  Synthetic
uauugaacaccuaauauggac

SEQ ID NO: 521867 - RNA, 22 nt, Artificial Sequence
  Synthetic
uuauugaacaccuaauauggac

SEQ ID NO: 521868 - RNA, 23 nt, Artificial Sequence
  Synthetic
uuuauugaacaccuaauauggac

SEQ ID NO: 521869 - RNA, 24 nt, Artificial Sequence
  Synthetic
auuuauugaacaccuaauauggac

SEQ ID NO: 521870 - RNA, 18 nt, Artificial Sequence
  Synthetic
uuguaaugcccuauggac

SEQ ID NO: 521871 - RNA, 19 nt, Artificial Sequence
  Synthetic
uuuguaaugcccuauggac

SEQ ID NO: 521872 - RNA, 20 nt, Artificial Sequence
  Synthetic
auuuguaaugcccuauggac

SEQ ID NO: 521873 - RNA, 21 nt, Artificial Sequence
  Synthetic
gauuuguaaugcccuauggac

SEQ ID NO: 521874 - RNA, 22 nt, Artificial Sequence
  Synthetic
agauuuguaaugcccuauggac

SEQ ID NO: 521875 - RNA, 23 nt, Artificial Sequence
  Synthetic
gagauuuguaaugcccuauggac

SEQ ID NO: 521876 - RNA, 24 nt, Artificial Sequence
  Synthetic
agagauuuguaaugcccuauggac

SEQ ID NO: 521877 - RNA, 18 nt, Artificial Sequence
  Synthetic
guugacauauaacuggac

SEQ ID NO: 521878 - RNA, 19 nt, Artificial Sequence
  Synthetic
uguugacauauaacuggac

SEQ ID NO: 521879 - RNA, 20 nt, Artificial Sequence
  Synthetic
auguugacauauaacuggac

SEQ ID NO: 521880 - RNA, 21 nt, Artificial Sequence
  Synthetic
cauguugacauauaacuggac

SEQ ID NO: 521881 - RNA, 22 nt, Artificial Sequence
  Synthetic
gcauguugacauauaacuggac

SEQ ID NO: 521882 - RNA, 23 nt, Artificial Sequence
  Synthetic
ggcauguugacauauaacuggac

SEQ ID NO: 521883 - RNA, 24 nt, Artificial Sequence
  Synthetic
aggcauguugacauauaacuggac

SEQ ID NO: 521884 - RNA, 18 nt, Artificial Sequence
  Synthetic
aguuccagaggccuggac

SEQ ID NO: 521885 - RNA, 19 nt, Artificial Sequence
  Synthetic
aaguuccagaggccuggac

SEQ ID NO: 521886 - RNA, 20 nt, Artificial Sequence
  Synthetic
gaaguuccagaggccuggac

SEQ ID NO: 521887 - RNA, 21 nt, Artificial Sequence
  Synthetic
agaaguuccagaggccuggac

SEQ ID NO: 521888 - RNA, 22 nt, Artificial Sequence
  Synthetic
cagaaguuccagaggccuggac

SEQ ID NO: 521889 - RNA, 23 nt, Artificial Sequence
  Synthetic
ucagaaguuccagaggccuggac

SEQ ID NO: 521890 - RNA, 24 nt, Artificial Sequence
  Synthetic
gucagaaguuccagaggccuggac

SEQ ID NO: 521891 - RNA, 18 nt, Artificial Sequence
  Synthetic
cuccagacaguccuggac

SEQ ID NO: 521892 - RNA, 19 nt, Artificial Sequence
  Synthetic
ccuccagacaguccuggac

SEQ ID NO: 521893 - RNA, 20 nt, Artificial Sequence
  Synthetic
accuccagacaguccuggac

SEQ ID NO: 521894 - RNA, 21 nt, Artificial Sequence
  Synthetic
uaccuccagacaguccuggac

SEQ ID NO: 521895 - RNA, 22 nt, Artificial Sequence
  Synthetic
auaccuccagacaguccuggac

SEQ ID NO: 521896 - RNA, 23 nt, Artificial Sequence
  Synthetic
aauaccuccagacaguccuggac

SEQ ID NO: 521897 - RNA, 24 nt, Artificial Sequence
  Synthetic
uaauaccuccagacaguccuggac

SEQ ID NO: 521898 - RNA, 18 nt, Artificial Sequence
  Synthetic
aggcauguuccucuggac

SEQ ID NO: 521899 - RNA, 19 nt, Artificial Sequence
  Synthetic
gaggcauguuccucuggac

SEQ ID NO: 521900 - RNA, 20 nt, Artificial Sequence
  Synthetic
agaggcauguuccucuggac

SEQ ID NO: 521901 - RNA, 21 nt, Artificial Sequence
  Synthetic
aagaggcauguuccucuggac

SEQ ID NO: 521902 - RNA, 22 nt, Artificial Sequence
  Synthetic
gaagaggcauguuccucuggac

SEQ ID NO: 521903 - RNA, 23 nt, Artificial Sequence
  Synthetic
agaagaggcauguuccucuggac

SEQ ID NO: 521904 - RNA, 24 nt, Artificial Sequence
  Synthetic
uagaagaggcauguuccucuggac

SEQ ID NO: 521905 - RNA, 18 nt, Artificial Sequence
  Synthetic
gaugucugugcucuggac

SEQ ID NO: 521906 - RNA, 19 nt, Artificial Sequence
  Synthetic
ugaugucugugcucuggac

SEQ ID NO: 521907 - RNA, 20 nt, Artificial Sequence
  Synthetic
gugaugucugugcucuggac

SEQ ID NO: 521908 - RNA, 21 nt, Artificial Sequence
  Synthetic
ggugaugucugugcucuggac

SEQ ID NO: 521909 - RNA, 22 nt, Artificial Sequence
  Synthetic
aggugaugucugugcucuggac

SEQ ID NO: 521910 - RNA, 23 nt, Artificial Sequence
  Synthetic
caggugaugucugugcucuggac

SEQ ID NO: 521911 - RNA, 24 nt, Artificial Sequence
  Synthetic
ccaggugaugucugugcucuggac

SEQ ID NO: 521912 - RNA, 18 nt, Artificial Sequence
  Synthetic
cugacaaugcuucuggac

SEQ ID NO: 521913 - RNA, 19 nt, Artificial Sequence
  Synthetic
acugacaaugcuucuggac

SEQ ID NO: 521914 - RNA, 20 nt, Artificial Sequence
  Synthetic
uacugacaaugcuucuggac

SEQ ID NO: 521915 - RNA, 21 nt, Artificial Sequence
  Synthetic
uuacugacaaugcuucuggac

SEQ ID NO: 521916 - RNA, 22 nt, Artificial Sequence
  Synthetic
guuacugacaaugcuucuggac

SEQ ID NO: 521917 - RNA, 23 nt, Artificial Sequence
  Synthetic
cguuacugacaaugcuucuggac

SEQ ID NO: 521918 - RNA, 24 nt, Artificial Sequence
  Synthetic
ccguuacugacaaugcuucuggac

SEQ ID NO: 521919 - RNA, 18 nt, Artificial Sequence
  Synthetic
ggaggggcugcaguggac

SEQ ID NO: 521920 - RNA, 19 nt, Artificial Sequence
  Synthetic
gggaggggcugcaguggac

SEQ ID NO: 521921 - RNA, 20 nt, Artificial Sequence
  Synthetic
agggaggggcugcaguggac

SEQ ID NO: 521922 - RNA, 21 nt, Artificial Sequence
  Synthetic
aagggaggggcugcaguggac

SEQ ID NO: 521923 - RNA, 22 nt, Artificial Sequence
  Synthetic
aaagggaggggcugcaguggac

SEQ ID NO: 521924 - RNA, 23 nt, Artificial Sequence
  Synthetic
uaaagggaggggcugcaguggac

SEQ ID NO: 521925 - RNA, 24 nt, Artificial Sequence
  Synthetic
uuaaagggaggggcugcaguggac

SEQ ID NO: 521926 - RNA, 18 nt, Artificial Sequence
  Synthetic
gagccaggcugaguggac

SEQ ID NO: 521927 - RNA, 19 nt, Artificial Sequence
  Synthetic
ggagccaggcugaguggac

SEQ ID NO: 521928 - RNA, 20 nt, Artificial Sequence
  Synthetic
uggagccaggcugaguggac

SEQ ID NO: 521929 - RNA, 21 nt, Artificial Sequence
  Synthetic
guggagccaggcugaguggac

SEQ ID NO: 521930 - RNA, 22 nt, Artificial Sequence
  Synthetic
uguggagccaggcugaguggac

SEQ ID NO: 521931 - RNA, 23 nt, Artificial Sequence
  Synthetic
auguggagccaggcugaguggac

SEQ ID NO: 521932 - RNA, 24 nt, Artificial Sequence
  Synthetic
cauguggagccaggcugaguggac

SEQ ID NO: 521933 - RNA, 18 nt, Artificial Sequence
  Synthetic
aaugggggaaacuuggac

SEQ ID NO: 521934 - RNA, 19 nt, Artificial Sequence
  Synthetic
caaugggggaaacuuggac

SEQ ID NO: 521935 - RNA, 20 nt, Artificial Sequence
  Synthetic
ucaaugggggaaacuuggac

SEQ ID NO: 521936 - RNA, 21 nt, Artificial Sequence
  Synthetic
gucaaugggggaaacuuggac

SEQ ID NO: 521937 - RNA, 22 nt, Artificial Sequence
  Synthetic
ugucaaugggggaaacuuggac

SEQ ID NO: 521938 - RNA, 23 nt, Artificial Sequence
  Synthetic
augucaaugggggaaacuuggac

SEQ ID NO: 521939 - RNA, 24 nt, Artificial Sequence
  Synthetic
aaugucaaugggggaaacuuggac

SEQ ID NO: 521940 - RNA, 18 nt, Artificial Sequence
  Synthetic
uaagccaugauguuggac

SEQ ID NO: 521941 - RNA, 19 nt, Artificial Sequence
  Synthetic
uuaagccaugauguuggac

SEQ ID NO: 521942 - RNA, 20 nt, Artificial Sequence
  Synthetic
cuuaagccaugauguuggac

SEQ ID NO: 521943 - RNA, 21 nt, Artificial Sequence
  Synthetic
ccuuaagccaugauguuggac

SEQ ID NO: 521944 - RNA, 22 nt, Artificial Sequence
  Synthetic
gccuuaagccaugauguuggac

SEQ ID NO: 521945 - RNA, 23 nt, Artificial Sequence
  Synthetic
ugccuuaagccaugauguuggac

SEQ ID NO: 521946 - RNA, 24 nt, Artificial Sequence
  Synthetic
cugccuuaagccaugauguuggac

SEQ ID NO: 521947 - RNA, 18 nt, Artificial Sequence
  Synthetic
uaaugccaaguguuggac

SEQ ID NO: 521948 - RNA, 19 nt, Artificial Sequence
  Synthetic
auaaugccaaguguuggac

SEQ ID NO: 521949 - RNA, 20 nt, Artificial Sequence
  Synthetic
uauaaugccaaguguuggac

SEQ ID NO: 521950 - RNA, 21 nt, Artificial Sequence
  Synthetic
auauaaugccaaguguuggac

SEQ ID NO: 521951 - RNA, 22 nt, Artificial Sequence
  Synthetic
aauauaaugccaaguguuggac

SEQ ID NO: 521952 - RNA, 23 nt, Artificial Sequence
  Synthetic
aaauauaaugccaaguguuggac

SEQ ID NO: 521953 - RNA, 24 nt, Artificial Sequence
  Synthetic
gaaauauaaugccaaguguuggac

SEQ ID NO: 521954 - RNA, 18 nt, Artificial Sequence
  Synthetic
ucagaugagacuuuggac

SEQ ID NO: 521955 - RNA, 19 nt, Artificial Sequence
  Synthetic
cucagaugagacuuuggac

SEQ ID NO: 521956 - RNA, 20 nt, Artificial Sequence
  Synthetic
ucucagaugagacuuuggac

SEQ ID NO: 521957 - RNA, 21 nt, Artificial Sequence
  Synthetic
gucucagaugagacuuuggac

SEQ ID NO: 521958 - RNA, 22 nt, Artificial Sequence
  Synthetic
ugucucagaugagacuuuggac

SEQ ID NO: 521959 - RNA, 23 nt, Artificial Sequence
  Synthetic
uugucucagaugagacuuuggac

SEQ ID NO: 521960 - RNA, 24 nt, Artificial Sequence
  Synthetic
cuugucucagaugagacuuuggac

SEQ ID NO: 521961 - RNA, 18 nt, Artificial Sequence
  Synthetic
auagugauggcuuuggac

SEQ ID NO: 521962 - RNA, 19 nt, Artificial Sequence
  Synthetic
cauagugauggcuuuggac

SEQ ID NO: 521963 - RNA, 20 nt, Artificial Sequence
  Synthetic
acauagugauggcuuuggac

SEQ ID NO: 521964 - RNA, 21 nt, Artificial Sequence
  Synthetic
uacauagugauggcuuuggac

SEQ ID NO: 521965 - RNA, 22 nt, Artificial Sequence
  Synthetic
auacauagugauggcuuuggac

SEQ ID NO: 521966 - RNA, 23 nt, Artificial Sequence
  Synthetic
uauacauagugauggcuuuggac

SEQ ID NO: 521967 - RNA, 24 nt, Artificial Sequence
  Synthetic
uuauacauagugauggcuuuggac

SEQ ID NO: 521968 - RNA, 18 nt, Artificial Sequence
  Synthetic
acuacaaacaguuuggac

SEQ ID NO: 521969 - RNA, 19 nt, Artificial Sequence
  Synthetic
cacuacaaacaguuuggac

SEQ ID NO: 521970 - RNA, 20 nt, Artificial Sequence
  Synthetic
ccacuacaaacaguuuggac

SEQ ID NO: 521971 - RNA, 21 nt, Artificial Sequence
  Synthetic
accacuacaaacaguuuggac

SEQ ID NO: 521972 - RNA, 22 nt, Artificial Sequence
  Synthetic
uaccacuacaaacaguuuggac

SEQ ID NO: 521973 - RNA, 23 nt, Artificial Sequence
  Synthetic
uuaccacuacaaacaguuuggac

SEQ ID NO: 521974 - RNA, 24 nt, Artificial Sequence
  Synthetic
cuuaccacuacaaacaguuuggac

SEQ ID NO: 521975 - RNA, 18 nt, Artificial Sequence
  Synthetic
gauaacuagaguuuggac

SEQ ID NO: 521976 - RNA, 19 nt, Artificial Sequence
  Synthetic
agauaacuagaguuuggac

SEQ ID NO: 521977 - RNA, 20 nt, Artificial Sequence
  Synthetic
aagauaacuagaguuuggac

SEQ ID NO: 521978 - RNA, 21 nt, Artificial Sequence
  Synthetic
uaagauaacuagaguuuggac

SEQ ID NO: 521979 - RNA, 22 nt, Artificial Sequence
  Synthetic
uuaagauaacuagaguuuggac

SEQ ID NO: 521980 - RNA, 23 nt, Artificial Sequence
  Synthetic
uuuaagauaacuagaguuuggac

SEQ ID NO: 521981 - RNA, 24 nt, Artificial Sequence
  Synthetic
guuuaagauaacuagaguuuggac

SEQ ID NO: 521982 - RNA, 18 nt, Artificial Sequence
  Synthetic
uaguuucucuguuuggac

SEQ ID NO: 521983 - RNA, 19 nt, Artificial Sequence
  Synthetic
cuaguuucucuguuuggac

SEQ ID NO: 521984 - RNA, 20 nt, Artificial Sequence
  Synthetic
ccuaguuucucuguuuggac

SEQ ID NO: 521985 - RNA, 21 nt, Artificial Sequence
  Synthetic
gccuaguuucucuguuuggac

SEQ ID NO: 521986 - RNA, 22 nt, Artificial Sequence
  Synthetic
ugccuaguuucucuguuuggac

SEQ ID NO: 521987 - RNA, 23 nt, Artificial Sequence
  Synthetic
uugccuaguuucucuguuuggac

SEQ ID NO: 521988 - RNA, 24 nt, Artificial Sequence
  Synthetic
uuugccuaguuucucuguuuggac

SEQ ID NO: 521989 - RNA, 18 nt, Artificial Sequence
  Synthetic
ucaacuuuaauuuuggac

SEQ ID NO: 521990 - RNA, 19 nt, Artificial Sequence
  Synthetic
uucaacuuuaauuuuggac

SEQ ID NO: 521991 - RNA, 20 nt, Artificial Sequence
  Synthetic
uuucaacuuuaauuuuggac

SEQ ID NO: 521992 - RNA, 21 nt, Artificial Sequence
  Synthetic
uuuucaacuuuaauuuuggac

SEQ ID NO: 521993 - RNA, 22 nt, Artificial Sequence
  Synthetic
uuuuucaacuuuaauuuuggac

SEQ ID NO: 521994 - RNA, 23 nt, Artificial Sequence
  Synthetic
uuuuuucaacuuuaauuuuggac

SEQ ID NO: 521995 - RNA, 24 nt, Artificial Sequence
  Synthetic
uuuuuuucaacuuuaauuuuggac

SEQ ID NO: 521996 - RNA, 18 nt, Artificial Sequence
  Synthetic
ccauugacaccaaaugac

SEQ ID NO: 521997 - RNA, 19 nt, Artificial Sequence
  Synthetic
accauugacaccaaaugac

SEQ ID NO: 521998 - RNA, 20 nt, Artificial Sequence
  Synthetic
aaccauugacaccaaaugac

SEQ ID NO: 521999 - RNA, 21 nt, Artificial Sequence
  Synthetic
aaaccauugacaccaaaugac

SEQ ID NO: 522000 - RNA, 22 nt, Artificial Sequence
  Synthetic
aaaaccauugacaccaaaugac

SEQ ID NO: 522001 - RNA, 23 nt, Artificial Sequence
  Synthetic
caaaaccauugacaccaaaugac

SEQ ID NO: 522002 - RNA, 24 nt, Artificial Sequence
  Synthetic
acaaaaccauugacaccaaaugac

SEQ ID NO: 522003 - RNA, 18 nt, Artificial Sequence
  Synthetic
aaacauaauugcaaugac

SEQ ID NO: 522004 - RNA, 19 nt, Artificial Sequence
  Synthetic
gaaacauaauugcaaugac

SEQ ID NO: 522005 - RNA, 20 nt, Artificial Sequence
  Synthetic
ggaaacauaauugcaaugac

SEQ ID NO: 522006 - RNA, 21 nt, Artificial Sequence
  Synthetic
aggaaacauaauugcaaugac

SEQ ID NO: 522007 - RNA, 22 nt, Artificial Sequence
  Synthetic
aaggaaacauaauugcaaugac

SEQ ID NO: 522008 - RNA, 23 nt, Artificial Sequence
  Synthetic
aaaggaaacauaauugcaaugac

SEQ ID NO: 522009 - RNA, 24 nt, Artificial Sequence
  Synthetic
caaaggaaacauaauugcaaugac

SEQ ID NO: 522010 - RNA, 18 nt, Artificial Sequence
  Synthetic
uaguccacacucaaugac

SEQ ID NO: 522011 - RNA, 19 nt, Artificial Sequence
  Synthetic
cuaguccacacucaaugac

SEQ ID NO: 522012 - RNA, 20 nt, Artificial Sequence
  Synthetic
ucuaguccacacucaaugac

SEQ ID NO: 522013 - RNA, 21 nt, Artificial Sequence
  Synthetic
aucuaguccacacucaaugac

SEQ ID NO: 522014 - RNA, 22 nt, Artificial Sequence
  Synthetic
aaucuaguccacacucaaugac

SEQ ID NO: 522015 - RNA, 23 nt, Artificial Sequence
  Synthetic
gaaucuaguccacacucaaugac

SEQ ID NO: 522016 - RNA, 24 nt, Artificial Sequence
  Synthetic
ugaaucuaguccacacucaaugac

SEQ ID NO: 522017 - RNA, 18 nt, Artificial Sequence
  Synthetic
aaaaucugauggaaugac

SEQ ID NO: 522018 - RNA, 19 nt, Artificial Sequence
  Synthetic
uaaaaucugauggaaugac

SEQ ID NO: 522019 - RNA, 20 nt, Artificial Sequence
  Synthetic
auaaaaucugauggaaugac

SEQ ID NO: 522020 - RNA, 21 nt, Artificial Sequence
  Synthetic
aauaaaaucugauggaaugac

SEQ ID NO: 522021 - RNA, 22 nt, Artificial Sequence
  Synthetic
gaauaaaaucugauggaaugac

SEQ ID NO: 522022 - RNA, 23 nt, Artificial Sequence
  Synthetic
agaauaaaaucugauggaaugac

SEQ ID NO: 522023 - RNA, 24 nt, Artificial Sequence
  Synthetic
cagaauaaaaucugauggaaugac

SEQ ID NO: 522024 - RNA, 18 nt, Artificial Sequence
  Synthetic
uguuuagggaauaaugac

SEQ ID NO: 522025 - RNA, 19 nt, Artificial Sequence
  Synthetic
cuguuuagggaauaaugac

SEQ ID NO: 522026 - RNA, 20 nt, Artificial Sequence
  Synthetic
acuguuuagggaauaaugac

SEQ ID NO: 522027 - RNA, 21 nt, Artificial Sequence
  Synthetic
uacuguuuagggaauaaugac

SEQ ID NO: 522028 - RNA, 22 nt, Artificial Sequence
  Synthetic
guacuguuuagggaauaaugac

SEQ ID NO: 522029 - RNA, 23 nt, Artificial Sequence
  Synthetic
uguacuguuuagggaauaaugac

SEQ ID NO: 522030 - RNA, 24 nt, Artificial Sequence
  Synthetic
uuguacuguuuagggaauaaugac

SEQ ID NO: 522031 - RNA, 18 nt, Artificial Sequence
  Synthetic
cacucccuuucuaaugac

SEQ ID NO: 522032 - RNA, 19 nt, Artificial Sequence
  Synthetic
ccacucccuuucuaaugac

SEQ ID NO: 522033 - RNA, 20 nt, Artificial Sequence
  Synthetic
accacucccuuucuaaugac

SEQ ID NO: 522034 - RNA, 21 nt, Artificial Sequence
  Synthetic
caccacucccuuucuaaugac

SEQ ID NO: 522035 - RNA, 22 nt, Artificial Sequence
  Synthetic
ccaccacucccuuucuaaugac

SEQ ID NO: 522036 - RNA, 23 nt, Artificial Sequence
  Synthetic
accaccacucccuuucuaaugac

SEQ ID NO: 522037 - RNA, 24 nt, Artificial Sequence
  Synthetic
aaccaccacucccuuucuaaugac

SEQ ID NO: 522038 - RNA, 18 nt, Artificial Sequence
  Synthetic
cuucccugcuguaaugac

SEQ ID NO: 522039 - RNA, 19 nt, Artificial Sequence
  Synthetic
acuucccugcuguaaugac

SEQ ID NO: 522040 - RNA, 20 nt, Artificial Sequence
  Synthetic
uacuucccugcuguaaugac

SEQ ID NO: 522041 - RNA, 21 nt, Artificial Sequence
  Synthetic
uuacuucccugcuguaaugac

SEQ ID NO: 522042 - RNA, 22 nt, Artificial Sequence
  Synthetic
uuuacuucccugcuguaaugac

SEQ ID NO: 522043 - RNA, 23 nt, Artificial Sequence
  Synthetic
uuuuacuucccugcuguaaugac

SEQ ID NO: 522044 - RNA, 24 nt, Artificial Sequence
  Synthetic
cuuuuacuucccugcuguaaugac

SEQ ID NO: 522045 - RNA, 18 nt, Artificial Sequence
  Synthetic
gguuagcaaauuaaugac

SEQ ID NO: 522046 - RNA, 19 nt, Artificial Sequence
  Synthetic
ugguuagcaaauuaaugac

SEQ ID NO: 522047 - RNA, 20 nt, Artificial Sequence
  Synthetic
cugguuagcaaauuaaugac

SEQ ID NO: 522048 - RNA, 21 nt, Artificial Sequence
  Synthetic
acugguuagcaaauuaaugac

SEQ ID NO: 522049 - RNA, 22 nt, Artificial Sequence
  Synthetic
uacugguuagcaaauuaaugac

SEQ ID NO: 522050 - RNA, 23 nt, Artificial Sequence
  Synthetic
uuacugguuagcaaauuaaugac

SEQ ID NO: 522051 - RNA, 24 nt, Artificial Sequence
  Synthetic
uuuacugguuagcaaauuaaugac

SEQ ID NO: 522052 - RNA, 18 nt, Artificial Sequence
  Synthetic
cuuauaguuccacaugac

SEQ ID NO: 522053 - RNA, 19 nt, Artificial Sequence
  Synthetic
acuuauaguuccacaugac

SEQ ID NO: 522054 - RNA, 20 nt, Artificial Sequence
  Synthetic
aacuuauaguuccacaugac

SEQ ID NO: 522055 - RNA, 21 nt, Artificial Sequence
  Synthetic
gaacuuauaguuccacaugac

SEQ ID NO: 522056 - RNA, 22 nt, Artificial Sequence
  Synthetic
ugaacuuauaguuccacaugac

SEQ ID NO: 522057 - RNA, 23 nt, Artificial Sequence
  Synthetic
uugaacuuauaguuccacaugac

SEQ ID NO: 522058 - RNA, 24 nt, Artificial Sequence
  Synthetic
auugaacuuauaguuccacaugac

SEQ ID NO: 522059 - RNA, 18 nt, Artificial Sequence
  Synthetic
cacaagauugcacaugac

SEQ ID NO: 522060 - RNA, 19 nt, Artificial Sequence
  Synthetic
ccacaagauugcacaugac

SEQ ID NO: 522061 - RNA, 20 nt, Artificial Sequence
  Synthetic
uccacaagauugcacaugac

SEQ ID NO: 522062 - RNA, 21 nt, Artificial Sequence
  Synthetic
auccacaagauugcacaugac

SEQ ID NO: 522063 - RNA, 22 nt, Artificial Sequence
  Synthetic
uauccacaagauugcacaugac

SEQ ID NO: 522064 - RNA, 23 nt, Artificial Sequence
  Synthetic
auauccacaagauugcacaugac

SEQ ID NO: 522065 - RNA, 24 nt, Artificial Sequence
  Synthetic
gauauccacaagauugcacaugac

SEQ ID NO: 522066 - RNA, 18 nt, Artificial Sequence
  Synthetic
cauagguaaugacaugac

SEQ ID NO: 522067 - RNA, 19 nt, Artificial Sequence
  Synthetic
gcauagguaaugacaugac

SEQ ID NO: 522068 - RNA, 20 nt, Artificial Sequence
  Synthetic
ggcauagguaaugacaugac

SEQ ID NO: 522069 - RNA, 21 nt, Artificial Sequence
  Synthetic
gggcauagguaaugacaugac

SEQ ID NO: 522070 - RNA, 22 nt, Artificial Sequence
  Synthetic
ugggcauagguaaugacaugac

SEQ ID NO: 522071 - RNA, 23 nt, Artificial Sequence
  Synthetic
cugggcauagguaaugacaugac

SEQ ID NO: 522072 - RNA, 24 nt, Artificial Sequence
  Synthetic
ucugggcauagguaaugacaugac

SEQ ID NO: 522073 - RNA, 18 nt, Artificial Sequence
  Synthetic
uccuaaauaucccaugac

SEQ ID NO: 522074 - RNA, 19 nt, Artificial Sequence
  Synthetic
cuccuaaauaucccaugac

SEQ ID NO: 522075 - RNA, 20 nt, Artificial Sequence
  Synthetic
ucuccuaaauaucccaugac

SEQ ID NO: 522076 - RNA, 21 nt, Artificial Sequence
  Synthetic
uucuccuaaauaucccaugac

SEQ ID NO: 522077 - RNA, 22 nt, Artificial Sequence
  Synthetic
guucuccuaaauaucccaugac

SEQ ID NO: 522078 - RNA, 23 nt, Artificial Sequence
  Synthetic
uguucuccuaaauaucccaugac

SEQ ID NO: 522079 - RNA, 24 nt, Artificial Sequence
  Synthetic
guguucuccuaaauaucccaugac

SEQ ID NO: 522080 - RNA, 18 nt, Artificial Sequence
  Synthetic
cgaguuagaagccaugac

SEQ ID NO: 522081 - RNA, 19 nt, Artificial Sequence
  Synthetic
acgaguuagaagccaugac

SEQ ID NO: 522082 - RNA, 20 nt, Artificial Sequence
  Synthetic
uacgaguuagaagccaugac

SEQ ID NO: 522083 - RNA, 21 nt, Artificial Sequence
  Synthetic
uuacgaguuagaagccaugac

SEQ ID NO: 522084 - RNA, 22 nt, Artificial Sequence
  Synthetic
guuacgaguuagaagccaugac

SEQ ID NO: 522085 - RNA, 23 nt, Artificial Sequence
  Synthetic
aguuacgaguuagaagccaugac

SEQ ID NO: 522086 - RNA, 24 nt, Artificial Sequence
  Synthetic
aaguuacgaguuagaagccaugac

SEQ ID NO: 522087 - RNA, 18 nt, Artificial Sequence
  Synthetic
aguuuugugugccaugac

SEQ ID NO: 522088 - RNA, 19 nt, Artificial Sequence
  Synthetic
gaguuuugugugccaugac

SEQ ID NO: 522089 - RNA, 20 nt, Artificial Sequence
  Synthetic
agaguuuugugugccaugac

SEQ ID NO: 522090 - RNA, 21 nt, Artificial Sequence
  Synthetic
aagaguuuugugugccaugac

SEQ ID NO: 522091 - RNA, 22 nt, Artificial Sequence
  Synthetic
gaagaguuuugugugccaugac

SEQ ID NO: 522092 - RNA, 23 nt, Artificial Sequence
  Synthetic
ugaagaguuuugugugccaugac

SEQ ID NO: 522093 - RNA, 24 nt, Artificial Sequence
  Synthetic
uugaagaguuuugugugccaugac

SEQ ID NO: 522094 - RNA, 18 nt, Artificial Sequence
  Synthetic
guaauugucaagcaugac

SEQ ID NO: 522095 - RNA, 19 nt, Artificial Sequence
  Synthetic
uguaauugucaagcaugac

SEQ ID NO: 522096 - RNA, 20 nt, Artificial Sequence
  Synthetic
uuguaauugucaagcaugac

SEQ ID NO: 522097 - RNA, 21 nt, Artificial Sequence
  Synthetic
auuguaauugucaagcaugac

SEQ ID NO: 522098 - RNA, 22 nt, Artificial Sequence
  Synthetic
aauuguaauugucaagcaugac

SEQ ID NO: 522099 - RNA, 23 nt, Artificial Sequence
  Synthetic
aaauuguaauugucaagcaugac

SEQ ID NO: 522100 - RNA, 24 nt, Artificial Sequence
  Synthetic
aaaauuguaauugucaagcaugac

SEQ ID NO: 522101 - RNA, 18 nt, Artificial Sequence
  Synthetic
aagcaauaucagcaugac

SEQ ID NO: 522102 - RNA, 19 nt, Artificial Sequence
  Synthetic
aaagcaauaucagcaugac

SEQ ID NO: 522103 - RNA, 20 nt, Artificial Sequence
  Synthetic
caaagcaauaucagcaugac

SEQ ID NO: 522104 - RNA, 21 nt, Artificial Sequence
  Synthetic
ucaaagcaauaucagcaugac

SEQ ID NO: 522105 - RNA, 22 nt, Artificial Sequence
  Synthetic
aucaaagcaauaucagcaugac

SEQ ID NO: 522106 - RNA, 23 nt, Artificial Sequence
  Synthetic
uaucaaagcaauaucagcaugac

SEQ ID NO: 522107 - RNA, 24 nt, Artificial Sequence
  Synthetic
uuaucaaagcaauaucagcaugac

SEQ ID NO: 522108 - RNA, 18 nt, Artificial Sequence
  Synthetic
ugaugauuauagcaugac

SEQ ID NO: 522109 - RNA, 19 nt, Artificial Sequence
  Synthetic
uugaugauuauagcaugac

SEQ ID NO: 522110 - RNA, 20 nt, Artificial Sequence
  Synthetic
cuugaugauuauagcaugac

SEQ ID NO: 522111 - RNA, 21 nt, Artificial Sequence
  Synthetic
ucuugaugauuauagcaugac

SEQ ID NO: 522112 - RNA, 22 nt, Artificial Sequence
  Synthetic
aucuugaugauuauagcaugac

SEQ ID NO: 522113 - RNA, 23 nt, Artificial Sequence
  Synthetic
aaucuugaugauuauagcaugac

SEQ ID NO: 522114 - RNA, 24 nt, Artificial Sequence
  Synthetic
caaucuugaugauuauagcaugac

SEQ ID NO: 522115 - RNA, 18 nt, Artificial Sequence
  Synthetic
ucugucuccaaucaugac

SEQ ID NO: 522116 - RNA, 19 nt, Artificial Sequence
  Synthetic
aucugucuccaaucaugac

SEQ ID NO: 522117 - RNA, 20 nt, Artificial Sequence
  Synthetic
uaucugucuccaaucaugac

SEQ ID NO: 522118 - RNA, 21 nt, Artificial Sequence
  Synthetic
auaucugucuccaaucaugac

SEQ ID NO: 522119 - RNA, 22 nt, Artificial Sequence
  Synthetic
aauaucugucuccaaucaugac

SEQ ID NO: 522120 - RNA, 23 nt, Artificial Sequence
  Synthetic
aaauaucugucuccaaucaugac

SEQ ID NO: 522121 - RNA, 24 nt, Artificial Sequence
  Synthetic
uaaauaucugucuccaaucaugac

SEQ ID NO: 522122 - RNA, 18 nt, Artificial Sequence
  Synthetic
uugugaaauguucaugac

SEQ ID NO: 522123 - RNA, 19 nt, Artificial Sequence
  Synthetic
cuugugaaauguucaugac

SEQ ID NO: 522124 - RNA, 20 nt, Artificial Sequence
  Synthetic
ccuugugaaauguucaugac

SEQ ID NO: 522125 - RNA, 21 nt, Artificial Sequence
  Synthetic
cccuugugaaauguucaugac

SEQ ID NO: 522126 - RNA, 22 nt, Artificial Sequence
  Synthetic
acccuugugaaauguucaugac

SEQ ID NO: 522127 - RNA, 23 nt, Artificial Sequence
  Synthetic
cacccuugugaaauguucaugac

SEQ ID NO: 522128 - RNA, 24 nt, Artificial Sequence
  Synthetic
ucacccuugugaaauguucaugac

SEQ ID NO: 522129 - RNA, 18 nt, Artificial Sequence
  Synthetic
gugucucaguacgaugac

SEQ ID NO: 522130 - RNA, 19 nt, Artificial Sequence
  Synthetic
agugucucaguacgaugac

SEQ ID NO: 522131 - RNA, 20 nt, Artificial Sequence
  Synthetic
aagugucucaguacgaugac

SEQ ID NO: 522132 - RNA, 21 nt, Artificial Sequence
  Synthetic
aaagugucucaguacgaugac

SEQ ID NO: 522133 - RNA, 22 nt, Artificial Sequence
  Synthetic
uaaagugucucaguacgaugac

SEQ ID NO: 522134 - RNA, 23 nt, Artificial Sequence
  Synthetic
uuaaagugucucaguacgaugac

SEQ ID NO: 522135 - RNA, 24 nt, Artificial Sequence
  Synthetic
auuaaagugucucaguacgaugac

SEQ ID NO: 522136 - RNA, 18 nt, Artificial Sequence
  Synthetic
augugccucauggaugac

SEQ ID NO: 522137 - RNA, 19 nt, Artificial Sequence
  Synthetic
aaugugccucauggaugac

SEQ ID NO: 522138 - RNA, 20 nt, Artificial Sequence
  Synthetic
gaaugugccucauggaugac

SEQ ID NO: 522139 - RNA, 21 nt, Artificial Sequence
  Synthetic
ggaaugugccucauggaugac

SEQ ID NO: 522140 - RNA, 22 nt, Artificial Sequence
  Synthetic
gggaaugugccucauggaugac

SEQ ID NO: 522141 - RNA, 23 nt, Artificial Sequence
  Synthetic
agggaaugugccucauggaugac

SEQ ID NO: 522142 - RNA, 24 nt, Artificial Sequence
  Synthetic
uagggaaugugccucauggaugac

SEQ ID NO: 522143 - RNA, 18 nt, Artificial Sequence
  Synthetic
cugagucggguggaugac

SEQ ID NO: 522144 - RNA, 19 nt, Artificial Sequence
  Synthetic
gcugagucggguggaugac

SEQ ID NO: 522145 - RNA, 20 nt, Artificial Sequence
  Synthetic
ggcugagucggguggaugac

SEQ ID NO: 522146 - RNA, 21 nt, Artificial Sequence
  Synthetic
aggcugagucggguggaugac

SEQ ID NO: 522147 - RNA, 22 nt, Artificial Sequence
  Synthetic
gaggcugagucggguggaugac

SEQ ID NO: 522148 - RNA, 23 nt, Artificial Sequence
  Synthetic
ggaggcugagucggguggaugac

SEQ ID NO: 522149 - RNA, 24 nt, Artificial Sequence
  Synthetic
gggaggcugagucggguggaugac

SEQ ID NO: 522150 - RNA, 18 nt, Artificial Sequence
  Synthetic
aagguagaugaugaugac

SEQ ID NO: 522151 - RNA, 19 nt, Artificial Sequence
  Synthetic
gaagguagaugaugaugac

SEQ ID NO: 522152 - RNA, 20 nt, Artificial Sequence
  Synthetic
ggaagguagaugaugaugac

SEQ ID NO: 522153 - RNA, 21 nt, Artificial Sequence
  Synthetic
aggaagguagaugaugaugac

SEQ ID NO: 522154 - RNA, 22 nt, Artificial Sequence
  Synthetic
uaggaagguagaugaugaugac

SEQ ID NO: 522155 - RNA, 23 nt, Artificial Sequence
  Synthetic
uuaggaagguagaugaugaugac

SEQ ID NO: 522156 - RNA, 24 nt, Artificial Sequence
  Synthetic
auuaggaagguagaugaugaugac

SEQ ID NO: 522157 - RNA, 18 nt, Artificial Sequence
  Synthetic
ucuaccuagaaauaugac

SEQ ID NO: 522158 - RNA, 19 nt, Artificial Sequence
  Synthetic
aucuaccuagaaauaugac

SEQ ID NO: 522159 - RNA, 20 nt, Artificial Sequence
  Synthetic
caucuaccuagaaauaugac

SEQ ID NO: 522160 - RNA, 21 nt, Artificial Sequence
  Synthetic
acaucuaccuagaaauaugac

SEQ ID NO: 522161 - RNA, 22 nt, Artificial Sequence
  Synthetic
aacaucuaccuagaaauaugac

SEQ ID NO: 522162 - RNA, 23 nt, Artificial Sequence
  Synthetic
caacaucuaccuagaaauaugac

SEQ ID NO: 522163 - RNA, 24 nt, Artificial Sequence
  Synthetic
gcaacaucuaccuagaaauaugac

SEQ ID NO: 522164 - RNA, 18 nt, Artificial Sequence
  Synthetic
aaugaccaucaauaugac

SEQ ID NO: 522165 - RNA, 19 nt, Artificial Sequence
  Synthetic
uaaugaccaucaauaugac

SEQ ID NO: 522166 - RNA, 20 nt, Artificial Sequence
  Synthetic
auaaugaccaucaauaugac

SEQ ID NO: 522167 - RNA, 21 nt, Artificial Sequence
  Synthetic
aauaaugaccaucaauaugac

SEQ ID NO: 522168 - RNA, 22 nt, Artificial Sequence
  Synthetic
aaauaaugaccaucaauaugac

SEQ ID NO: 522169 - RNA, 23 nt, Artificial Sequence
  Synthetic
aaaauaaugaccaucaauaugac

SEQ ID NO: 522170 - RNA, 24 nt, Artificial Sequence
  Synthetic
uaaaauaaugaccaucaauaugac

SEQ ID NO: 522171 - RNA, 18 nt, Artificial Sequence
  Synthetic
cuaccucacgaauaugac

SEQ ID NO: 522172 - RNA, 19 nt, Artificial Sequence
  Synthetic
acuaccucacgaauaugac

SEQ ID NO: 522173 - RNA, 20 nt, Artificial Sequence
  Synthetic
gacuaccucacgaauaugac

SEQ ID NO: 522174 - RNA, 21 nt, Artificial Sequence
  Synthetic
ugacuaccucacgaauaugac

SEQ ID NO: 522175 - RNA, 22 nt, Artificial Sequence
  Synthetic
cugacuaccucacgaauaugac

SEQ ID NO: 522176 - RNA, 23 nt, Artificial Sequence
  Synthetic
gcugacuaccucacgaauaugac

SEQ ID NO: 522177 - RNA, 24 nt, Artificial Sequence
  Synthetic
ugcugacuaccucacgaauaugac

SEQ ID NO: 522178 - RNA, 18 nt, Artificial Sequence
  Synthetic
aggauacaguaauaugac

SEQ ID NO: 522179 - RNA, 19 nt, Artificial Sequence
  Synthetic
aaggauacaguaauaugac

SEQ ID NO: 522180 - RNA, 20 nt, Artificial Sequence
  Synthetic
aaaggauacaguaauaugac

SEQ ID NO: 522181 - RNA, 21 nt, Artificial Sequence
  Synthetic
aaaaggauacaguaauaugac

SEQ ID NO: 522182 - RNA, 22 nt, Artificial Sequence
  Synthetic
gaaaaggauacaguaauaugac

SEQ ID NO: 522183 - RNA, 23 nt, Artificial Sequence
  Synthetic
agaaaaggauacaguaauaugac

SEQ ID NO: 522184 - RNA, 24 nt, Artificial Sequence
  Synthetic
cagaaaaggauacaguaauaugac

SEQ ID NO: 522185 - RNA, 18 nt, Artificial Sequence
  Synthetic
auaaucauaucauaugac

SEQ ID NO: 522186 - RNA, 19 nt, Artificial Sequence
  Synthetic
gauaaucauaucauaugac

SEQ ID NO: 522187 - RNA, 20 nt, Artificial Sequence
  Synthetic
agauaaucauaucauaugac

SEQ ID NO: 522188 - RNA, 21 nt, Artificial Sequence
  Synthetic
uagauaaucauaucauaugac

SEQ ID NO: 522189 - RNA, 22 nt, Artificial Sequence
  Synthetic
auagauaaucauaucauaugac

SEQ ID NO: 522190 - RNA, 23 nt, Artificial Sequence
  Synthetic
gauagauaaucauaucauaugac

SEQ ID NO: 522191 - RNA, 24 nt, Artificial Sequence
  Synthetic
ugauagauaaucauaucauaugac

SEQ ID NO: 522192 - RNA, 18 nt, Artificial Sequence
  Synthetic
ccaaggccauuauaugac

SEQ ID NO: 522193 - RNA, 19 nt, Artificial Sequence
  Synthetic
gccaaggccauuauaugac

SEQ ID NO: 522194 - RNA, 20 nt, Artificial Sequence
  Synthetic
ggccaaggccauuauaugac

SEQ ID NO: 522195 - RNA, 21 nt, Artificial Sequence
  Synthetic
aggccaaggccauuauaugac

SEQ ID NO: 522196 - RNA, 22 nt, Artificial Sequence
  Synthetic
aaggccaaggccauuauaugac

SEQ ID NO: 522197 - RNA, 23 nt, Artificial Sequence
  Synthetic
gaaggccaaggccauuauaugac

SEQ ID NO: 522198 - RNA, 24 nt, Artificial Sequence
  Synthetic
agaaggccaaggccauuauaugac

SEQ ID NO: 522199 - RNA, 18 nt, Artificial Sequence
  Synthetic
ucucagaacuuauaugac

SEQ ID NO: 522200 - RNA, 19 nt, Artificial Sequence
  Synthetic
uucucagaacuuauaugac

SEQ ID NO: 522201 - RNA, 20 nt, Artificial Sequence
  Synthetic
cuucucagaacuuauaugac

SEQ ID NO: 522202 - RNA, 21 nt, Artificial Sequence
  Synthetic
ucuucucagaacuuauaugac

SEQ ID NO: 522203 - RNA, 22 nt, Artificial Sequence
  Synthetic
uucuucucagaacuuauaugac

SEQ ID NO: 522204 - RNA, 23 nt, Artificial Sequence
  Synthetic
uuucuucucagaacuuauaugac

SEQ ID NO: 522205 - RNA, 24 nt, Artificial Sequence
  Synthetic
auuucuucucagaacuuauaugac

SEQ ID NO: 522206 - RNA, 18 nt, Artificial Sequence
  Synthetic
aauuugaaaagcuaugac

SEQ ID NO: 522207 - RNA, 19 nt, Artificial Sequence
  Synthetic
aaauuugaaaagcuaugac

SEQ ID NO: 522208 - RNA, 20 nt, Artificial Sequence
  Synthetic
uaaauuugaaaagcuaugac

SEQ ID NO: 522209 - RNA, 21 nt, Artificial Sequence
  Synthetic
auaaauuugaaaagcuaugac

SEQ ID NO: 522210 - RNA, 22 nt, Artificial Sequence
  Synthetic
uauaaauuugaaaagcuaugac

SEQ ID NO: 522211 - RNA, 23 nt, Artificial Sequence
  Synthetic
auauaaauuugaaaagcuaugac

SEQ ID NO: 522212 - RNA, 24 nt, Artificial Sequence
  Synthetic
gauauaaauuugaaaagcuaugac

SEQ ID NO: 522213 - RNA, 18 nt, Artificial Sequence
  Synthetic
cauucacuucaguaugac

SEQ ID NO: 522214 - RNA, 19 nt, Artificial Sequence
  Synthetic
ccauucacuucaguaugac

SEQ ID NO: 522215 - RNA, 20 nt, Artificial Sequence
  Synthetic
cccauucacuucaguaugac

SEQ ID NO: 522216 - RNA, 21 nt, Artificial Sequence
  Synthetic
ucccauucacuucaguaugac

SEQ ID NO: 522217 - RNA, 22 nt, Artificial Sequence
  Synthetic
uucccauucacuucaguaugac

SEQ ID NO: 522218 - RNA, 23 nt, Artificial Sequence
  Synthetic
auucccauucacuucaguaugac

SEQ ID NO: 522219 - RNA, 24 nt, Artificial Sequence
  Synthetic
aauucccauucacuucaguaugac

SEQ ID NO: 522220 - RNA, 18 nt, Artificial Sequence
  Synthetic
caagaucacagguaugac

SEQ ID NO: 522221 - RNA, 19 nt, Artificial Sequence
  Synthetic
ccaagaucacagguaugac

SEQ ID NO: 522222 - RNA, 20 nt, Artificial Sequence
  Synthetic
accaagaucacagguaugac

SEQ ID NO: 522223 - RNA, 21 nt, Artificial Sequence
  Synthetic
aaccaagaucacagguaugac

SEQ ID NO: 522224 - RNA, 22 nt, Artificial Sequence
  Synthetic
aaaccaagaucacagguaugac

SEQ ID NO: 522225 - RNA, 23 nt, Artificial Sequence
  Synthetic
aaaaccaagaucacagguaugac

SEQ ID NO: 522226 - RNA, 24 nt, Artificial Sequence
  Synthetic
gaaaaccaagaucacagguaugac

SEQ ID NO: 522227 - RNA, 18 nt, Artificial Sequence
  Synthetic
cuuaaguuucuguaugac

SEQ ID NO: 522228 - RNA, 19 nt, Artificial Sequence
  Synthetic
gcuuaaguuucuguaugac

SEQ ID NO: 522229 - RNA, 20 nt, Artificial Sequence
  Synthetic
ugcuuaaguuucuguaugac

SEQ ID NO: 522230 - RNA, 21 nt, Artificial Sequence
  Synthetic
augcuuaaguuucuguaugac

SEQ ID NO: 522231 - RNA, 22 nt, Artificial Sequence
  Synthetic
caugcuuaaguuucuguaugac

SEQ ID NO: 522232 - RNA, 23 nt, Artificial Sequence
  Synthetic
acaugcuuaaguuucuguaugac

SEQ ID NO: 522233 - RNA, 24 nt, Artificial Sequence
  Synthetic
cacaugcuuaaguuucuguaugac

SEQ ID NO: 522234 - RNA, 18 nt, Artificial Sequence
  Synthetic
gcugucacauauuaugac

SEQ ID NO: 522235 - RNA, 19 nt, Artificial Sequence
  Synthetic
agcugucacauauuaugac

SEQ ID NO: 522236 - RNA, 20 nt, Artificial Sequence
  Synthetic
uagcugucacauauuaugac

SEQ ID NO: 522237 - RNA, 21 nt, Artificial Sequence
  Synthetic
uuagcugucacauauuaugac

SEQ ID NO: 522238 - RNA, 22 nt, Artificial Sequence
  Synthetic
uuuagcugucacauauuaugac

SEQ ID NO: 522239 - RNA, 23 nt, Artificial Sequence
  Synthetic
cuuuagcugucacauauuaugac

SEQ ID NO: 522240 - RNA, 24 nt, Artificial Sequence
  Synthetic
ccuuuagcugucacauauuaugac

SEQ ID NO: 522241 - RNA, 18 nt, Artificial Sequence
  Synthetic
guuuauuuuuguuaugac

SEQ ID NO: 522242 - RNA, 19 nt, Artificial Sequence
  Synthetic
gguuuauuuuuguuaugac

SEQ ID NO: 522243 - RNA, 20 nt, Artificial Sequence
  Synthetic
cgguuuauuuuuguuaugac

SEQ ID NO: 522244 - RNA, 21 nt, Artificial Sequence
  Synthetic
gcgguuuauuuuuguuaugac

SEQ ID NO: 522245 - RNA, 22 nt, Artificial Sequence
  Synthetic
ggcgguuuauuuuuguuaugac

SEQ ID NO: 522246 - RNA, 23 nt, Artificial Sequence
  Synthetic
gggcgguuuauuuuuguuaugac

SEQ ID NO: 522247 - RNA, 24 nt, Artificial Sequence
  Synthetic
ggggcgguuuauuuuuguuaugac

SEQ ID NO: 522248 - RNA, 18 nt, Artificial Sequence
  Synthetic
aaaacaccauuuuaugac

SEQ ID NO: 522249 - RNA, 19 nt, Artificial Sequence
  Synthetic
aaaaacaccauuuuaugac

SEQ ID NO: 522250 - RNA, 20 nt, Artificial Sequence
  Synthetic
aaaaaacaccauuuuaugac

SEQ ID NO: 522251 - RNA, 21 nt, Artificial Sequence
  Synthetic
caaaaaacaccauuuuaugac

SEQ ID NO: 522252 - RNA, 22 nt, Artificial Sequence
  Synthetic
ucaaaaaacaccauuuuaugac

SEQ ID NO: 522253 - RNA, 23 nt, Artificial Sequence
  Synthetic
gucaaaaaacaccauuuuaugac

SEQ ID NO: 522254 - RNA, 24 nt, Artificial Sequence
  Synthetic
ugucaaaaaacaccauuuuaugac

SEQ ID NO: 522255 - RNA, 18 nt, Artificial Sequence
  Synthetic
ucucuuucaaaaacugac

SEQ ID NO: 522256 - RNA, 19 nt, Artificial Sequence
  Synthetic
uucucuuucaaaaacugac

SEQ ID NO: 522257 - RNA, 20 nt, Artificial Sequence
  Synthetic
uuucucuuucaaaaacugac

SEQ ID NO: 522258 - RNA, 21 nt, Artificial Sequence
  Synthetic
auuucucuuucaaaaacugac

SEQ ID NO: 522259 - RNA, 22 nt, Artificial Sequence
  Synthetic
gauuucucuuucaaaaacugac

SEQ ID NO: 522260 - RNA, 23 nt, Artificial Sequence
  Synthetic
ggauuucucuuucaaaaacugac

SEQ ID NO: 522261 - RNA, 24 nt, Artificial Sequence
  Synthetic
gggauuucucuuucaaaaacugac

SEQ ID NO: 522262 - RNA, 18 nt, Artificial Sequence
  Synthetic
aaaaccagaaagacugac

SEQ ID NO: 522263 - RNA, 19 nt, Artificial Sequence
  Synthetic
caaaaccagaaagacugac

SEQ ID NO: 522264 - RNA, 20 nt, Artificial Sequence
  Synthetic
ccaaaaccagaaagacugac

SEQ ID NO: 522265 - RNA, 21 nt, Artificial Sequence
  Synthetic
uccaaaaccagaaagacugac

SEQ ID NO: 522266 - RNA, 22 nt, Artificial Sequence
  Synthetic
guccaaaaccagaaagacugac

SEQ ID NO: 522267 - RNA, 23 nt, Artificial Sequence
  Synthetic
uguccaaaaccagaaagacugac

SEQ ID NO: 522268 - RNA, 24 nt, Artificial Sequence
  Synthetic
cuguccaaaaccagaaagacugac

SEQ ID NO: 522269 - RNA, 18 nt, Artificial Sequence
  Synthetic
ugcuuccagaugacugac

SEQ ID NO: 522270 - RNA, 19 nt, Artificial Sequence
  Synthetic
uugcuuccagaugacugac

SEQ ID NO: 522271 - RNA, 20 nt, Artificial Sequence
  Synthetic
auugcuuccagaugacugac

SEQ ID NO: 522272 - RNA, 21 nt, Artificial Sequence
  Synthetic
aauugcuuccagaugacugac

SEQ ID NO: 522273 - RNA, 22 nt, Artificial Sequence
  Synthetic
gaauugcuuccagaugacugac

SEQ ID NO: 522274 - RNA, 23 nt, Artificial Sequence
  Synthetic
agaauugcuuccagaugacugac

SEQ ID NO: 522275 - RNA, 24 nt, Artificial Sequence
  Synthetic
aagaauugcuuccagaugacugac

SEQ ID NO: 522276 - RNA, 18 nt, Artificial Sequence
  Synthetic
auuccuuuagguacugac

SEQ ID NO: 522277 - RNA, 19 nt, Artificial Sequence
  Synthetic
aauuccuuuagguacugac

SEQ ID NO: 522278 - RNA, 20 nt, Artificial Sequence
  Synthetic
aaauuccuuuagguacugac

SEQ ID NO: 522279 - RNA, 21 nt, Artificial Sequence
  Synthetic
uaaauuccuuuagguacugac

SEQ ID NO: 522280 - RNA, 22 nt, Artificial Sequence
  Synthetic
auaaauuccuuuagguacugac

SEQ ID NO: 522281 - RNA, 23 nt, Artificial Sequence
  Synthetic
aauaaauuccuuuagguacugac

SEQ ID NO: 522282 - RNA, 24 nt, Artificial Sequence
  Synthetic
aaauaaauuccuuuagguacugac

SEQ ID NO: 522283 - RNA, 18 nt, Artificial Sequence
  Synthetic
uaucuauaagccccugac

SEQ ID NO: 522284 - RNA, 19 nt, Artificial Sequence
  Synthetic
uuaucuauaagccccugac

SEQ ID NO: 522285 - RNA, 20 nt, Artificial Sequence
  Synthetic
uuuaucuauaagccccugac

SEQ ID NO: 522286 - RNA, 21 nt, Artificial Sequence
  Synthetic
uuuuaucuauaagccccugac

SEQ ID NO: 522287 - RNA, 22 nt, Artificial Sequence
  Synthetic
guuuuaucuauaagccccugac

SEQ ID NO: 522288 - RNA, 23 nt, Artificial Sequence
  Synthetic
aguuuuaucuauaagccccugac

SEQ ID NO: 522289 - RNA, 24 nt, Artificial Sequence
  Synthetic
gaguuuuaucuauaagccccugac

SEQ ID NO: 522290 - RNA, 18 nt, Artificial Sequence
  Synthetic
ucuguuaacuugccugac

SEQ ID NO: 522291 - RNA, 19 nt, Artificial Sequence
  Synthetic
uucuguuaacuugccugac

SEQ ID NO: 522292 - RNA, 20 nt, Artificial Sequence
  Synthetic
cuucuguuaacuugccugac

SEQ ID NO: 522293 - RNA, 21 nt, Artificial Sequence
  Synthetic
gcuucuguuaacuugccugac

SEQ ID NO: 522294 - RNA, 22 nt, Artificial Sequence
  Synthetic
ugcuucuguuaacuugccugac

SEQ ID NO: 522295 - RNA, 23 nt, Artificial Sequence
  Synthetic
cugcuucuguuaacuugccugac

SEQ ID NO: 522296 - RNA, 24 nt, Artificial Sequence
  Synthetic
gcugcuucuguuaacuugccugac

SEQ ID NO: 522297 - RNA, 18 nt, Artificial Sequence
  Synthetic
uguucuaauucuccugac

SEQ ID NO: 522298 - RNA, 19 nt, Artificial Sequence
  Synthetic
auguucuaauucuccugac

SEQ ID NO: 522299 - RNA, 20 nt, Artificial Sequence
  Synthetic
cauguucuaauucuccugac

SEQ ID NO: 522300 - RNA, 21 nt, Artificial Sequence
  Synthetic
ucauguucuaauucuccugac

SEQ ID NO: 522301 - RNA, 22 nt, Artificial Sequence
  Synthetic
cucauguucuaauucuccugac

SEQ ID NO: 522302 - RNA, 23 nt, Artificial Sequence
  Synthetic
ucucauguucuaauucuccugac

SEQ ID NO: 522303 - RNA, 24 nt, Artificial Sequence
  Synthetic
uucucauguucuaauucuccugac

SEQ ID NO: 522304 - RNA, 18 nt, Artificial Sequence
  Synthetic
ugguacagaucagcugac

SEQ ID NO: 522305 - RNA, 19 nt, Artificial Sequence
  Synthetic
gugguacagaucagcugac

SEQ ID NO: 522306 - RNA, 20 nt, Artificial Sequence
  Synthetic
agugguacagaucagcugac

SEQ ID NO: 522307 - RNA, 21 nt, Artificial Sequence
  Synthetic
aagugguacagaucagcugac

SEQ ID NO: 522308 - RNA, 22 nt, Artificial Sequence
  Synthetic
uaagugguacagaucagcugac

SEQ ID NO: 522309 - RNA, 23 nt, Artificial Sequence
  Synthetic
cuaagugguacagaucagcugac

SEQ ID NO: 522310 - RNA, 24 nt, Artificial Sequence
  Synthetic
acuaagugguacagaucagcugac

SEQ ID NO: 522311 - RNA, 18 nt, Artificial Sequence
  Synthetic
ucauccuucucagcugac

SEQ ID NO: 522312 - RNA, 19 nt, Artificial Sequence
  Synthetic
cucauccuucucagcugac

SEQ ID NO: 522313 - RNA, 20 nt, Artificial Sequence
  Synthetic
gcucauccuucucagcugac

SEQ ID NO: 522314 - RNA, 21 nt, Artificial Sequence
  Synthetic
agcucauccuucucagcugac

SEQ ID NO: 522315 - RNA, 22 nt, Artificial Sequence
  Synthetic
uagcucauccuucucagcugac

SEQ ID NO: 522316 - RNA, 23 nt, Artificial Sequence
  Synthetic
cuagcucauccuucucagcugac

SEQ ID NO: 522317 - RNA, 24 nt, Artificial Sequence
  Synthetic
ucuagcucauccuucucagcugac

SEQ ID NO: 522318 - RNA, 18 nt, Artificial Sequence
  Synthetic
ccugaaagcagagcugac

SEQ ID NO: 522319 - RNA, 19 nt, Artificial Sequence
  Synthetic
accugaaagcagagcugac

SEQ ID NO: 522320 - RNA, 20 nt, Artificial Sequence
  Synthetic
aaccugaaagcagagcugac

SEQ ID NO: 522321 - RNA, 21 nt, Artificial Sequence
  Synthetic
gaaccugaaagcagagcugac

SEQ ID NO: 522322 - RNA, 22 nt, Artificial Sequence
  Synthetic
agaaccugaaagcagagcugac

SEQ ID NO: 522323 - RNA, 23 nt, Artificial Sequence
  Synthetic
gagaaccugaaagcagagcugac

SEQ ID NO: 522324 - RNA, 24 nt, Artificial Sequence
  Synthetic
agagaaccugaaagcagagcugac

SEQ ID NO: 522325 - RNA, 18 nt, Artificial Sequence
  Synthetic
caaacugcgguagcugac

SEQ ID NO: 522326 - RNA, 19 nt, Artificial Sequence
  Synthetic
ucaaacugcgguagcugac

SEQ ID NO: 522327 - RNA, 20 nt, Artificial Sequence
  Synthetic
aucaaacugcgguagcugac

SEQ ID NO: 522328 - RNA, 21 nt, Artificial Sequence
  Synthetic
aaucaaacugcgguagcugac

SEQ ID NO: 522329 - RNA, 22 nt, Artificial Sequence
  Synthetic
gaaucaaacugcgguagcugac

SEQ ID NO: 522330 - RNA, 23 nt, Artificial Sequence
  Synthetic
agaaucaaacugcgguagcugac

SEQ ID NO: 522331 - RNA, 24 nt, Artificial Sequence
  Synthetic
aagaaucaaacugcgguagcugac

SEQ ID NO: 522332 - RNA, 18 nt, Artificial Sequence
  Synthetic
gauuaggacauggcugac

SEQ ID NO: 522333 - RNA, 19 nt, Artificial Sequence
  Synthetic
ugauuaggacauggcugac

SEQ ID NO: 522334 - RNA, 20 nt, Artificial Sequence
  Synthetic
gugauuaggacauggcugac

SEQ ID NO: 522335 - RNA, 21 nt, Artificial Sequence
  Synthetic
agugauuaggacauggcugac

SEQ ID NO: 522336 - RNA, 22 nt, Artificial Sequence
  Synthetic
aagugauuaggacauggcugac

SEQ ID NO: 522337 - RNA, 23 nt, Artificial Sequence
  Synthetic
aaagugauuaggacauggcugac

SEQ ID NO: 522338 - RNA, 24 nt, Artificial Sequence
  Synthetic
caaagugauuaggacauggcugac

SEQ ID NO: 522339 - RNA, 18 nt, Artificial Sequence
  Synthetic
ugccuguggacugcugac

SEQ ID NO: 522340 - RNA, 19 nt, Artificial Sequence
  Synthetic
cugccuguggacugcugac

SEQ ID NO: 522341 - RNA, 20 nt, Artificial Sequence
  Synthetic
gcugccuguggacugcugac

SEQ ID NO: 522342 - RNA, 21 nt, Artificial Sequence
  Synthetic
ugcugccuguggacugcugac

SEQ ID NO: 522343 - RNA, 22 nt, Artificial Sequence
  Synthetic
cugcugccuguggacugcugac

SEQ ID NO: 522344 - RNA, 23 nt, Artificial Sequence
  Synthetic
ccugcugccuguggacugcugac

SEQ ID NO: 522345 - RNA, 24 nt, Artificial Sequence
  Synthetic
uccugcugccuguggacugcugac

SEQ ID NO: 522346 - RNA, 18 nt, Artificial Sequence
  Synthetic
ccagugaacgaaucugac

SEQ ID NO: 522347 - RNA, 19 nt, Artificial Sequence
  Synthetic
cccagugaacgaaucugac

SEQ ID NO: 522348 - RNA, 20 nt, Artificial Sequence
  Synthetic
acccagugaacgaaucugac

SEQ ID NO: 522349 - RNA, 21 nt, Artificial Sequence
  Synthetic
aacccagugaacgaaucugac

SEQ ID NO: 522350 - RNA, 22 nt, Artificial Sequence
  Synthetic
caacccagugaacgaaucugac

SEQ ID NO: 522351 - RNA, 23 nt, Artificial Sequence
  Synthetic
ccaacccagugaacgaaucugac

SEQ ID NO: 522352 - RNA, 24 nt, Artificial Sequence
  Synthetic
accaacccagugaacgaaucugac

SEQ ID NO: 522353 - RNA, 18 nt, Artificial Sequence
  Synthetic
uguggcugcugaucugac

SEQ ID NO: 522354 - RNA, 19 nt, Artificial Sequence
  Synthetic
auguggcugcugaucugac

SEQ ID NO: 522355 - RNA, 20 nt, Artificial Sequence
  Synthetic
aauguggcugcugaucugac

SEQ ID NO: 522356 - RNA, 21 nt, Artificial Sequence
  Synthetic
uaauguggcugcugaucugac

SEQ ID NO: 522357 - RNA, 22 nt, Artificial Sequence
  Synthetic
uuaauguggcugcugaucugac

SEQ ID NO: 522358 - RNA, 23 nt, Artificial Sequence
  Synthetic
uuuaauguggcugcugaucugac

SEQ ID NO: 522359 - RNA, 24 nt, Artificial Sequence
  Synthetic
auuuaauguggcugcugaucugac

SEQ ID NO: 522360 - RNA, 18 nt, Artificial Sequence
  Synthetic
gcaauacugcuaucugac

SEQ ID NO: 522361 - RNA, 19 nt, Artificial Sequence
  Synthetic
agcaauacugcuaucugac

SEQ ID NO: 522362 - RNA, 20 nt, Artificial Sequence
  Synthetic
aagcaauacugcuaucugac

SEQ ID NO: 522363 - RNA, 21 nt, Artificial Sequence
  Synthetic
caagcaauacugcuaucugac

SEQ ID NO: 522364 - RNA, 22 nt, Artificial Sequence
  Synthetic
ccaagcaauacugcuaucugac

SEQ ID NO: 522365 - RNA, 23 nt, Artificial Sequence
  Synthetic
gccaagcaauacugcuaucugac

SEQ ID NO: 522366 - RNA, 24 nt, Artificial Sequence
  Synthetic
ggccaagcaauacugcuaucugac

SEQ ID NO: 522367 - RNA, 18 nt, Artificial Sequence
  Synthetic
acuucugccuuaucugac

SEQ ID NO: 522368 - RNA, 19 nt, Artificial Sequence
  Synthetic
uacuucugccuuaucugac

SEQ ID NO: 522369 - RNA, 20 nt, Artificial Sequence
  Synthetic
guacuucugccuuaucugac

SEQ ID NO: 522370 - RNA, 21 nt, Artificial Sequence
  Synthetic
aguacuucugccuuaucugac

SEQ ID NO: 522371 - RNA, 22 nt, Artificial Sequence
  Synthetic
aaguacuucugccuuaucugac

SEQ ID NO: 522372 - RNA, 23 nt, Artificial Sequence
  Synthetic
gaaguacuucugccuuaucugac

SEQ ID NO: 522373 - RNA, 24 nt, Artificial Sequence
  Synthetic
agaaguacuucugccuuaucugac

SEQ ID NO: 522374 - RNA, 18 nt, Artificial Sequence
  Synthetic
accauauauagcucugac

SEQ ID NO: 522375 - RNA, 19 nt, Artificial Sequence
  Synthetic
uaccauauauagcucugac

SEQ ID NO: 522376 - RNA, 20 nt, Artificial Sequence
  Synthetic
cuaccauauauagcucugac

SEQ ID NO: 522377 - RNA, 21 nt, Artificial Sequence
  Synthetic
acuaccauauauagcucugac

SEQ ID NO: 522378 - RNA, 22 nt, Artificial Sequence
  Synthetic
uacuaccauauauagcucugac

SEQ ID NO: 522379 - RNA, 23 nt, Artificial Sequence
  Synthetic
uuacuaccauauauagcucugac

SEQ ID NO: 522380 - RNA, 24 nt, Artificial Sequence
  Synthetic
auuacuaccauauauagcucugac

SEQ ID NO: 522381 - RNA, 18 nt, Artificial Sequence
  Synthetic
uagacaauuuucucugac

SEQ ID NO: 522382 - RNA, 19 nt, Artificial Sequence
  Synthetic
uuagacaauuuucucugac

SEQ ID NO: 522383 - RNA, 20 nt, Artificial Sequence
  Synthetic
auuagacaauuuucucugac

SEQ ID NO: 522384 - RNA, 21 nt, Artificial Sequence
  Synthetic
uauuagacaauuuucucugac

SEQ ID NO: 522385 - RNA, 22 nt, Artificial Sequence
  Synthetic
uuauuagacaauuuucucugac

SEQ ID NO: 522386 - RNA, 23 nt, Artificial Sequence
  Synthetic
uuuauuagacaauuuucucugac

SEQ ID NO: 522387 - RNA, 24 nt, Artificial Sequence
  Synthetic
auuuauuagacaauuuucucugac

SEQ ID NO: 522388 - RNA, 18 nt, Artificial Sequence
  Synthetic
ccaaguaaggagucugac

SEQ ID NO: 522389 - RNA, 19 nt, Artificial Sequence
  Synthetic
cccaaguaaggagucugac

SEQ ID NO: 522390 - RNA, 20 nt, Artificial Sequence
  Synthetic
acccaaguaaggagucugac

SEQ ID NO: 522391 - RNA, 21 nt, Artificial Sequence
  Synthetic
aacccaaguaaggagucugac

SEQ ID NO: 522392 - RNA, 22 nt, Artificial Sequence
  Synthetic
caacccaaguaaggagucugac

SEQ ID NO: 522393 - RNA, 23 nt, Artificial Sequence
  Synthetic
gcaacccaaguaaggagucugac

SEQ ID NO: 522394 - RNA, 24 nt, Artificial Sequence
  Synthetic
agcaacccaaguaaggagucugac

SEQ ID NO: 522395 - RNA, 18 nt, Artificial Sequence
  Synthetic
auuguuucuaugucugac

SEQ ID NO: 522396 - RNA, 19 nt, Artificial Sequence
  Synthetic
uauuguuucuaugucugac

SEQ ID NO: 522397 - RNA, 20 nt, Artificial Sequence
  Synthetic
guauuguuucuaugucugac

SEQ ID NO: 522398 - RNA, 21 nt, Artificial Sequence
  Synthetic
uguauuguuucuaugucugac

SEQ ID NO: 522399 - RNA, 22 nt, Artificial Sequence
  Synthetic
cuguauuguuucuaugucugac

SEQ ID NO: 522400 - RNA, 23 nt, Artificial Sequence
  Synthetic
ccuguauuguuucuaugucugac

SEQ ID NO: 522401 - RNA, 24 nt, Artificial Sequence
  Synthetic
uccuguauuguuucuaugucugac

SEQ ID NO: 522402 - RNA, 18 nt, Artificial Sequence
  Synthetic
uuuaucuaacugucugac

SEQ ID NO: 522403 - RNA, 19 nt, Artificial Sequence
  Synthetic
cuuuaucuaacugucugac

SEQ ID NO: 522404 - RNA, 20 nt, Artificial Sequence
  Synthetic
ccuuuaucuaacugucugac

SEQ ID NO: 522405 - RNA, 21 nt, Artificial Sequence
  Synthetic
gccuuuaucuaacugucugac

SEQ ID NO: 522406 - RNA, 22 nt, Artificial Sequence
  Synthetic
ggccuuuaucuaacugucugac

SEQ ID NO: 522407 - RNA, 23 nt, Artificial Sequence
  Synthetic
aggccuuuaucuaacugucugac

SEQ ID NO: 522408 - RNA, 24 nt, Artificial Sequence
  Synthetic
gaggccuuuaucuaacugucugac

SEQ ID NO: 522409 - RNA, 18 nt, Artificial Sequence
  Synthetic
aagcaagugacuucugac

SEQ ID NO: 522410 - RNA, 19 nt, Artificial Sequence
  Synthetic
aaagcaagugacuucugac

SEQ ID NO: 522411 - RNA, 20 nt, Artificial Sequence
  Synthetic
caaagcaagugacuucugac

SEQ ID NO: 522412 - RNA, 21 nt, Artificial Sequence
  Synthetic
acaaagcaagugacuucugac

SEQ ID NO: 522413 - RNA, 22 nt, Artificial Sequence
  Synthetic
uacaaagcaagugacuucugac

SEQ ID NO: 522414 - RNA, 23 nt, Artificial Sequence
  Synthetic
auacaaagcaagugacuucugac

SEQ ID NO: 522415 - RNA, 24 nt, Artificial Sequence
  Synthetic
aauacaaagcaagugacuucugac

SEQ ID NO: 522416 - RNA, 18 nt, Artificial Sequence
  Synthetic
aguucugugaguucugac

SEQ ID NO: 522417 - RNA, 19 nt, Artificial Sequence
  Synthetic
aaguucugugaguucugac

SEQ ID NO: 522418 - RNA, 20 nt, Artificial Sequence
  Synthetic
aaaguucugugaguucugac

SEQ ID NO: 522419 - RNA, 21 nt, Artificial Sequence
  Synthetic
uaaaguucugugaguucugac

SEQ ID NO: 522420 - RNA, 22 nt, Artificial Sequence
  Synthetic
guaaaguucugugaguucugac

SEQ ID NO: 522421 - RNA, 23 nt, Artificial Sequence
  Synthetic
aguaaaguucugugaguucugac

SEQ ID NO: 522422 - RNA, 24 nt, Artificial Sequence
  Synthetic
aaguaaaguucugugaguucugac

SEQ ID NO: 522423 - RNA, 18 nt, Artificial Sequence
  Synthetic
uagacuuccuuuucugac

SEQ ID NO: 522424 - RNA, 19 nt, Artificial Sequence
  Synthetic
auagacuuccuuuucugac

SEQ ID NO: 522425 - RNA, 20 nt, Artificial Sequence
  Synthetic
aauagacuuccuuuucugac

SEQ ID NO: 522426 - RNA, 21 nt, Artificial Sequence
  Synthetic
aaauagacuuccuuuucugac

SEQ ID NO: 522427 - RNA, 22 nt, Artificial Sequence
  Synthetic
aaaauagacuuccuuuucugac

SEQ ID NO: 522428 - RNA, 23 nt, Artificial Sequence
  Synthetic
uaaaauagacuuccuuuucugac

SEQ ID NO: 522429 - RNA, 24 nt, Artificial Sequence
  Synthetic
auaaaauagacuuccuuuucugac

SEQ ID NO: 522430 - RNA, 18 nt, Artificial Sequence
  Synthetic
gagcugggagaaagugac

SEQ ID NO: 522431 - RNA, 19 nt, Artificial Sequence
  Synthetic
ggagcugggagaaagugac

SEQ ID NO: 522432 - RNA, 20 nt, Artificial Sequence
  Synthetic
uggagcugggagaaagugac

SEQ ID NO: 522433 - RNA, 21 nt, Artificial Sequence
  Synthetic
guggagcugggagaaagugac

SEQ ID NO: 522434 - RNA, 22 nt, Artificial Sequence
  Synthetic
uguggagcugggagaaagugac

SEQ ID NO: 522435 - RNA, 23 nt, Artificial Sequence
  Synthetic
cuguggagcugggagaaagugac

SEQ ID NO: 522436 - RNA, 24 nt, Artificial Sequence
  Synthetic
acuguggagcugggagaaagugac

SEQ ID NO: 522437 - RNA, 18 nt, Artificial Sequence
  Synthetic
aacuuuagauaaagugac

SEQ ID NO: 522438 - RNA, 19 nt, Artificial Sequence
  Synthetic
uaacuuuagauaaagugac

SEQ ID NO: 522439 - RNA, 20 nt, Artificial Sequence
  Synthetic
guaacuuuagauaaagugac

SEQ ID NO: 522440 - RNA, 21 nt, Artificial Sequence
  Synthetic
uguaacuuuagauaaagugac

SEQ ID NO: 522441 - RNA, 22 nt, Artificial Sequence
  Synthetic
guguaacuuuagauaaagugac

SEQ ID NO: 522442 - RNA, 23 nt, Artificial Sequence
  Synthetic
gguguaacuuuagauaaagugac

SEQ ID NO: 522443 - RNA, 24 nt, Artificial Sequence
  Synthetic
ugguguaacuuuagauaaagugac

SEQ ID NO: 522444 - RNA, 18 nt, Artificial Sequence
  Synthetic
aaccuuaaaguaagugac

SEQ ID NO: 522445 - RNA, 19 nt, Artificial Sequence
  Synthetic
uaaccuuaaaguaagugac

SEQ ID NO: 522446 - RNA, 20 nt, Artificial Sequence
  Synthetic
guaaccuuaaaguaagugac

SEQ ID NO: 522447 - RNA, 21 nt, Artificial Sequence
  Synthetic
uguaaccuuaaaguaagugac

SEQ ID NO: 522448 - RNA, 22 nt, Artificial Sequence
  Synthetic
cuguaaccuuaaaguaagugac

SEQ ID NO: 522449 - RNA, 23 nt, Artificial Sequence
  Synthetic
gcuguaaccuuaaaguaagugac

SEQ ID NO: 522450 - RNA, 24 nt, Artificial Sequence
  Synthetic
ugcuguaaccuuaaaguaagugac

SEQ ID NO: 522451 - RNA, 18 nt, Artificial Sequence
  Synthetic
guacaaaaaaacagugac

SEQ ID NO: 522452 - RNA, 19 nt, Artificial Sequence
  Synthetic
gguacaaaaaaacagugac

SEQ ID NO: 522453 - RNA, 20 nt, Artificial Sequence
  Synthetic
cgguacaaaaaaacagugac

SEQ ID NO: 522454 - RNA, 21 nt, Artificial Sequence
  Synthetic
acgguacaaaaaaacagugac

SEQ ID NO: 522455 - RNA, 22 nt, Artificial Sequence
  Synthetic
aacgguacaaaaaaacagugac

SEQ ID NO: 522456 - RNA, 23 nt, Artificial Sequence
  Synthetic
aaacgguacaaaaaaacagugac

SEQ ID NO: 522457 - RNA, 24 nt, Artificial Sequence
  Synthetic
uaaacgguacaaaaaaacagugac

SEQ ID NO: 522458 - RNA, 18 nt, Artificial Sequence
  Synthetic
ucagauaagauuagugac

SEQ ID NO: 522459 - RNA, 19 nt, Artificial Sequence
  Synthetic
uucagauaagauuagugac

SEQ ID NO: 522460 - RNA, 20 nt, Artificial Sequence
  Synthetic
auucagauaagauuagugac

SEQ ID NO: 522461 - RNA, 21 nt, Artificial Sequence
  Synthetic
aauucagauaagauuagugac

SEQ ID NO: 522462 - RNA, 22 nt, Artificial Sequence
  Synthetic
aaauucagauaagauuagugac

SEQ ID NO: 522463 - RNA, 23 nt, Artificial Sequence
  Synthetic
uaaauucagauaagauuagugac

SEQ ID NO: 522464 - RNA, 24 nt, Artificial Sequence
  Synthetic
auaaauucagauaagauuagugac

SEQ ID NO: 522465 - RNA, 18 nt, Artificial Sequence
  Synthetic
cuugaauaauuacgugac

SEQ ID NO: 522466 - RNA, 19 nt, Artificial Sequence
  Synthetic
ucuugaauaauuacgugac

SEQ ID NO: 522467 - RNA, 20 nt, Artificial Sequence
  Synthetic
uucuugaauaauuacgugac

SEQ ID NO: 522468 - RNA, 21 nt, Artificial Sequence
  Synthetic
guucuugaauaauuacgugac

SEQ ID NO: 522469 - RNA, 22 nt, Artificial Sequence
  Synthetic
uguucuugaauaauuacgugac

SEQ ID NO: 522470 - RNA, 23 nt, Artificial Sequence
  Synthetic
auguucuugaauaauuacgugac

SEQ ID NO: 522471 - RNA, 24 nt, Artificial Sequence
  Synthetic
uauguucuugaauaauuacgugac

SEQ ID NO: 522472 - RNA, 18 nt, Artificial Sequence
  Synthetic
cauaguucaaaaggugac

SEQ ID NO: 522473 - RNA, 19 nt, Artificial Sequence
  Synthetic
ucauaguucaaaaggugac

SEQ ID NO: 522474 - RNA, 20 nt, Artificial Sequence
  Synthetic
aucauaguucaaaaggugac

SEQ ID NO: 522475 - RNA, 21 nt, Artificial Sequence
  Synthetic
caucauaguucaaaaggugac

SEQ ID NO: 522476 - RNA, 22 nt, Artificial Sequence
  Synthetic
ccaucauaguucaaaaggugac

SEQ ID NO: 522477 - RNA, 23 nt, Artificial Sequence
  Synthetic
uccaucauaguucaaaaggugac

SEQ ID NO: 522478 - RNA, 24 nt, Artificial Sequence
  Synthetic
cuccaucauaguucaaaaggugac

SEQ ID NO: 522479 - RNA, 18 nt, Artificial Sequence
  Synthetic
cuaccaaaauuaggugac

SEQ ID NO: 522480 - RNA, 19 nt, Artificial Sequence
  Synthetic
gcuaccaaaauuaggugac

SEQ ID NO: 522481 - RNA, 20 nt, Artificial Sequence
  Synthetic
ggcuaccaaaauuaggugac

SEQ ID NO: 522482 - RNA, 21 nt, Artificial Sequence
  Synthetic
uggcuaccaaaauuaggugac

SEQ ID NO: 522483 - RNA, 22 nt, Artificial Sequence
  Synthetic
guggcuaccaaaauuaggugac

SEQ ID NO: 522484 - RNA, 23 nt, Artificial Sequence
  Synthetic
uguggcuaccaaaauuaggugac

SEQ ID NO: 522485 - RNA, 24 nt, Artificial Sequence
  Synthetic
cuguggcuaccaaaauuaggugac

SEQ ID NO: 522486 - RNA, 18 nt, Artificial Sequence
  Synthetic
auuuguggagggggugac

SEQ ID NO: 522487 - RNA, 19 nt, Artificial Sequence
  Synthetic
aauuuguggagggggugac

SEQ ID NO: 522488 - RNA, 20 nt, Artificial Sequence
  Synthetic
caauuuguggagggggugac

SEQ ID NO: 522489 - RNA, 21 nt, Artificial Sequence
  Synthetic
ucaauuuguggagggggugac

SEQ ID NO: 522490 - RNA, 22 nt, Artificial Sequence
  Synthetic
uucaauuuguggagggggugac

SEQ ID NO: 522491 - RNA, 23 nt, Artificial Sequence
  Synthetic
auucaauuuguggagggggugac

SEQ ID NO: 522492 - RNA, 24 nt, Artificial Sequence
  Synthetic
aauucaauuuguggagggggugac

SEQ ID NO: 522493 - RNA, 18 nt, Artificial Sequence
  Synthetic
ucagggcucuugggugac

SEQ ID NO: 522494 - RNA, 19 nt, Artificial Sequence
  Synthetic
cucagggcucuugggugac

SEQ ID NO: 522495 - RNA, 20 nt, Artificial Sequence
  Synthetic
ccucagggcucuugggugac

SEQ ID NO: 522496 - RNA, 21 nt, Artificial Sequence
  Synthetic
uccucagggcucuugggugac

SEQ ID NO: 522497 - RNA, 22 nt, Artificial Sequence
  Synthetic
uuccucagggcucuugggugac

SEQ ID NO: 522498 - RNA, 23 nt, Artificial Sequence
  Synthetic
auuccucagggcucuugggugac

SEQ ID NO: 522499 - RNA, 24 nt, Artificial Sequence
  Synthetic
uauuccucagggcucuugggugac

SEQ ID NO: 522500 - RNA, 18 nt, Artificial Sequence
  Synthetic
gcuauaaacaaaugugac

SEQ ID NO: 522501 - RNA, 19 nt, Artificial Sequence
  Synthetic
ggcuauaaacaaaugugac

SEQ ID NO: 522502 - RNA, 20 nt, Artificial Sequence
  Synthetic
gggcuauaaacaaaugugac

SEQ ID NO: 522503 - RNA, 21 nt, Artificial Sequence
  Synthetic
ugggcuauaaacaaaugugac

SEQ ID NO: 522504 - RNA, 22 nt, Artificial Sequence
  Synthetic
augggcuauaaacaaaugugac

SEQ ID NO: 522505 - RNA, 23 nt, Artificial Sequence
  Synthetic
aaugggcuauaaacaaaugugac

SEQ ID NO: 522506 - RNA, 24 nt, Artificial Sequence
  Synthetic
uaaugggcuauaaacaaaugugac

SEQ ID NO: 522507 - RNA, 18 nt, Artificial Sequence
  Synthetic
ugcauccugcaaugugac

SEQ ID NO: 522508 - RNA, 19 nt, Artificial Sequence
  Synthetic
cugcauccugcaaugugac

SEQ ID NO: 522509 - RNA, 20 nt, Artificial Sequence
  Synthetic
ucugcauccugcaaugugac

SEQ ID NO: 522510 - RNA, 21 nt, Artificial Sequence
  Synthetic
cucugcauccugcaaugugac

SEQ ID NO: 522511 - RNA, 22 nt, Artificial Sequence
  Synthetic
acucugcauccugcaaugugac

SEQ ID NO: 522512 - RNA, 23 nt, Artificial Sequence
  Synthetic
cacucugcauccugcaaugugac

SEQ ID NO: 522513 - RNA, 24 nt, Artificial Sequence
  Synthetic
ucacucugcauccugcaaugugac

SEQ ID NO: 522514 - RNA, 18 nt, Artificial Sequence
  Synthetic
cugaaaaguggaugugac

SEQ ID NO: 522515 - RNA, 19 nt, Artificial Sequence
  Synthetic
gcugaaaaguggaugugac

SEQ ID NO: 522516 - RNA, 20 nt, Artificial Sequence
  Synthetic
ugcugaaaaguggaugugac

SEQ ID NO: 522517 - RNA, 21 nt, Artificial Sequence
  Synthetic
augcugaaaaguggaugugac

SEQ ID NO: 522518 - RNA, 22 nt, Artificial Sequence
  Synthetic
aaugcugaaaaguggaugugac

SEQ ID NO: 522519 - RNA, 23 nt, Artificial Sequence
  Synthetic
aaaugcugaaaaguggaugugac

SEQ ID NO: 522520 - RNA, 24 nt, Artificial Sequence
  Synthetic
uaaaugcugaaaaguggaugugac

SEQ ID NO: 522521 - RNA, 18 nt, Artificial Sequence
  Synthetic
aauuuccucaacugugac

SEQ ID NO: 522522 - RNA, 19 nt, Artificial Sequence
  Synthetic
uaauuuccucaacugugac

SEQ ID NO: 522523 - RNA, 20 nt, Artificial Sequence
  Synthetic
uuaauuuccucaacugugac

SEQ ID NO: 522524 - RNA, 21 nt, Artificial Sequence
  Synthetic
cuuaauuuccucaacugugac

SEQ ID NO: 522525 - RNA, 22 nt, Artificial Sequence
  Synthetic
ccuuaauuuccucaacugugac

SEQ ID NO: 522526 - RNA, 23 nt, Artificial Sequence
  Synthetic
gccuuaauuuccucaacugugac

SEQ ID NO: 522527 - RNA, 24 nt, Artificial Sequence
  Synthetic
agccuuaauuuccucaacugugac

SEQ ID NO: 522528 - RNA, 18 nt, Artificial Sequence
  Synthetic
uuuaggaugaacugugac

SEQ ID NO: 522529 - RNA, 19 nt, Artificial Sequence
  Synthetic
auuuaggaugaacugugac

SEQ ID NO: 522530 - RNA, 20 nt, Artificial Sequence
  Synthetic
gauuuaggaugaacugugac

SEQ ID NO: 522531 - RNA, 21 nt, Artificial Sequence
  Synthetic
ugauuuaggaugaacugugac

SEQ ID NO: 522532 - RNA, 22 nt, Artificial Sequence
  Synthetic
augauuuaggaugaacugugac

SEQ ID NO: 522533 - RNA, 23 nt, Artificial Sequence
  Synthetic
aaugauuuaggaugaacugugac

SEQ ID NO: 522534 - RNA, 24 nt, Artificial Sequence
  Synthetic
aaaugauuuaggaugaacugugac

SEQ ID NO: 522535 - RNA, 18 nt, Artificial Sequence
  Synthetic
cgaaucauuaccugugac

SEQ ID NO: 522536 - RNA, 19 nt, Artificial Sequence
  Synthetic
ucgaaucauuaccugugac

SEQ ID NO: 522537 - RNA, 20 nt, Artificial Sequence
  Synthetic
uucgaaucauuaccugugac

SEQ ID NO: 522538 - RNA, 21 nt, Artificial Sequence
  Synthetic
uuucgaaucauuaccugugac

SEQ ID NO: 522539 - RNA, 22 nt, Artificial Sequence
  Synthetic
auuucgaaucauuaccugugac

SEQ ID NO: 522540 - RNA, 23 nt, Artificial Sequence
  Synthetic
aauuucgaaucauuaccugugac

SEQ ID NO: 522541 - RNA, 24 nt, Artificial Sequence
  Synthetic
aaauuucgaaucauuaccugugac

SEQ ID NO: 522542 - RNA, 18 nt, Artificial Sequence
  Synthetic
acucuggucaucugugac

SEQ ID NO: 522543 - RNA, 19 nt, Artificial Sequence
  Synthetic
aacucuggucaucugugac

SEQ ID NO: 522544 - RNA, 20 nt, Artificial Sequence
  Synthetic
aaacucuggucaucugugac

SEQ ID NO: 522545 - RNA, 21 nt, Artificial Sequence
  Synthetic
gaaacucuggucaucugugac

SEQ ID NO: 522546 - RNA, 22 nt, Artificial Sequence
  Synthetic
ugaaacucuggucaucugugac

SEQ ID NO: 522547 - RNA, 23 nt, Artificial Sequence
  Synthetic
gugaaacucuggucaucugugac

SEQ ID NO: 522548 - RNA, 24 nt, Artificial Sequence
  Synthetic
ugugaaacucuggucaucugugac

SEQ ID NO: 522549 - RNA, 18 nt, Artificial Sequence
  Synthetic
aauguuagagauugugac

SEQ ID NO: 522550 - RNA, 19 nt, Artificial Sequence
  Synthetic
aaauguuagagauugugac

SEQ ID NO: 522551 - RNA, 20 nt, Artificial Sequence
  Synthetic
caaauguuagagauugugac

SEQ ID NO: 522552 - RNA, 21 nt, Artificial Sequence
  Synthetic
acaaauguuagagauugugac

SEQ ID NO: 522553 - RNA, 22 nt, Artificial Sequence
  Synthetic
aacaaauguuagagauugugac

SEQ ID NO: 522554 - RNA, 23 nt, Artificial Sequence
  Synthetic
aaacaaauguuagagauugugac

SEQ ID NO: 522555 - RNA, 24 nt, Artificial Sequence
  Synthetic
aaaacaaauguuagagauugugac

SEQ ID NO: 522556 - RNA, 18 nt, Artificial Sequence
  Synthetic
aagugagucacuugugac

SEQ ID NO: 522557 - RNA, 19 nt, Artificial Sequence
  Synthetic
gaagugagucacuugugac

SEQ ID NO: 522558 - RNA, 20 nt, Artificial Sequence
  Synthetic
ugaagugagucacuugugac

SEQ ID NO: 522559 - RNA, 21 nt, Artificial Sequence
  Synthetic
augaagugagucacuugugac

SEQ ID NO: 522560 - RNA, 22 nt, Artificial Sequence
  Synthetic
caugaagugagucacuugugac

SEQ ID NO: 522561 - RNA, 23 nt, Artificial Sequence
  Synthetic
acaugaagugagucacuugugac

SEQ ID NO: 522562 - RNA, 24 nt, Artificial Sequence
  Synthetic
gacaugaagugagucacuugugac

SEQ ID NO: 522563 - RNA, 18 nt, Artificial Sequence
  Synthetic
uugugagucacuugugac

SEQ ID NO: 522564 - RNA, 19 nt, Artificial Sequence
  Synthetic
cuugugagucacuugugac

SEQ ID NO: 522565 - RNA, 20 nt, Artificial Sequence
  Synthetic
ccuugugagucacuugugac

SEQ ID NO: 522566 - RNA, 21 nt, Artificial Sequence
  Synthetic
accuugugagucacuugugac

SEQ ID NO: 522567 - RNA, 22 nt, Artificial Sequence
  Synthetic
gaccuugugagucacuugugac

SEQ ID NO: 522568 - RNA, 23 nt, Artificial Sequence
  Synthetic
ugaccuugugagucacuugugac

SEQ ID NO: 522569 - RNA, 24 nt, Artificial Sequence
  Synthetic
gugaccuugugagucacuugugac

SEQ ID NO: 522570 - RNA, 18 nt, Artificial Sequence
  Synthetic
gaccugugggaaauugac

SEQ ID NO: 522571 - RNA, 19 nt, Artificial Sequence
  Synthetic
ugaccugugggaaauugac

SEQ ID NO: 522572 - RNA, 20 nt, Artificial Sequence
  Synthetic
augaccugugggaaauugac

SEQ ID NO: 522573 - RNA, 21 nt, Artificial Sequence
  Synthetic
caugaccugugggaaauugac

SEQ ID NO: 522574 - RNA, 22 nt, Artificial Sequence
  Synthetic
acaugaccugugggaaauugac

SEQ ID NO: 522575 - RNA, 23 nt, Artificial Sequence
  Synthetic
cacaugaccugugggaaauugac

SEQ ID NO: 522576 - RNA, 24 nt, Artificial Sequence
  Synthetic
ccacaugaccugugggaaauugac

SEQ ID NO: 522577 - RNA, 18 nt, Artificial Sequence
  Synthetic
uuuucacccuaaauugac

SEQ ID NO: 522578 - RNA, 19 nt, Artificial Sequence
  Synthetic
auuuucacccuaaauugac

SEQ ID NO: 522579 - RNA, 20 nt, Artificial Sequence
  Synthetic
cauuuucacccuaaauugac

SEQ ID NO: 522580 - RNA, 21 nt, Artificial Sequence
  Synthetic
acauuuucacccuaaauugac

SEQ ID NO: 522581 - RNA, 22 nt, Artificial Sequence
  Synthetic
uacauuuucacccuaaauugac

SEQ ID NO: 522582 - RNA, 23 nt, Artificial Sequence
  Synthetic
cuacauuuucacccuaaauugac

SEQ ID NO: 522583 - RNA, 24 nt, Artificial Sequence
  Synthetic
gcuacauuuucacccuaaauugac

SEQ ID NO: 522584 - RNA, 18 nt, Artificial Sequence
  Synthetic
uuggggcugggaauugac

SEQ ID NO: 522585 - RNA, 19 nt, Artificial Sequence
  Synthetic
auuggggcugggaauugac

SEQ ID NO: 522586 - RNA, 20 nt, Artificial Sequence
  Synthetic
uauuggggcugggaauugac

SEQ ID NO: 522587 - RNA, 21 nt, Artificial Sequence
  Synthetic
cuauuggggcugggaauugac

SEQ ID NO: 522588 - RNA, 22 nt, Artificial Sequence
  Synthetic
ccuauuggggcugggaauugac

SEQ ID NO: 522589 - RNA, 23 nt, Artificial Sequence
  Synthetic
gccuauuggggcugggaauugac

SEQ ID NO: 522590 - RNA, 24 nt, Artificial Sequence
  Synthetic
ugccuauuggggcugggaauugac

SEQ ID NO: 522591 - RNA, 18 nt, Artificial Sequence
  Synthetic
uuagguccaaagauugac

SEQ ID NO: 522592 - RNA, 19 nt, Artificial Sequence
  Synthetic
uuuagguccaaagauugac

SEQ ID NO: 522593 - RNA, 20 nt, Artificial Sequence
  Synthetic
cuuuagguccaaagauugac

SEQ ID NO: 522594 - RNA, 21 nt, Artificial Sequence
  Synthetic
gcuuuagguccaaagauugac

SEQ ID NO: 522595 - RNA, 22 nt, Artificial Sequence
  Synthetic
ggcuuuagguccaaagauugac

SEQ ID NO: 522596 - RNA, 23 nt, Artificial Sequence
  Synthetic
aggcuuuagguccaaagauugac

SEQ ID NO: 522597 - RNA, 24 nt, Artificial Sequence
  Synthetic
uaggcuuuagguccaaagauugac

SEQ ID NO: 522598 - RNA, 18 nt, Artificial Sequence
  Synthetic
accaagguauauauugac

SEQ ID NO: 522599 - RNA, 19 nt, Artificial Sequence
  Synthetic
aaccaagguauauauugac

SEQ ID NO: 522600 - RNA, 20 nt, Artificial Sequence
  Synthetic
aaaccaagguauauauugac

SEQ ID NO: 522601 - RNA, 21 nt, Artificial Sequence
  Synthetic
caaaccaagguauauauugac

SEQ ID NO: 522602 - RNA, 22 nt, Artificial Sequence
  Synthetic
ccaaaccaagguauauauugac

SEQ ID NO: 522603 - RNA, 23 nt, Artificial Sequence
  Synthetic
accaaaccaagguauauauugac

SEQ ID NO: 522604 - RNA, 24 nt, Artificial Sequence
  Synthetic
caccaaaccaagguauauauugac

SEQ ID NO: 522605 - RNA, 18 nt, Artificial Sequence
  Synthetic
aacuaaaugucuauugac

SEQ ID NO: 522606 - RNA, 19 nt, Artificial Sequence
  Synthetic
aaacuaaaugucuauugac

SEQ ID NO: 522607 - RNA, 20 nt, Artificial Sequence
  Synthetic
caaacuaaaugucuauugac

SEQ ID NO: 522608 - RNA, 21 nt, Artificial Sequence
  Synthetic
acaaacuaaaugucuauugac

SEQ ID NO: 522609 - RNA, 22 nt, Artificial Sequence
  Synthetic
aacaaacuaaaugucuauugac

SEQ ID NO: 522610 - RNA, 23 nt, Artificial Sequence
  Synthetic
gaacaaacuaaaugucuauugac

SEQ ID NO: 522611 - RNA, 24 nt, Artificial Sequence
  Synthetic
ugaacaaacuaaaugucuauugac

SEQ ID NO: 522612 - RNA, 18 nt, Artificial Sequence
  Synthetic
uauaaugagguuauugac

SEQ ID NO: 522613 - RNA, 19 nt, Artificial Sequence
  Synthetic
guauaaugagguuauugac

SEQ ID NO: 522614 - RNA, 20 nt, Artificial Sequence
  Synthetic
uguauaaugagguuauugac

SEQ ID NO: 522615 - RNA, 21 nt, Artificial Sequence
  Synthetic
cuguauaaugagguuauugac

SEQ ID NO: 522616 - RNA, 22 nt, Artificial Sequence
  Synthetic
ucuguauaaugagguuauugac

SEQ ID NO: 522617 - RNA, 23 nt, Artificial Sequence
  Synthetic
uucuguauaaugagguuauugac

SEQ ID NO: 522618 - RNA, 24 nt, Artificial Sequence
  Synthetic
guucuguauaaugagguuauugac

SEQ ID NO: 522619 - RNA, 18 nt, Artificial Sequence
  Synthetic
uccagugcaugacuugac

SEQ ID NO: 522620 - RNA, 19 nt, Artificial Sequence
  Synthetic
auccagugcaugacuugac

SEQ ID NO: 522621 - RNA, 20 nt, Artificial Sequence
  Synthetic
cauccagugcaugacuugac

SEQ ID NO: 522622 - RNA, 21 nt, Artificial Sequence
  Synthetic
acauccagugcaugacuugac

SEQ ID NO: 522623 - RNA, 22 nt, Artificial Sequence
  Synthetic
cacauccagugcaugacuugac

SEQ ID NO: 522624 - RNA, 23 nt, Artificial Sequence
  Synthetic
ccacauccagugcaugacuugac

SEQ ID NO: 522625 - RNA, 24 nt, Artificial Sequence
  Synthetic
cccacauccagugcaugacuugac

SEQ ID NO: 522626 - RNA, 18 nt, Artificial Sequence
  Synthetic
uuauuuccuuaccuugac

SEQ ID NO: 522627 - RNA, 19 nt, Artificial Sequence
  Synthetic
guuauuuccuuaccuugac

SEQ ID NO: 522628 - RNA, 20 nt, Artificial Sequence
  Synthetic
gguuauuuccuuaccuugac

SEQ ID NO: 522629 - RNA, 21 nt, Artificial Sequence
  Synthetic
agguuauuuccuuaccuugac

SEQ ID NO: 522630 - RNA, 22 nt, Artificial Sequence
  Synthetic
gagguuauuuccuuaccuugac

SEQ ID NO: 522631 - RNA, 23 nt, Artificial Sequence
  Synthetic
ugagguuauuuccuuaccuugac

SEQ ID NO: 522632 - RNA, 24 nt, Artificial Sequence
  Synthetic
gugagguuauuuccuuaccuugac

SEQ ID NO: 522633 - RNA, 18 nt, Artificial Sequence
  Synthetic
gggagccauucccuugac

SEQ ID NO: 522634 - RNA, 19 nt, Artificial Sequence
  Synthetic
ugggagccauucccuugac

SEQ ID NO: 522635 - RNA, 20 nt, Artificial Sequence
  Synthetic
augggagccauucccuugac

SEQ ID NO: 522636 - RNA, 21 nt, Artificial Sequence
  Synthetic
aaugggagccauucccuugac

SEQ ID NO: 522637 - RNA, 22 nt, Artificial Sequence
  Synthetic
aaaugggagccauucccuugac

SEQ ID NO: 522638 - RNA, 23 nt, Artificial Sequence
  Synthetic
aaaaugggagccauucccuugac

SEQ ID NO: 522639 - RNA, 24 nt, Artificial Sequence
  Synthetic
aaaaaugggagccauucccuugac

SEQ ID NO: 522640 - RNA, 18 nt, Artificial Sequence
  Synthetic
ugcaaccuccuccuugac

SEQ ID NO: 522641 - RNA, 19 nt, Artificial Sequence
  Synthetic
uugcaaccuccuccuugac

SEQ ID NO: 522642 - RNA, 20 nt, Artificial Sequence
  Synthetic
uuugcaaccuccuccuugac

SEQ ID NO: 522643 - RNA, 21 nt, Artificial Sequence
  Synthetic
cuuugcaaccuccuccuugac

SEQ ID NO: 522644 - RNA, 22 nt, Artificial Sequence
  Synthetic
ucuuugcaaccuccuccuugac

SEQ ID NO: 522645 - RNA, 23 nt, Artificial Sequence
  Synthetic
uucuuugcaaccuccuccuugac

SEQ ID NO: 522646 - RNA, 24 nt, Artificial Sequence
  Synthetic
uuucuuugcaaccuccuccuugac

SEQ ID NO: 522647 - RNA, 18 nt, Artificial Sequence
  Synthetic
uguaugcacaugcuugac

SEQ ID NO: 522648 - RNA, 19 nt, Artificial Sequence
  Synthetic
uuguaugcacaugcuugac

SEQ ID NO: 522649 - RNA, 20 nt, Artificial Sequence
  Synthetic
uuuguaugcacaugcuugac

SEQ ID NO: 522650 - RNA, 21 nt, Artificial Sequence
  Synthetic
auuuguaugcacaugcuugac

SEQ ID NO: 522651 - RNA, 22 nt, Artificial Sequence
  Synthetic
uauuuguaugcacaugcuugac

SEQ ID NO: 522652 - RNA, 23 nt, Artificial Sequence
  Synthetic
guauuuguaugcacaugcuugac

SEQ ID NO: 522653 - RNA, 24 nt, Artificial Sequence
  Synthetic
uguauuuguaugcacaugcuugac

SEQ ID NO: 522654 - RNA, 18 nt, Artificial Sequence
  Synthetic
guaagaaagcugcuugac

SEQ ID NO: 522655 - RNA, 19 nt, Artificial Sequence
  Synthetic
uguaagaaagcugcuugac

SEQ ID NO: 522656 - RNA, 20 nt, Artificial Sequence
  Synthetic
auguaagaaagcugcuugac

SEQ ID NO: 522657 - RNA, 21 nt, Artificial Sequence
  Synthetic
uauguaagaaagcugcuugac

SEQ ID NO: 522658 - RNA, 22 nt, Artificial Sequence
  Synthetic
auauguaagaaagcugcuugac

SEQ ID NO: 522659 - RNA, 23 nt, Artificial Sequence
  Synthetic
cauauguaagaaagcugcuugac

SEQ ID NO: 522660 - RNA, 24 nt, Artificial Sequence
  Synthetic
acauauguaagaaagcugcuugac

SEQ ID NO: 522661 - RNA, 18 nt, Artificial Sequence
  Synthetic
caggagaggaaucuugac

SEQ ID NO: 522662 - RNA, 19 nt, Artificial Sequence
  Synthetic
ucaggagaggaaucuugac

SEQ ID NO: 522663 - RNA, 20 nt, Artificial Sequence
  Synthetic
uucaggagaggaaucuugac

SEQ ID NO: 522664 - RNA, 21 nt, Artificial Sequence
  Synthetic
auucaggagaggaaucuugac

SEQ ID NO: 522665 - RNA, 22 nt, Artificial Sequence
  Synthetic
gauucaggagaggaaucuugac

SEQ ID NO: 522666 - RNA, 23 nt, Artificial Sequence
  Synthetic
ugauucaggagaggaaucuugac

SEQ ID NO: 522667 - RNA, 24 nt, Artificial Sequence
  Synthetic
augauucaggagaggaaucuugac

SEQ ID NO: 522668 - RNA, 18 nt, Artificial Sequence
  Synthetic
gggacaagaccucuugac

SEQ ID NO: 522669 - RNA, 19 nt, Artificial Sequence
  Synthetic
agggacaagaccucuugac

SEQ ID NO: 522670 - RNA, 20 nt, Artificial Sequence
  Synthetic
cagggacaagaccucuugac

SEQ ID NO: 522671 - RNA, 21 nt, Artificial Sequence
  Synthetic
gcagggacaagaccucuugac

SEQ ID NO: 522672 - RNA, 22 nt, Artificial Sequence
  Synthetic
ugcagggacaagaccucuugac

SEQ ID NO: 522673 - RNA, 23 nt, Artificial Sequence
  Synthetic
cugcagggacaagaccucuugac

SEQ ID NO: 522674 - RNA, 24 nt, Artificial Sequence
  Synthetic
gcugcagggacaagaccucuugac

SEQ ID NO: 522675 - RNA, 18 nt, Artificial Sequence
  Synthetic
uaauaaauaucuguugac

SEQ ID NO: 522676 - RNA, 19 nt, Artificial Sequence
  Synthetic
uuaauaaauaucuguugac

SEQ ID NO: 522677 - RNA, 20 nt, Artificial Sequence
  Synthetic
auuaauaaauaucuguugac

SEQ ID NO: 522678 - RNA, 21 nt, Artificial Sequence
  Synthetic
cauuaauaaauaucuguugac

SEQ ID NO: 522679 - RNA, 22 nt, Artificial Sequence
  Synthetic
gcauuaauaaauaucuguugac

SEQ ID NO: 522680 - RNA, 23 nt, Artificial Sequence
  Synthetic
agcauuaauaaauaucuguugac

SEQ ID NO: 522681 - RNA, 24 nt, Artificial Sequence
  Synthetic
uagcauuaauaaauaucuguugac

SEQ ID NO: 522682 - RNA, 18 nt, Artificial Sequence
  Synthetic
ggaaaucuacuuguugac

SEQ ID NO: 522683 - RNA, 19 nt, Artificial Sequence
  Synthetic
aggaaaucuacuuguugac

SEQ ID NO: 522684 - RNA, 20 nt, Artificial Sequence
  Synthetic
gaggaaaucuacuuguugac

SEQ ID NO: 522685 - RNA, 21 nt, Artificial Sequence
  Synthetic
ggaggaaaucuacuuguugac

SEQ ID NO: 522686 - RNA, 22 nt, Artificial Sequence
  Synthetic
uggaggaaaucuacuuguugac

SEQ ID NO: 522687 - RNA, 23 nt, Artificial Sequence
  Synthetic
uuggaggaaaucuacuuguugac

SEQ ID NO: 522688 - RNA, 24 nt, Artificial Sequence
  Synthetic
uuuggaggaaaucuacuuguugac

SEQ ID NO: 522689 - RNA, 18 nt, Artificial Sequence
  Synthetic
aagcauguaaacuuugac

SEQ ID NO: 522690 - RNA, 19 nt, Artificial Sequence
  Synthetic
aaagcauguaaacuuugac

SEQ ID NO: 522691 - RNA, 20 nt, Artificial Sequence
  Synthetic
aaaagcauguaaacuuugac

SEQ ID NO: 522692 - RNA, 21 nt, Artificial Sequence
  Synthetic
aaaaagcauguaaacuuugac

SEQ ID NO: 522693 - RNA, 22 nt, Artificial Sequence
  Synthetic
uaaaaagcauguaaacuuugac

SEQ ID NO: 522694 - RNA, 23 nt, Artificial Sequence
  Synthetic
auaaaaagcauguaaacuuugac

SEQ ID NO: 522695 - RNA, 24 nt, Artificial Sequence
  Synthetic
uauaaaaagcauguaaacuuugac

SEQ ID NO: 522696 - RNA, 18 nt, Artificial Sequence
  Synthetic
ugcauaaaaagcuuugac

SEQ ID NO: 522697 - RNA, 19 nt, Artificial Sequence
  Synthetic
uugcauaaaaagcuuugac

SEQ ID NO: 522698 - RNA, 20 nt, Artificial Sequence
  Synthetic
guugcauaaaaagcuuugac

SEQ ID NO: 522699 - RNA, 21 nt, Artificial Sequence
  Synthetic
aguugcauaaaaagcuuugac

SEQ ID NO: 522700 - RNA, 22 nt, Artificial Sequence
  Synthetic
gaguugcauaaaaagcuuugac

SEQ ID NO: 522701 - RNA, 23 nt, Artificial Sequence
  Synthetic
ugaguugcauaaaaagcuuugac

SEQ ID NO: 522702 - RNA, 24 nt, Artificial Sequence
  Synthetic
uugaguugcauaaaaagcuuugac

SEQ ID NO: 522703 - RNA, 18 nt, Artificial Sequence
  Synthetic
ugucccauucucuuugac

SEQ ID NO: 522704 - RNA, 19 nt, Artificial Sequence
  Synthetic
gugucccauucucuuugac

SEQ ID NO: 522705 - RNA, 20 nt, Artificial Sequence
  Synthetic
ugugucccauucucuuugac

SEQ ID NO: 522706 - RNA, 21 nt, Artificial Sequence
  Synthetic
uugugucccauucucuuugac

SEQ ID NO: 522707 - RNA, 22 nt, Artificial Sequence
  Synthetic
guugugucccauucucuuugac

SEQ ID NO: 522708 - RNA, 23 nt, Artificial Sequence
  Synthetic
aguugugucccauucucuuugac

SEQ ID NO: 522709 - RNA, 24 nt, Artificial Sequence
  Synthetic
gaguugugucccauucucuuugac

SEQ ID NO: 522710 - RNA, 18 nt, Artificial Sequence
  Synthetic
acacaauuucaguuugac

SEQ ID NO: 522711 - RNA, 19 nt, Artificial Sequence
  Synthetic
uacacaauuucaguuugac

SEQ ID NO: 522712 - RNA, 20 nt, Artificial Sequence
  Synthetic
auacacaauuucaguuugac

SEQ ID NO: 522713 - RNA, 21 nt, Artificial Sequence
  Synthetic
gauacacaauuucaguuugac

SEQ ID NO: 522714 - RNA, 22 nt, Artificial Sequence
  Synthetic
agauacacaauuucaguuugac

SEQ ID NO: 522715 - RNA, 23 nt, Artificial Sequence
  Synthetic
aagauacacaauuucaguuugac

SEQ ID NO: 522716 - RNA, 24 nt, Artificial Sequence
  Synthetic
aaagauacacaauuucaguuugac

SEQ ID NO: 522717 - RNA, 18 nt, Artificial Sequence
  Synthetic
gugugcucagaguuugac

SEQ ID NO: 522718 - RNA, 19 nt, Artificial Sequence
  Synthetic
ggugugcucagaguuugac

SEQ ID NO: 522719 - RNA, 20 nt, Artificial Sequence
  Synthetic
aggugugcucagaguuugac

SEQ ID NO: 522720 - RNA, 21 nt, Artificial Sequence
  Synthetic
caggugugcucagaguuugac

SEQ ID NO: 522721 - RNA, 22 nt, Artificial Sequence
  Synthetic
acaggugugcucagaguuugac

SEQ ID NO: 522722 - RNA, 23 nt, Artificial Sequence
  Synthetic
aacaggugugcucagaguuugac

SEQ ID NO: 522723 - RNA, 24 nt, Artificial Sequence
  Synthetic
uaacaggugugcucagaguuugac

SEQ ID NO: 522724 - RNA, 18 nt, Artificial Sequence
  Synthetic
acuuucuugauguuugac

SEQ ID NO: 522725 - RNA, 19 nt, Artificial Sequence
  Synthetic
uacuuucuugauguuugac

SEQ ID NO: 522726 - RNA, 20 nt, Artificial Sequence
  Synthetic
uuacuuucuugauguuugac

SEQ ID NO: 522727 - RNA, 21 nt, Artificial Sequence
  Synthetic
auuacuuucuugauguuugac

SEQ ID NO: 522728 - RNA, 22 nt, Artificial Sequence
  Synthetic
cauuacuuucuugauguuugac

SEQ ID NO: 522729 - RNA, 23 nt, Artificial Sequence
  Synthetic
acauuacuuucuugauguuugac

SEQ ID NO: 522730 - RNA, 24 nt, Artificial Sequence
  Synthetic
aacauuacuuucuugauguuugac

SEQ ID NO: 522731 - RNA, 18 nt, Artificial Sequence
  Synthetic
augauuaaacaaaaauac

SEQ ID NO: 522732 - RNA, 19 nt, Artificial Sequence
  Synthetic
aaugauuaaacaaaaauac

SEQ ID NO: 522733 - RNA, 20 nt, Artificial Sequence
  Synthetic
uaaugauuaaacaaaaauac

SEQ ID NO: 522734 - RNA, 21 nt, Artificial Sequence
  Synthetic
uuaaugauuaaacaaaaauac

SEQ ID NO: 522735 - RNA, 22 nt, Artificial Sequence
  Synthetic
uuuaaugauuaaacaaaaauac

SEQ ID NO: 522736 - RNA, 23 nt, Artificial Sequence
  Synthetic
uuuuaaugauuaaacaaaaauac

SEQ ID NO: 522737 - RNA, 24 nt, Artificial Sequence
  Synthetic
guuuuaaugauuaaacaaaaauac

SEQ ID NO: 522738 - RNA, 18 nt, Artificial Sequence
  Synthetic
gaucacagggcaaaauac

SEQ ID NO: 522739 - RNA, 19 nt, Artificial Sequence
  Synthetic
ugaucacagggcaaaauac

SEQ ID NO: 522740 - RNA, 20 nt, Artificial Sequence
  Synthetic
gugaucacagggcaaaauac

SEQ ID NO: 522741 - RNA, 21 nt, Artificial Sequence
  Synthetic
agugaucacagggcaaaauac

SEQ ID NO: 522742 - RNA, 22 nt, Artificial Sequence
  Synthetic
uagugaucacagggcaaaauac

SEQ ID NO: 522743 - RNA, 23 nt, Artificial Sequence
  Synthetic
cuagugaucacagggcaaaauac

SEQ ID NO: 522744 - RNA, 24 nt, Artificial Sequence
  Synthetic
acuagugaucacagggcaaaauac

SEQ ID NO: 522745 - RNA, 18 nt, Artificial Sequence
  Synthetic
agggaauaaagaaaauac

SEQ ID NO: 522746 - RNA, 19 nt, Artificial Sequence
  Synthetic
aagggaauaaagaaaauac

SEQ ID NO: 522747 - RNA, 20 nt, Artificial Sequence
  Synthetic
aaagggaauaaagaaaauac

SEQ ID NO: 522748 - RNA, 21 nt, Artificial Sequence
  Synthetic
aaaagggaauaaagaaaauac

SEQ ID NO: 522749 - RNA, 22 nt, Artificial Sequence
  Synthetic
caaaagggaauaaagaaaauac

SEQ ID NO: 522750 - RNA, 23 nt, Artificial Sequence
  Synthetic
acaaaagggaauaaagaaaauac

SEQ ID NO: 522751 - RNA, 24 nt, Artificial Sequence
  Synthetic
aacaaaagggaauaaagaaaauac

SEQ ID NO: 522752 - RNA, 18 nt, Artificial Sequence
  Synthetic
auagcuauaauaaaauac

SEQ ID NO: 522753 - RNA, 19 nt, Artificial Sequence
  Synthetic
aauagcuauaauaaaauac

SEQ ID NO: 522754 - RNA, 20 nt, Artificial Sequence
  Synthetic
aaauagcuauaauaaaauac

SEQ ID NO: 522755 - RNA, 21 nt, Artificial Sequence
  Synthetic
aaaauagcuauaauaaaauac

SEQ ID NO: 522756 - RNA, 22 nt, Artificial Sequence
  Synthetic
caaaauagcuauaauaaaauac

SEQ ID NO: 522757 - RNA, 23 nt, Artificial Sequence
  Synthetic
ucaaaauagcuauaauaaaauac

SEQ ID NO: 522758 - RNA, 24 nt, Artificial Sequence
  Synthetic
uucaaaauagcuauaauaaaauac

SEQ ID NO: 522759 - RNA, 18 nt, Artificial Sequence
  Synthetic
ugucaauaucuaaaauac

SEQ ID NO: 522760 - RNA, 19 nt, Artificial Sequence
  Synthetic
gugucaauaucuaaaauac

SEQ ID NO: 522761 - RNA, 20 nt, Artificial Sequence
  Synthetic
ggugucaauaucuaaaauac

SEQ ID NO: 522762 - RNA, 21 nt, Artificial Sequence
  Synthetic
aggugucaauaucuaaaauac

SEQ ID NO: 522763 - RNA, 22 nt, Artificial Sequence
  Synthetic
aaggugucaauaucuaaaauac

SEQ ID NO: 522764 - RNA, 23 nt, Artificial Sequence
  Synthetic
uaaggugucaauaucuaaaauac

SEQ ID NO: 522765 - RNA, 24 nt, Artificial Sequence
  Synthetic
auaaggugucaauaucuaaaauac

SEQ ID NO: 522766 - RNA, 18 nt, Artificial Sequence
  Synthetic
auuaaacggaacaaauac

SEQ ID NO: 522767 - RNA, 19 nt, Artificial Sequence
  Synthetic
aauuaaacggaacaaauac

SEQ ID NO: 522768 - RNA, 20 nt, Artificial Sequence
  Synthetic
gaauuaaacggaacaaauac

SEQ ID NO: 522769 - RNA, 21 nt, Artificial Sequence
  Synthetic
ggaauuaaacggaacaaauac

SEQ ID NO: 522770 - RNA, 22 nt, Artificial Sequence
  Synthetic
aggaauuaaacggaacaaauac

SEQ ID NO: 522771 - RNA, 23 nt, Artificial Sequence
  Synthetic
gaggaauuaaacggaacaaauac

SEQ ID NO: 522772 - RNA, 24 nt, Artificial Sequence
  Synthetic
agaggaauuaaacggaacaaauac

SEQ ID NO: 522773 - RNA, 18 nt, Artificial Sequence
  Synthetic
ugcuauuucuacaaauac

SEQ ID NO: 522774 - RNA, 19 nt, Artificial Sequence
  Synthetic
augcuauuucuacaaauac

SEQ ID NO: 522775 - RNA, 20 nt, Artificial Sequence
  Synthetic
caugcuauuucuacaaauac

SEQ ID NO: 522776 - RNA, 21 nt, Artificial Sequence
  Synthetic
ucaugcuauuucuacaaauac

SEQ ID NO: 522777 - RNA, 22 nt, Artificial Sequence
  Synthetic
cucaugcuauuucuacaaauac

SEQ ID NO: 522778 - RNA, 23 nt, Artificial Sequence
  Synthetic
gcucaugcuauuucuacaaauac

SEQ ID NO: 522779 - RNA, 24 nt, Artificial Sequence
  Synthetic
agcucaugcuauuucuacaaauac

SEQ ID NO: 522780 - RNA, 18 nt, Artificial Sequence
  Synthetic
cuggaaucucucaaauac

SEQ ID NO: 522781 - RNA, 19 nt, Artificial Sequence
  Synthetic
acuggaaucucucaaauac

SEQ ID NO: 522782 - RNA, 20 nt, Artificial Sequence
  Synthetic
uacuggaaucucucaaauac

SEQ ID NO: 522783 - RNA, 21 nt, Artificial Sequence
  Synthetic
cuacuggaaucucucaaauac

SEQ ID NO: 522784 - RNA, 22 nt, Artificial Sequence
  Synthetic
ccuacuggaaucucucaaauac

SEQ ID NO: 522785 - RNA, 23 nt, Artificial Sequence
  Synthetic
gccuacuggaaucucucaaauac

SEQ ID NO: 522786 - RNA, 24 nt, Artificial Sequence
  Synthetic
ggccuacuggaaucucucaaauac

SEQ ID NO: 522787 - RNA, 18 nt, Artificial Sequence
  Synthetic
gcaggacaugucaaauac

SEQ ID NO: 522788 - RNA, 19 nt, Artificial Sequence
  Synthetic
agcaggacaugucaaauac

SEQ ID NO: 522789 - RNA, 20 nt, Artificial Sequence
  Synthetic
gagcaggacaugucaaauac

SEQ ID NO: 522790 - RNA, 21 nt, Artificial Sequence
  Synthetic
ugagcaggacaugucaaauac

SEQ ID NO: 522791 - RNA, 22 nt, Artificial Sequence
  Synthetic
uugagcaggacaugucaaauac

SEQ ID NO: 522792 - RNA, 23 nt, Artificial Sequence
  Synthetic
guugagcaggacaugucaaauac

SEQ ID NO: 522793 - RNA, 24 nt, Artificial Sequence
  Synthetic
uguugagcaggacaugucaaauac

SEQ ID NO: 522794 - RNA, 18 nt, Artificial Sequence
  Synthetic
uaauugagaaagaaauac

SEQ ID NO: 522795 - RNA, 19 nt, Artificial Sequence
  Synthetic
auaauugagaaagaaauac

SEQ ID NO: 522796 - RNA, 20 nt, Artificial Sequence
  Synthetic
cauaauugagaaagaaauac

SEQ ID NO: 522797 - RNA, 21 nt, Artificial Sequence
  Synthetic
ccauaauugagaaagaaauac

SEQ ID NO: 522798 - RNA, 22 nt, Artificial Sequence
  Synthetic
accauaauugagaaagaaauac

SEQ ID NO: 522799 - RNA, 23 nt, Artificial Sequence
  Synthetic
caccauaauugagaaagaaauac

SEQ ID NO: 522800 - RNA, 24 nt, Artificial Sequence
  Synthetic
ccaccauaauugagaaagaaauac

SEQ ID NO: 522801 - RNA, 21 nt, Artificial Sequence
  Synthetic
ugcauugcuauaaagaaauac

SEQ ID NO: 522802 - RNA, 22 nt, Artificial Sequence
  Synthetic
uugcauugcuauaaagaaauac

SEQ ID NO: 522803 - RNA, 23 nt, Artificial Sequence
  Synthetic
cuugcauugcuauaaagaaauac

SEQ ID NO: 522804 - RNA, 24 nt, Artificial Sequence
  Synthetic
ucuugcauugcuauaaagaaauac

SEQ ID NO: 522805 - RNA, 18 nt, Artificial Sequence
  Synthetic
uauaaguuaaagaaauac

SEQ ID NO: 522806 - RNA, 19 nt, Artificial Sequence
  Synthetic
uuauaaguuaaagaaauac

SEQ ID NO: 522807 - RNA, 20 nt, Artificial Sequence
  Synthetic
guuauaaguuaaagaaauac

SEQ ID NO: 522808 - RNA, 21 nt, Artificial Sequence
  Synthetic
aguuauaaguuaaagaaauac

SEQ ID NO: 522809 - RNA, 22 nt, Artificial Sequence
  Synthetic
aaguuauaaguuaaagaaauac

SEQ ID NO: 522810 - RNA, 23 nt, Artificial Sequence
  Synthetic
gaaguuauaaguuaaagaaauac

SEQ ID NO: 522811 - RNA, 24 nt, Artificial Sequence
  Synthetic
ugaaguuauaaguuaaagaaauac

SEQ ID NO: 522812 - RNA, 18 nt, Artificial Sequence
  Synthetic
gcugcuaugaagaaauac

SEQ ID NO: 522813 - RNA, 19 nt, Artificial Sequence
  Synthetic
ugcugcuaugaagaaauac

SEQ ID NO: 522814 - RNA, 20 nt, Artificial Sequence
  Synthetic
augcugcuaugaagaaauac

SEQ ID NO: 522815 - RNA, 21 nt, Artificial Sequence
  Synthetic
caugcugcuaugaagaaauac

SEQ ID NO: 522816 - RNA, 22 nt, Artificial Sequence
  Synthetic
ucaugcugcuaugaagaaauac

SEQ ID NO: 522817 - RNA, 23 nt, Artificial Sequence
  Synthetic
cucaugcugcuaugaagaaauac

SEQ ID NO: 522818 - RNA, 24 nt, Artificial Sequence
  Synthetic
ucucaugcugcuaugaagaaauac

SEQ ID NO: 522819 - RNA, 18 nt, Artificial Sequence
  Synthetic
cauauggcuacgaaauac

SEQ ID NO: 522820 - RNA, 19 nt, Artificial Sequence
  Synthetic
acauauggcuacgaaauac

SEQ ID NO: 522821 - RNA, 20 nt, Artificial Sequence
  Synthetic
aacauauggcuacgaaauac

SEQ ID NO: 522822 - RNA, 21 nt, Artificial Sequence
  Synthetic
aaacauauggcuacgaaauac

SEQ ID NO: 522823 - RNA, 22 nt, Artificial Sequence
  Synthetic
gaaacauauggcuacgaaauac

SEQ ID NO: 522824 - RNA, 23 nt, Artificial Sequence
  Synthetic
ugaaacauauggcuacgaaauac

SEQ ID NO: 522825 - RNA, 24 nt, Artificial Sequence
  Synthetic
gugaaacauauggcuacgaaauac

SEQ ID NO: 522826 - RNA, 18 nt, Artificial Sequence
  Synthetic
auccuuaucaugaaauac

SEQ ID NO: 522827 - RNA, 19 nt, Artificial Sequence
  Synthetic
aauccuuaucaugaaauac

SEQ ID NO: 522828 - RNA, 20 nt, Artificial Sequence
  Synthetic
caauccuuaucaugaaauac

SEQ ID NO: 522829 - RNA, 21 nt, Artificial Sequence
  Synthetic
ccaauccuuaucaugaaauac

SEQ ID NO: 522830 - RNA, 22 nt, Artificial Sequence
  Synthetic
cccaauccuuaucaugaaauac

SEQ ID NO: 522831 - RNA, 23 nt, Artificial Sequence
  Synthetic
gcccaauccuuaucaugaaauac

SEQ ID NO: 522832 - RNA, 24 nt, Artificial Sequence
  Synthetic
agcccaauccuuaucaugaaauac

SEQ ID NO: 522833 - RNA, 18 nt, Artificial Sequence
  Synthetic
ccccaaaaugugaaauac

SEQ ID NO: 522834 - RNA, 19 nt, Artificial Sequence
  Synthetic
gccccaaaaugugaaauac

SEQ ID NO: 522835 - RNA, 20 nt, Artificial Sequence
  Synthetic
ggccccaaaaugugaaauac

SEQ ID NO: 522836 - RNA, 21 nt, Artificial Sequence
  Synthetic
aggccccaaaaugugaaauac

SEQ ID NO: 522837 - RNA, 22 nt, Artificial Sequence
  Synthetic
aaggccccaaaaugugaaauac

SEQ ID NO: 522838 - RNA, 23 nt, Artificial Sequence
  Synthetic
uaaggccccaaaaugugaaauac

SEQ ID NO: 522839 - RNA, 24 nt, Artificial Sequence
  Synthetic
auaaggccccaaaaugugaaauac

SEQ ID NO: 522840 - RNA, 18 nt, Artificial Sequence
  Synthetic
acacauggacauaaauac

SEQ ID NO: 522841 - RNA, 19 nt, Artificial Sequence
  Synthetic
cacacauggacauaaauac

SEQ ID NO: 522842 - RNA, 20 nt, Artificial Sequence
  Synthetic
gcacacauggacauaaauac

SEQ ID NO: 522843 - RNA, 21 nt, Artificial Sequence
  Synthetic
agcacacauggacauaaauac

SEQ ID NO: 522844 - RNA, 22 nt, Artificial Sequence
  Synthetic
gagcacacauggacauaaauac

SEQ ID NO: 522845 - RNA, 23 nt, Artificial Sequence
  Synthetic
ugagcacacauggacauaaauac

SEQ ID NO: 522846 - RNA, 24 nt, Artificial Sequence
  Synthetic
cugagcacacauggacauaaauac

SEQ ID NO: 522847 - RNA, 18 nt, Artificial Sequence
  Synthetic
ggaagaaaagauaaauac

SEQ ID NO: 522848 - RNA, 19 nt, Artificial Sequence
  Synthetic
uggaagaaaagauaaauac

SEQ ID NO: 522849 - RNA, 20 nt, Artificial Sequence
  Synthetic
cuggaagaaaagauaaauac

SEQ ID NO: 522850 - RNA, 21 nt, Artificial Sequence
  Synthetic
acuggaagaaaagauaaauac

SEQ ID NO: 522851 - RNA, 22 nt, Artificial Sequence
  Synthetic
aacuggaagaaaagauaaauac

SEQ ID NO: 522852 - RNA, 23 nt, Artificial Sequence
  Synthetic
caacuggaagaaaagauaaauac

SEQ ID NO: 522853 - RNA, 24 nt, Artificial Sequence
  Synthetic
gcaacuggaagaaaagauaaauac

SEQ ID NO: 522854 - RNA, 18 nt, Artificial Sequence
  Synthetic
cauauaaaugauaaauac

SEQ ID NO: 522855 - RNA, 19 nt, Artificial Sequence
  Synthetic
acauauaaaugauaaauac

SEQ ID NO: 522856 - RNA, 20 nt, Artificial Sequence
  Synthetic
cacauauaaaugauaaauac

SEQ ID NO: 522857 - RNA, 21 nt, Artificial Sequence
  Synthetic
acacauauaaaugauaaauac

SEQ ID NO: 522858 - RNA, 22 nt, Artificial Sequence
  Synthetic
aacacauauaaaugauaaauac

SEQ ID NO: 522859 - RNA, 23 nt, Artificial Sequence
  Synthetic
caacacauauaaaugauaaauac

SEQ ID NO: 522860 - RNA, 24 nt, Artificial Sequence
  Synthetic
ccaacacauauaaaugauaaauac

SEQ ID NO: 522861 - RNA, 18 nt, Artificial Sequence
  Synthetic
uauuauuaguauaaauac

SEQ ID NO: 522862 - RNA, 19 nt, Artificial Sequence
  Synthetic
cuauuauuaguauaaauac

SEQ ID NO: 522863 - RNA, 20 nt, Artificial Sequence
  Synthetic
acuauuauuaguauaaauac

SEQ ID NO: 522864 - RNA, 21 nt, Artificial Sequence
  Synthetic
aacuauuauuaguauaaauac

SEQ ID NO: 522865 - RNA, 22 nt, Artificial Sequence
  Synthetic
caacuauuauuaguauaaauac

SEQ ID NO: 522866 - RNA, 23 nt, Artificial Sequence
  Synthetic
ucaacuauuauuaguauaaauac

SEQ ID NO: 522867 - RNA, 24 nt, Artificial Sequence
  Synthetic
gucaacuauuauuaguauaaauac

SEQ ID NO: 522868 - RNA, 18 nt, Artificial Sequence
  Synthetic
guucuguuugcuaaauac

SEQ ID NO: 522869 - RNA, 19 nt, Artificial Sequence
  Synthetic
uguucuguuugcuaaauac

SEQ ID NO: 522870 - RNA, 20 nt, Artificial Sequence
  Synthetic
auguucuguuugcuaaauac

SEQ ID NO: 522871 - RNA, 21 nt, Artificial Sequence
  Synthetic
aauguucuguuugcuaaauac

SEQ ID NO: 522872 - RNA, 22 nt, Artificial Sequence
  Synthetic
uaauguucuguuugcuaaauac

SEQ ID NO: 522873 - RNA, 23 nt, Artificial Sequence
  Synthetic
uuaauguucuguuugcuaaauac

SEQ ID NO: 522874 - RNA, 24 nt, Artificial Sequence
  Synthetic
uuuaauguucuguuugcuaaauac

SEQ ID NO: 522875 - RNA, 18 nt, Artificial Sequence
  Synthetic
acucggaggauuaaauac

SEQ ID NO: 522876 - RNA, 19 nt, Artificial Sequence
  Synthetic
uacucggaggauuaaauac

SEQ ID NO: 522877 - RNA, 20 nt, Artificial Sequence
  Synthetic
uuacucggaggauuaaauac

SEQ ID NO: 522878 - RNA, 21 nt, Artificial Sequence
  Synthetic
auuacucggaggauuaaauac

SEQ ID NO: 522879 - RNA, 22 nt, Artificial Sequence
  Synthetic
aauuacucggaggauuaaauac

SEQ ID NO: 522880 - RNA, 23 nt, Artificial Sequence
  Synthetic
gaauuacucggaggauuaaauac

SEQ ID NO: 522881 - RNA, 24 nt, Artificial Sequence
  Synthetic
agaauuacucggaggauuaaauac

SEQ ID NO: 522882 - RNA, 18 nt, Artificial Sequence
  Synthetic
gaaaacaacacacaauac

SEQ ID NO: 522883 - RNA, 19 nt, Artificial Sequence
  Synthetic
ugaaaacaacacacaauac

SEQ ID NO: 522884 - RNA, 20 nt, Artificial Sequence
  Synthetic
cugaaaacaacacacaauac

SEQ ID NO: 522885 - RNA, 21 nt, Artificial Sequence
  Synthetic
acugaaaacaacacacaauac

SEQ ID NO: 522886 - RNA, 22 nt, Artificial Sequence
  Synthetic
uacugaaaacaacacacaauac

SEQ ID NO: 522887 - RNA, 23 nt, Artificial Sequence
  Synthetic
uuacugaaaacaacacacaauac

SEQ ID NO: 522888 - RNA, 24 nt, Artificial Sequence
  Synthetic
uuuacugaaaacaacacacaauac

SEQ ID NO: 522889 - RNA, 18 nt, Artificial Sequence
  Synthetic
ccaucuaauagacaauac

SEQ ID NO: 522890 - RNA, 19 nt, Artificial Sequence
  Synthetic
accaucuaauagacaauac

SEQ ID NO: 522891 - RNA, 20 nt, Artificial Sequence
  Synthetic
aaccaucuaauagacaauac

SEQ ID NO: 522892 - RNA, 21 nt, Artificial Sequence
  Synthetic
caaccaucuaauagacaauac

SEQ ID NO: 522893 - RNA, 22 nt, Artificial Sequence
  Synthetic
gcaaccaucuaauagacaauac

SEQ ID NO: 522894 - RNA, 23 nt, Artificial Sequence
  Synthetic
agcaaccaucuaauagacaauac

SEQ ID NO: 522895 - RNA, 24 nt, Artificial Sequence
  Synthetic
aagcaaccaucuaauagacaauac

SEQ ID NO: 522896 - RNA, 18 nt, Artificial Sequence
  Synthetic
uauuuaugcacccaauac

SEQ ID NO: 522897 - RNA, 19 nt, Artificial Sequence
  Synthetic
auauuuaugcacccaauac

SEQ ID NO: 522898 - RNA, 20 nt, Artificial Sequence
  Synthetic
aauauuuaugcacccaauac

SEQ ID NO: 522899 - RNA, 21 nt, Artificial Sequence
  Synthetic
aaauauuuaugcacccaauac

SEQ ID NO: 522900 - RNA, 22 nt, Artificial Sequence
  Synthetic
uaaauauuuaugcacccaauac

SEQ ID NO: 522901 - RNA, 23 nt, Artificial Sequence
  Synthetic
cuaaauauuuaugcacccaauac

SEQ ID NO: 522902 - RNA, 24 nt, Artificial Sequence
  Synthetic
ccuaaauauuuaugcacccaauac

SEQ ID NO: 522903 - RNA, 18 nt, Artificial Sequence
  Synthetic
auuggucacagccaauac

SEQ ID NO: 522904 - RNA, 19 nt, Artificial Sequence
  Synthetic
aauuggucacagccaauac

SEQ ID NO: 522905 - RNA, 20 nt, Artificial Sequence
  Synthetic
uaauuggucacagccaauac

SEQ ID NO: 522906 - RNA, 21 nt, Artificial Sequence
  Synthetic
auaauuggucacagccaauac

SEQ ID NO: 522907 - RNA, 22 nt, Artificial Sequence
  Synthetic
aauaauuggucacagccaauac

SEQ ID NO: 522908 - RNA, 23 nt, Artificial Sequence
  Synthetic
uaauaauuggucacagccaauac

SEQ ID NO: 522909 - RNA, 24 nt, Artificial Sequence
  Synthetic
auaauaauuggucacagccaauac

SEQ ID NO: 522910 - RNA, 18 nt, Artificial Sequence
  Synthetic
gucucuaucugccaauac

SEQ ID NO: 522911 - RNA, 19 nt, Artificial Sequence
  Synthetic
agucucuaucugccaauac

SEQ ID NO: 522912 - RNA, 20 nt, Artificial Sequence
  Synthetic
aagucucuaucugccaauac

SEQ ID NO: 522913 - RNA, 21 nt, Artificial Sequence
  Synthetic
uaagucucuaucugccaauac

SEQ ID NO: 522914 - RNA, 22 nt, Artificial Sequence
  Synthetic
uuaagucucuaucugccaauac

SEQ ID NO: 522915 - RNA, 23 nt, Artificial Sequence
  Synthetic
uuuaagucucuaucugccaauac

SEQ ID NO: 522916 - RNA, 24 nt, Artificial Sequence
  Synthetic
cuuuaagucucuaucugccaauac

SEQ ID NO: 522917 - RNA, 18 nt, Artificial Sequence
  Synthetic
gagccaucugggcaauac

SEQ ID NO: 522918 - RNA, 19 nt, Artificial Sequence
  Synthetic
ugagccaucugggcaauac

SEQ ID NO: 522919 - RNA, 20 nt, Artificial Sequence
  Synthetic
uugagccaucugggcaauac

SEQ ID NO: 522920 - RNA, 21 nt, Artificial Sequence
  Synthetic
uuugagccaucugggcaauac

SEQ ID NO: 522921 - RNA, 22 nt, Artificial Sequence
  Synthetic
uuuugagccaucugggcaauac

SEQ ID NO: 522922 - RNA, 23 nt, Artificial Sequence
  Synthetic
auuuugagccaucugggcaauac

SEQ ID NO: 522923 - RNA, 24 nt, Artificial Sequence
  Synthetic
aauuuugagccaucugggcaauac

SEQ ID NO: 522924 - RNA, 18 nt, Artificial Sequence
  Synthetic
agcaaccagugucaauac

SEQ ID NO: 522925 - RNA, 19 nt, Artificial Sequence
  Synthetic
gagcaaccagugucaauac

SEQ ID NO: 522926 - RNA, 20 nt, Artificial Sequence
  Synthetic
agagcaaccagugucaauac

SEQ ID NO: 522927 - RNA, 21 nt, Artificial Sequence
  Synthetic
uagagcaaccagugucaauac

SEQ ID NO: 522928 - RNA, 22 nt, Artificial Sequence
  Synthetic
auagagcaaccagugucaauac

SEQ ID NO: 522929 - RNA, 23 nt, Artificial Sequence
  Synthetic
cauagagcaaccagugucaauac

SEQ ID NO: 522930 - RNA, 24 nt, Artificial Sequence
  Synthetic
ccauagagcaaccagugucaauac

SEQ ID NO: 522931 - RNA, 18 nt, Artificial Sequence
  Synthetic
gguuuuggggaagaauac

SEQ ID NO: 522932 - RNA, 19 nt, Artificial Sequence
  Synthetic
agguuuuggggaagaauac

SEQ ID NO: 522933 - RNA, 20 nt, Artificial Sequence
  Synthetic
cagguuuuggggaagaauac

SEQ ID NO: 522934 - RNA, 21 nt, Artificial Sequence
  Synthetic
acagguuuuggggaagaauac

SEQ ID NO: 522935 - RNA, 22 nt, Artificial Sequence
  Synthetic
uacagguuuuggggaagaauac

SEQ ID NO: 522936 - RNA, 23 nt, Artificial Sequence
  Synthetic
uuacagguuuuggggaagaauac

SEQ ID NO: 522937 - RNA, 24 nt, Artificial Sequence
  Synthetic
guuacagguuuuggggaagaauac

SEQ ID NO: 522938 - RNA, 18 nt, Artificial Sequence
  Synthetic
cugaugauggaagaauac

SEQ ID NO: 522939 - RNA, 19 nt, Artificial Sequence
  Synthetic
ccugaugauggaagaauac

SEQ ID NO: 522940 - RNA, 20 nt, Artificial Sequence
  Synthetic
uccugaugauggaagaauac

SEQ ID NO: 522941 - RNA, 21 nt, Artificial Sequence
  Synthetic
cuccugaugauggaagaauac

SEQ ID NO: 522942 - RNA, 22 nt, Artificial Sequence
  Synthetic
ccuccugaugauggaagaauac

SEQ ID NO: 522943 - RNA, 23 nt, Artificial Sequence
  Synthetic
accuccugaugauggaagaauac

SEQ ID NO: 522944 - RNA, 24 nt, Artificial Sequence
  Synthetic
caccuccugaugauggaagaauac

SEQ ID NO: 522945 - RNA, 18 nt, Artificial Sequence
  Synthetic
gguagaaugauagaauac

SEQ ID NO: 522946 - RNA, 19 nt, Artificial Sequence
  Synthetic
cgguagaaugauagaauac

SEQ ID NO: 522947 - RNA, 20 nt, Artificial Sequence
  Synthetic
acgguagaaugauagaauac

SEQ ID NO: 522948 - RNA, 21 nt, Artificial Sequence
  Synthetic
uacgguagaaugauagaauac

SEQ ID NO: 522949 - RNA, 22 nt, Artificial Sequence
  Synthetic
uuacgguagaaugauagaauac

SEQ ID NO: 522950 - RNA, 23 nt, Artificial Sequence
  Synthetic
guuacgguagaaugauagaauac

SEQ ID NO: 522951 - RNA, 24 nt, Artificial Sequence
  Synthetic
uguuacgguagaaugauagaauac

SEQ ID NO: 522952 - RNA, 18 nt, Artificial Sequence
  Synthetic
aaaauuauuuucgaauac

SEQ ID NO: 522953 - RNA, 19 nt, Artificial Sequence
  Synthetic
caaaauuauuuucgaauac

SEQ ID NO: 522954 - RNA, 20 nt, Artificial Sequence
  Synthetic
gcaaaauuauuuucgaauac

SEQ ID NO: 522955 - RNA, 21 nt, Artificial Sequence
  Synthetic
agcaaaauuauuuucgaauac

SEQ ID NO: 522956 - RNA, 22 nt, Artificial Sequence
  Synthetic
aagcaaaauuauuuucgaauac

SEQ ID NO: 522957 - RNA, 23 nt, Artificial Sequence
  Synthetic
caagcaaaauuauuuucgaauac

SEQ ID NO: 522958 - RNA, 24 nt, Artificial Sequence
  Synthetic
ucaagcaaaauuauuuucgaauac

SEQ ID NO: 522959 - RNA, 18 nt, Artificial Sequence
  Synthetic
uggcuggaucaggaauac

SEQ ID NO: 522960 - RNA, 19 nt, Artificial Sequence
  Synthetic
cuggcuggaucaggaauac

SEQ ID NO: 522961 - RNA, 20 nt, Artificial Sequence
  Synthetic
gcuggcuggaucaggaauac

SEQ ID NO: 522962 - RNA, 21 nt, Artificial Sequence
  Synthetic
ggcuggcuggaucaggaauac

SEQ ID NO: 522963 - RNA, 22 nt, Artificial Sequence
  Synthetic
uggcuggcuggaucaggaauac

SEQ ID NO: 522964 - RNA, 23 nt, Artificial Sequence
  Synthetic
auggcuggcuggaucaggaauac

SEQ ID NO: 522965 - RNA, 24 nt, Artificial Sequence
  Synthetic
aauggcuggcuggaucaggaauac

SEQ ID NO: 522966 - RNA, 18 nt, Artificial Sequence
  Synthetic
auauuuucuguggaauac

SEQ ID NO: 522967 - RNA, 19 nt, Artificial Sequence
  Synthetic
uauauuuucuguggaauac

SEQ ID NO: 522968 - RNA, 20 nt, Artificial Sequence
  Synthetic
auauauuuucuguggaauac

SEQ ID NO: 522969 - RNA, 21 nt, Artificial Sequence
  Synthetic
uauauauuuucuguggaauac

SEQ ID NO: 522970 - RNA, 22 nt, Artificial Sequence
  Synthetic
guauauauuuucuguggaauac

SEQ ID NO: 522971 - RNA, 23 nt, Artificial Sequence
  Synthetic
uguauauauuuucuguggaauac

SEQ ID NO: 522972 - RNA, 24 nt, Artificial Sequence
  Synthetic
auguauauauuuucuguggaauac

SEQ ID NO: 522973 - RNA, 18 nt, Artificial Sequence
  Synthetic
uacauaccacaugaauac

SEQ ID NO: 522974 - RNA, 19 nt, Artificial Sequence
  Synthetic
auacauaccacaugaauac

SEQ ID NO: 522975 - RNA, 20 nt, Artificial Sequence
  Synthetic
cauacauaccacaugaauac

SEQ ID NO: 522976 - RNA, 21 nt, Artificial Sequence
  Synthetic
acauacauaccacaugaauac

SEQ ID NO: 522977 - RNA, 22 nt, Artificial Sequence
  Synthetic
uacauacauaccacaugaauac

SEQ ID NO: 522978 - RNA, 23 nt, Artificial Sequence
  Synthetic
auacauacauaccacaugaauac

SEQ ID NO: 522979 - RNA, 24 nt, Artificial Sequence
  Synthetic
uauacauacauaccacaugaauac

SEQ ID NO: 522980 - RNA, 18 nt, Artificial Sequence
  Synthetic
aaaaaugaguaugaauac

SEQ ID NO: 522981 - RNA, 19 nt, Artificial Sequence
  Synthetic
uaaaaaugaguaugaauac

SEQ ID NO: 522982 - RNA, 20 nt, Artificial Sequence
  Synthetic
uuaaaaaugaguaugaauac

SEQ ID NO: 522983 - RNA, 21 nt, Artificial Sequence
  Synthetic
guuaaaaaugaguaugaauac

SEQ ID NO: 522984 - RNA, 22 nt, Artificial Sequence
  Synthetic
aguuaaaaaugaguaugaauac

SEQ ID NO: 522985 - RNA, 23 nt, Artificial Sequence
  Synthetic
aaguuaaaaaugaguaugaauac

SEQ ID NO: 522986 - RNA, 24 nt, Artificial Sequence
  Synthetic
uaaguuaaaaaugaguaugaauac

SEQ ID NO: 522987 - RNA, 18 nt, Artificial Sequence
  Synthetic
ccucucuacccugaauac

SEQ ID NO: 522988 - RNA, 19 nt, Artificial Sequence
  Synthetic
uccucucuacccugaauac

SEQ ID NO: 522989 - RNA, 20 nt, Artificial Sequence
  Synthetic
cuccucucuacccugaauac

SEQ ID NO: 522990 - RNA, 21 nt, Artificial Sequence
  Synthetic
gcuccucucuacccugaauac

SEQ ID NO: 522991 - RNA, 22 nt, Artificial Sequence
  Synthetic
agcuccucucuacccugaauac

SEQ ID NO: 522992 - RNA, 23 nt, Artificial Sequence
  Synthetic
gagcuccucucuacccugaauac

SEQ ID NO: 522993 - RNA, 24 nt, Artificial Sequence
  Synthetic
ugagcuccucucuacccugaauac

SEQ ID NO: 522994 - RNA, 18 nt, Artificial Sequence
  Synthetic
uuuuacuucugugaauac

SEQ ID NO: 522995 - RNA, 19 nt, Artificial Sequence
  Synthetic
uuuuuacuucugugaauac

SEQ ID NO: 522996 - RNA, 20 nt, Artificial Sequence
  Synthetic
auuuuuacuucugugaauac

SEQ ID NO: 522997 - RNA, 21 nt, Artificial Sequence
  Synthetic
uauuuuuacuucugugaauac

SEQ ID NO: 522998 - RNA, 22 nt, Artificial Sequence
  Synthetic
uuauuuuuacuucugugaauac

SEQ ID NO: 522999 - RNA, 23 nt, Artificial Sequence
  Synthetic
guuauuuuuacuucugugaauac

SEQ ID NO: 523000 - RNA, 24 nt, Artificial Sequence
  Synthetic
uguuauuuuuacuucugugaauac

SEQ ID NO: 523001 - RNA, 18 nt, Artificial Sequence
  Synthetic
cauucuauuauugaauac

SEQ ID NO: 523002 - RNA, 19 nt, Artificial Sequence
  Synthetic
gcauucuauuauugaauac

SEQ ID NO: 523003 - RNA, 20 nt, Artificial Sequence
  Synthetic
agcauucuauuauugaauac

SEQ ID NO: 523004 - RNA, 21 nt, Artificial Sequence
  Synthetic
aagcauucuauuauugaauac

SEQ ID NO: 523005 - RNA, 22 nt, Artificial Sequence
  Synthetic
gaagcauucuauuauugaauac

SEQ ID NO: 523006 - RNA, 23 nt, Artificial Sequence
  Synthetic
agaagcauucuauuauugaauac

SEQ ID NO: 523007 - RNA, 24 nt, Artificial Sequence
  Synthetic
gagaagcauucuauuauugaauac

SEQ ID NO: 523008 - RNA, 18 nt, Artificial Sequence
  Synthetic
cacugagacaaauaauac

SEQ ID NO: 523009 - RNA, 19 nt, Artificial Sequence
  Synthetic
ccacugagacaaauaauac

SEQ ID NO: 523010 - RNA, 20 nt, Artificial Sequence
  Synthetic
accacugagacaaauaauac

SEQ ID NO: 523011 - RNA, 21 nt, Artificial Sequence
  Synthetic
aaccacugagacaaauaauac

SEQ ID NO: 523012 - RNA, 22 nt, Artificial Sequence
  Synthetic
caaccacugagacaaauaauac

SEQ ID NO: 523013 - RNA, 23 nt, Artificial Sequence
  Synthetic
ucaaccacugagacaaauaauac

SEQ ID NO: 523014 - RNA, 24 nt, Artificial Sequence
  Synthetic
uucaaccacugagacaaauaauac

SEQ ID NO: 523015 - RNA, 18 nt, Artificial Sequence
  Synthetic
cagaaaauccaauaauac

SEQ ID NO: 523016 - RNA, 19 nt, Artificial Sequence
  Synthetic
acagaaaauccaauaauac

SEQ ID NO: 523017 - RNA, 20 nt, Artificial Sequence
  Synthetic
gacagaaaauccaauaauac

SEQ ID NO: 523018 - RNA, 21 nt, Artificial Sequence
  Synthetic
ugacagaaaauccaauaauac

SEQ ID NO: 523019 - RNA, 22 nt, Artificial Sequence
  Synthetic
gugacagaaaauccaauaauac

SEQ ID NO: 523020 - RNA, 23 nt, Artificial Sequence
  Synthetic
ggugacagaaaauccaauaauac

SEQ ID NO: 523021 - RNA, 24 nt, Artificial Sequence
  Synthetic
uggugacagaaaauccaauaauac

SEQ ID NO: 523022 - RNA, 18 nt, Artificial Sequence
  Synthetic
aaccaucacagauaauac

SEQ ID NO: 523023 - RNA, 19 nt, Artificial Sequence
  Synthetic
aaaccaucacagauaauac

SEQ ID NO: 523024 - RNA, 20 nt, Artificial Sequence
  Synthetic
gaaaccaucacagauaauac

SEQ ID NO: 523025 - RNA, 21 nt, Artificial Sequence
  Synthetic
agaaaccaucacagauaauac

SEQ ID NO: 523026 - RNA, 22 nt, Artificial Sequence
  Synthetic
aagaaaccaucacagauaauac

SEQ ID NO: 523027 - RNA, 23 nt, Artificial Sequence
  Synthetic
uaagaaaccaucacagauaauac

SEQ ID NO: 523028 - RNA, 24 nt, Artificial Sequence
  Synthetic
auaagaaaccaucacagauaauac

SEQ ID NO: 523029 - RNA, 18 nt, Artificial Sequence
  Synthetic
ucauuaacaguauaauac

SEQ ID NO: 523030 - RNA, 19 nt, Artificial Sequence
  Synthetic
uucauuaacaguauaauac

SEQ ID NO: 523031 - RNA, 20 nt, Artificial Sequence
  Synthetic
cuucauuaacaguauaauac

SEQ ID NO: 523032 - RNA, 21 nt, Artificial Sequence
  Synthetic
gcuucauuaacaguauaauac

SEQ ID NO: 523033 - RNA, 22 nt, Artificial Sequence
  Synthetic
ugcuucauuaacaguauaauac

SEQ ID NO: 523034 - RNA, 23 nt, Artificial Sequence
  Synthetic
augcuucauuaacaguauaauac

SEQ ID NO: 523035 - RNA, 24 nt, Artificial Sequence
  Synthetic
aaugcuucauuaacaguauaauac

SEQ ID NO: 523036 - RNA, 18 nt, Artificial Sequence
  Synthetic
aaggaguucuuauaauac

SEQ ID NO: 523037 - RNA, 19 nt, Artificial Sequence
  Synthetic
caaggaguucuuauaauac

SEQ ID NO: 523038 - RNA, 20 nt, Artificial Sequence
  Synthetic
ccaaggaguucuuauaauac

SEQ ID NO: 523039 - RNA, 21 nt, Artificial Sequence
  Synthetic
accaaggaguucuuauaauac

SEQ ID NO: 523040 - RNA, 22 nt, Artificial Sequence
  Synthetic
aaccaaggaguucuuauaauac

SEQ ID NO: 523041 - RNA, 23 nt, Artificial Sequence
  Synthetic
aaaccaaggaguucuuauaauac

SEQ ID NO: 523042 - RNA, 24 nt, Artificial Sequence
  Synthetic
gaaaccaaggaguucuuauaauac

SEQ ID NO: 523043 - RNA, 18 nt, Artificial Sequence
  Synthetic
ucacaguguuuauaauac

SEQ ID NO: 523044 - RNA, 19 nt, Artificial Sequence
  Synthetic
cucacaguguuuauaauac

SEQ ID NO: 523045 - RNA, 20 nt, Artificial Sequence
  Synthetic
ucucacaguguuuauaauac

SEQ ID NO: 523046 - RNA, 21 nt, Artificial Sequence
  Synthetic
uucucacaguguuuauaauac

SEQ ID NO: 523047 - RNA, 22 nt, Artificial Sequence
  Synthetic
uuucucacaguguuuauaauac

SEQ ID NO: 523048 - RNA, 23 nt, Artificial Sequence
  Synthetic
guuucucacaguguuuauaauac

SEQ ID NO: 523049 - RNA, 24 nt, Artificial Sequence
  Synthetic
aguuucucacaguguuuauaauac

SEQ ID NO: 523050 - RNA, 18 nt, Artificial Sequence
  Synthetic
uacaccuuuuuauaauac

SEQ ID NO: 523051 - RNA, 19 nt, Artificial Sequence
  Synthetic
uuacaccuuuuuauaauac

SEQ ID NO: 523052 - RNA, 20 nt, Artificial Sequence
  Synthetic
guuacaccuuuuuauaauac

SEQ ID NO: 523053 - RNA, 21 nt, Artificial Sequence
  Synthetic
aguuacaccuuuuuauaauac

SEQ ID NO: 523054 - RNA, 22 nt, Artificial Sequence
  Synthetic
gaguuacaccuuuuuauaauac

SEQ ID NO: 523055 - RNA, 23 nt, Artificial Sequence
  Synthetic
ugaguuacaccuuuuuauaauac

SEQ ID NO: 523056 - RNA, 24 nt, Artificial Sequence
  Synthetic
gugaguuacaccuuuuuauaauac

SEQ ID NO: 523057 - RNA, 18 nt, Artificial Sequence
  Synthetic
uccuuaucaaacuaauac

SEQ ID NO: 523058 - RNA, 19 nt, Artificial Sequence
  Synthetic
guccuuaucaaacuaauac

SEQ ID NO: 523059 - RNA, 20 nt, Artificial Sequence
  Synthetic
uguccuuaucaaacuaauac

SEQ ID NO: 523060 - RNA, 21 nt, Artificial Sequence
  Synthetic
uuguccuuaucaaacuaauac

SEQ ID NO: 523061 - RNA, 22 nt, Artificial Sequence
  Synthetic
auuguccuuaucaaacuaauac

SEQ ID NO: 523062 - RNA, 23 nt, Artificial Sequence
  Synthetic
cauuguccuuaucaaacuaauac

SEQ ID NO: 523063 - RNA, 24 nt, Artificial Sequence
  Synthetic
ccauuguccuuaucaaacuaauac

SEQ ID NO: 523064 - RNA, 18 nt, Artificial Sequence
  Synthetic
uuaaucuuugacuaauac

SEQ ID NO: 523065 - RNA, 19 nt, Artificial Sequence
  Synthetic
auuaaucuuugacuaauac

SEQ ID NO: 523066 - RNA, 20 nt, Artificial Sequence
  Synthetic
cauuaaucuuugacuaauac

SEQ ID NO: 523067 - RNA, 21 nt, Artificial Sequence
  Synthetic
ccauuaaucuuugacuaauac

SEQ ID NO: 523068 - RNA, 22 nt, Artificial Sequence
  Synthetic
accauuaaucuuugacuaauac

SEQ ID NO: 523069 - RNA, 23 nt, Artificial Sequence
  Synthetic
uaccauuaaucuuugacuaauac

SEQ ID NO: 523070 - RNA, 24 nt, Artificial Sequence
  Synthetic
auaccauuaaucuuugacuaauac

SEQ ID NO: 523071 - RNA, 18 nt, Artificial Sequence
  Synthetic
cugacaaagggcuaauac

SEQ ID NO: 523072 - RNA, 19 nt, Artificial Sequence
  Synthetic
ucugacaaagggcuaauac

SEQ ID NO: 523073 - RNA, 20 nt, Artificial Sequence
  Synthetic
aucugacaaagggcuaauac

SEQ ID NO: 523074 - RNA, 21 nt, Artificial Sequence
  Synthetic
caucugacaaagggcuaauac

SEQ ID NO: 523075 - RNA, 22 nt, Artificial Sequence
  Synthetic
acaucugacaaagggcuaauac

SEQ ID NO: 523076 - RNA, 23 nt, Artificial Sequence
  Synthetic
uacaucugacaaagggcuaauac

SEQ ID NO: 523077 - RNA, 24 nt, Artificial Sequence
  Synthetic
auacaucugacaaagggcuaauac

SEQ ID NO: 523078 - RNA, 18 nt, Artificial Sequence
  Synthetic
agaaaaacaugcuaauac

SEQ ID NO: 523079 - RNA, 19 nt, Artificial Sequence
  Synthetic
gagaaaaacaugcuaauac

SEQ ID NO: 523080 - RNA, 20 nt, Artificial Sequence
  Synthetic
ggagaaaaacaugcuaauac

SEQ ID NO: 523081 - RNA, 21 nt, Artificial Sequence
  Synthetic
aggagaaaaacaugcuaauac

SEQ ID NO: 523082 - RNA, 22 nt, Artificial Sequence
  Synthetic
caggagaaaaacaugcuaauac

SEQ ID NO: 523083 - RNA, 23 nt, Artificial Sequence
  Synthetic
acaggagaaaaacaugcuaauac

SEQ ID NO: 523084 - RNA, 24 nt, Artificial Sequence
  Synthetic
aacaggagaaaaacaugcuaauac

SEQ ID NO: 523085 - RNA, 18 nt, Artificial Sequence
  Synthetic
uuauuacuaugcuaauac

SEQ ID NO: 523086 - RNA, 19 nt, Artificial Sequence
  Synthetic
cuuauuacuaugcuaauac

SEQ ID NO: 523087 - RNA, 20 nt, Artificial Sequence
  Synthetic
acuuauuacuaugcuaauac

SEQ ID NO: 523088 - RNA, 21 nt, Artificial Sequence
  Synthetic
uacuuauuacuaugcuaauac

SEQ ID NO: 523089 - RNA, 22 nt, Artificial Sequence
  Synthetic
auacuuauuacuaugcuaauac

SEQ ID NO: 523090 - RNA, 23 nt, Artificial Sequence
  Synthetic
aauacuuauuacuaugcuaauac

SEQ ID NO: 523091 - RNA, 24 nt, Artificial Sequence
  Synthetic
uaauacuuauuacuaugcuaauac

SEQ ID NO: 523092 - RNA, 18 nt, Artificial Sequence
  Synthetic
aguagucaggucuaauac

SEQ ID NO: 523093 - RNA, 19 nt, Artificial Sequence
  Synthetic
aaguagucaggucuaauac

SEQ ID NO: 523094 - RNA, 20 nt, Artificial Sequence
  Synthetic
aaaguagucaggucuaauac

SEQ ID NO: 523095 - RNA, 21 nt, Artificial Sequence
  Synthetic
gaaaguagucaggucuaauac

SEQ ID NO: 523096 - RNA, 22 nt, Artificial Sequence
  Synthetic
ugaaaguagucaggucuaauac

SEQ ID NO: 523097 - RNA, 23 nt, Artificial Sequence
  Synthetic
augaaaguagucaggucuaauac

SEQ ID NO: 523098 - RNA, 24 nt, Artificial Sequence
  Synthetic
caugaaaguagucaggucuaauac

SEQ ID NO: 523099 - RNA, 18 nt, Artificial Sequence
  Synthetic
gggaauggccaguaauac

SEQ ID NO: 523100 - RNA, 19 nt, Artificial Sequence
  Synthetic
cgggaauggccaguaauac

SEQ ID NO: 523101 - RNA, 20 nt, Artificial Sequence
  Synthetic
ccgggaauggccaguaauac

SEQ ID NO: 523102 - RNA, 21 nt, Artificial Sequence
  Synthetic
uccgggaauggccaguaauac

SEQ ID NO: 523103 - RNA, 22 nt, Artificial Sequence
  Synthetic
guccgggaauggccaguaauac

SEQ ID NO: 523104 - RNA, 23 nt, Artificial Sequence
  Synthetic
uguccgggaauggccaguaauac

SEQ ID NO: 523105 - RNA, 24 nt, Artificial Sequence
  Synthetic
auguccgggaauggccaguaauac

SEQ ID NO: 523106 - RNA, 18 nt, Artificial Sequence
  Synthetic
aagccuuaaauguaauac

SEQ ID NO: 523107 - RNA, 19 nt, Artificial Sequence
  Synthetic
aaagccuuaaauguaauac

SEQ ID NO: 523108 - RNA, 20 nt, Artificial Sequence
  Synthetic
uaaagccuuaaauguaauac

SEQ ID NO: 523109 - RNA, 21 nt, Artificial Sequence
  Synthetic
uuaaagccuuaaauguaauac

SEQ ID NO: 523110 - RNA, 22 nt, Artificial Sequence
  Synthetic
auuaaagccuuaaauguaauac

SEQ ID NO: 523111 - RNA, 23 nt, Artificial Sequence
  Synthetic
gauuaaagccuuaaauguaauac

SEQ ID NO: 523112 - RNA, 24 nt, Artificial Sequence
  Synthetic
ggauuaaagccuuaaauguaauac

SEQ ID NO: 523113 - RNA, 18 nt, Artificial Sequence
  Synthetic
aacguuaaaaauuaauac

SEQ ID NO: 523114 - RNA, 19 nt, Artificial Sequence
  Synthetic
uaacguuaaaaauuaauac

SEQ ID NO: 523115 - RNA, 20 nt, Artificial Sequence
  Synthetic
uuaacguuaaaaauuaauac

SEQ ID NO: 523116 - RNA, 21 nt, Artificial Sequence
  Synthetic
uuuaacguuaaaaauuaauac

SEQ ID NO: 523117 - RNA, 22 nt, Artificial Sequence
  Synthetic
uuuuaacguuaaaaauuaauac

SEQ ID NO: 523118 - RNA, 23 nt, Artificial Sequence
  Synthetic
uuuuuaacguuaaaaauuaauac

SEQ ID NO: 523119 - RNA, 24 nt, Artificial Sequence
  Synthetic
auuuuuaacguuaaaaauuaauac

SEQ ID NO: 523120 - RNA, 18 nt, Artificial Sequence
  Synthetic
gggaaaugguaaacauac

SEQ ID NO: 523121 - RNA, 19 nt, Artificial Sequence
  Synthetic
ugggaaaugguaaacauac

SEQ ID NO: 523122 - RNA, 20 nt, Artificial Sequence
  Synthetic
augggaaaugguaaacauac

SEQ ID NO: 523123 - RNA, 21 nt, Artificial Sequence
  Synthetic
gaugggaaaugguaaacauac

SEQ ID NO: 523124 - RNA, 22 nt, Artificial Sequence
  Synthetic
agaugggaaaugguaaacauac

SEQ ID NO: 523125 - RNA, 23 nt, Artificial Sequence
  Synthetic
aagaugggaaaugguaaacauac

SEQ ID NO: 523126 - RNA, 24 nt, Artificial Sequence
  Synthetic
caagaugggaaaugguaaacauac

SEQ ID NO: 523127 - RNA, 18 nt, Artificial Sequence
  Synthetic
gcaagaacaacaacauac

SEQ ID NO: 523128 - RNA, 19 nt, Artificial Sequence
  Synthetic
agcaagaacaacaacauac

SEQ ID NO: 523129 - RNA, 20 nt, Artificial Sequence
  Synthetic
cagcaagaacaacaacauac

SEQ ID NO: 523130 - RNA, 21 nt, Artificial Sequence
  Synthetic
gcagcaagaacaacaacauac

SEQ ID NO: 523131 - RNA, 22 nt, Artificial Sequence
  Synthetic
agcagcaagaacaacaacauac

SEQ ID NO: 523132 - RNA, 23 nt, Artificial Sequence
  Synthetic
cagcagcaagaacaacaacauac

SEQ ID NO: 523133 - RNA, 24 nt, Artificial Sequence
  Synthetic
gcagcagcaagaacaacaacauac

SEQ ID NO: 523134 - RNA, 18 nt, Artificial Sequence
  Synthetic
uccuuuauagcaacauac

SEQ ID NO: 523135 - RNA, 19 nt, Artificial Sequence
  Synthetic
uuccuuuauagcaacauac

SEQ ID NO: 523136 - RNA, 20 nt, Artificial Sequence
  Synthetic
auuccuuuauagcaacauac

SEQ ID NO: 523137 - RNA, 21 nt, Artificial Sequence
  Synthetic
cauuccuuuauagcaacauac

SEQ ID NO: 523138 - RNA, 22 nt, Artificial Sequence
  Synthetic
gcauuccuuuauagcaacauac

SEQ ID NO: 523139 - RNA, 23 nt, Artificial Sequence
  Synthetic
ggcauuccuuuauagcaacauac

SEQ ID NO: 523140 - RNA, 24 nt, Artificial Sequence
  Synthetic
uggcauuccuuuauagcaacauac

SEQ ID NO: 523141 - RNA, 18 nt, Artificial Sequence
  Synthetic
gguuguuacauaacauac

SEQ ID NO: 523142 - RNA, 19 nt, Artificial Sequence
  Synthetic
ugguuguuacauaacauac

SEQ ID NO: 523143 - RNA, 20 nt, Artificial Sequence
  Synthetic
augguuguuacauaacauac

SEQ ID NO: 523144 - RNA, 21 nt, Artificial Sequence
  Synthetic
aaugguuguuacauaacauac

SEQ ID NO: 523145 - RNA, 22 nt, Artificial Sequence
  Synthetic
aaaugguuguuacauaacauac

SEQ ID NO: 523146 - RNA, 23 nt, Artificial Sequence
  Synthetic
caaaugguuguuacauaacauac

SEQ ID NO: 523147 - RNA, 24 nt, Artificial Sequence
  Synthetic
acaaaugguuguuacauaacauac

SEQ ID NO: 523148 - RNA, 18 nt, Artificial Sequence
  Synthetic
cuacuuuaguacacauac

SEQ ID NO: 523149 - RNA, 19 nt, Artificial Sequence
  Synthetic
gcuacuuuaguacacauac

SEQ ID NO: 523150 - RNA, 20 nt, Artificial Sequence
  Synthetic
ggcuacuuuaguacacauac

SEQ ID NO: 523151 - RNA, 21 nt, Artificial Sequence
  Synthetic
aggcuacuuuaguacacauac

SEQ ID NO: 523152 - RNA, 22 nt, Artificial Sequence
  Synthetic
caggcuacuuuaguacacauac

SEQ ID NO: 523153 - RNA, 23 nt, Artificial Sequence
  Synthetic
gcaggcuacuuuaguacacauac

SEQ ID NO: 523154 - RNA, 24 nt, Artificial Sequence
  Synthetic
agcaggcuacuuuaguacacauac

SEQ ID NO: 523155 - RNA, 18 nt, Artificial Sequence
  Synthetic
ccaaaauugaccacauac

SEQ ID NO: 523156 - RNA, 19 nt, Artificial Sequence
  Synthetic
uccaaaauugaccacauac

SEQ ID NO: 523157 - RNA, 20 nt, Artificial Sequence
  Synthetic
uuccaaaauugaccacauac

SEQ ID NO: 523158 - RNA, 21 nt, Artificial Sequence
  Synthetic
auuccaaaauugaccacauac

SEQ ID NO: 523159 - RNA, 22 nt, Artificial Sequence
  Synthetic
uauuccaaaauugaccacauac

SEQ ID NO: 523160 - RNA, 23 nt, Artificial Sequence
  Synthetic
cuauuccaaaauugaccacauac

SEQ ID NO: 523161 - RNA, 24 nt, Artificial Sequence
  Synthetic
ccuauuccaaaauugaccacauac

SEQ ID NO: 523162 - RNA, 18 nt, Artificial Sequence
  Synthetic
guacauugauucacauac

SEQ ID NO: 523163 - RNA, 19 nt, Artificial Sequence
  Synthetic
aguacauugauucacauac

SEQ ID NO: 523164 - RNA, 20 nt, Artificial Sequence
  Synthetic
aaguacauugauucacauac

SEQ ID NO: 523165 - RNA, 21 nt, Artificial Sequence
  Synthetic
caaguacauugauucacauac

SEQ ID NO: 523166 - RNA, 22 nt, Artificial Sequence
  Synthetic
acaaguacauugauucacauac

SEQ ID NO: 523167 - RNA, 23 nt, Artificial Sequence
  Synthetic
aacaaguacauugauucacauac

SEQ ID NO: 523168 - RNA, 24 nt, Artificial Sequence
  Synthetic
uaacaaguacauugauucacauac

SEQ ID NO: 523169 - RNA, 18 nt, Artificial Sequence
  Synthetic
gcugugauaaagacauac

SEQ ID NO: 523170 - RNA, 19 nt, Artificial Sequence
  Synthetic
ugcugugauaaagacauac

SEQ ID NO: 523171 - RNA, 20 nt, Artificial Sequence
  Synthetic
augcugugauaaagacauac

SEQ ID NO: 523172 - RNA, 21 nt, Artificial Sequence
  Synthetic
caugcugugauaaagacauac

SEQ ID NO: 523173 - RNA, 22 nt, Artificial Sequence
  Synthetic
ucaugcugugauaaagacauac

SEQ ID NO: 523174 - RNA, 23 nt, Artificial Sequence
  Synthetic
uucaugcugugauaaagacauac

SEQ ID NO: 523175 - RNA, 24 nt, Artificial Sequence
  Synthetic
uuucaugcugugauaaagacauac

SEQ ID NO: 523176 - RNA, 18 nt, Artificial Sequence
  Synthetic
guauuaaauuagacauac

SEQ ID NO: 523177 - RNA, 19 nt, Artificial Sequence
  Synthetic
uguauuaaauuagacauac

SEQ ID NO: 523178 - RNA, 20 nt, Artificial Sequence
  Synthetic
guguauuaaauuagacauac

SEQ ID NO: 523179 - RNA, 21 nt, Artificial Sequence
  Synthetic
uguguauuaaauuagacauac

SEQ ID NO: 523180 - RNA, 22 nt, Artificial Sequence
  Synthetic
auguguauuaaauuagacauac

SEQ ID NO: 523181 - RNA, 23 nt, Artificial Sequence
  Synthetic
aauguguauuaaauuagacauac

SEQ ID NO: 523182 - RNA, 24 nt, Artificial Sequence
  Synthetic
aaauguguauuaaauuagacauac

SEQ ID NO: 523183 - RNA, 18 nt, Artificial Sequence
  Synthetic
uauuguuuauggacauac

SEQ ID NO: 523184 - RNA, 19 nt, Artificial Sequence
  Synthetic
auauuguuuauggacauac

SEQ ID NO: 523185 - RNA, 20 nt, Artificial Sequence
  Synthetic
cauauuguuuauggacauac

SEQ ID NO: 523186 - RNA, 21 nt, Artificial Sequence
  Synthetic
acauauuguuuauggacauac

SEQ ID NO: 523187 - RNA, 22 nt, Artificial Sequence
  Synthetic
aacauauuguuuauggacauac

SEQ ID NO: 523188 - RNA, 23 nt, Artificial Sequence
  Synthetic
uaacauauuguuuauggacauac

SEQ ID NO: 523189 - RNA, 24 nt, Artificial Sequence
  Synthetic
uuaacauauuguuuauggacauac

SEQ ID NO: 523190 - RNA, 18 nt, Artificial Sequence
  Synthetic
aaacaaagauguacauac

SEQ ID NO: 523191 - RNA, 19 nt, Artificial Sequence
  Synthetic
caaacaaagauguacauac

SEQ ID NO: 523192 - RNA, 20 nt, Artificial Sequence
  Synthetic
acaaacaaagauguacauac

SEQ ID NO: 523193 - RNA, 21 nt, Artificial Sequence
  Synthetic
aacaaacaaagauguacauac

SEQ ID NO: 523194 - RNA, 22 nt, Artificial Sequence
  Synthetic
aaacaaacaaagauguacauac

SEQ ID NO: 523195 - RNA, 23 nt, Artificial Sequence
  Synthetic
uaaacaaacaaagauguacauac

SEQ ID NO: 523196 - RNA, 24 nt, Artificial Sequence
  Synthetic
auaaacaaacaaagauguacauac

SEQ ID NO: 523197 - RNA, 18 nt, Artificial Sequence
  Synthetic
cagcuagaagaaccauac

SEQ ID NO: 523198 - RNA, 19 nt, Artificial Sequence
  Synthetic
gcagcuagaagaaccauac

SEQ ID NO: 523199 - RNA, 20 nt, Artificial Sequence
  Synthetic
ugcagcuagaagaaccauac

SEQ ID NO: 523200 - RNA, 21 nt, Artificial Sequence
  Synthetic
augcagcuagaagaaccauac

SEQ ID NO: 523201 - RNA, 22 nt, Artificial Sequence
  Synthetic
aaugcagcuagaagaaccauac

SEQ ID NO: 523202 - RNA, 23 nt, Artificial Sequence
  Synthetic
uaaugcagcuagaagaaccauac

SEQ ID NO: 523203 - RNA, 24 nt, Artificial Sequence
  Synthetic
auaaugcagcuagaagaaccauac

SEQ ID NO: 523204 - RNA, 18 nt, Artificial Sequence
  Synthetic
aggcagucccagccauac

SEQ ID NO: 523205 - RNA, 19 nt, Artificial Sequence
  Synthetic
caggcagucccagccauac

SEQ ID NO: 523206 - RNA, 20 nt, Artificial Sequence
  Synthetic
acaggcagucccagccauac

SEQ ID NO: 523207 - RNA, 21 nt, Artificial Sequence
  Synthetic
gacaggcagucccagccauac

SEQ ID NO: 523208 - RNA, 22 nt, Artificial Sequence
  Synthetic
ggacaggcagucccagccauac

SEQ ID NO: 523209 - RNA, 23 nt, Artificial Sequence
  Synthetic
uggacaggcagucccagccauac

SEQ ID NO: 523210 - RNA, 24 nt, Artificial Sequence
  Synthetic
guggacaggcagucccagccauac

SEQ ID NO: 523211 - RNA, 18 nt, Artificial Sequence
  Synthetic
acaaguaucuagccauac

SEQ ID NO: 523212 - RNA, 19 nt, Artificial Sequence
  Synthetic
uacaaguaucuagccauac

SEQ ID NO: 523213 - RNA, 20 nt, Artificial Sequence
  Synthetic
cuacaaguaucuagccauac

SEQ ID NO: 523214 - RNA, 21 nt, Artificial Sequence
  Synthetic
ccuacaaguaucuagccauac

SEQ ID NO: 523215 - RNA, 22 nt, Artificial Sequence
  Synthetic
uccuacaaguaucuagccauac

SEQ ID NO: 523216 - RNA, 23 nt, Artificial Sequence
  Synthetic
uuccuacaaguaucuagccauac

SEQ ID NO: 523217 - RNA, 24 nt, Artificial Sequence
  Synthetic
uuuccuacaaguaucuagccauac

SEQ ID NO: 523218 - RNA, 18 nt, Artificial Sequence
  Synthetic
uauauccaagcuccauac

SEQ ID NO: 523219 - RNA, 19 nt, Artificial Sequence
  Synthetic
guauauccaagcuccauac

SEQ ID NO: 523220 - RNA, 20 nt, Artificial Sequence
  Synthetic
uguauauccaagcuccauac

SEQ ID NO: 523221 - RNA, 21 nt, Artificial Sequence
  Synthetic
auguauauccaagcuccauac

SEQ ID NO: 523222 - RNA, 22 nt, Artificial Sequence
  Synthetic
uauguauauccaagcuccauac

SEQ ID NO: 523223 - RNA, 23 nt, Artificial Sequence
  Synthetic
auauguauauccaagcuccauac

SEQ ID NO: 523224 - RNA, 24 nt, Artificial Sequence
  Synthetic
aauauguauauccaagcuccauac

SEQ ID NO: 523225 - RNA, 18 nt, Artificial Sequence
  Synthetic
aucuacuaagcugcauac

SEQ ID NO: 523226 - RNA, 19 nt, Artificial Sequence
  Synthetic
aaucuacuaagcugcauac

SEQ ID NO: 523227 - RNA, 20 nt, Artificial Sequence
  Synthetic
uaaucuacuaagcugcauac

SEQ ID NO: 523228 - RNA, 21 nt, Artificial Sequence
  Synthetic
auaaucuacuaagcugcauac

SEQ ID NO: 523229 - RNA, 22 nt, Artificial Sequence
  Synthetic
uauaaucuacuaagcugcauac

SEQ ID NO: 523230 - RNA, 23 nt, Artificial Sequence
  Synthetic
auauaaucuacuaagcugcauac

SEQ ID NO: 523231 - RNA, 24 nt, Artificial Sequence
  Synthetic
gauauaaucuacuaagcugcauac

SEQ ID NO: 523232 - RNA, 18 nt, Artificial Sequence
  Synthetic
uuauaauggcaaucauac

SEQ ID NO: 523233 - RNA, 19 nt, Artificial Sequence
  Synthetic
uuuauaauggcaaucauac

SEQ ID NO: 523234 - RNA, 20 nt, Artificial Sequence
  Synthetic
uuuuauaauggcaaucauac

SEQ ID NO: 523235 - RNA, 21 nt, Artificial Sequence
  Synthetic
cuuuuauaauggcaaucauac

SEQ ID NO: 523236 - RNA, 22 nt, Artificial Sequence
  Synthetic
ucuuuuauaauggcaaucauac

SEQ ID NO: 523237 - RNA, 23 nt, Artificial Sequence
  Synthetic
uucuuuuauaauggcaaucauac

SEQ ID NO: 523238 - RNA, 24 nt, Artificial Sequence
  Synthetic
auucuuuuauaauggcaaucauac

SEQ ID NO: 523239 - RNA, 18 nt, Artificial Sequence
  Synthetic
gucaugagacuaucauac

SEQ ID NO: 523240 - RNA, 19 nt, Artificial Sequence
  Synthetic
ggucaugagacuaucauac

SEQ ID NO: 523241 - RNA, 20 nt, Artificial Sequence
  Synthetic
aggucaugagacuaucauac

SEQ ID NO: 523242 - RNA, 21 nt, Artificial Sequence
  Synthetic
caggucaugagacuaucauac

SEQ ID NO: 523243 - RNA, 22 nt, Artificial Sequence
  Synthetic
gcaggucaugagacuaucauac

SEQ ID NO: 523244 - RNA, 23 nt, Artificial Sequence
  Synthetic
agcaggucaugagacuaucauac

SEQ ID NO: 523245 - RNA, 24 nt, Artificial Sequence
  Synthetic
aagcaggucaugagacuaucauac

SEQ ID NO: 523246 - RNA, 18 nt, Artificial Sequence
  Synthetic
uuaauugaucucucauac

SEQ ID NO: 523247 - RNA, 19 nt, Artificial Sequence
  Synthetic
uuuaauugaucucucauac

SEQ ID NO: 523248 - RNA, 20 nt, Artificial Sequence
  Synthetic
guuuaauugaucucucauac

SEQ ID NO: 523249 - RNA, 21 nt, Artificial Sequence
  Synthetic
uguuuaauugaucucucauac

SEQ ID NO: 523250 - RNA, 22 nt, Artificial Sequence
  Synthetic
auguuuaauugaucucucauac

SEQ ID NO: 523251 - RNA, 23 nt, Artificial Sequence
  Synthetic
cauguuuaauugaucucucauac

SEQ ID NO: 523252 - RNA, 24 nt, Artificial Sequence
  Synthetic
ccauguuuaauugaucucucauac

SEQ ID NO: 523253 - RNA, 18 nt, Artificial Sequence
  Synthetic
ucccaagaagucucauac

SEQ ID NO: 523254 - RNA, 19 nt, Artificial Sequence
  Synthetic
uucccaagaagucucauac

SEQ ID NO: 523255 - RNA, 20 nt, Artificial Sequence
  Synthetic
guucccaagaagucucauac

SEQ ID NO: 523256 - RNA, 21 nt, Artificial Sequence
  Synthetic
aguucccaagaagucucauac

SEQ ID NO: 523257 - RNA, 22 nt, Artificial Sequence
  Synthetic
aaguucccaagaagucucauac

SEQ ID NO: 523258 - RNA, 23 nt, Artificial Sequence
  Synthetic
gaaguucccaagaagucucauac

SEQ ID NO: 523259 - RNA, 24 nt, Artificial Sequence
  Synthetic
agaaguucccaagaagucucauac

SEQ ID NO: 523260 - RNA, 18 nt, Artificial Sequence
  Synthetic
uugucaaaaaggucauac

SEQ ID NO: 523261 - RNA, 19 nt, Artificial Sequence
  Synthetic
auugucaaaaaggucauac

SEQ ID NO: 523262 - RNA, 20 nt, Artificial Sequence
  Synthetic
cauugucaaaaaggucauac

SEQ ID NO: 523263 - RNA, 21 nt, Artificial Sequence
  Synthetic
acauugucaaaaaggucauac

SEQ ID NO: 523264 - RNA, 22 nt, Artificial Sequence
  Synthetic
aacauugucaaaaaggucauac

SEQ ID NO: 523265 - RNA, 23 nt, Artificial Sequence
  Synthetic
aaacauugucaaaaaggucauac

SEQ ID NO: 523266 - RNA, 24 nt, Artificial Sequence
  Synthetic
uaaacauugucaaaaaggucauac

SEQ ID NO: 523267 - RNA, 18 nt, Artificial Sequence
  Synthetic
cuccaagacaggucauac

SEQ ID NO: 523268 - RNA, 19 nt, Artificial Sequence
  Synthetic
ucuccaagacaggucauac

SEQ ID NO: 523269 - RNA, 20 nt, Artificial Sequence
  Synthetic
uucuccaagacaggucauac

SEQ ID NO: 523270 - RNA, 21 nt, Artificial Sequence
  Synthetic
auucuccaagacaggucauac

SEQ ID NO: 523271 - RNA, 22 nt, Artificial Sequence
  Synthetic
cauucuccaagacaggucauac

SEQ ID NO: 523272 - RNA, 23 nt, Artificial Sequence
  Synthetic
ccauucuccaagacaggucauac

SEQ ID NO: 523273 - RNA, 24 nt, Artificial Sequence
  Synthetic
accauucuccaagacaggucauac

SEQ ID NO: 523274 - RNA, 18 nt, Artificial Sequence
  Synthetic
aauccugcagguucauac

SEQ ID NO: 523275 - RNA, 19 nt, Artificial Sequence
  Synthetic
gaauccugcagguucauac

SEQ ID NO: 523276 - RNA, 20 nt, Artificial Sequence
  Synthetic
ggaauccugcagguucauac

SEQ ID NO: 523277 - RNA, 21 nt, Artificial Sequence
  Synthetic
aggaauccugcagguucauac

SEQ ID NO: 523278 - RNA, 22 nt, Artificial Sequence
  Synthetic
uaggaauccugcagguucauac

SEQ ID NO: 523279 - RNA, 23 nt, Artificial Sequence
  Synthetic
guaggaauccugcagguucauac

SEQ ID NO: 523280 - RNA, 24 nt, Artificial Sequence
  Synthetic
gguaggaauccugcagguucauac

SEQ ID NO: 523281 - RNA, 18 nt, Artificial Sequence
  Synthetic
ugaucaucacuuucauac

SEQ ID NO: 523282 - RNA, 19 nt, Artificial Sequence
  Synthetic
uugaucaucacuuucauac

SEQ ID NO: 523283 - RNA, 20 nt, Artificial Sequence
  Synthetic
uuugaucaucacuuucauac

SEQ ID NO: 523284 - RNA, 21 nt, Artificial Sequence
  Synthetic
uuuugaucaucacuuucauac

SEQ ID NO: 523285 - RNA, 22 nt, Artificial Sequence
  Synthetic
auuuugaucaucacuuucauac

SEQ ID NO: 523286 - RNA, 23 nt, Artificial Sequence
  Synthetic
cauuuugaucaucacuuucauac

SEQ ID NO: 523287 - RNA, 24 nt, Artificial Sequence
  Synthetic
acauuuugaucaucacuuucauac

SEQ ID NO: 523288 - RNA, 18 nt, Artificial Sequence
  Synthetic
uaacauugcaaaagauac

SEQ ID NO: 523289 - RNA, 19 nt, Artificial Sequence
  Synthetic
cuaacauugcaaaagauac

SEQ ID NO: 523290 - RNA, 20 nt, Artificial Sequence
  Synthetic
acuaacauugcaaaagauac

SEQ ID NO: 523291 - RNA, 21 nt, Artificial Sequence
  Synthetic
cacuaacauugcaaaagauac

SEQ ID NO: 523292 - RNA, 22 nt, Artificial Sequence
  Synthetic
acacuaacauugcaaaagauac

SEQ ID NO: 523293 - RNA, 23 nt, Artificial Sequence
  Synthetic
cacacuaacauugcaaaagauac

SEQ ID NO: 523294 - RNA, 24 nt, Artificial Sequence
  Synthetic
acacacuaacauugcaaaagauac

SEQ ID NO: 523295 - RNA, 18 nt, Artificial Sequence
  Synthetic
aaacagggugaaagauac

SEQ ID NO: 523296 - RNA, 19 nt, Artificial Sequence
  Synthetic
gaaacagggugaaagauac

SEQ ID NO: 523297 - RNA, 20 nt, Artificial Sequence
  Synthetic
agaaacagggugaaagauac

SEQ ID NO: 523298 - RNA, 21 nt, Artificial Sequence
  Synthetic
aagaaacagggugaaagauac

SEQ ID NO: 523299 - RNA, 22 nt, Artificial Sequence
  Synthetic
aaagaaacagggugaaagauac

SEQ ID NO: 523300 - RNA, 23 nt, Artificial Sequence
  Synthetic
aaaagaaacagggugaaagauac

SEQ ID NO: 523301 - RNA, 24 nt, Artificial Sequence
  Synthetic
gaaaagaaacagggugaaagauac

SEQ ID NO: 523302 - RNA, 18 nt, Artificial Sequence
  Synthetic
guacugcuauaaagauac

SEQ ID NO: 523303 - RNA, 19 nt, Artificial Sequence
  Synthetic
gguacugcuauaaagauac

SEQ ID NO: 523304 - RNA, 20 nt, Artificial Sequence
  Synthetic
agguacugcuauaaagauac

SEQ ID NO: 523305 - RNA, 21 nt, Artificial Sequence
  Synthetic
gagguacugcuauaaagauac

SEQ ID NO: 523306 - RNA, 22 nt, Artificial Sequence
  Synthetic
ugagguacugcuauaaagauac

SEQ ID NO: 523307 - RNA, 23 nt, Artificial Sequence
  Synthetic
gugagguacugcuauaaagauac

SEQ ID NO: 523308 - RNA, 24 nt, Artificial Sequence
  Synthetic
agugagguacugcuauaaagauac

SEQ ID NO: 523309 - RNA, 18 nt, Artificial Sequence
  Synthetic
uauaagauaguaagauac

SEQ ID NO: 523310 - RNA, 19 nt, Artificial Sequence
  Synthetic
guauaagauaguaagauac

SEQ ID NO: 523311 - RNA, 20 nt, Artificial Sequence
  Synthetic
gguauaagauaguaagauac

SEQ ID NO: 523312 - RNA, 21 nt, Artificial Sequence
  Synthetic
ugguauaagauaguaagauac

SEQ ID NO: 523313 - RNA, 22 nt, Artificial Sequence
  Synthetic
uugguauaagauaguaagauac

SEQ ID NO: 523314 - RNA, 23 nt, Artificial Sequence
  Synthetic
guugguauaagauaguaagauac

SEQ ID NO: 523315 - RNA, 24 nt, Artificial Sequence
  Synthetic
aguugguauaagauaguaagauac

SEQ ID NO: 523316 - RNA, 18 nt, Artificial Sequence
  Synthetic
uugaggaucaacagauac

SEQ ID NO: 523317 - RNA, 19 nt, Artificial Sequence
  Synthetic
uuugaggaucaacagauac

SEQ ID NO: 523318 - RNA, 20 nt, Artificial Sequence
  Synthetic
auuugaggaucaacagauac

SEQ ID NO: 523319 - RNA, 21 nt, Artificial Sequence
  Synthetic
cauuugaggaucaacagauac

SEQ ID NO: 523320 - RNA, 22 nt, Artificial Sequence
  Synthetic
ccauuugaggaucaacagauac

SEQ ID NO: 523321 - RNA, 23 nt, Artificial Sequence
  Synthetic
gccauuugaggaucaacagauac

SEQ ID NO: 523322 - RNA, 24 nt, Artificial Sequence
  Synthetic
agccauuugaggaucaacagauac

SEQ ID NO: 523323 - RNA, 18 nt, Artificial Sequence
  Synthetic
gccuguaaucccagauac

SEQ ID NO: 523324 - RNA, 19 nt, Artificial Sequence
  Synthetic
ugccuguaaucccagauac

SEQ ID NO: 523325 - RNA, 20 nt, Artificial Sequence
  Synthetic
uugccuguaaucccagauac

SEQ ID NO: 523326 - RNA, 21 nt, Artificial Sequence
  Synthetic
cuugccuguaaucccagauac

SEQ ID NO: 523327 - RNA, 22 nt, Artificial Sequence
  Synthetic
acuugccuguaaucccagauac

SEQ ID NO: 523328 - RNA, 23 nt, Artificial Sequence
  Synthetic
uacuugccuguaaucccagauac

SEQ ID NO: 523329 - RNA, 24 nt, Artificial Sequence
  Synthetic
guacuugccuguaaucccagauac

SEQ ID NO: 523330 - RNA, 18 nt, Artificial Sequence
  Synthetic
uguagaaauuccagauac

SEQ ID NO: 523331 - RNA, 19 nt, Artificial Sequence
  Synthetic
cuguagaaauuccagauac

SEQ ID NO: 523332 - RNA, 20 nt, Artificial Sequence
  Synthetic
acuguagaaauuccagauac

SEQ ID NO: 523333 - RNA, 21 nt, Artificial Sequence
  Synthetic
gacuguagaaauuccagauac

SEQ ID NO: 523334 - RNA, 22 nt, Artificial Sequence
  Synthetic
agacuguagaaauuccagauac

SEQ ID NO: 523335 - RNA, 23 nt, Artificial Sequence
  Synthetic
aagacuguagaaauuccagauac

SEQ ID NO: 523336 - RNA, 24 nt, Artificial Sequence
  Synthetic
aaagacuguagaaauuccagauac

SEQ ID NO: 523337 - RNA, 18 nt, Artificial Sequence
  Synthetic
ggucacauuugcagauac

SEQ ID NO: 523338 - RNA, 19 nt, Artificial Sequence
  Synthetic
aggucacauuugcagauac

SEQ ID NO: 523339 - RNA, 20 nt, Artificial Sequence
  Synthetic
aaggucacauuugcagauac

SEQ ID NO: 523340 - RNA, 21 nt, Artificial Sequence
  Synthetic
uaaggucacauuugcagauac

SEQ ID NO: 523341 - RNA, 22 nt, Artificial Sequence
  Synthetic
auaaggucacauuugcagauac

SEQ ID NO: 523342 - RNA, 23 nt, Artificial Sequence
  Synthetic
cauaaggucacauuugcagauac

SEQ ID NO: 523343 - RNA, 24 nt, Artificial Sequence
  Synthetic
acauaaggucacauuugcagauac

SEQ ID NO: 523344 - RNA, 18 nt, Artificial Sequence
  Synthetic
agagcagacuugagauac

SEQ ID NO: 523345 - RNA, 19 nt, Artificial Sequence
  Synthetic
uagagcagacuugagauac

SEQ ID NO: 523346 - RNA, 20 nt, Artificial Sequence
  Synthetic
guagagcagacuugagauac

SEQ ID NO: 523347 - RNA, 21 nt, Artificial Sequence
  Synthetic
aguagagcagacuugagauac

SEQ ID NO: 523348 - RNA, 22 nt, Artificial Sequence
  Synthetic
aaguagagcagacuugagauac

SEQ ID NO: 523349 - RNA, 23 nt, Artificial Sequence
  Synthetic
gaaguagagcagacuugagauac

SEQ ID NO: 523350 - RNA, 24 nt, Artificial Sequence
  Synthetic
cgaaguagagcagacuugagauac

SEQ ID NO: 523351 - RNA, 18 nt, Artificial Sequence
  Synthetic
auuuuuuuuuauagauac

SEQ ID NO: 523352 - RNA, 19 nt, Artificial Sequence
  Synthetic
gauuuuuuuuuauagauac

SEQ ID NO: 523353 - RNA, 20 nt, Artificial Sequence
  Synthetic
ugauuuuuuuuuauagauac

SEQ ID NO: 523354 - RNA, 21 nt, Artificial Sequence
  Synthetic
gugauuuuuuuuuauagauac

SEQ ID NO: 523355 - RNA, 22 nt, Artificial Sequence
  Synthetic
ugugauuuuuuuuuauagauac

SEQ ID NO: 523356 - RNA, 23 nt, Artificial Sequence
  Synthetic
augugauuuuuuuuuauagauac

SEQ ID NO: 523357 - RNA, 24 nt, Artificial Sequence
  Synthetic
uaugugauuuuuuuuuauagauac

SEQ ID NO: 523358 - RNA, 18 nt, Artificial Sequence
  Synthetic
aaucgugcuuuucgauac

SEQ ID NO: 523359 - RNA, 19 nt, Artificial Sequence
  Synthetic
aaaucgugcuuuucgauac

SEQ ID NO: 523360 - RNA, 20 nt, Artificial Sequence
  Synthetic
aaaaucgugcuuuucgauac

SEQ ID NO: 523361 - RNA, 21 nt, Artificial Sequence
  Synthetic
aaaaaucgugcuuuucgauac

SEQ ID NO: 523362 - RNA, 22 nt, Artificial Sequence
  Synthetic
gaaaaaucgugcuuuucgauac

SEQ ID NO: 523363 - RNA, 23 nt, Artificial Sequence
  Synthetic
ugaaaaaucgugcuuuucgauac

SEQ ID NO: 523364 - RNA, 24 nt, Artificial Sequence
  Synthetic
augaaaaaucgugcuuuucgauac

SEQ ID NO: 523365 - RNA, 18 nt, Artificial Sequence
  Synthetic
ugguaccagaaaggauac

SEQ ID NO: 523366 - RNA, 19 nt, Artificial Sequence
  Synthetic
augguaccagaaaggauac

SEQ ID NO: 523367 - RNA, 20 nt, Artificial Sequence
  Synthetic
caugguaccagaaaggauac

SEQ ID NO: 523368 - RNA, 21 nt, Artificial Sequence
  Synthetic
acaugguaccagaaaggauac

SEQ ID NO: 523369 - RNA, 22 nt, Artificial Sequence
  Synthetic
uacaugguaccagaaaggauac

SEQ ID NO: 523370 - RNA, 23 nt, Artificial Sequence
  Synthetic
guacaugguaccagaaaggauac

SEQ ID NO: 523371 - RNA, 24 nt, Artificial Sequence
  Synthetic
gguacaugguaccagaaaggauac

SEQ ID NO: 523372 - RNA, 18 nt, Artificial Sequence
  Synthetic
ccaaggcuaaagggauac

SEQ ID NO: 523373 - RNA, 19 nt, Artificial Sequence
  Synthetic
gccaaggcuaaagggauac

SEQ ID NO: 523374 - RNA, 20 nt, Artificial Sequence
  Synthetic
agccaaggcuaaagggauac

SEQ ID NO: 523375 - RNA, 21 nt, Artificial Sequence
  Synthetic
gagccaaggcuaaagggauac

SEQ ID NO: 523376 - RNA, 22 nt, Artificial Sequence
  Synthetic
cgagccaaggcuaaagggauac

SEQ ID NO: 523377 - RNA, 23 nt, Artificial Sequence
  Synthetic
acgagccaaggcuaaagggauac

SEQ ID NO: 523378 - RNA, 24 nt, Artificial Sequence
  Synthetic
gacgagccaaggcuaaagggauac

SEQ ID NO: 523379 - RNA, 18 nt, Artificial Sequence
  Synthetic
caguagacugcgggauac

SEQ ID NO: 523380 - RNA, 19 nt, Artificial Sequence
  Synthetic
acaguagacugcgggauac

SEQ ID NO: 523381 - RNA, 20 nt, Artificial Sequence
  Synthetic
aacaguagacugcgggauac

SEQ ID NO: 523382 - RNA, 21 nt, Artificial Sequence
  Synthetic
aaacaguagacugcgggauac

SEQ ID NO: 523383 - RNA, 22 nt, Artificial Sequence
  Synthetic
gaaacaguagacugcgggauac

SEQ ID NO: 523384 - RNA, 23 nt, Artificial Sequence
  Synthetic
agaaacaguagacugcgggauac

SEQ ID NO: 523385 - RNA, 24 nt, Artificial Sequence
  Synthetic
aagaaacaguagacugcgggauac

SEQ ID NO: 523386 - RNA, 18 nt, Artificial Sequence
  Synthetic
cuuagugaucguggauac

SEQ ID NO: 523387 - RNA, 19 nt, Artificial Sequence
  Synthetic
ucuuagugaucguggauac

SEQ ID NO: 523388 - RNA, 20 nt, Artificial Sequence
  Synthetic
uucuuagugaucguggauac

SEQ ID NO: 523389 - RNA, 21 nt, Artificial Sequence
  Synthetic
uuucuuagugaucguggauac

SEQ ID NO: 523390 - RNA, 22 nt, Artificial Sequence
  Synthetic
guuucuuagugaucguggauac

SEQ ID NO: 523391 - RNA, 23 nt, Artificial Sequence
  Synthetic
gguuucuuagugaucguggauac

SEQ ID NO: 523392 - RNA, 24 nt, Artificial Sequence
  Synthetic
ggguuucuuagugaucguggauac

SEQ ID NO: 523393 - RNA, 18 nt, Artificial Sequence
  Synthetic
auuuucacauuuggauac

SEQ ID NO: 523394 - RNA, 19 nt, Artificial Sequence
  Synthetic
uauuuucacauuuggauac

SEQ ID NO: 523395 - RNA, 20 nt, Artificial Sequence
  Synthetic
auauuuucacauuuggauac

SEQ ID NO: 523396 - RNA, 21 nt, Artificial Sequence
  Synthetic
cauauuuucacauuuggauac

SEQ ID NO: 523397 - RNA, 22 nt, Artificial Sequence
  Synthetic
acauauuuucacauuuggauac

SEQ ID NO: 523398 - RNA, 23 nt, Artificial Sequence
  Synthetic
uacauauuuucacauuuggauac

SEQ ID NO: 523399 - RNA, 24 nt, Artificial Sequence
  Synthetic
auacauauuuucacauuuggauac

SEQ ID NO: 523400 - RNA, 18 nt, Artificial Sequence
  Synthetic
ugacaaagaaaaugauac

SEQ ID NO: 523401 - RNA, 19 nt, Artificial Sequence
  Synthetic
augacaaagaaaaugauac

SEQ ID NO: 523402 - RNA, 20 nt, Artificial Sequence
  Synthetic
aaugacaaagaaaaugauac

SEQ ID NO: 523403 - RNA, 21 nt, Artificial Sequence
  Synthetic
aaaugacaaagaaaaugauac

SEQ ID NO: 523404 - RNA, 22 nt, Artificial Sequence
  Synthetic
aaaaugacaaagaaaaugauac

SEQ ID NO: 523405 - RNA, 23 nt, Artificial Sequence
  Synthetic
uaaaaugacaaagaaaaugauac

SEQ ID NO: 523406 - RNA, 24 nt, Artificial Sequence
  Synthetic
guaaaaugacaaagaaaaugauac

SEQ ID NO: 523407 - RNA, 18 nt, Artificial Sequence
  Synthetic
aauacaaauaaaugauac

SEQ ID NO: 523408 - RNA, 19 nt, Artificial Sequence
  Synthetic
aaauacaaauaaaugauac

SEQ ID NO: 523409 - RNA, 20 nt, Artificial Sequence
  Synthetic
uaaauacaaauaaaugauac

SEQ ID NO: 523410 - RNA, 21 nt, Artificial Sequence
  Synthetic
uuaaauacaaauaaaugauac

SEQ ID NO: 523411 - RNA, 22 nt, Artificial Sequence
  Synthetic
guuaaauacaaauaaaugauac

SEQ ID NO: 523412 - RNA, 23 nt, Artificial Sequence
  Synthetic
gguuaaauacaaauaaaugauac

SEQ ID NO: 523413 - RNA, 24 nt, Artificial Sequence
  Synthetic
agguuaaauacaaauaaaugauac

SEQ ID NO: 523414 - RNA, 18 nt, Artificial Sequence
  Synthetic
uuaagauccuuaugauac

SEQ ID NO: 523415 - RNA, 19 nt, Artificial Sequence
  Synthetic
guuaagauccuuaugauac

SEQ ID NO: 523416 - RNA, 20 nt, Artificial Sequence
  Synthetic
uguuaagauccuuaugauac

SEQ ID NO: 523417 - RNA, 21 nt, Artificial Sequence
  Synthetic
guguuaagauccuuaugauac

SEQ ID NO: 523418 - RNA, 22 nt, Artificial Sequence
  Synthetic
gguguuaagauccuuaugauac

SEQ ID NO: 523419 - RNA, 23 nt, Artificial Sequence
  Synthetic
agguguuaagauccuuaugauac

SEQ ID NO: 523420 - RNA, 24 nt, Artificial Sequence
  Synthetic
cagguguuaagauccuuaugauac

SEQ ID NO: 523421 - RNA, 18 nt, Artificial Sequence
  Synthetic
aacaagaagaacugauac

SEQ ID NO: 523422 - RNA, 19 nt, Artificial Sequence
  Synthetic
aaacaagaagaacugauac

SEQ ID NO: 523423 - RNA, 20 nt, Artificial Sequence
  Synthetic
aaaacaagaagaacugauac

SEQ ID NO: 523424 - RNA, 21 nt, Artificial Sequence
  Synthetic
uaaaacaagaagaacugauac

SEQ ID NO: 523425 - RNA, 22 nt, Artificial Sequence
  Synthetic
uuaaaacaagaagaacugauac

SEQ ID NO: 523426 - RNA, 23 nt, Artificial Sequence
  Synthetic
uuuaaaacaagaagaacugauac

SEQ ID NO: 523427 - RNA, 24 nt, Artificial Sequence
  Synthetic
auuuaaaacaagaagaacugauac

SEQ ID NO: 523428 - RNA, 18 nt, Artificial Sequence
  Synthetic
auauguucucacugauac

SEQ ID NO: 523429 - RNA, 19 nt, Artificial Sequence
  Synthetic
cauauguucucacugauac

SEQ ID NO: 523430 - RNA, 20 nt, Artificial Sequence
  Synthetic
gcauauguucucacugauac

SEQ ID NO: 523431 - RNA, 21 nt, Artificial Sequence
  Synthetic
agcauauguucucacugauac

SEQ ID NO: 523432 - RNA, 22 nt, Artificial Sequence
  Synthetic
cagcauauguucucacugauac

SEQ ID NO: 523433 - RNA, 23 nt, Artificial Sequence
  Synthetic
acagcauauguucucacugauac

SEQ ID NO: 523434 - RNA, 24 nt, Artificial Sequence
  Synthetic
aacagcauauguucucacugauac

SEQ ID NO: 523435 - RNA, 18 nt, Artificial Sequence
  Synthetic
uucuuuauguacugauac

SEQ ID NO: 523436 - RNA, 19 nt, Artificial Sequence
  Synthetic
auucuuuauguacugauac

SEQ ID NO: 523437 - RNA, 20 nt, Artificial Sequence
  Synthetic
cauucuuuauguacugauac

SEQ ID NO: 523438 - RNA, 21 nt, Artificial Sequence
  Synthetic
acauucuuuauguacugauac

SEQ ID NO: 523439 - RNA, 22 nt, Artificial Sequence
  Synthetic
uacauucuuuauguacugauac

SEQ ID NO: 523440 - RNA, 23 nt, Artificial Sequence
  Synthetic
auacauucuuuauguacugauac

SEQ ID NO: 523441 - RNA, 24 nt, Artificial Sequence
  Synthetic
aauacauucuuuauguacugauac

SEQ ID NO: 523442 - RNA, 18 nt, Artificial Sequence
  Synthetic
gugaaggccagcugauac

SEQ ID NO: 523443 - RNA, 19 nt, Artificial Sequence
  Synthetic
ggugaaggccagcugauac

SEQ ID NO: 523444 - RNA, 20 nt, Artificial Sequence
  Synthetic
gggugaaggccagcugauac

SEQ ID NO: 523445 - RNA, 21 nt, Artificial Sequence
  Synthetic
ugggugaaggccagcugauac

SEQ ID NO: 523446 - RNA, 22 nt, Artificial Sequence
  Synthetic
uugggugaaggccagcugauac

SEQ ID NO: 523447 - RNA, 23 nt, Artificial Sequence
  Synthetic
guugggugaaggccagcugauac

SEQ ID NO: 523448 - RNA, 24 nt, Artificial Sequence
  Synthetic
gguugggugaaggccagcugauac

SEQ ID NO: 523449 - RNA, 18 nt, Artificial Sequence
  Synthetic
aaaggcacuaagugauac

SEQ ID NO: 523450 - RNA, 19 nt, Artificial Sequence
  Synthetic
aaaaggcacuaagugauac

SEQ ID NO: 523451 - RNA, 20 nt, Artificial Sequence
  Synthetic
gaaaaggcacuaagugauac

SEQ ID NO: 523452 - RNA, 21 nt, Artificial Sequence
  Synthetic
agaaaaggcacuaagugauac

SEQ ID NO: 523453 - RNA, 22 nt, Artificial Sequence
  Synthetic
gagaaaaggcacuaagugauac

SEQ ID NO: 523454 - RNA, 23 nt, Artificial Sequence
  Synthetic
agagaaaaggcacuaagugauac

SEQ ID NO: 523455 - RNA, 24 nt, Artificial Sequence
  Synthetic
cagagaaaaggcacuaagugauac

SEQ ID NO: 523456 - RNA, 18 nt, Artificial Sequence
  Synthetic
ucuguuuucuuuugauac

SEQ ID NO: 523457 - RNA, 19 nt, Artificial Sequence
  Synthetic
uucuguuuucuuuugauac

SEQ ID NO: 523458 - RNA, 20 nt, Artificial Sequence
  Synthetic
uuucuguuuucuuuugauac

SEQ ID NO: 523459 - RNA, 21 nt, Artificial Sequence
  Synthetic
uuuucuguuuucuuuugauac

SEQ ID NO: 523460 - RNA, 22 nt, Artificial Sequence
  Synthetic
auuuucuguuuucuuuugauac

SEQ ID NO: 523461 - RNA, 23 nt, Artificial Sequence
  Synthetic
aauuuucuguuuucuuuugauac

SEQ ID NO: 523462 - RNA, 24 nt, Artificial Sequence
  Synthetic
uaauuuucuguuuucuuuugauac

SEQ ID NO: 523463 - RNA, 18 nt, Artificial Sequence
  Synthetic
cuaauauccaaaauauac

SEQ ID NO: 523464 - RNA, 19 nt, Artificial Sequence
  Synthetic
gcuaauauccaaaauauac

SEQ ID NO: 523465 - RNA, 20 nt, Artificial Sequence
  Synthetic
ugcuaauauccaaaauauac

SEQ ID NO: 523466 - RNA, 21 nt, Artificial Sequence
  Synthetic
gugcuaauauccaaaauauac

SEQ ID NO: 523467 - RNA, 22 nt, Artificial Sequence
  Synthetic
ggugcuaauauccaaaauauac

SEQ ID NO: 523468 - RNA, 23 nt, Artificial Sequence
  Synthetic
aggugcuaauauccaaaauauac

SEQ ID NO: 523469 - RNA, 24 nt, Artificial Sequence
  Synthetic
aaggugcuaauauccaaaauauac

SEQ ID NO: 523470 - RNA, 18 nt, Artificial Sequence
  Synthetic
uuaauuuguaaaauauac

SEQ ID NO: 523471 - RNA, 19 nt, Artificial Sequence
  Synthetic
auuaauuuguaaaauauac

SEQ ID NO: 523472 - RNA, 20 nt, Artificial Sequence
  Synthetic
aauuaauuuguaaaauauac

SEQ ID NO: 523473 - RNA, 21 nt, Artificial Sequence
  Synthetic
uaauuaauuuguaaaauauac

SEQ ID NO: 523474 - RNA, 22 nt, Artificial Sequence
  Synthetic
cuaauuaauuuguaaaauauac

SEQ ID NO: 523475 - RNA, 23 nt, Artificial Sequence
  Synthetic
acuaauuaauuuguaaaauauac

SEQ ID NO: 523476 - RNA, 24 nt, Artificial Sequence
  Synthetic
uacuaauuaauuuguaaaauauac

SEQ ID NO: 523477 - RNA, 18 nt, Artificial Sequence
  Synthetic
acaugagaccaaauauac

SEQ ID NO: 523478 - RNA, 19 nt, Artificial Sequence
  Synthetic
cacaugagaccaaauauac

SEQ ID NO: 523479 - RNA, 20 nt, Artificial Sequence
  Synthetic
acacaugagaccaaauauac

SEQ ID NO: 523480 - RNA, 21 nt, Artificial Sequence
  Synthetic
uacacaugagaccaaauauac

SEQ ID NO: 523481 - RNA, 22 nt, Artificial Sequence
  Synthetic
auacacaugagaccaaauauac

SEQ ID NO: 523482 - RNA, 23 nt, Artificial Sequence
  Synthetic
aauacacaugagaccaaauauac

SEQ ID NO: 523483 - RNA, 24 nt, Artificial Sequence
  Synthetic
aaauacacaugagaccaaauauac

SEQ ID NO: 523484 - RNA, 18 nt, Artificial Sequence
  Synthetic
cucuaaucugaaauauac

SEQ ID NO: 523485 - RNA, 19 nt, Artificial Sequence
  Synthetic
gcucuaaucugaaauauac

SEQ ID NO: 523486 - RNA, 20 nt, Artificial Sequence
  Synthetic
agcucuaaucugaaauauac

SEQ ID NO: 523487 - RNA, 21 nt, Artificial Sequence
  Synthetic
aagcucuaaucugaaauauac

SEQ ID NO: 523488 - RNA, 22 nt, Artificial Sequence
  Synthetic
caagcucuaaucugaaauauac

SEQ ID NO: 523489 - RNA, 23 nt, Artificial Sequence
  Synthetic
gcaagcucuaaucugaaauauac

SEQ ID NO: 523490 - RNA, 24 nt, Artificial Sequence
  Synthetic
ggcaagcucuaaucugaaauauac

SEQ ID NO: 523491 - RNA, 18 nt, Artificial Sequence
  Synthetic
gcacuauaaaacauauac

SEQ ID NO: 523492 - RNA, 19 nt, Artificial Sequence
  Synthetic
ugcacuauaaaacauauac

SEQ ID NO: 523493 - RNA, 20 nt, Artificial Sequence
  Synthetic
augcacuauaaaacauauac

SEQ ID NO: 523494 - RNA, 21 nt, Artificial Sequence
  Synthetic
caugcacuauaaaacauauac

SEQ ID NO: 523495 - RNA, 22 nt, Artificial Sequence
  Synthetic
acaugcacuauaaaacauauac

SEQ ID NO: 523496 - RNA, 23 nt, Artificial Sequence
  Synthetic
aacaugcacuauaaaacauauac

SEQ ID NO: 523497 - RNA, 24 nt, Artificial Sequence
  Synthetic
aaacaugcacuauaaaacauauac

SEQ ID NO: 523498 - RNA, 18 nt, Artificial Sequence
  Synthetic
gaaauaauaaacauauac

SEQ ID NO: 523499 - RNA, 19 nt, Artificial Sequence
  Synthetic
ugaaauaauaaacauauac

SEQ ID NO: 523500 - RNA, 20 nt, Artificial Sequence
  Synthetic
augaaauaauaaacauauac

SEQ ID NO: 523501 - RNA, 21 nt, Artificial Sequence
  Synthetic
caugaaauaauaaacauauac

SEQ ID NO: 523502 - RNA, 22 nt, Artificial Sequence
  Synthetic
acaugaaauaauaaacauauac

SEQ ID NO: 523503 - RNA, 23 nt, Artificial Sequence
  Synthetic
uacaugaaauaauaaacauauac

SEQ ID NO: 523504 - RNA, 24 nt, Artificial Sequence
  Synthetic
guacaugaaauaauaaacauauac

SEQ ID NO: 523505 - RNA, 18 nt, Artificial Sequence
  Synthetic
uuuguaauuuucauauac

SEQ ID NO: 523506 - RNA, 19 nt, Artificial Sequence
  Synthetic
uuuuguaauuuucauauac

SEQ ID NO: 523507 - RNA, 20 nt, Artificial Sequence
  Synthetic
uuuuuguaauuuucauauac

SEQ ID NO: 523508 - RNA, 21 nt, Artificial Sequence
  Synthetic
uuuuuuguaauuuucauauac

SEQ ID NO: 523509 - RNA, 22 nt, Artificial Sequence
  Synthetic
cuuuuuuguaauuuucauauac

SEQ ID NO: 523510 - RNA, 23 nt, Artificial Sequence
  Synthetic
acuuuuuuguaauuuucauauac

SEQ ID NO: 523511 - RNA, 24 nt, Artificial Sequence
  Synthetic
gacuuuuuuguaauuuucauauac

SEQ ID NO: 523512 - RNA, 18 nt, Artificial Sequence
  Synthetic
cucucuaugcauauauac

SEQ ID NO: 523513 - RNA, 19 nt, Artificial Sequence
  Synthetic
ucucucuaugcauauauac

SEQ ID NO: 523514 - RNA, 20 nt, Artificial Sequence
  Synthetic
uucucucuaugcauauauac

SEQ ID NO: 523515 - RNA, 21 nt, Artificial Sequence
  Synthetic
cuucucucuaugcauauauac

SEQ ID NO: 523516 - RNA, 22 nt, Artificial Sequence
  Synthetic
ucuucucucuaugcauauauac

SEQ ID NO: 523517 - RNA, 23 nt, Artificial Sequence
  Synthetic
uucuucucucuaugcauauauac

SEQ ID NO: 523518 - RNA, 24 nt, Artificial Sequence
  Synthetic
guucuucucucuaugcauauauac

SEQ ID NO: 523519 - RNA, 18 nt, Artificial Sequence
  Synthetic
auucuuuuggauauauac

SEQ ID NO: 523520 - RNA, 19 nt, Artificial Sequence
  Synthetic
aauucuuuuggauauauac

SEQ ID NO: 523521 - RNA, 20 nt, Artificial Sequence
  Synthetic
aaauucuuuuggauauauac

SEQ ID NO: 523522 - RNA, 21 nt, Artificial Sequence
  Synthetic
uaaauucuuuuggauauauac

SEQ ID NO: 523523 - RNA, 22 nt, Artificial Sequence
  Synthetic
uuaaauucuuuuggauauauac

SEQ ID NO: 523524 - RNA, 23 nt, Artificial Sequence
  Synthetic
uuuaaauucuuuuggauauauac

SEQ ID NO: 523525 - RNA, 24 nt, Artificial Sequence
  Synthetic
guuuaaauucuuuuggauauauac

SEQ ID NO: 523526 - RNA, 18 nt, Artificial Sequence
  Synthetic
acaaugccugguauauac

SEQ ID NO: 523527 - RNA, 19 nt, Artificial Sequence
  Synthetic
cacaaugccugguauauac

SEQ ID NO: 523528 - RNA, 20 nt, Artificial Sequence
  Synthetic
gcacaaugccugguauauac

SEQ ID NO: 523529 - RNA, 21 nt, Artificial Sequence
  Synthetic
agcacaaugccugguauauac

SEQ ID NO: 523530 - RNA, 22 nt, Artificial Sequence
  Synthetic
uagcacaaugccugguauauac

SEQ ID NO: 523531 - RNA, 23 nt, Artificial Sequence
  Synthetic
auagcacaaugccugguauauac

SEQ ID NO: 523532 - RNA, 24 nt, Artificial Sequence
  Synthetic
cauagcacaaugccugguauauac

SEQ ID NO: 523533 - RNA, 18 nt, Artificial Sequence
  Synthetic
ccaaagcacuguauauac

SEQ ID NO: 523534 - RNA, 19 nt, Artificial Sequence
  Synthetic
uccaaagcacuguauauac

SEQ ID NO: 523535 - RNA, 20 nt, Artificial Sequence
  Synthetic
guccaaagcacuguauauac

SEQ ID NO: 523536 - RNA, 21 nt, Artificial Sequence
  Synthetic
uguccaaagcacuguauauac

SEQ ID NO: 523537 - RNA, 22 nt, Artificial Sequence
  Synthetic
cuguccaaagcacuguauauac

SEQ ID NO: 523538 - RNA, 23 nt, Artificial Sequence
  Synthetic
gcuguccaaagcacuguauauac

SEQ ID NO: 523539 - RNA, 24 nt, Artificial Sequence
  Synthetic
ugcuguccaaagcacuguauauac

SEQ ID NO: 523540 - RNA, 18 nt, Artificial Sequence
  Synthetic
uauuauugauuuauauac

SEQ ID NO: 523541 - RNA, 19 nt, Artificial Sequence
  Synthetic
guauuauugauuuauauac

SEQ ID NO: 523542 - RNA, 20 nt, Artificial Sequence
  Synthetic
uguauuauugauuuauauac

SEQ ID NO: 523543 - RNA, 21 nt, Artificial Sequence
  Synthetic
uuguauuauugauuuauauac

SEQ ID NO: 523544 - RNA, 22 nt, Artificial Sequence
  Synthetic
uuuguauuauugauuuauauac

SEQ ID NO: 523545 - RNA, 23 nt, Artificial Sequence
  Synthetic
uuuuguauuauugauuuauauac

SEQ ID NO: 523546 - RNA, 24 nt, Artificial Sequence
  Synthetic
uuuuuguauuauugauuuauauac

SEQ ID NO: 523547 - RNA, 18 nt, Artificial Sequence
  Synthetic
gauguggccagacuauac

SEQ ID NO: 523548 - RNA, 19 nt, Artificial Sequence
  Synthetic
ugauguggccagacuauac

SEQ ID NO: 523549 - RNA, 20 nt, Artificial Sequence
  Synthetic
uugauguggccagacuauac

SEQ ID NO: 523550 - RNA, 21 nt, Artificial Sequence
  Synthetic
uuugauguggccagacuauac

SEQ ID NO: 523551 - RNA, 22 nt, Artificial Sequence
  Synthetic
auuugauguggccagacuauac

SEQ ID NO: 523552 - RNA, 23 nt, Artificial Sequence
  Synthetic
aauuugauguggccagacuauac

SEQ ID NO: 523553 - RNA, 24 nt, Artificial Sequence
  Synthetic
uaauuugauguggccagacuauac

SEQ ID NO: 523554 - RNA, 18 nt, Artificial Sequence
  Synthetic
gaggugcccuuacuauac

SEQ ID NO: 523555 - RNA, 19 nt, Artificial Sequence
  Synthetic
agaggugcccuuacuauac

SEQ ID NO: 523556 - RNA, 20 nt, Artificial Sequence
  Synthetic
cagaggugcccuuacuauac

SEQ ID NO: 523557 - RNA, 21 nt, Artificial Sequence
  Synthetic
ccagaggugcccuuacuauac

SEQ ID NO: 523558 - RNA, 22 nt, Artificial Sequence
  Synthetic
accagaggugcccuuacuauac

SEQ ID NO: 523559 - RNA, 23 nt, Artificial Sequence
  Synthetic
uaccagaggugcccuuacuauac

SEQ ID NO: 523560 - RNA, 24 nt, Artificial Sequence
  Synthetic
auaccagaggugcccuuacuauac

SEQ ID NO: 523561 - RNA, 18 nt, Artificial Sequence
  Synthetic
uccauacaaguaguauac

SEQ ID NO: 523562 - RNA, 19 nt, Artificial Sequence
  Synthetic
guccauacaaguaguauac

SEQ ID NO: 523563 - RNA, 20 nt, Artificial Sequence
  Synthetic
aguccauacaaguaguauac

SEQ ID NO: 523564 - RNA, 21 nt, Artificial Sequence
  Synthetic
gaguccauacaaguaguauac

SEQ ID NO: 523565 - RNA, 22 nt, Artificial Sequence
  Synthetic
agaguccauacaaguaguauac

SEQ ID NO: 523566 - RNA, 23 nt, Artificial Sequence
  Synthetic
gagaguccauacaaguaguauac

SEQ ID NO: 523567 - RNA, 24 nt, Artificial Sequence
  Synthetic
ugagaguccauacaaguaguauac

SEQ ID NO: 523568 - RNA, 18 nt, Artificial Sequence
  Synthetic
ggcugccugguaguauac

SEQ ID NO: 523569 - RNA, 19 nt, Artificial Sequence
  Synthetic
aggcugccugguaguauac

SEQ ID NO: 523570 - RNA, 20 nt, Artificial Sequence
  Synthetic
uaggcugccugguaguauac

SEQ ID NO: 523571 - RNA, 21 nt, Artificial Sequence
  Synthetic
auaggcugccugguaguauac

SEQ ID NO: 523572 - RNA, 22 nt, Artificial Sequence
  Synthetic
gauaggcugccugguaguauac

SEQ ID NO: 523573 - RNA, 23 nt, Artificial Sequence
  Synthetic
ggauaggcugccugguaguauac

SEQ ID NO: 523574 - RNA, 24 nt, Artificial Sequence
  Synthetic
uggauaggcugccugguaguauac

SEQ ID NO: 523575 - RNA, 18 nt, Artificial Sequence
  Synthetic
aguaacaauaacguauac

SEQ ID NO: 523576 - RNA, 19 nt, Artificial Sequence
  Synthetic
uaguaacaauaacguauac

SEQ ID NO: 523577 - RNA, 20 nt, Artificial Sequence
  Synthetic
uuaguaacaauaacguauac

SEQ ID NO: 523578 - RNA, 21 nt, Artificial Sequence
  Synthetic
guuaguaacaauaacguauac

SEQ ID NO: 523579 - RNA, 22 nt, Artificial Sequence
  Synthetic
uguuaguaacaauaacguauac

SEQ ID NO: 523580 - RNA, 23 nt, Artificial Sequence
  Synthetic
cuguuaguaacaauaacguauac

SEQ ID NO: 523581 - RNA, 24 nt, Artificial Sequence
  Synthetic
acuguuaguaacaauaacguauac

SEQ ID NO: 523582 - RNA, 18 nt, Artificial Sequence
  Synthetic
uucaaaaaaaagguauac

SEQ ID NO: 523583 - RNA, 19 nt, Artificial Sequence
  Synthetic
guucaaaaaaaagguauac

SEQ ID NO: 523584 - RNA, 20 nt, Artificial Sequence
  Synthetic
aguucaaaaaaaagguauac

SEQ ID NO: 523585 - RNA, 21 nt, Artificial Sequence
  Synthetic
aaguucaaaaaaaagguauac

SEQ ID NO: 523586 - RNA, 22 nt, Artificial Sequence
  Synthetic
gaaguucaaaaaaaagguauac

SEQ ID NO: 523587 - RNA, 23 nt, Artificial Sequence
  Synthetic
ugaaguucaaaaaaaagguauac

SEQ ID NO: 523588 - RNA, 24 nt, Artificial Sequence
  Synthetic
uugaaguucaaaaaaaagguauac

SEQ ID NO: 523589 - RNA, 18 nt, Artificial Sequence
  Synthetic
ugguacacacugguauac

SEQ ID NO: 523590 - RNA, 19 nt, Artificial Sequence
  Synthetic
uugguacacacugguauac

SEQ ID NO: 523591 - RNA, 20 nt, Artificial Sequence
  Synthetic
auugguacacacugguauac

SEQ ID NO: 523592 - RNA, 21 nt, Artificial Sequence
  Synthetic
aauugguacacacugguauac

SEQ ID NO: 523593 - RNA, 22 nt, Artificial Sequence
  Synthetic
uaauugguacacacugguauac

SEQ ID NO: 523594 - RNA, 23 nt, Artificial Sequence
  Synthetic
uuaauugguacacacugguauac

SEQ ID NO: 523595 - RNA, 24 nt, Artificial Sequence
  Synthetic
auuaauugguacacacugguauac

SEQ ID NO: 523596 - RNA, 18 nt, Artificial Sequence
  Synthetic
gaaauugcaaguguauac

SEQ ID NO: 523597 - RNA, 19 nt, Artificial Sequence
  Synthetic
agaaauugcaaguguauac

SEQ ID NO: 523598 - RNA, 20 nt, Artificial Sequence
  Synthetic
aagaaauugcaaguguauac

SEQ ID NO: 523599 - RNA, 21 nt, Artificial Sequence
  Synthetic
gaagaaauugcaaguguauac

SEQ ID NO: 523600 - RNA, 22 nt, Artificial Sequence
  Synthetic
ggaagaaauugcaaguguauac

SEQ ID NO: 523601 - RNA, 23 nt, Artificial Sequence
  Synthetic
aggaagaaauugcaaguguauac

SEQ ID NO: 523602 - RNA, 24 nt, Artificial Sequence
  Synthetic
uaggaagaaauugcaaguguauac

SEQ ID NO: 523603 - RNA, 18 nt, Artificial Sequence
  Synthetic
ucccucaccaguguauac

SEQ ID NO: 523604 - RNA, 19 nt, Artificial Sequence
  Synthetic
uucccucaccaguguauac

SEQ ID NO: 523605 - RNA, 20 nt, Artificial Sequence
  Synthetic
auucccucaccaguguauac

SEQ ID NO: 523606 - RNA, 21 nt, Artificial Sequence
  Synthetic
uauucccucaccaguguauac

SEQ ID NO: 523607 - RNA, 22 nt, Artificial Sequence
  Synthetic
auauucccucaccaguguauac

SEQ ID NO: 523608 - RNA, 23 nt, Artificial Sequence
  Synthetic
cauauucccucaccaguguauac

SEQ ID NO: 523609 - RNA, 24 nt, Artificial Sequence
  Synthetic
ucauauucccucaccaguguauac

SEQ ID NO: 523610 - RNA, 18 nt, Artificial Sequence
  Synthetic
aaguuuuauaguguauac

SEQ ID NO: 523611 - RNA, 19 nt, Artificial Sequence
  Synthetic
aaaguuuuauaguguauac

SEQ ID NO: 523612 - RNA, 20 nt, Artificial Sequence
  Synthetic
uaaaguuuuauaguguauac

SEQ ID NO: 523613 - RNA, 21 nt, Artificial Sequence
  Synthetic
uuaaaguuuuauaguguauac

SEQ ID NO: 523614 - RNA, 22 nt, Artificial Sequence
  Synthetic
cuuaaaguuuuauaguguauac

SEQ ID NO: 523615 - RNA, 23 nt, Artificial Sequence
  Synthetic
acuuaaaguuuuauaguguauac

SEQ ID NO: 523616 - RNA, 24 nt, Artificial Sequence
  Synthetic
aacuuaaaguuuuauaguguauac

SEQ ID NO: 523617 - RNA, 18 nt, Artificial Sequence
  Synthetic
auauugaaaggauuauac

SEQ ID NO: 523618 - RNA, 19 nt, Artificial Sequence
  Synthetic
uauauugaaaggauuauac

SEQ ID NO: 523619 - RNA, 20 nt, Artificial Sequence
  Synthetic
guauauugaaaggauuauac

SEQ ID NO: 523620 - RNA, 21 nt, Artificial Sequence
  Synthetic
aguauauugaaaggauuauac

SEQ ID NO: 523621 - RNA, 22 nt, Artificial Sequence
  Synthetic
caguauauugaaaggauuauac

SEQ ID NO: 523622 - RNA, 23 nt, Artificial Sequence
  Synthetic
acaguauauugaaaggauuauac

SEQ ID NO: 523623 - RNA, 24 nt, Artificial Sequence
  Synthetic
aacaguauauugaaaggauuauac

SEQ ID NO: 523624 - RNA, 18 nt, Artificial Sequence
  Synthetic
agacuaaucagguuauac

SEQ ID NO: 523625 - RNA, 19 nt, Artificial Sequence
  Synthetic
aagacuaaucagguuauac

SEQ ID NO: 523626 - RNA, 20 nt, Artificial Sequence
  Synthetic
gaagacuaaucagguuauac

SEQ ID NO: 523627 - RNA, 21 nt, Artificial Sequence
  Synthetic
agaagacuaaucagguuauac

SEQ ID NO: 523628 - RNA, 22 nt, Artificial Sequence
  Synthetic
cagaagacuaaucagguuauac

SEQ ID NO: 523629 - RNA, 23 nt, Artificial Sequence
  Synthetic
ucagaagacuaaucagguuauac

SEQ ID NO: 523630 - RNA, 24 nt, Artificial Sequence
  Synthetic
uucagaagacuaaucagguuauac

SEQ ID NO: 523631 - RNA, 18 nt, Artificial Sequence
  Synthetic
accacaaauggguuauac

SEQ ID NO: 523632 - RNA, 19 nt, Artificial Sequence
  Synthetic
aaccacaaauggguuauac

SEQ ID NO: 523633 - RNA, 20 nt, Artificial Sequence
  Synthetic
aaaccacaaauggguuauac

SEQ ID NO: 523634 - RNA, 21 nt, Artificial Sequence
  Synthetic
caaaccacaaauggguuauac

SEQ ID NO: 523635 - RNA, 22 nt, Artificial Sequence
  Synthetic
acaaaccacaaauggguuauac

SEQ ID NO: 523636 - RNA, 23 nt, Artificial Sequence
  Synthetic
cacaaaccacaaauggguuauac

SEQ ID NO: 523637 - RNA, 24 nt, Artificial Sequence
  Synthetic
ucacaaaccacaaauggguuauac

SEQ ID NO: 523638 - RNA, 18 nt, Artificial Sequence
  Synthetic
agaauucuaauuuuauac

SEQ ID NO: 523639 - RNA, 19 nt, Artificial Sequence
  Synthetic
gagaauucuaauuuuauac

SEQ ID NO: 523640 - RNA, 20 nt, Artificial Sequence
  Synthetic
ggagaauucuaauuuuauac

SEQ ID NO: 523641 - RNA, 21 nt, Artificial Sequence
  Synthetic
uggagaauucuaauuuuauac

SEQ ID NO: 523642 - RNA, 22 nt, Artificial Sequence
  Synthetic
uuggagaauucuaauuuuauac

SEQ ID NO: 523643 - RNA, 23 nt, Artificial Sequence
  Synthetic
guuggagaauucuaauuuuauac

SEQ ID NO: 523644 - RNA, 24 nt, Artificial Sequence
  Synthetic
aguuggagaauucuaauuuuauac

SEQ ID NO: 523645 - RNA, 18 nt, Artificial Sequence
  Synthetic
uagcucuguauuuuauac

SEQ ID NO: 523646 - RNA, 19 nt, Artificial Sequence
  Synthetic
uuagcucuguauuuuauac

SEQ ID NO: 523647 - RNA, 20 nt, Artificial Sequence
  Synthetic
cuuagcucuguauuuuauac

SEQ ID NO: 523648 - RNA, 21 nt, Artificial Sequence
  Synthetic
ucuuagcucuguauuuuauac

SEQ ID NO: 523649 - RNA, 22 nt, Artificial Sequence
  Synthetic
gucuuagcucuguauuuuauac

SEQ ID NO: 523650 - RNA, 23 nt, Artificial Sequence
  Synthetic
ugucuuagcucuguauuuuauac

SEQ ID NO: 523651 - RNA, 24 nt, Artificial Sequence
  Synthetic
uugucuuagcucuguauuuuauac

SEQ ID NO: 523652 - RNA, 18 nt, Artificial Sequence
  Synthetic
uuuucuuuauuuuuauac

SEQ ID NO: 523653 - RNA, 19 nt, Artificial Sequence
  Synthetic
guuuucuuuauuuuuauac

SEQ ID NO: 523654 - RNA, 20 nt, Artificial Sequence
  Synthetic
aguuuucuuuauuuuuauac

SEQ ID NO: 523655 - RNA, 21 nt, Artificial Sequence
  Synthetic
aaguuuucuuuauuuuuauac

SEQ ID NO: 523656 - RNA, 22 nt, Artificial Sequence
  Synthetic
gaaguuuucuuuauuuuuauac

SEQ ID NO: 523657 - RNA, 23 nt, Artificial Sequence
  Synthetic
ggaaguuuucuuuauuuuuauac

SEQ ID NO: 523658 - RNA, 24 nt, Artificial Sequence
  Synthetic
aggaaguuuucuuuauuuuuauac

SEQ ID NO: 523659 - RNA, 18 nt, Artificial Sequence
  Synthetic
acauuuuuauuuuuauac

SEQ ID NO: 523660 - RNA, 19 nt, Artificial Sequence
  Synthetic
uacauuuuuauuuuuauac

SEQ ID NO: 523661 - RNA, 20 nt, Artificial Sequence
  Synthetic
cuacauuuuuauuuuuauac

SEQ ID NO: 523662 - RNA, 21 nt, Artificial Sequence
  Synthetic
gcuacauuuuuauuuuuauac

SEQ ID NO: 523663 - RNA, 22 nt, Artificial Sequence
  Synthetic
ugcuacauuuuuauuuuuauac

SEQ ID NO: 523664 - RNA, 23 nt, Artificial Sequence
  Synthetic
cugcuacauuuuuauuuuuauac

SEQ ID NO: 523665 - RNA, 24 nt, Artificial Sequence
  Synthetic
acugcuacauuuuuauuuuuauac

SEQ ID NO: 523666 - RNA, 18 nt, Artificial Sequence
  Synthetic
ucuuuccuuuuuuuauac

SEQ ID NO: 523667 - RNA, 19 nt, Artificial Sequence
  Synthetic
uucuuuccuuuuuuuauac

SEQ ID NO: 523668 - RNA, 20 nt, Artificial Sequence
  Synthetic
uuucuuuccuuuuuuuauac

SEQ ID NO: 523669 - RNA, 21 nt, Artificial Sequence
  Synthetic
cuuucuuuccuuuuuuuauac

SEQ ID NO: 523670 - RNA, 22 nt, Artificial Sequence
  Synthetic
ucuuucuuuccuuuuuuuauac

SEQ ID NO: 523671 - RNA, 23 nt, Artificial Sequence
  Synthetic
uucuuucuuuccuuuuuuuauac

SEQ ID NO: 523672 - RNA, 24 nt, Artificial Sequence
  Synthetic
uuucuuucuuuccuuuuuuuauac

SEQ ID NO: 523673 - RNA, 18 nt, Artificial Sequence
  Synthetic
cuaauagaagaaaacuac

SEQ ID NO: 523674 - RNA, 19 nt, Artificial Sequence
  Synthetic
ucuaauagaagaaaacuac

SEQ ID NO: 523675 - RNA, 20 nt, Artificial Sequence
  Synthetic
cucuaauagaagaaaacuac

SEQ ID NO: 523676 - RNA, 21 nt, Artificial Sequence
  Synthetic
acucuaauagaagaaaacuac

SEQ ID NO: 523677 - RNA, 22 nt, Artificial Sequence
  Synthetic
aacucuaauagaagaaaacuac

SEQ ID NO: 523678 - RNA, 23 nt, Artificial Sequence
  Synthetic
aaacucuaauagaagaaaacuac

SEQ ID NO: 523679 - RNA, 24 nt, Artificial Sequence
  Synthetic
aaaacucuaauagaagaaaacuac

SEQ ID NO: 523680 - RNA, 18 nt, Artificial Sequence
  Synthetic
ugucaaaccuaaaacuac

SEQ ID NO: 523681 - RNA, 19 nt, Artificial Sequence
  Synthetic
augucaaaccuaaaacuac

SEQ ID NO: 523682 - RNA, 20 nt, Artificial Sequence
  Synthetic
gaugucaaaccuaaaacuac

SEQ ID NO: 523683 - RNA, 21 nt, Artificial Sequence
  Synthetic
ugaugucaaaccuaaaacuac

SEQ ID NO: 523684 - RNA, 22 nt, Artificial Sequence
  Synthetic
gugaugucaaaccuaaaacuac

SEQ ID NO: 523685 - RNA, 23 nt, Artificial Sequence
  Synthetic
ugugaugucaaaccuaaaacuac

SEQ ID NO: 523686 - RNA, 24 nt, Artificial Sequence
  Synthetic
uugugaugucaaaccuaaaacuac

SEQ ID NO: 523687 - RNA, 18 nt, Artificial Sequence
  Synthetic
ucauauacaagaaacuac

SEQ ID NO: 523688 - RNA, 19 nt, Artificial Sequence
  Synthetic
uucauauacaagaaacuac

SEQ ID NO: 523689 - RNA, 20 nt, Artificial Sequence
  Synthetic
uuucauauacaagaaacuac

SEQ ID NO: 523690 - RNA, 21 nt, Artificial Sequence
  Synthetic
uuuucauauacaagaaacuac

SEQ ID NO: 523691 - RNA, 22 nt, Artificial Sequence
  Synthetic
auuuucauauacaagaaacuac

SEQ ID NO: 523692 - RNA, 23 nt, Artificial Sequence
  Synthetic
aauuuucauauacaagaaacuac

SEQ ID NO: 523693 - RNA, 24 nt, Artificial Sequence
  Synthetic
uaauuuucauauacaagaaacuac

SEQ ID NO: 523694 - RNA, 18 nt, Artificial Sequence
  Synthetic
gucugcuuugacaacuac

SEQ ID NO: 523695 - RNA, 19 nt, Artificial Sequence
  Synthetic
agucugcuuugacaacuac

SEQ ID NO: 523696 - RNA, 20 nt, Artificial Sequence
  Synthetic
gagucugcuuugacaacuac

SEQ ID NO: 523697 - RNA, 21 nt, Artificial Sequence
  Synthetic
ggagucugcuuugacaacuac

SEQ ID NO: 523698 - RNA, 22 nt, Artificial Sequence
  Synthetic
aggagucugcuuugacaacuac

SEQ ID NO: 523699 - RNA, 23 nt, Artificial Sequence
  Synthetic
caggagucugcuuugacaacuac

SEQ ID NO: 523700 - RNA, 24 nt, Artificial Sequence
  Synthetic
ucaggagucugcuuugacaacuac

SEQ ID NO: 523701 - RNA, 18 nt, Artificial Sequence
  Synthetic
ugauccucuuacaacuac

SEQ ID NO: 523702 - RNA, 19 nt, Artificial Sequence
  Synthetic
cugauccucuuacaacuac

SEQ ID NO: 523703 - RNA, 20 nt, Artificial Sequence
  Synthetic
gcugauccucuuacaacuac

SEQ ID NO: 523704 - RNA, 21 nt, Artificial Sequence
  Synthetic
agcugauccucuuacaacuac

SEQ ID NO: 523705 - RNA, 22 nt, Artificial Sequence
  Synthetic
aagcugauccucuuacaacuac

SEQ ID NO: 523706 - RNA, 23 nt, Artificial Sequence
  Synthetic
gaagcugauccucuuacaacuac

SEQ ID NO: 523707 - RNA, 24 nt, Artificial Sequence
  Synthetic
cgaagcugauccucuuacaacuac

SEQ ID NO: 523708 - RNA, 18 nt, Artificial Sequence
  Synthetic
augcauaaccgcaacuac

SEQ ID NO: 523709 - RNA, 19 nt, Artificial Sequence
  Synthetic
caugcauaaccgcaacuac

SEQ ID NO: 523710 - RNA, 20 nt, Artificial Sequence
  Synthetic
ucaugcauaaccgcaacuac

SEQ ID NO: 523711 - RNA, 21 nt, Artificial Sequence
  Synthetic
uucaugcauaaccgcaacuac

SEQ ID NO: 523712 - RNA, 22 nt, Artificial Sequence
  Synthetic
auucaugcauaaccgcaacuac

SEQ ID NO: 523713 - RNA, 23 nt, Artificial Sequence
  Synthetic
uauucaugcauaaccgcaacuac

SEQ ID NO: 523714 - RNA, 24 nt, Artificial Sequence
  Synthetic
uuauucaugcauaaccgcaacuac

SEQ ID NO: 523715 - RNA, 18 nt, Artificial Sequence
  Synthetic
ucaaagccgcucaacuac

SEQ ID NO: 523716 - RNA, 19 nt, Artificial Sequence
  Synthetic
cucaaagccgcucaacuac

SEQ ID NO: 523717 - RNA, 20 nt, Artificial Sequence
  Synthetic
acucaaagccgcucaacuac

SEQ ID NO: 523718 - RNA, 21 nt, Artificial Sequence
  Synthetic
cacucaaagccgcucaacuac

SEQ ID NO: 523719 - RNA, 22 nt, Artificial Sequence
  Synthetic
ucacucaaagccgcucaacuac

SEQ ID NO: 523720 - RNA, 23 nt, Artificial Sequence
  Synthetic
cucacucaaagccgcucaacuac

SEQ ID NO: 523721 - RNA, 24 nt, Artificial Sequence
  Synthetic
ucucacucaaagccgcucaacuac

SEQ ID NO: 523722 - RNA, 18 nt, Artificial Sequence
  Synthetic
ccaaggcucgagaacuac

SEQ ID NO: 523723 - RNA, 19 nt, Artificial Sequence
  Synthetic
accaaggcucgagaacuac

SEQ ID NO: 523724 - RNA, 20 nt, Artificial Sequence
  Synthetic
aaccaaggcucgagaacuac

SEQ ID NO: 523725 - RNA, 21 nt, Artificial Sequence
  Synthetic
aaaccaaggcucgagaacuac

SEQ ID NO: 523726 - RNA, 22 nt, Artificial Sequence
  Synthetic
aaaaccaaggcucgagaacuac

SEQ ID NO: 523727 - RNA, 23 nt, Artificial Sequence
  Synthetic
gaaaaccaaggcucgagaacuac

SEQ ID NO: 523728 - RNA, 24 nt, Artificial Sequence
  Synthetic
ugaaaaccaaggcucgagaacuac

SEQ ID NO: 523729 - RNA, 18 nt, Artificial Sequence
  Synthetic
aaaaugcuacauaacuac

SEQ ID NO: 523730 - RNA, 19 nt, Artificial Sequence
  Synthetic
caaaaugcuacauaacuac

SEQ ID NO: 523731 - RNA, 20 nt, Artificial Sequence
  Synthetic
acaaaaugcuacauaacuac

SEQ ID NO: 523732 - RNA, 21 nt, Artificial Sequence
  Synthetic
aacaaaaugcuacauaacuac

SEQ ID NO: 523733 - RNA, 22 nt, Artificial Sequence
  Synthetic
uaacaaaaugcuacauaacuac

SEQ ID NO: 523734 - RNA, 23 nt, Artificial Sequence
  Synthetic
uuaacaaaaugcuacauaacuac

SEQ ID NO: 523735 - RNA, 24 nt, Artificial Sequence
  Synthetic
auuaacaaaaugcuacauaacuac

SEQ ID NO: 523736 - RNA, 18 nt, Artificial Sequence
  Synthetic
uucaacaucacuaacuac

SEQ ID NO: 523737 - RNA, 19 nt, Artificial Sequence
  Synthetic
guucaacaucacuaacuac

SEQ ID NO: 523738 - RNA, 20 nt, Artificial Sequence
  Synthetic
uguucaacaucacuaacuac

SEQ ID NO: 523739 - RNA, 21 nt, Artificial Sequence
  Synthetic
auguucaacaucacuaacuac

SEQ ID NO: 523740 - RNA, 22 nt, Artificial Sequence
  Synthetic
gauguucaacaucacuaacuac

SEQ ID NO: 523741 - RNA, 23 nt, Artificial Sequence
  Synthetic
agauguucaacaucacuaacuac

SEQ ID NO: 523742 - RNA, 24 nt, Artificial Sequence
  Synthetic
aagauguucaacaucacuaacuac

SEQ ID NO: 523743 - RNA, 18 nt, Artificial Sequence
  Synthetic
aagacaagaauuaacuac

SEQ ID NO: 523744 - RNA, 19 nt, Artificial Sequence
  Synthetic
caagacaagaauuaacuac

SEQ ID NO: 523745 - RNA, 20 nt, Artificial Sequence
  Synthetic
gcaagacaagaauuaacuac

SEQ ID NO: 523746 - RNA, 21 nt, Artificial Sequence
  Synthetic
agcaagacaagaauuaacuac

SEQ ID NO: 523747 - RNA, 22 nt, Artificial Sequence
  Synthetic
aagcaagacaagaauuaacuac

SEQ ID NO: 523748 - RNA, 23 nt, Artificial Sequence
  Synthetic
caagcaagacaagaauuaacuac

SEQ ID NO: 523749 - RNA, 24 nt, Artificial Sequence
  Synthetic
ucaagcaagacaagaauuaacuac

SEQ ID NO: 523750 - RNA, 18 nt, Artificial Sequence
  Synthetic
uccaguggauuuaacuac

SEQ ID NO: 523751 - RNA, 19 nt, Artificial Sequence
  Synthetic
guccaguggauuuaacuac

SEQ ID NO: 523752 - RNA, 20 nt, Artificial Sequence
  Synthetic
uguccaguggauuuaacuac

SEQ ID NO: 523753 - RNA, 21 nt, Artificial Sequence
  Synthetic
auguccaguggauuuaacuac

SEQ ID NO: 523754 - RNA, 22 nt, Artificial Sequence
  Synthetic
uauguccaguggauuuaacuac

SEQ ID NO: 523755 - RNA, 23 nt, Artificial Sequence
  Synthetic
auauguccaguggauuuaacuac

SEQ ID NO: 523756 - RNA, 24 nt, Artificial Sequence
  Synthetic
gauauguccaguggauuuaacuac

SEQ ID NO: 523757 - RNA, 18 nt, Artificial Sequence
  Synthetic
gccaggcaaagacacuac

SEQ ID NO: 523758 - RNA, 19 nt, Artificial Sequence
  Synthetic
agccaggcaaagacacuac

SEQ ID NO: 523759 - RNA, 20 nt, Artificial Sequence
  Synthetic
aagccaggcaaagacacuac

SEQ ID NO: 523760 - RNA, 21 nt, Artificial Sequence
  Synthetic
aaagccaggcaaagacacuac

SEQ ID NO: 523761 - RNA, 22 nt, Artificial Sequence
  Synthetic
caaagccaggcaaagacacuac

SEQ ID NO: 523762 - RNA, 23 nt, Artificial Sequence
  Synthetic
ccaaagccaggcaaagacacuac

SEQ ID NO: 523763 - RNA, 24 nt, Artificial Sequence
  Synthetic
cccaaagccaggcaaagacacuac

SEQ ID NO: 523764 - RNA, 18 nt, Artificial Sequence
  Synthetic
uaugcucccugccacuac

SEQ ID NO: 523765 - RNA, 19 nt, Artificial Sequence
  Synthetic
uuaugcucccugccacuac

SEQ ID NO: 523766 - RNA, 20 nt, Artificial Sequence
  Synthetic
guuaugcucccugccacuac

SEQ ID NO: 523767 - RNA, 21 nt, Artificial Sequence
  Synthetic
cguuaugcucccugccacuac

SEQ ID NO: 523768 - RNA, 22 nt, Artificial Sequence
  Synthetic
gcguuaugcucccugccacuac

SEQ ID NO: 523769 - RNA, 23 nt, Artificial Sequence
  Synthetic
agcguuaugcucccugccacuac

SEQ ID NO: 523770 - RNA, 24 nt, Artificial Sequence
  Synthetic
aagcguuaugcucccugccacuac

SEQ ID NO: 523771 - RNA, 18 nt, Artificial Sequence
  Synthetic
auacagcaauuccacuac

SEQ ID NO: 523772 - RNA, 19 nt, Artificial Sequence
  Synthetic
gauacagcaauuccacuac

SEQ ID NO: 523773 - RNA, 20 nt, Artificial Sequence
  Synthetic
cgauacagcaauuccacuac

SEQ ID NO: 523774 - RNA, 21 nt, Artificial Sequence
  Synthetic
acgauacagcaauuccacuac

SEQ ID NO: 523775 - RNA, 22 nt, Artificial Sequence
  Synthetic
uacgauacagcaauuccacuac

SEQ ID NO: 523776 - RNA, 23 nt, Artificial Sequence
  Synthetic
auacgauacagcaauuccacuac

SEQ ID NO: 523777 - RNA, 24 nt, Artificial Sequence
  Synthetic
cauacgauacagcaauuccacuac

SEQ ID NO: 523778 - RNA, 18 nt, Artificial Sequence
  Synthetic
guaugagcuagcgacuac

SEQ ID NO: 523779 - RNA, 19 nt, Artificial Sequence
  Synthetic
uguaugagcuagcgacuac

SEQ ID NO: 523780 - RNA, 20 nt, Artificial Sequence
  Synthetic
guguaugagcuagcgacuac

SEQ ID NO: 523781 - RNA, 21 nt, Artificial Sequence
  Synthetic
aguguaugagcuagcgacuac

SEQ ID NO: 523782 - RNA, 22 nt, Artificial Sequence
  Synthetic
gaguguaugagcuagcgacuac

SEQ ID NO: 523783 - RNA, 23 nt, Artificial Sequence
  Synthetic
ggaguguaugagcuagcgacuac

SEQ ID NO: 523784 - RNA, 24 nt, Artificial Sequence
  Synthetic
uggaguguaugagcuagcgacuac

SEQ ID NO: 523785 - RNA, 18 nt, Artificial Sequence
  Synthetic
auagacccuggggacuac

SEQ ID NO: 523786 - RNA, 19 nt, Artificial Sequence
  Synthetic
aauagacccuggggacuac

SEQ ID NO: 523787 - RNA, 20 nt, Artificial Sequence
  Synthetic
caauagacccuggggacuac

SEQ ID NO: 523788 - RNA, 21 nt, Artificial Sequence
  Synthetic
acaauagacccuggggacuac

SEQ ID NO: 523789 - RNA, 22 nt, Artificial Sequence
  Synthetic
aacaauagacccuggggacuac

SEQ ID NO: 523790 - RNA, 23 nt, Artificial Sequence
  Synthetic
gaacaauagacccuggggacuac

SEQ ID NO: 523791 - RNA, 24 nt, Artificial Sequence
  Synthetic
ggaacaauagacccuggggacuac

SEQ ID NO: 523792 - RNA, 18 nt, Artificial Sequence
  Synthetic
aagccaaucuaugacuac

SEQ ID NO: 523793 - RNA, 19 nt, Artificial Sequence
  Synthetic
aaagccaaucuaugacuac

SEQ ID NO: 523794 - RNA, 20 nt, Artificial Sequence
  Synthetic
aaaagccaaucuaugacuac

SEQ ID NO: 523795 - RNA, 21 nt, Artificial Sequence
  Synthetic
uaaaagccaaucuaugacuac

SEQ ID NO: 523796 - RNA, 22 nt, Artificial Sequence
  Synthetic
uuaaaagccaaucuaugacuac

SEQ ID NO: 523797 - RNA, 23 nt, Artificial Sequence
  Synthetic
cuuaaaagccaaucuaugacuac

SEQ ID NO: 523798 - RNA, 24 nt, Artificial Sequence
  Synthetic
gcuuaaaagccaaucuaugacuac

SEQ ID NO: 523799 - RNA, 18 nt, Artificial Sequence
  Synthetic
gacuguacugaauacuac

SEQ ID NO: 523800 - RNA, 19 nt, Artificial Sequence
  Synthetic
ugacuguacugaauacuac

SEQ ID NO: 523801 - RNA, 20 nt, Artificial Sequence
  Synthetic
gugacuguacugaauacuac

SEQ ID NO: 523802 - RNA, 21 nt, Artificial Sequence
  Synthetic
cgugacuguacugaauacuac

SEQ ID NO: 523803 - RNA, 22 nt, Artificial Sequence
  Synthetic
acgugacuguacugaauacuac

SEQ ID NO: 523804 - RNA, 23 nt, Artificial Sequence
  Synthetic
cacgugacuguacugaauacuac

SEQ ID NO: 523805 - RNA, 24 nt, Artificial Sequence
  Synthetic
gcacgugacuguacugaauacuac

SEQ ID NO: 523806 - RNA, 18 nt, Artificial Sequence
  Synthetic
aggcgaaacauauacuac

SEQ ID NO: 523807 - RNA, 19 nt, Artificial Sequence
  Synthetic
gaggcgaaacauauacuac

SEQ ID NO: 523808 - RNA, 20 nt, Artificial Sequence
  Synthetic
ggaggcgaaacauauacuac

SEQ ID NO: 523809 - RNA, 21 nt, Artificial Sequence
  Synthetic
gggaggcgaaacauauacuac

SEQ ID NO: 523810 - RNA, 22 nt, Artificial Sequence
  Synthetic
agggaggcgaaacauauacuac

SEQ ID NO: 523811 - RNA, 23 nt, Artificial Sequence
  Synthetic
cagggaggcgaaacauauacuac

SEQ ID NO: 523812 - RNA, 24 nt, Artificial Sequence
  Synthetic
ucagggaggcgaaacauauacuac

SEQ ID NO: 523813 - RNA, 18 nt, Artificial Sequence
  Synthetic
guuaaaaauauauacuac

SEQ ID NO: 523814 - RNA, 19 nt, Artificial Sequence
  Synthetic
uguuaaaaauauauacuac

SEQ ID NO: 523815 - RNA, 20 nt, Artificial Sequence
  Synthetic
auguuaaaaauauauacuac

SEQ ID NO: 523816 - RNA, 21 nt, Artificial Sequence
  Synthetic
gauguuaaaaauauauacuac

SEQ ID NO: 523817 - RNA, 22 nt, Artificial Sequence
  Synthetic
ugauguuaaaaauauauacuac

SEQ ID NO: 523818 - RNA, 23 nt, Artificial Sequence
  Synthetic
cugauguuaaaaauauauacuac

SEQ ID NO: 523819 - RNA, 24 nt, Artificial Sequence
  Synthetic
ucugauguuaaaaauauauacuac

SEQ ID NO: 523820 - RNA, 18 nt, Artificial Sequence
  Synthetic
aaacuaagaaacuacuac

SEQ ID NO: 523821 - RNA, 19 nt, Artificial Sequence
  Synthetic
caaacuaagaaacuacuac

SEQ ID NO: 523822 - RNA, 20 nt, Artificial Sequence
  Synthetic
ucaaacuaagaaacuacuac

SEQ ID NO: 523823 - RNA, 21 nt, Artificial Sequence
  Synthetic
cucaaacuaagaaacuacuac

SEQ ID NO: 523824 - RNA, 22 nt, Artificial Sequence
  Synthetic
ccucaaacuaagaaacuacuac

SEQ ID NO: 523825 - RNA, 23 nt, Artificial Sequence
  Synthetic
accucaaacuaagaaacuacuac

SEQ ID NO: 523826 - RNA, 24 nt, Artificial Sequence
  Synthetic
gaccucaaacuaagaaacuacuac

SEQ ID NO: 523827 - RNA, 18 nt, Artificial Sequence
  Synthetic
aaaccaugaaacuacuac

SEQ ID NO: 523828 - RNA, 19 nt, Artificial Sequence
  Synthetic
caaaccaugaaacuacuac

SEQ ID NO: 523829 - RNA, 20 nt, Artificial Sequence
  Synthetic
ucaaaccaugaaacuacuac

SEQ ID NO: 523830 - RNA, 21 nt, Artificial Sequence
  Synthetic
cucaaaccaugaaacuacuac

SEQ ID NO: 523831 - RNA, 22 nt, Artificial Sequence
  Synthetic
ccucaaaccaugaaacuacuac

SEQ ID NO: 523832 - RNA, 23 nt, Artificial Sequence
  Synthetic
accucaaaccaugaaacuacuac

SEQ ID NO: 523833 - RNA, 24 nt, Artificial Sequence
  Synthetic
gaccucaaaccaugaaacuacuac

SEQ ID NO: 523834 - RNA, 18 nt, Artificial Sequence
  Synthetic
ggacagguccuuuacuac

SEQ ID NO: 523835 - RNA, 19 nt, Artificial Sequence
  Synthetic
uggacagguccuuuacuac

SEQ ID NO: 523836 - RNA, 20 nt, Artificial Sequence
  Synthetic
guggacagguccuuuacuac

SEQ ID NO: 523837 - RNA, 21 nt, Artificial Sequence
  Synthetic
aguggacagguccuuuacuac

SEQ ID NO: 523838 - RNA, 22 nt, Artificial Sequence
  Synthetic
aaguggacagguccuuuacuac

SEQ ID NO: 523839 - RNA, 23 nt, Artificial Sequence
  Synthetic
gaaguggacagguccuuuacuac

SEQ ID NO: 523840 - RNA, 24 nt, Artificial Sequence
  Synthetic
ggaaguggacagguccuuuacuac

SEQ ID NO: 523841 - RNA, 18 nt, Artificial Sequence
  Synthetic
guaggguuaguuuacuac

SEQ ID NO: 523842 - RNA, 19 nt, Artificial Sequence
  Synthetic
aguaggguuaguuuacuac

SEQ ID NO: 523843 - RNA, 20 nt, Artificial Sequence
  Synthetic
aaguaggguuaguuuacuac

SEQ ID NO: 523844 - RNA, 21 nt, Artificial Sequence
  Synthetic
aaaguaggguuaguuuacuac

SEQ ID NO: 523845 - RNA, 22 nt, Artificial Sequence
  Synthetic
gaaaguaggguuaguuuacuac

SEQ ID NO: 523846 - RNA, 23 nt, Artificial Sequence
  Synthetic
agaaaguaggguuaguuuacuac

SEQ ID NO: 523847 - RNA, 24 nt, Artificial Sequence
  Synthetic
gagaaaguaggguuaguuuacuac

SEQ ID NO: 523848 - RNA, 18 nt, Artificial Sequence
  Synthetic
gucugaggcugaaccuac

SEQ ID NO: 523849 - RNA, 19 nt, Artificial Sequence
  Synthetic
agucugaggcugaaccuac

SEQ ID NO: 523850 - RNA, 20 nt, Artificial Sequence
  Synthetic
gagucugaggcugaaccuac

SEQ ID NO: 523851 - RNA, 21 nt, Artificial Sequence
  Synthetic
agagucugaggcugaaccuac

SEQ ID NO: 523852 - RNA, 22 nt, Artificial Sequence
  Synthetic
cagagucugaggcugaaccuac

SEQ ID NO: 523853 - RNA, 23 nt, Artificial Sequence
  Synthetic
acagagucugaggcugaaccuac

SEQ ID NO: 523854 - RNA, 24 nt, Artificial Sequence
  Synthetic
uacagagucugaggcugaaccuac

SEQ ID NO: 523855 - RNA, 18 nt, Artificial Sequence
  Synthetic
aaaacaaaugacaccuac

SEQ ID NO: 523856 - RNA, 19 nt, Artificial Sequence
  Synthetic
gaaaacaaaugacaccuac

SEQ ID NO: 523857 - RNA, 20 nt, Artificial Sequence
  Synthetic
agaaaacaaaugacaccuac

SEQ ID NO: 523858 - RNA, 21 nt, Artificial Sequence
  Synthetic
aagaaaacaaaugacaccuac

SEQ ID NO: 523859 - RNA, 22 nt, Artificial Sequence
  Synthetic
aaagaaaacaaaugacaccuac

SEQ ID NO: 523860 - RNA, 23 nt, Artificial Sequence
  Synthetic
aaaagaaaacaaaugacaccuac

SEQ ID NO: 523861 - RNA, 24 nt, Artificial Sequence
  Synthetic
aaaaagaaaacaaaugacaccuac

SEQ ID NO: 523862 - RNA, 18 nt, Artificial Sequence
  Synthetic
guacuuuuaaauaccuac

SEQ ID NO: 523863 - RNA, 19 nt, Artificial Sequence
  Synthetic
uguacuuuuaaauaccuac

SEQ ID NO: 523864 - RNA, 20 nt, Artificial Sequence
  Synthetic
cuguacuuuuaaauaccuac

SEQ ID NO: 523865 - RNA, 21 nt, Artificial Sequence
  Synthetic
ucuguacuuuuaaauaccuac

SEQ ID NO: 523866 - RNA, 22 nt, Artificial Sequence
  Synthetic
uucuguacuuuuaaauaccuac

SEQ ID NO: 523867 - RNA, 23 nt, Artificial Sequence
  Synthetic
uuucuguacuuuuaaauaccuac

SEQ ID NO: 523868 - RNA, 24 nt, Artificial Sequence
  Synthetic
auuucuguacuuuuaaauaccuac

SEQ ID NO: 523869 - RNA, 18 nt, Artificial Sequence
  Synthetic
gguguuucuucuaccuac

SEQ ID NO: 523870 - RNA, 19 nt, Artificial Sequence
  Synthetic
agguguuucuucuaccuac

SEQ ID NO: 523871 - RNA, 20 nt, Artificial Sequence
  Synthetic
cagguguuucuucuaccuac

SEQ ID NO: 523872 - RNA, 21 nt, Artificial Sequence
  Synthetic
acagguguuucuucuaccuac

SEQ ID NO: 523873 - RNA, 22 nt, Artificial Sequence
  Synthetic
uacagguguuucuucuaccuac

SEQ ID NO: 523874 - RNA, 23 nt, Artificial Sequence
  Synthetic
uuacagguguuucuucuaccuac

SEQ ID NO: 523875 - RNA, 24 nt, Artificial Sequence
  Synthetic
auuacagguguuucuucuaccuac

SEQ ID NO: 523876 - RNA, 18 nt, Artificial Sequence
  Synthetic
ccaauuucaaaagccuac

SEQ ID NO: 523877 - RNA, 19 nt, Artificial Sequence
  Synthetic
gccaauuucaaaagccuac

SEQ ID NO: 523878 - RNA, 20 nt, Artificial Sequence
  Synthetic
agccaauuucaaaagccuac

SEQ ID NO: 523879 - RNA, 21 nt, Artificial Sequence
  Synthetic
cagccaauuucaaaagccuac

SEQ ID NO: 523880 - RNA, 22 nt, Artificial Sequence
  Synthetic
acagccaauuucaaaagccuac

SEQ ID NO: 523881 - RNA, 23 nt, Artificial Sequence
  Synthetic
cacagccaauuucaaaagccuac

SEQ ID NO: 523882 - RNA, 24 nt, Artificial Sequence
  Synthetic
ucacagccaauuucaaaagccuac

SEQ ID NO: 523883 - RNA, 18 nt, Artificial Sequence
  Synthetic
aaucuuaauauagccuac

SEQ ID NO: 523884 - RNA, 19 nt, Artificial Sequence
  Synthetic
aaaucuuaauauagccuac

SEQ ID NO: 523885 - RNA, 20 nt, Artificial Sequence
  Synthetic
gaaaucuuaauauagccuac

SEQ ID NO: 523886 - RNA, 21 nt, Artificial Sequence
  Synthetic
ugaaaucuuaauauagccuac

SEQ ID NO: 523887 - RNA, 22 nt, Artificial Sequence
  Synthetic
augaaaucuuaauauagccuac

SEQ ID NO: 523888 - RNA, 23 nt, Artificial Sequence
  Synthetic
aaugaaaucuuaauauagccuac

SEQ ID NO: 523889 - RNA, 24 nt, Artificial Sequence
  Synthetic
caaugaaaucuuaauauagccuac

SEQ ID NO: 523890 - RNA, 18 nt, Artificial Sequence
  Synthetic
ugugagaaaaaugccuac

SEQ ID NO: 523891 - RNA, 19 nt, Artificial Sequence
  Synthetic
augugagaaaaaugccuac

SEQ ID NO: 523892 - RNA, 20 nt, Artificial Sequence
  Synthetic
aaugugagaaaaaugccuac

SEQ ID NO: 523893 - RNA, 21 nt, Artificial Sequence
  Synthetic
caaugugagaaaaaugccuac

SEQ ID NO: 523894 - RNA, 22 nt, Artificial Sequence
  Synthetic
ucaaugugagaaaaaugccuac

SEQ ID NO: 523895 - RNA, 23 nt, Artificial Sequence
  Synthetic
uucaaugugagaaaaaugccuac

SEQ ID NO: 523896 - RNA, 24 nt, Artificial Sequence
  Synthetic
uuucaaugugagaaaaaugccuac

SEQ ID NO: 523897 - RNA, 18 nt, Artificial Sequence
  Synthetic
auagcacuaaaugccuac

SEQ ID NO: 523898 - RNA, 19 nt, Artificial Sequence
  Synthetic
uauagcacuaaaugccuac

SEQ ID NO: 523899 - RNA, 20 nt, Artificial Sequence
  Synthetic
uuauagcacuaaaugccuac

SEQ ID NO: 523900 - RNA, 21 nt, Artificial Sequence
  Synthetic
uuuauagcacuaaaugccuac

SEQ ID NO: 523901 - RNA, 22 nt, Artificial Sequence
  Synthetic
auuuauagcacuaaaugccuac

SEQ ID NO: 523902 - RNA, 23 nt, Artificial Sequence
  Synthetic
aauuuauagcacuaaaugccuac

SEQ ID NO: 523903 - RNA, 24 nt, Artificial Sequence
  Synthetic
aaauuuauagcacuaaaugccuac

SEQ ID NO: 523904 - RNA, 18 nt, Artificial Sequence
  Synthetic
guauaggcuuaugccuac

SEQ ID NO: 523905 - RNA, 19 nt, Artificial Sequence
  Synthetic
uguauaggcuuaugccuac

SEQ ID NO: 523906 - RNA, 20 nt, Artificial Sequence
  Synthetic
auguauaggcuuaugccuac

SEQ ID NO: 523907 - RNA, 21 nt, Artificial Sequence
  Synthetic
aauguauaggcuuaugccuac

SEQ ID NO: 523908 - RNA, 22 nt, Artificial Sequence
  Synthetic
aaauguauaggcuuaugccuac

SEQ ID NO: 523909 - RNA, 23 nt, Artificial Sequence
  Synthetic
caaauguauaggcuuaugccuac

SEQ ID NO: 523910 - RNA, 24 nt, Artificial Sequence
  Synthetic
gcaaauguauaggcuuaugccuac

SEQ ID NO: 523911 - RNA, 18 nt, Artificial Sequence
  Synthetic
uuuuuucagugugccuac

SEQ ID NO: 523912 - RNA, 19 nt, Artificial Sequence
  Synthetic
auuuuuucagugugccuac

SEQ ID NO: 523913 - RNA, 20 nt, Artificial Sequence
  Synthetic
uauuuuuucagugugccuac

SEQ ID NO: 523914 - RNA, 21 nt, Artificial Sequence
  Synthetic
uuauuuuuucagugugccuac

SEQ ID NO: 523915 - RNA, 22 nt, Artificial Sequence
  Synthetic
uuuauuuuuucagugugccuac

SEQ ID NO: 523916 - RNA, 23 nt, Artificial Sequence
  Synthetic
uuuuauuuuuucagugugccuac

SEQ ID NO: 523917 - RNA, 24 nt, Artificial Sequence
  Synthetic
uuuuuauuuuuucagugugccuac

SEQ ID NO: 523918 - RNA, 18 nt, Artificial Sequence
  Synthetic
uuuuuuccuuuugccuac

SEQ ID NO: 523919 - RNA, 19 nt, Artificial Sequence
  Synthetic
cuuuuuuccuuuugccuac

SEQ ID NO: 523920 - RNA, 20 nt, Artificial Sequence
  Synthetic
ucuuuuuuccuuuugccuac

SEQ ID NO: 523921 - RNA, 21 nt, Artificial Sequence
  Synthetic
uucuuuuuuccuuuugccuac

SEQ ID NO: 523922 - RNA, 22 nt, Artificial Sequence
  Synthetic
uuucuuuuuuccuuuugccuac

SEQ ID NO: 523923 - RNA, 23 nt, Artificial Sequence
  Synthetic
cuuucuuuuuuccuuuugccuac

SEQ ID NO: 523924 - RNA, 24 nt, Artificial Sequence
  Synthetic
ucuuucuuuuuuccuuuugccuac

SEQ ID NO: 523925 - RNA, 18 nt, Artificial Sequence
  Synthetic
aaucacuggguauccuac

SEQ ID NO: 523926 - RNA, 19 nt, Artificial Sequence
  Synthetic
gaaucacuggguauccuac

SEQ ID NO: 523927 - RNA, 20 nt, Artificial Sequence
  Synthetic
ugaaucacuggguauccuac

SEQ ID NO: 523928 - RNA, 21 nt, Artificial Sequence
  Synthetic
uugaaucacuggguauccuac

SEQ ID NO: 523929 - RNA, 22 nt, Artificial Sequence
  Synthetic
uuugaaucacuggguauccuac

SEQ ID NO: 523930 - RNA, 23 nt, Artificial Sequence
  Synthetic
cuuugaaucacuggguauccuac

SEQ ID NO: 523931 - RNA, 24 nt, Artificial Sequence
  Synthetic
acuuugaaucacuggguauccuac

SEQ ID NO: 523932 - RNA, 18 nt, Artificial Sequence
  Synthetic
caccugcuuagcuccuac

SEQ ID NO: 523933 - RNA, 19 nt, Artificial Sequence
  Synthetic
ccaccugcuuagcuccuac

SEQ ID NO: 523934 - RNA, 20 nt, Artificial Sequence
  Synthetic
gccaccugcuuagcuccuac

SEQ ID NO: 523935 - RNA, 21 nt, Artificial Sequence
  Synthetic
ggccaccugcuuagcuccuac

SEQ ID NO: 523936 - RNA, 22 nt, Artificial Sequence
  Synthetic
uggccaccugcuuagcuccuac

SEQ ID NO: 523937 - RNA, 23 nt, Artificial Sequence
  Synthetic
cuggccaccugcuuagcuccuac

SEQ ID NO: 523938 - RNA, 24 nt, Artificial Sequence
  Synthetic
ucuggccaccugcuuagcuccuac

SEQ ID NO: 523939 - RNA, 18 nt, Artificial Sequence
  Synthetic
ccucuuaguggcuccuac

SEQ ID NO: 523940 - RNA, 19 nt, Artificial Sequence
  Synthetic
uccucuuaguggcuccuac

SEQ ID NO: 523941 - RNA, 20 nt, Artificial Sequence
  Synthetic
cuccucuuaguggcuccuac

SEQ ID NO: 523942 - RNA, 21 nt, Artificial Sequence
  Synthetic
ucuccucuuaguggcuccuac

SEQ ID NO: 523943 - RNA, 22 nt, Artificial Sequence
  Synthetic
uucuccucuuaguggcuccuac

SEQ ID NO: 523944 - RNA, 23 nt, Artificial Sequence
  Synthetic
cuucuccucuuaguggcuccuac

SEQ ID NO: 523945 - RNA, 24 nt, Artificial Sequence
  Synthetic
ccuucuccucuuaguggcuccuac

SEQ ID NO: 523946 - RNA, 18 nt, Artificial Sequence
  Synthetic
gaauggauaauuuccuac

SEQ ID NO: 523947 - RNA, 19 nt, Artificial Sequence
  Synthetic
agaauggauaauuuccuac

SEQ ID NO: 523948 - RNA, 20 nt, Artificial Sequence
  Synthetic
aagaauggauaauuuccuac

SEQ ID NO: 523949 - RNA, 21 nt, Artificial Sequence
  Synthetic
aaagaauggauaauuuccuac

SEQ ID NO: 523950 - RNA, 22 nt, Artificial Sequence
  Synthetic
uaaagaauggauaauuuccuac

SEQ ID NO: 523951 - RNA, 23 nt, Artificial Sequence
  Synthetic
auaaagaauggauaauuuccuac

SEQ ID NO: 523952 - RNA, 24 nt, Artificial Sequence
  Synthetic
gauaaagaauggauaauuuccuac

SEQ ID NO: 523953 - RNA, 18 nt, Artificial Sequence
  Synthetic
uuuugacuucaaagcuac

SEQ ID NO: 523954 - RNA, 19 nt, Artificial Sequence
  Synthetic
auuuugacuucaaagcuac

SEQ ID NO: 523955 - RNA, 20 nt, Artificial Sequence
  Synthetic
cauuuugacuucaaagcuac

SEQ ID NO: 523956 - RNA, 21 nt, Artificial Sequence
  Synthetic
ccauuuugacuucaaagcuac

SEQ ID NO: 523957 - RNA, 22 nt, Artificial Sequence
  Synthetic
cccauuuugacuucaaagcuac

SEQ ID NO: 523958 - RNA, 23 nt, Artificial Sequence
  Synthetic
ucccauuuugacuucaaagcuac

SEQ ID NO: 523959 - RNA, 24 nt, Artificial Sequence
  Synthetic
gucccauuuugacuucaaagcuac

SEQ ID NO: 523960 - RNA, 18 nt, Artificial Sequence
  Synthetic
aaaaggaagaacagcuac

SEQ ID NO: 523961 - RNA, 19 nt, Artificial Sequence
  Synthetic
uaaaaggaagaacagcuac

SEQ ID NO: 523962 - RNA, 20 nt, Artificial Sequence
  Synthetic
auaaaaggaagaacagcuac

SEQ ID NO: 523963 - RNA, 21 nt, Artificial Sequence
  Synthetic
cauaaaaggaagaacagcuac

SEQ ID NO: 523964 - RNA, 22 nt, Artificial Sequence
  Synthetic
ucauaaaaggaagaacagcuac

SEQ ID NO: 523965 - RNA, 23 nt, Artificial Sequence
  Synthetic
cucauaaaaggaagaacagcuac

SEQ ID NO: 523966 - RNA, 24 nt, Artificial Sequence
  Synthetic
ccucauaaaaggaagaacagcuac

SEQ ID NO: 523967 - RNA, 18 nt, Artificial Sequence
  Synthetic
aagggacaguacagcuac

SEQ ID NO: 523968 - RNA, 19 nt, Artificial Sequence
  Synthetic
gaagggacaguacagcuac

SEQ ID NO: 523969 - RNA, 20 nt, Artificial Sequence
  Synthetic
ggaagggacaguacagcuac

SEQ ID NO: 523970 - RNA, 21 nt, Artificial Sequence
  Synthetic
uggaagggacaguacagcuac

SEQ ID NO: 523971 - RNA, 22 nt, Artificial Sequence
  Synthetic
uuggaagggacaguacagcuac

SEQ ID NO: 523972 - RNA, 23 nt, Artificial Sequence
  Synthetic
uuuggaagggacaguacagcuac

SEQ ID NO: 523973 - RNA, 24 nt, Artificial Sequence
  Synthetic
uuuuggaagggacaguacagcuac

SEQ ID NO: 523974 - RNA, 18 nt, Artificial Sequence
  Synthetic
gccuguaguaccagcuac

SEQ ID NO: 523975 - RNA, 19 nt, Artificial Sequence
  Synthetic
cgccuguaguaccagcuac

SEQ ID NO: 523976 - RNA, 20 nt, Artificial Sequence
  Synthetic
gcgccuguaguaccagcuac

SEQ ID NO: 523977 - RNA, 21 nt, Artificial Sequence
  Synthetic
agcgccuguaguaccagcuac

SEQ ID NO: 523978 - RNA, 22 nt, Artificial Sequence
  Synthetic
cagcgccuguaguaccagcuac

SEQ ID NO: 523979 - RNA, 23 nt, Artificial Sequence
  Synthetic
ccagcgccuguaguaccagcuac

SEQ ID NO: 523980 - RNA, 24 nt, Artificial Sequence
  Synthetic
gccagcgccuguaguaccagcuac

SEQ ID NO: 523981 - RNA, 18 nt, Artificial Sequence
  Synthetic
acuuauaaucccagcuac

SEQ ID NO: 523982 - RNA, 19 nt, Artificial Sequence
  Synthetic
cacuuauaaucccagcuac

SEQ ID NO: 523983 - RNA, 20 nt, Artificial Sequence
  Synthetic
acacuuauaaucccagcuac

SEQ ID NO: 523984 - RNA, 21 nt, Artificial Sequence
  Synthetic
gacacuuauaaucccagcuac

SEQ ID NO: 523985 - RNA, 22 nt, Artificial Sequence
  Synthetic
agacacuuauaaucccagcuac

SEQ ID NO: 523986 - RNA, 23 nt, Artificial Sequence
  Synthetic
cagacacuuauaaucccagcuac

SEQ ID NO: 523987 - RNA, 24 nt, Artificial Sequence
  Synthetic
gcagacacuuauaaucccagcuac

SEQ ID NO: 523988 - RNA, 18 nt, Artificial Sequence
  Synthetic
gccucuaaucccagcuac

SEQ ID NO: 523989 - RNA, 19 nt, Artificial Sequence
  Synthetic
cgccucuaaucccagcuac

SEQ ID NO: 523990 - RNA, 20 nt, Artificial Sequence
  Synthetic
gcgccucuaaucccagcuac

SEQ ID NO: 523991 - RNA, 21 nt, Artificial Sequence
  Synthetic
ggcgccucuaaucccagcuac

SEQ ID NO: 523992 - RNA, 22 nt, Artificial Sequence
  Synthetic
aggcgccucuaaucccagcuac

SEQ ID NO: 523993 - RNA, 23 nt, Artificial Sequence
  Synthetic
aaggcgccucuaaucccagcuac

SEQ ID NO: 523994 - RNA, 24 nt, Artificial Sequence
  Synthetic
gaaggcgccucuaaucccagcuac

SEQ ID NO: 523995 - RNA, 21 nt, Artificial Sequence
  Synthetic
agcaccuguaaucccagcuac

SEQ ID NO: 523996 - RNA, 22 nt, Artificial Sequence
  Synthetic
gagcaccuguaaucccagcuac

SEQ ID NO: 523997 - RNA, 23 nt, Artificial Sequence
  Synthetic
agagcaccuguaaucccagcuac

SEQ ID NO: 523998 - RNA, 24 nt, Artificial Sequence
  Synthetic
cagagcaccuguaaucccagcuac

SEQ ID NO: 523999 - RNA, 21 nt, Artificial Sequence
  Synthetic
ggcaccuguaaucccagcuac

SEQ ID NO: 524000 - RNA, 22 nt, Artificial Sequence
  Synthetic
aggcaccuguaaucccagcuac

SEQ ID NO: 524001 - RNA, 23 nt, Artificial Sequence
  Synthetic
caggcaccuguaaucccagcuac

SEQ ID NO: 524002 - RNA, 24 nt, Artificial Sequence
  Synthetic
gcaggcaccuguaaucccagcuac

SEQ ID NO: 524003 - RNA, 22 nt, Artificial Sequence
  Synthetic
gggcaccuguaaucccagcuac

SEQ ID NO: 524004 - RNA, 23 nt, Artificial Sequence
  Synthetic
ugggcaccuguaaucccagcuac

SEQ ID NO: 524005 - RNA, 24 nt, Artificial Sequence
  Synthetic
gugggcaccuguaaucccagcuac

SEQ ID NO: 524006 - RNA, 24 nt, Artificial Sequence
  Synthetic
gcaggcgccuguaaucccagcuac

SEQ ID NO: 524007 - RNA, 21 nt, Artificial Sequence
  Synthetic
caugccuguaaucccagcuac

SEQ ID NO: 524008 - RNA, 22 nt, Artificial Sequence
  Synthetic
gcaugccuguaaucccagcuac

SEQ ID NO: 524009 - RNA, 23 nt, Artificial Sequence
  Synthetic
ugcaugccuguaaucccagcuac

SEQ ID NO: 524010 - RNA, 24 nt, Artificial Sequence
  Synthetic
gugcaugccuguaaucccagcuac

SEQ ID NO: 524011 - RNA, 21 nt, Artificial Sequence
  Synthetic
ggugccuguaaucccagcuac

SEQ ID NO: 524012 - RNA, 22 nt, Artificial Sequence
  Synthetic
aggugccuguaaucccagcuac

SEQ ID NO: 524013 - RNA, 23 nt, Artificial Sequence
  Synthetic
caggugccuguaaucccagcuac

SEQ ID NO: 524014 - RNA, 24 nt, Artificial Sequence
  Synthetic
gcaggugccuguaaucccagcuac

SEQ ID NO: 524015 - RNA, 18 nt, Artificial Sequence
  Synthetic
uccuguaaucccagcuac

SEQ ID NO: 524016 - RNA, 19 nt, Artificial Sequence
  Synthetic
cuccuguaaucccagcuac

SEQ ID NO: 524017 - RNA, 20 nt, Artificial Sequence
  Synthetic
gcuccuguaaucccagcuac

SEQ ID NO: 524018 - RNA, 21 nt, Artificial Sequence
  Synthetic
ggcuccuguaaucccagcuac

SEQ ID NO: 524019 - RNA, 22 nt, Artificial Sequence
  Synthetic
aggcuccuguaaucccagcuac

SEQ ID NO: 524020 - RNA, 23 nt, Artificial Sequence
  Synthetic
uaggcuccuguaaucccagcuac

SEQ ID NO: 524021 - RNA, 24 nt, Artificial Sequence
  Synthetic
guaggcuccuguaaucccagcuac

SEQ ID NO: 524022 - RNA, 18 nt, Artificial Sequence
  Synthetic
ggcuguaaucccagcuac

SEQ ID NO: 524023 - RNA, 19 nt, Artificial Sequence
  Synthetic
uggcuguaaucccagcuac

SEQ ID NO: 524024 - RNA, 20 nt, Artificial Sequence
  Synthetic
auggcuguaaucccagcuac

SEQ ID NO: 524025 - RNA, 21 nt, Artificial Sequence
  Synthetic
cauggcuguaaucccagcuac

SEQ ID NO: 524026 - RNA, 22 nt, Artificial Sequence
  Synthetic
gcauggcuguaaucccagcuac

SEQ ID NO: 524027 - RNA, 23 nt, Artificial Sequence
  Synthetic
ugcauggcuguaaucccagcuac

SEQ ID NO: 524028 - RNA, 24 nt, Artificial Sequence
  Synthetic
gugcauggcuguaaucccagcuac

SEQ ID NO: 524029 - RNA, 18 nt, Artificial Sequence
  Synthetic
aucuguaaucccagcuac

SEQ ID NO: 524030 - RNA, 19 nt, Artificial Sequence
  Synthetic
caucuguaaucccagcuac

SEQ ID NO: 524031 - RNA, 20 nt, Artificial Sequence
  Synthetic
acaucuguaaucccagcuac

SEQ ID NO: 524032 - RNA, 21 nt, Artificial Sequence
  Synthetic
cacaucuguaaucccagcuac

SEQ ID NO: 524033 - RNA, 22 nt, Artificial Sequence
  Synthetic
gcacaucuguaaucccagcuac

SEQ ID NO: 524034 - RNA, 23 nt, Artificial Sequence
  Synthetic
ugcacaucuguaaucccagcuac

SEQ ID NO: 524035 - RNA, 24 nt, Artificial Sequence
  Synthetic
gugcacaucuguaaucccagcuac

SEQ ID NO: 524036 - RNA, 18 nt, Artificial Sequence
  Synthetic
caccuguaucccagcuac

SEQ ID NO: 524037 - RNA, 19 nt, Artificial Sequence
  Synthetic
gcaccuguaucccagcuac

SEQ ID NO: 524038 - RNA, 20 nt, Artificial Sequence
  Synthetic
cgcaccuguaucccagcuac

SEQ ID NO: 524039 - RNA, 21 nt, Artificial Sequence
  Synthetic
gcgcaccuguaucccagcuac

SEQ ID NO: 524040 - RNA, 22 nt, Artificial Sequence
  Synthetic
ugcgcaccuguaucccagcuac

SEQ ID NO: 524041 - RNA, 23 nt, Artificial Sequence
  Synthetic
gugcgcaccuguaucccagcuac

SEQ ID NO: 524042 - RNA, 24 nt, Artificial Sequence
  Synthetic
ggugcgcaccuguaucccagcuac

SEQ ID NO: 524043 - RNA, 18 nt, Artificial Sequence
  Synthetic
gcuaguagucccagcuac

SEQ ID NO: 524044 - RNA, 19 nt, Artificial Sequence
  Synthetic
ggcuaguagucccagcuac

SEQ ID NO: 524045 - RNA, 20 nt, Artificial Sequence
  Synthetic
uggcuaguagucccagcuac

SEQ ID NO: 524046 - RNA, 21 nt, Artificial Sequence
  Synthetic
cuggcuaguagucccagcuac

SEQ ID NO: 524047 - RNA, 22 nt, Artificial Sequence
  Synthetic
ccuggcuaguagucccagcuac

SEQ ID NO: 524048 - RNA, 23 nt, Artificial Sequence
  Synthetic
gccuggcuaguagucccagcuac

SEQ ID NO: 524049 - RNA, 24 nt, Artificial Sequence
  Synthetic
cgccuggcuaguagucccagcuac

SEQ ID NO: 524050 - RNA, 18 nt, Artificial Sequence
  Synthetic
gccuguagucccagcuac

SEQ ID NO: 524051 - RNA, 19 nt, Artificial Sequence
  Synthetic
cgccuguagucccagcuac

SEQ ID NO: 524052 - RNA, 20 nt, Artificial Sequence
  Synthetic
ccgccuguagucccagcuac

SEQ ID NO: 524053 - RNA, 21 nt, Artificial Sequence
  Synthetic
gccgccuguagucccagcuac

SEQ ID NO: 524054 - RNA, 22 nt, Artificial Sequence
  Synthetic
ggccgccuguagucccagcuac

SEQ ID NO: 524055 - RNA, 23 nt, Artificial Sequence
  Synthetic
cggccgccuguagucccagcuac

SEQ ID NO: 524056 - RNA, 24 nt, Artificial Sequence
  Synthetic
gcggccgccuguagucccagcuac

SEQ ID NO: 524057 - RNA, 21 nt, Artificial Sequence
  Synthetic
cgcgccuguagucccagcuac

SEQ ID NO: 524058 - RNA, 22 nt, Artificial Sequence
  Synthetic
gcgcgccuguagucccagcuac

SEQ ID NO: 524059 - RNA, 23 nt, Artificial Sequence
  Synthetic
cgcgcgccuguagucccagcuac

SEQ ID NO: 524060 - RNA, 24 nt, Artificial Sequence
  Synthetic
gcgcgcgccuguagucccagcuac

SEQ ID NO: 524061 - RNA, 23 nt, Artificial Sequence
  Synthetic
ugcgcgccuguagucccagcuac

SEQ ID NO: 524062 - RNA, 24 nt, Artificial Sequence
  Synthetic
gugcgcgccuguagucccagcuac

SEQ ID NO: 524063 - RNA, 22 nt, Artificial Sequence
  Synthetic
gggcgccuguagucccagcuac

SEQ ID NO: 524064 - RNA, 23 nt, Artificial Sequence
  Synthetic
cgggcgccuguagucccagcuac

SEQ ID NO: 524065 - RNA, 24 nt, Artificial Sequence
  Synthetic
gcgggcgccuguagucccagcuac

SEQ ID NO: 524066 - RNA, 21 nt, Artificial Sequence
  Synthetic
cgugccuguagucccagcuac

SEQ ID NO: 524067 - RNA, 22 nt, Artificial Sequence
  Synthetic
gcgugccuguagucccagcuac

SEQ ID NO: 524068 - RNA, 23 nt, Artificial Sequence
  Synthetic
cgcgugccuguagucccagcuac

SEQ ID NO: 524069 - RNA, 24 nt, Artificial Sequence
  Synthetic
gcgcgugccuguagucccagcuac

SEQ ID NO: 524070 - RNA, 18 nt, Artificial Sequence
  Synthetic
gccaguagccucagcuac

SEQ ID NO: 524071 - RNA, 19 nt, Artificial Sequence
  Synthetic
cgccaguagccucagcuac

SEQ ID NO: 524072 - RNA, 20 nt, Artificial Sequence
  Synthetic
gcgccaguagccucagcuac

SEQ ID NO: 524073 - RNA, 21 nt, Artificial Sequence
  Synthetic
ugcgccaguagccucagcuac

SEQ ID NO: 524074 - RNA, 22 nt, Artificial Sequence
  Synthetic
gugcgccaguagccucagcuac

SEQ ID NO: 524075 - RNA, 23 nt, Artificial Sequence
  Synthetic
cgugcgccaguagccucagcuac

SEQ ID NO: 524076 - RNA, 24 nt, Artificial Sequence
  Synthetic
gcgugcgccaguagccucagcuac

SEQ ID NO: 524077 - RNA, 18 nt, Artificial Sequence
  Synthetic
accuguaaucucagcuac

SEQ ID NO: 524078 - RNA, 19 nt, Artificial Sequence
  Synthetic
caccuguaaucucagcuac

SEQ ID NO: 524079 - RNA, 20 nt, Artificial Sequence
  Synthetic
acaccuguaaucucagcuac

SEQ ID NO: 524080 - RNA, 21 nt, Artificial Sequence
  Synthetic
cacaccuguaaucucagcuac

SEQ ID NO: 524081 - RNA, 22 nt, Artificial Sequence
  Synthetic
gcacaccuguaaucucagcuac

SEQ ID NO: 524082 - RNA, 23 nt, Artificial Sequence
  Synthetic
cgcacaccuguaaucucagcuac

SEQ ID NO: 524083 - RNA, 24 nt, Artificial Sequence
  Synthetic
acgcacaccuguaaucucagcuac

SEQ ID NO: 524084 - RNA, 21 nt, Artificial Sequence
  Synthetic
ggcaccuguaaucucagcuac

SEQ ID NO: 524085 - RNA, 22 nt, Artificial Sequence
  Synthetic
gggcaccuguaaucucagcuac

SEQ ID NO: 524086 - RNA, 23 nt, Artificial Sequence
  Synthetic
ugggcaccuguaaucucagcuac

SEQ ID NO: 524087 - RNA, 24 nt, Artificial Sequence
  Synthetic
gugggcaccuguaaucucagcuac

SEQ ID NO: 524088 - RNA, 18 nt, Artificial Sequence
  Synthetic
acuauggagaauagcuac

SEQ ID NO: 524089 - RNA, 19 nt, Artificial Sequence
  Synthetic
uacuauggagaauagcuac

SEQ ID NO: 524090 - RNA, 20 nt, Artificial Sequence
  Synthetic
auacuauggagaauagcuac

SEQ ID NO: 524091 - RNA, 21 nt, Artificial Sequence
  Synthetic
aauacuauggagaauagcuac

SEQ ID NO: 524092 - RNA, 22 nt, Artificial Sequence
  Synthetic
aaauacuauggagaauagcuac

SEQ ID NO: 524093 - RNA, 23 nt, Artificial Sequence
  Synthetic
aaaauacuauggagaauagcuac

SEQ ID NO: 524094 - RNA, 24 nt, Artificial Sequence
  Synthetic
caaaauacuauggagaauagcuac

SEQ ID NO: 524095 - RNA, 18 nt, Artificial Sequence
  Synthetic
uuagugagugguagcuac

SEQ ID NO: 524096 - RNA, 19 nt, Artificial Sequence
  Synthetic
auuagugagugguagcuac

SEQ ID NO: 524097 - RNA, 20 nt, Artificial Sequence
  Synthetic
cauuagugagugguagcuac

SEQ ID NO: 524098 - RNA, 21 nt, Artificial Sequence
  Synthetic
ucauuagugagugguagcuac

SEQ ID NO: 524099 - RNA, 22 nt, Artificial Sequence
  Synthetic
cucauuagugagugguagcuac

SEQ ID NO: 524100 - RNA, 23 nt, Artificial Sequence
  Synthetic
ucucauuagugagugguagcuac

SEQ ID NO: 524101 - RNA, 24 nt, Artificial Sequence
  Synthetic
cucucauuagugagugguagcuac

SEQ ID NO: 524102 - RNA, 18 nt, Artificial Sequence
  Synthetic
uuaugaggauguagcuac

SEQ ID NO: 524103 - RNA, 19 nt, Artificial Sequence
  Synthetic
uuuaugaggauguagcuac

SEQ ID NO: 524104 - RNA, 20 nt, Artificial Sequence
  Synthetic
guuuaugaggauguagcuac

SEQ ID NO: 524105 - RNA, 21 nt, Artificial Sequence
  Synthetic
gguuuaugaggauguagcuac

SEQ ID NO: 524106 - RNA, 22 nt, Artificial Sequence
  Synthetic
agguuuaugaggauguagcuac

SEQ ID NO: 524107 - RNA, 23 nt, Artificial Sequence
  Synthetic
uagguuuaugaggauguagcuac

SEQ ID NO: 524108 - RNA, 24 nt, Artificial Sequence
  Synthetic
auagguuuaugaggauguagcuac

SEQ ID NO: 524109 - RNA, 18 nt, Artificial Sequence
  Synthetic
auucccuuuauuagcuac

SEQ ID NO: 524110 - RNA, 19 nt, Artificial Sequence
  Synthetic
uauucccuuuauuagcuac

SEQ ID NO: 524111 - RNA, 20 nt, Artificial Sequence
  Synthetic
auauucccuuuauuagcuac

SEQ ID NO: 524112 - RNA, 21 nt, Artificial Sequence
  Synthetic
uauauucccuuuauuagcuac

SEQ ID NO: 524113 - RNA, 22 nt, Artificial Sequence
  Synthetic
cuauauucccuuuauuagcuac

SEQ ID NO: 524114 - RNA, 23 nt, Artificial Sequence
  Synthetic
ucuauauucccuuuauuagcuac

SEQ ID NO: 524115 - RNA, 24 nt, Artificial Sequence
  Synthetic
aucuauauucccuuuauuagcuac

SEQ ID NO: 524116 - RNA, 18 nt, Artificial Sequence
  Synthetic
gccaacacuuuuagcuac

SEQ ID NO: 524117 - RNA, 19 nt, Artificial Sequence
  Synthetic
ugccaacacuuuuagcuac

SEQ ID NO: 524118 - RNA, 20 nt, Artificial Sequence
  Synthetic
uugccaacacuuuuagcuac

SEQ ID NO: 524119 - RNA, 21 nt, Artificial Sequence
  Synthetic
uuugccaacacuuuuagcuac

SEQ ID NO: 524120 - RNA, 22 nt, Artificial Sequence
  Synthetic
uuuugccaacacuuuuagcuac

SEQ ID NO: 524121 - RNA, 23 nt, Artificial Sequence
  Synthetic
cuuuugccaacacuuuuagcuac

SEQ ID NO: 524122 - RNA, 24 nt, Artificial Sequence
  Synthetic
acuuuugccaacacuuuuagcuac

SEQ ID NO: 524123 - RNA, 18 nt, Artificial Sequence
  Synthetic
agauuuuugaugcgcuac

SEQ ID NO: 524124 - RNA, 19 nt, Artificial Sequence
  Synthetic
aagauuuuugaugcgcuac

SEQ ID NO: 524125 - RNA, 20 nt, Artificial Sequence
  Synthetic
caagauuuuugaugcgcuac

SEQ ID NO: 524126 - RNA, 21 nt, Artificial Sequence
  Synthetic
gcaagauuuuugaugcgcuac

SEQ ID NO: 524127 - RNA, 22 nt, Artificial Sequence
  Synthetic
agcaagauuuuugaugcgcuac

SEQ ID NO: 524128 - RNA, 23 nt, Artificial Sequence
  Synthetic
aagcaagauuuuugaugcgcuac

SEQ ID NO: 524129 - RNA, 24 nt, Artificial Sequence
  Synthetic
aaagcaagauuuuugaugcgcuac

SEQ ID NO: 524130 - RNA, 18 nt, Artificial Sequence
  Synthetic
uaauaugcuggaggcuac

SEQ ID NO: 524131 - RNA, 19 nt, Artificial Sequence
  Synthetic
auaauaugcuggaggcuac

SEQ ID NO: 524132 - RNA, 20 nt, Artificial Sequence
  Synthetic
aauaauaugcuggaggcuac

SEQ ID NO: 524133 - RNA, 21 nt, Artificial Sequence
  Synthetic
aaauaauaugcuggaggcuac

SEQ ID NO: 524134 - RNA, 22 nt, Artificial Sequence
  Synthetic
aaaauaauaugcuggaggcuac

SEQ ID NO: 524135 - RNA, 23 nt, Artificial Sequence
  Synthetic
caaaauaauaugcuggaggcuac

SEQ ID NO: 524136 - RNA, 24 nt, Artificial Sequence
  Synthetic
ucaaaauaauaugcuggaggcuac

SEQ ID NO: 524137 - RNA, 18 nt, Artificial Sequence
  Synthetic
aggaacaccuggggcuac

SEQ ID NO: 524138 - RNA, 19 nt, Artificial Sequence
  Synthetic
aaggaacaccuggggcuac

SEQ ID NO: 524139 - RNA, 20 nt, Artificial Sequence
  Synthetic
caaggaacaccuggggcuac

SEQ ID NO: 524140 - RNA, 21 nt, Artificial Sequence
  Synthetic
ucaaggaacaccuggggcuac

SEQ ID NO: 524141 - RNA, 22 nt, Artificial Sequence
  Synthetic
aucaaggaacaccuggggcuac

SEQ ID NO: 524142 - RNA, 23 nt, Artificial Sequence
  Synthetic
aaucaaggaacaccuggggcuac

SEQ ID NO: 524143 - RNA, 24 nt, Artificial Sequence
  Synthetic
aaaucaaggaacaccuggggcuac

SEQ ID NO: 524144 - RNA, 18 nt, Artificial Sequence
  Synthetic
cugaguagcuggggcuac

SEQ ID NO: 524145 - RNA, 19 nt, Artificial Sequence
  Synthetic
ccugaguagcuggggcuac

SEQ ID NO: 524146 - RNA, 20 nt, Artificial Sequence
  Synthetic
uccugaguagcuggggcuac

SEQ ID NO: 524147 - RNA, 21 nt, Artificial Sequence
  Synthetic
cuccugaguagcuggggcuac

SEQ ID NO: 524148 - RNA, 22 nt, Artificial Sequence
  Synthetic
ccuccugaguagcuggggcuac

SEQ ID NO: 524149 - RNA, 23 nt, Artificial Sequence
  Synthetic
gccuccugaguagcuggggcuac

SEQ ID NO: 524150 - RNA, 24 nt, Artificial Sequence
  Synthetic
agccuccugaguagcuggggcuac

SEQ ID NO: 524151 - RNA, 18 nt, Artificial Sequence
  Synthetic
aaaaccccacugggcuac

SEQ ID NO: 524152 - RNA, 19 nt, Artificial Sequence
  Synthetic
aaaaaccccacugggcuac

SEQ ID NO: 524153 - RNA, 20 nt, Artificial Sequence
  Synthetic
aaaaaaccccacugggcuac

SEQ ID NO: 524154 - RNA, 21 nt, Artificial Sequence
  Synthetic
aaaaaaaccccacugggcuac

SEQ ID NO: 524155 - RNA, 22 nt, Artificial Sequence
  Synthetic
aaaaaaaaccccacugggcuac

SEQ ID NO: 524156 - RNA, 23 nt, Artificial Sequence
  Synthetic
aaaaaaaaaccccacugggcuac

SEQ ID NO: 524157 - RNA, 24 nt, Artificial Sequence
  Synthetic
aaaaaaaaaaccccacugggcuac

SEQ ID NO: 524158 - RNA, 18 nt, Artificial Sequence
  Synthetic
gccuguagaccuggcuac

SEQ ID NO: 524159 - RNA, 19 nt, Artificial Sequence
  Synthetic
ugccuguagaccuggcuac

SEQ ID NO: 524160 - RNA, 20 nt, Artificial Sequence
  Synthetic
augccuguagaccuggcuac

SEQ ID NO: 524161 - RNA, 21 nt, Artificial Sequence
  Synthetic
caugccuguagaccuggcuac

SEQ ID NO: 524162 - RNA, 22 nt, Artificial Sequence
  Synthetic
acaugccuguagaccuggcuac

SEQ ID NO: 524163 - RNA, 23 nt, Artificial Sequence
  Synthetic
uacaugccuguagaccuggcuac

SEQ ID NO: 524164 - RNA, 24 nt, Artificial Sequence
  Synthetic
guacaugccuguagaccuggcuac

SEQ ID NO: 524165 - RNA, 18 nt, Artificial Sequence
  Synthetic
uauauagccaacugcuac

SEQ ID NO: 524166 - RNA, 19 nt, Artificial Sequence
  Synthetic
guauauagccaacugcuac

SEQ ID NO: 524167 - RNA, 20 nt, Artificial Sequence
  Synthetic
gguauauagccaacugcuac

SEQ ID NO: 524168 - RNA, 21 nt, Artificial Sequence
  Synthetic
agguauauagccaacugcuac

SEQ ID NO: 524169 - RNA, 22 nt, Artificial Sequence
  Synthetic
gagguauauagccaacugcuac

SEQ ID NO: 524170 - RNA, 23 nt, Artificial Sequence
  Synthetic
ugagguauauagccaacugcuac

SEQ ID NO: 524171 - RNA, 24 nt, Artificial Sequence
  Synthetic
cugagguauauagccaacugcuac

SEQ ID NO: 524172 - RNA, 18 nt, Artificial Sequence
  Synthetic
gccuguagucucugcuac

SEQ ID NO: 524173 - RNA, 19 nt, Artificial Sequence
  Synthetic
ugccuguagucucugcuac

SEQ ID NO: 524174 - RNA, 20 nt, Artificial Sequence
  Synthetic
uugccuguagucucugcuac

SEQ ID NO: 524175 - RNA, 21 nt, Artificial Sequence
  Synthetic
cuugccuguagucucugcuac

SEQ ID NO: 524176 - RNA, 22 nt, Artificial Sequence
  Synthetic
acuugccuguagucucugcuac

SEQ ID NO: 524177 - RNA, 23 nt, Artificial Sequence
  Synthetic
cacuugccuguagucucugcuac

SEQ ID NO: 524178 - RNA, 24 nt, Artificial Sequence
  Synthetic
gcacuugccuguagucucugcuac

SEQ ID NO: 524179 - RNA, 18 nt, Artificial Sequence
  Synthetic
uuuuauuuaacgugcuac

SEQ ID NO: 524180 - RNA, 19 nt, Artificial Sequence
  Synthetic
uuuuuauuuaacgugcuac

SEQ ID NO: 524181 - RNA, 20 nt, Artificial Sequence
  Synthetic
auuuuuauuuaacgugcuac

SEQ ID NO: 524182 - RNA, 21 nt, Artificial Sequence
  Synthetic
uauuuuuauuuaacgugcuac

SEQ ID NO: 524183 - RNA, 22 nt, Artificial Sequence
  Synthetic
cuauuuuuauuuaacgugcuac

SEQ ID NO: 524184 - RNA, 23 nt, Artificial Sequence
  Synthetic
acuauuuuuauuuaacgugcuac

SEQ ID NO: 524185 - RNA, 24 nt, Artificial Sequence
  Synthetic
uacuauuuuuauuuaacgugcuac

SEQ ID NO: 524186 - RNA, 18 nt, Artificial Sequence
  Synthetic
aaaaaaggaaaaaucuac

SEQ ID NO: 524187 - RNA, 19 nt, Artificial Sequence
  Synthetic
aaaaaaaggaaaaaucuac

SEQ ID NO: 524188 - RNA, 20 nt, Artificial Sequence
  Synthetic
uaaaaaaaggaaaaaucuac

SEQ ID NO: 524189 - RNA, 21 nt, Artificial Sequence
  Synthetic
guaaaaaaaggaaaaaucuac

SEQ ID NO: 524190 - RNA, 22 nt, Artificial Sequence
  Synthetic
aguaaaaaaaggaaaaaucuac

SEQ ID NO: 524191 - RNA, 23 nt, Artificial Sequence
  Synthetic
gaguaaaaaaaggaaaaaucuac

SEQ ID NO: 524192 - RNA, 24 nt, Artificial Sequence
  Synthetic
ugaguaaaaaaaggaaaaaucuac

SEQ ID NO: 524193 - RNA, 18 nt, Artificial Sequence
  Synthetic
uccuucuuagacaucuac

SEQ ID NO: 524194 - RNA, 19 nt, Artificial Sequence
  Synthetic
cuccuucuuagacaucuac

SEQ ID NO: 524195 - RNA, 20 nt, Artificial Sequence
  Synthetic
ucuccuucuuagacaucuac

SEQ ID NO: 524196 - RNA, 21 nt, Artificial Sequence
  Synthetic
aucuccuucuuagacaucuac

SEQ ID NO: 524197 - RNA, 22 nt, Artificial Sequence
  Synthetic
aaucuccuucuuagacaucuac

SEQ ID NO: 524198 - RNA, 23 nt, Artificial Sequence
  Synthetic
aaaucuccuucuuagacaucuac

SEQ ID NO: 524199 - RNA, 24 nt, Artificial Sequence
  Synthetic
uaaaucuccuucuuagacaucuac

SEQ ID NO: 524200 - RNA, 18 nt, Artificial Sequence
  Synthetic
gccuguaguuccaucuac

SEQ ID NO: 524201 - RNA, 19 nt, Artificial Sequence
  Synthetic
ugccuguaguuccaucuac

SEQ ID NO: 524202 - RNA, 20 nt, Artificial Sequence
  Synthetic
gugccuguaguuccaucuac

SEQ ID NO: 524203 - RNA, 21 nt, Artificial Sequence
  Synthetic
ugugccuguaguuccaucuac

SEQ ID NO: 524204 - RNA, 22 nt, Artificial Sequence
  Synthetic
augugccuguaguuccaucuac

SEQ ID NO: 524205 - RNA, 23 nt, Artificial Sequence
  Synthetic
aaugugccuguaguuccaucuac

SEQ ID NO: 524206 - RNA, 24 nt, Artificial Sequence
  Synthetic
gaaugugccuguaguuccaucuac

SEQ ID NO: 524207 - RNA, 18 nt, Artificial Sequence
  Synthetic
ugaaauucagucaucuac

SEQ ID NO: 524208 - RNA, 19 nt, Artificial Sequence
  Synthetic
uugaaauucagucaucuac

SEQ ID NO: 524209 - RNA, 20 nt, Artificial Sequence
  Synthetic
uuugaaauucagucaucuac

SEQ ID NO: 524210 - RNA, 21 nt, Artificial Sequence
  Synthetic
guuugaaauucagucaucuac

SEQ ID NO: 524211 - RNA, 22 nt, Artificial Sequence
  Synthetic
uguuugaaauucagucaucuac

SEQ ID NO: 524212 - RNA, 23 nt, Artificial Sequence
  Synthetic
cuguuugaaauucagucaucuac

SEQ ID NO: 524213 - RNA, 24 nt, Artificial Sequence
  Synthetic
ucuguuugaaauucagucaucuac

SEQ ID NO: 524214 - RNA, 18 nt, Artificial Sequence
  Synthetic
cagggauucuaacucuac

SEQ ID NO: 524215 - RNA, 19 nt, Artificial Sequence
  Synthetic
acagggauucuaacucuac

SEQ ID NO: 524216 - RNA, 20 nt, Artificial Sequence
  Synthetic
aacagggauucuaacucuac

SEQ ID NO: 524217 - RNA, 21 nt, Artificial Sequence
  Synthetic
uaacagggauucuaacucuac

SEQ ID NO: 524218 - RNA, 22 nt, Artificial Sequence
  Synthetic
cuaacagggauucuaacucuac

SEQ ID NO: 524219 - RNA, 23 nt, Artificial Sequence
  Synthetic
ccuaacagggauucuaacucuac

SEQ ID NO: 524220 - RNA, 24 nt, Artificial Sequence
  Synthetic
uccuaacagggauucuaacucuac

SEQ ID NO: 524221 - RNA, 18 nt, Artificial Sequence
  Synthetic
uaauaaagcccacucuac

SEQ ID NO: 524222 - RNA, 19 nt, Artificial Sequence
  Synthetic
uuaauaaagcccacucuac

SEQ ID NO: 524223 - RNA, 20 nt, Artificial Sequence
  Synthetic
auuaauaaagcccacucuac

SEQ ID NO: 524224 - RNA, 21 nt, Artificial Sequence
  Synthetic
cauuaauaaagcccacucuac

SEQ ID NO: 524225 - RNA, 22 nt, Artificial Sequence
  Synthetic
ucauuaauaaagcccacucuac

SEQ ID NO: 524226 - RNA, 23 nt, Artificial Sequence
  Synthetic
aucauuaauaaagcccacucuac

SEQ ID NO: 524227 - RNA, 24 nt, Artificial Sequence
  Synthetic
caucauuaauaaagcccacucuac

SEQ ID NO: 524228 - RNA, 18 nt, Artificial Sequence
  Synthetic
uggccaggguuacucuac

SEQ ID NO: 524229 - RNA, 19 nt, Artificial Sequence
  Synthetic
uuggccaggguuacucuac

SEQ ID NO: 524230 - RNA, 20 nt, Artificial Sequence
  Synthetic
guuggccaggguuacucuac

SEQ ID NO: 524231 - RNA, 21 nt, Artificial Sequence
  Synthetic
gguuggccaggguuacucuac

SEQ ID NO: 524232 - RNA, 22 nt, Artificial Sequence
  Synthetic
ggguuggccaggguuacucuac

SEQ ID NO: 524233 - RNA, 23 nt, Artificial Sequence
  Synthetic
uggguuggccaggguuacucuac

SEQ ID NO: 524234 - RNA, 24 nt, Artificial Sequence
  Synthetic
auggguuggccaggguuacucuac

SEQ ID NO: 524235 - RNA, 18 nt, Artificial Sequence
  Synthetic
uaucaacugcugcucuac

SEQ ID NO: 524236 - RNA, 19 nt, Artificial Sequence
  Synthetic
cuaucaacugcugcucuac

SEQ ID NO: 524237 - RNA, 20 nt, Artificial Sequence
  Synthetic
ucuaucaacugcugcucuac

SEQ ID NO: 524238 - RNA, 21 nt, Artificial Sequence
  Synthetic
aucuaucaacugcugcucuac

SEQ ID NO: 524239 - RNA, 22 nt, Artificial Sequence
  Synthetic
gaucuaucaacugcugcucuac

SEQ ID NO: 524240 - RNA, 23 nt, Artificial Sequence
  Synthetic
ugaucuaucaacugcugcucuac

SEQ ID NO: 524241 - RNA, 24 nt, Artificial Sequence
  Synthetic
uugaucuaucaacugcugcucuac

SEQ ID NO: 524242 - RNA, 18 nt, Artificial Sequence
  Synthetic
ucaguuuuuggucucuac

SEQ ID NO: 524243 - RNA, 19 nt, Artificial Sequence
  Synthetic
uucaguuuuuggucucuac

SEQ ID NO: 524244 - RNA, 20 nt, Artificial Sequence
  Synthetic
uuucaguuuuuggucucuac

SEQ ID NO: 524245 - RNA, 21 nt, Artificial Sequence
  Synthetic
auuucaguuuuuggucucuac

SEQ ID NO: 524246 - RNA, 22 nt, Artificial Sequence
  Synthetic
cauuucaguuuuuggucucuac

SEQ ID NO: 524247 - RNA, 23 nt, Artificial Sequence
  Synthetic
acauuucaguuuuuggucucuac

SEQ ID NO: 524248 - RNA, 24 nt, Artificial Sequence
  Synthetic
aacauuucaguuuuuggucucuac

SEQ ID NO: 524249 - RNA, 18 nt, Artificial Sequence
  Synthetic
acuguauauuuucucuac

SEQ ID NO: 524250 - RNA, 19 nt, Artificial Sequence
  Synthetic
gacuguauauuuucucuac

SEQ ID NO: 524251 - RNA, 20 nt, Artificial Sequence
  Synthetic
ugacuguauauuuucucuac

SEQ ID NO: 524252 - RNA, 21 nt, Artificial Sequence
  Synthetic
uugacuguauauuuucucuac

SEQ ID NO: 524253 - RNA, 22 nt, Artificial Sequence
  Synthetic
auugacuguauauuuucucuac

SEQ ID NO: 524254 - RNA, 23 nt, Artificial Sequence
  Synthetic
uauugacuguauauuuucucuac

SEQ ID NO: 524255 - RNA, 24 nt, Artificial Sequence
  Synthetic
auauugacuguauauuuucucuac

SEQ ID NO: 524256 - RNA, 18 nt, Artificial Sequence
  Synthetic
auugacaguagagucuac

SEQ ID NO: 524257 - RNA, 19 nt, Artificial Sequence
  Synthetic
uauugacaguagagucuac

SEQ ID NO: 524258 - RNA, 20 nt, Artificial Sequence
  Synthetic
auauugacaguagagucuac

SEQ ID NO: 524259 - RNA, 21 nt, Artificial Sequence
  Synthetic
uauauugacaguagagucuac

SEQ ID NO: 524260 - RNA, 22 nt, Artificial Sequence
  Synthetic
guauauugacaguagagucuac

SEQ ID NO: 524261 - RNA, 23 nt, Artificial Sequence
  Synthetic
aguauauugacaguagagucuac

SEQ ID NO: 524262 - RNA, 24 nt, Artificial Sequence
  Synthetic
uaguauauugacaguagagucuac

SEQ ID NO: 524263 - RNA, 18 nt, Artificial Sequence
  Synthetic
aaaacaucacaggucuac

SEQ ID NO: 524264 - RNA, 19 nt, Artificial Sequence
  Synthetic
aaaaacaucacaggucuac

SEQ ID NO: 524265 - RNA, 20 nt, Artificial Sequence
  Synthetic
caaaaacaucacaggucuac

SEQ ID NO: 524266 - RNA, 21 nt, Artificial Sequence
  Synthetic
ucaaaaacaucacaggucuac

SEQ ID NO: 524267 - RNA, 22 nt, Artificial Sequence
  Synthetic
uucaaaaacaucacaggucuac

SEQ ID NO: 524268 - RNA, 23 nt, Artificial Sequence
  Synthetic
uuucaaaaacaucacaggucuac

SEQ ID NO: 524269 - RNA, 24 nt, Artificial Sequence
  Synthetic
auuucaaaaacaucacaggucuac

SEQ ID NO: 524270 - RNA, 18 nt, Artificial Sequence
  Synthetic
uucauuugauuggucuac

SEQ ID NO: 524271 - RNA, 19 nt, Artificial Sequence
  Synthetic
auucauuugauuggucuac

SEQ ID NO: 524272 - RNA, 20 nt, Artificial Sequence
  Synthetic
gauucauuugauuggucuac

SEQ ID NO: 524273 - RNA, 21 nt, Artificial Sequence
  Synthetic
ugauucauuugauuggucuac

SEQ ID NO: 524274 - RNA, 22 nt, Artificial Sequence
  Synthetic
cugauucauuugauuggucuac

SEQ ID NO: 524275 - RNA, 23 nt, Artificial Sequence
  Synthetic
ucugauucauuugauuggucuac

SEQ ID NO: 524276 - RNA, 24 nt, Artificial Sequence
  Synthetic
uucugauucauuugauuggucuac

SEQ ID NO: 524277 - RNA, 18 nt, Artificial Sequence
  Synthetic
gaauagaacaaugucuac

SEQ ID NO: 524278 - RNA, 19 nt, Artificial Sequence
  Synthetic
agaauagaacaaugucuac

SEQ ID NO: 524279 - RNA, 20 nt, Artificial Sequence
  Synthetic
cagaauagaacaaugucuac

SEQ ID NO: 524280 - RNA, 21 nt, Artificial Sequence
  Synthetic
ucagaauagaacaaugucuac

SEQ ID NO: 524281 - RNA, 22 nt, Artificial Sequence
  Synthetic
uucagaauagaacaaugucuac

SEQ ID NO: 524282 - RNA, 23 nt, Artificial Sequence
  Synthetic
cuucagaauagaacaaugucuac

SEQ ID NO: 524283 - RNA, 24 nt, Artificial Sequence
  Synthetic
acuucagaauagaacaaugucuac

SEQ ID NO: 524284 - RNA, 18 nt, Artificial Sequence
  Synthetic
uggucgcaagcugucuac

SEQ ID NO: 524285 - RNA, 19 nt, Artificial Sequence
  Synthetic
auggucgcaagcugucuac

SEQ ID NO: 524286 - RNA, 20 nt, Artificial Sequence
  Synthetic
gauggucgcaagcugucuac

SEQ ID NO: 524287 - RNA, 21 nt, Artificial Sequence
  Synthetic
agauggucgcaagcugucuac

SEQ ID NO: 524288 - RNA, 22 nt, Artificial Sequence
  Synthetic
cagauggucgcaagcugucuac

SEQ ID NO: 524289 - RNA, 23 nt, Artificial Sequence
  Synthetic
ccagauggucgcaagcugucuac

SEQ ID NO: 524290 - RNA, 24 nt, Artificial Sequence
  Synthetic
uccagauggucgcaagcugucuac

SEQ ID NO: 524291 - RNA, 18 nt, Artificial Sequence
  Synthetic
auucaucucuuugucuac

SEQ ID NO: 524292 - RNA, 19 nt, Artificial Sequence
  Synthetic
aauucaucucuuugucuac

SEQ ID NO: 524293 - RNA, 20 nt, Artificial Sequence
  Synthetic
uaauucaucucuuugucuac

SEQ ID NO: 524294 - RNA, 21 nt, Artificial Sequence
  Synthetic
guaauucaucucuuugucuac

SEQ ID NO: 524295 - RNA, 22 nt, Artificial Sequence
  Synthetic
aguaauucaucucuuugucuac

SEQ ID NO: 524296 - RNA, 23 nt, Artificial Sequence
  Synthetic
caguaauucaucucuuugucuac

SEQ ID NO: 524297 - RNA, 24 nt, Artificial Sequence
  Synthetic
ucaguaauucaucucuuugucuac

SEQ ID NO: 524298 - RNA, 21 nt, Artificial Sequence
  Synthetic
ggauucacagccgaauucuac

SEQ ID NO: 524299 - RNA, 22 nt, Artificial Sequence
  Synthetic
cggauucacagccgaauucuac

SEQ ID NO: 524300 - RNA, 23 nt, Artificial Sequence
  Synthetic
acggauucacagccgaauucuac

SEQ ID NO: 524301 - RNA, 24 nt, Artificial Sequence
  Synthetic
gacggauucacagccgaauucuac

SEQ ID NO: 524302 - RNA, 22 nt, Artificial Sequence
  Synthetic
uggauucacagccgaauucuac

SEQ ID NO: 524303 - RNA, 23 nt, Artificial Sequence
  Synthetic
auggauucacagccgaauucuac

SEQ ID NO: 524304 - RNA, 24 nt, Artificial Sequence
  Synthetic
gauggauucacagccgaauucuac

SEQ ID NO: 524305 - RNA, 22 nt, Artificial Sequence
  Synthetic
cggauucacagcugaauucuac

SEQ ID NO: 524306 - RNA, 23 nt, Artificial Sequence
  Synthetic
acggauucacagcugaauucuac

SEQ ID NO: 524307 - RNA, 24 nt, Artificial Sequence
  Synthetic
gacggauucacagcugaauucuac

SEQ ID NO: 524308 - RNA, 18 nt, Artificial Sequence
  Synthetic
cuuccaagcucauucuac

SEQ ID NO: 524309 - RNA, 19 nt, Artificial Sequence
  Synthetic
acuuccaagcucauucuac

SEQ ID NO: 524310 - RNA, 20 nt, Artificial Sequence
  Synthetic
cacuuccaagcucauucuac

SEQ ID NO: 524311 - RNA, 21 nt, Artificial Sequence
  Synthetic
acacuuccaagcucauucuac

SEQ ID NO: 524312 - RNA, 22 nt, Artificial Sequence
  Synthetic
aacacuuccaagcucauucuac

SEQ ID NO: 524313 - RNA, 23 nt, Artificial Sequence
  Synthetic
gaacacuuccaagcucauucuac

SEQ ID NO: 524314 - RNA, 24 nt, Artificial Sequence
  Synthetic
agaacacuuccaagcucauucuac

SEQ ID NO: 524315 - RNA, 18 nt, Artificial Sequence
  Synthetic
uggaaucucaccuucuac

SEQ ID NO: 524316 - RNA, 19 nt, Artificial Sequence
  Synthetic
cuggaaucucaccuucuac

SEQ ID NO: 524317 - RNA, 20 nt, Artificial Sequence
  Synthetic
ucuggaaucucaccuucuac

SEQ ID NO: 524318 - RNA, 21 nt, Artificial Sequence
  Synthetic
cucuggaaucucaccuucuac

SEQ ID NO: 524319 - RNA, 22 nt, Artificial Sequence
  Synthetic
ucucuggaaucucaccuucuac

SEQ ID NO: 524320 - RNA, 23 nt, Artificial Sequence
  Synthetic
cucucuggaaucucaccuucuac

SEQ ID NO: 524321 - RNA, 24 nt, Artificial Sequence
  Synthetic
gcucucuggaaucucaccuucuac

SEQ ID NO: 524322 - RNA, 18 nt, Artificial Sequence
  Synthetic
cuggcagauuccuucuac

SEQ ID NO: 524323 - RNA, 19 nt, Artificial Sequence
  Synthetic
acuggcagauuccuucuac

SEQ ID NO: 524324 - RNA, 20 nt, Artificial Sequence
  Synthetic
uacuggcagauuccuucuac

SEQ ID NO: 524325 - RNA, 21 nt, Artificial Sequence
  Synthetic
cuacuggcagauuccuucuac

SEQ ID NO: 524326 - RNA, 22 nt, Artificial Sequence
  Synthetic
ccuacuggcagauuccuucuac

SEQ ID NO: 524327 - RNA, 23 nt, Artificial Sequence
  Synthetic
accuacuggcagauuccuucuac

SEQ ID NO: 524328 - RNA, 24 nt, Artificial Sequence
  Synthetic
uaccuacuggcagauuccuucuac

SEQ ID NO: 524329 - RNA, 18 nt, Artificial Sequence
  Synthetic
ucuguaucuugcuucuac

SEQ ID NO: 524330 - RNA, 19 nt, Artificial Sequence
  Synthetic
uucuguaucuugcuucuac

SEQ ID NO: 524331 - RNA, 20 nt, Artificial Sequence
  Synthetic
uuucuguaucuugcuucuac

SEQ ID NO: 524332 - RNA, 21 nt, Artificial Sequence
  Synthetic
guuucuguaucuugcuucuac

SEQ ID NO: 524333 - RNA, 22 nt, Artificial Sequence
  Synthetic
aguuucuguaucuugcuucuac

SEQ ID NO: 524334 - RNA, 23 nt, Artificial Sequence
  Synthetic
gaguuucuguaucuugcuucuac

SEQ ID NO: 524335 - RNA, 24 nt, Artificial Sequence
  Synthetic
agaguuucuguaucuugcuucuac

SEQ ID NO: 524336 - RNA, 18 nt, Artificial Sequence
  Synthetic
auuuucuguuucuucuac

SEQ ID NO: 524337 - RNA, 19 nt, Artificial Sequence
  Synthetic
gauuuucuguuucuucuac

SEQ ID NO: 524338 - RNA, 20 nt, Artificial Sequence
  Synthetic
ggauuuucuguuucuucuac

SEQ ID NO: 524339 - RNA, 21 nt, Artificial Sequence
  Synthetic
cggauuuucuguuucuucuac

SEQ ID NO: 524340 - RNA, 22 nt, Artificial Sequence
  Synthetic
acggauuuucuguuucuucuac

SEQ ID NO: 524341 - RNA, 23 nt, Artificial Sequence
  Synthetic
uacggauuuucuguuucuucuac

SEQ ID NO: 524342 - RNA, 24 nt, Artificial Sequence
  Synthetic
cuacggauuuucuguuucuucuac

SEQ ID NO: 524343 - RNA, 18 nt, Artificial Sequence
  Synthetic
ccuugauuaccuuucuac

SEQ ID NO: 524344 - RNA, 19 nt, Artificial Sequence
  Synthetic
accuugauuaccuuucuac

SEQ ID NO: 524345 - RNA, 20 nt, Artificial Sequence
  Synthetic
aaccuugauuaccuuucuac

SEQ ID NO: 524346 - RNA, 21 nt, Artificial Sequence
  Synthetic
aaaccuugauuaccuuucuac

SEQ ID NO: 524347 - RNA, 22 nt, Artificial Sequence
  Synthetic
uaaaccuugauuaccuuucuac

SEQ ID NO: 524348 - RNA, 23 nt, Artificial Sequence
  Synthetic
cuaaaccuugauuaccuuucuac

SEQ ID NO: 524349 - RNA, 24 nt, Artificial Sequence
  Synthetic
ucuaaaccuugauuaccuuucuac

SEQ ID NO: 524350 - RNA, 18 nt, Artificial Sequence
  Synthetic
aaugggucuccuuucuac

SEQ ID NO: 524351 - RNA, 19 nt, Artificial Sequence
  Synthetic
caaugggucuccuuucuac

SEQ ID NO: 524352 - RNA, 20 nt, Artificial Sequence
  Synthetic
acaaugggucuccuuucuac

SEQ ID NO: 524353 - RNA, 21 nt, Artificial Sequence
  Synthetic
gacaaugggucuccuuucuac

SEQ ID NO: 524354 - RNA, 22 nt, Artificial Sequence
  Synthetic
ugacaaugggucuccuuucuac

SEQ ID NO: 524355 - RNA, 23 nt, Artificial Sequence
  Synthetic
gugacaaugggucuccuuucuac

SEQ ID NO: 524356 - RNA, 24 nt, Artificial Sequence
  Synthetic
ggugacaaugggucuccuuucuac

SEQ ID NO: 524357 - RNA, 18 nt, Artificial Sequence
  Synthetic
gaagcuagaagaaaguac

SEQ ID NO: 524358 - RNA, 19 nt, Artificial Sequence
  Synthetic
agaagcuagaagaaaguac

SEQ ID NO: 524359 - RNA, 20 nt, Artificial Sequence
  Synthetic
aagaagcuagaagaaaguac

SEQ ID NO: 524360 - RNA, 21 nt, Artificial Sequence
  Synthetic
gaagaagcuagaagaaaguac

SEQ ID NO: 524361 - RNA, 22 nt, Artificial Sequence
  Synthetic
cgaagaagcuagaagaaaguac

SEQ ID NO: 524362 - RNA, 23 nt, Artificial Sequence
  Synthetic
ucgaagaagcuagaagaaaguac

SEQ ID NO: 524363 - RNA, 24 nt, Artificial Sequence
  Synthetic
aucgaagaagcuagaagaaaguac

SEQ ID NO: 524364 - RNA, 18 nt, Artificial Sequence
  Synthetic
cauucaggacacaaguac

SEQ ID NO: 524365 - RNA, 19 nt, Artificial Sequence
  Synthetic
ccauucaggacacaaguac

SEQ ID NO: 524366 - RNA, 20 nt, Artificial Sequence
  Synthetic
accauucaggacacaaguac

SEQ ID NO: 524367 - RNA, 21 nt, Artificial Sequence
  Synthetic
uaccauucaggacacaaguac

SEQ ID NO: 524368 - RNA, 22 nt, Artificial Sequence
  Synthetic
auaccauucaggacacaaguac

SEQ ID NO: 524369 - RNA, 23 nt, Artificial Sequence
  Synthetic
aauaccauucaggacacaaguac

SEQ ID NO: 524370 - RNA, 24 nt, Artificial Sequence
  Synthetic
caauaccauucaggacacaaguac

SEQ ID NO: 524371 - RNA, 18 nt, Artificial Sequence
  Synthetic
ccucagccucccaaguac

SEQ ID NO: 524372 - RNA, 19 nt, Artificial Sequence
  Synthetic
gccucagccucccaaguac

SEQ ID NO: 524373 - RNA, 20 nt, Artificial Sequence
  Synthetic
ugccucagccucccaaguac

SEQ ID NO: 524374 - RNA, 21 nt, Artificial Sequence
  Synthetic
cugccucagccucccaaguac

SEQ ID NO: 524375 - RNA, 22 nt, Artificial Sequence
  Synthetic
ccugccucagccucccaaguac

SEQ ID NO: 524376 - RNA, 23 nt, Artificial Sequence
  Synthetic
uccugccucagccucccaaguac

SEQ ID NO: 524377 - RNA, 24 nt, Artificial Sequence
  Synthetic
cuccugccucagccucccaaguac

SEQ ID NO: 524378 - RNA, 18 nt, Artificial Sequence
  Synthetic
gcaaagagaugcaaguac

SEQ ID NO: 524379 - RNA, 19 nt, Artificial Sequence
  Synthetic
agcaaagagaugcaaguac

SEQ ID NO: 524380 - RNA, 20 nt, Artificial Sequence
  Synthetic
aagcaaagagaugcaaguac

SEQ ID NO: 524381 - RNA, 21 nt, Artificial Sequence
  Synthetic
caagcaaagagaugcaaguac

SEQ ID NO: 524382 - RNA, 22 nt, Artificial Sequence
  Synthetic
ccaagcaaagagaugcaaguac

SEQ ID NO: 524383 - RNA, 23 nt, Artificial Sequence
  Synthetic
cccaagcaaagagaugcaaguac

SEQ ID NO: 524384 - RNA, 24 nt, Artificial Sequence
  Synthetic
ccccaagcaaagagaugcaaguac

SEQ ID NO: 524385 - RNA, 18 nt, Artificial Sequence
  Synthetic
cucgaccaaaucaaguac

SEQ ID NO: 524386 - RNA, 19 nt, Artificial Sequence
  Synthetic
ccucgaccaaaucaaguac

SEQ ID NO: 524387 - RNA, 20 nt, Artificial Sequence
  Synthetic
gccucgaccaaaucaaguac

SEQ ID NO: 524388 - RNA, 21 nt, Artificial Sequence
  Synthetic
ggccucgaccaaaucaaguac

SEQ ID NO: 524389 - RNA, 22 nt, Artificial Sequence
  Synthetic
gggccucgaccaaaucaaguac

SEQ ID NO: 524390 - RNA, 23 nt, Artificial Sequence
  Synthetic
ugggccucgaccaaaucaaguac

SEQ ID NO: 524391 - RNA, 24 nt, Artificial Sequence
  Synthetic
uugggccucgaccaaaucaaguac

SEQ ID NO: 524392 - RNA, 18 nt, Artificial Sequence
  Synthetic
augaaagacaucaaguac

SEQ ID NO: 524393 - RNA, 19 nt, Artificial Sequence
  Synthetic
uaugaaagacaucaaguac

SEQ ID NO: 524394 - RNA, 20 nt, Artificial Sequence
  Synthetic
uuaugaaagacaucaaguac

SEQ ID NO: 524395 - RNA, 21 nt, Artificial Sequence
  Synthetic
guuaugaaagacaucaaguac

SEQ ID NO: 524396 - RNA, 22 nt, Artificial Sequence
  Synthetic
aguuaugaaagacaucaaguac

SEQ ID NO: 524397 - RNA, 23 nt, Artificial Sequence
  Synthetic
uaguuaugaaagacaucaaguac

SEQ ID NO: 524398 - RNA, 24 nt, Artificial Sequence
  Synthetic
uuaguuaugaaagacaucaaguac

SEQ ID NO: 524399 - RNA, 18 nt, Artificial Sequence
  Synthetic
ugcuccuuuaucaaguac

SEQ ID NO: 524400 - RNA, 19 nt, Artificial Sequence
  Synthetic
uugcuccuuuaucaaguac

SEQ ID NO: 524401 - RNA, 20 nt, Artificial Sequence
  Synthetic
auugcuccuuuaucaaguac

SEQ ID NO: 524402 - RNA, 21 nt, Artificial Sequence
  Synthetic
cauugcuccuuuaucaaguac

SEQ ID NO: 524403 - RNA, 22 nt, Artificial Sequence
  Synthetic
ccauugcuccuuuaucaaguac

SEQ ID NO: 524404 - RNA, 23 nt, Artificial Sequence
  Synthetic
cccauugcuccuuuaucaaguac

SEQ ID NO: 524405 - RNA, 24 nt, Artificial Sequence
  Synthetic
ccccauugcuccuuuaucaaguac

SEQ ID NO: 524406 - RNA, 18 nt, Artificial Sequence
  Synthetic
aaggucauaaggaaguac

SEQ ID NO: 524407 - RNA, 19 nt, Artificial Sequence
  Synthetic
uaaggucauaaggaaguac

SEQ ID NO: 524408 - RNA, 20 nt, Artificial Sequence
  Synthetic
uuaaggucauaaggaaguac

SEQ ID NO: 524409 - RNA, 21 nt, Artificial Sequence
  Synthetic
cuuaaggucauaaggaaguac

SEQ ID NO: 524410 - RNA, 22 nt, Artificial Sequence
  Synthetic
ucuuaaggucauaaggaaguac

SEQ ID NO: 524411 - RNA, 23 nt, Artificial Sequence
  Synthetic
uucuuaaggucauaaggaaguac

SEQ ID NO: 524412 - RNA, 24 nt, Artificial Sequence
  Synthetic
auucuuaaggucauaaggaaguac

SEQ ID NO: 524413 - RNA, 18 nt, Artificial Sequence
  Synthetic
uuuugaaagaggaaguac

SEQ ID NO: 524414 - RNA, 19 nt, Artificial Sequence
  Synthetic
guuuugaaagaggaaguac

SEQ ID NO: 524415 - RNA, 20 nt, Artificial Sequence
  Synthetic
uguuuugaaagaggaaguac

SEQ ID NO: 524416 - RNA, 21 nt, Artificial Sequence
  Synthetic
guguuuugaaagaggaaguac

SEQ ID NO: 524417 - RNA, 22 nt, Artificial Sequence
  Synthetic
aguguuuugaaagaggaaguac

SEQ ID NO: 524418 - RNA, 23 nt, Artificial Sequence
  Synthetic
gaguguuuugaaagaggaaguac

SEQ ID NO: 524419 - RNA, 24 nt, Artificial Sequence
  Synthetic
ugaguguuuugaaagaggaaguac

SEQ ID NO: 524420 - RNA, 18 nt, Artificial Sequence
  Synthetic
aaaguuauuaggaaguac

SEQ ID NO: 524421 - RNA, 19 nt, Artificial Sequence
  Synthetic
caaaguuauuaggaaguac

SEQ ID NO: 524422 - RNA, 20 nt, Artificial Sequence
  Synthetic
gcaaaguuauuaggaaguac

SEQ ID NO: 524423 - RNA, 21 nt, Artificial Sequence
  Synthetic
cgcaaaguuauuaggaaguac

SEQ ID NO: 524424 - RNA, 22 nt, Artificial Sequence
  Synthetic
ccgcaaaguuauuaggaaguac

SEQ ID NO: 524425 - RNA, 23 nt, Artificial Sequence
  Synthetic
uccgcaaaguuauuaggaaguac

SEQ ID NO: 524426 - RNA, 24 nt, Artificial Sequence
  Synthetic
uuccgcaaaguuauuaggaaguac

SEQ ID NO: 524427 - RNA, 18 nt, Artificial Sequence
  Synthetic
ccccuuauccugaaguac

SEQ ID NO: 524428 - RNA, 19 nt, Artificial Sequence
  Synthetic
cccccuuauccugaaguac

SEQ ID NO: 524429 - RNA, 20 nt, Artificial Sequence
  Synthetic
acccccuuauccugaaguac

SEQ ID NO: 524430 - RNA, 21 nt, Artificial Sequence
  Synthetic
cacccccuuauccugaaguac

SEQ ID NO: 524431 - RNA, 22 nt, Artificial Sequence
  Synthetic
acacccccuuauccugaaguac

SEQ ID NO: 524432 - RNA, 23 nt, Artificial Sequence
  Synthetic
aacacccccuuauccugaaguac

SEQ ID NO: 524433 - RNA, 24 nt, Artificial Sequence
  Synthetic
aaacacccccuuauccugaaguac

SEQ ID NO: 524434 - RNA, 18 nt, Artificial Sequence
  Synthetic
gagagcucuuugaaguac

SEQ ID NO: 524435 - RNA, 19 nt, Artificial Sequence
  Synthetic
ugagagcucuuugaaguac

SEQ ID NO: 524436 - RNA, 20 nt, Artificial Sequence
  Synthetic
cugagagcucuuugaaguac

SEQ ID NO: 524437 - RNA, 21 nt, Artificial Sequence
  Synthetic
ccugagagcucuuugaaguac

SEQ ID NO: 524438 - RNA, 22 nt, Artificial Sequence
  Synthetic
cccugagagcucuuugaaguac

SEQ ID NO: 524439 - RNA, 23 nt, Artificial Sequence
  Synthetic
ccccugagagcucuuugaaguac

SEQ ID NO: 524440 - RNA, 24 nt, Artificial Sequence
  Synthetic
uccccugagagcucuuugaaguac

SEQ ID NO: 524441 - RNA, 18 nt, Artificial Sequence
  Synthetic
uucccaaguucuaaguac

SEQ ID NO: 524442 - RNA, 19 nt, Artificial Sequence
  Synthetic
cuucccaaguucuaaguac

SEQ ID NO: 524443 - RNA, 20 nt, Artificial Sequence
  Synthetic
acuucccaaguucuaaguac

SEQ ID NO: 524444 - RNA, 21 nt, Artificial Sequence
  Synthetic
gacuucccaaguucuaaguac

SEQ ID NO: 524445 - RNA, 22 nt, Artificial Sequence
  Synthetic
ggacuucccaaguucuaaguac

SEQ ID NO: 524446 - RNA, 23 nt, Artificial Sequence
  Synthetic
aggacuucccaaguucuaaguac

SEQ ID NO: 524447 - RNA, 24 nt, Artificial Sequence
  Synthetic
uaggacuucccaaguucuaaguac

SEQ ID NO: 524448 - RNA, 18 nt, Artificial Sequence
  Synthetic
uacauuguaauacaguac

SEQ ID NO: 524449 - RNA, 19 nt, Artificial Sequence
  Synthetic
uuacauuguaauacaguac

SEQ ID NO: 524450 - RNA, 20 nt, Artificial Sequence
  Synthetic
auuacauuguaauacaguac

SEQ ID NO: 524451 - RNA, 21 nt, Artificial Sequence
  Synthetic
uauuacauuguaauacaguac

SEQ ID NO: 524452 - RNA, 22 nt, Artificial Sequence
  Synthetic
cuauuacauuguaauacaguac

SEQ ID NO: 524453 - RNA, 23 nt, Artificial Sequence
  Synthetic
ucuauuacauuguaauacaguac

SEQ ID NO: 524454 - RNA, 24 nt, Artificial Sequence
  Synthetic
uucuauuacauuguaauacaguac

SEQ ID NO: 524455 - RNA, 18 nt, Artificial Sequence
  Synthetic
ccaguaguuucccaguac

SEQ ID NO: 524456 - RNA, 19 nt, Artificial Sequence
  Synthetic
cccaguaguuucccaguac

SEQ ID NO: 524457 - RNA, 20 nt, Artificial Sequence
  Synthetic
gcccaguaguuucccaguac

SEQ ID NO: 524458 - RNA, 21 nt, Artificial Sequence
  Synthetic
ugcccaguaguuucccaguac

SEQ ID NO: 524459 - RNA, 22 nt, Artificial Sequence
  Synthetic
cugcccaguaguuucccaguac

SEQ ID NO: 524460 - RNA, 23 nt, Artificial Sequence
  Synthetic
ccugcccaguaguuucccaguac

SEQ ID NO: 524461 - RNA, 24 nt, Artificial Sequence
  Synthetic
cccugcccaguaguuucccaguac

SEQ ID NO: 524462 - RNA, 18 nt, Artificial Sequence
  Synthetic
acaaaucuguuccaguac

SEQ ID NO: 524463 - RNA, 19 nt, Artificial Sequence
  Synthetic
cacaaaucuguuccaguac

SEQ ID NO: 524464 - RNA, 20 nt, Artificial Sequence
  Synthetic
gcacaaaucuguuccaguac

SEQ ID NO: 524465 - RNA, 21 nt, Artificial Sequence
  Synthetic
agcacaaaucuguuccaguac

SEQ ID NO: 524466 - RNA, 22 nt, Artificial Sequence
  Synthetic
cagcacaaaucuguuccaguac

SEQ ID NO: 524467 - RNA, 23 nt, Artificial Sequence
  Synthetic
acagcacaaaucuguuccaguac

SEQ ID NO: 524468 - RNA, 24 nt, Artificial Sequence
  Synthetic
aacagcacaaaucuguuccaguac

SEQ ID NO: 524469 - RNA, 18 nt, Artificial Sequence
  Synthetic
gugaggaaaccagaguac

SEQ ID NO: 524470 - RNA, 19 nt, Artificial Sequence
  Synthetic
ugugaggaaaccagaguac

SEQ ID NO: 524471 - RNA, 20 nt, Artificial Sequence
  Synthetic
augugaggaaaccagaguac

SEQ ID NO: 524472 - RNA, 21 nt, Artificial Sequence
  Synthetic
caugugaggaaaccagaguac

SEQ ID NO: 524473 - RNA, 22 nt, Artificial Sequence
  Synthetic
acaugugaggaaaccagaguac

SEQ ID NO: 524474 - RNA, 23 nt, Artificial Sequence
  Synthetic
gacaugugaggaaaccagaguac

SEQ ID NO: 524475 - RNA, 24 nt, Artificial Sequence
  Synthetic
ggacaugugaggaaaccagaguac

SEQ ID NO: 524476 - RNA, 18 nt, Artificial Sequence
  Synthetic
uaggcaaggccggaguac

SEQ ID NO: 524477 - RNA, 19 nt, Artificial Sequence
  Synthetic
auaggcaaggccggaguac

SEQ ID NO: 524478 - RNA, 20 nt, Artificial Sequence
  Synthetic
cauaggcaaggccggaguac

SEQ ID NO: 524479 - RNA, 21 nt, Artificial Sequence
  Synthetic
acauaggcaaggccggaguac

SEQ ID NO: 524480 - RNA, 22 nt, Artificial Sequence
  Synthetic
uacauaggcaaggccggaguac

SEQ ID NO: 524481 - RNA, 23 nt, Artificial Sequence
  Synthetic
cuacauaggcaaggccggaguac

SEQ ID NO: 524482 - RNA, 24 nt, Artificial Sequence
  Synthetic
ucuacauaggcaaggccggaguac

SEQ ID NO: 524483 - RNA, 18 nt, Artificial Sequence
  Synthetic
ugacugcaacgggaguac

SEQ ID NO: 524484 - RNA, 19 nt, Artificial Sequence
  Synthetic
cugacugcaacgggaguac

SEQ ID NO: 524485 - RNA, 20 nt, Artificial Sequence
  Synthetic
acugacugcaacgggaguac

SEQ ID NO: 524486 - RNA, 21 nt, Artificial Sequence
  Synthetic
gacugacugcaacgggaguac

SEQ ID NO: 524487 - RNA, 22 nt, Artificial Sequence
  Synthetic
agacugacugcaacgggaguac

SEQ ID NO: 524488 - RNA, 23 nt, Artificial Sequence
  Synthetic
gagacugacugcaacgggaguac

SEQ ID NO: 524489 - RNA, 24 nt, Artificial Sequence
  Synthetic
ggagacugacugcaacgggaguac

SEQ ID NO: 524490 - RNA, 18 nt, Artificial Sequence
  Synthetic
gaacaguuguaugaguac

SEQ ID NO: 524491 - RNA, 19 nt, Artificial Sequence
  Synthetic
agaacaguuguaugaguac

SEQ ID NO: 524492 - RNA, 20 nt, Artificial Sequence
  Synthetic
cagaacaguuguaugaguac

SEQ ID NO: 524493 - RNA, 21 nt, Artificial Sequence
  Synthetic
gcagaacaguuguaugaguac

SEQ ID NO: 524494 - RNA, 22 nt, Artificial Sequence
  Synthetic
agcagaacaguuguaugaguac

SEQ ID NO: 524495 - RNA, 23 nt, Artificial Sequence
  Synthetic
aagcagaacaguuguaugaguac

SEQ ID NO: 524496 - RNA, 24 nt, Artificial Sequence
  Synthetic
aaagcagaacaguuguaugaguac

SEQ ID NO: 524497 - RNA, 18 nt, Artificial Sequence
  Synthetic
gcaugagcuacugaguac

SEQ ID NO: 524498 - RNA, 19 nt, Artificial Sequence
  Synthetic
agcaugagcuacugaguac

SEQ ID NO: 524499 - RNA, 20 nt, Artificial Sequence
  Synthetic
cagcaugagcuacugaguac

SEQ ID NO: 524500 - RNA, 21 nt, Artificial Sequence
  Synthetic
ucagcaugagcuacugaguac

SEQ ID NO: 524501 - RNA, 22 nt, Artificial Sequence
  Synthetic
uucagcaugagcuacugaguac

SEQ ID NO: 524502 - RNA, 23 nt, Artificial Sequence
  Synthetic
uuucagcaugagcuacugaguac

SEQ ID NO: 524503 - RNA, 24 nt, Artificial Sequence
  Synthetic
auuucagcaugagcuacugaguac

SEQ ID NO: 524504 - RNA, 18 nt, Artificial Sequence
  Synthetic
caucuggcuacugaguac

SEQ ID NO: 524505 - RNA, 19 nt, Artificial Sequence
  Synthetic
acaucuggcuacugaguac

SEQ ID NO: 524506 - RNA, 20 nt, Artificial Sequence
  Synthetic
aacaucuggcuacugaguac

SEQ ID NO: 524507 - RNA, 21 nt, Artificial Sequence
  Synthetic
caacaucuggcuacugaguac

SEQ ID NO: 524508 - RNA, 22 nt, Artificial Sequence
  Synthetic
gcaacaucuggcuacugaguac

SEQ ID NO: 524509 - RNA, 23 nt, Artificial Sequence
  Synthetic
ggcaacaucuggcuacugaguac

SEQ ID NO: 524510 - RNA, 24 nt, Artificial Sequence
  Synthetic
uggcaacaucuggcuacugaguac

SEQ ID NO: 524511 - RNA, 18 nt, Artificial Sequence
  Synthetic
caguuaucagcugaguac

SEQ ID NO: 524512 - RNA, 19 nt, Artificial Sequence
  Synthetic
ccaguuaucagcugaguac

SEQ ID NO: 524513 - RNA, 20 nt, Artificial Sequence
  Synthetic
gccaguuaucagcugaguac

SEQ ID NO: 524514 - RNA, 21 nt, Artificial Sequence
  Synthetic
ugccaguuaucagcugaguac

SEQ ID NO: 524515 - RNA, 22 nt, Artificial Sequence
  Synthetic
cugccaguuaucagcugaguac

SEQ ID NO: 524516 - RNA, 23 nt, Artificial Sequence
  Synthetic
gcugccaguuaucagcugaguac

SEQ ID NO: 524517 - RNA, 24 nt, Artificial Sequence
  Synthetic
ugcugccaguuaucagcugaguac

SEQ ID NO: 524518 - RNA, 18 nt, Artificial Sequence
  Synthetic
uccaccaugucauaguac

SEQ ID NO: 524519 - RNA, 19 nt, Artificial Sequence
  Synthetic
uuccaccaugucauaguac

SEQ ID NO: 524520 - RNA, 20 nt, Artificial Sequence
  Synthetic
uuuccaccaugucauaguac

SEQ ID NO: 524521 - RNA, 21 nt, Artificial Sequence
  Synthetic
uuuuccaccaugucauaguac

SEQ ID NO: 524522 - RNA, 22 nt, Artificial Sequence
  Synthetic
cuuuuccaccaugucauaguac

SEQ ID NO: 524523 - RNA, 23 nt, Artificial Sequence
  Synthetic
ucuuuuccaccaugucauaguac

SEQ ID NO: 524524 - RNA, 24 nt, Artificial Sequence
  Synthetic
uucuuuuccaccaugucauaguac

SEQ ID NO: 524525 - RNA, 18 nt, Artificial Sequence
  Synthetic
aguacaugaaauuaguac

SEQ ID NO: 524526 - RNA, 19 nt, Artificial Sequence
  Synthetic
caguacaugaaauuaguac

SEQ ID NO: 524527 - RNA, 20 nt, Artificial Sequence
  Synthetic
ccaguacaugaaauuaguac

SEQ ID NO: 524528 - RNA, 21 nt, Artificial Sequence
  Synthetic
cccaguacaugaaauuaguac

SEQ ID NO: 524529 - RNA, 22 nt, Artificial Sequence
  Synthetic
ucccaguacaugaaauuaguac

SEQ ID NO: 524530 - RNA, 23 nt, Artificial Sequence
  Synthetic
uucccaguacaugaaauuaguac

SEQ ID NO: 524531 - RNA, 24 nt, Artificial Sequence
  Synthetic
uuucccaguacaugaaauuaguac

SEQ ID NO: 524532 - RNA, 18 nt, Artificial Sequence
  Synthetic
ccuuguuuaacuuaguac

SEQ ID NO: 524533 - RNA, 19 nt, Artificial Sequence
  Synthetic
cccuuguuuaacuuaguac

SEQ ID NO: 524534 - RNA, 20 nt, Artificial Sequence
  Synthetic
acccuuguuuaacuuaguac

SEQ ID NO: 524535 - RNA, 21 nt, Artificial Sequence
  Synthetic
cacccuuguuuaacuuaguac

SEQ ID NO: 524536 - RNA, 22 nt, Artificial Sequence
  Synthetic
ccacccuuguuuaacuuaguac

SEQ ID NO: 524537 - RNA, 23 nt, Artificial Sequence
  Synthetic
cccacccuuguuuaacuuaguac

SEQ ID NO: 524538 - RNA, 24 nt, Artificial Sequence
  Synthetic
ccccacccuuguuuaacuuaguac

SEQ ID NO: 524539 - RNA, 18 nt, Artificial Sequence
  Synthetic
gaacucaaacaaacguac

SEQ ID NO: 524540 - RNA, 19 nt, Artificial Sequence
  Synthetic
ugaacucaaacaaacguac

SEQ ID NO: 524541 - RNA, 20 nt, Artificial Sequence
  Synthetic
augaacucaaacaaacguac

SEQ ID NO: 524542 - RNA, 21 nt, Artificial Sequence
  Synthetic
aaugaacucaaacaaacguac

SEQ ID NO: 524543 - RNA, 22 nt, Artificial Sequence
  Synthetic
caaugaacucaaacaaacguac

SEQ ID NO: 524544 - RNA, 23 nt, Artificial Sequence
  Synthetic
acaaugaacucaaacaaacguac

SEQ ID NO: 524545 - RNA, 24 nt, Artificial Sequence
  Synthetic
uacaaugaacucaaacaaacguac

SEQ ID NO: 524546 - RNA, 18 nt, Artificial Sequence
  Synthetic
uuaggagaaagcacguac

SEQ ID NO: 524547 - RNA, 19 nt, Artificial Sequence
  Synthetic
uuuaggagaaagcacguac

SEQ ID NO: 524548 - RNA, 20 nt, Artificial Sequence
  Synthetic
cuuuaggagaaagcacguac

SEQ ID NO: 524549 - RNA, 21 nt, Artificial Sequence
  Synthetic
gcuuuaggagaaagcacguac

SEQ ID NO: 524550 - RNA, 22 nt, Artificial Sequence
  Synthetic
ugcuuuaggagaaagcacguac

SEQ ID NO: 524551 - RNA, 23 nt, Artificial Sequence
  Synthetic
cugcuuuaggagaaagcacguac

SEQ ID NO: 524552 - RNA, 24 nt, Artificial Sequence
  Synthetic
ccugcuuuaggagaaagcacguac

SEQ ID NO: 524553 - RNA, 18 nt, Artificial Sequence
  Synthetic
guaacuuaaugaccguac

SEQ ID NO: 524554 - RNA, 19 nt, Artificial Sequence
  Synthetic
aguaacuuaaugaccguac

SEQ ID NO: 524555 - RNA, 20 nt, Artificial Sequence
  Synthetic
uaguaacuuaaugaccguac

SEQ ID NO: 524556 - RNA, 21 nt, Artificial Sequence
  Synthetic
guaguaacuuaaugaccguac

SEQ ID NO: 524557 - RNA, 22 nt, Artificial Sequence
  Synthetic
aguaguaacuuaaugaccguac

SEQ ID NO: 524558 - RNA, 23 nt, Artificial Sequence
  Synthetic
gaguaguaacuuaaugaccguac

SEQ ID NO: 524559 - RNA, 24 nt, Artificial Sequence
  Synthetic
ggaguaguaacuuaaugaccguac

SEQ ID NO: 524560 - RNA, 18 nt, Artificial Sequence
  Synthetic
uucuuuucaaaaucguac

SEQ ID NO: 524561 - RNA, 19 nt, Artificial Sequence
  Synthetic
cuucuuuucaaaaucguac

SEQ ID NO: 524562 - RNA, 20 nt, Artificial Sequence
  Synthetic
acuucuuuucaaaaucguac

SEQ ID NO: 524563 - RNA, 21 nt, Artificial Sequence
  Synthetic
cacuucuuuucaaaaucguac

SEQ ID NO: 524564 - RNA, 22 nt, Artificial Sequence
  Synthetic
ccacuucuuuucaaaaucguac

SEQ ID NO: 524565 - RNA, 23 nt, Artificial Sequence
  Synthetic
gccacuucuuuucaaaaucguac

SEQ ID NO: 524566 - RNA, 24 nt, Artificial Sequence
  Synthetic
ugccacuucuuuucaaaaucguac

SEQ ID NO: 524567 - RNA, 18 nt, Artificial Sequence
  Synthetic
agaagcaaugaaagguac

SEQ ID NO: 524568 - RNA, 19 nt, Artificial Sequence
  Synthetic
uagaagcaaugaaagguac

SEQ ID NO: 524569 - RNA, 20 nt, Artificial Sequence
  Synthetic
uuagaagcaaugaaagguac

SEQ ID NO: 524570 - RNA, 21 nt, Artificial Sequence
  Synthetic
cuuagaagcaaugaaagguac

SEQ ID NO: 524571 - RNA, 22 nt, Artificial Sequence
  Synthetic
acuuagaagcaaugaaagguac

SEQ ID NO: 524572 - RNA, 23 nt, Artificial Sequence
  Synthetic
aacuuagaagcaaugaaagguac

SEQ ID NO: 524573 - RNA, 24 nt, Artificial Sequence
  Synthetic
aaacuuagaagcaaugaaagguac

SEQ ID NO: 524574 - RNA, 18 nt, Artificial Sequence
  Synthetic
agauaaaugguaagguac

SEQ ID NO: 524575 - RNA, 19 nt, Artificial Sequence
  Synthetic
gagauaaaugguaagguac

SEQ ID NO: 524576 - RNA, 20 nt, Artificial Sequence
  Synthetic
ugagauaaaugguaagguac

SEQ ID NO: 524577 - RNA, 21 nt, Artificial Sequence
  Synthetic
uugagauaaaugguaagguac

SEQ ID NO: 524578 - RNA, 22 nt, Artificial Sequence
  Synthetic
uuugagauaaaugguaagguac

SEQ ID NO: 524579 - RNA, 23 nt, Artificial Sequence
  Synthetic
uuuugagauaaaugguaagguac

SEQ ID NO: 524580 - RNA, 24 nt, Artificial Sequence
  Synthetic
auuuugagauaaaugguaagguac

SEQ ID NO: 524581 - RNA, 18 nt, Artificial Sequence
  Synthetic
ccugauuaggucagguac

SEQ ID NO: 524582 - RNA, 19 nt, Artificial Sequence
  Synthetic
gccugauuaggucagguac

SEQ ID NO: 524583 - RNA, 20 nt, Artificial Sequence
  Synthetic
agccugauuaggucagguac

SEQ ID NO: 524584 - RNA, 21 nt, Artificial Sequence
  Synthetic
uagccugauuaggucagguac

SEQ ID NO: 524585 - RNA, 22 nt, Artificial Sequence
  Synthetic
cuagccugauuaggucagguac

SEQ ID NO: 524586 - RNA, 23 nt, Artificial Sequence
  Synthetic
gcuagccugauuaggucagguac

SEQ ID NO: 524587 - RNA, 24 nt, Artificial Sequence
  Synthetic
cgcuagccugauuaggucagguac

SEQ ID NO: 524588 - RNA, 18 nt, Artificial Sequence
  Synthetic
ugcaaucgcuauagguac

SEQ ID NO: 524589 - RNA, 19 nt, Artificial Sequence
  Synthetic
cugcaaucgcuauagguac

SEQ ID NO: 524590 - RNA, 20 nt, Artificial Sequence
  Synthetic
gcugcaaucgcuauagguac

SEQ ID NO: 524591 - RNA, 21 nt, Artificial Sequence
  Synthetic
ggcugcaaucgcuauagguac

SEQ ID NO: 524592 - RNA, 22 nt, Artificial Sequence
  Synthetic
uggcugcaaucgcuauagguac

SEQ ID NO: 524593 - RNA, 23 nt, Artificial Sequence
  Synthetic
auggcugcaaucgcuauagguac

SEQ ID NO: 524594 - RNA, 24 nt, Artificial Sequence
  Synthetic
uauggcugcaaucgcuauagguac

SEQ ID NO: 524595 - RNA, 18 nt, Artificial Sequence
  Synthetic
acauuggaaaguagguac

SEQ ID NO: 524596 - RNA, 19 nt, Artificial Sequence
  Synthetic
gacauuggaaaguagguac

SEQ ID NO: 524597 - RNA, 20 nt, Artificial Sequence
  Synthetic
agacauuggaaaguagguac

SEQ ID NO: 524598 - RNA, 21 nt, Artificial Sequence
  Synthetic
uagacauuggaaaguagguac

SEQ ID NO: 524599 - RNA, 22 nt, Artificial Sequence
  Synthetic
cuagacauuggaaaguagguac

SEQ ID NO: 524600 - RNA, 23 nt, Artificial Sequence
  Synthetic
acuagacauuggaaaguagguac

SEQ ID NO: 524601 - RNA, 24 nt, Artificial Sequence
  Synthetic
aacuagacauuggaaaguagguac

SEQ ID NO: 524602 - RNA, 18 nt, Artificial Sequence
  Synthetic
aauggggggaaaggguac

SEQ ID NO: 524603 - RNA, 19 nt, Artificial Sequence
  Synthetic
caauggggggaaaggguac

SEQ ID NO: 524604 - RNA, 20 nt, Artificial Sequence
  Synthetic
ccaauggggggaaaggguac

SEQ ID NO: 524605 - RNA, 21 nt, Artificial Sequence
  Synthetic
gccaauggggggaaaggguac

SEQ ID NO: 524606 - RNA, 22 nt, Artificial Sequence
  Synthetic
agccaauggggggaaaggguac

SEQ ID NO: 524607 - RNA, 23 nt, Artificial Sequence
  Synthetic
cagccaauggggggaaaggguac

SEQ ID NO: 524608 - RNA, 24 nt, Artificial Sequence
  Synthetic
ccagccaauggggggaaaggguac

SEQ ID NO: 524609 - RNA, 18 nt, Artificial Sequence
  Synthetic
uauguacuuguaggguac

SEQ ID NO: 524610 - RNA, 19 nt, Artificial Sequence
  Synthetic
guauguacuuguaggguac

SEQ ID NO: 524611 - RNA, 20 nt, Artificial Sequence
  Synthetic
uguauguacuuguaggguac

SEQ ID NO: 524612 - RNA, 21 nt, Artificial Sequence
  Synthetic
guguauguacuuguaggguac

SEQ ID NO: 524613 - RNA, 22 nt, Artificial Sequence
  Synthetic
aguguauguacuuguaggguac

SEQ ID NO: 524614 - RNA, 23 nt, Artificial Sequence
  Synthetic
aaguguauguacuuguaggguac

SEQ ID NO: 524615 - RNA, 24 nt, Artificial Sequence
  Synthetic
uaaguguauguacuuguaggguac

SEQ ID NO: 524616 - RNA, 18 nt, Artificial Sequence
  Synthetic
uauauauuuguaggguac

SEQ ID NO: 524617 - RNA, 19 nt, Artificial Sequence
  Synthetic
guauauauuuguaggguac

SEQ ID NO: 524618 - RNA, 20 nt, Artificial Sequence
  Synthetic
aguauauauuuguaggguac

SEQ ID NO: 524619 - RNA, 21 nt, Artificial Sequence
  Synthetic
gaguauauauuuguaggguac

SEQ ID NO: 524620 - RNA, 22 nt, Artificial Sequence
  Synthetic
ggaguauauauuuguaggguac

SEQ ID NO: 524621 - RNA, 23 nt, Artificial Sequence
  Synthetic
aggaguauauauuuguaggguac

SEQ ID NO: 524622 - RNA, 24 nt, Artificial Sequence
  Synthetic
uaggaguauauauuuguaggguac

SEQ ID NO: 524623 - RNA, 18 nt, Artificial Sequence
  Synthetic
gaaacugucuagggguac

SEQ ID NO: 524624 - RNA, 19 nt, Artificial Sequence
  Synthetic
agaaacugucuagggguac

SEQ ID NO: 524625 - RNA, 20 nt, Artificial Sequence
  Synthetic
gagaaacugucuagggguac

SEQ ID NO: 524626 - RNA, 21 nt, Artificial Sequence
  Synthetic
ggagaaacugucuagggguac

SEQ ID NO: 524627 - RNA, 22 nt, Artificial Sequence
  Synthetic
gggagaaacugucuagggguac

SEQ ID NO: 524628 - RNA, 23 nt, Artificial Sequence
  Synthetic
ugggagaaacugucuagggguac

SEQ ID NO: 524629 - RNA, 24 nt, Artificial Sequence
  Synthetic
uugggagaaacugucuagggguac

SEQ ID NO: 524630 - RNA, 18 nt, Artificial Sequence
  Synthetic
cauauauuuacgggguac

SEQ ID NO: 524631 - RNA, 19 nt, Artificial Sequence
  Synthetic
gcauauauuuacgggguac

SEQ ID NO: 524632 - RNA, 20 nt, Artificial Sequence
  Synthetic
ugcauauauuuacgggguac

SEQ ID NO: 524633 - RNA, 21 nt, Artificial Sequence
  Synthetic
gugcauauauuuacgggguac

SEQ ID NO: 524634 - RNA, 22 nt, Artificial Sequence
  Synthetic
ggugcauauauuuacgggguac

SEQ ID NO: 524635 - RNA, 23 nt, Artificial Sequence
  Synthetic
aggugcauauauuuacgggguac

SEQ ID NO: 524636 - RNA, 24 nt, Artificial Sequence
  Synthetic
uaggugcauauauuuacgggguac

SEQ ID NO: 524637 - RNA, 18 nt, Artificial Sequence
  Synthetic
uugccagugcugggguac

SEQ ID NO: 524638 - RNA, 19 nt, Artificial Sequence
  Synthetic
auugccagugcugggguac

SEQ ID NO: 524639 - RNA, 20 nt, Artificial Sequence
  Synthetic
uauugccagugcugggguac

SEQ ID NO: 524640 - RNA, 21 nt, Artificial Sequence
  Synthetic
auauugccagugcugggguac

SEQ ID NO: 524641 - RNA, 22 nt, Artificial Sequence
  Synthetic
cauauugccagugcugggguac

SEQ ID NO: 524642 - RNA, 23 nt, Artificial Sequence
  Synthetic
ucauauugccagugcugggguac

SEQ ID NO: 524643 - RNA, 24 nt, Artificial Sequence
  Synthetic
gucauauugccagugcugggguac

SEQ ID NO: 524644 - RNA, 18 nt, Artificial Sequence
  Synthetic
gacucagggcaaugguac

SEQ ID NO: 524645 - RNA, 19 nt, Artificial Sequence
  Synthetic
ugacucagggcaaugguac

SEQ ID NO: 524646 - RNA, 20 nt, Artificial Sequence
  Synthetic
uugacucagggcaaugguac

SEQ ID NO: 524647 - RNA, 21 nt, Artificial Sequence
  Synthetic
uuugacucagggcaaugguac

SEQ ID NO: 524648 - RNA, 22 nt, Artificial Sequence
  Synthetic
auuugacucagggcaaugguac

SEQ ID NO: 524649 - RNA, 23 nt, Artificial Sequence
  Synthetic
gauuugacucagggcaaugguac

SEQ ID NO: 524650 - RNA, 24 nt, Artificial Sequence
  Synthetic
ggauuugacucagggcaaugguac

SEQ ID NO: 524651 - RNA, 18 nt, Artificial Sequence
  Synthetic
agccaagguacaugguac

SEQ ID NO: 524652 - RNA, 19 nt, Artificial Sequence
  Synthetic
gagccaagguacaugguac

SEQ ID NO: 524653 - RNA, 20 nt, Artificial Sequence
  Synthetic
ggagccaagguacaugguac

SEQ ID NO: 524654 - RNA, 21 nt, Artificial Sequence
  Synthetic
gggagccaagguacaugguac

SEQ ID NO: 524655 - RNA, 22 nt, Artificial Sequence
  Synthetic
ugggagccaagguacaugguac

SEQ ID NO: 524656 - RNA, 23 nt, Artificial Sequence
  Synthetic
gugggagccaagguacaugguac

SEQ ID NO: 524657 - RNA, 24 nt, Artificial Sequence
  Synthetic
ggugggagccaagguacaugguac

SEQ ID NO: 524658 - RNA, 18 nt, Artificial Sequence
  Synthetic
uuugauagagccugguac

SEQ ID NO: 524659 - RNA, 19 nt, Artificial Sequence
  Synthetic
auuugauagagccugguac

SEQ ID NO: 524660 - RNA, 20 nt, Artificial Sequence
  Synthetic
aauuugauagagccugguac

SEQ ID NO: 524661 - RNA, 21 nt, Artificial Sequence
  Synthetic
aaauuugauagagccugguac

SEQ ID NO: 524662 - RNA, 22 nt, Artificial Sequence
  Synthetic
uaaauuugauagagccugguac

SEQ ID NO: 524663 - RNA, 23 nt, Artificial Sequence
  Synthetic
uuaaauuugauagagccugguac

SEQ ID NO: 524664 - RNA, 24 nt, Artificial Sequence
  Synthetic
auuaaauuugauagagccugguac

SEQ ID NO: 524665 - RNA, 18 nt, Artificial Sequence
  Synthetic
gcaaacagaagcugguac

SEQ ID NO: 524666 - RNA, 19 nt, Artificial Sequence
  Synthetic
agcaaacagaagcugguac

SEQ ID NO: 524667 - RNA, 20 nt, Artificial Sequence
  Synthetic
gagcaaacagaagcugguac

SEQ ID NO: 524668 - RNA, 21 nt, Artificial Sequence
  Synthetic
ugagcaaacagaagcugguac

SEQ ID NO: 524669 - RNA, 22 nt, Artificial Sequence
  Synthetic
uugagcaaacagaagcugguac

SEQ ID NO: 524670 - RNA, 23 nt, Artificial Sequence
  Synthetic
auugagcaaacagaagcugguac

SEQ ID NO: 524671 - RNA, 24 nt, Artificial Sequence
  Synthetic
aauugagcaaacagaagcugguac

SEQ ID NO: 524672 - RNA, 18 nt, Artificial Sequence
  Synthetic
gaagggaaacagugguac

SEQ ID NO: 524673 - RNA, 19 nt, Artificial Sequence
  Synthetic
ugaagggaaacagugguac

SEQ ID NO: 524674 - RNA, 20 nt, Artificial Sequence
  Synthetic
augaagggaaacagugguac

SEQ ID NO: 524675 - RNA, 21 nt, Artificial Sequence
  Synthetic
aaugaagggaaacagugguac

SEQ ID NO: 524676 - RNA, 22 nt, Artificial Sequence
  Synthetic
caaugaagggaaacagugguac

SEQ ID NO: 524677 - RNA, 23 nt, Artificial Sequence
  Synthetic
acaaugaagggaaacagugguac

SEQ ID NO: 524678 - RNA, 24 nt, Artificial Sequence
  Synthetic
uacaaugaagggaaacagugguac

SEQ ID NO: 524679 - RNA, 18 nt, Artificial Sequence
  Synthetic
uuucacuuuucuugguac

SEQ ID NO: 524680 - RNA, 19 nt, Artificial Sequence
  Synthetic
uuuucacuuuucuugguac

SEQ ID NO: 524681 - RNA, 20 nt, Artificial Sequence
  Synthetic
auuuucacuuuucuugguac

SEQ ID NO: 524682 - RNA, 21 nt, Artificial Sequence
  Synthetic
cauuuucacuuuucuugguac

SEQ ID NO: 524683 - RNA, 22 nt, Artificial Sequence
  Synthetic
ucauuuucacuuuucuugguac

SEQ ID NO: 524684 - RNA, 23 nt, Artificial Sequence
  Synthetic
gucauuuucacuuuucuugguac

SEQ ID NO: 524685 - RNA, 24 nt, Artificial Sequence
  Synthetic
agucauuuucacuuuucuugguac

SEQ ID NO: 524686 - RNA, 18 nt, Artificial Sequence
  Synthetic
uacagggcuucaauguac

SEQ ID NO: 524687 - RNA, 19 nt, Artificial Sequence
  Synthetic
guacagggcuucaauguac

SEQ ID NO: 524688 - RNA, 20 nt, Artificial Sequence
  Synthetic
aguacagggcuucaauguac

SEQ ID NO: 524689 - RNA, 21 nt, Artificial Sequence
  Synthetic
caguacagggcuucaauguac

SEQ ID NO: 524690 - RNA, 22 nt, Artificial Sequence
  Synthetic
gcaguacagggcuucaauguac

SEQ ID NO: 524691 - RNA, 23 nt, Artificial Sequence
  Synthetic
ugcaguacagggcuucaauguac

SEQ ID NO: 524692 - RNA, 24 nt, Artificial Sequence
  Synthetic
gugcaguacagggcuucaauguac

SEQ ID NO: 524693 - RNA, 18 nt, Artificial Sequence
  Synthetic
cucuuccuaaacauguac

SEQ ID NO: 524694 - RNA, 19 nt, Artificial Sequence
  Synthetic
acucuuccuaaacauguac

SEQ ID NO: 524695 - RNA, 20 nt, Artificial Sequence
  Synthetic
uacucuuccuaaacauguac

SEQ ID NO: 524696 - RNA, 21 nt, Artificial Sequence
  Synthetic
auacucuuccuaaacauguac

SEQ ID NO: 524697 - RNA, 22 nt, Artificial Sequence
  Synthetic
aauacucuuccuaaacauguac

SEQ ID NO: 524698 - RNA, 23 nt, Artificial Sequence
  Synthetic
gaauacucuuccuaaacauguac

SEQ ID NO: 524699 - RNA, 24 nt, Artificial Sequence
  Synthetic
ugaauacucuuccuaaacauguac

SEQ ID NO: 524700 - RNA, 18 nt, Artificial Sequence
  Synthetic
aaaagauacuccauguac

SEQ ID NO: 524701 - RNA, 19 nt, Artificial Sequence
  Synthetic
aaaaagauacuccauguac

SEQ ID NO: 524702 - RNA, 20 nt, Artificial Sequence
  Synthetic
aaaaaagauacuccauguac

SEQ ID NO: 524703 - RNA, 21 nt, Artificial Sequence
  Synthetic
gaaaaaagauacuccauguac

SEQ ID NO: 524704 - RNA, 22 nt, Artificial Sequence
  Synthetic
ugaaaaaagauacuccauguac

SEQ ID NO: 524705 - RNA, 23 nt, Artificial Sequence
  Synthetic
augaaaaaagauacuccauguac

SEQ ID NO: 524706 - RNA, 24 nt, Artificial Sequence
  Synthetic
gaugaaaaaagauacuccauguac

SEQ ID NO: 524707 - RNA, 18 nt, Artificial Sequence
  Synthetic
ggaagucccuucauguac

SEQ ID NO: 524708 - RNA, 19 nt, Artificial Sequence
  Synthetic
aggaagucccuucauguac

SEQ ID NO: 524709 - RNA, 20 nt, Artificial Sequence
  Synthetic
aaggaagucccuucauguac

SEQ ID NO: 524710 - RNA, 21 nt, Artificial Sequence
  Synthetic
aaaggaagucccuucauguac

SEQ ID NO: 524711 - RNA, 22 nt, Artificial Sequence
  Synthetic
aaaaggaagucccuucauguac

SEQ ID NO: 524712 - RNA, 23 nt, Artificial Sequence
  Synthetic
uaaaaggaagucccuucauguac

SEQ ID NO: 524713 - RNA, 24 nt, Artificial Sequence
  Synthetic
guaaaaggaagucccuucauguac

SEQ ID NO: 524714 - RNA, 18 nt, Artificial Sequence
  Synthetic
uauuuuguuaagauguac

SEQ ID NO: 524715 - RNA, 19 nt, Artificial Sequence
  Synthetic
guauuuuguuaagauguac

SEQ ID NO: 524716 - RNA, 20 nt, Artificial Sequence
  Synthetic
uguauuuuguuaagauguac

SEQ ID NO: 524717 - RNA, 21 nt, Artificial Sequence
  Synthetic
guguauuuuguuaagauguac

SEQ ID NO: 524718 - RNA, 22 nt, Artificial Sequence
  Synthetic
aguguauuuuguuaagauguac

SEQ ID NO: 524719 - RNA, 23 nt, Artificial Sequence
  Synthetic
aaguguauuuuguuaagauguac

SEQ ID NO: 524720 - RNA, 24 nt, Artificial Sequence
  Synthetic
aaaguguauuuuguuaagauguac

SEQ ID NO: 524721 - RNA, 18 nt, Artificial Sequence
  Synthetic
ccugacuucuauauguac

SEQ ID NO: 524722 - RNA, 19 nt, Artificial Sequence
  Synthetic
accugacuucuauauguac

SEQ ID NO: 524723 - RNA, 20 nt, Artificial Sequence
  Synthetic
caccugacuucuauauguac

SEQ ID NO: 524724 - RNA, 21 nt, Artificial Sequence
  Synthetic
acaccugacuucuauauguac

SEQ ID NO: 524725 - RNA, 22 nt, Artificial Sequence
  Synthetic
uacaccugacuucuauauguac

SEQ ID NO: 524726 - RNA, 23 nt, Artificial Sequence
  Synthetic
guacaccugacuucuauauguac

SEQ ID NO: 524727 - RNA, 24 nt, Artificial Sequence
  Synthetic
uguacaccugacuucuauauguac

SEQ ID NO: 524728 - RNA, 18 nt, Artificial Sequence
  Synthetic
aauggcauuauuauguac

SEQ ID NO: 524729 - RNA, 19 nt, Artificial Sequence
  Synthetic
aaauggcauuauuauguac

SEQ ID NO: 524730 - RNA, 20 nt, Artificial Sequence
  Synthetic
gaaauggcauuauuauguac

SEQ ID NO: 524731 - RNA, 21 nt, Artificial Sequence
  Synthetic
ggaaauggcauuauuauguac

SEQ ID NO: 524732 - RNA, 22 nt, Artificial Sequence
  Synthetic
gggaaauggcauuauuauguac

SEQ ID NO: 524733 - RNA, 23 nt, Artificial Sequence
  Synthetic
agggaaauggcauuauuauguac

SEQ ID NO: 524734 - RNA, 24 nt, Artificial Sequence
  Synthetic
aagggaaauggcauuauuauguac

SEQ ID NO: 524735 - RNA, 18 nt, Artificial Sequence
  Synthetic
uuuuucauucuuauguac

SEQ ID NO: 524736 - RNA, 19 nt, Artificial Sequence
  Synthetic
cuuuuucauucuuauguac

SEQ ID NO: 524737 - RNA, 20 nt, Artificial Sequence
  Synthetic
ucuuuuucauucuuauguac

SEQ ID NO: 524738 - RNA, 21 nt, Artificial Sequence
  Synthetic
uucuuuuucauucuuauguac

SEQ ID NO: 524739 - RNA, 22 nt, Artificial Sequence
  Synthetic
guucuuuuucauucuuauguac

SEQ ID NO: 524740 - RNA, 23 nt, Artificial Sequence
  Synthetic
uguucuuuuucauucuuauguac

SEQ ID NO: 524741 - RNA, 24 nt, Artificial Sequence
  Synthetic
uuguucuuuuucauucuuauguac

SEQ ID NO: 524742 - RNA, 18 nt, Artificial Sequence
  Synthetic
gcuggaaaguuuauguac

SEQ ID NO: 524743 - RNA, 19 nt, Artificial Sequence
  Synthetic
ugcuggaaaguuuauguac

SEQ ID NO: 524744 - RNA, 20 nt, Artificial Sequence
  Synthetic
gugcuggaaaguuuauguac

SEQ ID NO: 524745 - RNA, 21 nt, Artificial Sequence
  Synthetic
agugcuggaaaguuuauguac

SEQ ID NO: 524746 - RNA, 22 nt, Artificial Sequence
  Synthetic
aagugcuggaaaguuuauguac

SEQ ID NO: 524747 - RNA, 23 nt, Artificial Sequence
  Synthetic
gaagugcuggaaaguuuauguac

SEQ ID NO: 524748 - RNA, 24 nt, Artificial Sequence
  Synthetic
agaagugcuggaaaguuuauguac

SEQ ID NO: 524749 - RNA, 18 nt, Artificial Sequence
  Synthetic
uauaaaaucauacuguac

SEQ ID NO: 524750 - RNA, 19 nt, Artificial Sequence
  Synthetic
cuauaaaaucauacuguac

SEQ ID NO: 524751 - RNA, 20 nt, Artificial Sequence
  Synthetic
ccuauaaaaucauacuguac

SEQ ID NO: 524752 - RNA, 21 nt, Artificial Sequence
  Synthetic
uccuauaaaaucauacuguac

SEQ ID NO: 524753 - RNA, 22 nt, Artificial Sequence
  Synthetic
auccuauaaaaucauacuguac

SEQ ID NO: 524754 - RNA, 23 nt, Artificial Sequence
  Synthetic
uauccuauaaaaucauacuguac

SEQ ID NO: 524755 - RNA, 24 nt, Artificial Sequence
  Synthetic
cuauccuauaaaaucauacuguac

SEQ ID NO: 524756 - RNA, 18 nt, Artificial Sequence
  Synthetic
guguugacgaaccuguac

SEQ ID NO: 524757 - RNA, 19 nt, Artificial Sequence
  Synthetic
aguguugacgaaccuguac

SEQ ID NO: 524758 - RNA, 20 nt, Artificial Sequence
  Synthetic
gaguguugacgaaccuguac

SEQ ID NO: 524759 - RNA, 21 nt, Artificial Sequence
  Synthetic
agaguguugacgaaccuguac

SEQ ID NO: 524760 - RNA, 22 nt, Artificial Sequence
  Synthetic
gagaguguugacgaaccuguac

SEQ ID NO: 524761 - RNA, 23 nt, Artificial Sequence
  Synthetic
ggagaguguugacgaaccuguac

SEQ ID NO: 524762 - RNA, 24 nt, Artificial Sequence
  Synthetic
aggagaguguugacgaaccuguac

SEQ ID NO: 524763 - RNA, 18 nt, Artificial Sequence
  Synthetic
agaaugggggcccuguac

SEQ ID NO: 524764 - RNA, 19 nt, Artificial Sequence
  Synthetic
aagaaugggggcccuguac

SEQ ID NO: 524765 - RNA, 20 nt, Artificial Sequence
  Synthetic
aaagaaugggggcccuguac

SEQ ID NO: 524766 - RNA, 21 nt, Artificial Sequence
  Synthetic
caaagaaugggggcccuguac

SEQ ID NO: 524767 - RNA, 22 nt, Artificial Sequence
  Synthetic
ucaaagaaugggggcccuguac

SEQ ID NO: 524768 - RNA, 23 nt, Artificial Sequence
  Synthetic
uucaaagaaugggggcccuguac

SEQ ID NO: 524769 - RNA, 24 nt, Artificial Sequence
  Synthetic
uuucaaagaaugggggcccuguac

SEQ ID NO: 524770 - RNA, 18 nt, Artificial Sequence
  Synthetic
aucaugugaucccuguac

SEQ ID NO: 524771 - RNA, 19 nt, Artificial Sequence
  Synthetic
aaucaugugaucccuguac

SEQ ID NO: 524772 - RNA, 20 nt, Artificial Sequence
  Synthetic
caaucaugugaucccuguac

SEQ ID NO: 524773 - RNA, 21 nt, Artificial Sequence
  Synthetic
ucaaucaugugaucccuguac

SEQ ID NO: 524774 - RNA, 22 nt, Artificial Sequence
  Synthetic
aucaaucaugugaucccuguac

SEQ ID NO: 524775 - RNA, 23 nt, Artificial Sequence
  Synthetic
uaucaaucaugugaucccuguac

SEQ ID NO: 524776 - RNA, 24 nt, Artificial Sequence
  Synthetic
cuaucaaucaugugaucccuguac

SEQ ID NO: 524777 - RNA, 18 nt, Artificial Sequence
  Synthetic
cgguucugcaggcuguac

SEQ ID NO: 524778 - RNA, 19 nt, Artificial Sequence
  Synthetic
acgguucugcaggcuguac

SEQ ID NO: 524779 - RNA, 20 nt, Artificial Sequence
  Synthetic
uacgguucugcaggcuguac

SEQ ID NO: 524780 - RNA, 21 nt, Artificial Sequence
  Synthetic
uuacgguucugcaggcuguac

SEQ ID NO: 524781 - RNA, 22 nt, Artificial Sequence
  Synthetic
cuuacgguucugcaggcuguac

SEQ ID NO: 524782 - RNA, 23 nt, Artificial Sequence
  Synthetic
acuuacgguucugcaggcuguac

SEQ ID NO: 524783 - RNA, 24 nt, Artificial Sequence
  Synthetic
gacuuacgguucugcaggcuguac

SEQ ID NO: 524784 - RNA, 18 nt, Artificial Sequence
  Synthetic
uuaagucaaauaguguac

SEQ ID NO: 524785 - RNA, 19 nt, Artificial Sequence
  Synthetic
guuaagucaaauaguguac

SEQ ID NO: 524786 - RNA, 20 nt, Artificial Sequence
  Synthetic
aguuaagucaaauaguguac

SEQ ID NO: 524787 - RNA, 21 nt, Artificial Sequence
  Synthetic
caguuaagucaaauaguguac

SEQ ID NO: 524788 - RNA, 22 nt, Artificial Sequence
  Synthetic
ccaguuaagucaaauaguguac

SEQ ID NO: 524789 - RNA, 23 nt, Artificial Sequence
  Synthetic
accaguuaagucaaauaguguac

SEQ ID NO: 524790 - RNA, 24 nt, Artificial Sequence
  Synthetic
caccaguuaagucaaauaguguac

SEQ ID NO: 524791 - RNA, 18 nt, Artificial Sequence
  Synthetic
uacgucugauugguguac

SEQ ID NO: 524792 - RNA, 19 nt, Artificial Sequence
  Synthetic
cuacgucugauugguguac

SEQ ID NO: 524793 - RNA, 20 nt, Artificial Sequence
  Synthetic
ucuacgucugauugguguac

SEQ ID NO: 524794 - RNA, 21 nt, Artificial Sequence
  Synthetic
aucuacgucugauugguguac

SEQ ID NO: 524795 - RNA, 22 nt, Artificial Sequence
  Synthetic
aaucuacgucugauugguguac

SEQ ID NO: 524796 - RNA, 23 nt, Artificial Sequence
  Synthetic
aaaucuacgucugauugguguac

SEQ ID NO: 524797 - RNA, 24 nt, Artificial Sequence
  Synthetic
caaaucuacgucugauugguguac

SEQ ID NO: 524798 - RNA, 18 nt, Artificial Sequence
  Synthetic
aauguaaugucuguguac

SEQ ID NO: 524799 - RNA, 19 nt, Artificial Sequence
  Synthetic
uaauguaaugucuguguac

SEQ ID NO: 524800 - RNA, 20 nt, Artificial Sequence
  Synthetic
guaauguaaugucuguguac

SEQ ID NO: 524801 - RNA, 21 nt, Artificial Sequence
  Synthetic
uguaauguaaugucuguguac

SEQ ID NO: 524802 - RNA, 22 nt, Artificial Sequence
  Synthetic
guguaauguaaugucuguguac

SEQ ID NO: 524803 - RNA, 23 nt, Artificial Sequence
  Synthetic
uguguaauguaaugucuguguac

SEQ ID NO: 524804 - RNA, 24 nt, Artificial Sequence
  Synthetic
uuguguaauguaaugucuguguac

SEQ ID NO: 524805 - RNA, 18 nt, Artificial Sequence
  Synthetic
gaaucaugggaauuguac

SEQ ID NO: 524806 - RNA, 19 nt, Artificial Sequence
  Synthetic
agaaucaugggaauuguac

SEQ ID NO: 524807 - RNA, 20 nt, Artificial Sequence
  Synthetic
aagaaucaugggaauuguac

SEQ ID NO: 524808 - RNA, 21 nt, Artificial Sequence
  Synthetic
caagaaucaugggaauuguac

SEQ ID NO: 524809 - RNA, 22 nt, Artificial Sequence
  Synthetic
acaagaaucaugggaauuguac

SEQ ID NO: 524810 - RNA, 23 nt, Artificial Sequence
  Synthetic
uacaagaaucaugggaauuguac

SEQ ID NO: 524811 - RNA, 24 nt, Artificial Sequence
  Synthetic
guacaagaaucaugggaauuguac

SEQ ID NO: 524812 - RNA, 18 nt, Artificial Sequence
  Synthetic
ugcuuuucauuauuguac

SEQ ID NO: 524813 - RNA, 19 nt, Artificial Sequence
  Synthetic
augcuuuucauuauuguac

SEQ ID NO: 524814 - RNA, 20 nt, Artificial Sequence
  Synthetic
aaugcuuuucauuauuguac

SEQ ID NO: 524815 - RNA, 21 nt, Artificial Sequence
  Synthetic
uaaugcuuuucauuauuguac

SEQ ID NO: 524816 - RNA, 22 nt, Artificial Sequence
  Synthetic
auaaugcuuuucauuauuguac

SEQ ID NO: 524817 - RNA, 23 nt, Artificial Sequence
  Synthetic
aauaaugcuuuucauuauuguac

SEQ ID NO: 524818 - RNA, 24 nt, Artificial Sequence
  Synthetic
uaauaaugcuuuucauuauuguac

SEQ ID NO: 524819 - RNA, 18 nt, Artificial Sequence
  Synthetic
augugucagugguuguac

SEQ ID NO: 524820 - RNA, 19 nt, Artificial Sequence
  Synthetic
caugugucagugguuguac

SEQ ID NO: 524821 - RNA, 20 nt, Artificial Sequence
  Synthetic
ccaugugucagugguuguac

SEQ ID NO: 524822 - RNA, 21 nt, Artificial Sequence
  Synthetic
accaugugucagugguuguac

SEQ ID NO: 524823 - RNA, 22 nt, Artificial Sequence
  Synthetic
uaccaugugucagugguuguac

SEQ ID NO: 524824 - RNA, 23 nt, Artificial Sequence
  Synthetic
cuaccaugugucagugguuguac

SEQ ID NO: 524825 - RNA, 24 nt, Artificial Sequence
  Synthetic
acuaccaugugucagugguuguac

SEQ ID NO: 524826 - RNA, 18 nt, Artificial Sequence
  Synthetic
aauuguguucuguuguac

SEQ ID NO: 524827 - RNA, 19 nt, Artificial Sequence
  Synthetic
gaauuguguucuguuguac

SEQ ID NO: 524828 - RNA, 20 nt, Artificial Sequence
  Synthetic
ugaauuguguucuguuguac

SEQ ID NO: 524829 - RNA, 21 nt, Artificial Sequence
  Synthetic
augaauuguguucuguuguac

SEQ ID NO: 524830 - RNA, 22 nt, Artificial Sequence
  Synthetic
aaugaauuguguucuguuguac

SEQ ID NO: 524831 - RNA, 23 nt, Artificial Sequence
  Synthetic
uaaugaauuguguucuguuguac

SEQ ID NO: 524832 - RNA, 24 nt, Artificial Sequence
  Synthetic
auaaugaauuguguucuguuguac

SEQ ID NO: 524833 - RNA, 18 nt, Artificial Sequence
  Synthetic
uacaaaccagguuuguac

SEQ ID NO: 524834 - RNA, 19 nt, Artificial Sequence
  Synthetic
guacaaaccagguuuguac

SEQ ID NO: 524835 - RNA, 20 nt, Artificial Sequence
  Synthetic
aguacaaaccagguuuguac

SEQ ID NO: 524836 - RNA, 21 nt, Artificial Sequence
  Synthetic
uaguacaaaccagguuuguac

SEQ ID NO: 524837 - RNA, 22 nt, Artificial Sequence
  Synthetic
guaguacaaaccagguuuguac

SEQ ID NO: 524838 - RNA, 23 nt, Artificial Sequence
  Synthetic
aguaguacaaaccagguuuguac

SEQ ID NO: 524839 - RNA, 24 nt, Artificial Sequence
  Synthetic
gaguaguacaaaccagguuuguac

SEQ ID NO: 524840 - RNA, 18 nt, Artificial Sequence
  Synthetic
ugcuuuugaauuuuguac

SEQ ID NO: 524841 - RNA, 19 nt, Artificial Sequence
  Synthetic
augcuuuugaauuuuguac

SEQ ID NO: 524842 - RNA, 20 nt, Artificial Sequence
  Synthetic
aaugcuuuugaauuuuguac

SEQ ID NO: 524843 - RNA, 21 nt, Artificial Sequence
  Synthetic
caaugcuuuugaauuuuguac

SEQ ID NO: 524844 - RNA, 22 nt, Artificial Sequence
  Synthetic
ucaaugcuuuugaauuuuguac

SEQ ID NO: 524845 - RNA, 23 nt, Artificial Sequence
  Synthetic
uucaaugcuuuugaauuuuguac

SEQ ID NO: 524846 - RNA, 24 nt, Artificial Sequence
  Synthetic
uuucaaugcuuuugaauuuuguac

SEQ ID NO: 524847 - RNA, 18 nt, Artificial Sequence
  Synthetic
aguccuuaccuuuuguac

SEQ ID NO: 524848 - RNA, 19 nt, Artificial Sequence
  Synthetic
caguccuuaccuuuuguac

SEQ ID NO: 524849 - RNA, 20 nt, Artificial Sequence
  Synthetic
acaguccuuaccuuuuguac

SEQ ID NO: 524850 - RNA, 21 nt, Artificial Sequence
  Synthetic
uacaguccuuaccuuuuguac

SEQ ID NO: 524851 - RNA, 22 nt, Artificial Sequence
  Synthetic
guacaguccuuaccuuuuguac

SEQ ID NO: 524852 - RNA, 23 nt, Artificial Sequence
  Synthetic
uguacaguccuuaccuuuuguac

SEQ ID NO: 524853 - RNA, 24 nt, Artificial Sequence
  Synthetic
auguacaguccuuaccuuuuguac

SEQ ID NO: 524854 - RNA, 18 nt, Artificial Sequence
  Synthetic
aaaaauacaaaaaauuac

SEQ ID NO: 524855 - RNA, 19 nt, Artificial Sequence
  Synthetic
aaaaaauacaaaaaauuac

SEQ ID NO: 524856 - RNA, 20 nt, Artificial Sequence
  Synthetic
aaaaaaauacaaaaaauuac

SEQ ID NO: 524857 - RNA, 21 nt, Artificial Sequence
  Synthetic
uaaaaaaauacaaaaaauuac

SEQ ID NO: 524858 - RNA, 22 nt, Artificial Sequence
  Synthetic
cuaaaaaaauacaaaaaauuac

SEQ ID NO: 524859 - RNA, 23 nt, Artificial Sequence
  Synthetic
acuaaaaaaauacaaaaaauuac

SEQ ID NO: 524860 - RNA, 24 nt, Artificial Sequence
  Synthetic
uacuaaaaaaauacaaaaaauuac

SEQ ID NO: 524861 - RNA, 18 nt, Artificial Sequence
  Synthetic
acauaagguaaaaauuac

SEQ ID NO: 524862 - RNA, 19 nt, Artificial Sequence
  Synthetic
uacauaagguaaaaauuac

SEQ ID NO: 524863 - RNA, 20 nt, Artificial Sequence
  Synthetic
cuacauaagguaaaaauuac

SEQ ID NO: 524864 - RNA, 21 nt, Artificial Sequence
  Synthetic
ucuacauaagguaaaaauuac

SEQ ID NO: 524865 - RNA, 22 nt, Artificial Sequence
  Synthetic
uucuacauaagguaaaaauuac

SEQ ID NO: 524866 - RNA, 23 nt, Artificial Sequence
  Synthetic
auucuacauaagguaaaaauuac

SEQ ID NO: 524867 - RNA, 24 nt, Artificial Sequence
  Synthetic
cauucuacauaagguaaaaauuac

SEQ ID NO: 524868 - RNA, 18 nt, Artificial Sequence
  Synthetic
uguuaauugcaaaauuac

SEQ ID NO: 524869 - RNA, 19 nt, Artificial Sequence
  Synthetic
auguuaauugcaaaauuac

SEQ ID NO: 524870 - RNA, 20 nt, Artificial Sequence
  Synthetic
uauguuaauugcaaaauuac

SEQ ID NO: 524871 - RNA, 21 nt, Artificial Sequence
  Synthetic
guauguuaauugcaaaauuac

SEQ ID NO: 524872 - RNA, 22 nt, Artificial Sequence
  Synthetic
cguauguuaauugcaaaauuac

SEQ ID NO: 524873 - RNA, 23 nt, Artificial Sequence
  Synthetic
ccguauguuaauugcaaaauuac

SEQ ID NO: 524874 - RNA, 24 nt, Artificial Sequence
  Synthetic
accguauguuaauugcaaaauuac

SEQ ID NO: 524875 - RNA, 18 nt, Artificial Sequence
  Synthetic
acuaaaggagaaaauuac

SEQ ID NO: 524876 - RNA, 19 nt, Artificial Sequence
  Synthetic
aacuaaaggagaaaauuac

SEQ ID NO: 524877 - RNA, 20 nt, Artificial Sequence
  Synthetic
gaacuaaaggagaaaauuac

SEQ ID NO: 524878 - RNA, 21 nt, Artificial Sequence
  Synthetic
agaacuaaaggagaaaauuac

SEQ ID NO: 524879 - RNA, 22 nt, Artificial Sequence
  Synthetic
gagaacuaaaggagaaaauuac

SEQ ID NO: 524880 - RNA, 23 nt, Artificial Sequence
  Synthetic
agagaacuaaaggagaaaauuac

SEQ ID NO: 524881 - RNA, 24 nt, Artificial Sequence
  Synthetic
uagagaacuaaaggagaaaauuac

SEQ ID NO: 524882 - RNA, 18 nt, Artificial Sequence
  Synthetic
gacuugaauaccaauuac

SEQ ID NO: 524883 - RNA, 19 nt, Artificial Sequence
  Synthetic
agacuugaauaccaauuac

SEQ ID NO: 524884 - RNA, 20 nt, Artificial Sequence
  Synthetic
aagacuugaauaccaauuac

SEQ ID NO: 524885 - RNA, 21 nt, Artificial Sequence
  Synthetic
gaagacuugaauaccaauuac

SEQ ID NO: 524886 - RNA, 22 nt, Artificial Sequence
  Synthetic
ugaagacuugaauaccaauuac

SEQ ID NO: 524887 - RNA, 23 nt, Artificial Sequence
  Synthetic
uugaagacuugaauaccaauuac

SEQ ID NO: 524888 - RNA, 24 nt, Artificial Sequence
  Synthetic
cuugaagacuugaauaccaauuac

SEQ ID NO: 524889 - RNA, 18 nt, Artificial Sequence
  Synthetic
gcuugcacacccaauuac

SEQ ID NO: 524890 - RNA, 19 nt, Artificial Sequence
  Synthetic
ggcuugcacacccaauuac

SEQ ID NO: 524891 - RNA, 20 nt, Artificial Sequence
  Synthetic
uggcuugcacacccaauuac

SEQ ID NO: 524892 - RNA, 21 nt, Artificial Sequence
  Synthetic
guggcuugcacacccaauuac

SEQ ID NO: 524893 - RNA, 22 nt, Artificial Sequence
  Synthetic
gguggcuugcacacccaauuac

SEQ ID NO: 524894 - RNA, 23 nt, Artificial Sequence
  Synthetic
ugguggcuugcacacccaauuac

SEQ ID NO: 524895 - RNA, 24 nt, Artificial Sequence
  Synthetic
gugguggcuugcacacccaauuac

SEQ ID NO: 524896 - RNA, 18 nt, Artificial Sequence
  Synthetic
cucacagaaugcaauuac

SEQ ID NO: 524897 - RNA, 19 nt, Artificial Sequence
  Synthetic
ccucacagaaugcaauuac

SEQ ID NO: 524898 - RNA, 20 nt, Artificial Sequence
  Synthetic
cccucacagaaugcaauuac

SEQ ID NO: 524899 - RNA, 21 nt, Artificial Sequence
  Synthetic
gcccucacagaaugcaauuac

SEQ ID NO: 524900 - RNA, 22 nt, Artificial Sequence
  Synthetic
agcccucacagaaugcaauuac

SEQ ID NO: 524901 - RNA, 23 nt, Artificial Sequence
  Synthetic
aagcccucacagaaugcaauuac

SEQ ID NO: 524902 - RNA, 24 nt, Artificial Sequence
  Synthetic
gaagcccucacagaaugcaauuac

SEQ ID NO: 524903 - RNA, 18 nt, Artificial Sequence
  Synthetic
aaauuagaaaucaauuac

SEQ ID NO: 524904 - RNA, 19 nt, Artificial Sequence
  Synthetic
aaaauuagaaaucaauuac

SEQ ID NO: 524905 - RNA, 20 nt, Artificial Sequence
  Synthetic
uaaaauuagaaaucaauuac

SEQ ID NO: 524906 - RNA, 21 nt, Artificial Sequence
  Synthetic
auaaaauuagaaaucaauuac

SEQ ID NO: 524907 - RNA, 22 nt, Artificial Sequence
  Synthetic
uauaaaauuagaaaucaauuac

SEQ ID NO: 524908 - RNA, 23 nt, Artificial Sequence
  Synthetic
auauaaaauuagaaaucaauuac

SEQ ID NO: 524909 - RNA, 24 nt, Artificial Sequence
  Synthetic
aauauaaaauuagaaaucaauuac

SEQ ID NO: 524910 - RNA, 18 nt, Artificial Sequence
  Synthetic
cugaggcaggagaauuac

SEQ ID NO: 524911 - RNA, 19 nt, Artificial Sequence
  Synthetic
gcugaggcaggagaauuac

SEQ ID NO: 524912 - RNA, 20 nt, Artificial Sequence
  Synthetic
ggcugaggcaggagaauuac

SEQ ID NO: 524913 - RNA, 21 nt, Artificial Sequence
  Synthetic
aggcugaggcaggagaauuac

SEQ ID NO: 524914 - RNA, 22 nt, Artificial Sequence
  Synthetic
gaggcugaggcaggagaauuac

SEQ ID NO: 524915 - RNA, 23 nt, Artificial Sequence
  Synthetic
ggaggcugaggcaggagaauuac

SEQ ID NO: 524916 - RNA, 24 nt, Artificial Sequence
  Synthetic
gggaggcugaggcaggagaauuac

SEQ ID NO: 524917 - RNA, 18 nt, Artificial Sequence
  Synthetic
ucuuuguuguagaauuac

SEQ ID NO: 524918 - RNA, 19 nt, Artificial Sequence
  Synthetic
aucuuuguuguagaauuac

SEQ ID NO: 524919 - RNA, 20 nt, Artificial Sequence
  Synthetic
uaucuuuguuguagaauuac

SEQ ID NO: 524920 - RNA, 21 nt, Artificial Sequence
  Synthetic
auaucuuuguuguagaauuac

SEQ ID NO: 524921 - RNA, 22 nt, Artificial Sequence
  Synthetic
aauaucuuuguuguagaauuac

SEQ ID NO: 524922 - RNA, 23 nt, Artificial Sequence
  Synthetic
uaauaucuuuguuguagaauuac

SEQ ID NO: 524923 - RNA, 24 nt, Artificial Sequence
  Synthetic
auaauaucuuuguuguagaauuac

SEQ ID NO: 524924 - RNA, 18 nt, Artificial Sequence
  Synthetic
uggagguaauugaauuac

SEQ ID NO: 524925 - RNA, 19 nt, Artificial Sequence
  Synthetic
uuggagguaauugaauuac

SEQ ID NO: 524926 - RNA, 20 nt, Artificial Sequence
  Synthetic
guuggagguaauugaauuac

SEQ ID NO: 524927 - RNA, 21 nt, Artificial Sequence
  Synthetic
aguuggagguaauugaauuac

SEQ ID NO: 524928 - RNA, 22 nt, Artificial Sequence
  Synthetic
caguuggagguaauugaauuac

SEQ ID NO: 524929 - RNA, 23 nt, Artificial Sequence
  Synthetic
ccaguuggagguaauugaauuac

SEQ ID NO: 524930 - RNA, 24 nt, Artificial Sequence
  Synthetic
cccaguuggagguaauugaauuac

SEQ ID NO: 524931 - RNA, 18 nt, Artificial Sequence
  Synthetic
aauugaacauugaauuac

SEQ ID NO: 524932 - RNA, 19 nt, Artificial Sequence
  Synthetic
uaauugaacauugaauuac

SEQ ID NO: 524933 - RNA, 20 nt, Artificial Sequence
  Synthetic
uuaauugaacauugaauuac

SEQ ID NO: 524934 - RNA, 21 nt, Artificial Sequence
  Synthetic
auuaauugaacauugaauuac

SEQ ID NO: 524935 - RNA, 22 nt, Artificial Sequence
  Synthetic
uauuaauugaacauugaauuac

SEQ ID NO: 524936 - RNA, 23 nt, Artificial Sequence
  Synthetic
uuauuaauugaacauugaauuac

SEQ ID NO: 524937 - RNA, 24 nt, Artificial Sequence
  Synthetic
uuuauuaauugaacauugaauuac

SEQ ID NO: 524938 - RNA, 18 nt, Artificial Sequence
  Synthetic
aaauaauacaauaauuac

SEQ ID NO: 524939 - RNA, 19 nt, Artificial Sequence
  Synthetic
gaaauaauacaauaauuac

SEQ ID NO: 524940 - RNA, 20 nt, Artificial Sequence
  Synthetic
ggaaauaauacaauaauuac

SEQ ID NO: 524941 - RNA, 21 nt, Artificial Sequence
  Synthetic
aggaaauaauacaauaauuac

SEQ ID NO: 524942 - RNA, 22 nt, Artificial Sequence
  Synthetic
aaggaaauaauacaauaauuac

SEQ ID NO: 524943 - RNA, 23 nt, Artificial Sequence
  Synthetic
uaaggaaauaauacaauaauuac

SEQ ID NO: 524944 - RNA, 24 nt, Artificial Sequence
  Synthetic
guaaggaaauaauacaauaauuac

SEQ ID NO: 524945 - RNA, 18 nt, Artificial Sequence
  Synthetic
uauccagacuauaauuac

SEQ ID NO: 524946 - RNA, 19 nt, Artificial Sequence
  Synthetic
auauccagacuauaauuac

SEQ ID NO: 524947 - RNA, 20 nt, Artificial Sequence
  Synthetic
uauauccagacuauaauuac

SEQ ID NO: 524948 - RNA, 21 nt, Artificial Sequence
  Synthetic
guauauccagacuauaauuac

SEQ ID NO: 524949 - RNA, 22 nt, Artificial Sequence
  Synthetic
uguauauccagacuauaauuac

SEQ ID NO: 524950 - RNA, 23 nt, Artificial Sequence
  Synthetic
auguauauccagacuauaauuac

SEQ ID NO: 524951 - RNA, 24 nt, Artificial Sequence
  Synthetic
aauguauauccagacuauaauuac

SEQ ID NO: 524952 - RNA, 18 nt, Artificial Sequence
  Synthetic
gagaugguuuauaauuac

SEQ ID NO: 524953 - RNA, 19 nt, Artificial Sequence
  Synthetic
agagaugguuuauaauuac

SEQ ID NO: 524954 - RNA, 20 nt, Artificial Sequence
  Synthetic
aagagaugguuuauaauuac

SEQ ID NO: 524955 - RNA, 21 nt, Artificial Sequence
  Synthetic
caagagaugguuuauaauuac

SEQ ID NO: 524956 - RNA, 22 nt, Artificial Sequence
  Synthetic
acaagagaugguuuauaauuac

SEQ ID NO: 524957 - RNA, 23 nt, Artificial Sequence
  Synthetic
uacaagagaugguuuauaauuac

SEQ ID NO: 524958 - RNA, 24 nt, Artificial Sequence
  Synthetic
cuacaagagaugguuuauaauuac

SEQ ID NO: 524959 - RNA, 18 nt, Artificial Sequence
  Synthetic
uagaaacauucuaauuac

SEQ ID NO: 524960 - RNA, 19 nt, Artificial Sequence
  Synthetic
cuagaaacauucuaauuac

SEQ ID NO: 524961 - RNA, 20 nt, Artificial Sequence
  Synthetic
gcuagaaacauucuaauuac

SEQ ID NO: 524962 - RNA, 21 nt, Artificial Sequence
  Synthetic
agcuagaaacauucuaauuac

SEQ ID NO: 524963 - RNA, 22 nt, Artificial Sequence
  Synthetic
aagcuagaaacauucuaauuac

SEQ ID NO: 524964 - RNA, 23 nt, Artificial Sequence
  Synthetic
caagcuagaaacauucuaauuac

SEQ ID NO: 524965 - RNA, 24 nt, Artificial Sequence
  Synthetic
gcaagcuagaaacauucuaauuac

SEQ ID NO: 524966 - RNA, 18 nt, Artificial Sequence
  Synthetic
aggccuuuaauuaauuac

SEQ ID NO: 524967 - RNA, 19 nt, Artificial Sequence
  Synthetic
caggccuuuaauuaauuac

SEQ ID NO: 524968 - RNA, 20 nt, Artificial Sequence
  Synthetic
ucaggccuuuaauuaauuac

SEQ ID NO: 524969 - RNA, 21 nt, Artificial Sequence
  Synthetic
uucaggccuuuaauuaauuac

SEQ ID NO: 524970 - RNA, 22 nt, Artificial Sequence
  Synthetic
auucaggccuuuaauuaauuac

SEQ ID NO: 524971 - RNA, 23 nt, Artificial Sequence
  Synthetic
uauucaggccuuuaauuaauuac

SEQ ID NO: 524972 - RNA, 24 nt, Artificial Sequence
  Synthetic
cuauucaggccuuuaauuaauuac

SEQ ID NO: 524973 - RNA, 18 nt, Artificial Sequence
  Synthetic
aacucuagcauuaauuac

SEQ ID NO: 524974 - RNA, 19 nt, Artificial Sequence
  Synthetic
aaacucuagcauuaauuac

SEQ ID NO: 524975 - RNA, 20 nt, Artificial Sequence
  Synthetic
uaaacucuagcauuaauuac

SEQ ID NO: 524976 - RNA, 21 nt, Artificial Sequence
  Synthetic
auaaacucuagcauuaauuac

SEQ ID NO: 524977 - RNA, 22 nt, Artificial Sequence
  Synthetic
aauaaacucuagcauuaauuac

SEQ ID NO: 524978 - RNA, 23 nt, Artificial Sequence
  Synthetic
uaauaaacucuagcauuaauuac

SEQ ID NO: 524979 - RNA, 24 nt, Artificial Sequence
  Synthetic
cuaauaaacucuagcauuaauuac

SEQ ID NO: 524980 - RNA, 18 nt, Artificial Sequence
  Synthetic
cucuccaaacuuaauuac

SEQ ID NO: 524981 - RNA, 19 nt, Artificial Sequence
  Synthetic
ucucuccaaacuuaauuac

SEQ ID NO: 524982 - RNA, 20 nt, Artificial Sequence
  Synthetic
cucucuccaaacuuaauuac

SEQ ID NO: 524983 - RNA, 21 nt, Artificial Sequence
  Synthetic
gcucucuccaaacuuaauuac

SEQ ID NO: 524984 - RNA, 22 nt, Artificial Sequence
  Synthetic
ugcucucuccaaacuuaauuac

SEQ ID NO: 524985 - RNA, 23 nt, Artificial Sequence
  Synthetic
uugcucucuccaaacuuaauuac

SEQ ID NO: 524986 - RNA, 24 nt, Artificial Sequence
  Synthetic
cuugcucucuccaaacuuaauuac

SEQ ID NO: 524987 - RNA, 18 nt, Artificial Sequence
  Synthetic
aagaucuauauacauuac

SEQ ID NO: 524988 - RNA, 19 nt, Artificial Sequence
  Synthetic
uaagaucuauauacauuac

SEQ ID NO: 524989 - RNA, 20 nt, Artificial Sequence
  Synthetic
auaagaucuauauacauuac

SEQ ID NO: 524990 - RNA, 21 nt, Artificial Sequence
  Synthetic
uauaagaucuauauacauuac

SEQ ID NO: 524991 - RNA, 22 nt, Artificial Sequence
  Synthetic
guauaagaucuauauacauuac

SEQ ID NO: 524992 - RNA, 23 nt, Artificial Sequence
  Synthetic
uguauaagaucuauauacauuac

SEQ ID NO: 524993 - RNA, 24 nt, Artificial Sequence
  Synthetic
auguauaagaucuauauacauuac

SEQ ID NO: 524994 - RNA, 18 nt, Artificial Sequence
  Synthetic
auuccuauuccccauuac

SEQ ID NO: 524995 - RNA, 19 nt, Artificial Sequence
  Synthetic
uauuccuauuccccauuac

SEQ ID NO: 524996 - RNA, 20 nt, Artificial Sequence
  Synthetic
uuauuccuauuccccauuac

SEQ ID NO: 524997 - RNA, 21 nt, Artificial Sequence
  Synthetic
guuauuccuauuccccauuac

SEQ ID NO: 524998 - RNA, 22 nt, Artificial Sequence
  Synthetic
aguuauuccuauuccccauuac

SEQ ID NO: 524999 - RNA, 23 nt, Artificial Sequence
  Synthetic
aaguuauuccuauuccccauuac

SEQ ID NO: 525000 - RNA, 24 nt, Artificial Sequence
  Synthetic
aaaguuauuccuauuccccauuac

SEQ ID NO: 525001 - RNA, 18 nt, Artificial Sequence
  Synthetic
augguuuccgagcauuac

SEQ ID NO: 525002 - RNA, 19 nt, Artificial Sequence
  Synthetic
aaugguuuccgagcauuac

SEQ ID NO: 525003 - RNA, 20 nt, Artificial Sequence
  Synthetic
aaaugguuuccgagcauuac

SEQ ID NO: 525004 - RNA, 21 nt, Artificial Sequence
  Synthetic
aaaaugguuuccgagcauuac

SEQ ID NO: 525005 - RNA, 22 nt, Artificial Sequence
  Synthetic
uaaaaugguuuccgagcauuac

SEQ ID NO: 525006 - RNA, 23 nt, Artificial Sequence
  Synthetic
cuaaaaugguuuccgagcauuac

SEQ ID NO: 525007 - RNA, 24 nt, Artificial Sequence
  Synthetic
gcuaaaaugguuuccgagcauuac

SEQ ID NO: 525008 - RNA, 18 nt, Artificial Sequence
  Synthetic
guuucaugcaggcauuac

SEQ ID NO: 525009 - RNA, 19 nt, Artificial Sequence
  Synthetic
uguuucaugcaggcauuac

SEQ ID NO: 525010 - RNA, 20 nt, Artificial Sequence
  Synthetic
uuguuucaugcaggcauuac

SEQ ID NO: 525011 - RNA, 21 nt, Artificial Sequence
  Synthetic
uuuguuucaugcaggcauuac

SEQ ID NO: 525012 - RNA, 22 nt, Artificial Sequence
  Synthetic
guuuguuucaugcaggcauuac

SEQ ID NO: 525013 - RNA, 23 nt, Artificial Sequence
  Synthetic
aguuuguuucaugcaggcauuac

SEQ ID NO: 525014 - RNA, 24 nt, Artificial Sequence
  Synthetic
uaguuuguuucaugcaggcauuac

SEQ ID NO: 525015 - RNA, 18 nt, Artificial Sequence
  Synthetic
ugacuguuuauucauuac

SEQ ID NO: 525016 - RNA, 19 nt, Artificial Sequence
  Synthetic
uugacuguuuauucauuac

SEQ ID NO: 525017 - RNA, 20 nt, Artificial Sequence
  Synthetic
uuugacuguuuauucauuac

SEQ ID NO: 525018 - RNA, 21 nt, Artificial Sequence
  Synthetic
auuugacuguuuauucauuac

SEQ ID NO: 525019 - RNA, 22 nt, Artificial Sequence
  Synthetic
gauuugacuguuuauucauuac

SEQ ID NO: 525020 - RNA, 23 nt, Artificial Sequence
  Synthetic
agauuugacuguuuauucauuac

SEQ ID NO: 525021 - RNA, 24 nt, Artificial Sequence
  Synthetic
aagauuugacuguuuauucauuac

SEQ ID NO: 525022 - RNA, 18 nt, Artificial Sequence
  Synthetic
caaaucaaugcagauuac

SEQ ID NO: 525023 - RNA, 19 nt, Artificial Sequence
  Synthetic
gcaaaucaaugcagauuac

SEQ ID NO: 525024 - RNA, 20 nt, Artificial Sequence
  Synthetic
agcaaaucaaugcagauuac

SEQ ID NO: 525025 - RNA, 21 nt, Artificial Sequence
  Synthetic
uagcaaaucaaugcagauuac

SEQ ID NO: 525026 - RNA, 22 nt, Artificial Sequence
  Synthetic
guagcaaaucaaugcagauuac

SEQ ID NO: 525027 - RNA, 23 nt, Artificial Sequence
  Synthetic
gguagcaaaucaaugcagauuac

SEQ ID NO: 525028 - RNA, 24 nt, Artificial Sequence
  Synthetic
agguagcaaaucaaugcagauuac

SEQ ID NO: 525029 - RNA, 18 nt, Artificial Sequence
  Synthetic
gagcugagauuagauuac

SEQ ID NO: 525030 - RNA, 19 nt, Artificial Sequence
  Synthetic
agagcugagauuagauuac

SEQ ID NO: 525031 - RNA, 20 nt, Artificial Sequence
  Synthetic
cagagcugagauuagauuac

SEQ ID NO: 525032 - RNA, 21 nt, Artificial Sequence
  Synthetic
acagagcugagauuagauuac

SEQ ID NO: 525033 - RNA, 22 nt, Artificial Sequence
  Synthetic
gacagagcugagauuagauuac

SEQ ID NO: 525034 - RNA, 23 nt, Artificial Sequence
  Synthetic
ggacagagcugagauuagauuac

SEQ ID NO: 525035 - RNA, 24 nt, Artificial Sequence
  Synthetic
aggacagagcugagauuagauuac

SEQ ID NO: 525036 - RNA, 18 nt, Artificial Sequence
  Synthetic
aaucugauuuacgauuac

SEQ ID NO: 525037 - RNA, 19 nt, Artificial Sequence
  Synthetic
caaucugauuuacgauuac

SEQ ID NO: 525038 - RNA, 20 nt, Artificial Sequence
  Synthetic
ccaaucugauuuacgauuac

SEQ ID NO: 525039 - RNA, 21 nt, Artificial Sequence
  Synthetic
cccaaucugauuuacgauuac

SEQ ID NO: 525040 - RNA, 22 nt, Artificial Sequence
  Synthetic
ccccaaucugauuuacgauuac

SEQ ID NO: 525041 - RNA, 23 nt, Artificial Sequence
  Synthetic
gccccaaucugauuuacgauuac

SEQ ID NO: 525042 - RNA, 24 nt, Artificial Sequence
  Synthetic
ugccccaaucugauuuacgauuac

SEQ ID NO: 525043 - RNA, 18 nt, Artificial Sequence
  Synthetic
cucaugagcuuugauuac

SEQ ID NO: 525044 - RNA, 19 nt, Artificial Sequence
  Synthetic
acucaugagcuuugauuac

SEQ ID NO: 525045 - RNA, 20 nt, Artificial Sequence
  Synthetic
cacucaugagcuuugauuac

SEQ ID NO: 525046 - RNA, 21 nt, Artificial Sequence
  Synthetic
acacucaugagcuuugauuac

SEQ ID NO: 525047 - RNA, 22 nt, Artificial Sequence
  Synthetic
gacacucaugagcuuugauuac

SEQ ID NO: 525048 - RNA, 23 nt, Artificial Sequence
  Synthetic
ugacacucaugagcuuugauuac

SEQ ID NO: 525049 - RNA, 24 nt, Artificial Sequence
  Synthetic
cugacacucaugagcuuugauuac

SEQ ID NO: 525050 - RNA, 18 nt, Artificial Sequence
  Synthetic
ucagguuucaaauauuac

SEQ ID NO: 525051 - RNA, 19 nt, Artificial Sequence
  Synthetic
gucagguuucaaauauuac

SEQ ID NO: 525052 - RNA, 20 nt, Artificial Sequence
  Synthetic
ugucagguuucaaauauuac

SEQ ID NO: 525053 - RNA, 21 nt, Artificial Sequence
  Synthetic
uugucagguuucaaauauuac

SEQ ID NO: 525054 - RNA, 22 nt, Artificial Sequence
  Synthetic
cuugucagguuucaaauauuac

SEQ ID NO: 525055 - RNA, 23 nt, Artificial Sequence
  Synthetic
acuugucagguuucaaauauuac

SEQ ID NO: 525056 - RNA, 24 nt, Artificial Sequence
  Synthetic
uacuugucagguuucaaauauuac

SEQ ID NO: 525057 - RNA, 18 nt, Artificial Sequence
  Synthetic
auacugugucaauauuac

SEQ ID NO: 525058 - RNA, 19 nt, Artificial Sequence
  Synthetic
gauacugugucaauauuac

SEQ ID NO: 525059 - RNA, 20 nt, Artificial Sequence
  Synthetic
ugauacugugucaauauuac

SEQ ID NO: 525060 - RNA, 21 nt, Artificial Sequence
  Synthetic
uugauacugugucaauauuac

SEQ ID NO: 525061 - RNA, 22 nt, Artificial Sequence
  Synthetic
auugauacugugucaauauuac

SEQ ID NO: 525062 - RNA, 23 nt, Artificial Sequence
  Synthetic
uauugauacugugucaauauuac

SEQ ID NO: 525063 - RNA, 24 nt, Artificial Sequence
  Synthetic
auauugauacugugucaauauuac

SEQ ID NO: 525064 - RNA, 18 nt, Artificial Sequence
  Synthetic
gaauuuuuugaauauuac

SEQ ID NO: 525065 - RNA, 19 nt, Artificial Sequence
  Synthetic
ugaauuuuuugaauauuac

SEQ ID NO: 525066 - RNA, 20 nt, Artificial Sequence
  Synthetic
cugaauuuuuugaauauuac

SEQ ID NO: 525067 - RNA, 21 nt, Artificial Sequence
  Synthetic
gcugaauuuuuugaauauuac

SEQ ID NO: 525068 - RNA, 22 nt, Artificial Sequence
  Synthetic
ugcugaauuuuuugaauauuac

SEQ ID NO: 525069 - RNA, 23 nt, Artificial Sequence
  Synthetic
cugcugaauuuuuugaauauuac

SEQ ID NO: 525070 - RNA, 24 nt, Artificial Sequence
  Synthetic
ccugcugaauuuuuugaauauuac

SEQ ID NO: 525071 - RNA, 18 nt, Artificial Sequence
  Synthetic
uagugugcaggauauuac

SEQ ID NO: 525072 - RNA, 19 nt, Artificial Sequence
  Synthetic
guagugugcaggauauuac

SEQ ID NO: 525073 - RNA, 20 nt, Artificial Sequence
  Synthetic
cguagugugcaggauauuac

SEQ ID NO: 525074 - RNA, 21 nt, Artificial Sequence
  Synthetic
acguagugugcaggauauuac

SEQ ID NO: 525075 - RNA, 22 nt, Artificial Sequence
  Synthetic
uacguagugugcaggauauuac

SEQ ID NO: 525076 - RNA, 23 nt, Artificial Sequence
  Synthetic
guacguagugugcaggauauuac

SEQ ID NO: 525077 - RNA, 24 nt, Artificial Sequence
  Synthetic
uguacguagugugcaggauauuac

SEQ ID NO: 525078 - RNA, 18 nt, Artificial Sequence
  Synthetic
aucccagugggauauuac

SEQ ID NO: 525079 - RNA, 19 nt, Artificial Sequence
  Synthetic
aaucccagugggauauuac

SEQ ID NO: 525080 - RNA, 20 nt, Artificial Sequence
  Synthetic
uaaucccagugggauauuac

SEQ ID NO: 525081 - RNA, 21 nt, Artificial Sequence
  Synthetic
cuaaucccagugggauauuac

SEQ ID NO: 525082 - RNA, 22 nt, Artificial Sequence
  Synthetic
ccuaaucccagugggauauuac

SEQ ID NO: 525083 - RNA, 23 nt, Artificial Sequence
  Synthetic
gccuaaucccagugggauauuac

SEQ ID NO: 525084 - RNA, 24 nt, Artificial Sequence
  Synthetic
ugccuaaucccagugggauauuac

SEQ ID NO: 525085 - RNA, 18 nt, Artificial Sequence
  Synthetic
ggcaacaugaacuauuac

SEQ ID NO: 525086 - RNA, 19 nt, Artificial Sequence
  Synthetic
aggcaacaugaacuauuac

SEQ ID NO: 525087 - RNA, 20 nt, Artificial Sequence
  Synthetic
aaggcaacaugaacuauuac

SEQ ID NO: 525088 - RNA, 21 nt, Artificial Sequence
  Synthetic
uaaggcaacaugaacuauuac

SEQ ID NO: 525089 - RNA, 22 nt, Artificial Sequence
  Synthetic
uuaaggcaacaugaacuauuac

SEQ ID NO: 525090 - RNA, 23 nt, Artificial Sequence
  Synthetic
auuaaggcaacaugaacuauuac

SEQ ID NO: 525091 - RNA, 24 nt, Artificial Sequence
  Synthetic
uauuaaggcaacaugaacuauuac

SEQ ID NO: 525092 - RNA, 18 nt, Artificial Sequence
  Synthetic
aggaggugucacuauuac

SEQ ID NO: 525093 - RNA, 19 nt, Artificial Sequence
  Synthetic
aaggaggugucacuauuac

SEQ ID NO: 525094 - RNA, 20 nt, Artificial Sequence
  Synthetic
gaaggaggugucacuauuac

SEQ ID NO: 525095 - RNA, 21 nt, Artificial Sequence
  Synthetic
ugaaggaggugucacuauuac

SEQ ID NO: 525096 - RNA, 22 nt, Artificial Sequence
  Synthetic
cugaaggaggugucacuauuac

SEQ ID NO: 525097 - RNA, 23 nt, Artificial Sequence
  Synthetic
gcugaaggaggugucacuauuac

SEQ ID NO: 525098 - RNA, 24 nt, Artificial Sequence
  Synthetic
ugcugaaggaggugucacuauuac

SEQ ID NO: 525099 - RNA, 18 nt, Artificial Sequence
  Synthetic
guuaagaguguguauuac

SEQ ID NO: 525100 - RNA, 19 nt, Artificial Sequence
  Synthetic
aguuaagaguguguauuac

SEQ ID NO: 525101 - RNA, 20 nt, Artificial Sequence
  Synthetic
gaguuaagaguguguauuac

SEQ ID NO: 525102 - RNA, 21 nt, Artificial Sequence
  Synthetic
ugaguuaagaguguguauuac

SEQ ID NO: 525103 - RNA, 22 nt, Artificial Sequence
  Synthetic
uugaguuaagaguguguauuac

SEQ ID NO: 525104 - RNA, 23 nt, Artificial Sequence
  Synthetic
auugaguuaagaguguguauuac

SEQ ID NO: 525105 - RNA, 24 nt, Artificial Sequence
  Synthetic
aauugaguuaagaguguguauuac

SEQ ID NO: 525106 - RNA, 18 nt, Artificial Sequence
  Synthetic
ugguauuauuauuauuac

SEQ ID NO: 525107 - RNA, 19 nt, Artificial Sequence
  Synthetic
uugguauuauuauuauuac

SEQ ID NO: 525108 - RNA, 20 nt, Artificial Sequence
  Synthetic
cuugguauuauuauuauuac

SEQ ID NO: 525109 - RNA, 21 nt, Artificial Sequence
  Synthetic
ucuugguauuauuauuauuac

SEQ ID NO: 525110 - RNA, 22 nt, Artificial Sequence
  Synthetic
uucuugguauuauuauuauuac

SEQ ID NO: 525111 - RNA, 23 nt, Artificial Sequence
  Synthetic
cuucuugguauuauuauuauuac

SEQ ID NO: 525112 - RNA, 24 nt, Artificial Sequence
  Synthetic
ucuucuugguauuauuauuauuac

SEQ ID NO: 525113 - RNA, 18 nt, Artificial Sequence
  Synthetic
cugcauaugcuuuauuac

SEQ ID NO: 525114 - RNA, 19 nt, Artificial Sequence
  Synthetic
ucugcauaugcuuuauuac

SEQ ID NO: 525115 - RNA, 20 nt, Artificial Sequence
  Synthetic
uucugcauaugcuuuauuac

SEQ ID NO: 525116 - RNA, 21 nt, Artificial Sequence
  Synthetic
auucugcauaugcuuuauuac

SEQ ID NO: 525117 - RNA, 22 nt, Artificial Sequence
  Synthetic
cauucugcauaugcuuuauuac

SEQ ID NO: 525118 - RNA, 23 nt, Artificial Sequence
  Synthetic
ucauucugcauaugcuuuauuac

SEQ ID NO: 525119 - RNA, 24 nt, Artificial Sequence
  Synthetic
aucauucugcauaugcuuuauuac

SEQ ID NO: 525120 - RNA, 18 nt, Artificial Sequence
  Synthetic
ugaauaaucuuuuauuac

SEQ ID NO: 525121 - RNA, 19 nt, Artificial Sequence
  Synthetic
uugaauaaucuuuuauuac

SEQ ID NO: 525122 - RNA, 20 nt, Artificial Sequence
  Synthetic
uuugaauaaucuuuuauuac

SEQ ID NO: 525123 - RNA, 21 nt, Artificial Sequence
  Synthetic
uuuugaauaaucuuuuauuac

SEQ ID NO: 525124 - RNA, 22 nt, Artificial Sequence
  Synthetic
uuuuugaauaaucuuuuauuac

SEQ ID NO: 525125 - RNA, 23 nt, Artificial Sequence
  Synthetic
uuuuuugaauaaucuuuuauuac

SEQ ID NO: 525126 - RNA, 24 nt, Artificial Sequence
  Synthetic
guuuuuugaauaaucuuuuauuac

SEQ ID NO: 525127 - RNA, 18 nt, Artificial Sequence
  Synthetic
gaacucaaacaaacuuac

SEQ ID NO: 525128 - RNA, 19 nt, Artificial Sequence
  Synthetic
agaacucaaacaaacuuac

SEQ ID NO: 525129 - RNA, 20 nt, Artificial Sequence
  Synthetic
aagaacucaaacaaacuuac

SEQ ID NO: 525130 - RNA, 21 nt, Artificial Sequence
  Synthetic
aaagaacucaaacaaacuuac

SEQ ID NO: 525131 - RNA, 22 nt, Artificial Sequence
  Synthetic
caaagaacucaaacaaacuuac

SEQ ID NO: 525132 - RNA, 23 nt, Artificial Sequence
  Synthetic
acaaagaacucaaacaaacuuac

SEQ ID NO: 525133 - RNA, 24 nt, Artificial Sequence
  Synthetic
uacaaagaacucaaacaaacuuac

SEQ ID NO: 525134 - RNA, 18 nt, Artificial Sequence
  Synthetic
uggaaauauuaaacuuac

SEQ ID NO: 525135 - RNA, 19 nt, Artificial Sequence
  Synthetic
cuggaaauauuaaacuuac

SEQ ID NO: 525136 - RNA, 20 nt, Artificial Sequence
  Synthetic
ccuggaaauauuaaacuuac

SEQ ID NO: 525137 - RNA, 21 nt, Artificial Sequence
  Synthetic
uccuggaaauauuaaacuuac

SEQ ID NO: 525138 - RNA, 22 nt, Artificial Sequence
  Synthetic
auccuggaaauauuaaacuuac

SEQ ID NO: 525139 - RNA, 23 nt, Artificial Sequence
  Synthetic
aauccuggaaauauuaaacuuac

SEQ ID NO: 525140 - RNA, 24 nt, Artificial Sequence
  Synthetic
aaauccuggaaauauuaaacuuac

SEQ ID NO: 525141 - RNA, 18 nt, Artificial Sequence
  Synthetic
ccuacaaauacaacuuac

SEQ ID NO: 525142 - RNA, 19 nt, Artificial Sequence
  Synthetic
accuacaaauacaacuuac

SEQ ID NO: 525143 - RNA, 20 nt, Artificial Sequence
  Synthetic
uaccuacaaauacaacuuac

SEQ ID NO: 525144 - RNA, 21 nt, Artificial Sequence
  Synthetic
auaccuacaaauacaacuuac

SEQ ID NO: 525145 - RNA, 22 nt, Artificial Sequence
  Synthetic
aauaccuacaaauacaacuuac

SEQ ID NO: 525146 - RNA, 23 nt, Artificial Sequence
  Synthetic
aaauaccuacaaauacaacuuac

SEQ ID NO: 525147 - RNA, 24 nt, Artificial Sequence
  Synthetic
aaaauaccuacaaauacaacuuac

SEQ ID NO: 525148 - RNA, 18 nt, Artificial Sequence
  Synthetic
ccuaggaauacaacuuac

SEQ ID NO: 525149 - RNA, 19 nt, Artificial Sequence
  Synthetic
gccuaggaauacaacuuac

SEQ ID NO: 525150 - RNA, 20 nt, Artificial Sequence
  Synthetic
ugccuaggaauacaacuuac

SEQ ID NO: 525151 - RNA, 21 nt, Artificial Sequence
  Synthetic
gugccuaggaauacaacuuac

SEQ ID NO: 525152 - RNA, 22 nt, Artificial Sequence
  Synthetic
agugccuaggaauacaacuuac

SEQ ID NO: 525153 - RNA, 23 nt, Artificial Sequence
  Synthetic
aagugccuaggaauacaacuuac

SEQ ID NO: 525154 - RNA, 24 nt, Artificial Sequence
  Synthetic
aaagugccuaggaauacaacuuac

SEQ ID NO: 525155 - RNA, 18 nt, Artificial Sequence
  Synthetic
ccuaggaauccaacuuac

SEQ ID NO: 525156 - RNA, 21 nt, Artificial Sequence
  Synthetic
auaccuaggaauccaacuuac

SEQ ID NO: 525157 - RNA, 22 nt, Artificial Sequence
  Synthetic
aauaccuaggaauccaacuuac

SEQ ID NO: 525158 - RNA, 23 nt, Artificial Sequence
  Synthetic
aaauaccuaggaauccaacuuac

SEQ ID NO: 525159 - RNA, 24 nt, Artificial Sequence
  Synthetic
aaaauaccuaggaauccaacuuac

SEQ ID NO: 525160 - RNA, 19 nt, Artificial Sequence
  Synthetic
gccuaggaauccaacuuac

SEQ ID NO: 525161 - RNA, 20 nt, Artificial Sequence
  Synthetic
ugccuaggaauccaacuuac

SEQ ID NO: 525162 - RNA, 21 nt, Artificial Sequence
  Synthetic
augccuaggaauccaacuuac

SEQ ID NO: 525163 - RNA, 22 nt, Artificial Sequence
  Synthetic
aaugccuaggaauccaacuuac

SEQ ID NO: 525164 - RNA, 23 nt, Artificial Sequence
  Synthetic
aaaugccuaggaauccaacuuac

SEQ ID NO: 525165 - RNA, 24 nt, Artificial Sequence
  Synthetic
aaaaugccuaggaauccaacuuac

SEQ ID NO: 525166 - RNA, 18 nt, Artificial Sequence
  Synthetic
ucaaaugaaauaacuuac

SEQ ID NO: 525167 - RNA, 19 nt, Artificial Sequence
  Synthetic
gucaaaugaaauaacuuac

SEQ ID NO: 525168 - RNA, 20 nt, Artificial Sequence
  Synthetic
agucaaaugaaauaacuuac

SEQ ID NO: 525169 - RNA, 21 nt, Artificial Sequence
  Synthetic
gagucaaaugaaauaacuuac

SEQ ID NO: 525170 - RNA, 22 nt, Artificial Sequence
  Synthetic
agagucaaaugaaauaacuuac

SEQ ID NO: 525171 - RNA, 23 nt, Artificial Sequence
  Synthetic
aagagucaaaugaaauaacuuac

SEQ ID NO: 525172 - RNA, 24 nt, Artificial Sequence
  Synthetic
uaagagucaaaugaaauaacuuac

SEQ ID NO: 525173 - RNA, 18 nt, Artificial Sequence
  Synthetic
cugcacgcauccacuuac

SEQ ID NO: 525174 - RNA, 19 nt, Artificial Sequence
  Synthetic
acugcacgcauccacuuac

SEQ ID NO: 525175 - RNA, 20 nt, Artificial Sequence
  Synthetic
uacugcacgcauccacuuac

SEQ ID NO: 525176 - RNA, 21 nt, Artificial Sequence
  Synthetic
auacugcacgcauccacuuac

SEQ ID NO: 525177 - RNA, 22 nt, Artificial Sequence
  Synthetic
aauacugcacgcauccacuuac

SEQ ID NO: 525178 - RNA, 23 nt, Artificial Sequence
  Synthetic
aaauacugcacgcauccacuuac

SEQ ID NO: 525179 - RNA, 24 nt, Artificial Sequence
  Synthetic
caaauacugcacgcauccacuuac

SEQ ID NO: 525180 - RNA, 18 nt, Artificial Sequence
  Synthetic
cugcaugauuccacuuac

SEQ ID NO: 525181 - RNA, 19 nt, Artificial Sequence
  Synthetic
acugcaugauuccacuuac

SEQ ID NO: 525182 - RNA, 20 nt, Artificial Sequence
  Synthetic
uacugcaugauuccacuuac

SEQ ID NO: 525183 - RNA, 21 nt, Artificial Sequence
  Synthetic
auacugcaugauuccacuuac

SEQ ID NO: 525184 - RNA, 22 nt, Artificial Sequence
  Synthetic
aauacugcaugauuccacuuac

SEQ ID NO: 525185 - RNA, 23 nt, Artificial Sequence
  Synthetic
aaauacugcaugauuccacuuac

SEQ ID NO: 525186 - RNA, 24 nt, Artificial Sequence
  Synthetic
caaauacugcaugauuccacuuac

SEQ ID NO: 525187 - RNA, 18 nt, Artificial Sequence
  Synthetic
acguccuaucucacuuac

SEQ ID NO: 525188 - RNA, 19 nt, Artificial Sequence
  Synthetic
gacguccuaucucacuuac

SEQ ID NO: 525189 - RNA, 20 nt, Artificial Sequence
  Synthetic
agacguccuaucucacuuac

SEQ ID NO: 525190 - RNA, 21 nt, Artificial Sequence
  Synthetic
uagacguccuaucucacuuac

SEQ ID NO: 525191 - RNA, 22 nt, Artificial Sequence
  Synthetic
auagacguccuaucucacuuac

SEQ ID NO: 525192 - RNA, 23 nt, Artificial Sequence
  Synthetic
cauagacguccuaucucacuuac

SEQ ID NO: 525193 - RNA, 24 nt, Artificial Sequence
  Synthetic
ucauagacguccuaucucacuuac

SEQ ID NO: 525194 - RNA, 18 nt, Artificial Sequence
  Synthetic
aaaguagaaaagacuuac

SEQ ID NO: 525195 - RNA, 19 nt, Artificial Sequence
  Synthetic
aaaaguagaaaagacuuac

SEQ ID NO: 525196 - RNA, 20 nt, Artificial Sequence
  Synthetic
uaaaaguagaaaagacuuac

SEQ ID NO: 525197 - RNA, 21 nt, Artificial Sequence
  Synthetic
auaaaaguagaaaagacuuac

SEQ ID NO: 525198 - RNA, 22 nt, Artificial Sequence
  Synthetic
aauaaaaguagaaaagacuuac

SEQ ID NO: 525199 - RNA, 23 nt, Artificial Sequence
  Synthetic
uaauaaaaguagaaaagacuuac

SEQ ID NO: 525200 - RNA, 24 nt, Artificial Sequence
  Synthetic
cuaauaaaaguagaaaagacuuac

SEQ ID NO: 525201 - RNA, 18 nt, Artificial Sequence
  Synthetic
ccuuguucugcuacuuac

SEQ ID NO: 525202 - RNA, 19 nt, Artificial Sequence
  Synthetic
uccuuguucugcuacuuac

SEQ ID NO: 525203 - RNA, 20 nt, Artificial Sequence
  Synthetic
auccuuguucugcuacuuac

SEQ ID NO: 525204 - RNA, 21 nt, Artificial Sequence
  Synthetic
aauccuuguucugcuacuuac

SEQ ID NO: 525205 - RNA, 22 nt, Artificial Sequence
  Synthetic
gaauccuuguucugcuacuuac

SEQ ID NO: 525206 - RNA, 23 nt, Artificial Sequence
  Synthetic
ugaauccuuguucugcuacuuac

SEQ ID NO: 525207 - RNA, 24 nt, Artificial Sequence
  Synthetic
uugaauccuuguucugcuacuuac

SEQ ID NO: 525208 - RNA, 18 nt, Artificial Sequence
  Synthetic
aacucuggaguuacuuac

SEQ ID NO: 525209 - RNA, 19 nt, Artificial Sequence
  Synthetic
caacucuggaguuacuuac

SEQ ID NO: 525210 - RNA, 20 nt, Artificial Sequence
  Synthetic
ucaacucuggaguuacuuac

SEQ ID NO: 525211 - RNA, 21 nt, Artificial Sequence
  Synthetic
cucaacucuggaguuacuuac

SEQ ID NO: 525212 - RNA, 22 nt, Artificial Sequence
  Synthetic
acucaacucuggaguuacuuac

SEQ ID NO: 525213 - RNA, 23 nt, Artificial Sequence
  Synthetic
uacucaacucuggaguuacuuac

SEQ ID NO: 525214 - RNA, 24 nt, Artificial Sequence
  Synthetic
uuacucaacucuggaguuacuuac

SEQ ID NO: 525215 - RNA, 18 nt, Artificial Sequence
  Synthetic
gguucuuuuucaccuuac

SEQ ID NO: 525216 - RNA, 19 nt, Artificial Sequence
  Synthetic
agguucuuuuucaccuuac

SEQ ID NO: 525217 - RNA, 20 nt, Artificial Sequence
  Synthetic
uagguucuuuuucaccuuac

SEQ ID NO: 525218 - RNA, 21 nt, Artificial Sequence
  Synthetic
auagguucuuuuucaccuuac

SEQ ID NO: 525219 - RNA, 22 nt, Artificial Sequence
  Synthetic
uauagguucuuuuucaccuuac

SEQ ID NO: 525220 - RNA, 23 nt, Artificial Sequence
  Synthetic
auauagguucuuuuucaccuuac

SEQ ID NO: 525221 - RNA, 24 nt, Artificial Sequence
  Synthetic
uauauagguucuuuuucaccuuac

SEQ ID NO: 525222 - RNA, 18 nt, Artificial Sequence
  Synthetic
ggucggggaagaccuuac

SEQ ID NO: 525223 - RNA, 19 nt, Artificial Sequence
  Synthetic
gggucggggaagaccuuac

SEQ ID NO: 525224 - RNA, 20 nt, Artificial Sequence
  Synthetic
ggggucggggaagaccuuac

SEQ ID NO: 525225 - RNA, 21 nt, Artificial Sequence
  Synthetic
aggggucggggaagaccuuac

SEQ ID NO: 525226 - RNA, 22 nt, Artificial Sequence
  Synthetic
gaggggucggggaagaccuuac

SEQ ID NO: 525227 - RNA, 23 nt, Artificial Sequence
  Synthetic
agaggggucggggaagaccuuac

SEQ ID NO: 525228 - RNA, 24 nt, Artificial Sequence
  Synthetic
aagaggggucggggaagaccuuac

SEQ ID NO: 525229 - RNA, 18 nt, Artificial Sequence
  Synthetic
caucauuauuugccuuac

SEQ ID NO: 525230 - RNA, 19 nt, Artificial Sequence
  Synthetic
ucaucauuauuugccuuac

SEQ ID NO: 525231 - RNA, 20 nt, Artificial Sequence
  Synthetic
aucaucauuauuugccuuac

SEQ ID NO: 525232 - RNA, 21 nt, Artificial Sequence
  Synthetic
caucaucauuauuugccuuac

SEQ ID NO: 525233 - RNA, 22 nt, Artificial Sequence
  Synthetic
ucaucaucauuauuugccuuac

SEQ ID NO: 525234 - RNA, 23 nt, Artificial Sequence
  Synthetic
uucaucaucauuauuugccuuac

SEQ ID NO: 525235 - RNA, 24 nt, Artificial Sequence
  Synthetic
uuucaucaucauuauuugccuuac

SEQ ID NO: 525236 - RNA, 18 nt, Artificial Sequence
  Synthetic
ucaucaugaaccucuuac

SEQ ID NO: 525237 - RNA, 19 nt, Artificial Sequence
  Synthetic
aucaucaugaaccucuuac

SEQ ID NO: 525238 - RNA, 20 nt, Artificial Sequence
  Synthetic
caucaucaugaaccucuuac

SEQ ID NO: 525239 - RNA, 21 nt, Artificial Sequence
  Synthetic
gcaucaucaugaaccucuuac

SEQ ID NO: 525240 - RNA, 22 nt, Artificial Sequence
  Synthetic
ugcaucaucaugaaccucuuac

SEQ ID NO: 525241 - RNA, 23 nt, Artificial Sequence
  Synthetic
uugcaucaucaugaaccucuuac

SEQ ID NO: 525242 - RNA, 24 nt, Artificial Sequence
  Synthetic
auugcaucaucaugaaccucuuac

SEQ ID NO: 525243 - RNA, 18 nt, Artificial Sequence
  Synthetic
ggaaccuucccgucuuac

SEQ ID NO: 525244 - RNA, 19 nt, Artificial Sequence
  Synthetic
aggaaccuucccgucuuac

SEQ ID NO: 525245 - RNA, 20 nt, Artificial Sequence
  Synthetic
caggaaccuucccgucuuac

SEQ ID NO: 525246 - RNA, 21 nt, Artificial Sequence
  Synthetic
ucaggaaccuucccgucuuac

SEQ ID NO: 525247 - RNA, 22 nt, Artificial Sequence
  Synthetic
aucaggaaccuucccgucuuac

SEQ ID NO: 525248 - RNA, 23 nt, Artificial Sequence
  Synthetic
aaucaggaaccuucccgucuuac

SEQ ID NO: 525249 - RNA, 24 nt, Artificial Sequence
  Synthetic
caaucaggaaccuucccgucuuac

SEQ ID NO: 525250 - RNA, 18 nt, Artificial Sequence
  Synthetic
aaucuggaaaggucuuac

SEQ ID NO: 525251 - RNA, 19 nt, Artificial Sequence
  Synthetic
caaucuggaaaggucuuac

SEQ ID NO: 525252 - RNA, 20 nt, Artificial Sequence
  Synthetic
ccaaucuggaaaggucuuac

SEQ ID NO: 525253 - RNA, 21 nt, Artificial Sequence
  Synthetic
cccaaucuggaaaggucuuac

SEQ ID NO: 525254 - RNA, 22 nt, Artificial Sequence
  Synthetic
ccccaaucuggaaaggucuuac

SEQ ID NO: 525255 - RNA, 23 nt, Artificial Sequence
  Synthetic
accccaaucuggaaaggucuuac

SEQ ID NO: 525256 - RNA, 24 nt, Artificial Sequence
  Synthetic
aaccccaaucuggaaaggucuuac

SEQ ID NO: 525257 - RNA, 18 nt, Artificial Sequence
  Synthetic
ggaacuuuucugucuuac

SEQ ID NO: 525258 - RNA, 19 nt, Artificial Sequence
  Synthetic
gggaacuuuucugucuuac

SEQ ID NO: 525259 - RNA, 20 nt, Artificial Sequence
  Synthetic
ggggaacuuuucugucuuac

SEQ ID NO: 525260 - RNA, 21 nt, Artificial Sequence
  Synthetic
uggggaacuuuucugucuuac

SEQ ID NO: 525261 - RNA, 22 nt, Artificial Sequence
  Synthetic
uuggggaacuuuucugucuuac

SEQ ID NO: 525262 - RNA, 23 nt, Artificial Sequence
  Synthetic
cuuggggaacuuuucugucuuac

SEQ ID NO: 525263 - RNA, 24 nt, Artificial Sequence
  Synthetic
acuuggggaacuuuucugucuuac

SEQ ID NO: 525264 - RNA, 18 nt, Artificial Sequence
  Synthetic
agacaacaguugucuuac

SEQ ID NO: 525265 - RNA, 19 nt, Artificial Sequence
  Synthetic
gagacaacaguugucuuac

SEQ ID NO: 525266 - RNA, 20 nt, Artificial Sequence
  Synthetic
agagacaacaguugucuuac

SEQ ID NO: 525267 - RNA, 21 nt, Artificial Sequence
  Synthetic
aagagacaacaguugucuuac

SEQ ID NO: 525268 - RNA, 22 nt, Artificial Sequence
  Synthetic
uaagagacaacaguugucuuac

SEQ ID NO: 525269 - RNA, 23 nt, Artificial Sequence
  Synthetic
uuaagagacaacaguugucuuac

SEQ ID NO: 525270 - RNA, 24 nt, Artificial Sequence
  Synthetic
cuuaagagacaacaguugucuuac

SEQ ID NO: 525271 - RNA, 18 nt, Artificial Sequence
  Synthetic
auaauggccuauucuuac

SEQ ID NO: 525272 - RNA, 19 nt, Artificial Sequence
  Synthetic
uauaauggccuauucuuac

SEQ ID NO: 525273 - RNA, 20 nt, Artificial Sequence
  Synthetic
auauaauggccuauucuuac

SEQ ID NO: 525274 - RNA, 21 nt, Artificial Sequence
  Synthetic
uauauaauggccuauucuuac

SEQ ID NO: 525275 - RNA, 22 nt, Artificial Sequence
  Synthetic
uuauauaauggccuauucuuac

SEQ ID NO: 525276 - RNA, 23 nt, Artificial Sequence
  Synthetic
uuuauauaauggccuauucuuac

SEQ ID NO: 525277 - RNA, 24 nt, Artificial Sequence
  Synthetic
cuuuauauaauggccuauucuuac

SEQ ID NO: 525278 - RNA, 18 nt, Artificial Sequence
  Synthetic
gugaaaggcacuucuuac

SEQ ID NO: 525279 - RNA, 19 nt, Artificial Sequence
  Synthetic
ggugaaaggcacuucuuac

SEQ ID NO: 525280 - RNA, 20 nt, Artificial Sequence
  Synthetic
aggugaaaggcacuucuuac

SEQ ID NO: 525281 - RNA, 21 nt, Artificial Sequence
  Synthetic
gaggugaaaggcacuucuuac

SEQ ID NO: 525282 - RNA, 22 nt, Artificial Sequence
  Synthetic
ggaggugaaaggcacuucuuac

SEQ ID NO: 525283 - RNA, 23 nt, Artificial Sequence
  Synthetic
gggaggugaaaggcacuucuuac

SEQ ID NO: 525284 - RNA, 24 nt, Artificial Sequence
  Synthetic
ugggaggugaaaggcacuucuuac

SEQ ID NO: 525285 - RNA, 18 nt, Artificial Sequence
  Synthetic
auguggcagucaaguuac

SEQ ID NO: 525286 - RNA, 19 nt, Artificial Sequence
  Synthetic
aauguggcagucaaguuac

SEQ ID NO: 525287 - RNA, 20 nt, Artificial Sequence
  Synthetic
gaauguggcagucaaguuac

SEQ ID NO: 525288 - RNA, 21 nt, Artificial Sequence
  Synthetic
agaauguggcagucaaguuac

SEQ ID NO: 525289 - RNA, 22 nt, Artificial Sequence
  Synthetic
uagaauguggcagucaaguuac

SEQ ID NO: 525290 - RNA, 23 nt, Artificial Sequence
  Synthetic
cuagaauguggcagucaaguuac

SEQ ID NO: 525291 - RNA, 24 nt, Artificial Sequence
  Synthetic
gcuagaauguggcagucaaguuac

SEQ ID NO: 525292 - RNA, 18 nt, Artificial Sequence
  Synthetic
gccuguaaucccaguuac

SEQ ID NO: 525293 - RNA, 19 nt, Artificial Sequence
  Synthetic
ugccuguaaucccaguuac

SEQ ID NO: 525294 - RNA, 20 nt, Artificial Sequence
  Synthetic
gugccuguaaucccaguuac

SEQ ID NO: 525295 - RNA, 21 nt, Artificial Sequence
  Synthetic
ugugccuguaaucccaguuac

SEQ ID NO: 525296 - RNA, 22 nt, Artificial Sequence
  Synthetic
augugccuguaaucccaguuac

SEQ ID NO: 525297 - RNA, 23 nt, Artificial Sequence
  Synthetic
caugugccuguaaucccaguuac

SEQ ID NO: 525298 - RNA, 24 nt, Artificial Sequence
  Synthetic
gcaugugccuguaaucccaguuac

SEQ ID NO: 525299 - RNA, 18 nt, Artificial Sequence
  Synthetic
uuauguccaaucaguuac

SEQ ID NO: 525300 - RNA, 19 nt, Artificial Sequence
  Synthetic
uuuauguccaaucaguuac

SEQ ID NO: 525301 - RNA, 20 nt, Artificial Sequence
  Synthetic
uuuuauguccaaucaguuac

SEQ ID NO: 525302 - RNA, 21 nt, Artificial Sequence
  Synthetic
auuuuauguccaaucaguuac

SEQ ID NO: 525303 - RNA, 22 nt, Artificial Sequence
  Synthetic
cauuuuauguccaaucaguuac

SEQ ID NO: 525304 - RNA, 23 nt, Artificial Sequence
  Synthetic
ccauuuuauguccaaucaguuac

SEQ ID NO: 525305 - RNA, 24 nt, Artificial Sequence
  Synthetic
uccauuuuauguccaaucaguuac

SEQ ID NO: 525306 - RNA, 18 nt, Artificial Sequence
  Synthetic
uuacaccuaaucaguuac

SEQ ID NO: 525307 - RNA, 19 nt, Artificial Sequence
  Synthetic
auuacaccuaaucaguuac

SEQ ID NO: 525308 - RNA, 20 nt, Artificial Sequence
  Synthetic
uauuacaccuaaucaguuac

SEQ ID NO: 525309 - RNA, 21 nt, Artificial Sequence
  Synthetic
cuauuacaccuaaucaguuac

SEQ ID NO: 525310 - RNA, 22 nt, Artificial Sequence
  Synthetic
ucuauuacaccuaaucaguuac

SEQ ID NO: 525311 - RNA, 23 nt, Artificial Sequence
  Synthetic
aucuauuacaccuaaucaguuac

SEQ ID NO: 525312 - RNA, 24 nt, Artificial Sequence
  Synthetic
uaucuauuacaccuaaucaguuac

SEQ ID NO: 525313 - RNA, 18 nt, Artificial Sequence
  Synthetic
aguaguuuuuagaguuac

SEQ ID NO: 525314 - RNA, 19 nt, Artificial Sequence
  Synthetic
aaguaguuuuuagaguuac

SEQ ID NO: 525315 - RNA, 20 nt, Artificial Sequence
  Synthetic
uaaguaguuuuuagaguuac

SEQ ID NO: 525316 - RNA, 21 nt, Artificial Sequence
  Synthetic
cuaaguaguuuuuagaguuac

SEQ ID NO: 525317 - RNA, 22 nt, Artificial Sequence
  Synthetic
gcuaaguaguuuuuagaguuac

SEQ ID NO: 525318 - RNA, 23 nt, Artificial Sequence
  Synthetic
agcuaaguaguuuuuagaguuac

SEQ ID NO: 525319 - RNA, 24 nt, Artificial Sequence
  Synthetic
aagcuaaguaguuuuuagaguuac

SEQ ID NO: 525320 - RNA, 18 nt, Artificial Sequence
  Synthetic
auauaauauaauaguuac

SEQ ID NO: 525321 - RNA, 19 nt, Artificial Sequence
  Synthetic
uauauaauauaauaguuac

SEQ ID NO: 525322 - RNA, 20 nt, Artificial Sequence
  Synthetic
uuauauaauauaauaguuac

SEQ ID NO: 525323 - RNA, 21 nt, Artificial Sequence
  Synthetic
uuuauauaauauaauaguuac

SEQ ID NO: 525324 - RNA, 22 nt, Artificial Sequence
  Synthetic
auuuauauaauauaauaguuac

SEQ ID NO: 525325 - RNA, 23 nt, Artificial Sequence
  Synthetic
uauuuauauaauauaauaguuac

SEQ ID NO: 525326 - RNA, 24 nt, Artificial Sequence
  Synthetic
auauuuauauaauauaauaguuac

SEQ ID NO: 525327 - RNA, 18 nt, Artificial Sequence
  Synthetic
agaacaggaauuaguuac

SEQ ID NO: 525328 - RNA, 19 nt, Artificial Sequence
  Synthetic
aagaacaggaauuaguuac

SEQ ID NO: 525329 - RNA, 20 nt, Artificial Sequence
  Synthetic
gaagaacaggaauuaguuac

SEQ ID NO: 525330 - RNA, 21 nt, Artificial Sequence
  Synthetic
ugaagaacaggaauuaguuac

SEQ ID NO: 525331 - RNA, 22 nt, Artificial Sequence
  Synthetic
augaagaacaggaauuaguuac

SEQ ID NO: 525332 - RNA, 23 nt, Artificial Sequence
  Synthetic
uaugaagaacaggaauuaguuac

SEQ ID NO: 525333 - RNA, 24 nt, Artificial Sequence
  Synthetic
uuaugaagaacaggaauuaguuac

SEQ ID NO: 525334 - RNA, 18 nt, Artificial Sequence
  Synthetic
aguaaggauuuuaguuac

SEQ ID NO: 525335 - RNA, 19 nt, Artificial Sequence
  Synthetic
uaguaaggauuuuaguuac

SEQ ID NO: 525336 - RNA, 20 nt, Artificial Sequence
  Synthetic
auaguaaggauuuuaguuac

SEQ ID NO: 525337 - RNA, 21 nt, Artificial Sequence
  Synthetic
uauaguaaggauuuuaguuac

SEQ ID NO: 525338 - RNA, 22 nt, Artificial Sequence
  Synthetic
auauaguaaggauuuuaguuac

SEQ ID NO: 525339 - RNA, 23 nt, Artificial Sequence
  Synthetic
aauauaguaaggauuuuaguuac

SEQ ID NO: 525340 - RNA, 24 nt, Artificial Sequence
  Synthetic
gaauauaguaaggauuuuaguuac

SEQ ID NO: 525341 - RNA, 18 nt, Artificial Sequence
  Synthetic
uuagcgauucuggguuac

SEQ ID NO: 525342 - RNA, 19 nt, Artificial Sequence
  Synthetic
uuuagcgauucuggguuac

SEQ ID NO: 525343 - RNA, 20 nt, Artificial Sequence
  Synthetic
uuuuagcgauucuggguuac

SEQ ID NO: 525344 - RNA, 21 nt, Artificial Sequence
  Synthetic
auuuuagcgauucuggguuac

SEQ ID NO: 525345 - RNA, 22 nt, Artificial Sequence
  Synthetic
uauuuuagcgauucuggguuac

SEQ ID NO: 525346 - RNA, 23 nt, Artificial Sequence
  Synthetic
cuauuuuagcgauucuggguuac

SEQ ID NO: 525347 - RNA, 24 nt, Artificial Sequence
  Synthetic
ucuauuuuagcgauucuggguuac

SEQ ID NO: 525348 - RNA, 18 nt, Artificial Sequence
  Synthetic
gccccuaucuuggguuac

SEQ ID NO: 525349 - RNA, 19 nt, Artificial Sequence
  Synthetic
ugccccuaucuuggguuac

SEQ ID NO: 525350 - RNA, 20 nt, Artificial Sequence
  Synthetic
augccccuaucuuggguuac

SEQ ID NO: 525351 - RNA, 21 nt, Artificial Sequence
  Synthetic
uaugccccuaucuuggguuac

SEQ ID NO: 525352 - RNA, 22 nt, Artificial Sequence
  Synthetic
uuaugccccuaucuuggguuac

SEQ ID NO: 525353 - RNA, 23 nt, Artificial Sequence
  Synthetic
cuuaugccccuaucuuggguuac

SEQ ID NO: 525354 - RNA, 24 nt, Artificial Sequence
  Synthetic
ucuuaugccccuaucuuggguuac

SEQ ID NO: 525355 - RNA, 18 nt, Artificial Sequence
  Synthetic
gaauaaaaggaugguuac

SEQ ID NO: 525356 - RNA, 19 nt, Artificial Sequence
  Synthetic
agaauaaaaggaugguuac

SEQ ID NO: 525357 - RNA, 20 nt, Artificial Sequence
  Synthetic
cagaauaaaaggaugguuac

SEQ ID NO: 525358 - RNA, 21 nt, Artificial Sequence
  Synthetic
acagaauaaaaggaugguuac

SEQ ID NO: 525359 - RNA, 22 nt, Artificial Sequence
  Synthetic
gacagaauaaaaggaugguuac

SEQ ID NO: 525360 - RNA, 23 nt, Artificial Sequence
  Synthetic
agacagaauaaaaggaugguuac

SEQ ID NO: 525361 - RNA, 24 nt, Artificial Sequence
  Synthetic
gagacagaauaaaaggaugguuac

SEQ ID NO: 525362 - RNA, 18 nt, Artificial Sequence
  Synthetic
gaguagaaggaugguuac

SEQ ID NO: 525363 - RNA, 19 nt, Artificial Sequence
  Synthetic
agaguagaaggaugguuac

SEQ ID NO: 525364 - RNA, 20 nt, Artificial Sequence
  Synthetic
gagaguagaaggaugguuac

SEQ ID NO: 525365 - RNA, 21 nt, Artificial Sequence
  Synthetic
agagaguagaaggaugguuac

SEQ ID NO: 525366 - RNA, 22 nt, Artificial Sequence
  Synthetic
uagagaguagaaggaugguuac

SEQ ID NO: 525367 - RNA, 23 nt, Artificial Sequence
  Synthetic
auagagaguagaaggaugguuac

SEQ ID NO: 525368 - RNA, 24 nt, Artificial Sequence
  Synthetic
cauagagaguagaaggaugguuac

SEQ ID NO: 525369 - RNA, 18 nt, Artificial Sequence
  Synthetic
ggguggaaggaugguuac

SEQ ID NO: 525370 - RNA, 19 nt, Artificial Sequence
  Synthetic
aggguggaaggaugguuac

SEQ ID NO: 525371 - RNA, 20 nt, Artificial Sequence
  Synthetic
gaggguggaaggaugguuac

SEQ ID NO: 525372 - RNA, 21 nt, Artificial Sequence
  Synthetic
agaggguggaaggaugguuac

SEQ ID NO: 525373 - RNA, 22 nt, Artificial Sequence
  Synthetic
uagaggguggaaggaugguuac

SEQ ID NO: 525374 - RNA, 23 nt, Artificial Sequence
  Synthetic
auagaggguggaaggaugguuac

SEQ ID NO: 525375 - RNA, 24 nt, Artificial Sequence
  Synthetic
gauagaggguggaaggaugguuac

SEQ ID NO: 525376 - RNA, 18 nt, Artificial Sequence
  Synthetic
cacuaccuuggugguuac

SEQ ID NO: 525377 - RNA, 19 nt, Artificial Sequence
  Synthetic
acacuaccuuggugguuac

SEQ ID NO: 525378 - RNA, 20 nt, Artificial Sequence
  Synthetic
gacacuaccuuggugguuac

SEQ ID NO: 525379 - RNA, 21 nt, Artificial Sequence
  Synthetic
agacacuaccuuggugguuac

SEQ ID NO: 525380 - RNA, 22 nt, Artificial Sequence
  Synthetic
uagacacuaccuuggugguuac

SEQ ID NO: 525381 - RNA, 23 nt, Artificial Sequence
  Synthetic
guagacacuaccuuggugguuac

SEQ ID NO: 525382 - RNA, 24 nt, Artificial Sequence
  Synthetic
aguagacacuaccuuggugguuac

SEQ ID NO: 525383 - RNA, 18 nt, Artificial Sequence
  Synthetic
ugcauuuuaaaauguuac

SEQ ID NO: 525384 - RNA, 19 nt, Artificial Sequence
  Synthetic
uugcauuuuaaaauguuac

SEQ ID NO: 525385 - RNA, 20 nt, Artificial Sequence
  Synthetic
uuugcauuuuaaaauguuac

SEQ ID NO: 525386 - RNA, 21 nt, Artificial Sequence
  Synthetic
uuuugcauuuuaaaauguuac

SEQ ID NO: 525387 - RNA, 22 nt, Artificial Sequence
  Synthetic
auuuugcauuuuaaaauguuac

SEQ ID NO: 525388 - RNA, 23 nt, Artificial Sequence
  Synthetic
aauuuugcauuuuaaaauguuac

SEQ ID NO: 525389 - RNA, 24 nt, Artificial Sequence
  Synthetic
aaauuuugcauuuuaaaauguuac

SEQ ID NO: 525390 - RNA, 18 nt, Artificial Sequence
  Synthetic
cuuaaauccaaauguuac

SEQ ID NO: 525391 - RNA, 19 nt, Artificial Sequence
  Synthetic
ucuuaaauccaaauguuac

SEQ ID NO: 525392 - RNA, 20 nt, Artificial Sequence
  Synthetic
cucuuaaauccaaauguuac

SEQ ID NO: 525393 - RNA, 21 nt, Artificial Sequence
  Synthetic
gcucuuaaauccaaauguuac

SEQ ID NO: 525394 - RNA, 22 nt, Artificial Sequence
  Synthetic
ggcucuuaaauccaaauguuac

SEQ ID NO: 525395 - RNA, 23 nt, Artificial Sequence
  Synthetic
aggcucuuaaauccaaauguuac

SEQ ID NO: 525396 - RNA, 24 nt, Artificial Sequence
  Synthetic
aaggcucuuaaauccaaauguuac

SEQ ID NO: 525397 - RNA, 18 nt, Artificial Sequence
  Synthetic
cuugcacugcaauguuac

SEQ ID NO: 525398 - RNA, 19 nt, Artificial Sequence
  Synthetic
ucuugcacugcaauguuac

SEQ ID NO: 525399 - RNA, 20 nt, Artificial Sequence
  Synthetic
uucuugcacugcaauguuac

SEQ ID NO: 525400 - RNA, 21 nt, Artificial Sequence
  Synthetic
guucuugcacugcaauguuac

SEQ ID NO: 525401 - RNA, 22 nt, Artificial Sequence
  Synthetic
aguucuugcacugcaauguuac

SEQ ID NO: 525402 - RNA, 23 nt, Artificial Sequence
  Synthetic
aaguucuugcacugcaauguuac

SEQ ID NO: 525403 - RNA, 24 nt, Artificial Sequence
  Synthetic
aaaguucuugcacugcaauguuac

SEQ ID NO: 525404 - RNA, 18 nt, Artificial Sequence
  Synthetic
gaaucaaacguauguuac

SEQ ID NO: 525405 - RNA, 19 nt, Artificial Sequence
  Synthetic
ggaaucaaacguauguuac

SEQ ID NO: 525406 - RNA, 20 nt, Artificial Sequence
  Synthetic
gggaaucaaacguauguuac

SEQ ID NO: 525407 - RNA, 21 nt, Artificial Sequence
  Synthetic
ugggaaucaaacguauguuac

SEQ ID NO: 525408 - RNA, 22 nt, Artificial Sequence
  Synthetic
augggaaucaaacguauguuac

SEQ ID NO: 525409 - RNA, 23 nt, Artificial Sequence
  Synthetic
caugggaaucaaacguauguuac

SEQ ID NO: 525410 - RNA, 24 nt, Artificial Sequence
  Synthetic
acaugggaaucaaacguauguuac

SEQ ID NO: 525411 - RNA, 18 nt, Artificial Sequence
  Synthetic
aggaaaaaaaaguguuac

SEQ ID NO: 525412 - RNA, 19 nt, Artificial Sequence
  Synthetic
aaggaaaaaaaaguguuac

SEQ ID NO: 525413 - RNA, 20 nt, Artificial Sequence
  Synthetic
gaaggaaaaaaaaguguuac

SEQ ID NO: 525414 - RNA, 21 nt, Artificial Sequence
  Synthetic
agaaggaaaaaaaaguguuac

SEQ ID NO: 525415 - RNA, 22 nt, Artificial Sequence
  Synthetic
aagaaggaaaaaaaaguguuac

SEQ ID NO: 525416 - RNA, 23 nt, Artificial Sequence
  Synthetic
caagaaggaaaaaaaaguguuac

SEQ ID NO: 525417 - RNA, 24 nt, Artificial Sequence
  Synthetic
ucaagaaggaaaaaaaaguguuac

SEQ ID NO: 525418 - RNA, 18 nt, Artificial Sequence
  Synthetic
uguguguucauuuguuac

SEQ ID NO: 525419 - RNA, 19 nt, Artificial Sequence
  Synthetic
guguguguucauuuguuac

SEQ ID NO: 525420 - RNA, 20 nt, Artificial Sequence
  Synthetic
uguguguguucauuuguuac

SEQ ID NO: 525421 - RNA, 21 nt, Artificial Sequence
  Synthetic
auguguguguucauuuguuac

SEQ ID NO: 525422 - RNA, 22 nt, Artificial Sequence
  Synthetic
aauguguguguucauuuguuac

SEQ ID NO: 525423 - RNA, 23 nt, Artificial Sequence
  Synthetic
aaauguguguguucauuuguuac

SEQ ID NO: 525424 - RNA, 24 nt, Artificial Sequence
  Synthetic
caaauguguguguucauuuguuac

SEQ ID NO: 525425 - RNA, 18 nt, Artificial Sequence
  Synthetic
uuuaggacauuuuguuac

SEQ ID NO: 525426 - RNA, 19 nt, Artificial Sequence
  Synthetic
auuuaggacauuuuguuac

SEQ ID NO: 525427 - RNA, 20 nt, Artificial Sequence
  Synthetic
gauuuaggacauuuuguuac

SEQ ID NO: 525428 - RNA, 21 nt, Artificial Sequence
  Synthetic
ugauuuaggacauuuuguuac

SEQ ID NO: 525429 - RNA, 22 nt, Artificial Sequence
  Synthetic
cugauuuaggacauuuuguuac

SEQ ID NO: 525430 - RNA, 23 nt, Artificial Sequence
  Synthetic
gcugauuuaggacauuuuguuac

SEQ ID NO: 525431 - RNA, 24 nt, Artificial Sequence
  Synthetic
ugcugauuuaggacauuuuguuac

SEQ ID NO: 525432 - RNA, 18 nt, Artificial Sequence
  Synthetic
gaacuuaaacaaauuuac

SEQ ID NO: 525433 - RNA, 19 nt, Artificial Sequence
  Synthetic
agaacuuaaacaaauuuac

SEQ ID NO: 525434 - RNA, 20 nt, Artificial Sequence
  Synthetic
aagaacuuaaacaaauuuac

SEQ ID NO: 525435 - RNA, 21 nt, Artificial Sequence
  Synthetic
aaagaacuuaaacaaauuuac

SEQ ID NO: 525436 - RNA, 22 nt, Artificial Sequence
  Synthetic
caaagaacuuaaacaaauuuac

SEQ ID NO: 525437 - RNA, 23 nt, Artificial Sequence
  Synthetic
acaaagaacuuaaacaaauuuac

SEQ ID NO: 525438 - RNA, 24 nt, Artificial Sequence
  Synthetic
uacaaagaacuuaaacaaauuuac

SEQ ID NO: 525439 - RNA, 21 nt, Artificial Sequence
  Synthetic
aaggaacuuaaacaaauuuac

SEQ ID NO: 525440 - RNA, 22 nt, Artificial Sequence
  Synthetic
uaaggaacuuaaacaaauuuac

SEQ ID NO: 525441 - RNA, 23 nt, Artificial Sequence
  Synthetic
auaaggaacuuaaacaaauuuac

SEQ ID NO: 525442 - RNA, 24 nt, Artificial Sequence
  Synthetic
uauaaggaacuuaaacaaauuuac

SEQ ID NO: 525443 - RNA, 18 nt, Artificial Sequence
  Synthetic
aaggcacuugaaauuuac

SEQ ID NO: 525444 - RNA, 19 nt, Artificial Sequence
  Synthetic
caaggcacuugaaauuuac

SEQ ID NO: 525445 - RNA, 20 nt, Artificial Sequence
  Synthetic
ucaaggcacuugaaauuuac

SEQ ID NO: 525446 - RNA, 21 nt, Artificial Sequence
  Synthetic
uucaaggcacuugaaauuuac

SEQ ID NO: 525447 - RNA, 22 nt, Artificial Sequence
  Synthetic
cuucaaggcacuugaaauuuac

SEQ ID NO: 525448 - RNA, 23 nt, Artificial Sequence
  Synthetic
ccuucaaggcacuugaaauuuac

SEQ ID NO: 525449 - RNA, 24 nt, Artificial Sequence
  Synthetic
gccuucaaggcacuugaaauuuac

SEQ ID NO: 525450 - RNA, 18 nt, Artificial Sequence
  Synthetic
aagcuuaucuaaauuuac

SEQ ID NO: 525451 - RNA, 19 nt, Artificial Sequence
  Synthetic
aaagcuuaucuaaauuuac

SEQ ID NO: 525452 - RNA, 20 nt, Artificial Sequence
  Synthetic
aaaagcuuaucuaaauuuac

SEQ ID NO: 525453 - RNA, 21 nt, Artificial Sequence
  Synthetic
aaaaagcuuaucuaaauuuac

SEQ ID NO: 525454 - RNA, 22 nt, Artificial Sequence
  Synthetic
aaaaaagcuuaucuaaauuuac

SEQ ID NO: 525455 - RNA, 23 nt, Artificial Sequence
  Synthetic
aaaaaaagcuuaucuaaauuuac

SEQ ID NO: 525456 - RNA, 24 nt, Artificial Sequence
  Synthetic
aaaaaaaagcuuaucuaaauuuac

SEQ ID NO: 525457 - RNA, 18 nt, Artificial Sequence
  Synthetic
aucuuuaaaauaauuuac

SEQ ID NO: 525458 - RNA, 19 nt, Artificial Sequence
  Synthetic
aaucuuuaaaauaauuuac

SEQ ID NO: 525459 - RNA, 20 nt, Artificial Sequence
  Synthetic
aaaucuuuaaaauaauuuac

SEQ ID NO: 525460 - RNA, 21 nt, Artificial Sequence
  Synthetic
caaaucuuuaaaauaauuuac

SEQ ID NO: 525461 - RNA, 22 nt, Artificial Sequence
  Synthetic
acaaaucuuuaaaauaauuuac

SEQ ID NO: 525462 - RNA, 23 nt, Artificial Sequence
  Synthetic
uacaaaucuuuaaaauaauuuac

SEQ ID NO: 525463 - RNA, 24 nt, Artificial Sequence
  Synthetic
guacaaaucuuuaaaauaauuuac

SEQ ID NO: 525464 - RNA, 18 nt, Artificial Sequence
  Synthetic
ccuuuaugaaccauuuac

SEQ ID NO: 525465 - RNA, 19 nt, Artificial Sequence
  Synthetic
uccuuuaugaaccauuuac

SEQ ID NO: 525466 - RNA, 20 nt, Artificial Sequence
  Synthetic
uuccuuuaugaaccauuuac

SEQ ID NO: 525467 - RNA, 21 nt, Artificial Sequence
  Synthetic
cuuccuuuaugaaccauuuac

SEQ ID NO: 525468 - RNA, 22 nt, Artificial Sequence
  Synthetic
ccuuccuuuaugaaccauuuac

SEQ ID NO: 525469 - RNA, 23 nt, Artificial Sequence
  Synthetic
gccuuccuuuaugaaccauuuac

SEQ ID NO: 525470 - RNA, 24 nt, Artificial Sequence
  Synthetic
ggccuuccuuuaugaaccauuuac

SEQ ID NO: 525471 - RNA, 18 nt, Artificial Sequence
  Synthetic
agaucaaucagcauuuac

SEQ ID NO: 525472 - RNA, 19 nt, Artificial Sequence
  Synthetic
aagaucaaucagcauuuac

SEQ ID NO: 525473 - RNA, 20 nt, Artificial Sequence
  Synthetic
gaagaucaaucagcauuuac

SEQ ID NO: 525474 - RNA, 21 nt, Artificial Sequence
  Synthetic
agaagaucaaucagcauuuac

SEQ ID NO: 525475 - RNA, 22 nt, Artificial Sequence
  Synthetic
aagaagaucaaucagcauuuac

SEQ ID NO: 525476 - RNA, 23 nt, Artificial Sequence
  Synthetic
aaagaagaucaaucagcauuuac

SEQ ID NO: 525477 - RNA, 24 nt, Artificial Sequence
  Synthetic
aaaagaagaucaaucagcauuuac

SEQ ID NO: 525478 - RNA, 18 nt, Artificial Sequence
  Synthetic
ccacuacagagcauuuac

SEQ ID NO: 525479 - RNA, 19 nt, Artificial Sequence
  Synthetic
cccacuacagagcauuuac

SEQ ID NO: 525480 - RNA, 20 nt, Artificial Sequence
  Synthetic
ucccacuacagagcauuuac

SEQ ID NO: 525481 - RNA, 21 nt, Artificial Sequence
  Synthetic
aucccacuacagagcauuuac

SEQ ID NO: 525482 - RNA, 22 nt, Artificial Sequence
  Synthetic
aaucccacuacagagcauuuac

SEQ ID NO: 525483 - RNA, 23 nt, Artificial Sequence
  Synthetic
aaaucccacuacagagcauuuac

SEQ ID NO: 525484 - RNA, 24 nt, Artificial Sequence
  Synthetic
uaaaucccacuacagagcauuuac

SEQ ID NO: 525485 - RNA, 18 nt, Artificial Sequence
  Synthetic
uuaugaaaugggauuuac

SEQ ID NO: 525486 - RNA, 19 nt, Artificial Sequence
  Synthetic
guuaugaaaugggauuuac

SEQ ID NO: 525487 - RNA, 20 nt, Artificial Sequence
  Synthetic
aguuaugaaaugggauuuac

SEQ ID NO: 525488 - RNA, 21 nt, Artificial Sequence
  Synthetic
aaguuaugaaaugggauuuac

SEQ ID NO: 525489 - RNA, 22 nt, Artificial Sequence
  Synthetic
aaaguuaugaaaugggauuuac

SEQ ID NO: 525490 - RNA, 23 nt, Artificial Sequence
  Synthetic
caaaguuaugaaaugggauuuac

SEQ ID NO: 525491 - RNA, 24 nt, Artificial Sequence
  Synthetic
ucaaaguuaugaaaugggauuuac

SEQ ID NO: 525492 - RNA, 18 nt, Artificial Sequence
  Synthetic
gaguucacuaugauuuac

SEQ ID NO: 525493 - RNA, 19 nt, Artificial Sequence
  Synthetic
ugaguucacuaugauuuac

SEQ ID NO: 525494 - RNA, 20 nt, Artificial Sequence
  Synthetic
gugaguucacuaugauuuac

SEQ ID NO: 525495 - RNA, 21 nt, Artificial Sequence
  Synthetic
cgugaguucacuaugauuuac

SEQ ID NO: 525496 - RNA, 22 nt, Artificial Sequence
  Synthetic
ccgugaguucacuaugauuuac

SEQ ID NO: 525497 - RNA, 23 nt, Artificial Sequence
  Synthetic
accgugaguucacuaugauuuac

SEQ ID NO: 525498 - RNA, 24 nt, Artificial Sequence
  Synthetic
uaccgugaguucacuaugauuuac

SEQ ID NO: 525499 - RNA, 18 nt, Artificial Sequence
  Synthetic
aacugccuaaauauuuac

SEQ ID NO: 525500 - RNA, 19 nt, Artificial Sequence
  Synthetic
gaacugccuaaauauuuac

SEQ ID NO: 525501 - RNA, 20 nt, Artificial Sequence
  Synthetic
ugaacugccuaaauauuuac

SEQ ID NO: 525502 - RNA, 21 nt, Artificial Sequence
  Synthetic
augaacugccuaaauauuuac

SEQ ID NO: 525503 - RNA, 22 nt, Artificial Sequence
  Synthetic
aaugaacugccuaaauauuuac

SEQ ID NO: 525504 - RNA, 23 nt, Artificial Sequence
  Synthetic
uaaugaacugccuaaauauuuac

SEQ ID NO: 525505 - RNA, 24 nt, Artificial Sequence
  Synthetic
uuaaugaacugccuaaauauuuac

SEQ ID NO: 525506 - RNA, 18 nt, Artificial Sequence
  Synthetic
auuuaaugguauauuuac

SEQ ID NO: 525507 - RNA, 19 nt, Artificial Sequence
  Synthetic
cauuuaaugguauauuuac

SEQ ID NO: 525508 - RNA, 20 nt, Artificial Sequence
  Synthetic
acauuuaaugguauauuuac

SEQ ID NO: 525509 - RNA, 21 nt, Artificial Sequence
  Synthetic
cacauuuaaugguauauuuac

SEQ ID NO: 525510 - RNA, 22 nt, Artificial Sequence
  Synthetic
ucacauuuaaugguauauuuac

SEQ ID NO: 525511 - RNA, 23 nt, Artificial Sequence
  Synthetic
aucacauuuaaugguauauuuac

SEQ ID NO: 525512 - RNA, 24 nt, Artificial Sequence
  Synthetic
uaucacauuuaaugguauauuuac

SEQ ID NO: 525513 - RNA, 18 nt, Artificial Sequence
  Synthetic
gcauauucuccuauuuac

SEQ ID NO: 525514 - RNA, 19 nt, Artificial Sequence
  Synthetic
agcauauucuccuauuuac

SEQ ID NO: 525515 - RNA, 20 nt, Artificial Sequence
  Synthetic
aagcauauucuccuauuuac

SEQ ID NO: 525516 - RNA, 21 nt, Artificial Sequence
  Synthetic
aaagcauauucuccuauuuac

SEQ ID NO: 525517 - RNA, 22 nt, Artificial Sequence
  Synthetic
aaaagcauauucuccuauuuac

SEQ ID NO: 525518 - RNA, 23 nt, Artificial Sequence
  Synthetic
aaaaagcauauucuccuauuuac

SEQ ID NO: 525519 - RNA, 24 nt, Artificial Sequence
  Synthetic
gaaaaagcauauucuccuauuuac

SEQ ID NO: 525520 - RNA, 18 nt, Artificial Sequence
  Synthetic
aauaaaaaucaacuuuac

SEQ ID NO: 525521 - RNA, 19 nt, Artificial Sequence
  Synthetic
aaauaaaaaucaacuuuac

SEQ ID NO: 525522 - RNA, 20 nt, Artificial Sequence
  Synthetic
aaaauaaaaaucaacuuuac

SEQ ID NO: 525523 - RNA, 21 nt, Artificial Sequence
  Synthetic
uaaaauaaaaaucaacuuuac

SEQ ID NO: 525524 - RNA, 22 nt, Artificial Sequence
  Synthetic
auaaaauaaaaaucaacuuuac

SEQ ID NO: 525525 - RNA, 23 nt, Artificial Sequence
  Synthetic
cauaaaauaaaaaucaacuuuac

SEQ ID NO: 525526 - RNA, 24 nt, Artificial Sequence
  Synthetic
acauaaaauaaaaaucaacuuuac

SEQ ID NO: 525527 - RNA, 18 nt, Artificial Sequence
  Synthetic
guuuuuaggauacuuuac

SEQ ID NO: 525528 - RNA, 19 nt, Artificial Sequence
  Synthetic
uguuuuuaggauacuuuac

SEQ ID NO: 525529 - RNA, 20 nt, Artificial Sequence
  Synthetic
uuguuuuuaggauacuuuac

SEQ ID NO: 525530 - RNA, 21 nt, Artificial Sequence
  Synthetic
uuuguuuuuaggauacuuuac

SEQ ID NO: 525531 - RNA, 22 nt, Artificial Sequence
  Synthetic
auuuguuuuuaggauacuuuac

SEQ ID NO: 525532 - RNA, 23 nt, Artificial Sequence
  Synthetic
aauuuguuuuuaggauacuuuac

SEQ ID NO: 525533 - RNA, 24 nt, Artificial Sequence
  Synthetic
uaauuuguuuuuaggauacuuuac

SEQ ID NO: 525534 - RNA, 18 nt, Artificial Sequence
  Synthetic
guaguuuagcuacuuuac

SEQ ID NO: 525535 - RNA, 19 nt, Artificial Sequence
  Synthetic
aguaguuuagcuacuuuac

SEQ ID NO: 525536 - RNA, 20 nt, Artificial Sequence
  Synthetic
caguaguuuagcuacuuuac

SEQ ID NO: 525537 - RNA, 21 nt, Artificial Sequence
  Synthetic
acaguaguuuagcuacuuuac

SEQ ID NO: 525538 - RNA, 22 nt, Artificial Sequence
  Synthetic
aacaguaguuuagcuacuuuac

SEQ ID NO: 525539 - RNA, 23 nt, Artificial Sequence
  Synthetic
uaacaguaguuuagcuacuuuac

SEQ ID NO: 525540 - RNA, 24 nt, Artificial Sequence
  Synthetic
auaacaguaguuuagcuacuuuac

SEQ ID NO: 525541 - RNA, 18 nt, Artificial Sequence
  Synthetic
uauuacaccuuccuuuac

SEQ ID NO: 525542 - RNA, 19 nt, Artificial Sequence
  Synthetic
auauuacaccuuccuuuac

SEQ ID NO: 525543 - RNA, 20 nt, Artificial Sequence
  Synthetic
aauauuacaccuuccuuuac

SEQ ID NO: 525544 - RNA, 21 nt, Artificial Sequence
  Synthetic
gaauauuacaccuuccuuuac

SEQ ID NO: 525545 - RNA, 22 nt, Artificial Sequence
  Synthetic
agaauauuacaccuuccuuuac

SEQ ID NO: 525546 - RNA, 23 nt, Artificial Sequence
  Synthetic
uagaauauuacaccuuccuuuac

SEQ ID NO: 525547 - RNA, 24 nt, Artificial Sequence
  Synthetic
auagaauauuacaccuuccuuuac

SEQ ID NO: 525548 - RNA, 18 nt, Artificial Sequence
  Synthetic
caacagaagcagcuuuac

SEQ ID NO: 525549 - RNA, 19 nt, Artificial Sequence
  Synthetic
acaacagaagcagcuuuac

SEQ ID NO: 525550 - RNA, 20 nt, Artificial Sequence
  Synthetic
gacaacagaagcagcuuuac

SEQ ID NO: 525551 - RNA, 21 nt, Artificial Sequence
  Synthetic
agacaacagaagcagcuuuac

SEQ ID NO: 525552 - RNA, 22 nt, Artificial Sequence
  Synthetic
aagacaacagaagcagcuuuac

SEQ ID NO: 525553 - RNA, 23 nt, Artificial Sequence
  Synthetic
caagacaacagaagcagcuuuac

SEQ ID NO: 525554 - RNA, 24 nt, Artificial Sequence
  Synthetic
ucaagacaacagaagcagcuuuac

SEQ ID NO: 525555 - RNA, 18 nt, Artificial Sequence
  Synthetic
auuaccuucaaaguuuac

SEQ ID NO: 525556 - RNA, 19 nt, Artificial Sequence
  Synthetic
gauuaccuucaaaguuuac

SEQ ID NO: 525557 - RNA, 20 nt, Artificial Sequence
  Synthetic
agauuaccuucaaaguuuac

SEQ ID NO: 525558 - RNA, 21 nt, Artificial Sequence
  Synthetic
gagauuaccuucaaaguuuac

SEQ ID NO: 525559 - RNA, 22 nt, Artificial Sequence
  Synthetic
agagauuaccuucaaaguuuac

SEQ ID NO: 525560 - RNA, 23 nt, Artificial Sequence
  Synthetic
cagagauuaccuucaaaguuuac

SEQ ID NO: 525561 - RNA, 24 nt, Artificial Sequence
  Synthetic
ucagagauuaccuucaaaguuuac

SEQ ID NO: 525562 - RNA, 18 nt, Artificial Sequence
  Synthetic
uccaccaaaccaguuuac

SEQ ID NO: 525563 - RNA, 19 nt, Artificial Sequence
  Synthetic
guccaccaaaccaguuuac

SEQ ID NO: 525564 - RNA, 20 nt, Artificial Sequence
  Synthetic
uguccaccaaaccaguuuac

SEQ ID NO: 525565 - RNA, 21 nt, Artificial Sequence
  Synthetic
uuguccaccaaaccaguuuac

SEQ ID NO: 525566 - RNA, 22 nt, Artificial Sequence
  Synthetic
guuguccaccaaaccaguuuac

SEQ ID NO: 525567 - RNA, 23 nt, Artificial Sequence
  Synthetic
aguuguccaccaaaccaguuuac

SEQ ID NO: 525568 - RNA, 24 nt, Artificial Sequence
  Synthetic
caguuguccaccaaaccaguuuac

SEQ ID NO: 525569 - RNA, 18 nt, Artificial Sequence
  Synthetic
accuaacuuccaguuuac

SEQ ID NO: 525570 - RNA, 19 nt, Artificial Sequence
  Synthetic
gaccuaacuuccaguuuac

SEQ ID NO: 525571 - RNA, 20 nt, Artificial Sequence
  Synthetic
agaccuaacuuccaguuuac

SEQ ID NO: 525572 - RNA, 21 nt, Artificial Sequence
  Synthetic
uagaccuaacuuccaguuuac

SEQ ID NO: 525573 - RNA, 22 nt, Artificial Sequence
  Synthetic
uuagaccuaacuuccaguuuac

SEQ ID NO: 525574 - RNA, 23 nt, Artificial Sequence
  Synthetic
uuuagaccuaacuuccaguuuac

SEQ ID NO: 525575 - RNA, 24 nt, Artificial Sequence
  Synthetic
auuuagaccuaacuuccaguuuac

SEQ ID NO: 525576 - RNA, 18 nt, Artificial Sequence
  Synthetic
ccuucuaauuuaguuuac

SEQ ID NO: 525577 - RNA, 19 nt, Artificial Sequence
  Synthetic
gccuucuaauuuaguuuac

SEQ ID NO: 525578 - RNA, 20 nt, Artificial Sequence
  Synthetic
agccuucuaauuuaguuuac

SEQ ID NO: 525579 - RNA, 21 nt, Artificial Sequence
  Synthetic
aagccuucuaauuuaguuuac

SEQ ID NO: 525580 - RNA, 22 nt, Artificial Sequence
  Synthetic
aaagccuucuaauuuaguuuac

SEQ ID NO: 525581 - RNA, 23 nt, Artificial Sequence
  Synthetic
gaaagccuucuaauuuaguuuac

SEQ ID NO: 525582 - RNA, 24 nt, Artificial Sequence
  Synthetic
ggaaagccuucuaauuuaguuuac

SEQ ID NO: 525583 - RNA, 18 nt, Artificial Sequence
  Synthetic
ucaccuuagacuguuuac

SEQ ID NO: 525584 - RNA, 19 nt, Artificial Sequence
  Synthetic
uucaccuuagacuguuuac

SEQ ID NO: 525585 - RNA, 20 nt, Artificial Sequence
  Synthetic
auucaccuuagacuguuuac

SEQ ID NO: 525586 - RNA, 21 nt, Artificial Sequence
  Synthetic
aauucaccuuagacuguuuac

SEQ ID NO: 525587 - RNA, 22 nt, Artificial Sequence
  Synthetic
gaauucaccuuagacuguuuac

SEQ ID NO: 525588 - RNA, 23 nt, Artificial Sequence
  Synthetic
ugaauucaccuuagacuguuuac

SEQ ID NO: 525589 - RNA, 24 nt, Artificial Sequence
  Synthetic
augaauucaccuuagacuguuuac

SEQ ID NO: 525590 - RNA, 18 nt, Artificial Sequence
  Synthetic
uaauacuuuacuguuuac

SEQ ID NO: 525591 - RNA, 19 nt, Artificial Sequence
  Synthetic
auaauacuuuacuguuuac

SEQ ID NO: 525592 - RNA, 20 nt, Artificial Sequence
  Synthetic
aauaauacuuuacuguuuac

SEQ ID NO: 525593 - RNA, 21 nt, Artificial Sequence
  Synthetic
uaauaauacuuuacuguuuac

SEQ ID NO: 525594 - RNA, 22 nt, Artificial Sequence
  Synthetic
uuaauaauacuuuacuguuuac

SEQ ID NO: 525595 - RNA, 23 nt, Artificial Sequence
  Synthetic
guuaauaauacuuuacuguuuac

SEQ ID NO: 525596 - RNA, 24 nt, Artificial Sequence
  Synthetic
aguuaauaauacuuuacuguuuac

SEQ ID NO: 525597 - RNA, 18 nt, Artificial Sequence
  Synthetic
aggagacuuccuguuuac

SEQ ID NO: 525598 - RNA, 19 nt, Artificial Sequence
  Synthetic
caggagacuuccuguuuac

SEQ ID NO: 525599 - RNA, 20 nt, Artificial Sequence
  Synthetic
ccaggagacuuccuguuuac

SEQ ID NO: 525600 - RNA, 21 nt, Artificial Sequence
  Synthetic
gccaggagacuuccuguuuac

SEQ ID NO: 525601 - RNA, 22 nt, Artificial Sequence
  Synthetic
ggccaggagacuuccuguuuac

SEQ ID NO: 525602 - RNA, 23 nt, Artificial Sequence
  Synthetic
aggccaggagacuuccuguuuac

SEQ ID NO: 525603 - RNA, 24 nt, Artificial Sequence
  Synthetic
caggccaggagacuuccuguuuac

SEQ ID NO: 525604 - RNA, 18 nt, Artificial Sequence
  Synthetic
caucuauaggcuguuuac

SEQ ID NO: 525605 - RNA, 19 nt, Artificial Sequence
  Synthetic
ccaucuauaggcuguuuac

SEQ ID NO: 525606 - RNA, 20 nt, Artificial Sequence
  Synthetic
uccaucuauaggcuguuuac

SEQ ID NO: 525607 - RNA, 21 nt, Artificial Sequence
  Synthetic
cuccaucuauaggcuguuuac

SEQ ID NO: 525608 - RNA, 22 nt, Artificial Sequence
  Synthetic
acuccaucuauaggcuguuuac

SEQ ID NO: 525609 - RNA, 23 nt, Artificial Sequence
  Synthetic
cacuccaucuauaggcuguuuac

SEQ ID NO: 525610 - RNA, 24 nt, Artificial Sequence
  Synthetic
acacuccaucuauaggcuguuuac

SEQ ID NO: 525611 - RNA, 18 nt, Artificial Sequence
  Synthetic
uuucccuucucuguuuac

SEQ ID NO: 525612 - RNA, 19 nt, Artificial Sequence
  Synthetic
cuuucccuucucuguuuac

SEQ ID NO: 525613 - RNA, 20 nt, Artificial Sequence
  Synthetic
ucuuucccuucucuguuuac

SEQ ID NO: 525614 - RNA, 21 nt, Artificial Sequence
  Synthetic
cucuuucccuucucuguuuac

SEQ ID NO: 525615 - RNA, 22 nt, Artificial Sequence
  Synthetic
ucucuuucccuucucuguuuac

SEQ ID NO: 525616 - RNA, 23 nt, Artificial Sequence
  Synthetic
gucucuuucccuucucuguuuac

SEQ ID NO: 525617 - RNA, 24 nt, Artificial Sequence
  Synthetic
agucucuuucccuucucuguuuac

SEQ ID NO: 525618 - RNA, 18 nt, Artificial Sequence
  Synthetic
aaaaugagcauuguuuac

SEQ ID NO: 525619 - RNA, 19 nt, Artificial Sequence
  Synthetic
aaaaaugagcauuguuuac

SEQ ID NO: 525620 - RNA, 20 nt, Artificial Sequence
  Synthetic
aaaaaaugagcauuguuuac

SEQ ID NO: 525621 - RNA, 21 nt, Artificial Sequence
  Synthetic
uaaaaaaugagcauuguuuac

SEQ ID NO: 525622 - RNA, 22 nt, Artificial Sequence
  Synthetic
uuaaaaaaugagcauuguuuac

SEQ ID NO: 525623 - RNA, 23 nt, Artificial Sequence
  Synthetic
uuuaaaaaaugagcauuguuuac

SEQ ID NO: 525624 - RNA, 24 nt, Artificial Sequence
  Synthetic
uuuuaaaaaaugagcauuguuuac

SEQ ID NO: 525625 - RNA, 18 nt, Artificial Sequence
  Synthetic
agucaauuacaauuuuac

SEQ ID NO: 525626 - RNA, 19 nt, Artificial Sequence
  Synthetic
aagucaauuacaauuuuac

SEQ ID NO: 525627 - RNA, 20 nt, Artificial Sequence
  Synthetic
aaagucaauuacaauuuuac

SEQ ID NO: 525628 - RNA, 21 nt, Artificial Sequence
  Synthetic
caaagucaauuacaauuuuac

SEQ ID NO: 525629 - RNA, 22 nt, Artificial Sequence
  Synthetic
acaaagucaauuacaauuuuac

SEQ ID NO: 525630 - RNA, 23 nt, Artificial Sequence
  Synthetic
cacaaagucaauuacaauuuuac

SEQ ID NO: 525631 - RNA, 24 nt, Artificial Sequence
  Synthetic
acacaaagucaauuacaauuuuac

SEQ ID NO: 525632 - RNA, 18 nt, Artificial Sequence
  Synthetic
uaagaaagaagauuuuac

SEQ ID NO: 525633 - RNA, 19 nt, Artificial Sequence
  Synthetic
uuaagaaagaagauuuuac

SEQ ID NO: 525634 - RNA, 20 nt, Artificial Sequence
  Synthetic
uuuaagaaagaagauuuuac

SEQ ID NO: 525635 - RNA, 21 nt, Artificial Sequence
  Synthetic
guuuaagaaagaagauuuuac

SEQ ID NO: 525636 - RNA, 22 nt, Artificial Sequence
  Synthetic
aguuuaagaaagaagauuuuac

SEQ ID NO: 525637 - RNA, 23 nt, Artificial Sequence
  Synthetic
gaguuuaagaaagaagauuuuac

SEQ ID NO: 525638 - RNA, 24 nt, Artificial Sequence
  Synthetic
agaguuuaagaaagaagauuuuac

SEQ ID NO: 525639 - RNA, 18 nt, Artificial Sequence
  Synthetic
gauaucuuuagauuuuac

SEQ ID NO: 525640 - RNA, 19 nt, Artificial Sequence
  Synthetic
agauaucuuuagauuuuac

SEQ ID NO: 525641 - RNA, 20 nt, Artificial Sequence
  Synthetic
aagauaucuuuagauuuuac

SEQ ID NO: 525642 - RNA, 21 nt, Artificial Sequence
  Synthetic
aaagauaucuuuagauuuuac

SEQ ID NO: 525643 - RNA, 22 nt, Artificial Sequence
  Synthetic
caaagauaucuuuagauuuuac

SEQ ID NO: 525644 - RNA, 23 nt, Artificial Sequence
  Synthetic
ucaaagauaucuuuagauuuuac

SEQ ID NO: 525645 - RNA, 24 nt, Artificial Sequence
  Synthetic
gucaaagauaucuuuagauuuuac

SEQ ID NO: 525646 - RNA, 18 nt, Artificial Sequence
  Synthetic
uuaaaagacauauuuuac

SEQ ID NO: 525647 - RNA, 19 nt, Artificial Sequence
  Synthetic
auuaaaagacauauuuuac

SEQ ID NO: 525648 - RNA, 20 nt, Artificial Sequence
  Synthetic
aauuaaaagacauauuuuac

SEQ ID NO: 525649 - RNA, 21 nt, Artificial Sequence
  Synthetic
gaauuaaaagacauauuuuac

SEQ ID NO: 525650 - RNA, 22 nt, Artificial Sequence
  Synthetic
ggaauuaaaagacauauuuuac

SEQ ID NO: 525651 - RNA, 23 nt, Artificial Sequence
  Synthetic
aggaauuaaaagacauauuuuac

SEQ ID NO: 525652 - RNA, 24 nt, Artificial Sequence
  Synthetic
aaggaauuaaaagacauauuuuac

SEQ ID NO: 525653 - RNA, 18 nt, Artificial Sequence
  Synthetic
auguauuugaccuuuuac

SEQ ID NO: 525654 - RNA, 19 nt, Artificial Sequence
  Synthetic
uauguauuugaccuuuuac

SEQ ID NO: 525655 - RNA, 20 nt, Artificial Sequence
  Synthetic
auauguauuugaccuuuuac

SEQ ID NO: 525656 - RNA, 21 nt, Artificial Sequence
  Synthetic
aauauguauuugaccuuuuac

SEQ ID NO: 525657 - RNA, 22 nt, Artificial Sequence
  Synthetic
uaauauguauuugaccuuuuac

SEQ ID NO: 525658 - RNA, 23 nt, Artificial Sequence
  Synthetic
auaauauguauuugaccuuuuac

SEQ ID NO: 525659 - RNA, 24 nt, Artificial Sequence
  Synthetic
cauaauauguauuugaccuuuuac

SEQ ID NO: 525660 - RNA, 18 nt, Artificial Sequence
  Synthetic
aacugcaauaccuuuuac

SEQ ID NO: 525661 - RNA, 19 nt, Artificial Sequence
  Synthetic
uaacugcaauaccuuuuac

SEQ ID NO: 525662 - RNA, 20 nt, Artificial Sequence
  Synthetic
auaacugcaauaccuuuuac

SEQ ID NO: 525663 - RNA, 21 nt, Artificial Sequence
  Synthetic
gauaacugcaauaccuuuuac

SEQ ID NO: 525664 - RNA, 22 nt, Artificial Sequence
  Synthetic
ggauaacugcaauaccuuuuac

SEQ ID NO: 525665 - RNA, 23 nt, Artificial Sequence
  Synthetic
aggauaacugcaauaccuuuuac

SEQ ID NO: 525666 - RNA, 24 nt, Artificial Sequence
  Synthetic
uaggauaacugcaauaccuuuuac

SEQ ID NO: 525667 - RNA, 18 nt, Artificial Sequence
  Synthetic
cgaaaaugucccuuuuac

SEQ ID NO: 525668 - RNA, 19 nt, Artificial Sequence
  Synthetic
acgaaaaugucccuuuuac

SEQ ID NO: 525669 - RNA, 20 nt, Artificial Sequence
  Synthetic
uacgaaaaugucccuuuuac

SEQ ID NO: 525670 - RNA, 21 nt, Artificial Sequence
  Synthetic
uuacgaaaaugucccuuuuac

SEQ ID NO: 525671 - RNA, 22 nt, Artificial Sequence
  Synthetic
cuuacgaaaaugucccuuuuac

SEQ ID NO: 525672 - RNA, 23 nt, Artificial Sequence
  Synthetic
gcuuacgaaaaugucccuuuuac

SEQ ID NO: 525673 - RNA, 24 nt, Artificial Sequence
  Synthetic
agcuuacgaaaaugucccuuuuac

SEQ ID NO: 525674 - RNA, 18 nt, Artificial Sequence
  Synthetic
uuguaaauaaaguuuuac

SEQ ID NO: 525675 - RNA, 19 nt, Artificial Sequence
  Synthetic
uuuguaaauaaaguuuuac

SEQ ID NO: 525676 - RNA, 20 nt, Artificial Sequence
  Synthetic
uuuuguaaauaaaguuuuac

SEQ ID NO: 525677 - RNA, 21 nt, Artificial Sequence
  Synthetic
uuuuuguaaauaaaguuuuac

SEQ ID NO: 525678 - RNA, 22 nt, Artificial Sequence
  Synthetic
guuuuuguaaauaaaguuuuac

SEQ ID NO: 525679 - RNA, 23 nt, Artificial Sequence
  Synthetic
uguuuuuguaaauaaaguuuuac

SEQ ID NO: 525680 - RNA, 24 nt, Artificial Sequence
  Synthetic
cuguuuuuguaaauaaaguuuuac

SEQ ID NO: 525681 - RNA, 18 nt, Artificial Sequence
  Synthetic
gaagccugucaguuuuac

SEQ ID NO: 525682 - RNA, 19 nt, Artificial Sequence
  Synthetic
agaagccugucaguuuuac

SEQ ID NO: 525683 - RNA, 20 nt, Artificial Sequence
  Synthetic
aagaagccugucaguuuuac

SEQ ID NO: 525684 - RNA, 21 nt, Artificial Sequence
  Synthetic
aaagaagccugucaguuuuac

SEQ ID NO: 525685 - RNA, 22 nt, Artificial Sequence
  Synthetic
caaagaagccugucaguuuuac

SEQ ID NO: 525686 - RNA, 23 nt, Artificial Sequence
  Synthetic
gcaaagaagccugucaguuuuac

SEQ ID NO: 525687 - RNA, 24 nt, Artificial Sequence
  Synthetic
agcaaagaagccugucaguuuuac

SEQ ID NO: 525688 - RNA, 18 nt, Artificial Sequence
  Synthetic
aaguuauggauguuuuac

SEQ ID NO: 525689 - RNA, 19 nt, Artificial Sequence
  Synthetic
aaaguuauggauguuuuac

SEQ ID NO: 525690 - RNA, 20 nt, Artificial Sequence
  Synthetic
aaaaguuauggauguuuuac

SEQ ID NO: 525691 - RNA, 21 nt, Artificial Sequence
  Synthetic
gaaaaguuauggauguuuuac

SEQ ID NO: 525692 - RNA, 22 nt, Artificial Sequence
  Synthetic
ggaaaaguuauggauguuuuac

SEQ ID NO: 525693 - RNA, 23 nt, Artificial Sequence
  Synthetic
aggaaaaguuauggauguuuuac

SEQ ID NO: 525694 - RNA, 24 nt, Artificial Sequence
  Synthetic
uaggaaaaguuauggauguuuuac

SEQ ID NO: 525695 - RNA, 18 nt, Artificial Sequence
  Synthetic
uuuuacaagaauuuuuac

SEQ ID NO: 525696 - RNA, 19 nt, Artificial Sequence
  Synthetic
auuuuacaagaauuuuuac

SEQ ID NO: 525697 - RNA, 20 nt, Artificial Sequence
  Synthetic
uauuuuacaagaauuuuuac

SEQ ID NO: 525698 - RNA, 21 nt, Artificial Sequence
  Synthetic
uuauuuuacaagaauuuuuac

SEQ ID NO: 525699 - RNA, 22 nt, Artificial Sequence
  Synthetic
auuauuuuacaagaauuuuuac

SEQ ID NO: 525700 - RNA, 23 nt, Artificial Sequence
  Synthetic
gauuauuuuacaagaauuuuuac

SEQ ID NO: 525701 - RNA, 24 nt, Artificial Sequence
  Synthetic
agauuauuuuacaagaauuuuuac

SEQ ID NO: 525702 - RNA, 18 nt, Artificial Sequence
  Synthetic
agcuaaaagcauuuuuac

SEQ ID NO: 525703 - RNA, 19 nt, Artificial Sequence
  Synthetic
gagcuaaaagcauuuuuac

SEQ ID NO: 525704 - RNA, 20 nt, Artificial Sequence
  Synthetic
agagcuaaaagcauuuuuac

SEQ ID NO: 525705 - RNA, 21 nt, Artificial Sequence
  Synthetic
aagagcuaaaagcauuuuuac

SEQ ID NO: 525706 - RNA, 22 nt, Artificial Sequence
  Synthetic
aaagagcuaaaagcauuuuuac

SEQ ID NO: 525707 - RNA, 23 nt, Artificial Sequence
  Synthetic
uaaagagcuaaaagcauuuuuac

SEQ ID NO: 525708 - RNA, 24 nt, Artificial Sequence
  Synthetic
uuaaagagcuaaaagcauuuuuac

SEQ ID NO: 525709 - RNA, 18 nt, Artificial Sequence
  Synthetic
cugcaauaugauuuuuac

SEQ ID NO: 525710 - RNA, 19 nt, Artificial Sequence
  Synthetic
ucugcaauaugauuuuuac

SEQ ID NO: 525711 - RNA, 20 nt, Artificial Sequence
  Synthetic
gucugcaauaugauuuuuac

SEQ ID NO: 525712 - RNA, 21 nt, Artificial Sequence
  Synthetic
ugucugcaauaugauuuuuac

SEQ ID NO: 525713 - RNA, 22 nt, Artificial Sequence
  Synthetic
gugucugcaauaugauuuuuac

SEQ ID NO: 525714 - RNA, 23 nt, Artificial Sequence
  Synthetic
agugucugcaauaugauuuuuac

SEQ ID NO: 525715 - RNA, 24 nt, Artificial Sequence
  Synthetic
aagugucugcaauaugauuuuuac

SEQ ID NO: 525716 - RNA, 18 nt, Artificial Sequence
  Synthetic
ucaguauucuauuuuuac

SEQ ID NO: 525717 - RNA, 19 nt, Artificial Sequence
  Synthetic
uucaguauucuauuuuuac

SEQ ID NO: 525718 - RNA, 20 nt, Artificial Sequence
  Synthetic
uuucaguauucuauuuuuac

SEQ ID NO: 525719 - RNA, 21 nt, Artificial Sequence
  Synthetic
guuucaguauucuauuuuuac

SEQ ID NO: 525720 - RNA, 22 nt, Artificial Sequence
  Synthetic
uguuucaguauucuauuuuuac

SEQ ID NO: 525721 - RNA, 23 nt, Artificial Sequence
  Synthetic
uuguuucaguauucuauuuuuac

SEQ ID NO: 525722 - RNA, 24 nt, Artificial Sequence
  Synthetic
uuuguuucaguauucuauuuuuac

SEQ ID NO: 525723 - RNA, 18 nt, Artificial Sequence
  Synthetic
uaauuuuucuauuuuuac

SEQ ID NO: 525724 - RNA, 19 nt, Artificial Sequence
  Synthetic
cuaauuuuucuauuuuuac

SEQ ID NO: 525725 - RNA, 20 nt, Artificial Sequence
  Synthetic
gcuaauuuuucuauuuuuac

SEQ ID NO: 525726 - RNA, 21 nt, Artificial Sequence
  Synthetic
ggcuaauuuuucuauuuuuac

SEQ ID NO: 525727 - RNA, 22 nt, Artificial Sequence
  Synthetic
uggcuaauuuuucuauuuuuac

SEQ ID NO: 525728 - RNA, 23 nt, Artificial Sequence
  Synthetic
cuggcuaauuuuucuauuuuuac

SEQ ID NO: 525729 - RNA, 24 nt, Artificial Sequence
  Synthetic
ccuggcuaauuuuucuauuuuuac

SEQ ID NO: 525730 - RNA, 18 nt, Artificial Sequence
  Synthetic
aucucgacaacuuuuuac

SEQ ID NO: 525731 - RNA, 19 nt, Artificial Sequence
  Synthetic
caucucgacaacuuuuuac

SEQ ID NO: 525732 - RNA, 20 nt, Artificial Sequence
  Synthetic
gcaucucgacaacuuuuuac

SEQ ID NO: 525733 - RNA, 21 nt, Artificial Sequence
  Synthetic
agcaucucgacaacuuuuuac

SEQ ID NO: 525734 - RNA, 22 nt, Artificial Sequence
  Synthetic
aagcaucucgacaacuuuuuac

SEQ ID NO: 525735 - RNA, 23 nt, Artificial Sequence
  Synthetic
caagcaucucgacaacuuuuuac

SEQ ID NO: 525736 - RNA, 24 nt, Artificial Sequence
  Synthetic
ucaagcaucucgacaacuuuuuac

SEQ ID NO: 525737 - RNA, 18 nt, Artificial Sequence
  Synthetic
cuuuugcccacuuuuuac

SEQ ID NO: 525738 - RNA, 19 nt, Artificial Sequence
  Synthetic
ucuuuugcccacuuuuuac

SEQ ID NO: 525739 - RNA, 20 nt, Artificial Sequence
  Synthetic
gucuuuugcccacuuuuuac

SEQ ID NO: 525740 - RNA, 21 nt, Artificial Sequence
  Synthetic
ugucuuuugcccacuuuuuac

SEQ ID NO: 525741 - RNA, 22 nt, Artificial Sequence
  Synthetic
augucuuuugcccacuuuuuac

SEQ ID NO: 525742 - RNA, 23 nt, Artificial Sequence
  Synthetic
caugucuuuugcccacuuuuuac

SEQ ID NO: 525743 - RNA, 24 nt, Artificial Sequence
  Synthetic
ucaugucuuuugcccacuuuuuac

SEQ ID NO: 525744 - RNA, 18 nt, Artificial Sequence
  Synthetic
cauccuuuauguuuuuac

SEQ ID NO: 525745 - RNA, 19 nt, Artificial Sequence
  Synthetic
acauccuuuauguuuuuac

SEQ ID NO: 525746 - RNA, 20 nt, Artificial Sequence
  Synthetic
uacauccuuuauguuuuuac

SEQ ID NO: 525747 - RNA, 21 nt, Artificial Sequence
  Synthetic
uuacauccuuuauguuuuuac

SEQ ID NO: 525748 - RNA, 22 nt, Artificial Sequence
  Synthetic
uuuacauccuuuauguuuuuac

SEQ ID NO: 525749 - RNA, 23 nt, Artificial Sequence
  Synthetic
guuuacauccuuuauguuuuuac

SEQ ID NO: 525750 - RNA, 24 nt, Artificial Sequence
  Synthetic
aguuuacauccuuuauguuuuuac

SEQ ID NO: 525751 - RNA, 18 nt, Artificial Sequence
  Synthetic
ucccccaagcaaaaaacc

SEQ ID NO: 525752 - RNA, 19 nt, Artificial Sequence
  Synthetic
uucccccaagcaaaaaacc

SEQ ID NO: 525753 - RNA, 20 nt, Artificial Sequence
  Synthetic
guucccccaagcaaaaaacc

SEQ ID NO: 525754 - RNA, 21 nt, Artificial Sequence
  Synthetic
aguucccccaagcaaaaaacc

SEQ ID NO: 525755 - RNA, 22 nt, Artificial Sequence
  Synthetic
caguucccccaagcaaaaaacc

SEQ ID NO: 525756 - RNA, 23 nt, Artificial Sequence
  Synthetic
ccaguucccccaagcaaaaaacc

SEQ ID NO: 525757 - RNA, 24 nt, Artificial Sequence
  Synthetic
gccaguucccccaagcaaaaaacc

SEQ ID NO: 525758 - RNA, 18 nt, Artificial Sequence
  Synthetic
gaaagauuaauaaaaacc

SEQ ID NO: 525759 - RNA, 19 nt, Artificial Sequence
  Synthetic
agaaagauuaauaaaaacc

SEQ ID NO: 525760 - RNA, 20 nt, Artificial Sequence
  Synthetic
uagaaagauuaauaaaaacc

SEQ ID NO: 525761 - RNA, 21 nt, Artificial Sequence
  Synthetic
uuagaaagauuaauaaaaacc

SEQ ID NO: 525762 - RNA, 22 nt, Artificial Sequence
  Synthetic
uuuagaaagauuaauaaaaacc

SEQ ID NO: 525763 - RNA, 23 nt, Artificial Sequence
  Synthetic
cuuuagaaagauuaauaaaaacc

SEQ ID NO: 525764 - RNA, 24 nt, Artificial Sequence
  Synthetic
acuuuagaaagauuaauaaaaacc

SEQ ID NO: 525765 - RNA, 18 nt, Artificial Sequence
  Synthetic
uacaguauacuaaaaacc

SEQ ID NO: 525766 - RNA, 19 nt, Artificial Sequence
  Synthetic
auacaguauacuaaaaacc

SEQ ID NO: 525767 - RNA, 20 nt, Artificial Sequence
  Synthetic
aauacaguauacuaaaaacc

SEQ ID NO: 525768 - RNA, 21 nt, Artificial Sequence
  Synthetic
uaauacaguauacuaaaaacc

SEQ ID NO: 525769 - RNA, 22 nt, Artificial Sequence
  Synthetic
guaauacaguauacuaaaaacc

SEQ ID NO: 525770 - RNA, 23 nt, Artificial Sequence
  Synthetic
uguaauacaguauacuaaaaacc

SEQ ID NO: 525771 - RNA, 24 nt, Artificial Sequence
  Synthetic
uuguaauacaguauacuaaaaacc

SEQ ID NO: 525772 - RNA, 18 nt, Artificial Sequence
  Synthetic
aauuauaauguaaaaacc

SEQ ID NO: 525773 - RNA, 19 nt, Artificial Sequence
  Synthetic
uaauuauaauguaaaaacc

SEQ ID NO: 525774 - RNA, 20 nt, Artificial Sequence
  Synthetic
guaauuauaauguaaaaacc

SEQ ID NO: 525775 - RNA, 21 nt, Artificial Sequence
  Synthetic
cguaauuauaauguaaaaacc

SEQ ID NO: 525776 - RNA, 22 nt, Artificial Sequence
  Synthetic
ccguaauuauaauguaaaaacc

SEQ ID NO: 525777 - RNA, 23 nt, Artificial Sequence
  Synthetic
accguaauuauaauguaaaaacc

SEQ ID NO: 525778 - RNA, 24 nt, Artificial Sequence
  Synthetic
aaccguaauuauaauguaaaaacc

SEQ ID NO: 525779 - RNA, 18 nt, Artificial Sequence
  Synthetic
aaaaaaauuuuaaaaacc

SEQ ID NO: 525780 - RNA, 19 nt, Artificial Sequence
  Synthetic
aaaaaaaauuuuaaaaacc

SEQ ID NO: 525781 - RNA, 20 nt, Artificial Sequence
  Synthetic
aaaaaaaaauuuuaaaaacc

SEQ ID NO: 525782 - RNA, 21 nt, Artificial Sequence
  Synthetic
aaaaaaaaaauuuuaaaaacc

SEQ ID NO: 525783 - RNA, 22 nt, Artificial Sequence
  Synthetic
uaaaaaaaaaauuuuaaaaacc

SEQ ID NO: 525784 - RNA, 23 nt, Artificial Sequence
  Synthetic
auaaaaaaaaaauuuuaaaaacc

SEQ ID NO: 525785 - RNA, 24 nt, Artificial Sequence
  Synthetic
aauaaaaaaaaaauuuuaaaaacc

SEQ ID NO: 525786 - RNA, 18 nt, Artificial Sequence
  Synthetic
uugugaaaugacaaaacc

SEQ ID NO: 525787 - RNA, 19 nt, Artificial Sequence
  Synthetic
uuugugaaaugacaaaacc

SEQ ID NO: 525788 - RNA, 20 nt, Artificial Sequence
  Synthetic
auuugugaaaugacaaaacc

SEQ ID NO: 525789 - RNA, 21 nt, Artificial Sequence
  Synthetic
aauuugugaaaugacaaaacc

SEQ ID NO: 525790 - RNA, 22 nt, Artificial Sequence
  Synthetic
aaauuugugaaaugacaaaacc

SEQ ID NO: 525791 - RNA, 23 nt, Artificial Sequence
  Synthetic
gaaauuugugaaaugacaaaacc

SEQ ID NO: 525792 - RNA, 24 nt, Artificial Sequence
  Synthetic
ggaaauuugugaaaugacaaaacc

SEQ ID NO: 525793 - RNA, 18 nt, Artificial Sequence
  Synthetic
auucuuugaaccaaaacc

SEQ ID NO: 525794 - RNA, 19 nt, Artificial Sequence
  Synthetic
gauucuuugaaccaaaacc

SEQ ID NO: 525795 - RNA, 20 nt, Artificial Sequence
  Synthetic
ggauucuuugaaccaaaacc

SEQ ID NO: 525796 - RNA, 21 nt, Artificial Sequence
  Synthetic
uggauucuuugaaccaaaacc

SEQ ID NO: 525797 - RNA, 22 nt, Artificial Sequence
  Synthetic
cuggauucuuugaaccaaaacc

SEQ ID NO: 525798 - RNA, 23 nt, Artificial Sequence
  Synthetic
acuggauucuuugaaccaaaacc

SEQ ID NO: 525799 - RNA, 24 nt, Artificial Sequence
  Synthetic
uacuggauucuuugaaccaaaacc

SEQ ID NO: 525800 - RNA, 18 nt, Artificial Sequence
  Synthetic
aaaagagguuccaaaacc

SEQ ID NO: 525801 - RNA, 19 nt, Artificial Sequence
  Synthetic
caaaagagguuccaaaacc

SEQ ID NO: 525802 - RNA, 20 nt, Artificial Sequence
  Synthetic
acaaaagagguuccaaaacc

SEQ ID NO: 525803 - RNA, 21 nt, Artificial Sequence
  Synthetic
uacaaaagagguuccaaaacc

SEQ ID NO: 525804 - RNA, 22 nt, Artificial Sequence
  Synthetic
uuacaaaagagguuccaaaacc

SEQ ID NO: 525805 - RNA, 23 nt, Artificial Sequence
  Synthetic
uuuacaaaagagguuccaaaacc

SEQ ID NO: 525806 - RNA, 24 nt, Artificial Sequence
  Synthetic
cuuuacaaaagagguuccaaaacc

SEQ ID NO: 525807 - RNA, 18 nt, Artificial Sequence
  Synthetic
cacucucaaagcaaaacc

SEQ ID NO: 525808 - RNA, 19 nt, Artificial Sequence
  Synthetic
ucacucucaaagcaaaacc

SEQ ID NO: 525809 - RNA, 20 nt, Artificial Sequence
  Synthetic
aucacucucaaagcaaaacc

SEQ ID NO: 525810 - RNA, 21 nt, Artificial Sequence
  Synthetic
aaucacucucaaagcaaaacc

SEQ ID NO: 525811 - RNA, 22 nt, Artificial Sequence
  Synthetic
uaaucacucucaaagcaaaacc

SEQ ID NO: 525812 - RNA, 23 nt, Artificial Sequence
  Synthetic
guaaucacucucaaagcaaaacc

SEQ ID NO: 525813 - RNA, 24 nt, Artificial Sequence
  Synthetic
aguaaucacucucaaagcaaaacc

SEQ ID NO: 525814 - RNA, 18 nt, Artificial Sequence
  Synthetic
aguuaaacuuucaaaacc

SEQ ID NO: 525815 - RNA, 19 nt, Artificial Sequence
  Synthetic
gaguuaaacuuucaaaacc

SEQ ID NO: 525816 - RNA, 20 nt, Artificial Sequence
  Synthetic
agaguuaaacuuucaaaacc

SEQ ID NO: 525817 - RNA, 21 nt, Artificial Sequence
  Synthetic
aagaguuaaacuuucaaaacc

SEQ ID NO: 525818 - RNA, 22 nt, Artificial Sequence
  Synthetic
aaagaguuaaacuuucaaaacc

SEQ ID NO: 525819 - RNA, 23 nt, Artificial Sequence
  Synthetic
uaaagaguuaaacuuucaaaacc

SEQ ID NO: 525820 - RNA, 24 nt, Artificial Sequence
  Synthetic
auaaagaguuaaacuuucaaaacc

SEQ ID NO: 525821 - RNA, 18 nt, Artificial Sequence
  Synthetic
agcaauccugagaaaacc

SEQ ID NO: 525822 - RNA, 19 nt, Artificial Sequence
  Synthetic
uagcaauccugagaaaacc

SEQ ID NO: 525823 - RNA, 20 nt, Artificial Sequence
  Synthetic
auagcaauccugagaaaacc

SEQ ID NO: 525824 - RNA, 21 nt, Artificial Sequence
  Synthetic
cauagcaauccugagaaaacc

SEQ ID NO: 525825 - RNA, 22 nt, Artificial Sequence
  Synthetic
gcauagcaauccugagaaaacc

SEQ ID NO: 525826 - RNA, 23 nt, Artificial Sequence
  Synthetic
ugcauagcaauccugagaaaacc

SEQ ID NO: 525827 - RNA, 24 nt, Artificial Sequence
  Synthetic
uugcauagcaauccugagaaaacc

SEQ ID NO: 525828 - RNA, 18 nt, Artificial Sequence
  Synthetic
ucuaccuacaugaaaacc

SEQ ID NO: 525829 - RNA, 19 nt, Artificial Sequence
  Synthetic
uucuaccuacaugaaaacc

SEQ ID NO: 525830 - RNA, 20 nt, Artificial Sequence
  Synthetic
cuucuaccuacaugaaaacc

SEQ ID NO: 525831 - RNA, 21 nt, Artificial Sequence
  Synthetic
ucuucuaccuacaugaaaacc

SEQ ID NO: 525832 - RNA, 22 nt, Artificial Sequence
  Synthetic
uucuucuaccuacaugaaaacc

SEQ ID NO: 525833 - RNA, 23 nt, Artificial Sequence
  Synthetic
uuucuucuaccuacaugaaaacc

SEQ ID NO: 525834 - RNA, 24 nt, Artificial Sequence
  Synthetic
guuucuucuaccuacaugaaaacc

SEQ ID NO: 525835 - RNA, 18 nt, Artificial Sequence
  Synthetic
acaggucaggugaaaacc

SEQ ID NO: 525836 - RNA, 19 nt, Artificial Sequence
  Synthetic
gacaggucaggugaaaacc

SEQ ID NO: 525837 - RNA, 20 nt, Artificial Sequence
  Synthetic
agacaggucaggugaaaacc

SEQ ID NO: 525838 - RNA, 21 nt, Artificial Sequence
  Synthetic
gagacaggucaggugaaaacc

SEQ ID NO: 525839 - RNA, 22 nt, Artificial Sequence
  Synthetic
ggagacaggucaggugaaaacc

SEQ ID NO: 525840 - RNA, 23 nt, Artificial Sequence
  Synthetic
uggagacaggucaggugaaaacc

SEQ ID NO: 525841 - RNA, 24 nt, Artificial Sequence
  Synthetic
auggagacaggucaggugaaaacc

SEQ ID NO: 525842 - RNA, 18 nt, Artificial Sequence
  Synthetic
ugacaacagaauaaaacc

SEQ ID NO: 525843 - RNA, 19 nt, Artificial Sequence
  Synthetic
gugacaacagaauaaaacc

SEQ ID NO: 525844 - RNA, 20 nt, Artificial Sequence
  Synthetic
ugugacaacagaauaaaacc

SEQ ID NO: 525845 - RNA, 21 nt, Artificial Sequence
  Synthetic
uugugacaacagaauaaaacc

SEQ ID NO: 525846 - RNA, 22 nt, Artificial Sequence
  Synthetic
uuugugacaacagaauaaaacc

SEQ ID NO: 525847 - RNA, 23 nt, Artificial Sequence
  Synthetic
guuugugacaacagaauaaaacc

SEQ ID NO: 525848 - RNA, 24 nt, Artificial Sequence
  Synthetic
gguuugugacaacagaauaaaacc

SEQ ID NO: 525849 - RNA, 18 nt, Artificial Sequence
  Synthetic
uuuccuaaaacuaaaacc

SEQ ID NO: 525850 - RNA, 19 nt, Artificial Sequence
  Synthetic
cuuuccuaaaacuaaaacc

SEQ ID NO: 525851 - RNA, 20 nt, Artificial Sequence
  Synthetic
gcuuuccuaaaacuaaaacc

SEQ ID NO: 525852 - RNA, 21 nt, Artificial Sequence
  Synthetic
ugcuuuccuaaaacuaaaacc

SEQ ID NO: 525853 - RNA, 22 nt, Artificial Sequence
  Synthetic
cugcuuuccuaaaacuaaaacc

SEQ ID NO: 525854 - RNA, 23 nt, Artificial Sequence
  Synthetic
gcugcuuuccuaaaacuaaaacc

SEQ ID NO: 525855 - RNA, 24 nt, Artificial Sequence
  Synthetic
agcugcuuuccuaaaacuaaaacc

SEQ ID NO: 525856 - RNA, 18 nt, Artificial Sequence
  Synthetic
auacuuuuuuuuaaaacc

SEQ ID NO: 525857 - RNA, 19 nt, Artificial Sequence
  Synthetic
aauacuuuuuuuuaaaacc

SEQ ID NO: 525858 - RNA, 20 nt, Artificial Sequence
  Synthetic
aaauacuuuuuuuuaaaacc

SEQ ID NO: 525859 - RNA, 21 nt, Artificial Sequence
  Synthetic
caaauacuuuuuuuuaaaacc

SEQ ID NO: 525860 - RNA, 22 nt, Artificial Sequence
  Synthetic
ucaaauacuuuuuuuuaaaacc

SEQ ID NO: 525861 - RNA, 23 nt, Artificial Sequence
  Synthetic
uucaaauacuuuuuuuuaaaacc

SEQ ID NO: 525862 - RNA, 24 nt, Artificial Sequence
  Synthetic
uuucaaauacuuuuuuuuaaaacc

SEQ ID NO: 525863 - RNA, 18 nt, Artificial Sequence
  Synthetic
auucaguauauacaaacc

SEQ ID NO: 525864 - RNA, 19 nt, Artificial Sequence
  Synthetic
gauucaguauauacaaacc

SEQ ID NO: 525865 - RNA, 20 nt, Artificial Sequence
  Synthetic
agauucaguauauacaaacc

SEQ ID NO: 525866 - RNA, 21 nt, Artificial Sequence
  Synthetic
uagauucaguauauacaaacc

SEQ ID NO: 525867 - RNA, 22 nt, Artificial Sequence
  Synthetic
uuagauucaguauauacaaacc

SEQ ID NO: 525868 - RNA, 23 nt, Artificial Sequence
  Synthetic
uuuagauucaguauauacaaacc

SEQ ID NO: 525869 - RNA, 24 nt, Artificial Sequence
  Synthetic
uuuuagauucaguauauacaaacc

SEQ ID NO: 525870 - RNA, 18 nt, Artificial Sequence
  Synthetic
agugaaaugcaccaaacc

SEQ ID NO: 525871 - RNA, 19 nt, Artificial Sequence
  Synthetic
aagugaaaugcaccaaacc

SEQ ID NO: 525872 - RNA, 20 nt, Artificial Sequence
  Synthetic
aaagugaaaugcaccaaacc

SEQ ID NO: 525873 - RNA, 21 nt, Artificial Sequence
  Synthetic
caaagugaaaugcaccaaacc

SEQ ID NO: 525874 - RNA, 22 nt, Artificial Sequence
  Synthetic
ccaaagugaaaugcaccaaacc

SEQ ID NO: 525875 - RNA, 23 nt, Artificial Sequence
  Synthetic
accaaagugaaaugcaccaaacc

SEQ ID NO: 525876 - RNA, 24 nt, Artificial Sequence
  Synthetic
caccaaagugaaaugcaccaaacc

SEQ ID NO: 525877 - RNA, 18 nt, Artificial Sequence
  Synthetic
gucucccaguagcaaacc

SEQ ID NO: 525878 - RNA, 19 nt, Artificial Sequence
  Synthetic
ggucucccaguagcaaacc

SEQ ID NO: 525879 - RNA, 20 nt, Artificial Sequence
  Synthetic
gggucucccaguagcaaacc

SEQ ID NO: 525880 - RNA, 21 nt, Artificial Sequence
  Synthetic
ugggucucccaguagcaaacc

SEQ ID NO: 525881 - RNA, 22 nt, Artificial Sequence
  Synthetic
uugggucucccaguagcaaacc

SEQ ID NO: 525882 - RNA, 23 nt, Artificial Sequence
  Synthetic
uuugggucucccaguagcaaacc

SEQ ID NO: 525883 - RNA, 24 nt, Artificial Sequence
  Synthetic
auuugggucucccaguagcaaacc

SEQ ID NO: 525884 - RNA, 18 nt, Artificial Sequence
  Synthetic
ggaagccaucugcaaacc

SEQ ID NO: 525885 - RNA, 19 nt, Artificial Sequence
  Synthetic
aggaagccaucugcaaacc

SEQ ID NO: 525886 - RNA, 20 nt, Artificial Sequence
  Synthetic
aaggaagccaucugcaaacc

SEQ ID NO: 525887 - RNA, 21 nt, Artificial Sequence
  Synthetic
gaaggaagccaucugcaaacc

SEQ ID NO: 525888 - RNA, 22 nt, Artificial Sequence
  Synthetic
agaaggaagccaucugcaaacc

SEQ ID NO: 525889 - RNA, 23 nt, Artificial Sequence
  Synthetic
gagaaggaagccaucugcaaacc

SEQ ID NO: 525890 - RNA, 24 nt, Artificial Sequence
  Synthetic
agagaaggaagccaucugcaaacc

SEQ ID NO: 525891 - RNA, 18 nt, Artificial Sequence
  Synthetic
aauguaagaccucaaacc

SEQ ID NO: 525892 - RNA, 19 nt, Artificial Sequence
  Synthetic
aaauguaagaccucaaacc

SEQ ID NO: 525893 - RNA, 20 nt, Artificial Sequence
  Synthetic
uaaauguaagaccucaaacc

SEQ ID NO: 525894 - RNA, 21 nt, Artificial Sequence
  Synthetic
uuaaauguaagaccucaaacc

SEQ ID NO: 525895 - RNA, 22 nt, Artificial Sequence
  Synthetic
cuuaaauguaagaccucaaacc

SEQ ID NO: 525896 - RNA, 23 nt, Artificial Sequence
  Synthetic
acuuaaauguaagaccucaaacc

SEQ ID NO: 525897 - RNA, 24 nt, Artificial Sequence
  Synthetic
gacuuaaauguaagaccucaaacc

SEQ ID NO: 525898 - RNA, 18 nt, Artificial Sequence
  Synthetic
aaaaaaaagaaagaaacc

SEQ ID NO: 525899 - RNA, 19 nt, Artificial Sequence
  Synthetic
aaaaaaaaagaaagaaacc

SEQ ID NO: 525900 - RNA, 20 nt, Artificial Sequence
  Synthetic
aaaaaaaaaagaaagaaacc

SEQ ID NO: 525901 - RNA, 21 nt, Artificial Sequence
  Synthetic
aaaaaaaaaaagaaagaaacc

SEQ ID NO: 525902 - RNA, 22 nt, Artificial Sequence
  Synthetic
aaaaaaaaaaaagaaagaaacc

SEQ ID NO: 525903 - RNA, 23 nt, Artificial Sequence
  Synthetic
aaaaaaaaaaaaagaaagaaacc

SEQ ID NO: 525904 - RNA, 24 nt, Artificial Sequence
  Synthetic
aaaaaaaaaaaaaagaaagaaacc

SEQ ID NO: 525905 - RNA, 18 nt, Artificial Sequence
  Synthetic
gagagaagugaagaaacc

SEQ ID NO: 525906 - RNA, 19 nt, Artificial Sequence
  Synthetic
agagagaagugaagaaacc

SEQ ID NO: 525907 - RNA, 20 nt, Artificial Sequence
  Synthetic
uagagagaagugaagaaacc

SEQ ID NO: 525908 - RNA, 21 nt, Artificial Sequence
  Synthetic
guagagagaagugaagaaacc

SEQ ID NO: 525909 - RNA, 22 nt, Artificial Sequence
  Synthetic
gguagagagaagugaagaaacc

SEQ ID NO: 525910 - RNA, 23 nt, Artificial Sequence
  Synthetic
agguagagagaagugaagaaacc

SEQ ID NO: 525911 - RNA, 24 nt, Artificial Sequence
  Synthetic
aagguagagagaagugaagaaacc

SEQ ID NO: 525912 - RNA, 18 nt, Artificial Sequence
  Synthetic
caucacaggagagaaacc

SEQ ID NO: 525913 - RNA, 19 nt, Artificial Sequence
  Synthetic
gcaucacaggagagaaacc

SEQ ID NO: 525914 - RNA, 20 nt, Artificial Sequence
  Synthetic
ugcaucacaggagagaaacc

SEQ ID NO: 525915 - RNA, 21 nt, Artificial Sequence
  Synthetic
uugcaucacaggagagaaacc

SEQ ID NO: 525916 - RNA, 22 nt, Artificial Sequence
  Synthetic
auugcaucacaggagagaaacc

SEQ ID NO: 525917 - RNA, 23 nt, Artificial Sequence
  Synthetic
gauugcaucacaggagagaaacc

SEQ ID NO: 525918 - RNA, 24 nt, Artificial Sequence
  Synthetic
ggauugcaucacaggagagaaacc

SEQ ID NO: 525919 - RNA, 18 nt, Artificial Sequence
  Synthetic
caagaagaaauagaaacc

SEQ ID NO: 525920 - RNA, 19 nt, Artificial Sequence
  Synthetic
ucaagaagaaauagaaacc

SEQ ID NO: 525921 - RNA, 20 nt, Artificial Sequence
  Synthetic
aucaagaagaaauagaaacc

SEQ ID NO: 525922 - RNA, 21 nt, Artificial Sequence
  Synthetic
aaucaagaagaaauagaaacc

SEQ ID NO: 525923 - RNA, 22 nt, Artificial Sequence
  Synthetic
aaaucaagaagaaauagaaacc

SEQ ID NO: 525924 - RNA, 23 nt, Artificial Sequence
  Synthetic
uaaaucaagaagaaauagaaacc

SEQ ID NO: 525925 - RNA, 24 nt, Artificial Sequence
  Synthetic
uuaaaucaagaagaaauagaaacc

SEQ ID NO: 525926 - RNA, 18 nt, Artificial Sequence
  Synthetic
uucauaaacauagaaacc

SEQ ID NO: 525927 - RNA, 19 nt, Artificial Sequence
  Synthetic
auucauaaacauagaaacc

SEQ ID NO: 525928 - RNA, 20 nt, Artificial Sequence
  Synthetic
aauucauaaacauagaaacc

SEQ ID NO: 525929 - RNA, 21 nt, Artificial Sequence
  Synthetic
gaauucauaaacauagaaacc

SEQ ID NO: 525930 - RNA, 22 nt, Artificial Sequence
  Synthetic
agaauucauaaacauagaaacc

SEQ ID NO: 525931 - RNA, 23 nt, Artificial Sequence
  Synthetic
gagaauucauaaacauagaaacc

SEQ ID NO: 525932 - RNA, 24 nt, Artificial Sequence
  Synthetic
agagaauucauaaacauagaaacc

SEQ ID NO: 525933 - RNA, 18 nt, Artificial Sequence
  Synthetic
uugaacaguauagaaacc

SEQ ID NO: 525934 - RNA, 19 nt, Artificial Sequence
  Synthetic
uuugaacaguauagaaacc

SEQ ID NO: 525935 - RNA, 20 nt, Artificial Sequence
  Synthetic
auuugaacaguauagaaacc

SEQ ID NO: 525936 - RNA, 21 nt, Artificial Sequence
  Synthetic
cauuugaacaguauagaaacc

SEQ ID NO: 525937 - RNA, 22 nt, Artificial Sequence
  Synthetic
ccauuugaacaguauagaaacc

SEQ ID NO: 525938 - RNA, 23 nt, Artificial Sequence
  Synthetic
cccauuugaacaguauagaaacc

SEQ ID NO: 525939 - RNA, 24 nt, Artificial Sequence
  Synthetic
acccauuugaacaguauagaaacc

SEQ ID NO: 525940 - RNA, 18 nt, Artificial Sequence
  Synthetic
ucauuaaagguagaaacc

SEQ ID NO: 525941 - RNA, 19 nt, Artificial Sequence
  Synthetic
aucauuaaagguagaaacc

SEQ ID NO: 525942 - RNA, 20 nt, Artificial Sequence
  Synthetic
aaucauuaaagguagaaacc

SEQ ID NO: 525943 - RNA, 21 nt, Artificial Sequence
  Synthetic
caaucauuaaagguagaaacc

SEQ ID NO: 525944 - RNA, 22 nt, Artificial Sequence
  Synthetic
gcaaucauuaaagguagaaacc

SEQ ID NO: 525945 - RNA, 23 nt, Artificial Sequence
  Synthetic
ugcaaucauuaaagguagaaacc

SEQ ID NO: 525946 - RNA, 24 nt, Artificial Sequence
  Synthetic
uugcaaucauuaaagguagaaacc

SEQ ID NO: 525947 - RNA, 18 nt, Artificial Sequence
  Synthetic
cacgcaauguuagaaacc

SEQ ID NO: 525948 - RNA, 19 nt, Artificial Sequence
  Synthetic
acacgcaauguuagaaacc

SEQ ID NO: 525949 - RNA, 20 nt, Artificial Sequence
  Synthetic
aacacgcaauguuagaaacc

SEQ ID NO: 525950 - RNA, 21 nt, Artificial Sequence
  Synthetic
caacacgcaauguuagaaacc

SEQ ID NO: 525951 - RNA, 22 nt, Artificial Sequence
  Synthetic
gcaacacgcaauguuagaaacc

SEQ ID NO: 525952 - RNA, 23 nt, Artificial Sequence
  Synthetic
ggcaacacgcaauguuagaaacc

SEQ ID NO: 525953 - RNA, 24 nt, Artificial Sequence
  Synthetic
uggcaacacgcaauguuagaaacc

SEQ ID NO: 525954 - RNA, 18 nt, Artificial Sequence
  Synthetic
gaaaaguagaaggaaacc

SEQ ID NO: 525955 - RNA, 19 nt, Artificial Sequence
  Synthetic
ugaaaaguagaaggaaacc

SEQ ID NO: 525956 - RNA, 20 nt, Artificial Sequence
  Synthetic
cugaaaaguagaaggaaacc

SEQ ID NO: 525957 - RNA, 21 nt, Artificial Sequence
  Synthetic
ucugaaaaguagaaggaaacc

SEQ ID NO: 525958 - RNA, 22 nt, Artificial Sequence
  Synthetic
uucugaaaaguagaaggaaacc

SEQ ID NO: 525959 - RNA, 23 nt, Artificial Sequence
  Synthetic
auucugaaaaguagaaggaaacc

SEQ ID NO: 525960 - RNA, 24 nt, Artificial Sequence
  Synthetic
cauucugaaaaguagaaggaaacc

SEQ ID NO: 525961 - RNA, 18 nt, Artificial Sequence
  Synthetic
uucugcccuguggaaacc

SEQ ID NO: 525962 - RNA, 19 nt, Artificial Sequence
  Synthetic
cuucugcccuguggaaacc

SEQ ID NO: 525963 - RNA, 20 nt, Artificial Sequence
  Synthetic
gcuucugcccuguggaaacc

SEQ ID NO: 525964 - RNA, 21 nt, Artificial Sequence
  Synthetic
ggcuucugcccuguggaaacc

SEQ ID NO: 525965 - RNA, 22 nt, Artificial Sequence
  Synthetic
gggcuucugcccuguggaaacc

SEQ ID NO: 525966 - RNA, 23 nt, Artificial Sequence
  Synthetic
agggcuucugcccuguggaaacc

SEQ ID NO: 525967 - RNA, 24 nt, Artificial Sequence
  Synthetic
aagggcuucugcccuguggaaacc

SEQ ID NO: 525968 - RNA, 18 nt, Artificial Sequence
  Synthetic
acacagggguuggaaacc

SEQ ID NO: 525969 - RNA, 19 nt, Artificial Sequence
  Synthetic
gacacagggguuggaaacc

SEQ ID NO: 525970 - RNA, 20 nt, Artificial Sequence
  Synthetic
ugacacagggguuggaaacc

SEQ ID NO: 525971 - RNA, 21 nt, Artificial Sequence
  Synthetic
augacacagggguuggaaacc

SEQ ID NO: 525972 - RNA, 22 nt, Artificial Sequence
  Synthetic
aaugacacagggguuggaaacc

SEQ ID NO: 525973 - RNA, 23 nt, Artificial Sequence
  Synthetic
gaaugacacagggguuggaaacc

SEQ ID NO: 525974 - RNA, 24 nt, Artificial Sequence
  Synthetic
ugaaugacacagggguuggaaacc

SEQ ID NO: 525975 - RNA, 18 nt, Artificial Sequence
  Synthetic
cuggaaaggggugaaacc

SEQ ID NO: 525976 - RNA, 19 nt, Artificial Sequence
  Synthetic
ucuggaaaggggugaaacc

SEQ ID NO: 525977 - RNA, 20 nt, Artificial Sequence
  Synthetic
cucuggaaaggggugaaacc

SEQ ID NO: 525978 - RNA, 21 nt, Artificial Sequence
  Synthetic
ucucuggaaaggggugaaacc

SEQ ID NO: 525979 - RNA, 22 nt, Artificial Sequence
  Synthetic
uucucuggaaaggggugaaacc

SEQ ID NO: 525980 - RNA, 23 nt, Artificial Sequence
  Synthetic
guucucuggaaaggggugaaacc

SEQ ID NO: 525981 - RNA, 24 nt, Artificial Sequence
  Synthetic
gguucucuggaaaggggugaaacc

SEQ ID NO: 525982 - RNA, 18 nt, Artificial Sequence
  Synthetic
aauuuugugcuugaaacc

SEQ ID NO: 525983 - RNA, 19 nt, Artificial Sequence
  Synthetic
caauuuugugcuugaaacc

SEQ ID NO: 525984 - RNA, 20 nt, Artificial Sequence
  Synthetic
ccaauuuugugcuugaaacc

SEQ ID NO: 525985 - RNA, 21 nt, Artificial Sequence
  Synthetic
cccaauuuugugcuugaaacc

SEQ ID NO: 525986 - RNA, 22 nt, Artificial Sequence
  Synthetic
gcccaauuuugugcuugaaacc

SEQ ID NO: 525987 - RNA, 23 nt, Artificial Sequence
  Synthetic
ugcccaauuuugugcuugaaacc

SEQ ID NO: 525988 - RNA, 24 nt, Artificial Sequence
  Synthetic
cugcccaauuuugugcuugaaacc

SEQ ID NO: 525989 - RNA, 18 nt, Artificial Sequence
  Synthetic
cucucagauucauaaacc

SEQ ID NO: 525990 - RNA, 19 nt, Artificial Sequence
  Synthetic
acucucagauucauaaacc

SEQ ID NO: 525991 - RNA, 20 nt, Artificial Sequence
  Synthetic
cacucucagauucauaaacc

SEQ ID NO: 525992 - RNA, 21 nt, Artificial Sequence
  Synthetic
ucacucucagauucauaaacc

SEQ ID NO: 525993 - RNA, 22 nt, Artificial Sequence
  Synthetic
cucacucucagauucauaaacc

SEQ ID NO: 525994 - RNA, 23 nt, Artificial Sequence
  Synthetic
ccucacucucagauucauaaacc

SEQ ID NO: 525995 - RNA, 24 nt, Artificial Sequence
  Synthetic
gccucacucucagauucauaaacc

SEQ ID NO: 525996 - RNA, 21 nt, Artificial Sequence
  Synthetic
acacccucccaagacuaaacc

SEQ ID NO: 525997 - RNA, 22 nt, Artificial Sequence
  Synthetic
uacacccucccaagacuaaacc

SEQ ID NO: 525998 - RNA, 23 nt, Artificial Sequence
  Synthetic
auacacccucccaagacuaaacc

SEQ ID NO: 525999 - RNA, 24 nt, Artificial Sequence
  Synthetic
cauacacccucccaagacuaaacc

SEQ ID NO: 526000 - RNA, 18 nt, Artificial Sequence
  Synthetic
ccuucccaagacuaaacc

SEQ ID NO: 526001 - RNA, 19 nt, Artificial Sequence
  Synthetic
accuucccaagacuaaacc

SEQ ID NO: 526002 - RNA, 20 nt, Artificial Sequence
  Synthetic
caccuucccaagacuaaacc

SEQ ID NO: 526003 - RNA, 21 nt, Artificial Sequence
  Synthetic
acaccuucccaagacuaaacc

SEQ ID NO: 526004 - RNA, 22 nt, Artificial Sequence
  Synthetic
uacaccuucccaagacuaaacc

SEQ ID NO: 526005 - RNA, 23 nt, Artificial Sequence
  Synthetic
auacaccuucccaagacuaaacc

SEQ ID NO: 526006 - RNA, 24 nt, Artificial Sequence
  Synthetic
cauacaccuucccaagacuaaacc

SEQ ID NO: 526007 - RNA, 18 nt, Artificial Sequence
  Synthetic
uaucaguguuacuaaacc

SEQ ID NO: 526008 - RNA, 19 nt, Artificial Sequence
  Synthetic
auaucaguguuacuaaacc

SEQ ID NO: 526009 - RNA, 20 nt, Artificial Sequence
  Synthetic
uauaucaguguuacuaaacc

SEQ ID NO: 526010 - RNA, 21 nt, Artificial Sequence
  Synthetic
auauaucaguguuacuaaacc

SEQ ID NO: 526011 - RNA, 22 nt, Artificial Sequence
  Synthetic
uauauaucaguguuacuaaacc

SEQ ID NO: 526012 - RNA, 23 nt, Artificial Sequence
  Synthetic
uuauauaucaguguuacuaaacc

SEQ ID NO: 526013 - RNA, 24 nt, Artificial Sequence
  Synthetic
guuauauaucaguguuacuaaacc

SEQ ID NO: 526014 - RNA, 18 nt, Artificial Sequence
  Synthetic
uuuauaaacaccuaaacc

SEQ ID NO: 526015 - RNA, 19 nt, Artificial Sequence
  Synthetic
guuuauaaacaccuaaacc

SEQ ID NO: 526016 - RNA, 20 nt, Artificial Sequence
  Synthetic
uguuuauaaacaccuaaacc

SEQ ID NO: 526017 - RNA, 21 nt, Artificial Sequence
  Synthetic
cuguuuauaaacaccuaaacc

SEQ ID NO: 526018 - RNA, 22 nt, Artificial Sequence
  Synthetic
ccuguuuauaaacaccuaaacc

SEQ ID NO: 526019 - RNA, 23 nt, Artificial Sequence
  Synthetic
cccuguuuauaaacaccuaaacc

SEQ ID NO: 526020 - RNA, 24 nt, Artificial Sequence
  Synthetic
acccuguuuauaaacaccuaaacc

SEQ ID NO: 526021 - RNA, 18 nt, Artificial Sequence
  Synthetic
ugccugauguaguaaacc

SEQ ID NO: 526022 - RNA, 19 nt, Artificial Sequence
  Synthetic
gugccugauguaguaaacc

SEQ ID NO: 526023 - RNA, 20 nt, Artificial Sequence
  Synthetic
ggugccugauguaguaaacc

SEQ ID NO: 526024 - RNA, 21 nt, Artificial Sequence
  Synthetic
aggugccugauguaguaaacc

SEQ ID NO: 526025 - RNA, 22 nt, Artificial Sequence
  Synthetic
uaggugccugauguaguaaacc

SEQ ID NO: 526026 - RNA, 23 nt, Artificial Sequence
  Synthetic
uuaggugccugauguaguaaacc

SEQ ID NO: 526027 - RNA, 24 nt, Artificial Sequence
  Synthetic
uuuaggugccugauguaguaaacc

SEQ ID NO: 526028 - RNA, 18 nt, Artificial Sequence
  Synthetic
aggagaauggcguaaacc

SEQ ID NO: 526029 - RNA, 19 nt, Artificial Sequence
  Synthetic
caggagaauggcguaaacc

SEQ ID NO: 526030 - RNA, 20 nt, Artificial Sequence
  Synthetic
gcaggagaauggcguaaacc

SEQ ID NO: 526031 - RNA, 21 nt, Artificial Sequence
  Synthetic
ggcaggagaauggcguaaacc

SEQ ID NO: 526032 - RNA, 22 nt, Artificial Sequence
  Synthetic
aggcaggagaauggcguaaacc

SEQ ID NO: 526033 - RNA, 23 nt, Artificial Sequence
  Synthetic
gaggcaggagaauggcguaaacc

SEQ ID NO: 526034 - RNA, 24 nt, Artificial Sequence
  Synthetic
ugaggcaggagaauggcguaaacc

SEQ ID NO: 526035 - RNA, 18 nt, Artificial Sequence
  Synthetic
guccgugguauguaaacc

SEQ ID NO: 526036 - RNA, 19 nt, Artificial Sequence
  Synthetic
uguccgugguauguaaacc

SEQ ID NO: 526037 - RNA, 20 nt, Artificial Sequence
  Synthetic
guguccgugguauguaaacc

SEQ ID NO: 526038 - RNA, 21 nt, Artificial Sequence
  Synthetic
gguguccgugguauguaaacc

SEQ ID NO: 526039 - RNA, 22 nt, Artificial Sequence
  Synthetic
ugguguccgugguauguaaacc

SEQ ID NO: 526040 - RNA, 23 nt, Artificial Sequence
  Synthetic
augguguccgugguauguaaacc

SEQ ID NO: 526041 - RNA, 24 nt, Artificial Sequence
  Synthetic
gaugguguccgugguauguaaacc

SEQ ID NO: 526042 - RNA, 18 nt, Artificial Sequence
  Synthetic
agaagauaaaauuaaacc

SEQ ID NO: 526043 - RNA, 19 nt, Artificial Sequence
  Synthetic
gagaagauaaaauuaaacc

SEQ ID NO: 526044 - RNA, 20 nt, Artificial Sequence
  Synthetic
agagaagauaaaauuaaacc

SEQ ID NO: 526045 - RNA, 21 nt, Artificial Sequence
  Synthetic
uagagaagauaaaauuaaacc

SEQ ID NO: 526046 - RNA, 22 nt, Artificial Sequence
  Synthetic
auagagaagauaaaauuaaacc

SEQ ID NO: 526047 - RNA, 23 nt, Artificial Sequence
  Synthetic
cauagagaagauaaaauuaaacc

SEQ ID NO: 526048 - RNA, 24 nt, Artificial Sequence
  Synthetic
ccauagagaagauaaaauuaaacc

SEQ ID NO: 526049 - RNA, 18 nt, Artificial Sequence
  Synthetic
guuuuuuaaaauuaaacc

SEQ ID NO: 526050 - RNA, 19 nt, Artificial Sequence
  Synthetic
uguuuuuuaaaauuaaacc

SEQ ID NO: 526051 - RNA, 20 nt, Artificial Sequence
  Synthetic
uuguuuuuuaaaauuaaacc

SEQ ID NO: 526052 - RNA, 21 nt, Artificial Sequence
  Synthetic
cuuguuuuuuaaaauuaaacc

SEQ ID NO: 526053 - RNA, 22 nt, Artificial Sequence
  Synthetic
ucuuguuuuuuaaaauuaaacc

SEQ ID NO: 526054 - RNA, 23 nt, Artificial Sequence
  Synthetic
uucuuguuuuuuaaaauuaaacc

SEQ ID NO: 526055 - RNA, 24 nt, Artificial Sequence
  Synthetic
uuucuuguuuuuuaaaauuaaacc

SEQ ID NO: 526056 - RNA, 18 nt, Artificial Sequence
  Synthetic
auaguuaucuguuaaacc

SEQ ID NO: 526057 - RNA, 19 nt, Artificial Sequence
  Synthetic
aauaguuaucuguuaaacc

SEQ ID NO: 526058 - RNA, 20 nt, Artificial Sequence
  Synthetic
aaauaguuaucuguuaaacc

SEQ ID NO: 526059 - RNA, 21 nt, Artificial Sequence
  Synthetic
uaaauaguuaucuguuaaacc

SEQ ID NO: 526060 - RNA, 22 nt, Artificial Sequence
  Synthetic
cuaaauaguuaucuguuaaacc

SEQ ID NO: 526061 - RNA, 23 nt, Artificial Sequence
  Synthetic
gcuaaauaguuaucuguuaaacc

SEQ ID NO: 526062 - RNA, 24 nt, Artificial Sequence
  Synthetic
agcuaaauaguuaucuguuaaacc

SEQ ID NO: 526063 - RNA, 18 nt, Artificial Sequence
  Synthetic
uaaaauguaguuuaaacc

SEQ ID NO: 526064 - RNA, 19 nt, Artificial Sequence
  Synthetic
auaaaauguaguuuaaacc

SEQ ID NO: 526065 - RNA, 20 nt, Artificial Sequence
  Synthetic
cauaaaauguaguuuaaacc

SEQ ID NO: 526066 - RNA, 21 nt, Artificial Sequence
  Synthetic
ccauaaaauguaguuuaaacc

SEQ ID NO: 526067 - RNA, 22 nt, Artificial Sequence
  Synthetic
uccauaaaauguaguuuaaacc

SEQ ID NO: 526068 - RNA, 23 nt, Artificial Sequence
  Synthetic
auccauaaaauguaguuuaaacc

SEQ ID NO: 526069 - RNA, 24 nt, Artificial Sequence
  Synthetic
aauccauaaaauguaguuuaaacc

SEQ ID NO: 526070 - RNA, 18 nt, Artificial Sequence
  Synthetic
ucacauacuguuuaaacc

SEQ ID NO: 526071 - RNA, 19 nt, Artificial Sequence
  Synthetic
gucacauacuguuuaaacc

SEQ ID NO: 526072 - RNA, 20 nt, Artificial Sequence
  Synthetic
ggucacauacuguuuaaacc

SEQ ID NO: 526073 - RNA, 21 nt, Artificial Sequence
  Synthetic
uggucacauacuguuuaaacc

SEQ ID NO: 526074 - RNA, 22 nt, Artificial Sequence
  Synthetic
uuggucacauacuguuuaaacc

SEQ ID NO: 526075 - RNA, 23 nt, Artificial Sequence
  Synthetic
uuuggucacauacuguuuaaacc

SEQ ID NO: 526076 - RNA, 24 nt, Artificial Sequence
  Synthetic
uuuuggucacauacuguuuaaacc

SEQ ID NO: 526077 - RNA, 18 nt, Artificial Sequence
  Synthetic
gugaaccucaaaacaacc

SEQ ID NO: 526078 - RNA, 19 nt, Artificial Sequence
  Synthetic
ugugaaccucaaaacaacc

SEQ ID NO: 526079 - RNA, 20 nt, Artificial Sequence
  Synthetic
augugaaccucaaaacaacc

SEQ ID NO: 526080 - RNA, 21 nt, Artificial Sequence
  Synthetic
caugugaaccucaaaacaacc

SEQ ID NO: 526081 - RNA, 22 nt, Artificial Sequence
  Synthetic
gcaugugaaccucaaaacaacc

SEQ ID NO: 526082 - RNA, 23 nt, Artificial Sequence
  Synthetic
ugcaugugaaccucaaaacaacc

SEQ ID NO: 526083 - RNA, 24 nt, Artificial Sequence
  Synthetic
augcaugugaaccucaaaacaacc

SEQ ID NO: 526084 - RNA, 18 nt, Artificial Sequence
  Synthetic
ugaauuuucaccacaacc

SEQ ID NO: 526085 - RNA, 19 nt, Artificial Sequence
  Synthetic
uugaauuuucaccacaacc

SEQ ID NO: 526086 - RNA, 20 nt, Artificial Sequence
  Synthetic
auugaauuuucaccacaacc

SEQ ID NO: 526087 - RNA, 21 nt, Artificial Sequence
  Synthetic
cauugaauuuucaccacaacc

SEQ ID NO: 526088 - RNA, 22 nt, Artificial Sequence
  Synthetic
ucauugaauuuucaccacaacc

SEQ ID NO: 526089 - RNA, 23 nt, Artificial Sequence
  Synthetic
cucauugaauuuucaccacaacc

SEQ ID NO: 526090 - RNA, 24 nt, Artificial Sequence
  Synthetic
ccucauugaauuuucaccacaacc

SEQ ID NO: 526091 - RNA, 18 nt, Artificial Sequence
  Synthetic
ucacccuauaccacaacc

SEQ ID NO: 526092 - RNA, 19 nt, Artificial Sequence
  Synthetic
cucacccuauaccacaacc

SEQ ID NO: 526093 - RNA, 20 nt, Artificial Sequence
  Synthetic
acucacccuauaccacaacc

SEQ ID NO: 526094 - RNA, 21 nt, Artificial Sequence
  Synthetic
cacucacccuauaccacaacc

SEQ ID NO: 526095 - RNA, 22 nt, Artificial Sequence
  Synthetic
ccacucacccuauaccacaacc

SEQ ID NO: 526096 - RNA, 23 nt, Artificial Sequence
  Synthetic
accacucacccuauaccacaacc

SEQ ID NO: 526097 - RNA, 24 nt, Artificial Sequence
  Synthetic
uaccacucacccuauaccacaacc

SEQ ID NO: 526098 - RNA, 18 nt, Artificial Sequence
  Synthetic
cugcuauugaucacaacc

SEQ ID NO: 526099 - RNA, 19 nt, Artificial Sequence
  Synthetic
ucugcuauugaucacaacc

SEQ ID NO: 526100 - RNA, 20 nt, Artificial Sequence
  Synthetic
aucugcuauugaucacaacc

SEQ ID NO: 526101 - RNA, 21 nt, Artificial Sequence
  Synthetic
aaucugcuauugaucacaacc

SEQ ID NO: 526102 - RNA, 22 nt, Artificial Sequence
  Synthetic
aaaucugcuauugaucacaacc

SEQ ID NO: 526103 - RNA, 23 nt, Artificial Sequence
  Synthetic
aaaaucugcuauugaucacaacc

SEQ ID NO: 526104 - RNA, 24 nt, Artificial Sequence
  Synthetic
aaaaaucugcuauugaucacaacc

SEQ ID NO: 526105 - RNA, 18 nt, Artificial Sequence
  Synthetic
agauauuaccucacaacc

SEQ ID NO: 526106 - RNA, 19 nt, Artificial Sequence
  Synthetic
gagauauuaccucacaacc

SEQ ID NO: 526107 - RNA, 20 nt, Artificial Sequence
  Synthetic
ugagauauuaccucacaacc

SEQ ID NO: 526108 - RNA, 21 nt, Artificial Sequence
  Synthetic
augagauauuaccucacaacc

SEQ ID NO: 526109 - RNA, 22 nt, Artificial Sequence
  Synthetic
aaugagauauuaccucacaacc

SEQ ID NO: 526110 - RNA, 23 nt, Artificial Sequence
  Synthetic
caaugagauauuaccucacaacc

SEQ ID NO: 526111 - RNA, 24 nt, Artificial Sequence
  Synthetic
acaaugagauauuaccucacaacc

SEQ ID NO: 526112 - RNA, 18 nt, Artificial Sequence
  Synthetic
cugaaaagaaagacaacc

SEQ ID NO: 526113 - RNA, 19 nt, Artificial Sequence
  Synthetic
acugaaaagaaagacaacc

SEQ ID NO: 526114 - RNA, 20 nt, Artificial Sequence
  Synthetic
aacugaaaagaaagacaacc

SEQ ID NO: 526115 - RNA, 21 nt, Artificial Sequence
  Synthetic
aaacugaaaagaaagacaacc

SEQ ID NO: 526116 - RNA, 22 nt, Artificial Sequence
  Synthetic
aaaacugaaaagaaagacaacc

SEQ ID NO: 526117 - RNA, 23 nt, Artificial Sequence
  Synthetic
uaaaacugaaaagaaagacaacc

SEQ ID NO: 526118 - RNA, 24 nt, Artificial Sequence
  Synthetic
uuaaaacugaaaagaaagacaacc

SEQ ID NO: 526119 - RNA, 18 nt, Artificial Sequence
  Synthetic
agaaucuguaagacaacc

SEQ ID NO: 526120 - RNA, 19 nt, Artificial Sequence
  Synthetic
aagaaucuguaagacaacc

SEQ ID NO: 526121 - RNA, 20 nt, Artificial Sequence
  Synthetic
aaagaaucuguaagacaacc

SEQ ID NO: 526122 - RNA, 21 nt, Artificial Sequence
  Synthetic
caaagaaucuguaagacaacc

SEQ ID NO: 526123 - RNA, 22 nt, Artificial Sequence
  Synthetic
acaaagaaucuguaagacaacc

SEQ ID NO: 526124 - RNA, 23 nt, Artificial Sequence
  Synthetic
aacaaagaaucuguaagacaacc

SEQ ID NO: 526125 - RNA, 24 nt, Artificial Sequence
  Synthetic
gaacaaagaaucuguaagacaacc

SEQ ID NO: 526126 - RNA, 18 nt, Artificial Sequence
  Synthetic
ggauauaagcauacaacc

SEQ ID NO: 526127 - RNA, 19 nt, Artificial Sequence
  Synthetic
gggauauaagcauacaacc

SEQ ID NO: 526128 - RNA, 20 nt, Artificial Sequence
  Synthetic
ugggauauaagcauacaacc

SEQ ID NO: 526129 - RNA, 21 nt, Artificial Sequence
  Synthetic
uugggauauaagcauacaacc

SEQ ID NO: 526130 - RNA, 22 nt, Artificial Sequence
  Synthetic
auugggauauaagcauacaacc

SEQ ID NO: 526131 - RNA, 23 nt, Artificial Sequence
  Synthetic
aauugggauauaagcauacaacc

SEQ ID NO: 526132 - RNA, 24 nt, Artificial Sequence
  Synthetic
gaauugggauauaagcauacaacc

SEQ ID NO: 526133 - RNA, 18 nt, Artificial Sequence
  Synthetic
ucaagauccucuacaacc

SEQ ID NO: 526134 - RNA, 19 nt, Artificial Sequence
  Synthetic
uucaagauccucuacaacc

SEQ ID NO: 526135 - RNA, 20 nt, Artificial Sequence
  Synthetic
auucaagauccucuacaacc

SEQ ID NO: 526136 - RNA, 21 nt, Artificial Sequence
  Synthetic
cauucaagauccucuacaacc

SEQ ID NO: 526137 - RNA, 22 nt, Artificial Sequence
  Synthetic
acauucaagauccucuacaacc

SEQ ID NO: 526138 - RNA, 23 nt, Artificial Sequence
  Synthetic
aacauucaagauccucuacaacc

SEQ ID NO: 526139 - RNA, 24 nt, Artificial Sequence
  Synthetic
aaacauucaagauccucuacaacc

SEQ ID NO: 526140 - RNA, 18 nt, Artificial Sequence
  Synthetic
agagcaaugauaccaacc

SEQ ID NO: 526141 - RNA, 19 nt, Artificial Sequence
  Synthetic
uagagcaaugauaccaacc

SEQ ID NO: 526142 - RNA, 20 nt, Artificial Sequence
  Synthetic
auagagcaaugauaccaacc

SEQ ID NO: 526143 - RNA, 21 nt, Artificial Sequence
  Synthetic
cauagagcaaugauaccaacc

SEQ ID NO: 526144 - RNA, 22 nt, Artificial Sequence
  Synthetic
ucauagagcaaugauaccaacc

SEQ ID NO: 526145 - RNA, 23 nt, Artificial Sequence
  Synthetic
aucauagagcaaugauaccaacc

SEQ ID NO: 526146 - RNA, 24 nt, Artificial Sequence
  Synthetic
caucauagagcaaugauaccaacc

SEQ ID NO: 526147 - RNA, 18 nt, Artificial Sequence
  Synthetic
cuuaguaaauacccaacc

SEQ ID NO: 526148 - RNA, 19 nt, Artificial Sequence
  Synthetic
acuuaguaaauacccaacc

SEQ ID NO: 526149 - RNA, 20 nt, Artificial Sequence
  Synthetic
aacuuaguaaauacccaacc

SEQ ID NO: 526150 - RNA, 21 nt, Artificial Sequence
  Synthetic
uaacuuaguaaauacccaacc

SEQ ID NO: 526151 - RNA, 22 nt, Artificial Sequence
  Synthetic
auaacuuaguaaauacccaacc

SEQ ID NO: 526152 - RNA, 23 nt, Artificial Sequence
  Synthetic
aauaacuuaguaaauacccaacc

SEQ ID NO: 526153 - RNA, 24 nt, Artificial Sequence
  Synthetic
aaauaacuuaguaaauacccaacc

SEQ ID NO: 526154 - RNA, 18 nt, Artificial Sequence
  Synthetic
aagauuguuuccccaacc

SEQ ID NO: 526155 - RNA, 19 nt, Artificial Sequence
  Synthetic
aaagauuguuuccccaacc

SEQ ID NO: 526156 - RNA, 20 nt, Artificial Sequence
  Synthetic
aaaagauuguuuccccaacc

SEQ ID NO: 526157 - RNA, 21 nt, Artificial Sequence
  Synthetic
caaaagauuguuuccccaacc

SEQ ID NO: 526158 - RNA, 22 nt, Artificial Sequence
  Synthetic
ccaaaagauuguuuccccaacc

SEQ ID NO: 526159 - RNA, 23 nt, Artificial Sequence
  Synthetic
cccaaaagauuguuuccccaacc

SEQ ID NO: 526160 - RNA, 24 nt, Artificial Sequence
  Synthetic
ccccaaaagauuguuuccccaacc

SEQ ID NO: 526161 - RNA, 18 nt, Artificial Sequence
  Synthetic
uaguaugucaaagcaacc

SEQ ID NO: 526162 - RNA, 19 nt, Artificial Sequence
  Synthetic
uuaguaugucaaagcaacc

SEQ ID NO: 526163 - RNA, 20 nt, Artificial Sequence
  Synthetic
cuuaguaugucaaagcaacc

SEQ ID NO: 526164 - RNA, 21 nt, Artificial Sequence
  Synthetic
acuuaguaugucaaagcaacc

SEQ ID NO: 526165 - RNA, 22 nt, Artificial Sequence
  Synthetic
uacuuaguaugucaaagcaacc

SEQ ID NO: 526166 - RNA, 23 nt, Artificial Sequence
  Synthetic
cuacuuaguaugucaaagcaacc

SEQ ID NO: 526167 - RNA, 24 nt, Artificial Sequence
  Synthetic
ccuacuuaguaugucaaagcaacc

SEQ ID NO: 526168 - RNA, 18 nt, Artificial Sequence
  Synthetic
ugagaagguuuugcaacc

SEQ ID NO: 526169 - RNA, 19 nt, Artificial Sequence
  Synthetic
augagaagguuuugcaacc

SEQ ID NO: 526170 - RNA, 20 nt, Artificial Sequence
  Synthetic
uaugagaagguuuugcaacc

SEQ ID NO: 526171 - RNA, 21 nt, Artificial Sequence
  Synthetic
guaugagaagguuuugcaacc

SEQ ID NO: 526172 - RNA, 22 nt, Artificial Sequence
  Synthetic
uguaugagaagguuuugcaacc

SEQ ID NO: 526173 - RNA, 23 nt, Artificial Sequence
  Synthetic
uuguaugagaagguuuugcaacc

SEQ ID NO: 526174 - RNA, 24 nt, Artificial Sequence
  Synthetic
uuuguaugagaagguuuugcaacc

SEQ ID NO: 526175 - RNA, 18 nt, Artificial Sequence
  Synthetic
accauuaaaauaucaacc

SEQ ID NO: 526176 - RNA, 19 nt, Artificial Sequence
  Synthetic
aaccauuaaaauaucaacc

SEQ ID NO: 526177 - RNA, 20 nt, Artificial Sequence
  Synthetic
aaaccauuaaaauaucaacc

SEQ ID NO: 526178 - RNA, 21 nt, Artificial Sequence
  Synthetic
uaaaccauuaaaauaucaacc

SEQ ID NO: 526179 - RNA, 22 nt, Artificial Sequence
  Synthetic
auaaaccauuaaaauaucaacc

SEQ ID NO: 526180 - RNA, 23 nt, Artificial Sequence
  Synthetic
cauaaaccauuaaaauaucaacc

SEQ ID NO: 526181 - RNA, 24 nt, Artificial Sequence
  Synthetic
ccauaaaccauuaaaauaucaacc

SEQ ID NO: 526182 - RNA, 18 nt, Artificial Sequence
  Synthetic
agauguggccccucaacc

SEQ ID NO: 526183 - RNA, 19 nt, Artificial Sequence
  Synthetic
cagauguggccccucaacc

SEQ ID NO: 526184 - RNA, 20 nt, Artificial Sequence
  Synthetic
ccagauguggccccucaacc

SEQ ID NO: 526185 - RNA, 21 nt, Artificial Sequence
  Synthetic
accagauguggccccucaacc

SEQ ID NO: 526186 - RNA, 22 nt, Artificial Sequence
  Synthetic
gaccagauguggccccucaacc

SEQ ID NO: 526187 - RNA, 23 nt, Artificial Sequence
  Synthetic
ugaccagauguggccccucaacc

SEQ ID NO: 526188 - RNA, 24 nt, Artificial Sequence
  Synthetic
cugaccagauguggccccucaacc

SEQ ID NO: 526189 - RNA, 18 nt, Artificial Sequence
  Synthetic
acaguucuacucucaacc

SEQ ID NO: 526190 - RNA, 19 nt, Artificial Sequence
  Synthetic
uacaguucuacucucaacc

SEQ ID NO: 526191 - RNA, 20 nt, Artificial Sequence
  Synthetic
cuacaguucuacucucaacc

SEQ ID NO: 526192 - RNA, 21 nt, Artificial Sequence
  Synthetic
ccuacaguucuacucucaacc

SEQ ID NO: 526193 - RNA, 22 nt, Artificial Sequence
  Synthetic
cccuacaguucuacucucaacc

SEQ ID NO: 526194 - RNA, 23 nt, Artificial Sequence
  Synthetic
ccccuacaguucuacucucaacc

SEQ ID NO: 526195 - RNA, 24 nt, Artificial Sequence
  Synthetic
uccccuacaguucuacucucaacc

SEQ ID NO: 526196 - RNA, 18 nt, Artificial Sequence
  Synthetic
aaauugaagcucucaacc

SEQ ID NO: 526197 - RNA, 19 nt, Artificial Sequence
  Synthetic
caaauugaagcucucaacc

SEQ ID NO: 526198 - RNA, 20 nt, Artificial Sequence
  Synthetic
ucaaauugaagcucucaacc

SEQ ID NO: 526199 - RNA, 21 nt, Artificial Sequence
  Synthetic
cucaaauugaagcucucaacc

SEQ ID NO: 526200 - RNA, 22 nt, Artificial Sequence
  Synthetic
ucucaaauugaagcucucaacc

SEQ ID NO: 526201 - RNA, 23 nt, Artificial Sequence
  Synthetic
uucucaaauugaagcucucaacc

SEQ ID NO: 526202 - RNA, 24 nt, Artificial Sequence
  Synthetic
uuucucaaauugaagcucucaacc

SEQ ID NO: 526203 - RNA, 18 nt, Artificial Sequence
  Synthetic
aauuaacgaaauucaacc

SEQ ID NO: 526204 - RNA, 19 nt, Artificial Sequence
  Synthetic
aaauuaacgaaauucaacc

SEQ ID NO: 526205 - RNA, 20 nt, Artificial Sequence
  Synthetic
aaaauuaacgaaauucaacc

SEQ ID NO: 526206 - RNA, 21 nt, Artificial Sequence
  Synthetic
uaaaauuaacgaaauucaacc

SEQ ID NO: 526207 - RNA, 22 nt, Artificial Sequence
  Synthetic
auaaaauuaacgaaauucaacc

SEQ ID NO: 526208 - RNA, 23 nt, Artificial Sequence
  Synthetic
uauaaaauuaacgaaauucaacc

SEQ ID NO: 526209 - RNA, 24 nt, Artificial Sequence
  Synthetic
guauaaaauuaacgaaauucaacc

SEQ ID NO: 526210 - RNA, 18 nt, Artificial Sequence
  Synthetic
aggagaaccgcuucaacc

SEQ ID NO: 526211 - RNA, 19 nt, Artificial Sequence
  Synthetic
caggagaaccgcuucaacc

SEQ ID NO: 526212 - RNA, 20 nt, Artificial Sequence
  Synthetic
gcaggagaaccgcuucaacc

SEQ ID NO: 526213 - RNA, 21 nt, Artificial Sequence
  Synthetic
ggcaggagaaccgcuucaacc

SEQ ID NO: 526214 - RNA, 22 nt, Artificial Sequence
  Synthetic
aggcaggagaaccgcuucaacc

SEQ ID NO: 526215 - RNA, 23 nt, Artificial Sequence
  Synthetic
gaggcaggagaaccgcuucaacc

SEQ ID NO: 526216 - RNA, 24 nt, Artificial Sequence
  Synthetic
ugaggcaggagaaccgcuucaacc

SEQ ID NO: 526217 - RNA, 18 nt, Artificial Sequence
  Synthetic
guacuuaauuguucaacc

SEQ ID NO: 526218 - RNA, 19 nt, Artificial Sequence
  Synthetic
cguacuuaauuguucaacc

SEQ ID NO: 526219 - RNA, 20 nt, Artificial Sequence
  Synthetic
gcguacuuaauuguucaacc

SEQ ID NO: 526220 - RNA, 21 nt, Artificial Sequence
  Synthetic
agcguacuuaauuguucaacc

SEQ ID NO: 526221 - RNA, 22 nt, Artificial Sequence
  Synthetic
aagcguacuuaauuguucaacc

SEQ ID NO: 526222 - RNA, 23 nt, Artificial Sequence
  Synthetic
aaagcguacuuaauuguucaacc

SEQ ID NO: 526223 - RNA, 24 nt, Artificial Sequence
  Synthetic
gaaagcguacuuaauuguucaacc

SEQ ID NO: 526224 - RNA, 18 nt, Artificial Sequence
  Synthetic
uaaaaaaauaaaagaacc

SEQ ID NO: 526225 - RNA, 19 nt, Artificial Sequence
  Synthetic
cuaaaaaaauaaaagaacc

SEQ ID NO: 526226 - RNA, 20 nt, Artificial Sequence
  Synthetic
acuaaaaaaauaaaagaacc

SEQ ID NO: 526227 - RNA, 21 nt, Artificial Sequence
  Synthetic
uacuaaaaaaauaaaagaacc

SEQ ID NO: 526228 - RNA, 22 nt, Artificial Sequence
  Synthetic
cuacuaaaaaaauaaaagaacc

SEQ ID NO: 526229 - RNA, 23 nt, Artificial Sequence
  Synthetic
acuacuaaaaaaauaaaagaacc

SEQ ID NO: 526230 - RNA, 24 nt, Artificial Sequence
  Synthetic
uacuacuaaaaaaauaaaagaacc

SEQ ID NO: 526231 - RNA, 18 nt, Artificial Sequence
  Synthetic
gaugugcaggaaagaacc

SEQ ID NO: 526232 - RNA, 19 nt, Artificial Sequence
  Synthetic
agaugugcaggaaagaacc

SEQ ID NO: 526233 - RNA, 20 nt, Artificial Sequence
  Synthetic
cagaugugcaggaaagaacc

SEQ ID NO: 526234 - RNA, 21 nt, Artificial Sequence
  Synthetic
ucagaugugcaggaaagaacc

SEQ ID NO: 526235 - RNA, 22 nt, Artificial Sequence
  Synthetic
uucagaugugcaggaaagaacc

SEQ ID NO: 526236 - RNA, 23 nt, Artificial Sequence
  Synthetic
auucagaugugcaggaaagaacc

SEQ ID NO: 526237 - RNA, 24 nt, Artificial Sequence
  Synthetic
uauucagaugugcaggaaagaacc

SEQ ID NO: 526238 - RNA, 18 nt, Artificial Sequence
  Synthetic
agugaaauauaaagaacc

SEQ ID NO: 526239 - RNA, 19 nt, Artificial Sequence
  Synthetic
aagugaaauauaaagaacc

SEQ ID NO: 526240 - RNA, 20 nt, Artificial Sequence
  Synthetic
aaagugaaauauaaagaacc

SEQ ID NO: 526241 - RNA, 21 nt, Artificial Sequence
  Synthetic
uaaagugaaauauaaagaacc

SEQ ID NO: 526242 - RNA, 22 nt, Artificial Sequence
  Synthetic
auaaagugaaauauaaagaacc

SEQ ID NO: 526243 - RNA, 23 nt, Artificial Sequence
  Synthetic
uauaaagugaaauauaaagaacc

SEQ ID NO: 526244 - RNA, 24 nt, Artificial Sequence
  Synthetic
auauaaagugaaauauaaagaacc

SEQ ID NO: 526245 - RNA, 18 nt, Artificial Sequence
  Synthetic
aguaacacacgaagaacc

SEQ ID NO: 526246 - RNA, 19 nt, Artificial Sequence
  Synthetic
uaguaacacacgaagaacc

SEQ ID NO: 526247 - RNA, 20 nt, Artificial Sequence
  Synthetic
cuaguaacacacgaagaacc

SEQ ID NO: 526248 - RNA, 21 nt, Artificial Sequence
  Synthetic
acuaguaacacacgaagaacc

SEQ ID NO: 526249 - RNA, 22 nt, Artificial Sequence
  Synthetic
uacuaguaacacacgaagaacc

SEQ ID NO: 526250 - RNA, 23 nt, Artificial Sequence
  Synthetic
uuacuaguaacacacgaagaacc

SEQ ID NO: 526251 - RNA, 24 nt, Artificial Sequence
  Synthetic
auuacuaguaacacacgaagaacc

SEQ ID NO: 526252 - RNA, 18 nt, Artificial Sequence
  Synthetic
uucucaaccuccagaacc

SEQ ID NO: 526253 - RNA, 19 nt, Artificial Sequence
  Synthetic
cuucucaaccuccagaacc

SEQ ID NO: 526254 - RNA, 20 nt, Artificial Sequence
  Synthetic
acuucucaaccuccagaacc

SEQ ID NO: 526255 - RNA, 21 nt, Artificial Sequence
  Synthetic
uacuucucaaccuccagaacc

SEQ ID NO: 526256 - RNA, 22 nt, Artificial Sequence
  Synthetic
guacuucucaaccuccagaacc

SEQ ID NO: 526257 - RNA, 23 nt, Artificial Sequence
  Synthetic
uguacuucucaaccuccagaacc

SEQ ID NO: 526258 - RNA, 24 nt, Artificial Sequence
  Synthetic
uuguacuucucaaccuccagaacc

SEQ ID NO: 526259 - RNA, 18 nt, Artificial Sequence
  Synthetic
uguacagccugcagaacc

SEQ ID NO: 526260 - RNA, 19 nt, Artificial Sequence
  Synthetic
uuguacagccugcagaacc

SEQ ID NO: 526261 - RNA, 20 nt, Artificial Sequence
  Synthetic
uuuguacagccugcagaacc

SEQ ID NO: 526262 - RNA, 21 nt, Artificial Sequence
  Synthetic
uuuuguacagccugcagaacc

SEQ ID NO: 526263 - RNA, 22 nt, Artificial Sequence
  Synthetic
uuuuuguacagccugcagaacc

SEQ ID NO: 526264 - RNA, 23 nt, Artificial Sequence
  Synthetic
uuuuuuguacagccugcagaacc

SEQ ID NO: 526265 - RNA, 24 nt, Artificial Sequence
  Synthetic
cuuuuuuguacagccugcagaacc

SEQ ID NO: 526266 - RNA, 18 nt, Artificial Sequence
  Synthetic
cagaugaaaaugagaacc

SEQ ID NO: 526267 - RNA, 19 nt, Artificial Sequence
  Synthetic
ucagaugaaaaugagaacc

SEQ ID NO: 526268 - RNA, 20 nt, Artificial Sequence
  Synthetic
cucagaugaaaaugagaacc

SEQ ID NO: 526269 - RNA, 21 nt, Artificial Sequence
  Synthetic
ucucagaugaaaaugagaacc

SEQ ID NO: 526270 - RNA, 22 nt, Artificial Sequence
  Synthetic
uucucagaugaaaaugagaacc

SEQ ID NO: 526271 - RNA, 23 nt, Artificial Sequence
  Synthetic
uuucucagaugaaaaugagaacc

SEQ ID NO: 526272 - RNA, 24 nt, Artificial Sequence
  Synthetic
uuuucucagaugaaaaugagaacc

SEQ ID NO: 526273 - RNA, 18 nt, Artificial Sequence
  Synthetic
uccaaaggcaugagaacc

SEQ ID NO: 526274 - RNA, 19 nt, Artificial Sequence
  Synthetic
guccaaaggcaugagaacc

SEQ ID NO: 526275 - RNA, 20 nt, Artificial Sequence
  Synthetic
aguccaaaggcaugagaacc

SEQ ID NO: 526276 - RNA, 21 nt, Artificial Sequence
  Synthetic
gaguccaaaggcaugagaacc

SEQ ID NO: 526277 - RNA, 22 nt, Artificial Sequence
  Synthetic
ugaguccaaaggcaugagaacc

SEQ ID NO: 526278 - RNA, 23 nt, Artificial Sequence
  Synthetic
cugaguccaaaggcaugagaacc

SEQ ID NO: 526279 - RNA, 24 nt, Artificial Sequence
  Synthetic
ucugaguccaaaggcaugagaacc

SEQ ID NO: 526280 - RNA, 18 nt, Artificial Sequence
  Synthetic
acacagaaaaauagaacc

SEQ ID NO: 526281 - RNA, 19 nt, Artificial Sequence
  Synthetic
aacacagaaaaauagaacc

SEQ ID NO: 526282 - RNA, 20 nt, Artificial Sequence
  Synthetic
caacacagaaaaauagaacc

SEQ ID NO: 526283 - RNA, 21 nt, Artificial Sequence
  Synthetic
ucaacacagaaaaauagaacc

SEQ ID NO: 526284 - RNA, 22 nt, Artificial Sequence
  Synthetic
gucaacacagaaaaauagaacc

SEQ ID NO: 526285 - RNA, 23 nt, Artificial Sequence
  Synthetic
ggucaacacagaaaaauagaacc

SEQ ID NO: 526286 - RNA, 24 nt, Artificial Sequence
  Synthetic
aggucaacacagaaaaauagaacc

SEQ ID NO: 526287 - RNA, 18 nt, Artificial Sequence
  Synthetic
ugaaucuuucuuagaacc

SEQ ID NO: 526288 - RNA, 19 nt, Artificial Sequence
  Synthetic
cugaaucuuucuuagaacc

SEQ ID NO: 526289 - RNA, 20 nt, Artificial Sequence
  Synthetic
gcugaaucuuucuuagaacc

SEQ ID NO: 526290 - RNA, 21 nt, Artificial Sequence
  Synthetic
ugcugaaucuuucuuagaacc

SEQ ID NO: 526291 - RNA, 22 nt, Artificial Sequence
  Synthetic
augcugaaucuuucuuagaacc

SEQ ID NO: 526292 - RNA, 23 nt, Artificial Sequence
  Synthetic
caugcugaaucuuucuuagaacc

SEQ ID NO: 526293 - RNA, 24 nt, Artificial Sequence
  Synthetic
acaugcugaaucuuucuuagaacc

SEQ ID NO: 526294 - RNA, 18 nt, Artificial Sequence
  Synthetic
aucacuaaaaaaggaacc

SEQ ID NO: 526295 - RNA, 19 nt, Artificial Sequence
  Synthetic
gaucacuaaaaaaggaacc

SEQ ID NO: 526296 - RNA, 20 nt, Artificial Sequence
  Synthetic
ugaucacuaaaaaaggaacc

SEQ ID NO: 526297 - RNA, 21 nt, Artificial Sequence
  Synthetic
augaucacuaaaaaaggaacc

SEQ ID NO: 526298 - RNA, 22 nt, Artificial Sequence
  Synthetic
uaugaucacuaaaaaaggaacc

SEQ ID NO: 526299 - RNA, 23 nt, Artificial Sequence
  Synthetic
cuaugaucacuaaaaaaggaacc

SEQ ID NO: 526300 - RNA, 24 nt, Artificial Sequence
  Synthetic
ucuaugaucacuaaaaaaggaacc

SEQ ID NO: 526301 - RNA, 18 nt, Artificial Sequence
  Synthetic
agccccaccauaggaacc

SEQ ID NO: 526302 - RNA, 19 nt, Artificial Sequence
  Synthetic
uagccccaccauaggaacc

SEQ ID NO: 526303 - RNA, 20 nt, Artificial Sequence
  Synthetic
auagccccaccauaggaacc

SEQ ID NO: 526304 - RNA, 21 nt, Artificial Sequence
  Synthetic
uauagccccaccauaggaacc

SEQ ID NO: 526305 - RNA, 22 nt, Artificial Sequence
  Synthetic
uuauagccccaccauaggaacc

SEQ ID NO: 526306 - RNA, 23 nt, Artificial Sequence
  Synthetic
guuauagccccaccauaggaacc

SEQ ID NO: 526307 - RNA, 24 nt, Artificial Sequence
  Synthetic
gguuauagccccaccauaggaacc

SEQ ID NO: 526308 - RNA, 18 nt, Artificial Sequence
  Synthetic
aaggguauuuuaggaacc

SEQ ID NO: 526309 - RNA, 19 nt, Artificial Sequence
  Synthetic
caaggguauuuuaggaacc

SEQ ID NO: 526310 - RNA, 20 nt, Artificial Sequence
  Synthetic
ccaaggguauuuuaggaacc

SEQ ID NO: 526311 - RNA, 21 nt, Artificial Sequence
  Synthetic
accaaggguauuuuaggaacc

SEQ ID NO: 526312 - RNA, 22 nt, Artificial Sequence
  Synthetic
aaccaaggguauuuuaggaacc

SEQ ID NO: 526313 - RNA, 23 nt, Artificial Sequence
  Synthetic
aaaccaaggguauuuuaggaacc

SEQ ID NO: 526314 - RNA, 24 nt, Artificial Sequence
  Synthetic
gaaaccaaggguauuuuaggaacc

SEQ ID NO: 526315 - RNA, 18 nt, Artificial Sequence
  Synthetic
caaguggguuagggaacc

SEQ ID NO: 526316 - RNA, 19 nt, Artificial Sequence
  Synthetic
ucaaguggguuagggaacc

SEQ ID NO: 526317 - RNA, 20 nt, Artificial Sequence
  Synthetic
uucaaguggguuagggaacc

SEQ ID NO: 526318 - RNA, 21 nt, Artificial Sequence
  Synthetic
auucaaguggguuagggaacc

SEQ ID NO: 526319 - RNA, 22 nt, Artificial Sequence
  Synthetic
uauucaaguggguuagggaacc

SEQ ID NO: 526320 - RNA, 23 nt, Artificial Sequence
  Synthetic
guauucaaguggguuagggaacc

SEQ ID NO: 526321 - RNA, 24 nt, Artificial Sequence
  Synthetic
aguauucaaguggguuagggaacc

SEQ ID NO: 526322 - RNA, 18 nt, Artificial Sequence
  Synthetic
aauauuguucugggaacc

SEQ ID NO: 526323 - RNA, 19 nt, Artificial Sequence
  Synthetic
uaauauuguucugggaacc

SEQ ID NO: 526324 - RNA, 20 nt, Artificial Sequence
  Synthetic
auaauauuguucugggaacc

SEQ ID NO: 526325 - RNA, 21 nt, Artificial Sequence
  Synthetic
gauaauauuguucugggaacc

SEQ ID NO: 526326 - RNA, 22 nt, Artificial Sequence
  Synthetic
agauaauauuguucugggaacc

SEQ ID NO: 526327 - RNA, 23 nt, Artificial Sequence
  Synthetic
aagauaauauuguucugggaacc

SEQ ID NO: 526328 - RNA, 24 nt, Artificial Sequence
  Synthetic
caagauaauauuguucugggaacc

SEQ ID NO: 526329 - RNA, 18 nt, Artificial Sequence
  Synthetic
ggccauuuucauggaacc

SEQ ID NO: 526330 - RNA, 19 nt, Artificial Sequence
  Synthetic
aggccauuuucauggaacc

SEQ ID NO: 526331 - RNA, 20 nt, Artificial Sequence
  Synthetic
gaggccauuuucauggaacc

SEQ ID NO: 526332 - RNA, 21 nt, Artificial Sequence
  Synthetic
ggaggccauuuucauggaacc

SEQ ID NO: 526333 - RNA, 22 nt, Artificial Sequence
  Synthetic
aggaggccauuuucauggaacc

SEQ ID NO: 526334 - RNA, 23 nt, Artificial Sequence
  Synthetic
aaggaggccauuuucauggaacc

SEQ ID NO: 526335 - RNA, 24 nt, Artificial Sequence
  Synthetic
aaaggaggccauuuucauggaacc

SEQ ID NO: 526336 - RNA, 18 nt, Artificial Sequence
  Synthetic
agagcauuuacuggaacc

SEQ ID NO: 526337 - RNA, 19 nt, Artificial Sequence
  Synthetic
cagagcauuuacuggaacc

SEQ ID NO: 526338 - RNA, 20 nt, Artificial Sequence
  Synthetic
acagagcauuuacuggaacc

SEQ ID NO: 526339 - RNA, 21 nt, Artificial Sequence
  Synthetic
uacagagcauuuacuggaacc

SEQ ID NO: 526340 - RNA, 22 nt, Artificial Sequence
  Synthetic
cuacagagcauuuacuggaacc

SEQ ID NO: 526341 - RNA, 23 nt, Artificial Sequence
  Synthetic
acuacagagcauuuacuggaacc

SEQ ID NO: 526342 - RNA, 24 nt, Artificial Sequence
  Synthetic
cacuacagagcauuuacuggaacc

SEQ ID NO: 526343 - RNA, 18 nt, Artificial Sequence
  Synthetic
agguuccacgguggaacc

SEQ ID NO: 526344 - RNA, 19 nt, Artificial Sequence
  Synthetic
cagguuccacgguggaacc

SEQ ID NO: 526345 - RNA, 20 nt, Artificial Sequence
  Synthetic
acagguuccacgguggaacc

SEQ ID NO: 526346 - RNA, 21 nt, Artificial Sequence
  Synthetic
gacagguuccacgguggaacc

SEQ ID NO: 526347 - RNA, 22 nt, Artificial Sequence
  Synthetic
agacagguuccacgguggaacc

SEQ ID NO: 526348 - RNA, 23 nt, Artificial Sequence
  Synthetic
cagacagguuccacgguggaacc

SEQ ID NO: 526349 - RNA, 24 nt, Artificial Sequence
  Synthetic
ucagacagguuccacgguggaacc

SEQ ID NO: 526350 - RNA, 18 nt, Artificial Sequence
  Synthetic
ggcagucaucuuggaacc

SEQ ID NO: 526351 - RNA, 19 nt, Artificial Sequence
  Synthetic
uggcagucaucuuggaacc

SEQ ID NO: 526352 - RNA, 20 nt, Artificial Sequence
  Synthetic
cuggcagucaucuuggaacc

SEQ ID NO: 526353 - RNA, 21 nt, Artificial Sequence
  Synthetic
gcuggcagucaucuuggaacc

SEQ ID NO: 526354 - RNA, 22 nt, Artificial Sequence
  Synthetic
ugcuggcagucaucuuggaacc

SEQ ID NO: 526355 - RNA, 23 nt, Artificial Sequence
  Synthetic
uugcuggcagucaucuuggaacc

SEQ ID NO: 526356 - RNA, 24 nt, Artificial Sequence
  Synthetic
guugcuggcagucaucuuggaacc

SEQ ID NO: 526357 - RNA, 18 nt, Artificial Sequence
  Synthetic
accaaauguccaugaacc

SEQ ID NO: 526358 - RNA, 19 nt, Artificial Sequence
  Synthetic
aaccaaauguccaugaacc

SEQ ID NO: 526359 - RNA, 20 nt, Artificial Sequence
  Synthetic
gaaccaaauguccaugaacc

SEQ ID NO: 526360 - RNA, 21 nt, Artificial Sequence
  Synthetic
ugaaccaaauguccaugaacc

SEQ ID NO: 526361 - RNA, 22 nt, Artificial Sequence
  Synthetic
cugaaccaaauguccaugaacc

SEQ ID NO: 526362 - RNA, 23 nt, Artificial Sequence
  Synthetic
ccugaaccaaauguccaugaacc

SEQ ID NO: 526363 - RNA, 24 nt, Artificial Sequence
  Synthetic
uccugaaccaaauguccaugaacc

SEQ ID NO: 526364 - RNA, 18 nt, Artificial Sequence
  Synthetic
uauuuacauucaugaacc

SEQ ID NO: 526365 - RNA, 19 nt, Artificial Sequence
  Synthetic
guauuuacauucaugaacc

SEQ ID NO: 526366 - RNA, 20 nt, Artificial Sequence
  Synthetic
uguauuuacauucaugaacc

SEQ ID NO: 526367 - RNA, 21 nt, Artificial Sequence
  Synthetic
cuguauuuacauucaugaacc

SEQ ID NO: 526368 - RNA, 22 nt, Artificial Sequence
  Synthetic
ccuguauuuacauucaugaacc

SEQ ID NO: 526369 - RNA, 23 nt, Artificial Sequence
  Synthetic
uccuguauuuacauucaugaacc

SEQ ID NO: 526370 - RNA, 24 nt, Artificial Sequence
  Synthetic
auccuguauuuacauucaugaacc

SEQ ID NO: 526371 - RNA, 18 nt, Artificial Sequence
  Synthetic
cuacaacauagaugaacc

SEQ ID NO: 526372 - RNA, 19 nt, Artificial Sequence
  Synthetic
gcuacaacauagaugaacc

SEQ ID NO: 526373 - RNA, 20 nt, Artificial Sequence
  Synthetic
ugcuacaacauagaugaacc

SEQ ID NO: 526374 - RNA, 21 nt, Artificial Sequence
  Synthetic
augcuacaacauagaugaacc

SEQ ID NO: 526375 - RNA, 22 nt, Artificial Sequence
  Synthetic
caugcuacaacauagaugaacc

SEQ ID NO: 526376 - RNA, 23 nt, Artificial Sequence
  Synthetic
acaugcuacaacauagaugaacc

SEQ ID NO: 526377 - RNA, 24 nt, Artificial Sequence
  Synthetic
cacaugcuacaacauagaugaacc

SEQ ID NO: 526378 - RNA, 18 nt, Artificial Sequence
  Synthetic
augagaaucaccugaacc

SEQ ID NO: 526379 - RNA, 19 nt, Artificial Sequence
  Synthetic
caugagaaucaccugaacc

SEQ ID NO: 526380 - RNA, 20 nt, Artificial Sequence
  Synthetic
gcaugagaaucaccugaacc

SEQ ID NO: 526381 - RNA, 21 nt, Artificial Sequence
  Synthetic
ggcaugagaaucaccugaacc

SEQ ID NO: 526382 - RNA, 22 nt, Artificial Sequence
  Synthetic
uggcaugagaaucaccugaacc

SEQ ID NO: 526383 - RNA, 23 nt, Artificial Sequence
  Synthetic
guggcaugagaaucaccugaacc

SEQ ID NO: 526384 - RNA, 24 nt, Artificial Sequence
  Synthetic
uguggcaugagaaucaccugaacc

SEQ ID NO: 526385 - RNA, 18 nt, Artificial Sequence
  Synthetic
aaaaaugaaagcugaacc

SEQ ID NO: 526386 - RNA, 19 nt, Artificial Sequence
  Synthetic
uaaaaaugaaagcugaacc

SEQ ID NO: 526387 - RNA, 20 nt, Artificial Sequence
  Synthetic
cuaaaaaugaaagcugaacc

SEQ ID NO: 526388 - RNA, 21 nt, Artificial Sequence
  Synthetic
ucuaaaaaugaaagcugaacc

SEQ ID NO: 526389 - RNA, 22 nt, Artificial Sequence
  Synthetic
aucuaaaaaugaaagcugaacc

SEQ ID NO: 526390 - RNA, 23 nt, Artificial Sequence
  Synthetic
aaucuaaaaaugaaagcugaacc

SEQ ID NO: 526391 - RNA, 24 nt, Artificial Sequence
  Synthetic
aaaucuaaaaaugaaagcugaacc

SEQ ID NO: 526392 - RNA, 18 nt, Artificial Sequence
  Synthetic
aggagaauggcgugaacc

SEQ ID NO: 526393 - RNA, 19 nt, Artificial Sequence
  Synthetic
aaggagaauggcgugaacc

SEQ ID NO: 526394 - RNA, 20 nt, Artificial Sequence
  Synthetic
gaaggagaauggcgugaacc

SEQ ID NO: 526395 - RNA, 21 nt, Artificial Sequence
  Synthetic
agaaggagaauggcgugaacc

SEQ ID NO: 526396 - RNA, 22 nt, Artificial Sequence
  Synthetic
gagaaggagaauggcgugaacc

SEQ ID NO: 526397 - RNA, 23 nt, Artificial Sequence
  Synthetic
ggagaaggagaauggcgugaacc

SEQ ID NO: 526398 - RNA, 24 nt, Artificial Sequence
  Synthetic
aggagaaggagaauggcgugaacc

SEQ ID NO: 526399 - RNA, 21 nt, Artificial Sequence
  Synthetic
cgcaggagaauggcgugaacc

SEQ ID NO: 526400 - RNA, 22 nt, Artificial Sequence
  Synthetic
acgcaggagaauggcgugaacc

SEQ ID NO: 526401 - RNA, 23 nt, Artificial Sequence
  Synthetic
gacgcaggagaauggcgugaacc

SEQ ID NO: 526402 - RNA, 24 nt, Artificial Sequence
  Synthetic
ugacgcaggagaauggcgugaacc

SEQ ID NO: 526403 - RNA, 18 nt, Artificial Sequence
  Synthetic
agcaagccccauugaacc

SEQ ID NO: 526404 - RNA, 19 nt, Artificial Sequence
  Synthetic
aagcaagccccauugaacc

SEQ ID NO: 526405 - RNA, 20 nt, Artificial Sequence
  Synthetic
uaagcaagccccauugaacc

SEQ ID NO: 526406 - RNA, 21 nt, Artificial Sequence
  Synthetic
auaagcaagccccauugaacc

SEQ ID NO: 526407 - RNA, 22 nt, Artificial Sequence
  Synthetic
gauaagcaagccccauugaacc

SEQ ID NO: 526408 - RNA, 23 nt, Artificial Sequence
  Synthetic
ggauaagcaagccccauugaacc

SEQ ID NO: 526409 - RNA, 24 nt, Artificial Sequence
  Synthetic
gggauaagcaagccccauugaacc

SEQ ID NO: 526410 - RNA, 18 nt, Artificial Sequence
  Synthetic
aggagaaccacuugaacc

SEQ ID NO: 526411 - RNA, 19 nt, Artificial Sequence
  Synthetic
caggagaaccacuugaacc

SEQ ID NO: 526412 - RNA, 20 nt, Artificial Sequence
  Synthetic
gcaggagaaccacuugaacc

SEQ ID NO: 526413 - RNA, 21 nt, Artificial Sequence
  Synthetic
ggcaggagaaccacuugaacc

SEQ ID NO: 526414 - RNA, 22 nt, Artificial Sequence
  Synthetic
aggcaggagaaccacuugaacc

SEQ ID NO: 526415 - RNA, 23 nt, Artificial Sequence
  Synthetic
gaggcaggagaaccacuugaacc

SEQ ID NO: 526416 - RNA, 24 nt, Artificial Sequence
  Synthetic
ugaggcaggagaaccacuugaacc

SEQ ID NO: 526417 - RNA, 18 nt, Artificial Sequence
  Synthetic
acaagaaucacuugaacc

SEQ ID NO: 526418 - RNA, 19 nt, Artificial Sequence
  Synthetic
cacaagaaucacuugaacc

SEQ ID NO: 526419 - RNA, 20 nt, Artificial Sequence
  Synthetic
gcacaagaaucacuugaacc

SEQ ID NO: 526420 - RNA, 21 nt, Artificial Sequence
  Synthetic
ggcacaagaaucacuugaacc

SEQ ID NO: 526421 - RNA, 22 nt, Artificial Sequence
  Synthetic
aggcacaagaaucacuugaacc

SEQ ID NO: 526422 - RNA, 23 nt, Artificial Sequence
  Synthetic
gaggcacaagaaucacuugaacc

SEQ ID NO: 526423 - RNA, 24 nt, Artificial Sequence
  Synthetic
cgaggcacaagaaucacuugaacc

SEQ ID NO: 526424 - RNA, 18 nt, Artificial Sequence
  Synthetic
agaagaaucacuugaacc

SEQ ID NO: 526425 - RNA, 19 nt, Artificial Sequence
  Synthetic
cagaagaaucacuugaacc

SEQ ID NO: 526426 - RNA, 20 nt, Artificial Sequence
  Synthetic
gcagaagaaucacuugaacc

SEQ ID NO: 526427 - RNA, 21 nt, Artificial Sequence
  Synthetic
ggcagaagaaucacuugaacc

SEQ ID NO: 526428 - RNA, 22 nt, Artificial Sequence
  Synthetic
aggcagaagaaucacuugaacc

SEQ ID NO: 526429 - RNA, 23 nt, Artificial Sequence
  Synthetic
gaggcagaagaaucacuugaacc

SEQ ID NO: 526430 - RNA, 24 nt, Artificial Sequence
  Synthetic
ugaggcagaagaaucacuugaacc

SEQ ID NO: 526431 - RNA, 18 nt, Artificial Sequence
  Synthetic
augagaagcgcuugaacc

SEQ ID NO: 526432 - RNA, 19 nt, Artificial Sequence
  Synthetic
caugagaagcgcuugaacc

SEQ ID NO: 526433 - RNA, 20 nt, Artificial Sequence
  Synthetic
gcaugagaagcgcuugaacc

SEQ ID NO: 526434 - RNA, 21 nt, Artificial Sequence
  Synthetic
ggcaugagaagcgcuugaacc

SEQ ID NO: 526435 - RNA, 22 nt, Artificial Sequence
  Synthetic
aggcaugagaagcgcuugaacc

SEQ ID NO: 526436 - RNA, 23 nt, Artificial Sequence
  Synthetic
gaggcaugagaagcgcuugaacc

SEQ ID NO: 526437 - RNA, 24 nt, Artificial Sequence
  Synthetic
ugaggcaugagaagcgcuugaacc

SEQ ID NO: 526438 - RNA, 18 nt, Artificial Sequence
  Synthetic
uggaggaucgcuugaacc

SEQ ID NO: 526439 - RNA, 19 nt, Artificial Sequence
  Synthetic
uuggaggaucgcuugaacc

SEQ ID NO: 526440 - RNA, 20 nt, Artificial Sequence
  Synthetic
guuggaggaucgcuugaacc

SEQ ID NO: 526441 - RNA, 21 nt, Artificial Sequence
  Synthetic
gguuggaggaucgcuugaacc

SEQ ID NO: 526442 - RNA, 22 nt, Artificial Sequence
  Synthetic
agguuggaggaucgcuugaacc

SEQ ID NO: 526443 - RNA, 23 nt, Artificial Sequence
  Synthetic
gagguuggaggaucgcuugaacc

SEQ ID NO: 526444 - RNA, 24 nt, Artificial Sequence
  Synthetic
ugagguuggaggaucgcuugaacc

SEQ ID NO: 526445 - RNA, 18 nt, Artificial Sequence
  Synthetic
cagagaauugcuugaacc

SEQ ID NO: 526446 - RNA, 19 nt, Artificial Sequence
  Synthetic
acagagaauugcuugaacc

SEQ ID NO: 526447 - RNA, 20 nt, Artificial Sequence
  Synthetic
gacagagaauugcuugaacc

SEQ ID NO: 526448 - RNA, 21 nt, Artificial Sequence
  Synthetic
agacagagaauugcuugaacc

SEQ ID NO: 526449 - RNA, 22 nt, Artificial Sequence
  Synthetic
gagacagagaauugcuugaacc

SEQ ID NO: 526450 - RNA, 23 nt, Artificial Sequence
  Synthetic
ugagacagagaauugcuugaacc

SEQ ID NO: 526451 - RNA, 24 nt, Artificial Sequence
  Synthetic
cugagacagagaauugcuugaacc

SEQ ID NO: 526452 - RNA, 19 nt, Artificial Sequence
  Synthetic
gcagagaauugcuugaacc

SEQ ID NO: 526453 - RNA, 20 nt, Artificial Sequence
  Synthetic
ggcagagaauugcuugaacc

SEQ ID NO: 526454 - RNA, 21 nt, Artificial Sequence
  Synthetic
aggcagagaauugcuugaacc

SEQ ID NO: 526455 - RNA, 22 nt, Artificial Sequence
  Synthetic
gaggcagagaauugcuugaacc

SEQ ID NO: 526456 - RNA, 23 nt, Artificial Sequence
  Synthetic
ugaggcagagaauugcuugaacc

SEQ ID NO: 526457 - RNA, 24 nt, Artificial Sequence
  Synthetic
cugaggcagagaauugcuugaacc

SEQ ID NO: 526458 - RNA, 18 nt, Artificial Sequence
  Synthetic
gggagaauugcuugaacc

SEQ ID NO: 526459 - RNA, 19 nt, Artificial Sequence
  Synthetic
cgggagaauugcuugaacc

SEQ ID NO: 526460 - RNA, 20 nt, Artificial Sequence
  Synthetic
gcgggagaauugcuugaacc

SEQ ID NO: 526461 - RNA, 21 nt, Artificial Sequence
  Synthetic
ggcgggagaauugcuugaacc

SEQ ID NO: 526462 - RNA, 22 nt, Artificial Sequence
  Synthetic
aggcgggagaauugcuugaacc

SEQ ID NO: 526463 - RNA, 23 nt, Artificial Sequence
  Synthetic
gaggcgggagaauugcuugaacc

SEQ ID NO: 526464 - RNA, 24 nt, Artificial Sequence
  Synthetic
ugaggcgggagaauugcuugaacc

SEQ ID NO: 526465 - RNA, 18 nt, Artificial Sequence
  Synthetic
acaagaaucucuugaacc

SEQ ID NO: 526466 - RNA, 19 nt, Artificial Sequence
  Synthetic
cacaagaaucucuugaacc

SEQ ID NO: 526467 - RNA, 20 nt, Artificial Sequence
  Synthetic
gcacaagaaucucuugaacc

SEQ ID NO: 526468 - RNA, 21 nt, Artificial Sequence
  Synthetic
ggcacaagaaucucuugaacc

SEQ ID NO: 526469 - RNA, 22 nt, Artificial Sequence
  Synthetic
aggcacaagaaucucuugaacc

SEQ ID NO: 526470 - RNA, 23 nt, Artificial Sequence
  Synthetic
aaggcacaagaaucucuugaacc

SEQ ID NO: 526471 - RNA, 24 nt, Artificial Sequence
  Synthetic
uaaggcacaagaaucucuugaacc

SEQ ID NO: 526472 - RNA, 18 nt, Artificial Sequence
  Synthetic
agagaagaaaguugaacc

SEQ ID NO: 526473 - RNA, 19 nt, Artificial Sequence
  Synthetic
aagagaagaaaguugaacc

SEQ ID NO: 526474 - RNA, 20 nt, Artificial Sequence
  Synthetic
uaagagaagaaaguugaacc

SEQ ID NO: 526475 - RNA, 21 nt, Artificial Sequence
  Synthetic
auaagagaagaaaguugaacc

SEQ ID NO: 526476 - RNA, 22 nt, Artificial Sequence
  Synthetic
gauaagagaagaaaguugaacc

SEQ ID NO: 526477 - RNA, 23 nt, Artificial Sequence
  Synthetic
ggauaagagaagaaaguugaacc

SEQ ID NO: 526478 - RNA, 24 nt, Artificial Sequence
  Synthetic
aggauaagagaagaaaguugaacc

SEQ ID NO: 526479 - RNA, 24 nt, Artificial Sequence
  Synthetic
ugaggcaggagaaucauuugaacc

SEQ ID NO: 526480 - RNA, 18 nt, Artificial Sequence
  Synthetic
augguaguacuuugaacc

SEQ ID NO: 526481 - RNA, 19 nt, Artificial Sequence
  Synthetic
uaugguaguacuuugaacc

SEQ ID NO: 526482 - RNA, 20 nt, Artificial Sequence
  Synthetic
uuaugguaguacuuugaacc

SEQ ID NO: 526483 - RNA, 21 nt, Artificial Sequence
  Synthetic
uuuaugguaguacuuugaacc

SEQ ID NO: 526484 - RNA, 22 nt, Artificial Sequence
  Synthetic
uuuuaugguaguacuuugaacc

SEQ ID NO: 526485 - RNA, 23 nt, Artificial Sequence
  Synthetic
guuuuaugguaguacuuugaacc

SEQ ID NO: 526486 - RNA, 24 nt, Artificial Sequence
  Synthetic
gguuuuaugguaguacuuugaacc

SEQ ID NO: 526487 - RNA, 18 nt, Artificial Sequence
  Synthetic
uauaaaggauuuugaacc

SEQ ID NO: 526488 - RNA, 19 nt, Artificial Sequence
  Synthetic
uuauaaaggauuuugaacc

SEQ ID NO: 526489 - RNA, 20 nt, Artificial Sequence
  Synthetic
uuuauaaaggauuuugaacc

SEQ ID NO: 526490 - RNA, 21 nt, Artificial Sequence
  Synthetic
uuuuauaaaggauuuugaacc

SEQ ID NO: 526491 - RNA, 22 nt, Artificial Sequence
  Synthetic
auuuuauaaaggauuuugaacc

SEQ ID NO: 526492 - RNA, 23 nt, Artificial Sequence
  Synthetic
uauuuuauaaaggauuuugaacc

SEQ ID NO: 526493 - RNA, 24 nt, Artificial Sequence
  Synthetic
auauuuuauaaaggauuuugaacc

SEQ ID NO: 526494 - RNA, 18 nt, Artificial Sequence
  Synthetic
aggagaaucuuuugaacc

SEQ ID NO: 526495 - RNA, 19 nt, Artificial Sequence
  Synthetic
uaggagaaucuuuugaacc

SEQ ID NO: 526496 - RNA, 20 nt, Artificial Sequence
  Synthetic
guaggagaaucuuuugaacc

SEQ ID NO: 526497 - RNA, 21 nt, Artificial Sequence
  Synthetic
gguaggagaaucuuuugaacc

SEQ ID NO: 526498 - RNA, 22 nt, Artificial Sequence
  Synthetic
agguaggagaaucuuuugaacc

SEQ ID NO: 526499 - RNA, 23 nt, Artificial Sequence
  Synthetic
gagguaggagaaucuuuugaacc

SEQ ID NO: 526500 - RNA, 24 nt, Artificial Sequence
  Synthetic
ugagguaggagaaucuuuugaacc

SEQ ID NO: 526501 - RNA, 18 nt, Artificial Sequence
  Synthetic
uuuggacauaaaauaacc

SEQ ID NO: 526502 - RNA, 19 nt, Artificial Sequence
  Synthetic
uuuuggacauaaaauaacc

SEQ ID NO: 526503 - RNA, 20 nt, Artificial Sequence
  Synthetic
auuuuggacauaaaauaacc

SEQ ID NO: 526504 - RNA, 21 nt, Artificial Sequence
  Synthetic
gauuuuggacauaaaauaacc

SEQ ID NO: 526505 - RNA, 22 nt, Artificial Sequence
  Synthetic
ugauuuuggacauaaaauaacc

SEQ ID NO: 526506 - RNA, 23 nt, Artificial Sequence
  Synthetic
augauuuuggacauaaaauaacc

SEQ ID NO: 526507 - RNA, 24 nt, Artificial Sequence
  Synthetic
caugauuuuggacauaaaauaacc

SEQ ID NO: 526508 - RNA, 18 nt, Artificial Sequence
  Synthetic
caagcaaguuaaauaacc

SEQ ID NO: 526509 - RNA, 19 nt, Artificial Sequence
  Synthetic
ucaagcaaguuaaauaacc

SEQ ID NO: 526510 - RNA, 20 nt, Artificial Sequence
  Synthetic
cucaagcaaguuaaauaacc

SEQ ID NO: 526511 - RNA, 21 nt, Artificial Sequence
  Synthetic
acucaagcaaguuaaauaacc

SEQ ID NO: 526512 - RNA, 22 nt, Artificial Sequence
  Synthetic
uacucaagcaaguuaaauaacc

SEQ ID NO: 526513 - RNA, 23 nt, Artificial Sequence
  Synthetic
uuacucaagcaaguuaaauaacc

SEQ ID NO: 526514 - RNA, 24 nt, Artificial Sequence
  Synthetic
uuuacucaagcaaguuaaauaacc

SEQ ID NO: 526515 - RNA, 18 nt, Artificial Sequence
  Synthetic
cugagggguggaauaacc

SEQ ID NO: 526516 - RNA, 19 nt, Artificial Sequence
  Synthetic
ucugagggguggaauaacc

SEQ ID NO: 526517 - RNA, 20 nt, Artificial Sequence
  Synthetic
uucugagggguggaauaacc

SEQ ID NO: 526518 - RNA, 21 nt, Artificial Sequence
  Synthetic
uuucugagggguggaauaacc

SEQ ID NO: 526519 - RNA, 22 nt, Artificial Sequence
  Synthetic
auuucugagggguggaauaacc

SEQ ID NO: 526520 - RNA, 23 nt, Artificial Sequence
  Synthetic
uauuucugagggguggaauaacc

SEQ ID NO: 526521 - RNA, 24 nt, Artificial Sequence
  Synthetic
auauuucugagggguggaauaacc

SEQ ID NO: 526522 - RNA, 18 nt, Artificial Sequence
  Synthetic
uuuuuaaaguuaauaacc

SEQ ID NO: 526523 - RNA, 19 nt, Artificial Sequence
  Synthetic
cuuuuuaaaguuaauaacc

SEQ ID NO: 526524 - RNA, 20 nt, Artificial Sequence
  Synthetic
acuuuuuaaaguuaauaacc

SEQ ID NO: 526525 - RNA, 21 nt, Artificial Sequence
  Synthetic
gacuuuuuaaaguuaauaacc

SEQ ID NO: 526526 - RNA, 22 nt, Artificial Sequence
  Synthetic
ugacuuuuuaaaguuaauaacc

SEQ ID NO: 526527 - RNA, 23 nt, Artificial Sequence
  Synthetic
uugacuuuuuaaaguuaauaacc

SEQ ID NO: 526528 - RNA, 24 nt, Artificial Sequence
  Synthetic
auugacuuuuuaaaguuaauaacc

SEQ ID NO: 526529 - RNA, 18 nt, Artificial Sequence
  Synthetic
gccagcaucagcauaacc

SEQ ID NO: 526530 - RNA, 19 nt, Artificial Sequence
  Synthetic
ggccagcaucagcauaacc

SEQ ID NO: 526531 - RNA, 20 nt, Artificial Sequence
  Synthetic
aggccagcaucagcauaacc

SEQ ID NO: 526532 - RNA, 21 nt, Artificial Sequence
  Synthetic
uaggccagcaucagcauaacc

SEQ ID NO: 526533 - RNA, 22 nt, Artificial Sequence
  Synthetic
auaggccagcaucagcauaacc

SEQ ID NO: 526534 - RNA, 23 nt, Artificial Sequence
  Synthetic
cauaggccagcaucagcauaacc

SEQ ID NO: 526535 - RNA, 24 nt, Artificial Sequence
  Synthetic
gcauaggccagcaucagcauaacc

SEQ ID NO: 526536 - RNA, 18 nt, Artificial Sequence
  Synthetic
guuucucaagucauaacc

SEQ ID NO: 526537 - RNA, 19 nt, Artificial Sequence
  Synthetic
aguuucucaagucauaacc

SEQ ID NO: 526538 - RNA, 20 nt, Artificial Sequence
  Synthetic
gaguuucucaagucauaacc

SEQ ID NO: 526539 - RNA, 21 nt, Artificial Sequence
  Synthetic
ugaguuucucaagucauaacc

SEQ ID NO: 526540 - RNA, 22 nt, Artificial Sequence
  Synthetic
gugaguuucucaagucauaacc

SEQ ID NO: 526541 - RNA, 23 nt, Artificial Sequence
  Synthetic
ugugaguuucucaagucauaacc

SEQ ID NO: 526542 - RNA, 24 nt, Artificial Sequence
  Synthetic
uugugaguuucucaagucauaacc

SEQ ID NO: 526543 - RNA, 18 nt, Artificial Sequence
  Synthetic
uaucuuauacauauaacc

SEQ ID NO: 526544 - RNA, 19 nt, Artificial Sequence
  Synthetic
auaucuuauacauauaacc

SEQ ID NO: 526545 - RNA, 20 nt, Artificial Sequence
  Synthetic
gauaucuuauacauauaacc

SEQ ID NO: 526546 - RNA, 21 nt, Artificial Sequence
  Synthetic
agauaucuuauacauauaacc

SEQ ID NO: 526547 - RNA, 22 nt, Artificial Sequence
  Synthetic
uagauaucuuauacauauaacc

SEQ ID NO: 526548 - RNA, 23 nt, Artificial Sequence
  Synthetic
auagauaucuuauacauauaacc

SEQ ID NO: 526549 - RNA, 24 nt, Artificial Sequence
  Synthetic
aauagauaucuuauacauauaacc

SEQ ID NO: 526550 - RNA, 18 nt, Artificial Sequence
  Synthetic
cuggacuaugauauaacc

SEQ ID NO: 526551 - RNA, 19 nt, Artificial Sequence
  Synthetic
acuggacuaugauauaacc

SEQ ID NO: 526552 - RNA, 20 nt, Artificial Sequence
  Synthetic
uacuggacuaugauauaacc

SEQ ID NO: 526553 - RNA, 21 nt, Artificial Sequence
  Synthetic
cuacuggacuaugauauaacc

SEQ ID NO: 526554 - RNA, 22 nt, Artificial Sequence
  Synthetic
ucuacuggacuaugauauaacc

SEQ ID NO: 526555 - RNA, 23 nt, Artificial Sequence
  Synthetic
cucuacuggacuaugauauaacc

SEQ ID NO: 526556 - RNA, 24 nt, Artificial Sequence
  Synthetic
ccucuacuggacuaugauauaacc

SEQ ID NO: 526557 - RNA, 18 nt, Artificial Sequence
  Synthetic
aaaaucauugcuauaacc

SEQ ID NO: 526558 - RNA, 19 nt, Artificial Sequence
  Synthetic
caaaaucauugcuauaacc

SEQ ID NO: 526559 - RNA, 20 nt, Artificial Sequence
  Synthetic
ccaaaaucauugcuauaacc

SEQ ID NO: 526560 - RNA, 21 nt, Artificial Sequence
  Synthetic
gccaaaaucauugcuauaacc

SEQ ID NO: 526561 - RNA, 22 nt, Artificial Sequence
  Synthetic
ggccaaaaucauugcuauaacc

SEQ ID NO: 526562 - RNA, 23 nt, Artificial Sequence
  Synthetic
aggccaaaaucauugcuauaacc

SEQ ID NO: 526563 - RNA, 24 nt, Artificial Sequence
  Synthetic
caggccaaaaucauugcuauaacc

SEQ ID NO: 526564 - RNA, 18 nt, Artificial Sequence
  Synthetic
cuguacagaaguauaacc

SEQ ID NO: 526565 - RNA, 19 nt, Artificial Sequence
  Synthetic
acuguacagaaguauaacc

SEQ ID NO: 526566 - RNA, 20 nt, Artificial Sequence
  Synthetic
gacuguacagaaguauaacc

SEQ ID NO: 526567 - RNA, 21 nt, Artificial Sequence
  Synthetic
ggacuguacagaaguauaacc

SEQ ID NO: 526568 - RNA, 22 nt, Artificial Sequence
  Synthetic
uggacuguacagaaguauaacc

SEQ ID NO: 526569 - RNA, 23 nt, Artificial Sequence
  Synthetic
uuggacuguacagaaguauaacc

SEQ ID NO: 526570 - RNA, 24 nt, Artificial Sequence
  Synthetic
uuuggacuguacagaaguauaacc

SEQ ID NO: 526571 - RNA, 18 nt, Artificial Sequence
  Synthetic
acaccacugcuuauaacc

SEQ ID NO: 526572 - RNA, 19 nt, Artificial Sequence
  Synthetic
cacaccacugcuuauaacc

SEQ ID NO: 526573 - RNA, 20 nt, Artificial Sequence
  Synthetic
ccacaccacugcuuauaacc

SEQ ID NO: 526574 - RNA, 21 nt, Artificial Sequence
  Synthetic
uccacaccacugcuuauaacc

SEQ ID NO: 526575 - RNA, 22 nt, Artificial Sequence
  Synthetic
guccacaccacugcuuauaacc

SEQ ID NO: 526576 - RNA, 23 nt, Artificial Sequence
  Synthetic
uguccacaccacugcuuauaacc

SEQ ID NO: 526577 - RNA, 24 nt, Artificial Sequence
  Synthetic
uuguccacaccacugcuuauaacc

SEQ ID NO: 526578 - RNA, 18 nt, Artificial Sequence
  Synthetic
guuuaacauaaccuaacc

SEQ ID NO: 526579 - RNA, 19 nt, Artificial Sequence
  Synthetic
uguuuaacauaaccuaacc

SEQ ID NO: 526580 - RNA, 20 nt, Artificial Sequence
  Synthetic
cuguuuaacauaaccuaacc

SEQ ID NO: 526581 - RNA, 21 nt, Artificial Sequence
  Synthetic
ucuguuuaacauaaccuaacc

SEQ ID NO: 526582 - RNA, 22 nt, Artificial Sequence
  Synthetic
aucuguuuaacauaaccuaacc

SEQ ID NO: 526583 - RNA, 23 nt, Artificial Sequence
  Synthetic
aaucuguuuaacauaaccuaacc

SEQ ID NO: 526584 - RNA, 24 nt, Artificial Sequence
  Synthetic
caaucuguuuaacauaaccuaacc

SEQ ID NO: 526585 - RNA, 18 nt, Artificial Sequence
  Synthetic
auucuaaaacuucuaacc

SEQ ID NO: 526586 - RNA, 19 nt, Artificial Sequence
  Synthetic
aauucuaaaacuucuaacc

SEQ ID NO: 526587 - RNA, 20 nt, Artificial Sequence
  Synthetic
uaauucuaaaacuucuaacc

SEQ ID NO: 526588 - RNA, 21 nt, Artificial Sequence
  Synthetic
cuaauucuaaaacuucuaacc

SEQ ID NO: 526589 - RNA, 22 nt, Artificial Sequence
  Synthetic
ucuaauucuaaaacuucuaacc

SEQ ID NO: 526590 - RNA, 23 nt, Artificial Sequence
  Synthetic
cucuaauucuaaaacuucuaacc

SEQ ID NO: 526591 - RNA, 24 nt, Artificial Sequence
  Synthetic
ucucuaauucuaaaacuucuaacc

SEQ ID NO: 526592 - RNA, 18 nt, Artificial Sequence
  Synthetic
auaguguuguuucuaacc

SEQ ID NO: 526593 - RNA, 19 nt, Artificial Sequence
  Synthetic
uauaguguuguuucuaacc

SEQ ID NO: 526594 - RNA, 20 nt, Artificial Sequence
  Synthetic
auauaguguuguuucuaacc

SEQ ID NO: 526595 - RNA, 21 nt, Artificial Sequence
  Synthetic
uauauaguguuguuucuaacc

SEQ ID NO: 526596 - RNA, 22 nt, Artificial Sequence
  Synthetic
uuauauaguguuguuucuaacc

SEQ ID NO: 526597 - RNA, 23 nt, Artificial Sequence
  Synthetic
uuuauauaguguuguuucuaacc

SEQ ID NO: 526598 - RNA, 24 nt, Artificial Sequence
  Synthetic
auuuauauaguguuguuucuaacc

SEQ ID NO: 526599 - RNA, 18 nt, Artificial Sequence
  Synthetic
ucuacuugacaaguaacc

SEQ ID NO: 526600 - RNA, 19 nt, Artificial Sequence
  Synthetic
aucuacuugacaaguaacc

SEQ ID NO: 526601 - RNA, 20 nt, Artificial Sequence
  Synthetic
uaucuacuugacaaguaacc

SEQ ID NO: 526602 - RNA, 21 nt, Artificial Sequence
  Synthetic
auaucuacuugacaaguaacc

SEQ ID NO: 526603 - RNA, 22 nt, Artificial Sequence
  Synthetic
cauaucuacuugacaaguaacc

SEQ ID NO: 526604 - RNA, 23 nt, Artificial Sequence
  Synthetic
ccauaucuacuugacaaguaacc

SEQ ID NO: 526605 - RNA, 24 nt, Artificial Sequence
  Synthetic
uccauaucuacuugacaaguaacc

SEQ ID NO: 526606 - RNA, 18 nt, Artificial Sequence
  Synthetic
ucuuccuaacuaguaacc

SEQ ID NO: 526607 - RNA, 19 nt, Artificial Sequence
  Synthetic
gucuuccuaacuaguaacc

SEQ ID NO: 526608 - RNA, 20 nt, Artificial Sequence
  Synthetic
agucuuccuaacuaguaacc

SEQ ID NO: 526609 - RNA, 21 nt, Artificial Sequence
  Synthetic
cagucuuccuaacuaguaacc

SEQ ID NO: 526610 - RNA, 22 nt, Artificial Sequence
  Synthetic
acagucuuccuaacuaguaacc

SEQ ID NO: 526611 - RNA, 23 nt, Artificial Sequence
  Synthetic
gacagucuuccuaacuaguaacc

SEQ ID NO: 526612 - RNA, 24 nt, Artificial Sequence
  Synthetic
ugacagucuuccuaacuaguaacc

SEQ ID NO: 526613 - RNA, 18 nt, Artificial Sequence
  Synthetic
augcacacuuuaguaacc

SEQ ID NO: 526614 - RNA, 19 nt, Artificial Sequence
  Synthetic
caugcacacuuuaguaacc

SEQ ID NO: 526615 - RNA, 20 nt, Artificial Sequence
  Synthetic
acaugcacacuuuaguaacc

SEQ ID NO: 526616 - RNA, 21 nt, Artificial Sequence
  Synthetic
uacaugcacacuuuaguaacc

SEQ ID NO: 526617 - RNA, 22 nt, Artificial Sequence
  Synthetic
auacaugcacacuuuaguaacc

SEQ ID NO: 526618 - RNA, 23 nt, Artificial Sequence
  Synthetic
aauacaugcacacuuuaguaacc

SEQ ID NO: 526619 - RNA, 24 nt, Artificial Sequence
  Synthetic
aaauacaugcacacuuuaguaacc

SEQ ID NO: 526620 - RNA, 18 nt, Artificial Sequence
  Synthetic
aaagcaaacaagguaacc

SEQ ID NO: 526621 - RNA, 19 nt, Artificial Sequence
  Synthetic
gaaagcaaacaagguaacc

SEQ ID NO: 526622 - RNA, 20 nt, Artificial Sequence
  Synthetic
ggaaagcaaacaagguaacc

SEQ ID NO: 526623 - RNA, 21 nt, Artificial Sequence
  Synthetic
uggaaagcaaacaagguaacc

SEQ ID NO: 526624 - RNA, 22 nt, Artificial Sequence
  Synthetic
uuggaaagcaaacaagguaacc

SEQ ID NO: 526625 - RNA, 23 nt, Artificial Sequence
  Synthetic
uuuggaaagcaaacaagguaacc

SEQ ID NO: 526626 - RNA, 24 nt, Artificial Sequence
  Synthetic
auuuggaaagcaaacaagguaacc

SEQ ID NO: 526627 - RNA, 18 nt, Artificial Sequence
  Synthetic
agagguggguggguaacc

SEQ ID NO: 526628 - RNA, 19 nt, Artificial Sequence
  Synthetic
gagagguggguggguaacc

SEQ ID NO: 526629 - RNA, 20 nt, Artificial Sequence
  Synthetic
agagagguggguggguaacc

SEQ ID NO: 526630 - RNA, 21 nt, Artificial Sequence
  Synthetic
cagagagguggguggguaacc

SEQ ID NO: 526631 - RNA, 22 nt, Artificial Sequence
  Synthetic
acagagagguggguggguaacc

SEQ ID NO: 526632 - RNA, 23 nt, Artificial Sequence
  Synthetic
aacagagagguggguggguaacc

SEQ ID NO: 526633 - RNA, 24 nt, Artificial Sequence
  Synthetic
uaacagagagguggguggguaacc

SEQ ID NO: 526634 - RNA, 18 nt, Artificial Sequence
  Synthetic
ucagcaucagugguaacc

SEQ ID NO: 526635 - RNA, 19 nt, Artificial Sequence
  Synthetic
gucagcaucagugguaacc

SEQ ID NO: 526636 - RNA, 20 nt, Artificial Sequence
  Synthetic
agucagcaucagugguaacc

SEQ ID NO: 526637 - RNA, 21 nt, Artificial Sequence
  Synthetic
cagucagcaucagugguaacc

SEQ ID NO: 526638 - RNA, 22 nt, Artificial Sequence
  Synthetic
ccagucagcaucagugguaacc

SEQ ID NO: 526639 - RNA, 23 nt, Artificial Sequence
  Synthetic
gccagucagcaucagugguaacc

SEQ ID NO: 526640 - RNA, 24 nt, Artificial Sequence
  Synthetic
ugccagucagcaucagugguaacc

SEQ ID NO: 526641 - RNA, 18 nt, Artificial Sequence
  Synthetic
cugacuagcucuguaacc

SEQ ID NO: 526642 - RNA, 19 nt, Artificial Sequence
  Synthetic
acugacuagcucuguaacc

SEQ ID NO: 526643 - RNA, 20 nt, Artificial Sequence
  Synthetic
cacugacuagcucuguaacc

SEQ ID NO: 526644 - RNA, 21 nt, Artificial Sequence
  Synthetic
ucacugacuagcucuguaacc

SEQ ID NO: 526645 - RNA, 22 nt, Artificial Sequence
  Synthetic
gucacugacuagcucuguaacc

SEQ ID NO: 526646 - RNA, 23 nt, Artificial Sequence
  Synthetic
ugucacugacuagcucuguaacc

SEQ ID NO: 526647 - RNA, 24 nt, Artificial Sequence
  Synthetic
cugucacugacuagcucuguaacc

SEQ ID NO: 526648 - RNA, 18 nt, Artificial Sequence
  Synthetic
agaaaacggaaauuaacc

SEQ ID NO: 526649 - RNA, 19 nt, Artificial Sequence
  Synthetic
cagaaaacggaaauuaacc

SEQ ID NO: 526650 - RNA, 20 nt, Artificial Sequence
  Synthetic
gcagaaaacggaaauuaacc

SEQ ID NO: 526651 - RNA, 21 nt, Artificial Sequence
  Synthetic
ugcagaaaacggaaauuaacc

SEQ ID NO: 526652 - RNA, 22 nt, Artificial Sequence
  Synthetic
gugcagaaaacggaaauuaacc

SEQ ID NO: 526653 - RNA, 23 nt, Artificial Sequence
  Synthetic
agugcagaaaacggaaauuaacc

SEQ ID NO: 526654 - RNA, 24 nt, Artificial Sequence
  Synthetic
gagugcagaaaacggaaauuaacc

SEQ ID NO: 526655 - RNA, 18 nt, Artificial Sequence
  Synthetic
ccauuagcaagauuaacc

SEQ ID NO: 526656 - RNA, 19 nt, Artificial Sequence
  Synthetic
accauuagcaagauuaacc

SEQ ID NO: 526657 - RNA, 20 nt, Artificial Sequence
  Synthetic
gaccauuagcaagauuaacc

SEQ ID NO: 526658 - RNA, 21 nt, Artificial Sequence
  Synthetic
agaccauuagcaagauuaacc

SEQ ID NO: 526659 - RNA, 22 nt, Artificial Sequence
  Synthetic
uagaccauuagcaagauuaacc

SEQ ID NO: 526660 - RNA, 23 nt, Artificial Sequence
  Synthetic
auagaccauuagcaagauuaacc

SEQ ID NO: 526661 - RNA, 24 nt, Artificial Sequence
  Synthetic
gauagaccauuagcaagauuaacc

SEQ ID NO: 526662 - RNA, 18 nt, Artificial Sequence
  Synthetic
ccaguaguuagauuaacc

SEQ ID NO: 526663 - RNA, 19 nt, Artificial Sequence
  Synthetic
accaguaguuagauuaacc

SEQ ID NO: 526664 - RNA, 20 nt, Artificial Sequence
  Synthetic
gaccaguaguuagauuaacc

SEQ ID NO: 526665 - RNA, 21 nt, Artificial Sequence
  Synthetic
agaccaguaguuagauuaacc

SEQ ID NO: 526666 - RNA, 22 nt, Artificial Sequence
  Synthetic
uagaccaguaguuagauuaacc

SEQ ID NO: 526667 - RNA, 23 nt, Artificial Sequence
  Synthetic
auagaccaguaguuagauuaacc

SEQ ID NO: 526668 - RNA, 24 nt, Artificial Sequence
  Synthetic
gauagaccaguaguuagauuaacc

SEQ ID NO: 526669 - RNA, 18 nt, Artificial Sequence
  Synthetic
agaauacagauauuaacc

SEQ ID NO: 526670 - RNA, 19 nt, Artificial Sequence
  Synthetic
aagaauacagauauuaacc

SEQ ID NO: 526671 - RNA, 20 nt, Artificial Sequence
  Synthetic
uaagaauacagauauuaacc

SEQ ID NO: 526672 - RNA, 21 nt, Artificial Sequence
  Synthetic
cuaagaauacagauauuaacc

SEQ ID NO: 526673 - RNA, 22 nt, Artificial Sequence
  Synthetic
ccuaagaauacagauauuaacc

SEQ ID NO: 526674 - RNA, 23 nt, Artificial Sequence
  Synthetic
accuaagaauacagauauuaacc

SEQ ID NO: 526675 - RNA, 24 nt, Artificial Sequence
  Synthetic
uaccuaagaauacagauauuaacc

SEQ ID NO: 526676 - RNA, 18 nt, Artificial Sequence
  Synthetic
aacaacuguauguuaacc

SEQ ID NO: 526677 - RNA, 19 nt, Artificial Sequence
  Synthetic
aaacaacuguauguuaacc

SEQ ID NO: 526678 - RNA, 20 nt, Artificial Sequence
  Synthetic
uaaacaacuguauguuaacc

SEQ ID NO: 526679 - RNA, 21 nt, Artificial Sequence
  Synthetic
guaaacaacuguauguuaacc

SEQ ID NO: 526680 - RNA, 22 nt, Artificial Sequence
  Synthetic
uguaaacaacuguauguuaacc

SEQ ID NO: 526681 - RNA, 23 nt, Artificial Sequence
  Synthetic
cuguaaacaacuguauguuaacc

SEQ ID NO: 526682 - RNA, 24 nt, Artificial Sequence
  Synthetic
gcuguaaacaacuguauguuaacc

SEQ ID NO: 526683 - RNA, 18 nt, Artificial Sequence
  Synthetic
augguuacaaauuuaacc

SEQ ID NO: 526684 - RNA, 19 nt, Artificial Sequence
  Synthetic
caugguuacaaauuuaacc

SEQ ID NO: 526685 - RNA, 20 nt, Artificial Sequence
  Synthetic
ucaugguuacaaauuuaacc

SEQ ID NO: 526686 - RNA, 21 nt, Artificial Sequence
  Synthetic
uucaugguuacaaauuuaacc

SEQ ID NO: 526687 - RNA, 22 nt, Artificial Sequence
  Synthetic
guucaugguuacaaauuuaacc

SEQ ID NO: 526688 - RNA, 23 nt, Artificial Sequence
  Synthetic
uguucaugguuacaaauuuaacc

SEQ ID NO: 526689 - RNA, 24 nt, Artificial Sequence
  Synthetic
auguucaugguuacaaauuuaacc

SEQ ID NO: 526690 - RNA, 18 nt, Artificial Sequence
  Synthetic
uuuggagugaauuuaacc

SEQ ID NO: 526691 - RNA, 19 nt, Artificial Sequence
  Synthetic
auuuggagugaauuuaacc

SEQ ID NO: 526692 - RNA, 20 nt, Artificial Sequence
  Synthetic
uauuuggagugaauuuaacc

SEQ ID NO: 526693 - RNA, 21 nt, Artificial Sequence
  Synthetic
auauuuggagugaauuuaacc

SEQ ID NO: 526694 - RNA, 22 nt, Artificial Sequence
  Synthetic
aauauuuggagugaauuuaacc

SEQ ID NO: 526695 - RNA, 23 nt, Artificial Sequence
  Synthetic
aaauauuuggagugaauuuaacc

SEQ ID NO: 526696 - RNA, 24 nt, Artificial Sequence
  Synthetic
aaaauauuuggagugaauuuaacc

SEQ ID NO: 526697 - RNA, 18 nt, Artificial Sequence
  Synthetic
aauugauucuauuuaacc

SEQ ID NO: 526698 - RNA, 19 nt, Artificial Sequence
  Synthetic
gaauugauucuauuuaacc

SEQ ID NO: 526699 - RNA, 20 nt, Artificial Sequence
  Synthetic
ugaauugauucuauuuaacc

SEQ ID NO: 526700 - RNA, 21 nt, Artificial Sequence
  Synthetic
uugaauugauucuauuuaacc

SEQ ID NO: 526701 - RNA, 22 nt, Artificial Sequence
  Synthetic
uuugaauugauucuauuuaacc

SEQ ID NO: 526702 - RNA, 23 nt, Artificial Sequence
  Synthetic
auuugaauugauucuauuuaacc

SEQ ID NO: 526703 - RNA, 24 nt, Artificial Sequence
  Synthetic
aauuugaauugauucuauuuaacc

SEQ ID NO: 526704 - RNA, 18 nt, Artificial Sequence
  Synthetic
cuuccuuauacuuuaacc

SEQ ID NO: 526705 - RNA, 19 nt, Artificial Sequence
  Synthetic
ucuuccuuauacuuuaacc

SEQ ID NO: 526706 - RNA, 20 nt, Artificial Sequence
  Synthetic
uucuuccuuauacuuuaacc

SEQ ID NO: 526707 - RNA, 21 nt, Artificial Sequence
  Synthetic
uuucuuccuuauacuuuaacc

SEQ ID NO: 526708 - RNA, 22 nt, Artificial Sequence
  Synthetic
cuuucuuccuuauacuuuaacc

SEQ ID NO: 526709 - RNA, 23 nt, Artificial Sequence
  Synthetic
ucuuucuuccuuauacuuuaacc

SEQ ID NO: 526710 - RNA, 24 nt, Artificial Sequence
  Synthetic
uucuuucuuccuuauacuuuaacc

SEQ ID NO: 526711 - RNA, 18 nt, Artificial Sequence
  Synthetic
cuuugaacgguuuuaacc

SEQ ID NO: 526712 - RNA, 19 nt, Artificial Sequence
  Synthetic
ccuuugaacgguuuuaacc

SEQ ID NO: 526713 - RNA, 20 nt, Artificial Sequence
  Synthetic
accuuugaacgguuuuaacc

SEQ ID NO: 526714 - RNA, 21 nt, Artificial Sequence
  Synthetic
aaccuuugaacgguuuuaacc

SEQ ID NO: 526715 - RNA, 22 nt, Artificial Sequence
  Synthetic
gaaccuuugaacgguuuuaacc

SEQ ID NO: 526716 - RNA, 23 nt, Artificial Sequence
  Synthetic
ggaaccuuugaacgguuuuaacc

SEQ ID NO: 526717 - RNA, 24 nt, Artificial Sequence
  Synthetic
aggaaccuuugaacgguuuuaacc

SEQ ID NO: 526718 - RNA, 18 nt, Artificial Sequence
  Synthetic
cuuaauuuuuuuuuaacc

SEQ ID NO: 526719 - RNA, 19 nt, Artificial Sequence
  Synthetic
ucuuaauuuuuuuuuaacc

SEQ ID NO: 526720 - RNA, 20 nt, Artificial Sequence
  Synthetic
uucuuaauuuuuuuuuaacc

SEQ ID NO: 526721 - RNA, 21 nt, Artificial Sequence
  Synthetic
auucuuaauuuuuuuuuaacc

SEQ ID NO: 526722 - RNA, 22 nt, Artificial Sequence
  Synthetic
aauucuuaauuuuuuuuuaacc

SEQ ID NO: 526723 - RNA, 23 nt, Artificial Sequence
  Synthetic
aaauucuuaauuuuuuuuuaacc

SEQ ID NO: 526724 - RNA, 24 nt, Artificial Sequence
  Synthetic
gaaauucuuaauuuuuuuuuaacc

SEQ ID NO: 526725 - RNA, 18 nt, Artificial Sequence
  Synthetic
ucaagggggaaaaacacc

SEQ ID NO: 526726 - RNA, 19 nt, Artificial Sequence
  Synthetic
uucaagggggaaaaacacc

SEQ ID NO: 526727 - RNA, 20 nt, Artificial Sequence
  Synthetic
uuucaagggggaaaaacacc

SEQ ID NO: 526728 - RNA, 21 nt, Artificial Sequence
  Synthetic
uuuucaagggggaaaaacacc

SEQ ID NO: 526729 - RNA, 22 nt, Artificial Sequence
  Synthetic
uuuuucaagggggaaaaacacc

SEQ ID NO: 526730 - RNA, 23 nt, Artificial Sequence
  Synthetic
auuuuucaagggggaaaaacacc

SEQ ID NO: 526731 - RNA, 24 nt, Artificial Sequence
  Synthetic
aauuuuucaagggggaaaaacacc

SEQ ID NO: 526732 - RNA, 18 nt, Artificial Sequence
  Synthetic
uuuuuuuuuuuaaacacc

SEQ ID NO: 526733 - RNA, 19 nt, Artificial Sequence
  Synthetic
uuuuuuuuuuuuaaacacc

SEQ ID NO: 526734 - RNA, 20 nt, Artificial Sequence
  Synthetic
uuuuuuuuuuuuuaaacacc

SEQ ID NO: 526735 - RNA, 21 nt, Artificial Sequence
  Synthetic
uuuuuuuuuuuuuuaaacacc

SEQ ID NO: 526736 - RNA, 22 nt, Artificial Sequence
  Synthetic
uuuuuuuuuuuuuuuaaacacc

SEQ ID NO: 526737 - RNA, 23 nt, Artificial Sequence
  Synthetic
uuuuuuuuuuuuuuuuaaacacc

SEQ ID NO: 526738 - RNA, 24 nt, Artificial Sequence
  Synthetic
uuuuuuuuuuuuuuuuuaaacacc

SEQ ID NO: 526739 - RNA, 18 nt, Artificial Sequence
  Synthetic
uugguuuggaccaacacc

SEQ ID NO: 526740 - RNA, 19 nt, Artificial Sequence
  Synthetic
auugguuuggaccaacacc

SEQ ID NO: 526741 - RNA, 20 nt, Artificial Sequence
  Synthetic
aauugguuuggaccaacacc

SEQ ID NO: 526742 - RNA, 21 nt, Artificial Sequence
  Synthetic
uaauugguuuggaccaacacc

SEQ ID NO: 526743 - RNA, 22 nt, Artificial Sequence
  Synthetic
cuaauugguuuggaccaacacc

SEQ ID NO: 526744 - RNA, 23 nt, Artificial Sequence
  Synthetic
gcuaauugguuuggaccaacacc

SEQ ID NO: 526745 - RNA, 24 nt, Artificial Sequence
  Synthetic
ugcuaauugguuuggaccaacacc

SEQ ID NO: 526746 - RNA, 18 nt, Artificial Sequence
  Synthetic
uauagcuagagcaacacc

SEQ ID NO: 526747 - RNA, 19 nt, Artificial Sequence
  Synthetic
cuauagcuagagcaacacc

SEQ ID NO: 526748 - RNA, 20 nt, Artificial Sequence
  Synthetic
ucuauagcuagagcaacacc

SEQ ID NO: 526749 - RNA, 21 nt, Artificial Sequence
  Synthetic
uucuauagcuagagcaacacc

SEQ ID NO: 526750 - RNA, 22 nt, Artificial Sequence
  Synthetic
auucuauagcuagagcaacacc

SEQ ID NO: 526751 - RNA, 23 nt, Artificial Sequence
  Synthetic
aauucuauagcuagagcaacacc

SEQ ID NO: 526752 - RNA, 24 nt, Artificial Sequence
  Synthetic
caauucuauagcuagagcaacacc

SEQ ID NO: 526753 - RNA, 18 nt, Artificial Sequence
  Synthetic
uugaaaucaaggaacacc

SEQ ID NO: 526754 - RNA, 19 nt, Artificial Sequence
  Synthetic
cuugaaaucaaggaacacc

SEQ ID NO: 526755 - RNA, 20 nt, Artificial Sequence
  Synthetic
gcuugaaaucaaggaacacc

SEQ ID NO: 526756 - RNA, 21 nt, Artificial Sequence
  Synthetic
ugcuugaaaucaaggaacacc

SEQ ID NO: 526757 - RNA, 22 nt, Artificial Sequence
  Synthetic
cugcuugaaaucaaggaacacc

SEQ ID NO: 526758 - RNA, 23 nt, Artificial Sequence
  Synthetic
gcugcuugaaaucaaggaacacc

SEQ ID NO: 526759 - RNA, 24 nt, Artificial Sequence
  Synthetic
ugcugcuugaaaucaaggaacacc

SEQ ID NO: 526760 - RNA, 18 nt, Artificial Sequence
  Synthetic
agcagcaucaugaacacc

SEQ ID NO: 526761 - RNA, 19 nt, Artificial Sequence
  Synthetic
cagcagcaucaugaacacc

SEQ ID NO: 526762 - RNA, 20 nt, Artificial Sequence
  Synthetic
ccagcagcaucaugaacacc

SEQ ID NO: 526763 - RNA, 21 nt, Artificial Sequence
  Synthetic
accagcagcaucaugaacacc

SEQ ID NO: 526764 - RNA, 22 nt, Artificial Sequence
  Synthetic
aaccagcagcaucaugaacacc

SEQ ID NO: 526765 - RNA, 23 nt, Artificial Sequence
  Synthetic
gaaccagcagcaucaugaacacc

SEQ ID NO: 526766 - RNA, 24 nt, Artificial Sequence
  Synthetic
ugaaccagcagcaucaugaacacc

SEQ ID NO: 526767 - RNA, 18 nt, Artificial Sequence
  Synthetic
uuuucuuaauuuaacacc

SEQ ID NO: 526768 - RNA, 19 nt, Artificial Sequence
  Synthetic
auuuucuuaauuuaacacc

SEQ ID NO: 526769 - RNA, 20 nt, Artificial Sequence
  Synthetic
aauuuucuuaauuuaacacc

SEQ ID NO: 526770 - RNA, 21 nt, Artificial Sequence
  Synthetic
gaauuuucuuaauuuaacacc

SEQ ID NO: 526771 - RNA, 22 nt, Artificial Sequence
  Synthetic
agaauuuucuuaauuuaacacc

SEQ ID NO: 526772 - RNA, 23 nt, Artificial Sequence
  Synthetic
gagaauuuucuuaauuuaacacc

SEQ ID NO: 526773 - RNA, 24 nt, Artificial Sequence
  Synthetic
agagaauuuucuuaauuuaacacc

SEQ ID NO: 526774 - RNA, 18 nt, Artificial Sequence
  Synthetic
cacacacacacacacacc

SEQ ID NO: 526775 - RNA, 19 nt, Artificial Sequence
  Synthetic
acacacacacacacacacc

SEQ ID NO: 526776 - RNA, 20 nt, Artificial Sequence
  Synthetic
cacacacacacacacacacc

SEQ ID NO: 526777 - RNA, 21 nt, Artificial Sequence
  Synthetic
acacacacacacacacacacc

SEQ ID NO: 526778 - RNA, 22 nt, Artificial Sequence
  Synthetic
cacacacacacacacacacacc

SEQ ID NO: 526779 - RNA, 23 nt, Artificial Sequence
  Synthetic
acacacacacacacacacacacc

SEQ ID NO: 526780 - RNA, 24 nt, Artificial Sequence
  Synthetic
cacacacacacacacacacacacc

SEQ ID NO: 526781 - RNA, 18 nt, Artificial Sequence
  Synthetic
agcauuucuagacacacc

SEQ ID NO: 526782 - RNA, 19 nt, Artificial Sequence
  Synthetic
uagcauuucuagacacacc

SEQ ID NO: 526783 - RNA, 20 nt, Artificial Sequence
  Synthetic
auagcauuucuagacacacc

SEQ ID NO: 526784 - RNA, 21 nt, Artificial Sequence
  Synthetic
gauagcauuucuagacacacc

SEQ ID NO: 526785 - RNA, 22 nt, Artificial Sequence
  Synthetic
ggauagcauuucuagacacacc

SEQ ID NO: 526786 - RNA, 23 nt, Artificial Sequence
  Synthetic
uggauagcauuucuagacacacc

SEQ ID NO: 526787 - RNA, 24 nt, Artificial Sequence
  Synthetic
cuggauagcauuucuagacacacc

SEQ ID NO: 526788 - RNA, 18 nt, Artificial Sequence
  Synthetic
auguggcacauacacacc

SEQ ID NO: 526789 - RNA, 19 nt, Artificial Sequence
  Synthetic
aauguggcacauacacacc

SEQ ID NO: 526790 - RNA, 20 nt, Artificial Sequence
  Synthetic
aaauguggcacauacacacc

SEQ ID NO: 526791 - RNA, 21 nt, Artificial Sequence
  Synthetic
aaaauguggcacauacacacc

SEQ ID NO: 526792 - RNA, 22 nt, Artificial Sequence
  Synthetic
gaaaauguggcacauacacacc

SEQ ID NO: 526793 - RNA, 23 nt, Artificial Sequence
  Synthetic
agaaaauguggcacauacacacc

SEQ ID NO: 526794 - RNA, 24 nt, Artificial Sequence
  Synthetic
aagaaaauguggcacauacacacc

SEQ ID NO: 526795 - RNA, 18 nt, Artificial Sequence
  Synthetic
ugagaaacuucccacacc

SEQ ID NO: 526796 - RNA, 19 nt, Artificial Sequence
  Synthetic
cugagaaacuucccacacc

SEQ ID NO: 526797 - RNA, 20 nt, Artificial Sequence
  Synthetic
ccugagaaacuucccacacc

SEQ ID NO: 526798 - RNA, 21 nt, Artificial Sequence
  Synthetic
uccugagaaacuucccacacc

SEQ ID NO: 526799 - RNA, 22 nt, Artificial Sequence
  Synthetic
cuccugagaaacuucccacacc

SEQ ID NO: 526800 - RNA, 23 nt, Artificial Sequence
  Synthetic
ccuccugagaaacuucccacacc

SEQ ID NO: 526801 - RNA, 24 nt, Artificial Sequence
  Synthetic
gccuccugagaaacuucccacacc

SEQ ID NO: 526802 - RNA, 18 nt, Artificial Sequence
  Synthetic
gcccaacagauccacacc

SEQ ID NO: 526803 - RNA, 19 nt, Artificial Sequence
  Synthetic
cgcccaacagauccacacc

SEQ ID NO: 526804 - RNA, 20 nt, Artificial Sequence
  Synthetic
ucgcccaacagauccacacc

SEQ ID NO: 526805 - RNA, 21 nt, Artificial Sequence
  Synthetic
gucgcccaacagauccacacc

SEQ ID NO: 526806 - RNA, 22 nt, Artificial Sequence
  Synthetic
ggucgcccaacagauccacacc

SEQ ID NO: 526807 - RNA, 23 nt, Artificial Sequence
  Synthetic
aggucgcccaacagauccacacc

SEQ ID NO: 526808 - RNA, 24 nt, Artificial Sequence
  Synthetic
aaggucgcccaacagauccacacc

SEQ ID NO: 526809 - RNA, 18 nt, Artificial Sequence
  Synthetic
gaaggggaacaucacacc

SEQ ID NO: 526810 - RNA, 19 nt, Artificial Sequence
  Synthetic
ggaaggggaacaucacacc

SEQ ID NO: 526811 - RNA, 20 nt, Artificial Sequence
  Synthetic
aggaaggggaacaucacacc

SEQ ID NO: 526812 - RNA, 21 nt, Artificial Sequence
  Synthetic
caggaaggggaacaucacacc

SEQ ID NO: 526813 - RNA, 22 nt, Artificial Sequence
  Synthetic
acaggaaggggaacaucacacc

SEQ ID NO: 526814 - RNA, 23 nt, Artificial Sequence
  Synthetic
cacaggaaggggaacaucacacc

SEQ ID NO: 526815 - RNA, 24 nt, Artificial Sequence
  Synthetic
acacaggaaggggaacaucacacc

SEQ ID NO: 526816 - RNA, 18 nt, Artificial Sequence
  Synthetic
ugauuucaacaagacacc

SEQ ID NO: 526817 - RNA, 19 nt, Artificial Sequence
  Synthetic
augauuucaacaagacacc

SEQ ID NO: 526818 - RNA, 20 nt, Artificial Sequence
  Synthetic
aaugauuucaacaagacacc

SEQ ID NO: 526819 - RNA, 21 nt, Artificial Sequence
  Synthetic
uaaugauuucaacaagacacc

SEQ ID NO: 526820 - RNA, 22 nt, Artificial Sequence
  Synthetic
auaaugauuucaacaagacacc

SEQ ID NO: 526821 - RNA, 23 nt, Artificial Sequence
  Synthetic
aauaaugauuucaacaagacacc

SEQ ID NO: 526822 - RNA, 24 nt, Artificial Sequence
  Synthetic
aaauaaugauuucaacaagacacc

SEQ ID NO: 526823 - RNA, 18 nt, Artificial Sequence
  Synthetic
cucacuggggaggacacc

SEQ ID NO: 526824 - RNA, 19 nt, Artificial Sequence
  Synthetic
ccucacuggggaggacacc

SEQ ID NO: 526825 - RNA, 20 nt, Artificial Sequence
  Synthetic
uccucacuggggaggacacc

SEQ ID NO: 526826 - RNA, 21 nt, Artificial Sequence
  Synthetic
guccucacuggggaggacacc

SEQ ID NO: 526827 - RNA, 22 nt, Artificial Sequence
  Synthetic
aguccucacuggggaggacacc

SEQ ID NO: 526828 - RNA, 23 nt, Artificial Sequence
  Synthetic
uaguccucacuggggaggacacc

SEQ ID NO: 526829 - RNA, 24 nt, Artificial Sequence
  Synthetic
auaguccucacuggggaggacacc

SEQ ID NO: 526830 - RNA, 18 nt, Artificial Sequence
  Synthetic
ggucccucccaugacacc

SEQ ID NO: 526831 - RNA, 19 nt, Artificial Sequence
  Synthetic
gggucccucccaugacacc

SEQ ID NO: 526832 - RNA, 20 nt, Artificial Sequence
  Synthetic
ugggucccucccaugacacc

SEQ ID NO: 526833 - RNA, 21 nt, Artificial Sequence
  Synthetic
cugggucccucccaugacacc

SEQ ID NO: 526834 - RNA, 22 nt, Artificial Sequence
  Synthetic
acugggucccucccaugacacc

SEQ ID NO: 526835 - RNA, 23 nt, Artificial Sequence
  Synthetic
cacugggucccucccaugacacc

SEQ ID NO: 526836 - RNA, 24 nt, Artificial Sequence
  Synthetic
ucacugggucccucccaugacacc

SEQ ID NO: 526837 - RNA, 18 nt, Artificial Sequence
  Synthetic
aauuaauacccugacacc

SEQ ID NO: 526838 - RNA, 19 nt, Artificial Sequence
  Synthetic
aaauuaauacccugacacc

SEQ ID NO: 526839 - RNA, 20 nt, Artificial Sequence
  Synthetic
gaaauuaauacccugacacc

SEQ ID NO: 526840 - RNA, 21 nt, Artificial Sequence
  Synthetic
ggaaauuaauacccugacacc

SEQ ID NO: 526841 - RNA, 22 nt, Artificial Sequence
  Synthetic
aggaaauuaauacccugacacc

SEQ ID NO: 526842 - RNA, 23 nt, Artificial Sequence
  Synthetic
gaggaaauuaauacccugacacc

SEQ ID NO: 526843 - RNA, 24 nt, Artificial Sequence
  Synthetic
agaggaaauuaauacccugacacc

SEQ ID NO: 526844 - RNA, 18 nt, Artificial Sequence
  Synthetic
uucuguucagcauacacc

SEQ ID NO: 526845 - RNA, 19 nt, Artificial Sequence
  Synthetic
uuucuguucagcauacacc

SEQ ID NO: 526846 - RNA, 20 nt, Artificial Sequence
  Synthetic
auuucuguucagcauacacc

SEQ ID NO: 526847 - RNA, 21 nt, Artificial Sequence
  Synthetic
uauuucuguucagcauacacc

SEQ ID NO: 526848 - RNA, 22 nt, Artificial Sequence
  Synthetic
uuauuucuguucagcauacacc

SEQ ID NO: 526849 - RNA, 23 nt, Artificial Sequence
  Synthetic
uuuauuucuguucagcauacacc

SEQ ID NO: 526850 - RNA, 24 nt, Artificial Sequence
  Synthetic
uuuuauuucuguucagcauacacc

SEQ ID NO: 526851 - RNA, 18 nt, Artificial Sequence
  Synthetic
aauugacacauauacacc

SEQ ID NO: 526852 - RNA, 19 nt, Artificial Sequence
  Synthetic
aaauugacacauauacacc

SEQ ID NO: 526853 - RNA, 20 nt, Artificial Sequence
  Synthetic
aaaauugacacauauacacc

SEQ ID NO: 526854 - RNA, 21 nt, Artificial Sequence
  Synthetic
gaaaauugacacauauacacc

SEQ ID NO: 526855 - RNA, 22 nt, Artificial Sequence
  Synthetic
agaaaauugacacauauacacc

SEQ ID NO: 526856 - RNA, 23 nt, Artificial Sequence
  Synthetic
aagaaaauugacacauauacacc

SEQ ID NO: 526857 - RNA, 24 nt, Artificial Sequence
  Synthetic
aaagaaaauugacacauauacacc

SEQ ID NO: 526858 - RNA, 18 nt, Artificial Sequence
  Synthetic
aauuggcacauauacacc

SEQ ID NO: 526859 - RNA, 19 nt, Artificial Sequence
  Synthetic
aaauuggcacauauacacc

SEQ ID NO: 526860 - RNA, 20 nt, Artificial Sequence
  Synthetic
aaaauuggcacauauacacc

SEQ ID NO: 526861 - RNA, 21 nt, Artificial Sequence
  Synthetic
gaaaauuggcacauauacacc

SEQ ID NO: 526862 - RNA, 22 nt, Artificial Sequence
  Synthetic
agaaaauuggcacauauacacc

SEQ ID NO: 526863 - RNA, 23 nt, Artificial Sequence
  Synthetic
aagaaaauuggcacauauacacc

SEQ ID NO: 526864 - RNA, 24 nt, Artificial Sequence
  Synthetic
aaagaaaauuggcacauauacacc

SEQ ID NO: 526865 - RNA, 21 nt, Artificial Sequence
  Synthetic
aaaaugugguacauauacacc

SEQ ID NO: 526866 - RNA, 22 nt, Artificial Sequence
  Synthetic
gaaaaugugguacauauacacc

SEQ ID NO: 526867 - RNA, 23 nt, Artificial Sequence
  Synthetic
agaaaaugugguacauauacacc

SEQ ID NO: 526868 - RNA, 24 nt, Artificial Sequence
  Synthetic
aagaaaaugugguacauauacacc

SEQ ID NO: 526869 - RNA, 24 nt, Artificial Sequence
  Synthetic
uagaaaaugugguacauauacacc

SEQ ID NO: 526870 - RNA, 18 nt, Artificial Sequence
  Synthetic
auacggugcauauacacc

SEQ ID NO: 526871 - RNA, 19 nt, Artificial Sequence
  Synthetic
aauacggugcauauacacc

SEQ ID NO: 526872 - RNA, 20 nt, Artificial Sequence
  Synthetic
aaauacggugcauauacacc

SEQ ID NO: 526873 - RNA, 21 nt, Artificial Sequence
  Synthetic
aaaauacggugcauauacacc

SEQ ID NO: 526874 - RNA, 22 nt, Artificial Sequence
  Synthetic
gaaaauacggugcauauacacc

SEQ ID NO: 526875 - RNA, 23 nt, Artificial Sequence
  Synthetic
agaaaauacggugcauauacacc

SEQ ID NO: 526876 - RNA, 24 nt, Artificial Sequence
  Synthetic
aagaaaauacggugcauauacacc

SEQ ID NO: 526877 - RNA, 18 nt, Artificial Sequence
  Synthetic
auguggcgcguauacacc

SEQ ID NO: 526878 - RNA, 19 nt, Artificial Sequence
  Synthetic
aauguggcgcguauacacc

SEQ ID NO: 526879 - RNA, 20 nt, Artificial Sequence
  Synthetic
gaauguggcgcguauacacc

SEQ ID NO: 526880 - RNA, 21 nt, Artificial Sequence
  Synthetic
agaauguggcgcguauacacc

SEQ ID NO: 526881 - RNA, 22 nt, Artificial Sequence
  Synthetic
aagaauguggcgcguauacacc

SEQ ID NO: 526882 - RNA, 23 nt, Artificial Sequence
  Synthetic
aaagaauguggcgcguauacacc

SEQ ID NO: 526883 - RNA, 24 nt, Artificial Sequence
  Synthetic
uaaagaauguggcgcguauacacc

SEQ ID NO: 526884 - RNA, 18 nt, Artificial Sequence
  Synthetic
gaccuugcaugcuacacc

SEQ ID NO: 526885 - RNA, 19 nt, Artificial Sequence
  Synthetic
ugaccuugcaugcuacacc

SEQ ID NO: 526886 - RNA, 20 nt, Artificial Sequence
  Synthetic
gugaccuugcaugcuacacc

SEQ ID NO: 526887 - RNA, 21 nt, Artificial Sequence
  Synthetic
ugugaccuugcaugcuacacc

SEQ ID NO: 526888 - RNA, 22 nt, Artificial Sequence
  Synthetic
gugugaccuugcaugcuacacc

SEQ ID NO: 526889 - RNA, 23 nt, Artificial Sequence
  Synthetic
ugugugaccuugcaugcuacacc

SEQ ID NO: 526890 - RNA, 24 nt, Artificial Sequence
  Synthetic
augugugaccuugcaugcuacacc

SEQ ID NO: 526891 - RNA, 18 nt, Artificial Sequence
  Synthetic
aguagcucagucuacacc

SEQ ID NO: 526892 - RNA, 19 nt, Artificial Sequence
  Synthetic
uaguagcucagucuacacc

SEQ ID NO: 526893 - RNA, 20 nt, Artificial Sequence
  Synthetic
auaguagcucagucuacacc

SEQ ID NO: 526894 - RNA, 21 nt, Artificial Sequence
  Synthetic
uauaguagcucagucuacacc

SEQ ID NO: 526895 - RNA, 22 nt, Artificial Sequence
  Synthetic
uuauaguagcucagucuacacc

SEQ ID NO: 526896 - RNA, 23 nt, Artificial Sequence
  Synthetic
auuauaguagcucagucuacacc

SEQ ID NO: 526897 - RNA, 24 nt, Artificial Sequence
  Synthetic
uauuauaguagcucagucuacacc

SEQ ID NO: 526898 - RNA, 18 nt, Artificial Sequence
  Synthetic
auucugacuuucuacacc

SEQ ID NO: 526899 - RNA, 19 nt, Artificial Sequence
  Synthetic
gauucugacuuucuacacc

SEQ ID NO: 526900 - RNA, 20 nt, Artificial Sequence
  Synthetic
ggauucugacuuucuacacc

SEQ ID NO: 526901 - RNA, 21 nt, Artificial Sequence
  Synthetic
uggauucugacuuucuacacc

SEQ ID NO: 526902 - RNA, 22 nt, Artificial Sequence
  Synthetic
guggauucugacuuucuacacc

SEQ ID NO: 526903 - RNA, 23 nt, Artificial Sequence
  Synthetic
uguggauucugacuuucuacacc

SEQ ID NO: 526904 - RNA, 24 nt, Artificial Sequence
  Synthetic
auguggauucugacuuucuacacc

SEQ ID NO: 526905 - RNA, 18 nt, Artificial Sequence
  Synthetic
auguggcacauguacacc

SEQ ID NO: 526906 - RNA, 19 nt, Artificial Sequence
  Synthetic
aauguggcacauguacacc

SEQ ID NO: 526907 - RNA, 20 nt, Artificial Sequence
  Synthetic
aaauguggcacauguacacc

SEQ ID NO: 526908 - RNA, 21 nt, Artificial Sequence
  Synthetic
aaaauguggcacauguacacc

SEQ ID NO: 526909 - RNA, 22 nt, Artificial Sequence
  Synthetic
gaaaauguggcacauguacacc

SEQ ID NO: 526910 - RNA, 23 nt, Artificial Sequence
  Synthetic
agaaaauguggcacauguacacc

SEQ ID NO: 526911 - RNA, 24 nt, Artificial Sequence
  Synthetic
aagaaaauguggcacauguacacc

SEQ ID NO: 526912 - RNA, 18 nt, Artificial Sequence
  Synthetic
cugugcaaguuguacacc

SEQ ID NO: 526913 - RNA, 19 nt, Artificial Sequence
  Synthetic
gcugugcaaguuguacacc

SEQ ID NO: 526914 - RNA, 20 nt, Artificial Sequence
  Synthetic
agcugugcaaguuguacacc

SEQ ID NO: 526915 - RNA, 21 nt, Artificial Sequence
  Synthetic
cagcugugcaaguuguacacc

SEQ ID NO: 526916 - RNA, 22 nt, Artificial Sequence
  Synthetic
acagcugugcaaguuguacacc

SEQ ID NO: 526917 - RNA, 23 nt, Artificial Sequence
  Synthetic
aacagcugugcaaguuguacacc

SEQ ID NO: 526918 - RNA, 24 nt, Artificial Sequence
  Synthetic
gaacagcugugcaaguuguacacc

SEQ ID NO: 526919 - RNA, 18 nt, Artificial Sequence
  Synthetic
uuccaauaacauuacacc

SEQ ID NO: 526920 - RNA, 19 nt, Artificial Sequence
  Synthetic
uuuccaauaacauuacacc

SEQ ID NO: 526921 - RNA, 20 nt, Artificial Sequence
  Synthetic
guuuccaauaacauuacacc

SEQ ID NO: 526922 - RNA, 21 nt, Artificial Sequence
  Synthetic
gguuuccaauaacauuacacc

SEQ ID NO: 526923 - RNA, 22 nt, Artificial Sequence
  Synthetic
agguuuccaauaacauuacacc

SEQ ID NO: 526924 - RNA, 23 nt, Artificial Sequence
  Synthetic
aagguuuccaauaacauuacacc

SEQ ID NO: 526925 - RNA, 24 nt, Artificial Sequence
  Synthetic
aaagguuuccaauaacauuacacc

SEQ ID NO: 526926 - RNA, 18 nt, Artificial Sequence
  Synthetic
agagggaguauuuacacc

SEQ ID NO: 526927 - RNA, 19 nt, Artificial Sequence
  Synthetic
uagagggaguauuuacacc

SEQ ID NO: 526928 - RNA, 20 nt, Artificial Sequence
  Synthetic
guagagggaguauuuacacc

SEQ ID NO: 526929 - RNA, 21 nt, Artificial Sequence
  Synthetic
gguagagggaguauuuacacc

SEQ ID NO: 526930 - RNA, 22 nt, Artificial Sequence
  Synthetic
ugguagagggaguauuuacacc

SEQ ID NO: 526931 - RNA, 23 nt, Artificial Sequence
  Synthetic
gugguagagggaguauuuacacc

SEQ ID NO: 526932 - RNA, 24 nt, Artificial Sequence
  Synthetic
agugguagagggaguauuuacacc

SEQ ID NO: 526933 - RNA, 18 nt, Artificial Sequence
  Synthetic
ugggugcagcaaaccacc

SEQ ID NO: 526934 - RNA, 19 nt, Artificial Sequence
  Synthetic
augggugcagcaaaccacc

SEQ ID NO: 526935 - RNA, 20 nt, Artificial Sequence
  Synthetic
gaugggugcagcaaaccacc

SEQ ID NO: 526936 - RNA, 21 nt, Artificial Sequence
  Synthetic
ugaugggugcagcaaaccacc

SEQ ID NO: 526937 - RNA, 22 nt, Artificial Sequence
  Synthetic
uugaugggugcagcaaaccacc

SEQ ID NO: 526938 - RNA, 23 nt, Artificial Sequence
  Synthetic
guugaugggugcagcaaaccacc

SEQ ID NO: 526939 - RNA, 24 nt, Artificial Sequence
  Synthetic
gguugaugggugcagcaaaccacc

SEQ ID NO: 526940 - RNA, 18 nt, Artificial Sequence
  Synthetic
ugugugcagcaaaccacc

SEQ ID NO: 526941 - RNA, 19 nt, Artificial Sequence
  Synthetic
augugugcagcaaaccacc

SEQ ID NO: 526942 - RNA, 20 nt, Artificial Sequence
  Synthetic
gaugugugcagcaaaccacc

SEQ ID NO: 526943 - RNA, 21 nt, Artificial Sequence
  Synthetic
ugaugugugcagcaaaccacc

SEQ ID NO: 526944 - RNA, 22 nt, Artificial Sequence
  Synthetic
uugaugugugcagcaaaccacc

SEQ ID NO: 526945 - RNA, 23 nt, Artificial Sequence
  Synthetic
guugaugugugcagcaaaccacc

SEQ ID NO: 526946 - RNA, 24 nt, Artificial Sequence
  Synthetic
gguugaugugugcagcaaaccacc

SEQ ID NO: 526947 - RNA, 18 nt, Artificial Sequence
  Synthetic
uuggaaugagaaaccacc

SEQ ID NO: 526948 - RNA, 19 nt, Artificial Sequence
  Synthetic
auuggaaugagaaaccacc

SEQ ID NO: 526949 - RNA, 20 nt, Artificial Sequence
  Synthetic
aauuggaaugagaaaccacc

SEQ ID NO: 526950 - RNA, 21 nt, Artificial Sequence
  Synthetic
gaauuggaaugagaaaccacc

SEQ ID NO: 526951 - RNA, 22 nt, Artificial Sequence
  Synthetic
agaauuggaaugagaaaccacc

SEQ ID NO: 526952 - RNA, 23 nt, Artificial Sequence
  Synthetic
gagaauuggaaugagaaaccacc

SEQ ID NO: 526953 - RNA, 24 nt, Artificial Sequence
  Synthetic
agagaauuggaaugagaaaccacc

SEQ ID NO: 526954 - RNA, 18 nt, Artificial Sequence
  Synthetic
cucuguuagcuaaccacc

SEQ ID NO: 526955 - RNA, 19 nt, Artificial Sequence
  Synthetic
acucuguuagcuaaccacc

SEQ ID NO: 526956 - RNA, 20 nt, Artificial Sequence
  Synthetic
aacucuguuagcuaaccacc

SEQ ID NO: 526957 - RNA, 21 nt, Artificial Sequence
  Synthetic
uaacucuguuagcuaaccacc

SEQ ID NO: 526958 - RNA, 22 nt, Artificial Sequence
  Synthetic
uuaacucuguuagcuaaccacc

SEQ ID NO: 526959 - RNA, 23 nt, Artificial Sequence
  Synthetic
uuuaacucuguuagcuaaccacc

SEQ ID NO: 526960 - RNA, 24 nt, Artificial Sequence
  Synthetic
auuuaacucuguuagcuaaccacc

SEQ ID NO: 526961 - RNA, 18 nt, Artificial Sequence
  Synthetic
caugcaccugucaccacc

SEQ ID NO: 526962 - RNA, 19 nt, Artificial Sequence
  Synthetic
ccaugcaccugucaccacc

SEQ ID NO: 526963 - RNA, 20 nt, Artificial Sequence
  Synthetic
cccaugcaccugucaccacc

SEQ ID NO: 526964 - RNA, 21 nt, Artificial Sequence
  Synthetic
ccccaugcaccugucaccacc

SEQ ID NO: 526965 - RNA, 22 nt, Artificial Sequence
  Synthetic
cccccaugcaccugucaccacc

SEQ ID NO: 526966 - RNA, 23 nt, Artificial Sequence
  Synthetic
acccccaugcaccugucaccacc

SEQ ID NO: 526967 - RNA, 24 nt, Artificial Sequence
  Synthetic
gacccccaugcaccugucaccacc

SEQ ID NO: 526968 - RNA, 18 nt, Artificial Sequence
  Synthetic
acacccucauuuaccacc

SEQ ID NO: 526969 - RNA, 19 nt, Artificial Sequence
  Synthetic
aacacccucauuuaccacc

SEQ ID NO: 526970 - RNA, 20 nt, Artificial Sequence
  Synthetic
uaacacccucauuuaccacc

SEQ ID NO: 526971 - RNA, 21 nt, Artificial Sequence
  Synthetic
guaacacccucauuuaccacc

SEQ ID NO: 526972 - RNA, 22 nt, Artificial Sequence
  Synthetic
aguaacacccucauuuaccacc

SEQ ID NO: 526973 - RNA, 23 nt, Artificial Sequence
  Synthetic
uaguaacacccucauuuaccacc

SEQ ID NO: 526974 - RNA, 24 nt, Artificial Sequence
  Synthetic
uuaguaacacccucauuuaccacc

SEQ ID NO: 526975 - RNA, 18 nt, Artificial Sequence
  Synthetic
guuuccccuccccccacc

SEQ ID NO: 526976 - RNA, 19 nt, Artificial Sequence
  Synthetic
uguuuccccuccccccacc

SEQ ID NO: 526977 - RNA, 20 nt, Artificial Sequence
  Synthetic
auguuuccccuccccccacc

SEQ ID NO: 526978 - RNA, 21 nt, Artificial Sequence
  Synthetic
uauguuuccccuccccccacc

SEQ ID NO: 526979 - RNA, 22 nt, Artificial Sequence
  Synthetic
uuauguuuccccuccccccacc

SEQ ID NO: 526980 - RNA, 23 nt, Artificial Sequence
  Synthetic
uuuauguuuccccuccccccacc

SEQ ID NO: 526981 - RNA, 24 nt, Artificial Sequence
  Synthetic
uuuuauguuuccccuccccccacc

SEQ ID NO: 526982 - RNA, 18 nt, Artificial Sequence
  Synthetic
auggggacaugucccacc

SEQ ID NO: 526983 - RNA, 19 nt, Artificial Sequence
  Synthetic
uauggggacaugucccacc

SEQ ID NO: 526984 - RNA, 20 nt, Artificial Sequence
  Synthetic
uuauggggacaugucccacc

SEQ ID NO: 526985 - RNA, 21 nt, Artificial Sequence
  Synthetic
auuauggggacaugucccacc

SEQ ID NO: 526986 - RNA, 22 nt, Artificial Sequence
  Synthetic
gauuauggggacaugucccacc

SEQ ID NO: 526987 - RNA, 23 nt, Artificial Sequence
  Synthetic
ggauuauggggacaugucccacc

SEQ ID NO: 526988 - RNA, 24 nt, Artificial Sequence
  Synthetic
gggauuauggggacaugucccacc

SEQ ID NO: 526989 - RNA, 18 nt, Artificial Sequence
  Synthetic
cacaaaaccaucgccacc

SEQ ID NO: 526990 - RNA, 19 nt, Artificial Sequence
  Synthetic
ccacaaaaccaucgccacc

SEQ ID NO: 526991 - RNA, 20 nt, Artificial Sequence
  Synthetic
cccacaaaaccaucgccacc

SEQ ID NO: 526992 - RNA, 21 nt, Artificial Sequence
  Synthetic
acccacaaaaccaucgccacc

SEQ ID NO: 526993 - RNA, 22 nt, Artificial Sequence
  Synthetic
cacccacaaaaccaucgccacc

SEQ ID NO: 526994 - RNA, 23 nt, Artificial Sequence
  Synthetic
acacccacaaaaccaucgccacc

SEQ ID NO: 526995 - RNA, 24 nt, Artificial Sequence
  Synthetic
uacacccacaaaaccaucgccacc

SEQ ID NO: 526996 - RNA, 18 nt, Artificial Sequence
  Synthetic
cauacccaaguggccacc

SEQ ID NO: 526997 - RNA, 19 nt, Artificial Sequence
  Synthetic
ucauacccaaguggccacc

SEQ ID NO: 526998 - RNA, 20 nt, Artificial Sequence
  Synthetic
cucauacccaaguggccacc

SEQ ID NO: 526999 - RNA, 21 nt, Artificial Sequence
  Synthetic
ccucauacccaaguggccacc

SEQ ID NO: 527000 - RNA, 22 nt, Artificial Sequence
  Synthetic
uccucauacccaaguggccacc

SEQ ID NO: 527001 - RNA, 23 nt, Artificial Sequence
  Synthetic
cuccucauacccaaguggccacc

SEQ ID NO: 527002 - RNA, 24 nt, Artificial Sequence
  Synthetic
gcuccucauacccaaguggccacc

SEQ ID NO: 527003 - RNA, 18 nt, Artificial Sequence
  Synthetic
ccaacagucaaugccacc

SEQ ID NO: 527004 - RNA, 19 nt, Artificial Sequence
  Synthetic
accaacagucaaugccacc

SEQ ID NO: 527005 - RNA, 20 nt, Artificial Sequence
  Synthetic
uaccaacagucaaugccacc

SEQ ID NO: 527006 - RNA, 21 nt, Artificial Sequence
  Synthetic
cuaccaacagucaaugccacc

SEQ ID NO: 527007 - RNA, 22 nt, Artificial Sequence
  Synthetic
ucuaccaacagucaaugccacc

SEQ ID NO: 527008 - RNA, 23 nt, Artificial Sequence
  Synthetic
uucuaccaacagucaaugccacc

SEQ ID NO: 527009 - RNA, 24 nt, Artificial Sequence
  Synthetic
uuucuaccaacagucaaugccacc

SEQ ID NO: 527010 - RNA, 18 nt, Artificial Sequence
  Synthetic
cuauucaccuuauccacc

SEQ ID NO: 527011 - RNA, 19 nt, Artificial Sequence
  Synthetic
ucuauucaccuuauccacc

SEQ ID NO: 527012 - RNA, 20 nt, Artificial Sequence
  Synthetic
uucuauucaccuuauccacc

SEQ ID NO: 527013 - RNA, 21 nt, Artificial Sequence
  Synthetic
auucuauucaccuuauccacc

SEQ ID NO: 527014 - RNA, 22 nt, Artificial Sequence
  Synthetic
aauucuauucaccuuauccacc

SEQ ID NO: 527015 - RNA, 23 nt, Artificial Sequence
  Synthetic
caauucuauucaccuuauccacc

SEQ ID NO: 527016 - RNA, 24 nt, Artificial Sequence
  Synthetic
ucaauucuauucaccuuauccacc

SEQ ID NO: 527017 - RNA, 18 nt, Artificial Sequence
  Synthetic
gugccacugcacuccacc

SEQ ID NO: 527018 - RNA, 19 nt, Artificial Sequence
  Synthetic
cgugccacugcacuccacc

SEQ ID NO: 527019 - RNA, 20 nt, Artificial Sequence
  Synthetic
ucgugccacugcacuccacc

SEQ ID NO: 527020 - RNA, 21 nt, Artificial Sequence
  Synthetic
aucgugccacugcacuccacc

SEQ ID NO: 527021 - RNA, 22 nt, Artificial Sequence
  Synthetic
gaucgugccacugcacuccacc

SEQ ID NO: 527022 - RNA, 23 nt, Artificial Sequence
  Synthetic
agaucgugccacugcacuccacc

SEQ ID NO: 527023 - RNA, 24 nt, Artificial Sequence
  Synthetic
gagaucgugccacugcacuccacc

SEQ ID NO: 527024 - RNA, 18 nt, Artificial Sequence
  Synthetic
auggagcaagacuccacc

SEQ ID NO: 527025 - RNA, 19 nt, Artificial Sequence
  Synthetic
gauggagcaagacuccacc

SEQ ID NO: 527026 - RNA, 20 nt, Artificial Sequence
  Synthetic
ugauggagcaagacuccacc

SEQ ID NO: 527027 - RNA, 21 nt, Artificial Sequence
  Synthetic
gugauggagcaagacuccacc

SEQ ID NO: 527028 - RNA, 22 nt, Artificial Sequence
  Synthetic
ggugauggagcaagacuccacc

SEQ ID NO: 527029 - RNA, 23 nt, Artificial Sequence
  Synthetic
gggugauggagcaagacuccacc

SEQ ID NO: 527030 - RNA, 24 nt, Artificial Sequence
  Synthetic
ugggugauggagcaagacuccacc

SEQ ID NO: 527031 - RNA, 18 nt, Artificial Sequence
  Synthetic
auauaucuagauuccacc

SEQ ID NO: 527032 - RNA, 19 nt, Artificial Sequence
  Synthetic
uauauaucuagauuccacc

SEQ ID NO: 527033 - RNA, 20 nt, Artificial Sequence
  Synthetic
cuauauaucuagauuccacc

SEQ ID NO: 527034 - RNA, 21 nt, Artificial Sequence
  Synthetic
ucuauauaucuagauuccacc

SEQ ID NO: 527035 - RNA, 22 nt, Artificial Sequence
  Synthetic
aucuauauaucuagauuccacc

SEQ ID NO: 527036 - RNA, 23 nt, Artificial Sequence
  Synthetic
uaucuauauaucuagauuccacc

SEQ ID NO: 527037 - RNA, 24 nt, Artificial Sequence
  Synthetic
auaucuauauaucuagauuccacc

SEQ ID NO: 527038 - RNA, 18 nt, Artificial Sequence
  Synthetic
uuuaaacucuuuuccacc

SEQ ID NO: 527039 - RNA, 19 nt, Artificial Sequence
  Synthetic
uuuuaaacucuuuuccacc

SEQ ID NO: 527040 - RNA, 20 nt, Artificial Sequence
  Synthetic
cuuuuaaacucuuuuccacc

SEQ ID NO: 527041 - RNA, 21 nt, Artificial Sequence
  Synthetic
acuuuuaaacucuuuuccacc

SEQ ID NO: 527042 - RNA, 22 nt, Artificial Sequence
  Synthetic
uacuuuuaaacucuuuuccacc

SEQ ID NO: 527043 - RNA, 23 nt, Artificial Sequence
  Synthetic
cuacuuuuaaacucuuuuccacc

SEQ ID NO: 527044 - RNA, 24 nt, Artificial Sequence
  Synthetic
acuacuuuuaaacucuuuuccacc

SEQ ID NO: 527045 - RNA, 18 nt, Artificial Sequence
  Synthetic
uguugagggaaaagcacc

SEQ ID NO: 527046 - RNA, 19 nt, Artificial Sequence
  Synthetic
cuguugagggaaaagcacc

SEQ ID NO: 527047 - RNA, 20 nt, Artificial Sequence
  Synthetic
acuguugagggaaaagcacc

SEQ ID NO: 527048 - RNA, 21 nt, Artificial Sequence
  Synthetic
gacuguugagggaaaagcacc

SEQ ID NO: 527049 - RNA, 22 nt, Artificial Sequence
  Synthetic
ugacuguugagggaaaagcacc

SEQ ID NO: 527050 - RNA, 23 nt, Artificial Sequence
  Synthetic
gugacuguugagggaaaagcacc

SEQ ID NO: 527051 - RNA, 24 nt, Artificial Sequence
  Synthetic
agugacuguugagggaaaagcacc

SEQ ID NO: 527052 - RNA, 18 nt, Artificial Sequence
  Synthetic
cccgaccaaugaagcacc

SEQ ID NO: 527053 - RNA, 19 nt, Artificial Sequence
  Synthetic
ccccgaccaaugaagcacc

SEQ ID NO: 527054 - RNA, 20 nt, Artificial Sequence
  Synthetic
uccccgaccaaugaagcacc

SEQ ID NO: 527055 - RNA, 21 nt, Artificial Sequence
  Synthetic
cuccccgaccaaugaagcacc

SEQ ID NO: 527056 - RNA, 22 nt, Artificial Sequence
  Synthetic
ccuccccgaccaaugaagcacc

SEQ ID NO: 527057 - RNA, 23 nt, Artificial Sequence
  Synthetic
uccuccccgaccaaugaagcacc

SEQ ID NO: 527058 - RNA, 24 nt, Artificial Sequence
  Synthetic
cuccuccccgaccaaugaagcacc

SEQ ID NO: 527059 - RNA, 18 nt, Artificial Sequence
  Synthetic
cacauuuggugaagcacc

SEQ ID NO: 527060 - RNA, 19 nt, Artificial Sequence
  Synthetic
ucacauuuggugaagcacc

SEQ ID NO: 527061 - RNA, 20 nt, Artificial Sequence
  Synthetic
gucacauuuggugaagcacc

SEQ ID NO: 527062 - RNA, 21 nt, Artificial Sequence
  Synthetic
ugucacauuuggugaagcacc

SEQ ID NO: 527063 - RNA, 22 nt, Artificial Sequence
  Synthetic
gugucacauuuggugaagcacc

SEQ ID NO: 527064 - RNA, 23 nt, Artificial Sequence
  Synthetic
ggugucacauuuggugaagcacc

SEQ ID NO: 527065 - RNA, 24 nt, Artificial Sequence
  Synthetic
uggugucacauuuggugaagcacc

SEQ ID NO: 527066 - RNA, 18 nt, Artificial Sequence
  Synthetic
gcccugaccauaagcacc

SEQ ID NO: 527067 - RNA, 19 nt, Artificial Sequence
  Synthetic
agcccugaccauaagcacc

SEQ ID NO: 527068 - RNA, 20 nt, Artificial Sequence
  Synthetic
uagcccugaccauaagcacc

SEQ ID NO: 527069 - RNA, 21 nt, Artificial Sequence
  Synthetic
cuagcccugaccauaagcacc

SEQ ID NO: 527070 - RNA, 22 nt, Artificial Sequence
  Synthetic
gcuagcccugaccauaagcacc

SEQ ID NO: 527071 - RNA, 23 nt, Artificial Sequence
  Synthetic
ugcuagcccugaccauaagcacc

SEQ ID NO: 527072 - RNA, 24 nt, Artificial Sequence
  Synthetic
gugcuagcccugaccauaagcacc

SEQ ID NO: 527073 - RNA, 18 nt, Artificial Sequence
  Synthetic
aauauacuccacagcacc

SEQ ID NO: 527074 - RNA, 19 nt, Artificial Sequence
  Synthetic
aaauauacuccacagcacc

SEQ ID NO: 527075 - RNA, 20 nt, Artificial Sequence
  Synthetic
uaaauauacuccacagcacc

SEQ ID NO: 527076 - RNA, 21 nt, Artificial Sequence
  Synthetic
uuaaauauacuccacagcacc

SEQ ID NO: 527077 - RNA, 22 nt, Artificial Sequence
  Synthetic
auuaaauauacuccacagcacc

SEQ ID NO: 527078 - RNA, 23 nt, Artificial Sequence
  Synthetic
gauuaaauauacuccacagcacc

SEQ ID NO: 527079 - RNA, 24 nt, Artificial Sequence
  Synthetic
ugauuaaauauacuccacagcacc

SEQ ID NO: 527080 - RNA, 18 nt, Artificial Sequence
  Synthetic
aaagaauuagacagcacc

SEQ ID NO: 527081 - RNA, 19 nt, Artificial Sequence
  Synthetic
aaaagaauuagacagcacc

SEQ ID NO: 527082 - RNA, 20 nt, Artificial Sequence
  Synthetic
aaaaagaauuagacagcacc

SEQ ID NO: 527083 - RNA, 21 nt, Artificial Sequence
  Synthetic
uaaaaagaauuagacagcacc

SEQ ID NO: 527084 - RNA, 22 nt, Artificial Sequence
  Synthetic
cuaaaaagaauuagacagcacc

SEQ ID NO: 527085 - RNA, 23 nt, Artificial Sequence
  Synthetic
ucuaaaaagaauuagacagcacc

SEQ ID NO: 527086 - RNA, 24 nt, Artificial Sequence
  Synthetic
aucuaaaaagaauuagacagcacc

SEQ ID NO: 527087 - RNA, 18 nt, Artificial Sequence
  Synthetic
gcacagcugcccagcacc

SEQ ID NO: 527088 - RNA, 19 nt, Artificial Sequence
  Synthetic
ugcacagcugcccagcacc

SEQ ID NO: 527089 - RNA, 20 nt, Artificial Sequence
  Synthetic
augcacagcugcccagcacc

SEQ ID NO: 527090 - RNA, 21 nt, Artificial Sequence
  Synthetic
gaugcacagcugcccagcacc

SEQ ID NO: 527091 - RNA, 22 nt, Artificial Sequence
  Synthetic
ggaugcacagcugcccagcacc

SEQ ID NO: 527092 - RNA, 23 nt, Artificial Sequence
  Synthetic
uggaugcacagcugcccagcacc

SEQ ID NO: 527093 - RNA, 24 nt, Artificial Sequence
  Synthetic
uuggaugcacagcugcccagcacc

SEQ ID NO: 527094 - RNA, 18 nt, Artificial Sequence
  Synthetic
ccccaacguggcagcacc

SEQ ID NO: 527095 - RNA, 19 nt, Artificial Sequence
  Synthetic
uccccaacguggcagcacc

SEQ ID NO: 527096 - RNA, 20 nt, Artificial Sequence
  Synthetic
auccccaacguggcagcacc

SEQ ID NO: 527097 - RNA, 21 nt, Artificial Sequence
  Synthetic
aauccccaacguggcagcacc

SEQ ID NO: 527098 - RNA, 22 nt, Artificial Sequence
  Synthetic
uaauccccaacguggcagcacc

SEQ ID NO: 527099 - RNA, 23 nt, Artificial Sequence
  Synthetic
uuaauccccaacguggcagcacc

SEQ ID NO: 527100 - RNA, 24 nt, Artificial Sequence
  Synthetic
cuuaauccccaacguggcagcacc

SEQ ID NO: 527101 - RNA, 18 nt, Artificial Sequence
  Synthetic
uuccuguaauucagcacc

SEQ ID NO: 527102 - RNA, 19 nt, Artificial Sequence
  Synthetic
auuccuguaauucagcacc

SEQ ID NO: 527103 - RNA, 20 nt, Artificial Sequence
  Synthetic
cauuccuguaauucagcacc

SEQ ID NO: 527104 - RNA, 21 nt, Artificial Sequence
  Synthetic
ucauuccuguaauucagcacc

SEQ ID NO: 527105 - RNA, 22 nt, Artificial Sequence
  Synthetic
uucauuccuguaauucagcacc

SEQ ID NO: 527106 - RNA, 23 nt, Artificial Sequence
  Synthetic
auucauuccuguaauucagcacc

SEQ ID NO: 527107 - RNA, 24 nt, Artificial Sequence
  Synthetic
gauucauuccuguaauucagcacc

SEQ ID NO: 527108 - RNA, 18 nt, Artificial Sequence
  Synthetic
ucaauucaaaaaggcacc

SEQ ID NO: 527109 - RNA, 19 nt, Artificial Sequence
  Synthetic
cucaauucaaaaaggcacc

SEQ ID NO: 527110 - RNA, 20 nt, Artificial Sequence
  Synthetic
gcucaauucaaaaaggcacc

SEQ ID NO: 527111 - RNA, 21 nt, Artificial Sequence
  Synthetic
agcucaauucaaaaaggcacc

SEQ ID NO: 527112 - RNA, 22 nt, Artificial Sequence
  Synthetic
aagcucaauucaaaaaggcacc

SEQ ID NO: 527113 - RNA, 23 nt, Artificial Sequence
  Synthetic
aaagcucaauucaaaaaggcacc

SEQ ID NO: 527114 - RNA, 24 nt, Artificial Sequence
  Synthetic
caaagcucaauucaaaaaggcacc

SEQ ID NO: 527115 - RNA, 18 nt, Artificial Sequence
  Synthetic
cgugugacuccaggcacc

SEQ ID NO: 527116 - RNA, 19 nt, Artificial Sequence
  Synthetic
gcgugugacuccaggcacc

SEQ ID NO: 527117 - RNA, 20 nt, Artificial Sequence
  Synthetic
ggcgugugacuccaggcacc

SEQ ID NO: 527118 - RNA, 21 nt, Artificial Sequence
  Synthetic
uggcgugugacuccaggcacc

SEQ ID NO: 527119 - RNA, 22 nt, Artificial Sequence
  Synthetic
auggcgugugacuccaggcacc

SEQ ID NO: 527120 - RNA, 23 nt, Artificial Sequence
  Synthetic
aauggcgugugacuccaggcacc

SEQ ID NO: 527121 - RNA, 24 nt, Artificial Sequence
  Synthetic
aaauggcgugugacuccaggcacc

SEQ ID NO: 527122 - RNA, 18 nt, Artificial Sequence
  Synthetic
aaaauguggcauggcacc

SEQ ID NO: 527123 - RNA, 19 nt, Artificial Sequence
  Synthetic
uaaaauguggcauggcacc

SEQ ID NO: 527124 - RNA, 20 nt, Artificial Sequence
  Synthetic
uuaaaauguggcauggcacc

SEQ ID NO: 527125 - RNA, 21 nt, Artificial Sequence
  Synthetic
uuuaaaauguggcauggcacc

SEQ ID NO: 527126 - RNA, 22 nt, Artificial Sequence
  Synthetic
uuuuaaaauguggcauggcacc

SEQ ID NO: 527127 - RNA, 23 nt, Artificial Sequence
  Synthetic
auuuuaaaauguggcauggcacc

SEQ ID NO: 527128 - RNA, 24 nt, Artificial Sequence
  Synthetic
uauuuuaaaauguggcauggcacc

SEQ ID NO: 527129 - RNA, 18 nt, Artificial Sequence
  Synthetic
ccugacccuuuuggcacc

SEQ ID NO: 527130 - RNA, 19 nt, Artificial Sequence
  Synthetic
cccugacccuuuuggcacc

SEQ ID NO: 527131 - RNA, 20 nt, Artificial Sequence
  Synthetic
ucccugacccuuuuggcacc

SEQ ID NO: 527132 - RNA, 21 nt, Artificial Sequence
  Synthetic
gucccugacccuuuuggcacc

SEQ ID NO: 527133 - RNA, 22 nt, Artificial Sequence
  Synthetic
ggucccugacccuuuuggcacc

SEQ ID NO: 527134 - RNA, 23 nt, Artificial Sequence
  Synthetic
uggucccugacccuuuuggcacc

SEQ ID NO: 527135 - RNA, 24 nt, Artificial Sequence
  Synthetic
guggucccugacccuuuuggcacc

SEQ ID NO: 527136 - RNA, 18 nt, Artificial Sequence
  Synthetic
gauauauauauaugcacc

SEQ ID NO: 527137 - RNA, 19 nt, Artificial Sequence
  Synthetic
ugauauauauauaugcacc

SEQ ID NO: 527138 - RNA, 20 nt, Artificial Sequence
  Synthetic
gugauauauauauaugcacc

SEQ ID NO: 527139 - RNA, 21 nt, Artificial Sequence
  Synthetic
ugugauauauauauaugcacc

SEQ ID NO: 527140 - RNA, 22 nt, Artificial Sequence
  Synthetic
augugauauauauauaugcacc

SEQ ID NO: 527141 - RNA, 23 nt, Artificial Sequence
  Synthetic
aaugugauauauauauaugcacc

SEQ ID NO: 527142 - RNA, 24 nt, Artificial Sequence
  Synthetic
aaaugugauauauauauaugcacc

SEQ ID NO: 527143 - RNA, 18 nt, Artificial Sequence
  Synthetic
ugaacucagcucugcacc

SEQ ID NO: 527144 - RNA, 19 nt, Artificial Sequence
  Synthetic
uugaacucagcucugcacc

SEQ ID NO: 527145 - RNA, 20 nt, Artificial Sequence
  Synthetic
auugaacucagcucugcacc

SEQ ID NO: 527146 - RNA, 21 nt, Artificial Sequence
  Synthetic
aauugaacucagcucugcacc

SEQ ID NO: 527147 - RNA, 22 nt, Artificial Sequence
  Synthetic
gaauugaacucagcucugcacc

SEQ ID NO: 527148 - RNA, 23 nt, Artificial Sequence
  Synthetic
ggaauugaacucagcucugcacc

SEQ ID NO: 527149 - RNA, 24 nt, Artificial Sequence
  Synthetic
aggaauugaacucagcucugcacc

SEQ ID NO: 527150 - RNA, 18 nt, Artificial Sequence
  Synthetic
agaacguggcuuugcacc

SEQ ID NO: 527151 - RNA, 19 nt, Artificial Sequence
  Synthetic
uagaacguggcuuugcacc

SEQ ID NO: 527152 - RNA, 20 nt, Artificial Sequence
  Synthetic
cuagaacguggcuuugcacc

SEQ ID NO: 527153 - RNA, 21 nt, Artificial Sequence
  Synthetic
gcuagaacguggcuuugcacc

SEQ ID NO: 527154 - RNA, 22 nt, Artificial Sequence
  Synthetic
agcuagaacguggcuuugcacc

SEQ ID NO: 527155 - RNA, 23 nt, Artificial Sequence
  Synthetic
aagcuagaacguggcuuugcacc

SEQ ID NO: 527156 - RNA, 24 nt, Artificial Sequence
  Synthetic
gaagcuagaacguggcuuugcacc

SEQ ID NO: 527157 - RNA, 18 nt, Artificial Sequence
  Synthetic
gacggagcaguuugcacc

SEQ ID NO: 527158 - RNA, 19 nt, Artificial Sequence
  Synthetic
ggacggagcaguuugcacc

SEQ ID NO: 527159 - RNA, 20 nt, Artificial Sequence
  Synthetic
aggacggagcaguuugcacc

SEQ ID NO: 527160 - RNA, 21 nt, Artificial Sequence
  Synthetic
aaggacggagcaguuugcacc

SEQ ID NO: 527161 - RNA, 22 nt, Artificial Sequence
  Synthetic
gaaggacggagcaguuugcacc

SEQ ID NO: 527162 - RNA, 23 nt, Artificial Sequence
  Synthetic
ggaaggacggagcaguuugcacc

SEQ ID NO: 527163 - RNA, 24 nt, Artificial Sequence
  Synthetic
uggaaggacggagcaguuugcacc

SEQ ID NO: 527164 - RNA, 18 nt, Artificial Sequence
  Synthetic
uaaaauguauaaaucacc

SEQ ID NO: 527165 - RNA, 19 nt, Artificial Sequence
  Synthetic
uuaaaauguauaaaucacc

SEQ ID NO: 527166 - RNA, 20 nt, Artificial Sequence
  Synthetic
auuaaaauguauaaaucacc

SEQ ID NO: 527167 - RNA, 21 nt, Artificial Sequence
  Synthetic
aauuaaaauguauaaaucacc

SEQ ID NO: 527168 - RNA, 22 nt, Artificial Sequence
  Synthetic
aaauuaaaauguauaaaucacc

SEQ ID NO: 527169 - RNA, 23 nt, Artificial Sequence
  Synthetic
caaauuaaaauguauaaaucacc

SEQ ID NO: 527170 - RNA, 24 nt, Artificial Sequence
  Synthetic
ucaaauuaaaauguauaaaucacc

SEQ ID NO: 527171 - RNA, 18 nt, Artificial Sequence
  Synthetic
uugaaucuguaaaucacc

SEQ ID NO: 527172 - RNA, 19 nt, Artificial Sequence
  Synthetic
auugaaucuguaaaucacc

SEQ ID NO: 527173 - RNA, 20 nt, Artificial Sequence
  Synthetic
cauugaaucuguaaaucacc

SEQ ID NO: 527174 - RNA, 21 nt, Artificial Sequence
  Synthetic
gcauugaaucuguaaaucacc

SEQ ID NO: 527175 - RNA, 22 nt, Artificial Sequence
  Synthetic
ggcauugaaucuguaaaucacc

SEQ ID NO: 527176 - RNA, 23 nt, Artificial Sequence
  Synthetic
uggcauugaaucuguaaaucacc

SEQ ID NO: 527177 - RNA, 24 nt, Artificial Sequence
  Synthetic
auggcauugaaucuguaaaucacc

SEQ ID NO: 527178 - RNA, 18 nt, Artificial Sequence
  Synthetic
aggaucaacagaaucacc

SEQ ID NO: 527179 - RNA, 19 nt, Artificial Sequence
  Synthetic
uaggaucaacagaaucacc

SEQ ID NO: 527180 - RNA, 20 nt, Artificial Sequence
  Synthetic
uuaggaucaacagaaucacc

SEQ ID NO: 527181 - RNA, 21 nt, Artificial Sequence
  Synthetic
uuuaggaucaacagaaucacc

SEQ ID NO: 527182 - RNA, 22 nt, Artificial Sequence
  Synthetic
cuuuaggaucaacagaaucacc

SEQ ID NO: 527183 - RNA, 23 nt, Artificial Sequence
  Synthetic
acuuuaggaucaacagaaucacc

SEQ ID NO: 527184 - RNA, 24 nt, Artificial Sequence
  Synthetic
uacuuuaggaucaacagaaucacc

SEQ ID NO: 527185 - RNA, 18 nt, Artificial Sequence
  Synthetic
gugggcuugagaaucacc

SEQ ID NO: 527186 - RNA, 19 nt, Artificial Sequence
  Synthetic
agugggcuugagaaucacc

SEQ ID NO: 527187 - RNA, 20 nt, Artificial Sequence
  Synthetic
gagugggcuugagaaucacc

SEQ ID NO: 527188 - RNA, 21 nt, Artificial Sequence
  Synthetic
ugagugggcuugagaaucacc

SEQ ID NO: 527189 - RNA, 22 nt, Artificial Sequence
  Synthetic
uugagugggcuugagaaucacc

SEQ ID NO: 527190 - RNA, 23 nt, Artificial Sequence
  Synthetic
cuugagugggcuugagaaucacc

SEQ ID NO: 527191 - RNA, 24 nt, Artificial Sequence
  Synthetic
acuugagugggcuugagaaucacc

SEQ ID NO: 527192 - RNA, 18 nt, Artificial Sequence
  Synthetic
accuauuaacccaucacc

SEQ ID NO: 527193 - RNA, 19 nt, Artificial Sequence
  Synthetic
caccuauuaacccaucacc

SEQ ID NO: 527194 - RNA, 20 nt, Artificial Sequence
  Synthetic
gcaccuauuaacccaucacc

SEQ ID NO: 527195 - RNA, 21 nt, Artificial Sequence
  Synthetic
ugcaccuauuaacccaucacc

SEQ ID NO: 527196 - RNA, 22 nt, Artificial Sequence
  Synthetic
cugcaccuauuaacccaucacc

SEQ ID NO: 527197 - RNA, 23 nt, Artificial Sequence
  Synthetic
gcugcaccuauuaacccaucacc

SEQ ID NO: 527198 - RNA, 24 nt, Artificial Sequence
  Synthetic
ugcugcaccuauuaacccaucacc

SEQ ID NO: 527199 - RNA, 18 nt, Artificial Sequence
  Synthetic
gacagcagcagcaucacc

SEQ ID NO: 527200 - RNA, 19 nt, Artificial Sequence
  Synthetic
ugacagcagcagcaucacc

SEQ ID NO: 527201 - RNA, 20 nt, Artificial Sequence
  Synthetic
cugacagcagcagcaucacc

SEQ ID NO: 527202 - RNA, 21 nt, Artificial Sequence
  Synthetic
acugacagcagcagcaucacc

SEQ ID NO: 527203 - RNA, 22 nt, Artificial Sequence
  Synthetic
gacugacagcagcagcaucacc

SEQ ID NO: 527204 - RNA, 23 nt, Artificial Sequence
  Synthetic
agacugacagcagcagcaucacc

SEQ ID NO: 527205 - RNA, 24 nt, Artificial Sequence
  Synthetic
gagacugacagcagcagcaucacc

SEQ ID NO: 527206 - RNA, 18 nt, Artificial Sequence
  Synthetic
uucaggcucaucaucacc

SEQ ID NO: 527207 - RNA, 19 nt, Artificial Sequence
  Synthetic
guucaggcucaucaucacc

SEQ ID NO: 527208 - RNA, 20 nt, Artificial Sequence
  Synthetic
aguucaggcucaucaucacc

SEQ ID NO: 527209 - RNA, 21 nt, Artificial Sequence
  Synthetic
aaguucaggcucaucaucacc

SEQ ID NO: 527210 - RNA, 22 nt, Artificial Sequence
  Synthetic
gaaguucaggcucaucaucacc

SEQ ID NO: 527211 - RNA, 23 nt, Artificial Sequence
  Synthetic
ggaaguucaggcucaucaucacc

SEQ ID NO: 527212 - RNA, 24 nt, Artificial Sequence
  Synthetic
aggaaguucaggcucaucaucacc

SEQ ID NO: 527213 - RNA, 18 nt, Artificial Sequence
  Synthetic
agcaugagugucaucacc

SEQ ID NO: 527214 - RNA, 19 nt, Artificial Sequence
  Synthetic
cagcaugagugucaucacc

SEQ ID NO: 527215 - RNA, 20 nt, Artificial Sequence
  Synthetic
ccagcaugagugucaucacc

SEQ ID NO: 527216 - RNA, 21 nt, Artificial Sequence
  Synthetic
gccagcaugagugucaucacc

SEQ ID NO: 527217 - RNA, 22 nt, Artificial Sequence
  Synthetic
ugccagcaugagugucaucacc

SEQ ID NO: 527218 - RNA, 23 nt, Artificial Sequence
  Synthetic
uugccagcaugagugucaucacc

SEQ ID NO: 527219 - RNA, 24 nt, Artificial Sequence
  Synthetic
guugccagcaugagugucaucacc

SEQ ID NO: 527220 - RNA, 18 nt, Artificial Sequence
  Synthetic
cugaaugcuuauaucacc

SEQ ID NO: 527221 - RNA, 19 nt, Artificial Sequence
  Synthetic
acugaaugcuuauaucacc

SEQ ID NO: 527222 - RNA, 20 nt, Artificial Sequence
  Synthetic
cacugaaugcuuauaucacc

SEQ ID NO: 527223 - RNA, 21 nt, Artificial Sequence
  Synthetic
acacugaaugcuuauaucacc

SEQ ID NO: 527224 - RNA, 22 nt, Artificial Sequence
  Synthetic
uacacugaaugcuuauaucacc

SEQ ID NO: 527225 - RNA, 23 nt, Artificial Sequence
  Synthetic
auacacugaaugcuuauaucacc

SEQ ID NO: 527226 - RNA, 24 nt, Artificial Sequence
  Synthetic
aauacacugaaugcuuauaucacc

SEQ ID NO: 527227 - RNA, 18 nt, Artificial Sequence
  Synthetic
gaaauggaugcuaucacc

SEQ ID NO: 527228 - RNA, 19 nt, Artificial Sequence
  Synthetic
agaaauggaugcuaucacc

SEQ ID NO: 527229 - RNA, 20 nt, Artificial Sequence
  Synthetic
uagaaauggaugcuaucacc

SEQ ID NO: 527230 - RNA, 21 nt, Artificial Sequence
  Synthetic
guagaaauggaugcuaucacc

SEQ ID NO: 527231 - RNA, 22 nt, Artificial Sequence
  Synthetic
cguagaaauggaugcuaucacc

SEQ ID NO: 527232 - RNA, 23 nt, Artificial Sequence
  Synthetic
ccguagaaauggaugcuaucacc

SEQ ID NO: 527233 - RNA, 24 nt, Artificial Sequence
  Synthetic
uccguagaaauggaugcuaucacc

SEQ ID NO: 527234 - RNA, 18 nt, Artificial Sequence
  Synthetic
cucacucaccgacucacc

SEQ ID NO: 527235 - RNA, 19 nt, Artificial Sequence
  Synthetic
acucacucaccgacucacc

SEQ ID NO: 527236 - RNA, 20 nt, Artificial Sequence
  Synthetic
cacucacucaccgacucacc

SEQ ID NO: 527237 - RNA, 21 nt, Artificial Sequence
  Synthetic
ccacucacucaccgacucacc

SEQ ID NO: 527238 - RNA, 22 nt, Artificial Sequence
  Synthetic
accacucacucaccgacucacc

SEQ ID NO: 527239 - RNA, 23 nt, Artificial Sequence
  Synthetic
uaccacucacucaccgacucacc

SEQ ID NO: 527240 - RNA, 24 nt, Artificial Sequence
  Synthetic
cuaccacucacucaccgacucacc

SEQ ID NO: 527241 - RNA, 18 nt, Artificial Sequence
  Synthetic
ucaauuccaacccucacc

SEQ ID NO: 527242 - RNA, 19 nt, Artificial Sequence
  Synthetic
cucaauuccaacccucacc

SEQ ID NO: 527243 - RNA, 20 nt, Artificial Sequence
  Synthetic
acucaauuccaacccucacc

SEQ ID NO: 527244 - RNA, 21 nt, Artificial Sequence
  Synthetic
cacucaauuccaacccucacc

SEQ ID NO: 527245 - RNA, 22 nt, Artificial Sequence
  Synthetic
ccacucaauuccaacccucacc

SEQ ID NO: 527246 - RNA, 23 nt, Artificial Sequence
  Synthetic
uccacucaauuccaacccucacc

SEQ ID NO: 527247 - RNA, 24 nt, Artificial Sequence
  Synthetic
guccacucaauuccaacccucacc

SEQ ID NO: 527248 - RNA, 18 nt, Artificial Sequence
  Synthetic
cccaggugcccucucacc

SEQ ID NO: 527249 - RNA, 19 nt, Artificial Sequence
  Synthetic
acccaggugcccucucacc

SEQ ID NO: 527250 - RNA, 20 nt, Artificial Sequence
  Synthetic
cacccaggugcccucucacc

SEQ ID NO: 527251 - RNA, 21 nt, Artificial Sequence
  Synthetic
gcacccaggugcccucucacc

SEQ ID NO: 527252 - RNA, 22 nt, Artificial Sequence
  Synthetic
ugcacccaggugcccucucacc

SEQ ID NO: 527253 - RNA, 23 nt, Artificial Sequence
  Synthetic
gugcacccaggugcccucucacc

SEQ ID NO: 527254 - RNA, 24 nt, Artificial Sequence
  Synthetic
ugugcacccaggugcccucucacc

SEQ ID NO: 527255 - RNA, 18 nt, Artificial Sequence
  Synthetic
aagaagaagguucucacc

SEQ ID NO: 527256 - RNA, 19 nt, Artificial Sequence
  Synthetic
caagaagaagguucucacc

SEQ ID NO: 527257 - RNA, 20 nt, Artificial Sequence
  Synthetic
gcaagaagaagguucucacc

SEQ ID NO: 527258 - RNA, 21 nt, Artificial Sequence
  Synthetic
agcaagaagaagguucucacc

SEQ ID NO: 527259 - RNA, 22 nt, Artificial Sequence
  Synthetic
cagcaagaagaagguucucacc

SEQ ID NO: 527260 - RNA, 23 nt, Artificial Sequence
  Synthetic
acagcaagaagaagguucucacc

SEQ ID NO: 527261 - RNA, 24 nt, Artificial Sequence
  Synthetic
uacagcaagaagaagguucucacc

SEQ ID NO: 527262 - RNA, 18 nt, Artificial Sequence
  Synthetic
guauuuuaaugagucacc

SEQ ID NO: 527263 - RNA, 19 nt, Artificial Sequence
  Synthetic
aguauuuuaaugagucacc

SEQ ID NO: 527264 - RNA, 20 nt, Artificial Sequence
  Synthetic
caguauuuuaaugagucacc

SEQ ID NO: 527265 - RNA, 21 nt, Artificial Sequence
  Synthetic
ucaguauuuuaaugagucacc

SEQ ID NO: 527266 - RNA, 22 nt, Artificial Sequence
  Synthetic
aucaguauuuuaaugagucacc

SEQ ID NO: 527267 - RNA, 23 nt, Artificial Sequence
  Synthetic
aaucaguauuuuaaugagucacc

SEQ ID NO: 527268 - RNA, 24 nt, Artificial Sequence
  Synthetic
caaucaguauuuuaaugagucacc

SEQ ID NO: 527269 - RNA, 18 nt, Artificial Sequence
  Synthetic
ggacaugaaauagucacc

SEQ ID NO: 527270 - RNA, 19 nt, Artificial Sequence
  Synthetic
uggacaugaaauagucacc

SEQ ID NO: 527271 - RNA, 20 nt, Artificial Sequence
  Synthetic
cuggacaugaaauagucacc

SEQ ID NO: 527272 - RNA, 21 nt, Artificial Sequence
  Synthetic
ucuggacaugaaauagucacc

SEQ ID NO: 527273 - RNA, 22 nt, Artificial Sequence
  Synthetic
cucuggacaugaaauagucacc

SEQ ID NO: 527274 - RNA, 23 nt, Artificial Sequence
  Synthetic
ccucuggacaugaaauagucacc

SEQ ID NO: 527275 - RNA, 24 nt, Artificial Sequence
  Synthetic
uccucuggacaugaaauagucacc

SEQ ID NO: 527276 - RNA, 18 nt, Artificial Sequence
  Synthetic
ucugugcaaugcgucacc

SEQ ID NO: 527277 - RNA, 19 nt, Artificial Sequence
  Synthetic
aucugugcaaugcgucacc

SEQ ID NO: 527278 - RNA, 20 nt, Artificial Sequence
  Synthetic
aaucugugcaaugcgucacc

SEQ ID NO: 527279 - RNA, 21 nt, Artificial Sequence
  Synthetic
aaaucugugcaaugcgucacc

SEQ ID NO: 527280 - RNA, 22 nt, Artificial Sequence
  Synthetic
uaaaucugugcaaugcgucacc

SEQ ID NO: 527281 - RNA, 23 nt, Artificial Sequence
  Synthetic
auaaaucugugcaaugcgucacc

SEQ ID NO: 527282 - RNA, 24 nt, Artificial Sequence
  Synthetic
aauaaaucugugcaaugcgucacc

SEQ ID NO: 527283 - RNA, 18 nt, Artificial Sequence
  Synthetic
caggccauuuuugucacc

SEQ ID NO: 527284 - RNA, 19 nt, Artificial Sequence
  Synthetic
ucaggccauuuuugucacc

SEQ ID NO: 527285 - RNA, 20 nt, Artificial Sequence
  Synthetic
uucaggccauuuuugucacc

SEQ ID NO: 527286 - RNA, 21 nt, Artificial Sequence
  Synthetic
cuucaggccauuuuugucacc

SEQ ID NO: 527287 - RNA, 22 nt, Artificial Sequence
  Synthetic
gcuucaggccauuuuugucacc

SEQ ID NO: 527288 - RNA, 23 nt, Artificial Sequence
  Synthetic
ggcuucaggccauuuuugucacc

SEQ ID NO: 527289 - RNA, 24 nt, Artificial Sequence
  Synthetic
cggcuucaggccauuuuugucacc

SEQ ID NO: 527290 - RNA, 18 nt, Artificial Sequence
  Synthetic
gugugcacaggauucacc

SEQ ID NO: 527291 - RNA, 19 nt, Artificial Sequence
  Synthetic
agugugcacaggauucacc

SEQ ID NO: 527292 - RNA, 20 nt, Artificial Sequence
  Synthetic
cagugugcacaggauucacc

SEQ ID NO: 527293 - RNA, 21 nt, Artificial Sequence
  Synthetic
ucagugugcacaggauucacc

SEQ ID NO: 527294 - RNA, 22 nt, Artificial Sequence
  Synthetic
gucagugugcacaggauucacc

SEQ ID NO: 527295 - RNA, 23 nt, Artificial Sequence
  Synthetic
ugucagugugcacaggauucacc

SEQ ID NO: 527296 - RNA, 24 nt, Artificial Sequence
  Synthetic
augucagugugcacaggauucacc

SEQ ID NO: 527297 - RNA, 18 nt, Artificial Sequence
  Synthetic
aaaauccacauauucacc

SEQ ID NO: 527298 - RNA, 19 nt, Artificial Sequence
  Synthetic
aaaaauccacauauucacc

SEQ ID NO: 527299 - RNA, 20 nt, Artificial Sequence
  Synthetic
caaaaauccacauauucacc

SEQ ID NO: 527300 - RNA, 21 nt, Artificial Sequence
  Synthetic
gcaaaaauccacauauucacc

SEQ ID NO: 527301 - RNA, 22 nt, Artificial Sequence
  Synthetic
cgcaaaaauccacauauucacc

SEQ ID NO: 527302 - RNA, 23 nt, Artificial Sequence
  Synthetic
ccgcaaaaauccacauauucacc

SEQ ID NO: 527303 - RNA, 24 nt, Artificial Sequence
  Synthetic
accgcaaaaauccacauauucacc

SEQ ID NO: 527304 - RNA, 18 nt, Artificial Sequence
  Synthetic
cacuugcgacacuucacc

SEQ ID NO: 527305 - RNA, 19 nt, Artificial Sequence
  Synthetic
acacuugcgacacuucacc

SEQ ID NO: 527306 - RNA, 20 nt, Artificial Sequence
  Synthetic
cacacuugcgacacuucacc

SEQ ID NO: 527307 - RNA, 21 nt, Artificial Sequence
  Synthetic
ccacacuugcgacacuucacc

SEQ ID NO: 527308 - RNA, 22 nt, Artificial Sequence
  Synthetic
accacacuugcgacacuucacc

SEQ ID NO: 527309 - RNA, 23 nt, Artificial Sequence
  Synthetic
uaccacacuugcgacacuucacc

SEQ ID NO: 527310 - RNA, 24 nt, Artificial Sequence
  Synthetic
uuaccacacuugcgacacuucacc

SEQ ID NO: 527311 - RNA, 18 nt, Artificial Sequence
  Synthetic
gagcucucugccuucacc

SEQ ID NO: 527312 - RNA, 19 nt, Artificial Sequence
  Synthetic
ggagcucucugccuucacc

SEQ ID NO: 527313 - RNA, 20 nt, Artificial Sequence
  Synthetic
aggagcucucugccuucacc

SEQ ID NO: 527314 - RNA, 21 nt, Artificial Sequence
  Synthetic
aaggagcucucugccuucacc

SEQ ID NO: 527315 - RNA, 22 nt, Artificial Sequence
  Synthetic
gaaggagcucucugccuucacc

SEQ ID NO: 527316 - RNA, 23 nt, Artificial Sequence
  Synthetic
agaaggagcucucugccuucacc

SEQ ID NO: 527317 - RNA, 24 nt, Artificial Sequence
  Synthetic
uagaaggagcucucugccuucacc

SEQ ID NO: 527318 - RNA, 18 nt, Artificial Sequence
  Synthetic
gugagcuucaauuucacc

SEQ ID NO: 527319 - RNA, 19 nt, Artificial Sequence
  Synthetic
ugugagcuucaauuucacc

SEQ ID NO: 527320 - RNA, 20 nt, Artificial Sequence
  Synthetic
gugugagcuucaauuucacc

SEQ ID NO: 527321 - RNA, 21 nt, Artificial Sequence
  Synthetic
ugugugagcuucaauuucacc

SEQ ID NO: 527322 - RNA, 22 nt, Artificial Sequence
  Synthetic
cugugugagcuucaauuucacc

SEQ ID NO: 527323 - RNA, 23 nt, Artificial Sequence
  Synthetic
ucugugugagcuucaauuucacc

SEQ ID NO: 527324 - RNA, 24 nt, Artificial Sequence
  Synthetic
aucugugugagcuucaauuucacc

SEQ ID NO: 527325 - RNA, 18 nt, Artificial Sequence
  Synthetic
agcaucuaauguuucacc

SEQ ID NO: 527326 - RNA, 19 nt, Artificial Sequence
  Synthetic
cagcaucuaauguuucacc

SEQ ID NO: 527327 - RNA, 20 nt, Artificial Sequence
  Synthetic
ccagcaucuaauguuucacc

SEQ ID NO: 527328 - RNA, 21 nt, Artificial Sequence
  Synthetic
uccagcaucuaauguuucacc

SEQ ID NO: 527329 - RNA, 22 nt, Artificial Sequence
  Synthetic
uuccagcaucuaauguuucacc

SEQ ID NO: 527330 - RNA, 23 nt, Artificial Sequence
  Synthetic
guuccagcaucuaauguuucacc

SEQ ID NO: 527331 - RNA, 24 nt, Artificial Sequence
  Synthetic
aguuccagcaucuaauguuucacc

SEQ ID NO: 527332 - RNA, 18 nt, Artificial Sequence
  Synthetic
uccacaaaccuuuucacc

SEQ ID NO: 527333 - RNA, 19 nt, Artificial Sequence
  Synthetic
auccacaaaccuuuucacc

SEQ ID NO: 527334 - RNA, 20 nt, Artificial Sequence
  Synthetic
aauccacaaaccuuuucacc

SEQ ID NO: 527335 - RNA, 21 nt, Artificial Sequence
  Synthetic
caauccacaaaccuuuucacc

SEQ ID NO: 527336 - RNA, 22 nt, Artificial Sequence
  Synthetic
acaauccacaaaccuuuucacc

SEQ ID NO: 527337 - RNA, 23 nt, Artificial Sequence
  Synthetic
aacaauccacaaaccuuuucacc

SEQ ID NO: 527338 - RNA, 24 nt, Artificial Sequence
  Synthetic
caacaauccacaaaccuuuucacc

SEQ ID NO: 527339 - RNA, 18 nt, Artificial Sequence
  Synthetic
uucacaauagcaaagacc

SEQ ID NO: 527340 - RNA, 19 nt, Artificial Sequence
  Synthetic
auucacaauagcaaagacc

SEQ ID NO: 527341 - RNA, 20 nt, Artificial Sequence
  Synthetic
uauucacaauagcaaagacc

SEQ ID NO: 527342 - RNA, 21 nt, Artificial Sequence
  Synthetic
cuauucacaauagcaaagacc

SEQ ID NO: 527343 - RNA, 22 nt, Artificial Sequence
  Synthetic
acuauucacaauagcaaagacc

SEQ ID NO: 527344 - RNA, 23 nt, Artificial Sequence
  Synthetic
cacuauucacaauagcaaagacc

SEQ ID NO: 527345 - RNA, 24 nt, Artificial Sequence
  Synthetic
gcacuauucacaauagcaaagacc

SEQ ID NO: 527346 - RNA, 18 nt, Artificial Sequence
  Synthetic
auccagagaagaaagacc

SEQ ID NO: 527347 - RNA, 19 nt, Artificial Sequence
  Synthetic
cauccagagaagaaagacc

SEQ ID NO: 527348 - RNA, 20 nt, Artificial Sequence
  Synthetic
acauccagagaagaaagacc

SEQ ID NO: 527349 - RNA, 21 nt, Artificial Sequence
  Synthetic
uacauccagagaagaaagacc

SEQ ID NO: 527350 - RNA, 22 nt, Artificial Sequence
  Synthetic
auacauccagagaagaaagacc

SEQ ID NO: 527351 - RNA, 23 nt, Artificial Sequence
  Synthetic
uauacauccagagaagaaagacc

SEQ ID NO: 527352 - RNA, 24 nt, Artificial Sequence
  Synthetic
cuauacauccagagaagaaagacc

SEQ ID NO: 527353 - RNA, 18 nt, Artificial Sequence
  Synthetic
aauauaagacgaaagacc

SEQ ID NO: 527354 - RNA, 19 nt, Artificial Sequence
  Synthetic
aaauauaagacgaaagacc

SEQ ID NO: 527355 - RNA, 20 nt, Artificial Sequence
  Synthetic
uaaauauaagacgaaagacc

SEQ ID NO: 527356 - RNA, 21 nt, Artificial Sequence
  Synthetic
auaaauauaagacgaaagacc

SEQ ID NO: 527357 - RNA, 22 nt, Artificial Sequence
  Synthetic
cauaaauauaagacgaaagacc

SEQ ID NO: 527358 - RNA, 23 nt, Artificial Sequence
  Synthetic
ccauaaauauaagacgaaagacc

SEQ ID NO: 527359 - RNA, 24 nt, Artificial Sequence
  Synthetic
accauaaauauaagacgaaagacc

SEQ ID NO: 527360 - RNA, 18 nt, Artificial Sequence
  Synthetic
guggagcuuaccaagacc

SEQ ID NO: 527361 - RNA, 19 nt, Artificial Sequence
  Synthetic
gguggagcuuaccaagacc

SEQ ID NO: 527362 - RNA, 20 nt, Artificial Sequence
  Synthetic
ggguggagcuuaccaagacc

SEQ ID NO: 527363 - RNA, 21 nt, Artificial Sequence
  Synthetic
gggguggagcuuaccaagacc

SEQ ID NO: 527364 - RNA, 22 nt, Artificial Sequence
  Synthetic
agggguggagcuuaccaagacc

SEQ ID NO: 527365 - RNA, 23 nt, Artificial Sequence
  Synthetic
cagggguggagcuuaccaagacc

SEQ ID NO: 527366 - RNA, 24 nt, Artificial Sequence
  Synthetic
acagggguggagcuuaccaagacc

SEQ ID NO: 527367 - RNA, 18 nt, Artificial Sequence
  Synthetic
auugggugugucaagacc

SEQ ID NO: 527368 - RNA, 19 nt, Artificial Sequence
  Synthetic
uauugggugugucaagacc

SEQ ID NO: 527369 - RNA, 20 nt, Artificial Sequence
  Synthetic
auauugggugugucaagacc

SEQ ID NO: 527370 - RNA, 21 nt, Artificial Sequence
  Synthetic
cauauugggugugucaagacc

SEQ ID NO: 527371 - RNA, 22 nt, Artificial Sequence
  Synthetic
gcauauugggugugucaagacc

SEQ ID NO: 527372 - RNA, 23 nt, Artificial Sequence
  Synthetic
ugcauauugggugugucaagacc

SEQ ID NO: 527373 - RNA, 24 nt, Artificial Sequence
  Synthetic
cugcauauugggugugucaagacc

SEQ ID NO: 527374 - RNA, 18 nt, Artificial Sequence
  Synthetic
uuuaguauuaggaagacc

SEQ ID NO: 527375 - RNA, 19 nt, Artificial Sequence
  Synthetic
cuuuaguauuaggaagacc

SEQ ID NO: 527376 - RNA, 20 nt, Artificial Sequence
  Synthetic
acuuuaguauuaggaagacc

SEQ ID NO: 527377 - RNA, 21 nt, Artificial Sequence
  Synthetic
gacuuuaguauuaggaagacc

SEQ ID NO: 527378 - RNA, 22 nt, Artificial Sequence
  Synthetic
ugacuuuaguauuaggaagacc

SEQ ID NO: 527379 - RNA, 23 nt, Artificial Sequence
  Synthetic
gugacuuuaguauuaggaagacc

SEQ ID NO: 527380 - RNA, 24 nt, Artificial Sequence
  Synthetic
agugacuuuaguauuaggaagacc

SEQ ID NO: 527381 - RNA, 18 nt, Artificial Sequence
  Synthetic
gagaagguauauaagacc

SEQ ID NO: 527382 - RNA, 19 nt, Artificial Sequence
  Synthetic
ggagaagguauauaagacc

SEQ ID NO: 527383 - RNA, 20 nt, Artificial Sequence
  Synthetic
gggagaagguauauaagacc

SEQ ID NO: 527384 - RNA, 21 nt, Artificial Sequence
  Synthetic
ggggagaagguauauaagacc

SEQ ID NO: 527385 - RNA, 22 nt, Artificial Sequence
  Synthetic
uggggagaagguauauaagacc

SEQ ID NO: 527386 - RNA, 23 nt, Artificial Sequence
  Synthetic
uuggggagaagguauauaagacc

SEQ ID NO: 527387 - RNA, 24 nt, Artificial Sequence
  Synthetic
auuggggagaagguauauaagacc

SEQ ID NO: 527388 - RNA, 18 nt, Artificial Sequence
  Synthetic
agaagucucccuaagacc

SEQ ID NO: 527389 - RNA, 19 nt, Artificial Sequence
  Synthetic
aagaagucucccuaagacc

SEQ ID NO: 527390 - RNA, 20 nt, Artificial Sequence
  Synthetic
caagaagucucccuaagacc

SEQ ID NO: 527391 - RNA, 21 nt, Artificial Sequence
  Synthetic
ucaagaagucucccuaagacc

SEQ ID NO: 527392 - RNA, 22 nt, Artificial Sequence
  Synthetic
gucaagaagucucccuaagacc

SEQ ID NO: 527393 - RNA, 23 nt, Artificial Sequence
  Synthetic
agucaagaagucucccuaagacc

SEQ ID NO: 527394 - RNA, 24 nt, Artificial Sequence
  Synthetic
aagucaagaagucucccuaagacc

SEQ ID NO: 527395 - RNA, 18 nt, Artificial Sequence
  Synthetic
cugcagguaucuaagacc

SEQ ID NO: 527396 - RNA, 19 nt, Artificial Sequence
  Synthetic
acugcagguaucuaagacc

SEQ ID NO: 527397 - RNA, 20 nt, Artificial Sequence
  Synthetic
uacugcagguaucuaagacc

SEQ ID NO: 527398 - RNA, 21 nt, Artificial Sequence
  Synthetic
cuacugcagguaucuaagacc

SEQ ID NO: 527399 - RNA, 22 nt, Artificial Sequence
  Synthetic
ccuacugcagguaucuaagacc

SEQ ID NO: 527400 - RNA, 23 nt, Artificial Sequence
  Synthetic
uccuacugcagguaucuaagacc

SEQ ID NO: 527401 - RNA, 24 nt, Artificial Sequence
  Synthetic
guccuacugcagguaucuaagacc

SEQ ID NO: 527402 - RNA, 18 nt, Artificial Sequence
  Synthetic
gaaguuugucuuaagacc

SEQ ID NO: 527403 - RNA, 19 nt, Artificial Sequence
  Synthetic
ugaaguuugucuuaagacc

SEQ ID NO: 527404 - RNA, 20 nt, Artificial Sequence
  Synthetic
augaaguuugucuuaagacc

SEQ ID NO: 527405 - RNA, 21 nt, Artificial Sequence
  Synthetic
aaugaaguuugucuuaagacc

SEQ ID NO: 527406 - RNA, 22 nt, Artificial Sequence
  Synthetic
aaaugaaguuugucuuaagacc

SEQ ID NO: 527407 - RNA, 23 nt, Artificial Sequence
  Synthetic
aaaaugaaguuugucuuaagacc

SEQ ID NO: 527408 - RNA, 24 nt, Artificial Sequence
  Synthetic
gaaaaugaaguuugucuuaagacc

SEQ ID NO: 527409 - RNA, 18 nt, Artificial Sequence
  Synthetic
aacagaggaaaacagacc

SEQ ID NO: 527410 - RNA, 19 nt, Artificial Sequence
  Synthetic
aaacagaggaaaacagacc

SEQ ID NO: 527411 - RNA, 20 nt, Artificial Sequence
  Synthetic
caaacagaggaaaacagacc

SEQ ID NO: 527412 - RNA, 21 nt, Artificial Sequence
  Synthetic
gcaaacagaggaaaacagacc

SEQ ID NO: 527413 - RNA, 22 nt, Artificial Sequence
  Synthetic
agcaaacagaggaaaacagacc

SEQ ID NO: 527414 - RNA, 23 nt, Artificial Sequence
  Synthetic
aagcaaacagaggaaaacagacc

SEQ ID NO: 527415 - RNA, 24 nt, Artificial Sequence
  Synthetic
gaagcaaacagaggaaaacagacc

SEQ ID NO: 527416 - RNA, 18 nt, Artificial Sequence
  Synthetic
ccaaaagcuacacagacc

SEQ ID NO: 527417 - RNA, 19 nt, Artificial Sequence
  Synthetic
uccaaaagcuacacagacc

SEQ ID NO: 527418 - RNA, 20 nt, Artificial Sequence
  Synthetic
cuccaaaagcuacacagacc

SEQ ID NO: 527419 - RNA, 21 nt, Artificial Sequence
  Synthetic
ucuccaaaagcuacacagacc

SEQ ID NO: 527420 - RNA, 22 nt, Artificial Sequence
  Synthetic
cucuccaaaagcuacacagacc

SEQ ID NO: 527421 - RNA, 23 nt, Artificial Sequence
  Synthetic
ccucuccaaaagcuacacagacc

SEQ ID NO: 527422 - RNA, 24 nt, Artificial Sequence
  Synthetic
gccucuccaaaagcuacacagacc

SEQ ID NO: 527423 - RNA, 18 nt, Artificial Sequence
  Synthetic
cuccucccaucacagacc

SEQ ID NO: 527424 - RNA, 19 nt, Artificial Sequence
  Synthetic
gcuccucccaucacagacc

SEQ ID NO: 527425 - RNA, 20 nt, Artificial Sequence
  Synthetic
ggcuccucccaucacagacc

SEQ ID NO: 527426 - RNA, 21 nt, Artificial Sequence
  Synthetic
cggcuccucccaucacagacc

SEQ ID NO: 527427 - RNA, 22 nt, Artificial Sequence
  Synthetic
gcggcuccucccaucacagacc

SEQ ID NO: 527428 - RNA, 23 nt, Artificial Sequence
  Synthetic
ugcggcuccucccaucacagacc

SEQ ID NO: 527429 - RNA, 24 nt, Artificial Sequence
  Synthetic
uugcggcuccucccaucacagacc

SEQ ID NO: 527430 - RNA, 18 nt, Artificial Sequence
  Synthetic
gaaucuauuugacagacc

SEQ ID NO: 527431 - RNA, 19 nt, Artificial Sequence
  Synthetic
ugaaucuauuugacagacc

SEQ ID NO: 527432 - RNA, 20 nt, Artificial Sequence
  Synthetic
augaaucuauuugacagacc

SEQ ID NO: 527433 - RNA, 21 nt, Artificial Sequence
  Synthetic
aaugaaucuauuugacagacc

SEQ ID NO: 527434 - RNA, 22 nt, Artificial Sequence
  Synthetic
aaaugaaucuauuugacagacc

SEQ ID NO: 527435 - RNA, 23 nt, Artificial Sequence
  Synthetic
caaaugaaucuauuugacagacc

SEQ ID NO: 527436 - RNA, 24 nt, Artificial Sequence
  Synthetic
ucaaaugaaucuauuugacagacc

SEQ ID NO: 527437 - RNA, 18 nt, Artificial Sequence
  Synthetic
gugaccaucacccagacc

SEQ ID NO: 527438 - RNA, 19 nt, Artificial Sequence
  Synthetic
ggugaccaucacccagacc

SEQ ID NO: 527439 - RNA, 20 nt, Artificial Sequence
  Synthetic
uggugaccaucacccagacc

SEQ ID NO: 527440 - RNA, 21 nt, Artificial Sequence
  Synthetic
auggugaccaucacccagacc

SEQ ID NO: 527441 - RNA, 22 nt, Artificial Sequence
  Synthetic
cauggugaccaucacccagacc

SEQ ID NO: 527442 - RNA, 23 nt, Artificial Sequence
  Synthetic
ccauggugaccaucacccagacc

SEQ ID NO: 527443 - RNA, 24 nt, Artificial Sequence
  Synthetic
cccauggugaccaucacccagacc

SEQ ID NO: 527444 - RNA, 18 nt, Artificial Sequence
  Synthetic
guucauggaagccagacc

SEQ ID NO: 527445 - RNA, 19 nt, Artificial Sequence
  Synthetic
aguucauggaagccagacc

SEQ ID NO: 527446 - RNA, 20 nt, Artificial Sequence
  Synthetic
aaguucauggaagccagacc

SEQ ID NO: 527447 - RNA, 21 nt, Artificial Sequence
  Synthetic
uaaguucauggaagccagacc

SEQ ID NO: 527448 - RNA, 22 nt, Artificial Sequence
  Synthetic
uuaaguucauggaagccagacc

SEQ ID NO: 527449 - RNA, 23 nt, Artificial Sequence
  Synthetic
guuaaguucauggaagccagacc

SEQ ID NO: 527450 - RNA, 24 nt, Artificial Sequence
  Synthetic
gguuaaguucauggaagccagacc

SEQ ID NO: 527451 - RNA, 18 nt, Artificial Sequence
  Synthetic
cuguuuuguugccagacc

SEQ ID NO: 527452 - RNA, 19 nt, Artificial Sequence
  Synthetic
gcuguuuuguugccagacc

SEQ ID NO: 527453 - RNA, 20 nt, Artificial Sequence
  Synthetic
agcuguuuuguugccagacc

SEQ ID NO: 527454 - RNA, 21 nt, Artificial Sequence
  Synthetic
cagcuguuuuguugccagacc

SEQ ID NO: 527455 - RNA, 22 nt, Artificial Sequence
  Synthetic
acagcuguuuuguugccagacc

SEQ ID NO: 527456 - RNA, 23 nt, Artificial Sequence
  Synthetic
aacagcuguuuuguugccagacc

SEQ ID NO: 527457 - RNA, 24 nt, Artificial Sequence
  Synthetic
aaacagcuguuuuguugccagacc

SEQ ID NO: 527458 - RNA, 18 nt, Artificial Sequence
  Synthetic
aauaauagucaucagacc

SEQ ID NO: 527459 - RNA, 19 nt, Artificial Sequence
  Synthetic
gaauaauagucaucagacc

SEQ ID NO: 527460 - RNA, 20 nt, Artificial Sequence
  Synthetic
agaauaauagucaucagacc

SEQ ID NO: 527461 - RNA, 21 nt, Artificial Sequence
  Synthetic
aagaauaauagucaucagacc

SEQ ID NO: 527462 - RNA, 22 nt, Artificial Sequence
  Synthetic
aaagaauaauagucaucagacc

SEQ ID NO: 527463 - RNA, 23 nt, Artificial Sequence
  Synthetic
uaaagaauaauagucaucagacc

SEQ ID NO: 527464 - RNA, 24 nt, Artificial Sequence
  Synthetic
cuaaagaauaauagucaucagacc

SEQ ID NO: 527465 - RNA, 18 nt, Artificial Sequence
  Synthetic
uucuuauacagucagacc

SEQ ID NO: 527466 - RNA, 19 nt, Artificial Sequence
  Synthetic
auucuuauacagucagacc

SEQ ID NO: 527467 - RNA, 20 nt, Artificial Sequence
  Synthetic
cauucuuauacagucagacc

SEQ ID NO: 527468 - RNA, 21 nt, Artificial Sequence
  Synthetic
gcauucuuauacagucagacc

SEQ ID NO: 527469 - RNA, 22 nt, Artificial Sequence
  Synthetic
ggcauucuuauacagucagacc

SEQ ID NO: 527470 - RNA, 23 nt, Artificial Sequence
  Synthetic
aggcauucuuauacagucagacc

SEQ ID NO: 527471 - RNA, 24 nt, Artificial Sequence
  Synthetic
uaggcauucuuauacagucagacc

SEQ ID NO: 527472 - RNA, 18 nt, Artificial Sequence
  Synthetic
acuuucugguaagagacc

SEQ ID NO: 527473 - RNA, 19 nt, Artificial Sequence
  Synthetic
cacuuucugguaagagacc

SEQ ID NO: 527474 - RNA, 20 nt, Artificial Sequence
  Synthetic
ucacuuucugguaagagacc

SEQ ID NO: 527475 - RNA, 21 nt, Artificial Sequence
  Synthetic
aucacuuucugguaagagacc

SEQ ID NO: 527476 - RNA, 22 nt, Artificial Sequence
  Synthetic
gaucacuuucugguaagagacc

SEQ ID NO: 527477 - RNA, 23 nt, Artificial Sequence
  Synthetic
ugaucacuuucugguaagagacc

SEQ ID NO: 527478 - RNA, 24 nt, Artificial Sequence
  Synthetic
gugaucacuuucugguaagagacc

SEQ ID NO: 527479 - RNA, 18 nt, Artificial Sequence
  Synthetic
cagccuuugugagagacc

SEQ ID NO: 527480 - RNA, 19 nt, Artificial Sequence
  Synthetic
gcagccuuugugagagacc

SEQ ID NO: 527481 - RNA, 20 nt, Artificial Sequence
  Synthetic
ugcagccuuugugagagacc

SEQ ID NO: 527482 - RNA, 21 nt, Artificial Sequence
  Synthetic
gugcagccuuugugagagacc

SEQ ID NO: 527483 - RNA, 22 nt, Artificial Sequence
  Synthetic
ugugcagccuuugugagagacc

SEQ ID NO: 527484 - RNA, 23 nt, Artificial Sequence
  Synthetic
gugugcagccuuugugagagacc

SEQ ID NO: 527485 - RNA, 24 nt, Artificial Sequence
  Synthetic
agugugcagccuuugugagagacc

SEQ ID NO: 527486 - RNA, 18 nt, Artificial Sequence
  Synthetic
cuugaagucagcgagacc

SEQ ID NO: 527487 - RNA, 19 nt, Artificial Sequence
  Synthetic
ucuugaagucagcgagacc

SEQ ID NO: 527488 - RNA, 20 nt, Artificial Sequence
  Synthetic
uucuugaagucagcgagacc

SEQ ID NO: 527489 - RNA, 21 nt, Artificial Sequence
  Synthetic
guucuugaagucagcgagacc

SEQ ID NO: 527490 - RNA, 22 nt, Artificial Sequence
  Synthetic
cguucuugaagucagcgagacc

SEQ ID NO: 527491 - RNA, 23 nt, Artificial Sequence
  Synthetic
ucguucuugaagucagcgagacc

SEQ ID NO: 527492 - RNA, 24 nt, Artificial Sequence
  Synthetic
uucguucuugaagucagcgagacc

SEQ ID NO: 527493 - RNA, 18 nt, Artificial Sequence
  Synthetic
acugaggagcaggagacc

SEQ ID NO: 527494 - RNA, 19 nt, Artificial Sequence
  Synthetic
uacugaggagcaggagacc

SEQ ID NO: 527495 - RNA, 20 nt, Artificial Sequence
  Synthetic
auacugaggagcaggagacc

SEQ ID NO: 527496 - RNA, 21 nt, Artificial Sequence
  Synthetic
aauacugaggagcaggagacc

SEQ ID NO: 527497 - RNA, 22 nt, Artificial Sequence
  Synthetic
aaauacugaggagcaggagacc

SEQ ID NO: 527498 - RNA, 23 nt, Artificial Sequence
  Synthetic
aaaauacugaggagcaggagacc

SEQ ID NO: 527499 - RNA, 24 nt, Artificial Sequence
  Synthetic
aaaaauacugaggagcaggagacc

SEQ ID NO: 527500 - RNA, 18 nt, Artificial Sequence
  Synthetic
gucuauucuuaggagacc

SEQ ID NO: 527501 - RNA, 19 nt, Artificial Sequence
  Synthetic
ggucuauucuuaggagacc

SEQ ID NO: 527502 - RNA, 20 nt, Artificial Sequence
  Synthetic
aggucuauucuuaggagacc

SEQ ID NO: 527503 - RNA, 21 nt, Artificial Sequence
  Synthetic
aaggucuauucuuaggagacc

SEQ ID NO: 527504 - RNA, 22 nt, Artificial Sequence
  Synthetic
gaaggucuauucuuaggagacc

SEQ ID NO: 527505 - RNA, 23 nt, Artificial Sequence
  Synthetic
ggaaggucuauucuuaggagacc

SEQ ID NO: 527506 - RNA, 24 nt, Artificial Sequence
  Synthetic
aggaaggucuauucuuaggagacc

SEQ ID NO: 527507 - RNA, 18 nt, Artificial Sequence
  Synthetic
gucagcaagcuggagacc

SEQ ID NO: 527508 - RNA, 19 nt, Artificial Sequence
  Synthetic
agucagcaagcuggagacc

SEQ ID NO: 527509 - RNA, 20 nt, Artificial Sequence
  Synthetic
cagucagcaagcuggagacc

SEQ ID NO: 527510 - RNA, 21 nt, Artificial Sequence
  Synthetic
acagucagcaagcuggagacc

SEQ ID NO: 527511 - RNA, 22 nt, Artificial Sequence
  Synthetic
uacagucagcaagcuggagacc

SEQ ID NO: 527512 - RNA, 23 nt, Artificial Sequence
  Synthetic
uuacagucagcaagcuggagacc

SEQ ID NO: 527513 - RNA, 24 nt, Artificial Sequence
  Synthetic
uuuacagucagcaagcuggagacc

SEQ ID NO: 527514 - RNA, 18 nt, Artificial Sequence
  Synthetic
agcaaaauaacugagacc

SEQ ID NO: 527515 - RNA, 19 nt, Artificial Sequence
  Synthetic
gagcaaaauaacugagacc

SEQ ID NO: 527516 - RNA, 20 nt, Artificial Sequence
  Synthetic
agagcaaaauaacugagacc

SEQ ID NO: 527517 - RNA, 21 nt, Artificial Sequence
  Synthetic
gagagcaaaauaacugagacc

SEQ ID NO: 527518 - RNA, 22 nt, Artificial Sequence
  Synthetic
agagagcaaaauaacugagacc

SEQ ID NO: 527519 - RNA, 23 nt, Artificial Sequence
  Synthetic
gagagagcaaaauaacugagacc

SEQ ID NO: 527520 - RNA, 24 nt, Artificial Sequence
  Synthetic
agagagagcaaaauaacugagacc

SEQ ID NO: 527521 - RNA, 18 nt, Artificial Sequence
  Synthetic
auacgggaacaauagacc

SEQ ID NO: 527522 - RNA, 19 nt, Artificial Sequence
  Synthetic
aauacgggaacaauagacc

SEQ ID NO: 527523 - RNA, 20 nt, Artificial Sequence
  Synthetic
aaauacgggaacaauagacc

SEQ ID NO: 527524 - RNA, 21 nt, Artificial Sequence
  Synthetic
uaaauacgggaacaauagacc

SEQ ID NO: 527525 - RNA, 22 nt, Artificial Sequence
  Synthetic
auaaauacgggaacaauagacc

SEQ ID NO: 527526 - RNA, 23 nt, Artificial Sequence
  Synthetic
cauaaauacgggaacaauagacc

SEQ ID NO: 527527 - RNA, 24 nt, Artificial Sequence
  Synthetic
acauaaauacgggaacaauagacc

SEQ ID NO: 527528 - RNA, 18 nt, Artificial Sequence
  Synthetic
accuuugaccaauagacc

SEQ ID NO: 527529 - RNA, 19 nt, Artificial Sequence
  Synthetic
uaccuuugaccaauagacc

SEQ ID NO: 527530 - RNA, 20 nt, Artificial Sequence
  Synthetic
guaccuuugaccaauagacc

SEQ ID NO: 527531 - RNA, 21 nt, Artificial Sequence
  Synthetic
uguaccuuugaccaauagacc

SEQ ID NO: 527532 - RNA, 22 nt, Artificial Sequence
  Synthetic
guguaccuuugaccaauagacc

SEQ ID NO: 527533 - RNA, 23 nt, Artificial Sequence
  Synthetic
uguguaccuuugaccaauagacc

SEQ ID NO: 527534 - RNA, 24 nt, Artificial Sequence
  Synthetic
cuguguaccuuugaccaauagacc

SEQ ID NO: 527535 - RNA, 18 nt, Artificial Sequence
  Synthetic
auuccaguugacuagacc

SEQ ID NO: 527536 - RNA, 19 nt, Artificial Sequence
  Synthetic
cauuccaguugacuagacc

SEQ ID NO: 527537 - RNA, 20 nt, Artificial Sequence
  Synthetic
ucauuccaguugacuagacc

SEQ ID NO: 527538 - RNA, 21 nt, Artificial Sequence
  Synthetic
uucauuccaguugacuagacc

SEQ ID NO: 527539 - RNA, 22 nt, Artificial Sequence
  Synthetic
uuucauuccaguugacuagacc

SEQ ID NO: 527540 - RNA, 23 nt, Artificial Sequence
  Synthetic
cuuucauuccaguugacuagacc

SEQ ID NO: 527541 - RNA, 24 nt, Artificial Sequence
  Synthetic
ccuuucauuccaguugacuagacc

SEQ ID NO: 527542 - RNA, 18 nt, Artificial Sequence
  Synthetic
uuugcucagaaguagacc

SEQ ID NO: 527543 - RNA, 19 nt, Artificial Sequence
  Synthetic
guuugcucagaaguagacc

SEQ ID NO: 527544 - RNA, 20 nt, Artificial Sequence
  Synthetic
gguuugcucagaaguagacc

SEQ ID NO: 527545 - RNA, 21 nt, Artificial Sequence
  Synthetic
agguuugcucagaaguagacc

SEQ ID NO: 527546 - RNA, 22 nt, Artificial Sequence
  Synthetic
uagguuugcucagaaguagacc

SEQ ID NO: 527547 - RNA, 23 nt, Artificial Sequence
  Synthetic
uuagguuugcucagaaguagacc

SEQ ID NO: 527548 - RNA, 24 nt, Artificial Sequence
  Synthetic
uuuagguuugcucagaaguagacc

SEQ ID NO: 527549 - RNA, 18 nt, Artificial Sequence
  Synthetic
augggaggcagcacgacc

SEQ ID NO: 527550 - RNA, 19 nt, Artificial Sequence
  Synthetic
aaugggaggcagcacgacc

SEQ ID NO: 527551 - RNA, 20 nt, Artificial Sequence
  Synthetic
aaaugggaggcagcacgacc

SEQ ID NO: 527552 - RNA, 21 nt, Artificial Sequence
  Synthetic
gaaaugggaggcagcacgacc

SEQ ID NO: 527553 - RNA, 22 nt, Artificial Sequence
  Synthetic
agaaaugggaggcagcacgacc

SEQ ID NO: 527554 - RNA, 23 nt, Artificial Sequence
  Synthetic
gagaaaugggaggcagcacgacc

SEQ ID NO: 527555 - RNA, 24 nt, Artificial Sequence
  Synthetic
agagaaaugggaggcagcacgacc

SEQ ID NO: 527556 - RNA, 18 nt, Artificial Sequence
  Synthetic
gaauaaaagaaaaggacc

SEQ ID NO: 527557 - RNA, 19 nt, Artificial Sequence
  Synthetic
agaauaaaagaaaaggacc

SEQ ID NO: 527558 - RNA, 20 nt, Artificial Sequence
  Synthetic
cagaauaaaagaaaaggacc

SEQ ID NO: 527559 - RNA, 21 nt, Artificial Sequence
  Synthetic
ucagaauaaaagaaaaggacc

SEQ ID NO: 527560 - RNA, 22 nt, Artificial Sequence
  Synthetic
uucagaauaaaagaaaaggacc

SEQ ID NO: 527561 - RNA, 23 nt, Artificial Sequence
  Synthetic
guucagaauaaaagaaaaggacc

SEQ ID NO: 527562 - RNA, 24 nt, Artificial Sequence
  Synthetic
uguucagaauaaaagaaaaggacc

SEQ ID NO: 527563 - RNA, 18 nt, Artificial Sequence
  Synthetic
ugaagaugagaaaggacc

SEQ ID NO: 527564 - RNA, 19 nt, Artificial Sequence
  Synthetic
augaagaugagaaaggacc

SEQ ID NO: 527565 - RNA, 20 nt, Artificial Sequence
  Synthetic
aaugaagaugagaaaggacc

SEQ ID NO: 527566 - RNA, 21 nt, Artificial Sequence
  Synthetic
caaugaagaugagaaaggacc

SEQ ID NO: 527567 - RNA, 22 nt, Artificial Sequence
  Synthetic
gcaaugaagaugagaaaggacc

SEQ ID NO: 527568 - RNA, 23 nt, Artificial Sequence
  Synthetic
ugcaaugaagaugagaaaggacc

SEQ ID NO: 527569 - RNA, 24 nt, Artificial Sequence
  Synthetic
uugcaaugaagaugagaaaggacc

SEQ ID NO: 527570 - RNA, 18 nt, Artificial Sequence
  Synthetic
ucagaugcagccaggacc

SEQ ID NO: 527571 - RNA, 19 nt, Artificial Sequence
  Synthetic
gucagaugcagccaggacc

SEQ ID NO: 527572 - RNA, 20 nt, Artificial Sequence
  Synthetic
agucagaugcagccaggacc

SEQ ID NO: 527573 - RNA, 21 nt, Artificial Sequence
  Synthetic
aagucagaugcagccaggacc

SEQ ID NO: 527574 - RNA, 22 nt, Artificial Sequence
  Synthetic
caagucagaugcagccaggacc

SEQ ID NO: 527575 - RNA, 23 nt, Artificial Sequence
  Synthetic
acaagucagaugcagccaggacc

SEQ ID NO: 527576 - RNA, 24 nt, Artificial Sequence
  Synthetic
aacaagucagaugcagccaggacc

SEQ ID NO: 527577 - RNA, 18 nt, Artificial Sequence
  Synthetic
aucacgugguucaggacc

SEQ ID NO: 527578 - RNA, 19 nt, Artificial Sequence
  Synthetic
uaucacgugguucaggacc

SEQ ID NO: 527579 - RNA, 20 nt, Artificial Sequence
  Synthetic
auaucacgugguucaggacc

SEQ ID NO: 527580 - RNA, 21 nt, Artificial Sequence
  Synthetic
uauaucacgugguucaggacc

SEQ ID NO: 527581 - RNA, 22 nt, Artificial Sequence
  Synthetic
uuauaucacgugguucaggacc

SEQ ID NO: 527582 - RNA, 23 nt, Artificial Sequence
  Synthetic
auuauaucacgugguucaggacc

SEQ ID NO: 527583 - RNA, 24 nt, Artificial Sequence
  Synthetic
uauuauaucacgugguucaggacc

SEQ ID NO: 527584 - RNA, 18 nt, Artificial Sequence
  Synthetic
cagaccuuggugaggacc

SEQ ID NO: 527585 - RNA, 19 nt, Artificial Sequence
  Synthetic
ucagaccuuggugaggacc

SEQ ID NO: 527586 - RNA, 20 nt, Artificial Sequence
  Synthetic
aucagaccuuggugaggacc

SEQ ID NO: 527587 - RNA, 21 nt, Artificial Sequence
  Synthetic
aaucagaccuuggugaggacc

SEQ ID NO: 527588 - RNA, 22 nt, Artificial Sequence
  Synthetic
caaucagaccuuggugaggacc

SEQ ID NO: 527589 - RNA, 23 nt, Artificial Sequence
  Synthetic
gcaaucagaccuuggugaggacc

SEQ ID NO: 527590 - RNA, 24 nt, Artificial Sequence
  Synthetic
ugcaaucagaccuuggugaggacc

SEQ ID NO: 527591 - RNA, 18 nt, Artificial Sequence
  Synthetic
auguccuuuuugaggacc

SEQ ID NO: 527592 - RNA, 19 nt, Artificial Sequence
  Synthetic
cauguccuuuuugaggacc

SEQ ID NO: 527593 - RNA, 20 nt, Artificial Sequence
  Synthetic
gcauguccuuuuugaggacc

SEQ ID NO: 527594 - RNA, 21 nt, Artificial Sequence
  Synthetic
agcauguccuuuuugaggacc

SEQ ID NO: 527595 - RNA, 22 nt, Artificial Sequence
  Synthetic
aagcauguccuuuuugaggacc

SEQ ID NO: 527596 - RNA, 23 nt, Artificial Sequence
  Synthetic
uaagcauguccuuuuugaggacc

SEQ ID NO: 527597 - RNA, 24 nt, Artificial Sequence
  Synthetic
cuaagcauguccuuuuugaggacc

SEQ ID NO: 527598 - RNA, 18 nt, Artificial Sequence
  Synthetic
agcagcagaagacggacc

SEQ ID NO: 527599 - RNA, 19 nt, Artificial Sequence
  Synthetic
cagcagcagaagacggacc

SEQ ID NO: 527600 - RNA, 20 nt, Artificial Sequence
  Synthetic
acagcagcagaagacggacc

SEQ ID NO: 527601 - RNA, 21 nt, Artificial Sequence
  Synthetic
uacagcagcagaagacggacc

SEQ ID NO: 527602 - RNA, 22 nt, Artificial Sequence
  Synthetic
auacagcagcagaagacggacc

SEQ ID NO: 527603 - RNA, 23 nt, Artificial Sequence
  Synthetic
aauacagcagcagaagacggacc

SEQ ID NO: 527604 - RNA, 24 nt, Artificial Sequence
  Synthetic
uaauacagcagcagaagacggacc

SEQ ID NO: 527605 - RNA, 18 nt, Artificial Sequence
  Synthetic
ggccgaagugggcggacc

SEQ ID NO: 527606 - RNA, 19 nt, Artificial Sequence
  Synthetic
aggccgaagugggcggacc

SEQ ID NO: 527607 - RNA, 20 nt, Artificial Sequence
  Synthetic
gaggccgaagugggcggacc

SEQ ID NO: 527608 - RNA, 21 nt, Artificial Sequence
  Synthetic
ggaggccgaagugggcggacc

SEQ ID NO: 527609 - RNA, 22 nt, Artificial Sequence
  Synthetic
gggaggccgaagugggcggacc

SEQ ID NO: 527610 - RNA, 23 nt, Artificial Sequence
  Synthetic
ugggaggccgaagugggcggacc

SEQ ID NO: 527611 - RNA, 24 nt, Artificial Sequence
  Synthetic
uugggaggccgaagugggcggacc

SEQ ID NO: 527612 - RNA, 18 nt, Artificial Sequence
  Synthetic
aaguagagcaaggggacc

SEQ ID NO: 527613 - RNA, 19 nt, Artificial Sequence
  Synthetic
gaaguagagcaaggggacc

SEQ ID NO: 527614 - RNA, 20 nt, Artificial Sequence
  Synthetic
agaaguagagcaaggggacc

SEQ ID NO: 527615 - RNA, 21 nt, Artificial Sequence
  Synthetic
aagaaguagagcaaggggacc

SEQ ID NO: 527616 - RNA, 22 nt, Artificial Sequence
  Synthetic
uaagaaguagagcaaggggacc

SEQ ID NO: 527617 - RNA, 23 nt, Artificial Sequence
  Synthetic
uuaagaaguagagcaaggggacc

SEQ ID NO: 527618 - RNA, 24 nt, Artificial Sequence
  Synthetic
uuuaagaaguagagcaaggggacc

SEQ ID NO: 527619 - RNA, 18 nt, Artificial Sequence
  Synthetic
aggaccuggccugggacc

SEQ ID NO: 527620 - RNA, 19 nt, Artificial Sequence
  Synthetic
aaggaccuggccugggacc

SEQ ID NO: 527621 - RNA, 20 nt, Artificial Sequence
  Synthetic
gaaggaccuggccugggacc

SEQ ID NO: 527622 - RNA, 21 nt, Artificial Sequence
  Synthetic
ugaaggaccuggccugggacc

SEQ ID NO: 527623 - RNA, 22 nt, Artificial Sequence
  Synthetic
uugaaggaccuggccugggacc

SEQ ID NO: 527624 - RNA, 23 nt, Artificial Sequence
  Synthetic
guugaaggaccuggccugggacc

SEQ ID NO: 527625 - RNA, 24 nt, Artificial Sequence
  Synthetic
uguugaaggaccuggccugggacc

SEQ ID NO: 527626 - RNA, 18 nt, Artificial Sequence
  Synthetic
ggaucuucuauauggacc

SEQ ID NO: 527627 - RNA, 19 nt, Artificial Sequence
  Synthetic
gggaucuucuauauggacc

SEQ ID NO: 527628 - RNA, 20 nt, Artificial Sequence
  Synthetic
agggaucuucuauauggacc

SEQ ID NO: 527629 - RNA, 21 nt, Artificial Sequence
  Synthetic
uagggaucuucuauauggacc

SEQ ID NO: 527630 - RNA, 22 nt, Artificial Sequence
  Synthetic
auagggaucuucuauauggacc

SEQ ID NO: 527631 - RNA, 23 nt, Artificial Sequence
  Synthetic
gauagggaucuucuauauggacc

SEQ ID NO: 527632 - RNA, 24 nt, Artificial Sequence
  Synthetic
ggauagggaucuucuauauggacc

SEQ ID NO: 527633 - RNA, 18 nt, Artificial Sequence
  Synthetic
agguaaugcuuauggacc

SEQ ID NO: 527634 - RNA, 19 nt, Artificial Sequence
  Synthetic
aagguaaugcuuauggacc

SEQ ID NO: 527635 - RNA, 20 nt, Artificial Sequence
  Synthetic
caagguaaugcuuauggacc

SEQ ID NO: 527636 - RNA, 21 nt, Artificial Sequence
  Synthetic
ucaagguaaugcuuauggacc

SEQ ID NO: 527637 - RNA, 22 nt, Artificial Sequence
  Synthetic
aucaagguaaugcuuauggacc

SEQ ID NO: 527638 - RNA, 23 nt, Artificial Sequence
  Synthetic
caucaagguaaugcuuauggacc

SEQ ID NO: 527639 - RNA, 24 nt, Artificial Sequence
  Synthetic
ucaucaagguaaugcuuauggacc

SEQ ID NO: 527640 - RNA, 18 nt, Artificial Sequence
  Synthetic
uuuauaggucacuggacc

SEQ ID NO: 527641 - RNA, 19 nt, Artificial Sequence
  Synthetic
cuuuauaggucacuggacc

SEQ ID NO: 527642 - RNA, 20 nt, Artificial Sequence
  Synthetic
acuuuauaggucacuggacc

SEQ ID NO: 527643 - RNA, 21 nt, Artificial Sequence
  Synthetic
cacuuuauaggucacuggacc

SEQ ID NO: 527644 - RNA, 22 nt, Artificial Sequence
  Synthetic
ucacuuuauaggucacuggacc

SEQ ID NO: 527645 - RNA, 23 nt, Artificial Sequence
  Synthetic
uucacuuuauaggucacuggacc

SEQ ID NO: 527646 - RNA, 24 nt, Artificial Sequence
  Synthetic
uuucacuuuauaggucacuggacc

SEQ ID NO: 527647 - RNA, 18 nt, Artificial Sequence
  Synthetic
uauauuucugaguggacc

SEQ ID NO: 527648 - RNA, 19 nt, Artificial Sequence
  Synthetic
auauauuucugaguggacc

SEQ ID NO: 527649 - RNA, 20 nt, Artificial Sequence
  Synthetic
gauauauuucugaguggacc

SEQ ID NO: 527650 - RNA, 21 nt, Artificial Sequence
  Synthetic
agauauauuucugaguggacc

SEQ ID NO: 527651 - RNA, 22 nt, Artificial Sequence
  Synthetic
uagauauauuucugaguggacc

SEQ ID NO: 527652 - RNA, 23 nt, Artificial Sequence
  Synthetic
uuagauauauuucugaguggacc

SEQ ID NO: 527653 - RNA, 24 nt, Artificial Sequence
  Synthetic
uuuagauauauuucugaguggacc

SEQ ID NO: 527654 - RNA, 18 nt, Artificial Sequence
  Synthetic
agacagggaauuuggacc

SEQ ID NO: 527655 - RNA, 19 nt, Artificial Sequence
  Synthetic
aagacagggaauuuggacc

SEQ ID NO: 527656 - RNA, 20 nt, Artificial Sequence
  Synthetic
aaagacagggaauuuggacc

SEQ ID NO: 527657 - RNA, 21 nt, Artificial Sequence
  Synthetic
uaaagacagggaauuuggacc

SEQ ID NO: 527658 - RNA, 22 nt, Artificial Sequence
  Synthetic
uuaaagacagggaauuuggacc

SEQ ID NO: 527659 - RNA, 23 nt, Artificial Sequence
  Synthetic
auuaaagacagggaauuuggacc

SEQ ID NO: 527660 - RNA, 24 nt, Artificial Sequence
  Synthetic
aauuaaagacagggaauuuggacc

SEQ ID NO: 527661 - RNA, 18 nt, Artificial Sequence
  Synthetic
aguuauuuuuaaaugacc

SEQ ID NO: 527662 - RNA, 19 nt, Artificial Sequence
  Synthetic
uaguuauuuuuaaaugacc

SEQ ID NO: 527663 - RNA, 20 nt, Artificial Sequence
  Synthetic
auaguuauuuuuaaaugacc

SEQ ID NO: 527664 - RNA, 21 nt, Artificial Sequence
  Synthetic
uauaguuauuuuuaaaugacc

SEQ ID NO: 527665 - RNA, 22 nt, Artificial Sequence
  Synthetic
guauaguuauuuuuaaaugacc

SEQ ID NO: 527666 - RNA, 23 nt, Artificial Sequence
  Synthetic
gguauaguuauuuuuaaaugacc

SEQ ID NO: 527667 - RNA, 24 nt, Artificial Sequence
  Synthetic
cgguauaguuauuuuuaaaugacc

SEQ ID NO: 527668 - RNA, 18 nt, Artificial Sequence
  Synthetic
uccgucuucauaaugacc

SEQ ID NO: 527669 - RNA, 19 nt, Artificial Sequence
  Synthetic
cuccgucuucauaaugacc

SEQ ID NO: 527670 - RNA, 20 nt, Artificial Sequence
  Synthetic
acuccgucuucauaaugacc

SEQ ID NO: 527671 - RNA, 21 nt, Artificial Sequence
  Synthetic
aacuccgucuucauaaugacc

SEQ ID NO: 527672 - RNA, 22 nt, Artificial Sequence
  Synthetic
gaacuccgucuucauaaugacc

SEQ ID NO: 527673 - RNA, 23 nt, Artificial Sequence
  Synthetic
ugaacuccgucuucauaaugacc

SEQ ID NO: 527674 - RNA, 24 nt, Artificial Sequence
  Synthetic
uugaacuccgucuucauaaugacc

SEQ ID NO: 527675 - RNA, 18 nt, Artificial Sequence
  Synthetic
agggucucccacaugacc

SEQ ID NO: 527676 - RNA, 19 nt, Artificial Sequence
  Synthetic
uagggucucccacaugacc

SEQ ID NO: 527677 - RNA, 20 nt, Artificial Sequence
  Synthetic
uuagggucucccacaugacc

SEQ ID NO: 527678 - RNA, 21 nt, Artificial Sequence
  Synthetic
auuagggucucccacaugacc

SEQ ID NO: 527679 - RNA, 22 nt, Artificial Sequence
  Synthetic
gauuagggucucccacaugacc

SEQ ID NO: 527680 - RNA, 23 nt, Artificial Sequence
  Synthetic
ggauuagggucucccacaugacc

SEQ ID NO: 527681 - RNA, 24 nt, Artificial Sequence
  Synthetic
uggauuagggucucccacaugacc

SEQ ID NO: 527682 - RNA, 18 nt, Artificial Sequence
  Synthetic
ggauuauucaccaugacc

SEQ ID NO: 527683 - RNA, 19 nt, Artificial Sequence
  Synthetic
aggauuauucaccaugacc

SEQ ID NO: 527684 - RNA, 20 nt, Artificial Sequence
  Synthetic
aaggauuauucaccaugacc

SEQ ID NO: 527685 - RNA, 21 nt, Artificial Sequence
  Synthetic
gaaggauuauucaccaugacc

SEQ ID NO: 527686 - RNA, 22 nt, Artificial Sequence
  Synthetic
agaaggauuauucaccaugacc

SEQ ID NO: 527687 - RNA, 23 nt, Artificial Sequence
  Synthetic
uagaaggauuauucaccaugacc

SEQ ID NO: 527688 - RNA, 24 nt, Artificial Sequence
  Synthetic
uuagaaggauuauucaccaugacc

SEQ ID NO: 527689 - RNA, 18 nt, Artificial Sequence
  Synthetic
gugaauagucccaugacc

SEQ ID NO: 527690 - RNA, 19 nt, Artificial Sequence
  Synthetic
ggugaauagucccaugacc

SEQ ID NO: 527691 - RNA, 20 nt, Artificial Sequence
  Synthetic
uggugaauagucccaugacc

SEQ ID NO: 527692 - RNA, 21 nt, Artificial Sequence
  Synthetic
guggugaauagucccaugacc

SEQ ID NO: 527693 - RNA, 22 nt, Artificial Sequence
  Synthetic
aguggugaauagucccaugacc

SEQ ID NO: 527694 - RNA, 23 nt, Artificial Sequence
  Synthetic
caguggugaauagucccaugacc

SEQ ID NO: 527695 - RNA, 24 nt, Artificial Sequence
  Synthetic
gcaguggugaauagucccaugacc

SEQ ID NO: 527696 - RNA, 18 nt, Artificial Sequence
  Synthetic
agcaauaucagcaugacc

SEQ ID NO: 527697 - RNA, 19 nt, Artificial Sequence
  Synthetic
aagcaauaucagcaugacc

SEQ ID NO: 527698 - RNA, 20 nt, Artificial Sequence
  Synthetic
aaagcaauaucagcaugacc

SEQ ID NO: 527699 - RNA, 21 nt, Artificial Sequence
  Synthetic
caaagcaauaucagcaugacc

SEQ ID NO: 527700 - RNA, 22 nt, Artificial Sequence
  Synthetic
ucaaagcaauaucagcaugacc

SEQ ID NO: 527701 - RNA, 23 nt, Artificial Sequence
  Synthetic
aucaaagcaauaucagcaugacc

SEQ ID NO: 527702 - RNA, 24 nt, Artificial Sequence
  Synthetic
uaucaaagcaauaucagcaugacc

SEQ ID NO: 527703 - RNA, 18 nt, Artificial Sequence
  Synthetic
guuagcaccuucaugacc

SEQ ID NO: 527704 - RNA, 19 nt, Artificial Sequence
  Synthetic
aguuagcaccuucaugacc

SEQ ID NO: 527705 - RNA, 20 nt, Artificial Sequence
  Synthetic
gaguuagcaccuucaugacc

SEQ ID NO: 527706 - RNA, 21 nt, Artificial Sequence
  Synthetic
agaguuagcaccuucaugacc

SEQ ID NO: 527707 - RNA, 22 nt, Artificial Sequence
  Synthetic
cagaguuagcaccuucaugacc

SEQ ID NO: 527708 - RNA, 23 nt, Artificial Sequence
  Synthetic
ucagaguuagcaccuucaugacc

SEQ ID NO: 527709 - RNA, 24 nt, Artificial Sequence
  Synthetic
gucagaguuagcaccuucaugacc

SEQ ID NO: 527710 - RNA, 18 nt, Artificial Sequence
  Synthetic
uucuuguucuucaugacc

SEQ ID NO: 527711 - RNA, 19 nt, Artificial Sequence
  Synthetic
cuucuuguucuucaugacc

SEQ ID NO: 527712 - RNA, 20 nt, Artificial Sequence
  Synthetic
ucuucuuguucuucaugacc

SEQ ID NO: 527713 - RNA, 21 nt, Artificial Sequence
  Synthetic
uucuucuuguucuucaugacc

SEQ ID NO: 527714 - RNA, 22 nt, Artificial Sequence
  Synthetic
uuucuucuuguucuucaugacc

SEQ ID NO: 527715 - RNA, 23 nt, Artificial Sequence
  Synthetic
guuucuucuuguucuucaugacc

SEQ ID NO: 527716 - RNA, 24 nt, Artificial Sequence
  Synthetic
aguuucuucuuguucuucaugacc

SEQ ID NO: 527717 - RNA, 18 nt, Artificial Sequence
  Synthetic
ugucuuggcaguaugacc

SEQ ID NO: 527718 - RNA, 19 nt, Artificial Sequence
  Synthetic
cugucuuggcaguaugacc

SEQ ID NO: 527719 - RNA, 20 nt, Artificial Sequence
  Synthetic
acugucuuggcaguaugacc

SEQ ID NO: 527720 - RNA, 21 nt, Artificial Sequence
  Synthetic
cacugucuuggcaguaugacc

SEQ ID NO: 527721 - RNA, 22 nt, Artificial Sequence
  Synthetic
ccacugucuuggcaguaugacc

SEQ ID NO: 527722 - RNA, 23 nt, Artificial Sequence
  Synthetic
gccacugucuuggcaguaugacc

SEQ ID NO: 527723 - RNA, 24 nt, Artificial Sequence
  Synthetic
agccacugucuuggcaguaugacc

SEQ ID NO: 527724 - RNA, 18 nt, Artificial Sequence
  Synthetic
cugucacauauuaugacc

SEQ ID NO: 527725 - RNA, 19 nt, Artificial Sequence
  Synthetic
gcugucacauauuaugacc

SEQ ID NO: 527726 - RNA, 20 nt, Artificial Sequence
  Synthetic
agcugucacauauuaugacc

SEQ ID NO: 527727 - RNA, 21 nt, Artificial Sequence
  Synthetic
uagcugucacauauuaugacc

SEQ ID NO: 527728 - RNA, 22 nt, Artificial Sequence
  Synthetic
uuagcugucacauauuaugacc

SEQ ID NO: 527729 - RNA, 23 nt, Artificial Sequence
  Synthetic
uuuagcugucacauauuaugacc

SEQ ID NO: 527730 - RNA, 24 nt, Artificial Sequence
  Synthetic
cuuuagcugucacauauuaugacc

SEQ ID NO: 527731 - RNA, 18 nt, Artificial Sequence
  Synthetic
ggaggugcugcacugacc

SEQ ID NO: 527732 - RNA, 19 nt, Artificial Sequence
  Synthetic
uggaggugcugcacugacc

SEQ ID NO: 527733 - RNA, 20 nt, Artificial Sequence
  Synthetic
uuggaggugcugcacugacc

SEQ ID NO: 527734 - RNA, 21 nt, Artificial Sequence
  Synthetic
uuuggaggugcugcacugacc

SEQ ID NO: 527735 - RNA, 22 nt, Artificial Sequence
  Synthetic
uuuuggaggugcugcacugacc

SEQ ID NO: 527736 - RNA, 23 nt, Artificial Sequence
  Synthetic
guuuuggaggugcugcacugacc

SEQ ID NO: 527737 - RNA, 24 nt, Artificial Sequence
  Synthetic
gguuuuggaggugcugcacugacc

SEQ ID NO: 527738 - RNA, 18 nt, Artificial Sequence
  Synthetic
aucauuuugacccugacc

SEQ ID NO: 527739 - RNA, 19 nt, Artificial Sequence
  Synthetic
caucauuuugacccugacc

SEQ ID NO: 527740 - RNA, 20 nt, Artificial Sequence
  Synthetic
gcaucauuuugacccugacc

SEQ ID NO: 527741 - RNA, 21 nt, Artificial Sequence
  Synthetic
ggcaucauuuugacccugacc

SEQ ID NO: 527742 - RNA, 22 nt, Artificial Sequence
  Synthetic
uggcaucauuuugacccugacc

SEQ ID NO: 527743 - RNA, 23 nt, Artificial Sequence
  Synthetic
cuggcaucauuuugacccugacc

SEQ ID NO: 527744 - RNA, 24 nt, Artificial Sequence
  Synthetic
acuggcaucauuuugacccugacc

SEQ ID NO: 527745 - RNA, 18 nt, Artificial Sequence
  Synthetic
ugaaacuggguccugacc

SEQ ID NO: 527746 - RNA, 19 nt, Artificial Sequence
  Synthetic
gugaaacuggguccugacc

SEQ ID NO: 527747 - RNA, 20 nt, Artificial Sequence
  Synthetic
ugugaaacuggguccugacc

SEQ ID NO: 527748 - RNA, 21 nt, Artificial Sequence
  Synthetic
uugugaaacuggguccugacc

SEQ ID NO: 527749 - RNA, 22 nt, Artificial Sequence
  Synthetic
cuugugaaacuggguccugacc

SEQ ID NO: 527750 - RNA, 23 nt, Artificial Sequence
  Synthetic
ucuugugaaacuggguccugacc

SEQ ID NO: 527751 - RNA, 24 nt, Artificial Sequence
  Synthetic
uucuugugaaacuggguccugacc

SEQ ID NO: 527752 - RNA, 18 nt, Artificial Sequence
  Synthetic
uuaaguucugagcugacc

SEQ ID NO: 527753 - RNA, 19 nt, Artificial Sequence
  Synthetic
guuaaguucugagcugacc

SEQ ID NO: 527754 - RNA, 20 nt, Artificial Sequence
  Synthetic
uguuaaguucugagcugacc

SEQ ID NO: 527755 - RNA, 21 nt, Artificial Sequence
  Synthetic
uuguuaaguucugagcugacc

SEQ ID NO: 527756 - RNA, 22 nt, Artificial Sequence
  Synthetic
guuguuaaguucugagcugacc

SEQ ID NO: 527757 - RNA, 23 nt, Artificial Sequence
  Synthetic
uguuguuaaguucugagcugacc

SEQ ID NO: 527758 - RNA, 24 nt, Artificial Sequence
  Synthetic
auguuguuaaguucugagcugacc

SEQ ID NO: 527759 - RNA, 18 nt, Artificial Sequence
  Synthetic
ccagacuuacuucugacc

SEQ ID NO: 527760 - RNA, 19 nt, Artificial Sequence
  Synthetic
uccagacuuacuucugacc

SEQ ID NO: 527761 - RNA, 20 nt, Artificial Sequence
  Synthetic
cuccagacuuacuucugacc

SEQ ID NO: 527762 - RNA, 21 nt, Artificial Sequence
  Synthetic
ucuccagacuuacuucugacc

SEQ ID NO: 527763 - RNA, 22 nt, Artificial Sequence
  Synthetic
uucuccagacuuacuucugacc

SEQ ID NO: 527764 - RNA, 23 nt, Artificial Sequence
  Synthetic
uuucuccagacuuacuucugacc

SEQ ID NO: 527765 - RNA, 24 nt, Artificial Sequence
  Synthetic
uuuucuccagacuuacuucugacc

SEQ ID NO: 527766 - RNA, 18 nt, Artificial Sequence
  Synthetic
acuuuagauaaagugacc

SEQ ID NO: 527767 - RNA, 19 nt, Artificial Sequence
  Synthetic
aacuuuagauaaagugacc

SEQ ID NO: 527768 - RNA, 20 nt, Artificial Sequence
  Synthetic
uaacuuuagauaaagugacc

SEQ ID NO: 527769 - RNA, 21 nt, Artificial Sequence
  Synthetic
guaacuuuagauaaagugacc

SEQ ID NO: 527770 - RNA, 22 nt, Artificial Sequence
  Synthetic
uguaacuuuagauaaagugacc

SEQ ID NO: 527771 - RNA, 23 nt, Artificial Sequence
  Synthetic
guguaacuuuagauaaagugacc

SEQ ID NO: 527772 - RNA, 24 nt, Artificial Sequence
  Synthetic
gguguaacuuuagauaaagugacc

SEQ ID NO: 527773 - RNA, 18 nt, Artificial Sequence
  Synthetic
uuuguggagggggugacc

SEQ ID NO: 527774 - RNA, 19 nt, Artificial Sequence
  Synthetic
auuuguggagggggugacc

SEQ ID NO: 527775 - RNA, 20 nt, Artificial Sequence
  Synthetic
aauuuguggagggggugacc

SEQ ID NO: 527776 - RNA, 21 nt, Artificial Sequence
  Synthetic
caauuuguggagggggugacc

SEQ ID NO: 527777 - RNA, 22 nt, Artificial Sequence
  Synthetic
ucaauuuguggagggggugacc

SEQ ID NO: 527778 - RNA, 23 nt, Artificial Sequence
  Synthetic
uucaauuuguggagggggugacc

SEQ ID NO: 527779 - RNA, 24 nt, Artificial Sequence
  Synthetic
auucaauuuguggagggggugacc

SEQ ID NO: 527780 - RNA, 18 nt, Artificial Sequence
  Synthetic
cuuucccauggggugacc

SEQ ID NO: 527781 - RNA, 19 nt, Artificial Sequence
  Synthetic
ucuuucccauggggugacc

SEQ ID NO: 527782 - RNA, 20 nt, Artificial Sequence
  Synthetic
cucuuucccauggggugacc

SEQ ID NO: 527783 - RNA, 21 nt, Artificial Sequence
  Synthetic
gcucuuucccauggggugacc

SEQ ID NO: 527784 - RNA, 22 nt, Artificial Sequence
  Synthetic
ugcucuuucccauggggugacc

SEQ ID NO: 527785 - RNA, 23 nt, Artificial Sequence
  Synthetic
cugcucuuucccauggggugacc

SEQ ID NO: 527786 - RNA, 24 nt, Artificial Sequence
  Synthetic
ucugcucuuucccauggggugacc

SEQ ID NO: 527787 - RNA, 18 nt, Artificial Sequence
  Synthetic
cagggcucuugggugacc

SEQ ID NO: 527788 - RNA, 19 nt, Artificial Sequence
  Synthetic
ucagggcucuugggugacc

SEQ ID NO: 527789 - RNA, 20 nt, Artificial Sequence
  Synthetic
cucagggcucuugggugacc

SEQ ID NO: 527790 - RNA, 21 nt, Artificial Sequence
  Synthetic
ccucagggcucuugggugacc

SEQ ID NO: 527791 - RNA, 22 nt, Artificial Sequence
  Synthetic
uccucagggcucuugggugacc

SEQ ID NO: 527792 - RNA, 23 nt, Artificial Sequence
  Synthetic
uuccucagggcucuugggugacc

SEQ ID NO: 527793 - RNA, 24 nt, Artificial Sequence
  Synthetic
auuccucagggcucuugggugacc

SEQ ID NO: 527794 - RNA, 18 nt, Artificial Sequence
  Synthetic
acaguaguaaaugugacc

SEQ ID NO: 527795 - RNA, 19 nt, Artificial Sequence
  Synthetic
aacaguaguaaaugugacc

SEQ ID NO: 527796 - RNA, 20 nt, Artificial Sequence
  Synthetic
caacaguaguaaaugugacc

SEQ ID NO: 527797 - RNA, 21 nt, Artificial Sequence
  Synthetic
gcaacaguaguaaaugugacc

SEQ ID NO: 527798 - RNA, 22 nt, Artificial Sequence
  Synthetic
ugcaacaguaguaaaugugacc

SEQ ID NO: 527799 - RNA, 23 nt, Artificial Sequence
  Synthetic
uugcaacaguaguaaaugugacc

SEQ ID NO: 527800 - RNA, 24 nt, Artificial Sequence
  Synthetic
auugcaacaguaguaaaugugacc

SEQ ID NO: 527801 - RNA, 18 nt, Artificial Sequence
  Synthetic
uuuuaucaccaugugacc

SEQ ID NO: 527802 - RNA, 19 nt, Artificial Sequence
  Synthetic
uuuuuaucaccaugugacc

SEQ ID NO: 527803 - RNA, 20 nt, Artificial Sequence
  Synthetic
auuuuuaucaccaugugacc

SEQ ID NO: 527804 - RNA, 21 nt, Artificial Sequence
  Synthetic
cauuuuuaucaccaugugacc

SEQ ID NO: 527805 - RNA, 22 nt, Artificial Sequence
  Synthetic
ucauuuuuaucaccaugugacc

SEQ ID NO: 527806 - RNA, 23 nt, Artificial Sequence
  Synthetic
cucauuuuuaucaccaugugacc

SEQ ID NO: 527807 - RNA, 24 nt, Artificial Sequence
  Synthetic
ccucauuuuuaucaccaugugacc

SEQ ID NO: 527808 - RNA, 18 nt, Artificial Sequence
  Synthetic
cuaggguggcaugugacc

SEQ ID NO: 527809 - RNA, 19 nt, Artificial Sequence
  Synthetic
acuaggguggcaugugacc

SEQ ID NO: 527810 - RNA, 20 nt, Artificial Sequence
  Synthetic
gacuaggguggcaugugacc

SEQ ID NO: 527811 - RNA, 21 nt, Artificial Sequence
  Synthetic
ggacuaggguggcaugugacc

SEQ ID NO: 527812 - RNA, 22 nt, Artificial Sequence
  Synthetic
aggacuaggguggcaugugacc

SEQ ID NO: 527813 - RNA, 23 nt, Artificial Sequence
  Synthetic
gaggacuaggguggcaugugacc

SEQ ID NO: 527814 - RNA, 24 nt, Artificial Sequence
  Synthetic
agaggacuaggguggcaugugacc

SEQ ID NO: 527815 - RNA, 18 nt, Artificial Sequence
  Synthetic
ugaaaaguggaugugacc

SEQ ID NO: 527816 - RNA, 19 nt, Artificial Sequence
  Synthetic
cugaaaaguggaugugacc

SEQ ID NO: 527817 - RNA, 20 nt, Artificial Sequence
  Synthetic
gcugaaaaguggaugugacc

SEQ ID NO: 527818 - RNA, 21 nt, Artificial Sequence
  Synthetic
ugcugaaaaguggaugugacc

SEQ ID NO: 527819 - RNA, 22 nt, Artificial Sequence
  Synthetic
augcugaaaaguggaugugacc

SEQ ID NO: 527820 - RNA, 23 nt, Artificial Sequence
  Synthetic
aaugcugaaaaguggaugugacc

SEQ ID NO: 527821 - RNA, 24 nt, Artificial Sequence
  Synthetic
aaaugcugaaaaguggaugugacc

SEQ ID NO: 527822 - RNA, 18 nt, Artificial Sequence
  Synthetic
aaucuccaugaugugacc

SEQ ID NO: 527823 - RNA, 19 nt, Artificial Sequence
  Synthetic
caaucuccaugaugugacc

SEQ ID NO: 527824 - RNA, 20 nt, Artificial Sequence
  Synthetic
gcaaucuccaugaugugacc

SEQ ID NO: 527825 - RNA, 21 nt, Artificial Sequence
  Synthetic
ugcaaucuccaugaugugacc

SEQ ID NO: 527826 - RNA, 22 nt, Artificial Sequence
  Synthetic
gugcaaucuccaugaugugacc

SEQ ID NO: 527827 - RNA, 23 nt, Artificial Sequence
  Synthetic
ugugcaaucuccaugaugugacc

SEQ ID NO: 527828 - RNA, 24 nt, Artificial Sequence
  Synthetic
gugugcaaucuccaugaugugacc

SEQ ID NO: 527829 - RNA, 18 nt, Artificial Sequence
  Synthetic
uauaaguaaaaauugacc

SEQ ID NO: 527830 - RNA, 19 nt, Artificial Sequence
  Synthetic
uuauaaguaaaaauugacc

SEQ ID NO: 527831 - RNA, 20 nt, Artificial Sequence
  Synthetic
uuuauaaguaaaaauugacc

SEQ ID NO: 527832 - RNA, 21 nt, Artificial Sequence
  Synthetic
auuuauaaguaaaaauugacc

SEQ ID NO: 527833 - RNA, 22 nt, Artificial Sequence
  Synthetic
aauuuauaaguaaaaauugacc

SEQ ID NO: 527834 - RNA, 23 nt, Artificial Sequence
  Synthetic
caauuuauaaguaaaaauugacc

SEQ ID NO: 527835 - RNA, 24 nt, Artificial Sequence
  Synthetic
acaauuuauaaguaaaaauugacc

SEQ ID NO: 527836 - RNA, 18 nt, Artificial Sequence
  Synthetic
aaaugaagcgacuugacc

SEQ ID NO: 527837 - RNA, 19 nt, Artificial Sequence
  Synthetic
aaaaugaagcgacuugacc

SEQ ID NO: 527838 - RNA, 20 nt, Artificial Sequence
  Synthetic
caaaaugaagcgacuugacc

SEQ ID NO: 527839 - RNA, 21 nt, Artificial Sequence
  Synthetic
ucaaaaugaagcgacuugacc

SEQ ID NO: 527840 - RNA, 22 nt, Artificial Sequence
  Synthetic
aucaaaaugaagcgacuugacc

SEQ ID NO: 527841 - RNA, 23 nt, Artificial Sequence
  Synthetic
uaucaaaaugaagcgacuugacc

SEQ ID NO: 527842 - RNA, 24 nt, Artificial Sequence
  Synthetic
cuaucaaaaugaagcgacuugacc

SEQ ID NO: 527843 - RNA, 18 nt, Artificial Sequence
  Synthetic
gcaaccuccuccuugacc

SEQ ID NO: 527844 - RNA, 19 nt, Artificial Sequence
  Synthetic
ugcaaccuccuccuugacc

SEQ ID NO: 527845 - RNA, 20 nt, Artificial Sequence
  Synthetic
uugcaaccuccuccuugacc

SEQ ID NO: 527846 - RNA, 21 nt, Artificial Sequence
  Synthetic
uuugcaaccuccuccuugacc

SEQ ID NO: 527847 - RNA, 22 nt, Artificial Sequence
  Synthetic
cuuugcaaccuccuccuugacc

SEQ ID NO: 527848 - RNA, 23 nt, Artificial Sequence
  Synthetic
ucuuugcaaccuccuccuugacc

SEQ ID NO: 527849 - RNA, 24 nt, Artificial Sequence
  Synthetic
uucuuugcaaccuccuccuugacc

SEQ ID NO: 527850 - RNA, 18 nt, Artificial Sequence
  Synthetic
agcauguaaacuuugacc

SEQ ID NO: 527851 - RNA, 19 nt, Artificial Sequence
  Synthetic
aagcauguaaacuuugacc

SEQ ID NO: 527852 - RNA, 20 nt, Artificial Sequence
  Synthetic
aaagcauguaaacuuugacc

SEQ ID NO: 527853 - RNA, 21 nt, Artificial Sequence
  Synthetic
aaaagcauguaaacuuugacc

SEQ ID NO: 527854 - RNA, 22 nt, Artificial Sequence
  Synthetic
aaaaagcauguaaacuuugacc

SEQ ID NO: 527855 - RNA, 23 nt, Artificial Sequence
  Synthetic
uaaaaagcauguaaacuuugacc

SEQ ID NO: 527856 - RNA, 24 nt, Artificial Sequence
  Synthetic
auaaaaagcauguaaacuuugacc

SEQ ID NO: 527857 - RNA, 18 nt, Artificial Sequence
  Synthetic
uucuguuuggguuugacc

SEQ ID NO: 527858 - RNA, 19 nt, Artificial Sequence
  Synthetic
uuucuguuuggguuugacc

SEQ ID NO: 527859 - RNA, 20 nt, Artificial Sequence
  Synthetic
uuuucuguuuggguuugacc

SEQ ID NO: 527860 - RNA, 21 nt, Artificial Sequence
  Synthetic
guuuucuguuuggguuugacc

SEQ ID NO: 527861 - RNA, 22 nt, Artificial Sequence
  Synthetic
gguuuucuguuuggguuugacc

SEQ ID NO: 527862 - RNA, 23 nt, Artificial Sequence
  Synthetic
ugguuuucuguuuggguuugacc

SEQ ID NO: 527863 - RNA, 24 nt, Artificial Sequence
  Synthetic
augguuuucuguuuggguuugacc

SEQ ID NO: 527864 - RNA, 18 nt, Artificial Sequence
  Synthetic
aaaauacaauuuuugacc

SEQ ID NO: 527865 - RNA, 19 nt, Artificial Sequence
  Synthetic
uaaaauacaauuuuugacc

SEQ ID NO: 527866 - RNA, 20 nt, Artificial Sequence
  Synthetic
auaaaauacaauuuuugacc

SEQ ID NO: 527867 - RNA, 21 nt, Artificial Sequence
  Synthetic
uauaaaauacaauuuuugacc

SEQ ID NO: 527868 - RNA, 22 nt, Artificial Sequence
  Synthetic
cuauaaaauacaauuuuugacc

SEQ ID NO: 527869 - RNA, 23 nt, Artificial Sequence
  Synthetic
gcuauaaaauacaauuuuugacc

SEQ ID NO: 527870 - RNA, 24 nt, Artificial Sequence
  Synthetic
ggcuauaaaauacaauuuuugacc

SEQ ID NO: 527871 - RNA, 18 nt, Artificial Sequence
  Synthetic
uguaucucucaaaauacc

SEQ ID NO: 527872 - RNA, 19 nt, Artificial Sequence
  Synthetic
uuguaucucucaaaauacc

SEQ ID NO: 527873 - RNA, 20 nt, Artificial Sequence
  Synthetic
auuguaucucucaaaauacc

SEQ ID NO: 527874 - RNA, 21 nt, Artificial Sequence
  Synthetic
uauuguaucucucaaaauacc

SEQ ID NO: 527875 - RNA, 22 nt, Artificial Sequence
  Synthetic
auauuguaucucucaaaauacc

SEQ ID NO: 527876 - RNA, 23 nt, Artificial Sequence
  Synthetic
uauauuguaucucucaaaauacc

SEQ ID NO: 527877 - RNA, 24 nt, Artificial Sequence
  Synthetic
auauauuguaucucucaaaauacc

SEQ ID NO: 527878 - RNA, 19 nt, Artificial Sequence
  Synthetic
acaaagagaauaaaauacc

SEQ ID NO: 527879 - RNA, 20 nt, Artificial Sequence
  Synthetic
uacaaagagaauaaaauacc

SEQ ID NO: 527880 - RNA, 21 nt, Artificial Sequence
  Synthetic
cuacaaagagaauaaaauacc

SEQ ID NO: 527881 - RNA, 22 nt, Artificial Sequence
  Synthetic
gcuacaaagagaauaaaauacc

SEQ ID NO: 527882 - RNA, 23 nt, Artificial Sequence
  Synthetic
ugcuacaaagagaauaaaauacc

SEQ ID NO: 527883 - RNA, 24 nt, Artificial Sequence
  Synthetic
uugcuacaaagagaauaaaauacc

SEQ ID NO: 527884 - RNA, 18 nt, Artificial Sequence
  Synthetic
gagaccaacacaaauacc

SEQ ID NO: 527885 - RNA, 19 nt, Artificial Sequence
  Synthetic
ugagaccaacacaaauacc

SEQ ID NO: 527886 - RNA, 20 nt, Artificial Sequence
  Synthetic
uugagaccaacacaaauacc

SEQ ID NO: 527887 - RNA, 21 nt, Artificial Sequence
  Synthetic
uuugagaccaacacaaauacc

SEQ ID NO: 527888 - RNA, 22 nt, Artificial Sequence
  Synthetic
uuuugagaccaacacaaauacc

SEQ ID NO: 527889 - RNA, 23 nt, Artificial Sequence
  Synthetic
uuuuugagaccaacacaaauacc

SEQ ID NO: 527890 - RNA, 24 nt, Artificial Sequence
  Synthetic
guuuuugagaccaacacaaauacc

SEQ ID NO: 527891 - RNA, 18 nt, Artificial Sequence
  Synthetic
aagagggaaagaaauacc

SEQ ID NO: 527892 - RNA, 19 nt, Artificial Sequence
  Synthetic
aaagagggaaagaaauacc

SEQ ID NO: 527893 - RNA, 20 nt, Artificial Sequence
  Synthetic
gaaagagggaaagaaauacc

SEQ ID NO: 527894 - RNA, 21 nt, Artificial Sequence
  Synthetic
ugaaagagggaaagaaauacc

SEQ ID NO: 527895 - RNA, 22 nt, Artificial Sequence
  Synthetic
gugaaagagggaaagaaauacc

SEQ ID NO: 527896 - RNA, 23 nt, Artificial Sequence
  Synthetic
agugaaagagggaaagaaauacc

SEQ ID NO: 527897 - RNA, 24 nt, Artificial Sequence
  Synthetic
cagugaaagagggaaagaaauacc

SEQ ID NO: 527898 - RNA, 18 nt, Artificial Sequence
  Synthetic
uccuuaucaugaaauacc

SEQ ID NO: 527899 - RNA, 19 nt, Artificial Sequence
  Synthetic
auccuuaucaugaaauacc

SEQ ID NO: 527900 - RNA, 20 nt, Artificial Sequence
  Synthetic
aauccuuaucaugaaauacc

SEQ ID NO: 527901 - RNA, 21 nt, Artificial Sequence
  Synthetic
caauccuuaucaugaaauacc

SEQ ID NO: 527902 - RNA, 22 nt, Artificial Sequence
  Synthetic
ccaauccuuaucaugaaauacc

SEQ ID NO: 527903 - RNA, 23 nt, Artificial Sequence
  Synthetic
cccaauccuuaucaugaaauacc

SEQ ID NO: 527904 - RNA, 24 nt, Artificial Sequence
  Synthetic
gcccaauccuuaucaugaaauacc

SEQ ID NO: 527905 - RNA, 18 nt, Artificial Sequence
  Synthetic
uaaaguuauguaaauacc

SEQ ID NO: 527906 - RNA, 19 nt, Artificial Sequence
  Synthetic
auaaaguuauguaaauacc

SEQ ID NO: 527907 - RNA, 20 nt, Artificial Sequence
  Synthetic
aauaaaguuauguaaauacc

SEQ ID NO: 527908 - RNA, 21 nt, Artificial Sequence
  Synthetic
aaauaaaguuauguaaauacc

SEQ ID NO: 527909 - RNA, 22 nt, Artificial Sequence
  Synthetic
uaaauaaaguuauguaaauacc

SEQ ID NO: 527910 - RNA, 23 nt, Artificial Sequence
  Synthetic
uuaaauaaaguuauguaaauacc

SEQ ID NO: 527911 - RNA, 24 nt, Artificial Sequence
  Synthetic
uuuaaauaaaguuauguaaauacc

SEQ ID NO: 527912 - RNA, 18 nt, Artificial Sequence
  Synthetic
agccaaaaauuaaauacc

SEQ ID NO: 527913 - RNA, 19 nt, Artificial Sequence
  Synthetic
uagccaaaaauuaaauacc

SEQ ID NO: 527914 - RNA, 20 nt, Artificial Sequence
  Synthetic
uuagccaaaaauuaaauacc

SEQ ID NO: 527915 - RNA, 21 nt, Artificial Sequence
  Synthetic
cuuagccaaaaauuaaauacc

SEQ ID NO: 527916 - RNA, 22 nt, Artificial Sequence
  Synthetic
ccuuagccaaaaauuaaauacc

SEQ ID NO: 527917 - RNA, 23 nt, Artificial Sequence
  Synthetic
accuuagccaaaaauuaaauacc

SEQ ID NO: 527918 - RNA, 24 nt, Artificial Sequence
  Synthetic
uaccuuagccaaaaauuaaauacc

SEQ ID NO: 527919 - RNA, 18 nt, Artificial Sequence
  Synthetic
uuggucacagccaauacc

SEQ ID NO: 527920 - RNA, 19 nt, Artificial Sequence
  Synthetic
auuggucacagccaauacc

SEQ ID NO: 527921 - RNA, 20 nt, Artificial Sequence
  Synthetic
aauuggucacagccaauacc

SEQ ID NO: 527922 - RNA, 21 nt, Artificial Sequence
  Synthetic
uaauuggucacagccaauacc

SEQ ID NO: 527923 - RNA, 22 nt, Artificial Sequence
  Synthetic
auaauuggucacagccaauacc

SEQ ID NO: 527924 - RNA, 23 nt, Artificial Sequence
  Synthetic
aauaauuggucacagccaauacc

SEQ ID NO: 527925 - RNA, 24 nt, Artificial Sequence
  Synthetic
uaauaauuggucacagccaauacc

SEQ ID NO: 527926 - RNA, 18 nt, Artificial Sequence
  Synthetic
auaaccaguugcaauacc

SEQ ID NO: 527927 - RNA, 19 nt, Artificial Sequence
  Synthetic
aauaaccaguugcaauacc

SEQ ID NO: 527928 - RNA, 20 nt, Artificial Sequence
  Synthetic
gaauaaccaguugcaauacc

SEQ ID NO: 527929 - RNA, 21 nt, Artificial Sequence
  Synthetic
ugaauaaccaguugcaauacc

SEQ ID NO: 527930 - RNA, 22 nt, Artificial Sequence
  Synthetic
uugaauaaccaguugcaauacc

SEQ ID NO: 527931 - RNA, 23 nt, Artificial Sequence
  Synthetic
guugaauaaccaguugcaauacc

SEQ ID NO: 527932 - RNA, 24 nt, Artificial Sequence
  Synthetic
cguugaauaaccaguugcaauacc

SEQ ID NO: 527933 - RNA, 18 nt, Artificial Sequence
  Synthetic
aacuguucccauaauacc

SEQ ID NO: 527934 - RNA, 19 nt, Artificial Sequence
  Synthetic
caacuguucccauaauacc

SEQ ID NO: 527935 - RNA, 20 nt, Artificial Sequence
  Synthetic
acaacuguucccauaauacc

SEQ ID NO: 527936 - RNA, 21 nt, Artificial Sequence
  Synthetic
cacaacuguucccauaauacc

SEQ ID NO: 527937 - RNA, 22 nt, Artificial Sequence
  Synthetic
acacaacuguucccauaauacc

SEQ ID NO: 527938 - RNA, 23 nt, Artificial Sequence
  Synthetic
gacacaacuguucccauaauacc

SEQ ID NO: 527939 - RNA, 24 nt, Artificial Sequence
  Synthetic
agacacaacuguucccauaauacc

SEQ ID NO: 527940 - RNA, 18 nt, Artificial Sequence
  Synthetic
acuacuaugaaccauacc

SEQ ID NO: 527941 - RNA, 19 nt, Artificial Sequence
  Synthetic
gacuacuaugaaccauacc

SEQ ID NO: 527942 - RNA, 20 nt, Artificial Sequence
  Synthetic
ggacuacuaugaaccauacc

SEQ ID NO: 527943 - RNA, 21 nt, Artificial Sequence
  Synthetic
uggacuacuaugaaccauacc

SEQ ID NO: 527944 - RNA, 22 nt, Artificial Sequence
  Synthetic
guggacuacuaugaaccauacc

SEQ ID NO: 527945 - RNA, 23 nt, Artificial Sequence
  Synthetic
uguggacuacuaugaaccauacc

SEQ ID NO: 527946 - RNA, 24 nt, Artificial Sequence
  Synthetic
auguggacuacuaugaaccauacc

SEQ ID NO: 527947 - RNA, 18 nt, Artificial Sequence
  Synthetic
aaauaugaagcccauacc

SEQ ID NO: 527948 - RNA, 19 nt, Artificial Sequence
  Synthetic
aaaauaugaagcccauacc

SEQ ID NO: 527949 - RNA, 20 nt, Artificial Sequence
  Synthetic
aaaaauaugaagcccauacc

SEQ ID NO: 527950 - RNA, 21 nt, Artificial Sequence
  Synthetic
aaaaaauaugaagcccauacc

SEQ ID NO: 527951 - RNA, 22 nt, Artificial Sequence
  Synthetic
caaaaaauaugaagcccauacc

SEQ ID NO: 527952 - RNA, 23 nt, Artificial Sequence
  Synthetic
ucaaaaaauaugaagcccauacc

SEQ ID NO: 527953 - RNA, 24 nt, Artificial Sequence
  Synthetic
uucaaaaaauaugaagcccauacc

SEQ ID NO: 527954 - RNA, 18 nt, Artificial Sequence
  Synthetic
auccugcagguucauacc

SEQ ID NO: 527955 - RNA, 19 nt, Artificial Sequence
  Synthetic
aauccugcagguucauacc

SEQ ID NO: 527956 - RNA, 20 nt, Artificial Sequence
  Synthetic
gaauccugcagguucauacc

SEQ ID NO: 527957 - RNA, 21 nt, Artificial Sequence
  Synthetic
ggaauccugcagguucauacc

SEQ ID NO: 527958 - RNA, 22 nt, Artificial Sequence
  Synthetic
aggaauccugcagguucauacc

SEQ ID NO: 527959 - RNA, 23 nt, Artificial Sequence
  Synthetic
uaggaauccugcagguucauacc

SEQ ID NO: 527960 - RNA, 24 nt, Artificial Sequence
  Synthetic
guaggaauccugcagguucauacc

SEQ ID NO: 527961 - RNA, 18 nt, Artificial Sequence
  Synthetic
gcucccuuauuucauacc

SEQ ID NO: 527962 - RNA, 19 nt, Artificial Sequence
  Synthetic
ugcucccuuauuucauacc

SEQ ID NO: 527963 - RNA, 20 nt, Artificial Sequence
  Synthetic
uugcucccuuauuucauacc

SEQ ID NO: 527964 - RNA, 21 nt, Artificial Sequence
  Synthetic
uuugcucccuuauuucauacc

SEQ ID NO: 527965 - RNA, 22 nt, Artificial Sequence
  Synthetic
cuuugcucccuuauuucauacc

SEQ ID NO: 527966 - RNA, 23 nt, Artificial Sequence
  Synthetic
ucuuugcucccuuauuucauacc

SEQ ID NO: 527967 - RNA, 24 nt, Artificial Sequence
  Synthetic
gucuuugcucccuuauuucauacc

SEQ ID NO: 527968 - RNA, 18 nt, Artificial Sequence
  Synthetic
aagcucuaguuucauacc

SEQ ID NO: 527969 - RNA, 19 nt, Artificial Sequence
  Synthetic
caagcucuaguuucauacc

SEQ ID NO: 527970 - RNA, 20 nt, Artificial Sequence
  Synthetic
ucaagcucuaguuucauacc

SEQ ID NO: 527971 - RNA, 21 nt, Artificial Sequence
  Synthetic
cucaagcucuaguuucauacc

SEQ ID NO: 527972 - RNA, 22 nt, Artificial Sequence
  Synthetic
ccucaagcucuaguuucauacc

SEQ ID NO: 527973 - RNA, 23 nt, Artificial Sequence
  Synthetic
uccucaagcucuaguuucauacc

SEQ ID NO: 527974 - RNA, 24 nt, Artificial Sequence
  Synthetic
guccucaagcucuaguuucauacc

SEQ ID NO: 527975 - RNA, 18 nt, Artificial Sequence
  Synthetic
auuuuucuuaaagauacc

SEQ ID NO: 527976 - RNA, 19 nt, Artificial Sequence
  Synthetic
aauuuuucuuaaagauacc

SEQ ID NO: 527977 - RNA, 20 nt, Artificial Sequence
  Synthetic
gaauuuuucuuaaagauacc

SEQ ID NO: 527978 - RNA, 21 nt, Artificial Sequence
  Synthetic
agaauuuuucuuaaagauacc

SEQ ID NO: 527979 - RNA, 22 nt, Artificial Sequence
  Synthetic
aagaauuuuucuuaaagauacc

SEQ ID NO: 527980 - RNA, 23 nt, Artificial Sequence
  Synthetic
caagaauuuuucuuaaagauacc

SEQ ID NO: 527981 - RNA, 24 nt, Artificial Sequence
  Synthetic
ucaagaauuuuucuuaaagauacc

SEQ ID NO: 527982 - RNA, 18 nt, Artificial Sequence
  Synthetic
augcgaacaacagauacc

SEQ ID NO: 527983 - RNA, 19 nt, Artificial Sequence
  Synthetic
uaugcgaacaacagauacc

SEQ ID NO: 527984 - RNA, 20 nt, Artificial Sequence
  Synthetic
auaugcgaacaacagauacc

SEQ ID NO: 527985 - RNA, 21 nt, Artificial Sequence
  Synthetic
aauaugcgaacaacagauacc

SEQ ID NO: 527986 - RNA, 22 nt, Artificial Sequence
  Synthetic
aaauaugcgaacaacagauacc

SEQ ID NO: 527987 - RNA, 23 nt, Artificial Sequence
  Synthetic
uaaauaugcgaacaacagauacc

SEQ ID NO: 527988 - RNA, 24 nt, Artificial Sequence
  Synthetic
guaaauaugcgaacaacagauacc

SEQ ID NO: 527989 - RNA, 18 nt, Artificial Sequence
  Synthetic
acagauguaagagauacc

SEQ ID NO: 527990 - RNA, 19 nt, Artificial Sequence
  Synthetic
gacagauguaagagauacc

SEQ ID NO: 527991 - RNA, 20 nt, Artificial Sequence
  Synthetic
ggacagauguaagagauacc

SEQ ID NO: 527992 - RNA, 21 nt, Artificial Sequence
  Synthetic
uggacagauguaagagauacc

SEQ ID NO: 527993 - RNA, 22 nt, Artificial Sequence
  Synthetic
auggacagauguaagagauacc

SEQ ID NO: 527994 - RNA, 23 nt, Artificial Sequence
  Synthetic
aauggacagauguaagagauacc

SEQ ID NO: 527995 - RNA, 24 nt, Artificial Sequence
  Synthetic
aaauggacagauguaagagauacc

SEQ ID NO: 527996 - RNA, 18 nt, Artificial Sequence
  Synthetic
caguuugcucuagauacc

SEQ ID NO: 527997 - RNA, 19 nt, Artificial Sequence
  Synthetic
acaguuugcucuagauacc

SEQ ID NO: 527998 - RNA, 20 nt, Artificial Sequence
  Synthetic
uacaguuugcucuagauacc

SEQ ID NO: 527999 - RNA, 21 nt, Artificial Sequence
  Synthetic
uuacaguuugcucuagauacc

SEQ ID NO: 528000 - RNA, 22 nt, Artificial Sequence
  Synthetic
guuacaguuugcucuagauacc

SEQ ID NO: 528001 - RNA, 23 nt, Artificial Sequence
  Synthetic
aguuacaguuugcucuagauacc

SEQ ID NO: 528002 - RNA, 24 nt, Artificial Sequence
  Synthetic
caguuacaguuugcucuagauacc

SEQ ID NO: 528003 - RNA, 18 nt, Artificial Sequence
  Synthetic
aaagucaacaaggauacc

SEQ ID NO: 528004 - RNA, 19 nt, Artificial Sequence
  Synthetic
gaaagucaacaaggauacc

SEQ ID NO: 528005 - RNA, 20 nt, Artificial Sequence
  Synthetic
agaaagucaacaaggauacc

SEQ ID NO: 528006 - RNA, 21 nt, Artificial Sequence
  Synthetic
cagaaagucaacaaggauacc

SEQ ID NO: 528007 - RNA, 22 nt, Artificial Sequence
  Synthetic
acagaaagucaacaaggauacc

SEQ ID NO: 528008 - RNA, 23 nt, Artificial Sequence
  Synthetic
gacagaaagucaacaaggauacc

SEQ ID NO: 528009 - RNA, 24 nt, Artificial Sequence
  Synthetic
agacagaaagucaacaaggauacc

SEQ ID NO: 528010 - RNA, 18 nt, Artificial Sequence
  Synthetic
uauucaaauggauauacc

SEQ ID NO: 528011 - RNA, 19 nt, Artificial Sequence
  Synthetic
auauucaaauggauauacc

SEQ ID NO: 528012 - RNA, 20 nt, Artificial Sequence
  Synthetic
uauauucaaauggauauacc

SEQ ID NO: 528013 - RNA, 21 nt, Artificial Sequence
  Synthetic
auauauucaaauggauauacc

SEQ ID NO: 528014 - RNA, 22 nt, Artificial Sequence
  Synthetic
uauauauucaaauggauauacc

SEQ ID NO: 528015 - RNA, 23 nt, Artificial Sequence
  Synthetic
uuauauauucaaauggauauacc

SEQ ID NO: 528016 - RNA, 24 nt, Artificial Sequence
  Synthetic
guuauauauucaaauggauauacc

SEQ ID NO: 528017 - RNA, 18 nt, Artificial Sequence
  Synthetic
uucuuugggauauauacc

SEQ ID NO: 528018 - RNA, 19 nt, Artificial Sequence
  Synthetic
auucuuugggauauauacc

SEQ ID NO: 528019 - RNA, 20 nt, Artificial Sequence
  Synthetic
aauucuuugggauauauacc

SEQ ID NO: 528020 - RNA, 21 nt, Artificial Sequence
  Synthetic
uaauucuuugggauauauacc

SEQ ID NO: 528021 - RNA, 22 nt, Artificial Sequence
  Synthetic
uuaauucuuugggauauauacc

SEQ ID NO: 528022 - RNA, 23 nt, Artificial Sequence
  Synthetic
uuuaauucuuugggauauauacc

SEQ ID NO: 528023 - RNA, 24 nt, Artificial Sequence
  Synthetic
uuuuaauucuuugggauauauacc

SEQ ID NO: 528024 - RNA, 18 nt, Artificial Sequence
  Synthetic
uucuuuuggauauauacc

SEQ ID NO: 528025 - RNA, 19 nt, Artificial Sequence
  Synthetic
auucuuuuggauauauacc

SEQ ID NO: 528026 - RNA, 20 nt, Artificial Sequence
  Synthetic
aauucuuuuggauauauacc

SEQ ID NO: 528027 - RNA, 21 nt, Artificial Sequence
  Synthetic
aaauucuuuuggauauauacc

SEQ ID NO: 528028 - RNA, 22 nt, Artificial Sequence
  Synthetic
uaaauucuuuuggauauauacc

SEQ ID NO: 528029 - RNA, 23 nt, Artificial Sequence
  Synthetic
uuaaauucuuuuggauauauacc

SEQ ID NO: 528030 - RNA, 24 nt, Artificial Sequence
  Synthetic
uuuaaauucuuuuggauauauacc

SEQ ID NO: 528031 - RNA, 18 nt, Artificial Sequence
  Synthetic
augugguaucuauauacc

SEQ ID NO: 528032 - RNA, 19 nt, Artificial Sequence
  Synthetic
aaugugguaucuauauacc

SEQ ID NO: 528033 - RNA, 20 nt, Artificial Sequence
  Synthetic
aaaugugguaucuauauacc

SEQ ID NO: 528034 - RNA, 21 nt, Artificial Sequence
  Synthetic
aaaaugugguaucuauauacc

SEQ ID NO: 528035 - RNA, 22 nt, Artificial Sequence
  Synthetic
gaaaaugugguaucuauauacc

SEQ ID NO: 528036 - RNA, 23 nt, Artificial Sequence
  Synthetic
agaaaaugugguaucuauauacc

SEQ ID NO: 528037 - RNA, 24 nt, Artificial Sequence
  Synthetic
aagaaaaugugguaucuauauacc

SEQ ID NO: 528038 - RNA, 18 nt, Artificial Sequence
  Synthetic
uuauuuuggguauauacc

SEQ ID NO: 528039 - RNA, 19 nt, Artificial Sequence
  Synthetic
auuauuuuggguauauacc

SEQ ID NO: 528040 - RNA, 20 nt, Artificial Sequence
  Synthetic
aauuauuuuggguauauacc

SEQ ID NO: 528041 - RNA, 21 nt, Artificial Sequence
  Synthetic
caauuauuuuggguauauacc

SEQ ID NO: 528042 - RNA, 22 nt, Artificial Sequence
  Synthetic
ucaauuauuuuggguauauacc

SEQ ID NO: 528043 - RNA, 23 nt, Artificial Sequence
  Synthetic
uucaauuauuuuggguauauacc

SEQ ID NO: 528044 - RNA, 24 nt, Artificial Sequence
  Synthetic
uuucaauuauuuuggguauauacc

SEQ ID NO: 528045 - RNA, 18 nt, Artificial Sequence
  Synthetic
aaguugauuguauauacc

SEQ ID NO: 528046 - RNA, 19 nt, Artificial Sequence
  Synthetic
caaguugauuguauauacc

SEQ ID NO: 528047 - RNA, 20 nt, Artificial Sequence
  Synthetic
ucaaguugauuguauauacc

SEQ ID NO: 528048 - RNA, 21 nt, Artificial Sequence
  Synthetic
cucaaguugauuguauauacc

SEQ ID NO: 528049 - RNA, 22 nt, Artificial Sequence
  Synthetic
ucucaaguugauuguauauacc

SEQ ID NO: 528050 - RNA, 23 nt, Artificial Sequence
  Synthetic
cucucaaguugauuguauauacc

SEQ ID NO: 528051 - RNA, 24 nt, Artificial Sequence
  Synthetic
ucucucaaguugauuguauauacc

SEQ ID NO: 528052 - RNA, 18 nt, Artificial Sequence
  Synthetic
gaugaacaauuauauacc

SEQ ID NO: 528053 - RNA, 19 nt, Artificial Sequence
  Synthetic
cgaugaacaauuauauacc

SEQ ID NO: 528054 - RNA, 20 nt, Artificial Sequence
  Synthetic
acgaugaacaauuauauacc

SEQ ID NO: 528055 - RNA, 21 nt, Artificial Sequence
  Synthetic
uacgaugaacaauuauauacc

SEQ ID NO: 528056 - RNA, 22 nt, Artificial Sequence
  Synthetic
cuacgaugaacaauuauauacc

SEQ ID NO: 528057 - RNA, 23 nt, Artificial Sequence
  Synthetic
acuacgaugaacaauuauauacc

SEQ ID NO: 528058 - RNA, 24 nt, Artificial Sequence
  Synthetic
gacuacgaugaacaauuauauacc

SEQ ID NO: 528059 - RNA, 18 nt, Artificial Sequence
  Synthetic
aggaucgugagguauacc

SEQ ID NO: 528060 - RNA, 19 nt, Artificial Sequence
  Synthetic
aaggaucgugagguauacc

SEQ ID NO: 528061 - RNA, 20 nt, Artificial Sequence
  Synthetic
aaaggaucgugagguauacc

SEQ ID NO: 528062 - RNA, 21 nt, Artificial Sequence
  Synthetic
aaaaggaucgugagguauacc

SEQ ID NO: 528063 - RNA, 22 nt, Artificial Sequence
  Synthetic
uaaaaggaucgugagguauacc

SEQ ID NO: 528064 - RNA, 23 nt, Artificial Sequence
  Synthetic
cuaaaaggaucgugagguauacc

SEQ ID NO: 528065 - RNA, 24 nt, Artificial Sequence
  Synthetic
gcuaaaaggaucgugagguauacc

SEQ ID NO: 528066 - RNA, 18 nt, Artificial Sequence
  Synthetic
cuuaagguuauguauacc

SEQ ID NO: 528067 - RNA, 19 nt, Artificial Sequence
  Synthetic
ccuuaagguuauguauacc

SEQ ID NO: 528068 - RNA, 20 nt, Artificial Sequence
  Synthetic
uccuuaagguuauguauacc

SEQ ID NO: 528069 - RNA, 21 nt, Artificial Sequence
  Synthetic
cuccuuaagguuauguauacc

SEQ ID NO: 528070 - RNA, 22 nt, Artificial Sequence
  Synthetic
gcuccuuaagguuauguauacc

SEQ ID NO: 528071 - RNA, 23 nt, Artificial Sequence
  Synthetic
agcuccuuaagguuauguauacc

SEQ ID NO: 528072 - RNA, 24 nt, Artificial Sequence
  Synthetic
gagcuccuuaagguuauguauacc

SEQ ID NO: 528073 - RNA, 18 nt, Artificial Sequence
  Synthetic
ggacugagaacaacuacc

SEQ ID NO: 528074 - RNA, 19 nt, Artificial Sequence
  Synthetic
aggacugagaacaacuacc

SEQ ID NO: 528075 - RNA, 20 nt, Artificial Sequence
  Synthetic
caggacugagaacaacuacc

SEQ ID NO: 528076 - RNA, 21 nt, Artificial Sequence
  Synthetic
ucaggacugagaacaacuacc

SEQ ID NO: 528077 - RNA, 22 nt, Artificial Sequence
  Synthetic
aucaggacugagaacaacuacc

SEQ ID NO: 528078 - RNA, 23 nt, Artificial Sequence
  Synthetic
aaucaggacugagaacaacuacc

SEQ ID NO: 528079 - RNA, 24 nt, Artificial Sequence
  Synthetic
aaaucaggacugagaacaacuacc

SEQ ID NO: 528080 - RNA, 18 nt, Artificial Sequence
  Synthetic
gugggcacaagaacuacc

SEQ ID NO: 528081 - RNA, 19 nt, Artificial Sequence
  Synthetic
agugggcacaagaacuacc

SEQ ID NO: 528082 - RNA, 20 nt, Artificial Sequence
  Synthetic
aagugggcacaagaacuacc

SEQ ID NO: 528083 - RNA, 21 nt, Artificial Sequence
  Synthetic
uaagugggcacaagaacuacc

SEQ ID NO: 528084 - RNA, 22 nt, Artificial Sequence
  Synthetic
uuaagugggcacaagaacuacc

SEQ ID NO: 528085 - RNA, 23 nt, Artificial Sequence
  Synthetic
uuuaagugggcacaagaacuacc

SEQ ID NO: 528086 - RNA, 24 nt, Artificial Sequence
  Synthetic
auuuaagugggcacaagaacuacc

SEQ ID NO: 528087 - RNA, 18 nt, Artificial Sequence
  Synthetic
ucaacaucacuaacuacc

SEQ ID NO: 528088 - RNA, 19 nt, Artificial Sequence
  Synthetic
uucaacaucacuaacuacc

SEQ ID NO: 528089 - RNA, 20 nt, Artificial Sequence
  Synthetic
guucaacaucacuaacuacc

SEQ ID NO: 528090 - RNA, 21 nt, Artificial Sequence
  Synthetic
uguucaacaucacuaacuacc

SEQ ID NO: 528091 - RNA, 22 nt, Artificial Sequence
  Synthetic
auguucaacaucacuaacuacc

SEQ ID NO: 528092 - RNA, 23 nt, Artificial Sequence
  Synthetic
gauguucaacaucacuaacuacc

SEQ ID NO: 528093 - RNA, 24 nt, Artificial Sequence
  Synthetic
agauguucaacaucacuaacuacc

SEQ ID NO: 528094 - RNA, 18 nt, Artificial Sequence
  Synthetic
agugucuaauuaacuacc

SEQ ID NO: 528095 - RNA, 19 nt, Artificial Sequence
  Synthetic
uagugucuaauuaacuacc

SEQ ID NO: 528096 - RNA, 20 nt, Artificial Sequence
  Synthetic
guagugucuaauuaacuacc

SEQ ID NO: 528097 - RNA, 21 nt, Artificial Sequence
  Synthetic
aguagugucuaauuaacuacc

SEQ ID NO: 528098 - RNA, 22 nt, Artificial Sequence
  Synthetic
gaguagugucuaauuaacuacc

SEQ ID NO: 528099 - RNA, 23 nt, Artificial Sequence
  Synthetic
ggaguagugucuaauuaacuacc

SEQ ID NO: 528100 - RNA, 24 nt, Artificial Sequence
  Synthetic
aggaguagugucuaauuaacuacc

SEQ ID NO: 528101 - RNA, 18 nt, Artificial Sequence
  Synthetic
aaugcagccauuacuacc

SEQ ID NO: 528102 - RNA, 19 nt, Artificial Sequence
  Synthetic
caaugcagccauuacuacc

SEQ ID NO: 528103 - RNA, 20 nt, Artificial Sequence
  Synthetic
acaaugcagccauuacuacc

SEQ ID NO: 528104 - RNA, 21 nt, Artificial Sequence
  Synthetic
aacaaugcagccauuacuacc

SEQ ID NO: 528105 - RNA, 22 nt, Artificial Sequence
  Synthetic
aaacaaugcagccauuacuacc

SEQ ID NO: 528106 - RNA, 23 nt, Artificial Sequence
  Synthetic
aaaacaaugcagccauuacuacc

SEQ ID NO: 528107 - RNA, 24 nt, Artificial Sequence
  Synthetic
aaaaacaaugcagccauuacuacc

SEQ ID NO: 528108 - RNA, 18 nt, Artificial Sequence
  Synthetic
aaccagaugauuacuacc

SEQ ID NO: 528109 - RNA, 19 nt, Artificial Sequence
  Synthetic
aaaccagaugauuacuacc

SEQ ID NO: 528110 - RNA, 20 nt, Artificial Sequence
  Synthetic
uaaaccagaugauuacuacc

SEQ ID NO: 528111 - RNA, 21 nt, Artificial Sequence
  Synthetic
cuaaaccagaugauuacuacc

SEQ ID NO: 528112 - RNA, 22 nt, Artificial Sequence
  Synthetic
acuaaaccagaugauuacuacc

SEQ ID NO: 528113 - RNA, 23 nt, Artificial Sequence
  Synthetic
gacuaaaccagaugauuacuacc

SEQ ID NO: 528114 - RNA, 24 nt, Artificial Sequence
  Synthetic
ugacuaaaccagaugauuacuacc

SEQ ID NO: 528115 - RNA, 18 nt, Artificial Sequence
  Synthetic
uuguugaaaaaaccuacc

SEQ ID NO: 528116 - RNA, 19 nt, Artificial Sequence
  Synthetic
uuuguugaaaaaaccuacc

SEQ ID NO: 528117 - RNA, 20 nt, Artificial Sequence
  Synthetic
auuuguugaaaaaaccuacc

SEQ ID NO: 528118 - RNA, 21 nt, Artificial Sequence
  Synthetic
uauuuguugaaaaaaccuacc

SEQ ID NO: 528119 - RNA, 22 nt, Artificial Sequence
  Synthetic
auauuuguugaaaaaaccuacc

SEQ ID NO: 528120 - RNA, 23 nt, Artificial Sequence
  Synthetic
aauauuuguugaaaaaaccuacc

SEQ ID NO: 528121 - RNA, 24 nt, Artificial Sequence
  Synthetic
aaauauuuguugaaaaaaccuacc

SEQ ID NO: 528122 - RNA, 18 nt, Artificial Sequence
  Synthetic
cuuccucccuccccuacc

SEQ ID NO: 528123 - RNA, 19 nt, Artificial Sequence
  Synthetic
ucuuccucccuccccuacc

SEQ ID NO: 528124 - RNA, 20 nt, Artificial Sequence
  Synthetic
cucuuccucccuccccuacc

SEQ ID NO: 528125 - RNA, 21 nt, Artificial Sequence
  Synthetic
ucucuuccucccuccccuacc

SEQ ID NO: 528126 - RNA, 22 nt, Artificial Sequence
  Synthetic
cucucuuccucccuccccuacc

SEQ ID NO: 528127 - RNA, 23 nt, Artificial Sequence
  Synthetic
ucucucuuccucccuccccuacc

SEQ ID NO: 528128 - RNA, 24 nt, Artificial Sequence
  Synthetic
aucucucuuccucccuccccuacc

SEQ ID NO: 528129 - RNA, 18 nt, Artificial Sequence
  Synthetic
auaauuaagaagccuacc

SEQ ID NO: 528130 - RNA, 19 nt, Artificial Sequence
  Synthetic
aauaauuaagaagccuacc

SEQ ID NO: 528131 - RNA, 20 nt, Artificial Sequence
  Synthetic
gaauaauuaagaagccuacc

SEQ ID NO: 528132 - RNA, 21 nt, Artificial Sequence
  Synthetic
agaauaauuaagaagccuacc

SEQ ID NO: 528133 - RNA, 22 nt, Artificial Sequence
  Synthetic
gagaauaauuaagaagccuacc

SEQ ID NO: 528134 - RNA, 23 nt, Artificial Sequence
  Synthetic
ugagaauaauuaagaagccuacc

SEQ ID NO: 528135 - RNA, 24 nt, Artificial Sequence
  Synthetic
cugagaauaauuaagaagccuacc

SEQ ID NO: 528136 - RNA, 18 nt, Artificial Sequence
  Synthetic
gagcagagaaaagcuacc

SEQ ID NO: 528137 - RNA, 19 nt, Artificial Sequence
  Synthetic
cgagcagagaaaagcuacc

SEQ ID NO: 528138 - RNA, 20 nt, Artificial Sequence
  Synthetic
ccgagcagagaaaagcuacc

SEQ ID NO: 528139 - RNA, 21 nt, Artificial Sequence
  Synthetic
cccgagcagagaaaagcuacc

SEQ ID NO: 528140 - RNA, 22 nt, Artificial Sequence
  Synthetic
acccgagcagagaaaagcuacc

SEQ ID NO: 528141 - RNA, 23 nt, Artificial Sequence
  Synthetic
aacccgagcagagaaaagcuacc

SEQ ID NO: 528142 - RNA, 24 nt, Artificial Sequence
  Synthetic
aaacccgagcagagaaaagcuacc

SEQ ID NO: 528143 - RNA, 18 nt, Artificial Sequence
  Synthetic
guaguagucccagcuacc

SEQ ID NO: 528144 - RNA, 19 nt, Artificial Sequence
  Synthetic
uguaguagucccagcuacc

SEQ ID NO: 528145 - RNA, 20 nt, Artificial Sequence
  Synthetic
cuguaguagucccagcuacc

SEQ ID NO: 528146 - RNA, 21 nt, Artificial Sequence
  Synthetic
ccuguaguagucccagcuacc

SEQ ID NO: 528147 - RNA, 22 nt, Artificial Sequence
  Synthetic
gccuguaguagucccagcuacc

SEQ ID NO: 528148 - RNA, 23 nt, Artificial Sequence
  Synthetic
ugccuguaguagucccagcuacc

SEQ ID NO: 528149 - RNA, 24 nt, Artificial Sequence
  Synthetic
augccuguaguagucccagcuacc

SEQ ID NO: 528150 - RNA, 18 nt, Artificial Sequence
  Synthetic
ccaguagccucagcuacc

SEQ ID NO: 528151 - RNA, 19 nt, Artificial Sequence
  Synthetic
gccaguagccucagcuacc

SEQ ID NO: 528152 - RNA, 20 nt, Artificial Sequence
  Synthetic
cgccaguagccucagcuacc

SEQ ID NO: 528153 - RNA, 21 nt, Artificial Sequence
  Synthetic
gcgccaguagccucagcuacc

SEQ ID NO: 528154 - RNA, 22 nt, Artificial Sequence
  Synthetic
ugcgccaguagccucagcuacc

SEQ ID NO: 528155 - RNA, 23 nt, Artificial Sequence
  Synthetic
gugcgccaguagccucagcuacc

SEQ ID NO: 528156 - RNA, 24 nt, Artificial Sequence
  Synthetic
cgugcgccaguagccucagcuacc

SEQ ID NO: 528157 - RNA, 18 nt, Artificial Sequence
  Synthetic
uagugagugguagcuacc

SEQ ID NO: 528158 - RNA, 19 nt, Artificial Sequence
  Synthetic
uuagugagugguagcuacc

SEQ ID NO: 528159 - RNA, 20 nt, Artificial Sequence
  Synthetic
auuagugagugguagcuacc

SEQ ID NO: 528160 - RNA, 21 nt, Artificial Sequence
  Synthetic
cauuagugagugguagcuacc

SEQ ID NO: 528161 - RNA, 22 nt, Artificial Sequence
  Synthetic
ucauuagugagugguagcuacc

SEQ ID NO: 528162 - RNA, 23 nt, Artificial Sequence
  Synthetic
cucauuagugagugguagcuacc

SEQ ID NO: 528163 - RNA, 24 nt, Artificial Sequence
  Synthetic
ucucauuagugagugguagcuacc

SEQ ID NO: 528164 - RNA, 18 nt, Artificial Sequence
  Synthetic
uauucuuggaaggcuacc

SEQ ID NO: 528165 - RNA, 19 nt, Artificial Sequence
  Synthetic
cuauucuuggaaggcuacc

SEQ ID NO: 528166 - RNA, 20 nt, Artificial Sequence
  Synthetic
ccuauucuuggaaggcuacc

SEQ ID NO: 528167 - RNA, 21 nt, Artificial Sequence
  Synthetic
uccuauucuuggaaggcuacc

SEQ ID NO: 528168 - RNA, 22 nt, Artificial Sequence
  Synthetic
auccuauucuuggaaggcuacc

SEQ ID NO: 528169 - RNA, 23 nt, Artificial Sequence
  Synthetic
cauccuauucuuggaaggcuacc

SEQ ID NO: 528170 - RNA, 24 nt, Artificial Sequence
  Synthetic
acauccuauucuuggaaggcuacc

SEQ ID NO: 528171 - RNA, 18 nt, Artificial Sequence
  Synthetic
caaagaauuuaaucuacc

SEQ ID NO: 528172 - RNA, 19 nt, Artificial Sequence
  Synthetic
ccaaagaauuuaaucuacc

SEQ ID NO: 528173 - RNA, 20 nt, Artificial Sequence
  Synthetic
cccaaagaauuuaaucuacc

SEQ ID NO: 528174 - RNA, 21 nt, Artificial Sequence
  Synthetic
ccccaaagaauuuaaucuacc

SEQ ID NO: 528175 - RNA, 22 nt, Artificial Sequence
  Synthetic
gccccaaagaauuuaaucuacc

SEQ ID NO: 528176 - RNA, 23 nt, Artificial Sequence
  Synthetic
agccccaaagaauuuaaucuacc

SEQ ID NO: 528177 - RNA, 24 nt, Artificial Sequence
  Synthetic
aagccccaaagaauuuaaucuacc

SEQ ID NO: 528178 - RNA, 18 nt, Artificial Sequence
  Synthetic
uuuugggcaacaucuacc

SEQ ID NO: 528179 - RNA, 19 nt, Artificial Sequence
  Synthetic
uuuuugggcaacaucuacc

SEQ ID NO: 528180 - RNA, 20 nt, Artificial Sequence
  Synthetic
guuuuugggcaacaucuacc

SEQ ID NO: 528181 - RNA, 21 nt, Artificial Sequence
  Synthetic
uguuuuugggcaacaucuacc

SEQ ID NO: 528182 - RNA, 22 nt, Artificial Sequence
  Synthetic
cuguuuuugggcaacaucuacc

SEQ ID NO: 528183 - RNA, 23 nt, Artificial Sequence
  Synthetic
ucuguuuuugggcaacaucuacc

SEQ ID NO: 528184 - RNA, 24 nt, Artificial Sequence
  Synthetic
aucuguuuuugggcaacaucuacc

SEQ ID NO: 528185 - RNA, 18 nt, Artificial Sequence
  Synthetic
auuuauuacacaucuacc

SEQ ID NO: 528186 - RNA, 19 nt, Artificial Sequence
  Synthetic
cauuuauuacacaucuacc

SEQ ID NO: 528187 - RNA, 20 nt, Artificial Sequence
  Synthetic
acauuuauuacacaucuacc

SEQ ID NO: 528188 - RNA, 21 nt, Artificial Sequence
  Synthetic
aacauuuauuacacaucuacc

SEQ ID NO: 528189 - RNA, 22 nt, Artificial Sequence
  Synthetic
aaacauuuauuacacaucuacc

SEQ ID NO: 528190 - RNA, 23 nt, Artificial Sequence
  Synthetic
caaacauuuauuacacaucuacc

SEQ ID NO: 528191 - RNA, 24 nt, Artificial Sequence
  Synthetic
ccaaacauuuauuacacaucuacc

SEQ ID NO: 528192 - RNA, 18 nt, Artificial Sequence
  Synthetic
uuacaaauaucaucuacc

SEQ ID NO: 528193 - RNA, 19 nt, Artificial Sequence
  Synthetic
auuacaaauaucaucuacc

SEQ ID NO: 528194 - RNA, 20 nt, Artificial Sequence
  Synthetic
gauuacaaauaucaucuacc

SEQ ID NO: 528195 - RNA, 21 nt, Artificial Sequence
  Synthetic
cgauuacaaauaucaucuacc

SEQ ID NO: 528196 - RNA, 22 nt, Artificial Sequence
  Synthetic
acgauuacaaauaucaucuacc

SEQ ID NO: 528197 - RNA, 23 nt, Artificial Sequence
  Synthetic
uacgauuacaaauaucaucuacc

SEQ ID NO: 528198 - RNA, 24 nt, Artificial Sequence
  Synthetic
guacgauuacaaauaucaucuacc

SEQ ID NO: 528199 - RNA, 18 nt, Artificial Sequence
  Synthetic
ccuaacauaugaucuacc

SEQ ID NO: 528200 - RNA, 19 nt, Artificial Sequence
  Synthetic
gccuaacauaugaucuacc

SEQ ID NO: 528201 - RNA, 20 nt, Artificial Sequence
  Synthetic
ggccuaacauaugaucuacc

SEQ ID NO: 528202 - RNA, 21 nt, Artificial Sequence
  Synthetic
uggccuaacauaugaucuacc

SEQ ID NO: 528203 - RNA, 22 nt, Artificial Sequence
  Synthetic
guggccuaacauaugaucuacc

SEQ ID NO: 528204 - RNA, 23 nt, Artificial Sequence
  Synthetic
uguggccuaacauaugaucuacc

SEQ ID NO: 528205 - RNA, 24 nt, Artificial Sequence
  Synthetic
uuguggccuaacauaugaucuacc

SEQ ID NO: 528206 - RNA, 18 nt, Artificial Sequence
  Synthetic
ugauauagaauaucuacc

SEQ ID NO: 528207 - RNA, 19 nt, Artificial Sequence
  Synthetic
cugauauagaauaucuacc

SEQ ID NO: 528208 - RNA, 20 nt, Artificial Sequence
  Synthetic
acugauauagaauaucuacc

SEQ ID NO: 528209 - RNA, 21 nt, Artificial Sequence
  Synthetic
gacugauauagaauaucuacc

SEQ ID NO: 528210 - RNA, 22 nt, Artificial Sequence
  Synthetic
agacugauauagaauaucuacc

SEQ ID NO: 528211 - RNA, 23 nt, Artificial Sequence
  Synthetic
aagacugauauagaauaucuacc

SEQ ID NO: 528212 - RNA, 24 nt, Artificial Sequence
  Synthetic
uaagacugauauagaauaucuacc

SEQ ID NO: 528213 - RNA, 18 nt, Artificial Sequence
  Synthetic
ugccaauaucccucuacc

SEQ ID NO: 528214 - RNA, 19 nt, Artificial Sequence
  Synthetic
augccaauaucccucuacc

SEQ ID NO: 528215 - RNA, 20 nt, Artificial Sequence
  Synthetic
aaugccaauaucccucuacc

SEQ ID NO: 528216 - RNA, 21 nt, Artificial Sequence
  Synthetic
caaugccaauaucccucuacc

SEQ ID NO: 528217 - RNA, 22 nt, Artificial Sequence
  Synthetic
ccaaugccaauaucccucuacc

SEQ ID NO: 528218 - RNA, 23 nt, Artificial Sequence
  Synthetic
uccaaugccaauaucccucuacc

SEQ ID NO: 528219 - RNA, 24 nt, Artificial Sequence
  Synthetic
cuccaaugccaauaucccucuacc

SEQ ID NO: 528220 - RNA, 18 nt, Artificial Sequence
  Synthetic
ucauuugauuggucuacc

SEQ ID NO: 528221 - RNA, 19 nt, Artificial Sequence
  Synthetic
uucauuugauuggucuacc

SEQ ID NO: 528222 - RNA, 20 nt, Artificial Sequence
  Synthetic
auucauuugauuggucuacc

SEQ ID NO: 528223 - RNA, 21 nt, Artificial Sequence
  Synthetic
gauucauuugauuggucuacc

SEQ ID NO: 528224 - RNA, 22 nt, Artificial Sequence
  Synthetic
ugauucauuugauuggucuacc

SEQ ID NO: 528225 - RNA, 23 nt, Artificial Sequence
  Synthetic
cugauucauuugauuggucuacc

SEQ ID NO: 528226 - RNA, 24 nt, Artificial Sequence
  Synthetic
ucugauucauuugauuggucuacc

SEQ ID NO: 528227 - RNA, 18 nt, Artificial Sequence
  Synthetic
aauaaauucaugucuacc

SEQ ID NO: 528228 - RNA, 19 nt, Artificial Sequence
  Synthetic
gaauaaauucaugucuacc

SEQ ID NO: 528229 - RNA, 20 nt, Artificial Sequence
  Synthetic
ugaauaaauucaugucuacc

SEQ ID NO: 528230 - RNA, 21 nt, Artificial Sequence
  Synthetic
uugaauaaauucaugucuacc

SEQ ID NO: 528231 - RNA, 22 nt, Artificial Sequence
  Synthetic
uuugaauaaauucaugucuacc

SEQ ID NO: 528232 - RNA, 23 nt, Artificial Sequence
  Synthetic
uuuugaauaaauucaugucuacc

SEQ ID NO: 528233 - RNA, 24 nt, Artificial Sequence
  Synthetic
guuuugaauaaauucaugucuacc

SEQ ID NO: 528234 - RNA, 18 nt, Artificial Sequence
  Synthetic
acauccuuauauucuacc

SEQ ID NO: 528235 - RNA, 19 nt, Artificial Sequence
  Synthetic
aacauccuuauauucuacc

SEQ ID NO: 528236 - RNA, 20 nt, Artificial Sequence
  Synthetic
caacauccuuauauucuacc

SEQ ID NO: 528237 - RNA, 21 nt, Artificial Sequence
  Synthetic
ccaacauccuuauauucuacc

SEQ ID NO: 528238 - RNA, 22 nt, Artificial Sequence
  Synthetic
cccaacauccuuauauucuacc

SEQ ID NO: 528239 - RNA, 23 nt, Artificial Sequence
  Synthetic
ucccaacauccuuauauucuacc

SEQ ID NO: 528240 - RNA, 24 nt, Artificial Sequence
  Synthetic
gucccaacauccuuauauucuacc

SEQ ID NO: 528241 - RNA, 18 nt, Artificial Sequence
  Synthetic
aaaaguuaagcuucuacc

SEQ ID NO: 528242 - RNA, 19 nt, Artificial Sequence
  Synthetic
gaaaaguuaagcuucuacc

SEQ ID NO: 528243 - RNA, 20 nt, Artificial Sequence
  Synthetic
cgaaaaguuaagcuucuacc

SEQ ID NO: 528244 - RNA, 21 nt, Artificial Sequence
  Synthetic
ccgaaaaguuaagcuucuacc

SEQ ID NO: 528245 - RNA, 22 nt, Artificial Sequence
  Synthetic
accgaaaaguuaagcuucuacc

SEQ ID NO: 528246 - RNA, 23 nt, Artificial Sequence
  Synthetic
gaccgaaaaguuaagcuucuacc

SEQ ID NO: 528247 - RNA, 24 nt, Artificial Sequence
  Synthetic
agaccgaaaaguuaagcuucuacc

SEQ ID NO: 528248 - RNA, 18 nt, Artificial Sequence
  Synthetic
cuucacagagguucuacc

SEQ ID NO: 528249 - RNA, 19 nt, Artificial Sequence
  Synthetic
acuucacagagguucuacc

SEQ ID NO: 528250 - RNA, 20 nt, Artificial Sequence
  Synthetic
cacuucacagagguucuacc

SEQ ID NO: 528251 - RNA, 21 nt, Artificial Sequence
  Synthetic
ucacuucacagagguucuacc

SEQ ID NO: 528252 - RNA, 22 nt, Artificial Sequence
  Synthetic
uucacuucacagagguucuacc

SEQ ID NO: 528253 - RNA, 23 nt, Artificial Sequence
  Synthetic
uuucacuucacagagguucuacc

SEQ ID NO: 528254 - RNA, 24 nt, Artificial Sequence
  Synthetic
uuuucacuucacagagguucuacc

SEQ ID NO: 528255 - RNA, 18 nt, Artificial Sequence
  Synthetic
auuuaagucauuucuacc

SEQ ID NO: 528256 - RNA, 19 nt, Artificial Sequence
  Synthetic
uauuuaagucauuucuacc

SEQ ID NO: 528257 - RNA, 20 nt, Artificial Sequence
  Synthetic
uuauuuaagucauuucuacc

SEQ ID NO: 528258 - RNA, 21 nt, Artificial Sequence
  Synthetic
uuuauuuaagucauuucuacc

SEQ ID NO: 528259 - RNA, 22 nt, Artificial Sequence
  Synthetic
uuuuauuuaagucauuucuacc

SEQ ID NO: 528260 - RNA, 23 nt, Artificial Sequence
  Synthetic
cuuuuauuuaagucauuucuacc

SEQ ID NO: 528261 - RNA, 24 nt, Artificial Sequence
  Synthetic
ucuuuuauuuaagucauuucuacc

SEQ ID NO: 528262 - RNA, 18 nt, Artificial Sequence
  Synthetic
uucuguaaucuuucuacc

SEQ ID NO: 528263 - RNA, 19 nt, Artificial Sequence
  Synthetic
cuucuguaaucuuucuacc

SEQ ID NO: 528264 - RNA, 20 nt, Artificial Sequence
  Synthetic
ccuucuguaaucuuucuacc

SEQ ID NO: 528265 - RNA, 21 nt, Artificial Sequence
  Synthetic
cccuucuguaaucuuucuacc

SEQ ID NO: 528266 - RNA, 22 nt, Artificial Sequence
  Synthetic
ucccuucuguaaucuuucuacc

SEQ ID NO: 528267 - RNA, 23 nt, Artificial Sequence
  Synthetic
cucccuucuguaaucuuucuacc

SEQ ID NO: 528268 - RNA, 24 nt, Artificial Sequence
  Synthetic
ucucccuucuguaaucuuucuacc

SEQ ID NO: 528269 - RNA, 18 nt, Artificial Sequence
  Synthetic
ccaaauaucugcaguacc

SEQ ID NO: 528270 - RNA, 19 nt, Artificial Sequence
  Synthetic
uccaaauaucugcaguacc

SEQ ID NO: 528271 - RNA, 20 nt, Artificial Sequence
  Synthetic
auccaaauaucugcaguacc

SEQ ID NO: 528272 - RNA, 21 nt, Artificial Sequence
  Synthetic
gauccaaauaucugcaguacc

SEQ ID NO: 528273 - RNA, 22 nt, Artificial Sequence
  Synthetic
agauccaaauaucugcaguacc

SEQ ID NO: 528274 - RNA, 23 nt, Artificial Sequence
  Synthetic
uagauccaaauaucugcaguacc

SEQ ID NO: 528275 - RNA, 24 nt, Artificial Sequence
  Synthetic
guagauccaaauaucugcaguacc

SEQ ID NO: 528276 - RNA, 18 nt, Artificial Sequence
  Synthetic
ugagacuuauucaguacc

SEQ ID NO: 528277 - RNA, 19 nt, Artificial Sequence
  Synthetic
gugagacuuauucaguacc

SEQ ID NO: 528278 - RNA, 20 nt, Artificial Sequence
  Synthetic
cgugagacuuauucaguacc

SEQ ID NO: 528279 - RNA, 21 nt, Artificial Sequence
  Synthetic
ucgugagacuuauucaguacc

SEQ ID NO: 528280 - RNA, 22 nt, Artificial Sequence
  Synthetic
cucgugagacuuauucaguacc

SEQ ID NO: 528281 - RNA, 23 nt, Artificial Sequence
  Synthetic
ucucgugagacuuauucaguacc

SEQ ID NO: 528282 - RNA, 24 nt, Artificial Sequence
  Synthetic
aucucgugagacuuauucaguacc

SEQ ID NO: 528283 - RNA, 18 nt, Artificial Sequence
  Synthetic
cugaauggcaagcguacc

SEQ ID NO: 528284 - RNA, 19 nt, Artificial Sequence
  Synthetic
acugaauggcaagcguacc

SEQ ID NO: 528285 - RNA, 20 nt, Artificial Sequence
  Synthetic
gacugaauggcaagcguacc

SEQ ID NO: 528286 - RNA, 21 nt, Artificial Sequence
  Synthetic
ugacugaauggcaagcguacc

SEQ ID NO: 528287 - RNA, 22 nt, Artificial Sequence
  Synthetic
gugacugaauggcaagcguacc

SEQ ID NO: 528288 - RNA, 23 nt, Artificial Sequence
  Synthetic
ggugacugaauggcaagcguacc

SEQ ID NO: 528289 - RNA, 24 nt, Artificial Sequence
  Synthetic
gggugacugaauggcaagcguacc

SEQ ID NO: 528290 - RNA, 18 nt, Artificial Sequence
  Synthetic
aacagaagaguagguacc

SEQ ID NO: 528291 - RNA, 19 nt, Artificial Sequence
  Synthetic
aaacagaagaguagguacc

SEQ ID NO: 528292 - RNA, 20 nt, Artificial Sequence
  Synthetic
gaaacagaagaguagguacc

SEQ ID NO: 528293 - RNA, 21 nt, Artificial Sequence
  Synthetic
agaaacagaagaguagguacc

SEQ ID NO: 528294 - RNA, 22 nt, Artificial Sequence
  Synthetic
gagaaacagaagaguagguacc

SEQ ID NO: 528295 - RNA, 23 nt, Artificial Sequence
  Synthetic
ggagaaacagaagaguagguacc

SEQ ID NO: 528296 - RNA, 24 nt, Artificial Sequence
  Synthetic
uggagaaacagaagaguagguacc

SEQ ID NO: 528297 - RNA, 18 nt, Artificial Sequence
  Synthetic
acucagggcaaugguacc

SEQ ID NO: 528298 - RNA, 19 nt, Artificial Sequence
  Synthetic
gacucagggcaaugguacc

SEQ ID NO: 528299 - RNA, 20 nt, Artificial Sequence
  Synthetic
ugacucagggcaaugguacc

SEQ ID NO: 528300 - RNA, 21 nt, Artificial Sequence
  Synthetic
uugacucagggcaaugguacc

SEQ ID NO: 528301 - RNA, 22 nt, Artificial Sequence
  Synthetic
uuugacucagggcaaugguacc

SEQ ID NO: 528302 - RNA, 23 nt, Artificial Sequence
  Synthetic
auuugacucagggcaaugguacc

SEQ ID NO: 528303 - RNA, 24 nt, Artificial Sequence
  Synthetic
gauuugacucagggcaaugguacc

SEQ ID NO: 528304 - RNA, 18 nt, Artificial Sequence
  Synthetic
cauugcuucagugguacc

SEQ ID NO: 528305 - RNA, 19 nt, Artificial Sequence
  Synthetic
ucauugcuucagugguacc

SEQ ID NO: 528306 - RNA, 20 nt, Artificial Sequence
  Synthetic
aucauugcuucagugguacc

SEQ ID NO: 528307 - RNA, 21 nt, Artificial Sequence
  Synthetic
aaucauugcuucagugguacc

SEQ ID NO: 528308 - RNA, 22 nt, Artificial Sequence
  Synthetic
aaaucauugcuucagugguacc

SEQ ID NO: 528309 - RNA, 23 nt, Artificial Sequence
  Synthetic
gaaaucauugcuucagugguacc

SEQ ID NO: 528310 - RNA, 24 nt, Artificial Sequence
  Synthetic
ugaaaucauugcuucagugguacc

SEQ ID NO: 528311 - RNA, 18 nt, Artificial Sequence
  Synthetic
gacaguuccuaauguacc

SEQ ID NO: 528312 - RNA, 19 nt, Artificial Sequence
  Synthetic
ggacaguuccuaauguacc

SEQ ID NO: 528313 - RNA, 20 nt, Artificial Sequence
  Synthetic
uggacaguuccuaauguacc

SEQ ID NO: 528314 - RNA, 21 nt, Artificial Sequence
  Synthetic
uuggacaguuccuaauguacc

SEQ ID NO: 528315 - RNA, 22 nt, Artificial Sequence
  Synthetic
guuggacaguuccuaauguacc

SEQ ID NO: 528316 - RNA, 23 nt, Artificial Sequence
  Synthetic
uguuggacaguuccuaauguacc

SEQ ID NO: 528317 - RNA, 24 nt, Artificial Sequence
  Synthetic
guguuggacaguuccuaauguacc

SEQ ID NO: 528318 - RNA, 18 nt, Artificial Sequence
  Synthetic
gucugaugaagauguacc

SEQ ID NO: 528319 - RNA, 19 nt, Artificial Sequence
  Synthetic
ggucugaugaagauguacc

SEQ ID NO: 528320 - RNA, 20 nt, Artificial Sequence
  Synthetic
aggucugaugaagauguacc

SEQ ID NO: 528321 - RNA, 21 nt, Artificial Sequence
  Synthetic
gaggucugaugaagauguacc

SEQ ID NO: 528322 - RNA, 22 nt, Artificial Sequence
  Synthetic
agaggucugaugaagauguacc

SEQ ID NO: 528323 - RNA, 23 nt, Artificial Sequence
  Synthetic
aagaggucugaugaagauguacc

SEQ ID NO: 528324 - RNA, 24 nt, Artificial Sequence
  Synthetic
caagaggucugaugaagauguacc

SEQ ID NO: 528325 - RNA, 18 nt, Artificial Sequence
  Synthetic
guugacauaagauguacc

SEQ ID NO: 528326 - RNA, 19 nt, Artificial Sequence
  Synthetic
gguugacauaagauguacc

SEQ ID NO: 528327 - RNA, 20 nt, Artificial Sequence
  Synthetic
agguugacauaagauguacc

SEQ ID NO: 528328 - RNA, 21 nt, Artificial Sequence
  Synthetic
cagguugacauaagauguacc

SEQ ID NO: 528329 - RNA, 22 nt, Artificial Sequence
  Synthetic
gcagguugacauaagauguacc

SEQ ID NO: 528330 - RNA, 23 nt, Artificial Sequence
  Synthetic
ugcagguugacauaagauguacc

SEQ ID NO: 528331 - RNA, 24 nt, Artificial Sequence
  Synthetic
augcagguugacauaagauguacc

SEQ ID NO: 528332 - RNA, 18 nt, Artificial Sequence
  Synthetic
cugacuucuauauguacc

SEQ ID NO: 528333 - RNA, 19 nt, Artificial Sequence
  Synthetic
ccugacuucuauauguacc

SEQ ID NO: 528334 - RNA, 20 nt, Artificial Sequence
  Synthetic
accugacuucuauauguacc

SEQ ID NO: 528335 - RNA, 21 nt, Artificial Sequence
  Synthetic
caccugacuucuauauguacc

SEQ ID NO: 528336 - RNA, 22 nt, Artificial Sequence
  Synthetic
acaccugacuucuauauguacc

SEQ ID NO: 528337 - RNA, 23 nt, Artificial Sequence
  Synthetic
uacaccugacuucuauauguacc

SEQ ID NO: 528338 - RNA, 24 nt, Artificial Sequence
  Synthetic
guacaccugacuucuauauguacc

SEQ ID NO: 528339 - RNA, 18 nt, Artificial Sequence
  Synthetic
cuggaaaguuuauguacc

SEQ ID NO: 528340 - RNA, 19 nt, Artificial Sequence
  Synthetic
gcuggaaaguuuauguacc

SEQ ID NO: 528341 - RNA, 20 nt, Artificial Sequence
  Synthetic
ugcuggaaaguuuauguacc

SEQ ID NO: 528342 - RNA, 21 nt, Artificial Sequence
  Synthetic
gugcuggaaaguuuauguacc

SEQ ID NO: 528343 - RNA, 22 nt, Artificial Sequence
  Synthetic
agugcuggaaaguuuauguacc

SEQ ID NO: 528344 - RNA, 23 nt, Artificial Sequence
  Synthetic
aagugcuggaaaguuuauguacc

SEQ ID NO: 528345 - RNA, 24 nt, Artificial Sequence
  Synthetic
gaagugcuggaaaguuuauguacc

SEQ ID NO: 528346 - RNA, 18 nt, Artificial Sequence
  Synthetic
cuacaacauggguguacc

SEQ ID NO: 528347 - RNA, 19 nt, Artificial Sequence
  Synthetic
gcuacaacauggguguacc

SEQ ID NO: 528348 - RNA, 20 nt, Artificial Sequence
  Synthetic
ugcuacaacauggguguacc

SEQ ID NO: 528349 - RNA, 21 nt, Artificial Sequence
  Synthetic
augcuacaacauggguguacc

SEQ ID NO: 528350 - RNA, 22 nt, Artificial Sequence
  Synthetic
uaugcuacaacauggguguacc

SEQ ID NO: 528351 - RNA, 23 nt, Artificial Sequence
  Synthetic
cuaugcuacaacauggguguacc

SEQ ID NO: 528352 - RNA, 24 nt, Artificial Sequence
  Synthetic
ccuaugcuacaacauggguguacc

SEQ ID NO: 528353 - RNA, 18 nt, Artificial Sequence
  Synthetic
ugguaccuccauuguacc

SEQ ID NO: 528354 - RNA, 19 nt, Artificial Sequence
  Synthetic
cugguaccuccauuguacc

SEQ ID NO: 528355 - RNA, 20 nt, Artificial Sequence
  Synthetic
gcugguaccuccauuguacc

SEQ ID NO: 528356 - RNA, 21 nt, Artificial Sequence
  Synthetic
ugcugguaccuccauuguacc

SEQ ID NO: 528357 - RNA, 22 nt, Artificial Sequence
  Synthetic
augcugguaccuccauuguacc

SEQ ID NO: 528358 - RNA, 23 nt, Artificial Sequence
  Synthetic
aaugcugguaccuccauuguacc

SEQ ID NO: 528359 - RNA, 24 nt, Artificial Sequence
  Synthetic
caaugcugguaccuccauuguacc

SEQ ID NO: 528360 - RNA, 18 nt, Artificial Sequence
  Synthetic
acaggaucuauuuguacc

SEQ ID NO: 528361 - RNA, 19 nt, Artificial Sequence
  Synthetic
aacaggaucuauuuguacc

SEQ ID NO: 528362 - RNA, 20 nt, Artificial Sequence
  Synthetic
aaacaggaucuauuuguacc

SEQ ID NO: 528363 - RNA, 21 nt, Artificial Sequence
  Synthetic
uaaacaggaucuauuuguacc

SEQ ID NO: 528364 - RNA, 22 nt, Artificial Sequence
  Synthetic
guaaacaggaucuauuuguacc

SEQ ID NO: 528365 - RNA, 23 nt, Artificial Sequence
  Synthetic
aguaaacaggaucuauuuguacc

SEQ ID NO: 528366 - RNA, 24 nt, Artificial Sequence
  Synthetic
gaguaaacaggaucuauuuguacc

SEQ ID NO: 528367 - RNA, 18 nt, Artificial Sequence
  Synthetic
agugugcaucaaauuacc

SEQ ID NO: 528368 - RNA, 19 nt, Artificial Sequence
  Synthetic
uagugugcaucaaauuacc

SEQ ID NO: 528369 - RNA, 20 nt, Artificial Sequence
  Synthetic
uuagugugcaucaaauuacc

SEQ ID NO: 528370 - RNA, 21 nt, Artificial Sequence
  Synthetic
uuuagugugcaucaaauuacc

SEQ ID NO: 528371 - RNA, 22 nt, Artificial Sequence
  Synthetic
cuuuagugugcaucaaauuacc

SEQ ID NO: 528372 - RNA, 23 nt, Artificial Sequence
  Synthetic
acuuuagugugcaucaaauuacc

SEQ ID NO: 528373 - RNA, 24 nt, Artificial Sequence
  Synthetic
aacuuuagugugcaucaaauuacc

SEQ ID NO: 528374 - RNA, 18 nt, Artificial Sequence
  Synthetic
gguuaaauuuaaauuacc

SEQ ID NO: 528375 - RNA, 19 nt, Artificial Sequence
  Synthetic
cgguuaaauuuaaauuacc

SEQ ID NO: 528376 - RNA, 20 nt, Artificial Sequence
  Synthetic
acgguuaaauuuaaauuacc

SEQ ID NO: 528377 - RNA, 21 nt, Artificial Sequence
  Synthetic
cacgguuaaauuuaaauuacc

SEQ ID NO: 528378 - RNA, 22 nt, Artificial Sequence
  Synthetic
ccacgguuaaauuuaaauuacc

SEQ ID NO: 528379 - RNA, 23 nt, Artificial Sequence
  Synthetic
accacgguuaaauuuaaauuacc

SEQ ID NO: 528380 - RNA, 24 nt, Artificial Sequence
  Synthetic
uaccacgguuaaauuuaaauuacc

SEQ ID NO: 528381 - RNA, 18 nt, Artificial Sequence
  Synthetic
cuggcagguacaauuacc

SEQ ID NO: 528382 - RNA, 19 nt, Artificial Sequence
  Synthetic
acuggcagguacaauuacc

SEQ ID NO: 528383 - RNA, 20 nt, Artificial Sequence
  Synthetic
aacuggcagguacaauuacc

SEQ ID NO: 528384 - RNA, 21 nt, Artificial Sequence
  Synthetic
caacuggcagguacaauuacc

SEQ ID NO: 528385 - RNA, 22 nt, Artificial Sequence
  Synthetic
ucaacuggcagguacaauuacc

SEQ ID NO: 528386 - RNA, 23 nt, Artificial Sequence
  Synthetic
aucaacuggcagguacaauuacc

SEQ ID NO: 528387 - RNA, 24 nt, Artificial Sequence
  Synthetic
aaucaacuggcagguacaauuacc

SEQ ID NO: 528388 - RNA, 18 nt, Artificial Sequence
  Synthetic
ucacagaaugcaauuacc

SEQ ID NO: 528389 - RNA, 19 nt, Artificial Sequence
  Synthetic
cucacagaaugcaauuacc

SEQ ID NO: 528390 - RNA, 20 nt, Artificial Sequence
  Synthetic
ccucacagaaugcaauuacc

SEQ ID NO: 528391 - RNA, 21 nt, Artificial Sequence
  Synthetic
cccucacagaaugcaauuacc

SEQ ID NO: 528392 - RNA, 22 nt, Artificial Sequence
  Synthetic
gcccucacagaaugcaauuacc

SEQ ID NO: 528393 - RNA, 23 nt, Artificial Sequence
  Synthetic
agcccucacagaaugcaauuacc

SEQ ID NO: 528394 - RNA, 24 nt, Artificial Sequence
  Synthetic
aagcccucacagaaugcaauuacc

SEQ ID NO: 528395 - RNA, 18 nt, Artificial Sequence
  Synthetic
agaucuauauacauuacc

SEQ ID NO: 528396 - RNA, 19 nt, Artificial Sequence
  Synthetic
aagaucuauauacauuacc

SEQ ID NO: 528397 - RNA, 20 nt, Artificial Sequence
  Synthetic
uaagaucuauauacauuacc

SEQ ID NO: 528398 - RNA, 21 nt, Artificial Sequence
  Synthetic
auaagaucuauauacauuacc

SEQ ID NO: 528399 - RNA, 22 nt, Artificial Sequence
  Synthetic
uauaagaucuauauacauuacc

SEQ ID NO: 528400 - RNA, 23 nt, Artificial Sequence
  Synthetic
guauaagaucuauauacauuacc

SEQ ID NO: 528401 - RNA, 24 nt, Artificial Sequence
  Synthetic
uguauaagaucuauauacauuacc

SEQ ID NO: 528402 - RNA, 18 nt, Artificial Sequence
  Synthetic
gacaacauuuccauuacc

SEQ ID NO: 528403 - RNA, 19 nt, Artificial Sequence
  Synthetic
agacaacauuuccauuacc

SEQ ID NO: 528404 - RNA, 20 nt, Artificial Sequence
  Synthetic
uagacaacauuuccauuacc

SEQ ID NO: 528405 - RNA, 21 nt, Artificial Sequence
  Synthetic
auagacaacauuuccauuacc

SEQ ID NO: 528406 - RNA, 22 nt, Artificial Sequence
  Synthetic
aauagacaacauuuccauuacc

SEQ ID NO: 528407 - RNA, 23 nt, Artificial Sequence
  Synthetic
aaauagacaacauuuccauuacc

SEQ ID NO: 528408 - RNA, 24 nt, Artificial Sequence
  Synthetic
aaaauagacaacauuuccauuacc

SEQ ID NO: 528409 - RNA, 18 nt, Artificial Sequence
  Synthetic
aacauagauaagauuacc

SEQ ID NO: 528410 - RNA, 19 nt, Artificial Sequence
  Synthetic
gaacauagauaagauuacc

SEQ ID NO: 528411 - RNA, 20 nt, Artificial Sequence
  Synthetic
ggaacauagauaagauuacc

SEQ ID NO: 528412 - RNA, 21 nt, Artificial Sequence
  Synthetic
aggaacauagauaagauuacc

SEQ ID NO: 528413 - RNA, 22 nt, Artificial Sequence
  Synthetic
caggaacauagauaagauuacc

SEQ ID NO: 528414 - RNA, 23 nt, Artificial Sequence
  Synthetic
ucaggaacauagauaagauuacc

SEQ ID NO: 528415 - RNA, 24 nt, Artificial Sequence
  Synthetic
aucaggaacauagauaagauuacc

SEQ ID NO: 528416 - RNA, 18 nt, Artificial Sequence
  Synthetic
uaucaaacagagauuacc

SEQ ID NO: 528417 - RNA, 19 nt, Artificial Sequence
  Synthetic
auaucaaacagagauuacc

SEQ ID NO: 528418 - RNA, 20 nt, Artificial Sequence
  Synthetic
uauaucaaacagagauuacc

SEQ ID NO: 528419 - RNA, 21 nt, Artificial Sequence
  Synthetic
auauaucaaacagagauuacc

SEQ ID NO: 528420 - RNA, 22 nt, Artificial Sequence
  Synthetic
uauauaucaaacagagauuacc

SEQ ID NO: 528421 - RNA, 23 nt, Artificial Sequence
  Synthetic
cuauauaucaaacagagauuacc

SEQ ID NO: 528422 - RNA, 24 nt, Artificial Sequence
  Synthetic
ucuauauaucaaacagagauuacc

SEQ ID NO: 528423 - RNA, 18 nt, Artificial Sequence
  Synthetic
uaaaugaauuauauuacc

SEQ ID NO: 528424 - RNA, 19 nt, Artificial Sequence
  Synthetic
guaaaugaauuauauuacc

SEQ ID NO: 528425 - RNA, 20 nt, Artificial Sequence
  Synthetic
uguaaaugaauuauauuacc

SEQ ID NO: 528426 - RNA, 21 nt, Artificial Sequence
  Synthetic
uuguaaaugaauuauauuacc

SEQ ID NO: 528427 - RNA, 22 nt, Artificial Sequence
  Synthetic
auuguaaaugaauuauauuacc

SEQ ID NO: 528428 - RNA, 23 nt, Artificial Sequence
  Synthetic
uauuguaaaugaauuauauuacc

SEQ ID NO: 528429 - RNA, 24 nt, Artificial Sequence
  Synthetic
uuauuguaaaugaauuauauuacc

SEQ ID NO: 528430 - RNA, 18 nt, Artificial Sequence
  Synthetic
cauuccauaguuauuacc

SEQ ID NO: 528431 - RNA, 19 nt, Artificial Sequence
  Synthetic
ucauuccauaguuauuacc

SEQ ID NO: 528432 - RNA, 20 nt, Artificial Sequence
  Synthetic
uucauuccauaguuauuacc

SEQ ID NO: 528433 - RNA, 21 nt, Artificial Sequence
  Synthetic
auucauuccauaguuauuacc

SEQ ID NO: 528434 - RNA, 22 nt, Artificial Sequence
  Synthetic
uauucauuccauaguuauuacc

SEQ ID NO: 528435 - RNA, 23 nt, Artificial Sequence
  Synthetic
uuauucauuccauaguuauuacc

SEQ ID NO: 528436 - RNA, 24 nt, Artificial Sequence
  Synthetic
guuauucauuccauaguuauuacc

SEQ ID NO: 528437 - RNA, 18 nt, Artificial Sequence
  Synthetic
uuuuaaaacggacuuacc

SEQ ID NO: 528438 - RNA, 19 nt, Artificial Sequence
  Synthetic
uuuuuaaaacggacuuacc

SEQ ID NO: 528439 - RNA, 20 nt, Artificial Sequence
  Synthetic
auuuuuaaaacggacuuacc

SEQ ID NO: 528440 - RNA, 21 nt, Artificial Sequence
  Synthetic
aauuuuuaaaacggacuuacc

SEQ ID NO: 528441 - RNA, 22 nt, Artificial Sequence
  Synthetic
gaauuuuuaaaacggacuuacc

SEQ ID NO: 528442 - RNA, 23 nt, Artificial Sequence
  Synthetic
agaauuuuuaaaacggacuuacc

SEQ ID NO: 528443 - RNA, 24 nt, Artificial Sequence
  Synthetic
uagaauuuuuaaaacggacuuacc

SEQ ID NO: 528444 - RNA, 18 nt, Artificial Sequence
  Synthetic
gucggggaagaccuuacc

SEQ ID NO: 528445 - RNA, 19 nt, Artificial Sequence
  Synthetic
ggucggggaagaccuuacc

SEQ ID NO: 528446 - RNA, 20 nt, Artificial Sequence
  Synthetic
gggucggggaagaccuuacc

SEQ ID NO: 528447 - RNA, 21 nt, Artificial Sequence
  Synthetic
ggggucggggaagaccuuacc

SEQ ID NO: 528448 - RNA, 22 nt, Artificial Sequence
  Synthetic
aggggucggggaagaccuuacc

SEQ ID NO: 528449 - RNA, 23 nt, Artificial Sequence
  Synthetic
gaggggucggggaagaccuuacc

SEQ ID NO: 528450 - RNA, 24 nt, Artificial Sequence
  Synthetic
agaggggucggggaagaccuuacc

SEQ ID NO: 528451 - RNA, 18 nt, Artificial Sequence
  Synthetic
aucuaccuuggaguuacc

SEQ ID NO: 528452 - RNA, 19 nt, Artificial Sequence
  Synthetic
caucuaccuuggaguuacc

SEQ ID NO: 528453 - RNA, 20 nt, Artificial Sequence
  Synthetic
ucaucuaccuuggaguuacc

SEQ ID NO: 528454 - RNA, 21 nt, Artificial Sequence
  Synthetic
aucaucuaccuuggaguuacc

SEQ ID NO: 528455 - RNA, 22 nt, Artificial Sequence
  Synthetic
uaucaucuaccuuggaguuacc

SEQ ID NO: 528456 - RNA, 23 nt, Artificial Sequence
  Synthetic
auaucaucuaccuuggaguuacc

SEQ ID NO: 528457 - RNA, 24 nt, Artificial Sequence
  Synthetic
aauaucaucuaccuuggaguuacc

SEQ ID NO: 528458 - RNA, 18 nt, Artificial Sequence
  Synthetic
uauaauauaauaguuacc

SEQ ID NO: 528459 - RNA, 19 nt, Artificial Sequence
  Synthetic
auauaauauaauaguuacc

SEQ ID NO: 528460 - RNA, 20 nt, Artificial Sequence
  Synthetic
uauauaauauaauaguuacc

SEQ ID NO: 528461 - RNA, 21 nt, Artificial Sequence
  Synthetic
uuauauaauauaauaguuacc

SEQ ID NO: 528462 - RNA, 22 nt, Artificial Sequence
  Synthetic
uuuauauaauauaauaguuacc

SEQ ID NO: 528463 - RNA, 23 nt, Artificial Sequence
  Synthetic
auuuauauaauauaauaguuacc

SEQ ID NO: 528464 - RNA, 24 nt, Artificial Sequence
  Synthetic
uauuuauauaauauaauaguuacc

SEQ ID NO: 528465 - RNA, 18 nt, Artificial Sequence
  Synthetic
gacuagguuuuaguuacc

SEQ ID NO: 528466 - RNA, 19 nt, Artificial Sequence
  Synthetic
ggacuagguuuuaguuacc

SEQ ID NO: 528467 - RNA, 20 nt, Artificial Sequence
  Synthetic
aggacuagguuuuaguuacc

SEQ ID NO: 528468 - RNA, 21 nt, Artificial Sequence
  Synthetic
aaggacuagguuuuaguuacc

SEQ ID NO: 528469 - RNA, 22 nt, Artificial Sequence
  Synthetic
aaaggacuagguuuuaguuacc

SEQ ID NO: 528470 - RNA, 23 nt, Artificial Sequence
  Synthetic
uaaaggacuagguuuuaguuacc

SEQ ID NO: 528471 - RNA, 24 nt, Artificial Sequence
  Synthetic
uuaaaggacuagguuuuaguuacc

SEQ ID NO: 528472 - RNA, 18 nt, Artificial Sequence
  Synthetic
gcuucuucuauuguuacc

SEQ ID NO: 528473 - RNA, 19 nt, Artificial Sequence
  Synthetic
agcuucuucuauuguuacc

SEQ ID NO: 528474 - RNA, 20 nt, Artificial Sequence
  Synthetic
aagcuucuucuauuguuacc

SEQ ID NO: 528475 - RNA, 21 nt, Artificial Sequence
  Synthetic
aaagcuucuucuauuguuacc

SEQ ID NO: 528476 - RNA, 22 nt, Artificial Sequence
  Synthetic
gaaagcuucuucuauuguuacc

SEQ ID NO: 528477 - RNA, 23 nt, Artificial Sequence
  Synthetic
ugaaagcuucuucuauuguuacc

SEQ ID NO: 528478 - RNA, 24 nt, Artificial Sequence
  Synthetic
cugaaagcuucuucuauuguuacc

SEQ ID NO: 528479 - RNA, 18 nt, Artificial Sequence
  Synthetic
ccagaaaacugauuuacc

SEQ ID NO: 528480 - RNA, 19 nt, Artificial Sequence
  Synthetic
cccagaaaacugauuuacc

SEQ ID NO: 528481 - RNA, 20 nt, Artificial Sequence
  Synthetic
acccagaaaacugauuuacc

SEQ ID NO: 528482 - RNA, 21 nt, Artificial Sequence
  Synthetic
uacccagaaaacugauuuacc

SEQ ID NO: 528483 - RNA, 22 nt, Artificial Sequence
  Synthetic
auacccagaaaacugauuuacc

SEQ ID NO: 528484 - RNA, 23 nt, Artificial Sequence
  Synthetic
aauacccagaaaacugauuuacc

SEQ ID NO: 528485 - RNA, 24 nt, Artificial Sequence
  Synthetic
uaauacccagaaaacugauuuacc

SEQ ID NO: 528486 - RNA, 18 nt, Artificial Sequence
  Synthetic
uguccauagugcuuuacc

SEQ ID NO: 528487 - RNA, 19 nt, Artificial Sequence
  Synthetic
auguccauagugcuuuacc

SEQ ID NO: 528488 - RNA, 20 nt, Artificial Sequence
  Synthetic
cauguccauagugcuuuacc

SEQ ID NO: 528489 - RNA, 21 nt, Artificial Sequence
  Synthetic
ucauguccauagugcuuuacc

SEQ ID NO: 528490 - RNA, 22 nt, Artificial Sequence
  Synthetic
gucauguccauagugcuuuacc

SEQ ID NO: 528491 - RNA, 23 nt, Artificial Sequence
  Synthetic
agucauguccauagugcuuuacc

SEQ ID NO: 528492 - RNA, 24 nt, Artificial Sequence
  Synthetic
aagucauguccauagugcuuuacc

SEQ ID NO: 528493 - RNA, 18 nt, Artificial Sequence
  Synthetic
gguguaggaacuuuuacc

SEQ ID NO: 528494 - RNA, 19 nt, Artificial Sequence
  Synthetic
agguguaggaacuuuuacc

SEQ ID NO: 528495 - RNA, 20 nt, Artificial Sequence
  Synthetic
uagguguaggaacuuuuacc

SEQ ID NO: 528496 - RNA, 21 nt, Artificial Sequence
  Synthetic
auagguguaggaacuuuuacc

SEQ ID NO: 528497 - RNA, 22 nt, Artificial Sequence
  Synthetic
aauagguguaggaacuuuuacc

SEQ ID NO: 528498 - RNA, 23 nt, Artificial Sequence
  Synthetic
uaauagguguaggaacuuuuacc

SEQ ID NO: 528499 - RNA, 24 nt, Artificial Sequence
  Synthetic
auaauagguguaggaacuuuuacc

SEQ ID NO: 528500 - RNA, 18 nt, Artificial Sequence
  Synthetic
guagaaugugcuuuuacc

SEQ ID NO: 528501 - RNA, 19 nt, Artificial Sequence
  Synthetic
aguagaaugugcuuuuacc

SEQ ID NO: 528502 - RNA, 20 nt, Artificial Sequence
  Synthetic
gaguagaaugugcuuuuacc

SEQ ID NO: 528503 - RNA, 21 nt, Artificial Sequence
  Synthetic
agaguagaaugugcuuuuacc

SEQ ID NO: 528504 - RNA, 22 nt, Artificial Sequence
  Synthetic
aagaguagaaugugcuuuuacc

SEQ ID NO: 528505 - RNA, 23 nt, Artificial Sequence
  Synthetic
aaagaguagaaugugcuuuuacc

SEQ ID NO: 528506 - RNA, 24 nt, Artificial Sequence
  Synthetic
aaaagaguagaaugugcuuuuacc

SEQ ID NO: 528507 - RNA, 18 nt, Artificial Sequence
  Synthetic
auccgcugaaguuuuacc

SEQ ID NO: 528508 - RNA, 19 nt, Artificial Sequence
  Synthetic
gauccgcugaaguuuuacc

SEQ ID NO: 528509 - RNA, 20 nt, Artificial Sequence
  Synthetic
ggauccgcugaaguuuuacc

SEQ ID NO: 528510 - RNA, 21 nt, Artificial Sequence
  Synthetic
uggauccgcugaaguuuuacc

SEQ ID NO: 528511 - RNA, 22 nt, Artificial Sequence
  Synthetic
cuggauccgcugaaguuuuacc

SEQ ID NO: 528512 - RNA, 23 nt, Artificial Sequence
  Synthetic
ucuggauccgcugaaguuuuacc

SEQ ID NO: 528513 - RNA, 24 nt, Artificial Sequence
  Synthetic
cucuggauccgcugaaguuuuacc

SEQ ID NO: 528514 - RNA, 18 nt, Artificial Sequence
  Synthetic
gguagaaaaaaaaaaccc

SEQ ID NO: 528515 - RNA, 19 nt, Artificial Sequence
  Synthetic
agguagaaaaaaaaaaccc

SEQ ID NO: 528516 - RNA, 20 nt, Artificial Sequence
  Synthetic
gagguagaaaaaaaaaaccc

SEQ ID NO: 528517 - RNA, 21 nt, Artificial Sequence
  Synthetic
agagguagaaaaaaaaaaccc

SEQ ID NO: 528518 - RNA, 22 nt, Artificial Sequence
  Synthetic
aagagguagaaaaaaaaaaccc

SEQ ID NO: 528519 - RNA, 23 nt, Artificial Sequence
  Synthetic
aaagagguagaaaaaaaaaaccc

SEQ ID NO: 528520 - RNA, 24 nt, Artificial Sequence
  Synthetic
aaaagagguagaaaaaaaaaaccc

SEQ ID NO: 528521 - RNA, 18 nt, Artificial Sequence
  Synthetic
auuauaauguaaaaaccc

SEQ ID NO: 528522 - RNA, 19 nt, Artificial Sequence
  Synthetic
aauuauaauguaaaaaccc

SEQ ID NO: 528523 - RNA, 20 nt, Artificial Sequence
  Synthetic
uaauuauaauguaaaaaccc

SEQ ID NO: 528524 - RNA, 21 nt, Artificial Sequence
  Synthetic
guaauuauaauguaaaaaccc

SEQ ID NO: 528525 - RNA, 22 nt, Artificial Sequence
  Synthetic
cguaauuauaauguaaaaaccc

SEQ ID NO: 528526 - RNA, 23 nt, Artificial Sequence
  Synthetic
ccguaauuauaauguaaaaaccc

SEQ ID NO: 528527 - RNA, 24 nt, Artificial Sequence
  Synthetic
accguaauuauaauguaaaaaccc

SEQ ID NO: 528528 - RNA, 18 nt, Artificial Sequence
  Synthetic
cgaaaaccaucaaaaccc

SEQ ID NO: 528529 - RNA, 19 nt, Artificial Sequence
  Synthetic
ccgaaaaccaucaaaaccc

SEQ ID NO: 528530 - RNA, 20 nt, Artificial Sequence
  Synthetic
accgaaaaccaucaaaaccc

SEQ ID NO: 528531 - RNA, 21 nt, Artificial Sequence
  Synthetic
aaccgaaaaccaucaaaaccc

SEQ ID NO: 528532 - RNA, 22 nt, Artificial Sequence
  Synthetic
aaaccgaaaaccaucaaaaccc

SEQ ID NO: 528533 - RNA, 23 nt, Artificial Sequence
  Synthetic
aaaaccgaaaaccaucaaaaccc

SEQ ID NO: 528534 - RNA, 24 nt, Artificial Sequence
  Synthetic
uaaaaccgaaaaccaucaaaaccc

SEQ ID NO: 528535 - RNA, 18 nt, Artificial Sequence
  Synthetic
ccuaaaaccauaaaaccc

SEQ ID NO: 528536 - RNA, 19 nt, Artificial Sequence
  Synthetic
accuaaaaccauaaaaccc

SEQ ID NO: 528537 - RNA, 20 nt, Artificial Sequence
  Synthetic
gaccuaaaaccauaaaaccc

SEQ ID NO: 528538 - RNA, 21 nt, Artificial Sequence
  Synthetic
agaccuaaaaccauaaaaccc

SEQ ID NO: 528539 - RNA, 22 nt, Artificial Sequence
  Synthetic
uagaccuaaaaccauaaaaccc

SEQ ID NO: 528540 - RNA, 23 nt, Artificial Sequence
  Synthetic
uuagaccuaaaaccauaaaaccc

SEQ ID NO: 528541 - RNA, 24 nt, Artificial Sequence
  Synthetic
guuagaccuaaaaccauaaaaccc

SEQ ID NO: 528542 - RNA, 18 nt, Artificial Sequence
  Synthetic
ucuggaaaacucaaaccc

SEQ ID NO: 528543 - RNA, 19 nt, Artificial Sequence
  Synthetic
cucuggaaaacucaaaccc

SEQ ID NO: 528544 - RNA, 20 nt, Artificial Sequence
  Synthetic
gcucuggaaaacucaaaccc

SEQ ID NO: 528545 - RNA, 21 nt, Artificial Sequence
  Synthetic
ggcucuggaaaacucaaaccc

SEQ ID NO: 528546 - RNA, 22 nt, Artificial Sequence
  Synthetic
gggcucuggaaaacucaaaccc

SEQ ID NO: 528547 - RNA, 23 nt, Artificial Sequence
  Synthetic
ggggcucuggaaaacucaaaccc

SEQ ID NO: 528548 - RNA, 24 nt, Artificial Sequence
  Synthetic
gggggcucuggaaaacucaaaccc

SEQ ID NO: 528549 - RNA, 18 nt, Artificial Sequence
  Synthetic
aaacacugggcuaaaccc

SEQ ID NO: 528550 - RNA, 19 nt, Artificial Sequence
  Synthetic
uaaacacugggcuaaaccc

SEQ ID NO: 528551 - RNA, 20 nt, Artificial Sequence
  Synthetic
guaaacacugggcuaaaccc

SEQ ID NO: 528552 - RNA, 21 nt, Artificial Sequence
  Synthetic
aguaaacacugggcuaaaccc

SEQ ID NO: 528553 - RNA, 22 nt, Artificial Sequence
  Synthetic
caguaaacacugggcuaaaccc

SEQ ID NO: 528554 - RNA, 23 nt, Artificial Sequence
  Synthetic
gcaguaaacacugggcuaaaccc

SEQ ID NO: 528555 - RNA, 24 nt, Artificial Sequence
  Synthetic
cgcaguaaacacugggcuaaaccc

SEQ ID NO: 528556 - RNA, 18 nt, Artificial Sequence
  Synthetic
ggagaauggcguaaaccc

SEQ ID NO: 528557 - RNA, 19 nt, Artificial Sequence
  Synthetic
aggagaauggcguaaaccc

SEQ ID NO: 528558 - RNA, 20 nt, Artificial Sequence
  Synthetic
caggagaauggcguaaaccc

SEQ ID NO: 528559 - RNA, 21 nt, Artificial Sequence
  Synthetic
gcaggagaauggcguaaaccc

SEQ ID NO: 528560 - RNA, 22 nt, Artificial Sequence
  Synthetic
ggcaggagaauggcguaaaccc

SEQ ID NO: 528561 - RNA, 23 nt, Artificial Sequence
  Synthetic
aggcaggagaauggcguaaaccc

SEQ ID NO: 528562 - RNA, 24 nt, Artificial Sequence
  Synthetic
gaggcaggagaauggcguaaaccc

SEQ ID NO: 528563 - RNA, 18 nt, Artificial Sequence
  Synthetic
aucuaauccucccaaccc

SEQ ID NO: 528564 - RNA, 19 nt, Artificial Sequence
  Synthetic
caucuaauccucccaaccc

SEQ ID NO: 528565 - RNA, 20 nt, Artificial Sequence
  Synthetic
ucaucuaauccucccaaccc

SEQ ID NO: 528566 - RNA, 21 nt, Artificial Sequence
  Synthetic
uucaucuaauccucccaaccc

SEQ ID NO: 528567 - RNA, 22 nt, Artificial Sequence
  Synthetic
uuucaucuaauccucccaaccc

SEQ ID NO: 528568 - RNA, 23 nt, Artificial Sequence
  Synthetic
auuucaucuaauccucccaaccc

SEQ ID NO: 528569 - RNA, 24 nt, Artificial Sequence
  Synthetic
uauuucaucuaauccucccaaccc

SEQ ID NO: 528570 - RNA, 18 nt, Artificial Sequence
  Synthetic
cacuguagucuccaaccc

SEQ ID NO: 528571 - RNA, 19 nt, Artificial Sequence
  Synthetic
ucacuguagucuccaaccc

SEQ ID NO: 528572 - RNA, 20 nt, Artificial Sequence
  Synthetic
cucacuguagucuccaaccc

SEQ ID NO: 528573 - RNA, 21 nt, Artificial Sequence
  Synthetic
gcucacuguagucuccaaccc

SEQ ID NO: 528574 - RNA, 22 nt, Artificial Sequence
  Synthetic
agcucacuguagucuccaaccc

SEQ ID NO: 528575 - RNA, 23 nt, Artificial Sequence
  Synthetic
uagcucacuguagucuccaaccc

SEQ ID NO: 528576 - RNA, 24 nt, Artificial Sequence
  Synthetic
auagcucacuguagucuccaaccc

SEQ ID NO: 528577 - RNA, 18 nt, Artificial Sequence
  Synthetic
gcuuccaacuagcaaccc

SEQ ID NO: 528578 - RNA, 19 nt, Artificial Sequence
  Synthetic
ggcuuccaacuagcaaccc

SEQ ID NO: 528579 - RNA, 20 nt, Artificial Sequence
  Synthetic
aggcuuccaacuagcaaccc

SEQ ID NO: 528580 - RNA, 21 nt, Artificial Sequence
  Synthetic
gaggcuuccaacuagcaaccc

SEQ ID NO: 528581 - RNA, 22 nt, Artificial Sequence
  Synthetic
ggaggcuuccaacuagcaaccc

SEQ ID NO: 528582 - RNA, 23 nt, Artificial Sequence
  Synthetic
uggaggcuuccaacuagcaaccc

SEQ ID NO: 528583 - RNA, 24 nt, Artificial Sequence
  Synthetic
auggaggcuuccaacuagcaaccc

SEQ ID NO: 528584 - RNA, 18 nt, Artificial Sequence
  Synthetic
caggaaaacuugcaaccc

SEQ ID NO: 528585 - RNA, 19 nt, Artificial Sequence
  Synthetic
gcaggaaaacuugcaaccc

SEQ ID NO: 528586 - RNA, 20 nt, Artificial Sequence
  Synthetic
ugcaggaaaacuugcaaccc

SEQ ID NO: 528587 - RNA, 21 nt, Artificial Sequence
  Synthetic
uugcaggaaaacuugcaaccc

SEQ ID NO: 528588 - RNA, 22 nt, Artificial Sequence
  Synthetic
uuugcaggaaaacuugcaaccc

SEQ ID NO: 528589 - RNA, 23 nt, Artificial Sequence
  Synthetic
uuuugcaggaaaacuugcaaccc

SEQ ID NO: 528590 - RNA, 24 nt, Artificial Sequence
  Synthetic
uuuuugcaggaaaacuugcaaccc

SEQ ID NO: 528591 - RNA, 18 nt, Artificial Sequence
  Synthetic
cacuaucauugucaaccc

SEQ ID NO: 528592 - RNA, 19 nt, Artificial Sequence
  Synthetic
gcacuaucauugucaaccc

SEQ ID NO: 528593 - RNA, 20 nt, Artificial Sequence
  Synthetic
ggcacuaucauugucaaccc

SEQ ID NO: 528594 - RNA, 21 nt, Artificial Sequence
  Synthetic
gggcacuaucauugucaaccc

SEQ ID NO: 528595 - RNA, 22 nt, Artificial Sequence
  Synthetic
agggcacuaucauugucaaccc

SEQ ID NO: 528596 - RNA, 23 nt, Artificial Sequence
  Synthetic
cagggcacuaucauugucaaccc

SEQ ID NO: 528597 - RNA, 24 nt, Artificial Sequence
  Synthetic
gcagggcacuaucauugucaaccc

SEQ ID NO: 528598 - RNA, 18 nt, Artificial Sequence
  Synthetic
guuucucagauucaaccc

SEQ ID NO: 528599 - RNA, 19 nt, Artificial Sequence
  Synthetic
aguuucucagauucaaccc

SEQ ID NO: 528600 - RNA, 20 nt, Artificial Sequence
  Synthetic
gaguuucucagauucaaccc

SEQ ID NO: 528601 - RNA, 21 nt, Artificial Sequence
  Synthetic
ugaguuucucagauucaaccc

SEQ ID NO: 528602 - RNA, 22 nt, Artificial Sequence
  Synthetic
gugaguuucucagauucaaccc

SEQ ID NO: 528603 - RNA, 23 nt, Artificial Sequence
  Synthetic
ugugaguuucucagauucaaccc

SEQ ID NO: 528604 - RNA, 24 nt, Artificial Sequence
  Synthetic
cugugaguuucucagauucaaccc

SEQ ID NO: 528605 - RNA, 18 nt, Artificial Sequence
  Synthetic
ggagaaccgcuucaaccc

SEQ ID NO: 528606 - RNA, 19 nt, Artificial Sequence
  Synthetic
aggagaaccgcuucaaccc

SEQ ID NO: 528607 - RNA, 20 nt, Artificial Sequence
  Synthetic
caggagaaccgcuucaaccc

SEQ ID NO: 528608 - RNA, 21 nt, Artificial Sequence
  Synthetic
gcaggagaaccgcuucaaccc

SEQ ID NO: 528609 - RNA, 22 nt, Artificial Sequence
  Synthetic
ggcaggagaaccgcuucaaccc

SEQ ID NO: 528610 - RNA, 23 nt, Artificial Sequence
  Synthetic
aggcaggagaaccgcuucaaccc

SEQ ID NO: 528611 - RNA, 24 nt, Artificial Sequence
  Synthetic
gaggcaggagaaccgcuucaaccc

SEQ ID NO: 528612 - RNA, 18 nt, Artificial Sequence
  Synthetic
ugccagaggacagaaccc

SEQ ID NO: 528613 - RNA, 19 nt, Artificial Sequence
  Synthetic
augccagaggacagaaccc

SEQ ID NO: 528614 - RNA, 20 nt, Artificial Sequence
  Synthetic
aaugccagaggacagaaccc

SEQ ID NO: 528615 - RNA, 21 nt, Artificial Sequence
  Synthetic
caaugccagaggacagaaccc

SEQ ID NO: 528616 - RNA, 22 nt, Artificial Sequence
  Synthetic
acaaugccagaggacagaaccc

SEQ ID NO: 528617 - RNA, 23 nt, Artificial Sequence
  Synthetic
aacaaugccagaggacagaaccc

SEQ ID NO: 528618 - RNA, 24 nt, Artificial Sequence
  Synthetic
aaacaaugccagaggacagaaccc

SEQ ID NO: 528619 - RNA, 18 nt, Artificial Sequence
  Synthetic
ggucuucugagugaaccc

SEQ ID NO: 528620 - RNA, 19 nt, Artificial Sequence
  Synthetic
gggucuucugagugaaccc

SEQ ID NO: 528621 - RNA, 20 nt, Artificial Sequence
  Synthetic
agggucuucugagugaaccc

SEQ ID NO: 528622 - RNA, 21 nt, Artificial Sequence
  Synthetic
aagggucuucugagugaaccc

SEQ ID NO: 528623 - RNA, 22 nt, Artificial Sequence
  Synthetic
caagggucuucugagugaaccc

SEQ ID NO: 528624 - RNA, 23 nt, Artificial Sequence
  Synthetic
ccaagggucuucugagugaaccc

SEQ ID NO: 528625 - RNA, 24 nt, Artificial Sequence
  Synthetic
uccaagggucuucugagugaaccc

SEQ ID NO: 528626 - RNA, 18 nt, Artificial Sequence
  Synthetic
ggagaauggcgugaaccc

SEQ ID NO: 528627 - RNA, 19 nt, Artificial Sequence
  Synthetic
aggagaauggcgugaaccc

SEQ ID NO: 528628 - RNA, 20 nt, Artificial Sequence
  Synthetic
aaggagaauggcgugaaccc

SEQ ID NO: 528629 - RNA, 21 nt, Artificial Sequence
  Synthetic
gaaggagaauggcgugaaccc

SEQ ID NO: 528630 - RNA, 22 nt, Artificial Sequence
  Synthetic
agaaggagaauggcgugaaccc

SEQ ID NO: 528631 - RNA, 23 nt, Artificial Sequence
  Synthetic
gagaaggagaauggcgugaaccc

SEQ ID NO: 528632 - RNA, 24 nt, Artificial Sequence
  Synthetic
ggagaaggagaauggcgugaaccc

SEQ ID NO: 528633 - RNA, 22 nt, Artificial Sequence
  Synthetic
cgcaggagaauggcgugaaccc

SEQ ID NO: 528634 - RNA, 23 nt, Artificial Sequence
  Synthetic
acgcaggagaauggcgugaaccc

SEQ ID NO: 528635 - RNA, 24 nt, Artificial Sequence
  Synthetic
gacgcaggagaauggcgugaaccc

SEQ ID NO: 528636 - RNA, 18 nt, Artificial Sequence
  Synthetic
caagaaucacuugaaccc

SEQ ID NO: 528637 - RNA, 19 nt, Artificial Sequence
  Synthetic
acaagaaucacuugaaccc

SEQ ID NO: 528638 - RNA, 20 nt, Artificial Sequence
  Synthetic
cacaagaaucacuugaaccc

SEQ ID NO: 528639 - RNA, 21 nt, Artificial Sequence
  Synthetic
gcacaagaaucacuugaaccc

SEQ ID NO: 528640 - RNA, 22 nt, Artificial Sequence
  Synthetic
ggcacaagaaucacuugaaccc

SEQ ID NO: 528641 - RNA, 23 nt, Artificial Sequence
  Synthetic
aggcacaagaaucacuugaaccc

SEQ ID NO: 528642 - RNA, 24 nt, Artificial Sequence
  Synthetic
gaggcacaagaaucacuugaaccc

SEQ ID NO: 528643 - RNA, 18 nt, Artificial Sequence
  Synthetic
gaagaaucacuugaaccc

SEQ ID NO: 528644 - RNA, 19 nt, Artificial Sequence
  Synthetic
agaagaaucacuugaaccc

SEQ ID NO: 528645 - RNA, 20 nt, Artificial Sequence
  Synthetic
cagaagaaucacuugaaccc

SEQ ID NO: 528646 - RNA, 21 nt, Artificial Sequence
  Synthetic
gcagaagaaucacuugaaccc

SEQ ID NO: 528647 - RNA, 22 nt, Artificial Sequence
  Synthetic
ggcagaagaaucacuugaaccc

SEQ ID NO: 528648 - RNA, 23 nt, Artificial Sequence
  Synthetic
aggcagaagaaucacuugaaccc

SEQ ID NO: 528649 - RNA, 24 nt, Artificial Sequence
  Synthetic
gaggcagaagaaucacuugaaccc

SEQ ID NO: 528650 - RNA, 21 nt, Artificial Sequence
  Synthetic
gcaggagaaucacuugaaccc

SEQ ID NO: 528651 - RNA, 22 nt, Artificial Sequence
  Synthetic
ggcaggagaaucacuugaaccc

SEQ ID NO: 528652 - RNA, 23 nt, Artificial Sequence
  Synthetic
aggcaggagaaucacuugaaccc

SEQ ID NO: 528653 - RNA, 24 nt, Artificial Sequence
  Synthetic
gaggcaggagaaucacuugaaccc

SEQ ID NO: 528654 - RNA, 18 nt, Artificial Sequence
  Synthetic
agagaauugcuugaaccc

SEQ ID NO: 528655 - RNA, 19 nt, Artificial Sequence
  Synthetic
cagagaauugcuugaaccc

SEQ ID NO: 528656 - RNA, 20 nt, Artificial Sequence
  Synthetic
acagagaauugcuugaaccc

SEQ ID NO: 528657 - RNA, 21 nt, Artificial Sequence
  Synthetic
gacagagaauugcuugaaccc

SEQ ID NO: 528658 - RNA, 22 nt, Artificial Sequence
  Synthetic
agacagagaauugcuugaaccc

SEQ ID NO: 528659 - RNA, 23 nt, Artificial Sequence
  Synthetic
gagacagagaauugcuugaaccc

SEQ ID NO: 528660 - RNA, 24 nt, Artificial Sequence
  Synthetic
ugagacagagaauugcuugaaccc

SEQ ID NO: 528661 - RNA, 20 nt, Artificial Sequence
  Synthetic
gcagagaauugcuugaaccc

SEQ ID NO: 528662 - RNA, 21 nt, Artificial Sequence
  Synthetic
ggcagagaauugcuugaaccc

SEQ ID NO: 528663 - RNA, 22 nt, Artificial Sequence
  Synthetic
aggcagagaauugcuugaaccc

SEQ ID NO: 528664 - RNA, 23 nt, Artificial Sequence
  Synthetic
gaggcagagaauugcuugaaccc

SEQ ID NO: 528665 - RNA, 24 nt, Artificial Sequence
  Synthetic
ugaggcagagaauugcuugaaccc

SEQ ID NO: 528666 - RNA, 18 nt, Artificial Sequence
  Synthetic
caagaaucucuugaaccc

SEQ ID NO: 528667 - RNA, 19 nt, Artificial Sequence
  Synthetic
acaagaaucucuugaaccc

SEQ ID NO: 528668 - RNA, 20 nt, Artificial Sequence
  Synthetic
cacaagaaucucuugaaccc

SEQ ID NO: 528669 - RNA, 21 nt, Artificial Sequence
  Synthetic
gcacaagaaucucuugaaccc

SEQ ID NO: 528670 - RNA, 22 nt, Artificial Sequence
  Synthetic
ggcacaagaaucucuugaaccc

SEQ ID NO: 528671 - RNA, 23 nt, Artificial Sequence
  Synthetic
aggcacaagaaucucuugaaccc

SEQ ID NO: 528672 - RNA, 24 nt, Artificial Sequence
  Synthetic
aaggcacaagaaucucuugaaccc

SEQ ID NO: 528673 - RNA, 24 nt, Artificial Sequence
  Synthetic
gaggcaggagaaucauuugaaccc

SEQ ID NO: 528674 - RNA, 18 nt, Artificial Sequence
  Synthetic
aagcuaggauuugaaccc

SEQ ID NO: 528675 - RNA, 19 nt, Artificial Sequence
  Synthetic
caagcuaggauuugaaccc

SEQ ID NO: 528676 - RNA, 20 nt, Artificial Sequence
  Synthetic
ccaagcuaggauuugaaccc

SEQ ID NO: 528677 - RNA, 21 nt, Artificial Sequence
  Synthetic
accaagcuaggauuugaaccc

SEQ ID NO: 528678 - RNA, 22 nt, Artificial Sequence
  Synthetic
aaccaagcuaggauuugaaccc

SEQ ID NO: 528679 - RNA, 23 nt, Artificial Sequence
  Synthetic
uaaccaagcuaggauuugaaccc

SEQ ID NO: 528680 - RNA, 24 nt, Artificial Sequence
  Synthetic
guaaccaagcuaggauuugaaccc

SEQ ID NO: 528681 - RNA, 18 nt, Artificial Sequence
  Synthetic
ggagaaucuuuugaaccc

SEQ ID NO: 528682 - RNA, 19 nt, Artificial Sequence
  Synthetic
aggagaaucuuuugaaccc

SEQ ID NO: 528683 - RNA, 20 nt, Artificial Sequence
  Synthetic
uaggagaaucuuuugaaccc

SEQ ID NO: 528684 - RNA, 21 nt, Artificial Sequence
  Synthetic
guaggagaaucuuuugaaccc

SEQ ID NO: 528685 - RNA, 22 nt, Artificial Sequence
  Synthetic
gguaggagaaucuuuugaaccc

SEQ ID NO: 528686 - RNA, 23 nt, Artificial Sequence
  Synthetic
agguaggagaaucuuuugaaccc

SEQ ID NO: 528687 - RNA, 24 nt, Artificial Sequence
  Synthetic
gagguaggagaaucuuuugaaccc

SEQ ID NO: 528688 - RNA, 18 nt, Artificial Sequence
  Synthetic
uuuaacauaaccuaaccc

SEQ ID NO: 528689 - RNA, 19 nt, Artificial Sequence
  Synthetic
guuuaacauaaccuaaccc

SEQ ID NO: 528690 - RNA, 20 nt, Artificial Sequence
  Synthetic
uguuuaacauaaccuaaccc

SEQ ID NO: 528691 - RNA, 21 nt, Artificial Sequence
  Synthetic
cuguuuaacauaaccuaaccc

SEQ ID NO: 528692 - RNA, 22 nt, Artificial Sequence
  Synthetic
ucuguuuaacauaaccuaaccc

SEQ ID NO: 528693 - RNA, 23 nt, Artificial Sequence
  Synthetic
aucuguuuaacauaaccuaaccc

SEQ ID NO: 528694 - RNA, 24 nt, Artificial Sequence
  Synthetic
aaucuguuuaacauaaccuaaccc

SEQ ID NO: 528695 - RNA, 18 nt, Artificial Sequence
  Synthetic
acaugauugagcuaaccc

SEQ ID NO: 528696 - RNA, 19 nt, Artificial Sequence
  Synthetic
gacaugauugagcuaaccc

SEQ ID NO: 528697 - RNA, 20 nt, Artificial Sequence
  Synthetic
ugacaugauugagcuaaccc

SEQ ID NO: 528698 - RNA, 21 nt, Artificial Sequence
  Synthetic
cugacaugauugagcuaaccc

SEQ ID NO: 528699 - RNA, 22 nt, Artificial Sequence
  Synthetic
ucugacaugauugagcuaaccc

SEQ ID NO: 528700 - RNA, 23 nt, Artificial Sequence
  Synthetic
aucugacaugauugagcuaaccc

SEQ ID NO: 528701 - RNA, 24 nt, Artificial Sequence
  Synthetic
gaucugacaugauugagcuaaccc

SEQ ID NO: 528702 - RNA, 18 nt, Artificial Sequence
  Synthetic
auuaaauugcaguaaccc

SEQ ID NO: 528703 - RNA, 19 nt, Artificial Sequence
  Synthetic
aauuaaauugcaguaaccc

SEQ ID NO: 528704 - RNA, 20 nt, Artificial Sequence
  Synthetic
aaauuaaauugcaguaaccc

SEQ ID NO: 528705 - RNA, 21 nt, Artificial Sequence
  Synthetic
aaaauuaaauugcaguaaccc

SEQ ID NO: 528706 - RNA, 22 nt, Artificial Sequence
  Synthetic
gaaaauuaaauugcaguaaccc

SEQ ID NO: 528707 - RNA, 23 nt, Artificial Sequence
  Synthetic
ggaaaauuaaauugcaguaaccc

SEQ ID NO: 528708 - RNA, 24 nt, Artificial Sequence
  Synthetic
uggaaaauuaaauugcaguaaccc

SEQ ID NO: 528709 - RNA, 18 nt, Artificial Sequence
  Synthetic
auagaguuucaguaaccc

SEQ ID NO: 528710 - RNA, 19 nt, Artificial Sequence
  Synthetic
gauagaguuucaguaaccc

SEQ ID NO: 528711 - RNA, 20 nt, Artificial Sequence
  Synthetic
agauagaguuucaguaaccc

SEQ ID NO: 528712 - RNA, 21 nt, Artificial Sequence
  Synthetic
gagauagaguuucaguaaccc

SEQ ID NO: 528713 - RNA, 22 nt, Artificial Sequence
  Synthetic
agagauagaguuucaguaaccc

SEQ ID NO: 528714 - RNA, 23 nt, Artificial Sequence
  Synthetic
uagagauagaguuucaguaaccc

SEQ ID NO: 528715 - RNA, 24 nt, Artificial Sequence
  Synthetic
guagagauagaguuucaguaaccc

SEQ ID NO: 528716 - RNA, 18 nt, Artificial Sequence
  Synthetic
aagcaaacaagguaaccc

SEQ ID NO: 528717 - RNA, 19 nt, Artificial Sequence
  Synthetic
aaagcaaacaagguaaccc

SEQ ID NO: 528718 - RNA, 20 nt, Artificial Sequence
  Synthetic
gaaagcaaacaagguaaccc

SEQ ID NO: 528719 - RNA, 21 nt, Artificial Sequence
  Synthetic
ggaaagcaaacaagguaaccc

SEQ ID NO: 528720 - RNA, 22 nt, Artificial Sequence
  Synthetic
uggaaagcaaacaagguaaccc

SEQ ID NO: 528721 - RNA, 23 nt, Artificial Sequence
  Synthetic
uuggaaagcaaacaagguaaccc

SEQ ID NO: 528722 - RNA, 24 nt, Artificial Sequence
  Synthetic
uuuggaaagcaaacaagguaaccc

SEQ ID NO: 528723 - RNA, 18 nt, Artificial Sequence
  Synthetic
gaaugggguggguaaccc

SEQ ID NO: 528724 - RNA, 19 nt, Artificial Sequence
  Synthetic
agaaugggguggguaaccc

SEQ ID NO: 528725 - RNA, 20 nt, Artificial Sequence
  Synthetic
gagaaugggguggguaaccc

SEQ ID NO: 528726 - RNA, 21 nt, Artificial Sequence
  Synthetic
agagaaugggguggguaaccc

SEQ ID NO: 528727 - RNA, 22 nt, Artificial Sequence
  Synthetic
cagagaaugggguggguaaccc

SEQ ID NO: 528728 - RNA, 23 nt, Artificial Sequence
  Synthetic
ucagagaaugggguggguaaccc

SEQ ID NO: 528729 - RNA, 24 nt, Artificial Sequence
  Synthetic
aucagagaaugggguggguaaccc

SEQ ID NO: 528730 - RNA, 18 nt, Artificial Sequence
  Synthetic
ugguuuggaccaacaccc

SEQ ID NO: 528731 - RNA, 19 nt, Artificial Sequence
  Synthetic
uugguuuggaccaacaccc

SEQ ID NO: 528732 - RNA, 20 nt, Artificial Sequence
  Synthetic
auugguuuggaccaacaccc

SEQ ID NO: 528733 - RNA, 21 nt, Artificial Sequence
  Synthetic
aauugguuuggaccaacaccc

SEQ ID NO: 528734 - RNA, 22 nt, Artificial Sequence
  Synthetic
uaauugguuuggaccaacaccc

SEQ ID NO: 528735 - RNA, 23 nt, Artificial Sequence
  Synthetic
cuaauugguuuggaccaacaccc

SEQ ID NO: 528736 - RNA, 24 nt, Artificial Sequence
  Synthetic
gcuaauugguuuggaccaacaccc

SEQ ID NO: 528737 - RNA, 18 nt, Artificial Sequence
  Synthetic
aaggggaacaucacaccc

SEQ ID NO: 528738 - RNA, 19 nt, Artificial Sequence
  Synthetic
gaaggggaacaucacaccc

SEQ ID NO: 528739 - RNA, 20 nt, Artificial Sequence
  Synthetic
ggaaggggaacaucacaccc

SEQ ID NO: 528740 - RNA, 21 nt, Artificial Sequence
  Synthetic
aggaaggggaacaucacaccc

SEQ ID NO: 528741 - RNA, 22 nt, Artificial Sequence
  Synthetic
caggaaggggaacaucacaccc

SEQ ID NO: 528742 - RNA, 23 nt, Artificial Sequence
  Synthetic
acaggaaggggaacaucacaccc

SEQ ID NO: 528743 - RNA, 24 nt, Artificial Sequence
  Synthetic
cacaggaaggggaacaucacaccc

SEQ ID NO: 528744 - RNA, 18 nt, Artificial Sequence
  Synthetic
gaugugauaacgacaccc

SEQ ID NO: 528745 - RNA, 19 nt, Artificial Sequence
  Synthetic
ugaugugauaacgacaccc

SEQ ID NO: 528746 - RNA, 20 nt, Artificial Sequence
  Synthetic
uugaugugauaacgacaccc

SEQ ID NO: 528747 - RNA, 21 nt, Artificial Sequence
  Synthetic
auugaugugauaacgacaccc

SEQ ID NO: 528748 - RNA, 22 nt, Artificial Sequence
  Synthetic
aauugaugugauaacgacaccc

SEQ ID NO: 528749 - RNA, 23 nt, Artificial Sequence
  Synthetic
aaauugaugugauaacgacaccc

SEQ ID NO: 528750 - RNA, 24 nt, Artificial Sequence
  Synthetic
aaaauugaugugauaacgacaccc

SEQ ID NO: 528751 - RNA, 18 nt, Artificial Sequence
  Synthetic
aacuuaauggggacaccc

SEQ ID NO: 528752 - RNA, 19 nt, Artificial Sequence
  Synthetic
caacuuaauggggacaccc

SEQ ID NO: 528753 - RNA, 20 nt, Artificial Sequence
  Synthetic
ucaacuuaauggggacaccc

SEQ ID NO: 528754 - RNA, 21 nt, Artificial Sequence
  Synthetic
cucaacuuaauggggacaccc

SEQ ID NO: 528755 - RNA, 22 nt, Artificial Sequence
  Synthetic
ucucaacuuaauggggacaccc

SEQ ID NO: 528756 - RNA, 23 nt, Artificial Sequence
  Synthetic
cucucaacuuaauggggacaccc

SEQ ID NO: 528757 - RNA, 24 nt, Artificial Sequence
  Synthetic
acucucaacuuaauggggacaccc

SEQ ID NO: 528758 - RNA, 18 nt, Artificial Sequence
  Synthetic
cagaaagagaugacaccc

SEQ ID NO: 528759 - RNA, 19 nt, Artificial Sequence
  Synthetic
ucagaaagagaugacaccc

SEQ ID NO: 528760 - RNA, 20 nt, Artificial Sequence
  Synthetic
aucagaaagagaugacaccc

SEQ ID NO: 528761 - RNA, 21 nt, Artificial Sequence
  Synthetic
aaucagaaagagaugacaccc

SEQ ID NO: 528762 - RNA, 22 nt, Artificial Sequence
  Synthetic
gaaucagaaagagaugacaccc

SEQ ID NO: 528763 - RNA, 23 nt, Artificial Sequence
  Synthetic
agaaucagaaagagaugacaccc

SEQ ID NO: 528764 - RNA, 24 nt, Artificial Sequence
  Synthetic
cagaaucagaaagagaugacaccc

SEQ ID NO: 528765 - RNA, 18 nt, Artificial Sequence
  Synthetic
uggacuuaaauuacaccc

SEQ ID NO: 528766 - RNA, 19 nt, Artificial Sequence
  Synthetic
auggacuuaaauuacaccc

SEQ ID NO: 528767 - RNA, 20 nt, Artificial Sequence
  Synthetic
aauggacuuaaauuacaccc

SEQ ID NO: 528768 - RNA, 21 nt, Artificial Sequence
  Synthetic
caauggacuuaaauuacaccc

SEQ ID NO: 528769 - RNA, 22 nt, Artificial Sequence
  Synthetic
acaauggacuuaaauuacaccc

SEQ ID NO: 528770 - RNA, 23 nt, Artificial Sequence
  Synthetic
aacaauggacuuaaauuacaccc

SEQ ID NO: 528771 - RNA, 24 nt, Artificial Sequence
  Synthetic
aaacaauggacuuaaauuacaccc

SEQ ID NO: 528772 - RNA, 18 nt, Artificial Sequence
  Synthetic
uccaauaacauuacaccc

SEQ ID NO: 528773 - RNA, 19 nt, Artificial Sequence
  Synthetic
uuccaauaacauuacaccc

SEQ ID NO: 528774 - RNA, 20 nt, Artificial Sequence
  Synthetic
uuuccaauaacauuacaccc

SEQ ID NO: 528775 - RNA, 21 nt, Artificial Sequence
  Synthetic
guuuccaauaacauuacaccc

SEQ ID NO: 528776 - RNA, 22 nt, Artificial Sequence
  Synthetic
gguuuccaauaacauuacaccc

SEQ ID NO: 528777 - RNA, 23 nt, Artificial Sequence
  Synthetic
agguuuccaauaacauuacaccc

SEQ ID NO: 528778 - RNA, 24 nt, Artificial Sequence
  Synthetic
aagguuuccaauaacauuacaccc

SEQ ID NO: 528779 - RNA, 18 nt, Artificial Sequence
  Synthetic
uagucaggaaaaccaccc

SEQ ID NO: 528780 - RNA, 19 nt, Artificial Sequence
  Synthetic
uuagucaggaaaaccaccc

SEQ ID NO: 528781 - RNA, 20 nt, Artificial Sequence
  Synthetic
auuagucaggaaaaccaccc

SEQ ID NO: 528782 - RNA, 21 nt, Artificial Sequence
  Synthetic
gauuagucaggaaaaccaccc

SEQ ID NO: 528783 - RNA, 22 nt, Artificial Sequence
  Synthetic
ugauuagucaggaaaaccaccc

SEQ ID NO: 528784 - RNA, 23 nt, Artificial Sequence
  Synthetic
cugauuagucaggaaaaccaccc

SEQ ID NO: 528785 - RNA, 24 nt, Artificial Sequence
  Synthetic
ucugauuagucaggaaaaccaccc

SEQ ID NO: 528786 - RNA, 18 nt, Artificial Sequence
  Synthetic
ccucuguggaaaccaccc

SEQ ID NO: 528787 - RNA, 19 nt, Artificial Sequence
  Synthetic
gccucuguggaaaccaccc

SEQ ID NO: 528788 - RNA, 20 nt, Artificial Sequence
  Synthetic
agccucuguggaaaccaccc

SEQ ID NO: 528789 - RNA, 21 nt, Artificial Sequence
  Synthetic
cagccucuguggaaaccaccc

SEQ ID NO: 528790 - RNA, 22 nt, Artificial Sequence
  Synthetic
gcagccucuguggaaaccaccc

SEQ ID NO: 528791 - RNA, 23 nt, Artificial Sequence
  Synthetic
ugcagccucuguggaaaccaccc

SEQ ID NO: 528792 - RNA, 24 nt, Artificial Sequence
  Synthetic
uugcagccucuguggaaaccaccc

SEQ ID NO: 528793 - RNA, 18 nt, Artificial Sequence
  Synthetic
ccaccuccaccuccaccc

SEQ ID NO: 528794 - RNA, 19 nt, Artificial Sequence
  Synthetic
gccaccuccaccuccaccc

SEQ ID NO: 528795 - RNA, 20 nt, Artificial Sequence
  Synthetic
ugccaccuccaccuccaccc

SEQ ID NO: 528796 - RNA, 21 nt, Artificial Sequence
  Synthetic
cugccaccuccaccuccaccc

SEQ ID NO: 528797 - RNA, 22 nt, Artificial Sequence
  Synthetic
acugccaccuccaccuccaccc

SEQ ID NO: 528798 - RNA, 23 nt, Artificial Sequence
  Synthetic
uacugccaccuccaccuccaccc

SEQ ID NO: 528799 - RNA, 24 nt, Artificial Sequence
  Synthetic
cuacugccaccuccaccuccaccc

SEQ ID NO: 528800 - RNA, 18 nt, Artificial Sequence
  Synthetic
uaaggcccaauuccaccc

SEQ ID NO: 528801 - RNA, 19 nt, Artificial Sequence
  Synthetic
uuaaggcccaauuccaccc

SEQ ID NO: 528802 - RNA, 20 nt, Artificial Sequence
  Synthetic
cuuaaggcccaauuccaccc

SEQ ID NO: 528803 - RNA, 21 nt, Artificial Sequence
  Synthetic
acuuaaggcccaauuccaccc

SEQ ID NO: 528804 - RNA, 22 nt, Artificial Sequence
  Synthetic
uacuuaaggcccaauuccaccc

SEQ ID NO: 528805 - RNA, 23 nt, Artificial Sequence
  Synthetic
cuacuuaaggcccaauuccaccc

SEQ ID NO: 528806 - RNA, 24 nt, Artificial Sequence
  Synthetic
acuacuuaaggcccaauuccaccc

SEQ ID NO: 528807 - RNA, 18 nt, Artificial Sequence
  Synthetic
ccgaccaaugaagcaccc

SEQ ID NO: 528808 - RNA, 19 nt, Artificial Sequence
  Synthetic
cccgaccaaugaagcaccc

SEQ ID NO: 528809 - RNA, 20 nt, Artificial Sequence
  Synthetic
ccccgaccaaugaagcaccc

SEQ ID NO: 528810 - RNA, 21 nt, Artificial Sequence
  Synthetic
uccccgaccaaugaagcaccc

SEQ ID NO: 528811 - RNA, 22 nt, Artificial Sequence
  Synthetic
cuccccgaccaaugaagcaccc

SEQ ID NO: 528812 - RNA, 23 nt, Artificial Sequence
  Synthetic
ccuccccgaccaaugaagcaccc

SEQ ID NO: 528813 - RNA, 24 nt, Artificial Sequence
  Synthetic
uccuccccgaccaaugaagcaccc

SEQ ID NO: 528814 - RNA, 18 nt, Artificial Sequence
  Synthetic
gcauagcuguaagcaccc

SEQ ID NO: 528815 - RNA, 19 nt, Artificial Sequence
  Synthetic
ugcauagcuguaagcaccc

SEQ ID NO: 528816 - RNA, 20 nt, Artificial Sequence
  Synthetic
augcauagcuguaagcaccc

SEQ ID NO: 528817 - RNA, 21 nt, Artificial Sequence
  Synthetic
aaugcauagcuguaagcaccc

SEQ ID NO: 528818 - RNA, 22 nt, Artificial Sequence
  Synthetic
aaaugcauagcuguaagcaccc

SEQ ID NO: 528819 - RNA, 23 nt, Artificial Sequence
  Synthetic
uaaaugcauagcuguaagcaccc

SEQ ID NO: 528820 - RNA, 24 nt, Artificial Sequence
  Synthetic
uuaaaugcauagcuguaagcaccc

SEQ ID NO: 528821 - RNA, 18 nt, Artificial Sequence
  Synthetic
cugguggcguaggcaccc

SEQ ID NO: 528822 - RNA, 19 nt, Artificial Sequence
  Synthetic
ccugguggcguaggcaccc

SEQ ID NO: 528823 - RNA, 20 nt, Artificial Sequence
  Synthetic
cccugguggcguaggcaccc

SEQ ID NO: 528824 - RNA, 21 nt, Artificial Sequence
  Synthetic
gcccugguggcguaggcaccc

SEQ ID NO: 528825 - RNA, 22 nt, Artificial Sequence
  Synthetic
ggcccugguggcguaggcaccc

SEQ ID NO: 528826 - RNA, 23 nt, Artificial Sequence
  Synthetic
gggcccugguggcguaggcaccc

SEQ ID NO: 528827 - RNA, 24 nt, Artificial Sequence
  Synthetic
agggcccugguggcguaggcaccc

SEQ ID NO: 528828 - RNA, 18 nt, Artificial Sequence
  Synthetic
gaacguggcuuugcaccc

SEQ ID NO: 528829 - RNA, 19 nt, Artificial Sequence
  Synthetic
agaacguggcuuugcaccc

SEQ ID NO: 528830 - RNA, 20 nt, Artificial Sequence
  Synthetic
uagaacguggcuuugcaccc

SEQ ID NO: 528831 - RNA, 21 nt, Artificial Sequence
  Synthetic
cuagaacguggcuuugcaccc

SEQ ID NO: 528832 - RNA, 22 nt, Artificial Sequence
  Synthetic
gcuagaacguggcuuugcaccc

SEQ ID NO: 528833 - RNA, 23 nt, Artificial Sequence
  Synthetic
agcuagaacguggcuuugcaccc

SEQ ID NO: 528834 - RNA, 24 nt, Artificial Sequence
  Synthetic
aagcuagaacguggcuuugcaccc

SEQ ID NO: 528835 - RNA, 18 nt, Artificial Sequence
  Synthetic
aacuuuuuccccucaccc

SEQ ID NO: 528836 - RNA, 19 nt, Artificial Sequence
  Synthetic
uaacuuuuuccccucaccc

SEQ ID NO: 528837 - RNA, 20 nt, Artificial Sequence
  Synthetic
cuaacuuuuuccccucaccc

SEQ ID NO: 528838 - RNA, 21 nt, Artificial Sequence
  Synthetic
ccuaacuuuuuccccucaccc

SEQ ID NO: 528839 - RNA, 22 nt, Artificial Sequence
  Synthetic
cccuaacuuuuuccccucaccc

SEQ ID NO: 528840 - RNA, 23 nt, Artificial Sequence
  Synthetic
acccuaacuuuuuccccucaccc

SEQ ID NO: 528841 - RNA, 24 nt, Artificial Sequence
  Synthetic
cacccuaacuuuuuccccucaccc

SEQ ID NO: 528842 - RNA, 18 nt, Artificial Sequence
  Synthetic
ucuuaagcauccucaccc

SEQ ID NO: 528843 - RNA, 19 nt, Artificial Sequence
  Synthetic
uucuuaagcauccucaccc

SEQ ID NO: 528844 - RNA, 20 nt, Artificial Sequence
  Synthetic
auucuuaagcauccucaccc

SEQ ID NO: 528845 - RNA, 21 nt, Artificial Sequence
  Synthetic
cauucuuaagcauccucaccc

SEQ ID NO: 528846 - RNA, 22 nt, Artificial Sequence
  Synthetic
ucauucuuaagcauccucaccc

SEQ ID NO: 528847 - RNA, 23 nt, Artificial Sequence
  Synthetic
gucauucuuaagcauccucaccc

SEQ ID NO: 528848 - RNA, 24 nt, Artificial Sequence
  Synthetic
ggucauucuuaagcauccucaccc

SEQ ID NO: 528849 - RNA, 18 nt, Artificial Sequence
  Synthetic
gacacaaacagcucaccc

SEQ ID NO: 528850 - RNA, 19 nt, Artificial Sequence
  Synthetic
ugacacaaacagcucaccc

SEQ ID NO: 528851 - RNA, 20 nt, Artificial Sequence
  Synthetic
augacacaaacagcucaccc

SEQ ID NO: 528852 - RNA, 21 nt, Artificial Sequence
  Synthetic
aaugacacaaacagcucaccc

SEQ ID NO: 528853 - RNA, 22 nt, Artificial Sequence
  Synthetic
aaaugacacaaacagcucaccc

SEQ ID NO: 528854 - RNA, 23 nt, Artificial Sequence
  Synthetic
uaaaugacacaaacagcucaccc

SEQ ID NO: 528855 - RNA, 24 nt, Artificial Sequence
  Synthetic
auaaaugacacaaacagcucaccc

SEQ ID NO: 528856 - RNA, 18 nt, Artificial Sequence
  Synthetic
gagaugcaggucucaccc

SEQ ID NO: 528857 - RNA, 19 nt, Artificial Sequence
  Synthetic
agagaugcaggucucaccc

SEQ ID NO: 528858 - RNA, 20 nt, Artificial Sequence
  Synthetic
gagagaugcaggucucaccc

SEQ ID NO: 528859 - RNA, 21 nt, Artificial Sequence
  Synthetic
agagagaugcaggucucaccc

SEQ ID NO: 528860 - RNA, 22 nt, Artificial Sequence
  Synthetic
gagagagaugcaggucucaccc

SEQ ID NO: 528861 - RNA, 23 nt, Artificial Sequence
  Synthetic
agagagagaugcaggucucaccc

SEQ ID NO: 528862 - RNA, 24 nt, Artificial Sequence
  Synthetic
gagagagagaugcaggucucaccc

SEQ ID NO: 528863 - RNA, 18 nt, Artificial Sequence
  Synthetic
acuugcgacacuucaccc

SEQ ID NO: 528864 - RNA, 19 nt, Artificial Sequence
  Synthetic
cacuugcgacacuucaccc

SEQ ID NO: 528865 - RNA, 20 nt, Artificial Sequence
  Synthetic
acacuugcgacacuucaccc

SEQ ID NO: 528866 - RNA, 21 nt, Artificial Sequence
  Synthetic
cacacuugcgacacuucaccc

SEQ ID NO: 528867 - RNA, 22 nt, Artificial Sequence
  Synthetic
ccacacuugcgacacuucaccc

SEQ ID NO: 528868 - RNA, 23 nt, Artificial Sequence
  Synthetic
accacacuugcgacacuucaccc

SEQ ID NO: 528869 - RNA, 24 nt, Artificial Sequence
  Synthetic
uaccacacuugcgacacuucaccc

SEQ ID NO: 528870 - RNA, 18 nt, Artificial Sequence
  Synthetic
ccuguaacuaaaagaccc

SEQ ID NO: 528871 - RNA, 19 nt, Artificial Sequence
  Synthetic
uccuguaacuaaaagaccc

SEQ ID NO: 528872 - RNA, 20 nt, Artificial Sequence
  Synthetic
uuccuguaacuaaaagaccc

SEQ ID NO: 528873 - RNA, 21 nt, Artificial Sequence
  Synthetic
cuuccuguaacuaaaagaccc

SEQ ID NO: 528874 - RNA, 22 nt, Artificial Sequence
  Synthetic
acuuccuguaacuaaaagaccc

SEQ ID NO: 528875 - RNA, 23 nt, Artificial Sequence
  Synthetic
cacuuccuguaacuaaaagaccc

SEQ ID NO: 528876 - RNA, 24 nt, Artificial Sequence
  Synthetic
acacuuccuguaacuaaaagaccc

SEQ ID NO: 528877 - RNA, 18 nt, Artificial Sequence
  Synthetic
aaacagacacaaagaccc

SEQ ID NO: 528878 - RNA, 19 nt, Artificial Sequence
  Synthetic
aaaacagacacaaagaccc

SEQ ID NO: 528879 - RNA, 20 nt, Artificial Sequence
  Synthetic
aaaaacagacacaaagaccc

SEQ ID NO: 528880 - RNA, 21 nt, Artificial Sequence
  Synthetic
uaaaaacagacacaaagaccc

SEQ ID NO: 528881 - RNA, 22 nt, Artificial Sequence
  Synthetic
auaaaaacagacacaaagaccc

SEQ ID NO: 528882 - RNA, 23 nt, Artificial Sequence
  Synthetic
cauaaaaacagacacaaagaccc

SEQ ID NO: 528883 - RNA, 24 nt, Artificial Sequence
  Synthetic
ccauaaaaacagacacaaagaccc

SEQ ID NO: 528884 - RNA, 18 nt, Artificial Sequence
  Synthetic
gaagucucccuaagaccc

SEQ ID NO: 528885 - RNA, 19 nt, Artificial Sequence
  Synthetic
agaagucucccuaagaccc

SEQ ID NO: 528886 - RNA, 20 nt, Artificial Sequence
  Synthetic
aagaagucucccuaagaccc

SEQ ID NO: 528887 - RNA, 21 nt, Artificial Sequence
  Synthetic
caagaagucucccuaagaccc

SEQ ID NO: 528888 - RNA, 22 nt, Artificial Sequence
  Synthetic
ucaagaagucucccuaagaccc

SEQ ID NO: 528889 - RNA, 23 nt, Artificial Sequence
  Synthetic
gucaagaagucucccuaagaccc

SEQ ID NO: 528890 - RNA, 24 nt, Artificial Sequence
  Synthetic
agucaagaagucucccuaagaccc

SEQ ID NO: 528891 - RNA, 18 nt, Artificial Sequence
  Synthetic
auaauagucaucagaccc

SEQ ID NO: 528892 - RNA, 19 nt, Artificial Sequence
  Synthetic
aauaauagucaucagaccc

SEQ ID NO: 528893 - RNA, 20 nt, Artificial Sequence
  Synthetic
gaauaauagucaucagaccc

SEQ ID NO: 528894 - RNA, 21 nt, Artificial Sequence
  Synthetic
agaauaauagucaucagaccc

SEQ ID NO: 528895 - RNA, 22 nt, Artificial Sequence
  Synthetic
aagaauaauagucaucagaccc

SEQ ID NO: 528896 - RNA, 23 nt, Artificial Sequence
  Synthetic
aaagaauaauagucaucagaccc

SEQ ID NO: 528897 - RNA, 24 nt, Artificial Sequence
  Synthetic
uaaagaauaauagucaucagaccc

SEQ ID NO: 528898 - RNA, 18 nt, Artificial Sequence
  Synthetic
ucuauucuuaggagaccc

SEQ ID NO: 528899 - RNA, 19 nt, Artificial Sequence
  Synthetic
gucuauucuuaggagaccc

SEQ ID NO: 528900 - RNA, 20 nt, Artificial Sequence
  Synthetic
ggucuauucuuaggagaccc

SEQ ID NO: 528901 - RNA, 21 nt, Artificial Sequence
  Synthetic
aggucuauucuuaggagaccc

SEQ ID NO: 528902 - RNA, 22 nt, Artificial Sequence
  Synthetic
aaggucuauucuuaggagaccc

SEQ ID NO: 528903 - RNA, 23 nt, Artificial Sequence
  Synthetic
gaaggucuauucuuaggagaccc

SEQ ID NO: 528904 - RNA, 24 nt, Artificial Sequence
  Synthetic
ggaaggucuauucuuaggagaccc

SEQ ID NO: 528905 - RNA, 18 nt, Artificial Sequence
  Synthetic
caagcaagcuggagaccc

SEQ ID NO: 528906 - RNA, 19 nt, Artificial Sequence
  Synthetic
acaagcaagcuggagaccc

SEQ ID NO: 528907 - RNA, 20 nt, Artificial Sequence
  Synthetic
aacaagcaagcuggagaccc

SEQ ID NO: 528908 - RNA, 21 nt, Artificial Sequence
  Synthetic
gaacaagcaagcuggagaccc

SEQ ID NO: 528909 - RNA, 22 nt, Artificial Sequence
  Synthetic
ugaacaagcaagcuggagaccc

SEQ ID NO: 528910 - RNA, 23 nt, Artificial Sequence
  Synthetic
gugaacaagcaagcuggagaccc

SEQ ID NO: 528911 - RNA, 24 nt, Artificial Sequence
  Synthetic
ggugaacaagcaagcuggagaccc

SEQ ID NO: 528912 - RNA, 18 nt, Artificial Sequence
  Synthetic
ucagcaagcuggagaccc

SEQ ID NO: 528913 - RNA, 19 nt, Artificial Sequence
  Synthetic
gucagcaagcuggagaccc

SEQ ID NO: 528914 - RNA, 20 nt, Artificial Sequence
  Synthetic
agucagcaagcuggagaccc

SEQ ID NO: 528915 - RNA, 21 nt, Artificial Sequence
  Synthetic
cagucagcaagcuggagaccc

SEQ ID NO: 528916 - RNA, 22 nt, Artificial Sequence
  Synthetic
acagucagcaagcuggagaccc

SEQ ID NO: 528917 - RNA, 23 nt, Artificial Sequence
  Synthetic
uacagucagcaagcuggagaccc

SEQ ID NO: 528918 - RNA, 24 nt, Artificial Sequence
  Synthetic
uuacagucagcaagcuggagaccc

SEQ ID NO: 528919 - RNA, 18 nt, Artificial Sequence
  Synthetic
uacgggaacaauagaccc

SEQ ID NO: 528920 - RNA, 19 nt, Artificial Sequence
  Synthetic
auacgggaacaauagaccc

SEQ ID NO: 528921 - RNA, 20 nt, Artificial Sequence
  Synthetic
aauacgggaacaauagaccc

SEQ ID NO: 528922 - RNA, 21 nt, Artificial Sequence
  Synthetic
aaauacgggaacaauagaccc

SEQ ID NO: 528923 - RNA, 22 nt, Artificial Sequence
  Synthetic
uaaauacgggaacaauagaccc

SEQ ID NO: 528924 - RNA, 23 nt, Artificial Sequence
  Synthetic
auaaauacgggaacaauagaccc

SEQ ID NO: 528925 - RNA, 24 nt, Artificial Sequence
  Synthetic
cauaaauacgggaacaauagaccc

SEQ ID NO: 528926 - RNA, 18 nt, Artificial Sequence
  Synthetic
uggaggcgucugcgaccc

SEQ ID NO: 528927 - RNA, 19 nt, Artificial Sequence
  Synthetic
guggaggcgucugcgaccc

SEQ ID NO: 528928 - RNA, 20 nt, Artificial Sequence
  Synthetic
gguggaggcgucugcgaccc

SEQ ID NO: 528929 - RNA, 21 nt, Artificial Sequence
  Synthetic
agguggaggcgucugcgaccc

SEQ ID NO: 528930 - RNA, 22 nt, Artificial Sequence
  Synthetic
uagguggaggcgucugcgaccc

SEQ ID NO: 528931 - RNA, 23 nt, Artificial Sequence
  Synthetic
cuagguggaggcgucugcgaccc

SEQ ID NO: 528932 - RNA, 24 nt, Artificial Sequence
  Synthetic
ucuagguggaggcgucugcgaccc

SEQ ID NO: 528933 - RNA, 18 nt, Artificial Sequence
  Synthetic
ugagaaggaucaggaccc

SEQ ID NO: 528934 - RNA, 19 nt, Artificial Sequence
  Synthetic
augagaaggaucaggaccc

SEQ ID NO: 528935 - RNA, 20 nt, Artificial Sequence
  Synthetic
aaugagaaggaucaggaccc

SEQ ID NO: 528936 - RNA, 21 nt, Artificial Sequence
  Synthetic
uaaugagaaggaucaggaccc

SEQ ID NO: 528937 - RNA, 22 nt, Artificial Sequence
  Synthetic
uuaaugagaaggaucaggaccc

SEQ ID NO: 528938 - RNA, 23 nt, Artificial Sequence
  Synthetic
auuaaugagaaggaucaggaccc

SEQ ID NO: 528939 - RNA, 24 nt, Artificial Sequence
  Synthetic
uauuaaugagaaggaucaggaccc

SEQ ID NO: 528940 - RNA, 18 nt, Artificial Sequence
  Synthetic
gccuugagaaggggaccc

SEQ ID NO: 528941 - RNA, 19 nt, Artificial Sequence
  Synthetic
ggccuugagaaggggaccc

SEQ ID NO: 528942 - RNA, 20 nt, Artificial Sequence
  Synthetic
aggccuugagaaggggaccc

SEQ ID NO: 528943 - RNA, 21 nt, Artificial Sequence
  Synthetic
gaggccuugagaaggggaccc

SEQ ID NO: 528944 - RNA, 22 nt, Artificial Sequence
  Synthetic
ugaggccuugagaaggggaccc

SEQ ID NO: 528945 - RNA, 23 nt, Artificial Sequence
  Synthetic
uugaggccuugagaaggggaccc

SEQ ID NO: 528946 - RNA, 24 nt, Artificial Sequence
  Synthetic
auugaggccuugagaaggggaccc

SEQ ID NO: 528947 - RNA, 18 nt, Artificial Sequence
  Synthetic
aauguggucuggggaccc

SEQ ID NO: 528948 - RNA, 19 nt, Artificial Sequence
  Synthetic
aaauguggucuggggaccc

SEQ ID NO: 528949 - RNA, 20 nt, Artificial Sequence
  Synthetic
uaaauguggucuggggaccc

SEQ ID NO: 528950 - RNA, 21 nt, Artificial Sequence
  Synthetic
uuaaauguggucuggggaccc

SEQ ID NO: 528951 - RNA, 22 nt, Artificial Sequence
  Synthetic
cuuaaauguggucuggggaccc

SEQ ID NO: 528952 - RNA, 23 nt, Artificial Sequence
  Synthetic
ccuuaaauguggucuggggaccc

SEQ ID NO: 528953 - RNA, 24 nt, Artificial Sequence
  Synthetic
uccuuaaauguggucuggggaccc

SEQ ID NO: 528954 - RNA, 18 nt, Artificial Sequence
  Synthetic
uaauuugaagcuggaccc

SEQ ID NO: 528955 - RNA, 19 nt, Artificial Sequence
  Synthetic
uuaauuugaagcuggaccc

SEQ ID NO: 528956 - RNA, 20 nt, Artificial Sequence
  Synthetic
auuaauuugaagcuggaccc

SEQ ID NO: 528957 - RNA, 21 nt, Artificial Sequence
  Synthetic
aauuaauuugaagcuggaccc

SEQ ID NO: 528958 - RNA, 22 nt, Artificial Sequence
  Synthetic
aaauuaauuugaagcuggaccc

SEQ ID NO: 528959 - RNA, 23 nt, Artificial Sequence
  Synthetic
uaaauuaauuugaagcuggaccc

SEQ ID NO: 528960 - RNA, 24 nt, Artificial Sequence
  Synthetic
guaaauuaauuugaagcuggaccc

SEQ ID NO: 528961 - RNA, 18 nt, Artificial Sequence
  Synthetic
guuauuuuuaaaugaccc

SEQ ID NO: 528962 - RNA, 19 nt, Artificial Sequence
  Synthetic
aguuauuuuuaaaugaccc

SEQ ID NO: 528963 - RNA, 20 nt, Artificial Sequence
  Synthetic
uaguuauuuuuaaaugaccc

SEQ ID NO: 528964 - RNA, 21 nt, Artificial Sequence
  Synthetic
auaguuauuuuuaaaugaccc

SEQ ID NO: 528965 - RNA, 22 nt, Artificial Sequence
  Synthetic
uauaguuauuuuuaaaugaccc

SEQ ID NO: 528966 - RNA, 23 nt, Artificial Sequence
  Synthetic
guauaguuauuuuuaaaugaccc

SEQ ID NO: 528967 - RNA, 24 nt, Artificial Sequence
  Synthetic
gguauaguuauuuuuaaaugaccc

SEQ ID NO: 528968 - RNA, 18 nt, Artificial Sequence
  Synthetic
uagcuucaacaaugaccc

SEQ ID NO: 528969 - RNA, 19 nt, Artificial Sequence
  Synthetic
auagcuucaacaaugaccc

SEQ ID NO: 528970 - RNA, 20 nt, Artificial Sequence
  Synthetic
cauagcuucaacaaugaccc

SEQ ID NO: 528971 - RNA, 21 nt, Artificial Sequence
  Synthetic
acauagcuucaacaaugaccc

SEQ ID NO: 528972 - RNA, 22 nt, Artificial Sequence
  Synthetic
aacauagcuucaacaaugaccc

SEQ ID NO: 528973 - RNA, 23 nt, Artificial Sequence
  Synthetic
aaacauagcuucaacaaugaccc

SEQ ID NO: 528974 - RNA, 24 nt, Artificial Sequence
  Synthetic
aaaacauagcuucaacaaugaccc

SEQ ID NO: 528975 - RNA, 18 nt, Artificial Sequence
  Synthetic
agcaguuucacaugaccc

SEQ ID NO: 528976 - RNA, 19 nt, Artificial Sequence
  Synthetic
uagcaguuucacaugaccc

SEQ ID NO: 528977 - RNA, 20 nt, Artificial Sequence
  Synthetic
uuagcaguuucacaugaccc

SEQ ID NO: 528978 - RNA, 21 nt, Artificial Sequence
  Synthetic
cuuagcaguuucacaugaccc

SEQ ID NO: 528979 - RNA, 22 nt, Artificial Sequence
  Synthetic
ccuuagcaguuucacaugaccc

SEQ ID NO: 528980 - RNA, 23 nt, Artificial Sequence
  Synthetic
uccuuagcaguuucacaugaccc

SEQ ID NO: 528981 - RNA, 24 nt, Artificial Sequence
  Synthetic
uuccuuagcaguuucacaugaccc

SEQ ID NO: 528982 - RNA, 18 nt, Artificial Sequence
  Synthetic
ugaguuuacugaugaccc

SEQ ID NO: 528983 - RNA, 19 nt, Artificial Sequence
  Synthetic
cugaguuuacugaugaccc

SEQ ID NO: 528984 - RNA, 20 nt, Artificial Sequence
  Synthetic
acugaguuuacugaugaccc

SEQ ID NO: 528985 - RNA, 21 nt, Artificial Sequence
  Synthetic
cacugaguuuacugaugaccc

SEQ ID NO: 528986 - RNA, 22 nt, Artificial Sequence
  Synthetic
ccacugaguuuacugaugaccc

SEQ ID NO: 528987 - RNA, 23 nt, Artificial Sequence
  Synthetic
uccacugaguuuacugaugaccc

SEQ ID NO: 528988 - RNA, 24 nt, Artificial Sequence
  Synthetic
uuccacugaguuuacugaugaccc

SEQ ID NO: 528989 - RNA, 18 nt, Artificial Sequence
  Synthetic
gaggugcugcacugaccc

SEQ ID NO: 528990 - RNA, 19 nt, Artificial Sequence
  Synthetic
ggaggugcugcacugaccc

SEQ ID NO: 528991 - RNA, 20 nt, Artificial Sequence
  Synthetic
uggaggugcugcacugaccc

SEQ ID NO: 528992 - RNA, 21 nt, Artificial Sequence
  Synthetic
uuggaggugcugcacugaccc

SEQ ID NO: 528993 - RNA, 22 nt, Artificial Sequence
  Synthetic
uuuggaggugcugcacugaccc

SEQ ID NO: 528994 - RNA, 23 nt, Artificial Sequence
  Synthetic
uuuuggaggugcugcacugaccc

SEQ ID NO: 528995 - RNA, 24 nt, Artificial Sequence
  Synthetic
guuuuggaggugcugcacugaccc

SEQ ID NO: 528996 - RNA, 18 nt, Artificial Sequence
  Synthetic
aggagaaucacuugaccc

SEQ ID NO: 528997 - RNA, 19 nt, Artificial Sequence
  Synthetic
uaggagaaucacuugaccc

SEQ ID NO: 528998 - RNA, 20 nt, Artificial Sequence
  Synthetic
guaggagaaucacuugaccc

SEQ ID NO: 528999 - RNA, 21 nt, Artificial Sequence
  Synthetic
gguaggagaaucacuugaccc

SEQ ID NO: 529000 - RNA, 22 nt, Artificial Sequence
  Synthetic
agguaggagaaucacuugaccc

SEQ ID NO: 529001 - RNA, 23 nt, Artificial Sequence
  Synthetic
aagguaggagaaucacuugaccc

SEQ ID NO: 529002 - RNA, 24 nt, Artificial Sequence
  Synthetic
uaagguaggagaaucacuugaccc

SEQ ID NO: 529003 - RNA, 18 nt, Artificial Sequence
  Synthetic
uaaccaguugcaauaccc

SEQ ID NO: 529004 - RNA, 19 nt, Artificial Sequence
  Synthetic
auaaccaguugcaauaccc

SEQ ID NO: 529005 - RNA, 20 nt, Artificial Sequence
  Synthetic
aauaaccaguugcaauaccc

SEQ ID NO: 529006 - RNA, 21 nt, Artificial Sequence
  Synthetic
gaauaaccaguugcaauaccc

SEQ ID NO: 529007 - RNA, 22 nt, Artificial Sequence
  Synthetic
ugaauaaccaguugcaauaccc

SEQ ID NO: 529008 - RNA, 23 nt, Artificial Sequence
  Synthetic
uugaauaaccaguugcaauaccc

SEQ ID NO: 529009 - RNA, 24 nt, Artificial Sequence
  Synthetic
guugaauaaccaguugcaauaccc

SEQ ID NO: 529010 - RNA, 18 nt, Artificial Sequence
  Synthetic
ugguggugauucauaccc

SEQ ID NO: 529011 - RNA, 19 nt, Artificial Sequence
  Synthetic
cugguggugauucauaccc

SEQ ID NO: 529012 - RNA, 20 nt, Artificial Sequence
  Synthetic
ucugguggugauucauaccc

SEQ ID NO: 529013 - RNA, 21 nt, Artificial Sequence
  Synthetic
cucugguggugauucauaccc

SEQ ID NO: 529014 - RNA, 22 nt, Artificial Sequence
  Synthetic
acucugguggugauucauaccc

SEQ ID NO: 529015 - RNA, 23 nt, Artificial Sequence
  Synthetic
uacucugguggugauucauaccc

SEQ ID NO: 529016 - RNA, 24 nt, Artificial Sequence
  Synthetic
cuacucugguggugauucauaccc

SEQ ID NO: 529017 - RNA, 18 nt, Artificial Sequence
  Synthetic
cuaaauuuaaauauaccc

SEQ ID NO: 529018 - RNA, 19 nt, Artificial Sequence
  Synthetic
acuaaauuuaaauauaccc

SEQ ID NO: 529019 - RNA, 20 nt, Artificial Sequence
  Synthetic
uacuaaauuuaaauauaccc

SEQ ID NO: 529020 - RNA, 21 nt, Artificial Sequence
  Synthetic
uuacuaaauuuaaauauaccc

SEQ ID NO: 529021 - RNA, 22 nt, Artificial Sequence
  Synthetic
auuacuaaauuuaaauauaccc

SEQ ID NO: 529022 - RNA, 23 nt, Artificial Sequence
  Synthetic
aauuacuaaauuuaaauauaccc

SEQ ID NO: 529023 - RNA, 24 nt, Artificial Sequence
  Synthetic
aaauuacuaaauuuaaauauaccc

SEQ ID NO: 529024 - RNA, 18 nt, Artificial Sequence
  Synthetic
gggucccaccauauaccc

SEQ ID NO: 529025 - RNA, 19 nt, Artificial Sequence
  Synthetic
agggucccaccauauaccc

SEQ ID NO: 529026 - RNA, 20 nt, Artificial Sequence
  Synthetic
gagggucccaccauauaccc

SEQ ID NO: 529027 - RNA, 21 nt, Artificial Sequence
  Synthetic
agagggucccaccauauaccc

SEQ ID NO: 529028 - RNA, 22 nt, Artificial Sequence
  Synthetic
uagagggucccaccauauaccc

SEQ ID NO: 529029 - RNA, 23 nt, Artificial Sequence
  Synthetic
uuagagggucccaccauauaccc

SEQ ID NO: 529030 - RNA, 24 nt, Artificial Sequence
  Synthetic
guuagagggucccaccauauaccc

SEQ ID NO: 529031 - RNA, 18 nt, Artificial Sequence
  Synthetic
uuccucccuccccuaccc

SEQ ID NO: 529032 - RNA, 19 nt, Artificial Sequence
  Synthetic
cuuccucccuccccuaccc

SEQ ID NO: 529033 - RNA, 20 nt, Artificial Sequence
  Synthetic
ucuuccucccuccccuaccc

SEQ ID NO: 529034 - RNA, 21 nt, Artificial Sequence
  Synthetic
cucuuccucccuccccuaccc

SEQ ID NO: 529035 - RNA, 22 nt, Artificial Sequence
  Synthetic
ucucuuccucccuccccuaccc

SEQ ID NO: 529036 - RNA, 23 nt, Artificial Sequence
  Synthetic
cucucuuccucccuccccuaccc

SEQ ID NO: 529037 - RNA, 24 nt, Artificial Sequence
  Synthetic
ucucucuuccucccuccccuaccc

SEQ ID NO: 529038 - RNA, 18 nt, Artificial Sequence
  Synthetic
cuagcauauggccuaccc

SEQ ID NO: 529039 - RNA, 19 nt, Artificial Sequence
  Synthetic
ccuagcauauggccuaccc

SEQ ID NO: 529040 - RNA, 20 nt, Artificial Sequence
  Synthetic
accuagcauauggccuaccc

SEQ ID NO: 529041 - RNA, 21 nt, Artificial Sequence
  Synthetic
gaccuagcauauggccuaccc

SEQ ID NO: 529042 - RNA, 22 nt, Artificial Sequence
  Synthetic
ugaccuagcauauggccuaccc

SEQ ID NO: 529043 - RNA, 23 nt, Artificial Sequence
  Synthetic
augaccuagcauauggccuaccc

SEQ ID NO: 529044 - RNA, 24 nt, Artificial Sequence
  Synthetic
uaugaccuagcauauggccuaccc

SEQ ID NO: 529045 - RNA, 18 nt, Artificial Sequence
  Synthetic
ccaccaugucuccuaccc

SEQ ID NO: 529046 - RNA, 19 nt, Artificial Sequence
  Synthetic
accaccaugucuccuaccc

SEQ ID NO: 529047 - RNA, 20 nt, Artificial Sequence
  Synthetic
gaccaccaugucuccuaccc

SEQ ID NO: 529048 - RNA, 21 nt, Artificial Sequence
  Synthetic
ggaccaccaugucuccuaccc

SEQ ID NO: 529049 - RNA, 22 nt, Artificial Sequence
  Synthetic
aggaccaccaugucuccuaccc

SEQ ID NO: 529050 - RNA, 23 nt, Artificial Sequence
  Synthetic
uaggaccaccaugucuccuaccc

SEQ ID NO: 529051 - RNA, 24 nt, Artificial Sequence
  Synthetic
uuaggaccaccaugucuccuaccc

SEQ ID NO: 529052 - RNA, 18 nt, Artificial Sequence
  Synthetic
auuggagguguccuaccc

SEQ ID NO: 529053 - RNA, 19 nt, Artificial Sequence
  Synthetic
cauuggagguguccuaccc

SEQ ID NO: 529054 - RNA, 20 nt, Artificial Sequence
  Synthetic
gcauuggagguguccuaccc

SEQ ID NO: 529055 - RNA, 21 nt, Artificial Sequence
  Synthetic
ugcauuggagguguccuaccc

SEQ ID NO: 529056 - RNA, 22 nt, Artificial Sequence
  Synthetic
augcauuggagguguccuaccc

SEQ ID NO: 529057 - RNA, 23 nt, Artificial Sequence
  Synthetic
caugcauuggagguguccuaccc

SEQ ID NO: 529058 - RNA, 24 nt, Artificial Sequence
  Synthetic
acaugcauuggagguguccuaccc

SEQ ID NO: 529059 - RNA, 18 nt, Artificial Sequence
  Synthetic
uauugauucuuccuaccc

SEQ ID NO: 529060 - RNA, 19 nt, Artificial Sequence
  Synthetic
auauugauucuuccuaccc

SEQ ID NO: 529061 - RNA, 20 nt, Artificial Sequence
  Synthetic
aauauugauucuuccuaccc

SEQ ID NO: 529062 - RNA, 21 nt, Artificial Sequence
  Synthetic
caauauugauucuuccuaccc

SEQ ID NO: 529063 - RNA, 22 nt, Artificial Sequence
  Synthetic
acaauauugauucuuccuaccc

SEQ ID NO: 529064 - RNA, 23 nt, Artificial Sequence
  Synthetic
cacaauauugauucuuccuaccc

SEQ ID NO: 529065 - RNA, 24 nt, Artificial Sequence
  Synthetic
ucacaauauugauucuuccuaccc

SEQ ID NO: 529066 - RNA, 18 nt, Artificial Sequence
  Synthetic
uaguagucccagcuaccc

SEQ ID NO: 529067 - RNA, 19 nt, Artificial Sequence
  Synthetic
guaguagucccagcuaccc

SEQ ID NO: 529068 - RNA, 20 nt, Artificial Sequence
  Synthetic
uguaguagucccagcuaccc

SEQ ID NO: 529069 - RNA, 21 nt, Artificial Sequence
  Synthetic
cuguaguagucccagcuaccc

SEQ ID NO: 529070 - RNA, 22 nt, Artificial Sequence
  Synthetic
ccuguaguagucccagcuaccc

SEQ ID NO: 529071 - RNA, 23 nt, Artificial Sequence
  Synthetic
gccuguaguagucccagcuaccc

SEQ ID NO: 529072 - RNA, 24 nt, Artificial Sequence
  Synthetic
ugccuguaguagucccagcuaccc

SEQ ID NO: 529073 - RNA, 18 nt, Artificial Sequence
  Synthetic
caguagccucagcuaccc

SEQ ID NO: 529074 - RNA, 19 nt, Artificial Sequence
  Synthetic
ccaguagccucagcuaccc

SEQ ID NO: 529075 - RNA, 20 nt, Artificial Sequence
  Synthetic
gccaguagccucagcuaccc

SEQ ID NO: 529076 - RNA, 21 nt, Artificial Sequence
  Synthetic
cgccaguagccucagcuaccc

SEQ ID NO: 529077 - RNA, 22 nt, Artificial Sequence
  Synthetic
gcgccaguagccucagcuaccc

SEQ ID NO: 529078 - RNA, 23 nt, Artificial Sequence
  Synthetic
ugcgccaguagccucagcuaccc

SEQ ID NO: 529079 - RNA, 24 nt, Artificial Sequence
  Synthetic
gugcgccaguagccucagcuaccc

SEQ ID NO: 529080 - RNA, 18 nt, Artificial Sequence
  Synthetic
auucuuggaaggcuaccc

SEQ ID NO: 529081 - RNA, 19 nt, Artificial Sequence
  Synthetic
uauucuuggaaggcuaccc

SEQ ID NO: 529082 - RNA, 20 nt, Artificial Sequence
  Synthetic
cuauucuuggaaggcuaccc

SEQ ID NO: 529083 - RNA, 21 nt, Artificial Sequence
  Synthetic
ccuauucuuggaaggcuaccc

SEQ ID NO: 529084 - RNA, 22 nt, Artificial Sequence
  Synthetic
uccuauucuuggaaggcuaccc

SEQ ID NO: 529085 - RNA, 23 nt, Artificial Sequence
  Synthetic
auccuauucuuggaaggcuaccc

SEQ ID NO: 529086 - RNA, 24 nt, Artificial Sequence
  Synthetic
cauccuauucuuggaaggcuaccc

SEQ ID NO: 529087 - RNA, 18 nt, Artificial Sequence
  Synthetic
cauccuuauauucuaccc

SEQ ID NO: 529088 - RNA, 19 nt, Artificial Sequence
  Synthetic
acauccuuauauucuaccc

SEQ ID NO: 529089 - RNA, 20 nt, Artificial Sequence
  Synthetic
aacauccuuauauucuaccc

SEQ ID NO: 529090 - RNA, 21 nt, Artificial Sequence
  Synthetic
caacauccuuauauucuaccc

SEQ ID NO: 529091 - RNA, 22 nt, Artificial Sequence
  Synthetic
ccaacauccuuauauucuaccc

SEQ ID NO: 529092 - RNA, 23 nt, Artificial Sequence
  Synthetic
cccaacauccuuauauucuaccc

SEQ ID NO: 529093 - RNA, 24 nt, Artificial Sequence
  Synthetic
ucccaacauccuuauauucuaccc

SEQ ID NO: 529094 - RNA, 18 nt, Artificial Sequence
  Synthetic
aaaguuaagcuucuaccc

SEQ ID NO: 529095 - RNA, 19 nt, Artificial Sequence
  Synthetic
aaaaguuaagcuucuaccc

SEQ ID NO: 529096 - RNA, 20 nt, Artificial Sequence
  Synthetic
gaaaaguuaagcuucuaccc

SEQ ID NO: 529097 - RNA, 21 nt, Artificial Sequence
  Synthetic
cgaaaaguuaagcuucuaccc

SEQ ID NO: 529098 - RNA, 22 nt, Artificial Sequence
  Synthetic
ccgaaaaguuaagcuucuaccc

SEQ ID NO: 529099 - RNA, 23 nt, Artificial Sequence
  Synthetic
accgaaaaguuaagcuucuaccc

SEQ ID NO: 529100 - RNA, 24 nt, Artificial Sequence
  Synthetic
gaccgaaaaguuaagcuucuaccc

SEQ ID NO: 529101 - RNA, 18 nt, Artificial Sequence
  Synthetic
auugcuucagugguaccc

SEQ ID NO: 529102 - RNA, 19 nt, Artificial Sequence
  Synthetic
cauugcuucagugguaccc

SEQ ID NO: 529103 - RNA, 20 nt, Artificial Sequence
  Synthetic
ucauugcuucagugguaccc

SEQ ID NO: 529104 - RNA, 21 nt, Artificial Sequence
  Synthetic
aucauugcuucagugguaccc

SEQ ID NO: 529105 - RNA, 22 nt, Artificial Sequence
  Synthetic
aaucauugcuucagugguaccc

SEQ ID NO: 529106 - RNA, 23 nt, Artificial Sequence
  Synthetic
aaaucauugcuucagugguaccc

SEQ ID NO: 529107 - RNA, 24 nt, Artificial Sequence
  Synthetic
gaaaucauugcuucagugguaccc

SEQ ID NO: 529108 - RNA, 18 nt, Artificial Sequence
  Synthetic
aaaccugcacauguaccc

SEQ ID NO: 529109 - RNA, 19 nt, Artificial Sequence
  Synthetic
caaaccugcacauguaccc

SEQ ID NO: 529110 - RNA, 20 nt, Artificial Sequence
  Synthetic
acaaaccugcacauguaccc

SEQ ID NO: 529111 - RNA, 21 nt, Artificial Sequence
  Synthetic
aacaaaccugcacauguaccc

SEQ ID NO: 529112 - RNA, 22 nt, Artificial Sequence
  Synthetic
uaacaaaccugcacauguaccc

SEQ ID NO: 529113 - RNA, 23 nt, Artificial Sequence
  Synthetic
guaacaaaccugcacauguaccc

SEQ ID NO: 529114 - RNA, 24 nt, Artificial Sequence
  Synthetic
uguaacaaaccugcacauguaccc

SEQ ID NO: 529115 - RNA, 18 nt, Artificial Sequence
  Synthetic
aguugugcacauguaccc

SEQ ID NO: 529116 - RNA, 19 nt, Artificial Sequence
  Synthetic
aaguugugcacauguaccc

SEQ ID NO: 529117 - RNA, 20 nt, Artificial Sequence
  Synthetic
caaguugugcacauguaccc

SEQ ID NO: 529118 - RNA, 21 nt, Artificial Sequence
  Synthetic
gcaaguugugcacauguaccc

SEQ ID NO: 529119 - RNA, 22 nt, Artificial Sequence
  Synthetic
ugcaaguugugcacauguaccc

SEQ ID NO: 529120 - RNA, 23 nt, Artificial Sequence
  Synthetic
cugcaaguugugcacauguaccc

SEQ ID NO: 529121 - RNA, 24 nt, Artificial Sequence
  Synthetic
ccugcaaguugugcacauguaccc

SEQ ID NO: 529122 - RNA, 18 nt, Artificial Sequence
  Synthetic
cguugugcacauguaccc

SEQ ID NO: 529123 - RNA, 19 nt, Artificial Sequence
  Synthetic
acguugugcacauguaccc

SEQ ID NO: 529124 - RNA, 20 nt, Artificial Sequence
  Synthetic
cacguugugcacauguaccc

SEQ ID NO: 529125 - RNA, 21 nt, Artificial Sequence
  Synthetic
gcacguugugcacauguaccc

SEQ ID NO: 529126 - RNA, 22 nt, Artificial Sequence
  Synthetic
ugcacguugugcacauguaccc

SEQ ID NO: 529127 - RNA, 23 nt, Artificial Sequence
  Synthetic
cugcacguugugcacauguaccc

SEQ ID NO: 529128 - RNA, 24 nt, Artificial Sequence
  Synthetic
ccugcacguugugcacauguaccc

SEQ ID NO: 529129 - RNA, 18 nt, Artificial Sequence
  Synthetic
uuuaacuucauuguaccc

SEQ ID NO: 529130 - RNA, 19 nt, Artificial Sequence
  Synthetic
auuuaacuucauuguaccc

SEQ ID NO: 529131 - RNA, 20 nt, Artificial Sequence
  Synthetic
uauuuaacuucauuguaccc

SEQ ID NO: 529132 - RNA, 21 nt, Artificial Sequence
  Synthetic
uuauuuaacuucauuguaccc

SEQ ID NO: 529133 - RNA, 22 nt, Artificial Sequence
  Synthetic
cuuauuuaacuucauuguaccc

SEQ ID NO: 529134 - RNA, 23 nt, Artificial Sequence
  Synthetic
acuuauuuaacuucauuguaccc

SEQ ID NO: 529135 - RNA, 24 nt, Artificial Sequence
  Synthetic
uacuuauuuaacuucauuguaccc

SEQ ID NO: 529136 - RNA, 18 nt, Artificial Sequence
  Synthetic
gccuaggguggauuaccc

SEQ ID NO: 529137 - RNA, 19 nt, Artificial Sequence
  Synthetic
ggccuaggguggauuaccc

SEQ ID NO: 529138 - RNA, 20 nt, Artificial Sequence
  Synthetic
uggccuaggguggauuaccc

SEQ ID NO: 529139 - RNA, 21 nt, Artificial Sequence
  Synthetic
cuggccuaggguggauuaccc

SEQ ID NO: 529140 - RNA, 22 nt, Artificial Sequence
  Synthetic
ccuggccuaggguggauuaccc

SEQ ID NO: 529141 - RNA, 23 nt, Artificial Sequence
  Synthetic
gccuggccuaggguggauuaccc

SEQ ID NO: 529142 - RNA, 24 nt, Artificial Sequence
  Synthetic
ugccuggccuaggguggauuaccc

SEQ ID NO: 529143 - RNA, 18 nt, Artificial Sequence
  Synthetic
acaacuuaaauauuaccc

SEQ ID NO: 529144 - RNA, 19 nt, Artificial Sequence
  Synthetic
cacaacuuaaauauuaccc

SEQ ID NO: 529145 - RNA, 20 nt, Artificial Sequence
  Synthetic
ucacaacuuaaauauuaccc

SEQ ID NO: 529146 - RNA, 21 nt, Artificial Sequence
  Synthetic
cucacaacuuaaauauuaccc

SEQ ID NO: 529147 - RNA, 22 nt, Artificial Sequence
  Synthetic
acucacaacuuaaauauuaccc

SEQ ID NO: 529148 - RNA, 23 nt, Artificial Sequence
  Synthetic
cacucacaacuuaaauauuaccc

SEQ ID NO: 529149 - RNA, 24 nt, Artificial Sequence
  Synthetic
ccacucacaacuuaaauauuaccc

SEQ ID NO: 529150 - RNA, 18 nt, Artificial Sequence
  Synthetic
aagucugacuccuuaccc

SEQ ID NO: 529151 - RNA, 19 nt, Artificial Sequence
  Synthetic
uaagucugacuccuuaccc

SEQ ID NO: 529152 - RNA, 20 nt, Artificial Sequence
  Synthetic
guaagucugacuccuuaccc

SEQ ID NO: 529153 - RNA, 21 nt, Artificial Sequence
  Synthetic
gguaagucugacuccuuaccc

SEQ ID NO: 529154 - RNA, 22 nt, Artificial Sequence
  Synthetic
ugguaagucugacuccuuaccc

SEQ ID NO: 529155 - RNA, 23 nt, Artificial Sequence
  Synthetic
uugguaagucugacuccuuaccc

SEQ ID NO: 529156 - RNA, 24 nt, Artificial Sequence
  Synthetic
auugguaagucugacuccuuaccc

SEQ ID NO: 529157 - RNA, 18 nt, Artificial Sequence
  Synthetic
guuuagguguucuuaccc

SEQ ID NO: 529158 - RNA, 19 nt, Artificial Sequence
  Synthetic
uguuuagguguucuuaccc

SEQ ID NO: 529159 - RNA, 20 nt, Artificial Sequence
  Synthetic
auguuuagguguucuuaccc

SEQ ID NO: 529160 - RNA, 21 nt, Artificial Sequence
  Synthetic
gauguuuagguguucuuaccc

SEQ ID NO: 529161 - RNA, 22 nt, Artificial Sequence
  Synthetic
agauguuuagguguucuuaccc

SEQ ID NO: 529162 - RNA, 23 nt, Artificial Sequence
  Synthetic
uagauguuuagguguucuuaccc

SEQ ID NO: 529163 - RNA, 24 nt, Artificial Sequence
  Synthetic
cuagauguuuagguguucuuaccc

SEQ ID NO: 529164 - RNA, 18 nt, Artificial Sequence
  Synthetic
auuuuucuuuauuuaccc

SEQ ID NO: 529165 - RNA, 19 nt, Artificial Sequence
  Synthetic
uauuuuucuuuauuuaccc

SEQ ID NO: 529166 - RNA, 20 nt, Artificial Sequence
  Synthetic
uuauuuuucuuuauuuaccc

SEQ ID NO: 529167 - RNA, 21 nt, Artificial Sequence
  Synthetic
cuuauuuuucuuuauuuaccc

SEQ ID NO: 529168 - RNA, 22 nt, Artificial Sequence
  Synthetic
gcuuauuuuucuuuauuuaccc

SEQ ID NO: 529169 - RNA, 23 nt, Artificial Sequence
  Synthetic
agcuuauuuuucuuuauuuaccc

SEQ ID NO: 529170 - RNA, 24 nt, Artificial Sequence
  Synthetic
aagcuuauuuuucuuuauuuaccc

SEQ ID NO: 529171 - RNA, 18 nt, Artificial Sequence
  Synthetic
ucccaauagccuuuaccc

SEQ ID NO: 529172 - RNA, 19 nt, Artificial Sequence
  Synthetic
uucccaauagccuuuaccc

SEQ ID NO: 529173 - RNA, 20 nt, Artificial Sequence
  Synthetic
uuucccaauagccuuuaccc

SEQ ID NO: 529174 - RNA, 21 nt, Artificial Sequence
  Synthetic
cuuucccaauagccuuuaccc

SEQ ID NO: 529175 - RNA, 22 nt, Artificial Sequence
  Synthetic
gcuuucccaauagccuuuaccc

SEQ ID NO: 529176 - RNA, 23 nt, Artificial Sequence
  Synthetic
ugcuuucccaauagccuuuaccc

SEQ ID NO: 529177 - RNA, 24 nt, Artificial Sequence
  Synthetic
cugcuuucccaauagccuuuaccc

SEQ ID NO: 529178 - RNA, 18 nt, Artificial Sequence
  Synthetic
uuucucagauucaacccc

SEQ ID NO: 529179 - RNA, 19 nt, Artificial Sequence
  Synthetic
guuucucagauucaacccc

SEQ ID NO: 529180 - RNA, 20 nt, Artificial Sequence
  Synthetic
aguuucucagauucaacccc

SEQ ID NO: 529181 - RNA, 21 nt, Artificial Sequence
  Synthetic
gaguuucucagauucaacccc

SEQ ID NO: 529182 - RNA, 22 nt, Artificial Sequence
  Synthetic
ugaguuucucagauucaacccc

SEQ ID NO: 529183 - RNA, 23 nt, Artificial Sequence
  Synthetic
gugaguuucucagauucaacccc

SEQ ID NO: 529184 - RNA, 24 nt, Artificial Sequence
  Synthetic
ugugaguuucucagauucaacccc

SEQ ID NO: 529185 - RNA, 18 nt, Artificial Sequence
  Synthetic
aaugcucuuuucaacccc

SEQ ID NO: 529186 - RNA, 19 nt, Artificial Sequence
  Synthetic
gaaugcucuuuucaacccc

SEQ ID NO: 529187 - RNA, 20 nt, Artificial Sequence
  Synthetic
cgaaugcucuuuucaacccc

SEQ ID NO: 529188 - RNA, 21 nt, Artificial Sequence
  Synthetic
acgaaugcucuuuucaacccc

SEQ ID NO: 529189 - RNA, 22 nt, Artificial Sequence
  Synthetic
cacgaaugcucuuuucaacccc

SEQ ID NO: 529190 - RNA, 23 nt, Artificial Sequence
  Synthetic
ucacgaaugcucuuuucaacccc

SEQ ID NO: 529191 - RNA, 24 nt, Artificial Sequence
  Synthetic
aucacgaaugcucuuuucaacccc

SEQ ID NO: 529192 - RNA, 18 nt, Artificial Sequence
  Synthetic
uuggagugucagaacccc

SEQ ID NO: 529193 - RNA, 19 nt, Artificial Sequence
  Synthetic
uuuggagugucagaacccc

SEQ ID NO: 529194 - RNA, 20 nt, Artificial Sequence
  Synthetic
auuuggagugucagaacccc

SEQ ID NO: 529195 - RNA, 21 nt, Artificial Sequence
  Synthetic
cauuuggagugucagaacccc

SEQ ID NO: 529196 - RNA, 22 nt, Artificial Sequence
  Synthetic
acauuuggagugucagaacccc

SEQ ID NO: 529197 - RNA, 23 nt, Artificial Sequence
  Synthetic
aacauuuggagugucagaacccc

SEQ ID NO: 529198 - RNA, 24 nt, Artificial Sequence
  Synthetic
gaacauuuggagugucagaacccc

SEQ ID NO: 529199 - RNA, 18 nt, Artificial Sequence
  Synthetic
aaccuucacaugaacccc

SEQ ID NO: 529200 - RNA, 19 nt, Artificial Sequence
  Synthetic
uaaccuucacaugaacccc

SEQ ID NO: 529201 - RNA, 20 nt, Artificial Sequence
  Synthetic
uuaaccuucacaugaacccc

SEQ ID NO: 529202 - RNA, 21 nt, Artificial Sequence
  Synthetic
cuuaaccuucacaugaacccc

SEQ ID NO: 529203 - RNA, 22 nt, Artificial Sequence
  Synthetic
ucuuaaccuucacaugaacccc

SEQ ID NO: 529204 - RNA, 23 nt, Artificial Sequence
  Synthetic
uucuuaaccuucacaugaacccc

SEQ ID NO: 529205 - RNA, 24 nt, Artificial Sequence
  Synthetic
uuucuuaaccuucacaugaacccc

SEQ ID NO: 529206 - RNA, 18 nt, Artificial Sequence
  Synthetic
aacaaaaacucuaacccc

SEQ ID NO: 529207 - RNA, 19 nt, Artificial Sequence
  Synthetic
aaacaaaaacucuaacccc

SEQ ID NO: 529208 - RNA, 20 nt, Artificial Sequence
  Synthetic
uaaacaaaaacucuaacccc

SEQ ID NO: 529209 - RNA, 21 nt, Artificial Sequence
  Synthetic
auaaacaaaaacucuaacccc

SEQ ID NO: 529210 - RNA, 22 nt, Artificial Sequence
  Synthetic
cauaaacaaaaacucuaacccc

SEQ ID NO: 529211 - RNA, 23 nt, Artificial Sequence
  Synthetic
gcauaaacaaaaacucuaacccc

SEQ ID NO: 529212 - RNA, 24 nt, Artificial Sequence
  Synthetic
ugcauaaacaaaaacucuaacccc

SEQ ID NO: 529213 - RNA, 18 nt, Artificial Sequence
  Synthetic
aacagauaaugacacccc

SEQ ID NO: 529214 - RNA, 19 nt, Artificial Sequence
  Synthetic
caacagauaaugacacccc

SEQ ID NO: 529215 - RNA, 20 nt, Artificial Sequence
  Synthetic
ucaacagauaaugacacccc

SEQ ID NO: 529216 - RNA, 21 nt, Artificial Sequence
  Synthetic
cucaacagauaaugacacccc

SEQ ID NO: 529217 - RNA, 22 nt, Artificial Sequence
  Synthetic
ucucaacagauaaugacacccc

SEQ ID NO: 529218 - RNA, 23 nt, Artificial Sequence
  Synthetic
uucucaacagauaaugacacccc

SEQ ID NO: 529219 - RNA, 24 nt, Artificial Sequence
  Synthetic
auucucaacagauaaugacacccc

SEQ ID NO: 529220 - RNA, 18 nt, Artificial Sequence
  Synthetic
caccuccaccuccacccc

SEQ ID NO: 529221 - RNA, 19 nt, Artificial Sequence
  Synthetic
ccaccuccaccuccacccc

SEQ ID NO: 529222 - RNA, 20 nt, Artificial Sequence
  Synthetic
gccaccuccaccuccacccc

SEQ ID NO: 529223 - RNA, 21 nt, Artificial Sequence
  Synthetic
ugccaccuccaccuccacccc

SEQ ID NO: 529224 - RNA, 22 nt, Artificial Sequence
  Synthetic
cugccaccuccaccuccacccc

SEQ ID NO: 529225 - RNA, 23 nt, Artificial Sequence
  Synthetic
acugccaccuccaccuccacccc

SEQ ID NO: 529226 - RNA, 24 nt, Artificial Sequence
  Synthetic
uacugccaccuccaccuccacccc

SEQ ID NO: 529227 - RNA, 18 nt, Artificial Sequence
  Synthetic
aguaauucuuuccacccc

SEQ ID NO: 529228 - RNA, 19 nt, Artificial Sequence
  Synthetic
uaguaauucuuuccacccc

SEQ ID NO: 529229 - RNA, 20 nt, Artificial Sequence
  Synthetic
guaguaauucuuuccacccc

SEQ ID NO: 529230 - RNA, 21 nt, Artificial Sequence
  Synthetic
gguaguaauucuuuccacccc

SEQ ID NO: 529231 - RNA, 22 nt, Artificial Sequence
  Synthetic
ugguaguaauucuuuccacccc

SEQ ID NO: 529232 - RNA, 23 nt, Artificial Sequence
  Synthetic
gugguaguaauucuuuccacccc

SEQ ID NO: 529233 - RNA, 24 nt, Artificial Sequence
  Synthetic
cgugguaguaauucuuuccacccc

SEQ ID NO: 529234 - RNA, 18 nt, Artificial Sequence
  Synthetic
agaacuacuccucacccc

SEQ ID NO: 529235 - RNA, 19 nt, Artificial Sequence
  Synthetic
uagaacuacuccucacccc

SEQ ID NO: 529236 - RNA, 20 nt, Artificial Sequence
  Synthetic
uuagaacuacuccucacccc

SEQ ID NO: 529237 - RNA, 21 nt, Artificial Sequence
  Synthetic
auuagaacuacuccucacccc

SEQ ID NO: 529238 - RNA, 22 nt, Artificial Sequence
  Synthetic
aauuagaacuacuccucacccc

SEQ ID NO: 529239 - RNA, 23 nt, Artificial Sequence
  Synthetic
uaauuagaacuacuccucacccc

SEQ ID NO: 529240 - RNA, 24 nt, Artificial Sequence
  Synthetic
auaauuagaacuacuccucacccc

SEQ ID NO: 529241 - RNA, 18 nt, Artificial Sequence
  Synthetic
agcuccuuuucagacccc

SEQ ID NO: 529242 - RNA, 19 nt, Artificial Sequence
  Synthetic
cagcuccuuuucagacccc

SEQ ID NO: 529243 - RNA, 20 nt, Artificial Sequence
  Synthetic
ucagcuccuuuucagacccc

SEQ ID NO: 529244 - RNA, 21 nt, Artificial Sequence
  Synthetic
uucagcuccuuuucagacccc

SEQ ID NO: 529245 - RNA, 22 nt, Artificial Sequence
  Synthetic
uuucagcuccuuuucagacccc

SEQ ID NO: 529246 - RNA, 23 nt, Artificial Sequence
  Synthetic
uuuucagcuccuuuucagacccc

SEQ ID NO: 529247 - RNA, 24 nt, Artificial Sequence
  Synthetic
uuuuucagcuccuuuucagacccc

SEQ ID NO: 529248 - RNA, 18 nt, Artificial Sequence
  Synthetic
auguggucuggggacccc

SEQ ID NO: 529249 - RNA, 19 nt, Artificial Sequence
  Synthetic
aauguggucuggggacccc

SEQ ID NO: 529250 - RNA, 20 nt, Artificial Sequence
  Synthetic
aaauguggucuggggacccc

SEQ ID NO: 529251 - RNA, 21 nt, Artificial Sequence
  Synthetic
uaaauguggucuggggacccc

SEQ ID NO: 529252 - RNA, 22 nt, Artificial Sequence
  Synthetic
uuaaauguggucuggggacccc

SEQ ID NO: 529253 - RNA, 23 nt, Artificial Sequence
  Synthetic
cuuaaauguggucuggggacccc

SEQ ID NO: 529254 - RNA, 24 nt, Artificial Sequence
  Synthetic
ccuuaaauguggucuggggacccc

SEQ ID NO: 529255 - RNA, 18 nt, Artificial Sequence
  Synthetic
gucacucuuccugacccc

SEQ ID NO: 529256 - RNA, 19 nt, Artificial Sequence
  Synthetic
ugucacucuuccugacccc

SEQ ID NO: 529257 - RNA, 20 nt, Artificial Sequence
  Synthetic
cugucacucuuccugacccc

SEQ ID NO: 529258 - RNA, 21 nt, Artificial Sequence
  Synthetic
ucugucacucuuccugacccc

SEQ ID NO: 529259 - RNA, 22 nt, Artificial Sequence
  Synthetic
gucugucacucuuccugacccc

SEQ ID NO: 529260 - RNA, 23 nt, Artificial Sequence
  Synthetic
cgucugucacucuuccugacccc

SEQ ID NO: 529261 - RNA, 24 nt, Artificial Sequence
  Synthetic
ucgucugucacucuuccugacccc

SEQ ID NO: 529262 - RNA, 18 nt, Artificial Sequence
  Synthetic
gcauuggaaauugacccc

SEQ ID NO: 529263 - RNA, 19 nt, Artificial Sequence
  Synthetic
agcauuggaaauugacccc

SEQ ID NO: 529264 - RNA, 20 nt, Artificial Sequence
  Synthetic
aagcauuggaaauugacccc

SEQ ID NO: 529265 - RNA, 21 nt, Artificial Sequence
  Synthetic
caagcauuggaaauugacccc

SEQ ID NO: 529266 - RNA, 22 nt, Artificial Sequence
  Synthetic
ccaagcauuggaaauugacccc

SEQ ID NO: 529267 - RNA, 23 nt, Artificial Sequence
  Synthetic
uccaagcauuggaaauugacccc

SEQ ID NO: 529268 - RNA, 24 nt, Artificial Sequence
  Synthetic
auccaagcauuggaaauugacccc

SEQ ID NO: 529269 - RNA, 18 nt, Artificial Sequence
  Synthetic
ggagaaucacuugacccc

SEQ ID NO: 529270 - RNA, 19 nt, Artificial Sequence
  Synthetic
aggagaaucacuugacccc

SEQ ID NO: 529271 - RNA, 20 nt, Artificial Sequence
  Synthetic
uaggagaaucacuugacccc

SEQ ID NO: 529272 - RNA, 21 nt, Artificial Sequence
  Synthetic
guaggagaaucacuugacccc

SEQ ID NO: 529273 - RNA, 22 nt, Artificial Sequence
  Synthetic
gguaggagaaucacuugacccc

SEQ ID NO: 529274 - RNA, 23 nt, Artificial Sequence
  Synthetic
agguaggagaaucacuugacccc

SEQ ID NO: 529275 - RNA, 24 nt, Artificial Sequence
  Synthetic
aagguaggagaaucacuugacccc

SEQ ID NO: 529276 - RNA, 18 nt, Artificial Sequence
  Synthetic
ccccuacacguugacccc

SEQ ID NO: 529277 - RNA, 19 nt, Artificial Sequence
  Synthetic
gccccuacacguugacccc

SEQ ID NO: 529278 - RNA, 20 nt, Artificial Sequence
  Synthetic
ugccccuacacguugacccc

SEQ ID NO: 529279 - RNA, 21 nt, Artificial Sequence
  Synthetic
cugccccuacacguugacccc

SEQ ID NO: 529280 - RNA, 22 nt, Artificial Sequence
  Synthetic
ucugccccuacacguugacccc

SEQ ID NO: 529281 - RNA, 23 nt, Artificial Sequence
  Synthetic
cucugccccuacacguugacccc

SEQ ID NO: 529282 - RNA, 24 nt, Artificial Sequence
  Synthetic
ccucugccccuacacguugacccc

SEQ ID NO: 529283 - RNA, 18 nt, Artificial Sequence
  Synthetic
cagauagcccccuacccc

SEQ ID NO: 529284 - RNA, 19 nt, Artificial Sequence
  Synthetic
gcagauagcccccuacccc

SEQ ID NO: 529285 - RNA, 20 nt, Artificial Sequence
  Synthetic
ugcagauagcccccuacccc

SEQ ID NO: 529286 - RNA, 21 nt, Artificial Sequence
  Synthetic
augcagauagcccccuacccc

SEQ ID NO: 529287 - RNA, 22 nt, Artificial Sequence
  Synthetic
caugcagauagcccccuacccc

SEQ ID NO: 529288 - RNA, 23 nt, Artificial Sequence
  Synthetic
gcaugcagauagcccccuacccc

SEQ ID NO: 529289 - RNA, 24 nt, Artificial Sequence
  Synthetic
ugcaugcagauagcccccuacccc

SEQ ID NO: 529290 - RNA, 18 nt, Artificial Sequence
  Synthetic
acuagauuuuucuacccc

SEQ ID NO: 529291 - RNA, 19 nt, Artificial Sequence
  Synthetic
aacuagauuuuucuacccc

SEQ ID NO: 529292 - RNA, 20 nt, Artificial Sequence
  Synthetic
caacuagauuuuucuacccc

SEQ ID NO: 529293 - RNA, 21 nt, Artificial Sequence
  Synthetic
acaacuagauuuuucuacccc

SEQ ID NO: 529294 - RNA, 22 nt, Artificial Sequence
  Synthetic
uacaacuagauuuuucuacccc

SEQ ID NO: 529295 - RNA, 23 nt, Artificial Sequence
  Synthetic
cuacaacuagauuuuucuacccc

SEQ ID NO: 529296 - RNA, 24 nt, Artificial Sequence
  Synthetic
ccuacaacuagauuuuucuacccc

SEQ ID NO: 529297 - RNA, 18 nt, Artificial Sequence
  Synthetic
ccuaggguggauuacccc

SEQ ID NO: 529298 - RNA, 19 nt, Artificial Sequence
  Synthetic
gccuaggguggauuacccc

SEQ ID NO: 529299 - RNA, 20 nt, Artificial Sequence
  Synthetic
ggccuaggguggauuacccc

SEQ ID NO: 529300 - RNA, 21 nt, Artificial Sequence
  Synthetic
uggccuaggguggauuacccc

SEQ ID NO: 529301 - RNA, 22 nt, Artificial Sequence
  Synthetic
cuggccuaggguggauuacccc

SEQ ID NO: 529302 - RNA, 23 nt, Artificial Sequence
  Synthetic
ccuggccuaggguggauuacccc

SEQ ID NO: 529303 - RNA, 24 nt, Artificial Sequence
  Synthetic
gccuggccuaggguggauuacccc

SEQ ID NO: 529304 - RNA, 18 nt, Artificial Sequence
  Synthetic
cuaaaaacugcuuacccc

SEQ ID NO: 529305 - RNA, 19 nt, Artificial Sequence
  Synthetic
acuaaaaacugcuuacccc

SEQ ID NO: 529306 - RNA, 20 nt, Artificial Sequence
  Synthetic
uacuaaaaacugcuuacccc

SEQ ID NO: 529307 - RNA, 21 nt, Artificial Sequence
  Synthetic
uuacuaaaaacugcuuacccc

SEQ ID NO: 529308 - RNA, 22 nt, Artificial Sequence
  Synthetic
uuuacuaaaaacugcuuacccc

SEQ ID NO: 529309 - RNA, 23 nt, Artificial Sequence
  Synthetic
cuuuacuaaaaacugcuuacccc

SEQ ID NO: 529310 - RNA, 24 nt, Artificial Sequence
  Synthetic
gcuuuacuaaaaacugcuuacccc

SEQ ID NO: 529311 - RNA, 18 nt, Artificial Sequence
  Synthetic
uggagugucagaaccccc

SEQ ID NO: 529312 - RNA, 19 nt, Artificial Sequence
  Synthetic
uuggagugucagaaccccc

SEQ ID NO: 529313 - RNA, 20 nt, Artificial Sequence
  Synthetic
uuuggagugucagaaccccc

SEQ ID NO: 529314 - RNA, 21 nt, Artificial Sequence
  Synthetic
auuuggagugucagaaccccc

SEQ ID NO: 529315 - RNA, 22 nt, Artificial Sequence
  Synthetic
cauuuggagugucagaaccccc

SEQ ID NO: 529316 - RNA, 23 nt, Artificial Sequence
  Synthetic
acauuuggagugucagaaccccc

SEQ ID NO: 529317 - RNA, 24 nt, Artificial Sequence
  Synthetic
aacauuuggagugucagaaccccc

SEQ ID NO: 529318 - RNA, 18 nt, Artificial Sequence
  Synthetic
uuuuaaaggagaaccccc

SEQ ID NO: 529319 - RNA, 19 nt, Artificial Sequence
  Synthetic
auuuuaaaggagaaccccc

SEQ ID NO: 529320 - RNA, 20 nt, Artificial Sequence
  Synthetic
cauuuuaaaggagaaccccc

SEQ ID NO: 529321 - RNA, 21 nt, Artificial Sequence
  Synthetic
ccauuuuaaaggagaaccccc

SEQ ID NO: 529322 - RNA, 22 nt, Artificial Sequence
  Synthetic
accauuuuaaaggagaaccccc

SEQ ID NO: 529323 - RNA, 23 nt, Artificial Sequence
  Synthetic
uaccauuuuaaaggagaaccccc

SEQ ID NO: 529324 - RNA, 24 nt, Artificial Sequence
  Synthetic
guaccauuuuaaaggagaaccccc

SEQ ID NO: 529325 - RNA, 18 nt, Artificial Sequence
  Synthetic
cauuuuaaaauaaccccc

SEQ ID NO: 529326 - RNA, 19 nt, Artificial Sequence
  Synthetic
ucauuuuaaaauaaccccc

SEQ ID NO: 529327 - RNA, 20 nt, Artificial Sequence
  Synthetic
uucauuuuaaaauaaccccc

SEQ ID NO: 529328 - RNA, 21 nt, Artificial Sequence
  Synthetic
uuucauuuuaaaauaaccccc

SEQ ID NO: 529329 - RNA, 22 nt, Artificial Sequence
  Synthetic
uuuucauuuuaaaauaaccccc

SEQ ID NO: 529330 - RNA, 23 nt, Artificial Sequence
  Synthetic
cuuuucauuuuaaaauaaccccc

SEQ ID NO: 529331 - RNA, 24 nt, Artificial Sequence
  Synthetic
acuuuucauuuuaaaauaaccccc

SEQ ID NO: 529332 - RNA, 18 nt, Artificial Sequence
  Synthetic
ugcucaaauacugccccc

SEQ ID NO: 529333 - RNA, 19 nt, Artificial Sequence
  Synthetic
cugcucaaauacugccccc

SEQ ID NO: 529334 - RNA, 20 nt, Artificial Sequence
  Synthetic
ucugcucaaauacugccccc

SEQ ID NO: 529335 - RNA, 21 nt, Artificial Sequence
  Synthetic
aucugcucaaauacugccccc

SEQ ID NO: 529336 - RNA, 22 nt, Artificial Sequence
  Synthetic
uaucugcucaaauacugccccc

SEQ ID NO: 529337 - RNA, 23 nt, Artificial Sequence
  Synthetic
auaucugcucaaauacugccccc

SEQ ID NO: 529338 - RNA, 24 nt, Artificial Sequence
  Synthetic
cauaucugcucaaauacugccccc

SEQ ID NO: 529339 - RNA, 18 nt, Artificial Sequence
  Synthetic
ucucauugcccugccccc

SEQ ID NO: 529340 - RNA, 19 nt, Artificial Sequence
  Synthetic
uucucauugcccugccccc

SEQ ID NO: 529341 - RNA, 20 nt, Artificial Sequence
  Synthetic
uuucucauugcccugccccc

SEQ ID NO: 529342 - RNA, 21 nt, Artificial Sequence
  Synthetic
auuucucauugcccugccccc

SEQ ID NO: 529343 - RNA, 22 nt, Artificial Sequence
  Synthetic
aauuucucauugcccugccccc

SEQ ID NO: 529344 - RNA, 23 nt, Artificial Sequence
  Synthetic
caauuucucauugcccugccccc

SEQ ID NO: 529345 - RNA, 24 nt, Artificial Sequence
  Synthetic
ucaauuucucauugcccugccccc

SEQ ID NO: 529346 - RNA, 18 nt, Artificial Sequence
  Synthetic
cuuaagaucauguccccc

SEQ ID NO: 529347 - RNA, 19 nt, Artificial Sequence
  Synthetic
ccuuaagaucauguccccc

SEQ ID NO: 529348 - RNA, 20 nt, Artificial Sequence
  Synthetic
cccuuaagaucauguccccc

SEQ ID NO: 529349 - RNA, 21 nt, Artificial Sequence
  Synthetic
ucccuuaagaucauguccccc

SEQ ID NO: 529350 - RNA, 22 nt, Artificial Sequence
  Synthetic
uucccuuaagaucauguccccc

SEQ ID NO: 529351 - RNA, 23 nt, Artificial Sequence
  Synthetic
uuucccuuaagaucauguccccc

SEQ ID NO: 529352 - RNA, 24 nt, Artificial Sequence
  Synthetic
auuucccuuaagaucauguccccc

SEQ ID NO: 529353 - RNA, 18 nt, Artificial Sequence
  Synthetic
cucauaucccuguccccc

SEQ ID NO: 529354 - RNA, 19 nt, Artificial Sequence
  Synthetic
ucucauaucccuguccccc

SEQ ID NO: 529355 - RNA, 20 nt, Artificial Sequence
  Synthetic
aucucauaucccuguccccc

SEQ ID NO: 529356 - RNA, 21 nt, Artificial Sequence
  Synthetic
caucucauaucccuguccccc

SEQ ID NO: 529357 - RNA, 22 nt, Artificial Sequence
  Synthetic
acaucucauaucccuguccccc

SEQ ID NO: 529358 - RNA, 23 nt, Artificial Sequence
  Synthetic
aacaucucauaucccuguccccc

SEQ ID NO: 529359 - RNA, 24 nt, Artificial Sequence
  Synthetic
caacaucucauaucccuguccccc

SEQ ID NO: 529360 - RNA, 18 nt, Artificial Sequence
  Synthetic
gcauccugaauuuccccc

SEQ ID NO: 529361 - RNA, 19 nt, Artificial Sequence
  Synthetic
agcauccugaauuuccccc

SEQ ID NO: 529362 - RNA, 20 nt, Artificial Sequence
  Synthetic
uagcauccugaauuuccccc

SEQ ID NO: 529363 - RNA, 21 nt, Artificial Sequence
  Synthetic
cuagcauccugaauuuccccc

SEQ ID NO: 529364 - RNA, 22 nt, Artificial Sequence
  Synthetic
gcuagcauccugaauuuccccc

SEQ ID NO: 529365 - RNA, 23 nt, Artificial Sequence
  Synthetic
agcuagcauccugaauuuccccc

SEQ ID NO: 529366 - RNA, 24 nt, Artificial Sequence
  Synthetic
gagcuagcauccugaauuuccccc

SEQ ID NO: 529367 - RNA, 18 nt, Artificial Sequence
  Synthetic
cagcggcagcaaagcccc

SEQ ID NO: 529368 - RNA, 19 nt, Artificial Sequence
  Synthetic
ccagcggcagcaaagcccc

SEQ ID NO: 529369 - RNA, 20 nt, Artificial Sequence
  Synthetic
gccagcggcagcaaagcccc

SEQ ID NO: 529370 - RNA, 21 nt, Artificial Sequence
  Synthetic
agccagcggcagcaaagcccc

SEQ ID NO: 529371 - RNA, 22 nt, Artificial Sequence
  Synthetic
gagccagcggcagcaaagcccc

SEQ ID NO: 529372 - RNA, 23 nt, Artificial Sequence
  Synthetic
cgagccagcggcagcaaagcccc

SEQ ID NO: 529373 - RNA, 24 nt, Artificial Sequence
  Synthetic
ccgagccagcggcagcaaagcccc

SEQ ID NO: 529374 - RNA, 18 nt, Artificial Sequence
  Synthetic
guaaguaaagucagcccc

SEQ ID NO: 529375 - RNA, 19 nt, Artificial Sequence
  Synthetic
gguaaguaaagucagcccc

SEQ ID NO: 529376 - RNA, 20 nt, Artificial Sequence
  Synthetic
agguaaguaaagucagcccc

SEQ ID NO: 529377 - RNA, 21 nt, Artificial Sequence
  Synthetic
uagguaaguaaagucagcccc

SEQ ID NO: 529378 - RNA, 22 nt, Artificial Sequence
  Synthetic
uuagguaaguaaagucagcccc

SEQ ID NO: 529379 - RNA, 23 nt, Artificial Sequence
  Synthetic
uuuagguaaguaaagucagcccc

SEQ ID NO: 529380 - RNA, 24 nt, Artificial Sequence
  Synthetic
cuuuagguaaguaaagucagcccc

SEQ ID NO: 529381 - RNA, 18 nt, Artificial Sequence
  Synthetic
gauuucucacaucgcccc

SEQ ID NO: 529382 - RNA, 19 nt, Artificial Sequence
  Synthetic
ugauuucucacaucgcccc

SEQ ID NO: 529383 - RNA, 20 nt, Artificial Sequence
  Synthetic
cugauuucucacaucgcccc

SEQ ID NO: 529384 - RNA, 21 nt, Artificial Sequence
  Synthetic
gcugauuucucacaucgcccc

SEQ ID NO: 529385 - RNA, 22 nt, Artificial Sequence
  Synthetic
agcugauuucucacaucgcccc

SEQ ID NO: 529386 - RNA, 23 nt, Artificial Sequence
  Synthetic
gagcugauuucucacaucgcccc

SEQ ID NO: 529387 - RNA, 24 nt, Artificial Sequence
  Synthetic
ggagcugauuucucacaucgcccc

SEQ ID NO: 529388 - RNA, 18 nt, Artificial Sequence
  Synthetic
uuguccaagcaucgcccc

SEQ ID NO: 529389 - RNA, 19 nt, Artificial Sequence
  Synthetic
guuguccaagcaucgcccc

SEQ ID NO: 529390 - RNA, 20 nt, Artificial Sequence
  Synthetic
uguuguccaagcaucgcccc

SEQ ID NO: 529391 - RNA, 21 nt, Artificial Sequence
  Synthetic
cuguuguccaagcaucgcccc

SEQ ID NO: 529392 - RNA, 22 nt, Artificial Sequence
  Synthetic
acuguuguccaagcaucgcccc

SEQ ID NO: 529393 - RNA, 23 nt, Artificial Sequence
  Synthetic
uacuguuguccaagcaucgcccc

SEQ ID NO: 529394 - RNA, 24 nt, Artificial Sequence
  Synthetic
auacuguuguccaagcaucgcccc

SEQ ID NO: 529395 - RNA, 18 nt, Artificial Sequence
  Synthetic
cagcaucaaucuggcccc

SEQ ID NO: 529396 - RNA, 19 nt, Artificial Sequence
  Synthetic
ccagcaucaaucuggcccc

SEQ ID NO: 529397 - RNA, 20 nt, Artificial Sequence
  Synthetic
accagcaucaaucuggcccc

SEQ ID NO: 529398 - RNA, 21 nt, Artificial Sequence
  Synthetic
gaccagcaucaaucuggcccc

SEQ ID NO: 529399 - RNA, 22 nt, Artificial Sequence
  Synthetic
agaccagcaucaaucuggcccc

SEQ ID NO: 529400 - RNA, 23 nt, Artificial Sequence
  Synthetic
gagaccagcaucaaucuggcccc

SEQ ID NO: 529401 - RNA, 24 nt, Artificial Sequence
  Synthetic
ggagaccagcaucaaucuggcccc

SEQ ID NO: 529402 - RNA, 18 nt, Artificial Sequence
  Synthetic
ccuucuuuaucaugcccc

SEQ ID NO: 529403 - RNA, 19 nt, Artificial Sequence
  Synthetic
gccuucuuuaucaugcccc

SEQ ID NO: 529404 - RNA, 20 nt, Artificial Sequence
  Synthetic
ggccuucuuuaucaugcccc

SEQ ID NO: 529405 - RNA, 21 nt, Artificial Sequence
  Synthetic
aggccuucuuuaucaugcccc

SEQ ID NO: 529406 - RNA, 22 nt, Artificial Sequence
  Synthetic
caggccuucuuuaucaugcccc

SEQ ID NO: 529407 - RNA, 23 nt, Artificial Sequence
  Synthetic
ccaggccuucuuuaucaugcccc

SEQ ID NO: 529408 - RNA, 24 nt, Artificial Sequence
  Synthetic
gccaggccuucuuuaucaugcccc

SEQ ID NO: 529409 - RNA, 18 nt, Artificial Sequence
  Synthetic
uucucauugcccugcccc

SEQ ID NO: 529410 - RNA, 19 nt, Artificial Sequence
  Synthetic
uuucucauugcccugcccc

SEQ ID NO: 529411 - RNA, 20 nt, Artificial Sequence
  Synthetic
auuucucauugcccugcccc

SEQ ID NO: 529412 - RNA, 21 nt, Artificial Sequence
  Synthetic
aauuucucauugcccugcccc

SEQ ID NO: 529413 - RNA, 22 nt, Artificial Sequence
  Synthetic
caauuucucauugcccugcccc

SEQ ID NO: 529414 - RNA, 23 nt, Artificial Sequence
  Synthetic
ucaauuucucauugcccugcccc

SEQ ID NO: 529415 - RNA, 24 nt, Artificial Sequence
  Synthetic
uucaauuucucauugcccugcccc

SEQ ID NO: 529416 - RNA, 18 nt, Artificial Sequence
  Synthetic
aaccugcacaugugcccc

SEQ ID NO: 529417 - RNA, 19 nt, Artificial Sequence
  Synthetic
aaaccugcacaugugcccc

SEQ ID NO: 529418 - RNA, 20 nt, Artificial Sequence
  Synthetic
caaaccugcacaugugcccc

SEQ ID NO: 529419 - RNA, 21 nt, Artificial Sequence
  Synthetic
acaaaccugcacaugugcccc

SEQ ID NO: 529420 - RNA, 22 nt, Artificial Sequence
  Synthetic
aacaaaccugcacaugugcccc

SEQ ID NO: 529421 - RNA, 23 nt, Artificial Sequence
  Synthetic
uaacaaaccugcacaugugcccc

SEQ ID NO: 529422 - RNA, 24 nt, Artificial Sequence
  Synthetic
guaacaaaccugcacaugugcccc

SEQ ID NO: 529423 - RNA, 18 nt, Artificial Sequence
  Synthetic
gagaauuccccuugcccc

SEQ ID NO: 529424 - RNA, 19 nt, Artificial Sequence
  Synthetic
agagaauuccccuugcccc

SEQ ID NO: 529425 - RNA, 20 nt, Artificial Sequence
  Synthetic
cagagaauuccccuugcccc

SEQ ID NO: 529426 - RNA, 21 nt, Artificial Sequence
  Synthetic
acagagaauuccccuugcccc

SEQ ID NO: 529427 - RNA, 22 nt, Artificial Sequence
  Synthetic
cacagagaauuccccuugcccc

SEQ ID NO: 529428 - RNA, 23 nt, Artificial Sequence
  Synthetic
ucacagagaauuccccuugcccc

SEQ ID NO: 529429 - RNA, 24 nt, Artificial Sequence
  Synthetic
aucacagagaauuccccuugcccc

SEQ ID NO: 529430 - RNA, 18 nt, Artificial Sequence
  Synthetic
agcaacaauaguaucccc

SEQ ID NO: 529431 - RNA, 19 nt, Artificial Sequence
  Synthetic
cagcaacaauaguaucccc

SEQ ID NO: 529432 - RNA, 20 nt, Artificial Sequence
  Synthetic
ucagcaacaauaguaucccc

SEQ ID NO: 529433 - RNA, 21 nt, Artificial Sequence
  Synthetic
aucagcaacaauaguaucccc

SEQ ID NO: 529434 - RNA, 22 nt, Artificial Sequence
  Synthetic
aaucagcaacaauaguaucccc

SEQ ID NO: 529435 - RNA, 23 nt, Artificial Sequence
  Synthetic
caaucagcaacaauaguaucccc

SEQ ID NO: 529436 - RNA, 24 nt, Artificial Sequence
  Synthetic
ucaaucagcaacaauaguaucccc

SEQ ID NO: 529437 - RNA, 18 nt, Artificial Sequence
  Synthetic
caaaaauauacccucccc

SEQ ID NO: 529438 - RNA, 19 nt, Artificial Sequence
  Synthetic
acaaaaauauacccucccc

SEQ ID NO: 529439 - RNA, 20 nt, Artificial Sequence
  Synthetic
cacaaaaauauacccucccc

SEQ ID NO: 529440 - RNA, 21 nt, Artificial Sequence
  Synthetic
acacaaaaauauacccucccc

SEQ ID NO: 529441 - RNA, 22 nt, Artificial Sequence
  Synthetic
uacacaaaaauauacccucccc

SEQ ID NO: 529442 - RNA, 23 nt, Artificial Sequence
  Synthetic
auacacaaaaauauacccucccc

SEQ ID NO: 529443 - RNA, 24 nt, Artificial Sequence
  Synthetic
uauacacaaaaauauacccucccc

SEQ ID NO: 529444 - RNA, 18 nt, Artificial Sequence
  Synthetic
acucccugaggccucccc

SEQ ID NO: 529445 - RNA, 19 nt, Artificial Sequence
  Synthetic
aacucccugaggccucccc

SEQ ID NO: 529446 - RNA, 20 nt, Artificial Sequence
  Synthetic
aaacucccugaggccucccc

SEQ ID NO: 529447 - RNA, 21 nt, Artificial Sequence
  Synthetic
aaaacucccugaggccucccc

SEQ ID NO: 529448 - RNA, 22 nt, Artificial Sequence
  Synthetic
aaaaacucccugaggccucccc

SEQ ID NO: 529449 - RNA, 23 nt, Artificial Sequence
  Synthetic
caaaaacucccugaggccucccc

SEQ ID NO: 529450 - RNA, 24 nt, Artificial Sequence
  Synthetic
gcaaaaacucccugaggccucccc

SEQ ID NO: 529451 - RNA, 18 nt, Artificial Sequence
  Synthetic
uuuaauaauuuccucccc

SEQ ID NO: 529452 - RNA, 19 nt, Artificial Sequence
  Synthetic
cuuuaauaauuuccucccc

SEQ ID NO: 529453 - RNA, 20 nt, Artificial Sequence
  Synthetic
ccuuuaauaauuuccucccc

SEQ ID NO: 529454 - RNA, 21 nt, Artificial Sequence
  Synthetic
uccuuuaauaauuuccucccc

SEQ ID NO: 529455 - RNA, 22 nt, Artificial Sequence
  Synthetic
guccuuuaauaauuuccucccc

SEQ ID NO: 529456 - RNA, 23 nt, Artificial Sequence
  Synthetic
aguccuuuaauaauuuccucccc

SEQ ID NO: 529457 - RNA, 24 nt, Artificial Sequence
  Synthetic
gaguccuuuaauaauuuccucccc

SEQ ID NO: 529458 - RNA, 18 nt, Artificial Sequence
  Synthetic
agcauggggcugcucccc

SEQ ID NO: 529459 - RNA, 19 nt, Artificial Sequence
  Synthetic
aagcauggggcugcucccc

SEQ ID NO: 529460 - RNA, 20 nt, Artificial Sequence
  Synthetic
aaagcauggggcugcucccc

SEQ ID NO: 529461 - RNA, 21 nt, Artificial Sequence
  Synthetic
caaagcauggggcugcucccc

SEQ ID NO: 529462 - RNA, 22 nt, Artificial Sequence
  Synthetic
acaaagcauggggcugcucccc

SEQ ID NO: 529463 - RNA, 23 nt, Artificial Sequence
  Synthetic
gacaaagcauggggcugcucccc

SEQ ID NO: 529464 - RNA, 24 nt, Artificial Sequence
  Synthetic
ugacaaagcauggggcugcucccc

SEQ ID NO: 529465 - RNA, 18 nt, Artificial Sequence
  Synthetic
gggaugauuuugcucccc

SEQ ID NO: 529466 - RNA, 19 nt, Artificial Sequence
  Synthetic
agggaugauuuugcucccc

SEQ ID NO: 529467 - RNA, 20 nt, Artificial Sequence
  Synthetic
uagggaugauuuugcucccc

SEQ ID NO: 529468 - RNA, 21 nt, Artificial Sequence
  Synthetic
cuagggaugauuuugcucccc

SEQ ID NO: 529469 - RNA, 22 nt, Artificial Sequence
  Synthetic
acuagggaugauuuugcucccc

SEQ ID NO: 529470 - RNA, 23 nt, Artificial Sequence
  Synthetic
aacuagggaugauuuugcucccc

SEQ ID NO: 529471 - RNA, 24 nt, Artificial Sequence
  Synthetic
caacuagggaugauuuugcucccc

SEQ ID NO: 529472 - RNA, 18 nt, Artificial Sequence
  Synthetic
uaguucagcuuucucccc

SEQ ID NO: 529473 - RNA, 19 nt, Artificial Sequence
  Synthetic
auaguucagcuuucucccc

SEQ ID NO: 529474 - RNA, 20 nt, Artificial Sequence
  Synthetic
cauaguucagcuuucucccc

SEQ ID NO: 529475 - RNA, 21 nt, Artificial Sequence
  Synthetic
acauaguucagcuuucucccc

SEQ ID NO: 529476 - RNA, 22 nt, Artificial Sequence
  Synthetic
cacauaguucagcuuucucccc

SEQ ID NO: 529477 - RNA, 23 nt, Artificial Sequence
  Synthetic
gcacauaguucagcuuucucccc

SEQ ID NO: 529478 - RNA, 24 nt, Artificial Sequence
  Synthetic
agcacauaguucagcuuucucccc

SEQ ID NO: 529479 - RNA, 18 nt, Artificial Sequence
  Synthetic
ugcacuugcugagucccc

SEQ ID NO: 529480 - RNA, 19 nt, Artificial Sequence
  Synthetic
uugcacuugcugagucccc

SEQ ID NO: 529481 - RNA, 20 nt, Artificial Sequence
  Synthetic
cuugcacuugcugagucccc

SEQ ID NO: 529482 - RNA, 21 nt, Artificial Sequence
  Synthetic
acuugcacuugcugagucccc

SEQ ID NO: 529483 - RNA, 22 nt, Artificial Sequence
  Synthetic
uacuugcacuugcugagucccc

SEQ ID NO: 529484 - RNA, 23 nt, Artificial Sequence
  Synthetic
uuacuugcacuugcugagucccc

SEQ ID NO: 529485 - RNA, 24 nt, Artificial Sequence
  Synthetic
uuuacuugcacuugcugagucccc

SEQ ID NO: 529486 - RNA, 18 nt, Artificial Sequence
  Synthetic
ccuuaagaucaugucccc

SEQ ID NO: 529487 - RNA, 19 nt, Artificial Sequence
  Synthetic
cccuuaagaucaugucccc

SEQ ID NO: 529488 - RNA, 20 nt, Artificial Sequence
  Synthetic
ucccuuaagaucaugucccc

SEQ ID NO: 529489 - RNA, 21 nt, Artificial Sequence
  Synthetic
uucccuuaagaucaugucccc

SEQ ID NO: 529490 - RNA, 22 nt, Artificial Sequence
  Synthetic
uuucccuuaagaucaugucccc

SEQ ID NO: 529491 - RNA, 23 nt, Artificial Sequence
  Synthetic
auuucccuuaagaucaugucccc

SEQ ID NO: 529492 - RNA, 24 nt, Artificial Sequence
  Synthetic
uauuucccuuaagaucaugucccc

SEQ ID NO: 529493 - RNA, 18 nt, Artificial Sequence
  Synthetic
gggcucugcugugucccc

SEQ ID NO: 529494 - RNA, 19 nt, Artificial Sequence
  Synthetic
agggcucugcugugucccc

SEQ ID NO: 529495 - RNA, 20 nt, Artificial Sequence
  Synthetic
cagggcucugcugugucccc

SEQ ID NO: 529496 - RNA, 21 nt, Artificial Sequence
  Synthetic
ucagggcucugcugugucccc

SEQ ID NO: 529497 - RNA, 22 nt, Artificial Sequence
  Synthetic
cucagggcucugcugugucccc

SEQ ID NO: 529498 - RNA, 23 nt, Artificial Sequence
  Synthetic
ccucagggcucugcugugucccc

SEQ ID NO: 529499 - RNA, 24 nt, Artificial Sequence
  Synthetic
gccucagggcucugcugugucccc

SEQ ID NO: 529500 - RNA, 18 nt, Artificial Sequence
  Synthetic
gaagcacaugcauucccc

SEQ ID NO: 529501 - RNA, 19 nt, Artificial Sequence
  Synthetic
agaagcacaugcauucccc

SEQ ID NO: 529502 - RNA, 20 nt, Artificial Sequence
  Synthetic
gagaagcacaugcauucccc

SEQ ID NO: 529503 - RNA, 21 nt, Artificial Sequence
  Synthetic
agagaagcacaugcauucccc

SEQ ID NO: 529504 - RNA, 22 nt, Artificial Sequence
  Synthetic
gagagaagcacaugcauucccc

SEQ ID NO: 529505 - RNA, 23 nt, Artificial Sequence
  Synthetic
agagagaagcacaugcauucccc

SEQ ID NO: 529506 - RNA, 24 nt, Artificial Sequence
  Synthetic
gagagagaagcacaugcauucccc

SEQ ID NO: 529507 - RNA, 18 nt, Artificial Sequence
  Synthetic
uguugacugcuuuucccc

SEQ ID NO: 529508 - RNA, 19 nt, Artificial Sequence
  Synthetic
uuguugacugcuuuucccc

SEQ ID NO: 529509 - RNA, 20 nt, Artificial Sequence
  Synthetic
uuuguugacugcuuuucccc

SEQ ID NO: 529510 - RNA, 21 nt, Artificial Sequence
  Synthetic
uuuuguugacugcuuuucccc

SEQ ID NO: 529511 - RNA, 22 nt, Artificial Sequence
  Synthetic
cuuuuguugacugcuuuucccc

SEQ ID NO: 529512 - RNA, 23 nt, Artificial Sequence
  Synthetic
acuuuuguugacugcuuuucccc

SEQ ID NO: 529513 - RNA, 24 nt, Artificial Sequence
  Synthetic
aacuuuuguugacugcuuuucccc

SEQ ID NO: 529514 - RNA, 18 nt, Artificial Sequence
  Synthetic
aagaaauauuuuuucccc

SEQ ID NO: 529515 - RNA, 19 nt, Artificial Sequence
  Synthetic
uaagaaauauuuuuucccc

SEQ ID NO: 529516 - RNA, 20 nt, Artificial Sequence
  Synthetic
auaagaaauauuuuuucccc

SEQ ID NO: 529517 - RNA, 21 nt, Artificial Sequence
  Synthetic
gauaagaaauauuuuuucccc

SEQ ID NO: 529518 - RNA, 22 nt, Artificial Sequence
  Synthetic
ugauaagaaauauuuuuucccc

SEQ ID NO: 529519 - RNA, 23 nt, Artificial Sequence
  Synthetic
augauaagaaauauuuuuucccc

SEQ ID NO: 529520 - RNA, 24 nt, Artificial Sequence
  Synthetic
gaugauaagaaauauuuuuucccc

SEQ ID NO: 529521 - RNA, 18 nt, Artificial Sequence
  Synthetic
ccagcggcagcaaagccc

SEQ ID NO: 529522 - RNA, 19 nt, Artificial Sequence
  Synthetic
gccagcggcagcaaagccc

SEQ ID NO: 529523 - RNA, 20 nt, Artificial Sequence
  Synthetic
agccagcggcagcaaagccc

SEQ ID NO: 529524 - RNA, 21 nt, Artificial Sequence
  Synthetic
gagccagcggcagcaaagccc

SEQ ID NO: 529525 - RNA, 22 nt, Artificial Sequence
  Synthetic
cgagccagcggcagcaaagccc

SEQ ID NO: 529526 - RNA, 23 nt, Artificial Sequence
  Synthetic
ccgagccagcggcagcaaagccc

SEQ ID NO: 529527 - RNA, 24 nt, Artificial Sequence
  Synthetic
gccgagccagcggcagcaaagccc

SEQ ID NO: 529528 - RNA, 18 nt, Artificial Sequence
  Synthetic
uacagcugagggaagccc

SEQ ID NO: 529529 - RNA, 19 nt, Artificial Sequence
  Synthetic
uuacagcugagggaagccc

SEQ ID NO: 529530 - RNA, 20 nt, Artificial Sequence
  Synthetic
uuuacagcugagggaagccc

SEQ ID NO: 529531 - RNA, 21 nt, Artificial Sequence
  Synthetic
cuuuacagcugagggaagccc

SEQ ID NO: 529532 - RNA, 22 nt, Artificial Sequence
  Synthetic
ccuuuacagcugagggaagccc

SEQ ID NO: 529533 - RNA, 23 nt, Artificial Sequence
  Synthetic
cccuuuacagcugagggaagccc

SEQ ID NO: 529534 - RNA, 24 nt, Artificial Sequence
  Synthetic
ccccuuuacagcugagggaagccc

SEQ ID NO: 529535 - RNA, 18 nt, Artificial Sequence
  Synthetic
cugcgaccccugaagccc

SEQ ID NO: 529536 - RNA, 19 nt, Artificial Sequence
  Synthetic
ucugcgaccccugaagccc

SEQ ID NO: 529537 - RNA, 20 nt, Artificial Sequence
  Synthetic
gucugcgaccccugaagccc

SEQ ID NO: 529538 - RNA, 21 nt, Artificial Sequence
  Synthetic
cgucugcgaccccugaagccc

SEQ ID NO: 529539 - RNA, 22 nt, Artificial Sequence
  Synthetic
gcgucugcgaccccugaagccc

SEQ ID NO: 529540 - RNA, 23 nt, Artificial Sequence
  Synthetic
ggcgucugcgaccccugaagccc

SEQ ID NO: 529541 - RNA, 24 nt, Artificial Sequence
  Synthetic
aggcgucugcgaccccugaagccc

SEQ ID NO: 529542 - RNA, 18 nt, Artificial Sequence
  Synthetic
uugcaugagaauaagccc

SEQ ID NO: 529543 - RNA, 19 nt, Artificial Sequence
  Synthetic
cuugcaugagaauaagccc

SEQ ID NO: 529544 - RNA, 20 nt, Artificial Sequence
  Synthetic
ucuugcaugagaauaagccc

SEQ ID NO: 529545 - RNA, 21 nt, Artificial Sequence
  Synthetic
uucuugcaugagaauaagccc

SEQ ID NO: 529546 - RNA, 22 nt, Artificial Sequence
  Synthetic
uuucuugcaugagaauaagccc

SEQ ID NO: 529547 - RNA, 23 nt, Artificial Sequence
  Synthetic
guuucuugcaugagaauaagccc

SEQ ID NO: 529548 - RNA, 24 nt, Artificial Sequence
  Synthetic
uguuucuugcaugagaauaagccc

SEQ ID NO: 529549 - RNA, 18 nt, Artificial Sequence
  Synthetic
uuugaccauguuaagccc

SEQ ID NO: 529550 - RNA, 19 nt, Artificial Sequence
  Synthetic
cuuugaccauguuaagccc

SEQ ID NO: 529551 - RNA, 20 nt, Artificial Sequence
  Synthetic
ucuuugaccauguuaagccc

SEQ ID NO: 529552 - RNA, 21 nt, Artificial Sequence
  Synthetic
uucuuugaccauguuaagccc

SEQ ID NO: 529553 - RNA, 22 nt, Artificial Sequence
  Synthetic
uuucuuugaccauguuaagccc

SEQ ID NO: 529554 - RNA, 23 nt, Artificial Sequence
  Synthetic
uuuucuuugaccauguuaagccc

SEQ ID NO: 529555 - RNA, 24 nt, Artificial Sequence
  Synthetic
auuuucuuugaccauguuaagccc

SEQ ID NO: 529556 - RNA, 18 nt, Artificial Sequence
  Synthetic
uccugucaucgacagccc

SEQ ID NO: 529557 - RNA, 19 nt, Artificial Sequence
  Synthetic
cuccugucaucgacagccc

SEQ ID NO: 529558 - RNA, 20 nt, Artificial Sequence
  Synthetic
ucuccugucaucgacagccc

SEQ ID NO: 529559 - RNA, 21 nt, Artificial Sequence
  Synthetic
gucuccugucaucgacagccc

SEQ ID NO: 529560 - RNA, 22 nt, Artificial Sequence
  Synthetic
ggucuccugucaucgacagccc

SEQ ID NO: 529561 - RNA, 23 nt, Artificial Sequence
  Synthetic
gggucuccugucaucgacagccc

SEQ ID NO: 529562 - RNA, 24 nt, Artificial Sequence
  Synthetic
agggucuccugucaucgacagccc

SEQ ID NO: 529563 - RNA, 18 nt, Artificial Sequence
  Synthetic
uugucgguuccccagccc

SEQ ID NO: 529564 - RNA, 19 nt, Artificial Sequence
  Synthetic
cuugucgguuccccagccc

SEQ ID NO: 529565 - RNA, 20 nt, Artificial Sequence
  Synthetic
acuugucgguuccccagccc

SEQ ID NO: 529566 - RNA, 21 nt, Artificial Sequence
  Synthetic
aacuugucgguuccccagccc

SEQ ID NO: 529567 - RNA, 22 nt, Artificial Sequence
  Synthetic
aaacuugucgguuccccagccc

SEQ ID NO: 529568 - RNA, 23 nt, Artificial Sequence
  Synthetic
aaaacuugucgguuccccagccc

SEQ ID NO: 529569 - RNA, 24 nt, Artificial Sequence
  Synthetic
uaaaacuugucgguuccccagccc

SEQ ID NO: 529570 - RNA, 18 nt, Artificial Sequence
  Synthetic
aacaauuuuguccagccc

SEQ ID NO: 529571 - RNA, 19 nt, Artificial Sequence
  Synthetic
uaacaauuuuguccagccc

SEQ ID NO: 529572 - RNA, 20 nt, Artificial Sequence
  Synthetic
cuaacaauuuuguccagccc

SEQ ID NO: 529573 - RNA, 21 nt, Artificial Sequence
  Synthetic
gcuaacaauuuuguccagccc

SEQ ID NO: 529574 - RNA, 22 nt, Artificial Sequence
  Synthetic
ggcuaacaauuuuguccagccc

SEQ ID NO: 529575 - RNA, 23 nt, Artificial Sequence
  Synthetic
uggcuaacaauuuuguccagccc

SEQ ID NO: 529576 - RNA, 24 nt, Artificial Sequence
  Synthetic
auggcuaacaauuuuguccagccc

SEQ ID NO: 529577 - RNA, 18 nt, Artificial Sequence
  Synthetic
gacguuaaguuccagccc

SEQ ID NO: 529578 - RNA, 19 nt, Artificial Sequence
  Synthetic
ugacguuaaguuccagccc

SEQ ID NO: 529579 - RNA, 20 nt, Artificial Sequence
  Synthetic
augacguuaaguuccagccc

SEQ ID NO: 529580 - RNA, 21 nt, Artificial Sequence
  Synthetic
aaugacguuaaguuccagccc

SEQ ID NO: 529581 - RNA, 22 nt, Artificial Sequence
  Synthetic
caaugacguuaaguuccagccc

SEQ ID NO: 529582 - RNA, 23 nt, Artificial Sequence
  Synthetic
ccaaugacguuaaguuccagccc

SEQ ID NO: 529583 - RNA, 24 nt, Artificial Sequence
  Synthetic
gccaaugacguuaaguuccagccc

SEQ ID NO: 529584 - RNA, 18 nt, Artificial Sequence
  Synthetic
agacauaacugucagccc

SEQ ID NO: 529585 - RNA, 19 nt, Artificial Sequence
  Synthetic
uagacauaacugucagccc

SEQ ID NO: 529586 - RNA, 20 nt, Artificial Sequence
  Synthetic
auagacauaacugucagccc

SEQ ID NO: 529587 - RNA, 21 nt, Artificial Sequence
  Synthetic
gauagacauaacugucagccc

SEQ ID NO: 529588 - RNA, 22 nt, Artificial Sequence
  Synthetic
agauagacauaacugucagccc

SEQ ID NO: 529589 - RNA, 23 nt, Artificial Sequence
  Synthetic
gagauagacauaacugucagccc

SEQ ID NO: 529590 - RNA, 24 nt, Artificial Sequence
  Synthetic
agagauagacauaacugucagccc

SEQ ID NO: 529591 - RNA, 18 nt, Artificial Sequence
  Synthetic
aagcugauggaagagccc

SEQ ID NO: 529592 - RNA, 19 nt, Artificial Sequence
  Synthetic
caagcugauggaagagccc

SEQ ID NO: 529593 - RNA, 20 nt, Artificial Sequence
  Synthetic
acaagcugauggaagagccc

SEQ ID NO: 529594 - RNA, 21 nt, Artificial Sequence
  Synthetic
cacaagcugauggaagagccc

SEQ ID NO: 529595 - RNA, 22 nt, Artificial Sequence
  Synthetic
ccacaagcugauggaagagccc

SEQ ID NO: 529596 - RNA, 23 nt, Artificial Sequence
  Synthetic
accacaagcugauggaagagccc

SEQ ID NO: 529597 - RNA, 24 nt, Artificial Sequence
  Synthetic
caccacaagcugauggaagagccc

SEQ ID NO: 529598 - RNA, 18 nt, Artificial Sequence
  Synthetic
ugugcugcagcagagccc

SEQ ID NO: 529599 - RNA, 19 nt, Artificial Sequence
  Synthetic
gugugcugcagcagagccc

SEQ ID NO: 529600 - RNA, 20 nt, Artificial Sequence
  Synthetic
ggugugcugcagcagagccc

SEQ ID NO: 529601 - RNA, 21 nt, Artificial Sequence
  Synthetic
uggugugcugcagcagagccc

SEQ ID NO: 529602 - RNA, 22 nt, Artificial Sequence
  Synthetic
guggugugcugcagcagagccc

SEQ ID NO: 529603 - RNA, 23 nt, Artificial Sequence
  Synthetic
aguggugugcugcagcagagccc

SEQ ID NO: 529604 - RNA, 24 nt, Artificial Sequence
  Synthetic
caguggugugcugcagcagagccc

SEQ ID NO: 529605 - RNA, 18 nt, Artificial Sequence
  Synthetic
gggggaucacccgagccc

SEQ ID NO: 529606 - RNA, 19 nt, Artificial Sequence
  Synthetic
ggggggaucacccgagccc

SEQ ID NO: 529607 - RNA, 20 nt, Artificial Sequence
  Synthetic
uggggggaucacccgagccc

SEQ ID NO: 529608 - RNA, 21 nt, Artificial Sequence
  Synthetic
uuggggggaucacccgagccc

SEQ ID NO: 529609 - RNA, 22 nt, Artificial Sequence
  Synthetic
guuggggggaucacccgagccc

SEQ ID NO: 529610 - RNA, 23 nt, Artificial Sequence
  Synthetic
gguuggggggaucacccgagccc

SEQ ID NO: 529611 - RNA, 24 nt, Artificial Sequence
  Synthetic
agguuggggggaucacccgagccc

SEQ ID NO: 529612 - RNA, 18 nt, Artificial Sequence
  Synthetic
aaucaacuaacugagccc

SEQ ID NO: 529613 - RNA, 19 nt, Artificial Sequence
  Synthetic
caaucaacuaacugagccc

SEQ ID NO: 529614 - RNA, 20 nt, Artificial Sequence
  Synthetic
ccaaucaacuaacugagccc

SEQ ID NO: 529615 - RNA, 21 nt, Artificial Sequence
  Synthetic
uccaaucaacuaacugagccc

SEQ ID NO: 529616 - RNA, 22 nt, Artificial Sequence
  Synthetic
auccaaucaacuaacugagccc

SEQ ID NO: 529617 - RNA, 23 nt, Artificial Sequence
  Synthetic
gauccaaucaacuaacugagccc

SEQ ID NO: 529618 - RNA, 24 nt, Artificial Sequence
  Synthetic
agauccaaucaacuaacugagccc

SEQ ID NO: 529619 - RNA, 18 nt, Artificial Sequence
  Synthetic
ggaggaucaucugagccc

SEQ ID NO: 529620 - RNA, 19 nt, Artificial Sequence
  Synthetic
gggaggaucaucugagccc

SEQ ID NO: 529621 - RNA, 20 nt, Artificial Sequence
  Synthetic
ugggaggaucaucugagccc

SEQ ID NO: 529622 - RNA, 21 nt, Artificial Sequence
  Synthetic
gugggaggaucaucugagccc

SEQ ID NO: 529623 - RNA, 22 nt, Artificial Sequence
  Synthetic
ugugggaggaucaucugagccc

SEQ ID NO: 529624 - RNA, 23 nt, Artificial Sequence
  Synthetic
augugggaggaucaucugagccc

SEQ ID NO: 529625 - RNA, 24 nt, Artificial Sequence
  Synthetic
gaugugggaggaucaucugagccc

SEQ ID NO: 529626 - RNA, 18 nt, Artificial Sequence
  Synthetic
ggagaacugcuugagccc

SEQ ID NO: 529627 - RNA, 19 nt, Artificial Sequence
  Synthetic
cggagaacugcuugagccc

SEQ ID NO: 529628 - RNA, 20 nt, Artificial Sequence
  Synthetic
gcggagaacugcuugagccc

SEQ ID NO: 529629 - RNA, 21 nt, Artificial Sequence
  Synthetic
ggcggagaacugcuugagccc

SEQ ID NO: 529630 - RNA, 22 nt, Artificial Sequence
  Synthetic
aggcggagaacugcuugagccc

SEQ ID NO: 529631 - RNA, 23 nt, Artificial Sequence
  Synthetic
gaggcggagaacugcuugagccc

SEQ ID NO: 529632 - RNA, 24 nt, Artificial Sequence
  Synthetic
ugaggcggagaacugcuugagccc

SEQ ID NO: 529633 - RNA, 18 nt, Artificial Sequence
  Synthetic
ggaggauugcuugagccc

SEQ ID NO: 529634 - RNA, 19 nt, Artificial Sequence
  Synthetic
gggaggauugcuugagccc

SEQ ID NO: 529635 - RNA, 20 nt, Artificial Sequence
  Synthetic
ugggaggauugcuugagccc

SEQ ID NO: 529636 - RNA, 21 nt, Artificial Sequence
  Synthetic
augggaggauugcuugagccc

SEQ ID NO: 529637 - RNA, 22 nt, Artificial Sequence
  Synthetic
uaugggaggauugcuugagccc

SEQ ID NO: 529638 - RNA, 23 nt, Artificial Sequence
  Synthetic
auaugggaggauugcuugagccc

SEQ ID NO: 529639 - RNA, 24 nt, Artificial Sequence
  Synthetic
gauaugggaggauugcuugagccc

SEQ ID NO: 529640 - RNA, 18 nt, Artificial Sequence
  Synthetic
augggagcccccuagccc

SEQ ID NO: 529641 - RNA, 19 nt, Artificial Sequence
  Synthetic
uaugggagcccccuagccc

SEQ ID NO: 529642 - RNA, 20 nt, Artificial Sequence
  Synthetic
uuaugggagcccccuagccc

SEQ ID NO: 529643 - RNA, 21 nt, Artificial Sequence
  Synthetic
cuuaugggagcccccuagccc

SEQ ID NO: 529644 - RNA, 22 nt, Artificial Sequence
  Synthetic
gcuuaugggagcccccuagccc

SEQ ID NO: 529645 - RNA, 23 nt, Artificial Sequence
  Synthetic
ugcuuaugggagcccccuagccc

SEQ ID NO: 529646 - RNA, 24 nt, Artificial Sequence
  Synthetic
cugcuuaugggagcccccuagccc

SEQ ID NO: 529647 - RNA, 18 nt, Artificial Sequence
  Synthetic
caaugccaauucuagccc

SEQ ID NO: 529648 - RNA, 19 nt, Artificial Sequence
  Synthetic
ucaaugccaauucuagccc

SEQ ID NO: 529649 - RNA, 20 nt, Artificial Sequence
  Synthetic
uucaaugccaauucuagccc

SEQ ID NO: 529650 - RNA, 21 nt, Artificial Sequence
  Synthetic
uuucaaugccaauucuagccc

SEQ ID NO: 529651 - RNA, 22 nt, Artificial Sequence
  Synthetic
cuuucaaugccaauucuagccc

SEQ ID NO: 529652 - RNA, 23 nt, Artificial Sequence
  Synthetic
gcuuucaaugccaauucuagccc

SEQ ID NO: 529653 - RNA, 24 nt, Artificial Sequence
  Synthetic
ugcuuucaaugccaauucuagccc

SEQ ID NO: 529654 - RNA, 18 nt, Artificial Sequence
  Synthetic
uaguaugguuucuagccc

SEQ ID NO: 529655 - RNA, 19 nt, Artificial Sequence
  Synthetic
cuaguaugguuucuagccc

SEQ ID NO: 529656 - RNA, 20 nt, Artificial Sequence
  Synthetic
ucuaguaugguuucuagccc

SEQ ID NO: 529657 - RNA, 21 nt, Artificial Sequence
  Synthetic
cucuaguaugguuucuagccc

SEQ ID NO: 529658 - RNA, 22 nt, Artificial Sequence
  Synthetic
acucuaguaugguuucuagccc

SEQ ID NO: 529659 - RNA, 23 nt, Artificial Sequence
  Synthetic
aacucuaguaugguuucuagccc

SEQ ID NO: 529660 - RNA, 24 nt, Artificial Sequence
  Synthetic
aaacucuaguaugguuucuagccc

SEQ ID NO: 529661 - RNA, 18 nt, Artificial Sequence
  Synthetic
uccaugcaucaguagccc

SEQ ID NO: 529662 - RNA, 19 nt, Artificial Sequence
  Synthetic
cuccaugcaucaguagccc

SEQ ID NO: 529663 - RNA, 20 nt, Artificial Sequence
  Synthetic
ucuccaugcaucaguagccc

SEQ ID NO: 529664 - RNA, 21 nt, Artificial Sequence
  Synthetic
cucuccaugcaucaguagccc

SEQ ID NO: 529665 - RNA, 22 nt, Artificial Sequence
  Synthetic
gcucuccaugcaucaguagccc

SEQ ID NO: 529666 - RNA, 23 nt, Artificial Sequence
  Synthetic
agcucuccaugcaucaguagccc

SEQ ID NO: 529667 - RNA, 24 nt, Artificial Sequence
  Synthetic
cagcucuccaugcaucaguagccc

SEQ ID NO: 529668 - RNA, 18 nt, Artificial Sequence
  Synthetic
cucucugucugguagccc

SEQ ID NO: 529669 - RNA, 19 nt, Artificial Sequence
  Synthetic
gcucucugucugguagccc

SEQ ID NO: 529670 - RNA, 20 nt, Artificial Sequence
  Synthetic
ggcucucugucugguagccc

SEQ ID NO: 529671 - RNA, 21 nt, Artificial Sequence
  Synthetic
aggcucucugucugguagccc

SEQ ID NO: 529672 - RNA, 22 nt, Artificial Sequence
  Synthetic
uaggcucucugucugguagccc

SEQ ID NO: 529673 - RNA, 23 nt, Artificial Sequence
  Synthetic
cuaggcucucugucugguagccc

SEQ ID NO: 529674 - RNA, 24 nt, Artificial Sequence
  Synthetic
ucuaggcucucugucugguagccc

SEQ ID NO: 529675 - RNA, 18 nt, Artificial Sequence
  Synthetic
aauuaaguccuaacgccc

SEQ ID NO: 529676 - RNA, 19 nt, Artificial Sequence
  Synthetic
gaauuaaguccuaacgccc

SEQ ID NO: 529677 - RNA, 20 nt, Artificial Sequence
  Synthetic
agaauuaaguccuaacgccc

SEQ ID NO: 529678 - RNA, 21 nt, Artificial Sequence
  Synthetic
gagaauuaaguccuaacgccc

SEQ ID NO: 529679 - RNA, 22 nt, Artificial Sequence
  Synthetic
agagaauuaaguccuaacgccc

SEQ ID NO: 529680 - RNA, 23 nt, Artificial Sequence
  Synthetic
gagagaauuaaguccuaacgccc

SEQ ID NO: 529681 - RNA, 24 nt, Artificial Sequence
  Synthetic
ggagagaauuaaguccuaacgccc

SEQ ID NO: 529682 - RNA, 18 nt, Artificial Sequence
  Synthetic
aaucauauaaucacgccc

SEQ ID NO: 529683 - RNA, 19 nt, Artificial Sequence
  Synthetic
caaucauauaaucacgccc

SEQ ID NO: 529684 - RNA, 20 nt, Artificial Sequence
  Synthetic
acaaucauauaaucacgccc

SEQ ID NO: 529685 - RNA, 21 nt, Artificial Sequence
  Synthetic
aacaaucauauaaucacgccc

SEQ ID NO: 529686 - RNA, 22 nt, Artificial Sequence
  Synthetic
uaacaaucauauaaucacgccc

SEQ ID NO: 529687 - RNA, 23 nt, Artificial Sequence
  Synthetic
uuaacaaucauauaaucacgccc

SEQ ID NO: 529688 - RNA, 24 nt, Artificial Sequence
  Synthetic
guuaacaaucauauaaucacgccc

SEQ ID NO: 529689 - RNA, 18 nt, Artificial Sequence
  Synthetic
uguacugagaaugcgccc

SEQ ID NO: 529690 - RNA, 19 nt, Artificial Sequence
  Synthetic
auguacugagaaugcgccc

SEQ ID NO: 529691 - RNA, 20 nt, Artificial Sequence
  Synthetic
uauguacugagaaugcgccc

SEQ ID NO: 529692 - RNA, 21 nt, Artificial Sequence
  Synthetic
cuauguacugagaaugcgccc

SEQ ID NO: 529693 - RNA, 22 nt, Artificial Sequence
  Synthetic
gcuauguacugagaaugcgccc

SEQ ID NO: 529694 - RNA, 23 nt, Artificial Sequence
  Synthetic
ugcuauguacugagaaugcgccc

SEQ ID NO: 529695 - RNA, 24 nt, Artificial Sequence
  Synthetic
gugcuauguacugagaaugcgccc

SEQ ID NO: 529696 - RNA, 18 nt, Artificial Sequence
  Synthetic
ugauuucucacaucgccc

SEQ ID NO: 529697 - RNA, 19 nt, Artificial Sequence
  Synthetic
cugauuucucacaucgccc

SEQ ID NO: 529698 - RNA, 20 nt, Artificial Sequence
  Synthetic
gcugauuucucacaucgccc

SEQ ID NO: 529699 - RNA, 21 nt, Artificial Sequence
  Synthetic
agcugauuucucacaucgccc

SEQ ID NO: 529700 - RNA, 22 nt, Artificial Sequence
  Synthetic
gagcugauuucucacaucgccc

SEQ ID NO: 529701 - RNA, 23 nt, Artificial Sequence
  Synthetic
ggagcugauuucucacaucgccc

SEQ ID NO: 529702 - RNA, 24 nt, Artificial Sequence
  Synthetic
uggagcugauuucucacaucgccc

SEQ ID NO: 529703 - RNA, 18 nt, Artificial Sequence
  Synthetic
aguaguaacaccucgccc

SEQ ID NO: 529704 - RNA, 19 nt, Artificial Sequence
  Synthetic
caguaguaacaccucgccc

SEQ ID NO: 529705 - RNA, 20 nt, Artificial Sequence
  Synthetic
ccaguaguaacaccucgccc

SEQ ID NO: 529706 - RNA, 21 nt, Artificial Sequence
  Synthetic
accaguaguaacaccucgccc

SEQ ID NO: 529707 - RNA, 22 nt, Artificial Sequence
  Synthetic
uaccaguaguaacaccucgccc

SEQ ID NO: 529708 - RNA, 23 nt, Artificial Sequence
  Synthetic
auaccaguaguaacaccucgccc

SEQ ID NO: 529709 - RNA, 24 nt, Artificial Sequence
  Synthetic
gauaccaguaguaacaccucgccc

SEQ ID NO: 529710 - RNA, 18 nt, Artificial Sequence
  Synthetic
cagcaagugcaaaggccc

SEQ ID NO: 529711 - RNA, 19 nt, Artificial Sequence
  Synthetic
acagcaagugcaaaggccc

SEQ ID NO: 529712 - RNA, 20 nt, Artificial Sequence
  Synthetic
gacagcaagugcaaaggccc

SEQ ID NO: 529713 - RNA, 21 nt, Artificial Sequence
  Synthetic
agacagcaagugcaaaggccc

SEQ ID NO: 529714 - RNA, 22 nt, Artificial Sequence
  Synthetic
gagacagcaagugcaaaggccc

SEQ ID NO: 529715 - RNA, 23 nt, Artificial Sequence
  Synthetic
agagacagcaagugcaaaggccc

SEQ ID NO: 529716 - RNA, 24 nt, Artificial Sequence
  Synthetic
cagagacagcaagugcaaaggccc

SEQ ID NO: 529717 - RNA, 18 nt, Artificial Sequence
  Synthetic
uuaucaaacuacaggccc

SEQ ID NO: 529718 - RNA, 19 nt, Artificial Sequence
  Synthetic
guuaucaaacuacaggccc

SEQ ID NO: 529719 - RNA, 20 nt, Artificial Sequence
  Synthetic
aguuaucaaacuacaggccc

SEQ ID NO: 529720 - RNA, 21 nt, Artificial Sequence
  Synthetic
aaguuaucaaacuacaggccc

SEQ ID NO: 529721 - RNA, 22 nt, Artificial Sequence
  Synthetic
caaguuaucaaacuacaggccc

SEQ ID NO: 529722 - RNA, 23 nt, Artificial Sequence
  Synthetic
ccaaguuaucaaacuacaggccc

SEQ ID NO: 529723 - RNA, 24 nt, Artificial Sequence
  Synthetic
uccaaguuaucaaacuacaggccc

SEQ ID NO: 529724 - RNA, 18 nt, Artificial Sequence
  Synthetic
cuuuaugcaagcaggccc

SEQ ID NO: 529725 - RNA, 19 nt, Artificial Sequence
  Synthetic
ucuuuaugcaagcaggccc

SEQ ID NO: 529726 - RNA, 20 nt, Artificial Sequence
  Synthetic
uucuuuaugcaagcaggccc

SEQ ID NO: 529727 - RNA, 21 nt, Artificial Sequence
  Synthetic
cuucuuuaugcaagcaggccc

SEQ ID NO: 529728 - RNA, 22 nt, Artificial Sequence
  Synthetic
acuucuuuaugcaagcaggccc

SEQ ID NO: 529729 - RNA, 23 nt, Artificial Sequence
  Synthetic
uacuucuuuaugcaagcaggccc

SEQ ID NO: 529730 - RNA, 24 nt, Artificial Sequence
  Synthetic
auacuucuuuaugcaagcaggccc

SEQ ID NO: 529731 - RNA, 18 nt, Artificial Sequence
  Synthetic
auaaauguucucaggccc

SEQ ID NO: 529732 - RNA, 19 nt, Artificial Sequence
  Synthetic
gauaaauguucucaggccc

SEQ ID NO: 529733 - RNA, 20 nt, Artificial Sequence
  Synthetic
agauaaauguucucaggccc

SEQ ID NO: 529734 - RNA, 21 nt, Artificial Sequence
  Synthetic
uagauaaauguucucaggccc

SEQ ID NO: 529735 - RNA, 22 nt, Artificial Sequence
  Synthetic
cuagauaaauguucucaggccc

SEQ ID NO: 529736 - RNA, 23 nt, Artificial Sequence
  Synthetic
ccuagauaaauguucucaggccc

SEQ ID NO: 529737 - RNA, 24 nt, Artificial Sequence
  Synthetic
accuagauaaauguucucaggccc

SEQ ID NO: 529738 - RNA, 18 nt, Artificial Sequence
  Synthetic
cagggaauagggaggccc

SEQ ID NO: 529739 - RNA, 19 nt, Artificial Sequence
  Synthetic
ucagggaauagggaggccc

SEQ ID NO: 529740 - RNA, 20 nt, Artificial Sequence
  Synthetic
cucagggaauagggaggccc

SEQ ID NO: 529741 - RNA, 21 nt, Artificial Sequence
  Synthetic
ucucagggaauagggaggccc

SEQ ID NO: 529742 - RNA, 22 nt, Artificial Sequence
  Synthetic
gucucagggaauagggaggccc

SEQ ID NO: 529743 - RNA, 23 nt, Artificial Sequence
  Synthetic
ugucucagggaauagggaggccc

SEQ ID NO: 529744 - RNA, 24 nt, Artificial Sequence
  Synthetic
gugucucagggaauagggaggccc

SEQ ID NO: 529745 - RNA, 18 nt, Artificial Sequence
  Synthetic
aaugugauuaugaggccc

SEQ ID NO: 529746 - RNA, 19 nt, Artificial Sequence
  Synthetic
caaugugauuaugaggccc

SEQ ID NO: 529747 - RNA, 20 nt, Artificial Sequence
  Synthetic
ucaaugugauuaugaggccc

SEQ ID NO: 529748 - RNA, 21 nt, Artificial Sequence
  Synthetic
uucaaugugauuaugaggccc

SEQ ID NO: 529749 - RNA, 22 nt, Artificial Sequence
  Synthetic
uuucaaugugauuaugaggccc

SEQ ID NO: 529750 - RNA, 23 nt, Artificial Sequence
  Synthetic
auuucaaugugauuaugaggccc

SEQ ID NO: 529751 - RNA, 24 nt, Artificial Sequence
  Synthetic
uauuucaaugugauuaugaggccc

SEQ ID NO: 529752 - RNA, 18 nt, Artificial Sequence
  Synthetic
guuacuacaucuaggccc

SEQ ID NO: 529753 - RNA, 19 nt, Artificial Sequence
  Synthetic
uguuacuacaucuaggccc

SEQ ID NO: 529754 - RNA, 20 nt, Artificial Sequence
  Synthetic
cuguuacuacaucuaggccc

SEQ ID NO: 529755 - RNA, 21 nt, Artificial Sequence
  Synthetic
gcuguuacuacaucuaggccc

SEQ ID NO: 529756 - RNA, 22 nt, Artificial Sequence
  Synthetic
agcuguuacuacaucuaggccc

SEQ ID NO: 529757 - RNA, 23 nt, Artificial Sequence
  Synthetic
gagcuguuacuacaucuaggccc

SEQ ID NO: 529758 - RNA, 24 nt, Artificial Sequence
  Synthetic
agagcuguuacuacaucuaggccc

SEQ ID NO: 529759 - RNA, 18 nt, Artificial Sequence
  Synthetic
ucaacucacuugcggccc

SEQ ID NO: 529760 - RNA, 19 nt, Artificial Sequence
  Synthetic
aucaacucacuugcggccc

SEQ ID NO: 529761 - RNA, 20 nt, Artificial Sequence
  Synthetic
uaucaacucacuugcggccc

SEQ ID NO: 529762 - RNA, 21 nt, Artificial Sequence
  Synthetic
uuaucaacucacuugcggccc

SEQ ID NO: 529763 - RNA, 22 nt, Artificial Sequence
  Synthetic
cuuaucaacucacuugcggccc

SEQ ID NO: 529764 - RNA, 23 nt, Artificial Sequence
  Synthetic
gcuuaucaacucacuugcggccc

SEQ ID NO: 529765 - RNA, 24 nt, Artificial Sequence
  Synthetic
ugcuuaucaacucacuugcggccc

SEQ ID NO: 529766 - RNA, 18 nt, Artificial Sequence
  Synthetic
guaucagaauaagggccc

SEQ ID NO: 529767 - RNA, 19 nt, Artificial Sequence
  Synthetic
aguaucagaauaagggccc

SEQ ID NO: 529768 - RNA, 20 nt, Artificial Sequence
  Synthetic
aaguaucagaauaagggccc

SEQ ID NO: 529769 - RNA, 21 nt, Artificial Sequence
  Synthetic
aaaguaucagaauaagggccc

SEQ ID NO: 529770 - RNA, 22 nt, Artificial Sequence
  Synthetic
aaaaguaucagaauaagggccc

SEQ ID NO: 529771 - RNA, 23 nt, Artificial Sequence
  Synthetic
uaaaaguaucagaauaagggccc

SEQ ID NO: 529772 - RNA, 24 nt, Artificial Sequence
  Synthetic
uuaaaaguaucagaauaagggccc

SEQ ID NO: 529773 - RNA, 18 nt, Artificial Sequence
  Synthetic
ccucgaacuccugggccc

SEQ ID NO: 529774 - RNA, 19 nt, Artificial Sequence
  Synthetic
gccucgaacuccugggccc

SEQ ID NO: 529775 - RNA, 20 nt, Artificial Sequence
  Synthetic
agccucgaacuccugggccc

SEQ ID NO: 529776 - RNA, 21 nt, Artificial Sequence
  Synthetic
cagccucgaacuccugggccc

SEQ ID NO: 529777 - RNA, 22 nt, Artificial Sequence
  Synthetic
gcagccucgaacuccugggccc

SEQ ID NO: 529778 - RNA, 23 nt, Artificial Sequence
  Synthetic
ugcagccucgaacuccugggccc

SEQ ID NO: 529779 - RNA, 24 nt, Artificial Sequence
  Synthetic
cugcagccucgaacuccugggccc

SEQ ID NO: 529780 - RNA, 18 nt, Artificial Sequence
  Synthetic
acagagaccaaauggccc

SEQ ID NO: 529781 - RNA, 19 nt, Artificial Sequence
  Synthetic
aacagagaccaaauggccc

SEQ ID NO: 529782 - RNA, 20 nt, Artificial Sequence
  Synthetic
caacagagaccaaauggccc

SEQ ID NO: 529783 - RNA, 21 nt, Artificial Sequence
  Synthetic
ccaacagagaccaaauggccc

SEQ ID NO: 529784 - RNA, 22 nt, Artificial Sequence
  Synthetic
uccaacagagaccaaauggccc

SEQ ID NO: 529785 - RNA, 23 nt, Artificial Sequence
  Synthetic
uuccaacagagaccaaauggccc

SEQ ID NO: 529786 - RNA, 24 nt, Artificial Sequence
  Synthetic
uuuccaacagagaccaaauggccc

SEQ ID NO: 529787 - RNA, 18 nt, Artificial Sequence
  Synthetic
gcauggaaggaauggccc

SEQ ID NO: 529788 - RNA, 19 nt, Artificial Sequence
  Synthetic
ggcauggaaggaauggccc

SEQ ID NO: 529789 - RNA, 20 nt, Artificial Sequence
  Synthetic
uggcauggaaggaauggccc

SEQ ID NO: 529790 - RNA, 21 nt, Artificial Sequence
  Synthetic
guggcauggaaggaauggccc

SEQ ID NO: 529791 - RNA, 22 nt, Artificial Sequence
  Synthetic
aguggcauggaaggaauggccc

SEQ ID NO: 529792 - RNA, 23 nt, Artificial Sequence
  Synthetic
caguggcauggaaggaauggccc

SEQ ID NO: 529793 - RNA, 24 nt, Artificial Sequence
  Synthetic
ccaguggcauggaaggaauggccc

SEQ ID NO: 529794 - RNA, 18 nt, Artificial Sequence
  Synthetic
gggaaugaaagauggccc

SEQ ID NO: 529795 - RNA, 19 nt, Artificial Sequence
  Synthetic
ugggaaugaaagauggccc

SEQ ID NO: 529796 - RNA, 20 nt, Artificial Sequence
  Synthetic
augggaaugaaagauggccc

SEQ ID NO: 529797 - RNA, 21 nt, Artificial Sequence
  Synthetic
caugggaaugaaagauggccc

SEQ ID NO: 529798 - RNA, 22 nt, Artificial Sequence
  Synthetic
acaugggaaugaaagauggccc

SEQ ID NO: 529799 - RNA, 23 nt, Artificial Sequence
  Synthetic
cacaugggaaugaaagauggccc

SEQ ID NO: 529800 - RNA, 24 nt, Artificial Sequence
  Synthetic
gcacaugggaaugaaagauggccc

SEQ ID NO: 529801 - RNA, 18 nt, Artificial Sequence
  Synthetic
cggcccugugccuggccc

SEQ ID NO: 529802 - RNA, 19 nt, Artificial Sequence
  Synthetic
acggcccugugccuggccc

SEQ ID NO: 529803 - RNA, 20 nt, Artificial Sequence
  Synthetic
cacggcccugugccuggccc

SEQ ID NO: 529804 - RNA, 21 nt, Artificial Sequence
  Synthetic
gcacggcccugugccuggccc

SEQ ID NO: 529805 - RNA, 22 nt, Artificial Sequence
  Synthetic
agcacggcccugugccuggccc

SEQ ID NO: 529806 - RNA, 23 nt, Artificial Sequence
  Synthetic
cagcacggcccugugccuggccc

SEQ ID NO: 529807 - RNA, 24 nt, Artificial Sequence
  Synthetic
gcagcacggcccugugccuggccc

SEQ ID NO: 529808 - RNA, 18 nt, Artificial Sequence
  Synthetic
ucaaugaauggcuggccc

SEQ ID NO: 529809 - RNA, 19 nt, Artificial Sequence
  Synthetic
uucaaugaauggcuggccc

SEQ ID NO: 529810 - RNA, 20 nt, Artificial Sequence
  Synthetic
uuucaaugaauggcuggccc

SEQ ID NO: 529811 - RNA, 21 nt, Artificial Sequence
  Synthetic
guuucaaugaauggcuggccc

SEQ ID NO: 529812 - RNA, 22 nt, Artificial Sequence
  Synthetic
uguuucaaugaauggcuggccc

SEQ ID NO: 529813 - RNA, 23 nt, Artificial Sequence
  Synthetic
uuguuucaaugaauggcuggccc

SEQ ID NO: 529814 - RNA, 24 nt, Artificial Sequence
  Synthetic
uuuguuucaaugaauggcuggccc

SEQ ID NO: 529815 - RNA, 18 nt, Artificial Sequence
  Synthetic
gaggacuaaauguggccc

SEQ ID NO: 529816 - RNA, 19 nt, Artificial Sequence
  Synthetic
ggaggacuaaauguggccc

SEQ ID NO: 529817 - RNA, 20 nt, Artificial Sequence
  Synthetic
uggaggacuaaauguggccc

SEQ ID NO: 529818 - RNA, 21 nt, Artificial Sequence
  Synthetic
guggaggacuaaauguggccc

SEQ ID NO: 529819 - RNA, 22 nt, Artificial Sequence
  Synthetic
gguggaggacuaaauguggccc

SEQ ID NO: 529820 - RNA, 23 nt, Artificial Sequence
  Synthetic
agguggaggacuaaauguggccc

SEQ ID NO: 529821 - RNA, 24 nt, Artificial Sequence
  Synthetic
uagguggaggacuaaauguggccc

SEQ ID NO: 529822 - RNA, 18 nt, Artificial Sequence
  Synthetic
uguacuggucuguggccc

SEQ ID NO: 529823 - RNA, 19 nt, Artificial Sequence
  Synthetic
cuguacuggucuguggccc

SEQ ID NO: 529824 - RNA, 20 nt, Artificial Sequence
  Synthetic
ccuguacuggucuguggccc

SEQ ID NO: 529825 - RNA, 21 nt, Artificial Sequence
  Synthetic
accuguacuggucuguggccc

SEQ ID NO: 529826 - RNA, 22 nt, Artificial Sequence
  Synthetic
gaccuguacuggucuguggccc

SEQ ID NO: 529827 - RNA, 23 nt, Artificial Sequence
  Synthetic
ugaccuguacuggucuguggccc

SEQ ID NO: 529828 - RNA, 24 nt, Artificial Sequence
  Synthetic
cugaccuguacuggucuguggccc

SEQ ID NO: 529829 - RNA, 18 nt, Artificial Sequence
  Synthetic
gguggguguaauuggccc

SEQ ID NO: 529830 - RNA, 19 nt, Artificial Sequence
  Synthetic
ugguggguguaauuggccc

SEQ ID NO: 529831 - RNA, 20 nt, Artificial Sequence
  Synthetic
gugguggguguaauuggccc

SEQ ID NO: 529832 - RNA, 21 nt, Artificial Sequence
  Synthetic
agugguggguguaauuggccc

SEQ ID NO: 529833 - RNA, 22 nt, Artificial Sequence
  Synthetic
aagugguggguguaauuggccc

SEQ ID NO: 529834 - RNA, 23 nt, Artificial Sequence
  Synthetic
caagugguggguguaauuggccc

SEQ ID NO: 529835 - RNA, 24 nt, Artificial Sequence
  Synthetic
acaagugguggguguaauuggccc

SEQ ID NO: 529836 - RNA, 18 nt, Artificial Sequence
  Synthetic
gaagaauuaugaaugccc

SEQ ID NO: 529837 - RNA, 19 nt, Artificial Sequence
  Synthetic
ugaagaauuaugaaugccc

SEQ ID NO: 529838 - RNA, 20 nt, Artificial Sequence
  Synthetic
augaagaauuaugaaugccc

SEQ ID NO: 529839 - RNA, 21 nt, Artificial Sequence
  Synthetic
gaugaagaauuaugaaugccc

SEQ ID NO: 529840 - RNA, 22 nt, Artificial Sequence
  Synthetic
ugaugaagaauuaugaaugccc

SEQ ID NO: 529841 - RNA, 23 nt, Artificial Sequence
  Synthetic
uugaugaagaauuaugaaugccc

SEQ ID NO: 529842 - RNA, 24 nt, Artificial Sequence
  Synthetic
uuugaugaagaauuaugaaugccc

SEQ ID NO: 529843 - RNA, 18 nt, Artificial Sequence
  Synthetic
auacucucuugaaugccc

SEQ ID NO: 529844 - RNA, 19 nt, Artificial Sequence
  Synthetic
cauacucucuugaaugccc

SEQ ID NO: 529845 - RNA, 20 nt, Artificial Sequence
  Synthetic
ccauacucucuugaaugccc

SEQ ID NO: 529846 - RNA, 21 nt, Artificial Sequence
  Synthetic
gccauacucucuugaaugccc

SEQ ID NO: 529847 - RNA, 22 nt, Artificial Sequence
  Synthetic
ggccauacucucuugaaugccc

SEQ ID NO: 529848 - RNA, 23 nt, Artificial Sequence
  Synthetic
uggccauacucucuugaaugccc

SEQ ID NO: 529849 - RNA, 24 nt, Artificial Sequence
  Synthetic
cuggccauacucucuugaaugccc

SEQ ID NO: 529850 - RNA, 18 nt, Artificial Sequence
  Synthetic
aagaccucugacaugccc

SEQ ID NO: 529851 - RNA, 19 nt, Artificial Sequence
  Synthetic
uaagaccucugacaugccc

SEQ ID NO: 529852 - RNA, 20 nt, Artificial Sequence
  Synthetic
uuaagaccucugacaugccc

SEQ ID NO: 529853 - RNA, 21 nt, Artificial Sequence
  Synthetic
auuaagaccucugacaugccc

SEQ ID NO: 529854 - RNA, 22 nt, Artificial Sequence
  Synthetic
cauuaagaccucugacaugccc

SEQ ID NO: 529855 - RNA, 23 nt, Artificial Sequence
  Synthetic
ccauuaagaccucugacaugccc

SEQ ID NO: 529856 - RNA, 24 nt, Artificial Sequence
  Synthetic
gccauuaagaccucugacaugccc

SEQ ID NO: 529857 - RNA, 18 nt, Artificial Sequence
  Synthetic
gaaauccauuugaugccc

SEQ ID NO: 529858 - RNA, 19 nt, Artificial Sequence
  Synthetic
ugaaauccauuugaugccc

SEQ ID NO: 529859 - RNA, 20 nt, Artificial Sequence
  Synthetic
gugaaauccauuugaugccc

SEQ ID NO: 529860 - RNA, 21 nt, Artificial Sequence
  Synthetic
cgugaaauccauuugaugccc

SEQ ID NO: 529861 - RNA, 22 nt, Artificial Sequence
  Synthetic
ucgugaaauccauuugaugccc

SEQ ID NO: 529862 - RNA, 23 nt, Artificial Sequence
  Synthetic
cucgugaaauccauuugaugccc

SEQ ID NO: 529863 - RNA, 24 nt, Artificial Sequence
  Synthetic
ccucgugaaauccauuugaugccc

SEQ ID NO: 529864 - RNA, 18 nt, Artificial Sequence
  Synthetic
gaauauaagaguaugccc

SEQ ID NO: 529865 - RNA, 19 nt, Artificial Sequence
  Synthetic
ggaauauaagaguaugccc

SEQ ID NO: 529866 - RNA, 20 nt, Artificial Sequence
  Synthetic
uggaauauaagaguaugccc

SEQ ID NO: 529867 - RNA, 21 nt, Artificial Sequence
  Synthetic
guggaauauaagaguaugccc

SEQ ID NO: 529868 - RNA, 22 nt, Artificial Sequence
  Synthetic
uguggaauauaagaguaugccc

SEQ ID NO: 529869 - RNA, 23 nt, Artificial Sequence
  Synthetic
uuguggaauauaagaguaugccc

SEQ ID NO: 529870 - RNA, 24 nt, Artificial Sequence
  Synthetic
cuuguggaauauaagaguaugccc

SEQ ID NO: 529871 - RNA, 18 nt, Artificial Sequence
  Synthetic
aaaauggccauacugccc

SEQ ID NO: 529872 - RNA, 19 nt, Artificial Sequence
  Synthetic
gaaaauggccauacugccc

SEQ ID NO: 529873 - RNA, 20 nt, Artificial Sequence
  Synthetic
ugaaaauggccauacugccc

SEQ ID NO: 529874 - RNA, 21 nt, Artificial Sequence
  Synthetic
gugaaaauggccauacugccc

SEQ ID NO: 529875 - RNA, 22 nt, Artificial Sequence
  Synthetic
cgugaaaauggccauacugccc

SEQ ID NO: 529876 - RNA, 23 nt, Artificial Sequence
  Synthetic
ucgugaaaauggccauacugccc

SEQ ID NO: 529877 - RNA, 24 nt, Artificial Sequence
  Synthetic
aucgugaaaauggccauacugccc

SEQ ID NO: 529878 - RNA, 18 nt, Artificial Sequence
  Synthetic
gagccaccgcaccugccc

SEQ ID NO: 529879 - RNA, 19 nt, Artificial Sequence
  Synthetic
ugagccaccgcaccugccc

SEQ ID NO: 529880 - RNA, 20 nt, Artificial Sequence
  Synthetic
augagccaccgcaccugccc

SEQ ID NO: 529881 - RNA, 21 nt, Artificial Sequence
  Synthetic
caugagccaccgcaccugccc

SEQ ID NO: 529882 - RNA, 22 nt, Artificial Sequence
  Synthetic
acaugagccaccgcaccugccc

SEQ ID NO: 529883 - RNA, 23 nt, Artificial Sequence
  Synthetic
gacaugagccaccgcaccugccc

SEQ ID NO: 529884 - RNA, 24 nt, Artificial Sequence
  Synthetic
agacaugagccaccgcaccugccc

SEQ ID NO: 529885 - RNA, 18 nt, Artificial Sequence
  Synthetic
caauccuguucucugccc

SEQ ID NO: 529886 - RNA, 19 nt, Artificial Sequence
  Synthetic
acaauccuguucucugccc

SEQ ID NO: 529887 - RNA, 20 nt, Artificial Sequence
  Synthetic
gacaauccuguucucugccc

SEQ ID NO: 529888 - RNA, 21 nt, Artificial Sequence
  Synthetic
agacaauccuguucucugccc

SEQ ID NO: 529889 - RNA, 22 nt, Artificial Sequence
  Synthetic
uagacaauccuguucucugccc

SEQ ID NO: 529890 - RNA, 23 nt, Artificial Sequence
  Synthetic
guagacaauccuguucucugccc

SEQ ID NO: 529891 - RNA, 24 nt, Artificial Sequence
  Synthetic
gguagacaauccuguucucugccc

SEQ ID NO: 529892 - RNA, 18 nt, Artificial Sequence
  Synthetic
uaaaaauggcaagugccc

SEQ ID NO: 529893 - RNA, 19 nt, Artificial Sequence
  Synthetic
auaaaaauggcaagugccc

SEQ ID NO: 529894 - RNA, 20 nt, Artificial Sequence
  Synthetic
aauaaaaauggcaagugccc

SEQ ID NO: 529895 - RNA, 21 nt, Artificial Sequence
  Synthetic
aaauaaaaauggcaagugccc

SEQ ID NO: 529896 - RNA, 22 nt, Artificial Sequence
  Synthetic
uaaauaaaaauggcaagugccc

SEQ ID NO: 529897 - RNA, 23 nt, Artificial Sequence
  Synthetic
auaaauaaaaauggcaagugccc

SEQ ID NO: 529898 - RNA, 24 nt, Artificial Sequence
  Synthetic
aauaaauaaaaauggcaagugccc

SEQ ID NO: 529899 - RNA, 18 nt, Artificial Sequence
  Synthetic
augaauguuucauugccc

SEQ ID NO: 529900 - RNA, 19 nt, Artificial Sequence
  Synthetic
caugaauguuucauugccc

SEQ ID NO: 529901 - RNA, 20 nt, Artificial Sequence
  Synthetic
ucaugaauguuucauugccc

SEQ ID NO: 529902 - RNA, 21 nt, Artificial Sequence
  Synthetic
uucaugaauguuucauugccc

SEQ ID NO: 529903 - RNA, 22 nt, Artificial Sequence
  Synthetic
uuucaugaauguuucauugccc

SEQ ID NO: 529904 - RNA, 23 nt, Artificial Sequence
  Synthetic
guuucaugaauguuucauugccc

SEQ ID NO: 529905 - RNA, 24 nt, Artificial Sequence
  Synthetic
aguuucaugaauguuucauugccc

SEQ ID NO: 529906 - RNA, 18 nt, Artificial Sequence
  Synthetic
agagaauuccccuugccc

SEQ ID NO: 529907 - RNA, 19 nt, Artificial Sequence
  Synthetic
cagagaauuccccuugccc

SEQ ID NO: 529908 - RNA, 20 nt, Artificial Sequence
  Synthetic
acagagaauuccccuugccc

SEQ ID NO: 529909 - RNA, 21 nt, Artificial Sequence
  Synthetic
cacagagaauuccccuugccc

SEQ ID NO: 529910 - RNA, 22 nt, Artificial Sequence
  Synthetic
ucacagagaauuccccuugccc

SEQ ID NO: 529911 - RNA, 23 nt, Artificial Sequence
  Synthetic
aucacagagaauuccccuugccc

SEQ ID NO: 529912 - RNA, 24 nt, Artificial Sequence
  Synthetic
aaucacagagaauuccccuugccc

SEQ ID NO: 529913 - RNA, 18 nt, Artificial Sequence
  Synthetic
caaguaggguccuugccc

SEQ ID NO: 529914 - RNA, 19 nt, Artificial Sequence
  Synthetic
acaaguaggguccuugccc

SEQ ID NO: 529915 - RNA, 20 nt, Artificial Sequence
  Synthetic
aacaaguaggguccuugccc

SEQ ID NO: 529916 - RNA, 21 nt, Artificial Sequence
  Synthetic
uaacaaguaggguccuugccc

SEQ ID NO: 529917 - RNA, 22 nt, Artificial Sequence
  Synthetic
uuaacaaguaggguccuugccc

SEQ ID NO: 529918 - RNA, 23 nt, Artificial Sequence
  Synthetic
cuuaacaaguaggguccuugccc

SEQ ID NO: 529919 - RNA, 24 nt, Artificial Sequence
  Synthetic
ccuuaacaaguaggguccuugccc

SEQ ID NO: 529920 - RNA, 18 nt, Artificial Sequence
  Synthetic
gcguucaucauguugccc

SEQ ID NO: 529921 - RNA, 19 nt, Artificial Sequence
  Synthetic
agcguucaucauguugccc

SEQ ID NO: 529922 - RNA, 20 nt, Artificial Sequence
  Synthetic
cagcguucaucauguugccc

SEQ ID NO: 529923 - RNA, 21 nt, Artificial Sequence
  Synthetic
ucagcguucaucauguugccc

SEQ ID NO: 529924 - RNA, 22 nt, Artificial Sequence
  Synthetic
aucagcguucaucauguugccc

SEQ ID NO: 529925 - RNA, 23 nt, Artificial Sequence
  Synthetic
caucagcguucaucauguugccc

SEQ ID NO: 529926 - RNA, 24 nt, Artificial Sequence
  Synthetic
ucaucagcguucaucauguugccc

SEQ ID NO: 529927 - RNA, 18 nt, Artificial Sequence
  Synthetic
uaguggcugcuguugccc

SEQ ID NO: 529928 - RNA, 19 nt, Artificial Sequence
  Synthetic
cuaguggcugcuguugccc

SEQ ID NO: 529929 - RNA, 20 nt, Artificial Sequence
  Synthetic
acuaguggcugcuguugccc

SEQ ID NO: 529930 - RNA, 21 nt, Artificial Sequence
  Synthetic
gacuaguggcugcuguugccc

SEQ ID NO: 529931 - RNA, 22 nt, Artificial Sequence
  Synthetic
agacuaguggcugcuguugccc

SEQ ID NO: 529932 - RNA, 23 nt, Artificial Sequence
  Synthetic
aagacuaguggcugcuguugccc

SEQ ID NO: 529933 - RNA, 24 nt, Artificial Sequence
  Synthetic
aaagacuaguggcugcuguugccc

SEQ ID NO: 529934 - RNA, 18 nt, Artificial Sequence
  Synthetic
gaacaauggagaaauccc

SEQ ID NO: 529935 - RNA, 19 nt, Artificial Sequence
  Synthetic
ugaacaauggagaaauccc

SEQ ID NO: 529936 - RNA, 20 nt, Artificial Sequence
  Synthetic
cugaacaauggagaaauccc

SEQ ID NO: 529937 - RNA, 21 nt, Artificial Sequence
  Synthetic
acugaacaauggagaaauccc

SEQ ID NO: 529938 - RNA, 22 nt, Artificial Sequence
  Synthetic
aacugaacaauggagaaauccc

SEQ ID NO: 529939 - RNA, 23 nt, Artificial Sequence
  Synthetic
gaacugaacaauggagaaauccc

SEQ ID NO: 529940 - RNA, 24 nt, Artificial Sequence
  Synthetic
agaacugaacaauggagaaauccc

SEQ ID NO: 529941 - RNA, 18 nt, Artificial Sequence
  Synthetic
cugaggcaggagaauccc

SEQ ID NO: 529942 - RNA, 24 nt, Artificial Sequence
  Synthetic
aggaggcugaggcaggagaauccc

SEQ ID NO: 529943 - RNA, 19 nt, Artificial Sequence
  Synthetic
ucugaggcaggagaauccc

SEQ ID NO: 529944 - RNA, 20 nt, Artificial Sequence
  Synthetic
gucugaggcaggagaauccc

SEQ ID NO: 529945 - RNA, 21 nt, Artificial Sequence
  Synthetic
agucugaggcaggagaauccc

SEQ ID NO: 529946 - RNA, 22 nt, Artificial Sequence
  Synthetic
cagucugaggcaggagaauccc

SEQ ID NO: 529947 - RNA, 23 nt, Artificial Sequence
  Synthetic
gcagucugaggcaggagaauccc

SEQ ID NO: 529948 - RNA, 24 nt, Artificial Sequence
  Synthetic
ggcagucugaggcaggagaauccc

SEQ ID NO: 529949 - RNA, 18 nt, Artificial Sequence
  Synthetic
aauuacuuccugaauccc

SEQ ID NO: 529950 - RNA, 19 nt, Artificial Sequence
  Synthetic
uaauuacuuccugaauccc

SEQ ID NO: 529951 - RNA, 20 nt, Artificial Sequence
  Synthetic
auaauuacuuccugaauccc

SEQ ID NO: 529952 - RNA, 21 nt, Artificial Sequence
  Synthetic
gauaauuacuuccugaauccc

SEQ ID NO: 529953 - RNA, 22 nt, Artificial Sequence
  Synthetic
agauaauuacuuccugaauccc

SEQ ID NO: 529954 - RNA, 23 nt, Artificial Sequence
  Synthetic
aagauaauuacuuccugaauccc

SEQ ID NO: 529955 - RNA, 24 nt, Artificial Sequence
  Synthetic
uaagauaauuacuuccugaauccc

SEQ ID NO: 529956 - RNA, 18 nt, Artificial Sequence
  Synthetic
aagggccggcaacauccc

SEQ ID NO: 529957 - RNA, 19 nt, Artificial Sequence
  Synthetic
caagggccggcaacauccc

SEQ ID NO: 529958 - RNA, 20 nt, Artificial Sequence
  Synthetic
ucaagggccggcaacauccc

SEQ ID NO: 529959 - RNA, 21 nt, Artificial Sequence
  Synthetic
uucaagggccggcaacauccc

SEQ ID NO: 529960 - RNA, 22 nt, Artificial Sequence
  Synthetic
auucaagggccggcaacauccc

SEQ ID NO: 529961 - RNA, 23 nt, Artificial Sequence
  Synthetic
gauucaagggccggcaacauccc

SEQ ID NO: 529962 - RNA, 24 nt, Artificial Sequence
  Synthetic
ugauucaagggccggcaacauccc

SEQ ID NO: 529963 - RNA, 18 nt, Artificial Sequence
  Synthetic
uguauacagacacauccc

SEQ ID NO: 529964 - RNA, 19 nt, Artificial Sequence
  Synthetic
auguauacagacacauccc

SEQ ID NO: 529965 - RNA, 20 nt, Artificial Sequence
  Synthetic
aauguauacagacacauccc

SEQ ID NO: 529966 - RNA, 21 nt, Artificial Sequence
  Synthetic
caauguauacagacacauccc

SEQ ID NO: 529967 - RNA, 22 nt, Artificial Sequence
  Synthetic
acaauguauacagacacauccc

SEQ ID NO: 529968 - RNA, 23 nt, Artificial Sequence
  Synthetic
aacaauguauacagacacauccc

SEQ ID NO: 529969 - RNA, 24 nt, Artificial Sequence
  Synthetic
uaacaauguauacagacacauccc

SEQ ID NO: 529970 - RNA, 18 nt, Artificial Sequence
  Synthetic
gauuaaacucuacauccc

SEQ ID NO: 529971 - RNA, 19 nt, Artificial Sequence
  Synthetic
ggauuaaacucuacauccc

SEQ ID NO: 529972 - RNA, 20 nt, Artificial Sequence
  Synthetic
aggauuaaacucuacauccc

SEQ ID NO: 529973 - RNA, 21 nt, Artificial Sequence
  Synthetic
gaggauuaaacucuacauccc

SEQ ID NO: 529974 - RNA, 22 nt, Artificial Sequence
  Synthetic
ggaggauuaaacucuacauccc

SEQ ID NO: 529975 - RNA, 23 nt, Artificial Sequence
  Synthetic
gggaggauuaaacucuacauccc

SEQ ID NO: 529976 - RNA, 24 nt, Artificial Sequence
  Synthetic
ggggaggauuaaacucuacauccc

SEQ ID NO: 529977 - RNA, 18 nt, Artificial Sequence
  Synthetic
gauuccacgacccauccc

SEQ ID NO: 529978 - RNA, 19 nt, Artificial Sequence
  Synthetic
agauuccacgacccauccc

SEQ ID NO: 529979 - RNA, 20 nt, Artificial Sequence
  Synthetic
cagauuccacgacccauccc

SEQ ID NO: 529980 - RNA, 21 nt, Artificial Sequence
  Synthetic
gcagauuccacgacccauccc

SEQ ID NO: 529981 - RNA, 22 nt, Artificial Sequence
  Synthetic
ugcagauuccacgacccauccc

SEQ ID NO: 529982 - RNA, 23 nt, Artificial Sequence
  Synthetic
augcagauuccacgacccauccc

SEQ ID NO: 529983 - RNA, 24 nt, Artificial Sequence
  Synthetic
uaugcagauuccacgacccauccc

SEQ ID NO: 529984 - RNA, 18 nt, Artificial Sequence
  Synthetic
uuugaacuaccccauccc

SEQ ID NO: 529985 - RNA, 19 nt, Artificial Sequence
  Synthetic
cuuugaacuaccccauccc

SEQ ID NO: 529986 - RNA, 20 nt, Artificial Sequence
  Synthetic
acuuugaacuaccccauccc

SEQ ID NO: 529987 - RNA, 21 nt, Artificial Sequence
  Synthetic
aacuuugaacuaccccauccc

SEQ ID NO: 529988 - RNA, 22 nt, Artificial Sequence
  Synthetic
caacuuugaacuaccccauccc

SEQ ID NO: 529989 - RNA, 23 nt, Artificial Sequence
  Synthetic
ucaacuuugaacuaccccauccc

SEQ ID NO: 529990 - RNA, 24 nt, Artificial Sequence
  Synthetic
uucaacuuugaacuaccccauccc

SEQ ID NO: 529991 - RNA, 18 nt, Artificial Sequence
  Synthetic
uuccccaagucccauccc

SEQ ID NO: 529992 - RNA, 19 nt, Artificial Sequence
  Synthetic
guuccccaagucccauccc

SEQ ID NO: 529993 - RNA, 20 nt, Artificial Sequence
  Synthetic
aguuccccaagucccauccc

SEQ ID NO: 529994 - RNA, 21 nt, Artificial Sequence
  Synthetic
aaguuccccaagucccauccc

SEQ ID NO: 529995 - RNA, 22 nt, Artificial Sequence
  Synthetic
aaaguuccccaagucccauccc

SEQ ID NO: 529996 - RNA, 23 nt, Artificial Sequence
  Synthetic
aaaaguuccccaagucccauccc

SEQ ID NO: 529997 - RNA, 24 nt, Artificial Sequence
  Synthetic
uaaaaguuccccaagucccauccc

SEQ ID NO: 529998 - RNA, 18 nt, Artificial Sequence
  Synthetic
gccaaucaaagccauccc

SEQ ID NO: 529999 - RNA, 19 nt, Artificial Sequence
  Synthetic
ugccaaucaaagccauccc

SEQ ID NO: 530000 - RNA, 20 nt, Artificial Sequence
  Synthetic
cugccaaucaaagccauccc

SEQ ID NO: 530001 - RNA, 21 nt, Artificial Sequence
  Synthetic
ucugccaaucaaagccauccc

SEQ ID NO: 530002 - RNA, 22 nt, Artificial Sequence
  Synthetic
gucugccaaucaaagccauccc

SEQ ID NO: 530003 - RNA, 23 nt, Artificial Sequence
  Synthetic
ugucugccaaucaaagccauccc

SEQ ID NO: 530004 - RNA, 24 nt, Artificial Sequence
  Synthetic
cugucugccaaucaaagccauccc

SEQ ID NO: 530005 - RNA, 18 nt, Artificial Sequence
  Synthetic
uacucacuuuaucauccc

SEQ ID NO: 530006 - RNA, 19 nt, Artificial Sequence
  Synthetic
cuacucacuuuaucauccc

SEQ ID NO: 530007 - RNA, 20 nt, Artificial Sequence
  Synthetic
gcuacucacuuuaucauccc

SEQ ID NO: 530008 - RNA, 21 nt, Artificial Sequence
  Synthetic
agcuacucacuuuaucauccc

SEQ ID NO: 530009 - RNA, 22 nt, Artificial Sequence
  Synthetic
gagcuacucacuuuaucauccc

SEQ ID NO: 530010 - RNA, 23 nt, Artificial Sequence
  Synthetic
cgagcuacucacuuuaucauccc

SEQ ID NO: 530011 - RNA, 24 nt, Artificial Sequence
  Synthetic
ucgagcuacucacuuuaucauccc

SEQ ID NO: 530012 - RNA, 18 nt, Artificial Sequence
  Synthetic
aaaaaucaacaagauccc

SEQ ID NO: 530013 - RNA, 19 nt, Artificial Sequence
  Synthetic
uaaaaaucaacaagauccc

SEQ ID NO: 530014 - RNA, 20 nt, Artificial Sequence
  Synthetic
auaaaaaucaacaagauccc

SEQ ID NO: 530015 - RNA, 21 nt, Artificial Sequence
  Synthetic
aauaaaaaucaacaagauccc

SEQ ID NO: 530016 - RNA, 22 nt, Artificial Sequence
  Synthetic
gaauaaaaaucaacaagauccc

SEQ ID NO: 530017 - RNA, 23 nt, Artificial Sequence
  Synthetic
ugaauaaaaaucaacaagauccc

SEQ ID NO: 530018 - RNA, 24 nt, Artificial Sequence
  Synthetic
uugaauaaaaaucaacaagauccc

SEQ ID NO: 530019 - RNA, 18 nt, Artificial Sequence
  Synthetic
aacgugcgugcagauccc

SEQ ID NO: 530020 - RNA, 19 nt, Artificial Sequence
  Synthetic
caacgugcgugcagauccc

SEQ ID NO: 530021 - RNA, 20 nt, Artificial Sequence
  Synthetic
gcaacgugcgugcagauccc

SEQ ID NO: 530022 - RNA, 21 nt, Artificial Sequence
  Synthetic
ugcaacgugcgugcagauccc

SEQ ID NO: 530023 - RNA, 22 nt, Artificial Sequence
  Synthetic
cugcaacgugcgugcagauccc

SEQ ID NO: 530024 - RNA, 23 nt, Artificial Sequence
  Synthetic
gcugcaacgugcgugcagauccc

SEQ ID NO: 530025 - RNA, 24 nt, Artificial Sequence
  Synthetic
agcugcaacgugcgugcagauccc

SEQ ID NO: 530026 - RNA, 18 nt, Artificial Sequence
  Synthetic
gucuaacaaucagauccc

SEQ ID NO: 530027 - RNA, 19 nt, Artificial Sequence
  Synthetic
ugucuaacaaucagauccc

SEQ ID NO: 530028 - RNA, 20 nt, Artificial Sequence
  Synthetic
augucuaacaaucagauccc

SEQ ID NO: 530029 - RNA, 21 nt, Artificial Sequence
  Synthetic
aaugucuaacaaucagauccc

SEQ ID NO: 530030 - RNA, 22 nt, Artificial Sequence
  Synthetic
aaaugucuaacaaucagauccc

SEQ ID NO: 530031 - RNA, 23 nt, Artificial Sequence
  Synthetic
uaaaugucuaacaaucagauccc

SEQ ID NO: 530032 - RNA, 24 nt, Artificial Sequence
  Synthetic
guaaaugucuaacaaucagauccc

SEQ ID NO: 530033 - RNA, 18 nt, Artificial Sequence
  Synthetic
gauagauuggaugauccc

SEQ ID NO: 530034 - RNA, 19 nt, Artificial Sequence
  Synthetic
ggauagauuggaugauccc

SEQ ID NO: 530035 - RNA, 20 nt, Artificial Sequence
  Synthetic
aggauagauuggaugauccc

SEQ ID NO: 530036 - RNA, 21 nt, Artificial Sequence
  Synthetic
gaggauagauuggaugauccc

SEQ ID NO: 530037 - RNA, 22 nt, Artificial Sequence
  Synthetic
ggaggauagauuggaugauccc

SEQ ID NO: 530038 - RNA, 23 nt, Artificial Sequence
  Synthetic
aggaggauagauuggaugauccc

SEQ ID NO: 530039 - RNA, 24 nt, Artificial Sequence
  Synthetic
aaggaggauagauuggaugauccc

SEQ ID NO: 530040 - RNA, 18 nt, Artificial Sequence
  Synthetic
cauuuggaagcugauccc

SEQ ID NO: 530041 - RNA, 19 nt, Artificial Sequence
  Synthetic
ucauuuggaagcugauccc

SEQ ID NO: 530042 - RNA, 20 nt, Artificial Sequence
  Synthetic
cucauuuggaagcugauccc

SEQ ID NO: 530043 - RNA, 21 nt, Artificial Sequence
  Synthetic
gcucauuuggaagcugauccc

SEQ ID NO: 530044 - RNA, 22 nt, Artificial Sequence
  Synthetic
agcucauuuggaagcugauccc

SEQ ID NO: 530045 - RNA, 23 nt, Artificial Sequence
  Synthetic
uagcucauuuggaagcugauccc

SEQ ID NO: 530046 - RNA, 24 nt, Artificial Sequence
  Synthetic
auagcucauuuggaagcugauccc

SEQ ID NO: 530047 - RNA, 18 nt, Artificial Sequence
  Synthetic
cauccaaucucugauccc

SEQ ID NO: 530048 - RNA, 19 nt, Artificial Sequence
  Synthetic
gcauccaaucucugauccc

SEQ ID NO: 530049 - RNA, 20 nt, Artificial Sequence
  Synthetic
ugcauccaaucucugauccc

SEQ ID NO: 530050 - RNA, 21 nt, Artificial Sequence
  Synthetic
gugcauccaaucucugauccc

SEQ ID NO: 530051 - RNA, 22 nt, Artificial Sequence
  Synthetic
ugugcauccaaucucugauccc

SEQ ID NO: 530052 - RNA, 23 nt, Artificial Sequence
  Synthetic
cugugcauccaaucucugauccc

SEQ ID NO: 530053 - RNA, 24 nt, Artificial Sequence
  Synthetic
ccugugcauccaaucucugauccc

SEQ ID NO: 530054 - RNA, 18 nt, Artificial Sequence
  Synthetic
aacucaauucuugauccc

SEQ ID NO: 530055 - RNA, 19 nt, Artificial Sequence
  Synthetic
uaacucaauucuugauccc

SEQ ID NO: 530056 - RNA, 20 nt, Artificial Sequence
  Synthetic
uuaacucaauucuugauccc

SEQ ID NO: 530057 - RNA, 21 nt, Artificial Sequence
  Synthetic
uuuaacucaauucuugauccc

SEQ ID NO: 530058 - RNA, 22 nt, Artificial Sequence
  Synthetic
uuuuaacucaauucuugauccc

SEQ ID NO: 530059 - RNA, 23 nt, Artificial Sequence
  Synthetic
auuuuaacucaauucuugauccc

SEQ ID NO: 530060 - RNA, 24 nt, Artificial Sequence
  Synthetic
aauuuuaacucaauucuugauccc

SEQ ID NO: 530061 - RNA, 18 nt, Artificial Sequence
  Synthetic
gcaaacagugcauauccc

SEQ ID NO: 530062 - RNA, 19 nt, Artificial Sequence
  Synthetic
ggcaaacagugcauauccc

SEQ ID NO: 530063 - RNA, 20 nt, Artificial Sequence
  Synthetic
uggcaaacagugcauauccc

SEQ ID NO: 530064 - RNA, 21 nt, Artificial Sequence
  Synthetic
uuggcaaacagugcauauccc

SEQ ID NO: 530065 - RNA, 22 nt, Artificial Sequence
  Synthetic
uuuggcaaacagugcauauccc

SEQ ID NO: 530066 - RNA, 23 nt, Artificial Sequence
  Synthetic
auuuggcaaacagugcauauccc

SEQ ID NO: 530067 - RNA, 24 nt, Artificial Sequence
  Synthetic
cauuuggcaaacagugcauauccc

SEQ ID NO: 530068 - RNA, 18 nt, Artificial Sequence
  Synthetic
cuuguucacucauauccc

SEQ ID NO: 530069 - RNA, 19 nt, Artificial Sequence
  Synthetic
ccuuguucacucauauccc

SEQ ID NO: 530070 - RNA, 20 nt, Artificial Sequence
  Synthetic
accuuguucacucauauccc

SEQ ID NO: 530071 - RNA, 21 nt, Artificial Sequence
  Synthetic
uaccuuguucacucauauccc

SEQ ID NO: 530072 - RNA, 22 nt, Artificial Sequence
  Synthetic
cuaccuuguucacucauauccc

SEQ ID NO: 530073 - RNA, 23 nt, Artificial Sequence
  Synthetic
acuaccuuguucacucauauccc

SEQ ID NO: 530074 - RNA, 24 nt, Artificial Sequence
  Synthetic
aacuaccuuguucacucauauccc

SEQ ID NO: 530075 - RNA, 18 nt, Artificial Sequence
  Synthetic
agccaggucagauauccc

SEQ ID NO: 530076 - RNA, 19 nt, Artificial Sequence
  Synthetic
cagccaggucagauauccc

SEQ ID NO: 530077 - RNA, 20 nt, Artificial Sequence
  Synthetic
ccagccaggucagauauccc

SEQ ID NO: 530078 - RNA, 21 nt, Artificial Sequence
  Synthetic
gccagccaggucagauauccc

SEQ ID NO: 530079 - RNA, 22 nt, Artificial Sequence
  Synthetic
ggccagccaggucagauauccc

SEQ ID NO: 530080 - RNA, 23 nt, Artificial Sequence
  Synthetic
gggccagccaggucagauauccc

SEQ ID NO: 530081 - RNA, 24 nt, Artificial Sequence
  Synthetic
ugggccagccaggucagauauccc

SEQ ID NO: 530082 - RNA, 18 nt, Artificial Sequence
  Synthetic
ugcucuuaaugauauccc

SEQ ID NO: 530083 - RNA, 19 nt, Artificial Sequence
  Synthetic
cugcucuuaaugauauccc

SEQ ID NO: 530084 - RNA, 20 nt, Artificial Sequence
  Synthetic
ucugcucuuaaugauauccc

SEQ ID NO: 530085 - RNA, 21 nt, Artificial Sequence
  Synthetic
uucugcucuuaaugauauccc

SEQ ID NO: 530086 - RNA, 22 nt, Artificial Sequence
  Synthetic
uuucugcucuuaaugauauccc

SEQ ID NO: 530087 - RNA, 23 nt, Artificial Sequence
  Synthetic
auuucugcucuuaaugauauccc

SEQ ID NO: 530088 - RNA, 24 nt, Artificial Sequence
  Synthetic
aauuucugcucuuaaugauauccc

SEQ ID NO: 530089 - RNA, 18 nt, Artificial Sequence
  Synthetic
ccauaauuuuccuauccc

SEQ ID NO: 530090 - RNA, 19 nt, Artificial Sequence
  Synthetic
cccauaauuuuccuauccc

SEQ ID NO: 530091 - RNA, 20 nt, Artificial Sequence
  Synthetic
acccauaauuuuccuauccc

SEQ ID NO: 530092 - RNA, 21 nt, Artificial Sequence
  Synthetic
uacccauaauuuuccuauccc

SEQ ID NO: 530093 - RNA, 22 nt, Artificial Sequence
  Synthetic
guacccauaauuuuccuauccc

SEQ ID NO: 530094 - RNA, 23 nt, Artificial Sequence
  Synthetic
uguacccauaauuuuccuauccc

SEQ ID NO: 530095 - RNA, 24 nt, Artificial Sequence
  Synthetic
cuguacccauaauuuuccuauccc

SEQ ID NO: 530096 - RNA, 18 nt, Artificial Sequence
  Synthetic
aaguuguuacucuauccc

SEQ ID NO: 530097 - RNA, 19 nt, Artificial Sequence
  Synthetic
aaaguuguuacucuauccc

SEQ ID NO: 530098 - RNA, 20 nt, Artificial Sequence
  Synthetic
gaaaguuguuacucuauccc

SEQ ID NO: 530099 - RNA, 21 nt, Artificial Sequence
  Synthetic
ugaaaguuguuacucuauccc

SEQ ID NO: 530100 - RNA, 22 nt, Artificial Sequence
  Synthetic
cugaaaguuguuacucuauccc

SEQ ID NO: 530101 - RNA, 23 nt, Artificial Sequence
  Synthetic
ucugaaaguuguuacucuauccc

SEQ ID NO: 530102 - RNA, 24 nt, Artificial Sequence
  Synthetic
gucugaaaguuguuacucuauccc

SEQ ID NO: 530103 - RNA, 18 nt, Artificial Sequence
  Synthetic
gaagaaaaucaguauccc

SEQ ID NO: 530104 - RNA, 19 nt, Artificial Sequence
  Synthetic
agaagaaaaucaguauccc

SEQ ID NO: 530105 - RNA, 20 nt, Artificial Sequence
  Synthetic
aagaagaaaaucaguauccc

SEQ ID NO: 530106 - RNA, 21 nt, Artificial Sequence
  Synthetic
aaagaagaaaaucaguauccc

SEQ ID NO: 530107 - RNA, 22 nt, Artificial Sequence
  Synthetic
caaagaagaaaaucaguauccc

SEQ ID NO: 530108 - RNA, 23 nt, Artificial Sequence
  Synthetic
acaaagaagaaaaucaguauccc

SEQ ID NO: 530109 - RNA, 24 nt, Artificial Sequence
  Synthetic
aacaaagaagaaaaucaguauccc

SEQ ID NO: 530110 - RNA, 18 nt, Artificial Sequence
  Synthetic
cagcaacaauaguauccc

SEQ ID NO: 530111 - RNA, 19 nt, Artificial Sequence
  Synthetic
ucagcaacaauaguauccc

SEQ ID NO: 530112 - RNA, 20 nt, Artificial Sequence
  Synthetic
aucagcaacaauaguauccc

SEQ ID NO: 530113 - RNA, 21 nt, Artificial Sequence
  Synthetic
aaucagcaacaauaguauccc

SEQ ID NO: 530114 - RNA, 22 nt, Artificial Sequence
  Synthetic
caaucagcaacaauaguauccc

SEQ ID NO: 530115 - RNA, 23 nt, Artificial Sequence
  Synthetic
ucaaucagcaacaauaguauccc

SEQ ID NO: 530116 - RNA, 24 nt, Artificial Sequence
  Synthetic
cucaaucagcaacaauaguauccc

SEQ ID NO: 530117 - RNA, 18 nt, Artificial Sequence
  Synthetic
ugaguacaguaguauccc

SEQ ID NO: 530118 - RNA, 19 nt, Artificial Sequence
  Synthetic
augaguacaguaguauccc

SEQ ID NO: 530119 - RNA, 20 nt, Artificial Sequence
  Synthetic
caugaguacaguaguauccc

SEQ ID NO: 530120 - RNA, 21 nt, Artificial Sequence
  Synthetic
ucaugaguacaguaguauccc

SEQ ID NO: 530121 - RNA, 22 nt, Artificial Sequence
  Synthetic
cucaugaguacaguaguauccc

SEQ ID NO: 530122 - RNA, 23 nt, Artificial Sequence
  Synthetic
ccucaugaguacaguaguauccc

SEQ ID NO: 530123 - RNA, 24 nt, Artificial Sequence
  Synthetic
uccucaugaguacaguaguauccc

SEQ ID NO: 530124 - RNA, 18 nt, Artificial Sequence
  Synthetic
caauauuuacuguauccc

SEQ ID NO: 530125 - RNA, 19 nt, Artificial Sequence
  Synthetic
ucaauauuuacuguauccc

SEQ ID NO: 530126 - RNA, 20 nt, Artificial Sequence
  Synthetic
gucaauauuuacuguauccc

SEQ ID NO: 530127 - RNA, 21 nt, Artificial Sequence
  Synthetic
ugucaauauuuacuguauccc

SEQ ID NO: 530128 - RNA, 22 nt, Artificial Sequence
  Synthetic
augucaauauuuacuguauccc

SEQ ID NO: 530129 - RNA, 23 nt, Artificial Sequence
  Synthetic
aaugucaauauuuacuguauccc

SEQ ID NO: 530130 - RNA, 24 nt, Artificial Sequence
  Synthetic
aaaugucaauauuuacuguauccc

SEQ ID NO: 530131 - RNA, 18 nt, Artificial Sequence
  Synthetic
cugagacucacuuauccc

SEQ ID NO: 530132 - RNA, 19 nt, Artificial Sequence
  Synthetic
ucugagacucacuuauccc

SEQ ID NO: 530133 - RNA, 20 nt, Artificial Sequence
  Synthetic
gucugagacucacuuauccc

SEQ ID NO: 530134 - RNA, 21 nt, Artificial Sequence
  Synthetic
ugucugagacucacuuauccc

SEQ ID NO: 530135 - RNA, 22 nt, Artificial Sequence
  Synthetic
gugucugagacucacuuauccc

SEQ ID NO: 530136 - RNA, 23 nt, Artificial Sequence
  Synthetic
ugugucugagacucacuuauccc

SEQ ID NO: 530137 - RNA, 24 nt, Artificial Sequence
  Synthetic
cugugucugagacucacuuauccc

SEQ ID NO: 530138 - RNA, 18 nt, Artificial Sequence
  Synthetic
aauucuaaaaaaacuccc

SEQ ID NO: 530139 - RNA, 19 nt, Artificial Sequence
  Synthetic
aaauucuaaaaaaacuccc

SEQ ID NO: 530140 - RNA, 20 nt, Artificial Sequence
  Synthetic
aaaauucuaaaaaaacuccc

SEQ ID NO: 530141 - RNA, 21 nt, Artificial Sequence
  Synthetic
caaaauucuaaaaaaacuccc

SEQ ID NO: 530142 - RNA, 22 nt, Artificial Sequence
  Synthetic
ucaaaauucuaaaaaaacuccc

SEQ ID NO: 530143 - RNA, 23 nt, Artificial Sequence
  Synthetic
uucaaaauucuaaaaaaacuccc

SEQ ID NO: 530144 - RNA, 24 nt, Artificial Sequence
  Synthetic
uuucaaaauucuaaaaaaacuccc

SEQ ID NO: 530145 - RNA, 18 nt, Artificial Sequence
  Synthetic
uuuacuuagaaaacuccc

SEQ ID NO: 530146 - RNA, 19 nt, Artificial Sequence
  Synthetic
guuuacuuagaaaacuccc

SEQ ID NO: 530147 - RNA, 20 nt, Artificial Sequence
  Synthetic
aguuuacuuagaaaacuccc

SEQ ID NO: 530148 - RNA, 21 nt, Artificial Sequence
  Synthetic
gaguuuacuuagaaaacuccc

SEQ ID NO: 530149 - RNA, 22 nt, Artificial Sequence
  Synthetic
ugaguuuacuuagaaaacuccc

SEQ ID NO: 530150 - RNA, 23 nt, Artificial Sequence
  Synthetic
augaguuuacuuagaaaacuccc

SEQ ID NO: 530151 - RNA, 24 nt, Artificial Sequence
  Synthetic
aaugaguuuacuuagaaaacuccc

SEQ ID NO: 530152 - RNA, 18 nt, Artificial Sequence
  Synthetic
gcaauuuccagaacuccc

SEQ ID NO: 530153 - RNA, 19 nt, Artificial Sequence
  Synthetic
ugcaauuuccagaacuccc

SEQ ID NO: 530154 - RNA, 20 nt, Artificial Sequence
  Synthetic
augcaauuuccagaacuccc

SEQ ID NO: 530155 - RNA, 21 nt, Artificial Sequence
  Synthetic
caugcaauuuccagaacuccc

SEQ ID NO: 530156 - RNA, 22 nt, Artificial Sequence
  Synthetic
ccaugcaauuuccagaacuccc

SEQ ID NO: 530157 - RNA, 23 nt, Artificial Sequence
  Synthetic
gccaugcaauuuccagaacuccc

SEQ ID NO: 530158 - RNA, 24 nt, Artificial Sequence
  Synthetic
ggccaugcaauuuccagaacuccc

SEQ ID NO: 530159 - RNA, 18 nt, Artificial Sequence
  Synthetic
agugcauaucuaacuccc

SEQ ID NO: 530160 - RNA, 19 nt, Artificial Sequence
  Synthetic
aagugcauaucuaacuccc

SEQ ID NO: 530161 - RNA, 20 nt, Artificial Sequence
  Synthetic
gaagugcauaucuaacuccc

SEQ ID NO: 530162 - RNA, 21 nt, Artificial Sequence
  Synthetic
agaagugcauaucuaacuccc

SEQ ID NO: 530163 - RNA, 22 nt, Artificial Sequence
  Synthetic
aagaagugcauaucuaacuccc

SEQ ID NO: 530164 - RNA, 23 nt, Artificial Sequence
  Synthetic
uaagaagugcauaucuaacuccc

SEQ ID NO: 530165 - RNA, 24 nt, Artificial Sequence
  Synthetic
auaagaagugcauaucuaacuccc

SEQ ID NO: 530166 - RNA, 21 nt, Artificial Sequence
  Synthetic
uucaucagcucuuuuacuccc

SEQ ID NO: 530167 - RNA, 22 nt, Artificial Sequence
  Synthetic
uuucaucagcucuuuuacuccc

SEQ ID NO: 530168 - RNA, 23 nt, Artificial Sequence
  Synthetic
guuucaucagcucuuuuacuccc

SEQ ID NO: 530169 - RNA, 24 nt, Artificial Sequence
  Synthetic
uguuucaucagcucuuuuacuccc

SEQ ID NO: 530170 - RNA, 18 nt, Artificial Sequence
  Synthetic
uugaugagaguaccuccc

SEQ ID NO: 530171 - RNA, 19 nt, Artificial Sequence
  Synthetic
cuugaugagaguaccuccc

SEQ ID NO: 530172 - RNA, 20 nt, Artificial Sequence
  Synthetic
ccuugaugagaguaccuccc

SEQ ID NO: 530173 - RNA, 21 nt, Artificial Sequence
  Synthetic
uccuugaugagaguaccuccc

SEQ ID NO: 530174 - RNA, 22 nt, Artificial Sequence
  Synthetic
guccuugaugagaguaccuccc

SEQ ID NO: 530175 - RNA, 23 nt, Artificial Sequence
  Synthetic
uguccuugaugagaguaccuccc

SEQ ID NO: 530176 - RNA, 24 nt, Artificial Sequence
  Synthetic
guguccuugaugagaguaccuccc

SEQ ID NO: 530177 - RNA, 18 nt, Artificial Sequence
  Synthetic
cacagcugccucccuccc

SEQ ID NO: 530178 - RNA, 19 nt, Artificial Sequence
  Synthetic
ucacagcugccucccuccc

SEQ ID NO: 530179 - RNA, 20 nt, Artificial Sequence
  Synthetic
cucacagcugccucccuccc

SEQ ID NO: 530180 - RNA, 21 nt, Artificial Sequence
  Synthetic
gcucacagcugccucccuccc

SEQ ID NO: 530181 - RNA, 22 nt, Artificial Sequence
  Synthetic
agcucacagcugccucccuccc

SEQ ID NO: 530182 - RNA, 23 nt, Artificial Sequence
  Synthetic
cagcucacagcugccucccuccc

SEQ ID NO: 530183 - RNA, 24 nt, Artificial Sequence
  Synthetic
acagcucacagcugccucccuccc

SEQ ID NO: 530184 - RNA, 18 nt, Artificial Sequence
  Synthetic
aauguucugcucccuccc

SEQ ID NO: 530185 - RNA, 19 nt, Artificial Sequence
  Synthetic
gaauguucugcucccuccc

SEQ ID NO: 530186 - RNA, 20 nt, Artificial Sequence
  Synthetic
ggaauguucugcucccuccc

SEQ ID NO: 530187 - RNA, 21 nt, Artificial Sequence
  Synthetic
gggaauguucugcucccuccc

SEQ ID NO: 530188 - RNA, 22 nt, Artificial Sequence
  Synthetic
agggaauguucugcucccuccc

SEQ ID NO: 530189 - RNA, 23 nt, Artificial Sequence
  Synthetic
cagggaauguucugcucccuccc

SEQ ID NO: 530190 - RNA, 24 nt, Artificial Sequence
  Synthetic
gcagggaauguucugcucccuccc

SEQ ID NO: 530191 - RNA, 18 nt, Artificial Sequence
  Synthetic
agcucccggaggccuccc

SEQ ID NO: 530192 - RNA, 19 nt, Artificial Sequence
  Synthetic
aagcucccggaggccuccc

SEQ ID NO: 530193 - RNA, 20 nt, Artificial Sequence
  Synthetic
aaagcucccggaggccuccc

SEQ ID NO: 530194 - RNA, 21 nt, Artificial Sequence
  Synthetic
aaaagcucccggaggccuccc

SEQ ID NO: 530195 - RNA, 22 nt, Artificial Sequence
  Synthetic
uaaaagcucccggaggccuccc

SEQ ID NO: 530196 - RNA, 23 nt, Artificial Sequence
  Synthetic
guaaaagcucccggaggccuccc

SEQ ID NO: 530197 - RNA, 24 nt, Artificial Sequence
  Synthetic
aguaaaagcucccggaggccuccc

SEQ ID NO: 530198 - RNA, 18 nt, Artificial Sequence
  Synthetic
aacucccugaggccuccc

SEQ ID NO: 530199 - RNA, 19 nt, Artificial Sequence
  Synthetic
aaacucccugaggccuccc

SEQ ID NO: 530200 - RNA, 20 nt, Artificial Sequence
  Synthetic
aaaacucccugaggccuccc

SEQ ID NO: 530201 - RNA, 21 nt, Artificial Sequence
  Synthetic
aaaaacucccugaggccuccc

SEQ ID NO: 530202 - RNA, 22 nt, Artificial Sequence
  Synthetic
caaaaacucccugaggccuccc

SEQ ID NO: 530203 - RNA, 23 nt, Artificial Sequence
  Synthetic
gcaaaaacucccugaggccuccc

SEQ ID NO: 530204 - RNA, 24 nt, Artificial Sequence
  Synthetic
agcaaaaacucccugaggccuccc

SEQ ID NO: 530205 - RNA, 18 nt, Artificial Sequence
  Synthetic
agcucccugaggccuccc

SEQ ID NO: 530206 - RNA, 19 nt, Artificial Sequence
  Synthetic
aagcucccugaggccuccc

SEQ ID NO: 530207 - RNA, 20 nt, Artificial Sequence
  Synthetic
aaagcucccugaggccuccc

SEQ ID NO: 530208 - RNA, 21 nt, Artificial Sequence
  Synthetic
aaaagcucccugaggccuccc

SEQ ID NO: 530209 - RNA, 22 nt, Artificial Sequence
  Synthetic
uaaaagcucccugaggccuccc

SEQ ID NO: 530210 - RNA, 23 nt, Artificial Sequence
  Synthetic
guaaaagcucccugaggccuccc

SEQ ID NO: 530211 - RNA, 24 nt, Artificial Sequence
  Synthetic
aguaaaagcucccugaggccuccc

SEQ ID NO: 530212 - RNA, 18 nt, Artificial Sequence
  Synthetic
gguuucuucaugccuccc

SEQ ID NO: 530213 - RNA, 19 nt, Artificial Sequence
  Synthetic
agguuucuucaugccuccc

SEQ ID NO: 530214 - RNA, 20 nt, Artificial Sequence
  Synthetic
uagguuucuucaugccuccc

SEQ ID NO: 530215 - RNA, 21 nt, Artificial Sequence
  Synthetic
auagguuucuucaugccuccc

SEQ ID NO: 530216 - RNA, 22 nt, Artificial Sequence
  Synthetic
cauagguuucuucaugccuccc

SEQ ID NO: 530217 - RNA, 23 nt, Artificial Sequence
  Synthetic
acauagguuucuucaugccuccc

SEQ ID NO: 530218 - RNA, 24 nt, Artificial Sequence
  Synthetic
aacauagguuucuucaugccuccc

SEQ ID NO: 530219 - RNA, 18 nt, Artificial Sequence
  Synthetic
uuuacuugugugccuccc

SEQ ID NO: 530220 - RNA, 19 nt, Artificial Sequence
  Synthetic
guuuacuugugugccuccc

SEQ ID NO: 530221 - RNA, 20 nt, Artificial Sequence
  Synthetic
uguuuacuugugugccuccc

SEQ ID NO: 530222 - RNA, 21 nt, Artificial Sequence
  Synthetic
uuguuuacuugugugccuccc

SEQ ID NO: 530223 - RNA, 22 nt, Artificial Sequence
  Synthetic
cuuguuuacuugugugccuccc

SEQ ID NO: 530224 - RNA, 23 nt, Artificial Sequence
  Synthetic
gcuuguuuacuugugugccuccc

SEQ ID NO: 530225 - RNA, 24 nt, Artificial Sequence
  Synthetic
ugcuuguuuacuugugugccuccc

SEQ ID NO: 530226 - RNA, 18 nt, Artificial Sequence
  Synthetic
cauuauuaacaagcuccc

SEQ ID NO: 530227 - RNA, 19 nt, Artificial Sequence
  Synthetic
gcauuauuaacaagcuccc

SEQ ID NO: 530228 - RNA, 20 nt, Artificial Sequence
  Synthetic
ugcauuauuaacaagcuccc

SEQ ID NO: 530229 - RNA, 21 nt, Artificial Sequence
  Synthetic
cugcauuauuaacaagcuccc

SEQ ID NO: 530230 - RNA, 22 nt, Artificial Sequence
  Synthetic
ucugcauuauuaacaagcuccc

SEQ ID NO: 530231 - RNA, 23 nt, Artificial Sequence
  Synthetic
aucugcauuauuaacaagcuccc

SEQ ID NO: 530232 - RNA, 24 nt, Artificial Sequence
  Synthetic
aaucugcauuauuaacaagcuccc

SEQ ID NO: 530233 - RNA, 18 nt, Artificial Sequence
  Synthetic
uauaacauggcagcuccc

SEQ ID NO: 530234 - RNA, 19 nt, Artificial Sequence
  Synthetic
auauaacauggcagcuccc

SEQ ID NO: 530235 - RNA, 20 nt, Artificial Sequence
  Synthetic
aauauaacauggcagcuccc

SEQ ID NO: 530236 - RNA, 21 nt, Artificial Sequence
  Synthetic
aaauauaacauggcagcuccc

SEQ ID NO: 530237 - RNA, 22 nt, Artificial Sequence
  Synthetic
gaaauauaacauggcagcuccc

SEQ ID NO: 530238 - RNA, 23 nt, Artificial Sequence
  Synthetic
ggaaauauaacauggcagcuccc

SEQ ID NO: 530239 - RNA, 24 nt, Artificial Sequence
  Synthetic
uggaaauauaacauggcagcuccc

SEQ ID NO: 530240 - RNA, 18 nt, Artificial Sequence
  Synthetic
ugacuucagaaggcuccc

SEQ ID NO: 530241 - RNA, 19 nt, Artificial Sequence
  Synthetic
augacuucagaaggcuccc

SEQ ID NO: 530242 - RNA, 20 nt, Artificial Sequence
  Synthetic
aaugacuucagaaggcuccc

SEQ ID NO: 530243 - RNA, 21 nt, Artificial Sequence
  Synthetic
caaugacuucagaaggcuccc

SEQ ID NO: 530244 - RNA, 22 nt, Artificial Sequence
  Synthetic
gcaaugacuucagaaggcuccc

SEQ ID NO: 530245 - RNA, 23 nt, Artificial Sequence
  Synthetic
agcaaugacuucagaaggcuccc

SEQ ID NO: 530246 - RNA, 24 nt, Artificial Sequence
  Synthetic
uagcaaugacuucagaaggcuccc

SEQ ID NO: 530247 - RNA, 18 nt, Artificial Sequence
  Synthetic
cuugaaggccuggcuccc

SEQ ID NO: 530248 - RNA, 19 nt, Artificial Sequence
  Synthetic
gcuugaaggccuggcuccc

SEQ ID NO: 530249 - RNA, 20 nt, Artificial Sequence
  Synthetic
ugcuugaaggccuggcuccc

SEQ ID NO: 530250 - RNA, 21 nt, Artificial Sequence
  Synthetic
uugcuugaaggccuggcuccc

SEQ ID NO: 530251 - RNA, 22 nt, Artificial Sequence
  Synthetic
auugcuugaaggccuggcuccc

SEQ ID NO: 530252 - RNA, 23 nt, Artificial Sequence
  Synthetic
cauugcuugaaggccuggcuccc

SEQ ID NO: 530253 - RNA, 24 nt, Artificial Sequence
  Synthetic
ccauugcuugaaggccuggcuccc

SEQ ID NO: 530254 - RNA, 18 nt, Artificial Sequence
  Synthetic
guagaucaucaugcuccc

SEQ ID NO: 530255 - RNA, 19 nt, Artificial Sequence
  Synthetic
gguagaucaucaugcuccc

SEQ ID NO: 530256 - RNA, 20 nt, Artificial Sequence
  Synthetic
agguagaucaucaugcuccc

SEQ ID NO: 530257 - RNA, 21 nt, Artificial Sequence
  Synthetic
cagguagaucaucaugcuccc

SEQ ID NO: 530258 - RNA, 22 nt, Artificial Sequence
  Synthetic
ccagguagaucaucaugcuccc

SEQ ID NO: 530259 - RNA, 23 nt, Artificial Sequence
  Synthetic
accagguagaucaucaugcuccc

SEQ ID NO: 530260 - RNA, 24 nt, Artificial Sequence
  Synthetic
gaccagguagaucaucaugcuccc

SEQ ID NO: 530261 - RNA, 18 nt, Artificial Sequence
  Synthetic
caaucgccuccaucuccc

SEQ ID NO: 530262 - RNA, 19 nt, Artificial Sequence
  Synthetic
acaaucgccuccaucuccc

SEQ ID NO: 530263 - RNA, 20 nt, Artificial Sequence
  Synthetic
cacaaucgccuccaucuccc

SEQ ID NO: 530264 - RNA, 21 nt, Artificial Sequence
  Synthetic
gcacaaucgccuccaucuccc

SEQ ID NO: 530265 - RNA, 22 nt, Artificial Sequence
  Synthetic
agcacaaucgccuccaucuccc

SEQ ID NO: 530266 - RNA, 23 nt, Artificial Sequence
  Synthetic
cagcacaaucgccuccaucuccc

SEQ ID NO: 530267 - RNA, 24 nt, Artificial Sequence
  Synthetic
acagcacaaucgccuccaucuccc

SEQ ID NO: 530268 - RNA, 18 nt, Artificial Sequence
  Synthetic
ggaaucuuuaacucuccc

SEQ ID NO: 530269 - RNA, 19 nt, Artificial Sequence
  Synthetic
aggaaucuuuaacucuccc

SEQ ID NO: 530270 - RNA, 20 nt, Artificial Sequence
  Synthetic
gaggaaucuuuaacucuccc

SEQ ID NO: 530271 - RNA, 21 nt, Artificial Sequence
  Synthetic
ugaggaaucuuuaacucuccc

SEQ ID NO: 530272 - RNA, 22 nt, Artificial Sequence
  Synthetic
cugaggaaucuuuaacucuccc

SEQ ID NO: 530273 - RNA, 23 nt, Artificial Sequence
  Synthetic
acugaggaaucuuuaacucuccc

SEQ ID NO: 530274 - RNA, 24 nt, Artificial Sequence
  Synthetic
cacugaggaaucuuuaacucuccc

SEQ ID NO: 530275 - RNA, 18 nt, Artificial Sequence
  Synthetic
ccauaaggcuucucuccc

SEQ ID NO: 530276 - RNA, 19 nt, Artificial Sequence
  Synthetic
uccauaaggcuucucuccc

SEQ ID NO: 530277 - RNA, 20 nt, Artificial Sequence
  Synthetic
uuccauaaggcuucucuccc

SEQ ID NO: 530278 - RNA, 21 nt, Artificial Sequence
  Synthetic
auuccauaaggcuucucuccc

SEQ ID NO: 530279 - RNA, 22 nt, Artificial Sequence
  Synthetic
uauuccauaaggcuucucuccc

SEQ ID NO: 530280 - RNA, 23 nt, Artificial Sequence
  Synthetic
cuauuccauaaggcuucucuccc

SEQ ID NO: 530281 - RNA, 24 nt, Artificial Sequence
  Synthetic
acuauuccauaaggcuucucuccc

SEQ ID NO: 530282 - RNA, 18 nt, Artificial Sequence
  Synthetic
accaaaaaucugucuccc

SEQ ID NO: 530283 - RNA, 19 nt, Artificial Sequence
  Synthetic
uaccaaaaaucugucuccc

SEQ ID NO: 530284 - RNA, 20 nt, Artificial Sequence
  Synthetic
uuaccaaaaaucugucuccc

SEQ ID NO: 530285 - RNA, 21 nt, Artificial Sequence
  Synthetic
cuuaccaaaaaucugucuccc

SEQ ID NO: 530286 - RNA, 22 nt, Artificial Sequence
  Synthetic
acuuaccaaaaaucugucuccc

SEQ ID NO: 530287 - RNA, 23 nt, Artificial Sequence
  Synthetic
gacuuaccaaaaaucugucuccc

SEQ ID NO: 530288 - RNA, 24 nt, Artificial Sequence
  Synthetic
ugacuuaccaaaaaucugucuccc

SEQ ID NO: 530289 - RNA, 18 nt, Artificial Sequence
  Synthetic
uuuccuuuacauucuccc

SEQ ID NO: 530290 - RNA, 19 nt, Artificial Sequence
  Synthetic
cuuuccuuuacauucuccc

SEQ ID NO: 530291 - RNA, 20 nt, Artificial Sequence
  Synthetic
ucuuuccuuuacauucuccc

SEQ ID NO: 530292 - RNA, 21 nt, Artificial Sequence
  Synthetic
aucuuuccuuuacauucuccc

SEQ ID NO: 530293 - RNA, 22 nt, Artificial Sequence
  Synthetic
uaucuuuccuuuacauucuccc

SEQ ID NO: 530294 - RNA, 23 nt, Artificial Sequence
  Synthetic
uuaucuuuccuuuacauucuccc

SEQ ID NO: 530295 - RNA, 24 nt, Artificial Sequence
  Synthetic
guuaucuuuccuuuacauucuccc

SEQ ID NO: 530296 - RNA, 18 nt, Artificial Sequence
  Synthetic
ccccuucccccuucuccc

SEQ ID NO: 530297 - RNA, 19 nt, Artificial Sequence
  Synthetic
uccccuucccccuucuccc

SEQ ID NO: 530298 - RNA, 20 nt, Artificial Sequence
  Synthetic
uuccccuucccccuucuccc

SEQ ID NO: 530299 - RNA, 21 nt, Artificial Sequence
  Synthetic
cuuccccuucccccuucuccc

SEQ ID NO: 530300 - RNA, 22 nt, Artificial Sequence
  Synthetic
ccuuccccuucccccuucuccc

SEQ ID NO: 530301 - RNA, 23 nt, Artificial Sequence
  Synthetic
accuuccccuucccccuucuccc

SEQ ID NO: 530302 - RNA, 24 nt, Artificial Sequence
  Synthetic
caccuuccccuucccccuucuccc

SEQ ID NO: 530303 - RNA, 18 nt, Artificial Sequence
  Synthetic
uucuagcucccuucuccc

SEQ ID NO: 530304 - RNA, 19 nt, Artificial Sequence
  Synthetic
uuucuagcucccuucuccc

SEQ ID NO: 530305 - RNA, 20 nt, Artificial Sequence
  Synthetic
cuuucuagcucccuucuccc

SEQ ID NO: 530306 - RNA, 21 nt, Artificial Sequence
  Synthetic
acuuucuagcucccuucuccc

SEQ ID NO: 530307 - RNA, 22 nt, Artificial Sequence
  Synthetic
aacuuucuagcucccuucuccc

SEQ ID NO: 530308 - RNA, 23 nt, Artificial Sequence
  Synthetic
caacuuucuagcucccuucuccc

SEQ ID NO: 530309 - RNA, 24 nt, Artificial Sequence
  Synthetic
ucaacuuucuagcucccuucuccc

SEQ ID NO: 530310 - RNA, 18 nt, Artificial Sequence
  Synthetic
agaaaagacugaaguccc

SEQ ID NO: 530311 - RNA, 19 nt, Artificial Sequence
  Synthetic
gagaaaagacugaaguccc

SEQ ID NO: 530312 - RNA, 20 nt, Artificial Sequence
  Synthetic
agagaaaagacugaaguccc

SEQ ID NO: 530313 - RNA, 21 nt, Artificial Sequence
  Synthetic
aagagaaaagacugaaguccc

SEQ ID NO: 530314 - RNA, 22 nt, Artificial Sequence
  Synthetic
uaagagaaaagacugaaguccc

SEQ ID NO: 530315 - RNA, 23 nt, Artificial Sequence
  Synthetic
uuaagagaaaagacugaaguccc

SEQ ID NO: 530316 - RNA, 24 nt, Artificial Sequence
  Synthetic
cuuaagagaaaagacugaaguccc

SEQ ID NO: 530317 - RNA, 18 nt, Artificial Sequence
  Synthetic
uuggaaaaaaacaguccc

SEQ ID NO: 530318 - RNA, 19 nt, Artificial Sequence
  Synthetic
cuuggaaaaaaacaguccc

SEQ ID NO: 530319 - RNA, 20 nt, Artificial Sequence
  Synthetic
ucuuggaaaaaaacaguccc

SEQ ID NO: 530320 - RNA, 21 nt, Artificial Sequence
  Synthetic
cucuuggaaaaaaacaguccc

SEQ ID NO: 530321 - RNA, 22 nt, Artificial Sequence
  Synthetic
ucucuuggaaaaaaacaguccc

SEQ ID NO: 530322 - RNA, 23 nt, Artificial Sequence
  Synthetic
gucucuuggaaaaaaacaguccc

SEQ ID NO: 530323 - RNA, 24 nt, Artificial Sequence
  Synthetic
agucucuuggaaaaaaacaguccc

SEQ ID NO: 530324 - RNA, 18 nt, Artificial Sequence
  Synthetic
aaaacauuacccaguccc

SEQ ID NO: 530325 - RNA, 19 nt, Artificial Sequence
  Synthetic
caaaacauuacccaguccc

SEQ ID NO: 530326 - RNA, 20 nt, Artificial Sequence
  Synthetic
acaaaacauuacccaguccc

SEQ ID NO: 530327 - RNA, 21 nt, Artificial Sequence
  Synthetic
aacaaaacauuacccaguccc

SEQ ID NO: 530328 - RNA, 22 nt, Artificial Sequence
  Synthetic
aaacaaaacauuacccaguccc

SEQ ID NO: 530329 - RNA, 23 nt, Artificial Sequence
  Synthetic
gaaacaaaacauuacccaguccc

SEQ ID NO: 530330 - RNA, 24 nt, Artificial Sequence
  Synthetic
agaaacaaaacauuacccaguccc

SEQ ID NO: 530331 - RNA, 18 nt, Artificial Sequence
  Synthetic
cuuaucuaacagaguccc

SEQ ID NO: 530332 - RNA, 19 nt, Artificial Sequence
  Synthetic
ccuuaucuaacagaguccc

SEQ ID NO: 530333 - RNA, 20 nt, Artificial Sequence
  Synthetic
gccuuaucuaacagaguccc

SEQ ID NO: 530334 - RNA, 21 nt, Artificial Sequence
  Synthetic
ugccuuaucuaacagaguccc

SEQ ID NO: 530335 - RNA, 22 nt, Artificial Sequence
  Synthetic
uugccuuaucuaacagaguccc

SEQ ID NO: 530336 - RNA, 23 nt, Artificial Sequence
  Synthetic
uuugccuuaucuaacagaguccc

SEQ ID NO: 530337 - RNA, 24 nt, Artificial Sequence
  Synthetic
uuuugccuuaucuaacagaguccc

SEQ ID NO: 530338 - RNA, 18 nt, Artificial Sequence
  Synthetic
aaagcacuguggaguccc

SEQ ID NO: 530339 - RNA, 19 nt, Artificial Sequence
  Synthetic
caaagcacuguggaguccc

SEQ ID NO: 530340 - RNA, 20 nt, Artificial Sequence
  Synthetic
acaaagcacuguggaguccc

SEQ ID NO: 530341 - RNA, 21 nt, Artificial Sequence
  Synthetic
cacaaagcacuguggaguccc

SEQ ID NO: 530342 - RNA, 22 nt, Artificial Sequence
  Synthetic
acacaaagcacuguggaguccc

SEQ ID NO: 530343 - RNA, 23 nt, Artificial Sequence
  Synthetic
uacacaaagcacuguggaguccc

SEQ ID NO: 530344 - RNA, 24 nt, Artificial Sequence
  Synthetic
uuacacaaagcacuguggaguccc

SEQ ID NO: 530345 - RNA, 18 nt, Artificial Sequence
  Synthetic
uaagcuuccucuaguccc

SEQ ID NO: 530346 - RNA, 19 nt, Artificial Sequence
  Synthetic
cuaagcuuccucuaguccc

SEQ ID NO: 530347 - RNA, 20 nt, Artificial Sequence
  Synthetic
gcuaagcuuccucuaguccc

SEQ ID NO: 530348 - RNA, 21 nt, Artificial Sequence
  Synthetic
ugcuaagcuuccucuaguccc

SEQ ID NO: 530349 - RNA, 22 nt, Artificial Sequence
  Synthetic
uugcuaagcuuccucuaguccc

SEQ ID NO: 530350 - RNA, 23 nt, Artificial Sequence
  Synthetic
uuugcuaagcuuccucuaguccc

SEQ ID NO: 530351 - RNA, 24 nt, Artificial Sequence
  Synthetic
guuugcuaagcuuccucuaguccc

SEQ ID NO: 530352 - RNA, 18 nt, Artificial Sequence
  Synthetic
gaacacucaaguaguccc

SEQ ID NO: 530353 - RNA, 19 nt, Artificial Sequence
  Synthetic
agaacacucaaguaguccc

SEQ ID NO: 530354 - RNA, 20 nt, Artificial Sequence
  Synthetic
aagaacacucaaguaguccc

SEQ ID NO: 530355 - RNA, 21 nt, Artificial Sequence
  Synthetic
uaagaacacucaaguaguccc

SEQ ID NO: 530356 - RNA, 22 nt, Artificial Sequence
  Synthetic
auaagaacacucaaguaguccc

SEQ ID NO: 530357 - RNA, 23 nt, Artificial Sequence
  Synthetic
cauaagaacacucaaguaguccc

SEQ ID NO: 530358 - RNA, 24 nt, Artificial Sequence
  Synthetic
ucauaagaacacucaaguaguccc

SEQ ID NO: 530359 - RNA, 18 nt, Artificial Sequence
  Synthetic
cagaggaccuuacguccc

SEQ ID NO: 530360 - RNA, 19 nt, Artificial Sequence
  Synthetic
gcagaggaccuuacguccc

SEQ ID NO: 530361 - RNA, 20 nt, Artificial Sequence
  Synthetic
ugcagaggaccuuacguccc

SEQ ID NO: 530362 - RNA, 21 nt, Artificial Sequence
  Synthetic
augcagaggaccuuacguccc

SEQ ID NO: 530363 - RNA, 22 nt, Artificial Sequence
  Synthetic
aaugcagaggaccuuacguccc

SEQ ID NO: 530364 - RNA, 23 nt, Artificial Sequence
  Synthetic
aaaugcagaggaccuuacguccc

SEQ ID NO: 530365 - RNA, 24 nt, Artificial Sequence
  Synthetic
aaaaugcagaggaccuuacguccc

SEQ ID NO: 530366 - RNA, 18 nt, Artificial Sequence
  Synthetic
cagcagaguugucguccc

SEQ ID NO: 530367 - RNA, 19 nt, Artificial Sequence
  Synthetic
gcagcagaguugucguccc

SEQ ID NO: 530368 - RNA, 20 nt, Artificial Sequence
  Synthetic
agcagcagaguugucguccc

SEQ ID NO: 530369 - RNA, 21 nt, Artificial Sequence
  Synthetic
aagcagcagaguugucguccc

SEQ ID NO: 530370 - RNA, 22 nt, Artificial Sequence
  Synthetic
aaagcagcagaguugucguccc

SEQ ID NO: 530371 - RNA, 23 nt, Artificial Sequence
  Synthetic
aaaagcagcagaguugucguccc

SEQ ID NO: 530372 - RNA, 24 nt, Artificial Sequence
  Synthetic
uaaaagcagcagaguugucguccc

SEQ ID NO: 530373 - RNA, 18 nt, Artificial Sequence
  Synthetic
ggagcuaugcuagguccc

SEQ ID NO: 530374 - RNA, 19 nt, Artificial Sequence
  Synthetic
aggagcuaugcuagguccc

SEQ ID NO: 530375 - RNA, 20 nt, Artificial Sequence
  Synthetic
caggagcuaugcuagguccc

SEQ ID NO: 530376 - RNA, 21 nt, Artificial Sequence
  Synthetic
ccaggagcuaugcuagguccc

SEQ ID NO: 530377 - RNA, 22 nt, Artificial Sequence
  Synthetic
gccaggagcuaugcuagguccc

SEQ ID NO: 530378 - RNA, 23 nt, Artificial Sequence
  Synthetic
ugccaggagcuaugcuagguccc

SEQ ID NO: 530379 - RNA, 24 nt, Artificial Sequence
  Synthetic
uugccaggagcuaugcuagguccc

SEQ ID NO: 530380 - RNA, 18 nt, Artificial Sequence
  Synthetic
uuguugucuuuggguccc

SEQ ID NO: 530381 - RNA, 19 nt, Artificial Sequence
  Synthetic
auuguugucuuuggguccc

SEQ ID NO: 530382 - RNA, 20 nt, Artificial Sequence
  Synthetic
uauuguugucuuuggguccc

SEQ ID NO: 530383 - RNA, 21 nt, Artificial Sequence
  Synthetic
uuauuguugucuuuggguccc

SEQ ID NO: 530384 - RNA, 22 nt, Artificial Sequence
  Synthetic
cuuauuguugucuuuggguccc

SEQ ID NO: 530385 - RNA, 23 nt, Artificial Sequence
  Synthetic
ucuuauuguugucuuuggguccc

SEQ ID NO: 530386 - RNA, 24 nt, Artificial Sequence
  Synthetic
uucuuauuguugucuuuggguccc

SEQ ID NO: 530387 - RNA, 18 nt, Artificial Sequence
  Synthetic
cccguggugcucuguccc

SEQ ID NO: 530388 - RNA, 19 nt, Artificial Sequence
  Synthetic
ccccguggugcucuguccc

SEQ ID NO: 530389 - RNA, 20 nt, Artificial Sequence
  Synthetic
uccccguggugcucuguccc

SEQ ID NO: 530390 - RNA, 21 nt, Artificial Sequence
  Synthetic
uuccccguggugcucuguccc

SEQ ID NO: 530391 - RNA, 22 nt, Artificial Sequence
  Synthetic
cuuccccguggugcucuguccc

SEQ ID NO: 530392 - RNA, 23 nt, Artificial Sequence
  Synthetic
ccuuccccguggugcucuguccc

SEQ ID NO: 530393 - RNA, 24 nt, Artificial Sequence
  Synthetic
cccuuccccguggugcucuguccc

SEQ ID NO: 530394 - RNA, 18 nt, Artificial Sequence
  Synthetic
aauaccaguguguguccc

SEQ ID NO: 530395 - RNA, 19 nt, Artificial Sequence
  Synthetic
caauaccaguguguguccc

SEQ ID NO: 530396 - RNA, 20 nt, Artificial Sequence
  Synthetic
ucaauaccaguguguguccc

SEQ ID NO: 530397 - RNA, 21 nt, Artificial Sequence
  Synthetic
uucaauaccaguguguguccc

SEQ ID NO: 530398 - RNA, 22 nt, Artificial Sequence
  Synthetic
auucaauaccaguguguguccc

SEQ ID NO: 530399 - RNA, 23 nt, Artificial Sequence
  Synthetic
aauucaauaccaguguguguccc

SEQ ID NO: 530400 - RNA, 24 nt, Artificial Sequence
  Synthetic
aaauucaauaccaguguguguccc

SEQ ID NO: 530401 - RNA, 18 nt, Artificial Sequence
  Synthetic
uuauuauagauuuguccc

SEQ ID NO: 530402 - RNA, 19 nt, Artificial Sequence
  Synthetic
uuuauuauagauuuguccc

SEQ ID NO: 530403 - RNA, 20 nt, Artificial Sequence
  Synthetic
uuuuauuauagauuuguccc

SEQ ID NO: 530404 - RNA, 21 nt, Artificial Sequence
  Synthetic
uuuuuauuauagauuuguccc

SEQ ID NO: 530405 - RNA, 22 nt, Artificial Sequence
  Synthetic
auuuuuauuauagauuuguccc

SEQ ID NO: 530406 - RNA, 23 nt, Artificial Sequence
  Synthetic
aauuuuuauuauagauuuguccc

SEQ ID NO: 530407 - RNA, 24 nt, Artificial Sequence
  Synthetic
uaauuuuuauuauagauuuguccc

SEQ ID NO: 530408 - RNA, 18 nt, Artificial Sequence
  Synthetic
aaguuaggcaaaauuccc

SEQ ID NO: 530409 - RNA, 19 nt, Artificial Sequence
  Synthetic
uaaguuaggcaaaauuccc

SEQ ID NO: 530410 - RNA, 20 nt, Artificial Sequence
  Synthetic
uuaaguuaggcaaaauuccc

SEQ ID NO: 530411 - RNA, 21 nt, Artificial Sequence
  Synthetic
auuaaguuaggcaaaauuccc

SEQ ID NO: 530412 - RNA, 22 nt, Artificial Sequence
  Synthetic
aauuaaguuaggcaaaauuccc

SEQ ID NO: 530413 - RNA, 23 nt, Artificial Sequence
  Synthetic
aaauuaaguuaggcaaaauuccc

SEQ ID NO: 530414 - RNA, 24 nt, Artificial Sequence
  Synthetic
aaaauuaaguuaggcaaaauuccc

SEQ ID NO: 530415 - RNA, 18 nt, Artificial Sequence
  Synthetic
agcaauugccaaauuccc

SEQ ID NO: 530416 - RNA, 19 nt, Artificial Sequence
  Synthetic
cagcaauugccaaauuccc

SEQ ID NO: 530417 - RNA, 20 nt, Artificial Sequence
  Synthetic
ccagcaauugccaaauuccc

SEQ ID NO: 530418 - RNA, 21 nt, Artificial Sequence
  Synthetic
uccagcaauugccaaauuccc

SEQ ID NO: 530419 - RNA, 22 nt, Artificial Sequence
  Synthetic
cuccagcaauugccaaauuccc

SEQ ID NO: 530420 - RNA, 23 nt, Artificial Sequence
  Synthetic
ucuccagcaauugccaaauuccc

SEQ ID NO: 530421 - RNA, 24 nt, Artificial Sequence
  Synthetic
aucuccagcaauugccaaauuccc

SEQ ID NO: 530422 - RNA, 18 nt, Artificial Sequence
  Synthetic
ugaacuucaggaauuccc

SEQ ID NO: 530423 - RNA, 19 nt, Artificial Sequence
  Synthetic
cugaacuucaggaauuccc

SEQ ID NO: 530424 - RNA, 20 nt, Artificial Sequence
  Synthetic
acugaacuucaggaauuccc

SEQ ID NO: 530425 - RNA, 21 nt, Artificial Sequence
  Synthetic
aacugaacuucaggaauuccc

SEQ ID NO: 530426 - RNA, 22 nt, Artificial Sequence
  Synthetic
caacugaacuucaggaauuccc

SEQ ID NO: 530427 - RNA, 23 nt, Artificial Sequence
  Synthetic
gcaacugaacuucaggaauuccc

SEQ ID NO: 530428 - RNA, 24 nt, Artificial Sequence
  Synthetic
ggcaacugaacuucaggaauuccc

SEQ ID NO: 530429 - RNA, 18 nt, Artificial Sequence
  Synthetic
uuucuugaucacauuccc

SEQ ID NO: 530430 - RNA, 19 nt, Artificial Sequence
  Synthetic
auuucuugaucacauuccc

SEQ ID NO: 530431 - RNA, 20 nt, Artificial Sequence
  Synthetic
gauuucuugaucacauuccc

SEQ ID NO: 530432 - RNA, 21 nt, Artificial Sequence
  Synthetic
ugauuucuugaucacauuccc

SEQ ID NO: 530433 - RNA, 22 nt, Artificial Sequence
  Synthetic
augauuucuugaucacauuccc

SEQ ID NO: 530434 - RNA, 23 nt, Artificial Sequence
  Synthetic
caugauuucuugaucacauuccc

SEQ ID NO: 530435 - RNA, 24 nt, Artificial Sequence
  Synthetic
ucaugauuucuugaucacauuccc

SEQ ID NO: 530436 - RNA, 18 nt, Artificial Sequence
  Synthetic
uagcuucauuccauuccc

SEQ ID NO: 530437 - RNA, 19 nt, Artificial Sequence
  Synthetic
auagcuucauuccauuccc

SEQ ID NO: 530438 - RNA, 20 nt, Artificial Sequence
  Synthetic
gauagcuucauuccauuccc

SEQ ID NO: 530439 - RNA, 21 nt, Artificial Sequence
  Synthetic
agauagcuucauuccauuccc

SEQ ID NO: 530440 - RNA, 22 nt, Artificial Sequence
  Synthetic
aagauagcuucauuccauuccc

SEQ ID NO: 530441 - RNA, 23 nt, Artificial Sequence
  Synthetic
uaagauagcuucauuccauuccc

SEQ ID NO: 530442 - RNA, 24 nt, Artificial Sequence
  Synthetic
guaagauagcuucauuccauuccc

SEQ ID NO: 530443 - RNA, 18 nt, Artificial Sequence
  Synthetic
agaagcacaugcauuccc

SEQ ID NO: 530444 - RNA, 19 nt, Artificial Sequence
  Synthetic
gagaagcacaugcauuccc

SEQ ID NO: 530445 - RNA, 20 nt, Artificial Sequence
  Synthetic
agagaagcacaugcauuccc

SEQ ID NO: 530446 - RNA, 21 nt, Artificial Sequence
  Synthetic
gagagaagcacaugcauuccc

SEQ ID NO: 530447 - RNA, 22 nt, Artificial Sequence
  Synthetic
agagagaagcacaugcauuccc

SEQ ID NO: 530448 - RNA, 23 nt, Artificial Sequence
  Synthetic
gagagagaagcacaugcauuccc

SEQ ID NO: 530449 - RNA, 24 nt, Artificial Sequence
  Synthetic
ggagagagaagcacaugcauuccc

SEQ ID NO: 530450 - RNA, 18 nt, Artificial Sequence
  Synthetic
cuacugggcugcauuccc

SEQ ID NO: 530451 - RNA, 19 nt, Artificial Sequence
  Synthetic
ccuacugggcugcauuccc

SEQ ID NO: 530452 - RNA, 20 nt, Artificial Sequence
  Synthetic
accuacugggcugcauuccc

SEQ ID NO: 530453 - RNA, 21 nt, Artificial Sequence
  Synthetic
gaccuacugggcugcauuccc

SEQ ID NO: 530454 - RNA, 22 nt, Artificial Sequence
  Synthetic
agaccuacugggcugcauuccc

SEQ ID NO: 530455 - RNA, 23 nt, Artificial Sequence
  Synthetic
gagaccuacugggcugcauuccc

SEQ ID NO: 530456 - RNA, 24 nt, Artificial Sequence
  Synthetic
ugagaccuacugggcugcauuccc

SEQ ID NO: 530457 - RNA, 18 nt, Artificial Sequence
  Synthetic
aaacuggaagucauuccc

SEQ ID NO: 530458 - RNA, 19 nt, Artificial Sequence
  Synthetic
uaaacuggaagucauuccc

SEQ ID NO: 530459 - RNA, 20 nt, Artificial Sequence
  Synthetic
auaaacuggaagucauuccc

SEQ ID NO: 530460 - RNA, 21 nt, Artificial Sequence
  Synthetic
uauaaacuggaagucauuccc

SEQ ID NO: 530461 - RNA, 22 nt, Artificial Sequence
  Synthetic
auauaaacuggaagucauuccc

SEQ ID NO: 530462 - RNA, 23 nt, Artificial Sequence
  Synthetic
aauauaaacuggaagucauuccc

SEQ ID NO: 530463 - RNA, 24 nt, Artificial Sequence
  Synthetic
aaauauaaacuggaagucauuccc

SEQ ID NO: 530464 - RNA, 18 nt, Artificial Sequence
  Synthetic
gcuacccuccagauuccc

SEQ ID NO: 530465 - RNA, 19 nt, Artificial Sequence
  Synthetic
agcuacccuccagauuccc

SEQ ID NO: 530466 - RNA, 20 nt, Artificial Sequence
  Synthetic
cagcuacccuccagauuccc

SEQ ID NO: 530467 - RNA, 21 nt, Artificial Sequence
  Synthetic
ucagcuacccuccagauuccc

SEQ ID NO: 530468 - RNA, 22 nt, Artificial Sequence
  Synthetic
cucagcuacccuccagauuccc

SEQ ID NO: 530469 - RNA, 23 nt, Artificial Sequence
  Synthetic
ucucagcuacccuccagauuccc

SEQ ID NO: 530470 - RNA, 24 nt, Artificial Sequence
  Synthetic
cucucagcuacccuccagauuccc

SEQ ID NO: 530471 - RNA, 18 nt, Artificial Sequence
  Synthetic
cuaaauaauaauauuccc

SEQ ID NO: 530472 - RNA, 19 nt, Artificial Sequence
  Synthetic
gcuaaauaauaauauuccc

SEQ ID NO: 530473 - RNA, 20 nt, Artificial Sequence
  Synthetic
ugcuaaauaauaauauuccc

SEQ ID NO: 530474 - RNA, 21 nt, Artificial Sequence
  Synthetic
gugcuaaauaauaauauuccc

SEQ ID NO: 530475 - RNA, 22 nt, Artificial Sequence
  Synthetic
ggugcuaaauaauaauauuccc

SEQ ID NO: 530476 - RNA, 23 nt, Artificial Sequence
  Synthetic
uggugcuaaauaauaauauuccc

SEQ ID NO: 530477 - RNA, 24 nt, Artificial Sequence
  Synthetic
uuggugcuaaauaauaauauuccc

SEQ ID NO: 530478 - RNA, 18 nt, Artificial Sequence
  Synthetic
uuaaauguugcuauuccc

SEQ ID NO: 530479 - RNA, 19 nt, Artificial Sequence
  Synthetic
cuuaaauguugcuauuccc

SEQ ID NO: 530480 - RNA, 20 nt, Artificial Sequence
  Synthetic
ccuuaaauguugcuauuccc

SEQ ID NO: 530481 - RNA, 21 nt, Artificial Sequence
  Synthetic
uccuuaaauguugcuauuccc

SEQ ID NO: 530482 - RNA, 22 nt, Artificial Sequence
  Synthetic
uuccuuaaauguugcuauuccc

SEQ ID NO: 530483 - RNA, 23 nt, Artificial Sequence
  Synthetic
auuccuuaaauguugcuauuccc

SEQ ID NO: 530484 - RNA, 24 nt, Artificial Sequence
  Synthetic
cauuccuuaaauguugcuauuccc

SEQ ID NO: 530485 - RNA, 18 nt, Artificial Sequence
  Synthetic
gaaacauuaucuauuccc

SEQ ID NO: 530486 - RNA, 19 nt, Artificial Sequence
  Synthetic
agaaacauuaucuauuccc

SEQ ID NO: 530487 - RNA, 20 nt, Artificial Sequence
  Synthetic
aagaaacauuaucuauuccc

SEQ ID NO: 530488 - RNA, 21 nt, Artificial Sequence
  Synthetic
uaagaaacauuaucuauuccc

SEQ ID NO: 530489 - RNA, 22 nt, Artificial Sequence
  Synthetic
guaagaaacauuaucuauuccc

SEQ ID NO: 530490 - RNA, 23 nt, Artificial Sequence
  Synthetic
aguaagaaacauuaucuauuccc

SEQ ID NO: 530491 - RNA, 24 nt, Artificial Sequence
  Synthetic
aaguaagaaacauuaucuauuccc

SEQ ID NO: 530492 - RNA, 18 nt, Artificial Sequence
  Synthetic
aaaaauaaguaacuuccc

SEQ ID NO: 530493 - RNA, 19 nt, Artificial Sequence
  Synthetic
uaaaaauaaguaacuuccc

SEQ ID NO: 530494 - RNA, 20 nt, Artificial Sequence
  Synthetic
auaaaaauaaguaacuuccc

SEQ ID NO: 530495 - RNA, 21 nt, Artificial Sequence
  Synthetic
uauaaaaauaaguaacuuccc

SEQ ID NO: 530496 - RNA, 22 nt, Artificial Sequence
  Synthetic
guauaaaaauaaguaacuuccc

SEQ ID NO: 530497 - RNA, 23 nt, Artificial Sequence
  Synthetic
uguauaaaaauaaguaacuuccc

SEQ ID NO: 530498 - RNA, 24 nt, Artificial Sequence
  Synthetic
auguauaaaaauaaguaacuuccc

SEQ ID NO: 530499 - RNA, 18 nt, Artificial Sequence
  Synthetic
uauaaguugacccuuccc

SEQ ID NO: 530500 - RNA, 19 nt, Artificial Sequence
  Synthetic
guauaaguugacccuuccc

SEQ ID NO: 530501 - RNA, 20 nt, Artificial Sequence
  Synthetic
aguauaaguugacccuuccc

SEQ ID NO: 530502 - RNA, 21 nt, Artificial Sequence
  Synthetic
aaguauaaguugacccuuccc

SEQ ID NO: 530503 - RNA, 22 nt, Artificial Sequence
  Synthetic
caaguauaaguugacccuuccc

SEQ ID NO: 530504 - RNA, 23 nt, Artificial Sequence
  Synthetic
ucaaguauaaguugacccuuccc

SEQ ID NO: 530505 - RNA, 24 nt, Artificial Sequence
  Synthetic
uucaaguauaaguugacccuuccc

SEQ ID NO: 530506 - RNA, 18 nt, Artificial Sequence
  Synthetic
uuuaucugaaagcuuccc

SEQ ID NO: 530507 - RNA, 19 nt, Artificial Sequence
  Synthetic
auuuaucugaaagcuuccc

SEQ ID NO: 530508 - RNA, 20 nt, Artificial Sequence
  Synthetic
cauuuaucugaaagcuuccc

SEQ ID NO: 530509 - RNA, 21 nt, Artificial Sequence
  Synthetic
acauuuaucugaaagcuuccc

SEQ ID NO: 530510 - RNA, 22 nt, Artificial Sequence
  Synthetic
gacauuuaucugaaagcuuccc

SEQ ID NO: 530511 - RNA, 23 nt, Artificial Sequence
  Synthetic
agacauuuaucugaaagcuuccc

SEQ ID NO: 530512 - RNA, 24 nt, Artificial Sequence
  Synthetic
cagacauuuaucugaaagcuuccc

SEQ ID NO: 530513 - RNA, 18 nt, Artificial Sequence
  Synthetic
ggccugggcaaucuuccc

SEQ ID NO: 530514 - RNA, 19 nt, Artificial Sequence
  Synthetic
gggccugggcaaucuuccc

SEQ ID NO: 530515 - RNA, 20 nt, Artificial Sequence
  Synthetic
agggccugggcaaucuuccc

SEQ ID NO: 530516 - RNA, 21 nt, Artificial Sequence
  Synthetic
cagggccugggcaaucuuccc

SEQ ID NO: 530517 - RNA, 22 nt, Artificial Sequence
  Synthetic
ucagggccugggcaaucuuccc

SEQ ID NO: 530518 - RNA, 23 nt, Artificial Sequence
  Synthetic
gucagggccugggcaaucuuccc

SEQ ID NO: 530519 - RNA, 24 nt, Artificial Sequence
  Synthetic
agucagggccugggcaaucuuccc

SEQ ID NO: 530520 - RNA, 18 nt, Artificial Sequence
  Synthetic
guggcaaguaaucuuccc

SEQ ID NO: 530521 - RNA, 19 nt, Artificial Sequence
  Synthetic
gguggcaaguaaucuuccc

SEQ ID NO: 530522 - RNA, 20 nt, Artificial Sequence
  Synthetic
ggguggcaaguaaucuuccc

SEQ ID NO: 530523 - RNA, 21 nt, Artificial Sequence
  Synthetic
gggguggcaaguaaucuuccc

SEQ ID NO: 530524 - RNA, 22 nt, Artificial Sequence
  Synthetic
ggggguggcaaguaaucuuccc

SEQ ID NO: 530525 - RNA, 23 nt, Artificial Sequence
  Synthetic
uggggguggcaaguaaucuuccc

SEQ ID NO: 530526 - RNA, 24 nt, Artificial Sequence
  Synthetic
auggggguggcaaguaaucuuccc

SEQ ID NO: 530527 - RNA, 18 nt, Artificial Sequence
  Synthetic
acgaaaggacaucuuccc

SEQ ID NO: 530528 - RNA, 19 nt, Artificial Sequence
  Synthetic
aacgaaaggacaucuuccc

SEQ ID NO: 530529 - RNA, 20 nt, Artificial Sequence
  Synthetic
uaacgaaaggacaucuuccc

SEQ ID NO: 530530 - RNA, 21 nt, Artificial Sequence
  Synthetic
guaacgaaaggacaucuuccc

SEQ ID NO: 530531 - RNA, 22 nt, Artificial Sequence
  Synthetic
aguaacgaaaggacaucuuccc

SEQ ID NO: 530532 - RNA, 23 nt, Artificial Sequence
  Synthetic
gaguaacgaaaggacaucuuccc

SEQ ID NO: 530533 - RNA, 24 nt, Artificial Sequence
  Synthetic
agaguaacgaaaggacaucuuccc

SEQ ID NO: 530534 - RNA, 18 nt, Artificial Sequence
  Synthetic
guaguauguacucuuccc

SEQ ID NO: 530535 - RNA, 19 nt, Artificial Sequence
  Synthetic
cguaguauguacucuuccc

SEQ ID NO: 530536 - RNA, 20 nt, Artificial Sequence
  Synthetic
gcguaguauguacucuuccc

SEQ ID NO: 530537 - RNA, 21 nt, Artificial Sequence
  Synthetic
ggcguaguauguacucuuccc

SEQ ID NO: 530538 - RNA, 22 nt, Artificial Sequence
  Synthetic
uggcguaguauguacucuuccc

SEQ ID NO: 530539 - RNA, 23 nt, Artificial Sequence
  Synthetic
auggcguaguauguacucuuccc

SEQ ID NO: 530540 - RNA, 24 nt, Artificial Sequence
  Synthetic
cauggcguaguauguacucuuccc

SEQ ID NO: 530541 - RNA, 18 nt, Artificial Sequence
  Synthetic
auagguaacucucuuccc

SEQ ID NO: 530542 - RNA, 19 nt, Artificial Sequence
  Synthetic
aauagguaacucucuuccc

SEQ ID NO: 530543 - RNA, 20 nt, Artificial Sequence
  Synthetic
aaauagguaacucucuuccc

SEQ ID NO: 530544 - RNA, 21 nt, Artificial Sequence
  Synthetic
caaauagguaacucucuuccc

SEQ ID NO: 530545 - RNA, 22 nt, Artificial Sequence
  Synthetic
ucaaauagguaacucucuuccc

SEQ ID NO: 530546 - RNA, 23 nt, Artificial Sequence
  Synthetic
uucaaauagguaacucucuuccc

SEQ ID NO: 530547 - RNA, 24 nt, Artificial Sequence
  Synthetic
cuucaaauagguaacucucuuccc

SEQ ID NO: 530548 - RNA, 18 nt, Artificial Sequence
  Synthetic
caaggaagaauucuuccc

SEQ ID NO: 530549 - RNA, 19 nt, Artificial Sequence
  Synthetic
gcaaggaagaauucuuccc

SEQ ID NO: 530550 - RNA, 20 nt, Artificial Sequence
  Synthetic
ggcaaggaagaauucuuccc

SEQ ID NO: 530551 - RNA, 21 nt, Artificial Sequence
  Synthetic
aggcaaggaagaauucuuccc

SEQ ID NO: 530552 - RNA, 22 nt, Artificial Sequence
  Synthetic
gaggcaaggaagaauucuuccc

SEQ ID NO: 530553 - RNA, 23 nt, Artificial Sequence
  Synthetic
agaggcaaggaagaauucuuccc

SEQ ID NO: 530554 - RNA, 24 nt, Artificial Sequence
  Synthetic
aagaggcaaggaagaauucuuccc

SEQ ID NO: 530555 - RNA, 18 nt, Artificial Sequence
  Synthetic
gagaggaucuuucuuccc

SEQ ID NO: 530556 - RNA, 19 nt, Artificial Sequence
  Synthetic
ugagaggaucuuucuuccc

SEQ ID NO: 530557 - RNA, 20 nt, Artificial Sequence
  Synthetic
cugagaggaucuuucuuccc

SEQ ID NO: 530558 - RNA, 21 nt, Artificial Sequence
  Synthetic
gcugagaggaucuuucuuccc

SEQ ID NO: 530559 - RNA, 22 nt, Artificial Sequence
  Synthetic
ggcugagaggaucuuucuuccc

SEQ ID NO: 530560 - RNA, 23 nt, Artificial Sequence
  Synthetic
gggcugagaggaucuuucuuccc

SEQ ID NO: 530561 - RNA, 24 nt, Artificial Sequence
  Synthetic
ggggcugagaggaucuuucuuccc

SEQ ID NO: 530562 - RNA, 18 nt, Artificial Sequence
  Synthetic
cuauuugcuuuucuuccc

SEQ ID NO: 530563 - RNA, 19 nt, Artificial Sequence
  Synthetic
acuauuugcuuuucuuccc

SEQ ID NO: 530564 - RNA, 20 nt, Artificial Sequence
  Synthetic
cacuauuugcuuuucuuccc

SEQ ID NO: 530565 - RNA, 21 nt, Artificial Sequence
  Synthetic
acacuauuugcuuuucuuccc

SEQ ID NO: 530566 - RNA, 22 nt, Artificial Sequence
  Synthetic
aacacuauuugcuuuucuuccc

SEQ ID NO: 530567 - RNA, 23 nt, Artificial Sequence
  Synthetic
uaacacuauuugcuuuucuuccc

SEQ ID NO: 530568 - RNA, 24 nt, Artificial Sequence
  Synthetic
auaacacuauuugcuuuucuuccc

SEQ ID NO: 530569 - RNA, 18 nt, Artificial Sequence
  Synthetic
aucacagaagaaguuccc

SEQ ID NO: 530570 - RNA, 19 nt, Artificial Sequence
  Synthetic
uaucacagaagaaguuccc

SEQ ID NO: 530571 - RNA, 20 nt, Artificial Sequence
  Synthetic
cuaucacagaagaaguuccc

SEQ ID NO: 530572 - RNA, 21 nt, Artificial Sequence
  Synthetic
acuaucacagaagaaguuccc

SEQ ID NO: 530573 - RNA, 22 nt, Artificial Sequence
  Synthetic
cacuaucacagaagaaguuccc

SEQ ID NO: 530574 - RNA, 23 nt, Artificial Sequence
  Synthetic
acacuaucacagaagaaguuccc

SEQ ID NO: 530575 - RNA, 24 nt, Artificial Sequence
  Synthetic
gacacuaucacagaagaaguuccc

SEQ ID NO: 530576 - RNA, 18 nt, Artificial Sequence
  Synthetic
cggaaacccgaaguuccc

SEQ ID NO: 530577 - RNA, 19 nt, Artificial Sequence
  Synthetic
acggaaacccgaaguuccc

SEQ ID NO: 530578 - RNA, 20 nt, Artificial Sequence
  Synthetic
gacggaaacccgaaguuccc

SEQ ID NO: 530579 - RNA, 21 nt, Artificial Sequence
  Synthetic
agacggaaacccgaaguuccc

SEQ ID NO: 530580 - RNA, 22 nt, Artificial Sequence
  Synthetic
gagacggaaacccgaaguuccc

SEQ ID NO: 530581 - RNA, 23 nt, Artificial Sequence
  Synthetic
agagacggaaacccgaaguuccc

SEQ ID NO: 530582 - RNA, 24 nt, Artificial Sequence
  Synthetic
uagagacggaaacccgaaguuccc

SEQ ID NO: 530583 - RNA, 18 nt, Artificial Sequence
  Synthetic
auugaacucacaguuccc

SEQ ID NO: 530584 - RNA, 19 nt, Artificial Sequence
  Synthetic
aauugaacucacaguuccc

SEQ ID NO: 530585 - RNA, 20 nt, Artificial Sequence
  Synthetic
aaauugaacucacaguuccc

SEQ ID NO: 530586 - RNA, 21 nt, Artificial Sequence
  Synthetic
aaaauugaacucacaguuccc

SEQ ID NO: 530587 - RNA, 22 nt, Artificial Sequence
  Synthetic
uaaaauugaacucacaguuccc

SEQ ID NO: 530588 - RNA, 23 nt, Artificial Sequence
  Synthetic
cuaaaauugaacucacaguuccc

SEQ ID NO: 530589 - RNA, 24 nt, Artificial Sequence
  Synthetic
ucuaaaauugaacucacaguuccc

SEQ ID NO: 530590 - RNA, 18 nt, Artificial Sequence
  Synthetic
aggcccaagacaguuccc

SEQ ID NO: 530591 - RNA, 19 nt, Artificial Sequence
  Synthetic
gaggcccaagacaguuccc

SEQ ID NO: 530592 - RNA, 20 nt, Artificial Sequence
  Synthetic
agaggcccaagacaguuccc

SEQ ID NO: 530593 - RNA, 21 nt, Artificial Sequence
  Synthetic
aagaggcccaagacaguuccc

SEQ ID NO: 530594 - RNA, 22 nt, Artificial Sequence
  Synthetic
aaagaggcccaagacaguuccc

SEQ ID NO: 530595 - RNA, 23 nt, Artificial Sequence
  Synthetic
aaaagaggcccaagacaguuccc

SEQ ID NO: 530596 - RNA, 24 nt, Artificial Sequence
  Synthetic
caaaagaggcccaagacaguuccc

SEQ ID NO: 530597 - RNA, 18 nt, Artificial Sequence
  Synthetic
uccuuugcuccaguuccc

SEQ ID NO: 530598 - RNA, 19 nt, Artificial Sequence
  Synthetic
guccuuugcuccaguuccc

SEQ ID NO: 530599 - RNA, 20 nt, Artificial Sequence
  Synthetic
uguccuuugcuccaguuccc

SEQ ID NO: 530600 - RNA, 21 nt, Artificial Sequence
  Synthetic
guguccuuugcuccaguuccc

SEQ ID NO: 530601 - RNA, 22 nt, Artificial Sequence
  Synthetic
aguguccuuugcuccaguuccc

SEQ ID NO: 530602 - RNA, 23 nt, Artificial Sequence
  Synthetic
caguguccuuugcuccaguuccc

SEQ ID NO: 530603 - RNA, 24 nt, Artificial Sequence
  Synthetic
acaguguccuuugcuccaguuccc

SEQ ID NO: 530604 - RNA, 18 nt, Artificial Sequence
  Synthetic
ucauauucuggaguuccc

SEQ ID NO: 530605 - RNA, 19 nt, Artificial Sequence
  Synthetic
uucauauucuggaguuccc

SEQ ID NO: 530606 - RNA, 20 nt, Artificial Sequence
  Synthetic
uuucauauucuggaguuccc

SEQ ID NO: 530607 - RNA, 21 nt, Artificial Sequence
  Synthetic
guuucauauucuggaguuccc

SEQ ID NO: 530608 - RNA, 22 nt, Artificial Sequence
  Synthetic
uguuucauauucuggaguuccc

SEQ ID NO: 530609 - RNA, 23 nt, Artificial Sequence
  Synthetic
auguuucauauucuggaguuccc

SEQ ID NO: 530610 - RNA, 24 nt, Artificial Sequence
  Synthetic
aauguuucauauucuggaguuccc

SEQ ID NO: 530611 - RNA, 18 nt, Artificial Sequence
  Synthetic
uauguuucucauguuccc

SEQ ID NO: 530612 - RNA, 19 nt, Artificial Sequence
  Synthetic
uuauguuucucauguuccc

SEQ ID NO: 530613 - RNA, 20 nt, Artificial Sequence
  Synthetic
auuauguuucucauguuccc

SEQ ID NO: 530614 - RNA, 21 nt, Artificial Sequence
  Synthetic
cauuauguuucucauguuccc

SEQ ID NO: 530615 - RNA, 22 nt, Artificial Sequence
  Synthetic
ucauuauguuucucauguuccc

SEQ ID NO: 530616 - RNA, 23 nt, Artificial Sequence
  Synthetic
uucauuauguuucucauguuccc

SEQ ID NO: 530617 - RNA, 24 nt, Artificial Sequence
  Synthetic
uuucauuauguuucucauguuccc

SEQ ID NO: 530618 - RNA, 18 nt, Artificial Sequence
  Synthetic
guaauaccaccuguuccc

SEQ ID NO: 530619 - RNA, 19 nt, Artificial Sequence
  Synthetic
aguaauaccaccuguuccc

SEQ ID NO: 530620 - RNA, 20 nt, Artificial Sequence
  Synthetic
uaguaauaccaccuguuccc

SEQ ID NO: 530621 - RNA, 21 nt, Artificial Sequence
  Synthetic
cuaguaauaccaccuguuccc

SEQ ID NO: 530622 - RNA, 22 nt, Artificial Sequence
  Synthetic
gcuaguaauaccaccuguuccc

SEQ ID NO: 530623 - RNA, 23 nt, Artificial Sequence
  Synthetic
ggcuaguaauaccaccuguuccc

SEQ ID NO: 530624 - RNA, 24 nt, Artificial Sequence
  Synthetic
uggcuaguaauaccaccuguuccc

SEQ ID NO: 530625 - RNA, 18 nt, Artificial Sequence
  Synthetic
gagccaauguguguuccc

SEQ ID NO: 530626 - RNA, 19 nt, Artificial Sequence
  Synthetic
ugagccaauguguguuccc

SEQ ID NO: 530627 - RNA, 20 nt, Artificial Sequence
  Synthetic
augagccaauguguguuccc

SEQ ID NO: 530628 - RNA, 21 nt, Artificial Sequence
  Synthetic
aaugagccaauguguguuccc

SEQ ID NO: 530629 - RNA, 22 nt, Artificial Sequence
  Synthetic
gaaugagccaauguguguuccc

SEQ ID NO: 530630 - RNA, 23 nt, Artificial Sequence
  Synthetic
ugaaugagccaauguguguuccc

SEQ ID NO: 530631 - RNA, 24 nt, Artificial Sequence
  Synthetic
uugaaugagccaauguguguuccc

SEQ ID NO: 530632 - RNA, 18 nt, Artificial Sequence
  Synthetic
cuaaggguauuauuuccc

SEQ ID NO: 530633 - RNA, 19 nt, Artificial Sequence
  Synthetic
ucuaaggguauuauuuccc

SEQ ID NO: 530634 - RNA, 20 nt, Artificial Sequence
  Synthetic
cucuaaggguauuauuuccc

SEQ ID NO: 530635 - RNA, 21 nt, Artificial Sequence
  Synthetic
acucuaaggguauuauuuccc

SEQ ID NO: 530636 - RNA, 22 nt, Artificial Sequence
  Synthetic
gacucuaaggguauuauuuccc

SEQ ID NO: 530637 - RNA, 23 nt, Artificial Sequence
  Synthetic
agacucuaaggguauuauuuccc

SEQ ID NO: 530638 - RNA, 24 nt, Artificial Sequence
  Synthetic
cagacucuaaggguauuauuuccc

SEQ ID NO: 530639 - RNA, 18 nt, Artificial Sequence
  Synthetic
cuacugaucuuauuuccc

SEQ ID NO: 530640 - RNA, 19 nt, Artificial Sequence
  Synthetic
ucuacugaucuuauuuccc

SEQ ID NO: 530641 - RNA, 20 nt, Artificial Sequence
  Synthetic
gucuacugaucuuauuuccc

SEQ ID NO: 530642 - RNA, 21 nt, Artificial Sequence
  Synthetic
ugucuacugaucuuauuuccc

SEQ ID NO: 530643 - RNA, 22 nt, Artificial Sequence
  Synthetic
cugucuacugaucuuauuuccc

SEQ ID NO: 530644 - RNA, 23 nt, Artificial Sequence
  Synthetic
acugucuacugaucuuauuuccc

SEQ ID NO: 530645 - RNA, 24 nt, Artificial Sequence
  Synthetic
cacugucuacugaucuuauuuccc

SEQ ID NO: 530646 - RNA, 18 nt, Artificial Sequence
  Synthetic
uuuucuggccucuuuccc

SEQ ID NO: 530647 - RNA, 19 nt, Artificial Sequence
  Synthetic
guuuucuggccucuuuccc

SEQ ID NO: 530648 - RNA, 20 nt, Artificial Sequence
  Synthetic
aguuuucuggccucuuuccc

SEQ ID NO: 530649 - RNA, 21 nt, Artificial Sequence
  Synthetic
aaguuuucuggccucuuuccc

SEQ ID NO: 530650 - RNA, 22 nt, Artificial Sequence
  Synthetic
gaaguuuucuggccucuuuccc

SEQ ID NO: 530651 - RNA, 23 nt, Artificial Sequence
  Synthetic
agaaguuuucuggccucuuuccc

SEQ ID NO: 530652 - RNA, 24 nt, Artificial Sequence
  Synthetic
aagaaguuuucuggccucuuuccc

SEQ ID NO: 530653 - RNA, 18 nt, Artificial Sequence
  Synthetic
uccagucugcucuuuccc

SEQ ID NO: 530654 - RNA, 19 nt, Artificial Sequence
  Synthetic
cuccagucugcucuuuccc

SEQ ID NO: 530655 - RNA, 20 nt, Artificial Sequence
  Synthetic
acuccagucugcucuuuccc

SEQ ID NO: 530656 - RNA, 21 nt, Artificial Sequence
  Synthetic
uacuccagucugcucuuuccc

SEQ ID NO: 530657 - RNA, 22 nt, Artificial Sequence
  Synthetic
uuacuccagucugcucuuuccc

SEQ ID NO: 530658 - RNA, 23 nt, Artificial Sequence
  Synthetic
cuuacuccagucugcucuuuccc

SEQ ID NO: 530659 - RNA, 24 nt, Artificial Sequence
  Synthetic
ucuuacuccagucugcucuuuccc

SEQ ID NO: 530660 - RNA, 18 nt, Artificial Sequence
  Synthetic
aggguuccagaguuuccc

SEQ ID NO: 530661 - RNA, 19 nt, Artificial Sequence
  Synthetic
aaggguuccagaguuuccc

SEQ ID NO: 530662 - RNA, 20 nt, Artificial Sequence
  Synthetic
caaggguuccagaguuuccc

SEQ ID NO: 530663 - RNA, 21 nt, Artificial Sequence
  Synthetic
acaaggguuccagaguuuccc

SEQ ID NO: 530664 - RNA, 22 nt, Artificial Sequence
  Synthetic
uacaaggguuccagaguuuccc

SEQ ID NO: 530665 - RNA, 23 nt, Artificial Sequence
  Synthetic
uuacaaggguuccagaguuuccc

SEQ ID NO: 530666 - RNA, 24 nt, Artificial Sequence
  Synthetic
uuuacaaggguuccagaguuuccc

SEQ ID NO: 530667 - RNA, 18 nt, Artificial Sequence
  Synthetic
uacagcccaugguuuccc

SEQ ID NO: 530668 - RNA, 19 nt, Artificial Sequence
  Synthetic
guacagcccaugguuuccc

SEQ ID NO: 530669 - RNA, 20 nt, Artificial Sequence
  Synthetic
uguacagcccaugguuuccc

SEQ ID NO: 530670 - RNA, 21 nt, Artificial Sequence
  Synthetic
cuguacagcccaugguuuccc

SEQ ID NO: 530671 - RNA, 22 nt, Artificial Sequence
  Synthetic
ucuguacagcccaugguuuccc

SEQ ID NO: 530672 - RNA, 23 nt, Artificial Sequence
  Synthetic
gucuguacagcccaugguuuccc

SEQ ID NO: 530673 - RNA, 24 nt, Artificial Sequence
  Synthetic
ugucuguacagcccaugguuuccc

SEQ ID NO: 530674 - RNA, 18 nt, Artificial Sequence
  Synthetic
ugggaaaacugguuuccc

SEQ ID NO: 530675 - RNA, 19 nt, Artificial Sequence
  Synthetic
augggaaaacugguuuccc

SEQ ID NO: 530676 - RNA, 20 nt, Artificial Sequence
  Synthetic
aaugggaaaacugguuuccc

SEQ ID NO: 530677 - RNA, 21 nt, Artificial Sequence
  Synthetic
caaugggaaaacugguuuccc

SEQ ID NO: 530678 - RNA, 22 nt, Artificial Sequence
  Synthetic
ucaaugggaaaacugguuuccc

SEQ ID NO: 530679 - RNA, 23 nt, Artificial Sequence
  Synthetic
uucaaugggaaaacugguuuccc

SEQ ID NO: 530680 - RNA, 24 nt, Artificial Sequence
  Synthetic
uuucaaugggaaaacugguuuccc

SEQ ID NO: 530681 - RNA, 18 nt, Artificial Sequence
  Synthetic
guuucagggcauuuuccc

SEQ ID NO: 530682 - RNA, 19 nt, Artificial Sequence
  Synthetic
uguuucagggcauuuuccc

SEQ ID NO: 530683 - RNA, 20 nt, Artificial Sequence
  Synthetic
uuguuucagggcauuuuccc

SEQ ID NO: 530684 - RNA, 21 nt, Artificial Sequence
  Synthetic
guuguuucagggcauuuuccc

SEQ ID NO: 530685 - RNA, 22 nt, Artificial Sequence
  Synthetic
uguuguuucagggcauuuuccc

SEQ ID NO: 530686 - RNA, 23 nt, Artificial Sequence
  Synthetic
uuguuguuucagggcauuuuccc

SEQ ID NO: 530687 - RNA, 24 nt, Artificial Sequence
  Synthetic
auuguuguuucagggcauuuuccc

SEQ ID NO: 530688 - RNA, 18 nt, Artificial Sequence
  Synthetic
aagucaauguauuuuccc

SEQ ID NO: 530689 - RNA, 19 nt, Artificial Sequence
  Synthetic
caagucaauguauuuuccc

SEQ ID NO: 530690 - RNA, 20 nt, Artificial Sequence
  Synthetic
ccaagucaauguauuuuccc

SEQ ID NO: 530691 - RNA, 21 nt, Artificial Sequence
  Synthetic
gccaagucaauguauuuuccc

SEQ ID NO: 530692 - RNA, 22 nt, Artificial Sequence
  Synthetic
ggccaagucaauguauuuuccc

SEQ ID NO: 530693 - RNA, 23 nt, Artificial Sequence
  Synthetic
gggccaagucaauguauuuuccc

SEQ ID NO: 530694 - RNA, 24 nt, Artificial Sequence
  Synthetic
agggccaagucaauguauuuuccc

SEQ ID NO: 530695 - RNA, 18 nt, Artificial Sequence
  Synthetic
guaaugggcaguuuuccc

SEQ ID NO: 530696 - RNA, 19 nt, Artificial Sequence
  Synthetic
uguaaugggcaguuuuccc

SEQ ID NO: 530697 - RNA, 20 nt, Artificial Sequence
  Synthetic
uuguaaugggcaguuuuccc

SEQ ID NO: 530698 - RNA, 21 nt, Artificial Sequence
  Synthetic
cuuguaaugggcaguuuuccc

SEQ ID NO: 530699 - RNA, 22 nt, Artificial Sequence
  Synthetic
gcuuguaaugggcaguuuuccc

SEQ ID NO: 530700 - RNA, 23 nt, Artificial Sequence
  Synthetic
ggcuuguaaugggcaguuuuccc

SEQ ID NO: 530701 - RNA, 24 nt, Artificial Sequence
  Synthetic
uggcuuguaaugggcaguuuuccc

SEQ ID NO: 530702 - RNA, 18 nt, Artificial Sequence
  Synthetic
uaagaaauauuuuuuccc

SEQ ID NO: 530703 - RNA, 19 nt, Artificial Sequence
  Synthetic
auaagaaauauuuuuuccc

SEQ ID NO: 530704 - RNA, 20 nt, Artificial Sequence
  Synthetic
gauaagaaauauuuuuuccc

SEQ ID NO: 530705 - RNA, 21 nt, Artificial Sequence
  Synthetic
ugauaagaaauauuuuuuccc

SEQ ID NO: 530706 - RNA, 22 nt, Artificial Sequence
  Synthetic
augauaagaaauauuuuuuccc

SEQ ID NO: 530707 - RNA, 23 nt, Artificial Sequence
  Synthetic
gaugauaagaaauauuuuuuccc

SEQ ID NO: 530708 - RNA, 24 nt, Artificial Sequence
  Synthetic
ugaugauaagaaauauuuuuuccc

SEQ ID NO: 530709 - RNA, 18 nt, Artificial Sequence
  Synthetic
gugacucuuuuuuuuccc

SEQ ID NO: 530710 - RNA, 19 nt, Artificial Sequence
  Synthetic
ugugacucuuuuuuuuccc

SEQ ID NO: 530711 - RNA, 20 nt, Artificial Sequence
  Synthetic
augugacucuuuuuuuuccc

SEQ ID NO: 530712 - RNA, 21 nt, Artificial Sequence
  Synthetic
caugugacucuuuuuuuuccc

SEQ ID NO: 530713 - RNA, 22 nt, Artificial Sequence
  Synthetic
acaugugacucuuuuuuuuccc

SEQ ID NO: 530714 - RNA, 23 nt, Artificial Sequence
  Synthetic
aacaugugacucuuuuuuuuccc

SEQ ID NO: 530715 - RNA, 24 nt, Artificial Sequence
  Synthetic
aaacaugugacucuuuuuuuuccc

SEQ ID NO: 530716 - RNA, 18 nt, Artificial Sequence
  Synthetic
aaaaaaaaaaaaaaagcc

SEQ ID NO: 530717 - RNA, 19 nt, Artificial Sequence
  Synthetic
aaaaaaaaaaaaaaaagcc

SEQ ID NO: 530718 - RNA, 20 nt, Artificial Sequence
  Synthetic
aaaaaaaaaaaaaaaaagcc

SEQ ID NO: 530719 - RNA, 21 nt, Artificial Sequence
  Synthetic
aaaaaaaaaaaaaaaaaagcc

SEQ ID NO: 530720 - RNA, 22 nt, Artificial Sequence
  Synthetic
aaaaaaaaaaaaaaaaaaagcc

SEQ ID NO: 530721 - RNA, 23 nt, Artificial Sequence
  Synthetic
aaaaaaaaaaaaaaaaaaaagcc

SEQ ID NO: 530722 - RNA, 24 nt, Artificial Sequence
  Synthetic
aaaaaaaaaaaaaaaaaaaaagcc

SEQ ID NO: 530723 - RNA, 18 nt, Artificial Sequence
  Synthetic
uuccaacaaagaaaagcc

SEQ ID NO: 530724 - RNA, 19 nt, Artificial Sequence
  Synthetic
cuuccaacaaagaaaagcc

SEQ ID NO: 530725 - RNA, 20 nt, Artificial Sequence
  Synthetic
ccuuccaacaaagaaaagcc

SEQ ID NO: 530726 - RNA, 21 nt, Artificial Sequence
  Synthetic
accuuccaacaaagaaaagcc

SEQ ID NO: 530727 - RNA, 22 nt, Artificial Sequence
  Synthetic
aaccuuccaacaaagaaaagcc

SEQ ID NO: 530728 - RNA, 23 nt, Artificial Sequence
  Synthetic
aaaccuuccaacaaagaaaagcc

SEQ ID NO: 530729 - RNA, 24 nt, Artificial Sequence
  Synthetic
aaaaccuuccaacaaagaaaagcc

SEQ ID NO: 530730 - RNA, 18 nt, Artificial Sequence
  Synthetic
auugaggcuauaaaagcc

SEQ ID NO: 530731 - RNA, 19 nt, Artificial Sequence
  Synthetic
gauugaggcuauaaaagcc

SEQ ID NO: 530732 - RNA, 20 nt, Artificial Sequence
  Synthetic
ugauugaggcuauaaaagcc

SEQ ID NO: 530733 - RNA, 21 nt, Artificial Sequence
  Synthetic
gugauugaggcuauaaaagcc

SEQ ID NO: 530734 - RNA, 22 nt, Artificial Sequence
  Synthetic
ggugauugaggcuauaaaagcc

SEQ ID NO: 530735 - RNA, 23 nt, Artificial Sequence
  Synthetic
uggugauugaggcuauaaaagcc

SEQ ID NO: 530736 - RNA, 24 nt, Artificial Sequence
  Synthetic
uuggugauugaggcuauaaaagcc

SEQ ID NO: 530737 - RNA, 18 nt, Artificial Sequence
  Synthetic
cuuuucauuguaaaagcc

SEQ ID NO: 530738 - RNA, 19 nt, Artificial Sequence
  Synthetic
ucuuuucauuguaaaagcc

SEQ ID NO: 530739 - RNA, 20 nt, Artificial Sequence
  Synthetic
uucuuuucauuguaaaagcc

SEQ ID NO: 530740 - RNA, 21 nt, Artificial Sequence
  Synthetic
cuucuuuucauuguaaaagcc

SEQ ID NO: 530741 - RNA, 22 nt, Artificial Sequence
  Synthetic
acuucuuuucauuguaaaagcc

SEQ ID NO: 530742 - RNA, 23 nt, Artificial Sequence
  Synthetic
aacuucuuuucauuguaaaagcc

SEQ ID NO: 530743 - RNA, 24 nt, Artificial Sequence
  Synthetic
gaacuucuuuucauuguaaaagcc

SEQ ID NO: 530744 - RNA, 18 nt, Artificial Sequence
  Synthetic
ggaccaaucuuaaaagcc

SEQ ID NO: 530745 - RNA, 19 nt, Artificial Sequence
  Synthetic
uggaccaaucuuaaaagcc

SEQ ID NO: 530746 - RNA, 20 nt, Artificial Sequence
  Synthetic
uuggaccaaucuuaaaagcc

SEQ ID NO: 530747 - RNA, 21 nt, Artificial Sequence
  Synthetic
uuuggaccaaucuuaaaagcc

SEQ ID NO: 530748 - RNA, 22 nt, Artificial Sequence
  Synthetic
guuuggaccaaucuuaaaagcc

SEQ ID NO: 530749 - RNA, 23 nt, Artificial Sequence
  Synthetic
aguuuggaccaaucuuaaaagcc

SEQ ID NO: 530750 - RNA, 24 nt, Artificial Sequence
  Synthetic
aaguuuggaccaaucuuaaaagcc

SEQ ID NO: 530751 - RNA, 18 nt, Artificial Sequence
  Synthetic
gauuaccuacccaaagcc

SEQ ID NO: 530752 - RNA, 19 nt, Artificial Sequence
  Synthetic
ggauuaccuacccaaagcc

SEQ ID NO: 530753 - RNA, 20 nt, Artificial Sequence
  Synthetic
aggauuaccuacccaaagcc

SEQ ID NO: 530754 - RNA, 21 nt, Artificial Sequence
  Synthetic
gaggauuaccuacccaaagcc

SEQ ID NO: 530755 - RNA, 22 nt, Artificial Sequence
  Synthetic
agaggauuaccuacccaaagcc

SEQ ID NO: 530756 - RNA, 23 nt, Artificial Sequence
  Synthetic
gagaggauuaccuacccaaagcc

SEQ ID NO: 530757 - RNA, 24 nt, Artificial Sequence
  Synthetic
ggagaggauuaccuacccaaagcc

SEQ ID NO: 530758 - RNA, 18 nt, Artificial Sequence
  Synthetic
aagaacaagggcaaagcc

SEQ ID NO: 530759 - RNA, 19 nt, Artificial Sequence
  Synthetic
aaagaacaagggcaaagcc

SEQ ID NO: 530760 - RNA, 20 nt, Artificial Sequence
  Synthetic
uaaagaacaagggcaaagcc

SEQ ID NO: 530761 - RNA, 21 nt, Artificial Sequence
  Synthetic
guaaagaacaagggcaaagcc

SEQ ID NO: 530762 - RNA, 22 nt, Artificial Sequence
  Synthetic
gguaaagaacaagggcaaagcc

SEQ ID NO: 530763 - RNA, 23 nt, Artificial Sequence
  Synthetic
ggguaaagaacaagggcaaagcc

SEQ ID NO: 530764 - RNA, 24 nt, Artificial Sequence
  Synthetic
aggguaaagaacaagggcaaagcc

SEQ ID NO: 530765 - RNA, 18 nt, Artificial Sequence
  Synthetic
agcagaauagucaaagcc

SEQ ID NO: 530766 - RNA, 19 nt, Artificial Sequence
  Synthetic
cagcagaauagucaaagcc

SEQ ID NO: 530767 - RNA, 20 nt, Artificial Sequence
  Synthetic
ccagcagaauagucaaagcc

SEQ ID NO: 530768 - RNA, 21 nt, Artificial Sequence
  Synthetic
cccagcagaauagucaaagcc

SEQ ID NO: 530769 - RNA, 22 nt, Artificial Sequence
  Synthetic
ucccagcagaauagucaaagcc

SEQ ID NO: 530770 - RNA, 23 nt, Artificial Sequence
  Synthetic
uucccagcagaauagucaaagcc

SEQ ID NO: 530771 - RNA, 24 nt, Artificial Sequence
  Synthetic
guucccagcagaauagucaaagcc

SEQ ID NO: 530772 - RNA, 18 nt, Artificial Sequence
  Synthetic
gaauccuauaagaaagcc

SEQ ID NO: 530773 - RNA, 19 nt, Artificial Sequence
  Synthetic
agaauccuauaagaaagcc

SEQ ID NO: 530774 - RNA, 20 nt, Artificial Sequence
  Synthetic
aagaauccuauaagaaagcc

SEQ ID NO: 530775 - RNA, 21 nt, Artificial Sequence
  Synthetic
uaagaauccuauaagaaagcc

SEQ ID NO: 530776 - RNA, 22 nt, Artificial Sequence
  Synthetic
auaagaauccuauaagaaagcc

SEQ ID NO: 530777 - RNA, 23 nt, Artificial Sequence
  Synthetic
uauaagaauccuauaagaaagcc

SEQ ID NO: 530778 - RNA, 24 nt, Artificial Sequence
  Synthetic
uuauaagaauccuauaagaaagcc

SEQ ID NO: 530779 - RNA, 18 nt, Artificial Sequence
  Synthetic
aagagcacagagaaagcc

SEQ ID NO: 530780 - RNA, 19 nt, Artificial Sequence
  Synthetic
aaagagcacagagaaagcc

SEQ ID NO: 530781 - RNA, 20 nt, Artificial Sequence
  Synthetic
caaagagcacagagaaagcc

SEQ ID NO: 530782 - RNA, 21 nt, Artificial Sequence
  Synthetic
gcaaagagcacagagaaagcc

SEQ ID NO: 530783 - RNA, 22 nt, Artificial Sequence
  Synthetic
ggcaaagagcacagagaaagcc

SEQ ID NO: 530784 - RNA, 23 nt, Artificial Sequence
  Synthetic
aggcaaagagcacagagaaagcc

SEQ ID NO: 530785 - RNA, 24 nt, Artificial Sequence
  Synthetic
caggcaaagagcacagagaaagcc

SEQ ID NO: 530786 - RNA, 18 nt, Artificial Sequence
  Synthetic
gaaggcaugucgaaagcc

SEQ ID NO: 530787 - RNA, 19 nt, Artificial Sequence
  Synthetic
ggaaggcaugucgaaagcc

SEQ ID NO: 530788 - RNA, 20 nt, Artificial Sequence
  Synthetic
aggaaggcaugucgaaagcc

SEQ ID NO: 530789 - RNA, 21 nt, Artificial Sequence
  Synthetic
uaggaaggcaugucgaaagcc

SEQ ID NO: 530790 - RNA, 22 nt, Artificial Sequence
  Synthetic
uuaggaaggcaugucgaaagcc

SEQ ID NO: 530791 - RNA, 23 nt, Artificial Sequence
  Synthetic
guuaggaaggcaugucgaaagcc

SEQ ID NO: 530792 - RNA, 24 nt, Artificial Sequence
  Synthetic
gguuaggaaggcaugucgaaagcc

SEQ ID NO: 530793 - RNA, 18 nt, Artificial Sequence
  Synthetic
aacaguuccaugaaagcc

SEQ ID NO: 530794 - RNA, 19 nt, Artificial Sequence
  Synthetic
gaacaguuccaugaaagcc

SEQ ID NO: 530795 - RNA, 20 nt, Artificial Sequence
  Synthetic
ggaacaguuccaugaaagcc

SEQ ID NO: 530796 - RNA, 21 nt, Artificial Sequence
  Synthetic
uggaacaguuccaugaaagcc

SEQ ID NO: 530797 - RNA, 22 nt, Artificial Sequence
  Synthetic
auggaacaguuccaugaaagcc

SEQ ID NO: 530798 - RNA, 23 nt, Artificial Sequence
  Synthetic
gauggaacaguuccaugaaagcc

SEQ ID NO: 530799 - RNA, 24 nt, Artificial Sequence
  Synthetic
ggauggaacaguuccaugaaagcc

SEQ ID NO: 530800 - RNA, 18 nt, Artificial Sequence
  Synthetic
acaaggaaguuuaaagcc

SEQ ID NO: 530801 - RNA, 19 nt, Artificial Sequence
  Synthetic
cacaaggaaguuuaaagcc

SEQ ID NO: 530802 - RNA, 20 nt, Artificial Sequence
  Synthetic
ucacaaggaaguuuaaagcc

SEQ ID NO: 530803 - RNA, 21 nt, Artificial Sequence
  Synthetic
cucacaaggaaguuuaaagcc

SEQ ID NO: 530804 - RNA, 22 nt, Artificial Sequence
  Synthetic
ucucacaaggaaguuuaaagcc

SEQ ID NO: 530805 - RNA, 23 nt, Artificial Sequence
  Synthetic
aucucacaaggaaguuuaaagcc

SEQ ID NO: 530806 - RNA, 24 nt, Artificial Sequence
  Synthetic
uaucucacaaggaaguuuaaagcc

SEQ ID NO: 530807 - RNA, 18 nt, Artificial Sequence
  Synthetic
auagguagagaacaagcc

SEQ ID NO: 530808 - RNA, 19 nt, Artificial Sequence
  Synthetic
aauagguagagaacaagcc

SEQ ID NO: 530809 - RNA, 20 nt, Artificial Sequence
  Synthetic
aaauagguagagaacaagcc

SEQ ID NO: 530810 - RNA, 21 nt, Artificial Sequence
  Synthetic
gaaauagguagagaacaagcc

SEQ ID NO: 530811 - RNA, 22 nt, Artificial Sequence
  Synthetic
ugaaauagguagagaacaagcc

SEQ ID NO: 530812 - RNA, 23 nt, Artificial Sequence
  Synthetic
cugaaauagguagagaacaagcc

SEQ ID NO: 530813 - RNA, 24 nt, Artificial Sequence
  Synthetic
acugaaauagguagagaacaagcc

SEQ ID NO: 530814 - RNA, 18 nt, Artificial Sequence
  Synthetic
uauauucuaucacaagcc

SEQ ID NO: 530815 - RNA, 19 nt, Artificial Sequence
  Synthetic
uuauauucuaucacaagcc

SEQ ID NO: 530816 - RNA, 20 nt, Artificial Sequence
  Synthetic
cuuauauucuaucacaagcc

SEQ ID NO: 530817 - RNA, 21 nt, Artificial Sequence
  Synthetic
ccuuauauucuaucacaagcc

SEQ ID NO: 530818 - RNA, 22 nt, Artificial Sequence
  Synthetic
cccuuauauucuaucacaagcc

SEQ ID NO: 530819 - RNA, 23 nt, Artificial Sequence
  Synthetic
gcccuuauauucuaucacaagcc

SEQ ID NO: 530820 - RNA, 24 nt, Artificial Sequence
  Synthetic
ugcccuuauauucuaucacaagcc

SEQ ID NO: 530821 - RNA, 18 nt, Artificial Sequence
  Synthetic
auuacccccauacaagcc

SEQ ID NO: 530822 - RNA, 19 nt, Artificial Sequence
  Synthetic
uauuacccccauacaagcc

SEQ ID NO: 530823 - RNA, 20 nt, Artificial Sequence
  Synthetic
cuauuacccccauacaagcc

SEQ ID NO: 530824 - RNA, 21 nt, Artificial Sequence
  Synthetic
ccuauuacccccauacaagcc

SEQ ID NO: 530825 - RNA, 22 nt, Artificial Sequence
  Synthetic
cccuauuacccccauacaagcc

SEQ ID NO: 530826 - RNA, 23 nt, Artificial Sequence
  Synthetic
gcccuauuacccccauacaagcc

SEQ ID NO: 530827 - RNA, 24 nt, Artificial Sequence
  Synthetic
ugcccuauuacccccauacaagcc

SEQ ID NO: 530828 - RNA, 18 nt, Artificial Sequence
  Synthetic
cuggcauggaaccaagcc

SEQ ID NO: 530829 - RNA, 19 nt, Artificial Sequence
  Synthetic
gcuggcauggaaccaagcc

SEQ ID NO: 530830 - RNA, 20 nt, Artificial Sequence
  Synthetic
agcuggcauggaaccaagcc

SEQ ID NO: 530831 - RNA, 21 nt, Artificial Sequence
  Synthetic
aagcuggcauggaaccaagcc

SEQ ID NO: 530832 - RNA, 22 nt, Artificial Sequence
  Synthetic
caagcuggcauggaaccaagcc

SEQ ID NO: 530833 - RNA, 23 nt, Artificial Sequence
  Synthetic
gcaagcuggcauggaaccaagcc

SEQ ID NO: 530834 - RNA, 24 nt, Artificial Sequence
  Synthetic
ugcaagcuggcauggaaccaagcc

SEQ ID NO: 530835 - RNA, 18 nt, Artificial Sequence
  Synthetic
uucugcccucgccaagcc

SEQ ID NO: 530836 - RNA, 19 nt, Artificial Sequence
  Synthetic
cuucugcccucgccaagcc

SEQ ID NO: 530837 - RNA, 20 nt, Artificial Sequence
  Synthetic
ccuucugcccucgccaagcc

SEQ ID NO: 530838 - RNA, 21 nt, Artificial Sequence
  Synthetic
uccuucugcccucgccaagcc

SEQ ID NO: 530839 - RNA, 22 nt, Artificial Sequence
  Synthetic
uuccuucugcccucgccaagcc

SEQ ID NO: 530840 - RNA, 23 nt, Artificial Sequence
  Synthetic
uuuccuucugcccucgccaagcc

SEQ ID NO: 530841 - RNA, 24 nt, Artificial Sequence
  Synthetic
uuuuccuucugcccucgccaagcc

SEQ ID NO: 530842 - RNA, 18 nt, Artificial Sequence
  Synthetic
agcugaaaucuucaagcc

SEQ ID NO: 530843 - RNA, 19 nt, Artificial Sequence
  Synthetic
aagcugaaaucuucaagcc

SEQ ID NO: 530844 - RNA, 20 nt, Artificial Sequence
  Synthetic
gaagcugaaaucuucaagcc

SEQ ID NO: 530845 - RNA, 21 nt, Artificial Sequence
  Synthetic
agaagcugaaaucuucaagcc

SEQ ID NO: 530846 - RNA, 22 nt, Artificial Sequence
  Synthetic
gagaagcugaaaucuucaagcc

SEQ ID NO: 530847 - RNA, 23 nt, Artificial Sequence
  Synthetic
agagaagcugaaaucuucaagcc

SEQ ID NO: 530848 - RNA, 24 nt, Artificial Sequence
  Synthetic
cagagaagcugaaaucuucaagcc

SEQ ID NO: 530849 - RNA, 18 nt, Artificial Sequence
  Synthetic
uauuuuuaaaaagaagcc

SEQ ID NO: 530850 - RNA, 19 nt, Artificial Sequence
  Synthetic
auauuuuuaaaaagaagcc

SEQ ID NO: 530851 - RNA, 20 nt, Artificial Sequence
  Synthetic
gauauuuuuaaaaagaagcc

SEQ ID NO: 530852 - RNA, 21 nt, Artificial Sequence
  Synthetic
agauauuuuuaaaaagaagcc

SEQ ID NO: 530853 - RNA, 22 nt, Artificial Sequence
  Synthetic
cagauauuuuuaaaaagaagcc

SEQ ID NO: 530854 - RNA, 23 nt, Artificial Sequence
  Synthetic
ucagauauuuuuaaaaagaagcc

SEQ ID NO: 530855 - RNA, 24 nt, Artificial Sequence
  Synthetic
uucagauauuuuuaaaaagaagcc

SEQ ID NO: 530856 - RNA, 18 nt, Artificial Sequence
  Synthetic
uccaaaugaaaagaagcc

SEQ ID NO: 530857 - RNA, 19 nt, Artificial Sequence
  Synthetic
uuccaaaugaaaagaagcc

SEQ ID NO: 530858 - RNA, 20 nt, Artificial Sequence
  Synthetic
uuuccaaaugaaaagaagcc

SEQ ID NO: 530859 - RNA, 21 nt, Artificial Sequence
  Synthetic
auuuccaaaugaaaagaagcc

SEQ ID NO: 530860 - RNA, 22 nt, Artificial Sequence
  Synthetic
aauuuccaaaugaaaagaagcc

SEQ ID NO: 530861 - RNA, 23 nt, Artificial Sequence
  Synthetic
aaauuuccaaaugaaaagaagcc

SEQ ID NO: 530862 - RNA, 24 nt, Artificial Sequence
  Synthetic
uaaauuuccaaaugaaaagaagcc

SEQ ID NO: 530863 - RNA, 18 nt, Artificial Sequence
  Synthetic
uucugaguggcagaagcc

SEQ ID NO: 530864 - RNA, 19 nt, Artificial Sequence
  Synthetic
guucugaguggcagaagcc

SEQ ID NO: 530865 - RNA, 20 nt, Artificial Sequence
  Synthetic
uguucugaguggcagaagcc

SEQ ID NO: 530866 - RNA, 21 nt, Artificial Sequence
  Synthetic
cuguucugaguggcagaagcc

SEQ ID NO: 530867 - RNA, 22 nt, Artificial Sequence
  Synthetic
acuguucugaguggcagaagcc

SEQ ID NO: 530868 - RNA, 23 nt, Artificial Sequence
  Synthetic
cacuguucugaguggcagaagcc

SEQ ID NO: 530869 - RNA, 24 nt, Artificial Sequence
  Synthetic
gcacuguucugaguggcagaagcc

SEQ ID NO: 530870 - RNA, 18 nt, Artificial Sequence
  Synthetic
gggaaguuguuagaagcc

SEQ ID NO: 530871 - RNA, 19 nt, Artificial Sequence
  Synthetic
agggaaguuguuagaagcc

SEQ ID NO: 530872 - RNA, 20 nt, Artificial Sequence
  Synthetic
uagggaaguuguuagaagcc

SEQ ID NO: 530873 - RNA, 21 nt, Artificial Sequence
  Synthetic
auagggaaguuguuagaagcc

SEQ ID NO: 530874 - RNA, 22 nt, Artificial Sequence
  Synthetic
aauagggaaguuguuagaagcc

SEQ ID NO: 530875 - RNA, 23 nt, Artificial Sequence
  Synthetic
aaauagggaaguuguuagaagcc

SEQ ID NO: 530876 - RNA, 24 nt, Artificial Sequence
  Synthetic
gaaauagggaaguuguuagaagcc

SEQ ID NO: 530877 - RNA, 18 nt, Artificial Sequence
  Synthetic
ggaaucuaaaaggaagcc

SEQ ID NO: 530878 - RNA, 19 nt, Artificial Sequence
  Synthetic
gggaaucuaaaaggaagcc

SEQ ID NO: 530879 - RNA, 20 nt, Artificial Sequence
  Synthetic
agggaaucuaaaaggaagcc

SEQ ID NO: 530880 - RNA, 21 nt, Artificial Sequence
  Synthetic
cagggaaucuaaaaggaagcc

SEQ ID NO: 530881 - RNA, 22 nt, Artificial Sequence
  Synthetic
gcagggaaucuaaaaggaagcc

SEQ ID NO: 530882 - RNA, 23 nt, Artificial Sequence
  Synthetic
ugcagggaaucuaaaaggaagcc

SEQ ID NO: 530883 - RNA, 24 nt, Artificial Sequence
  Synthetic
uugcagggaaucuaaaaggaagcc

SEQ ID NO: 530884 - RNA, 18 nt, Artificial Sequence
  Synthetic
ugaugaauaacugaagcc

SEQ ID NO: 530885 - RNA, 19 nt, Artificial Sequence
  Synthetic
gugaugaauaacugaagcc

SEQ ID NO: 530886 - RNA, 20 nt, Artificial Sequence
  Synthetic
agugaugaauaacugaagcc

SEQ ID NO: 530887 - RNA, 21 nt, Artificial Sequence
  Synthetic
uagugaugaauaacugaagcc

SEQ ID NO: 530888 - RNA, 22 nt, Artificial Sequence
  Synthetic
auagugaugaauaacugaagcc

SEQ ID NO: 530889 - RNA, 23 nt, Artificial Sequence
  Synthetic
uauagugaugaauaacugaagcc

SEQ ID NO: 530890 - RNA, 24 nt, Artificial Sequence
  Synthetic
auauagugaugaauaacugaagcc

SEQ ID NO: 530891 - RNA, 18 nt, Artificial Sequence
  Synthetic
ggcauuaagacugaagcc

SEQ ID NO: 530892 - RNA, 19 nt, Artificial Sequence
  Synthetic
uggcauuaagacugaagcc

SEQ ID NO: 530893 - RNA, 20 nt, Artificial Sequence
  Synthetic
auggcauuaagacugaagcc

SEQ ID NO: 530894 - RNA, 21 nt, Artificial Sequence
  Synthetic
uauggcauuaagacugaagcc

SEQ ID NO: 530895 - RNA, 22 nt, Artificial Sequence
  Synthetic
cuauggcauuaagacugaagcc

SEQ ID NO: 530896 - RNA, 23 nt, Artificial Sequence
  Synthetic
acuauggcauuaagacugaagcc

SEQ ID NO: 530897 - RNA, 24 nt, Artificial Sequence
  Synthetic
uacuauggcauuaagacugaagcc

SEQ ID NO: 530898 - RNA, 18 nt, Artificial Sequence
  Synthetic
gcucagaggacugaagcc

SEQ ID NO: 530899 - RNA, 19 nt, Artificial Sequence
  Synthetic
ugcucagaggacugaagcc

SEQ ID NO: 530900 - RNA, 20 nt, Artificial Sequence
  Synthetic
gugcucagaggacugaagcc

SEQ ID NO: 530901 - RNA, 21 nt, Artificial Sequence
  Synthetic
ugugcucagaggacugaagcc

SEQ ID NO: 530902 - RNA, 22 nt, Artificial Sequence
  Synthetic
augugcucagaggacugaagcc

SEQ ID NO: 530903 - RNA, 23 nt, Artificial Sequence
  Synthetic
aaugugcucagaggacugaagcc

SEQ ID NO: 530904 - RNA, 24 nt, Artificial Sequence
  Synthetic
gaaugugcucagaggacugaagcc

SEQ ID NO: 530905 - RNA, 18 nt, Artificial Sequence
  Synthetic
uuugaacauacugaagcc

SEQ ID NO: 530906 - RNA, 19 nt, Artificial Sequence
  Synthetic
uuuugaacauacugaagcc

SEQ ID NO: 530907 - RNA, 20 nt, Artificial Sequence
  Synthetic
guuuugaacauacugaagcc

SEQ ID NO: 530908 - RNA, 21 nt, Artificial Sequence
  Synthetic
uguuuugaacauacugaagcc

SEQ ID NO: 530909 - RNA, 22 nt, Artificial Sequence
  Synthetic
cuguuuugaacauacugaagcc

SEQ ID NO: 530910 - RNA, 23 nt, Artificial Sequence
  Synthetic
ucuguuuugaacauacugaagcc

SEQ ID NO: 530911 - RNA, 24 nt, Artificial Sequence
  Synthetic
cucuguuuugaacauacugaagcc

SEQ ID NO: 530912 - RNA, 18 nt, Artificial Sequence
  Synthetic
guaauuuuuacugaagcc

SEQ ID NO: 530913 - RNA, 19 nt, Artificial Sequence
  Synthetic
aguaauuuuuacugaagcc

SEQ ID NO: 530914 - RNA, 20 nt, Artificial Sequence
  Synthetic
aaguaauuuuuacugaagcc

SEQ ID NO: 530915 - RNA, 21 nt, Artificial Sequence
  Synthetic
caaguaauuuuuacugaagcc

SEQ ID NO: 530916 - RNA, 22 nt, Artificial Sequence
  Synthetic
acaaguaauuuuuacugaagcc

SEQ ID NO: 530917 - RNA, 23 nt, Artificial Sequence
  Synthetic
aacaaguaauuuuuacugaagcc

SEQ ID NO: 530918 - RNA, 24 nt, Artificial Sequence
  Synthetic
aaacaaguaauuuuuacugaagcc

SEQ ID NO: 530919 - RNA, 18 nt, Artificial Sequence
  Synthetic
ggagaauugcuugaagcc

SEQ ID NO: 530920 - RNA, 19 nt, Artificial Sequence
  Synthetic
aggagaauugcuugaagcc

SEQ ID NO: 530921 - RNA, 20 nt, Artificial Sequence
  Synthetic
caggagaauugcuugaagcc

SEQ ID NO: 530922 - RNA, 21 nt, Artificial Sequence
  Synthetic
gcaggagaauugcuugaagcc

SEQ ID NO: 530923 - RNA, 22 nt, Artificial Sequence
  Synthetic
ggcaggagaauugcuugaagcc

SEQ ID NO: 530924 - RNA, 23 nt, Artificial Sequence
  Synthetic
aggcaggagaauugcuugaagcc

SEQ ID NO: 530925 - RNA, 24 nt, Artificial Sequence
  Synthetic
aaggcaggagaauugcuugaagcc

SEQ ID NO: 530926 - RNA, 18 nt, Artificial Sequence
  Synthetic
cuugcaugagaauaagcc

SEQ ID NO: 530927 - RNA, 19 nt, Artificial Sequence
  Synthetic
ucuugcaugagaauaagcc

SEQ ID NO: 530928 - RNA, 20 nt, Artificial Sequence
  Synthetic
uucuugcaugagaauaagcc

SEQ ID NO: 530929 - RNA, 21 nt, Artificial Sequence
  Synthetic
uuucuugcaugagaauaagcc

SEQ ID NO: 530930 - RNA, 22 nt, Artificial Sequence
  Synthetic
guuucuugcaugagaauaagcc

SEQ ID NO: 530931 - RNA, 23 nt, Artificial Sequence
  Synthetic
uguuucuugcaugagaauaagcc

SEQ ID NO: 530932 - RNA, 24 nt, Artificial Sequence
  Synthetic
cuguuucuugcaugagaauaagcc

SEQ ID NO: 530933 - RNA, 18 nt, Artificial Sequence
  Synthetic
aaauguuuuauguaagcc

SEQ ID NO: 530934 - RNA, 19 nt, Artificial Sequence
  Synthetic
aaaauguuuuauguaagcc

SEQ ID NO: 530935 - RNA, 20 nt, Artificial Sequence
  Synthetic
uaaaauguuuuauguaagcc

SEQ ID NO: 530936 - RNA, 21 nt, Artificial Sequence
  Synthetic
auaaaauguuuuauguaagcc

SEQ ID NO: 530937 - RNA, 22 nt, Artificial Sequence
  Synthetic
uauaaaauguuuuauguaagcc

SEQ ID NO: 530938 - RNA, 23 nt, Artificial Sequence
  Synthetic
uuauaaaauguuuuauguaagcc

SEQ ID NO: 530939 - RNA, 24 nt, Artificial Sequence
  Synthetic
cuuauaaaauguuuuauguaagcc

SEQ ID NO: 530940 - RNA, 18 nt, Artificial Sequence
  Synthetic
gagguaagaauaacagcc

SEQ ID NO: 530941 - RNA, 19 nt, Artificial Sequence
  Synthetic
ugagguaagaauaacagcc

SEQ ID NO: 530942 - RNA, 20 nt, Artificial Sequence
  Synthetic
augagguaagaauaacagcc

SEQ ID NO: 530943 - RNA, 21 nt, Artificial Sequence
  Synthetic
uaugagguaagaauaacagcc

SEQ ID NO: 530944 - RNA, 22 nt, Artificial Sequence
  Synthetic
auaugagguaagaauaacagcc

SEQ ID NO: 530945 - RNA, 23 nt, Artificial Sequence
  Synthetic
aauaugagguaagaauaacagcc

SEQ ID NO: 530946 - RNA, 24 nt, Artificial Sequence
  Synthetic
gaauaugagguaagaauaacagcc

SEQ ID NO: 530947 - RNA, 18 nt, Artificial Sequence
  Synthetic
ggaggaguauacacagcc

SEQ ID NO: 530948 - RNA, 19 nt, Artificial Sequence
  Synthetic
uggaggaguauacacagcc

SEQ ID NO: 530949 - RNA, 20 nt, Artificial Sequence
  Synthetic
auggaggaguauacacagcc

SEQ ID NO: 530950 - RNA, 21 nt, Artificial Sequence
  Synthetic
aauggaggaguauacacagcc

SEQ ID NO: 530951 - RNA, 22 nt, Artificial Sequence
  Synthetic
gaauggaggaguauacacagcc

SEQ ID NO: 530952 - RNA, 23 nt, Artificial Sequence
  Synthetic
ggaauggaggaguauacacagcc

SEQ ID NO: 530953 - RNA, 24 nt, Artificial Sequence
  Synthetic
gggaauggaggaguauacacagcc

SEQ ID NO: 530954 - RNA, 18 nt, Artificial Sequence
  Synthetic
auaaauuuugauacagcc

SEQ ID NO: 530955 - RNA, 19 nt, Artificial Sequence
  Synthetic
cauaaauuuugauacagcc

SEQ ID NO: 530956 - RNA, 20 nt, Artificial Sequence
  Synthetic
gcauaaauuuugauacagcc

SEQ ID NO: 530957 - RNA, 21 nt, Artificial Sequence
  Synthetic
ggcauaaauuuugauacagcc

SEQ ID NO: 530958 - RNA, 22 nt, Artificial Sequence
  Synthetic
uggcauaaauuuugauacagcc

SEQ ID NO: 530959 - RNA, 23 nt, Artificial Sequence
  Synthetic
uuggcauaaauuuugauacagcc

SEQ ID NO: 530960 - RNA, 24 nt, Artificial Sequence
  Synthetic
uuuggcauaaauuuugauacagcc

SEQ ID NO: 530961 - RNA, 18 nt, Artificial Sequence
  Synthetic
gcuguuuugccuacagcc

SEQ ID NO: 530962 - RNA, 19 nt, Artificial Sequence
  Synthetic
ggcuguuuugccuacagcc

SEQ ID NO: 530963 - RNA, 20 nt, Artificial Sequence
  Synthetic
gggcuguuuugccuacagcc

SEQ ID NO: 530964 - RNA, 21 nt, Artificial Sequence
  Synthetic
ugggcuguuuugccuacagcc

SEQ ID NO: 530965 - RNA, 22 nt, Artificial Sequence
  Synthetic
augggcuguuuugccuacagcc

SEQ ID NO: 530966 - RNA, 23 nt, Artificial Sequence
  Synthetic
caugggcuguuuugccuacagcc

SEQ ID NO: 530967 - RNA, 24 nt, Artificial Sequence
  Synthetic
gcaugggcuguuuugccuacagcc

SEQ ID NO: 530968 - RNA, 18 nt, Artificial Sequence
  Synthetic
gagaccacuuuuacagcc

SEQ ID NO: 530969 - RNA, 19 nt, Artificial Sequence
  Synthetic
agagaccacuuuuacagcc

SEQ ID NO: 530970 - RNA, 20 nt, Artificial Sequence
  Synthetic
cagagaccacuuuuacagcc

SEQ ID NO: 530971 - RNA, 21 nt, Artificial Sequence
  Synthetic
ccagagaccacuuuuacagcc

SEQ ID NO: 530972 - RNA, 22 nt, Artificial Sequence
  Synthetic
accagagaccacuuuuacagcc

SEQ ID NO: 530973 - RNA, 23 nt, Artificial Sequence
  Synthetic
aaccagagaccacuuuuacagcc

SEQ ID NO: 530974 - RNA, 24 nt, Artificial Sequence
  Synthetic
caaccagagaccacuuuuacagcc

SEQ ID NO: 530975 - RNA, 18 nt, Artificial Sequence
  Synthetic
aggaguuggauaccagcc

SEQ ID NO: 530976 - RNA, 19 nt, Artificial Sequence
  Synthetic
caggaguuggauaccagcc

SEQ ID NO: 530977 - RNA, 20 nt, Artificial Sequence
  Synthetic
ccaggaguuggauaccagcc

SEQ ID NO: 530978 - RNA, 21 nt, Artificial Sequence
  Synthetic
cccaggaguuggauaccagcc

SEQ ID NO: 530979 - RNA, 22 nt, Artificial Sequence
  Synthetic
gcccaggaguuggauaccagcc

SEQ ID NO: 530980 - RNA, 23 nt, Artificial Sequence
  Synthetic
agcccaggaguuggauaccagcc

SEQ ID NO: 530981 - RNA, 24 nt, Artificial Sequence
  Synthetic
gagcccaggaguuggauaccagcc

SEQ ID NO: 530982 - RNA, 18 nt, Artificial Sequence
  Synthetic
gagccaccacgcccagcc

SEQ ID NO: 530983 - RNA, 19 nt, Artificial Sequence
  Synthetic
ugagccaccacgcccagcc

SEQ ID NO: 530984 - RNA, 20 nt, Artificial Sequence
  Synthetic
gugagccaccacgcccagcc

SEQ ID NO: 530985 - RNA, 21 nt, Artificial Sequence
  Synthetic
ugugagccaccacgcccagcc

SEQ ID NO: 530986 - RNA, 22 nt, Artificial Sequence
  Synthetic
uugugagccaccacgcccagcc

SEQ ID NO: 530987 - RNA, 23 nt, Artificial Sequence
  Synthetic
guugugagccaccacgcccagcc

SEQ ID NO: 530988 - RNA, 24 nt, Artificial Sequence
  Synthetic
aguugugagccaccacgcccagcc

SEQ ID NO: 530989 - RNA, 18 nt, Artificial Sequence
  Synthetic
uuagggguggucccagcc

SEQ ID NO: 530990 - RNA, 19 nt, Artificial Sequence
  Synthetic
uuuagggguggucccagcc

SEQ ID NO: 530991 - RNA, 20 nt, Artificial Sequence
  Synthetic
uuuuagggguggucccagcc

SEQ ID NO: 530992 - RNA, 21 nt, Artificial Sequence
  Synthetic
guuuuagggguggucccagcc

SEQ ID NO: 530993 - RNA, 22 nt, Artificial Sequence
  Synthetic
aguuuuagggguggucccagcc

SEQ ID NO: 530994 - RNA, 23 nt, Artificial Sequence
  Synthetic
caguuuuagggguggucccagcc

SEQ ID NO: 530995 - RNA, 24 nt, Artificial Sequence
  Synthetic
ucaguuuuagggguggucccagcc

SEQ ID NO: 530996 - RNA, 18 nt, Artificial Sequence
  Synthetic
cgccauugcacuccagcc

SEQ ID NO: 530997 - RNA, 19 nt, Artificial Sequence
  Synthetic
gcgccauugcacuccagcc

SEQ ID NO: 530998 - RNA, 20 nt, Artificial Sequence
  Synthetic
ugcgccauugcacuccagcc

SEQ ID NO: 530999 - RNA, 21 nt, Artificial Sequence
  Synthetic
uugcgccauugcacuccagcc

SEQ ID NO: 531000 - RNA, 22 nt, Artificial Sequence
  Synthetic
auugcgccauugcacuccagcc

SEQ ID NO: 531001 - RNA, 23 nt, Artificial Sequence
  Synthetic
gauugcgccauugcacuccagcc

SEQ ID NO: 531002 - RNA, 24 nt, Artificial Sequence
  Synthetic
agauugcgccauugcacuccagcc

SEQ ID NO: 531003 - RNA, 18 nt, Artificial Sequence
  Synthetic
ugccauugcacuccagcc

SEQ ID NO: 531004 - RNA, 19 nt, Artificial Sequence
  Synthetic
augccauugcacuccagcc

SEQ ID NO: 531005 - RNA, 20 nt, Artificial Sequence
  Synthetic
caugccauugcacuccagcc

SEQ ID NO: 531006 - RNA, 21 nt, Artificial Sequence
  Synthetic
ucaugccauugcacuccagcc

SEQ ID NO: 531007 - RNA, 22 nt, Artificial Sequence
  Synthetic
aucaugccauugcacuccagcc

SEQ ID NO: 531008 - RNA, 23 nt, Artificial Sequence
  Synthetic
gaucaugccauugcacuccagcc

SEQ ID NO: 531009 - RNA, 24 nt, Artificial Sequence
  Synthetic
agaucaugccauugcacuccagcc

SEQ ID NO: 531010 - RNA, 18 nt, Artificial Sequence
  Synthetic
gcaaauuauccuccagcc

SEQ ID NO: 531011 - RNA, 19 nt, Artificial Sequence
  Synthetic
ugcaaauuauccuccagcc

SEQ ID NO: 531012 - RNA, 20 nt, Artificial Sequence
  Synthetic
cugcaaauuauccuccagcc

SEQ ID NO: 531013 - RNA, 21 nt, Artificial Sequence
  Synthetic
gcugcaaauuauccuccagcc

SEQ ID NO: 531014 - RNA, 22 nt, Artificial Sequence
  Synthetic
ugcugcaaauuauccuccagcc

SEQ ID NO: 531015 - RNA, 23 nt, Artificial Sequence
  Synthetic
cugcugcaaauuauccuccagcc

SEQ ID NO: 531016 - RNA, 24 nt, Artificial Sequence
  Synthetic
ucugcugcaaauuauccuccagcc

SEQ ID NO: 531017 - RNA, 18 nt, Artificial Sequence
  Synthetic
gaaaaauaaauuccagcc

SEQ ID NO: 531018 - RNA, 19 nt, Artificial Sequence
  Synthetic
agaaaaauaaauuccagcc

SEQ ID NO: 531019 - RNA, 20 nt, Artificial Sequence
  Synthetic
gagaaaaauaaauuccagcc

SEQ ID NO: 531020 - RNA, 21 nt, Artificial Sequence
  Synthetic
ugagaaaaauaaauuccagcc

SEQ ID NO: 531021 - RNA, 22 nt, Artificial Sequence
  Synthetic
augagaaaaauaaauuccagcc

SEQ ID NO: 531022 - RNA, 23 nt, Artificial Sequence
  Synthetic
gaugagaaaaauaaauuccagcc

SEQ ID NO: 531023 - RNA, 24 nt, Artificial Sequence
  Synthetic
agaugagaaaaauaaauuccagcc

SEQ ID NO: 531024 - RNA, 18 nt, Artificial Sequence
  Synthetic
auuaguuuuauuccagcc

SEQ ID NO: 531025 - RNA, 19 nt, Artificial Sequence
  Synthetic
cauuaguuuuauuccagcc

SEQ ID NO: 531026 - RNA, 20 nt, Artificial Sequence
  Synthetic
acauuaguuuuauuccagcc

SEQ ID NO: 531027 - RNA, 21 nt, Artificial Sequence
  Synthetic
gacauuaguuuuauuccagcc

SEQ ID NO: 531028 - RNA, 22 nt, Artificial Sequence
  Synthetic
agacauuaguuuuauuccagcc

SEQ ID NO: 531029 - RNA, 23 nt, Artificial Sequence
  Synthetic
uagacauuaguuuuauuccagcc

SEQ ID NO: 531030 - RNA, 24 nt, Artificial Sequence
  Synthetic
uuagacauuaguuuuauuccagcc

SEQ ID NO: 531031 - RNA, 18 nt, Artificial Sequence
  Synthetic
cagccuguaaaagcagcc

SEQ ID NO: 531032 - RNA, 19 nt, Artificial Sequence
  Synthetic
ccagccuguaaaagcagcc

SEQ ID NO: 531033 - RNA, 20 nt, Artificial Sequence
  Synthetic
gccagccuguaaaagcagcc

SEQ ID NO: 531034 - RNA, 21 nt, Artificial Sequence
  Synthetic
ugccagccuguaaaagcagcc

SEQ ID NO: 531035 - RNA, 22 nt, Artificial Sequence
  Synthetic
augccagccuguaaaagcagcc

SEQ ID NO: 531036 - RNA, 23 nt, Artificial Sequence
  Synthetic
aaugccagccuguaaaagcagcc

SEQ ID NO: 531037 - RNA, 24 nt, Artificial Sequence
  Synthetic
caaugccagccuguaaaagcagcc

SEQ ID NO: 531038 - RNA, 18 nt, Artificial Sequence
  Synthetic
uagccugugaaagcagcc

SEQ ID NO: 531039 - RNA, 19 nt, Artificial Sequence
  Synthetic
cuagccugugaaagcagcc

SEQ ID NO: 531040 - RNA, 20 nt, Artificial Sequence
  Synthetic
gcuagccugugaaagcagcc

SEQ ID NO: 531041 - RNA, 21 nt, Artificial Sequence
  Synthetic
ugcuagccugugaaagcagcc

SEQ ID NO: 531042 - RNA, 22 nt, Artificial Sequence
  Synthetic
augcuagccugugaaagcagcc

SEQ ID NO: 531043 - RNA, 23 nt, Artificial Sequence
  Synthetic
aaugcuagccugugaaagcagcc

SEQ ID NO: 531044 - RNA, 24 nt, Artificial Sequence
  Synthetic
caaugcuagccugugaaagcagcc

SEQ ID NO: 531045 - RNA, 18 nt, Artificial Sequence
  Synthetic
uauccauaucaagcagcc

SEQ ID NO: 531046 - RNA, 19 nt, Artificial Sequence
  Synthetic
auauccauaucaagcagcc

SEQ ID NO: 531047 - RNA, 20 nt, Artificial Sequence
  Synthetic
cauauccauaucaagcagcc

SEQ ID NO: 531048 - RNA, 21 nt, Artificial Sequence
  Synthetic
acauauccauaucaagcagcc

SEQ ID NO: 531049 - RNA, 22 nt, Artificial Sequence
  Synthetic
gacauauccauaucaagcagcc

SEQ ID NO: 531050 - RNA, 23 nt, Artificial Sequence
  Synthetic
ugacauauccauaucaagcagcc

SEQ ID NO: 531051 - RNA, 24 nt, Artificial Sequence
  Synthetic
augacauauccauaucaagcagcc

SEQ ID NO: 531052 - RNA, 18 nt, Artificial Sequence
  Synthetic
gacuccagcugggcagcc

SEQ ID NO: 531053 - RNA, 19 nt, Artificial Sequence
  Synthetic
ggacuccagcugggcagcc

SEQ ID NO: 531054 - RNA, 20 nt, Artificial Sequence
  Synthetic
aggacuccagcugggcagcc

SEQ ID NO: 531055 - RNA, 21 nt, Artificial Sequence
  Synthetic
uaggacuccagcugggcagcc

SEQ ID NO: 531056 - RNA, 22 nt, Artificial Sequence
  Synthetic
guaggacuccagcugggcagcc

SEQ ID NO: 531057 - RNA, 23 nt, Artificial Sequence
  Synthetic
uguaggacuccagcugggcagcc

SEQ ID NO: 531058 - RNA, 24 nt, Artificial Sequence
  Synthetic
uuguaggacuccagcugggcagcc

SEQ ID NO: 531059 - RNA, 18 nt, Artificial Sequence
  Synthetic
uauuccaagauggcagcc

SEQ ID NO: 531060 - RNA, 19 nt, Artificial Sequence
  Synthetic
auauuccaagauggcagcc

SEQ ID NO: 531061 - RNA, 20 nt, Artificial Sequence
  Synthetic
cauauuccaagauggcagcc

SEQ ID NO: 531062 - RNA, 21 nt, Artificial Sequence
  Synthetic
gcauauuccaagauggcagcc

SEQ ID NO: 531063 - RNA, 22 nt, Artificial Sequence
  Synthetic
ugcauauuccaagauggcagcc

SEQ ID NO: 531064 - RNA, 23 nt, Artificial Sequence
  Synthetic
uugcauauuccaagauggcagcc

SEQ ID NO: 531065 - RNA, 24 nt, Artificial Sequence
  Synthetic
uuugcauauuccaagauggcagcc

SEQ ID NO: 531066 - RNA, 18 nt, Artificial Sequence
  Synthetic
agaaucucaacugcagcc

SEQ ID NO: 531067 - RNA, 19 nt, Artificial Sequence
  Synthetic
uagaaucucaacugcagcc

SEQ ID NO: 531068 - RNA, 20 nt, Artificial Sequence
  Synthetic
auagaaucucaacugcagcc

SEQ ID NO: 531069 - RNA, 21 nt, Artificial Sequence
  Synthetic
uauagaaucucaacugcagcc

SEQ ID NO: 531070 - RNA, 22 nt, Artificial Sequence
  Synthetic
uuauagaaucucaacugcagcc

SEQ ID NO: 531071 - RNA, 23 nt, Artificial Sequence
  Synthetic
uuuauagaaucucaacugcagcc

SEQ ID NO: 531072 - RNA, 24 nt, Artificial Sequence
  Synthetic
guuuauagaaucucaacugcagcc

SEQ ID NO: 531073 - RNA, 18 nt, Artificial Sequence
  Synthetic
ucauagcucacugcagcc

SEQ ID NO: 531074 - RNA, 19 nt, Artificial Sequence
  Synthetic
aucauagcucacugcagcc

SEQ ID NO: 531075 - RNA, 20 nt, Artificial Sequence
  Synthetic
gaucauagcucacugcagcc

SEQ ID NO: 531076 - RNA, 21 nt, Artificial Sequence
  Synthetic
ugaucauagcucacugcagcc

SEQ ID NO: 531077 - RNA, 22 nt, Artificial Sequence
  Synthetic
augaucauagcucacugcagcc

SEQ ID NO: 531078 - RNA, 23 nt, Artificial Sequence
  Synthetic
caugaucauagcucacugcagcc

SEQ ID NO: 531079 - RNA, 24 nt, Artificial Sequence
  Synthetic
gcaugaucauagcucacugcagcc

SEQ ID NO: 531080 - RNA, 20 nt, Artificial Sequence
  Synthetic
uaucauagcucacugcagcc

SEQ ID NO: 531081 - RNA, 21 nt, Artificial Sequence
  Synthetic
cuaucauagcucacugcagcc

SEQ ID NO: 531082 - RNA, 22 nt, Artificial Sequence
  Synthetic
gcuaucauagcucacugcagcc

SEQ ID NO: 531083 - RNA, 23 nt, Artificial Sequence
  Synthetic
cgcuaucauagcucacugcagcc

SEQ ID NO: 531084 - RNA, 24 nt, Artificial Sequence
  Synthetic
gcgcuaucauagcucacugcagcc

SEQ ID NO: 531085 - RNA, 18 nt, Artificial Sequence
  Synthetic
ccccugcuaugugcagcc

SEQ ID NO: 531086 - RNA, 19 nt, Artificial Sequence
  Synthetic
cccccugcuaugugcagcc

SEQ ID NO: 531087 - RNA, 20 nt, Artificial Sequence
  Synthetic
ccccccugcuaugugcagcc

SEQ ID NO: 531088 - RNA, 21 nt, Artificial Sequence
  Synthetic
gccccccugcuaugugcagcc

SEQ ID NO: 531089 - RNA, 22 nt, Artificial Sequence
  Synthetic
agccccccugcuaugugcagcc

SEQ ID NO: 531090 - RNA, 23 nt, Artificial Sequence
  Synthetic
gagccccccugcuaugugcagcc

SEQ ID NO: 531091 - RNA, 24 nt, Artificial Sequence
  Synthetic
agagccccccugcuaugugcagcc

SEQ ID NO: 531092 - RNA, 18 nt, Artificial Sequence
  Synthetic
ccuauacuauuugcagcc

SEQ ID NO: 531093 - RNA, 19 nt, Artificial Sequence
  Synthetic
gccuauacuauuugcagcc

SEQ ID NO: 531094 - RNA, 20 nt, Artificial Sequence
  Synthetic
ugccuauacuauuugcagcc

SEQ ID NO: 531095 - RNA, 21 nt, Artificial Sequence
  Synthetic
uugccuauacuauuugcagcc

SEQ ID NO: 531096 - RNA, 22 nt, Artificial Sequence
  Synthetic
uuugccuauacuauuugcagcc

SEQ ID NO: 531097 - RNA, 23 nt, Artificial Sequence
  Synthetic
uuuugccuauacuauuugcagcc

SEQ ID NO: 531098 - RNA, 24 nt, Artificial Sequence
  Synthetic
auuuugccuauacuauuugcagcc

SEQ ID NO: 531099 - RNA, 18 nt, Artificial Sequence
  Synthetic
gaucuuuagaacucagcc

SEQ ID NO: 531100 - RNA, 19 nt, Artificial Sequence
  Synthetic
agaucuuuagaacucagcc

SEQ ID NO: 531101 - RNA, 20 nt, Artificial Sequence
  Synthetic
gagaucuuuagaacucagcc

SEQ ID NO: 531102 - RNA, 21 nt, Artificial Sequence
  Synthetic
ugagaucuuuagaacucagcc

SEQ ID NO: 531103 - RNA, 22 nt, Artificial Sequence
  Synthetic
cugagaucuuuagaacucagcc

SEQ ID NO: 531104 - RNA, 23 nt, Artificial Sequence
  Synthetic
ucugagaucuuuagaacucagcc

SEQ ID NO: 531105 - RNA, 24 nt, Artificial Sequence
  Synthetic
uucugagaucuuuagaacucagcc

SEQ ID NO: 531106 - RNA, 18 nt, Artificial Sequence
  Synthetic
gaacagcuuaacucagcc

SEQ ID NO: 531107 - RNA, 19 nt, Artificial Sequence
  Synthetic
ggaacagcuuaacucagcc

SEQ ID NO: 531108 - RNA, 20 nt, Artificial Sequence
  Synthetic
gggaacagcuuaacucagcc

SEQ ID NO: 531109 - RNA, 21 nt, Artificial Sequence
  Synthetic
ggggaacagcuuaacucagcc

SEQ ID NO: 531110 - RNA, 22 nt, Artificial Sequence
  Synthetic
gggggaacagcuuaacucagcc

SEQ ID NO: 531111 - RNA, 23 nt, Artificial Sequence
  Synthetic
cgggggaacagcuuaacucagcc

SEQ ID NO: 531112 - RNA, 24 nt, Artificial Sequence
  Synthetic
ucgggggaacagcuuaacucagcc

SEQ ID NO: 531113 - RNA, 18 nt, Artificial Sequence
  Synthetic
auuauaggugccucagcc

SEQ ID NO: 531114 - RNA, 19 nt, Artificial Sequence
  Synthetic
cauuauaggugccucagcc

SEQ ID NO: 531115 - RNA, 20 nt, Artificial Sequence
  Synthetic
ucauuauaggugccucagcc

SEQ ID NO: 531116 - RNA, 21 nt, Artificial Sequence
  Synthetic
uucauuauaggugccucagcc

SEQ ID NO: 531117 - RNA, 22 nt, Artificial Sequence
  Synthetic
cuucauuauaggugccucagcc

SEQ ID NO: 531118 - RNA, 23 nt, Artificial Sequence
  Synthetic
ccuucauuauaggugccucagcc

SEQ ID NO: 531119 - RNA, 24 nt, Artificial Sequence
  Synthetic
uccuucauuauaggugccucagcc

SEQ ID NO: 531120 - RNA, 18 nt, Artificial Sequence
  Synthetic
uaucgaucccucucagcc

SEQ ID NO: 531121 - RNA, 19 nt, Artificial Sequence
  Synthetic
auaucgaucccucucagcc

SEQ ID NO: 531122 - RNA, 20 nt, Artificial Sequence
  Synthetic
gauaucgaucccucucagcc

SEQ ID NO: 531123 - RNA, 21 nt, Artificial Sequence
  Synthetic
agauaucgaucccucucagcc

SEQ ID NO: 531124 - RNA, 22 nt, Artificial Sequence
  Synthetic
cagauaucgaucccucucagcc

SEQ ID NO: 531125 - RNA, 23 nt, Artificial Sequence
  Synthetic
ucagauaucgaucccucucagcc

SEQ ID NO: 531126 - RNA, 24 nt, Artificial Sequence
  Synthetic
uucagauaucgaucccucucagcc

SEQ ID NO: 531127 - RNA, 18 nt, Artificial Sequence
  Synthetic
agaaugucgcucucagcc

SEQ ID NO: 531128 - RNA, 19 nt, Artificial Sequence
  Synthetic
uagaaugucgcucucagcc

SEQ ID NO: 531129 - RNA, 20 nt, Artificial Sequence
  Synthetic
uuagaaugucgcucucagcc

SEQ ID NO: 531130 - RNA, 21 nt, Artificial Sequence
  Synthetic
guuagaaugucgcucucagcc

SEQ ID NO: 531131 - RNA, 22 nt, Artificial Sequence
  Synthetic
gguuagaaugucgcucucagcc

SEQ ID NO: 531132 - RNA, 23 nt, Artificial Sequence
  Synthetic
ugguuagaaugucgcucucagcc

SEQ ID NO: 531133 - RNA, 24 nt, Artificial Sequence
  Synthetic
gugguuagaaugucgcucucagcc

SEQ ID NO: 531134 - RNA, 18 nt, Artificial Sequence
  Synthetic
agagcaugucagucagcc

SEQ ID NO: 531135 - RNA, 19 nt, Artificial Sequence
  Synthetic
cagagcaugucagucagcc

SEQ ID NO: 531136 - RNA, 20 nt, Artificial Sequence
  Synthetic
ucagagcaugucagucagcc

SEQ ID NO: 531137 - RNA, 21 nt, Artificial Sequence
  Synthetic
aucagagcaugucagucagcc

SEQ ID NO: 531138 - RNA, 22 nt, Artificial Sequence
  Synthetic
aaucagagcaugucagucagcc

SEQ ID NO: 531139 - RNA, 23 nt, Artificial Sequence
  Synthetic
caaucagagcaugucagucagcc

SEQ ID NO: 531140 - RNA, 24 nt, Artificial Sequence
  Synthetic
acaaucagagcaugucagucagcc

SEQ ID NO: 531141 - RNA, 18 nt, Artificial Sequence
  Synthetic
uaaugcaccuggucagcc

SEQ ID NO: 531142 - RNA, 19 nt, Artificial Sequence
  Synthetic
auaaugcaccuggucagcc

SEQ ID NO: 531143 - RNA, 20 nt, Artificial Sequence
  Synthetic
gauaaugcaccuggucagcc

SEQ ID NO: 531144 - RNA, 21 nt, Artificial Sequence
  Synthetic
ugauaaugcaccuggucagcc

SEQ ID NO: 531145 - RNA, 22 nt, Artificial Sequence
  Synthetic
uugauaaugcaccuggucagcc

SEQ ID NO: 531146 - RNA, 23 nt, Artificial Sequence
  Synthetic
guugauaaugcaccuggucagcc

SEQ ID NO: 531147 - RNA, 24 nt, Artificial Sequence
  Synthetic
uguugauaaugcaccuggucagcc

SEQ ID NO: 531148 - RNA, 18 nt, Artificial Sequence
  Synthetic
uggguggcaaauucagcc

SEQ ID NO: 531149 - RNA, 19 nt, Artificial Sequence
  Synthetic
guggguggcaaauucagcc

SEQ ID NO: 531150 - RNA, 20 nt, Artificial Sequence
  Synthetic
aguggguggcaaauucagcc

SEQ ID NO: 531151 - RNA, 21 nt, Artificial Sequence
  Synthetic
caguggguggcaaauucagcc

SEQ ID NO: 531152 - RNA, 22 nt, Artificial Sequence
  Synthetic
acaguggguggcaaauucagcc

SEQ ID NO: 531153 - RNA, 23 nt, Artificial Sequence
  Synthetic
cacaguggguggcaaauucagcc

SEQ ID NO: 531154 - RNA, 24 nt, Artificial Sequence
  Synthetic
acacaguggguggcaaauucagcc

SEQ ID NO: 531155 - RNA, 18 nt, Artificial Sequence
  Synthetic
aaaagggugcauucagcc

SEQ ID NO: 531156 - RNA, 19 nt, Artificial Sequence
  Synthetic
gaaaagggugcauucagcc

SEQ ID NO: 531157 - RNA, 20 nt, Artificial Sequence
  Synthetic
agaaaagggugcauucagcc

SEQ ID NO: 531158 - RNA, 21 nt, Artificial Sequence
  Synthetic
gagaaaagggugcauucagcc

SEQ ID NO: 531159 - RNA, 22 nt, Artificial Sequence
  Synthetic
ggagaaaagggugcauucagcc

SEQ ID NO: 531160 - RNA, 23 nt, Artificial Sequence
  Synthetic
uggagaaaagggugcauucagcc

SEQ ID NO: 531161 - RNA, 24 nt, Artificial Sequence
  Synthetic
auggagaaaagggugcauucagcc

SEQ ID NO: 531162 - RNA, 18 nt, Artificial Sequence
  Synthetic
ggguggaucacuucagcc

SEQ ID NO: 531163 - RNA, 19 nt, Artificial Sequence
  Synthetic
uggguggaucacuucagcc

SEQ ID NO: 531164 - RNA, 20 nt, Artificial Sequence
  Synthetic
guggguggaucacuucagcc

SEQ ID NO: 531165 - RNA, 21 nt, Artificial Sequence
  Synthetic
gguggguggaucacuucagcc

SEQ ID NO: 531166 - RNA, 22 nt, Artificial Sequence
  Synthetic
agguggguggaucacuucagcc

SEQ ID NO: 531167 - RNA, 23 nt, Artificial Sequence
  Synthetic
aagguggguggaucacuucagcc

SEQ ID NO: 531168 - RNA, 24 nt, Artificial Sequence
  Synthetic
caagguggguggaucacuucagcc

SEQ ID NO: 531169 - RNA, 18 nt, Artificial Sequence
  Synthetic
uauguaauaauaagagcc

SEQ ID NO: 531170 - RNA, 19 nt, Artificial Sequence
  Synthetic
guauguaauaauaagagcc

SEQ ID NO: 531171 - RNA, 20 nt, Artificial Sequence
  Synthetic
aguauguaauaauaagagcc

SEQ ID NO: 531172 - RNA, 21 nt, Artificial Sequence
  Synthetic
gaguauguaauaauaagagcc

SEQ ID NO: 531173 - RNA, 22 nt, Artificial Sequence
  Synthetic
agaguauguaauaauaagagcc

SEQ ID NO: 531174 - RNA, 23 nt, Artificial Sequence
  Synthetic
uagaguauguaauaauaagagcc

SEQ ID NO: 531175 - RNA, 24 nt, Artificial Sequence
  Synthetic
guagaguauguaauaauaagagcc

SEQ ID NO: 531176 - RNA, 18 nt, Artificial Sequence
  Synthetic
gauagaaacuuaagagcc

SEQ ID NO: 531177 - RNA, 19 nt, Artificial Sequence
  Synthetic
ggauagaaacuuaagagcc

SEQ ID NO: 531178 - RNA, 20 nt, Artificial Sequence
  Synthetic
aggauagaaacuuaagagcc

SEQ ID NO: 531179 - RNA, 21 nt, Artificial Sequence
  Synthetic
gaggauagaaacuuaagagcc

SEQ ID NO: 531180 - RNA, 22 nt, Artificial Sequence
  Synthetic
agaggauagaaacuuaagagcc

SEQ ID NO: 531181 - RNA, 23 nt, Artificial Sequence
  Synthetic
cagaggauagaaacuuaagagcc

SEQ ID NO: 531182 - RNA, 24 nt, Artificial Sequence
  Synthetic
ccagaggauagaaacuuaagagcc

SEQ ID NO: 531183 - RNA, 18 nt, Artificial Sequence
  Synthetic
guaaagcaaaacagagcc

SEQ ID NO: 531184 - RNA, 19 nt, Artificial Sequence
  Synthetic
aguaaagcaaaacagagcc

SEQ ID NO: 531185 - RNA, 20 nt, Artificial Sequence
  Synthetic
caguaaagcaaaacagagcc

SEQ ID NO: 531186 - RNA, 21 nt, Artificial Sequence
  Synthetic
gcaguaaagcaaaacagagcc

SEQ ID NO: 531187 - RNA, 22 nt, Artificial Sequence
  Synthetic
ggcaguaaagcaaaacagagcc

SEQ ID NO: 531188 - RNA, 23 nt, Artificial Sequence
  Synthetic
aggcaguaaagcaaaacagagcc

SEQ ID NO: 531189 - RNA, 24 nt, Artificial Sequence
  Synthetic
aaggcaguaaagcaaaacagagcc

SEQ ID NO: 531190 - RNA, 18 nt, Artificial Sequence
  Synthetic
aaugaaauagacagagcc

SEQ ID NO: 531191 - RNA, 19 nt, Artificial Sequence
  Synthetic
gaaugaaauagacagagcc

SEQ ID NO: 531192 - RNA, 20 nt, Artificial Sequence
  Synthetic
ugaaugaaauagacagagcc

SEQ ID NO: 531193 - RNA, 21 nt, Artificial Sequence
  Synthetic
gugaaugaaauagacagagcc

SEQ ID NO: 531194 - RNA, 22 nt, Artificial Sequence
  Synthetic
ggugaaugaaauagacagagcc

SEQ ID NO: 531195 - RNA, 23 nt, Artificial Sequence
  Synthetic
gggugaaugaaauagacagagcc

SEQ ID NO: 531196 - RNA, 24 nt, Artificial Sequence
  Synthetic
ugggugaaugaaauagacagagcc

SEQ ID NO: 531197 - RNA, 18 nt, Artificial Sequence
  Synthetic
ggggggaucacccgagcc

SEQ ID NO: 531198 - RNA, 19 nt, Artificial Sequence
  Synthetic
uggggggaucacccgagcc

SEQ ID NO: 531199 - RNA, 20 nt, Artificial Sequence
  Synthetic
uuggggggaucacccgagcc

SEQ ID NO: 531200 - RNA, 21 nt, Artificial Sequence
  Synthetic
guuggggggaucacccgagcc

SEQ ID NO: 531201 - RNA, 22 nt, Artificial Sequence
  Synthetic
gguuggggggaucacccgagcc

SEQ ID NO: 531202 - RNA, 23 nt, Artificial Sequence
  Synthetic
agguuggggggaucacccgagcc

SEQ ID NO: 531203 - RNA, 24 nt, Artificial Sequence
  Synthetic
gagguuggggggaucacccgagcc

SEQ ID NO: 531204 - RNA, 18 nt, Artificial Sequence
  Synthetic
aaagguguaaaaggagcc

SEQ ID NO: 531205 - RNA, 19 nt, Artificial Sequence
  Synthetic
gaaagguguaaaaggagcc

SEQ ID NO: 531206 - RNA, 20 nt, Artificial Sequence
  Synthetic
agaaagguguaaaaggagcc

SEQ ID NO: 531207 - RNA, 21 nt, Artificial Sequence
  Synthetic
cagaaagguguaaaaggagcc

SEQ ID NO: 531208 - RNA, 22 nt, Artificial Sequence
  Synthetic
ucagaaagguguaaaaggagcc

SEQ ID NO: 531209 - RNA, 23 nt, Artificial Sequence
  Synthetic
aucagaaagguguaaaaggagcc

SEQ ID NO: 531210 - RNA, 24 nt, Artificial Sequence
  Synthetic
aaucagaaagguguaaaaggagcc

SEQ ID NO: 531211 - RNA, 18 nt, Artificial Sequence
  Synthetic
gaauggauuggaggagcc

SEQ ID NO: 531212 - RNA, 19 nt, Artificial Sequence
  Synthetic
ugaauggauuggaggagcc

SEQ ID NO: 531213 - RNA, 20 nt, Artificial Sequence
  Synthetic
augaauggauuggaggagcc

SEQ ID NO: 531214 - RNA, 21 nt, Artificial Sequence
  Synthetic
gaugaauggauuggaggagcc

SEQ ID NO: 531215 - RNA, 22 nt, Artificial Sequence
  Synthetic
ggaugaauggauuggaggagcc

SEQ ID NO: 531216 - RNA, 23 nt, Artificial Sequence
  Synthetic
aggaugaauggauuggaggagcc

SEQ ID NO: 531217 - RNA, 24 nt, Artificial Sequence
  Synthetic
gaggaugaauggauuggaggagcc

SEQ ID NO: 531218 - RNA, 18 nt, Artificial Sequence
  Synthetic
aaaugaaaacucggagcc

SEQ ID NO: 531219 - RNA, 19 nt, Artificial Sequence
  Synthetic
uaaaugaaaacucggagcc

SEQ ID NO: 531220 - RNA, 20 nt, Artificial Sequence
  Synthetic
auaaaugaaaacucggagcc

SEQ ID NO: 531221 - RNA, 21 nt, Artificial Sequence
  Synthetic
aauaaaugaaaacucggagcc

SEQ ID NO: 531222 - RNA, 22 nt, Artificial Sequence
  Synthetic
aaauaaaugaaaacucggagcc

SEQ ID NO: 531223 - RNA, 23 nt, Artificial Sequence
  Synthetic
aaaauaaaugaaaacucggagcc

SEQ ID NO: 531224 - RNA, 24 nt, Artificial Sequence
  Synthetic
aaaaauaaaugaaaacucggagcc

SEQ ID NO: 531225 - RNA, 18 nt, Artificial Sequence
  Synthetic
uaaauaaaucagggagcc

SEQ ID NO: 531226 - RNA, 19 nt, Artificial Sequence
  Synthetic
uuaaauaaaucagggagcc

SEQ ID NO: 531227 - RNA, 20 nt, Artificial Sequence
  Synthetic
auuaaauaaaucagggagcc

SEQ ID NO: 531228 - RNA, 21 nt, Artificial Sequence
  Synthetic
uauuaaauaaaucagggagcc

SEQ ID NO: 531229 - RNA, 22 nt, Artificial Sequence
  Synthetic
auauuaaauaaaucagggagcc

SEQ ID NO: 531230 - RNA, 23 nt, Artificial Sequence
  Synthetic
cauauuaaauaaaucagggagcc

SEQ ID NO: 531231 - RNA, 24 nt, Artificial Sequence
  Synthetic
ucauauuaaauaaaucagggagcc

SEQ ID NO: 531232 - RNA, 18 nt, Artificial Sequence
  Synthetic
guagauucagugggagcc

SEQ ID NO: 531233 - RNA, 19 nt, Artificial Sequence
  Synthetic
uguagauucagugggagcc

SEQ ID NO: 531234 - RNA, 20 nt, Artificial Sequence
  Synthetic
auguagauucagugggagcc

SEQ ID NO: 531235 - RNA, 21 nt, Artificial Sequence
  Synthetic
aauguagauucagugggagcc

SEQ ID NO: 531236 - RNA, 22 nt, Artificial Sequence
  Synthetic
uaauguagauucagugggagcc

SEQ ID NO: 531237 - RNA, 23 nt, Artificial Sequence
  Synthetic
auaauguagauucagugggagcc

SEQ ID NO: 531238 - RNA, 24 nt, Artificial Sequence
  Synthetic
cauaauguagauucagugggagcc

SEQ ID NO: 531239 - RNA, 18 nt, Artificial Sequence
  Synthetic
uuugacaugcauggagcc

SEQ ID NO: 531240 - RNA, 19 nt, Artificial Sequence
  Synthetic
auuugacaugcauggagcc

SEQ ID NO: 531241 - RNA, 20 nt, Artificial Sequence
  Synthetic
gauuugacaugcauggagcc

SEQ ID NO: 531242 - RNA, 21 nt, Artificial Sequence
  Synthetic
ggauuugacaugcauggagcc

SEQ ID NO: 531243 - RNA, 22 nt, Artificial Sequence
  Synthetic
uggauuugacaugcauggagcc

SEQ ID NO: 531244 - RNA, 23 nt, Artificial Sequence
  Synthetic
uuggauuugacaugcauggagcc

SEQ ID NO: 531245 - RNA, 24 nt, Artificial Sequence
  Synthetic
auuggauuugacaugcauggagcc

SEQ ID NO: 531246 - RNA, 18 nt, Artificial Sequence
  Synthetic
gaauaauaaggaugagcc

SEQ ID NO: 531247 - RNA, 19 nt, Artificial Sequence
  Synthetic
ggaauaauaaggaugagcc

SEQ ID NO: 531248 - RNA, 20 nt, Artificial Sequence
  Synthetic
uggaauaauaaggaugagcc

SEQ ID NO: 531249 - RNA, 21 nt, Artificial Sequence
  Synthetic
uuggaauaauaaggaugagcc

SEQ ID NO: 531250 - RNA, 22 nt, Artificial Sequence
  Synthetic
uuuggaauaauaaggaugagcc

SEQ ID NO: 531251 - RNA, 23 nt, Artificial Sequence
  Synthetic
auuuggaauaauaaggaugagcc

SEQ ID NO: 531252 - RNA, 24 nt, Artificial Sequence
  Synthetic
cauuuggaauaauaaggaugagcc

SEQ ID NO: 531253 - RNA, 18 nt, Artificial Sequence
  Synthetic
gggaggaucaccugagcc

SEQ ID NO: 531254 - RNA, 19 nt, Artificial Sequence
  Synthetic
agggaggaucaccugagcc

SEQ ID NO: 531255 - RNA, 20 nt, Artificial Sequence
  Synthetic
gagggaggaucaccugagcc

SEQ ID NO: 531256 - RNA, 21 nt, Artificial Sequence
  Synthetic
ggagggaggaucaccugagcc

SEQ ID NO: 531257 - RNA, 22 nt, Artificial Sequence
  Synthetic
gggagggaggaucaccugagcc

SEQ ID NO: 531258 - RNA, 23 nt, Artificial Sequence
  Synthetic
ugggagggaggaucaccugagcc

SEQ ID NO: 531259 - RNA, 24 nt, Artificial Sequence
  Synthetic
gugggagggaggaucaccugagcc

SEQ ID NO: 531260 - RNA, 18 nt, Artificial Sequence
  Synthetic
aauaggaucuccugagcc

SEQ ID NO: 531261 - RNA, 19 nt, Artificial Sequence
  Synthetic
caauaggaucuccugagcc

SEQ ID NO: 531262 - RNA, 20 nt, Artificial Sequence
  Synthetic
gcaauaggaucuccugagcc

SEQ ID NO: 531263 - RNA, 21 nt, Artificial Sequence
  Synthetic
ggcaauaggaucuccugagcc

SEQ ID NO: 531264 - RNA, 22 nt, Artificial Sequence
  Synthetic
aggcaauaggaucuccugagcc

SEQ ID NO: 531265 - RNA, 23 nt, Artificial Sequence
  Synthetic
gaggcaauaggaucuccugagcc

SEQ ID NO: 531266 - RNA, 24 nt, Artificial Sequence
  Synthetic
ugaggcaauaggaucuccugagcc

SEQ ID NO: 531267 - RNA, 18 nt, Artificial Sequence
  Synthetic
gggaggaucaucugagcc

SEQ ID NO: 531268 - RNA, 19 nt, Artificial Sequence
  Synthetic
ugggaggaucaucugagcc

SEQ ID NO: 531269 - RNA, 20 nt, Artificial Sequence
  Synthetic
gugggaggaucaucugagcc

SEQ ID NO: 531270 - RNA, 21 nt, Artificial Sequence
  Synthetic
ugugggaggaucaucugagcc

SEQ ID NO: 531271 - RNA, 22 nt, Artificial Sequence
  Synthetic
augugggaggaucaucugagcc

SEQ ID NO: 531272 - RNA, 23 nt, Artificial Sequence
  Synthetic
gaugugggaggaucaucugagcc

SEQ ID NO: 531273 - RNA, 24 nt, Artificial Sequence
  Synthetic
ugaugugggaggaucaucugagcc

SEQ ID NO: 531274 - RNA, 18 nt, Artificial Sequence
  Synthetic
caaaguccaaggugagcc

SEQ ID NO: 531275 - RNA, 19 nt, Artificial Sequence
  Synthetic
gcaaaguccaaggugagcc

SEQ ID NO: 531276 - RNA, 20 nt, Artificial Sequence
  Synthetic
ggcaaaguccaaggugagcc

SEQ ID NO: 531277 - RNA, 21 nt, Artificial Sequence
  Synthetic
aggcaaaguccaaggugagcc

SEQ ID NO: 531278 - RNA, 22 nt, Artificial Sequence
  Synthetic
uaggcaaaguccaaggugagcc

SEQ ID NO: 531279 - RNA, 23 nt, Artificial Sequence
  Synthetic
auaggcaaaguccaaggugagcc

SEQ ID NO: 531280 - RNA, 24 nt, Artificial Sequence
  Synthetic
gauaggcaaaguccaaggugagcc

SEQ ID NO: 531281 - RNA, 18 nt, Artificial Sequence
  Synthetic
uaacauugaaauugagcc

SEQ ID NO: 531282 - RNA, 19 nt, Artificial Sequence
  Synthetic
guaacauugaaauugagcc

SEQ ID NO: 531283 - RNA, 20 nt, Artificial Sequence
  Synthetic
aguaacauugaaauugagcc

SEQ ID NO: 531284 - RNA, 21 nt, Artificial Sequence
  Synthetic
aaguaacauugaaauugagcc

SEQ ID NO: 531285 - RNA, 22 nt, Artificial Sequence
  Synthetic
uaaguaacauugaaauugagcc

SEQ ID NO: 531286 - RNA, 23 nt, Artificial Sequence
  Synthetic
guaaguaacauugaaauugagcc

SEQ ID NO: 531287 - RNA, 24 nt, Artificial Sequence
  Synthetic
aguaaguaacauugaaauugagcc

SEQ ID NO: 531288 - RNA, 18 nt, Artificial Sequence
  Synthetic
gggcagaucacuugagcc

SEQ ID NO: 531289 - RNA, 19 nt, Artificial Sequence
  Synthetic
ugggcagaucacuugagcc

SEQ ID NO: 531290 - RNA, 20 nt, Artificial Sequence
  Synthetic
gugggcagaucacuugagcc

SEQ ID NO: 531291 - RNA, 21 nt, Artificial Sequence
  Synthetic
ggugggcagaucacuugagcc

SEQ ID NO: 531292 - RNA, 22 nt, Artificial Sequence
  Synthetic
aggugggcagaucacuugagcc

SEQ ID NO: 531293 - RNA, 23 nt, Artificial Sequence
  Synthetic
gaggugggcagaucacuugagcc

SEQ ID NO: 531294 - RNA, 24 nt, Artificial Sequence
  Synthetic
ugaggugggcagaucacuugagcc

SEQ ID NO: 531295 - RNA, 18 nt, Artificial Sequence
  Synthetic
ugcucccucccuugagcc

SEQ ID NO: 531296 - RNA, 19 nt, Artificial Sequence
  Synthetic
cugcucccucccuugagcc

SEQ ID NO: 531297 - RNA, 20 nt, Artificial Sequence
  Synthetic
ucugcucccucccuugagcc

SEQ ID NO: 531298 - RNA, 21 nt, Artificial Sequence
  Synthetic
uucugcucccucccuugagcc

SEQ ID NO: 531299 - RNA, 22 nt, Artificial Sequence
  Synthetic
guucugcucccucccuugagcc

SEQ ID NO: 531300 - RNA, 23 nt, Artificial Sequence
  Synthetic
uguucugcucccucccuugagcc

SEQ ID NO: 531301 - RNA, 24 nt, Artificial Sequence
  Synthetic
auguucugcucccucccuugagcc

SEQ ID NO: 531302 - RNA, 18 nt, Artificial Sequence
  Synthetic
caggacuuggcuugagcc

SEQ ID NO: 531303 - RNA, 19 nt, Artificial Sequence
  Synthetic
acaggacuuggcuugagcc

SEQ ID NO: 531304 - RNA, 20 nt, Artificial Sequence
  Synthetic
uacaggacuuggcuugagcc

SEQ ID NO: 531305 - RNA, 21 nt, Artificial Sequence
  Synthetic
uuacaggacuuggcuugagcc

SEQ ID NO: 531306 - RNA, 22 nt, Artificial Sequence
  Synthetic
guuacaggacuuggcuugagcc

SEQ ID NO: 531307 - RNA, 23 nt, Artificial Sequence
  Synthetic
aguuacaggacuuggcuugagcc

SEQ ID NO: 531308 - RNA, 24 nt, Artificial Sequence
  Synthetic
aaguuacaggacuuggcuugagcc

SEQ ID NO: 531309 - RNA, 18 nt, Artificial Sequence
  Synthetic
cggagaacugcuugagcc

SEQ ID NO: 531310 - RNA, 19 nt, Artificial Sequence
  Synthetic
gcggagaacugcuugagcc

SEQ ID NO: 531311 - RNA, 20 nt, Artificial Sequence
  Synthetic
ggcggagaacugcuugagcc

SEQ ID NO: 531312 - RNA, 21 nt, Artificial Sequence
  Synthetic
aggcggagaacugcuugagcc

SEQ ID NO: 531313 - RNA, 22 nt, Artificial Sequence
  Synthetic
gaggcggagaacugcuugagcc

SEQ ID NO: 531314 - RNA, 23 nt, Artificial Sequence
  Synthetic
ugaggcggagaacugcuugagcc

SEQ ID NO: 531315 - RNA, 24 nt, Artificial Sequence
  Synthetic
cugaggcggagaacugcuugagcc

SEQ ID NO: 531316 - RNA, 18 nt, Artificial Sequence
  Synthetic
aggaggacugcuugagcc

SEQ ID NO: 531317 - RNA, 19 nt, Artificial Sequence
  Synthetic
aaggaggacugcuugagcc

SEQ ID NO: 531318 - RNA, 20 nt, Artificial Sequence
  Synthetic
gaaggaggacugcuugagcc

SEQ ID NO: 531319 - RNA, 21 nt, Artificial Sequence
  Synthetic
ggaaggaggacugcuugagcc

SEQ ID NO: 531320 - RNA, 22 nt, Artificial Sequence
  Synthetic
aggaaggaggacugcuugagcc

SEQ ID NO: 531321 - RNA, 23 nt, Artificial Sequence
  Synthetic
gaggaaggaggacugcuugagcc

SEQ ID NO: 531322 - RNA, 24 nt, Artificial Sequence
  Synthetic
cgaggaaggaggacugcuugagcc

SEQ ID NO: 531323 - RNA, 18 nt, Artificial Sequence
  Synthetic
ggguggacugcuugagcc

SEQ ID NO: 531324 - RNA, 19 nt, Artificial Sequence
  Synthetic
uggguggacugcuugagcc

SEQ ID NO: 531325 - RNA, 20 nt, Artificial Sequence
  Synthetic
guggguggacugcuugagcc

SEQ ID NO: 531326 - RNA, 21 nt, Artificial Sequence
  Synthetic
uguggguggacugcuugagcc

SEQ ID NO: 531327 - RNA, 22 nt, Artificial Sequence
  Synthetic
auguggguggacugcuugagcc

SEQ ID NO: 531328 - RNA, 23 nt, Artificial Sequence
  Synthetic
gauguggguggacugcuugagcc

SEQ ID NO: 531329 - RNA, 24 nt, Artificial Sequence
  Synthetic
agauguggguggacugcuugagcc

SEQ ID NO: 531330 - RNA, 24 nt, Artificial Sequence
  Synthetic
ugaggcaggaggauugcuugagcc

SEQ ID NO: 531331 - RNA, 18 nt, Artificial Sequence
  Synthetic
caaaauaggaagauagcc

SEQ ID NO: 531332 - RNA, 19 nt, Artificial Sequence
  Synthetic
ucaaaauaggaagauagcc

SEQ ID NO: 531333 - RNA, 20 nt, Artificial Sequence
  Synthetic
aucaaaauaggaagauagcc

SEQ ID NO: 531334 - RNA, 21 nt, Artificial Sequence
  Synthetic
caucaaaauaggaagauagcc

SEQ ID NO: 531335 - RNA, 22 nt, Artificial Sequence
  Synthetic
acaucaaaauaggaagauagcc

SEQ ID NO: 531336 - RNA, 23 nt, Artificial Sequence
  Synthetic
uacaucaaaauaggaagauagcc

SEQ ID NO: 531337 - RNA, 24 nt, Artificial Sequence
  Synthetic
guacaucaaaauaggaagauagcc

SEQ ID NO: 531338 - RNA, 18 nt, Artificial Sequence
  Synthetic
gcugagccucagauagcc

SEQ ID NO: 531339 - RNA, 19 nt, Artificial Sequence
  Synthetic
ggcugagccucagauagcc

SEQ ID NO: 531340 - RNA, 20 nt, Artificial Sequence
  Synthetic
uggcugagccucagauagcc

SEQ ID NO: 531341 - RNA, 21 nt, Artificial Sequence
  Synthetic
cuggcugagccucagauagcc

SEQ ID NO: 531342 - RNA, 22 nt, Artificial Sequence
  Synthetic
acuggcugagccucagauagcc

SEQ ID NO: 531343 - RNA, 23 nt, Artificial Sequence
  Synthetic
aacuggcugagccucagauagcc

SEQ ID NO: 531344 - RNA, 24 nt, Artificial Sequence
  Synthetic
aaacuggcugagccucagauagcc

SEQ ID NO: 531345 - RNA, 18 nt, Artificial Sequence
  Synthetic
aaaagggcccauauagcc

SEQ ID NO: 531346 - RNA, 19 nt, Artificial Sequence
  Synthetic
aaaaagggcccauauagcc

SEQ ID NO: 531347 - RNA, 20 nt, Artificial Sequence
  Synthetic
aaaaaagggcccauauagcc

SEQ ID NO: 531348 - RNA, 21 nt, Artificial Sequence
  Synthetic
caaaaaagggcccauauagcc

SEQ ID NO: 531349 - RNA, 22 nt, Artificial Sequence
  Synthetic
ccaaaaaagggcccauauagcc

SEQ ID NO: 531350 - RNA, 23 nt, Artificial Sequence
  Synthetic
accaaaaaagggcccauauagcc

SEQ ID NO: 531351 - RNA, 24 nt, Artificial Sequence
  Synthetic
aaccaaaaaagggcccauauagcc

SEQ ID NO: 531352 - RNA, 18 nt, Artificial Sequence
  Synthetic
ugcuauugcuguauagcc

SEQ ID NO: 531353 - RNA, 19 nt, Artificial Sequence
  Synthetic
augcuauugcuguauagcc

SEQ ID NO: 531354 - RNA, 20 nt, Artificial Sequence
  Synthetic
caugcuauugcuguauagcc

SEQ ID NO: 531355 - RNA, 21 nt, Artificial Sequence
  Synthetic
gcaugcuauugcuguauagcc

SEQ ID NO: 531356 - RNA, 22 nt, Artificial Sequence
  Synthetic
ugcaugcuauugcuguauagcc

SEQ ID NO: 531357 - RNA, 23 nt, Artificial Sequence
  Synthetic
augcaugcuauugcuguauagcc

SEQ ID NO: 531358 - RNA, 24 nt, Artificial Sequence
  Synthetic
aaugcaugcuauugcuguauagcc

SEQ ID NO: 531359 - RNA, 18 nt, Artificial Sequence
  Synthetic
cuguacugguuuauagcc

SEQ ID NO: 531360 - RNA, 19 nt, Artificial Sequence
  Synthetic
gcuguacugguuuauagcc

SEQ ID NO: 531361 - RNA, 20 nt, Artificial Sequence
  Synthetic
ugcuguacugguuuauagcc

SEQ ID NO: 531362 - RNA, 21 nt, Artificial Sequence
  Synthetic
augcuguacugguuuauagcc

SEQ ID NO: 531363 - RNA, 22 nt, Artificial Sequence
  Synthetic
caugcuguacugguuuauagcc

SEQ ID NO: 531364 - RNA, 23 nt, Artificial Sequence
  Synthetic
acaugcuguacugguuuauagcc

SEQ ID NO: 531365 - RNA, 24 nt, Artificial Sequence
  Synthetic
cacaugcuguacugguuuauagcc

SEQ ID NO: 531366 - RNA, 18 nt, Artificial Sequence
  Synthetic
gaucauugguuuauagcc

SEQ ID NO: 531367 - RNA, 19 nt, Artificial Sequence
  Synthetic
agaucauugguuuauagcc

SEQ ID NO: 531368 - RNA, 20 nt, Artificial Sequence
  Synthetic
uagaucauugguuuauagcc

SEQ ID NO: 531369 - RNA, 21 nt, Artificial Sequence
  Synthetic
cuagaucauugguuuauagcc

SEQ ID NO: 531370 - RNA, 22 nt, Artificial Sequence
  Synthetic
ccuagaucauugguuuauagcc

SEQ ID NO: 531371 - RNA, 23 nt, Artificial Sequence
  Synthetic
accuagaucauugguuuauagcc

SEQ ID NO: 531372 - RNA, 24 nt, Artificial Sequence
  Synthetic
gaccuagaucauugguuuauagcc

SEQ ID NO: 531373 - RNA, 18 nt, Artificial Sequence
  Synthetic
aauaaguaacaacuagcc

SEQ ID NO: 531374 - RNA, 19 nt, Artificial Sequence
  Synthetic
gaauaaguaacaacuagcc

SEQ ID NO: 531375 - RNA, 20 nt, Artificial Sequence
  Synthetic
ugaauaaguaacaacuagcc

SEQ ID NO: 531376 - RNA, 21 nt, Artificial Sequence
  Synthetic
cugaauaaguaacaacuagcc

SEQ ID NO: 531377 - RNA, 22 nt, Artificial Sequence
  Synthetic
ccugaauaaguaacaacuagcc

SEQ ID NO: 531378 - RNA, 23 nt, Artificial Sequence
  Synthetic
uccugaauaaguaacaacuagcc

SEQ ID NO: 531379 - RNA, 24 nt, Artificial Sequence
  Synthetic
cuccugaauaaguaacaacuagcc

SEQ ID NO: 531380 - RNA, 18 nt, Artificial Sequence
  Synthetic
uaugggagcccccuagcc

SEQ ID NO: 531381 - RNA, 19 nt, Artificial Sequence
  Synthetic
uuaugggagcccccuagcc

SEQ ID NO: 531382 - RNA, 20 nt, Artificial Sequence
  Synthetic
cuuaugggagcccccuagcc

SEQ ID NO: 531383 - RNA, 21 nt, Artificial Sequence
  Synthetic
gcuuaugggagcccccuagcc

SEQ ID NO: 531384 - RNA, 22 nt, Artificial Sequence
  Synthetic
ugcuuaugggagcccccuagcc

SEQ ID NO: 531385 - RNA, 23 nt, Artificial Sequence
  Synthetic
cugcuuaugggagcccccuagcc

SEQ ID NO: 531386 - RNA, 24 nt, Artificial Sequence
  Synthetic
ucugcuuaugggagcccccuagcc

SEQ ID NO: 531387 - RNA, 18 nt, Artificial Sequence
  Synthetic
auuaaagauucucuagcc

SEQ ID NO: 531388 - RNA, 19 nt, Artificial Sequence
  Synthetic
aauuaaagauucucuagcc

SEQ ID NO: 531389 - RNA, 20 nt, Artificial Sequence
  Synthetic
caauuaaagauucucuagcc

SEQ ID NO: 531390 - RNA, 21 nt, Artificial Sequence
  Synthetic
ccaauuaaagauucucuagcc

SEQ ID NO: 531391 - RNA, 22 nt, Artificial Sequence
  Synthetic
uccaauuaaagauucucuagcc

SEQ ID NO: 531392 - RNA, 23 nt, Artificial Sequence
  Synthetic
auccaauuaaagauucucuagcc

SEQ ID NO: 531393 - RNA, 24 nt, Artificial Sequence
  Synthetic
uauccaauuaaagauucucuagcc

SEQ ID NO: 531394 - RNA, 18 nt, Artificial Sequence
  Synthetic
uugaagcuuucucuagcc

SEQ ID NO: 531395 - RNA, 19 nt, Artificial Sequence
  Synthetic
cuugaagcuuucucuagcc

SEQ ID NO: 531396 - RNA, 20 nt, Artificial Sequence
  Synthetic
acuugaagcuuucucuagcc

SEQ ID NO: 531397 - RNA, 21 nt, Artificial Sequence
  Synthetic
aacuugaagcuuucucuagcc

SEQ ID NO: 531398 - RNA, 22 nt, Artificial Sequence
  Synthetic
gaacuugaagcuuucucuagcc

SEQ ID NO: 531399 - RNA, 23 nt, Artificial Sequence
  Synthetic
agaacuugaagcuuucucuagcc

SEQ ID NO: 531400 - RNA, 24 nt, Artificial Sequence
  Synthetic
aagaacuugaagcuuucucuagcc

SEQ ID NO: 531401 - RNA, 18 nt, Artificial Sequence
  Synthetic
guuuccagaauucuagcc

SEQ ID NO: 531402 - RNA, 19 nt, Artificial Sequence
  Synthetic
aguuuccagaauucuagcc

SEQ ID NO: 531403 - RNA, 20 nt, Artificial Sequence
  Synthetic
uaguuuccagaauucuagcc

SEQ ID NO: 531404 - RNA, 21 nt, Artificial Sequence
  Synthetic
auaguuuccagaauucuagcc

SEQ ID NO: 531405 - RNA, 22 nt, Artificial Sequence
  Synthetic
aauaguuuccagaauucuagcc

SEQ ID NO: 531406 - RNA, 23 nt, Artificial Sequence
  Synthetic
uaauaguuuccagaauucuagcc

SEQ ID NO: 531407 - RNA, 24 nt, Artificial Sequence
  Synthetic
cuaauaguuuccagaauucuagcc

SEQ ID NO: 531408 - RNA, 18 nt, Artificial Sequence
  Synthetic
ucuuuuguucuucuagcc

SEQ ID NO: 531409 - RNA, 19 nt, Artificial Sequence
  Synthetic
uucuuuuguucuucuagcc

SEQ ID NO: 531410 - RNA, 20 nt, Artificial Sequence
  Synthetic
auucuuuuguucuucuagcc

SEQ ID NO: 531411 - RNA, 21 nt, Artificial Sequence
  Synthetic
uauucuuuuguucuucuagcc

SEQ ID NO: 531412 - RNA, 22 nt, Artificial Sequence
  Synthetic
auauucuuuuguucuucuagcc

SEQ ID NO: 531413 - RNA, 23 nt, Artificial Sequence
  Synthetic
gauauucuuuuguucuucuagcc

SEQ ID NO: 531414 - RNA, 24 nt, Artificial Sequence
  Synthetic
agauauucuuuuguucuucuagcc

SEQ ID NO: 531415 - RNA, 18 nt, Artificial Sequence
  Synthetic
aaccuaaaguuucuagcc

SEQ ID NO: 531416 - RNA, 19 nt, Artificial Sequence
  Synthetic
gaaccuaaaguuucuagcc

SEQ ID NO: 531417 - RNA, 20 nt, Artificial Sequence
  Synthetic
ugaaccuaaaguuucuagcc

SEQ ID NO: 531418 - RNA, 21 nt, Artificial Sequence
  Synthetic
augaaccuaaaguuucuagcc

SEQ ID NO: 531419 - RNA, 22 nt, Artificial Sequence
  Synthetic
gaugaaccuaaaguuucuagcc

SEQ ID NO: 531420 - RNA, 23 nt, Artificial Sequence
  Synthetic
ggaugaaccuaaaguuucuagcc

SEQ ID NO: 531421 - RNA, 24 nt, Artificial Sequence
  Synthetic
aggaugaaccuaaaguuucuagcc

SEQ ID NO: 531422 - RNA, 18 nt, Artificial Sequence
  Synthetic
cuuaaacaugaaguagcc

SEQ ID NO: 531423 - RNA, 19 nt, Artificial Sequence
  Synthetic
ucuuaaacaugaaguagcc

SEQ ID NO: 531424 - RNA, 20 nt, Artificial Sequence
  Synthetic
aucuuaaacaugaaguagcc

SEQ ID NO: 531425 - RNA, 21 nt, Artificial Sequence
  Synthetic
uaucuuaaacaugaaguagcc

SEQ ID NO: 531426 - RNA, 22 nt, Artificial Sequence
  Synthetic
guaucuuaaacaugaaguagcc

SEQ ID NO: 531427 - RNA, 23 nt, Artificial Sequence
  Synthetic
aguaucuuaaacaugaaguagcc

SEQ ID NO: 531428 - RNA, 24 nt, Artificial Sequence
  Synthetic
gaguaucuuaaacaugaaguagcc

SEQ ID NO: 531429 - RNA, 18 nt, Artificial Sequence
  Synthetic
agcauuuuuacaguagcc

SEQ ID NO: 531430 - RNA, 19 nt, Artificial Sequence
  Synthetic
uagcauuuuuacaguagcc

SEQ ID NO: 531431 - RNA, 20 nt, Artificial Sequence
  Synthetic
guagcauuuuuacaguagcc

SEQ ID NO: 531432 - RNA, 21 nt, Artificial Sequence
  Synthetic
uguagcauuuuuacaguagcc

SEQ ID NO: 531433 - RNA, 22 nt, Artificial Sequence
  Synthetic
uuguagcauuuuuacaguagcc

SEQ ID NO: 531434 - RNA, 23 nt, Artificial Sequence
  Synthetic
auuguagcauuuuuacaguagcc

SEQ ID NO: 531435 - RNA, 24 nt, Artificial Sequence
  Synthetic
uauuguagcauuuuuacaguagcc

SEQ ID NO: 531436 - RNA, 18 nt, Artificial Sequence
  Synthetic
gugaaaacaauaguagcc

SEQ ID NO: 531437 - RNA, 19 nt, Artificial Sequence
  Synthetic
agugaaaacaauaguagcc

SEQ ID NO: 531438 - RNA, 20 nt, Artificial Sequence
  Synthetic
aagugaaaacaauaguagcc

SEQ ID NO: 531439 - RNA, 21 nt, Artificial Sequence
  Synthetic
caagugaaaacaauaguagcc

SEQ ID NO: 531440 - RNA, 22 nt, Artificial Sequence
  Synthetic
acaagugaaaacaauaguagcc

SEQ ID NO: 531441 - RNA, 23 nt, Artificial Sequence
  Synthetic
uacaagugaaaacaauaguagcc

SEQ ID NO: 531442 - RNA, 24 nt, Artificial Sequence
  Synthetic
cuacaagugaaaacaauaguagcc

SEQ ID NO: 531443 - RNA, 18 nt, Artificial Sequence
  Synthetic
cuacaaaacuagguagcc

SEQ ID NO: 531444 - RNA, 19 nt, Artificial Sequence
  Synthetic
acuacaaaacuagguagcc

SEQ ID NO: 531445 - RNA, 20 nt, Artificial Sequence
  Synthetic
aacuacaaaacuagguagcc

SEQ ID NO: 531446 - RNA, 21 nt, Artificial Sequence
  Synthetic
aaacuacaaaacuagguagcc

SEQ ID NO: 531447 - RNA, 22 nt, Artificial Sequence
  Synthetic
caaacuacaaaacuagguagcc

SEQ ID NO: 531448 - RNA, 23 nt, Artificial Sequence
  Synthetic
ccaaacuacaaaacuagguagcc

SEQ ID NO: 531449 - RNA, 24 nt, Artificial Sequence
  Synthetic
uccaaacuacaaaacuagguagcc

SEQ ID NO: 531450 - RNA, 18 nt, Artificial Sequence
  Synthetic
ugaucaucuuagguagcc

SEQ ID NO: 531451 - RNA, 19 nt, Artificial Sequence
  Synthetic
uugaucaucuuagguagcc

SEQ ID NO: 531452 - RNA, 20 nt, Artificial Sequence
  Synthetic
uuugaucaucuuagguagcc

SEQ ID NO: 531453 - RNA, 21 nt, Artificial Sequence
  Synthetic
uuuugaucaucuuagguagcc

SEQ ID NO: 531454 - RNA, 22 nt, Artificial Sequence
  Synthetic
uuuuugaucaucuuagguagcc

SEQ ID NO: 531455 - RNA, 23 nt, Artificial Sequence
  Synthetic
uuuuuugaucaucuuagguagcc

SEQ ID NO: 531456 - RNA, 24 nt, Artificial Sequence
  Synthetic
cuuuuuugaucaucuuagguagcc

SEQ ID NO: 531457 - RNA, 18 nt, Artificial Sequence
  Synthetic
aauugcugcaugguagcc

SEQ ID NO: 531458 - RNA, 19 nt, Artificial Sequence
  Synthetic
uaauugcugcaugguagcc

SEQ ID NO: 531459 - RNA, 20 nt, Artificial Sequence
  Synthetic
cuaauugcugcaugguagcc

SEQ ID NO: 531460 - RNA, 21 nt, Artificial Sequence
  Synthetic
gcuaauugcugcaugguagcc

SEQ ID NO: 531461 - RNA, 22 nt, Artificial Sequence
  Synthetic
ugcuaauugcugcaugguagcc

SEQ ID NO: 531462 - RNA, 23 nt, Artificial Sequence
  Synthetic
uugcuaauugcugcaugguagcc

SEQ ID NO: 531463 - RNA, 24 nt, Artificial Sequence
  Synthetic
cuugcuaauugcugcaugguagcc

SEQ ID NO: 531464 - RNA, 18 nt, Artificial Sequence
  Synthetic
gcucucugucugguagcc

SEQ ID NO: 531465 - RNA, 19 nt, Artificial Sequence
  Synthetic
ggcucucugucugguagcc

SEQ ID NO: 531466 - RNA, 20 nt, Artificial Sequence
  Synthetic
aggcucucugucugguagcc

SEQ ID NO: 531467 - RNA, 21 nt, Artificial Sequence
  Synthetic
uaggcucucugucugguagcc

SEQ ID NO: 531468 - RNA, 22 nt, Artificial Sequence
  Synthetic
cuaggcucucugucugguagcc

SEQ ID NO: 531469 - RNA, 23 nt, Artificial Sequence
  Synthetic
ucuaggcucucugucugguagcc

SEQ ID NO: 531470 - RNA, 24 nt, Artificial Sequence
  Synthetic
cucuaggcucucugucugguagcc

SEQ ID NO: 531471 - RNA, 18 nt, Artificial Sequence
  Synthetic
uuacaaucagugguagcc

SEQ ID NO: 531472 - RNA, 19 nt, Artificial Sequence
  Synthetic
guuacaaucagugguagcc

SEQ ID NO: 531473 - RNA, 20 nt, Artificial Sequence
  Synthetic
uguuacaaucagugguagcc

SEQ ID NO: 531474 - RNA, 21 nt, Artificial Sequence
  Synthetic
cuguuacaaucagugguagcc

SEQ ID NO: 531475 - RNA, 22 nt, Artificial Sequence
  Synthetic
gcuguuacaaucagugguagcc

SEQ ID NO: 531476 - RNA, 23 nt, Artificial Sequence
  Synthetic
ugcuguuacaaucagugguagcc

SEQ ID NO: 531477 - RNA, 24 nt, Artificial Sequence
  Synthetic
uugcuguuacaaucagugguagcc

SEQ ID NO: 531478 - RNA, 18 nt, Artificial Sequence
  Synthetic
caguacagguuuguagcc

SEQ ID NO: 531479 - RNA, 19 nt, Artificial Sequence
  Synthetic
gcaguacagguuuguagcc

SEQ ID NO: 531480 - RNA, 20 nt, Artificial Sequence
  Synthetic
ugcaguacagguuuguagcc

SEQ ID NO: 531481 - RNA, 21 nt, Artificial Sequence
  Synthetic
augcaguacagguuuguagcc

SEQ ID NO: 531482 - RNA, 22 nt, Artificial Sequence
  Synthetic
caugcaguacagguuuguagcc

SEQ ID NO: 531483 - RNA, 23 nt, Artificial Sequence
  Synthetic
acaugcaguacagguuuguagcc

SEQ ID NO: 531484 - RNA, 24 nt, Artificial Sequence
  Synthetic
cacaugcaguacagguuuguagcc

SEQ ID NO: 531485 - RNA, 18 nt, Artificial Sequence
  Synthetic
gaugaugcugaauuagcc

SEQ ID NO: 531486 - RNA, 19 nt, Artificial Sequence
  Synthetic
ugaugaugcugaauuagcc

SEQ ID NO: 531487 - RNA, 20 nt, Artificial Sequence
  Synthetic
augaugaugcugaauuagcc

SEQ ID NO: 531488 - RNA, 21 nt, Artificial Sequence
  Synthetic
gaugaugaugcugaauuagcc

SEQ ID NO: 531489 - RNA, 22 nt, Artificial Sequence
  Synthetic
ggaugaugaugcugaauuagcc

SEQ ID NO: 531490 - RNA, 23 nt, Artificial Sequence
  Synthetic
aggaugaugaugcugaauuagcc

SEQ ID NO: 531491 - RNA, 24 nt, Artificial Sequence
  Synthetic
caggaugaugaugcugaauuagcc

SEQ ID NO: 531492 - RNA, 18 nt, Artificial Sequence
  Synthetic
ucauaaauugaauuagcc

SEQ ID NO: 531493 - RNA, 19 nt, Artificial Sequence
  Synthetic
gucauaaauugaauuagcc

SEQ ID NO: 531494 - RNA, 20 nt, Artificial Sequence
  Synthetic
ugucauaaauugaauuagcc

SEQ ID NO: 531495 - RNA, 21 nt, Artificial Sequence
  Synthetic
augucauaaauugaauuagcc

SEQ ID NO: 531496 - RNA, 22 nt, Artificial Sequence
  Synthetic
uaugucauaaauugaauuagcc

SEQ ID NO: 531497 - RNA, 23 nt, Artificial Sequence
  Synthetic
guaugucauaaauugaauuagcc

SEQ ID NO: 531498 - RNA, 24 nt, Artificial Sequence
  Synthetic
gguaugucauaaauugaauuagcc

SEQ ID NO: 531499 - RNA, 18 nt, Artificial Sequence
  Synthetic
agacgcucuugauuagcc

SEQ ID NO: 531500 - RNA, 19 nt, Artificial Sequence
  Synthetic
gagacgcucuugauuagcc

SEQ ID NO: 531501 - RNA, 20 nt, Artificial Sequence
  Synthetic
ggagacgcucuugauuagcc

SEQ ID NO: 531502 - RNA, 21 nt, Artificial Sequence
  Synthetic
aggagacgcucuugauuagcc

SEQ ID NO: 531503 - RNA, 22 nt, Artificial Sequence
  Synthetic
aaggagacgcucuugauuagcc

SEQ ID NO: 531504 - RNA, 23 nt, Artificial Sequence
  Synthetic
aaaggagacgcucuugauuagcc

SEQ ID NO: 531505 - RNA, 24 nt, Artificial Sequence
  Synthetic
aaaaggagacgcucuugauuagcc

SEQ ID NO: 531506 - RNA, 18 nt, Artificial Sequence
  Synthetic
ucaaauuuuauauuagcc

SEQ ID NO: 531507 - RNA, 19 nt, Artificial Sequence
  Synthetic
aucaaauuuuauauuagcc

SEQ ID NO: 531508 - RNA, 20 nt, Artificial Sequence
  Synthetic
caucaaauuuuauauuagcc

SEQ ID NO: 531509 - RNA, 21 nt, Artificial Sequence
  Synthetic
ucaucaaauuuuauauuagcc

SEQ ID NO: 531510 - RNA, 22 nt, Artificial Sequence
  Synthetic
uucaucaaauuuuauauuagcc

SEQ ID NO: 531511 - RNA, 23 nt, Artificial Sequence
  Synthetic
uuucaucaaauuuuauauuagcc

SEQ ID NO: 531512 - RNA, 24 nt, Artificial Sequence
  Synthetic
cuuucaucaaauuuuauauuagcc

SEQ ID NO: 531513 - RNA, 18 nt, Artificial Sequence
  Synthetic
cuauaacuuugguuagcc

SEQ ID NO: 531514 - RNA, 19 nt, Artificial Sequence
  Synthetic
ucuauaacuuugguuagcc

SEQ ID NO: 531515 - RNA, 20 nt, Artificial Sequence
  Synthetic
uucuauaacuuugguuagcc

SEQ ID NO: 531516 - RNA, 21 nt, Artificial Sequence
  Synthetic
cuucuauaacuuugguuagcc

SEQ ID NO: 531517 - RNA, 22 nt, Artificial Sequence
  Synthetic
ccuucuauaacuuugguuagcc

SEQ ID NO: 531518 - RNA, 23 nt, Artificial Sequence
  Synthetic
uccuucuauaacuuugguuagcc

SEQ ID NO: 531519 - RNA, 24 nt, Artificial Sequence
  Synthetic
auccuucuauaacuuugguuagcc

SEQ ID NO: 531520 - RNA, 18 nt, Artificial Sequence
  Synthetic
uuuugcaucacaaacgcc

SEQ ID NO: 531521 - RNA, 19 nt, Artificial Sequence
  Synthetic
uuuuugcaucacaaacgcc

SEQ ID NO: 531522 - RNA, 20 nt, Artificial Sequence
  Synthetic
uuuuuugcaucacaaacgcc

SEQ ID NO: 531523 - RNA, 21 nt, Artificial Sequence
  Synthetic
uuuuuuugcaucacaaacgcc

SEQ ID NO: 531524 - RNA, 22 nt, Artificial Sequence
  Synthetic
cuuuuuuugcaucacaaacgcc

SEQ ID NO: 531525 - RNA, 23 nt, Artificial Sequence
  Synthetic
acuuuuuuugcaucacaaacgcc

SEQ ID NO: 531526 - RNA, 24 nt, Artificial Sequence
  Synthetic
cacuuuuuuugcaucacaaacgcc

SEQ ID NO: 531527 - RNA, 18 nt, Artificial Sequence
  Synthetic
caaaaaguguacuacgcc

SEQ ID NO: 531528 - RNA, 19 nt, Artificial Sequence
  Synthetic
ccaaaaaguguacuacgcc

SEQ ID NO: 531529 - RNA, 20 nt, Artificial Sequence
  Synthetic
gccaaaaaguguacuacgcc

SEQ ID NO: 531530 - RNA, 21 nt, Artificial Sequence
  Synthetic
ggccaaaaaguguacuacgcc

SEQ ID NO: 531531 - RNA, 22 nt, Artificial Sequence
  Synthetic
gggccaaaaaguguacuacgcc

SEQ ID NO: 531532 - RNA, 23 nt, Artificial Sequence
  Synthetic
ugggccaaaaaguguacuacgcc

SEQ ID NO: 531533 - RNA, 24 nt, Artificial Sequence
  Synthetic
augggccaaaaaguguacuacgcc

SEQ ID NO: 531534 - RNA, 18 nt, Artificial Sequence
  Synthetic
acacucucucuccccgcc

SEQ ID NO: 531535 - RNA, 19 nt, Artificial Sequence
  Synthetic
gacacucucucuccccgcc

SEQ ID NO: 531536 - RNA, 20 nt, Artificial Sequence
  Synthetic
agacacucucucuccccgcc

SEQ ID NO: 531537 - RNA, 21 nt, Artificial Sequence
  Synthetic
cagacacucucucuccccgcc

SEQ ID NO: 531538 - RNA, 22 nt, Artificial Sequence
  Synthetic
ucagacacucucucuccccgcc

SEQ ID NO: 531539 - RNA, 23 nt, Artificial Sequence
  Synthetic
aucagacacucucucuccccgcc

SEQ ID NO: 531540 - RNA, 24 nt, Artificial Sequence
  Synthetic
aaucagacacucucucuccccgcc

SEQ ID NO: 531541 - RNA, 18 nt, Artificial Sequence
  Synthetic
ucaaaugaugugcccgcc

SEQ ID NO: 531542 - RNA, 19 nt, Artificial Sequence
  Synthetic
cucaaaugaugugcccgcc

SEQ ID NO: 531543 - RNA, 20 nt, Artificial Sequence
  Synthetic
ccucaaaugaugugcccgcc

SEQ ID NO: 531544 - RNA, 21 nt, Artificial Sequence
  Synthetic
accucaaaugaugugcccgcc

SEQ ID NO: 531545 - RNA, 22 nt, Artificial Sequence
  Synthetic
gaccucaaaugaugugcccgcc

SEQ ID NO: 531546 - RNA, 23 nt, Artificial Sequence
  Synthetic
ugaccucaaaugaugugcccgcc

SEQ ID NO: 531547 - RNA, 24 nt, Artificial Sequence
  Synthetic
cugaccucaaaugaugugcccgcc

SEQ ID NO: 531548 - RNA, 18 nt, Artificial Sequence
  Synthetic
agagcuuagaaugccgcc

SEQ ID NO: 531549 - RNA, 19 nt, Artificial Sequence
  Synthetic
gagagcuuagaaugccgcc

SEQ ID NO: 531550 - RNA, 20 nt, Artificial Sequence
  Synthetic
ugagagcuuagaaugccgcc

SEQ ID NO: 531551 - RNA, 21 nt, Artificial Sequence
  Synthetic
augagagcuuagaaugccgcc

SEQ ID NO: 531552 - RNA, 22 nt, Artificial Sequence
  Synthetic
aaugagagcuuagaaugccgcc

SEQ ID NO: 531553 - RNA, 23 nt, Artificial Sequence
  Synthetic
caaugagagcuuagaaugccgcc

SEQ ID NO: 531554 - RNA, 24 nt, Artificial Sequence
  Synthetic
ccaaugagagcuuagaaugccgcc

SEQ ID NO: 531555 - RNA, 18 nt, Artificial Sequence
  Synthetic
agguuagggcucagcgcc

SEQ ID NO: 531556 - RNA, 19 nt, Artificial Sequence
  Synthetic
gagguuagggcucagcgcc

SEQ ID NO: 531557 - RNA, 20 nt, Artificial Sequence
  Synthetic
ugagguuagggcucagcgcc

SEQ ID NO: 531558 - RNA, 21 nt, Artificial Sequence
  Synthetic
uugagguuagggcucagcgcc

SEQ ID NO: 531559 - RNA, 22 nt, Artificial Sequence
  Synthetic
cuugagguuagggcucagcgcc

SEQ ID NO: 531560 - RNA, 23 nt, Artificial Sequence
  Synthetic
acuugagguuagggcucagcgcc

SEQ ID NO: 531561 - RNA, 24 nt, Artificial Sequence
  Synthetic
uacuugagguuagggcucagcgcc

SEQ ID NO: 531562 - RNA, 18 nt, Artificial Sequence
  Synthetic
gagccuuuuuauuucgcc

SEQ ID NO: 531563 - RNA, 19 nt, Artificial Sequence
  Synthetic
agagccuuuuuauuucgcc

SEQ ID NO: 531564 - RNA, 20 nt, Artificial Sequence
  Synthetic
cagagccuuuuuauuucgcc

SEQ ID NO: 531565 - RNA, 21 nt, Artificial Sequence
  Synthetic
acagagccuuuuuauuucgcc

SEQ ID NO: 531566 - RNA, 22 nt, Artificial Sequence
  Synthetic
aacagagccuuuuuauuucgcc

SEQ ID NO: 531567 - RNA, 23 nt, Artificial Sequence
  Synthetic
caacagagccuuuuuauuucgcc

SEQ ID NO: 531568 - RNA, 24 nt, Artificial Sequence
  Synthetic
acaacagagccuuuuuauuucgcc

SEQ ID NO: 531569 - RNA, 18 nt, Artificial Sequence
  Synthetic
uuauaguucauuuucgcc

SEQ ID NO: 531570 - RNA, 19 nt, Artificial Sequence
  Synthetic
auuauaguucauuuucgcc

SEQ ID NO: 531571 - RNA, 20 nt, Artificial Sequence
  Synthetic
gauuauaguucauuuucgcc

SEQ ID NO: 531572 - RNA, 21 nt, Artificial Sequence
  Synthetic
agauuauaguucauuuucgcc

SEQ ID NO: 531573 - RNA, 22 nt, Artificial Sequence
  Synthetic
gagauuauaguucauuuucgcc

SEQ ID NO: 531574 - RNA, 23 nt, Artificial Sequence
  Synthetic
ugagauuauaguucauuuucgcc

SEQ ID NO: 531575 - RNA, 24 nt, Artificial Sequence
  Synthetic
gugagauuauaguucauuuucgcc

SEQ ID NO: 531576 - RNA, 18 nt, Artificial Sequence
  Synthetic
aaaacaaguacaaaggcc

SEQ ID NO: 531577 - RNA, 19 nt, Artificial Sequence
  Synthetic
gaaaacaaguacaaaggcc

SEQ ID NO: 531578 - RNA, 20 nt, Artificial Sequence
  Synthetic
agaaaacaaguacaaaggcc

SEQ ID NO: 531579 - RNA, 21 nt, Artificial Sequence
  Synthetic
gagaaaacaaguacaaaggcc

SEQ ID NO: 531580 - RNA, 22 nt, Artificial Sequence
  Synthetic
agagaaaacaaguacaaaggcc

SEQ ID NO: 531581 - RNA, 23 nt, Artificial Sequence
  Synthetic
cagagaaaacaaguacaaaggcc

SEQ ID NO: 531582 - RNA, 24 nt, Artificial Sequence
  Synthetic
gcagagaaaacaaguacaaaggcc

SEQ ID NO: 531583 - RNA, 18 nt, Artificial Sequence
  Synthetic
acagcaagugcaaaggcc

SEQ ID NO: 531584 - RNA, 19 nt, Artificial Sequence
  Synthetic
gacagcaagugcaaaggcc

SEQ ID NO: 531585 - RNA, 20 nt, Artificial Sequence
  Synthetic
agacagcaagugcaaaggcc

SEQ ID NO: 531586 - RNA, 21 nt, Artificial Sequence
  Synthetic
gagacagcaagugcaaaggcc

SEQ ID NO: 531587 - RNA, 22 nt, Artificial Sequence
  Synthetic
agagacagcaagugcaaaggcc

SEQ ID NO: 531588 - RNA, 23 nt, Artificial Sequence
  Synthetic
cagagacagcaagugcaaaggcc

SEQ ID NO: 531589 - RNA, 24 nt, Artificial Sequence
  Synthetic
gcagagacagcaagugcaaaggcc

SEQ ID NO: 531590 - RNA, 18 nt, Artificial Sequence
  Synthetic
gaaacacgugcaaaggcc

SEQ ID NO: 531591 - RNA, 19 nt, Artificial Sequence
  Synthetic
agaaacacgugcaaaggcc

SEQ ID NO: 531592 - RNA, 20 nt, Artificial Sequence
  Synthetic
gagaaacacgugcaaaggcc

SEQ ID NO: 531593 - RNA, 21 nt, Artificial Sequence
  Synthetic
agagaaacacgugcaaaggcc

SEQ ID NO: 531594 - RNA, 22 nt, Artificial Sequence
  Synthetic
cagagaaacacgugcaaaggcc

SEQ ID NO: 531595 - RNA, 23 nt, Artificial Sequence
  Synthetic
acagagaaacacgugcaaaggcc

SEQ ID NO: 531596 - RNA, 24 nt, Artificial Sequence
  Synthetic
aacagagaaacacgugcaaaggcc

SEQ ID NO: 531597 - RNA, 18 nt, Artificial Sequence
  Synthetic
gccauuuccauaaaggcc

SEQ ID NO: 531598 - RNA, 19 nt, Artificial Sequence
  Synthetic
ugccauuuccauaaaggcc

SEQ ID NO: 531599 - RNA, 20 nt, Artificial Sequence
  Synthetic
augccauuuccauaaaggcc

SEQ ID NO: 531600 - RNA, 21 nt, Artificial Sequence
  Synthetic
aaugccauuuccauaaaggcc

SEQ ID NO: 531601 - RNA, 22 nt, Artificial Sequence
  Synthetic
uaaugccauuuccauaaaggcc

SEQ ID NO: 531602 - RNA, 23 nt, Artificial Sequence
  Synthetic
auaaugccauuuccauaaaggcc

SEQ ID NO: 531603 - RNA, 24 nt, Artificial Sequence
  Synthetic
aauaaugccauuuccauaaaggcc

SEQ ID NO: 531604 - RNA, 18 nt, Artificial Sequence
  Synthetic
cuugagaaugggaaggcc

SEQ ID NO: 531605 - RNA, 19 nt, Artificial Sequence
  Synthetic
ucuugagaaugggaaggcc

SEQ ID NO: 531606 - RNA, 20 nt, Artificial Sequence
  Synthetic
cucuugagaaugggaaggcc

SEQ ID NO: 531607 - RNA, 21 nt, Artificial Sequence
  Synthetic
gcucuugagaaugggaaggcc

SEQ ID NO: 531608 - RNA, 22 nt, Artificial Sequence
  Synthetic
ggcucuugagaaugggaaggcc

SEQ ID NO: 531609 - RNA, 23 nt, Artificial Sequence
  Synthetic
aggcucuugagaaugggaaggcc

SEQ ID NO: 531610 - RNA, 24 nt, Artificial Sequence
  Synthetic
caggcucuugagaaugggaaggcc

SEQ ID NO: 531611 - RNA, 18 nt, Artificial Sequence
  Synthetic
ugagguccuuggaaggcc

SEQ ID NO: 531612 - RNA, 19 nt, Artificial Sequence
  Synthetic
uugagguccuuggaaggcc

SEQ ID NO: 531613 - RNA, 20 nt, Artificial Sequence
  Synthetic
cuugagguccuuggaaggcc

SEQ ID NO: 531614 - RNA, 21 nt, Artificial Sequence
  Synthetic
ucuugagguccuuggaaggcc

SEQ ID NO: 531615 - RNA, 22 nt, Artificial Sequence
  Synthetic
aucuugagguccuuggaaggcc

SEQ ID NO: 531616 - RNA, 23 nt, Artificial Sequence
  Synthetic
caucuugagguccuuggaaggcc

SEQ ID NO: 531617 - RNA, 24 nt, Artificial Sequence
  Synthetic
acaucuugagguccuuggaaggcc

SEQ ID NO: 531618 - RNA, 18 nt, Artificial Sequence
  Synthetic
gacaucauguugaaggcc

SEQ ID NO: 531619 - RNA, 19 nt, Artificial Sequence
  Synthetic
ggacaucauguugaaggcc

SEQ ID NO: 531620 - RNA, 20 nt, Artificial Sequence
  Synthetic
aggacaucauguugaaggcc

SEQ ID NO: 531621 - RNA, 21 nt, Artificial Sequence
  Synthetic
aaggacaucauguugaaggcc

SEQ ID NO: 531622 - RNA, 22 nt, Artificial Sequence
  Synthetic
uaaggacaucauguugaaggcc

SEQ ID NO: 531623 - RNA, 23 nt, Artificial Sequence
  Synthetic
auaaggacaucauguugaaggcc

SEQ ID NO: 531624 - RNA, 24 nt, Artificial Sequence
  Synthetic
aauaaggacaucauguugaaggcc

SEQ ID NO: 531625 - RNA, 18 nt, Artificial Sequence
  Synthetic
augacacauuuuaaggcc

SEQ ID NO: 531626 - RNA, 19 nt, Artificial Sequence
  Synthetic
aaugacacauuuuaaggcc

SEQ ID NO: 531627 - RNA, 20 nt, Artificial Sequence
  Synthetic
aaaugacacauuuuaaggcc

SEQ ID NO: 531628 - RNA, 21 nt, Artificial Sequence
  Synthetic
gaaaugacacauuuuaaggcc

SEQ ID NO: 531629 - RNA, 22 nt, Artificial Sequence
  Synthetic
agaaaugacacauuuuaaggcc

SEQ ID NO: 531630 - RNA, 23 nt, Artificial Sequence
  Synthetic
cagaaaugacacauuuuaaggcc

SEQ ID NO: 531631 - RNA, 24 nt, Artificial Sequence
  Synthetic
acagaaaugacacauuuuaaggcc

SEQ ID NO: 531632 - RNA, 18 nt, Artificial Sequence
  Synthetic
guuaucaaacuacaggcc

SEQ ID NO: 531633 - RNA, 19 nt, Artificial Sequence
  Synthetic
aguuaucaaacuacaggcc

SEQ ID NO: 531634 - RNA, 20 nt, Artificial Sequence
  Synthetic
aaguuaucaaacuacaggcc

SEQ ID NO: 531635 - RNA, 21 nt, Artificial Sequence
  Synthetic
caaguuaucaaacuacaggcc

SEQ ID NO: 531636 - RNA, 22 nt, Artificial Sequence
  Synthetic
ccaaguuaucaaacuacaggcc

SEQ ID NO: 531637 - RNA, 23 nt, Artificial Sequence
  Synthetic
uccaaguuaucaaacuacaggcc

SEQ ID NO: 531638 - RNA, 24 nt, Artificial Sequence
  Synthetic
guccaaguuaucaaacuacaggcc

SEQ ID NO: 531639 - RNA, 18 nt, Artificial Sequence
  Synthetic
gcgccacugcaccaggcc

SEQ ID NO: 531640 - RNA, 19 nt, Artificial Sequence
  Synthetic
ugcgccacugcaccaggcc

SEQ ID NO: 531641 - RNA, 20 nt, Artificial Sequence
  Synthetic
cugcgccacugcaccaggcc

SEQ ID NO: 531642 - RNA, 21 nt, Artificial Sequence
  Synthetic
gcugcgccacugcaccaggcc

SEQ ID NO: 531643 - RNA, 22 nt, Artificial Sequence
  Synthetic
ggcugcgccacugcaccaggcc

SEQ ID NO: 531644 - RNA, 23 nt, Artificial Sequence
  Synthetic
aggcugcgccacugcaccaggcc

SEQ ID NO: 531645 - RNA, 24 nt, Artificial Sequence
  Synthetic
caggcugcgccacugcaccaggcc

SEQ ID NO: 531646 - RNA, 18 nt, Artificial Sequence
  Synthetic
ucuuuaugcaagcaggcc

SEQ ID NO: 531647 - RNA, 19 nt, Artificial Sequence
  Synthetic
uucuuuaugcaagcaggcc

SEQ ID NO: 531648 - RNA, 20 nt, Artificial Sequence
  Synthetic
cuucuuuaugcaagcaggcc

SEQ ID NO: 531649 - RNA, 21 nt, Artificial Sequence
  Synthetic
acuucuuuaugcaagcaggcc

SEQ ID NO: 531650 - RNA, 22 nt, Artificial Sequence
  Synthetic
uacuucuuuaugcaagcaggcc

SEQ ID NO: 531651 - RNA, 23 nt, Artificial Sequence
  Synthetic
auacuucuuuaugcaagcaggcc

SEQ ID NO: 531652 - RNA, 24 nt, Artificial Sequence
  Synthetic
uauacuucuuuaugcaagcaggcc

SEQ ID NO: 531653 - RNA, 18 nt, Artificial Sequence
  Synthetic
uugcuuuuagggcaggcc

SEQ ID NO: 531654 - RNA, 19 nt, Artificial Sequence
  Synthetic
cuugcuuuuagggcaggcc

SEQ ID NO: 531655 - RNA, 20 nt, Artificial Sequence
  Synthetic
ucuugcuuuuagggcaggcc

SEQ ID NO: 531656 - RNA, 21 nt, Artificial Sequence
  Synthetic
uucuugcuuuuagggcaggcc

SEQ ID NO: 531657 - RNA, 22 nt, Artificial Sequence
  Synthetic
auucuugcuuuuagggcaggcc

SEQ ID NO: 531658 - RNA, 23 nt, Artificial Sequence
  Synthetic
cauucuugcuuuuagggcaggcc

SEQ ID NO: 531659 - RNA, 24 nt, Artificial Sequence
  Synthetic
ccauucuugcuuuuagggcaggcc

SEQ ID NO: 531660 - RNA, 18 nt, Artificial Sequence
  Synthetic
cacagcuauucucaggcc

SEQ ID NO: 531661 - RNA, 19 nt, Artificial Sequence
  Synthetic
acacagcuauucucaggcc

SEQ ID NO: 531662 - RNA, 20 nt, Artificial Sequence
  Synthetic
gacacagcuauucucaggcc

SEQ ID NO: 531663 - RNA, 21 nt, Artificial Sequence
  Synthetic
agacacagcuauucucaggcc

SEQ ID NO: 531664 - RNA, 22 nt, Artificial Sequence
  Synthetic
gagacacagcuauucucaggcc

SEQ ID NO: 531665 - RNA, 23 nt, Artificial Sequence
  Synthetic
ugagacacagcuauucucaggcc

SEQ ID NO: 531666 - RNA, 24 nt, Artificial Sequence
  Synthetic
cugagacacagcuauucucaggcc

SEQ ID NO: 531667 - RNA, 18 nt, Artificial Sequence
  Synthetic
cagcaguuacgucaggcc

SEQ ID NO: 531668 - RNA, 19 nt, Artificial Sequence
  Synthetic
gcagcaguuacgucaggcc

SEQ ID NO: 531669 - RNA, 20 nt, Artificial Sequence
  Synthetic
ugcagcaguuacgucaggcc

SEQ ID NO: 531670 - RNA, 21 nt, Artificial Sequence
  Synthetic
augcagcaguuacgucaggcc

SEQ ID NO: 531671 - RNA, 22 nt, Artificial Sequence
  Synthetic
aaugcagcaguuacgucaggcc

SEQ ID NO: 531672 - RNA, 23 nt, Artificial Sequence
  Synthetic
caaugcagcaguuacgucaggcc

SEQ ID NO: 531673 - RNA, 24 nt, Artificial Sequence
  Synthetic
acaaugcagcaguuacgucaggcc

SEQ ID NO: 531674 - RNA, 18 nt, Artificial Sequence
  Synthetic
cuacuaacuaaagaggcc

SEQ ID NO: 531675 - RNA, 19 nt, Artificial Sequence
  Synthetic
gcuacuaacuaaagaggcc

SEQ ID NO: 531676 - RNA, 20 nt, Artificial Sequence
  Synthetic
agcuacuaacuaaagaggcc

SEQ ID NO: 531677 - RNA, 21 nt, Artificial Sequence
  Synthetic
cagcuacuaacuaaagaggcc

SEQ ID NO: 531678 - RNA, 22 nt, Artificial Sequence
  Synthetic
ucagcuacuaacuaaagaggcc

SEQ ID NO: 531679 - RNA, 23 nt, Artificial Sequence
  Synthetic
aucagcuacuaacuaaagaggcc

SEQ ID NO: 531680 - RNA, 24 nt, Artificial Sequence
  Synthetic
caucagcuacuaacuaaagaggcc

SEQ ID NO: 531681 - RNA, 18 nt, Artificial Sequence
  Synthetic
gaggacuuuuaagaggcc

SEQ ID NO: 531682 - RNA, 19 nt, Artificial Sequence
  Synthetic
agaggacuuuuaagaggcc

SEQ ID NO: 531683 - RNA, 20 nt, Artificial Sequence
  Synthetic
uagaggacuuuuaagaggcc

SEQ ID NO: 531684 - RNA, 21 nt, Artificial Sequence
  Synthetic
cuagaggacuuuuaagaggcc

SEQ ID NO: 531685 - RNA, 22 nt, Artificial Sequence
  Synthetic
ucuagaggacuuuuaagaggcc

SEQ ID NO: 531686 - RNA, 23 nt, Artificial Sequence
  Synthetic
uucuagaggacuuuuaagaggcc

SEQ ID NO: 531687 - RNA, 24 nt, Artificial Sequence
  Synthetic
uuucuagaggacuuuuaagaggcc

SEQ ID NO: 531688 - RNA, 18 nt, Artificial Sequence
  Synthetic
aucauaggaccagaggcc

SEQ ID NO: 531689 - RNA, 19 nt, Artificial Sequence
  Synthetic
caucauaggaccagaggcc

SEQ ID NO: 531690 - RNA, 20 nt, Artificial Sequence
  Synthetic
ccaucauaggaccagaggcc

SEQ ID NO: 531691 - RNA, 21 nt, Artificial Sequence
  Synthetic
cccaucauaggaccagaggcc

SEQ ID NO: 531692 - RNA, 22 nt, Artificial Sequence
  Synthetic
ucccaucauaggaccagaggcc

SEQ ID NO: 531693 - RNA, 23 nt, Artificial Sequence
  Synthetic
cucccaucauaggaccagaggcc

SEQ ID NO: 531694 - RNA, 24 nt, Artificial Sequence
  Synthetic
ccucccaucauaggaccagaggcc

SEQ ID NO: 531695 - RNA, 21 nt, Artificial Sequence
  Synthetic
aucccagcacuuugggaggcc

SEQ ID NO: 531696 - RNA, 22 nt, Artificial Sequence
  Synthetic
aaucccagcacuuugggaggcc

SEQ ID NO: 531697 - RNA, 23 nt, Artificial Sequence
  Synthetic
uaaucccagcacuuugggaggcc

SEQ ID NO: 531698 - RNA, 24 nt, Artificial Sequence
  Synthetic
guaaucccagcacuuugggaggcc

SEQ ID NO: 531699 - RNA, 18 nt, Artificial Sequence
  Synthetic
cuagcacuuugggaggcc

SEQ ID NO: 531700 - RNA, 19 nt, Artificial Sequence
  Synthetic
ccuagcacuuugggaggcc

SEQ ID NO: 531701 - RNA, 20 nt, Artificial Sequence
  Synthetic
uccuagcacuuugggaggcc

SEQ ID NO: 531702 - RNA, 21 nt, Artificial Sequence
  Synthetic
auccuagcacuuugggaggcc

SEQ ID NO: 531703 - RNA, 22 nt, Artificial Sequence
  Synthetic
aauccuagcacuuugggaggcc

SEQ ID NO: 531704 - RNA, 23 nt, Artificial Sequence
  Synthetic
uaauccuagcacuuugggaggcc

SEQ ID NO: 531705 - RNA, 24 nt, Artificial Sequence
  Synthetic
auaauccuagcacuuugggaggcc

SEQ ID NO: 531706 - RNA, 18 nt, Artificial Sequence
  Synthetic
cuagugcuuugggaggcc

SEQ ID NO: 531707 - RNA, 19 nt, Artificial Sequence
  Synthetic
ccuagugcuuugggaggcc

SEQ ID NO: 531708 - RNA, 20 nt, Artificial Sequence
  Synthetic
uccuagugcuuugggaggcc

SEQ ID NO: 531709 - RNA, 21 nt, Artificial Sequence
  Synthetic
auccuagugcuuugggaggcc

SEQ ID NO: 531710 - RNA, 22 nt, Artificial Sequence
  Synthetic
aauccuagugcuuugggaggcc

SEQ ID NO: 531711 - RNA, 23 nt, Artificial Sequence
  Synthetic
uaauccuagugcuuugggaggcc

SEQ ID NO: 531712 - RNA, 24 nt, Artificial Sequence
  Synthetic
guaauccuagugcuuugggaggcc

SEQ ID NO: 531713 - RNA, 18 nt, Artificial Sequence
  Synthetic
acucaagaaauugaggcc

SEQ ID NO: 531714 - RNA, 19 nt, Artificial Sequence
  Synthetic
aacucaagaaauugaggcc

SEQ ID NO: 531715 - RNA, 20 nt, Artificial Sequence
  Synthetic
aaacucaagaaauugaggcc

SEQ ID NO: 531716 - RNA, 21 nt, Artificial Sequence
  Synthetic
uaaacucaagaaauugaggcc

SEQ ID NO: 531717 - RNA, 22 nt, Artificial Sequence
  Synthetic
uuaaacucaagaaauugaggcc

SEQ ID NO: 531718 - RNA, 23 nt, Artificial Sequence
  Synthetic
guuaaacucaagaaauugaggcc

SEQ ID NO: 531719 - RNA, 24 nt, Artificial Sequence
  Synthetic
uguuaaacucaagaaauugaggcc

SEQ ID NO: 531720 - RNA, 18 nt, Artificial Sequence
  Synthetic
uccacagaucucuaggcc

SEQ ID NO: 531721 - RNA, 19 nt, Artificial Sequence
  Synthetic
uuccacagaucucuaggcc

SEQ ID NO: 531722 - RNA, 20 nt, Artificial Sequence
  Synthetic
uuuccacagaucucuaggcc

SEQ ID NO: 531723 - RNA, 21 nt, Artificial Sequence
  Synthetic
auuuccacagaucucuaggcc

SEQ ID NO: 531724 - RNA, 22 nt, Artificial Sequence
  Synthetic
aauuuccacagaucucuaggcc

SEQ ID NO: 531725 - RNA, 23 nt, Artificial Sequence
  Synthetic
aaauuuccacagaucucuaggcc

SEQ ID NO: 531726 - RNA, 24 nt, Artificial Sequence
  Synthetic
caaauuuccacagaucucuaggcc

SEQ ID NO: 531727 - RNA, 18 nt, Artificial Sequence
  Synthetic
uugauauuuauuuaggcc

SEQ ID NO: 531728 - RNA, 19 nt, Artificial Sequence
  Synthetic
cuugauauuuauuuaggcc

SEQ ID NO: 531729 - RNA, 20 nt, Artificial Sequence
  Synthetic
acuugauauuuauuuaggcc

SEQ ID NO: 531730 - RNA, 21 nt, Artificial Sequence
  Synthetic
aacuugauauuuauuuaggcc

SEQ ID NO: 531731 - RNA, 22 nt, Artificial Sequence
  Synthetic
uaacuugauauuuauuuaggcc

SEQ ID NO: 531732 - RNA, 23 nt, Artificial Sequence
  Synthetic
auaacuugauauuuauuuaggcc

SEQ ID NO: 531733 - RNA, 24 nt, Artificial Sequence
  Synthetic
aauaacuugauauuuauuuaggcc

SEQ ID NO: 531734 - RNA, 18 nt, Artificial Sequence
  Synthetic
cgaacagaaccgacggcc

SEQ ID NO: 531735 - RNA, 19 nt, Artificial Sequence
  Synthetic
ccgaacagaaccgacggcc

SEQ ID NO: 531736 - RNA, 20 nt, Artificial Sequence
  Synthetic
cccgaacagaaccgacggcc

SEQ ID NO: 531737 - RNA, 21 nt, Artificial Sequence
  Synthetic
acccgaacagaaccgacggcc

SEQ ID NO: 531738 - RNA, 22 nt, Artificial Sequence
  Synthetic
gacccgaacagaaccgacggcc

SEQ ID NO: 531739 - RNA, 23 nt, Artificial Sequence
  Synthetic
agacccgaacagaaccgacggcc

SEQ ID NO: 531740 - RNA, 24 nt, Artificial Sequence
  Synthetic
uagacccgaacagaaccgacggcc

SEQ ID NO: 531741 - RNA, 18 nt, Artificial Sequence
  Synthetic
guagaagaaacaccggcc

SEQ ID NO: 531742 - RNA, 19 nt, Artificial Sequence
  Synthetic
aguagaagaaacaccggcc

SEQ ID NO: 531743 - RNA, 20 nt, Artificial Sequence
  Synthetic
gaguagaagaaacaccggcc

SEQ ID NO: 531744 - RNA, 21 nt, Artificial Sequence
  Synthetic
agaguagaagaaacaccggcc

SEQ ID NO: 531745 - RNA, 22 nt, Artificial Sequence
  Synthetic
uagaguagaagaaacaccggcc

SEQ ID NO: 531746 - RNA, 23 nt, Artificial Sequence
  Synthetic
auagaguagaagaaacaccggcc

SEQ ID NO: 531747 - RNA, 24 nt, Artificial Sequence
  Synthetic
cauagaguagaagaaacaccggcc

SEQ ID NO: 531748 - RNA, 18 nt, Artificial Sequence
  Synthetic
aaacauguguuagcggcc

SEQ ID NO: 531749 - RNA, 19 nt, Artificial Sequence
  Synthetic
aaaacauguguuagcggcc

SEQ ID NO: 531750 - RNA, 20 nt, Artificial Sequence
  Synthetic
aaaaacauguguuagcggcc

SEQ ID NO: 531751 - RNA, 21 nt, Artificial Sequence
  Synthetic
uaaaaacauguguuagcggcc

SEQ ID NO: 531752 - RNA, 22 nt, Artificial Sequence
  Synthetic
uuaaaaacauguguuagcggcc

SEQ ID NO: 531753 - RNA, 23 nt, Artificial Sequence
  Synthetic
uuuaaaaacauguguuagcggcc

SEQ ID NO: 531754 - RNA, 24 nt, Artificial Sequence
  Synthetic
uuuuaaaaacauguguuagcggcc

SEQ ID NO: 531755 - RNA, 18 nt, Artificial Sequence
  Synthetic
ugagucucucaaagggcc

SEQ ID NO: 531756 - RNA, 19 nt, Artificial Sequence
  Synthetic
uugagucucucaaagggcc

SEQ ID NO: 531757 - RNA, 20 nt, Artificial Sequence
  Synthetic
uuugagucucucaaagggcc

SEQ ID NO: 531758 - RNA, 21 nt, Artificial Sequence
  Synthetic
uuuugagucucucaaagggcc

SEQ ID NO: 531759 - RNA, 22 nt, Artificial Sequence
  Synthetic
cuuuugagucucucaaagggcc

SEQ ID NO: 531760 - RNA, 23 nt, Artificial Sequence
  Synthetic
ucuuuugagucucucaaagggcc

SEQ ID NO: 531761 - RNA, 24 nt, Artificial Sequence
  Synthetic
cucuuuugagucucucaaagggcc

SEQ ID NO: 531762 - RNA, 18 nt, Artificial Sequence
  Synthetic
cuguucaaagacagggcc

SEQ ID NO: 531763 - RNA, 19 nt, Artificial Sequence
  Synthetic
ccuguucaaagacagggcc

SEQ ID NO: 531764 - RNA, 20 nt, Artificial Sequence
  Synthetic
gccuguucaaagacagggcc

SEQ ID NO: 531765 - RNA, 21 nt, Artificial Sequence
  Synthetic
agccuguucaaagacagggcc

SEQ ID NO: 531766 - RNA, 22 nt, Artificial Sequence
  Synthetic
cagccuguucaaagacagggcc

SEQ ID NO: 531767 - RNA, 23 nt, Artificial Sequence
  Synthetic
acagccuguucaaagacagggcc

SEQ ID NO: 531768 - RNA, 24 nt, Artificial Sequence
  Synthetic
cacagccuguucaaagacagggcc

SEQ ID NO: 531769 - RNA, 18 nt, Artificial Sequence
  Synthetic
caaaaccaauacagggcc

SEQ ID NO: 531770 - RNA, 19 nt, Artificial Sequence
  Synthetic
gcaaaaccaauacagggcc

SEQ ID NO: 531771 - RNA, 20 nt, Artificial Sequence
  Synthetic
agcaaaaccaauacagggcc

SEQ ID NO: 531772 - RNA, 21 nt, Artificial Sequence
  Synthetic
gagcaaaaccaauacagggcc

SEQ ID NO: 531773 - RNA, 22 nt, Artificial Sequence
  Synthetic
ugagcaaaaccaauacagggcc

SEQ ID NO: 531774 - RNA, 23 nt, Artificial Sequence
  Synthetic
uugagcaaaaccaauacagggcc

SEQ ID NO: 531775 - RNA, 24 nt, Artificial Sequence
  Synthetic
auugagcaaaaccaauacagggcc

SEQ ID NO: 531776 - RNA, 18 nt, Artificial Sequence
  Synthetic
uuguggaagcagagggcc

SEQ ID NO: 531777 - RNA, 19 nt, Artificial Sequence
  Synthetic
uuuguggaagcagagggcc

SEQ ID NO: 531778 - RNA, 20 nt, Artificial Sequence
  Synthetic
auuuguggaagcagagggcc

SEQ ID NO: 531779 - RNA, 21 nt, Artificial Sequence
  Synthetic
aauuuguggaagcagagggcc

SEQ ID NO: 531780 - RNA, 22 nt, Artificial Sequence
  Synthetic
gaauuuguggaagcagagggcc

SEQ ID NO: 531781 - RNA, 23 nt, Artificial Sequence
  Synthetic
ugaauuuguggaagcagagggcc

SEQ ID NO: 531782 - RNA, 24 nt, Artificial Sequence
  Synthetic
augaauuuguggaagcagagggcc

SEQ ID NO: 531783 - RNA, 18 nt, Artificial Sequence
  Synthetic
gguuuccugggccgggcc

SEQ ID NO: 531784 - RNA, 19 nt, Artificial Sequence
  Synthetic
ugguuuccugggccgggcc

SEQ ID NO: 531785 - RNA, 20 nt, Artificial Sequence
  Synthetic
augguuuccugggccgggcc

SEQ ID NO: 531786 - RNA, 21 nt, Artificial Sequence
  Synthetic
aaugguuuccugggccgggcc

SEQ ID NO: 531787 - RNA, 22 nt, Artificial Sequence
  Synthetic
aaaugguuuccugggccgggcc

SEQ ID NO: 531788 - RNA, 23 nt, Artificial Sequence
  Synthetic
aaaaugguuuccugggccgggcc

SEQ ID NO: 531789 - RNA, 24 nt, Artificial Sequence
  Synthetic
caaaaugguuuccugggccgggcc

SEQ ID NO: 531790 - RNA, 18 nt, Artificial Sequence
  Synthetic
ggcgauuccucaggggcc

SEQ ID NO: 531791 - RNA, 19 nt, Artificial Sequence
  Synthetic
uggcgauuccucaggggcc

SEQ ID NO: 531792 - RNA, 20 nt, Artificial Sequence
  Synthetic
guggcgauuccucaggggcc

SEQ ID NO: 531793 - RNA, 21 nt, Artificial Sequence
  Synthetic
uguggcgauuccucaggggcc

SEQ ID NO: 531794 - RNA, 22 nt, Artificial Sequence
  Synthetic
guguggcgauuccucaggggcc

SEQ ID NO: 531795 - RNA, 23 nt, Artificial Sequence
  Synthetic
aguguggcgauuccucaggggcc

SEQ ID NO: 531796 - RNA, 24 nt, Artificial Sequence
  Synthetic
caguguggcgauuccucaggggcc

SEQ ID NO: 531797 - RNA, 18 nt, Artificial Sequence
  Synthetic
uaaaccaugggaggggcc

SEQ ID NO: 531798 - RNA, 19 nt, Artificial Sequence
  Synthetic
auaaaccaugggaggggcc

SEQ ID NO: 531799 - RNA, 20 nt, Artificial Sequence
  Synthetic
cauaaaccaugggaggggcc

SEQ ID NO: 531800 - RNA, 21 nt, Artificial Sequence
  Synthetic
ucauaaaccaugggaggggcc

SEQ ID NO: 531801 - RNA, 22 nt, Artificial Sequence
  Synthetic
uucauaaaccaugggaggggcc

SEQ ID NO: 531802 - RNA, 23 nt, Artificial Sequence
  Synthetic
auucauaaaccaugggaggggcc

SEQ ID NO: 531803 - RNA, 24 nt, Artificial Sequence
  Synthetic
gauucauaaaccaugggaggggcc

SEQ ID NO: 531804 - RNA, 23 nt, Artificial Sequence
  Synthetic
ggacaugagauuugggaggggcc

SEQ ID NO: 531805 - RNA, 24 nt, Artificial Sequence
  Synthetic
gggacaugagauuugggaggggcc

SEQ ID NO: 531806 - RNA, 18 nt, Artificial Sequence
  Synthetic
aguggaagaaauggggcc

SEQ ID NO: 531807 - RNA, 19 nt, Artificial Sequence
  Synthetic
gaguggaagaaauggggcc

SEQ ID NO: 531808 - RNA, 20 nt, Artificial Sequence
  Synthetic
agaguggaagaaauggggcc

SEQ ID NO: 531809 - RNA, 21 nt, Artificial Sequence
  Synthetic
gagaguggaagaaauggggcc

SEQ ID NO: 531810 - RNA, 22 nt, Artificial Sequence
  Synthetic
ggagaguggaagaaauggggcc

SEQ ID NO: 531811 - RNA, 23 nt, Artificial Sequence
  Synthetic
aggagaguggaagaaauggggcc

SEQ ID NO: 531812 - RNA, 24 nt, Artificial Sequence
  Synthetic
aaggagaguggaagaaauggggcc

SEQ ID NO: 531813 - RNA, 18 nt, Artificial Sequence
  Synthetic
uaucauccucauggggcc

SEQ ID NO: 531814 - RNA, 19 nt, Artificial Sequence
  Synthetic
auaucauccucauggggcc

SEQ ID NO: 531815 - RNA, 20 nt, Artificial Sequence
  Synthetic
uauaucauccucauggggcc

SEQ ID NO: 531816 - RNA, 21 nt, Artificial Sequence
  Synthetic
auauaucauccucauggggcc

SEQ ID NO: 531817 - RNA, 22 nt, Artificial Sequence
  Synthetic
gauauaucauccucauggggcc

SEQ ID NO: 531818 - RNA, 23 nt, Artificial Sequence
  Synthetic
agauauaucauccucauggggcc

SEQ ID NO: 531819 - RNA, 24 nt, Artificial Sequence
  Synthetic
cagauauaucauccucauggggcc

SEQ ID NO: 531820 - RNA, 18 nt, Artificial Sequence
  Synthetic
cacaagaaaugaugggcc

SEQ ID NO: 531821 - RNA, 19 nt, Artificial Sequence
  Synthetic
acacaagaaaugaugggcc

SEQ ID NO: 531822 - RNA, 20 nt, Artificial Sequence
  Synthetic
uacacaagaaaugaugggcc

SEQ ID NO: 531823 - RNA, 21 nt, Artificial Sequence
  Synthetic
uuacacaagaaaugaugggcc

SEQ ID NO: 531824 - RNA, 22 nt, Artificial Sequence
  Synthetic
guuacacaagaaaugaugggcc

SEQ ID NO: 531825 - RNA, 23 nt, Artificial Sequence
  Synthetic
aguuacacaagaaaugaugggcc

SEQ ID NO: 531826 - RNA, 24 nt, Artificial Sequence
  Synthetic
aaguuacacaagaaaugaugggcc

SEQ ID NO: 531827 - RNA, 18 nt, Artificial Sequence
  Synthetic
ggcagaucucggugggcc

SEQ ID NO: 531828 - RNA, 19 nt, Artificial Sequence
  Synthetic
uggcagaucucggugggcc

SEQ ID NO: 531829 - RNA, 20 nt, Artificial Sequence
  Synthetic
uuggcagaucucggugggcc

SEQ ID NO: 531830 - RNA, 21 nt, Artificial Sequence
  Synthetic
uuuggcagaucucggugggcc

SEQ ID NO: 531831 - RNA, 22 nt, Artificial Sequence
  Synthetic
auuuggcagaucucggugggcc

SEQ ID NO: 531832 - RNA, 23 nt, Artificial Sequence
  Synthetic
aauuuggcagaucucggugggcc

SEQ ID NO: 531833 - RNA, 24 nt, Artificial Sequence
  Synthetic
caauuuggcagaucucggugggcc

SEQ ID NO: 531834 - RNA, 18 nt, Artificial Sequence
  Synthetic
ugcaaggaaaugugggcc

SEQ ID NO: 531835 - RNA, 19 nt, Artificial Sequence
  Synthetic
gugcaaggaaaugugggcc

SEQ ID NO: 531836 - RNA, 20 nt, Artificial Sequence
  Synthetic
cgugcaaggaaaugugggcc

SEQ ID NO: 531837 - RNA, 21 nt, Artificial Sequence
  Synthetic
acgugcaaggaaaugugggcc

SEQ ID NO: 531838 - RNA, 22 nt, Artificial Sequence
  Synthetic
aacgugcaaggaaaugugggcc

SEQ ID NO: 531839 - RNA, 23 nt, Artificial Sequence
  Synthetic
aaacgugcaaggaaaugugggcc

SEQ ID NO: 531840 - RNA, 24 nt, Artificial Sequence
  Synthetic
uaaacgugcaaggaaaugugggcc

SEQ ID NO: 531841 - RNA, 18 nt, Artificial Sequence
  Synthetic
uaucuacaaguuugggcc

SEQ ID NO: 531842 - RNA, 19 nt, Artificial Sequence
  Synthetic
auaucuacaaguuugggcc

SEQ ID NO: 531843 - RNA, 20 nt, Artificial Sequence
  Synthetic
aauaucuacaaguuugggcc

SEQ ID NO: 531844 - RNA, 21 nt, Artificial Sequence
  Synthetic
caauaucuacaaguuugggcc

SEQ ID NO: 531845 - RNA, 22 nt, Artificial Sequence
  Synthetic
gcaauaucuacaaguuugggcc

SEQ ID NO: 531846 - RNA, 23 nt, Artificial Sequence
  Synthetic
ggcaauaucuacaaguuugggcc

SEQ ID NO: 531847 - RNA, 24 nt, Artificial Sequence
  Synthetic
gggcaauaucuacaaguuugggcc

SEQ ID NO: 531848 - RNA, 18 nt, Artificial Sequence
  Synthetic
aaaccaacuuaaauggcc

SEQ ID NO: 531849 - RNA, 19 nt, Artificial Sequence
  Synthetic
aaaaccaacuuaaauggcc

SEQ ID NO: 531850 - RNA, 20 nt, Artificial Sequence
  Synthetic
aaaaaccaacuuaaauggcc

SEQ ID NO: 531851 - RNA, 21 nt, Artificial Sequence
  Synthetic
caaaaaccaacuuaaauggcc

SEQ ID NO: 531852 - RNA, 22 nt, Artificial Sequence
  Synthetic
acaaaaaccaacuuaaauggcc

SEQ ID NO: 531853 - RNA, 23 nt, Artificial Sequence
  Synthetic
uacaaaaaccaacuuaaauggcc

SEQ ID NO: 531854 - RNA, 24 nt, Artificial Sequence
  Synthetic
guacaaaaaccaacuuaaauggcc

SEQ ID NO: 531855 - RNA, 18 nt, Artificial Sequence
  Synthetic
ugucaauguagaauggcc

SEQ ID NO: 531856 - RNA, 19 nt, Artificial Sequence
  Synthetic
augucaauguagaauggcc

SEQ ID NO: 531857 - RNA, 20 nt, Artificial Sequence
  Synthetic
gaugucaauguagaauggcc

SEQ ID NO: 531858 - RNA, 21 nt, Artificial Sequence
  Synthetic
agaugucaauguagaauggcc

SEQ ID NO: 531859 - RNA, 22 nt, Artificial Sequence
  Synthetic
cagaugucaauguagaauggcc

SEQ ID NO: 531860 - RNA, 23 nt, Artificial Sequence
  Synthetic
gcagaugucaauguagaauggcc

SEQ ID NO: 531861 - RNA, 24 nt, Artificial Sequence
  Synthetic
ugcagaugucaauguagaauggcc

SEQ ID NO: 531862 - RNA, 18 nt, Artificial Sequence
  Synthetic
uggaaaauccuaauggcc

SEQ ID NO: 531863 - RNA, 19 nt, Artificial Sequence
  Synthetic
guggaaaauccuaauggcc

SEQ ID NO: 531864 - RNA, 20 nt, Artificial Sequence
  Synthetic
aguggaaaauccuaauggcc

SEQ ID NO: 531865 - RNA, 21 nt, Artificial Sequence
  Synthetic
aaguggaaaauccuaauggcc

SEQ ID NO: 531866 - RNA, 22 nt, Artificial Sequence
  Synthetic
uaaguggaaaauccuaauggcc

SEQ ID NO: 531867 - RNA, 23 nt, Artificial Sequence
  Synthetic
auaaguggaaaauccuaauggcc

SEQ ID NO: 531868 - RNA, 24 nt, Artificial Sequence
  Synthetic
cauaaguggaaaauccuaauggcc

SEQ ID NO: 531869 - RNA, 18 nt, Artificial Sequence
  Synthetic
gagccaccacacauggcc

SEQ ID NO: 531870 - RNA, 19 nt, Artificial Sequence
  Synthetic
ugagccaccacacauggcc

SEQ ID NO: 531871 - RNA, 20 nt, Artificial Sequence
  Synthetic
gugagccaccacacauggcc

SEQ ID NO: 531872 - RNA, 21 nt, Artificial Sequence
  Synthetic
ugugagccaccacacauggcc

SEQ ID NO: 531873 - RNA, 22 nt, Artificial Sequence
  Synthetic
gugugagccaccacacauggcc

SEQ ID NO: 531874 - RNA, 23 nt, Artificial Sequence
  Synthetic
agugugagccaccacacauggcc

SEQ ID NO: 531875 - RNA, 24 nt, Artificial Sequence
  Synthetic
aagugugagccaccacacauggcc

SEQ ID NO: 531876 - RNA, 18 nt, Artificial Sequence
  Synthetic
aggugggcucccauggcc

SEQ ID NO: 531877 - RNA, 19 nt, Artificial Sequence
  Synthetic
gaggugggcucccauggcc

SEQ ID NO: 531878 - RNA, 20 nt, Artificial Sequence
  Synthetic
agaggugggcucccauggcc

SEQ ID NO: 531879 - RNA, 21 nt, Artificial Sequence
  Synthetic
aagaggugggcucccauggcc

SEQ ID NO: 531880 - RNA, 22 nt, Artificial Sequence
  Synthetic
caagaggugggcucccauggcc

SEQ ID NO: 531881 - RNA, 23 nt, Artificial Sequence
  Synthetic
gcaagaggugggcucccauggcc

SEQ ID NO: 531882 - RNA, 24 nt, Artificial Sequence
  Synthetic
ugcaagaggugggcucccauggcc

SEQ ID NO: 531883 - RNA, 18 nt, Artificial Sequence
  Synthetic
ugggaaugaaagauggcc

SEQ ID NO: 531884 - RNA, 19 nt, Artificial Sequence
  Synthetic
augggaaugaaagauggcc

SEQ ID NO: 531885 - RNA, 20 nt, Artificial Sequence
  Synthetic
caugggaaugaaagauggcc

SEQ ID NO: 531886 - RNA, 21 nt, Artificial Sequence
  Synthetic
acaugggaaugaaagauggcc

SEQ ID NO: 531887 - RNA, 22 nt, Artificial Sequence
  Synthetic
cacaugggaaugaaagauggcc

SEQ ID NO: 531888 - RNA, 23 nt, Artificial Sequence
  Synthetic
gcacaugggaaugaaagauggcc

SEQ ID NO: 531889 - RNA, 24 nt, Artificial Sequence
  Synthetic
ugcacaugggaaugaaagauggcc

SEQ ID NO: 531890 - RNA, 18 nt, Artificial Sequence
  Synthetic
ugggaaauuguuauggcc

SEQ ID NO: 531891 - RNA, 19 nt, Artificial Sequence
  Synthetic
cugggaaauuguuauggcc

SEQ ID NO: 531892 - RNA, 20 nt, Artificial Sequence
  Synthetic
ccugggaaauuguuauggcc

SEQ ID NO: 531893 - RNA, 21 nt, Artificial Sequence
  Synthetic
uccugggaaauuguuauggcc

SEQ ID NO: 531894 - RNA, 22 nt, Artificial Sequence
  Synthetic
cuccugggaaauuguuauggcc

SEQ ID NO: 531895 - RNA, 23 nt, Artificial Sequence
  Synthetic
ucuccugggaaauuguuauggcc

SEQ ID NO: 531896 - RNA, 24 nt, Artificial Sequence
  Synthetic
cucuccugggaaauuguuauggcc

SEQ ID NO: 531897 - RNA, 18 nt, Artificial Sequence
  Synthetic
cucucauggcaacuggcc

SEQ ID NO: 531898 - RNA, 19 nt, Artificial Sequence
  Synthetic
gcucucauggcaacuggcc

SEQ ID NO: 531899 - RNA, 20 nt, Artificial Sequence
  Synthetic
ugcucucauggcaacuggcc

SEQ ID NO: 531900 - RNA, 21 nt, Artificial Sequence
  Synthetic
gugcucucauggcaacuggcc

SEQ ID NO: 531901 - RNA, 22 nt, Artificial Sequence
  Synthetic
ugugcucucauggcaacuggcc

SEQ ID NO: 531902 - RNA, 23 nt, Artificial Sequence
  Synthetic
gugugcucucauggcaacuggcc

SEQ ID NO: 531903 - RNA, 24 nt, Artificial Sequence
  Synthetic
ggugugcucucauggcaacuggcc

SEQ ID NO: 531904 - RNA, 18 nt, Artificial Sequence
  Synthetic
uguaacgaggaacuggcc

SEQ ID NO: 531905 - RNA, 19 nt, Artificial Sequence
  Synthetic
auguaacgaggaacuggcc

SEQ ID NO: 531906 - RNA, 20 nt, Artificial Sequence
  Synthetic
uauguaacgaggaacuggcc

SEQ ID NO: 531907 - RNA, 21 nt, Artificial Sequence
  Synthetic
auauguaacgaggaacuggcc

SEQ ID NO: 531908 - RNA, 22 nt, Artificial Sequence
  Synthetic
cauauguaacgaggaacuggcc

SEQ ID NO: 531909 - RNA, 23 nt, Artificial Sequence
  Synthetic
acauauguaacgaggaacuggcc

SEQ ID NO: 531910 - RNA, 24 nt, Artificial Sequence
  Synthetic
gacauauguaacgaggaacuggcc

SEQ ID NO: 531911 - RNA, 18 nt, Artificial Sequence
  Synthetic
aagccacgaaaccuggcc

SEQ ID NO: 531912 - RNA, 19 nt, Artificial Sequence
  Synthetic
caagccacgaaaccuggcc

SEQ ID NO: 531913 - RNA, 20 nt, Artificial Sequence
  Synthetic
ucaagccacgaaaccuggcc

SEQ ID NO: 531914 - RNA, 21 nt, Artificial Sequence
  Synthetic
uucaagccacgaaaccuggcc

SEQ ID NO: 531915 - RNA, 22 nt, Artificial Sequence
  Synthetic
cuucaagccacgaaaccuggcc

SEQ ID NO: 531916 - RNA, 23 nt, Artificial Sequence
  Synthetic
ucuucaagccacgaaaccuggcc

SEQ ID NO: 531917 - RNA, 24 nt, Artificial Sequence
  Synthetic
aucuucaagccacgaaaccuggcc

SEQ ID NO: 531918 - RNA, 18 nt, Artificial Sequence
  Synthetic
uuguugaaggaccuggcc

SEQ ID NO: 531919 - RNA, 19 nt, Artificial Sequence
  Synthetic
auuguugaaggaccuggcc

SEQ ID NO: 531920 - RNA, 20 nt, Artificial Sequence
  Synthetic
cauuguugaaggaccuggcc

SEQ ID NO: 531921 - RNA, 21 nt, Artificial Sequence
  Synthetic
gcauuguugaaggaccuggcc

SEQ ID NO: 531922 - RNA, 22 nt, Artificial Sequence
  Synthetic
agcauuguugaaggaccuggcc

SEQ ID NO: 531923 - RNA, 23 nt, Artificial Sequence
  Synthetic
gagcauuguugaaggaccuggcc

SEQ ID NO: 531924 - RNA, 24 nt, Artificial Sequence
  Synthetic
ugagcauuguugaaggaccuggcc

SEQ ID NO: 531925 - RNA, 18 nt, Artificial Sequence
  Synthetic
gaugaguagcagcuggcc

SEQ ID NO: 531926 - RNA, 19 nt, Artificial Sequence
  Synthetic
ggaugaguagcagcuggcc

SEQ ID NO: 531927 - RNA, 20 nt, Artificial Sequence
  Synthetic
gggaugaguagcagcuggcc

SEQ ID NO: 531928 - RNA, 21 nt, Artificial Sequence
  Synthetic
agggaugaguagcagcuggcc

SEQ ID NO: 531929 - RNA, 22 nt, Artificial Sequence
  Synthetic
gagggaugaguagcagcuggcc

SEQ ID NO: 531930 - RNA, 23 nt, Artificial Sequence
  Synthetic
ugagggaugaguagcagcuggcc

SEQ ID NO: 531931 - RNA, 24 nt, Artificial Sequence
  Synthetic
uugagggaugaguagcagcuggcc

SEQ ID NO: 531932 - RNA, 18 nt, Artificial Sequence
  Synthetic
ccucauauguugcuggcc

SEQ ID NO: 531933 - RNA, 19 nt, Artificial Sequence
  Synthetic
uccucauauguugcuggcc

SEQ ID NO: 531934 - RNA, 20 nt, Artificial Sequence
  Synthetic
uuccucauauguugcuggcc

SEQ ID NO: 531935 - RNA, 21 nt, Artificial Sequence
  Synthetic
auuccucauauguugcuggcc

SEQ ID NO: 531936 - RNA, 22 nt, Artificial Sequence
  Synthetic
gauuccucauauguugcuggcc

SEQ ID NO: 531937 - RNA, 23 nt, Artificial Sequence
  Synthetic
agauuccucauauguugcuggcc

SEQ ID NO: 531938 - RNA, 24 nt, Artificial Sequence
  Synthetic
gagauuccucauauguugcuggcc

SEQ ID NO: 531939 - RNA, 18 nt, Artificial Sequence
  Synthetic
aaaaacagcaaucuggcc

SEQ ID NO: 531940 - RNA, 19 nt, Artificial Sequence
  Synthetic
aaaaaacagcaaucuggcc

SEQ ID NO: 531941 - RNA, 20 nt, Artificial Sequence
  Synthetic
uaaaaaacagcaaucuggcc

SEQ ID NO: 531942 - RNA, 21 nt, Artificial Sequence
  Synthetic
uuaaaaaacagcaaucuggcc

SEQ ID NO: 531943 - RNA, 22 nt, Artificial Sequence
  Synthetic
auuaaaaaacagcaaucuggcc

SEQ ID NO: 531944 - RNA, 23 nt, Artificial Sequence
  Synthetic
cauuaaaaaacagcaaucuggcc

SEQ ID NO: 531945 - RNA, 24 nt, Artificial Sequence
  Synthetic
acauuaaaaaacagcaaucuggcc

SEQ ID NO: 531946 - RNA, 18 nt, Artificial Sequence
  Synthetic
gagccaccgcaucuggcc

SEQ ID NO: 531947 - RNA, 19 nt, Artificial Sequence
  Synthetic
ugagccaccgcaucuggcc

SEQ ID NO: 531948 - RNA, 20 nt, Artificial Sequence
  Synthetic
augagccaccgcaucuggcc

SEQ ID NO: 531949 - RNA, 21 nt, Artificial Sequence
  Synthetic
caugagccaccgcaucuggcc

SEQ ID NO: 531950 - RNA, 22 nt, Artificial Sequence
  Synthetic
gcaugagccaccgcaucuggcc

SEQ ID NO: 531951 - RNA, 23 nt, Artificial Sequence
  Synthetic
ggcaugagccaccgcaucuggcc

SEQ ID NO: 531952 - RNA, 24 nt, Artificial Sequence
  Synthetic
aggcaugagccaccgcaucuggcc

SEQ ID NO: 531953 - RNA, 18 nt, Artificial Sequence
  Synthetic
uagggguuauaucuggcc

SEQ ID NO: 531954 - RNA, 19 nt, Artificial Sequence
  Synthetic
auagggguuauaucuggcc

SEQ ID NO: 531955 - RNA, 20 nt, Artificial Sequence
  Synthetic
gauagggguuauaucuggcc

SEQ ID NO: 531956 - RNA, 21 nt, Artificial Sequence
  Synthetic
agauagggguuauaucuggcc

SEQ ID NO: 531957 - RNA, 22 nt, Artificial Sequence
  Synthetic
gagauagggguuauaucuggcc

SEQ ID NO: 531958 - RNA, 23 nt, Artificial Sequence
  Synthetic
ggagauagggguuauaucuggcc

SEQ ID NO: 531959 - RNA, 24 nt, Artificial Sequence
  Synthetic
aggagauagggguuauaucuggcc

SEQ ID NO: 531960 - RNA, 18 nt, Artificial Sequence
  Synthetic
ggauguuagccucuggcc

SEQ ID NO: 531961 - RNA, 19 nt, Artificial Sequence
  Synthetic
uggauguuagccucuggcc

SEQ ID NO: 531962 - RNA, 20 nt, Artificial Sequence
  Synthetic
cuggauguuagccucuggcc

SEQ ID NO: 531963 - RNA, 21 nt, Artificial Sequence
  Synthetic
ucuggauguuagccucuggcc

SEQ ID NO: 531964 - RNA, 22 nt, Artificial Sequence
  Synthetic
uucuggauguuagccucuggcc

SEQ ID NO: 531965 - RNA, 23 nt, Artificial Sequence
  Synthetic
auucuggauguuagccucuggcc

SEQ ID NO: 531966 - RNA, 24 nt, Artificial Sequence
  Synthetic
aauucuggauguuagccucuggcc

SEQ ID NO: 531967 - RNA, 18 nt, Artificial Sequence
  Synthetic
gagcuaaaaucucuggcc

SEQ ID NO: 531968 - RNA, 19 nt, Artificial Sequence
  Synthetic
ugagcuaaaaucucuggcc

SEQ ID NO: 531969 - RNA, 20 nt, Artificial Sequence
  Synthetic
augagcuaaaaucucuggcc

SEQ ID NO: 531970 - RNA, 21 nt, Artificial Sequence
  Synthetic
aaugagcuaaaaucucuggcc

SEQ ID NO: 531971 - RNA, 22 nt, Artificial Sequence
  Synthetic
aaaugagcuaaaaucucuggcc

SEQ ID NO: 531972 - RNA, 23 nt, Artificial Sequence
  Synthetic
uaaaugagcuaaaaucucuggcc

SEQ ID NO: 531973 - RNA, 24 nt, Artificial Sequence
  Synthetic
cuaaaugagcuaaaaucucuggcc

SEQ ID NO: 531974 - RNA, 18 nt, Artificial Sequence
  Synthetic
ucaugacacucucuggcc

SEQ ID NO: 531975 - RNA, 19 nt, Artificial Sequence
  Synthetic
aucaugacacucucuggcc

SEQ ID NO: 531976 - RNA, 20 nt, Artificial Sequence
  Synthetic
gaucaugacacucucuggcc

SEQ ID NO: 531977 - RNA, 21 nt, Artificial Sequence
  Synthetic
ggaucaugacacucucuggcc

SEQ ID NO: 531978 - RNA, 22 nt, Artificial Sequence
  Synthetic
uggaucaugacacucucuggcc

SEQ ID NO: 531979 - RNA, 23 nt, Artificial Sequence
  Synthetic
auggaucaugacacucucuggcc

SEQ ID NO: 531980 - RNA, 24 nt, Artificial Sequence
  Synthetic
uauggaucaugacacucucuggcc

SEQ ID NO: 531981 - RNA, 18 nt, Artificial Sequence
  Synthetic
gcaaugguuucucuggcc

SEQ ID NO: 531982 - RNA, 19 nt, Artificial Sequence
  Synthetic
ggcaaugguuucucuggcc

SEQ ID NO: 531983 - RNA, 20 nt, Artificial Sequence
  Synthetic
aggcaaugguuucucuggcc

SEQ ID NO: 531984 - RNA, 21 nt, Artificial Sequence
  Synthetic
gaggcaaugguuucucuggcc

SEQ ID NO: 531985 - RNA, 22 nt, Artificial Sequence
  Synthetic
ggaggcaaugguuucucuggcc

SEQ ID NO: 531986 - RNA, 23 nt, Artificial Sequence
  Synthetic
aggaggcaaugguuucucuggcc

SEQ ID NO: 531987 - RNA, 24 nt, Artificial Sequence
  Synthetic
aaggaggcaaugguuucucuggcc

SEQ ID NO: 531988 - RNA, 18 nt, Artificial Sequence
  Synthetic
gucaguaaaacaguggcc

SEQ ID NO: 531989 - RNA, 19 nt, Artificial Sequence
  Synthetic
agucaguaaaacaguggcc

SEQ ID NO: 531990 - RNA, 20 nt, Artificial Sequence
  Synthetic
cagucaguaaaacaguggcc

SEQ ID NO: 531991 - RNA, 21 nt, Artificial Sequence
  Synthetic
ccagucaguaaaacaguggcc

SEQ ID NO: 531992 - RNA, 22 nt, Artificial Sequence
  Synthetic
uccagucaguaaaacaguggcc

SEQ ID NO: 531993 - RNA, 23 nt, Artificial Sequence
  Synthetic
uuccagucaguaaaacaguggcc

SEQ ID NO: 531994 - RNA, 24 nt, Artificial Sequence
  Synthetic
cuuccagucaguaaaacaguggcc

SEQ ID NO: 531995 - RNA, 18 nt, Artificial Sequence
  Synthetic
gugccuggaggaguggcc

SEQ ID NO: 531996 - RNA, 19 nt, Artificial Sequence
  Synthetic
ugugccuggaggaguggcc

SEQ ID NO: 531997 - RNA, 20 nt, Artificial Sequence
  Synthetic
augugccuggaggaguggcc

SEQ ID NO: 531998 - RNA, 21 nt, Artificial Sequence
  Synthetic
aaugugccuggaggaguggcc

SEQ ID NO: 531999 - RNA, 22 nt, Artificial Sequence
  Synthetic
gaaugugccuggaggaguggcc

SEQ ID NO: 532000 - RNA, 23 nt, Artificial Sequence
  Synthetic
ggaaugugccuggaggaguggcc

SEQ ID NO: 532001 - RNA, 24 nt, Artificial Sequence
  Synthetic
uggaaugugccuggaggaguggcc

SEQ ID NO: 532002 - RNA, 18 nt, Artificial Sequence
  Synthetic
cagacuauuaggguggcc

SEQ ID NO: 532003 - RNA, 19 nt, Artificial Sequence
  Synthetic
ucagacuauuaggguggcc

SEQ ID NO: 532004 - RNA, 20 nt, Artificial Sequence
  Synthetic
aucagacuauuaggguggcc

SEQ ID NO: 532005 - RNA, 21 nt, Artificial Sequence
  Synthetic
uaucagacuauuaggguggcc

SEQ ID NO: 532006 - RNA, 22 nt, Artificial Sequence
  Synthetic
cuaucagacuauuaggguggcc

SEQ ID NO: 532007 - RNA, 23 nt, Artificial Sequence
  Synthetic
acuaucagacuauuaggguggcc

SEQ ID NO: 532008 - RNA, 24 nt, Artificial Sequence
  Synthetic
aacuaucagacuauuaggguggcc

SEQ ID NO: 532009 - RNA, 18 nt, Artificial Sequence
  Synthetic
agaugcaaaacuguggcc

SEQ ID NO: 532010 - RNA, 19 nt, Artificial Sequence
  Synthetic
cagaugcaaaacuguggcc

SEQ ID NO: 532011 - RNA, 20 nt, Artificial Sequence
  Synthetic
acagaugcaaaacuguggcc

SEQ ID NO: 532012 - RNA, 21 nt, Artificial Sequence
  Synthetic
uacagaugcaaaacuguggcc

SEQ ID NO: 532013 - RNA, 22 nt, Artificial Sequence
  Synthetic
uuacagaugcaaaacuguggcc

SEQ ID NO: 532014 - RNA, 23 nt, Artificial Sequence
  Synthetic
uuuacagaugcaaaacuguggcc

SEQ ID NO: 532015 - RNA, 24 nt, Artificial Sequence
  Synthetic
uuuuacagaugcaaaacuguggcc

SEQ ID NO: 532016 - RNA, 18 nt, Artificial Sequence
  Synthetic
ugagagccagcuguggcc

SEQ ID NO: 532017 - RNA, 19 nt, Artificial Sequence
  Synthetic
cugagagccagcuguggcc

SEQ ID NO: 532018 - RNA, 20 nt, Artificial Sequence
  Synthetic
ucugagagccagcuguggcc

SEQ ID NO: 532019 - RNA, 21 nt, Artificial Sequence
  Synthetic
uucugagagccagcuguggcc

SEQ ID NO: 532020 - RNA, 22 nt, Artificial Sequence
  Synthetic
uuucugagagccagcuguggcc

SEQ ID NO: 532021 - RNA, 23 nt, Artificial Sequence
  Synthetic
uuuucugagagccagcuguggcc

SEQ ID NO: 532022 - RNA, 24 nt, Artificial Sequence
  Synthetic
uuuuucugagagccagcuguggcc

SEQ ID NO: 532023 - RNA, 18 nt, Artificial Sequence
  Synthetic
gaaccaccaugcuuggcc

SEQ ID NO: 532024 - RNA, 19 nt, Artificial Sequence
  Synthetic
ugaaccaccaugcuuggcc

SEQ ID NO: 532025 - RNA, 20 nt, Artificial Sequence
  Synthetic
uugaaccaccaugcuuggcc

SEQ ID NO: 532026 - RNA, 21 nt, Artificial Sequence
  Synthetic
cuugaaccaccaugcuuggcc

SEQ ID NO: 532027 - RNA, 22 nt, Artificial Sequence
  Synthetic
gcuugaaccaccaugcuuggcc

SEQ ID NO: 532028 - RNA, 23 nt, Artificial Sequence
  Synthetic
ggcuugaaccaccaugcuuggcc

SEQ ID NO: 532029 - RNA, 24 nt, Artificial Sequence
  Synthetic
aggcuugaaccaccaugcuuggcc

SEQ ID NO: 532030 - RNA, 18 nt, Artificial Sequence
  Synthetic
uacucuaugugcuuggcc

SEQ ID NO: 532031 - RNA, 19 nt, Artificial Sequence
  Synthetic
cuacucuaugugcuuggcc

SEQ ID NO: 532032 - RNA, 20 nt, Artificial Sequence
  Synthetic
ucuacucuaugugcuuggcc

SEQ ID NO: 532033 - RNA, 21 nt, Artificial Sequence
  Synthetic
uucuacucuaugugcuuggcc

SEQ ID NO: 532034 - RNA, 22 nt, Artificial Sequence
  Synthetic
cuucuacucuaugugcuuggcc

SEQ ID NO: 532035 - RNA, 23 nt, Artificial Sequence
  Synthetic
ucuucuacucuaugugcuuggcc

SEQ ID NO: 532036 - RNA, 24 nt, Artificial Sequence
  Synthetic
uucuucuacucuaugugcuuggcc

SEQ ID NO: 532037 - RNA, 18 nt, Artificial Sequence
  Synthetic
acuuuacauaucuuggcc

SEQ ID NO: 532038 - RNA, 19 nt, Artificial Sequence
  Synthetic
cacuuuacauaucuuggcc

SEQ ID NO: 532039 - RNA, 20 nt, Artificial Sequence
  Synthetic
gcacuuuacauaucuuggcc

SEQ ID NO: 532040 - RNA, 21 nt, Artificial Sequence
  Synthetic
agcacuuuacauaucuuggcc

SEQ ID NO: 532041 - RNA, 22 nt, Artificial Sequence
  Synthetic
gagcacuuuacauaucuuggcc

SEQ ID NO: 532042 - RNA, 23 nt, Artificial Sequence
  Synthetic
agagcacuuuacauaucuuggcc

SEQ ID NO: 532043 - RNA, 24 nt, Artificial Sequence
  Synthetic
cagagcacuuuacauaucuuggcc

SEQ ID NO: 532044 - RNA, 18 nt, Artificial Sequence
  Synthetic
aggauuacgcucuuggcc

SEQ ID NO: 532045 - RNA, 19 nt, Artificial Sequence
  Synthetic
gaggauuacgcucuuggcc

SEQ ID NO: 532046 - RNA, 20 nt, Artificial Sequence
  Synthetic
ggaggauuacgcucuuggcc

SEQ ID NO: 532047 - RNA, 21 nt, Artificial Sequence
  Synthetic
uggaggauuacgcucuuggcc

SEQ ID NO: 532048 - RNA, 22 nt, Artificial Sequence
  Synthetic
auggaggauuacgcucuuggcc

SEQ ID NO: 532049 - RNA, 23 nt, Artificial Sequence
  Synthetic
gauggaggauuacgcucuuggcc

SEQ ID NO: 532050 - RNA, 24 nt, Artificial Sequence
  Synthetic
ggauggaggauuacgcucuuggcc

SEQ ID NO: 532051 - RNA, 18 nt, Artificial Sequence
  Synthetic
accaucucaucuuuggcc

SEQ ID NO: 532052 - RNA, 19 nt, Artificial Sequence
  Synthetic
aaccaucucaucuuuggcc

SEQ ID NO: 532053 - RNA, 20 nt, Artificial Sequence
  Synthetic
aaaccaucucaucuuuggcc

SEQ ID NO: 532054 - RNA, 21 nt, Artificial Sequence
  Synthetic
aaaaccaucucaucuuuggcc

SEQ ID NO: 532055 - RNA, 22 nt, Artificial Sequence
  Synthetic
caaaaccaucucaucuuuggcc

SEQ ID NO: 532056 - RNA, 23 nt, Artificial Sequence
  Synthetic
gcaaaaccaucucaucuuuggcc

SEQ ID NO: 532057 - RNA, 24 nt, Artificial Sequence
  Synthetic
cgcaaaaccaucucaucuuuggcc

SEQ ID NO: 532058 - RNA, 18 nt, Artificial Sequence
  Synthetic
gaaucacuucuuuuggcc

SEQ ID NO: 532059 - RNA, 19 nt, Artificial Sequence
  Synthetic
agaaucacuucuuuuggcc

SEQ ID NO: 532060 - RNA, 20 nt, Artificial Sequence
  Synthetic
uagaaucacuucuuuuggcc

SEQ ID NO: 532061 - RNA, 21 nt, Artificial Sequence
  Synthetic
uuagaaucacuucuuuuggcc

SEQ ID NO: 532062 - RNA, 22 nt, Artificial Sequence
  Synthetic
auuagaaucacuucuuuuggcc

SEQ ID NO: 532063 - RNA, 23 nt, Artificial Sequence
  Synthetic
aauuagaaucacuucuuuuggcc

SEQ ID NO: 532064 - RNA, 24 nt, Artificial Sequence
  Synthetic
caauuagaaucacuucuuuuggcc

SEQ ID NO: 532065 - RNA, 18 nt, Artificial Sequence
  Synthetic
ucaagagaauaaaaugcc

SEQ ID NO: 532066 - RNA, 19 nt, Artificial Sequence
  Synthetic
cucaagagaauaaaaugcc

SEQ ID NO: 532067 - RNA, 20 nt, Artificial Sequence
  Synthetic
ccucaagagaauaaaaugcc

SEQ ID NO: 532068 - RNA, 21 nt, Artificial Sequence
  Synthetic
gccucaagagaauaaaaugcc

SEQ ID NO: 532069 - RNA, 22 nt, Artificial Sequence
  Synthetic
ugccucaagagaauaaaaugcc

SEQ ID NO: 532070 - RNA, 23 nt, Artificial Sequence
  Synthetic
augccucaagagaauaaaaugcc

SEQ ID NO: 532071 - RNA, 24 nt, Artificial Sequence
  Synthetic
aaugccucaagagaauaaaaugcc

SEQ ID NO: 532072 - RNA, 18 nt, Artificial Sequence
  Synthetic
ucucagagauaaaaugcc

SEQ ID NO: 532073 - RNA, 19 nt, Artificial Sequence
  Synthetic
gucucagagauaaaaugcc

SEQ ID NO: 532074 - RNA, 20 nt, Artificial Sequence
  Synthetic
ggucucagagauaaaaugcc

SEQ ID NO: 532075 - RNA, 21 nt, Artificial Sequence
  Synthetic
uggucucagagauaaaaugcc

SEQ ID NO: 532076 - RNA, 22 nt, Artificial Sequence
  Synthetic
cuggucucagagauaaaaugcc

SEQ ID NO: 532077 - RNA, 23 nt, Artificial Sequence
  Synthetic
ccuggucucagagauaaaaugcc

SEQ ID NO: 532078 - RNA, 24 nt, Artificial Sequence
  Synthetic
uccuggucucagagauaaaaugcc

SEQ ID NO: 532079 - RNA, 18 nt, Artificial Sequence
  Synthetic
ucagaagacucaaaugcc

SEQ ID NO: 532080 - RNA, 19 nt, Artificial Sequence
  Synthetic
uucagaagacucaaaugcc

SEQ ID NO: 532081 - RNA, 20 nt, Artificial Sequence
  Synthetic
uuucagaagacucaaaugcc

SEQ ID NO: 532082 - RNA, 21 nt, Artificial Sequence
  Synthetic
uuuucagaagacucaaaugcc

SEQ ID NO: 532083 - RNA, 22 nt, Artificial Sequence
  Synthetic
guuuucagaagacucaaaugcc

SEQ ID NO: 532084 - RNA, 23 nt, Artificial Sequence
  Synthetic
aguuuucagaagacucaaaugcc

SEQ ID NO: 532085 - RNA, 24 nt, Artificial Sequence
  Synthetic
uaguuuucagaagacucaaaugcc

SEQ ID NO: 532086 - RNA, 18 nt, Artificial Sequence
  Synthetic
uuagguaucagaaaugcc

SEQ ID NO: 532087 - RNA, 19 nt, Artificial Sequence
  Synthetic
uuuagguaucagaaaugcc

SEQ ID NO: 532088 - RNA, 20 nt, Artificial Sequence
  Synthetic
uuuuagguaucagaaaugcc

SEQ ID NO: 532089 - RNA, 21 nt, Artificial Sequence
  Synthetic
guuuuagguaucagaaaugcc

SEQ ID NO: 532090 - RNA, 22 nt, Artificial Sequence
  Synthetic
aguuuuagguaucagaaaugcc

SEQ ID NO: 532091 - RNA, 23 nt, Artificial Sequence
  Synthetic
caguuuuagguaucagaaaugcc

SEQ ID NO: 532092 - RNA, 24 nt, Artificial Sequence
  Synthetic
gcaguuuuagguaucagaaaugcc

SEQ ID NO: 532093 - RNA, 18 nt, Artificial Sequence
  Synthetic
aauccuaugugaaaugcc

SEQ ID NO: 532094 - RNA, 19 nt, Artificial Sequence
  Synthetic
aaauccuaugugaaaugcc

SEQ ID NO: 532095 - RNA, 20 nt, Artificial Sequence
  Synthetic
gaaauccuaugugaaaugcc

SEQ ID NO: 532096 - RNA, 21 nt, Artificial Sequence
  Synthetic
agaaauccuaugugaaaugcc

SEQ ID NO: 532097 - RNA, 22 nt, Artificial Sequence
  Synthetic
aagaaauccuaugugaaaugcc

SEQ ID NO: 532098 - RNA, 23 nt, Artificial Sequence
  Synthetic
uaagaaauccuaugugaaaugcc

SEQ ID NO: 532099 - RNA, 24 nt, Artificial Sequence
  Synthetic
auaagaaauccuaugugaaaugcc

SEQ ID NO: 532100 - RNA, 18 nt, Artificial Sequence
  Synthetic
guaaauguauguaaugcc

SEQ ID NO: 532101 - RNA, 19 nt, Artificial Sequence
  Synthetic
cguaaauguauguaaugcc

SEQ ID NO: 532102 - RNA, 20 nt, Artificial Sequence
  Synthetic
acguaaauguauguaaugcc

SEQ ID NO: 532103 - RNA, 21 nt, Artificial Sequence
  Synthetic
aacguaaauguauguaaugcc

SEQ ID NO: 532104 - RNA, 22 nt, Artificial Sequence
  Synthetic
caacguaaauguauguaaugcc

SEQ ID NO: 532105 - RNA, 23 nt, Artificial Sequence
  Synthetic
acaacguaaauguauguaaugcc

SEQ ID NO: 532106 - RNA, 24 nt, Artificial Sequence
  Synthetic
aacaacguaaauguauguaaugcc

SEQ ID NO: 532107 - RNA, 18 nt, Artificial Sequence
  Synthetic
gaacuuucuguuaaugcc

SEQ ID NO: 532108 - RNA, 19 nt, Artificial Sequence
  Synthetic
ugaacuuucuguuaaugcc

SEQ ID NO: 532109 - RNA, 20 nt, Artificial Sequence
  Synthetic
gugaacuuucuguuaaugcc

SEQ ID NO: 532110 - RNA, 21 nt, Artificial Sequence
  Synthetic
ugugaacuuucuguuaaugcc

SEQ ID NO: 532111 - RNA, 22 nt, Artificial Sequence
  Synthetic
augugaacuuucuguuaaugcc

SEQ ID NO: 532112 - RNA, 23 nt, Artificial Sequence
  Synthetic
uaugugaacuuucuguuaaugcc

SEQ ID NO: 532113 - RNA, 24 nt, Artificial Sequence
  Synthetic
guaugugaacuuucuguuaaugcc

SEQ ID NO: 532114 - RNA, 18 nt, Artificial Sequence
  Synthetic
gacccacugcaacaugcc

SEQ ID NO: 532115 - RNA, 19 nt, Artificial Sequence
  Synthetic
ggacccacugcaacaugcc

SEQ ID NO: 532116 - RNA, 20 nt, Artificial Sequence
  Synthetic
uggacccacugcaacaugcc

SEQ ID NO: 532117 - RNA, 21 nt, Artificial Sequence
  Synthetic
auggacccacugcaacaugcc

SEQ ID NO: 532118 - RNA, 22 nt, Artificial Sequence
  Synthetic
aauggacccacugcaacaugcc

SEQ ID NO: 532119 - RNA, 23 nt, Artificial Sequence
  Synthetic
aaauggacccacugcaacaugcc

SEQ ID NO: 532120 - RNA, 24 nt, Artificial Sequence
  Synthetic
uaaauggacccacugcaacaugcc

SEQ ID NO: 532121 - RNA, 18 nt, Artificial Sequence
  Synthetic
ucuugcuagccacaugcc

SEQ ID NO: 532122 - RNA, 19 nt, Artificial Sequence
  Synthetic
uucuugcuagccacaugcc

SEQ ID NO: 532123 - RNA, 20 nt, Artificial Sequence
  Synthetic
cuucuugcuagccacaugcc

SEQ ID NO: 532124 - RNA, 21 nt, Artificial Sequence
  Synthetic
acuucuugcuagccacaugcc

SEQ ID NO: 532125 - RNA, 22 nt, Artificial Sequence
  Synthetic
uacuucuugcuagccacaugcc

SEQ ID NO: 532126 - RNA, 23 nt, Artificial Sequence
  Synthetic
auacuucuugcuagccacaugcc

SEQ ID NO: 532127 - RNA, 24 nt, Artificial Sequence
  Synthetic
aauacuucuugcuagccacaugcc

SEQ ID NO: 532128 - RNA, 18 nt, Artificial Sequence
  Synthetic
uaccuuucuagacaugcc

SEQ ID NO: 532129 - RNA, 19 nt, Artificial Sequence
  Synthetic
cuaccuuucuagacaugcc

SEQ ID NO: 532130 - RNA, 20 nt, Artificial Sequence
  Synthetic
ucuaccuuucuagacaugcc

SEQ ID NO: 532131 - RNA, 21 nt, Artificial Sequence
  Synthetic
cucuaccuuucuagacaugcc

SEQ ID NO: 532132 - RNA, 22 nt, Artificial Sequence
  Synthetic
acucuaccuuucuagacaugcc

SEQ ID NO: 532133 - RNA, 23 nt, Artificial Sequence
  Synthetic
gacucuaccuuucuagacaugcc

SEQ ID NO: 532134 - RNA, 24 nt, Artificial Sequence
  Synthetic
ugacucuaccuuucuagacaugcc

SEQ ID NO: 532135 - RNA, 18 nt, Artificial Sequence
  Synthetic
uaagaccucugacaugcc

SEQ ID NO: 532136 - RNA, 19 nt, Artificial Sequence
  Synthetic
uuaagaccucugacaugcc

SEQ ID NO: 532137 - RNA, 20 nt, Artificial Sequence
  Synthetic
auuaagaccucugacaugcc

SEQ ID NO: 532138 - RNA, 21 nt, Artificial Sequence
  Synthetic
cauuaagaccucugacaugcc

SEQ ID NO: 532139 - RNA, 22 nt, Artificial Sequence
  Synthetic
ccauuaagaccucugacaugcc

SEQ ID NO: 532140 - RNA, 23 nt, Artificial Sequence
  Synthetic
gccauuaagaccucugacaugcc

SEQ ID NO: 532141 - RNA, 24 nt, Artificial Sequence
  Synthetic
ugccauuaagaccucugacaugcc

SEQ ID NO: 532142 - RNA, 18 nt, Artificial Sequence
  Synthetic
gagcucccauuccaugcc

SEQ ID NO: 532143 - RNA, 19 nt, Artificial Sequence
  Synthetic
ugagcucccauuccaugcc

SEQ ID NO: 532144 - RNA, 20 nt, Artificial Sequence
  Synthetic
gugagcucccauuccaugcc

SEQ ID NO: 532145 - RNA, 21 nt, Artificial Sequence
  Synthetic
agugagcucccauuccaugcc

SEQ ID NO: 532146 - RNA, 22 nt, Artificial Sequence
  Synthetic
aagugagcucccauuccaugcc

SEQ ID NO: 532147 - RNA, 23 nt, Artificial Sequence
  Synthetic
gaagugagcucccauuccaugcc

SEQ ID NO: 532148 - RNA, 24 nt, Artificial Sequence
  Synthetic
ugaagugagcucccauuccaugcc

SEQ ID NO: 532149 - RNA, 18 nt, Artificial Sequence
  Synthetic
guuugauuauugcaugcc

SEQ ID NO: 532150 - RNA, 19 nt, Artificial Sequence
  Synthetic
aguuugauuauugcaugcc

SEQ ID NO: 532151 - RNA, 20 nt, Artificial Sequence
  Synthetic
gaguuugauuauugcaugcc

SEQ ID NO: 532152 - RNA, 21 nt, Artificial Sequence
  Synthetic
ggaguuugauuauugcaugcc

SEQ ID NO: 532153 - RNA, 22 nt, Artificial Sequence
  Synthetic
gggaguuugauuauugcaugcc

SEQ ID NO: 532154 - RNA, 23 nt, Artificial Sequence
  Synthetic
ugggaguuugauuauugcaugcc

SEQ ID NO: 532155 - RNA, 24 nt, Artificial Sequence
  Synthetic
gugggaguuugauuauugcaugcc

SEQ ID NO: 532156 - RNA, 18 nt, Artificial Sequence
  Synthetic
auagacaacuuucaugcc

SEQ ID NO: 532157 - RNA, 19 nt, Artificial Sequence
  Synthetic
uauagacaacuuucaugcc

SEQ ID NO: 532158 - RNA, 20 nt, Artificial Sequence
  Synthetic
guauagacaacuuucaugcc

SEQ ID NO: 532159 - RNA, 21 nt, Artificial Sequence
  Synthetic
uguauagacaacuuucaugcc

SEQ ID NO: 532160 - RNA, 22 nt, Artificial Sequence
  Synthetic
auguauagacaacuuucaugcc

SEQ ID NO: 532161 - RNA, 23 nt, Artificial Sequence
  Synthetic
uauguauagacaacuuucaugcc

SEQ ID NO: 532162 - RNA, 24 nt, Artificial Sequence
  Synthetic
uuauguauagacaacuuucaugcc

SEQ ID NO: 532163 - RNA, 18 nt, Artificial Sequence
  Synthetic
auuuaugacaaagaugcc

SEQ ID NO: 532164 - RNA, 19 nt, Artificial Sequence
  Synthetic
gauuuaugacaaagaugcc

SEQ ID NO: 532165 - RNA, 20 nt, Artificial Sequence
  Synthetic
ugauuuaugacaaagaugcc

SEQ ID NO: 532166 - RNA, 21 nt, Artificial Sequence
  Synthetic
uugauuuaugacaaagaugcc

SEQ ID NO: 532167 - RNA, 22 nt, Artificial Sequence
  Synthetic
cuugauuuaugacaaagaugcc

SEQ ID NO: 532168 - RNA, 23 nt, Artificial Sequence
  Synthetic
ucuugauuuaugacaaagaugcc

SEQ ID NO: 532169 - RNA, 24 nt, Artificial Sequence
  Synthetic
cucuugauuuaugacaaagaugcc

SEQ ID NO: 532170 - RNA, 18 nt, Artificial Sequence
  Synthetic
aaagaguucgaagaugcc

SEQ ID NO: 532171 - RNA, 19 nt, Artificial Sequence
  Synthetic
caaagaguucgaagaugcc

SEQ ID NO: 532172 - RNA, 20 nt, Artificial Sequence
  Synthetic
ucaaagaguucgaagaugcc

SEQ ID NO: 532173 - RNA, 21 nt, Artificial Sequence
  Synthetic
aucaaagaguucgaagaugcc

SEQ ID NO: 532174 - RNA, 22 nt, Artificial Sequence
  Synthetic
aaucaaagaguucgaagaugcc

SEQ ID NO: 532175 - RNA, 23 nt, Artificial Sequence
  Synthetic
aaaucaaagaguucgaagaugcc

SEQ ID NO: 532176 - RNA, 24 nt, Artificial Sequence
  Synthetic
uaaaucaaagaguucgaagaugcc

SEQ ID NO: 532177 - RNA, 18 nt, Artificial Sequence
  Synthetic
ucuuuuaaaagagaugcc

SEQ ID NO: 532178 - RNA, 19 nt, Artificial Sequence
  Synthetic
uucuuuuaaaagagaugcc

SEQ ID NO: 532179 - RNA, 20 nt, Artificial Sequence
  Synthetic
uuucuuuuaaaagagaugcc

SEQ ID NO: 532180 - RNA, 21 nt, Artificial Sequence
  Synthetic
uuuucuuuuaaaagagaugcc

SEQ ID NO: 532181 - RNA, 22 nt, Artificial Sequence
  Synthetic
auuuucuuuuaaaagagaugcc

SEQ ID NO: 532182 - RNA, 23 nt, Artificial Sequence
  Synthetic
uauuuucuuuuaaaagagaugcc

SEQ ID NO: 532183 - RNA, 24 nt, Artificial Sequence
  Synthetic
uuauuuucuuuuaaaagagaugcc

SEQ ID NO: 532184 - RNA, 18 nt, Artificial Sequence
  Synthetic
uauuauugcggagaugcc

SEQ ID NO: 532185 - RNA, 19 nt, Artificial Sequence
  Synthetic
cuauuauugcggagaugcc

SEQ ID NO: 532186 - RNA, 20 nt, Artificial Sequence
  Synthetic
acuauuauugcggagaugcc

SEQ ID NO: 532187 - RNA, 21 nt, Artificial Sequence
  Synthetic
uacuauuauugcggagaugcc

SEQ ID NO: 532188 - RNA, 22 nt, Artificial Sequence
  Synthetic
auacuauuauugcggagaugcc

SEQ ID NO: 532189 - RNA, 23 nt, Artificial Sequence
  Synthetic
uauacuauuauugcggagaugcc

SEQ ID NO: 532190 - RNA, 24 nt, Artificial Sequence
  Synthetic
auauacuauuauugcggagaugcc

SEQ ID NO: 532191 - RNA, 18 nt, Artificial Sequence
  Synthetic
aucugaggaaaugaugcc

SEQ ID NO: 532192 - RNA, 19 nt, Artificial Sequence
  Synthetic
uaucugaggaaaugaugcc

SEQ ID NO: 532193 - RNA, 20 nt, Artificial Sequence
  Synthetic
auaucugaggaaaugaugcc

SEQ ID NO: 532194 - RNA, 21 nt, Artificial Sequence
  Synthetic
cauaucugaggaaaugaugcc

SEQ ID NO: 532195 - RNA, 22 nt, Artificial Sequence
  Synthetic
ucauaucugaggaaaugaugcc

SEQ ID NO: 532196 - RNA, 23 nt, Artificial Sequence
  Synthetic
uucauaucugaggaaaugaugcc

SEQ ID NO: 532197 - RNA, 24 nt, Artificial Sequence
  Synthetic
guucauaucugaggaaaugaugcc

SEQ ID NO: 532198 - RNA, 18 nt, Artificial Sequence
  Synthetic
gacaaguaauuugaugcc

SEQ ID NO: 532199 - RNA, 19 nt, Artificial Sequence
  Synthetic
ugacaaguaauuugaugcc

SEQ ID NO: 532200 - RNA, 20 nt, Artificial Sequence
  Synthetic
cugacaaguaauuugaugcc

SEQ ID NO: 532201 - RNA, 21 nt, Artificial Sequence
  Synthetic
acugacaaguaauuugaugcc

SEQ ID NO: 532202 - RNA, 22 nt, Artificial Sequence
  Synthetic
cacugacaaguaauuugaugcc

SEQ ID NO: 532203 - RNA, 23 nt, Artificial Sequence
  Synthetic
ccacugacaaguaauuugaugcc

SEQ ID NO: 532204 - RNA, 24 nt, Artificial Sequence
  Synthetic
uccacugacaaguaauuugaugcc

SEQ ID NO: 532205 - RNA, 18 nt, Artificial Sequence
  Synthetic
aaaucaauuaaauaugcc

SEQ ID NO: 532206 - RNA, 19 nt, Artificial Sequence
  Synthetic
uaaaucaauuaaauaugcc

SEQ ID NO: 532207 - RNA, 20 nt, Artificial Sequence
  Synthetic
uuaaaucaauuaaauaugcc

SEQ ID NO: 532208 - RNA, 21 nt, Artificial Sequence
  Synthetic
guuaaaucaauuaaauaugcc

SEQ ID NO: 532209 - RNA, 22 nt, Artificial Sequence
  Synthetic
uguuaaaucaauuaaauaugcc

SEQ ID NO: 532210 - RNA, 23 nt, Artificial Sequence
  Synthetic
uuguuaaaucaauuaaauaugcc

SEQ ID NO: 532211 - RNA, 24 nt, Artificial Sequence
  Synthetic
uuuguuaaaucaauuaaauaugcc

SEQ ID NO: 532212 - RNA, 18 nt, Artificial Sequence
  Synthetic
agcaucucuggauaugcc

SEQ ID NO: 532213 - RNA, 19 nt, Artificial Sequence
  Synthetic
cagcaucucuggauaugcc

SEQ ID NO: 532214 - RNA, 20 nt, Artificial Sequence
  Synthetic
acagcaucucuggauaugcc

SEQ ID NO: 532215 - RNA, 21 nt, Artificial Sequence
  Synthetic
gacagcaucucuggauaugcc

SEQ ID NO: 532216 - RNA, 22 nt, Artificial Sequence
  Synthetic
agacagcaucucuggauaugcc

SEQ ID NO: 532217 - RNA, 23 nt, Artificial Sequence
  Synthetic
cagacagcaucucuggauaugcc

SEQ ID NO: 532218 - RNA, 24 nt, Artificial Sequence
  Synthetic
ucagacagcaucucuggauaugcc

SEQ ID NO: 532219 - RNA, 18 nt, Artificial Sequence
  Synthetic
auaacccugugauaugcc

SEQ ID NO: 532220 - RNA, 19 nt, Artificial Sequence
  Synthetic
uauaacccugugauaugcc

SEQ ID NO: 532221 - RNA, 20 nt, Artificial Sequence
  Synthetic
guauaacccugugauaugcc

SEQ ID NO: 532222 - RNA, 21 nt, Artificial Sequence
  Synthetic
uguauaacccugugauaugcc

SEQ ID NO: 532223 - RNA, 22 nt, Artificial Sequence
  Synthetic
uuguauaacccugugauaugcc

SEQ ID NO: 532224 - RNA, 23 nt, Artificial Sequence
  Synthetic
uuuguauaacccugugauaugcc

SEQ ID NO: 532225 - RNA, 24 nt, Artificial Sequence
  Synthetic
uuuuguauaacccugugauaugcc

SEQ ID NO: 532226 - RNA, 18 nt, Artificial Sequence
  Synthetic
ggguaccuauuauaugcc

SEQ ID NO: 532227 - RNA, 19 nt, Artificial Sequence
  Synthetic
uggguaccuauuauaugcc

SEQ ID NO: 532228 - RNA, 20 nt, Artificial Sequence
  Synthetic
uuggguaccuauuauaugcc

SEQ ID NO: 532229 - RNA, 21 nt, Artificial Sequence
  Synthetic
auuggguaccuauuauaugcc

SEQ ID NO: 532230 - RNA, 22 nt, Artificial Sequence
  Synthetic
uauuggguaccuauuauaugcc

SEQ ID NO: 532231 - RNA, 23 nt, Artificial Sequence
  Synthetic
uuauuggguaccuauuauaugcc

SEQ ID NO: 532232 - RNA, 24 nt, Artificial Sequence
  Synthetic
auuauuggguaccuauuauaugcc

SEQ ID NO: 532233 - RNA, 18 nt, Artificial Sequence
  Synthetic
agaaaaccauacuaugcc

SEQ ID NO: 532234 - RNA, 19 nt, Artificial Sequence
  Synthetic
uagaaaaccauacuaugcc

SEQ ID NO: 532235 - RNA, 20 nt, Artificial Sequence
  Synthetic
guagaaaaccauacuaugcc

SEQ ID NO: 532236 - RNA, 21 nt, Artificial Sequence
  Synthetic
uguagaaaaccauacuaugcc

SEQ ID NO: 532237 - RNA, 22 nt, Artificial Sequence
  Synthetic
uuguagaaaaccauacuaugcc

SEQ ID NO: 532238 - RNA, 23 nt, Artificial Sequence
  Synthetic
cuuguagaaaaccauacuaugcc

SEQ ID NO: 532239 - RNA, 24 nt, Artificial Sequence
  Synthetic
acuuguagaaaaccauacuaugcc

SEQ ID NO: 532240 - RNA, 18 nt, Artificial Sequence
  Synthetic
ggaauauaagaguaugcc

SEQ ID NO: 532241 - RNA, 19 nt, Artificial Sequence
  Synthetic
uggaauauaagaguaugcc

SEQ ID NO: 532242 - RNA, 20 nt, Artificial Sequence
  Synthetic
guggaauauaagaguaugcc

SEQ ID NO: 532243 - RNA, 21 nt, Artificial Sequence
  Synthetic
uguggaauauaagaguaugcc

SEQ ID NO: 532244 - RNA, 22 nt, Artificial Sequence
  Synthetic
uuguggaauauaagaguaugcc

SEQ ID NO: 532245 - RNA, 23 nt, Artificial Sequence
  Synthetic
cuuguggaauauaagaguaugcc

SEQ ID NO: 532246 - RNA, 24 nt, Artificial Sequence
  Synthetic
ucuuguggaauauaagaguaugcc

SEQ ID NO: 532247 - RNA, 18 nt, Artificial Sequence
  Synthetic
ggaucauuuuuuuaugcc

SEQ ID NO: 532248 - RNA, 19 nt, Artificial Sequence
  Synthetic
aggaucauuuuuuuaugcc

SEQ ID NO: 532249 - RNA, 20 nt, Artificial Sequence
  Synthetic
uaggaucauuuuuuuaugcc

SEQ ID NO: 532250 - RNA, 21 nt, Artificial Sequence
  Synthetic
cuaggaucauuuuuuuaugcc

SEQ ID NO: 532251 - RNA, 22 nt, Artificial Sequence
  Synthetic
gcuaggaucauuuuuuuaugcc

SEQ ID NO: 532252 - RNA, 23 nt, Artificial Sequence
  Synthetic
ggcuaggaucauuuuuuuaugcc

SEQ ID NO: 532253 - RNA, 24 nt, Artificial Sequence
  Synthetic
uggcuaggaucauuuuuuuaugcc

SEQ ID NO: 532254 - RNA, 18 nt, Artificial Sequence
  Synthetic
cucucuuggaaaacugcc

SEQ ID NO: 532255 - RNA, 19 nt, Artificial Sequence
  Synthetic
ccucucuuggaaaacugcc

SEQ ID NO: 532256 - RNA, 20 nt, Artificial Sequence
  Synthetic
cccucucuuggaaaacugcc

SEQ ID NO: 532257 - RNA, 21 nt, Artificial Sequence
  Synthetic
gcccucucuuggaaaacugcc

SEQ ID NO: 532258 - RNA, 22 nt, Artificial Sequence
  Synthetic
cgcccucucuuggaaaacugcc

SEQ ID NO: 532259 - RNA, 23 nt, Artificial Sequence
  Synthetic
ccgcccucucuuggaaaacugcc

SEQ ID NO: 532260 - RNA, 24 nt, Artificial Sequence
  Synthetic
cccgcccucucuuggaaaacugcc

SEQ ID NO: 532261 - RNA, 18 nt, Artificial Sequence
  Synthetic
gaaucaucguccacugcc

SEQ ID NO: 532262 - RNA, 19 nt, Artificial Sequence
  Synthetic
ugaaucaucguccacugcc

SEQ ID NO: 532263 - RNA, 20 nt, Artificial Sequence
  Synthetic
uugaaucaucguccacugcc

SEQ ID NO: 532264 - RNA, 21 nt, Artificial Sequence
  Synthetic
uuugaaucaucguccacugcc

SEQ ID NO: 532265 - RNA, 22 nt, Artificial Sequence
  Synthetic
uuuugaaucaucguccacugcc

SEQ ID NO: 532266 - RNA, 23 nt, Artificial Sequence
  Synthetic
uuuuugaaucaucguccacugcc

SEQ ID NO: 532267 - RNA, 24 nt, Artificial Sequence
  Synthetic
cuuuuugaaucaucguccacugcc

SEQ ID NO: 532268 - RNA, 18 nt, Artificial Sequence
  Synthetic
ugggaauaguucacugcc

SEQ ID NO: 532269 - RNA, 19 nt, Artificial Sequence
  Synthetic
cugggaauaguucacugcc

SEQ ID NO: 532270 - RNA, 20 nt, Artificial Sequence
  Synthetic
acugggaauaguucacugcc

SEQ ID NO: 532271 - RNA, 21 nt, Artificial Sequence
  Synthetic
cacugggaauaguucacugcc

SEQ ID NO: 532272 - RNA, 22 nt, Artificial Sequence
  Synthetic
ccacugggaauaguucacugcc

SEQ ID NO: 532273 - RNA, 23 nt, Artificial Sequence
  Synthetic
accacugggaauaguucacugcc

SEQ ID NO: 532274 - RNA, 24 nt, Artificial Sequence
  Synthetic
aaccacugggaauaguucacugcc

SEQ ID NO: 532275 - RNA, 18 nt, Artificial Sequence
  Synthetic
acaauauauaggacugcc

SEQ ID NO: 532276 - RNA, 19 nt, Artificial Sequence
  Synthetic
aacaauauauaggacugcc

SEQ ID NO: 532277 - RNA, 20 nt, Artificial Sequence
  Synthetic
aaacaauauauaggacugcc

SEQ ID NO: 532278 - RNA, 21 nt, Artificial Sequence
  Synthetic
gaaacaauauauaggacugcc

SEQ ID NO: 532279 - RNA, 22 nt, Artificial Sequence
  Synthetic
ugaaacaauauauaggacugcc

SEQ ID NO: 532280 - RNA, 23 nt, Artificial Sequence
  Synthetic
augaaacaauauauaggacugcc

SEQ ID NO: 532281 - RNA, 24 nt, Artificial Sequence
  Synthetic
caugaaacaauauauaggacugcc

SEQ ID NO: 532282 - RNA, 18 nt, Artificial Sequence
  Synthetic
aaugcucauaugacugcc

SEQ ID NO: 532283 - RNA, 19 nt, Artificial Sequence
  Synthetic
caaugcucauaugacugcc

SEQ ID NO: 532284 - RNA, 20 nt, Artificial Sequence
  Synthetic
ucaaugcucauaugacugcc

SEQ ID NO: 532285 - RNA, 21 nt, Artificial Sequence
  Synthetic
cucaaugcucauaugacugcc

SEQ ID NO: 532286 - RNA, 22 nt, Artificial Sequence
  Synthetic
acucaaugcucauaugacugcc

SEQ ID NO: 532287 - RNA, 23 nt, Artificial Sequence
  Synthetic
uacucaaugcucauaugacugcc

SEQ ID NO: 532288 - RNA, 24 nt, Artificial Sequence
  Synthetic
auacucaaugcucauaugacugcc

SEQ ID NO: 532289 - RNA, 18 nt, Artificial Sequence
  Synthetic
uauuaauucccuacugcc

SEQ ID NO: 532290 - RNA, 19 nt, Artificial Sequence
  Synthetic
auauuaauucccuacugcc

SEQ ID NO: 532291 - RNA, 20 nt, Artificial Sequence
  Synthetic
aauauuaauucccuacugcc

SEQ ID NO: 532292 - RNA, 21 nt, Artificial Sequence
  Synthetic
gaauauuaauucccuacugcc

SEQ ID NO: 532293 - RNA, 22 nt, Artificial Sequence
  Synthetic
ggaauauuaauucccuacugcc

SEQ ID NO: 532294 - RNA, 23 nt, Artificial Sequence
  Synthetic
uggaauauuaauucccuacugcc

SEQ ID NO: 532295 - RNA, 24 nt, Artificial Sequence
  Synthetic
cuggaauauuaauucccuacugcc

SEQ ID NO: 532296 - RNA, 18 nt, Artificial Sequence
  Synthetic
aauuuauaaucuacugcc

SEQ ID NO: 532297 - RNA, 19 nt, Artificial Sequence
  Synthetic
aaauuuauaaucuacugcc

SEQ ID NO: 532298 - RNA, 20 nt, Artificial Sequence
  Synthetic
uaaauuuauaaucuacugcc

SEQ ID NO: 532299 - RNA, 21 nt, Artificial Sequence
  Synthetic
auaaauuuauaaucuacugcc

SEQ ID NO: 532300 - RNA, 22 nt, Artificial Sequence
  Synthetic
aauaaauuuauaaucuacugcc

SEQ ID NO: 532301 - RNA, 23 nt, Artificial Sequence
  Synthetic
gaauaaauuuauaaucuacugcc

SEQ ID NO: 532302 - RNA, 24 nt, Artificial Sequence
  Synthetic
agaauaaauuuauaaucuacugcc

SEQ ID NO: 532303 - RNA, 18 nt, Artificial Sequence
  Synthetic
ugagccaccgcaccugcc

SEQ ID NO: 532304 - RNA, 19 nt, Artificial Sequence
  Synthetic
augagccaccgcaccugcc

SEQ ID NO: 532305 - RNA, 20 nt, Artificial Sequence
  Synthetic
caugagccaccgcaccugcc

SEQ ID NO: 532306 - RNA, 21 nt, Artificial Sequence
  Synthetic
acaugagccaccgcaccugcc

SEQ ID NO: 532307 - RNA, 22 nt, Artificial Sequence
  Synthetic
gacaugagccaccgcaccugcc

SEQ ID NO: 532308 - RNA, 23 nt, Artificial Sequence
  Synthetic
agacaugagccaccgcaccugcc

SEQ ID NO: 532309 - RNA, 24 nt, Artificial Sequence
  Synthetic
cagacaugagccaccgcaccugcc

SEQ ID NO: 532310 - RNA, 18 nt, Artificial Sequence
  Synthetic
uuucagagaugcccugcc

SEQ ID NO: 532311 - RNA, 19 nt, Artificial Sequence
  Synthetic
cuuucagagaugcccugcc

SEQ ID NO: 532312 - RNA, 20 nt, Artificial Sequence
  Synthetic
ucuuucagagaugcccugcc

SEQ ID NO: 532313 - RNA, 21 nt, Artificial Sequence
  Synthetic
uucuuucagagaugcccugcc

SEQ ID NO: 532314 - RNA, 22 nt, Artificial Sequence
  Synthetic
uuucuuucagagaugcccugcc

SEQ ID NO: 532315 - RNA, 23 nt, Artificial Sequence
  Synthetic
cuuucuuucagagaugcccugcc

SEQ ID NO: 532316 - RNA, 24 nt, Artificial Sequence
  Synthetic
ccuuucuuucagagaugcccugcc

SEQ ID NO: 532317 - RNA, 18 nt, Artificial Sequence
  Synthetic
uucauccaugucccugcc

SEQ ID NO: 532318 - RNA, 19 nt, Artificial Sequence
  Synthetic
cuucauccaugucccugcc

SEQ ID NO: 532319 - RNA, 20 nt, Artificial Sequence
  Synthetic
gcuucauccaugucccugcc

SEQ ID NO: 532320 - RNA, 21 nt, Artificial Sequence
  Synthetic
agcuucauccaugucccugcc

SEQ ID NO: 532321 - RNA, 22 nt, Artificial Sequence
  Synthetic
cagcuucauccaugucccugcc

SEQ ID NO: 532322 - RNA, 23 nt, Artificial Sequence
  Synthetic
ccagcuucauccaugucccugcc

SEQ ID NO: 532323 - RNA, 24 nt, Artificial Sequence
  Synthetic
uccagcuucauccaugucccugcc

SEQ ID NO: 532324 - RNA, 18 nt, Artificial Sequence
  Synthetic
agcauuuuugguccugcc

SEQ ID NO: 532325 - RNA, 19 nt, Artificial Sequence
  Synthetic
cagcauuuuugguccugcc

SEQ ID NO: 532326 - RNA, 20 nt, Artificial Sequence
  Synthetic
acagcauuuuugguccugcc

SEQ ID NO: 532327 - RNA, 21 nt, Artificial Sequence
  Synthetic
gacagcauuuuugguccugcc

SEQ ID NO: 532328 - RNA, 22 nt, Artificial Sequence
  Synthetic
ggacagcauuuuugguccugcc

SEQ ID NO: 532329 - RNA, 23 nt, Artificial Sequence
  Synthetic
uggacagcauuuuugguccugcc

SEQ ID NO: 532330 - RNA, 24 nt, Artificial Sequence
  Synthetic
uuggacagcauuuuugguccugcc

SEQ ID NO: 532331 - RNA, 18 nt, Artificial Sequence
  Synthetic
ggcgucagcagagcugcc

SEQ ID NO: 532332 - RNA, 19 nt, Artificial Sequence
  Synthetic
gggcgucagcagagcugcc

SEQ ID NO: 532333 - RNA, 20 nt, Artificial Sequence
  Synthetic
ugggcgucagcagagcugcc

SEQ ID NO: 532334 - RNA, 21 nt, Artificial Sequence
  Synthetic
gugggcgucagcagagcugcc

SEQ ID NO: 532335 - RNA, 22 nt, Artificial Sequence
  Synthetic
agugggcgucagcagagcugcc

SEQ ID NO: 532336 - RNA, 23 nt, Artificial Sequence
  Synthetic
cagugggcgucagcagagcugcc

SEQ ID NO: 532337 - RNA, 24 nt, Artificial Sequence
  Synthetic
ccagugggcgucagcagagcugcc

SEQ ID NO: 532338 - RNA, 18 nt, Artificial Sequence
  Synthetic
aauacaauauuagcugcc

SEQ ID NO: 532339 - RNA, 19 nt, Artificial Sequence
  Synthetic
aaauacaauauuagcugcc

SEQ ID NO: 532340 - RNA, 20 nt, Artificial Sequence
  Synthetic
aaaauacaauauuagcugcc

SEQ ID NO: 532341 - RNA, 21 nt, Artificial Sequence
  Synthetic
gaaaauacaauauuagcugcc

SEQ ID NO: 532342 - RNA, 22 nt, Artificial Sequence
  Synthetic
agaaaauacaauauuagcugcc

SEQ ID NO: 532343 - RNA, 23 nt, Artificial Sequence
  Synthetic
uagaaaauacaauauuagcugcc

SEQ ID NO: 532344 - RNA, 24 nt, Artificial Sequence
  Synthetic
auagaaaauacaauauuagcugcc

SEQ ID NO: 532345 - RNA, 18 nt, Artificial Sequence
  Synthetic
cauguuggccaggcugcc

SEQ ID NO: 532346 - RNA, 19 nt, Artificial Sequence
  Synthetic
ccauguuggccaggcugcc

SEQ ID NO: 532347 - RNA, 20 nt, Artificial Sequence
  Synthetic
accauguuggccaggcugcc

SEQ ID NO: 532348 - RNA, 21 nt, Artificial Sequence
  Synthetic
caccauguuggccaggcugcc

SEQ ID NO: 532349 - RNA, 22 nt, Artificial Sequence
  Synthetic
ucaccauguuggccaggcugcc

SEQ ID NO: 532350 - RNA, 23 nt, Artificial Sequence
  Synthetic
uucaccauguuggccaggcugcc

SEQ ID NO: 532351 - RNA, 24 nt, Artificial Sequence
  Synthetic
uuucaccauguuggccaggcugcc

SEQ ID NO: 532352 - RNA, 18 nt, Artificial Sequence
  Synthetic
guagaaacucaggcugcc

SEQ ID NO: 532353 - RNA, 19 nt, Artificial Sequence
  Synthetic
aguagaaacucaggcugcc

SEQ ID NO: 532354 - RNA, 20 nt, Artificial Sequence
  Synthetic
uaguagaaacucaggcugcc

SEQ ID NO: 532355 - RNA, 21 nt, Artificial Sequence
  Synthetic
auaguagaaacucaggcugcc

SEQ ID NO: 532356 - RNA, 22 nt, Artificial Sequence
  Synthetic
cauaguagaaacucaggcugcc

SEQ ID NO: 532357 - RNA, 23 nt, Artificial Sequence
  Synthetic
acauaguagaaacucaggcugcc

SEQ ID NO: 532358 - RNA, 24 nt, Artificial Sequence
  Synthetic
gacauaguagaaacucaggcugcc

SEQ ID NO: 532359 - RNA, 18 nt, Artificial Sequence
  Synthetic
cacaaacuuauggcugcc

SEQ ID NO: 532360 - RNA, 19 nt, Artificial Sequence
  Synthetic
ccacaaacuuauggcugcc

SEQ ID NO: 532361 - RNA, 20 nt, Artificial Sequence
  Synthetic
accacaaacuuauggcugcc

SEQ ID NO: 532362 - RNA, 21 nt, Artificial Sequence
  Synthetic
aaccacaaacuuauggcugcc

SEQ ID NO: 532363 - RNA, 22 nt, Artificial Sequence
  Synthetic
aaaccacaaacuuauggcugcc

SEQ ID NO: 532364 - RNA, 23 nt, Artificial Sequence
  Synthetic
uaaaccacaaacuuauggcugcc

SEQ ID NO: 532365 - RNA, 24 nt, Artificial Sequence
  Synthetic
guaaaccacaaacuuauggcugcc

SEQ ID NO: 532366 - RNA, 18 nt, Artificial Sequence
  Synthetic
cuuccaagaaaugcugcc

SEQ ID NO: 532367 - RNA, 19 nt, Artificial Sequence
  Synthetic
ucuuccaagaaaugcugcc

SEQ ID NO: 532368 - RNA, 20 nt, Artificial Sequence
  Synthetic
cucuuccaagaaaugcugcc

SEQ ID NO: 532369 - RNA, 21 nt, Artificial Sequence
  Synthetic
ucucuuccaagaaaugcugcc

SEQ ID NO: 532370 - RNA, 22 nt, Artificial Sequence
  Synthetic
uucucuuccaagaaaugcugcc

SEQ ID NO: 532371 - RNA, 23 nt, Artificial Sequence
  Synthetic
uuucucuuccaagaaaugcugcc

SEQ ID NO: 532372 - RNA, 24 nt, Artificial Sequence
  Synthetic
cuuucucuuccaagaaaugcugcc

SEQ ID NO: 532373 - RNA, 18 nt, Artificial Sequence
  Synthetic
cuuacaaacuaugcugcc

SEQ ID NO: 532374 - RNA, 19 nt, Artificial Sequence
  Synthetic
acuuacaaacuaugcugcc

SEQ ID NO: 532375 - RNA, 20 nt, Artificial Sequence
  Synthetic
cacuuacaaacuaugcugcc

SEQ ID NO: 532376 - RNA, 21 nt, Artificial Sequence
  Synthetic
gcacuuacaaacuaugcugcc

SEQ ID NO: 532377 - RNA, 22 nt, Artificial Sequence
  Synthetic
ugcacuuacaaacuaugcugcc

SEQ ID NO: 532378 - RNA, 23 nt, Artificial Sequence
  Synthetic
augcacuuacaaacuaugcugcc

SEQ ID NO: 532379 - RNA, 24 nt, Artificial Sequence
  Synthetic
gaugcacuuacaaacuaugcugcc

SEQ ID NO: 532380 - RNA, 18 nt, Artificial Sequence
  Synthetic
agaaagcucagugcugcc

SEQ ID NO: 532381 - RNA, 19 nt, Artificial Sequence
  Synthetic
gagaaagcucagugcugcc

SEQ ID NO: 532382 - RNA, 20 nt, Artificial Sequence
  Synthetic
ugagaaagcucagugcugcc

SEQ ID NO: 532383 - RNA, 21 nt, Artificial Sequence
  Synthetic
uugagaaagcucagugcugcc

SEQ ID NO: 532384 - RNA, 22 nt, Artificial Sequence
  Synthetic
cuugagaaagcucagugcugcc

SEQ ID NO: 532385 - RNA, 23 nt, Artificial Sequence
  Synthetic
gcuugagaaagcucagugcugcc

SEQ ID NO: 532386 - RNA, 24 nt, Artificial Sequence
  Synthetic
ugcuugagaaagcucagugcugcc

SEQ ID NO: 532387 - RNA, 18 nt, Artificial Sequence
  Synthetic
ugaggcuauggaucugcc

SEQ ID NO: 532388 - RNA, 19 nt, Artificial Sequence
  Synthetic
uugaggcuauggaucugcc

SEQ ID NO: 532389 - RNA, 20 nt, Artificial Sequence
  Synthetic
uuugaggcuauggaucugcc

SEQ ID NO: 532390 - RNA, 21 nt, Artificial Sequence
  Synthetic
guuugaggcuauggaucugcc

SEQ ID NO: 532391 - RNA, 22 nt, Artificial Sequence
  Synthetic
uguuugaggcuauggaucugcc

SEQ ID NO: 532392 - RNA, 23 nt, Artificial Sequence
  Synthetic
auguuugaggcuauggaucugcc

SEQ ID NO: 532393 - RNA, 24 nt, Artificial Sequence
  Synthetic
aauguuugaggcuauggaucugcc

SEQ ID NO: 532394 - RNA, 18 nt, Artificial Sequence
  Synthetic
caacuacucaacucugcc

SEQ ID NO: 532395 - RNA, 19 nt, Artificial Sequence
  Synthetic
acaacuacucaacucugcc

SEQ ID NO: 532396 - RNA, 20 nt, Artificial Sequence
  Synthetic
uacaacuacucaacucugcc

SEQ ID NO: 532397 - RNA, 21 nt, Artificial Sequence
  Synthetic
uuacaacuacucaacucugcc

SEQ ID NO: 532398 - RNA, 22 nt, Artificial Sequence
  Synthetic
guuacaacuacucaacucugcc

SEQ ID NO: 532399 - RNA, 23 nt, Artificial Sequence
  Synthetic
uguuacaacuacucaacucugcc

SEQ ID NO: 532400 - RNA, 24 nt, Artificial Sequence
  Synthetic
uuguuacaacuacucaacucugcc

SEQ ID NO: 532401 - RNA, 18 nt, Artificial Sequence
  Synthetic
ugggcaucaccuucugcc

SEQ ID NO: 532402 - RNA, 19 nt, Artificial Sequence
  Synthetic
gugggcaucaccuucugcc

SEQ ID NO: 532403 - RNA, 20 nt, Artificial Sequence
  Synthetic
ugugggcaucaccuucugcc

SEQ ID NO: 532404 - RNA, 21 nt, Artificial Sequence
  Synthetic
gugugggcaucaccuucugcc

SEQ ID NO: 532405 - RNA, 22 nt, Artificial Sequence
  Synthetic
ugugugggcaucaccuucugcc

SEQ ID NO: 532406 - RNA, 23 nt, Artificial Sequence
  Synthetic
gugugugggcaucaccuucugcc

SEQ ID NO: 532407 - RNA, 24 nt, Artificial Sequence
  Synthetic
agugugugggcaucaccuucugcc

SEQ ID NO: 532408 - RNA, 18 nt, Artificial Sequence
  Synthetic
ugggacuuaauuucugcc

SEQ ID NO: 532409 - RNA, 19 nt, Artificial Sequence
  Synthetic
augggacuuaauuucugcc

SEQ ID NO: 532410 - RNA, 20 nt, Artificial Sequence
  Synthetic
aaugggacuuaauuucugcc

SEQ ID NO: 532411 - RNA, 21 nt, Artificial Sequence
  Synthetic
caaugggacuuaauuucugcc

SEQ ID NO: 532412 - RNA, 22 nt, Artificial Sequence
  Synthetic
acaaugggacuuaauuucugcc

SEQ ID NO: 532413 - RNA, 23 nt, Artificial Sequence
  Synthetic
cacaaugggacuuaauuucugcc

SEQ ID NO: 532414 - RNA, 24 nt, Artificial Sequence
  Synthetic
ccacaaugggacuuaauuucugcc

SEQ ID NO: 532415 - RNA, 18 nt, Artificial Sequence
  Synthetic
gaccaucccuuuucugcc

SEQ ID NO: 532416 - RNA, 19 nt, Artificial Sequence
  Synthetic
ggaccaucccuuuucugcc

SEQ ID NO: 532417 - RNA, 20 nt, Artificial Sequence
  Synthetic
gggaccaucccuuuucugcc

SEQ ID NO: 532418 - RNA, 21 nt, Artificial Sequence
  Synthetic
ggggaccaucccuuuucugcc

SEQ ID NO: 532419 - RNA, 22 nt, Artificial Sequence
  Synthetic
uggggaccaucccuuuucugcc

SEQ ID NO: 532420 - RNA, 23 nt, Artificial Sequence
  Synthetic
cuggggaccaucccuuuucugcc

SEQ ID NO: 532421 - RNA, 24 nt, Artificial Sequence
  Synthetic
gcuggggaccaucccuuuucugcc

SEQ ID NO: 532422 - RNA, 18 nt, Artificial Sequence
  Synthetic
gccaaggaguuuucugcc

SEQ ID NO: 532423 - RNA, 19 nt, Artificial Sequence
  Synthetic
agccaaggaguuuucugcc

SEQ ID NO: 532424 - RNA, 20 nt, Artificial Sequence
  Synthetic
aagccaaggaguuuucugcc

SEQ ID NO: 532425 - RNA, 21 nt, Artificial Sequence
  Synthetic
gaagccaaggaguuuucugcc

SEQ ID NO: 532426 - RNA, 22 nt, Artificial Sequence
  Synthetic
ugaagccaaggaguuuucugcc

SEQ ID NO: 532427 - RNA, 23 nt, Artificial Sequence
  Synthetic
cugaagccaaggaguuuucugcc

SEQ ID NO: 532428 - RNA, 24 nt, Artificial Sequence
  Synthetic
acugaagccaaggaguuuucugcc

SEQ ID NO: 532429 - RNA, 18 nt, Artificial Sequence
  Synthetic
aaaaucaauaaaagugcc

SEQ ID NO: 532430 - RNA, 19 nt, Artificial Sequence
  Synthetic
aaaaaucaauaaaagugcc

SEQ ID NO: 532431 - RNA, 20 nt, Artificial Sequence
  Synthetic
caaaaaucaauaaaagugcc

SEQ ID NO: 532432 - RNA, 21 nt, Artificial Sequence
  Synthetic
ccaaaaaucaauaaaagugcc

SEQ ID NO: 532433 - RNA, 22 nt, Artificial Sequence
  Synthetic
uccaaaaaucaauaaaagugcc

SEQ ID NO: 532434 - RNA, 23 nt, Artificial Sequence
  Synthetic
uuccaaaaaucaauaaaagugcc

SEQ ID NO: 532435 - RNA, 24 nt, Artificial Sequence
  Synthetic
auuccaaaaaucaauaaaagugcc

SEQ ID NO: 532436 - RNA, 18 nt, Artificial Sequence
  Synthetic
caaagagaauaaagugcc

SEQ ID NO: 532437 - RNA, 19 nt, Artificial Sequence
  Synthetic
acaaagagaauaaagugcc

SEQ ID NO: 532438 - RNA, 20 nt, Artificial Sequence
  Synthetic
uacaaagagaauaaagugcc

SEQ ID NO: 532439 - RNA, 21 nt, Artificial Sequence
  Synthetic
cuacaaagagaauaaagugcc

SEQ ID NO: 532440 - RNA, 22 nt, Artificial Sequence
  Synthetic
gcuacaaagagaauaaagugcc

SEQ ID NO: 532441 - RNA, 23 nt, Artificial Sequence
  Synthetic
ugcuacaaagagaauaaagugcc

SEQ ID NO: 532442 - RNA, 24 nt, Artificial Sequence
  Synthetic
uugcuacaaagagaauaaagugcc

SEQ ID NO: 532443 - RNA, 18 nt, Artificial Sequence
  Synthetic
ccacaaaagcgaagugcc

SEQ ID NO: 532444 - RNA, 19 nt, Artificial Sequence
  Synthetic
gccacaaaagcgaagugcc

SEQ ID NO: 532445 - RNA, 20 nt, Artificial Sequence
  Synthetic
agccacaaaagcgaagugcc

SEQ ID NO: 532446 - RNA, 21 nt, Artificial Sequence
  Synthetic
gagccacaaaagcgaagugcc

SEQ ID NO: 532447 - RNA, 22 nt, Artificial Sequence
  Synthetic
agagccacaaaagcgaagugcc

SEQ ID NO: 532448 - RNA, 23 nt, Artificial Sequence
  Synthetic
cagagccacaaaagcgaagugcc

SEQ ID NO: 532449 - RNA, 24 nt, Artificial Sequence
  Synthetic
ucagagccacaaaagcgaagugcc

SEQ ID NO: 532450 - RNA, 18 nt, Artificial Sequence
  Synthetic
aacuuaguuuucagugcc

SEQ ID NO: 532451 - RNA, 19 nt, Artificial Sequence
  Synthetic
aaacuuaguuuucagugcc

SEQ ID NO: 532452 - RNA, 20 nt, Artificial Sequence
  Synthetic
aaaacuuaguuuucagugcc

SEQ ID NO: 532453 - RNA, 21 nt, Artificial Sequence
  Synthetic
aaaaacuuaguuuucagugcc

SEQ ID NO: 532454 - RNA, 22 nt, Artificial Sequence
  Synthetic
caaaaacuuaguuuucagugcc

SEQ ID NO: 532455 - RNA, 23 nt, Artificial Sequence
  Synthetic
ucaaaaacuuaguuuucagugcc

SEQ ID NO: 532456 - RNA, 24 nt, Artificial Sequence
  Synthetic
aucaaaaacuuaguuuucagugcc

SEQ ID NO: 532457 - RNA, 18 nt, Artificial Sequence
  Synthetic
uggagaaacaagagugcc

SEQ ID NO: 532458 - RNA, 19 nt, Artificial Sequence
  Synthetic
uuggagaaacaagagugcc

SEQ ID NO: 532459 - RNA, 20 nt, Artificial Sequence
  Synthetic
uuuggagaaacaagagugcc

SEQ ID NO: 532460 - RNA, 21 nt, Artificial Sequence
  Synthetic
uuuuggagaaacaagagugcc

SEQ ID NO: 532461 - RNA, 22 nt, Artificial Sequence
  Synthetic
uuuuuggagaaacaagagugcc

SEQ ID NO: 532462 - RNA, 23 nt, Artificial Sequence
  Synthetic
guuuuuggagaaacaagagugcc

SEQ ID NO: 532463 - RNA, 24 nt, Artificial Sequence
  Synthetic
gguuuuuggagaaacaagagugcc

SEQ ID NO: 532464 - RNA, 18 nt, Artificial Sequence
  Synthetic
aaguacagacauagugcc

SEQ ID NO: 532465 - RNA, 19 nt, Artificial Sequence
  Synthetic
aaaguacagacauagugcc

SEQ ID NO: 532466 - RNA, 20 nt, Artificial Sequence
  Synthetic
uaaaguacagacauagugcc

SEQ ID NO: 532467 - RNA, 21 nt, Artificial Sequence
  Synthetic
uuaaaguacagacauagugcc

SEQ ID NO: 532468 - RNA, 22 nt, Artificial Sequence
  Synthetic
uuuaaaguacagacauagugcc

SEQ ID NO: 532469 - RNA, 23 nt, Artificial Sequence
  Synthetic
uuuuaaaguacagacauagugcc

SEQ ID NO: 532470 - RNA, 24 nt, Artificial Sequence
  Synthetic
auuuuaaaguacagacauagugcc

SEQ ID NO: 532471 - RNA, 18 nt, Artificial Sequence
  Synthetic
cagcuugcaccacgugcc

SEQ ID NO: 532472 - RNA, 19 nt, Artificial Sequence
  Synthetic
acagcuugcaccacgugcc

SEQ ID NO: 532473 - RNA, 20 nt, Artificial Sequence
  Synthetic
aacagcuugcaccacgugcc

SEQ ID NO: 532474 - RNA, 21 nt, Artificial Sequence
  Synthetic
caacagcuugcaccacgugcc

SEQ ID NO: 532475 - RNA, 22 nt, Artificial Sequence
  Synthetic
ucaacagcuugcaccacgugcc

SEQ ID NO: 532476 - RNA, 23 nt, Artificial Sequence
  Synthetic
aucaacagcuugcaccacgugcc

SEQ ID NO: 532477 - RNA, 24 nt, Artificial Sequence
  Synthetic
gaucaacagcuugcaccacgugcc

SEQ ID NO: 532478 - RNA, 18 nt, Artificial Sequence
  Synthetic
gguugcauccuccgugcc

SEQ ID NO: 532479 - RNA, 19 nt, Artificial Sequence
  Synthetic
ugguugcauccuccgugcc

SEQ ID NO: 532480 - RNA, 20 nt, Artificial Sequence
  Synthetic
augguugcauccuccgugcc

SEQ ID NO: 532481 - RNA, 21 nt, Artificial Sequence
  Synthetic
caugguugcauccuccgugcc

SEQ ID NO: 532482 - RNA, 22 nt, Artificial Sequence
  Synthetic
ucaugguugcauccuccgugcc

SEQ ID NO: 532483 - RNA, 23 nt, Artificial Sequence
  Synthetic
uucaugguugcauccuccgugcc

SEQ ID NO: 532484 - RNA, 24 nt, Artificial Sequence
  Synthetic
auucaugguugcauccuccgugcc

SEQ ID NO: 532485 - RNA, 18 nt, Artificial Sequence
  Synthetic
accauacaucaucgugcc

SEQ ID NO: 532486 - RNA, 19 nt, Artificial Sequence
  Synthetic
gaccauacaucaucgugcc

SEQ ID NO: 532487 - RNA, 20 nt, Artificial Sequence
  Synthetic
ugaccauacaucaucgugcc

SEQ ID NO: 532488 - RNA, 21 nt, Artificial Sequence
  Synthetic
gugaccauacaucaucgugcc

SEQ ID NO: 532489 - RNA, 22 nt, Artificial Sequence
  Synthetic
agugaccauacaucaucgugcc

SEQ ID NO: 532490 - RNA, 23 nt, Artificial Sequence
  Synthetic
cagugaccauacaucaucgugcc

SEQ ID NO: 532491 - RNA, 24 nt, Artificial Sequence
  Synthetic
gcagugaccauacaucaucgugcc

SEQ ID NO: 532492 - RNA, 18 nt, Artificial Sequence
  Synthetic
auuuuugacaaaggugcc

SEQ ID NO: 532493 - RNA, 19 nt, Artificial Sequence
  Synthetic
cauuuuugacaaaggugcc

SEQ ID NO: 532494 - RNA, 20 nt, Artificial Sequence
  Synthetic
ucauuuuugacaaaggugcc

SEQ ID NO: 532495 - RNA, 21 nt, Artificial Sequence
  Synthetic
cucauuuuugacaaaggugcc

SEQ ID NO: 532496 - RNA, 22 nt, Artificial Sequence
  Synthetic
acucauuuuugacaaaggugcc

SEQ ID NO: 532497 - RNA, 23 nt, Artificial Sequence
  Synthetic
aacucauuuuugacaaaggugcc

SEQ ID NO: 532498 - RNA, 24 nt, Artificial Sequence
  Synthetic
uaacucauuuuugacaaaggugcc

SEQ ID NO: 532499 - RNA, 18 nt, Artificial Sequence
  Synthetic
uaggguuuggcaggugcc

SEQ ID NO: 532500 - RNA, 19 nt, Artificial Sequence
  Synthetic
auaggguuuggcaggugcc

SEQ ID NO: 532501 - RNA, 20 nt, Artificial Sequence
  Synthetic
cauaggguuuggcaggugcc

SEQ ID NO: 532502 - RNA, 21 nt, Artificial Sequence
  Synthetic
ucauaggguuuggcaggugcc

SEQ ID NO: 532503 - RNA, 22 nt, Artificial Sequence
  Synthetic
cucauaggguuuggcaggugcc

SEQ ID NO: 532504 - RNA, 23 nt, Artificial Sequence
  Synthetic
ccucauaggguuuggcaggugcc

SEQ ID NO: 532505 - RNA, 24 nt, Artificial Sequence
  Synthetic
gccucauaggguuuggcaggugcc

SEQ ID NO: 532506 - RNA, 18 nt, Artificial Sequence
  Synthetic
ggguagaaaaggggugcc

SEQ ID NO: 532507 - RNA, 19 nt, Artificial Sequence
  Synthetic
gggguagaaaaggggugcc

SEQ ID NO: 532508 - RNA, 20 nt, Artificial Sequence
  Synthetic
ggggguagaaaaggggugcc

SEQ ID NO: 532509 - RNA, 21 nt, Artificial Sequence
  Synthetic
gggggguagaaaaggggugcc

SEQ ID NO: 532510 - RNA, 22 nt, Artificial Sequence
  Synthetic
ugggggguagaaaaggggugcc

SEQ ID NO: 532511 - RNA, 23 nt, Artificial Sequence
  Synthetic
uugggggguagaaaaggggugcc

SEQ ID NO: 532512 - RNA, 24 nt, Artificial Sequence
  Synthetic
cuugggggguagaaaaggggugcc

SEQ ID NO: 532513 - RNA, 18 nt, Artificial Sequence
  Synthetic
guuguaggugauggugcc

SEQ ID NO: 532514 - RNA, 19 nt, Artificial Sequence
  Synthetic
aguuguaggugauggugcc

SEQ ID NO: 532515 - RNA, 20 nt, Artificial Sequence
  Synthetic
caguuguaggugauggugcc

SEQ ID NO: 532516 - RNA, 21 nt, Artificial Sequence
  Synthetic
ucaguuguaggugauggugcc

SEQ ID NO: 532517 - RNA, 22 nt, Artificial Sequence
  Synthetic
cucaguuguaggugauggugcc

SEQ ID NO: 532518 - RNA, 23 nt, Artificial Sequence
  Synthetic
acucaguuguaggugauggugcc

SEQ ID NO: 532519 - RNA, 24 nt, Artificial Sequence
  Synthetic
uacucaguuguaggugauggugcc

SEQ ID NO: 532520 - RNA, 18 nt, Artificial Sequence
  Synthetic
gagauaagcaguggugcc

SEQ ID NO: 532521 - RNA, 19 nt, Artificial Sequence
  Synthetic
ggagauaagcaguggugcc

SEQ ID NO: 532522 - RNA, 20 nt, Artificial Sequence
  Synthetic
aggagauaagcaguggugcc

SEQ ID NO: 532523 - RNA, 21 nt, Artificial Sequence
  Synthetic
aaggagauaagcaguggugcc

SEQ ID NO: 532524 - RNA, 22 nt, Artificial Sequence
  Synthetic
caaggagauaagcaguggugcc

SEQ ID NO: 532525 - RNA, 23 nt, Artificial Sequence
  Synthetic
acaaggagauaagcaguggugcc

SEQ ID NO: 532526 - RNA, 24 nt, Artificial Sequence
  Synthetic
uacaaggagauaagcaguggugcc

SEQ ID NO: 532527 - RNA, 18 nt, Artificial Sequence
  Synthetic
gagacagauaguggugcc

SEQ ID NO: 532528 - RNA, 19 nt, Artificial Sequence
  Synthetic
agagacagauaguggugcc

SEQ ID NO: 532529 - RNA, 20 nt, Artificial Sequence
  Synthetic
aagagacagauaguggugcc

SEQ ID NO: 532530 - RNA, 21 nt, Artificial Sequence
  Synthetic
aaagagacagauaguggugcc

SEQ ID NO: 532531 - RNA, 22 nt, Artificial Sequence
  Synthetic
aaaagagacagauaguggugcc

SEQ ID NO: 532532 - RNA, 23 nt, Artificial Sequence
  Synthetic
caaaagagacagauaguggugcc

SEQ ID NO: 532533 - RNA, 24 nt, Artificial Sequence
  Synthetic
gcaaaagagacagauaguggugcc

SEQ ID NO: 532534 - RNA, 18 nt, Artificial Sequence
  Synthetic
cugacacuggaaugugcc

SEQ ID NO: 532535 - RNA, 19 nt, Artificial Sequence
  Synthetic
ccugacacuggaaugugcc

SEQ ID NO: 532536 - RNA, 20 nt, Artificial Sequence
  Synthetic
cccugacacuggaaugugcc

SEQ ID NO: 532537 - RNA, 21 nt, Artificial Sequence
  Synthetic
gcccugacacuggaaugugcc

SEQ ID NO: 532538 - RNA, 22 nt, Artificial Sequence
  Synthetic
ggcccugacacuggaaugugcc

SEQ ID NO: 532539 - RNA, 23 nt, Artificial Sequence
  Synthetic
gggcccugacacuggaaugugcc

SEQ ID NO: 532540 - RNA, 24 nt, Artificial Sequence
  Synthetic
agggcccugacacuggaaugugcc

SEQ ID NO: 532541 - RNA, 18 nt, Artificial Sequence
  Synthetic
uuuuccauuugaugugcc

SEQ ID NO: 532542 - RNA, 19 nt, Artificial Sequence
  Synthetic
cuuuuccauuugaugugcc

SEQ ID NO: 532543 - RNA, 20 nt, Artificial Sequence
  Synthetic
ccuuuuccauuugaugugcc

SEQ ID NO: 532544 - RNA, 21 nt, Artificial Sequence
  Synthetic
gccuuuuccauuugaugugcc

SEQ ID NO: 532545 - RNA, 22 nt, Artificial Sequence
  Synthetic
agccuuuuccauuugaugugcc

SEQ ID NO: 532546 - RNA, 23 nt, Artificial Sequence
  Synthetic
cagccuuuuccauuugaugugcc

SEQ ID NO: 532547 - RNA, 24 nt, Artificial Sequence
  Synthetic
ccagccuuuuccauuugaugugcc

SEQ ID NO: 532548 - RNA, 18 nt, Artificial Sequence
  Synthetic
uauuugucuuucugugcc

SEQ ID NO: 532549 - RNA, 19 nt, Artificial Sequence
  Synthetic
guauuugucuuucugugcc

SEQ ID NO: 532550 - RNA, 20 nt, Artificial Sequence
  Synthetic
gguauuugucuuucugugcc

SEQ ID NO: 532551 - RNA, 21 nt, Artificial Sequence
  Synthetic
ugguauuugucuuucugugcc

SEQ ID NO: 532552 - RNA, 22 nt, Artificial Sequence
  Synthetic
gugguauuugucuuucugugcc

SEQ ID NO: 532553 - RNA, 23 nt, Artificial Sequence
  Synthetic
ugugguauuugucuuucugugcc

SEQ ID NO: 532554 - RNA, 24 nt, Artificial Sequence
  Synthetic
augugguauuugucuuucugugcc

SEQ ID NO: 532555 - RNA, 18 nt, Artificial Sequence
  Synthetic
uauacagaacauugugcc

SEQ ID NO: 532556 - RNA, 19 nt, Artificial Sequence
  Synthetic
auauacagaacauugugcc

SEQ ID NO: 532557 - RNA, 20 nt, Artificial Sequence
  Synthetic
cauauacagaacauugugcc

SEQ ID NO: 532558 - RNA, 21 nt, Artificial Sequence
  Synthetic
acauauacagaacauugugcc

SEQ ID NO: 532559 - RNA, 22 nt, Artificial Sequence
  Synthetic
gacauauacagaacauugugcc

SEQ ID NO: 532560 - RNA, 23 nt, Artificial Sequence
  Synthetic
agacauauacagaacauugugcc

SEQ ID NO: 532561 - RNA, 24 nt, Artificial Sequence
  Synthetic
cagacauauacagaacauugugcc

SEQ ID NO: 532562 - RNA, 18 nt, Artificial Sequence
  Synthetic
gaguuaucaauaauugcc

SEQ ID NO: 532563 - RNA, 19 nt, Artificial Sequence
  Synthetic
ugaguuaucaauaauugcc

SEQ ID NO: 532564 - RNA, 20 nt, Artificial Sequence
  Synthetic
augaguuaucaauaauugcc

SEQ ID NO: 532565 - RNA, 21 nt, Artificial Sequence
  Synthetic
aaugaguuaucaauaauugcc

SEQ ID NO: 532566 - RNA, 22 nt, Artificial Sequence
  Synthetic
gaaugaguuaucaauaauugcc

SEQ ID NO: 532567 - RNA, 23 nt, Artificial Sequence
  Synthetic
agaaugaguuaucaauaauugcc

SEQ ID NO: 532568 - RNA, 24 nt, Artificial Sequence
  Synthetic
cagaaugaguuaucaauaauugcc

SEQ ID NO: 532569 - RNA, 18 nt, Artificial Sequence
  Synthetic
gccagcauuaacauugcc

SEQ ID NO: 532570 - RNA, 19 nt, Artificial Sequence
  Synthetic
agccagcauuaacauugcc

SEQ ID NO: 532571 - RNA, 20 nt, Artificial Sequence
  Synthetic
aagccagcauuaacauugcc

SEQ ID NO: 532572 - RNA, 21 nt, Artificial Sequence
  Synthetic
aaagccagcauuaacauugcc

SEQ ID NO: 532573 - RNA, 22 nt, Artificial Sequence
  Synthetic
caaagccagcauuaacauugcc

SEQ ID NO: 532574 - RNA, 23 nt, Artificial Sequence
  Synthetic
ucaaagccagcauuaacauugcc

SEQ ID NO: 532575 - RNA, 24 nt, Artificial Sequence
  Synthetic
gucaaagccagcauuaacauugcc

SEQ ID NO: 532576 - RNA, 18 nt, Artificial Sequence
  Synthetic
guugcccaugacauugcc

SEQ ID NO: 532577 - RNA, 19 nt, Artificial Sequence
  Synthetic
aguugcccaugacauugcc

SEQ ID NO: 532578 - RNA, 20 nt, Artificial Sequence
  Synthetic
uaguugcccaugacauugcc

SEQ ID NO: 532579 - RNA, 21 nt, Artificial Sequence
  Synthetic
uuaguugcccaugacauugcc

SEQ ID NO: 532580 - RNA, 22 nt, Artificial Sequence
  Synthetic
cuuaguugcccaugacauugcc

SEQ ID NO: 532581 - RNA, 23 nt, Artificial Sequence
  Synthetic
ccuuaguugcccaugacauugcc

SEQ ID NO: 532582 - RNA, 24 nt, Artificial Sequence
  Synthetic
cccuuaguugcccaugacauugcc

SEQ ID NO: 532583 - RNA, 18 nt, Artificial Sequence
  Synthetic
caucaauucuccauugcc

SEQ ID NO: 532584 - RNA, 19 nt, Artificial Sequence
  Synthetic
ccaucaauucuccauugcc

SEQ ID NO: 532585 - RNA, 20 nt, Artificial Sequence
  Synthetic
gccaucaauucuccauugcc

SEQ ID NO: 532586 - RNA, 21 nt, Artificial Sequence
  Synthetic
ugccaucaauucuccauugcc

SEQ ID NO: 532587 - RNA, 22 nt, Artificial Sequence
  Synthetic
cugccaucaauucuccauugcc

SEQ ID NO: 532588 - RNA, 23 nt, Artificial Sequence
  Synthetic
ucugccaucaauucuccauugcc

SEQ ID NO: 532589 - RNA, 24 nt, Artificial Sequence
  Synthetic
cucugccaucaauucuccauugcc

SEQ ID NO: 532590 - RNA, 18 nt, Artificial Sequence
  Synthetic
gcuaccuggagcauugcc

SEQ ID NO: 532591 - RNA, 19 nt, Artificial Sequence
  Synthetic
agcuaccuggagcauugcc

SEQ ID NO: 532592 - RNA, 20 nt, Artificial Sequence
  Synthetic
uagcuaccuggagcauugcc

SEQ ID NO: 532593 - RNA, 21 nt, Artificial Sequence
  Synthetic
guagcuaccuggagcauugcc

SEQ ID NO: 532594 - RNA, 22 nt, Artificial Sequence
  Synthetic
gguagcuaccuggagcauugcc

SEQ ID NO: 532595 - RNA, 23 nt, Artificial Sequence
  Synthetic
ugguagcuaccuggagcauugcc

SEQ ID NO: 532596 - RNA, 24 nt, Artificial Sequence
  Synthetic
gugguagcuaccuggagcauugcc

SEQ ID NO: 532597 - RNA, 18 nt, Artificial Sequence
  Synthetic
cuuaucaauggcauugcc

SEQ ID NO: 532598 - RNA, 19 nt, Artificial Sequence
  Synthetic
acuuaucaauggcauugcc

SEQ ID NO: 532599 - RNA, 20 nt, Artificial Sequence
  Synthetic
cacuuaucaauggcauugcc

SEQ ID NO: 532600 - RNA, 21 nt, Artificial Sequence
  Synthetic
gcacuuaucaauggcauugcc

SEQ ID NO: 532601 - RNA, 22 nt, Artificial Sequence
  Synthetic
ggcacuuaucaauggcauugcc

SEQ ID NO: 532602 - RNA, 23 nt, Artificial Sequence
  Synthetic
uggcacuuaucaauggcauugcc

SEQ ID NO: 532603 - RNA, 24 nt, Artificial Sequence
  Synthetic
cuggcacuuaucaauggcauugcc

SEQ ID NO: 532604 - RNA, 18 nt, Artificial Sequence
  Synthetic
cuaccugauuucauugcc

SEQ ID NO: 532605 - RNA, 19 nt, Artificial Sequence
  Synthetic
acuaccugauuucauugcc

SEQ ID NO: 532606 - RNA, 20 nt, Artificial Sequence
  Synthetic
uacuaccugauuucauugcc

SEQ ID NO: 532607 - RNA, 21 nt, Artificial Sequence
  Synthetic
cuacuaccugauuucauugcc

SEQ ID NO: 532608 - RNA, 22 nt, Artificial Sequence
  Synthetic
ucuacuaccugauuucauugcc

SEQ ID NO: 532609 - RNA, 23 nt, Artificial Sequence
  Synthetic
uucuacuaccugauuucauugcc

SEQ ID NO: 532610 - RNA, 24 nt, Artificial Sequence
  Synthetic
cuucuacuaccugauuucauugcc

SEQ ID NO: 532611 - RNA, 18 nt, Artificial Sequence
  Synthetic
uuaaauguucagauugcc

SEQ ID NO: 532612 - RNA, 19 nt, Artificial Sequence
  Synthetic
uuuaaauguucagauugcc

SEQ ID NO: 532613 - RNA, 20 nt, Artificial Sequence
  Synthetic
guuuaaauguucagauugcc

SEQ ID NO: 532614 - RNA, 21 nt, Artificial Sequence
  Synthetic
gguuuaaauguucagauugcc

SEQ ID NO: 532615 - RNA, 22 nt, Artificial Sequence
  Synthetic
agguuuaaauguucagauugcc

SEQ ID NO: 532616 - RNA, 23 nt, Artificial Sequence
  Synthetic
uagguuuaaauguucagauugcc

SEQ ID NO: 532617 - RNA, 24 nt, Artificial Sequence
  Synthetic
guagguuuaaauguucagauugcc

SEQ ID NO: 532618 - RNA, 18 nt, Artificial Sequence
  Synthetic
gaccaagaugauauugcc

SEQ ID NO: 532619 - RNA, 19 nt, Artificial Sequence
  Synthetic
ugaccaagaugauauugcc

SEQ ID NO: 532620 - RNA, 20 nt, Artificial Sequence
  Synthetic
uugaccaagaugauauugcc

SEQ ID NO: 532621 - RNA, 21 nt, Artificial Sequence
  Synthetic
uuugaccaagaugauauugcc

SEQ ID NO: 532622 - RNA, 22 nt, Artificial Sequence
  Synthetic
cuuugaccaagaugauauugcc

SEQ ID NO: 532623 - RNA, 23 nt, Artificial Sequence
  Synthetic
ucuuugaccaagaugauauugcc

SEQ ID NO: 532624 - RNA, 24 nt, Artificial Sequence
  Synthetic
uucuuugaccaagaugauauugcc

SEQ ID NO: 532625 - RNA, 18 nt, Artificial Sequence
  Synthetic
cucuaaaauuauauugcc

SEQ ID NO: 532626 - RNA, 19 nt, Artificial Sequence
  Synthetic
acucuaaaauuauauugcc

SEQ ID NO: 532627 - RNA, 20 nt, Artificial Sequence
  Synthetic
aacucuaaaauuauauugcc

SEQ ID NO: 532628 - RNA, 21 nt, Artificial Sequence
  Synthetic
gaacucuaaaauuauauugcc

SEQ ID NO: 532629 - RNA, 22 nt, Artificial Sequence
  Synthetic
ggaacucuaaaauuauauugcc

SEQ ID NO: 532630 - RNA, 23 nt, Artificial Sequence
  Synthetic
aggaacucuaaaauuauauugcc

SEQ ID NO: 532631 - RNA, 24 nt, Artificial Sequence
  Synthetic
aaggaacucuaaaauuauauugcc

SEQ ID NO: 532632 - RNA, 18 nt, Artificial Sequence
  Synthetic
aaaggucagaaacuugcc

SEQ ID NO: 532633 - RNA, 19 nt, Artificial Sequence
  Synthetic
gaaaggucagaaacuugcc

SEQ ID NO: 532634 - RNA, 20 nt, Artificial Sequence
  Synthetic
cgaaaggucagaaacuugcc

SEQ ID NO: 532635 - RNA, 21 nt, Artificial Sequence
  Synthetic
acgaaaggucagaaacuugcc

SEQ ID NO: 532636 - RNA, 22 nt, Artificial Sequence
  Synthetic
cacgaaaggucagaaacuugcc

SEQ ID NO: 532637 - RNA, 23 nt, Artificial Sequence
  Synthetic
ucacgaaaggucagaaacuugcc

SEQ ID NO: 532638 - RNA, 24 nt, Artificial Sequence
  Synthetic
gucacgaaaggucagaaacuugcc

SEQ ID NO: 532639 - RNA, 18 nt, Artificial Sequence
  Synthetic
gguccacgaggacuugcc

SEQ ID NO: 532640 - RNA, 19 nt, Artificial Sequence
  Synthetic
ugguccacgaggacuugcc

SEQ ID NO: 532641 - RNA, 20 nt, Artificial Sequence
  Synthetic
gugguccacgaggacuugcc

SEQ ID NO: 532642 - RNA, 21 nt, Artificial Sequence
  Synthetic
ugugguccacgaggacuugcc

SEQ ID NO: 532643 - RNA, 22 nt, Artificial Sequence
  Synthetic
uugugguccacgaggacuugcc

SEQ ID NO: 532644 - RNA, 23 nt, Artificial Sequence
  Synthetic
uuugugguccacgaggacuugcc

SEQ ID NO: 532645 - RNA, 24 nt, Artificial Sequence
  Synthetic
guuugugguccacgaggacuugcc

SEQ ID NO: 532646 - RNA, 18 nt, Artificial Sequence
  Synthetic
cacaaucuccaccuugcc

SEQ ID NO: 532647 - RNA, 19 nt, Artificial Sequence
  Synthetic
gcacaaucuccaccuugcc

SEQ ID NO: 532648 - RNA, 20 nt, Artificial Sequence
  Synthetic
ugcacaaucuccaccuugcc

SEQ ID NO: 532649 - RNA, 21 nt, Artificial Sequence
  Synthetic
cugcacaaucuccaccuugcc

SEQ ID NO: 532650 - RNA, 22 nt, Artificial Sequence
  Synthetic
acugcacaaucuccaccuugcc

SEQ ID NO: 532651 - RNA, 23 nt, Artificial Sequence
  Synthetic
cacugcacaaucuccaccuugcc

SEQ ID NO: 532652 - RNA, 24 nt, Artificial Sequence
  Synthetic
ucacugcacaaucuccaccuugcc

SEQ ID NO: 532653 - RNA, 18 nt, Artificial Sequence
  Synthetic
aaguuuucagaccuugcc

SEQ ID NO: 532654 - RNA, 19 nt, Artificial Sequence
  Synthetic
aaaguuuucagaccuugcc

SEQ ID NO: 532655 - RNA, 20 nt, Artificial Sequence
  Synthetic
aaaaguuuucagaccuugcc

SEQ ID NO: 532656 - RNA, 21 nt, Artificial Sequence
  Synthetic
caaaaguuuucagaccuugcc

SEQ ID NO: 532657 - RNA, 22 nt, Artificial Sequence
  Synthetic
acaaaaguuuucagaccuugcc

SEQ ID NO: 532658 - RNA, 23 nt, Artificial Sequence
  Synthetic
aacaaaaguuuucagaccuugcc

SEQ ID NO: 532659 - RNA, 24 nt, Artificial Sequence
  Synthetic
aaacaaaaguuuucagaccuugcc

SEQ ID NO: 532660 - RNA, 18 nt, Artificial Sequence
  Synthetic
gucuuacugccccuugcc

SEQ ID NO: 532661 - RNA, 19 nt, Artificial Sequence
  Synthetic
ggucuuacugccccuugcc

SEQ ID NO: 532662 - RNA, 20 nt, Artificial Sequence
  Synthetic
uggucuuacugccccuugcc

SEQ ID NO: 532663 - RNA, 21 nt, Artificial Sequence
  Synthetic
auggucuuacugccccuugcc

SEQ ID NO: 532664 - RNA, 22 nt, Artificial Sequence
  Synthetic
gauggucuuacugccccuugcc

SEQ ID NO: 532665 - RNA, 23 nt, Artificial Sequence
  Synthetic
ugauggucuuacugccccuugcc

SEQ ID NO: 532666 - RNA, 24 nt, Artificial Sequence
  Synthetic
uugauggucuuacugccccuugcc

SEQ ID NO: 532667 - RNA, 18 nt, Artificial Sequence
  Synthetic
aggacagugauccuugcc

SEQ ID NO: 532668 - RNA, 19 nt, Artificial Sequence
  Synthetic
aaggacagugauccuugcc

SEQ ID NO: 532669 - RNA, 20 nt, Artificial Sequence
  Synthetic
gaaggacagugauccuugcc

SEQ ID NO: 532670 - RNA, 21 nt, Artificial Sequence
  Synthetic
ugaaggacagugauccuugcc

SEQ ID NO: 532671 - RNA, 22 nt, Artificial Sequence
  Synthetic
uugaaggacagugauccuugcc

SEQ ID NO: 532672 - RNA, 23 nt, Artificial Sequence
  Synthetic
auugaaggacagugauccuugcc

SEQ ID NO: 532673 - RNA, 24 nt, Artificial Sequence
  Synthetic
cauugaaggacagugauccuugcc

SEQ ID NO: 532674 - RNA, 18 nt, Artificial Sequence
  Synthetic
uuuuccaaauuccuugcc

SEQ ID NO: 532675 - RNA, 19 nt, Artificial Sequence
  Synthetic
uuuuuccaaauuccuugcc

SEQ ID NO: 532676 - RNA, 20 nt, Artificial Sequence
  Synthetic
uuuuuuccaaauuccuugcc

SEQ ID NO: 532677 - RNA, 21 nt, Artificial Sequence
  Synthetic
guuuuuuccaaauuccuugcc

SEQ ID NO: 532678 - RNA, 22 nt, Artificial Sequence
  Synthetic
aguuuuuuccaaauuccuugcc

SEQ ID NO: 532679 - RNA, 23 nt, Artificial Sequence
  Synthetic
gaguuuuuuccaaauuccuugcc

SEQ ID NO: 532680 - RNA, 24 nt, Artificial Sequence
  Synthetic
ugaguuuuuuccaaauuccuugcc

SEQ ID NO: 532681 - RNA, 18 nt, Artificial Sequence
  Synthetic
ugaaaggaugugcuugcc

SEQ ID NO: 532682 - RNA, 19 nt, Artificial Sequence
  Synthetic
cugaaaggaugugcuugcc

SEQ ID NO: 532683 - RNA, 20 nt, Artificial Sequence
  Synthetic
gcugaaaggaugugcuugcc

SEQ ID NO: 532684 - RNA, 21 nt, Artificial Sequence
  Synthetic
agcugaaaggaugugcuugcc

SEQ ID NO: 532685 - RNA, 22 nt, Artificial Sequence
  Synthetic
aagcugaaaggaugugcuugcc

SEQ ID NO: 532686 - RNA, 23 nt, Artificial Sequence
  Synthetic
aaagcugaaaggaugugcuugcc

SEQ ID NO: 532687 - RNA, 24 nt, Artificial Sequence
  Synthetic
gaaagcugaaaggaugugcuugcc

SEQ ID NO: 532688 - RNA, 18 nt, Artificial Sequence
  Synthetic
agucuuuuuaaucuugcc

SEQ ID NO: 532689 - RNA, 19 nt, Artificial Sequence
  Synthetic
gagucuuuuuaaucuugcc

SEQ ID NO: 532690 - RNA, 20 nt, Artificial Sequence
  Synthetic
ugagucuuuuuaaucuugcc

SEQ ID NO: 532691 - RNA, 21 nt, Artificial Sequence
  Synthetic
cugagucuuuuuaaucuugcc

SEQ ID NO: 532692 - RNA, 22 nt, Artificial Sequence
  Synthetic
ccugagucuuuuuaaucuugcc

SEQ ID NO: 532693 - RNA, 23 nt, Artificial Sequence
  Synthetic
accugagucuuuuuaaucuugcc

SEQ ID NO: 532694 - RNA, 24 nt, Artificial Sequence
  Synthetic
uaccugagucuuuuuaaucuugcc

SEQ ID NO: 532695 - RNA, 18 nt, Artificial Sequence
  Synthetic
acagauaaacaucuugcc

SEQ ID NO: 532696 - RNA, 19 nt, Artificial Sequence
  Synthetic
cacagauaaacaucuugcc

SEQ ID NO: 532697 - RNA, 20 nt, Artificial Sequence
  Synthetic
ucacagauaaacaucuugcc

SEQ ID NO: 532698 - RNA, 21 nt, Artificial Sequence
  Synthetic
cucacagauaaacaucuugcc

SEQ ID NO: 532699 - RNA, 22 nt, Artificial Sequence
  Synthetic
acucacagauaaacaucuugcc

SEQ ID NO: 532700 - RNA, 23 nt, Artificial Sequence
  Synthetic
cacucacagauaaacaucuugcc

SEQ ID NO: 532701 - RNA, 24 nt, Artificial Sequence
  Synthetic
gcacucacagauaaacaucuugcc

SEQ ID NO: 532702 - RNA, 18 nt, Artificial Sequence
  Synthetic
cagaauuauacucuugcc

SEQ ID NO: 532703 - RNA, 19 nt, Artificial Sequence
  Synthetic
ccagaauuauacucuugcc

SEQ ID NO: 532704 - RNA, 20 nt, Artificial Sequence
  Synthetic
gccagaauuauacucuugcc

SEQ ID NO: 532705 - RNA, 21 nt, Artificial Sequence
  Synthetic
agccagaauuauacucuugcc

SEQ ID NO: 532706 - RNA, 22 nt, Artificial Sequence
  Synthetic
aagccagaauuauacucuugcc

SEQ ID NO: 532707 - RNA, 23 nt, Artificial Sequence
  Synthetic
caagccagaauuauacucuugcc

SEQ ID NO: 532708 - RNA, 24 nt, Artificial Sequence
  Synthetic
ucaagccagaauuauacucuugcc

SEQ ID NO: 532709 - RNA, 18 nt, Artificial Sequence
  Synthetic
uuacuuguuucucuugcc

SEQ ID NO: 532710 - RNA, 19 nt, Artificial Sequence
  Synthetic
guuacuuguuucucuugcc

SEQ ID NO: 532711 - RNA, 20 nt, Artificial Sequence
  Synthetic
uguuacuuguuucucuugcc

SEQ ID NO: 532712 - RNA, 21 nt, Artificial Sequence
  Synthetic
cuguuacuuguuucucuugcc

SEQ ID NO: 532713 - RNA, 22 nt, Artificial Sequence
  Synthetic
acuguuacuuguuucucuugcc

SEQ ID NO: 532714 - RNA, 23 nt, Artificial Sequence
  Synthetic
aacuguuacuuguuucucuugcc

SEQ ID NO: 532715 - RNA, 24 nt, Artificial Sequence
  Synthetic
caacuguuacuuguuucucuugcc

SEQ ID NO: 532716 - RNA, 18 nt, Artificial Sequence
  Synthetic
ccauacaguggucuugcc

SEQ ID NO: 532717 - RNA, 19 nt, Artificial Sequence
  Synthetic
cccauacaguggucuugcc

SEQ ID NO: 532718 - RNA, 20 nt, Artificial Sequence
  Synthetic
acccauacaguggucuugcc

SEQ ID NO: 532719 - RNA, 21 nt, Artificial Sequence
  Synthetic
uacccauacaguggucuugcc

SEQ ID NO: 532720 - RNA, 22 nt, Artificial Sequence
  Synthetic
uuacccauacaguggucuugcc

SEQ ID NO: 532721 - RNA, 23 nt, Artificial Sequence
  Synthetic
guuacccauacaguggucuugcc

SEQ ID NO: 532722 - RNA, 24 nt, Artificial Sequence
  Synthetic
uguuacccauacaguggucuugcc

SEQ ID NO: 532723 - RNA, 18 nt, Artificial Sequence
  Synthetic
acuacacgagaaguugcc

SEQ ID NO: 532724 - RNA, 19 nt, Artificial Sequence
  Synthetic
aacuacacgagaaguugcc

SEQ ID NO: 532725 - RNA, 20 nt, Artificial Sequence
  Synthetic
caacuacacgagaaguugcc

SEQ ID NO: 532726 - RNA, 21 nt, Artificial Sequence
  Synthetic
acaacuacacgagaaguugcc

SEQ ID NO: 532727 - RNA, 22 nt, Artificial Sequence
  Synthetic
uacaacuacacgagaaguugcc

SEQ ID NO: 532728 - RNA, 23 nt, Artificial Sequence
  Synthetic
uuacaacuacacgagaaguugcc

SEQ ID NO: 532729 - RNA, 24 nt, Artificial Sequence
  Synthetic
cuuacaacuacacgagaaguugcc

SEQ ID NO: 532730 - RNA, 18 nt, Artificial Sequence
  Synthetic
uugagaaucacaguugcc

SEQ ID NO: 532731 - RNA, 19 nt, Artificial Sequence
  Synthetic
cuugagaaucacaguugcc

SEQ ID NO: 532732 - RNA, 20 nt, Artificial Sequence
  Synthetic
gcuugagaaucacaguugcc

SEQ ID NO: 532733 - RNA, 21 nt, Artificial Sequence
  Synthetic
agcuugagaaucacaguugcc

SEQ ID NO: 532734 - RNA, 22 nt, Artificial Sequence
  Synthetic
aagcuugagaaucacaguugcc

SEQ ID NO: 532735 - RNA, 23 nt, Artificial Sequence
  Synthetic
aaagcuugagaaucacaguugcc

SEQ ID NO: 532736 - RNA, 24 nt, Artificial Sequence
  Synthetic
uaaagcuugagaaucacaguugcc

SEQ ID NO: 532737 - RNA, 18 nt, Artificial Sequence
  Synthetic
cccuucucuagaguugcc

SEQ ID NO: 532738 - RNA, 19 nt, Artificial Sequence
  Synthetic
ccccuucucuagaguugcc

SEQ ID NO: 532739 - RNA, 20 nt, Artificial Sequence
  Synthetic
accccuucucuagaguugcc

SEQ ID NO: 532740 - RNA, 21 nt, Artificial Sequence
  Synthetic
uaccccuucucuagaguugcc

SEQ ID NO: 532741 - RNA, 22 nt, Artificial Sequence
  Synthetic
cuaccccuucucuagaguugcc

SEQ ID NO: 532742 - RNA, 23 nt, Artificial Sequence
  Synthetic
ucuaccccuucucuagaguugcc

SEQ ID NO: 532743 - RNA, 24 nt, Artificial Sequence
  Synthetic
aucuaccccuucucuagaguugcc

SEQ ID NO: 532744 - RNA, 18 nt, Artificial Sequence
  Synthetic
auuaguggugggguugcc

SEQ ID NO: 532745 - RNA, 19 nt, Artificial Sequence
  Synthetic
uauuaguggugggguugcc

SEQ ID NO: 532746 - RNA, 20 nt, Artificial Sequence
  Synthetic
auauuaguggugggguugcc

SEQ ID NO: 532747 - RNA, 21 nt, Artificial Sequence
  Synthetic
cauauuaguggugggguugcc

SEQ ID NO: 532748 - RNA, 22 nt, Artificial Sequence
  Synthetic
ucauauuaguggugggguugcc

SEQ ID NO: 532749 - RNA, 23 nt, Artificial Sequence
  Synthetic
uucauauuaguggugggguugcc

SEQ ID NO: 532750 - RNA, 24 nt, Artificial Sequence
  Synthetic
cuucauauuaguggugggguugcc

SEQ ID NO: 532751 - RNA, 18 nt, Artificial Sequence
  Synthetic
acuggacuggugguugcc

SEQ ID NO: 532752 - RNA, 19 nt, Artificial Sequence
  Synthetic
gacuggacuggugguugcc

SEQ ID NO: 532753 - RNA, 20 nt, Artificial Sequence
  Synthetic
agacuggacuggugguugcc

SEQ ID NO: 532754 - RNA, 21 nt, Artificial Sequence
  Synthetic
aagacuggacuggugguugcc

SEQ ID NO: 532755 - RNA, 22 nt, Artificial Sequence
  Synthetic
aaagacuggacuggugguugcc

SEQ ID NO: 532756 - RNA, 23 nt, Artificial Sequence
  Synthetic
caaagacuggacuggugguugcc

SEQ ID NO: 532757 - RNA, 24 nt, Artificial Sequence
  Synthetic
ucaaagacuggacuggugguugcc

SEQ ID NO: 532758 - RNA, 18 nt, Artificial Sequence
  Synthetic
gucucagagacuguugcc

SEQ ID NO: 532759 - RNA, 19 nt, Artificial Sequence
  Synthetic
ugucucagagacuguugcc

SEQ ID NO: 532760 - RNA, 20 nt, Artificial Sequence
  Synthetic
uugucucagagacuguugcc

SEQ ID NO: 532761 - RNA, 21 nt, Artificial Sequence
  Synthetic
uuugucucagagacuguugcc

SEQ ID NO: 532762 - RNA, 22 nt, Artificial Sequence
  Synthetic
uuuugucucagagacuguugcc

SEQ ID NO: 532763 - RNA, 23 nt, Artificial Sequence
  Synthetic
uuuuugucucagagacuguugcc

SEQ ID NO: 532764 - RNA, 24 nt, Artificial Sequence
  Synthetic
cuuuuugucucagagacuguugcc

SEQ ID NO: 532765 - RNA, 18 nt, Artificial Sequence
  Synthetic
agaggcuuagguguugcc

SEQ ID NO: 532766 - RNA, 19 nt, Artificial Sequence
  Synthetic
aagaggcuuagguguugcc

SEQ ID NO: 532767 - RNA, 20 nt, Artificial Sequence
  Synthetic
uaagaggcuuagguguugcc

SEQ ID NO: 532768 - RNA, 21 nt, Artificial Sequence
  Synthetic
cuaagaggcuuagguguugcc

SEQ ID NO: 532769 - RNA, 22 nt, Artificial Sequence
  Synthetic
acuaagaggcuuagguguugcc

SEQ ID NO: 532770 - RNA, 23 nt, Artificial Sequence
  Synthetic
cacuaagaggcuuagguguugcc

SEQ ID NO: 532771 - RNA, 24 nt, Artificial Sequence
  Synthetic
ccacuaagaggcuuagguguugcc

SEQ ID NO: 532772 - RNA, 18 nt, Artificial Sequence
  Synthetic
gcccaucgaguuguugcc

SEQ ID NO: 532773 - RNA, 19 nt, Artificial Sequence
  Synthetic
ugcccaucgaguuguugcc

SEQ ID NO: 532774 - RNA, 20 nt, Artificial Sequence
  Synthetic
uugcccaucgaguuguugcc

SEQ ID NO: 532775 - RNA, 21 nt, Artificial Sequence
  Synthetic
uuugcccaucgaguuguugcc

SEQ ID NO: 532776 - RNA, 22 nt, Artificial Sequence
  Synthetic
guuugcccaucgaguuguugcc

SEQ ID NO: 532777 - RNA, 23 nt, Artificial Sequence
  Synthetic
uguuugcccaucgaguuguugcc

SEQ ID NO: 532778 - RNA, 24 nt, Artificial Sequence
  Synthetic
guguuugcccaucgaguuguugcc

SEQ ID NO: 532779 - RNA, 18 nt, Artificial Sequence
  Synthetic
caacauuuaaaauuugcc

SEQ ID NO: 532780 - RNA, 19 nt, Artificial Sequence
  Synthetic
ucaacauuuaaaauuugcc

SEQ ID NO: 532781 - RNA, 20 nt, Artificial Sequence
  Synthetic
uucaacauuuaaaauuugcc

SEQ ID NO: 532782 - RNA, 21 nt, Artificial Sequence
  Synthetic
uuucaacauuuaaaauuugcc

SEQ ID NO: 532783 - RNA, 22 nt, Artificial Sequence
  Synthetic
auuucaacauuuaaaauuugcc

SEQ ID NO: 532784 - RNA, 23 nt, Artificial Sequence
  Synthetic
uauuucaacauuuaaaauuugcc

SEQ ID NO: 532785 - RNA, 24 nt, Artificial Sequence
  Synthetic
uuauuucaacauuuaaaauuugcc

SEQ ID NO: 532786 - RNA, 18 nt, Artificial Sequence
  Synthetic
guuggccucacauuugcc

SEQ ID NO: 532787 - RNA, 19 nt, Artificial Sequence
  Synthetic
aguuggccucacauuugcc

SEQ ID NO: 532788 - RNA, 20 nt, Artificial Sequence
  Synthetic
caguuggccucacauuugcc

SEQ ID NO: 532789 - RNA, 21 nt, Artificial Sequence
  Synthetic
ucaguuggccucacauuugcc

SEQ ID NO: 532790 - RNA, 22 nt, Artificial Sequence
  Synthetic
cucaguuggccucacauuugcc

SEQ ID NO: 532791 - RNA, 23 nt, Artificial Sequence
  Synthetic
acucaguuggccucacauuugcc

SEQ ID NO: 532792 - RNA, 24 nt, Artificial Sequence
  Synthetic
aacucaguuggccucacauuugcc

SEQ ID NO: 532793 - RNA, 18 nt, Artificial Sequence
  Synthetic
cagaugguggcauuugcc

SEQ ID NO: 532794 - RNA, 19 nt, Artificial Sequence
  Synthetic
acagaugguggcauuugcc

SEQ ID NO: 532795 - RNA, 20 nt, Artificial Sequence
  Synthetic
cacagaugguggcauuugcc

SEQ ID NO: 532796 - RNA, 21 nt, Artificial Sequence
  Synthetic
acacagaugguggcauuugcc

SEQ ID NO: 532797 - RNA, 22 nt, Artificial Sequence
  Synthetic
cacacagaugguggcauuugcc

SEQ ID NO: 532798 - RNA, 23 nt, Artificial Sequence
  Synthetic
ucacacagaugguggcauuugcc

SEQ ID NO: 532799 - RNA, 24 nt, Artificial Sequence
  Synthetic
aucacacagaugguggcauuugcc

SEQ ID NO: 532800 - RNA, 18 nt, Artificial Sequence
  Synthetic
auauuuggcauauuugcc

SEQ ID NO: 532801 - RNA, 19 nt, Artificial Sequence
  Synthetic
aauauuuggcauauuugcc

SEQ ID NO: 532802 - RNA, 20 nt, Artificial Sequence
  Synthetic
uaauauuuggcauauuugcc

SEQ ID NO: 532803 - RNA, 21 nt, Artificial Sequence
  Synthetic
guaauauuuggcauauuugcc

SEQ ID NO: 532804 - RNA, 22 nt, Artificial Sequence
  Synthetic
gguaauauuuggcauauuugcc

SEQ ID NO: 532805 - RNA, 23 nt, Artificial Sequence
  Synthetic
agguaauauuuggcauauuugcc

SEQ ID NO: 532806 - RNA, 24 nt, Artificial Sequence
  Synthetic
uagguaauauuuggcauauuugcc

SEQ ID NO: 532807 - RNA, 18 nt, Artificial Sequence
  Synthetic
uguuguauacucuuugcc

SEQ ID NO: 532808 - RNA, 19 nt, Artificial Sequence
  Synthetic
uuguuguauacucuuugcc

SEQ ID NO: 532809 - RNA, 20 nt, Artificial Sequence
  Synthetic
uuuguuguauacucuuugcc

SEQ ID NO: 532810 - RNA, 21 nt, Artificial Sequence
  Synthetic
auuuguuguauacucuuugcc

SEQ ID NO: 532811 - RNA, 22 nt, Artificial Sequence
  Synthetic
uauuuguuguauacucuuugcc

SEQ ID NO: 532812 - RNA, 23 nt, Artificial Sequence
  Synthetic
auauuuguuguauacucuuugcc

SEQ ID NO: 532813 - RNA, 24 nt, Artificial Sequence
  Synthetic
cauauuuguuguauacucuuugcc

SEQ ID NO: 532814 - RNA, 18 nt, Artificial Sequence
  Synthetic
ugcuccagcuucuuugcc

SEQ ID NO: 532815 - RNA, 19 nt, Artificial Sequence
  Synthetic
gugcuccagcuucuuugcc

SEQ ID NO: 532816 - RNA, 20 nt, Artificial Sequence
  Synthetic
ugugcuccagcuucuuugcc

SEQ ID NO: 532817 - RNA, 21 nt, Artificial Sequence
  Synthetic
cugugcuccagcuucuuugcc

SEQ ID NO: 532818 - RNA, 22 nt, Artificial Sequence
  Synthetic
ucugugcuccagcuucuuugcc

SEQ ID NO: 532819 - RNA, 23 nt, Artificial Sequence
  Synthetic
cucugugcuccagcuucuuugcc

SEQ ID NO: 532820 - RNA, 24 nt, Artificial Sequence
  Synthetic
ucucugugcuccagcuucuuugcc

SEQ ID NO: 532821 - RNA, 18 nt, Artificial Sequence
  Synthetic
aucaucuccagguuugcc

SEQ ID NO: 532822 - RNA, 19 nt, Artificial Sequence
  Synthetic
uaucaucuccagguuugcc

SEQ ID NO: 532823 - RNA, 20 nt, Artificial Sequence
  Synthetic
uuaucaucuccagguuugcc

SEQ ID NO: 532824 - RNA, 21 nt, Artificial Sequence
  Synthetic
uuuaucaucuccagguuugcc

SEQ ID NO: 532825 - RNA, 22 nt, Artificial Sequence
  Synthetic
cuuuaucaucuccagguuugcc

SEQ ID NO: 532826 - RNA, 23 nt, Artificial Sequence
  Synthetic
ucuuuaucaucuccagguuugcc

SEQ ID NO: 532827 - RNA, 24 nt, Artificial Sequence
  Synthetic
uucuuuaucaucuccagguuugcc

SEQ ID NO: 532828 - RNA, 18 nt, Artificial Sequence
  Synthetic
ccaagccacugguuugcc

SEQ ID NO: 532829 - RNA, 19 nt, Artificial Sequence
  Synthetic
cccaagccacugguuugcc

SEQ ID NO: 532830 - RNA, 20 nt, Artificial Sequence
  Synthetic
ucccaagccacugguuugcc

SEQ ID NO: 532831 - RNA, 21 nt, Artificial Sequence
  Synthetic
gucccaagccacugguuugcc

SEQ ID NO: 532832 - RNA, 22 nt, Artificial Sequence
  Synthetic
agucccaagccacugguuugcc

SEQ ID NO: 532833 - RNA, 23 nt, Artificial Sequence
  Synthetic
gagucccaagccacugguuugcc

SEQ ID NO: 532834 - RNA, 24 nt, Artificial Sequence
  Synthetic
ugagucccaagccacugguuugcc

SEQ ID NO: 532835 - RNA, 18 nt, Artificial Sequence
  Synthetic
uuuuaaacaaauuuugcc

SEQ ID NO: 532836 - RNA, 19 nt, Artificial Sequence
  Synthetic
uuuuuaaacaaauuuugcc

SEQ ID NO: 532837 - RNA, 20 nt, Artificial Sequence
  Synthetic
guuuuuaaacaaauuuugcc

SEQ ID NO: 532838 - RNA, 21 nt, Artificial Sequence
  Synthetic
uguuuuuaaacaaauuuugcc

SEQ ID NO: 532839 - RNA, 22 nt, Artificial Sequence
  Synthetic
uuguuuuuaaacaaauuuugcc

SEQ ID NO: 532840 - RNA, 23 nt, Artificial Sequence
  Synthetic
cuuguuuuuaaacaaauuuugcc

SEQ ID NO: 532841 - RNA, 24 nt, Artificial Sequence
  Synthetic
gcuuguuuuuaaacaaauuuugcc

SEQ ID NO: 532842 - RNA, 18 nt, Artificial Sequence
  Synthetic
acuggaauucuuuuugcc

SEQ ID NO: 532843 - RNA, 19 nt, Artificial Sequence
  Synthetic
uacuggaauucuuuuugcc

SEQ ID NO: 532844 - RNA, 20 nt, Artificial Sequence
  Synthetic
guacuggaauucuuuuugcc

SEQ ID NO: 532845 - RNA, 21 nt, Artificial Sequence
  Synthetic
aguacuggaauucuuuuugcc

SEQ ID NO: 532846 - RNA, 22 nt, Artificial Sequence
  Synthetic
uaguacuggaauucuuuuugcc

SEQ ID NO: 532847 - RNA, 23 nt, Artificial Sequence
  Synthetic
cuaguacuggaauucuuuuugcc

SEQ ID NO: 532848 - RNA, 24 nt, Artificial Sequence
  Synthetic
gcuaguacuggaauucuuuuugcc

SEQ ID NO: 532849 - RNA, 18 nt, Artificial Sequence
  Synthetic
uuacuauuccaaaaaucc

SEQ ID NO: 532850 - RNA, 19 nt, Artificial Sequence
  Synthetic
uuuacuauuccaaaaaucc

SEQ ID NO: 532851 - RNA, 20 nt, Artificial Sequence
  Synthetic
auuuacuauuccaaaaaucc

SEQ ID NO: 532852 - RNA, 21 nt, Artificial Sequence
  Synthetic
cauuuacuauuccaaaaaucc

SEQ ID NO: 532853 - RNA, 22 nt, Artificial Sequence
  Synthetic
ucauuuacuauuccaaaaaucc

SEQ ID NO: 532854 - RNA, 23 nt, Artificial Sequence
  Synthetic
cucauuuacuauuccaaaaaucc

SEQ ID NO: 532855 - RNA, 24 nt, Artificial Sequence
  Synthetic
gcucauuuacuauuccaaaaaucc

SEQ ID NO: 532856 - RNA, 18 nt, Artificial Sequence
  Synthetic
cauugaguuuuaaaaucc

SEQ ID NO: 532857 - RNA, 19 nt, Artificial Sequence
  Synthetic
ucauugaguuuuaaaaucc

SEQ ID NO: 532858 - RNA, 20 nt, Artificial Sequence
  Synthetic
gucauugaguuuuaaaaucc

SEQ ID NO: 532859 - RNA, 21 nt, Artificial Sequence
  Synthetic
agucauugaguuuuaaaaucc

SEQ ID NO: 532860 - RNA, 22 nt, Artificial Sequence
  Synthetic
uagucauugaguuuuaaaaucc

SEQ ID NO: 532861 - RNA, 23 nt, Artificial Sequence
  Synthetic
cuagucauugaguuuuaaaaucc

SEQ ID NO: 532862 - RNA, 24 nt, Artificial Sequence
  Synthetic
gcuagucauugaguuuuaaaaucc

SEQ ID NO: 532863 - RNA, 18 nt, Artificial Sequence
  Synthetic
gucaaaagguacaaaucc

SEQ ID NO: 532864 - RNA, 19 nt, Artificial Sequence
  Synthetic
agucaaaagguacaaaucc

SEQ ID NO: 532865 - RNA, 20 nt, Artificial Sequence
  Synthetic
aagucaaaagguacaaaucc

SEQ ID NO: 532866 - RNA, 21 nt, Artificial Sequence
  Synthetic
uaagucaaaagguacaaaucc

SEQ ID NO: 532867 - RNA, 22 nt, Artificial Sequence
  Synthetic
auaagucaaaagguacaaaucc

SEQ ID NO: 532868 - RNA, 23 nt, Artificial Sequence
  Synthetic
cauaagucaaaagguacaaaucc

SEQ ID NO: 532869 - RNA, 24 nt, Artificial Sequence
  Synthetic
ucauaagucaaaagguacaaaucc

SEQ ID NO: 532870 - RNA, 18 nt, Artificial Sequence
  Synthetic
cuaguagguaccaaaucc

SEQ ID NO: 532871 - RNA, 19 nt, Artificial Sequence
  Synthetic
acuaguagguaccaaaucc

SEQ ID NO: 532872 - RNA, 20 nt, Artificial Sequence
  Synthetic
gacuaguagguaccaaaucc

SEQ ID NO: 532873 - RNA, 21 nt, Artificial Sequence
  Synthetic
agacuaguagguaccaaaucc

SEQ ID NO: 532874 - RNA, 22 nt, Artificial Sequence
  Synthetic
uagacuaguagguaccaaaucc

SEQ ID NO: 532875 - RNA, 23 nt, Artificial Sequence
  Synthetic
auagacuaguagguaccaaaucc

SEQ ID NO: 532876 - RNA, 24 nt, Artificial Sequence
  Synthetic
gauagacuaguagguaccaaaucc

SEQ ID NO: 532877 - RNA, 18 nt, Artificial Sequence
  Synthetic
ccucagcuucccaaaucc

SEQ ID NO: 532878 - RNA, 19 nt, Artificial Sequence
  Synthetic
gccucagcuucccaaaucc

SEQ ID NO: 532879 - RNA, 20 nt, Artificial Sequence
  Synthetic
ugccucagcuucccaaaucc

SEQ ID NO: 532880 - RNA, 21 nt, Artificial Sequence
  Synthetic
cugccucagcuucccaaaucc

SEQ ID NO: 532881 - RNA, 22 nt, Artificial Sequence
  Synthetic
ccugccucagcuucccaaaucc

SEQ ID NO: 532882 - RNA, 23 nt, Artificial Sequence
  Synthetic
gccugccucagcuucccaaaucc

SEQ ID NO: 532883 - RNA, 24 nt, Artificial Sequence
  Synthetic
ugccugccucagcuucccaaaucc

SEQ ID NO: 532884 - RNA, 18 nt, Artificial Sequence
  Synthetic
ugauuuuucuccaaaucc

SEQ ID NO: 532885 - RNA, 19 nt, Artificial Sequence
  Synthetic
uugauuuuucuccaaaucc

SEQ ID NO: 532886 - RNA, 20 nt, Artificial Sequence
  Synthetic
guugauuuuucuccaaaucc

SEQ ID NO: 532887 - RNA, 21 nt, Artificial Sequence
  Synthetic
uguugauuuuucuccaaaucc

SEQ ID NO: 532888 - RNA, 22 nt, Artificial Sequence
  Synthetic
auguugauuuuucuccaaaucc

SEQ ID NO: 532889 - RNA, 23 nt, Artificial Sequence
  Synthetic
uauguugauuuuucuccaaaucc

SEQ ID NO: 532890 - RNA, 24 nt, Artificial Sequence
  Synthetic
auauguugauuuuucuccaaaucc

SEQ ID NO: 532891 - RNA, 18 nt, Artificial Sequence
  Synthetic
uuaagauauuccaaaucc

SEQ ID NO: 532892 - RNA, 19 nt, Artificial Sequence
  Synthetic
auuaagauauuccaaaucc

SEQ ID NO: 532893 - RNA, 20 nt, Artificial Sequence
  Synthetic
uauuaagauauuccaaaucc

SEQ ID NO: 532894 - RNA, 21 nt, Artificial Sequence
  Synthetic
auauuaagauauuccaaaucc

SEQ ID NO: 532895 - RNA, 22 nt, Artificial Sequence
  Synthetic
uauauuaagauauuccaaaucc

SEQ ID NO: 532896 - RNA, 23 nt, Artificial Sequence
  Synthetic
guauauuaagauauuccaaaucc

SEQ ID NO: 532897 - RNA, 24 nt, Artificial Sequence
  Synthetic
aguauauuaagauauuccaaaucc

SEQ ID NO: 532898 - RNA, 18 nt, Artificial Sequence
  Synthetic
ugaacaauggagaaaucc

SEQ ID NO: 532899 - RNA, 19 nt, Artificial Sequence
  Synthetic
cugaacaauggagaaaucc

SEQ ID NO: 532900 - RNA, 20 nt, Artificial Sequence
  Synthetic
acugaacaauggagaaaucc

SEQ ID NO: 532901 - RNA, 21 nt, Artificial Sequence
  Synthetic
aacugaacaauggagaaaucc

SEQ ID NO: 532902 - RNA, 22 nt, Artificial Sequence
  Synthetic
gaacugaacaauggagaaaucc

SEQ ID NO: 532903 - RNA, 23 nt, Artificial Sequence
  Synthetic
agaacugaacaauggagaaaucc

SEQ ID NO: 532904 - RNA, 24 nt, Artificial Sequence
  Synthetic
gagaacugaacaauggagaaaucc

SEQ ID NO: 532905 - RNA, 18 nt, Artificial Sequence
  Synthetic
uaaagguaacugaaaucc

SEQ ID NO: 532906 - RNA, 19 nt, Artificial Sequence
  Synthetic
auaaagguaacugaaaucc

SEQ ID NO: 532907 - RNA, 20 nt, Artificial Sequence
  Synthetic
uauaaagguaacugaaaucc

SEQ ID NO: 532908 - RNA, 21 nt, Artificial Sequence
  Synthetic
auauaaagguaacugaaaucc

SEQ ID NO: 532909 - RNA, 22 nt, Artificial Sequence
  Synthetic
aauauaaagguaacugaaaucc

SEQ ID NO: 532910 - RNA, 23 nt, Artificial Sequence
  Synthetic
gaauauaaagguaacugaaaucc

SEQ ID NO: 532911 - RNA, 24 nt, Artificial Sequence
  Synthetic
agaauauaaagguaacugaaaucc

SEQ ID NO: 532912 - RNA, 18 nt, Artificial Sequence
  Synthetic
ugaauguccaauaaaucc

SEQ ID NO: 532913 - RNA, 19 nt, Artificial Sequence
  Synthetic
augaauguccaauaaaucc

SEQ ID NO: 532914 - RNA, 20 nt, Artificial Sequence
  Synthetic
uaugaauguccaauaaaucc

SEQ ID NO: 532915 - RNA, 21 nt, Artificial Sequence
  Synthetic
auaugaauguccaauaaaucc

SEQ ID NO: 532916 - RNA, 22 nt, Artificial Sequence
  Synthetic
uauaugaauguccaauaaaucc

SEQ ID NO: 532917 - RNA, 23 nt, Artificial Sequence
  Synthetic
cuauaugaauguccaauaaaucc

SEQ ID NO: 532918 - RNA, 24 nt, Artificial Sequence
  Synthetic
ucuauaugaauguccaauaaaucc

SEQ ID NO: 532919 - RNA, 18 nt, Artificial Sequence
  Synthetic
uccuaauaagauaaaucc

SEQ ID NO: 532920 - RNA, 19 nt, Artificial Sequence
  Synthetic
auccuaauaagauaaaucc

SEQ ID NO: 532921 - RNA, 20 nt, Artificial Sequence
  Synthetic
cauccuaauaagauaaaucc

SEQ ID NO: 532922 - RNA, 21 nt, Artificial Sequence
  Synthetic
ucauccuaauaagauaaaucc

SEQ ID NO: 532923 - RNA, 22 nt, Artificial Sequence
  Synthetic
uucauccuaauaagauaaaucc

SEQ ID NO: 532924 - RNA, 23 nt, Artificial Sequence
  Synthetic
guucauccuaauaagauaaaucc

SEQ ID NO: 532925 - RNA, 24 nt, Artificial Sequence
  Synthetic
uguucauccuaauaagauaaaucc

SEQ ID NO: 532926 - RNA, 18 nt, Artificial Sequence
  Synthetic
aaagcaauacaacaaucc

SEQ ID NO: 532927 - RNA, 19 nt, Artificial Sequence
  Synthetic
caaagcaauacaacaaucc

SEQ ID NO: 532928 - RNA, 20 nt, Artificial Sequence
  Synthetic
ccaaagcaauacaacaaucc

SEQ ID NO: 532929 - RNA, 21 nt, Artificial Sequence
  Synthetic
uccaaagcaauacaacaaucc

SEQ ID NO: 532930 - RNA, 22 nt, Artificial Sequence
  Synthetic
uuccaaagcaauacaacaaucc

SEQ ID NO: 532931 - RNA, 23 nt, Artificial Sequence
  Synthetic
auuccaaagcaauacaacaaucc

SEQ ID NO: 532932 - RNA, 24 nt, Artificial Sequence
  Synthetic
aauuccaaagcaauacaacaaucc

SEQ ID NO: 532933 - RNA, 18 nt, Artificial Sequence
  Synthetic
uuccccagcccccaaucc

SEQ ID NO: 532934 - RNA, 19 nt, Artificial Sequence
  Synthetic
uuuccccagcccccaaucc

SEQ ID NO: 532935 - RNA, 20 nt, Artificial Sequence
  Synthetic
auuuccccagcccccaaucc

SEQ ID NO: 532936 - RNA, 21 nt, Artificial Sequence
  Synthetic
cauuuccccagcccccaaucc

SEQ ID NO: 532937 - RNA, 22 nt, Artificial Sequence
  Synthetic
gcauuuccccagcccccaaucc

SEQ ID NO: 532938 - RNA, 23 nt, Artificial Sequence
  Synthetic
agcauuuccccagcccccaaucc

SEQ ID NO: 532939 - RNA, 24 nt, Artificial Sequence
  Synthetic
uagcauuuccccagcccccaaucc

SEQ ID NO: 532940 - RNA, 18 nt, Artificial Sequence
  Synthetic
aucuccaucuagcaaucc

SEQ ID NO: 532941 - RNA, 19 nt, Artificial Sequence
  Synthetic
aaucuccaucuagcaaucc

SEQ ID NO: 532942 - RNA, 20 nt, Artificial Sequence
  Synthetic
uaaucuccaucuagcaaucc

SEQ ID NO: 532943 - RNA, 21 nt, Artificial Sequence
  Synthetic
uuaaucuccaucuagcaaucc

SEQ ID NO: 532944 - RNA, 22 nt, Artificial Sequence
  Synthetic
uuuaaucuccaucuagcaaucc

SEQ ID NO: 532945 - RNA, 23 nt, Artificial Sequence
  Synthetic
auuuaaucuccaucuagcaaucc

SEQ ID NO: 532946 - RNA, 24 nt, Artificial Sequence
  Synthetic
aauuuaaucuccaucuagcaaucc

SEQ ID NO: 532947 - RNA, 18 nt, Artificial Sequence
  Synthetic
ccgcuacuuauagaaucc

SEQ ID NO: 532948 - RNA, 19 nt, Artificial Sequence
  Synthetic
accgcuacuuauagaaucc

SEQ ID NO: 532949 - RNA, 20 nt, Artificial Sequence
  Synthetic
uaccgcuacuuauagaaucc

SEQ ID NO: 532950 - RNA, 21 nt, Artificial Sequence
  Synthetic
cuaccgcuacuuauagaaucc

SEQ ID NO: 532951 - RNA, 22 nt, Artificial Sequence
  Synthetic
ucuaccgcuacuuauagaaucc

SEQ ID NO: 532952 - RNA, 23 nt, Artificial Sequence
  Synthetic
cucuaccgcuacuuauagaaucc

SEQ ID NO: 532953 - RNA, 24 nt, Artificial Sequence
  Synthetic
ccucuaccgcuacuuauagaaucc

SEQ ID NO: 532954 - RNA, 18 nt, Artificial Sequence
  Synthetic
gaaucucuacaggaaucc

SEQ ID NO: 532955 - RNA, 19 nt, Artificial Sequence
  Synthetic
ugaaucucuacaggaaucc

SEQ ID NO: 532956 - RNA, 20 nt, Artificial Sequence
  Synthetic
uugaaucucuacaggaaucc

SEQ ID NO: 532957 - RNA, 21 nt, Artificial Sequence
  Synthetic
uuugaaucucuacaggaaucc

SEQ ID NO: 532958 - RNA, 22 nt, Artificial Sequence
  Synthetic
cuuugaaucucuacaggaaucc

SEQ ID NO: 532959 - RNA, 23 nt, Artificial Sequence
  Synthetic
ucuuugaaucucuacaggaaucc

SEQ ID NO: 532960 - RNA, 24 nt, Artificial Sequence
  Synthetic
aucuuugaaucucuacaggaaucc

SEQ ID NO: 532961 - RNA, 18 nt, Artificial Sequence
  Synthetic
agauuugccaaugaaucc

SEQ ID NO: 532962 - RNA, 19 nt, Artificial Sequence
  Synthetic
gagauuugccaaugaaucc

SEQ ID NO: 532963 - RNA, 20 nt, Artificial Sequence
  Synthetic
ugagauuugccaaugaaucc

SEQ ID NO: 532964 - RNA, 21 nt, Artificial Sequence
  Synthetic
augagauuugccaaugaaucc

SEQ ID NO: 532965 - RNA, 22 nt, Artificial Sequence
  Synthetic
aaugagauuugccaaugaaucc

SEQ ID NO: 532966 - RNA, 23 nt, Artificial Sequence
  Synthetic
aaaugagauuugccaaugaaucc

SEQ ID NO: 532967 - RNA, 24 nt, Artificial Sequence
  Synthetic
aaaaugagauuugccaaugaaucc

SEQ ID NO: 532968 - RNA, 18 nt, Artificial Sequence
  Synthetic
aaaaaaaucaaugaaucc

SEQ ID NO: 532969 - RNA, 19 nt, Artificial Sequence
  Synthetic
caaaaaaaucaaugaaucc

SEQ ID NO: 532970 - RNA, 20 nt, Artificial Sequence
  Synthetic
ucaaaaaaaucaaugaaucc

SEQ ID NO: 532971 - RNA, 21 nt, Artificial Sequence
  Synthetic
uucaaaaaaaucaaugaaucc

SEQ ID NO: 532972 - RNA, 22 nt, Artificial Sequence
  Synthetic
cuucaaaaaaaucaaugaaucc

SEQ ID NO: 532973 - RNA, 23 nt, Artificial Sequence
  Synthetic
ccuucaaaaaaaucaaugaaucc

SEQ ID NO: 532974 - RNA, 24 nt, Artificial Sequence
  Synthetic
cccuucaaaaaaaucaaugaaucc

SEQ ID NO: 532975 - RNA, 18 nt, Artificial Sequence
  Synthetic
caaaaaaucaaugaaucc

SEQ ID NO: 532976 - RNA, 19 nt, Artificial Sequence
  Synthetic
ucaaaaaaucaaugaaucc

SEQ ID NO: 532977 - RNA, 20 nt, Artificial Sequence
  Synthetic
uucaaaaaaucaaugaaucc

SEQ ID NO: 532978 - RNA, 21 nt, Artificial Sequence
  Synthetic
cuucaaaaaaucaaugaaucc

SEQ ID NO: 532979 - RNA, 22 nt, Artificial Sequence
  Synthetic
ccuucaaaaaaucaaugaaucc

SEQ ID NO: 532980 - RNA, 23 nt, Artificial Sequence
  Synthetic
cccuucaaaaaaucaaugaaucc

SEQ ID NO: 532981 - RNA, 24 nt, Artificial Sequence
  Synthetic
acccuucaaaaaaucaaugaaucc

SEQ ID NO: 532982 - RNA, 18 nt, Artificial Sequence
  Synthetic
guccccaugacugaaucc

SEQ ID NO: 532983 - RNA, 19 nt, Artificial Sequence
  Synthetic
uguccccaugacugaaucc

SEQ ID NO: 532984 - RNA, 20 nt, Artificial Sequence
  Synthetic
uuguccccaugacugaaucc

SEQ ID NO: 532985 - RNA, 21 nt, Artificial Sequence
  Synthetic
auuguccccaugacugaaucc

SEQ ID NO: 532986 - RNA, 22 nt, Artificial Sequence
  Synthetic
cauuguccccaugacugaaucc

SEQ ID NO: 532987 - RNA, 23 nt, Artificial Sequence
  Synthetic
gcauuguccccaugacugaaucc

SEQ ID NO: 532988 - RNA, 24 nt, Artificial Sequence
  Synthetic
ugcauuguccccaugacugaaucc

SEQ ID NO: 532989 - RNA, 18 nt, Artificial Sequence
  Synthetic
gcaauugugauugaaucc

SEQ ID NO: 532990 - RNA, 19 nt, Artificial Sequence
  Synthetic
ugcaauugugauugaaucc

SEQ ID NO: 532991 - RNA, 20 nt, Artificial Sequence
  Synthetic
gugcaauugugauugaaucc

SEQ ID NO: 532992 - RNA, 21 nt, Artificial Sequence
  Synthetic
agugcaauugugauugaaucc

SEQ ID NO: 532993 - RNA, 22 nt, Artificial Sequence
  Synthetic
gagugcaauugugauugaaucc

SEQ ID NO: 532994 - RNA, 23 nt, Artificial Sequence
  Synthetic
ugagugcaauugugauugaaucc

SEQ ID NO: 532995 - RNA, 24 nt, Artificial Sequence
  Synthetic
gugagugcaauugugauugaaucc

SEQ ID NO: 532996 - RNA, 18 nt, Artificial Sequence
  Synthetic
gaaggaagaacauaaucc

SEQ ID NO: 532997 - RNA, 19 nt, Artificial Sequence
  Synthetic
ggaaggaagaacauaaucc

SEQ ID NO: 532998 - RNA, 20 nt, Artificial Sequence
  Synthetic
uggaaggaagaacauaaucc

SEQ ID NO: 532999 - RNA, 21 nt, Artificial Sequence
  Synthetic
cuggaaggaagaacauaaucc

SEQ ID NO: 533000 - RNA, 22 nt, Artificial Sequence
  Synthetic
ucuggaaggaagaacauaaucc

SEQ ID NO: 533001 - RNA, 23 nt, Artificial Sequence
  Synthetic
aucuggaaggaagaacauaaucc

SEQ ID NO: 533002 - RNA, 24 nt, Artificial Sequence
  Synthetic
gaucuggaaggaagaacauaaucc

SEQ ID NO: 533003 - RNA, 18 nt, Artificial Sequence
  Synthetic
uauaaugaugcauaaucc

SEQ ID NO: 533004 - RNA, 19 nt, Artificial Sequence
  Synthetic
cuauaaugaugcauaaucc

SEQ ID NO: 533005 - RNA, 20 nt, Artificial Sequence
  Synthetic
ucuauaaugaugcauaaucc

SEQ ID NO: 533006 - RNA, 21 nt, Artificial Sequence
  Synthetic
gucuauaaugaugcauaaucc

SEQ ID NO: 533007 - RNA, 22 nt, Artificial Sequence
  Synthetic
agucuauaaugaugcauaaucc

SEQ ID NO: 533008 - RNA, 23 nt, Artificial Sequence
  Synthetic
gagucuauaaugaugcauaaucc

SEQ ID NO: 533009 - RNA, 24 nt, Artificial Sequence
  Synthetic
ugagucuauaaugaugcauaaucc

SEQ ID NO: 533010 - RNA, 18 nt, Artificial Sequence
  Synthetic
uuccucaauuccuaaucc

SEQ ID NO: 533011 - RNA, 19 nt, Artificial Sequence
  Synthetic
uuuccucaauuccuaaucc

SEQ ID NO: 533012 - RNA, 20 nt, Artificial Sequence
  Synthetic
uuuuccucaauuccuaaucc

SEQ ID NO: 533013 - RNA, 21 nt, Artificial Sequence
  Synthetic
auuuuccucaauuccuaaucc

SEQ ID NO: 533014 - RNA, 22 nt, Artificial Sequence
  Synthetic
aauuuuccucaauuccuaaucc

SEQ ID NO: 533015 - RNA, 23 nt, Artificial Sequence
  Synthetic
gaauuuuccucaauuccuaaucc

SEQ ID NO: 533016 - RNA, 24 nt, Artificial Sequence
  Synthetic
ggaauuuuccucaauuccuaaucc

SEQ ID NO: 533017 - RNA, 18 nt, Artificial Sequence
  Synthetic
augacugccgaguaaucc

SEQ ID NO: 533018 - RNA, 19 nt, Artificial Sequence
  Synthetic
gaugacugccgaguaaucc

SEQ ID NO: 533019 - RNA, 20 nt, Artificial Sequence
  Synthetic
ugaugacugccgaguaaucc

SEQ ID NO: 533020 - RNA, 21 nt, Artificial Sequence
  Synthetic
cugaugacugccgaguaaucc

SEQ ID NO: 533021 - RNA, 22 nt, Artificial Sequence
  Synthetic
ucugaugacugccgaguaaucc

SEQ ID NO: 533022 - RNA, 23 nt, Artificial Sequence
  Synthetic
cucugaugacugccgaguaaucc

SEQ ID NO: 533023 - RNA, 24 nt, Artificial Sequence
  Synthetic
acucugaugacugccgaguaaucc

SEQ ID NO: 533024 - RNA, 18 nt, Artificial Sequence
  Synthetic
caucuagaacuguaaucc

SEQ ID NO: 533025 - RNA, 19 nt, Artificial Sequence
  Synthetic
ucaucuagaacuguaaucc

SEQ ID NO: 533026 - RNA, 20 nt, Artificial Sequence
  Synthetic
cucaucuagaacuguaaucc

SEQ ID NO: 533027 - RNA, 21 nt, Artificial Sequence
  Synthetic
ucucaucuagaacuguaaucc

SEQ ID NO: 533028 - RNA, 22 nt, Artificial Sequence
  Synthetic
aucucaucuagaacuguaaucc

SEQ ID NO: 533029 - RNA, 23 nt, Artificial Sequence
  Synthetic
aaucucaucuagaacuguaaucc

SEQ ID NO: 533030 - RNA, 24 nt, Artificial Sequence
  Synthetic
aaaucucaucuagaacuguaaucc

SEQ ID NO: 533031 - RNA, 18 nt, Artificial Sequence
  Synthetic
ggcucacgccuguaaucc

SEQ ID NO: 533032 - RNA, 19 nt, Artificial Sequence
  Synthetic
uggcucacgccuguaaucc

SEQ ID NO: 533033 - RNA, 20 nt, Artificial Sequence
  Synthetic
guggcucacgccuguaaucc

SEQ ID NO: 533034 - RNA, 21 nt, Artificial Sequence
  Synthetic
aguggcucacgccuguaaucc

SEQ ID NO: 533035 - RNA, 22 nt, Artificial Sequence
  Synthetic
caguggcucacgccuguaaucc

SEQ ID NO: 533036 - RNA, 23 nt, Artificial Sequence
  Synthetic
gcaguggcucacgccuguaaucc

SEQ ID NO: 533037 - RNA, 24 nt, Artificial Sequence
  Synthetic
ugcaguggcucacgccuguaaucc

SEQ ID NO: 533038 - RNA, 21 nt, Artificial Sequence
  Synthetic
gguggcucaugccuguaaucc

SEQ ID NO: 533039 - RNA, 22 nt, Artificial Sequence
  Synthetic
ugguggcucaugccuguaaucc

SEQ ID NO: 533040 - RNA, 23 nt, Artificial Sequence
  Synthetic
gugguggcucaugccuguaaucc

SEQ ID NO: 533041 - RNA, 24 nt, Artificial Sequence
  Synthetic
cgugguggcucaugccuguaaucc

SEQ ID NO: 533042 - RNA, 18 nt, Artificial Sequence
  Synthetic
uggcucacgcuguaaucc

SEQ ID NO: 533043 - RNA, 19 nt, Artificial Sequence
  Synthetic
guggcucacgcuguaaucc

SEQ ID NO: 533044 - RNA, 20 nt, Artificial Sequence
  Synthetic
gguggcucacgcuguaaucc

SEQ ID NO: 533045 - RNA, 21 nt, Artificial Sequence
  Synthetic
cgguggcucacgcuguaaucc

SEQ ID NO: 533046 - RNA, 22 nt, Artificial Sequence
  Synthetic
gcgguggcucacgcuguaaucc

SEQ ID NO: 533047 - RNA, 23 nt, Artificial Sequence
  Synthetic
cgcgguggcucacgcuguaaucc

SEQ ID NO: 533048 - RNA, 24 nt, Artificial Sequence
  Synthetic
gcgcgguggcucacgcuguaaucc

SEQ ID NO: 533049 - RNA, 18 nt, Artificial Sequence
  Synthetic
gcgauggggucuuaaucc

SEQ ID NO: 533050 - RNA, 19 nt, Artificial Sequence
  Synthetic
ugcgauggggucuuaaucc

SEQ ID NO: 533051 - RNA, 20 nt, Artificial Sequence
  Synthetic
gugcgauggggucuuaaucc

SEQ ID NO: 533052 - RNA, 21 nt, Artificial Sequence
  Synthetic
ugugcgauggggucuuaaucc

SEQ ID NO: 533053 - RNA, 22 nt, Artificial Sequence
  Synthetic
gugugcgauggggucuuaaucc

SEQ ID NO: 533054 - RNA, 23 nt, Artificial Sequence
  Synthetic
ugugugcgauggggucuuaaucc

SEQ ID NO: 533055 - RNA, 24 nt, Artificial Sequence
  Synthetic
cugugugcgauggggucuuaaucc

SEQ ID NO: 533056 - RNA, 18 nt, Artificial Sequence
  Synthetic
auagaauauauuuaaucc

SEQ ID NO: 533057 - RNA, 19 nt, Artificial Sequence
  Synthetic
uauagaauauauuuaaucc

SEQ ID NO: 533058 - RNA, 20 nt, Artificial Sequence
  Synthetic
auauagaauauauuuaaucc

SEQ ID NO: 533059 - RNA, 21 nt, Artificial Sequence
  Synthetic
uauauagaauauauuuaaucc

SEQ ID NO: 533060 - RNA, 22 nt, Artificial Sequence
  Synthetic
uuauauagaauauauuuaaucc

SEQ ID NO: 533061 - RNA, 23 nt, Artificial Sequence
  Synthetic
guuauauagaauauauuuaaucc

SEQ ID NO: 533062 - RNA, 24 nt, Artificial Sequence
  Synthetic
uguuauauagaauauauuuaaucc

SEQ ID NO: 533063 - RNA, 18 nt, Artificial Sequence
  Synthetic
acaugaugacuuuaaucc

SEQ ID NO: 533064 - RNA, 19 nt, Artificial Sequence
  Synthetic
uacaugaugacuuuaaucc

SEQ ID NO: 533065 - RNA, 20 nt, Artificial Sequence
  Synthetic
auacaugaugacuuuaaucc

SEQ ID NO: 533066 - RNA, 21 nt, Artificial Sequence
  Synthetic
aauacaugaugacuuuaaucc

SEQ ID NO: 533067 - RNA, 22 nt, Artificial Sequence
  Synthetic
aaauacaugaugacuuuaaucc

SEQ ID NO: 533068 - RNA, 23 nt, Artificial Sequence
  Synthetic
aaaauacaugaugacuuuaaucc

SEQ ID NO: 533069 - RNA, 24 nt, Artificial Sequence
  Synthetic
aaaaauacaugaugacuuuaaucc

SEQ ID NO: 533070 - RNA, 18 nt, Artificial Sequence
  Synthetic
acauuaauccuuuaaucc

SEQ ID NO: 533071 - RNA, 19 nt, Artificial Sequence
  Synthetic
cacauuaauccuuuaaucc

SEQ ID NO: 533072 - RNA, 20 nt, Artificial Sequence
  Synthetic
acacauuaauccuuuaaucc

SEQ ID NO: 533073 - RNA, 21 nt, Artificial Sequence
  Synthetic
aacacauuaauccuuuaaucc

SEQ ID NO: 533074 - RNA, 22 nt, Artificial Sequence
  Synthetic
aaacacauuaauccuuuaaucc

SEQ ID NO: 533075 - RNA, 23 nt, Artificial Sequence
  Synthetic
caaacacauuaauccuuuaaucc

SEQ ID NO: 533076 - RNA, 24 nt, Artificial Sequence
  Synthetic
ucaaacacauuaauccuuuaaucc

SEQ ID NO: 533077 - RNA, 18 nt, Artificial Sequence
  Synthetic
ggaagauaauuuuaaucc

SEQ ID NO: 533078 - RNA, 19 nt, Artificial Sequence
  Synthetic
aggaagauaauuuuaaucc

SEQ ID NO: 533079 - RNA, 20 nt, Artificial Sequence
  Synthetic
uaggaagauaauuuuaaucc

SEQ ID NO: 533080 - RNA, 21 nt, Artificial Sequence
  Synthetic
guaggaagauaauuuuaaucc

SEQ ID NO: 533081 - RNA, 22 nt, Artificial Sequence
  Synthetic
uguaggaagauaauuuuaaucc

SEQ ID NO: 533082 - RNA, 23 nt, Artificial Sequence
  Synthetic
auguaggaagauaauuuuaaucc

SEQ ID NO: 533083 - RNA, 24 nt, Artificial Sequence
  Synthetic
uauguaggaagauaauuuuaaucc

SEQ ID NO: 533084 - RNA, 18 nt, Artificial Sequence
  Synthetic
ucuguacauauaacaucc

SEQ ID NO: 533085 - RNA, 19 nt, Artificial Sequence
  Synthetic
gucuguacauauaacaucc

SEQ ID NO: 533086 - RNA, 20 nt, Artificial Sequence
  Synthetic
ugucuguacauauaacaucc

SEQ ID NO: 533087 - RNA, 21 nt, Artificial Sequence
  Synthetic
gugucuguacauauaacaucc

SEQ ID NO: 533088 - RNA, 22 nt, Artificial Sequence
  Synthetic
ugugucuguacauauaacaucc

SEQ ID NO: 533089 - RNA, 23 nt, Artificial Sequence
  Synthetic
augugucuguacauauaacaucc

SEQ ID NO: 533090 - RNA, 24 nt, Artificial Sequence
  Synthetic
caugugucuguacauauaacaucc

SEQ ID NO: 533091 - RNA, 18 nt, Artificial Sequence
  Synthetic
uucuaagcuauaacaucc

SEQ ID NO: 533092 - RNA, 19 nt, Artificial Sequence
  Synthetic
cuucuaagcuauaacaucc

SEQ ID NO: 533093 - RNA, 20 nt, Artificial Sequence
  Synthetic
acuucuaagcuauaacaucc

SEQ ID NO: 533094 - RNA, 21 nt, Artificial Sequence
  Synthetic
aacuucuaagcuauaacaucc

SEQ ID NO: 533095 - RNA, 22 nt, Artificial Sequence
  Synthetic
gaacuucuaagcuauaacaucc

SEQ ID NO: 533096 - RNA, 23 nt, Artificial Sequence
  Synthetic
ugaacuucuaagcuauaacaucc

SEQ ID NO: 533097 - RNA, 24 nt, Artificial Sequence
  Synthetic
uugaacuucuaagcuauaacaucc

SEQ ID NO: 533098 - RNA, 18 nt, Artificial Sequence
  Synthetic
aucuaaccauucacaucc

SEQ ID NO: 533099 - RNA, 19 nt, Artificial Sequence
  Synthetic
aaucuaaccauucacaucc

SEQ ID NO: 533100 - RNA, 20 nt, Artificial Sequence
  Synthetic
aaaucuaaccauucacaucc

SEQ ID NO: 533101 - RNA, 21 nt, Artificial Sequence
  Synthetic
aaaaucuaaccauucacaucc

SEQ ID NO: 533102 - RNA, 22 nt, Artificial Sequence
  Synthetic
caaaaucuaaccauucacaucc

SEQ ID NO: 533103 - RNA, 23 nt, Artificial Sequence
  Synthetic
ucaaaaucuaaccauucacaucc

SEQ ID NO: 533104 - RNA, 24 nt, Artificial Sequence
  Synthetic
aucaaaaucuaaccauucacaucc

SEQ ID NO: 533105 - RNA, 18 nt, Artificial Sequence
  Synthetic
uaaacaaaggagacaucc

SEQ ID NO: 533106 - RNA, 19 nt, Artificial Sequence
  Synthetic
guaaacaaaggagacaucc

SEQ ID NO: 533107 - RNA, 20 nt, Artificial Sequence
  Synthetic
uguaaacaaaggagacaucc

SEQ ID NO: 533108 - RNA, 21 nt, Artificial Sequence
  Synthetic
auguaaacaaaggagacaucc

SEQ ID NO: 533109 - RNA, 22 nt, Artificial Sequence
  Synthetic
gauguaaacaaaggagacaucc

SEQ ID NO: 533110 - RNA, 23 nt, Artificial Sequence
  Synthetic
ggauguaaacaaaggagacaucc

SEQ ID NO: 533111 - RNA, 24 nt, Artificial Sequence
  Synthetic
gggauguaaacaaaggagacaucc

SEQ ID NO: 533112 - RNA, 18 nt, Artificial Sequence
  Synthetic
agugcuugggagacaucc

SEQ ID NO: 533113 - RNA, 19 nt, Artificial Sequence
  Synthetic
cagugcuugggagacaucc

SEQ ID NO: 533114 - RNA, 20 nt, Artificial Sequence
  Synthetic
gcagugcuugggagacaucc

SEQ ID NO: 533115 - RNA, 21 nt, Artificial Sequence
  Synthetic
ggcagugcuugggagacaucc

SEQ ID NO: 533116 - RNA, 22 nt, Artificial Sequence
  Synthetic
gggcagugcuugggagacaucc

SEQ ID NO: 533117 - RNA, 23 nt, Artificial Sequence
  Synthetic
ggggcagugcuugggagacaucc

SEQ ID NO: 533118 - RNA, 24 nt, Artificial Sequence
  Synthetic
uggggcagugcuugggagacaucc

SEQ ID NO: 533119 - RNA, 18 nt, Artificial Sequence
  Synthetic
uugcauauguagacaucc

SEQ ID NO: 533120 - RNA, 19 nt, Artificial Sequence
  Synthetic
uuugcauauguagacaucc

SEQ ID NO: 533121 - RNA, 20 nt, Artificial Sequence
  Synthetic
auuugcauauguagacaucc

SEQ ID NO: 533122 - RNA, 21 nt, Artificial Sequence
  Synthetic
aauuugcauauguagacaucc

SEQ ID NO: 533123 - RNA, 22 nt, Artificial Sequence
  Synthetic
uaauuugcauauguagacaucc

SEQ ID NO: 533124 - RNA, 23 nt, Artificial Sequence
  Synthetic
auaauuugcauauguagacaucc

SEQ ID NO: 533125 - RNA, 24 nt, Artificial Sequence
  Synthetic
gauaauuugcauauguagacaucc

SEQ ID NO: 533126 - RNA, 18 nt, Artificial Sequence
  Synthetic
ggauuaaacucuacaucc

SEQ ID NO: 533127 - RNA, 19 nt, Artificial Sequence
  Synthetic
aggauuaaacucuacaucc

SEQ ID NO: 533128 - RNA, 20 nt, Artificial Sequence
  Synthetic
gaggauuaaacucuacaucc

SEQ ID NO: 533129 - RNA, 21 nt, Artificial Sequence
  Synthetic
ggaggauuaaacucuacaucc

SEQ ID NO: 533130 - RNA, 22 nt, Artificial Sequence
  Synthetic
gggaggauuaaacucuacaucc

SEQ ID NO: 533131 - RNA, 23 nt, Artificial Sequence
  Synthetic
ggggaggauuaaacucuacaucc

SEQ ID NO: 533132 - RNA, 24 nt, Artificial Sequence
  Synthetic
aggggaggauuaaacucuacaucc

SEQ ID NO: 533133 - RNA, 18 nt, Artificial Sequence
  Synthetic
auccuuuaagacccaucc

SEQ ID NO: 533134 - RNA, 19 nt, Artificial Sequence
  Synthetic
cauccuuuaagacccaucc

SEQ ID NO: 533135 - RNA, 20 nt, Artificial Sequence
  Synthetic
ucauccuuuaagacccaucc

SEQ ID NO: 533136 - RNA, 21 nt, Artificial Sequence
  Synthetic
cucauccuuuaagacccaucc

SEQ ID NO: 533137 - RNA, 22 nt, Artificial Sequence
  Synthetic
ucucauccuuuaagacccaucc

SEQ ID NO: 533138 - RNA, 23 nt, Artificial Sequence
  Synthetic
uucucauccuuuaagacccaucc

SEQ ID NO: 533139 - RNA, 24 nt, Artificial Sequence
  Synthetic
cuucucauccuuuaagacccaucc

SEQ ID NO: 533140 - RNA, 18 nt, Artificial Sequence
  Synthetic
ccacauucaaagccaucc

SEQ ID NO: 533141 - RNA, 19 nt, Artificial Sequence
  Synthetic
gccacauucaaagccaucc

SEQ ID NO: 533142 - RNA, 20 nt, Artificial Sequence
  Synthetic
ggccacauucaaagccaucc

SEQ ID NO: 533143 - RNA, 21 nt, Artificial Sequence
  Synthetic
gggccacauucaaagccaucc

SEQ ID NO: 533144 - RNA, 22 nt, Artificial Sequence
  Synthetic
ugggccacauucaaagccaucc

SEQ ID NO: 533145 - RNA, 23 nt, Artificial Sequence
  Synthetic
uugggccacauucaaagccaucc

SEQ ID NO: 533146 - RNA, 24 nt, Artificial Sequence
  Synthetic
guugggccacauucaaagccaucc

SEQ ID NO: 533147 - RNA, 18 nt, Artificial Sequence
  Synthetic
aagcauaaggggccaucc

SEQ ID NO: 533148 - RNA, 19 nt, Artificial Sequence
  Synthetic
aaagcauaaggggccaucc

SEQ ID NO: 533149 - RNA, 20 nt, Artificial Sequence
  Synthetic
caaagcauaaggggccaucc

SEQ ID NO: 533150 - RNA, 21 nt, Artificial Sequence
  Synthetic
ccaaagcauaaggggccaucc

SEQ ID NO: 533151 - RNA, 22 nt, Artificial Sequence
  Synthetic
accaaagcauaaggggccaucc

SEQ ID NO: 533152 - RNA, 23 nt, Artificial Sequence
  Synthetic
gaccaaagcauaaggggccaucc

SEQ ID NO: 533153 - RNA, 24 nt, Artificial Sequence
  Synthetic
ugaccaaagcauaaggggccaucc

SEQ ID NO: 533154 - RNA, 18 nt, Artificial Sequence
  Synthetic
cuguuagcucugccaucc

SEQ ID NO: 533155 - RNA, 19 nt, Artificial Sequence
  Synthetic
ucuguuagcucugccaucc

SEQ ID NO: 533156 - RNA, 20 nt, Artificial Sequence
  Synthetic
cucuguuagcucugccaucc

SEQ ID NO: 533157 - RNA, 21 nt, Artificial Sequence
  Synthetic
gcucuguuagcucugccaucc

SEQ ID NO: 533158 - RNA, 22 nt, Artificial Sequence
  Synthetic
ugcucuguuagcucugccaucc

SEQ ID NO: 533159 - RNA, 23 nt, Artificial Sequence
  Synthetic
gugcucuguuagcucugccaucc

SEQ ID NO: 533160 - RNA, 24 nt, Artificial Sequence
  Synthetic
agugcucuguuagcucugccaucc

SEQ ID NO: 533161 - RNA, 18 nt, Artificial Sequence
  Synthetic
auaaugcacacuccaucc

SEQ ID NO: 533162 - RNA, 19 nt, Artificial Sequence
  Synthetic
cauaaugcacacuccaucc

SEQ ID NO: 533163 - RNA, 20 nt, Artificial Sequence
  Synthetic
ccauaaugcacacuccaucc

SEQ ID NO: 533164 - RNA, 21 nt, Artificial Sequence
  Synthetic
cccauaaugcacacuccaucc

SEQ ID NO: 533165 - RNA, 22 nt, Artificial Sequence
  Synthetic
ucccauaaugcacacuccaucc

SEQ ID NO: 533166 - RNA, 23 nt, Artificial Sequence
  Synthetic
uucccauaaugcacacuccaucc

SEQ ID NO: 533167 - RNA, 24 nt, Artificial Sequence
  Synthetic
auucccauaaugcacacuccaucc

SEQ ID NO: 533168 - RNA, 18 nt, Artificial Sequence
  Synthetic
cagaaccucauagcaucc

SEQ ID NO: 533169 - RNA, 19 nt, Artificial Sequence
  Synthetic
ucagaaccucauagcaucc

SEQ ID NO: 533170 - RNA, 20 nt, Artificial Sequence
  Synthetic
uucagaaccucauagcaucc

SEQ ID NO: 533171 - RNA, 21 nt, Artificial Sequence
  Synthetic
auucagaaccucauagcaucc

SEQ ID NO: 533172 - RNA, 22 nt, Artificial Sequence
  Synthetic
cauucagaaccucauagcaucc

SEQ ID NO: 533173 - RNA, 23 nt, Artificial Sequence
  Synthetic
acauucagaaccucauagcaucc

SEQ ID NO: 533174 - RNA, 24 nt, Artificial Sequence
  Synthetic
aacauucagaaccucauagcaucc

SEQ ID NO: 533175 - RNA, 18 nt, Artificial Sequence
  Synthetic
caaaaaaaagaggcaucc

SEQ ID NO: 533176 - RNA, 19 nt, Artificial Sequence
  Synthetic
acaaaaaaaagaggcaucc

SEQ ID NO: 533177 - RNA, 20 nt, Artificial Sequence
  Synthetic
cacaaaaaaaagaggcaucc

SEQ ID NO: 533178 - RNA, 21 nt, Artificial Sequence
  Synthetic
ccacaaaaaaaagaggcaucc

SEQ ID NO: 533179 - RNA, 22 nt, Artificial Sequence
  Synthetic
accacaaaaaaaagaggcaucc

SEQ ID NO: 533180 - RNA, 23 nt, Artificial Sequence
  Synthetic
gaccacaaaaaaaagaggcaucc

SEQ ID NO: 533181 - RNA, 24 nt, Artificial Sequence
  Synthetic
agaccacaaaaaaaagaggcaucc

SEQ ID NO: 533182 - RNA, 18 nt, Artificial Sequence
  Synthetic
ugaaccagccuggcaucc

SEQ ID NO: 533183 - RNA, 19 nt, Artificial Sequence
  Synthetic
uugaaccagccuggcaucc

SEQ ID NO: 533184 - RNA, 20 nt, Artificial Sequence
  Synthetic
guugaaccagccuggcaucc

SEQ ID NO: 533185 - RNA, 21 nt, Artificial Sequence
  Synthetic
uguugaaccagccuggcaucc

SEQ ID NO: 533186 - RNA, 22 nt, Artificial Sequence
  Synthetic
auguugaaccagccuggcaucc

SEQ ID NO: 533187 - RNA, 23 nt, Artificial Sequence
  Synthetic
uauguugaaccagccuggcaucc

SEQ ID NO: 533188 - RNA, 24 nt, Artificial Sequence
  Synthetic
guauguugaaccagccuggcaucc

SEQ ID NO: 533189 - RNA, 18 nt, Artificial Sequence
  Synthetic
gcagggcagcuugcaucc

SEQ ID NO: 533190 - RNA, 19 nt, Artificial Sequence
  Synthetic
agcagggcagcuugcaucc

SEQ ID NO: 533191 - RNA, 20 nt, Artificial Sequence
  Synthetic
aagcagggcagcuugcaucc

SEQ ID NO: 533192 - RNA, 21 nt, Artificial Sequence
  Synthetic
uaagcagggcagcuugcaucc

SEQ ID NO: 533193 - RNA, 22 nt, Artificial Sequence
  Synthetic
guaagcagggcagcuugcaucc

SEQ ID NO: 533194 - RNA, 23 nt, Artificial Sequence
  Synthetic
aguaagcagggcagcuugcaucc

SEQ ID NO: 533195 - RNA, 24 nt, Artificial Sequence
  Synthetic
caguaagcagggcagcuugcaucc

SEQ ID NO: 533196 - RNA, 18 nt, Artificial Sequence
  Synthetic
aacuuccuagaaucaucc

SEQ ID NO: 533197 - RNA, 19 nt, Artificial Sequence
  Synthetic
gaacuuccuagaaucaucc

SEQ ID NO: 533198 - RNA, 20 nt, Artificial Sequence
  Synthetic
agaacuuccuagaaucaucc

SEQ ID NO: 533199 - RNA, 21 nt, Artificial Sequence
  Synthetic
cagaacuuccuagaaucaucc

SEQ ID NO: 533200 - RNA, 22 nt, Artificial Sequence
  Synthetic
gcagaacuuccuagaaucaucc

SEQ ID NO: 533201 - RNA, 23 nt, Artificial Sequence
  Synthetic
agcagaacuuccuagaaucaucc

SEQ ID NO: 533202 - RNA, 24 nt, Artificial Sequence
  Synthetic
aagcagaacuuccuagaaucaucc

SEQ ID NO: 533203 - RNA, 18 nt, Artificial Sequence
  Synthetic
auaugccaaccaucaucc

SEQ ID NO: 533204 - RNA, 19 nt, Artificial Sequence
  Synthetic
uauaugccaaccaucaucc

SEQ ID NO: 533205 - RNA, 20 nt, Artificial Sequence
  Synthetic
guauaugccaaccaucaucc

SEQ ID NO: 533206 - RNA, 21 nt, Artificial Sequence
  Synthetic
aguauaugccaaccaucaucc

SEQ ID NO: 533207 - RNA, 22 nt, Artificial Sequence
  Synthetic
caguauaugccaaccaucaucc

SEQ ID NO: 533208 - RNA, 23 nt, Artificial Sequence
  Synthetic
ucaguauaugccaaccaucaucc

SEQ ID NO: 533209 - RNA, 24 nt, Artificial Sequence
  Synthetic
aucaguauaugccaaccaucaucc

SEQ ID NO: 533210 - RNA, 18 nt, Artificial Sequence
  Synthetic
agugagcuuagaucaucc

SEQ ID NO: 533211 - RNA, 19 nt, Artificial Sequence
  Synthetic
cagugagcuuagaucaucc

SEQ ID NO: 533212 - RNA, 20 nt, Artificial Sequence
  Synthetic
ucagugagcuuagaucaucc

SEQ ID NO: 533213 - RNA, 21 nt, Artificial Sequence
  Synthetic
uucagugagcuuagaucaucc

SEQ ID NO: 533214 - RNA, 22 nt, Artificial Sequence
  Synthetic
uuucagugagcuuagaucaucc

SEQ ID NO: 533215 - RNA, 23 nt, Artificial Sequence
  Synthetic
guuucagugagcuuagaucaucc

SEQ ID NO: 533216 - RNA, 24 nt, Artificial Sequence
  Synthetic
gguuucagugagcuuagaucaucc

SEQ ID NO: 533217 - RNA, 18 nt, Artificial Sequence
  Synthetic
cacuaagauuuaucaucc

SEQ ID NO: 533218 - RNA, 19 nt, Artificial Sequence
  Synthetic
ucacuaagauuuaucaucc

SEQ ID NO: 533219 - RNA, 20 nt, Artificial Sequence
  Synthetic
gucacuaagauuuaucaucc

SEQ ID NO: 533220 - RNA, 21 nt, Artificial Sequence
  Synthetic
ggucacuaagauuuaucaucc

SEQ ID NO: 533221 - RNA, 22 nt, Artificial Sequence
  Synthetic
gggucacuaagauuuaucaucc

SEQ ID NO: 533222 - RNA, 23 nt, Artificial Sequence
  Synthetic
ugggucacuaagauuuaucaucc

SEQ ID NO: 533223 - RNA, 24 nt, Artificial Sequence
  Synthetic
augggucacuaagauuuaucaucc

SEQ ID NO: 533224 - RNA, 18 nt, Artificial Sequence
  Synthetic
gcuugaggccacucaucc

SEQ ID NO: 533225 - RNA, 19 nt, Artificial Sequence
  Synthetic
ugcuugaggccacucaucc

SEQ ID NO: 533226 - RNA, 20 nt, Artificial Sequence
  Synthetic
cugcuugaggccacucaucc

SEQ ID NO: 533227 - RNA, 21 nt, Artificial Sequence
  Synthetic
gcugcuugaggccacucaucc

SEQ ID NO: 533228 - RNA, 22 nt, Artificial Sequence
  Synthetic
agcugcuugaggccacucaucc

SEQ ID NO: 533229 - RNA, 23 nt, Artificial Sequence
  Synthetic
uagcugcuugaggccacucaucc

SEQ ID NO: 533230 - RNA, 24 nt, Artificial Sequence
  Synthetic
guagcugcuugaggccacucaucc

SEQ ID NO: 533231 - RNA, 18 nt, Artificial Sequence
  Synthetic
uucucagaggucucaucc

SEQ ID NO: 533232 - RNA, 19 nt, Artificial Sequence
  Synthetic
cuucucagaggucucaucc

SEQ ID NO: 533233 - RNA, 20 nt, Artificial Sequence
  Synthetic
ucuucucagaggucucaucc

SEQ ID NO: 533234 - RNA, 21 nt, Artificial Sequence
  Synthetic
uucuucucagaggucucaucc

SEQ ID NO: 533235 - RNA, 22 nt, Artificial Sequence
  Synthetic
uuucuucucagaggucucaucc

SEQ ID NO: 533236 - RNA, 23 nt, Artificial Sequence
  Synthetic
uuuucuucucagaggucucaucc

SEQ ID NO: 533237 - RNA, 24 nt, Artificial Sequence
  Synthetic
cuuuucuucucagaggucucaucc

SEQ ID NO: 533238 - RNA, 18 nt, Artificial Sequence
  Synthetic
gacucaguaacgucaucc

SEQ ID NO: 533239 - RNA, 19 nt, Artificial Sequence
  Synthetic
ggacucaguaacgucaucc

SEQ ID NO: 533240 - RNA, 20 nt, Artificial Sequence
  Synthetic
aggacucaguaacgucaucc

SEQ ID NO: 533241 - RNA, 21 nt, Artificial Sequence
  Synthetic
uaggacucaguaacgucaucc

SEQ ID NO: 533242 - RNA, 22 nt, Artificial Sequence
  Synthetic
uuaggacucaguaacgucaucc

SEQ ID NO: 533243 - RNA, 23 nt, Artificial Sequence
  Synthetic
guuaggacucaguaacgucaucc

SEQ ID NO: 533244 - RNA, 24 nt, Artificial Sequence
  Synthetic
uguuaggacucaguaacgucaucc

SEQ ID NO: 533245 - RNA, 18 nt, Artificial Sequence
  Synthetic
gggaggauuacuucaucc

SEQ ID NO: 533246 - RNA, 19 nt, Artificial Sequence
  Synthetic
ugggaggauuacuucaucc

SEQ ID NO: 533247 - RNA, 20 nt, Artificial Sequence
  Synthetic
gugggaggauuacuucaucc

SEQ ID NO: 533248 - RNA, 21 nt, Artificial Sequence
  Synthetic
ggugggaggauuacuucaucc

SEQ ID NO: 533249 - RNA, 22 nt, Artificial Sequence
  Synthetic
aggugggaggauuacuucaucc

SEQ ID NO: 533250 - RNA, 23 nt, Artificial Sequence
  Synthetic
gaggugggaggauuacuucaucc

SEQ ID NO: 533251 - RNA, 24 nt, Artificial Sequence
  Synthetic
ugaggugggaggauuacuucaucc

SEQ ID NO: 533252 - RNA, 18 nt, Artificial Sequence
  Synthetic
ccucuggaagcuucaucc

SEQ ID NO: 533253 - RNA, 19 nt, Artificial Sequence
  Synthetic
uccucuggaagcuucaucc

SEQ ID NO: 533254 - RNA, 20 nt, Artificial Sequence
  Synthetic
uuccucuggaagcuucaucc

SEQ ID NO: 533255 - RNA, 21 nt, Artificial Sequence
  Synthetic
cuuccucuggaagcuucaucc

SEQ ID NO: 533256 - RNA, 22 nt, Artificial Sequence
  Synthetic
ccuuccucuggaagcuucaucc

SEQ ID NO: 533257 - RNA, 23 nt, Artificial Sequence
  Synthetic
uccuuccucuggaagcuucaucc

SEQ ID NO: 533258 - RNA, 24 nt, Artificial Sequence
  Synthetic
uuccuuccucuggaagcuucaucc

SEQ ID NO: 533259 - RNA, 18 nt, Artificial Sequence
  Synthetic
aucaaguaggcuucaucc

SEQ ID NO: 533260 - RNA, 19 nt, Artificial Sequence
  Synthetic
aaucaaguaggcuucaucc

SEQ ID NO: 533261 - RNA, 20 nt, Artificial Sequence
  Synthetic
caaucaaguaggcuucaucc

SEQ ID NO: 533262 - RNA, 21 nt, Artificial Sequence
  Synthetic
acaaucaaguaggcuucaucc

SEQ ID NO: 533263 - RNA, 22 nt, Artificial Sequence
  Synthetic
cacaaucaaguaggcuucaucc

SEQ ID NO: 533264 - RNA, 23 nt, Artificial Sequence
  Synthetic
ucacaaucaaguaggcuucaucc

SEQ ID NO: 533265 - RNA, 24 nt, Artificial Sequence
  Synthetic
aucacaaucaaguaggcuucaucc

SEQ ID NO: 533266 - RNA, 21 nt, Artificial Sequence
  Synthetic
augaucaagugggcuucaucc

SEQ ID NO: 533267 - RNA, 22 nt, Artificial Sequence
  Synthetic
caugaucaagugggcuucaucc

SEQ ID NO: 533268 - RNA, 23 nt, Artificial Sequence
  Synthetic
ccaugaucaagugggcuucaucc

SEQ ID NO: 533269 - RNA, 24 nt, Artificial Sequence
  Synthetic
accaugaucaagugggcuucaucc

SEQ ID NO: 533270 - RNA, 18 nt, Artificial Sequence
  Synthetic
uagguaauaaguucaucc

SEQ ID NO: 533271 - RNA, 19 nt, Artificial Sequence
  Synthetic
guagguaauaaguucaucc

SEQ ID NO: 533272 - RNA, 20 nt, Artificial Sequence
  Synthetic
aguagguaauaaguucaucc

SEQ ID NO: 533273 - RNA, 21 nt, Artificial Sequence
  Synthetic
caguagguaauaaguucaucc

SEQ ID NO: 533274 - RNA, 22 nt, Artificial Sequence
  Synthetic
gcaguagguaauaaguucaucc

SEQ ID NO: 533275 - RNA, 23 nt, Artificial Sequence
  Synthetic
agcaguagguaauaaguucaucc

SEQ ID NO: 533276 - RNA, 24 nt, Artificial Sequence
  Synthetic
aagcaguagguaauaaguucaucc

SEQ ID NO: 533277 - RNA, 18 nt, Artificial Sequence
  Synthetic
auggaagccauuucaucc

SEQ ID NO: 533278 - RNA, 19 nt, Artificial Sequence
  Synthetic
aauggaagccauuucaucc

SEQ ID NO: 533279 - RNA, 20 nt, Artificial Sequence
  Synthetic
aaauggaagccauuucaucc

SEQ ID NO: 533280 - RNA, 21 nt, Artificial Sequence
  Synthetic
gaaauggaagccauuucaucc

SEQ ID NO: 533281 - RNA, 22 nt, Artificial Sequence
  Synthetic
ggaaauggaagccauuucaucc

SEQ ID NO: 533282 - RNA, 23 nt, Artificial Sequence
  Synthetic
uggaaauggaagccauuucaucc

SEQ ID NO: 533283 - RNA, 24 nt, Artificial Sequence
  Synthetic
uuggaaauggaagccauuucaucc

SEQ ID NO: 533284 - RNA, 18 nt, Artificial Sequence
  Synthetic
guaagauauuaaagaucc

SEQ ID NO: 533285 - RNA, 19 nt, Artificial Sequence
  Synthetic
gguaagauauuaaagaucc

SEQ ID NO: 533286 - RNA, 20 nt, Artificial Sequence
  Synthetic
agguaagauauuaaagaucc

SEQ ID NO: 533287 - RNA, 21 nt, Artificial Sequence
  Synthetic
uagguaagauauuaaagaucc

SEQ ID NO: 533288 - RNA, 22 nt, Artificial Sequence
  Synthetic
auagguaagauauuaaagaucc

SEQ ID NO: 533289 - RNA, 23 nt, Artificial Sequence
  Synthetic
cauagguaagauauuaaagaucc

SEQ ID NO: 533290 - RNA, 24 nt, Artificial Sequence
  Synthetic
acauagguaagauauuaaagaucc

SEQ ID NO: 533291 - RNA, 18 nt, Artificial Sequence
  Synthetic
uaaaaaucaacaagaucc

SEQ ID NO: 533292 - RNA, 19 nt, Artificial Sequence
  Synthetic
auaaaaaucaacaagaucc

SEQ ID NO: 533293 - RNA, 20 nt, Artificial Sequence
  Synthetic
aauaaaaaucaacaagaucc

SEQ ID NO: 533294 - RNA, 21 nt, Artificial Sequence
  Synthetic
gaauaaaaaucaacaagaucc

SEQ ID NO: 533295 - RNA, 22 nt, Artificial Sequence
  Synthetic
ugaauaaaaaucaacaagaucc

SEQ ID NO: 533296 - RNA, 23 nt, Artificial Sequence
  Synthetic
uugaauaaaaaucaacaagaucc

SEQ ID NO: 533297 - RNA, 24 nt, Artificial Sequence
  Synthetic
auugaauaaaaaucaacaagaucc

SEQ ID NO: 533298 - RNA, 18 nt, Artificial Sequence
  Synthetic
cauuagcauauaagaucc

SEQ ID NO: 533299 - RNA, 19 nt, Artificial Sequence
  Synthetic
ucauuagcauauaagaucc

SEQ ID NO: 533300 - RNA, 20 nt, Artificial Sequence
  Synthetic
uucauuagcauauaagaucc

SEQ ID NO: 533301 - RNA, 21 nt, Artificial Sequence
  Synthetic
uuucauuagcauauaagaucc

SEQ ID NO: 533302 - RNA, 22 nt, Artificial Sequence
  Synthetic
auuucauuagcauauaagaucc

SEQ ID NO: 533303 - RNA, 23 nt, Artificial Sequence
  Synthetic
uauuucauuagcauauaagaucc

SEQ ID NO: 533304 - RNA, 24 nt, Artificial Sequence
  Synthetic
cuauuucauuagcauauaagaucc

SEQ ID NO: 533305 - RNA, 18 nt, Artificial Sequence
  Synthetic
agcggacgggacagaucc

SEQ ID NO: 533306 - RNA, 19 nt, Artificial Sequence
  Synthetic
aagcggacgggacagaucc

SEQ ID NO: 533307 - RNA, 20 nt, Artificial Sequence
  Synthetic
caagcggacgggacagaucc

SEQ ID NO: 533308 - RNA, 21 nt, Artificial Sequence
  Synthetic
gcaagcggacgggacagaucc

SEQ ID NO: 533309 - RNA, 22 nt, Artificial Sequence
  Synthetic
agcaagcggacgggacagaucc

SEQ ID NO: 533310 - RNA, 23 nt, Artificial Sequence
  Synthetic
gagcaagcggacgggacagaucc

SEQ ID NO: 533311 - RNA, 24 nt, Artificial Sequence
  Synthetic
agagcaagcggacgggacagaucc

SEQ ID NO: 533312 - RNA, 18 nt, Artificial Sequence
  Synthetic
ggaacagaauagagaucc

SEQ ID NO: 533313 - RNA, 19 nt, Artificial Sequence
  Synthetic
uggaacagaauagagaucc

SEQ ID NO: 533314 - RNA, 20 nt, Artificial Sequence
  Synthetic
auggaacagaauagagaucc

SEQ ID NO: 533315 - RNA, 21 nt, Artificial Sequence
  Synthetic
aauggaacagaauagagaucc

SEQ ID NO: 533316 - RNA, 22 nt, Artificial Sequence
  Synthetic
caauggaacagaauagagaucc

SEQ ID NO: 533317 - RNA, 23 nt, Artificial Sequence
  Synthetic
ccaauggaacagaauagagaucc

SEQ ID NO: 533318 - RNA, 24 nt, Artificial Sequence
  Synthetic
accaauggaacagaauagagaucc

SEQ ID NO: 533319 - RNA, 18 nt, Artificial Sequence
  Synthetic
gacuagaccaugagaucc

SEQ ID NO: 533320 - RNA, 19 nt, Artificial Sequence
  Synthetic
ugacuagaccaugagaucc

SEQ ID NO: 533321 - RNA, 20 nt, Artificial Sequence
  Synthetic
uugacuagaccaugagaucc

SEQ ID NO: 533322 - RNA, 21 nt, Artificial Sequence
  Synthetic
guugacuagaccaugagaucc

SEQ ID NO: 533323 - RNA, 22 nt, Artificial Sequence
  Synthetic
aguugacuagaccaugagaucc

SEQ ID NO: 533324 - RNA, 23 nt, Artificial Sequence
  Synthetic
caguugacuagaccaugagaucc

SEQ ID NO: 533325 - RNA, 24 nt, Artificial Sequence
  Synthetic
ccaguugacuagaccaugagaucc

SEQ ID NO: 533326 - RNA, 18 nt, Artificial Sequence
  Synthetic
ggagcccuaacuagaucc

SEQ ID NO: 533327 - RNA, 19 nt, Artificial Sequence
  Synthetic
aggagcccuaacuagaucc

SEQ ID NO: 533328 - RNA, 20 nt, Artificial Sequence
  Synthetic
aaggagcccuaacuagaucc

SEQ ID NO: 533329 - RNA, 21 nt, Artificial Sequence
  Synthetic
aaaggagcccuaacuagaucc

SEQ ID NO: 533330 - RNA, 22 nt, Artificial Sequence
  Synthetic
uaaaggagcccuaacuagaucc

SEQ ID NO: 533331 - RNA, 23 nt, Artificial Sequence
  Synthetic
auaaaggagcccuaacuagaucc

SEQ ID NO: 533332 - RNA, 24 nt, Artificial Sequence
  Synthetic
uauaaaggagcccuaacuagaucc

SEQ ID NO: 533333 - RNA, 21 nt, Artificial Sequence
  Synthetic
gguauuucuaguucuagaucc

SEQ ID NO: 533334 - RNA, 22 nt, Artificial Sequence
  Synthetic
ugguauuucuaguucuagaucc

SEQ ID NO: 533335 - RNA, 23 nt, Artificial Sequence
  Synthetic
augguauuucuaguucuagaucc

SEQ ID NO: 533336 - RNA, 24 nt, Artificial Sequence
  Synthetic
aaugguauuucuaguucuagaucc

SEQ ID NO: 533337 - RNA, 18 nt, Artificial Sequence
  Synthetic
acuucugguucuagaucc

SEQ ID NO: 533338 - RNA, 19 nt, Artificial Sequence
  Synthetic
uacuucugguucuagaucc

SEQ ID NO: 533339 - RNA, 20 nt, Artificial Sequence
  Synthetic
guacuucugguucuagaucc

SEQ ID NO: 533340 - RNA, 21 nt, Artificial Sequence
  Synthetic
gguacuucugguucuagaucc

SEQ ID NO: 533341 - RNA, 22 nt, Artificial Sequence
  Synthetic
ugguacuucugguucuagaucc

SEQ ID NO: 533342 - RNA, 23 nt, Artificial Sequence
  Synthetic
augguacuucugguucuagaucc

SEQ ID NO: 533343 - RNA, 24 nt, Artificial Sequence
  Synthetic
aaugguacuucugguucuagaucc

SEQ ID NO: 533344 - RNA, 18 nt, Artificial Sequence
  Synthetic
auuucugguuguagaucc

SEQ ID NO: 533345 - RNA, 19 nt, Artificial Sequence
  Synthetic
uauuucugguuguagaucc

SEQ ID NO: 533346 - RNA, 20 nt, Artificial Sequence
  Synthetic
guauuucugguuguagaucc

SEQ ID NO: 533347 - RNA, 21 nt, Artificial Sequence
  Synthetic
gguauuucugguuguagaucc

SEQ ID NO: 533348 - RNA, 22 nt, Artificial Sequence
  Synthetic
ugguauuucugguuguagaucc

SEQ ID NO: 533349 - RNA, 23 nt, Artificial Sequence
  Synthetic
augguauuucugguuguagaucc

SEQ ID NO: 533350 - RNA, 24 nt, Artificial Sequence
  Synthetic
aaugguauuucugguuguagaucc

SEQ ID NO: 533351 - RNA, 18 nt, Artificial Sequence
  Synthetic
auggugguuauuagaucc

SEQ ID NO: 533352 - RNA, 19 nt, Artificial Sequence
  Synthetic
aauggugguuauuagaucc

SEQ ID NO: 533353 - RNA, 20 nt, Artificial Sequence
  Synthetic
aaauggugguuauuagaucc

SEQ ID NO: 533354 - RNA, 21 nt, Artificial Sequence
  Synthetic
aaaauggugguuauuagaucc

SEQ ID NO: 533355 - RNA, 22 nt, Artificial Sequence
  Synthetic
aaaaauggugguuauuagaucc

SEQ ID NO: 533356 - RNA, 23 nt, Artificial Sequence
  Synthetic
gaaaaauggugguuauuagaucc

SEQ ID NO: 533357 - RNA, 24 nt, Artificial Sequence
  Synthetic
agaaaaauggugguuauuagaucc

SEQ ID NO: 533358 - RNA, 18 nt, Artificial Sequence
  Synthetic
uaacugccauaacgaucc

SEQ ID NO: 533359 - RNA, 19 nt, Artificial Sequence
  Synthetic
cuaacugccauaacgaucc

SEQ ID NO: 533360 - RNA, 20 nt, Artificial Sequence
  Synthetic
acuaacugccauaacgaucc

SEQ ID NO: 533361 - RNA, 21 nt, Artificial Sequence
  Synthetic
aacuaacugccauaacgaucc

SEQ ID NO: 533362 - RNA, 22 nt, Artificial Sequence
  Synthetic
caacuaacugccauaacgaucc

SEQ ID NO: 533363 - RNA, 23 nt, Artificial Sequence
  Synthetic
gcaacuaacugccauaacgaucc

SEQ ID NO: 533364 - RNA, 24 nt, Artificial Sequence
  Synthetic
ugcaacuaacugccauaacgaucc

SEQ ID NO: 533365 - RNA, 18 nt, Artificial Sequence
  Synthetic
gagaaauggucaggaucc

SEQ ID NO: 533366 - RNA, 19 nt, Artificial Sequence
  Synthetic
ggagaaauggucaggaucc

SEQ ID NO: 533367 - RNA, 20 nt, Artificial Sequence
  Synthetic
uggagaaauggucaggaucc

SEQ ID NO: 533368 - RNA, 21 nt, Artificial Sequence
  Synthetic
guggagaaauggucaggaucc

SEQ ID NO: 533369 - RNA, 22 nt, Artificial Sequence
  Synthetic
aguggagaaauggucaggaucc

SEQ ID NO: 533370 - RNA, 23 nt, Artificial Sequence
  Synthetic
aaguggagaaauggucaggaucc

SEQ ID NO: 533371 - RNA, 24 nt, Artificial Sequence
  Synthetic
uaaguggagaaauggucaggaucc

SEQ ID NO: 533372 - RNA, 18 nt, Artificial Sequence
  Synthetic
cucuguuaaauaggaucc

SEQ ID NO: 533373 - RNA, 19 nt, Artificial Sequence
  Synthetic
ucucuguuaaauaggaucc

SEQ ID NO: 533374 - RNA, 20 nt, Artificial Sequence
  Synthetic
uucucuguuaaauaggaucc

SEQ ID NO: 533375 - RNA, 21 nt, Artificial Sequence
  Synthetic
uuucucuguuaaauaggaucc

SEQ ID NO: 533376 - RNA, 22 nt, Artificial Sequence
  Synthetic
uuuucucuguuaaauaggaucc

SEQ ID NO: 533377 - RNA, 23 nt, Artificial Sequence
  Synthetic
auuuucucuguuaaauaggaucc

SEQ ID NO: 533378 - RNA, 24 nt, Artificial Sequence
  Synthetic
cauuuucucuguuaaauaggaucc

SEQ ID NO: 533379 - RNA, 18 nt, Artificial Sequence
  Synthetic
caagcucugcaaugaucc

SEQ ID NO: 533380 - RNA, 19 nt, Artificial Sequence
  Synthetic
ucaagcucugcaaugaucc

SEQ ID NO: 533381 - RNA, 20 nt, Artificial Sequence
  Synthetic
uucaagcucugcaaugaucc

SEQ ID NO: 533382 - RNA, 21 nt, Artificial Sequence
  Synthetic
uuucaagcucugcaaugaucc

SEQ ID NO: 533383 - RNA, 22 nt, Artificial Sequence
  Synthetic
uuuucaagcucugcaaugaucc

SEQ ID NO: 533384 - RNA, 23 nt, Artificial Sequence
  Synthetic
uuuuucaagcucugcaaugaucc

SEQ ID NO: 533385 - RNA, 24 nt, Artificial Sequence
  Synthetic
cuuuuucaagcucugcaaugaucc

SEQ ID NO: 533386 - RNA, 18 nt, Artificial Sequence
  Synthetic
ugucuuugggaaugaucc

SEQ ID NO: 533387 - RNA, 19 nt, Artificial Sequence
  Synthetic
augucuuugggaaugaucc

SEQ ID NO: 533388 - RNA, 20 nt, Artificial Sequence
  Synthetic
gaugucuuugggaaugaucc

SEQ ID NO: 533389 - RNA, 21 nt, Artificial Sequence
  Synthetic
ggaugucuuugggaaugaucc

SEQ ID NO: 533390 - RNA, 22 nt, Artificial Sequence
  Synthetic
gggaugucuuugggaaugaucc

SEQ ID NO: 533391 - RNA, 23 nt, Artificial Sequence
  Synthetic
agggaugucuuugggaaugaucc

SEQ ID NO: 533392 - RNA, 24 nt, Artificial Sequence
  Synthetic
aagggaugucuuugggaaugaucc

SEQ ID NO: 533393 - RNA, 18 nt, Artificial Sequence
  Synthetic
ggauagauuggaugaucc

SEQ ID NO: 533394 - RNA, 19 nt, Artificial Sequence
  Synthetic
aggauagauuggaugaucc

SEQ ID NO: 533395 - RNA, 20 nt, Artificial Sequence
  Synthetic
gaggauagauuggaugaucc

SEQ ID NO: 533396 - RNA, 21 nt, Artificial Sequence
  Synthetic
ggaggauagauuggaugaucc

SEQ ID NO: 533397 - RNA, 22 nt, Artificial Sequence
  Synthetic
aggaggauagauuggaugaucc

SEQ ID NO: 533398 - RNA, 23 nt, Artificial Sequence
  Synthetic
aaggaggauagauuggaugaucc

SEQ ID NO: 533399 - RNA, 24 nt, Artificial Sequence
  Synthetic
aaaggaggauagauuggaugaucc

SEQ ID NO: 533400 - RNA, 18 nt, Artificial Sequence
  Synthetic
gaugaaauuauaugaucc

SEQ ID NO: 533401 - RNA, 19 nt, Artificial Sequence
  Synthetic
agaugaaauuauaugaucc

SEQ ID NO: 533402 - RNA, 20 nt, Artificial Sequence
  Synthetic
gagaugaaauuauaugaucc

SEQ ID NO: 533403 - RNA, 21 nt, Artificial Sequence
  Synthetic
ggagaugaaauuauaugaucc

SEQ ID NO: 533404 - RNA, 22 nt, Artificial Sequence
  Synthetic
aggagaugaaauuauaugaucc

SEQ ID NO: 533405 - RNA, 23 nt, Artificial Sequence
  Synthetic
uaggagaugaaauuauaugaucc

SEQ ID NO: 533406 - RNA, 24 nt, Artificial Sequence
  Synthetic
auaggagaugaaauuauaugaucc

SEQ ID NO: 533407 - RNA, 18 nt, Artificial Sequence
  Synthetic
ucaauugggagcugaucc

SEQ ID NO: 533408 - RNA, 19 nt, Artificial Sequence
  Synthetic
uucaauugggagcugaucc

SEQ ID NO: 533409 - RNA, 20 nt, Artificial Sequence
  Synthetic
auucaauugggagcugaucc

SEQ ID NO: 533410 - RNA, 21 nt, Artificial Sequence
  Synthetic
aauucaauugggagcugaucc

SEQ ID NO: 533411 - RNA, 22 nt, Artificial Sequence
  Synthetic
uaauucaauugggagcugaucc

SEQ ID NO: 533412 - RNA, 23 nt, Artificial Sequence
  Synthetic
auaauucaauugggagcugaucc

SEQ ID NO: 533413 - RNA, 24 nt, Artificial Sequence
  Synthetic
aauaauucaauugggagcugaucc

SEQ ID NO: 533414 - RNA, 18 nt, Artificial Sequence
  Synthetic
ugcuaacgcugcugaucc

SEQ ID NO: 533415 - RNA, 19 nt, Artificial Sequence
  Synthetic
augcuaacgcugcugaucc

SEQ ID NO: 533416 - RNA, 20 nt, Artificial Sequence
  Synthetic
gaugcuaacgcugcugaucc

SEQ ID NO: 533417 - RNA, 21 nt, Artificial Sequence
  Synthetic
ugaugcuaacgcugcugaucc

SEQ ID NO: 533418 - RNA, 22 nt, Artificial Sequence
  Synthetic
gugaugcuaacgcugcugaucc

SEQ ID NO: 533419 - RNA, 23 nt, Artificial Sequence
  Synthetic
agugaugcuaacgcugcugaucc

SEQ ID NO: 533420 - RNA, 24 nt, Artificial Sequence
  Synthetic
aagugaugcuaacgcugcugaucc

SEQ ID NO: 533421 - RNA, 18 nt, Artificial Sequence
  Synthetic
aguucauuucucugaucc

SEQ ID NO: 533422 - RNA, 19 nt, Artificial Sequence
  Synthetic
uaguucauuucucugaucc

SEQ ID NO: 533423 - RNA, 20 nt, Artificial Sequence
  Synthetic
cuaguucauuucucugaucc

SEQ ID NO: 533424 - RNA, 21 nt, Artificial Sequence
  Synthetic
ucuaguucauuucucugaucc

SEQ ID NO: 533425 - RNA, 22 nt, Artificial Sequence
  Synthetic
gucuaguucauuucucugaucc

SEQ ID NO: 533426 - RNA, 23 nt, Artificial Sequence
  Synthetic
ugucuaguucauuucucugaucc

SEQ ID NO: 533427 - RNA, 24 nt, Artificial Sequence
  Synthetic
uugucuaguucauuucucugaucc

SEQ ID NO: 533428 - RNA, 18 nt, Artificial Sequence
  Synthetic
auaaccaaacagugaucc

SEQ ID NO: 533429 - RNA, 19 nt, Artificial Sequence
  Synthetic
aauaaccaaacagugaucc

SEQ ID NO: 533430 - RNA, 20 nt, Artificial Sequence
  Synthetic
caauaaccaaacagugaucc

SEQ ID NO: 533431 - RNA, 21 nt, Artificial Sequence
  Synthetic
acaauaaccaaacagugaucc

SEQ ID NO: 533432 - RNA, 22 nt, Artificial Sequence
  Synthetic
aacaauaaccaaacagugaucc

SEQ ID NO: 533433 - RNA, 23 nt, Artificial Sequence
  Synthetic
caacaauaaccaaacagugaucc

SEQ ID NO: 533434 - RNA, 24 nt, Artificial Sequence
  Synthetic
acaacaauaaccaaacagugaucc

SEQ ID NO: 533435 - RNA, 18 nt, Artificial Sequence
  Synthetic
uuguuuaaagagugaucc

SEQ ID NO: 533436 - RNA, 19 nt, Artificial Sequence
  Synthetic
cuuguuuaaagagugaucc

SEQ ID NO: 533437 - RNA, 20 nt, Artificial Sequence
  Synthetic
ucuuguuuaaagagugaucc

SEQ ID NO: 533438 - RNA, 21 nt, Artificial Sequence
  Synthetic
uucuuguuuaaagagugaucc

SEQ ID NO: 533439 - RNA, 22 nt, Artificial Sequence
  Synthetic
uuucuuguuuaaagagugaucc

SEQ ID NO: 533440 - RNA, 23 nt, Artificial Sequence
  Synthetic
auuucuuguuuaaagagugaucc

SEQ ID NO: 533441 - RNA, 24 nt, Artificial Sequence
  Synthetic
uauuucuuguuuaaagagugaucc

SEQ ID NO: 533442 - RNA, 18 nt, Artificial Sequence
  Synthetic
agcagacugaggugaucc

SEQ ID NO: 533443 - RNA, 19 nt, Artificial Sequence
  Synthetic
cagcagacugaggugaucc

SEQ ID NO: 533444 - RNA, 20 nt, Artificial Sequence
  Synthetic
acagcagacugaggugaucc

SEQ ID NO: 533445 - RNA, 21 nt, Artificial Sequence
  Synthetic
uacagcagacugaggugaucc

SEQ ID NO: 533446 - RNA, 22 nt, Artificial Sequence
  Synthetic
auacagcagacugaggugaucc

SEQ ID NO: 533447 - RNA, 23 nt, Artificial Sequence
  Synthetic
cauacagcagacugaggugaucc

SEQ ID NO: 533448 - RNA, 24 nt, Artificial Sequence
  Synthetic
ccauacagcagacugaggugaucc

SEQ ID NO: 533449 - RNA, 18 nt, Artificial Sequence
  Synthetic
cuacugguugugugaucc

SEQ ID NO: 533450 - RNA, 19 nt, Artificial Sequence
  Synthetic
acuacugguugugugaucc

SEQ ID NO: 533451 - RNA, 20 nt, Artificial Sequence
  Synthetic
uacuacugguugugugaucc

SEQ ID NO: 533452 - RNA, 21 nt, Artificial Sequence
  Synthetic
cuacuacugguugugugaucc

SEQ ID NO: 533453 - RNA, 22 nt, Artificial Sequence
  Synthetic
acuacuacugguugugugaucc

SEQ ID NO: 533454 - RNA, 23 nt, Artificial Sequence
  Synthetic
cacuacuacugguugugugaucc

SEQ ID NO: 533455 - RNA, 24 nt, Artificial Sequence
  Synthetic
ucacuacuacugguugugugaucc

SEQ ID NO: 533456 - RNA, 18 nt, Artificial Sequence
  Synthetic
gaagugacuucuugaucc

SEQ ID NO: 533457 - RNA, 19 nt, Artificial Sequence
  Synthetic
ugaagugacuucuugaucc

SEQ ID NO: 533458 - RNA, 20 nt, Artificial Sequence
  Synthetic
uugaagugacuucuugaucc

SEQ ID NO: 533459 - RNA, 21 nt, Artificial Sequence
  Synthetic
guugaagugacuucuugaucc

SEQ ID NO: 533460 - RNA, 22 nt, Artificial Sequence
  Synthetic
aguugaagugacuucuugaucc

SEQ ID NO: 533461 - RNA, 23 nt, Artificial Sequence
  Synthetic
aaguugaagugacuucuugaucc

SEQ ID NO: 533462 - RNA, 24 nt, Artificial Sequence
  Synthetic
aaaguugaagugacuucuugaucc

SEQ ID NO: 533463 - RNA, 18 nt, Artificial Sequence
  Synthetic
caagauugguuuugaucc

SEQ ID NO: 533464 - RNA, 19 nt, Artificial Sequence
  Synthetic
ucaagauugguuuugaucc

SEQ ID NO: 533465 - RNA, 20 nt, Artificial Sequence
  Synthetic
cucaagauugguuuugaucc

SEQ ID NO: 533466 - RNA, 21 nt, Artificial Sequence
  Synthetic
acucaagauugguuuugaucc

SEQ ID NO: 533467 - RNA, 22 nt, Artificial Sequence
  Synthetic
uacucaagauugguuuugaucc

SEQ ID NO: 533468 - RNA, 23 nt, Artificial Sequence
  Synthetic
uuacucaagauugguuuugaucc

SEQ ID NO: 533469 - RNA, 24 nt, Artificial Sequence
  Synthetic
auuacucaagauugguuuugaucc

SEQ ID NO: 533470 - RNA, 18 nt, Artificial Sequence
  Synthetic
aaucauguauaaauaucc

SEQ ID NO: 533471 - RNA, 19 nt, Artificial Sequence
  Synthetic
gaaucauguauaaauaucc

SEQ ID NO: 533472 - RNA, 20 nt, Artificial Sequence
  Synthetic
ugaaucauguauaaauaucc

SEQ ID NO: 533473 - RNA, 21 nt, Artificial Sequence
  Synthetic
gugaaucauguauaaauaucc

SEQ ID NO: 533474 - RNA, 22 nt, Artificial Sequence
  Synthetic
cgugaaucauguauaaauaucc

SEQ ID NO: 533475 - RNA, 23 nt, Artificial Sequence
  Synthetic
acgugaaucauguauaaauaucc

SEQ ID NO: 533476 - RNA, 24 nt, Artificial Sequence
  Synthetic
aacgugaaucauguauaaauaucc

SEQ ID NO: 533477 - RNA, 18 nt, Artificial Sequence
  Synthetic
aaaacaccguaaauaucc

SEQ ID NO: 533478 - RNA, 19 nt, Artificial Sequence
  Synthetic
gaaaacaccguaaauaucc

SEQ ID NO: 533479 - RNA, 20 nt, Artificial Sequence
  Synthetic
ggaaaacaccguaaauaucc

SEQ ID NO: 533480 - RNA, 21 nt, Artificial Sequence
  Synthetic
gggaaaacaccguaaauaucc

SEQ ID NO: 533481 - RNA, 22 nt, Artificial Sequence
  Synthetic
ggggaaaacaccguaaauaucc

SEQ ID NO: 533482 - RNA, 23 nt, Artificial Sequence
  Synthetic
aggggaaaacaccguaaauaucc

SEQ ID NO: 533483 - RNA, 24 nt, Artificial Sequence
  Synthetic
uaggggaaaacaccguaaauaucc

SEQ ID NO: 533484 - RNA, 18 nt, Artificial Sequence
  Synthetic
aaauuucaaucaauaucc

SEQ ID NO: 533485 - RNA, 19 nt, Artificial Sequence
  Synthetic
aaaauuucaaucaauaucc

SEQ ID NO: 533486 - RNA, 20 nt, Artificial Sequence
  Synthetic
caaaauuucaaucaauaucc

SEQ ID NO: 533487 - RNA, 21 nt, Artificial Sequence
  Synthetic
acaaaauuucaaucaauaucc

SEQ ID NO: 533488 - RNA, 22 nt, Artificial Sequence
  Synthetic
cacaaaauuucaaucaauaucc

SEQ ID NO: 533489 - RNA, 23 nt, Artificial Sequence
  Synthetic
ucacaaaauuucaaucaauaucc

SEQ ID NO: 533490 - RNA, 24 nt, Artificial Sequence
  Synthetic
uucacaaaauuucaaucaauaucc

SEQ ID NO: 533491 - RNA, 18 nt, Artificial Sequence
  Synthetic
ucauuugcuuacauaucc

SEQ ID NO: 533492 - RNA, 19 nt, Artificial Sequence
  Synthetic
cucauuugcuuacauaucc

SEQ ID NO: 533493 - RNA, 20 nt, Artificial Sequence
  Synthetic
gcucauuugcuuacauaucc

SEQ ID NO: 533494 - RNA, 21 nt, Artificial Sequence
  Synthetic
ugcucauuugcuuacauaucc

SEQ ID NO: 533495 - RNA, 22 nt, Artificial Sequence
  Synthetic
uugcucauuugcuuacauaucc

SEQ ID NO: 533496 - RNA, 23 nt, Artificial Sequence
  Synthetic
cuugcucauuugcuuacauaucc

SEQ ID NO: 533497 - RNA, 24 nt, Artificial Sequence
  Synthetic
acuugcucauuugcuuacauaucc

SEQ ID NO: 533498 - RNA, 18 nt, Artificial Sequence
  Synthetic
aggaaguaacccauaucc

SEQ ID NO: 533499 - RNA, 19 nt, Artificial Sequence
  Synthetic
caggaaguaacccauaucc

SEQ ID NO: 533500 - RNA, 20 nt, Artificial Sequence
  Synthetic
ccaggaaguaacccauaucc

SEQ ID NO: 533501 - RNA, 21 nt, Artificial Sequence
  Synthetic
cccaggaaguaacccauaucc

SEQ ID NO: 533502 - RNA, 22 nt, Artificial Sequence
  Synthetic
gcccaggaaguaacccauaucc

SEQ ID NO: 533503 - RNA, 23 nt, Artificial Sequence
  Synthetic
agcccaggaaguaacccauaucc

SEQ ID NO: 533504 - RNA, 24 nt, Artificial Sequence
  Synthetic
uagcccaggaaguaacccauaucc

SEQ ID NO: 533505 - RNA, 18 nt, Artificial Sequence
  Synthetic
ggcaaacagugcauaucc

SEQ ID NO: 533506 - RNA, 19 nt, Artificial Sequence
  Synthetic
uggcaaacagugcauaucc

SEQ ID NO: 533507 - RNA, 20 nt, Artificial Sequence
  Synthetic
uuggcaaacagugcauaucc

SEQ ID NO: 533508 - RNA, 21 nt, Artificial Sequence
  Synthetic
uuuggcaaacagugcauaucc

SEQ ID NO: 533509 - RNA, 22 nt, Artificial Sequence
  Synthetic
auuuggcaaacagugcauaucc

SEQ ID NO: 533510 - RNA, 23 nt, Artificial Sequence
  Synthetic
cauuuggcaaacagugcauaucc

SEQ ID NO: 533511 - RNA, 24 nt, Artificial Sequence
  Synthetic
ucauuuggcaaacagugcauaucc

SEQ ID NO: 533512 - RNA, 18 nt, Artificial Sequence
  Synthetic
ccuuguucacucauaucc

SEQ ID NO: 533513 - RNA, 19 nt, Artificial Sequence
  Synthetic
accuuguucacucauaucc

SEQ ID NO: 533514 - RNA, 20 nt, Artificial Sequence
  Synthetic
uaccuuguucacucauaucc

SEQ ID NO: 533515 - RNA, 21 nt, Artificial Sequence
  Synthetic
cuaccuuguucacucauaucc

SEQ ID NO: 533516 - RNA, 22 nt, Artificial Sequence
  Synthetic
acuaccuuguucacucauaucc

SEQ ID NO: 533517 - RNA, 23 nt, Artificial Sequence
  Synthetic
aacuaccuuguucacucauaucc

SEQ ID NO: 533518 - RNA, 24 nt, Artificial Sequence
  Synthetic
uaacuaccuuguucacucauaucc

SEQ ID NO: 533519 - RNA, 18 nt, Artificial Sequence
  Synthetic
acacuuacucggauaucc

SEQ ID NO: 533520 - RNA, 19 nt, Artificial Sequence
  Synthetic
aacacuuacucggauaucc

SEQ ID NO: 533521 - RNA, 20 nt, Artificial Sequence
  Synthetic
uaacacuuacucggauaucc

SEQ ID NO: 533522 - RNA, 21 nt, Artificial Sequence
  Synthetic
cuaacacuuacucggauaucc

SEQ ID NO: 533523 - RNA, 22 nt, Artificial Sequence
  Synthetic
gcuaacacuuacucggauaucc

SEQ ID NO: 533524 - RNA, 23 nt, Artificial Sequence
  Synthetic
agcuaacacuuacucggauaucc

SEQ ID NO: 533525 - RNA, 24 nt, Artificial Sequence
  Synthetic
uagcuaacacuuacucggauaucc

SEQ ID NO: 533526 - RNA, 18 nt, Artificial Sequence
  Synthetic
ggauguuugaugauaucc

SEQ ID NO: 533527 - RNA, 19 nt, Artificial Sequence
  Synthetic
aggauguuugaugauaucc

SEQ ID NO: 533528 - RNA, 20 nt, Artificial Sequence
  Synthetic
caggauguuugaugauaucc

SEQ ID NO: 533529 - RNA, 21 nt, Artificial Sequence
  Synthetic
ccaggauguuugaugauaucc

SEQ ID NO: 533530 - RNA, 22 nt, Artificial Sequence
  Synthetic
accaggauguuugaugauaucc

SEQ ID NO: 533531 - RNA, 23 nt, Artificial Sequence
  Synthetic
gaccaggauguuugaugauaucc

SEQ ID NO: 533532 - RNA, 24 nt, Artificial Sequence
  Synthetic
ggaccaggauguuugaugauaucc

SEQ ID NO: 533533 - RNA, 18 nt, Artificial Sequence
  Synthetic
uugagaugacugauaucc

SEQ ID NO: 533534 - RNA, 19 nt, Artificial Sequence
  Synthetic
cuugagaugacugauaucc

SEQ ID NO: 533535 - RNA, 20 nt, Artificial Sequence
  Synthetic
gcuugagaugacugauaucc

SEQ ID NO: 533536 - RNA, 21 nt, Artificial Sequence
  Synthetic
ugcuugagaugacugauaucc

SEQ ID NO: 533537 - RNA, 22 nt, Artificial Sequence
  Synthetic
uugcuugagaugacugauaucc

SEQ ID NO: 533538 - RNA, 23 nt, Artificial Sequence
  Synthetic
cuugcuugagaugacugauaucc

SEQ ID NO: 533539 - RNA, 24 nt, Artificial Sequence
  Synthetic
gcuugcuugagaugacugauaucc

SEQ ID NO: 533540 - RNA, 18 nt, Artificial Sequence
  Synthetic
gugguuaaaaauauaucc

SEQ ID NO: 533541 - RNA, 19 nt, Artificial Sequence
  Synthetic
agugguuaaaaauauaucc

SEQ ID NO: 533542 - RNA, 20 nt, Artificial Sequence
  Synthetic
uagugguuaaaaauauaucc

SEQ ID NO: 533543 - RNA, 21 nt, Artificial Sequence
  Synthetic
auagugguuaaaaauauaucc

SEQ ID NO: 533544 - RNA, 22 nt, Artificial Sequence
  Synthetic
aauagugguuaaaaauauaucc

SEQ ID NO: 533545 - RNA, 23 nt, Artificial Sequence
  Synthetic
gaauagugguuaaaaauauaucc

SEQ ID NO: 533546 - RNA, 24 nt, Artificial Sequence
  Synthetic
ggaauagugguuaaaaauauaucc

SEQ ID NO: 533547 - RNA, 18 nt, Artificial Sequence
  Synthetic
aauguucacacuauaucc

SEQ ID NO: 533548 - RNA, 19 nt, Artificial Sequence
  Synthetic
uaauguucacacuauaucc

SEQ ID NO: 533549 - RNA, 20 nt, Artificial Sequence
  Synthetic
uuaauguucacacuauaucc

SEQ ID NO: 533550 - RNA, 21 nt, Artificial Sequence
  Synthetic
auuaauguucacacuauaucc

SEQ ID NO: 533551 - RNA, 22 nt, Artificial Sequence
  Synthetic
aauuaauguucacacuauaucc

SEQ ID NO: 533552 - RNA, 23 nt, Artificial Sequence
  Synthetic
uaauuaauguucacacuauaucc

SEQ ID NO: 533553 - RNA, 24 nt, Artificial Sequence
  Synthetic
cuaauuaauguucacacuauaucc

SEQ ID NO: 533554 - RNA, 18 nt, Artificial Sequence
  Synthetic
ucaucaugcacuauaucc

SEQ ID NO: 533555 - RNA, 19 nt, Artificial Sequence
  Synthetic
aucaucaugcacuauaucc

SEQ ID NO: 533556 - RNA, 20 nt, Artificial Sequence
  Synthetic
caucaucaugcacuauaucc

SEQ ID NO: 533557 - RNA, 21 nt, Artificial Sequence
  Synthetic
ucaucaucaugcacuauaucc

SEQ ID NO: 533558 - RNA, 22 nt, Artificial Sequence
  Synthetic
cucaucaucaugcacuauaucc

SEQ ID NO: 533559 - RNA, 23 nt, Artificial Sequence
  Synthetic
ccucaucaucaugcacuauaucc

SEQ ID NO: 533560 - RNA, 24 nt, Artificial Sequence
  Synthetic
accucaucaucaugcacuauaucc

SEQ ID NO: 533561 - RNA, 18 nt, Artificial Sequence
  Synthetic
agaguugagauuauaucc

SEQ ID NO: 533562 - RNA, 19 nt, Artificial Sequence
  Synthetic
cagaguugagauuauaucc

SEQ ID NO: 533563 - RNA, 20 nt, Artificial Sequence
  Synthetic
gcagaguugagauuauaucc

SEQ ID NO: 533564 - RNA, 21 nt, Artificial Sequence
  Synthetic
ggcagaguugagauuauaucc

SEQ ID NO: 533565 - RNA, 22 nt, Artificial Sequence
  Synthetic
uggcagaguugagauuauaucc

SEQ ID NO: 533566 - RNA, 23 nt, Artificial Sequence
  Synthetic
auggcagaguugagauuauaucc

SEQ ID NO: 533567 - RNA, 24 nt, Artificial Sequence
  Synthetic
aauggcagaguugagauuauaucc

SEQ ID NO: 533568 - RNA, 18 nt, Artificial Sequence
  Synthetic
gcuuguauacaacuaucc

SEQ ID NO: 533569 - RNA, 19 nt, Artificial Sequence
  Synthetic
ugcuuguauacaacuaucc

SEQ ID NO: 533570 - RNA, 20 nt, Artificial Sequence
  Synthetic
augcuuguauacaacuaucc

SEQ ID NO: 533571 - RNA, 21 nt, Artificial Sequence
  Synthetic
aaugcuuguauacaacuaucc

SEQ ID NO: 533572 - RNA, 22 nt, Artificial Sequence
  Synthetic
aaaugcuuguauacaacuaucc

SEQ ID NO: 533573 - RNA, 23 nt, Artificial Sequence
  Synthetic
aaaaugcuuguauacaacuaucc

SEQ ID NO: 533574 - RNA, 24 nt, Artificial Sequence
  Synthetic
gaaaaugcuuguauacaacuaucc

SEQ ID NO: 533575 - RNA, 18 nt, Artificial Sequence
  Synthetic
cagguagaaaaccuaucc

SEQ ID NO: 533576 - RNA, 19 nt, Artificial Sequence
  Synthetic
ucagguagaaaaccuaucc

SEQ ID NO: 533577 - RNA, 20 nt, Artificial Sequence
  Synthetic
aucagguagaaaaccuaucc

SEQ ID NO: 533578 - RNA, 21 nt, Artificial Sequence
  Synthetic
gaucagguagaaaaccuaucc

SEQ ID NO: 533579 - RNA, 22 nt, Artificial Sequence
  Synthetic
ugaucagguagaaaaccuaucc

SEQ ID NO: 533580 - RNA, 23 nt, Artificial Sequence
  Synthetic
uugaucagguagaaaaccuaucc

SEQ ID NO: 533581 - RNA, 24 nt, Artificial Sequence
  Synthetic
uuugaucagguagaaaaccuaucc

SEQ ID NO: 533582 - RNA, 21 nt, Artificial Sequence
  Synthetic
cgauauugauucuuccuaucc

SEQ ID NO: 533583 - RNA, 22 nt, Artificial Sequence
  Synthetic
acgauauugauucuuccuaucc

SEQ ID NO: 533584 - RNA, 23 nt, Artificial Sequence
  Synthetic
cacgauauugauucuuccuaucc

SEQ ID NO: 533585 - RNA, 24 nt, Artificial Sequence
  Synthetic
ucacgauauugauucuuccuaucc

SEQ ID NO: 533586 - RNA, 18 nt, Artificial Sequence
  Synthetic
aguaaucacuggcuaucc

SEQ ID NO: 533587 - RNA, 19 nt, Artificial Sequence
  Synthetic
caguaaucacuggcuaucc

SEQ ID NO: 533588 - RNA, 20 nt, Artificial Sequence
  Synthetic
acaguaaucacuggcuaucc

SEQ ID NO: 533589 - RNA, 21 nt, Artificial Sequence
  Synthetic
cacaguaaucacuggcuaucc

SEQ ID NO: 533590 - RNA, 22 nt, Artificial Sequence
  Synthetic
gcacaguaaucacuggcuaucc

SEQ ID NO: 533591 - RNA, 23 nt, Artificial Sequence
  Synthetic
agcacaguaaucacuggcuaucc

SEQ ID NO: 533592 - RNA, 24 nt, Artificial Sequence
  Synthetic
aagcacaguaaucacuggcuaucc

SEQ ID NO: 533593 - RNA, 18 nt, Artificial Sequence
  Synthetic
cuagcauagaaucuaucc

SEQ ID NO: 533594 - RNA, 19 nt, Artificial Sequence
  Synthetic
ccuagcauagaaucuaucc

SEQ ID NO: 533595 - RNA, 20 nt, Artificial Sequence
  Synthetic
accuagcauagaaucuaucc

SEQ ID NO: 533596 - RNA, 21 nt, Artificial Sequence
  Synthetic
gaccuagcauagaaucuaucc

SEQ ID NO: 533597 - RNA, 22 nt, Artificial Sequence
  Synthetic
ugaccuagcauagaaucuaucc

SEQ ID NO: 533598 - RNA, 23 nt, Artificial Sequence
  Synthetic
uugaccuagcauagaaucuaucc

SEQ ID NO: 533599 - RNA, 24 nt, Artificial Sequence
  Synthetic
uuugaccuagcauagaaucuaucc

SEQ ID NO: 533600 - RNA, 18 nt, Artificial Sequence
  Synthetic
aaaguuguuacucuaucc

SEQ ID NO: 533601 - RNA, 19 nt, Artificial Sequence
  Synthetic
gaaaguuguuacucuaucc

SEQ ID NO: 533602 - RNA, 20 nt, Artificial Sequence
  Synthetic
ugaaaguuguuacucuaucc

SEQ ID NO: 533603 - RNA, 21 nt, Artificial Sequence
  Synthetic
cugaaaguuguuacucuaucc

SEQ ID NO: 533604 - RNA, 22 nt, Artificial Sequence
  Synthetic
ucugaaaguuguuacucuaucc

SEQ ID NO: 533605 - RNA, 23 nt, Artificial Sequence
  Synthetic
gucugaaaguuguuacucuaucc

SEQ ID NO: 533606 - RNA, 24 nt, Artificial Sequence
  Synthetic
ggucugaaaguuguuacucuaucc

SEQ ID NO: 533607 - RNA, 18 nt, Artificial Sequence
  Synthetic
agaagaaaaucaguaucc

SEQ ID NO: 533608 - RNA, 19 nt, Artificial Sequence
  Synthetic
aagaagaaaaucaguaucc

SEQ ID NO: 533609 - RNA, 20 nt, Artificial Sequence
  Synthetic
aaagaagaaaaucaguaucc

SEQ ID NO: 533610 - RNA, 21 nt, Artificial Sequence
  Synthetic
caaagaagaaaaucaguaucc

SEQ ID NO: 533611 - RNA, 22 nt, Artificial Sequence
  Synthetic
acaaagaagaaaaucaguaucc

SEQ ID NO: 533612 - RNA, 23 nt, Artificial Sequence
  Synthetic
aacaaagaagaaaaucaguaucc

SEQ ID NO: 533613 - RNA, 24 nt, Artificial Sequence
  Synthetic
uaacaaagaagaaaaucaguaucc

SEQ ID NO: 533614 - RNA, 18 nt, Artificial Sequence
  Synthetic
aauugucccucaguaucc

SEQ ID NO: 533615 - RNA, 19 nt, Artificial Sequence
  Synthetic
caauugucccucaguaucc

SEQ ID NO: 533616 - RNA, 20 nt, Artificial Sequence
  Synthetic
acaauugucccucaguaucc

SEQ ID NO: 533617 - RNA, 21 nt, Artificial Sequence
  Synthetic
uacaauugucccucaguaucc

SEQ ID NO: 533618 - RNA, 22 nt, Artificial Sequence
  Synthetic
auacaauugucccucaguaucc

SEQ ID NO: 533619 - RNA, 23 nt, Artificial Sequence
  Synthetic
aauacaauugucccucaguaucc

SEQ ID NO: 533620 - RNA, 24 nt, Artificial Sequence
  Synthetic
uaauacaauugucccucaguaucc

SEQ ID NO: 533621 - RNA, 18 nt, Artificial Sequence
  Synthetic
ggccuucccugaguaucc

SEQ ID NO: 533622 - RNA, 19 nt, Artificial Sequence
  Synthetic
gggccuucccugaguaucc

SEQ ID NO: 533623 - RNA, 20 nt, Artificial Sequence
  Synthetic
agggccuucccugaguaucc

SEQ ID NO: 533624 - RNA, 21 nt, Artificial Sequence
  Synthetic
gagggccuucccugaguaucc

SEQ ID NO: 533625 - RNA, 22 nt, Artificial Sequence
  Synthetic
cgagggccuucccugaguaucc

SEQ ID NO: 533626 - RNA, 23 nt, Artificial Sequence
  Synthetic
ccgagggccuucccugaguaucc

SEQ ID NO: 533627 - RNA, 24 nt, Artificial Sequence
  Synthetic
uccgagggccuucccugaguaucc

SEQ ID NO: 533628 - RNA, 18 nt, Artificial Sequence
  Synthetic
agaauugcaaacguaucc

SEQ ID NO: 533629 - RNA, 19 nt, Artificial Sequence
  Synthetic
uagaauugcaaacguaucc

SEQ ID NO: 533630 - RNA, 20 nt, Artificial Sequence
  Synthetic
cuagaauugcaaacguaucc

SEQ ID NO: 533631 - RNA, 21 nt, Artificial Sequence
  Synthetic
ucuagaauugcaaacguaucc

SEQ ID NO: 533632 - RNA, 22 nt, Artificial Sequence
  Synthetic
uucuagaauugcaaacguaucc

SEQ ID NO: 533633 - RNA, 23 nt, Artificial Sequence
  Synthetic
uuucuagaauugcaaacguaucc

SEQ ID NO: 533634 - RNA, 24 nt, Artificial Sequence
  Synthetic
auuucuagaauugcaaacguaucc

SEQ ID NO: 533635 - RNA, 18 nt, Artificial Sequence
  Synthetic
aagucagacuagguaucc

SEQ ID NO: 533636 - RNA, 19 nt, Artificial Sequence
  Synthetic
caagucagacuagguaucc

SEQ ID NO: 533637 - RNA, 20 nt, Artificial Sequence
  Synthetic
ccaagucagacuagguaucc

SEQ ID NO: 533638 - RNA, 21 nt, Artificial Sequence
  Synthetic
cccaagucagacuagguaucc

SEQ ID NO: 533639 - RNA, 22 nt, Artificial Sequence
  Synthetic
ucccaagucagacuagguaucc

SEQ ID NO: 533640 - RNA, 23 nt, Artificial Sequence
  Synthetic
uucccaagucagacuagguaucc

SEQ ID NO: 533641 - RNA, 24 nt, Artificial Sequence
  Synthetic
uuucccaagucagacuagguaucc

SEQ ID NO: 533642 - RNA, 18 nt, Artificial Sequence
  Synthetic
uuauaauauaugguaucc

SEQ ID NO: 533643 - RNA, 19 nt, Artificial Sequence
  Synthetic
cuuauaauauaugguaucc

SEQ ID NO: 533644 - RNA, 20 nt, Artificial Sequence
  Synthetic
gcuuauaauauaugguaucc

SEQ ID NO: 533645 - RNA, 21 nt, Artificial Sequence
  Synthetic
agcuuauaauauaugguaucc

SEQ ID NO: 533646 - RNA, 22 nt, Artificial Sequence
  Synthetic
uagcuuauaauauaugguaucc

SEQ ID NO: 533647 - RNA, 23 nt, Artificial Sequence
  Synthetic
auagcuuauaauauaugguaucc

SEQ ID NO: 533648 - RNA, 24 nt, Artificial Sequence
  Synthetic
uauagcuuauaauauaugguaucc

SEQ ID NO: 533649 - RNA, 18 nt, Artificial Sequence
  Synthetic
cguucuguacauguaucc

SEQ ID NO: 533650 - RNA, 19 nt, Artificial Sequence
  Synthetic
acguucuguacauguaucc

SEQ ID NO: 533651 - RNA, 20 nt, Artificial Sequence
  Synthetic
cacguucuguacauguaucc

SEQ ID NO: 533652 - RNA, 21 nt, Artificial Sequence
  Synthetic
gcacguucuguacauguaucc

SEQ ID NO: 533653 - RNA, 22 nt, Artificial Sequence
  Synthetic
ugcacguucuguacauguaucc

SEQ ID NO: 533654 - RNA, 23 nt, Artificial Sequence
  Synthetic
cugcacguucuguacauguaucc

SEQ ID NO: 533655 - RNA, 24 nt, Artificial Sequence
  Synthetic
ccugcacguucuguacauguaucc

SEQ ID NO: 533656 - RNA, 18 nt, Artificial Sequence
  Synthetic
cauuucucagauguaucc

SEQ ID NO: 533657 - RNA, 19 nt, Artificial Sequence
  Synthetic
ccauuucucagauguaucc

SEQ ID NO: 533658 - RNA, 20 nt, Artificial Sequence
  Synthetic
uccauuucucagauguaucc

SEQ ID NO: 533659 - RNA, 21 nt, Artificial Sequence
  Synthetic
uuccauuucucagauguaucc

SEQ ID NO: 533660 - RNA, 22 nt, Artificial Sequence
  Synthetic
cuuccauuucucagauguaucc

SEQ ID NO: 533661 - RNA, 23 nt, Artificial Sequence
  Synthetic
ucuuccauuucucagauguaucc

SEQ ID NO: 533662 - RNA, 24 nt, Artificial Sequence
  Synthetic
gucuuccauuucucagauguaucc

SEQ ID NO: 533663 - RNA, 18 nt, Artificial Sequence
  Synthetic
cguucugcaccuguaucc

SEQ ID NO: 533664 - RNA, 19 nt, Artificial Sequence
  Synthetic
acguucugcaccuguaucc

SEQ ID NO: 533665 - RNA, 20 nt, Artificial Sequence
  Synthetic
cacguucugcaccuguaucc

SEQ ID NO: 533666 - RNA, 21 nt, Artificial Sequence
  Synthetic
gcacguucugcaccuguaucc

SEQ ID NO: 533667 - RNA, 22 nt, Artificial Sequence
  Synthetic
ugcacguucugcaccuguaucc

SEQ ID NO: 533668 - RNA, 23 nt, Artificial Sequence
  Synthetic
cugcacguucugcaccuguaucc

SEQ ID NO: 533669 - RNA, 24 nt, Artificial Sequence
  Synthetic
ccugcacguucugcaccuguaucc

SEQ ID NO: 533670 - RNA, 18 nt, Artificial Sequence
  Synthetic
cauucugcacguguaucc

SEQ ID NO: 533671 - RNA, 19 nt, Artificial Sequence
  Synthetic
acauucugcacguguaucc

SEQ ID NO: 533672 - RNA, 20 nt, Artificial Sequence
  Synthetic
uacauucugcacguguaucc

SEQ ID NO: 533673 - RNA, 21 nt, Artificial Sequence
  Synthetic
guacauucugcacguguaucc

SEQ ID NO: 533674 - RNA, 22 nt, Artificial Sequence
  Synthetic
uguacauucugcacguguaucc

SEQ ID NO: 533675 - RNA, 23 nt, Artificial Sequence
  Synthetic
cuguacauucugcacguguaucc

SEQ ID NO: 533676 - RNA, 24 nt, Artificial Sequence
  Synthetic
ccuguacauucugcacguguaucc

SEQ ID NO: 533677 - RNA, 18 nt, Artificial Sequence
  Synthetic
cuggggacaaaauuaucc

SEQ ID NO: 533678 - RNA, 19 nt, Artificial Sequence
  Synthetic
ucuggggacaaaauuaucc

SEQ ID NO: 533679 - RNA, 20 nt, Artificial Sequence
  Synthetic
aucuggggacaaaauuaucc

SEQ ID NO: 533680 - RNA, 21 nt, Artificial Sequence
  Synthetic
caucuggggacaaaauuaucc

SEQ ID NO: 533681 - RNA, 22 nt, Artificial Sequence
  Synthetic
acaucuggggacaaaauuaucc

SEQ ID NO: 533682 - RNA, 23 nt, Artificial Sequence
  Synthetic
gacaucuggggacaaaauuaucc

SEQ ID NO: 533683 - RNA, 24 nt, Artificial Sequence
  Synthetic
agacaucuggggacaaaauuaucc

SEQ ID NO: 533684 - RNA, 18 nt, Artificial Sequence
  Synthetic
aaagacuggucauuaucc

SEQ ID NO: 533685 - RNA, 19 nt, Artificial Sequence
  Synthetic
aaaagacuggucauuaucc

SEQ ID NO: 533686 - RNA, 20 nt, Artificial Sequence
  Synthetic
uaaaagacuggucauuaucc

SEQ ID NO: 533687 - RNA, 21 nt, Artificial Sequence
  Synthetic
cuaaaagacuggucauuaucc

SEQ ID NO: 533688 - RNA, 22 nt, Artificial Sequence
  Synthetic
ucuaaaagacuggucauuaucc

SEQ ID NO: 533689 - RNA, 23 nt, Artificial Sequence
  Synthetic
aucuaaaagacuggucauuaucc

SEQ ID NO: 533690 - RNA, 24 nt, Artificial Sequence
  Synthetic
aaucuaaaagacuggucauuaucc

SEQ ID NO: 533691 - RNA, 18 nt, Artificial Sequence
  Synthetic
ucuauuuuuggauuaucc

SEQ ID NO: 533692 - RNA, 19 nt, Artificial Sequence
  Synthetic
aucuauuuuuggauuaucc

SEQ ID NO: 533693 - RNA, 20 nt, Artificial Sequence
  Synthetic
caucuauuuuuggauuaucc

SEQ ID NO: 533694 - RNA, 21 nt, Artificial Sequence
  Synthetic
ucaucuauuuuuggauuaucc

SEQ ID NO: 533695 - RNA, 22 nt, Artificial Sequence
  Synthetic
aucaucuauuuuuggauuaucc

SEQ ID NO: 533696 - RNA, 23 nt, Artificial Sequence
  Synthetic
aaucaucuauuuuuggauuaucc

SEQ ID NO: 533697 - RNA, 24 nt, Artificial Sequence
  Synthetic
aaaucaucuauuuuuggauuaucc

SEQ ID NO: 533698 - RNA, 18 nt, Artificial Sequence
  Synthetic
cucugcaggauauuaucc

SEQ ID NO: 533699 - RNA, 19 nt, Artificial Sequence
  Synthetic
acucugcaggauauuaucc

SEQ ID NO: 533700 - RNA, 20 nt, Artificial Sequence
  Synthetic
cacucugcaggauauuaucc

SEQ ID NO: 533701 - RNA, 21 nt, Artificial Sequence
  Synthetic
acacucugcaggauauuaucc

SEQ ID NO: 533702 - RNA, 22 nt, Artificial Sequence
  Synthetic
aacacucugcaggauauuaucc

SEQ ID NO: 533703 - RNA, 23 nt, Artificial Sequence
  Synthetic
aaacacucugcaggauauuaucc

SEQ ID NO: 533704 - RNA, 24 nt, Artificial Sequence
  Synthetic
aaaacacucugcaggauauuaucc

SEQ ID NO: 533705 - RNA, 18 nt, Artificial Sequence
  Synthetic
ucugagacucacuuaucc

SEQ ID NO: 533706 - RNA, 19 nt, Artificial Sequence
  Synthetic
gucugagacucacuuaucc

SEQ ID NO: 533707 - RNA, 20 nt, Artificial Sequence
  Synthetic
ugucugagacucacuuaucc

SEQ ID NO: 533708 - RNA, 21 nt, Artificial Sequence
  Synthetic
gugucugagacucacuuaucc

SEQ ID NO: 533709 - RNA, 22 nt, Artificial Sequence
  Synthetic
ugugucugagacucacuuaucc

SEQ ID NO: 533710 - RNA, 23 nt, Artificial Sequence
  Synthetic
cugugucugagacucacuuaucc

SEQ ID NO: 533711 - RNA, 24 nt, Artificial Sequence
  Synthetic
acugugucugagacucacuuaucc

SEQ ID NO: 533712 - RNA, 18 nt, Artificial Sequence
  Synthetic
ucuucucaagacuuaucc

SEQ ID NO: 533713 - RNA, 19 nt, Artificial Sequence
  Synthetic
uucuucucaagacuuaucc

SEQ ID NO: 533714 - RNA, 20 nt, Artificial Sequence
  Synthetic
uuucuucucaagacuuaucc

SEQ ID NO: 533715 - RNA, 21 nt, Artificial Sequence
  Synthetic
guuucuucucaagacuuaucc

SEQ ID NO: 533716 - RNA, 22 nt, Artificial Sequence
  Synthetic
aguuucuucucaagacuuaucc

SEQ ID NO: 533717 - RNA, 23 nt, Artificial Sequence
  Synthetic
uaguuucuucucaagacuuaucc

SEQ ID NO: 533718 - RNA, 24 nt, Artificial Sequence
  Synthetic
uuaguuucuucucaagacuuaucc

SEQ ID NO: 533719 - RNA, 18 nt, Artificial Sequence
  Synthetic
ucacgauaaugcuuaucc

SEQ ID NO: 533720 - RNA, 19 nt, Artificial Sequence
  Synthetic
aucacgauaaugcuuaucc

SEQ ID NO: 533721 - RNA, 20 nt, Artificial Sequence
  Synthetic
aaucacgauaaugcuuaucc

SEQ ID NO: 533722 - RNA, 21 nt, Artificial Sequence
  Synthetic
aaaucacgauaaugcuuaucc

SEQ ID NO: 533723 - RNA, 22 nt, Artificial Sequence
  Synthetic
gaaaucacgauaaugcuuaucc

SEQ ID NO: 533724 - RNA, 23 nt, Artificial Sequence
  Synthetic
agaaaucacgauaaugcuuaucc

SEQ ID NO: 533725 - RNA, 24 nt, Artificial Sequence
  Synthetic
uagaaaucacgauaaugcuuaucc

SEQ ID NO: 533726 - RNA, 18 nt, Artificial Sequence
  Synthetic
accaagagggauuuaucc

SEQ ID NO: 533727 - RNA, 19 nt, Artificial Sequence
  Synthetic
gaccaagagggauuuaucc

SEQ ID NO: 533728 - RNA, 20 nt, Artificial Sequence
  Synthetic
ugaccaagagggauuuaucc

SEQ ID NO: 533729 - RNA, 21 nt, Artificial Sequence
  Synthetic
augaccaagagggauuuaucc

SEQ ID NO: 533730 - RNA, 22 nt, Artificial Sequence
  Synthetic
caugaccaagagggauuuaucc

SEQ ID NO: 533731 - RNA, 23 nt, Artificial Sequence
  Synthetic
ccaugaccaagagggauuuaucc

SEQ ID NO: 533732 - RNA, 24 nt, Artificial Sequence
  Synthetic
accaugaccaagagggauuuaucc

SEQ ID NO: 533733 - RNA, 18 nt, Artificial Sequence
  Synthetic
uguaaucuuccuuuaucc

SEQ ID NO: 533734 - RNA, 19 nt, Artificial Sequence
  Synthetic
cuguaaucuuccuuuaucc

SEQ ID NO: 533735 - RNA, 20 nt, Artificial Sequence
  Synthetic
ucuguaaucuuccuuuaucc

SEQ ID NO: 533736 - RNA, 21 nt, Artificial Sequence
  Synthetic
aucuguaaucuuccuuuaucc

SEQ ID NO: 533737 - RNA, 22 nt, Artificial Sequence
  Synthetic
aaucuguaaucuuccuuuaucc

SEQ ID NO: 533738 - RNA, 23 nt, Artificial Sequence
  Synthetic
uaaucuguaaucuuccuuuaucc

SEQ ID NO: 533739 - RNA, 24 nt, Artificial Sequence
  Synthetic
uuaaucuguaaucuuccuuuaucc

SEQ ID NO: 533740 - RNA, 18 nt, Artificial Sequence
  Synthetic
aaaauuuagcuuuuaucc

SEQ ID NO: 533741 - RNA, 19 nt, Artificial Sequence
  Synthetic
aaaaauuuagcuuuuaucc

SEQ ID NO: 533742 - RNA, 20 nt, Artificial Sequence
  Synthetic
gaaaaauuuagcuuuuaucc

SEQ ID NO: 533743 - RNA, 21 nt, Artificial Sequence
  Synthetic
ugaaaaauuuagcuuuuaucc

SEQ ID NO: 533744 - RNA, 22 nt, Artificial Sequence
  Synthetic
cugaaaaauuuagcuuuuaucc

SEQ ID NO: 533745 - RNA, 23 nt, Artificial Sequence
  Synthetic
gcugaaaaauuuagcuuuuaucc

SEQ ID NO: 533746 - RNA, 24 nt, Artificial Sequence
  Synthetic
agcugaaaaauuuagcuuuuaucc

SEQ ID NO: 533747 - RNA, 18 nt, Artificial Sequence
  Synthetic
gccaugagcaaaaacucc

SEQ ID NO: 533748 - RNA, 19 nt, Artificial Sequence
  Synthetic
ugccaugagcaaaaacucc

SEQ ID NO: 533749 - RNA, 20 nt, Artificial Sequence
  Synthetic
cugccaugagcaaaaacucc

SEQ ID NO: 533750 - RNA, 21 nt, Artificial Sequence
  Synthetic
ucugccaugagcaaaaacucc

SEQ ID NO: 533751 - RNA, 22 nt, Artificial Sequence
  Synthetic
uucugccaugagcaaaaacucc

SEQ ID NO: 533752 - RNA, 23 nt, Artificial Sequence
  Synthetic
cuucugccaugagcaaaaacucc

SEQ ID NO: 533753 - RNA, 24 nt, Artificial Sequence
  Synthetic
ccuucugccaugagcaaaaacucc

SEQ ID NO: 533754 - RNA, 18 nt, Artificial Sequence
  Synthetic
uuacuugcugaaaacucc

SEQ ID NO: 533755 - RNA, 19 nt, Artificial Sequence
  Synthetic
cuuacuugcugaaaacucc

SEQ ID NO: 533756 - RNA, 20 nt, Artificial Sequence
  Synthetic
ucuuacuugcugaaaacucc

SEQ ID NO: 533757 - RNA, 21 nt, Artificial Sequence
  Synthetic
cucuuacuugcugaaaacucc

SEQ ID NO: 533758 - RNA, 22 nt, Artificial Sequence
  Synthetic
ccucuuacuugcugaaaacucc

SEQ ID NO: 533759 - RNA, 23 nt, Artificial Sequence
  Synthetic
accucuuacuugcugaaaacucc

SEQ ID NO: 533760 - RNA, 24 nt, Artificial Sequence
  Synthetic
aaccucuuacuugcugaaaacucc

SEQ ID NO: 533761 - RNA, 18 nt, Artificial Sequence
  Synthetic
gaggcaacaagaaacucc

SEQ ID NO: 533762 - RNA, 19 nt, Artificial Sequence
  Synthetic
agaggcaacaagaaacucc

SEQ ID NO: 533763 - RNA, 20 nt, Artificial Sequence
  Synthetic
cagaggcaacaagaaacucc

SEQ ID NO: 533764 - RNA, 21 nt, Artificial Sequence
  Synthetic
ucagaggcaacaagaaacucc

SEQ ID NO: 533765 - RNA, 22 nt, Artificial Sequence
  Synthetic
cucagaggcaacaagaaacucc

SEQ ID NO: 533766 - RNA, 23 nt, Artificial Sequence
  Synthetic
acucagaggcaacaagaaacucc

SEQ ID NO: 533767 - RNA, 24 nt, Artificial Sequence
  Synthetic
aacucagaggcaacaagaaacucc

SEQ ID NO: 533768 - RNA, 18 nt, Artificial Sequence
  Synthetic
ucagaaucccucaacucc

SEQ ID NO: 533769 - RNA, 19 nt, Artificial Sequence
  Synthetic
uucagaaucccucaacucc

SEQ ID NO: 533770 - RNA, 20 nt, Artificial Sequence
  Synthetic
auucagaaucccucaacucc

SEQ ID NO: 533771 - RNA, 21 nt, Artificial Sequence
  Synthetic
cauucagaaucccucaacucc

SEQ ID NO: 533772 - RNA, 22 nt, Artificial Sequence
  Synthetic
gcauucagaaucccucaacucc

SEQ ID NO: 533773 - RNA, 23 nt, Artificial Sequence
  Synthetic
ggcauucagaaucccucaacucc

SEQ ID NO: 533774 - RNA, 24 nt, Artificial Sequence
  Synthetic
uggcauucagaaucccucaacucc

SEQ ID NO: 533775 - RNA, 18 nt, Artificial Sequence
  Synthetic
uuccagcuuaagaacucc

SEQ ID NO: 533776 - RNA, 19 nt, Artificial Sequence
  Synthetic
auuccagcuuaagaacucc

SEQ ID NO: 533777 - RNA, 20 nt, Artificial Sequence
  Synthetic
cauuccagcuuaagaacucc

SEQ ID NO: 533778 - RNA, 21 nt, Artificial Sequence
  Synthetic
ucauuccagcuuaagaacucc

SEQ ID NO: 533779 - RNA, 22 nt, Artificial Sequence
  Synthetic
gucauuccagcuuaagaacucc

SEQ ID NO: 533780 - RNA, 23 nt, Artificial Sequence
  Synthetic
ggucauuccagcuuaagaacucc

SEQ ID NO: 533781 - RNA, 24 nt, Artificial Sequence
  Synthetic
gggucauuccagcuuaagaacucc

SEQ ID NO: 533782 - RNA, 18 nt, Artificial Sequence
  Synthetic
aacuuucuuuguaacucc

SEQ ID NO: 533783 - RNA, 19 nt, Artificial Sequence
  Synthetic
uaacuuucuuuguaacucc

SEQ ID NO: 533784 - RNA, 20 nt, Artificial Sequence
  Synthetic
auaacuuucuuuguaacucc

SEQ ID NO: 533785 - RNA, 21 nt, Artificial Sequence
  Synthetic
aauaacuuucuuuguaacucc

SEQ ID NO: 533786 - RNA, 22 nt, Artificial Sequence
  Synthetic
gaauaacuuucuuuguaacucc

SEQ ID NO: 533787 - RNA, 23 nt, Artificial Sequence
  Synthetic
agaauaacuuucuuuguaacucc

SEQ ID NO: 533788 - RNA, 24 nt, Artificial Sequence
  Synthetic
gagaauaacuuucuuuguaacucc

SEQ ID NO: 533789 - RNA, 18 nt, Artificial Sequence
  Synthetic
cuuucauacauuaacucc

SEQ ID NO: 533790 - RNA, 19 nt, Artificial Sequence
  Synthetic
acuuucauacauuaacucc

SEQ ID NO: 533791 - RNA, 20 nt, Artificial Sequence
  Synthetic
gacuuucauacauuaacucc

SEQ ID NO: 533792 - RNA, 21 nt, Artificial Sequence
  Synthetic
ugacuuucauacauuaacucc

SEQ ID NO: 533793 - RNA, 22 nt, Artificial Sequence
  Synthetic
gugacuuucauacauuaacucc

SEQ ID NO: 533794 - RNA, 23 nt, Artificial Sequence
  Synthetic
ugugacuuucauacauuaacucc

SEQ ID NO: 533795 - RNA, 24 nt, Artificial Sequence
  Synthetic
uugugacuuucauacauuaacucc

SEQ ID NO: 533796 - RNA, 18 nt, Artificial Sequence
  Synthetic
cuaguagguuaacacucc

SEQ ID NO: 533797 - RNA, 19 nt, Artificial Sequence
  Synthetic
ucuaguagguuaacacucc

SEQ ID NO: 533798 - RNA, 20 nt, Artificial Sequence
  Synthetic
uucuaguagguuaacacucc

SEQ ID NO: 533799 - RNA, 21 nt, Artificial Sequence
  Synthetic
uuucuaguagguuaacacucc

SEQ ID NO: 533800 - RNA, 22 nt, Artificial Sequence
  Synthetic
cuuucuaguagguuaacacucc

SEQ ID NO: 533801 - RNA, 23 nt, Artificial Sequence
  Synthetic
acuuucuaguagguuaacacucc

SEQ ID NO: 533802 - RNA, 24 nt, Artificial Sequence
  Synthetic
uacuuucuaguagguuaacacucc

SEQ ID NO: 533803 - RNA, 18 nt, Artificial Sequence
  Synthetic
uuacuuaguuuccacucc

SEQ ID NO: 533804 - RNA, 19 nt, Artificial Sequence
  Synthetic
uuuacuuaguuuccacucc

SEQ ID NO: 533805 - RNA, 20 nt, Artificial Sequence
  Synthetic
uuuuacuuaguuuccacucc

SEQ ID NO: 533806 - RNA, 21 nt, Artificial Sequence
  Synthetic
uuuuuacuuaguuuccacucc

SEQ ID NO: 533807 - RNA, 22 nt, Artificial Sequence
  Synthetic
uuuuuuacuuaguuuccacucc

SEQ ID NO: 533808 - RNA, 23 nt, Artificial Sequence
  Synthetic
uuuuuuuacuuaguuuccacucc

SEQ ID NO: 533809 - RNA, 24 nt, Artificial Sequence
  Synthetic
uuuuuuuuacuuaguuuccacucc

SEQ ID NO: 533810 - RNA, 18 nt, Artificial Sequence
  Synthetic
auaaaauguaggcacucc

SEQ ID NO: 533811 - RNA, 19 nt, Artificial Sequence
  Synthetic
uauaaaauguaggcacucc

SEQ ID NO: 533812 - RNA, 20 nt, Artificial Sequence
  Synthetic
uuauaaaauguaggcacucc

SEQ ID NO: 533813 - RNA, 21 nt, Artificial Sequence
  Synthetic
guuauaaaauguaggcacucc

SEQ ID NO: 533814 - RNA, 22 nt, Artificial Sequence
  Synthetic
aguuauaaaauguaggcacucc

SEQ ID NO: 533815 - RNA, 23 nt, Artificial Sequence
  Synthetic
aaguuauaaaauguaggcacucc

SEQ ID NO: 533816 - RNA, 24 nt, Artificial Sequence
  Synthetic
uaaguuauaaaauguaggcacucc

SEQ ID NO: 533817 - RNA, 18 nt, Artificial Sequence
  Synthetic
uucucucucccucacucc

SEQ ID NO: 533818 - RNA, 19 nt, Artificial Sequence
  Synthetic
cuucucucucccucacucc

SEQ ID NO: 533819 - RNA, 20 nt, Artificial Sequence
  Synthetic
ucuucucucucccucacucc

SEQ ID NO: 533820 - RNA, 21 nt, Artificial Sequence
  Synthetic
uucuucucucucccucacucc

SEQ ID NO: 533821 - RNA, 22 nt, Artificial Sequence
  Synthetic
auucuucucucucccucacucc

SEQ ID NO: 533822 - RNA, 23 nt, Artificial Sequence
  Synthetic
gauucuucucucucccucacucc

SEQ ID NO: 533823 - RNA, 24 nt, Artificial Sequence
  Synthetic
ugauucuucucucucccucacucc

SEQ ID NO: 533824 - RNA, 18 nt, Artificial Sequence
  Synthetic
ccaaauggauuucacucc

SEQ ID NO: 533825 - RNA, 19 nt, Artificial Sequence
  Synthetic
gccaaauggauuucacucc

SEQ ID NO: 533826 - RNA, 20 nt, Artificial Sequence
  Synthetic
ugccaaauggauuucacucc

SEQ ID NO: 533827 - RNA, 21 nt, Artificial Sequence
  Synthetic
gugccaaauggauuucacucc

SEQ ID NO: 533828 - RNA, 22 nt, Artificial Sequence
  Synthetic
agugccaaauggauuucacucc

SEQ ID NO: 533829 - RNA, 23 nt, Artificial Sequence
  Synthetic
uagugccaaauggauuucacucc

SEQ ID NO: 533830 - RNA, 24 nt, Artificial Sequence
  Synthetic
auagugccaaauggauuucacucc

SEQ ID NO: 533831 - RNA, 18 nt, Artificial Sequence
  Synthetic
gggcugggaauggacucc

SEQ ID NO: 533832 - RNA, 19 nt, Artificial Sequence
  Synthetic
cgggcugggaauggacucc

SEQ ID NO: 533833 - RNA, 20 nt, Artificial Sequence
  Synthetic
ccgggcugggaauggacucc

SEQ ID NO: 533834 - RNA, 21 nt, Artificial Sequence
  Synthetic
accgggcugggaauggacucc

SEQ ID NO: 533835 - RNA, 22 nt, Artificial Sequence
  Synthetic
caccgggcugggaauggacucc

SEQ ID NO: 533836 - RNA, 23 nt, Artificial Sequence
  Synthetic
acaccgggcugggaauggacucc

SEQ ID NO: 533837 - RNA, 24 nt, Artificial Sequence
  Synthetic
aacaccgggcugggaauggacucc

SEQ ID NO: 533838 - RNA, 18 nt, Artificial Sequence
  Synthetic
gccaacuguuaugacucc

SEQ ID NO: 533839 - RNA, 19 nt, Artificial Sequence
  Synthetic
ugccaacuguuaugacucc

SEQ ID NO: 533840 - RNA, 20 nt, Artificial Sequence
  Synthetic
gugccaacuguuaugacucc

SEQ ID NO: 533841 - RNA, 21 nt, Artificial Sequence
  Synthetic
agugccaacuguuaugacucc

SEQ ID NO: 533842 - RNA, 22 nt, Artificial Sequence
  Synthetic
cagugccaacuguuaugacucc

SEQ ID NO: 533843 - RNA, 23 nt, Artificial Sequence
  Synthetic
ccagugccaacuguuaugacucc

SEQ ID NO: 533844 - RNA, 24 nt, Artificial Sequence
  Synthetic
uccagugccaacuguuaugacucc

SEQ ID NO: 533845 - RNA, 18 nt, Artificial Sequence
  Synthetic
auaauaaacugugacucc

SEQ ID NO: 533846 - RNA, 19 nt, Artificial Sequence
  Synthetic
aauaauaaacugugacucc

SEQ ID NO: 533847 - RNA, 20 nt, Artificial Sequence
  Synthetic
uaauaauaaacugugacucc

SEQ ID NO: 533848 - RNA, 21 nt, Artificial Sequence
  Synthetic
auaauaauaaacugugacucc

SEQ ID NO: 533849 - RNA, 22 nt, Artificial Sequence
  Synthetic
aauaauaauaaacugugacucc

SEQ ID NO: 533850 - RNA, 23 nt, Artificial Sequence
  Synthetic
aaauaauaauaaacugugacucc

SEQ ID NO: 533851 - RNA, 24 nt, Artificial Sequence
  Synthetic
aaaauaauaauaaacugugacucc

SEQ ID NO: 533852 - RNA, 18 nt, Artificial Sequence
  Synthetic
gacuuagauaaauacucc

SEQ ID NO: 533853 - RNA, 19 nt, Artificial Sequence
  Synthetic
ugacuuagauaaauacucc

SEQ ID NO: 533854 - RNA, 20 nt, Artificial Sequence
  Synthetic
cugacuuagauaaauacucc

SEQ ID NO: 533855 - RNA, 21 nt, Artificial Sequence
  Synthetic
acugacuuagauaaauacucc

SEQ ID NO: 533856 - RNA, 22 nt, Artificial Sequence
  Synthetic
uacugacuuagauaaauacucc

SEQ ID NO: 533857 - RNA, 23 nt, Artificial Sequence
  Synthetic
cuacugacuuagauaaauacucc

SEQ ID NO: 533858 - RNA, 24 nt, Artificial Sequence
  Synthetic
acuacugacuuagauaaauacucc

SEQ ID NO: 533859 - RNA, 18 nt, Artificial Sequence
  Synthetic
acgccacaaagauacucc

SEQ ID NO: 533860 - RNA, 19 nt, Artificial Sequence
  Synthetic
aacgccacaaagauacucc

SEQ ID NO: 533861 - RNA, 20 nt, Artificial Sequence
  Synthetic
gaacgccacaaagauacucc

SEQ ID NO: 533862 - RNA, 21 nt, Artificial Sequence
  Synthetic
agaacgccacaaagauacucc

SEQ ID NO: 533863 - RNA, 22 nt, Artificial Sequence
  Synthetic
gagaacgccacaaagauacucc

SEQ ID NO: 533864 - RNA, 23 nt, Artificial Sequence
  Synthetic
agagaacgccacaaagauacucc

SEQ ID NO: 533865 - RNA, 24 nt, Artificial Sequence
  Synthetic
cagagaacgccacaaagauacucc

SEQ ID NO: 533866 - RNA, 18 nt, Artificial Sequence
  Synthetic
acuaucugugccuacucc

SEQ ID NO: 533867 - RNA, 19 nt, Artificial Sequence
  Synthetic
aacuaucugugccuacucc

SEQ ID NO: 533868 - RNA, 20 nt, Artificial Sequence
  Synthetic
aaacuaucugugccuacucc

SEQ ID NO: 533869 - RNA, 21 nt, Artificial Sequence
  Synthetic
aaaacuaucugugccuacucc

SEQ ID NO: 533870 - RNA, 22 nt, Artificial Sequence
  Synthetic
uaaaacuaucugugccuacucc

SEQ ID NO: 533871 - RNA, 23 nt, Artificial Sequence
  Synthetic
uuaaaacuaucugugccuacucc

SEQ ID NO: 533872 - RNA, 24 nt, Artificial Sequence
  Synthetic
cuuaaaacuaucugugccuacucc

SEQ ID NO: 533873 - RNA, 18 nt, Artificial Sequence
  Synthetic
auauagaauugcuacucc

SEQ ID NO: 533874 - RNA, 19 nt, Artificial Sequence
  Synthetic
cauauagaauugcuacucc

SEQ ID NO: 533875 - RNA, 20 nt, Artificial Sequence
  Synthetic
ucauauagaauugcuacucc

SEQ ID NO: 533876 - RNA, 21 nt, Artificial Sequence
  Synthetic
aucauauagaauugcuacucc

SEQ ID NO: 533877 - RNA, 22 nt, Artificial Sequence
  Synthetic
uaucauauagaauugcuacucc

SEQ ID NO: 533878 - RNA, 23 nt, Artificial Sequence
  Synthetic
auaucauauagaauugcuacucc

SEQ ID NO: 533879 - RNA, 24 nt, Artificial Sequence
  Synthetic
aauaucauauagaauugcuacucc

SEQ ID NO: 533880 - RNA, 18 nt, Artificial Sequence
  Synthetic
ugcgaauaauucuacucc

SEQ ID NO: 533881 - RNA, 19 nt, Artificial Sequence
  Synthetic
augcgaauaauucuacucc

SEQ ID NO: 533882 - RNA, 20 nt, Artificial Sequence
  Synthetic
aaugcgaauaauucuacucc

SEQ ID NO: 533883 - RNA, 21 nt, Artificial Sequence
  Synthetic
aaaugcgaauaauucuacucc

SEQ ID NO: 533884 - RNA, 22 nt, Artificial Sequence
  Synthetic
gaaaugcgaauaauucuacucc

SEQ ID NO: 533885 - RNA, 23 nt, Artificial Sequence
  Synthetic
ugaaaugcgaauaauucuacucc

SEQ ID NO: 533886 - RNA, 24 nt, Artificial Sequence
  Synthetic
cugaaaugcgaauaauucuacucc

SEQ ID NO: 533887 - RNA, 18 nt, Artificial Sequence
  Synthetic
caaauccuuuucuacucc

SEQ ID NO: 533888 - RNA, 19 nt, Artificial Sequence
  Synthetic
acaaauccuuuucuacucc

SEQ ID NO: 533889 - RNA, 20 nt, Artificial Sequence
  Synthetic
aacaaauccuuuucuacucc

SEQ ID NO: 533890 - RNA, 21 nt, Artificial Sequence
  Synthetic
aaacaaauccuuuucuacucc

SEQ ID NO: 533891 - RNA, 22 nt, Artificial Sequence
  Synthetic
aaaacaaauccuuuucuacucc

SEQ ID NO: 533892 - RNA, 23 nt, Artificial Sequence
  Synthetic
aaaaacaaauccuuuucuacucc

SEQ ID NO: 533893 - RNA, 24 nt, Artificial Sequence
  Synthetic
uaaaaacaaauccuuuucuacucc

SEQ ID NO: 533894 - RNA, 18 nt, Artificial Sequence
  Synthetic
cccaaaauauguuacucc

SEQ ID NO: 533895 - RNA, 19 nt, Artificial Sequence
  Synthetic
ucccaaaauauguuacucc

SEQ ID NO: 533896 - RNA, 20 nt, Artificial Sequence
  Synthetic
cucccaaaauauguuacucc

SEQ ID NO: 533897 - RNA, 21 nt, Artificial Sequence
  Synthetic
ccucccaaaauauguuacucc

SEQ ID NO: 533898 - RNA, 22 nt, Artificial Sequence
  Synthetic
uccucccaaaauauguuacucc

SEQ ID NO: 533899 - RNA, 23 nt, Artificial Sequence
  Synthetic
uuccucccaaaauauguuacucc

SEQ ID NO: 533900 - RNA, 24 nt, Artificial Sequence
  Synthetic
cuuccucccaaaauauguuacucc

SEQ ID NO: 533901 - RNA, 18 nt, Artificial Sequence
  Synthetic
ccaauuuuaacaaccucc

SEQ ID NO: 533902 - RNA, 19 nt, Artificial Sequence
  Synthetic
gccaauuuuaacaaccucc

SEQ ID NO: 533903 - RNA, 20 nt, Artificial Sequence
  Synthetic
ggccaauuuuaacaaccucc

SEQ ID NO: 533904 - RNA, 21 nt, Artificial Sequence
  Synthetic
uggccaauuuuaacaaccucc

SEQ ID NO: 533905 - RNA, 22 nt, Artificial Sequence
  Synthetic
cuggccaauuuuaacaaccucc

SEQ ID NO: 533906 - RNA, 23 nt, Artificial Sequence
  Synthetic
ccuggccaauuuuaacaaccucc

SEQ ID NO: 533907 - RNA, 24 nt, Artificial Sequence
  Synthetic
accuggccaauuuuaacaaccucc

SEQ ID NO: 533908 - RNA, 18 nt, Artificial Sequence
  Synthetic
cucuucuuugucaccucc

SEQ ID NO: 533909 - RNA, 19 nt, Artificial Sequence
  Synthetic
ucucuucuuugucaccucc

SEQ ID NO: 533910 - RNA, 20 nt, Artificial Sequence
  Synthetic
cucucuucuuugucaccucc

SEQ ID NO: 533911 - RNA, 21 nt, Artificial Sequence
  Synthetic
ccucucuucuuugucaccucc

SEQ ID NO: 533912 - RNA, 22 nt, Artificial Sequence
  Synthetic
uccucucuucuuugucaccucc

SEQ ID NO: 533913 - RNA, 23 nt, Artificial Sequence
  Synthetic
uuccucucuucuuugucaccucc

SEQ ID NO: 533914 - RNA, 24 nt, Artificial Sequence
  Synthetic
guuccucucuucuuugucaccucc

SEQ ID NO: 533915 - RNA, 18 nt, Artificial Sequence
  Synthetic
ugugacauaccuaccucc

SEQ ID NO: 533916 - RNA, 19 nt, Artificial Sequence
  Synthetic
cugugacauaccuaccucc

SEQ ID NO: 533917 - RNA, 20 nt, Artificial Sequence
  Synthetic
acugugacauaccuaccucc

SEQ ID NO: 533918 - RNA, 21 nt, Artificial Sequence
  Synthetic
aacugugacauaccuaccucc

SEQ ID NO: 533919 - RNA, 22 nt, Artificial Sequence
  Synthetic
aaacugugacauaccuaccucc

SEQ ID NO: 533920 - RNA, 23 nt, Artificial Sequence
  Synthetic
caaacugugacauaccuaccucc

SEQ ID NO: 533921 - RNA, 24 nt, Artificial Sequence
  Synthetic
ucaaacugugacauaccuaccucc

SEQ ID NO: 533922 - RNA, 18 nt, Artificial Sequence
  Synthetic
ucccuaccuucuaccucc

SEQ ID NO: 533923 - RNA, 19 nt, Artificial Sequence
  Synthetic
aucccuaccuucuaccucc

SEQ ID NO: 533924 - RNA, 20 nt, Artificial Sequence
  Synthetic
gaucccuaccuucuaccucc

SEQ ID NO: 533925 - RNA, 21 nt, Artificial Sequence
  Synthetic
ggaucccuaccuucuaccucc

SEQ ID NO: 533926 - RNA, 22 nt, Artificial Sequence
  Synthetic
aggaucccuaccuucuaccucc

SEQ ID NO: 533927 - RNA, 23 nt, Artificial Sequence
  Synthetic
gaggaucccuaccuucuaccucc

SEQ ID NO: 533928 - RNA, 24 nt, Artificial Sequence
  Synthetic
ggaggaucccuaccuucuaccucc

SEQ ID NO: 533929 - RNA, 18 nt, Artificial Sequence
  Synthetic
cauauuuagauuaccucc

SEQ ID NO: 533930 - RNA, 19 nt, Artificial Sequence
  Synthetic
ccauauuuagauuaccucc

SEQ ID NO: 533931 - RNA, 20 nt, Artificial Sequence
  Synthetic
gccauauuuagauuaccucc

SEQ ID NO: 533932 - RNA, 21 nt, Artificial Sequence
  Synthetic
ggccauauuuagauuaccucc

SEQ ID NO: 533933 - RNA, 22 nt, Artificial Sequence
  Synthetic
aggccauauuuagauuaccucc

SEQ ID NO: 533934 - RNA, 23 nt, Artificial Sequence
  Synthetic
gaggccauauuuagauuaccucc

SEQ ID NO: 533935 - RNA, 24 nt, Artificial Sequence
  Synthetic
ggaggccauauuuagauuaccucc

SEQ ID NO: 533936 - RNA, 18 nt, Artificial Sequence
  Synthetic
cuguuuucauuuaccucc

SEQ ID NO: 533937 - RNA, 19 nt, Artificial Sequence
  Synthetic
acuguuuucauuuaccucc

SEQ ID NO: 533938 - RNA, 20 nt, Artificial Sequence
  Synthetic
cacuguuuucauuuaccucc

SEQ ID NO: 533939 - RNA, 21 nt, Artificial Sequence
  Synthetic
ccacuguuuucauuuaccucc

SEQ ID NO: 533940 - RNA, 22 nt, Artificial Sequence
  Synthetic
cccacuguuuucauuuaccucc

SEQ ID NO: 533941 - RNA, 23 nt, Artificial Sequence
  Synthetic
ucccacuguuuucauuuaccucc

SEQ ID NO: 533942 - RNA, 24 nt, Artificial Sequence
  Synthetic
cucccacuguuuucauuuaccucc

SEQ ID NO: 533943 - RNA, 18 nt, Artificial Sequence
  Synthetic
gaacauuaugcacccucc

SEQ ID NO: 533944 - RNA, 19 nt, Artificial Sequence
  Synthetic
ugaacauuaugcacccucc

SEQ ID NO: 533945 - RNA, 20 nt, Artificial Sequence
  Synthetic
augaacauuaugcacccucc

SEQ ID NO: 533946 - RNA, 21 nt, Artificial Sequence
  Synthetic
aaugaacauuaugcacccucc

SEQ ID NO: 533947 - RNA, 22 nt, Artificial Sequence
  Synthetic
gaaugaacauuaugcacccucc

SEQ ID NO: 533948 - RNA, 23 nt, Artificial Sequence
  Synthetic
agaaugaacauuaugcacccucc

SEQ ID NO: 533949 - RNA, 24 nt, Artificial Sequence
  Synthetic
gagaaugaacauuaugcacccucc

SEQ ID NO: 533950 - RNA, 18 nt, Artificial Sequence
  Synthetic
agaccuuagagacccucc

SEQ ID NO: 533951 - RNA, 19 nt, Artificial Sequence
  Synthetic
gagaccuuagagacccucc

SEQ ID NO: 533952 - RNA, 20 nt, Artificial Sequence
  Synthetic
ugagaccuuagagacccucc

SEQ ID NO: 533953 - RNA, 21 nt, Artificial Sequence
  Synthetic
gugagaccuuagagacccucc

SEQ ID NO: 533954 - RNA, 22 nt, Artificial Sequence
  Synthetic
ugugagaccuuagagacccucc

SEQ ID NO: 533955 - RNA, 23 nt, Artificial Sequence
  Synthetic
cugugagaccuuagagacccucc

SEQ ID NO: 533956 - RNA, 24 nt, Artificial Sequence
  Synthetic
acugugagaccuuagagacccucc

SEQ ID NO: 533957 - RNA, 18 nt, Artificial Sequence
  Synthetic
gggagagacugccccucc

SEQ ID NO: 533958 - RNA, 19 nt, Artificial Sequence
  Synthetic
agggagagacugccccucc

SEQ ID NO: 533959 - RNA, 20 nt, Artificial Sequence
  Synthetic
cagggagagacugccccucc

SEQ ID NO: 533960 - RNA, 21 nt, Artificial Sequence
  Synthetic
ccagggagagacugccccucc

SEQ ID NO: 533961 - RNA, 22 nt, Artificial Sequence
  Synthetic
gccagggagagacugccccucc

SEQ ID NO: 533962 - RNA, 23 nt, Artificial Sequence
  Synthetic
ggccagggagagacugccccucc

SEQ ID NO: 533963 - RNA, 24 nt, Artificial Sequence
  Synthetic
aggccagggagagacugccccucc

SEQ ID NO: 533964 - RNA, 18 nt, Artificial Sequence
  Synthetic
ucacagcugccucccucc

SEQ ID NO: 533965 - RNA, 19 nt, Artificial Sequence
  Synthetic
cucacagcugccucccucc

SEQ ID NO: 533966 - RNA, 20 nt, Artificial Sequence
  Synthetic
gcucacagcugccucccucc

SEQ ID NO: 533967 - RNA, 21 nt, Artificial Sequence
  Synthetic
agcucacagcugccucccucc

SEQ ID NO: 533968 - RNA, 22 nt, Artificial Sequence
  Synthetic
cagcucacagcugccucccucc

SEQ ID NO: 533969 - RNA, 23 nt, Artificial Sequence
  Synthetic
acagcucacagcugccucccucc

SEQ ID NO: 533970 - RNA, 24 nt, Artificial Sequence
  Synthetic
aacagcucacagcugccucccucc

SEQ ID NO: 533971 - RNA, 18 nt, Artificial Sequence
  Synthetic
ccuugaaaauuucccucc

SEQ ID NO: 533972 - RNA, 19 nt, Artificial Sequence
  Synthetic
gccuugaaaauuucccucc

SEQ ID NO: 533973 - RNA, 20 nt, Artificial Sequence
  Synthetic
ugccuugaaaauuucccucc

SEQ ID NO: 533974 - RNA, 21 nt, Artificial Sequence
  Synthetic
uugccuugaaaauuucccucc

SEQ ID NO: 533975 - RNA, 22 nt, Artificial Sequence
  Synthetic
cuugccuugaaaauuucccucc

SEQ ID NO: 533976 - RNA, 23 nt, Artificial Sequence
  Synthetic
ccuugccuugaaaauuucccucc

SEQ ID NO: 533977 - RNA, 24 nt, Artificial Sequence
  Synthetic
accuugccuugaaaauuucccucc

SEQ ID NO: 533978 - RNA, 18 nt, Artificial Sequence
  Synthetic
gaaaugagcaaagccucc

SEQ ID NO: 533979 - RNA, 19 nt, Artificial Sequence
  Synthetic
agaaaugagcaaagccucc

SEQ ID NO: 533980 - RNA, 20 nt, Artificial Sequence
  Synthetic
aagaaaugagcaaagccucc

SEQ ID NO: 533981 - RNA, 21 nt, Artificial Sequence
  Synthetic
aaagaaaugagcaaagccucc

SEQ ID NO: 533982 - RNA, 22 nt, Artificial Sequence
  Synthetic
aaaagaaaugagcaaagccucc

SEQ ID NO: 533983 - RNA, 23 nt, Artificial Sequence
  Synthetic
aaaaagaaaugagcaaagccucc

SEQ ID NO: 533984 - RNA, 24 nt, Artificial Sequence
  Synthetic
uaaaaagaaaugagcaaagccucc

SEQ ID NO: 533985 - RNA, 18 nt, Artificial Sequence
  Synthetic
auuuaauauaaagccucc

SEQ ID NO: 533986 - RNA, 19 nt, Artificial Sequence
  Synthetic
cauuuaauauaaagccucc

SEQ ID NO: 533987 - RNA, 20 nt, Artificial Sequence
  Synthetic
ccauuuaauauaaagccucc

SEQ ID NO: 533988 - RNA, 21 nt, Artificial Sequence
  Synthetic
uccauuuaauauaaagccucc

SEQ ID NO: 533989 - RNA, 22 nt, Artificial Sequence
  Synthetic
auccauuuaauauaaagccucc

SEQ ID NO: 533990 - RNA, 23 nt, Artificial Sequence
  Synthetic
aauccauuuaauauaaagccucc

SEQ ID NO: 533991 - RNA, 24 nt, Artificial Sequence
  Synthetic
aaauccauuuaauauaaagccucc

SEQ ID NO: 533992 - RNA, 18 nt, Artificial Sequence
  Synthetic
aauucagucacagccucc

SEQ ID NO: 533993 - RNA, 19 nt, Artificial Sequence
  Synthetic
uaauucagucacagccucc

SEQ ID NO: 533994 - RNA, 20 nt, Artificial Sequence
  Synthetic
auaauucagucacagccucc

SEQ ID NO: 533995 - RNA, 21 nt, Artificial Sequence
  Synthetic
uauaauucagucacagccucc

SEQ ID NO: 533996 - RNA, 22 nt, Artificial Sequence
  Synthetic
auauaauucagucacagccucc

SEQ ID NO: 533997 - RNA, 23 nt, Artificial Sequence
  Synthetic
aauauaauucagucacagccucc

SEQ ID NO: 533998 - RNA, 24 nt, Artificial Sequence
  Synthetic
aaauauaauucagucacagccucc

SEQ ID NO: 533999 - RNA, 18 nt, Artificial Sequence
  Synthetic
uguaauucagacgccucc

SEQ ID NO: 534000 - RNA, 19 nt, Artificial Sequence
  Synthetic
auguaauucagacgccucc

SEQ ID NO: 534001 - RNA, 20 nt, Artificial Sequence
  Synthetic
cauguaauucagacgccucc

SEQ ID NO: 534002 - RNA, 21 nt, Artificial Sequence
  Synthetic
ucauguaauucagacgccucc

SEQ ID NO: 534003 - RNA, 22 nt, Artificial Sequence
  Synthetic
uucauguaauucagacgccucc

SEQ ID NO: 534004 - RNA, 23 nt, Artificial Sequence
  Synthetic
uuucauguaauucagacgccucc

SEQ ID NO: 534005 - RNA, 24 nt, Artificial Sequence
  Synthetic
guuucauguaauucagacgccucc

SEQ ID NO: 534006 - RNA, 18 nt, Artificial Sequence
  Synthetic
aauuagggcauugccucc

SEQ ID NO: 534007 - RNA, 19 nt, Artificial Sequence
  Synthetic
aaauuagggcauugccucc

SEQ ID NO: 534008 - RNA, 20 nt, Artificial Sequence
  Synthetic
aaaauuagggcauugccucc

SEQ ID NO: 534009 - RNA, 21 nt, Artificial Sequence
  Synthetic
uaaaauuagggcauugccucc

SEQ ID NO: 534010 - RNA, 22 nt, Artificial Sequence
  Synthetic
uuaaaauuagggcauugccucc

SEQ ID NO: 534011 - RNA, 23 nt, Artificial Sequence
  Synthetic
guuaaaauuagggcauugccucc

SEQ ID NO: 534012 - RNA, 24 nt, Artificial Sequence
  Synthetic
uguuaaaauuagggcauugccucc

SEQ ID NO: 534013 - RNA, 18 nt, Artificial Sequence
  Synthetic
agacuucagagauccucc

SEQ ID NO: 534014 - RNA, 19 nt, Artificial Sequence
  Synthetic
cagacuucagagauccucc

SEQ ID NO: 534015 - RNA, 20 nt, Artificial Sequence
  Synthetic
ucagacuucagagauccucc

SEQ ID NO: 534016 - RNA, 21 nt, Artificial Sequence
  Synthetic
uucagacuucagagauccucc

SEQ ID NO: 534017 - RNA, 22 nt, Artificial Sequence
  Synthetic
cuucagacuucagagauccucc

SEQ ID NO: 534018 - RNA, 23 nt, Artificial Sequence
  Synthetic
ccuucagacuucagagauccucc

SEQ ID NO: 534019 - RNA, 24 nt, Artificial Sequence
  Synthetic
accuucagacuucagagauccucc

SEQ ID NO: 534020 - RNA, 18 nt, Artificial Sequence
  Synthetic
acccauuacugauccucc

SEQ ID NO: 534021 - RNA, 19 nt, Artificial Sequence
  Synthetic
uacccauuacugauccucc

SEQ ID NO: 534022 - RNA, 20 nt, Artificial Sequence
  Synthetic
auacccauuacugauccucc

SEQ ID NO: 534023 - RNA, 21 nt, Artificial Sequence
  Synthetic
aauacccauuacugauccucc

SEQ ID NO: 534024 - RNA, 22 nt, Artificial Sequence
  Synthetic
uaauacccauuacugauccucc

SEQ ID NO: 534025 - RNA, 23 nt, Artificial Sequence
  Synthetic
uuaauacccauuacugauccucc

SEQ ID NO: 534026 - RNA, 24 nt, Artificial Sequence
  Synthetic
auuaauacccauuacugauccucc

SEQ ID NO: 534027 - RNA, 18 nt, Artificial Sequence
  Synthetic
ucaaauucagccuccucc

SEQ ID NO: 534028 - RNA, 19 nt, Artificial Sequence
  Synthetic
gucaaauucagccuccucc

SEQ ID NO: 534029 - RNA, 20 nt, Artificial Sequence
  Synthetic
ggucaaauucagccuccucc

SEQ ID NO: 534030 - RNA, 21 nt, Artificial Sequence
  Synthetic
aggucaaauucagccuccucc

SEQ ID NO: 534031 - RNA, 22 nt, Artificial Sequence
  Synthetic
caggucaaauucagccuccucc

SEQ ID NO: 534032 - RNA, 23 nt, Artificial Sequence
  Synthetic
ccaggucaaauucagccuccucc

SEQ ID NO: 534033 - RNA, 24 nt, Artificial Sequence
  Synthetic
accaggucaaauucagccuccucc

SEQ ID NO: 534034 - RNA, 18 nt, Artificial Sequence
  Synthetic
uuucccaaacucuccucc

SEQ ID NO: 534035 - RNA, 19 nt, Artificial Sequence
  Synthetic
uuuucccaaacucuccucc

SEQ ID NO: 534036 - RNA, 20 nt, Artificial Sequence
  Synthetic
cuuuucccaaacucuccucc

SEQ ID NO: 534037 - RNA, 21 nt, Artificial Sequence
  Synthetic
ucuuuucccaaacucuccucc

SEQ ID NO: 534038 - RNA, 22 nt, Artificial Sequence
  Synthetic
cucuuuucccaaacucuccucc

SEQ ID NO: 534039 - RNA, 23 nt, Artificial Sequence
  Synthetic
gcucuuuucccaaacucuccucc

SEQ ID NO: 534040 - RNA, 24 nt, Artificial Sequence
  Synthetic
ggcucuuuucccaaacucuccucc

SEQ ID NO: 534041 - RNA, 18 nt, Artificial Sequence
  Synthetic
cuuaaaacgcgguccucc

SEQ ID NO: 534042 - RNA, 19 nt, Artificial Sequence
  Synthetic
ucuuaaaacgcgguccucc

SEQ ID NO: 534043 - RNA, 20 nt, Artificial Sequence
  Synthetic
uucuuaaaacgcgguccucc

SEQ ID NO: 534044 - RNA, 21 nt, Artificial Sequence
  Synthetic
guucuuaaaacgcgguccucc

SEQ ID NO: 534045 - RNA, 22 nt, Artificial Sequence
  Synthetic
aguucuuaaaacgcgguccucc

SEQ ID NO: 534046 - RNA, 23 nt, Artificial Sequence
  Synthetic
aaguucuuaaaacgcgguccucc

SEQ ID NO: 534047 - RNA, 24 nt, Artificial Sequence
  Synthetic
uaaguucuuaaaacgcgguccucc

SEQ ID NO: 534048 - RNA, 18 nt, Artificial Sequence
  Synthetic
uuuucuauaccuuccucc

SEQ ID NO: 534049 - RNA, 19 nt, Artificial Sequence
  Synthetic
uuuuucuauaccuuccucc

SEQ ID NO: 534050 - RNA, 20 nt, Artificial Sequence
  Synthetic
auuuuucuauaccuuccucc

SEQ ID NO: 534051 - RNA, 21 nt, Artificial Sequence
  Synthetic
aauuuuucuauaccuuccucc

SEQ ID NO: 534052 - RNA, 22 nt, Artificial Sequence
  Synthetic
aaauuuuucuauaccuuccucc

SEQ ID NO: 534053 - RNA, 23 nt, Artificial Sequence
  Synthetic
uaaauuuuucuauaccuuccucc

SEQ ID NO: 534054 - RNA, 24 nt, Artificial Sequence
  Synthetic
cuaaauuuuucuauaccuuccucc

SEQ ID NO: 534055 - RNA, 18 nt, Artificial Sequence
  Synthetic
cuauccuuuuguuccucc

SEQ ID NO: 534056 - RNA, 19 nt, Artificial Sequence
  Synthetic
ucuauccuuuuguuccucc

SEQ ID NO: 534057 - RNA, 20 nt, Artificial Sequence
  Synthetic
cucuauccuuuuguuccucc

SEQ ID NO: 534058 - RNA, 21 nt, Artificial Sequence
  Synthetic
ucucuauccuuuuguuccucc

SEQ ID NO: 534059 - RNA, 22 nt, Artificial Sequence
  Synthetic
aucucuauccuuuuguuccucc

SEQ ID NO: 534060 - RNA, 23 nt, Artificial Sequence
  Synthetic
uaucucuauccuuuuguuccucc

SEQ ID NO: 534061 - RNA, 24 nt, Artificial Sequence
  Synthetic
cuaucucuauccuuuuguuccucc

SEQ ID NO: 534062 - RNA, 18 nt, Artificial Sequence
  Synthetic
ucggugccucuuuccucc

SEQ ID NO: 534063 - RNA, 19 nt, Artificial Sequence
  Synthetic
uucggugccucuuuccucc

SEQ ID NO: 534064 - RNA, 20 nt, Artificial Sequence
  Synthetic
cuucggugccucuuuccucc

SEQ ID NO: 534065 - RNA, 21 nt, Artificial Sequence
  Synthetic
ccuucggugccucuuuccucc

SEQ ID NO: 534066 - RNA, 22 nt, Artificial Sequence
  Synthetic
uccuucggugccucuuuccucc

SEQ ID NO: 534067 - RNA, 23 nt, Artificial Sequence
  Synthetic
uuccuucggugccucuuuccucc

SEQ ID NO: 534068 - RNA, 24 nt, Artificial Sequence
  Synthetic
guuccuucggugccucuuuccucc

SEQ ID NO: 534069 - RNA, 18 nt, Artificial Sequence
  Synthetic
accaugaguaaaagcucc

SEQ ID NO: 534070 - RNA, 19 nt, Artificial Sequence
  Synthetic
caccaugaguaaaagcucc

SEQ ID NO: 534071 - RNA, 20 nt, Artificial Sequence
  Synthetic
ccaccaugaguaaaagcucc

SEQ ID NO: 534072 - RNA, 21 nt, Artificial Sequence
  Synthetic
uccaccaugaguaaaagcucc

SEQ ID NO: 534073 - RNA, 22 nt, Artificial Sequence
  Synthetic
uuccaccaugaguaaaagcucc

SEQ ID NO: 534074 - RNA, 23 nt, Artificial Sequence
  Synthetic
cuuccaccaugaguaaaagcucc

SEQ ID NO: 534075 - RNA, 24 nt, Artificial Sequence
  Synthetic
ccuuccaccaugaguaaaagcucc

SEQ ID NO: 534076 - RNA, 18 nt, Artificial Sequence
  Synthetic
acuaugaguaaaagcucc

SEQ ID NO: 534077 - RNA, 19 nt, Artificial Sequence
  Synthetic
cacuaugaguaaaagcucc

SEQ ID NO: 534078 - RNA, 20 nt, Artificial Sequence
  Synthetic
ccacuaugaguaaaagcucc

SEQ ID NO: 534079 - RNA, 21 nt, Artificial Sequence
  Synthetic
uccacuaugaguaaaagcucc

SEQ ID NO: 534080 - RNA, 22 nt, Artificial Sequence
  Synthetic
uuccacuaugaguaaaagcucc

SEQ ID NO: 534081 - RNA, 23 nt, Artificial Sequence
  Synthetic
cuuccacuaugaguaaaagcucc

SEQ ID NO: 534082 - RNA, 24 nt, Artificial Sequence
  Synthetic
ucuuccacuaugaguaaaagcucc

SEQ ID NO: 534083 - RNA, 18 nt, Artificial Sequence
  Synthetic
auuauaagccgaagcucc

SEQ ID NO: 534084 - RNA, 19 nt, Artificial Sequence
  Synthetic
aauuauaagccgaagcucc

SEQ ID NO: 534085 - RNA, 20 nt, Artificial Sequence
  Synthetic
caauuauaagccgaagcucc

SEQ ID NO: 534086 - RNA, 21 nt, Artificial Sequence
  Synthetic
ucaauuauaagccgaagcucc

SEQ ID NO: 534087 - RNA, 22 nt, Artificial Sequence
  Synthetic
uucaauuauaagccgaagcucc

SEQ ID NO: 534088 - RNA, 23 nt, Artificial Sequence
  Synthetic
uuucaauuauaagccgaagcucc

SEQ ID NO: 534089 - RNA, 24 nt, Artificial Sequence
  Synthetic
auuucaauuauaagccgaagcucc

SEQ ID NO: 534090 - RNA, 18 nt, Artificial Sequence
  Synthetic
ggguuaaauaccagcucc

SEQ ID NO: 534091 - RNA, 19 nt, Artificial Sequence
  Synthetic
gggguuaaauaccagcucc

SEQ ID NO: 534092 - RNA, 20 nt, Artificial Sequence
  Synthetic
agggguuaaauaccagcucc

SEQ ID NO: 534093 - RNA, 21 nt, Artificial Sequence
  Synthetic
aagggguuaaauaccagcucc

SEQ ID NO: 534094 - RNA, 22 nt, Artificial Sequence
  Synthetic
aaagggguuaaauaccagcucc

SEQ ID NO: 534095 - RNA, 23 nt, Artificial Sequence
  Synthetic
caaagggguuaaauaccagcucc

SEQ ID NO: 534096 - RNA, 24 nt, Artificial Sequence
  Synthetic
acaaagggguuaaauaccagcucc

SEQ ID NO: 534097 - RNA, 18 nt, Artificial Sequence
  Synthetic
ugccuccccuccagcucc

SEQ ID NO: 534098 - RNA, 19 nt, Artificial Sequence
  Synthetic
augccuccccuccagcucc

SEQ ID NO: 534099 - RNA, 20 nt, Artificial Sequence
  Synthetic
gaugccuccccuccagcucc

SEQ ID NO: 534100 - RNA, 21 nt, Artificial Sequence
  Synthetic
ugaugccuccccuccagcucc

SEQ ID NO: 534101 - RNA, 22 nt, Artificial Sequence
  Synthetic
cugaugccuccccuccagcucc

SEQ ID NO: 534102 - RNA, 23 nt, Artificial Sequence
  Synthetic
acugaugccuccccuccagcucc

SEQ ID NO: 534103 - RNA, 24 nt, Artificial Sequence
  Synthetic
aacugaugccuccccuccagcucc

SEQ ID NO: 534104 - RNA, 18 nt, Artificial Sequence
  Synthetic
accucucuucucagcucc

SEQ ID NO: 534105 - RNA, 19 nt, Artificial Sequence
  Synthetic
aaccucucuucucagcucc

SEQ ID NO: 534106 - RNA, 20 nt, Artificial Sequence
  Synthetic
uaaccucucuucucagcucc

SEQ ID NO: 534107 - RNA, 21 nt, Artificial Sequence
  Synthetic
uuaaccucucuucucagcucc

SEQ ID NO: 534108 - RNA, 22 nt, Artificial Sequence
  Synthetic
guuaaccucucuucucagcucc

SEQ ID NO: 534109 - RNA, 23 nt, Artificial Sequence
  Synthetic
uguuaaccucucuucucagcucc

SEQ ID NO: 534110 - RNA, 24 nt, Artificial Sequence
  Synthetic
uuguuaaccucucuucucagcucc

SEQ ID NO: 534111 - RNA, 18 nt, Artificial Sequence
  Synthetic
gcuauggaaaagagcucc

SEQ ID NO: 534112 - RNA, 19 nt, Artificial Sequence
  Synthetic
ugcuauggaaaagagcucc

SEQ ID NO: 534113 - RNA, 20 nt, Artificial Sequence
  Synthetic
cugcuauggaaaagagcucc

SEQ ID NO: 534114 - RNA, 21 nt, Artificial Sequence
  Synthetic
ucugcuauggaaaagagcucc

SEQ ID NO: 534115 - RNA, 22 nt, Artificial Sequence
  Synthetic
uucugcuauggaaaagagcucc

SEQ ID NO: 534116 - RNA, 23 nt, Artificial Sequence
  Synthetic
uuucugcuauggaaaagagcucc

SEQ ID NO: 534117 - RNA, 24 nt, Artificial Sequence
  Synthetic
uuuucugcuauggaaaagagcucc

SEQ ID NO: 534118 - RNA, 18 nt, Artificial Sequence
  Synthetic
cauuacuauaugagcucc

SEQ ID NO: 534119 - RNA, 19 nt, Artificial Sequence
  Synthetic
ccauuacuauaugagcucc

SEQ ID NO: 534120 - RNA, 20 nt, Artificial Sequence
  Synthetic
cccauuacuauaugagcucc

SEQ ID NO: 534121 - RNA, 21 nt, Artificial Sequence
  Synthetic
ucccauuacuauaugagcucc

SEQ ID NO: 534122 - RNA, 22 nt, Artificial Sequence
  Synthetic
uucccauuacuauaugagcucc

SEQ ID NO: 534123 - RNA, 23 nt, Artificial Sequence
  Synthetic
cuucccauuacuauaugagcucc

SEQ ID NO: 534124 - RNA, 24 nt, Artificial Sequence
  Synthetic
acuucccauuacuauaugagcucc

SEQ ID NO: 534125 - RNA, 18 nt, Artificial Sequence
  Synthetic
ucauuuauugugagcucc

SEQ ID NO: 534126 - RNA, 19 nt, Artificial Sequence
  Synthetic
aucauuuauugugagcucc

SEQ ID NO: 534127 - RNA, 20 nt, Artificial Sequence
  Synthetic
gaucauuuauugugagcucc

SEQ ID NO: 534128 - RNA, 21 nt, Artificial Sequence
  Synthetic
agaucauuuauugugagcucc

SEQ ID NO: 534129 - RNA, 22 nt, Artificial Sequence
  Synthetic
aagaucauuuauugugagcucc

SEQ ID NO: 534130 - RNA, 23 nt, Artificial Sequence
  Synthetic
gaagaucauuuauugugagcucc

SEQ ID NO: 534131 - RNA, 24 nt, Artificial Sequence
  Synthetic
ggaagaucauuuauugugagcucc

SEQ ID NO: 534132 - RNA, 18 nt, Artificial Sequence
  Synthetic
gauacauuuagaggcucc

SEQ ID NO: 534133 - RNA, 19 nt, Artificial Sequence
  Synthetic
ugauacauuuagaggcucc

SEQ ID NO: 534134 - RNA, 20 nt, Artificial Sequence
  Synthetic
uugauacauuuagaggcucc

SEQ ID NO: 534135 - RNA, 21 nt, Artificial Sequence
  Synthetic
uuugauacauuuagaggcucc

SEQ ID NO: 534136 - RNA, 22 nt, Artificial Sequence
  Synthetic
guuugauacauuuagaggcucc

SEQ ID NO: 534137 - RNA, 23 nt, Artificial Sequence
  Synthetic
aguuugauacauuuagaggcucc

SEQ ID NO: 534138 - RNA, 24 nt, Artificial Sequence
  Synthetic
uaguuugauacauuuagaggcucc

SEQ ID NO: 534139 - RNA, 18 nt, Artificial Sequence
  Synthetic
gcaaguuaaaauggcucc

SEQ ID NO: 534140 - RNA, 19 nt, Artificial Sequence
  Synthetic
agcaaguuaaaauggcucc

SEQ ID NO: 534141 - RNA, 20 nt, Artificial Sequence
  Synthetic
uagcaaguuaaaauggcucc

SEQ ID NO: 534142 - RNA, 21 nt, Artificial Sequence
  Synthetic
guagcaaguuaaaauggcucc

SEQ ID NO: 534143 - RNA, 22 nt, Artificial Sequence
  Synthetic
uguagcaaguuaaaauggcucc

SEQ ID NO: 534144 - RNA, 23 nt, Artificial Sequence
  Synthetic
auguagcaaguuaaaauggcucc

SEQ ID NO: 534145 - RNA, 24 nt, Artificial Sequence
  Synthetic
uauguagcaaguuaaaauggcucc

SEQ ID NO: 534146 - RNA, 18 nt, Artificial Sequence
  Synthetic
aagcccuuuaauggcucc

SEQ ID NO: 534147 - RNA, 19 nt, Artificial Sequence
  Synthetic
caagcccuuuaauggcucc

SEQ ID NO: 534148 - RNA, 20 nt, Artificial Sequence
  Synthetic
acaagcccuuuaauggcucc

SEQ ID NO: 534149 - RNA, 21 nt, Artificial Sequence
  Synthetic
aacaagcccuuuaauggcucc

SEQ ID NO: 534150 - RNA, 22 nt, Artificial Sequence
  Synthetic
uaacaagcccuuuaauggcucc

SEQ ID NO: 534151 - RNA, 23 nt, Artificial Sequence
  Synthetic
guaacaagcccuuuaauggcucc

SEQ ID NO: 534152 - RNA, 24 nt, Artificial Sequence
  Synthetic
gguaacaagcccuuuaauggcucc

SEQ ID NO: 534153 - RNA, 18 nt, Artificial Sequence
  Synthetic
agaagaaagaaaugcucc

SEQ ID NO: 534154 - RNA, 19 nt, Artificial Sequence
  Synthetic
uagaagaaagaaaugcucc

SEQ ID NO: 534155 - RNA, 20 nt, Artificial Sequence
  Synthetic
auagaagaaagaaaugcucc

SEQ ID NO: 534156 - RNA, 21 nt, Artificial Sequence
  Synthetic
uauagaagaaagaaaugcucc

SEQ ID NO: 534157 - RNA, 22 nt, Artificial Sequence
  Synthetic
guauagaagaaagaaaugcucc

SEQ ID NO: 534158 - RNA, 23 nt, Artificial Sequence
  Synthetic
aguauagaagaaagaaaugcucc

SEQ ID NO: 534159 - RNA, 24 nt, Artificial Sequence
  Synthetic
gaguauagaagaaagaaaugcucc

SEQ ID NO: 534160 - RNA, 18 nt, Artificial Sequence
  Synthetic
ucuuccgugccaugcucc

SEQ ID NO: 534161 - RNA, 19 nt, Artificial Sequence
  Synthetic
cucuuccgugccaugcucc

SEQ ID NO: 534162 - RNA, 20 nt, Artificial Sequence
  Synthetic
ccucuuccgugccaugcucc

SEQ ID NO: 534163 - RNA, 21 nt, Artificial Sequence
  Synthetic
accucuuccgugccaugcucc

SEQ ID NO: 534164 - RNA, 22 nt, Artificial Sequence
  Synthetic
aaccucuuccgugccaugcucc

SEQ ID NO: 534165 - RNA, 23 nt, Artificial Sequence
  Synthetic
caaccucuuccgugccaugcucc

SEQ ID NO: 534166 - RNA, 24 nt, Artificial Sequence
  Synthetic
ccaaccucuuccgugccaugcucc

SEQ ID NO: 534167 - RNA, 18 nt, Artificial Sequence
  Synthetic
aaaagcccaaacugcucc

SEQ ID NO: 534168 - RNA, 19 nt, Artificial Sequence
  Synthetic
aaaaagcccaaacugcucc

SEQ ID NO: 534169 - RNA, 20 nt, Artificial Sequence
  Synthetic
gaaaaagcccaaacugcucc

SEQ ID NO: 534170 - RNA, 21 nt, Artificial Sequence
  Synthetic
ugaaaaagcccaaacugcucc

SEQ ID NO: 534171 - RNA, 22 nt, Artificial Sequence
  Synthetic
gugaaaaagcccaaacugcucc

SEQ ID NO: 534172 - RNA, 23 nt, Artificial Sequence
  Synthetic
ugugaaaaagcccaaacugcucc

SEQ ID NO: 534173 - RNA, 24 nt, Artificial Sequence
  Synthetic
cugugaaaaagcccaaacugcucc

SEQ ID NO: 534174 - RNA, 18 nt, Artificial Sequence
  Synthetic
aaagcauggggcugcucc

SEQ ID NO: 534175 - RNA, 19 nt, Artificial Sequence
  Synthetic
caaagcauggggcugcucc

SEQ ID NO: 534176 - RNA, 20 nt, Artificial Sequence
  Synthetic
acaaagcauggggcugcucc

SEQ ID NO: 534177 - RNA, 21 nt, Artificial Sequence
  Synthetic
gacaaagcauggggcugcucc

SEQ ID NO: 534178 - RNA, 22 nt, Artificial Sequence
  Synthetic
ugacaaagcauggggcugcucc

SEQ ID NO: 534179 - RNA, 23 nt, Artificial Sequence
  Synthetic
cugacaaagcauggggcugcucc

SEQ ID NO: 534180 - RNA, 24 nt, Artificial Sequence
  Synthetic
ccugacaaagcauggggcugcucc

SEQ ID NO: 534181 - RNA, 18 nt, Artificial Sequence
  Synthetic
uggaaagcgaucugcucc

SEQ ID NO: 534182 - RNA, 19 nt, Artificial Sequence
  Synthetic
cuggaaagcgaucugcucc

SEQ ID NO: 534183 - RNA, 20 nt, Artificial Sequence
  Synthetic
ucuggaaagcgaucugcucc

SEQ ID NO: 534184 - RNA, 21 nt, Artificial Sequence
  Synthetic
aucuggaaagcgaucugcucc

SEQ ID NO: 534185 - RNA, 22 nt, Artificial Sequence
  Synthetic
uaucuggaaagcgaucugcucc

SEQ ID NO: 534186 - RNA, 23 nt, Artificial Sequence
  Synthetic
auaucuggaaagcgaucugcucc

SEQ ID NO: 534187 - RNA, 24 nt, Artificial Sequence
  Synthetic
uauaucuggaaagcgaucugcucc

SEQ ID NO: 534188 - RNA, 18 nt, Artificial Sequence
  Synthetic
agcuucuaguucugcucc

SEQ ID NO: 534189 - RNA, 19 nt, Artificial Sequence
  Synthetic
gagcuucuaguucugcucc

SEQ ID NO: 534190 - RNA, 20 nt, Artificial Sequence
  Synthetic
ugagcuucuaguucugcucc

SEQ ID NO: 534191 - RNA, 21 nt, Artificial Sequence
  Synthetic
gugagcuucuaguucugcucc

SEQ ID NO: 534192 - RNA, 22 nt, Artificial Sequence
  Synthetic
ggugagcuucuaguucugcucc

SEQ ID NO: 534193 - RNA, 23 nt, Artificial Sequence
  Synthetic
cggugagcuucuaguucugcucc

SEQ ID NO: 534194 - RNA, 24 nt, Artificial Sequence
  Synthetic
acggugagcuucuaguucugcucc

SEQ ID NO: 534195 - RNA, 18 nt, Artificial Sequence
  Synthetic
gucaguuuuaaaaucucc

SEQ ID NO: 534196 - RNA, 19 nt, Artificial Sequence
  Synthetic
ugucaguuuuaaaaucucc

SEQ ID NO: 534197 - RNA, 20 nt, Artificial Sequence
  Synthetic
gugucaguuuuaaaaucucc

SEQ ID NO: 534198 - RNA, 21 nt, Artificial Sequence
  Synthetic
ggugucaguuuuaaaaucucc

SEQ ID NO: 534199 - RNA, 22 nt, Artificial Sequence
  Synthetic
aggugucaguuuuaaaaucucc

SEQ ID NO: 534200 - RNA, 23 nt, Artificial Sequence
  Synthetic
gaggugucaguuuuaaaaucucc

SEQ ID NO: 534201 - RNA, 24 nt, Artificial Sequence
  Synthetic
ugaggugucaguuuuaaaaucucc

SEQ ID NO: 534202 - RNA, 18 nt, Artificial Sequence
  Synthetic
augcgcauacaaaucucc

SEQ ID NO: 534203 - RNA, 19 nt, Artificial Sequence
  Synthetic
aaugcgcauacaaaucucc

SEQ ID NO: 534204 - RNA, 20 nt, Artificial Sequence
  Synthetic
uaaugcgcauacaaaucucc

SEQ ID NO: 534205 - RNA, 21 nt, Artificial Sequence
  Synthetic
uuaaugcgcauacaaaucucc

SEQ ID NO: 534206 - RNA, 22 nt, Artificial Sequence
  Synthetic
uuuaaugcgcauacaaaucucc

SEQ ID NO: 534207 - RNA, 23 nt, Artificial Sequence
  Synthetic
cuuuaaugcgcauacaaaucucc

SEQ ID NO: 534208 - RNA, 24 nt, Artificial Sequence
  Synthetic
acuuuaaugcgcauacaaaucucc

SEQ ID NO: 534209 - RNA, 18 nt, Artificial Sequence
  Synthetic
aaguugguuacaaucucc

SEQ ID NO: 534210 - RNA, 19 nt, Artificial Sequence
  Synthetic
aaaguugguuacaaucucc

SEQ ID NO: 534211 - RNA, 20 nt, Artificial Sequence
  Synthetic
aaaaguugguuacaaucucc

SEQ ID NO: 534212 - RNA, 21 nt, Artificial Sequence
  Synthetic
gaaaaguugguuacaaucucc

SEQ ID NO: 534213 - RNA, 22 nt, Artificial Sequence
  Synthetic
agaaaaguugguuacaaucucc

SEQ ID NO: 534214 - RNA, 23 nt, Artificial Sequence
  Synthetic
gagaaaaguugguuacaaucucc

SEQ ID NO: 534215 - RNA, 24 nt, Artificial Sequence
  Synthetic
agagaaaaguugguuacaaucucc

SEQ ID NO: 534216 - RNA, 18 nt, Artificial Sequence
  Synthetic
ugacaugauagaaucucc

SEQ ID NO: 534217 - RNA, 19 nt, Artificial Sequence
  Synthetic
augacaugauagaaucucc

SEQ ID NO: 534218 - RNA, 20 nt, Artificial Sequence
  Synthetic
gaugacaugauagaaucucc

SEQ ID NO: 534219 - RNA, 21 nt, Artificial Sequence
  Synthetic
agaugacaugauagaaucucc

SEQ ID NO: 534220 - RNA, 22 nt, Artificial Sequence
  Synthetic
gagaugacaugauagaaucucc

SEQ ID NO: 534221 - RNA, 23 nt, Artificial Sequence
  Synthetic
agagaugacaugauagaaucucc

SEQ ID NO: 534222 - RNA, 24 nt, Artificial Sequence
  Synthetic
cagagaugacaugauagaaucucc

SEQ ID NO: 534223 - RNA, 18 nt, Artificial Sequence
  Synthetic
acaaucgccuccaucucc

SEQ ID NO: 534224 - RNA, 19 nt, Artificial Sequence
  Synthetic
cacaaucgccuccaucucc

SEQ ID NO: 534225 - RNA, 20 nt, Artificial Sequence
  Synthetic
gcacaaucgccuccaucucc

SEQ ID NO: 534226 - RNA, 21 nt, Artificial Sequence
  Synthetic
agcacaaucgccuccaucucc

SEQ ID NO: 534227 - RNA, 22 nt, Artificial Sequence
  Synthetic
cagcacaaucgccuccaucucc

SEQ ID NO: 534228 - RNA, 23 nt, Artificial Sequence
  Synthetic
acagcacaaucgccuccaucucc

SEQ ID NO: 534229 - RNA, 24 nt, Artificial Sequence
  Synthetic
cacagcacaaucgccuccaucucc

SEQ ID NO: 534230 - RNA, 18 nt, Artificial Sequence
  Synthetic
aguguguuguccaucucc

SEQ ID NO: 534231 - RNA, 19 nt, Artificial Sequence
  Synthetic
uaguguguuguccaucucc

SEQ ID NO: 534232 - RNA, 20 nt, Artificial Sequence
  Synthetic
uuaguguguuguccaucucc

SEQ ID NO: 534233 - RNA, 21 nt, Artificial Sequence
  Synthetic
uuuaguguguuguccaucucc

SEQ ID NO: 534234 - RNA, 22 nt, Artificial Sequence
  Synthetic
guuuaguguguuguccaucucc

SEQ ID NO: 534235 - RNA, 23 nt, Artificial Sequence
  Synthetic
gguuuaguguguuguccaucucc

SEQ ID NO: 534236 - RNA, 24 nt, Artificial Sequence
  Synthetic
ugguuuaguguguuguccaucucc

SEQ ID NO: 534237 - RNA, 18 nt, Artificial Sequence
  Synthetic
gcagcccagcucaucucc

SEQ ID NO: 534238 - RNA, 19 nt, Artificial Sequence
  Synthetic
ugcagcccagcucaucucc

SEQ ID NO: 534239 - RNA, 20 nt, Artificial Sequence
  Synthetic
uugcagcccagcucaucucc

SEQ ID NO: 534240 - RNA, 21 nt, Artificial Sequence
  Synthetic
auugcagcccagcucaucucc

SEQ ID NO: 534241 - RNA, 22 nt, Artificial Sequence
  Synthetic
aauugcagcccagcucaucucc

SEQ ID NO: 534242 - RNA, 23 nt, Artificial Sequence
  Synthetic
aaauugcagcccagcucaucucc

SEQ ID NO: 534243 - RNA, 24 nt, Artificial Sequence
  Synthetic
aaaauugcagcccagcucaucucc

SEQ ID NO: 534244 - RNA, 18 nt, Artificial Sequence
  Synthetic
uugcaucuccagaucucc

SEQ ID NO: 534245 - RNA, 19 nt, Artificial Sequence
  Synthetic
auugcaucuccagaucucc

SEQ ID NO: 534246 - RNA, 20 nt, Artificial Sequence
  Synthetic
aauugcaucuccagaucucc

SEQ ID NO: 534247 - RNA, 21 nt, Artificial Sequence
  Synthetic
caauugcaucuccagaucucc

SEQ ID NO: 534248 - RNA, 22 nt, Artificial Sequence
  Synthetic
acaauugcaucuccagaucucc

SEQ ID NO: 534249 - RNA, 23 nt, Artificial Sequence
  Synthetic
uacaauugcaucuccagaucucc

SEQ ID NO: 534250 - RNA, 24 nt, Artificial Sequence
  Synthetic
cuacaauugcaucuccagaucucc

SEQ ID NO: 534251 - RNA, 18 nt, Artificial Sequence
  Synthetic
aaaguuaagcagaucucc

SEQ ID NO: 534252 - RNA, 19 nt, Artificial Sequence
  Synthetic
gaaaguuaagcagaucucc

SEQ ID NO: 534253 - RNA, 20 nt, Artificial Sequence
  Synthetic
agaaaguuaagcagaucucc

SEQ ID NO: 534254 - RNA, 21 nt, Artificial Sequence
  Synthetic
aagaaaguuaagcagaucucc

SEQ ID NO: 534255 - RNA, 22 nt, Artificial Sequence
  Synthetic
gaagaaaguuaagcagaucucc

SEQ ID NO: 534256 - RNA, 23 nt, Artificial Sequence
  Synthetic
ugaagaaaguuaagcagaucucc

SEQ ID NO: 534257 - RNA, 24 nt, Artificial Sequence
  Synthetic
augaagaaaguuaagcagaucucc

SEQ ID NO: 534258 - RNA, 18 nt, Artificial Sequence
  Synthetic
uguaacuaaaauaucucc

SEQ ID NO: 534259 - RNA, 19 nt, Artificial Sequence
  Synthetic
guguaacuaaaauaucucc

SEQ ID NO: 534260 - RNA, 20 nt, Artificial Sequence
  Synthetic
uguguaacuaaaauaucucc

SEQ ID NO: 534261 - RNA, 21 nt, Artificial Sequence
  Synthetic
guguguaacuaaaauaucucc

SEQ ID NO: 534262 - RNA, 22 nt, Artificial Sequence
  Synthetic
aguguguaacuaaaauaucucc

SEQ ID NO: 534263 - RNA, 23 nt, Artificial Sequence
  Synthetic
aaguguguaacuaaaauaucucc

SEQ ID NO: 534264 - RNA, 24 nt, Artificial Sequence
  Synthetic
gaaguguguaacuaaaauaucucc

SEQ ID NO: 534265 - RNA, 18 nt, Artificial Sequence
  Synthetic
uguuuguuuacuaucucc

SEQ ID NO: 534266 - RNA, 19 nt, Artificial Sequence
  Synthetic
uuguuuguuuacuaucucc

SEQ ID NO: 534267 - RNA, 20 nt, Artificial Sequence
  Synthetic
uuuguuuguuuacuaucucc

SEQ ID NO: 534268 - RNA, 21 nt, Artificial Sequence
  Synthetic
guuuguuuguuuacuaucucc

SEQ ID NO: 534269 - RNA, 22 nt, Artificial Sequence
  Synthetic
uguuuguuuguuuacuaucucc

SEQ ID NO: 534270 - RNA, 23 nt, Artificial Sequence
  Synthetic
uuguuuguuuguuuacuaucucc

SEQ ID NO: 534271 - RNA, 24 nt, Artificial Sequence
  Synthetic
uuuguuuguuuguuuacuaucucc

SEQ ID NO: 534272 - RNA, 18 nt, Artificial Sequence
  Synthetic
ggcaaaaauccuaucucc

SEQ ID NO: 534273 - RNA, 19 nt, Artificial Sequence
  Synthetic
gggcaaaaauccuaucucc

SEQ ID NO: 534274 - RNA, 20 nt, Artificial Sequence
  Synthetic
agggcaaaaauccuaucucc

SEQ ID NO: 534275 - RNA, 21 nt, Artificial Sequence
  Synthetic
gagggcaaaaauccuaucucc

SEQ ID NO: 534276 - RNA, 22 nt, Artificial Sequence
  Synthetic
ugagggcaaaaauccuaucucc

SEQ ID NO: 534277 - RNA, 23 nt, Artificial Sequence
  Synthetic
uugagggcaaaaauccuaucucc

SEQ ID NO: 534278 - RNA, 24 nt, Artificial Sequence
  Synthetic
auugagggcaaaaauccuaucucc

SEQ ID NO: 534279 - RNA, 18 nt, Artificial Sequence
  Synthetic
uuuaaaauggcuaucucc

SEQ ID NO: 534280 - RNA, 19 nt, Artificial Sequence
  Synthetic
uuuuaaaauggcuaucucc

SEQ ID NO: 534281 - RNA, 20 nt, Artificial Sequence
  Synthetic
guuuuaaaauggcuaucucc

SEQ ID NO: 534282 - RNA, 21 nt, Artificial Sequence
  Synthetic
uguuuuaaaauggcuaucucc

SEQ ID NO: 534283 - RNA, 22 nt, Artificial Sequence
  Synthetic
auguuuuaaaauggcuaucucc

SEQ ID NO: 534284 - RNA, 23 nt, Artificial Sequence
  Synthetic
uauguuuuaaaauggcuaucucc

SEQ ID NO: 534285 - RNA, 24 nt, Artificial Sequence
  Synthetic
auauguuuuaaaauggcuaucucc

SEQ ID NO: 534286 - RNA, 18 nt, Artificial Sequence
  Synthetic
ggaucuuaccuuaucucc

SEQ ID NO: 534287 - RNA, 19 nt, Artificial Sequence
  Synthetic
uggaucuuaccuuaucucc

SEQ ID NO: 534288 - RNA, 20 nt, Artificial Sequence
  Synthetic
cuggaucuuaccuuaucucc

SEQ ID NO: 534289 - RNA, 21 nt, Artificial Sequence
  Synthetic
ccuggaucuuaccuuaucucc

SEQ ID NO: 534290 - RNA, 22 nt, Artificial Sequence
  Synthetic
accuggaucuuaccuuaucucc

SEQ ID NO: 534291 - RNA, 23 nt, Artificial Sequence
  Synthetic
caccuggaucuuaccuuaucucc

SEQ ID NO: 534292 - RNA, 24 nt, Artificial Sequence
  Synthetic
ccaccuggaucuuaccuuaucucc

SEQ ID NO: 534293 - RNA, 18 nt, Artificial Sequence
  Synthetic
uuaaaaacuuuuaucucc

SEQ ID NO: 534294 - RNA, 19 nt, Artificial Sequence
  Synthetic
uuuaaaaacuuuuaucucc

SEQ ID NO: 534295 - RNA, 20 nt, Artificial Sequence
  Synthetic
auuuaaaaacuuuuaucucc

SEQ ID NO: 534296 - RNA, 21 nt, Artificial Sequence
  Synthetic
gauuuaaaaacuuuuaucucc

SEQ ID NO: 534297 - RNA, 22 nt, Artificial Sequence
  Synthetic
agauuuaaaaacuuuuaucucc

SEQ ID NO: 534298 - RNA, 23 nt, Artificial Sequence
  Synthetic
gagauuuaaaaacuuuuaucucc

SEQ ID NO: 534299 - RNA, 24 nt, Artificial Sequence
  Synthetic
agagauuuaaaaacuuuuaucucc

SEQ ID NO: 534300 - RNA, 18 nt, Artificial Sequence
  Synthetic
cccucuccaggacucucc

SEQ ID NO: 534301 - RNA, 19 nt, Artificial Sequence
  Synthetic
gcccucuccaggacucucc

SEQ ID NO: 534302 - RNA, 20 nt, Artificial Sequence
  Synthetic
agcccucuccaggacucucc

SEQ ID NO: 534303 - RNA, 21 nt, Artificial Sequence
  Synthetic
cagcccucuccaggacucucc

SEQ ID NO: 534304 - RNA, 22 nt, Artificial Sequence
  Synthetic
acagcccucuccaggacucucc

SEQ ID NO: 534305 - RNA, 23 nt, Artificial Sequence
  Synthetic
gacagcccucuccaggacucucc

SEQ ID NO: 534306 - RNA, 24 nt, Artificial Sequence
  Synthetic
agacagcccucuccaggacucucc

SEQ ID NO: 534307 - RNA, 18 nt, Artificial Sequence
  Synthetic
cuaccucucuuccucucc

SEQ ID NO: 534308 - RNA, 19 nt, Artificial Sequence
  Synthetic
ccuaccucucuuccucucc

SEQ ID NO: 534309 - RNA, 20 nt, Artificial Sequence
  Synthetic
cccuaccucucuuccucucc

SEQ ID NO: 534310 - RNA, 21 nt, Artificial Sequence
  Synthetic
ccccuaccucucuuccucucc

SEQ ID NO: 534311 - RNA, 22 nt, Artificial Sequence
  Synthetic
cccccuaccucucuuccucucc

SEQ ID NO: 534312 - RNA, 23 nt, Artificial Sequence
  Synthetic
ucccccuaccucucuuccucucc

SEQ ID NO: 534313 - RNA, 24 nt, Artificial Sequence
  Synthetic
aucccccuaccucucuuccucucc

SEQ ID NO: 534314 - RNA, 18 nt, Artificial Sequence
  Synthetic
auguucugcaggcucucc

SEQ ID NO: 534315 - RNA, 19 nt, Artificial Sequence
  Synthetic
uauguucugcaggcucucc

SEQ ID NO: 534316 - RNA, 20 nt, Artificial Sequence
  Synthetic
uuauguucugcaggcucucc

SEQ ID NO: 534317 - RNA, 21 nt, Artificial Sequence
  Synthetic
guuauguucugcaggcucucc

SEQ ID NO: 534318 - RNA, 22 nt, Artificial Sequence
  Synthetic
gguuauguucugcaggcucucc

SEQ ID NO: 534319 - RNA, 23 nt, Artificial Sequence
  Synthetic
ugguuauguucugcaggcucucc

SEQ ID NO: 534320 - RNA, 24 nt, Artificial Sequence
  Synthetic
augguuauguucugcaggcucucc

SEQ ID NO: 534321 - RNA, 18 nt, Artificial Sequence
  Synthetic
gcuauaagcccucucucc

SEQ ID NO: 534322 - RNA, 19 nt, Artificial Sequence
  Synthetic
ugcuauaagcccucucucc

SEQ ID NO: 534323 - RNA, 20 nt, Artificial Sequence
  Synthetic
cugcuauaagcccucucucc

SEQ ID NO: 534324 - RNA, 21 nt, Artificial Sequence
  Synthetic
acugcuauaagcccucucucc

SEQ ID NO: 534325 - RNA, 22 nt, Artificial Sequence
  Synthetic
aacugcuauaagcccucucucc

SEQ ID NO: 534326 - RNA, 23 nt, Artificial Sequence
  Synthetic
uaacugcuauaagcccucucucc

SEQ ID NO: 534327 - RNA, 24 nt, Artificial Sequence
  Synthetic
auaacugcuauaagcccucucucc

SEQ ID NO: 534328 - RNA, 18 nt, Artificial Sequence
  Synthetic
aaugauuaucuucucucc

SEQ ID NO: 534329 - RNA, 19 nt, Artificial Sequence
  Synthetic
uaaugauuaucuucucucc

SEQ ID NO: 534330 - RNA, 20 nt, Artificial Sequence
  Synthetic
auaaugauuaucuucucucc

SEQ ID NO: 534331 - RNA, 21 nt, Artificial Sequence
  Synthetic
aauaaugauuaucuucucucc

SEQ ID NO: 534332 - RNA, 22 nt, Artificial Sequence
  Synthetic
caauaaugauuaucuucucucc

SEQ ID NO: 534333 - RNA, 23 nt, Artificial Sequence
  Synthetic
ucaauaaugauuaucuucucucc

SEQ ID NO: 534334 - RNA, 24 nt, Artificial Sequence
  Synthetic
aucaauaaugauuaucuucucucc

SEQ ID NO: 534335 - RNA, 18 nt, Artificial Sequence
  Synthetic
uagcaugaaucagucucc

SEQ ID NO: 534336 - RNA, 19 nt, Artificial Sequence
  Synthetic
guagcaugaaucagucucc

SEQ ID NO: 534337 - RNA, 20 nt, Artificial Sequence
  Synthetic
uguagcaugaaucagucucc

SEQ ID NO: 534338 - RNA, 21 nt, Artificial Sequence
  Synthetic
guguagcaugaaucagucucc

SEQ ID NO: 534339 - RNA, 22 nt, Artificial Sequence
  Synthetic
uguguagcaugaaucagucucc

SEQ ID NO: 534340 - RNA, 23 nt, Artificial Sequence
  Synthetic
uuguguagcaugaaucagucucc

SEQ ID NO: 534341 - RNA, 24 nt, Artificial Sequence
  Synthetic
uuuguguagcaugaaucagucucc

SEQ ID NO: 534342 - RNA, 18 nt, Artificial Sequence
  Synthetic
uauuuuuuccuagucucc

SEQ ID NO: 534343 - RNA, 19 nt, Artificial Sequence
  Synthetic
uuauuuuuuccuagucucc

SEQ ID NO: 534344 - RNA, 20 nt, Artificial Sequence
  Synthetic
cuuauuuuuuccuagucucc

SEQ ID NO: 534345 - RNA, 21 nt, Artificial Sequence
  Synthetic
acuuauuuuuuccuagucucc

SEQ ID NO: 534346 - RNA, 22 nt, Artificial Sequence
  Synthetic
aacuuauuuuuuccuagucucc

SEQ ID NO: 534347 - RNA, 23 nt, Artificial Sequence
  Synthetic
aaacuuauuuuuuccuagucucc

SEQ ID NO: 534348 - RNA, 24 nt, Artificial Sequence
  Synthetic
aaaacuuauuuuuuccuagucucc

SEQ ID NO: 534349 - RNA, 18 nt, Artificial Sequence
  Synthetic
agccuuauaaacgucucc

SEQ ID NO: 534350 - RNA, 19 nt, Artificial Sequence
  Synthetic
uagccuuauaaacgucucc

SEQ ID NO: 534351 - RNA, 20 nt, Artificial Sequence
  Synthetic
guagccuuauaaacgucucc

SEQ ID NO: 534352 - RNA, 21 nt, Artificial Sequence
  Synthetic
uguagccuuauaaacgucucc

SEQ ID NO: 534353 - RNA, 22 nt, Artificial Sequence
  Synthetic
auguagccuuauaaacgucucc

SEQ ID NO: 534354 - RNA, 23 nt, Artificial Sequence
  Synthetic
cauguagccuuauaaacgucucc

SEQ ID NO: 534355 - RNA, 24 nt, Artificial Sequence
  Synthetic
ucauguagccuuauaaacgucucc

SEQ ID NO: 534356 - RNA, 18 nt, Artificial Sequence
  Synthetic
accccugaccccgucucc

SEQ ID NO: 534357 - RNA, 19 nt, Artificial Sequence
  Synthetic
uaccccugaccccgucucc

SEQ ID NO: 534358 - RNA, 20 nt, Artificial Sequence
  Synthetic
auaccccugaccccgucucc

SEQ ID NO: 534359 - RNA, 21 nt, Artificial Sequence
  Synthetic
uauaccccugaccccgucucc

SEQ ID NO: 534360 - RNA, 22 nt, Artificial Sequence
  Synthetic
guauaccccugaccccgucucc

SEQ ID NO: 534361 - RNA, 23 nt, Artificial Sequence
  Synthetic
aguauaccccugaccccgucucc

SEQ ID NO: 534362 - RNA, 24 nt, Artificial Sequence
  Synthetic
caguauaccccugaccccgucucc

SEQ ID NO: 534363 - RNA, 18 nt, Artificial Sequence
  Synthetic
auguaaacaaaggucucc

SEQ ID NO: 534364 - RNA, 19 nt, Artificial Sequence
  Synthetic
gauguaaacaaaggucucc

SEQ ID NO: 534365 - RNA, 20 nt, Artificial Sequence
  Synthetic
ugauguaaacaaaggucucc

SEQ ID NO: 534366 - RNA, 21 nt, Artificial Sequence
  Synthetic
uugauguaaacaaaggucucc

SEQ ID NO: 534367 - RNA, 22 nt, Artificial Sequence
  Synthetic
uuugauguaaacaaaggucucc

SEQ ID NO: 534368 - RNA, 23 nt, Artificial Sequence
  Synthetic
uuuugauguaaacaaaggucucc

SEQ ID NO: 534369 - RNA, 24 nt, Artificial Sequence
  Synthetic
cuuuugauguaaacaaaggucucc

SEQ ID NO: 534370 - RNA, 18 nt, Artificial Sequence
  Synthetic
uagcaucuauuggucucc

SEQ ID NO: 534371 - RNA, 19 nt, Artificial Sequence
  Synthetic
uuagcaucuauuggucucc

SEQ ID NO: 534372 - RNA, 20 nt, Artificial Sequence
  Synthetic
uuuagcaucuauuggucucc

SEQ ID NO: 534373 - RNA, 21 nt, Artificial Sequence
  Synthetic
guuuagcaucuauuggucucc

SEQ ID NO: 534374 - RNA, 22 nt, Artificial Sequence
  Synthetic
gguuuagcaucuauuggucucc

SEQ ID NO: 534375 - RNA, 23 nt, Artificial Sequence
  Synthetic
ugguuuagcaucuauuggucucc

SEQ ID NO: 534376 - RNA, 24 nt, Artificial Sequence
  Synthetic
uugguuuagcaucuauuggucucc

SEQ ID NO: 534377 - RNA, 18 nt, Artificial Sequence
  Synthetic
uggagggccucugucucc

SEQ ID NO: 534378 - RNA, 19 nt, Artificial Sequence
  Synthetic
cuggagggccucugucucc

SEQ ID NO: 534379 - RNA, 20 nt, Artificial Sequence
  Synthetic
ucuggagggccucugucucc

SEQ ID NO: 534380 - RNA, 21 nt, Artificial Sequence
  Synthetic
gucuggagggccucugucucc

SEQ ID NO: 534381 - RNA, 22 nt, Artificial Sequence
  Synthetic
agucuggagggccucugucucc

SEQ ID NO: 534382 - RNA, 23 nt, Artificial Sequence
  Synthetic
gagucuggagggccucugucucc

SEQ ID NO: 534383 - RNA, 24 nt, Artificial Sequence
  Synthetic
ggagucuggagggccucugucucc

SEQ ID NO: 534384 - RNA, 18 nt, Artificial Sequence
  Synthetic
aaugggaaaauugucucc

SEQ ID NO: 534385 - RNA, 19 nt, Artificial Sequence
  Synthetic
caaugggaaaauugucucc

SEQ ID NO: 534386 - RNA, 20 nt, Artificial Sequence
  Synthetic
gcaaugggaaaauugucucc

SEQ ID NO: 534387 - RNA, 21 nt, Artificial Sequence
  Synthetic
ggcaaugggaaaauugucucc

SEQ ID NO: 534388 - RNA, 22 nt, Artificial Sequence
  Synthetic
aggcaaugggaaaauugucucc

SEQ ID NO: 534389 - RNA, 23 nt, Artificial Sequence
  Synthetic
aaggcaaugggaaaauugucucc

SEQ ID NO: 534390 - RNA, 24 nt, Artificial Sequence
  Synthetic
caaggcaaugggaaaauugucucc

SEQ ID NO: 534391 - RNA, 18 nt, Artificial Sequence
  Synthetic
auccacugcauauucucc

SEQ ID NO: 534392 - RNA, 19 nt, Artificial Sequence
  Synthetic
uauccacugcauauucucc

SEQ ID NO: 534393 - RNA, 20 nt, Artificial Sequence
  Synthetic
uuauccacugcauauucucc

SEQ ID NO: 534394 - RNA, 21 nt, Artificial Sequence
  Synthetic
guuauccacugcauauucucc

SEQ ID NO: 534395 - RNA, 22 nt, Artificial Sequence
  Synthetic
aguuauccacugcauauucucc

SEQ ID NO: 534396 - RNA, 23 nt, Artificial Sequence
  Synthetic
caguuauccacugcauauucucc

SEQ ID NO: 534397 - RNA, 24 nt, Artificial Sequence
  Synthetic
gcaguuauccacugcauauucucc

SEQ ID NO: 534398 - RNA, 18 nt, Artificial Sequence
  Synthetic
ucccuuuucauauucucc

SEQ ID NO: 534399 - RNA, 19 nt, Artificial Sequence
  Synthetic
cucccuuuucauauucucc

SEQ ID NO: 534400 - RNA, 20 nt, Artificial Sequence
  Synthetic
ccucccuuuucauauucucc

SEQ ID NO: 534401 - RNA, 21 nt, Artificial Sequence
  Synthetic
cccucccuuuucauauucucc

SEQ ID NO: 534402 - RNA, 22 nt, Artificial Sequence
  Synthetic
acccucccuuuucauauucucc

SEQ ID NO: 534403 - RNA, 23 nt, Artificial Sequence
  Synthetic
uacccucccuuuucauauucucc

SEQ ID NO: 534404 - RNA, 24 nt, Artificial Sequence
  Synthetic
uuacccucccuuuucauauucucc

SEQ ID NO: 534405 - RNA, 18 nt, Artificial Sequence
  Synthetic
uaccuucucuuauucucc

SEQ ID NO: 534406 - RNA, 19 nt, Artificial Sequence
  Synthetic
uuaccuucucuuauucucc

SEQ ID NO: 534407 - RNA, 20 nt, Artificial Sequence
  Synthetic
uuuaccuucucuuauucucc

SEQ ID NO: 534408 - RNA, 21 nt, Artificial Sequence
  Synthetic
cuuuaccuucucuuauucucc

SEQ ID NO: 534409 - RNA, 22 nt, Artificial Sequence
  Synthetic
acuuuaccuucucuuauucucc

SEQ ID NO: 534410 - RNA, 23 nt, Artificial Sequence
  Synthetic
uacuuuaccuucucuuauucucc

SEQ ID NO: 534411 - RNA, 24 nt, Artificial Sequence
  Synthetic
auacuuuaccuucucuuauucucc

SEQ ID NO: 534412 - RNA, 18 nt, Artificial Sequence
  Synthetic
acuuuuugauacuucucc

SEQ ID NO: 534413 - RNA, 19 nt, Artificial Sequence
  Synthetic
aacuuuuugauacuucucc

SEQ ID NO: 534414 - RNA, 20 nt, Artificial Sequence
  Synthetic
aaacuuuuugauacuucucc

SEQ ID NO: 534415 - RNA, 21 nt, Artificial Sequence
  Synthetic
aaaacuuuuugauacuucucc

SEQ ID NO: 534416 - RNA, 22 nt, Artificial Sequence
  Synthetic
caaaacuuuuugauacuucucc

SEQ ID NO: 534417 - RNA, 23 nt, Artificial Sequence
  Synthetic
ucaaaacuuuuugauacuucucc

SEQ ID NO: 534418 - RNA, 24 nt, Artificial Sequence
  Synthetic
aucaaaacuuuuugauacuucucc

SEQ ID NO: 534419 - RNA, 18 nt, Artificial Sequence
  Synthetic
uauuuauucuacuucucc

SEQ ID NO: 534420 - RNA, 19 nt, Artificial Sequence
  Synthetic
auauuuauucuacuucucc

SEQ ID NO: 534421 - RNA, 20 nt, Artificial Sequence
  Synthetic
gauauuuauucuacuucucc

SEQ ID NO: 534422 - RNA, 21 nt, Artificial Sequence
  Synthetic
ugauauuuauucuacuucucc

SEQ ID NO: 534423 - RNA, 22 nt, Artificial Sequence
  Synthetic
uugauauuuauucuacuucucc

SEQ ID NO: 534424 - RNA, 23 nt, Artificial Sequence
  Synthetic
guugauauuuauucuacuucucc

SEQ ID NO: 534425 - RNA, 24 nt, Artificial Sequence
  Synthetic
uguugauauuuauucuacuucucc

SEQ ID NO: 534426 - RNA, 18 nt, Artificial Sequence
  Synthetic
uaaucuaccaccuucucc

SEQ ID NO: 534427 - RNA, 19 nt, Artificial Sequence
  Synthetic
cuaaucuaccaccuucucc

SEQ ID NO: 534428 - RNA, 20 nt, Artificial Sequence
  Synthetic
gcuaaucuaccaccuucucc

SEQ ID NO: 534429 - RNA, 21 nt, Artificial Sequence
  Synthetic
agcuaaucuaccaccuucucc

SEQ ID NO: 534430 - RNA, 22 nt, Artificial Sequence
  Synthetic
gagcuaaucuaccaccuucucc

SEQ ID NO: 534431 - RNA, 23 nt, Artificial Sequence
  Synthetic
ugagcuaaucuaccaccuucucc

SEQ ID NO: 534432 - RNA, 24 nt, Artificial Sequence
  Synthetic
augagcuaaucuaccaccuucucc

SEQ ID NO: 534433 - RNA, 18 nt, Artificial Sequence
  Synthetic
uuuuaugaaugcuucucc

SEQ ID NO: 534434 - RNA, 19 nt, Artificial Sequence
  Synthetic
cuuuuaugaaugcuucucc

SEQ ID NO: 534435 - RNA, 20 nt, Artificial Sequence
  Synthetic
ccuuuuaugaaugcuucucc

SEQ ID NO: 534436 - RNA, 21 nt, Artificial Sequence
  Synthetic
accuuuuaugaaugcuucucc

SEQ ID NO: 534437 - RNA, 22 nt, Artificial Sequence
  Synthetic
uaccuuuuaugaaugcuucucc

SEQ ID NO: 534438 - RNA, 23 nt, Artificial Sequence
  Synthetic
auaccuuuuaugaaugcuucucc

SEQ ID NO: 534439 - RNA, 24 nt, Artificial Sequence
  Synthetic
cauaccuuuuaugaaugcuucucc

SEQ ID NO: 534440 - RNA, 18 nt, Artificial Sequence
  Synthetic
guaucaguucaguucucc

SEQ ID NO: 534441 - RNA, 19 nt, Artificial Sequence
  Synthetic
aguaucaguucaguucucc

SEQ ID NO: 534442 - RNA, 20 nt, Artificial Sequence
  Synthetic
aaguaucaguucaguucucc

SEQ ID NO: 534443 - RNA, 21 nt, Artificial Sequence
  Synthetic
caaguaucaguucaguucucc

SEQ ID NO: 534444 - RNA, 22 nt, Artificial Sequence
  Synthetic
ccaaguaucaguucaguucucc

SEQ ID NO: 534445 - RNA, 23 nt, Artificial Sequence
  Synthetic
cccaaguaucaguucaguucucc

SEQ ID NO: 534446 - RNA, 24 nt, Artificial Sequence
  Synthetic
acccaaguaucaguucaguucucc

SEQ ID NO: 534447 - RNA, 21 nt, Artificial Sequence
  Synthetic
agcagugguuuguaguucucc

SEQ ID NO: 534448 - RNA, 22 nt, Artificial Sequence
  Synthetic
gagcagugguuuguaguucucc

SEQ ID NO: 534449 - RNA, 23 nt, Artificial Sequence
  Synthetic
ugagcagugguuuguaguucucc

SEQ ID NO: 534450 - RNA, 24 nt, Artificial Sequence
  Synthetic
uugagcagugguuuguaguucucc

SEQ ID NO: 534451 - RNA, 18 nt, Artificial Sequence
  Synthetic
aucuggaauauguucucc

SEQ ID NO: 534452 - RNA, 19 nt, Artificial Sequence
  Synthetic
caucuggaauauguucucc

SEQ ID NO: 534453 - RNA, 20 nt, Artificial Sequence
  Synthetic
acaucuggaauauguucucc

SEQ ID NO: 534454 - RNA, 21 nt, Artificial Sequence
  Synthetic
aacaucuggaauauguucucc

SEQ ID NO: 534455 - RNA, 22 nt, Artificial Sequence
  Synthetic
aaacaucuggaauauguucucc

SEQ ID NO: 534456 - RNA, 23 nt, Artificial Sequence
  Synthetic
uaaacaucuggaauauguucucc

SEQ ID NO: 534457 - RNA, 24 nt, Artificial Sequence
  Synthetic
uuaaacaucuggaauauguucucc

SEQ ID NO: 534458 - RNA, 18 nt, Artificial Sequence
  Synthetic
agacuauuuauguucucc

SEQ ID NO: 534459 - RNA, 19 nt, Artificial Sequence
  Synthetic
gagacuauuuauguucucc

SEQ ID NO: 534460 - RNA, 20 nt, Artificial Sequence
  Synthetic
ugagacuauuuauguucucc

SEQ ID NO: 534461 - RNA, 21 nt, Artificial Sequence
  Synthetic
uugagacuauuuauguucucc

SEQ ID NO: 534462 - RNA, 22 nt, Artificial Sequence
  Synthetic
cuugagacuauuuauguucucc

SEQ ID NO: 534463 - RNA, 23 nt, Artificial Sequence
  Synthetic
ucuugagacuauuuauguucucc

SEQ ID NO: 534464 - RNA, 24 nt, Artificial Sequence
  Synthetic
aucuugagacuauuuauguucucc

SEQ ID NO: 534465 - RNA, 18 nt, Artificial Sequence
  Synthetic
aaucaguuaaauuucucc

SEQ ID NO: 534466 - RNA, 19 nt, Artificial Sequence
  Synthetic
gaaucaguuaaauuucucc

SEQ ID NO: 534467 - RNA, 20 nt, Artificial Sequence
  Synthetic
ggaaucaguuaaauuucucc

SEQ ID NO: 534468 - RNA, 21 nt, Artificial Sequence
  Synthetic
aggaaucaguuaaauuucucc

SEQ ID NO: 534469 - RNA, 22 nt, Artificial Sequence
  Synthetic
caggaaucaguuaaauuucucc

SEQ ID NO: 534470 - RNA, 23 nt, Artificial Sequence
  Synthetic
acaggaaucaguuaaauuucucc

SEQ ID NO: 534471 - RNA, 24 nt, Artificial Sequence
  Synthetic
aacaggaaucaguuaaauuucucc

SEQ ID NO: 534472 - RNA, 18 nt, Artificial Sequence
  Synthetic
cagaggcgcaauuucucc

SEQ ID NO: 534473 - RNA, 19 nt, Artificial Sequence
  Synthetic
ucagaggcgcaauuucucc

SEQ ID NO: 534474 - RNA, 20 nt, Artificial Sequence
  Synthetic
uucagaggcgcaauuucucc

SEQ ID NO: 534475 - RNA, 21 nt, Artificial Sequence
  Synthetic
uuucagaggcgcaauuucucc

SEQ ID NO: 534476 - RNA, 22 nt, Artificial Sequence
  Synthetic
cuuucagaggcgcaauuucucc

SEQ ID NO: 534477 - RNA, 23 nt, Artificial Sequence
  Synthetic
ucuuucagaggcgcaauuucucc

SEQ ID NO: 534478 - RNA, 24 nt, Artificial Sequence
  Synthetic
cucuuucagaggcgcaauuucucc

SEQ ID NO: 534479 - RNA, 18 nt, Artificial Sequence
  Synthetic
ccuucccagacuuucucc

SEQ ID NO: 534480 - RNA, 19 nt, Artificial Sequence
  Synthetic
gccuucccagacuuucucc

SEQ ID NO: 534481 - RNA, 20 nt, Artificial Sequence
  Synthetic
ugccuucccagacuuucucc

SEQ ID NO: 534482 - RNA, 21 nt, Artificial Sequence
  Synthetic
augccuucccagacuuucucc

SEQ ID NO: 534483 - RNA, 22 nt, Artificial Sequence
  Synthetic
uaugccuucccagacuuucucc

SEQ ID NO: 534484 - RNA, 23 nt, Artificial Sequence
  Synthetic
uuaugccuucccagacuuucucc

SEQ ID NO: 534485 - RNA, 24 nt, Artificial Sequence
  Synthetic
uuuaugccuucccagacuuucucc

SEQ ID NO: 534486 - RNA, 18 nt, Artificial Sequence
  Synthetic
agcuaucuugcuuucucc

SEQ ID NO: 534487 - RNA, 19 nt, Artificial Sequence
  Synthetic
aagcuaucuugcuuucucc

SEQ ID NO: 534488 - RNA, 20 nt, Artificial Sequence
  Synthetic
aaagcuaucuugcuuucucc

SEQ ID NO: 534489 - RNA, 21 nt, Artificial Sequence
  Synthetic
aaaagcuaucuugcuuucucc

SEQ ID NO: 534490 - RNA, 22 nt, Artificial Sequence
  Synthetic
gaaaagcuaucuugcuuucucc

SEQ ID NO: 534491 - RNA, 23 nt, Artificial Sequence
  Synthetic
agaaaagcuaucuugcuuucucc

SEQ ID NO: 534492 - RNA, 24 nt, Artificial Sequence
  Synthetic
gagaaaagcuaucuugcuuucucc

SEQ ID NO: 534493 - RNA, 18 nt, Artificial Sequence
  Synthetic
uucagcucucuuuucucc

SEQ ID NO: 534494 - RNA, 19 nt, Artificial Sequence
  Synthetic
cuucagcucucuuuucucc

SEQ ID NO: 534495 - RNA, 20 nt, Artificial Sequence
  Synthetic
ccuucagcucucuuuucucc

SEQ ID NO: 534496 - RNA, 21 nt, Artificial Sequence
  Synthetic
uccuucagcucucuuuucucc

SEQ ID NO: 534497 - RNA, 22 nt, Artificial Sequence
  Synthetic
auccuucagcucucuuuucucc

SEQ ID NO: 534498 - RNA, 23 nt, Artificial Sequence
  Synthetic
uauccuucagcucucuuuucucc

SEQ ID NO: 534499 - RNA, 24 nt, Artificial Sequence
  Synthetic
auauccuucagcucucuuuucucc

SEQ ID NO: 534500 - RNA, 18 nt, Artificial Sequence
  Synthetic
ugaaauauuuuuuucucc

SEQ ID NO: 534501 - RNA, 19 nt, Artificial Sequence
  Synthetic
uugaaauauuuuuuucucc

SEQ ID NO: 534502 - RNA, 20 nt, Artificial Sequence
  Synthetic
guugaaauauuuuuuucucc

SEQ ID NO: 534503 - RNA, 21 nt, Artificial Sequence
  Synthetic
uguugaaauauuuuuuucucc

SEQ ID NO: 534504 - RNA, 22 nt, Artificial Sequence
  Synthetic
guguugaaauauuuuuuucucc

SEQ ID NO: 534505 - RNA, 23 nt, Artificial Sequence
  Synthetic
uguguugaaauauuuuuuucucc

SEQ ID NO: 534506 - RNA, 24 nt, Artificial Sequence
  Synthetic
guguguugaaauauuuuuuucucc

SEQ ID NO: 534507 - RNA, 18 nt, Artificial Sequence
  Synthetic
cagauggaagaaaagucc

SEQ ID NO: 534508 - RNA, 19 nt, Artificial Sequence
  Synthetic
ccagauggaagaaaagucc

SEQ ID NO: 534509 - RNA, 20 nt, Artificial Sequence
  Synthetic
gccagauggaagaaaagucc

SEQ ID NO: 534510 - RNA, 21 nt, Artificial Sequence
  Synthetic
ugccagauggaagaaaagucc

SEQ ID NO: 534511 - RNA, 22 nt, Artificial Sequence
  Synthetic
augccagauggaagaaaagucc

SEQ ID NO: 534512 - RNA, 23 nt, Artificial Sequence
  Synthetic
gaugccagauggaagaaaagucc

SEQ ID NO: 534513 - RNA, 24 nt, Artificial Sequence
  Synthetic
ugaugccagauggaagaaaagucc

SEQ ID NO: 534514 - RNA, 18 nt, Artificial Sequence
  Synthetic
cuguaauaugaaaagucc

SEQ ID NO: 534515 - RNA, 19 nt, Artificial Sequence
  Synthetic
ucuguaauaugaaaagucc

SEQ ID NO: 534516 - RNA, 20 nt, Artificial Sequence
  Synthetic
gucuguaauaugaaaagucc

SEQ ID NO: 534517 - RNA, 21 nt, Artificial Sequence
  Synthetic
agucuguaauaugaaaagucc

SEQ ID NO: 534518 - RNA, 22 nt, Artificial Sequence
  Synthetic
aagucuguaauaugaaaagucc

SEQ ID NO: 534519 - RNA, 23 nt, Artificial Sequence
  Synthetic
aaagucuguaauaugaaaagucc

SEQ ID NO: 534520 - RNA, 24 nt, Artificial Sequence
  Synthetic
gaaagucuguaauaugaaaagucc

SEQ ID NO: 534521 - RNA, 18 nt, Artificial Sequence
  Synthetic
uuugguaaauaaaagucc

SEQ ID NO: 534522 - RNA, 19 nt, Artificial Sequence
  Synthetic
cuuugguaaauaaaagucc

SEQ ID NO: 534523 - RNA, 20 nt, Artificial Sequence
  Synthetic
ccuuugguaaauaaaagucc

SEQ ID NO: 534524 - RNA, 21 nt, Artificial Sequence
  Synthetic
uccuuugguaaauaaaagucc

SEQ ID NO: 534525 - RNA, 22 nt, Artificial Sequence
  Synthetic
uuccuuugguaaauaaaagucc

SEQ ID NO: 534526 - RNA, 23 nt, Artificial Sequence
  Synthetic
uuuccuuugguaaauaaaagucc

SEQ ID NO: 534527 - RNA, 24 nt, Artificial Sequence
  Synthetic
guuuccuuugguaaauaaaagucc

SEQ ID NO: 534528 - RNA, 18 nt, Artificial Sequence
  Synthetic
uaugggauggccaagucc

SEQ ID NO: 534529 - RNA, 19 nt, Artificial Sequence
  Synthetic
cuaugggauggccaagucc

SEQ ID NO: 534530 - RNA, 20 nt, Artificial Sequence
  Synthetic
ccuaugggauggccaagucc

SEQ ID NO: 534531 - RNA, 21 nt, Artificial Sequence
  Synthetic
gccuaugggauggccaagucc

SEQ ID NO: 534532 - RNA, 22 nt, Artificial Sequence
  Synthetic
agccuaugggauggccaagucc

SEQ ID NO: 534533 - RNA, 23 nt, Artificial Sequence
  Synthetic
cagccuaugggauggccaagucc

SEQ ID NO: 534534 - RNA, 24 nt, Artificial Sequence
  Synthetic
gcagccuaugggauggccaagucc

SEQ ID NO: 534535 - RNA, 18 nt, Artificial Sequence
  Synthetic
ugguaucauuggaagucc

SEQ ID NO: 534536 - RNA, 19 nt, Artificial Sequence
  Synthetic
cugguaucauuggaagucc

SEQ ID NO: 534537 - RNA, 20 nt, Artificial Sequence
  Synthetic
acugguaucauuggaagucc

SEQ ID NO: 534538 - RNA, 21 nt, Artificial Sequence
  Synthetic
cacugguaucauuggaagucc

SEQ ID NO: 534539 - RNA, 22 nt, Artificial Sequence
  Synthetic
ucacugguaucauuggaagucc

SEQ ID NO: 534540 - RNA, 23 nt, Artificial Sequence
  Synthetic
aucacugguaucauuggaagucc

SEQ ID NO: 534541 - RNA, 24 nt, Artificial Sequence
  Synthetic
uaucacugguaucauuggaagucc

SEQ ID NO: 534542 - RNA, 18 nt, Artificial Sequence
  Synthetic
aaaaguuucaauaagucc

SEQ ID NO: 534543 - RNA, 19 nt, Artificial Sequence
  Synthetic
uaaaaguuucaauaagucc

SEQ ID NO: 534544 - RNA, 20 nt, Artificial Sequence
  Synthetic
auaaaaguuucaauaagucc

SEQ ID NO: 534545 - RNA, 21 nt, Artificial Sequence
  Synthetic
uauaaaaguuucaauaagucc

SEQ ID NO: 534546 - RNA, 22 nt, Artificial Sequence
  Synthetic
uuauaaaaguuucaauaagucc

SEQ ID NO: 534547 - RNA, 23 nt, Artificial Sequence
  Synthetic
uuuauaaaaguuucaauaagucc

SEQ ID NO: 534548 - RNA, 24 nt, Artificial Sequence
  Synthetic
uuuuauaaaaguuucaauaagucc

SEQ ID NO: 534549 - RNA, 18 nt, Artificial Sequence
  Synthetic
uauuggagagauaagucc

SEQ ID NO: 534550 - RNA, 19 nt, Artificial Sequence
  Synthetic
uuauuggagagauaagucc

SEQ ID NO: 534551 - RNA, 20 nt, Artificial Sequence
  Synthetic
uuuauuggagagauaagucc

SEQ ID NO: 534552 - RNA, 21 nt, Artificial Sequence
  Synthetic
cuuuauuggagagauaagucc

SEQ ID NO: 534553 - RNA, 22 nt, Artificial Sequence
  Synthetic
ucuuuauuggagagauaagucc

SEQ ID NO: 534554 - RNA, 23 nt, Artificial Sequence
  Synthetic
cucuuuauuggagagauaagucc

SEQ ID NO: 534555 - RNA, 24 nt, Artificial Sequence
  Synthetic
gcucuuuauuggagagauaagucc

SEQ ID NO: 534556 - RNA, 18 nt, Artificial Sequence
  Synthetic
agacuacuguaacagucc

SEQ ID NO: 534557 - RNA, 19 nt, Artificial Sequence
  Synthetic
aagacuacuguaacagucc

SEQ ID NO: 534558 - RNA, 20 nt, Artificial Sequence
  Synthetic
uaagacuacuguaacagucc

SEQ ID NO: 534559 - RNA, 21 nt, Artificial Sequence
  Synthetic
auaagacuacuguaacagucc

SEQ ID NO: 534560 - RNA, 22 nt, Artificial Sequence
  Synthetic
uauaagacuacuguaacagucc

SEQ ID NO: 534561 - RNA, 23 nt, Artificial Sequence
  Synthetic
auauaagacuacuguaacagucc

SEQ ID NO: 534562 - RNA, 24 nt, Artificial Sequence
  Synthetic
aauauaagacuacuguaacagucc

SEQ ID NO: 534563 - RNA, 18 nt, Artificial Sequence
  Synthetic
cauuuugugucacagucc

SEQ ID NO: 534564 - RNA, 19 nt, Artificial Sequence
  Synthetic
gcauuuugugucacagucc

SEQ ID NO: 534565 - RNA, 20 nt, Artificial Sequence
  Synthetic
agcauuuugugucacagucc

SEQ ID NO: 534566 - RNA, 21 nt, Artificial Sequence
  Synthetic
uagcauuuugugucacagucc

SEQ ID NO: 534567 - RNA, 22 nt, Artificial Sequence
  Synthetic
auagcauuuugugucacagucc

SEQ ID NO: 534568 - RNA, 23 nt, Artificial Sequence
  Synthetic
aauagcauuuugugucacagucc

SEQ ID NO: 534569 - RNA, 24 nt, Artificial Sequence
  Synthetic
aaauagcauuuugugucacagucc

SEQ ID NO: 534570 - RNA, 18 nt, Artificial Sequence
  Synthetic
ucagccagauggcagucc

SEQ ID NO: 534571 - RNA, 19 nt, Artificial Sequence
  Synthetic
aucagccagauggcagucc

SEQ ID NO: 534572 - RNA, 20 nt, Artificial Sequence
  Synthetic
caucagccagauggcagucc

SEQ ID NO: 534573 - RNA, 21 nt, Artificial Sequence
  Synthetic
ucaucagccagauggcagucc

SEQ ID NO: 534574 - RNA, 22 nt, Artificial Sequence
  Synthetic
gucaucagccagauggcagucc

SEQ ID NO: 534575 - RNA, 23 nt, Artificial Sequence
  Synthetic
agucaucagccagauggcagucc

SEQ ID NO: 534576 - RNA, 24 nt, Artificial Sequence
  Synthetic
aagucaucagccagauggcagucc

SEQ ID NO: 534577 - RNA, 18 nt, Artificial Sequence
  Synthetic
uaaauagguuggcagucc

SEQ ID NO: 534578 - RNA, 19 nt, Artificial Sequence
  Synthetic
auaaauagguuggcagucc

SEQ ID NO: 534579 - RNA, 20 nt, Artificial Sequence
  Synthetic
aauaaauagguuggcagucc

SEQ ID NO: 534580 - RNA, 21 nt, Artificial Sequence
  Synthetic
caauaaauagguuggcagucc

SEQ ID NO: 534581 - RNA, 22 nt, Artificial Sequence
  Synthetic
acaauaaauagguuggcagucc

SEQ ID NO: 534582 - RNA, 23 nt, Artificial Sequence
  Synthetic
uacaauaaauagguuggcagucc

SEQ ID NO: 534583 - RNA, 24 nt, Artificial Sequence
  Synthetic
guacaauaaauagguuggcagucc

SEQ ID NO: 534584 - RNA, 21 nt, Artificial Sequence
  Synthetic
acaacauccauucugcagucc

SEQ ID NO: 534585 - RNA, 22 nt, Artificial Sequence
  Synthetic
cacaacauccauucugcagucc

SEQ ID NO: 534586 - RNA, 23 nt, Artificial Sequence
  Synthetic
acacaacauccauucugcagucc

SEQ ID NO: 534587 - RNA, 24 nt, Artificial Sequence
  Synthetic
aacacaacauccauucugcagucc

SEQ ID NO: 534588 - RNA, 18 nt, Artificial Sequence
  Synthetic
uccaauaguggucagucc

SEQ ID NO: 534589 - RNA, 19 nt, Artificial Sequence
  Synthetic
cuccaauaguggucagucc

SEQ ID NO: 534590 - RNA, 20 nt, Artificial Sequence
  Synthetic
gcuccaauaguggucagucc

SEQ ID NO: 534591 - RNA, 21 nt, Artificial Sequence
  Synthetic
ggcuccaauaguggucagucc

SEQ ID NO: 534592 - RNA, 22 nt, Artificial Sequence
  Synthetic
aggcuccaauaguggucagucc

SEQ ID NO: 534593 - RNA, 23 nt, Artificial Sequence
  Synthetic
caggcuccaauaguggucagucc

SEQ ID NO: 534594 - RNA, 24 nt, Artificial Sequence
  Synthetic
acaggcuccaauaguggucagucc

SEQ ID NO: 534595 - RNA, 18 nt, Artificial Sequence
  Synthetic
gagaauaaagaagagucc

SEQ ID NO: 534596 - RNA, 19 nt, Artificial Sequence
  Synthetic
ugagaauaaagaagagucc

SEQ ID NO: 534597 - RNA, 20 nt, Artificial Sequence
  Synthetic
uugagaauaaagaagagucc

SEQ ID NO: 534598 - RNA, 21 nt, Artificial Sequence
  Synthetic
uuugagaauaaagaagagucc

SEQ ID NO: 534599 - RNA, 22 nt, Artificial Sequence
  Synthetic
cuuugagaauaaagaagagucc

SEQ ID NO: 534600 - RNA, 23 nt, Artificial Sequence
  Synthetic
ucuuugagaauaaagaagagucc

SEQ ID NO: 534601 - RNA, 24 nt, Artificial Sequence
  Synthetic
uucuuugagaauaaagaagagucc

SEQ ID NO: 534602 - RNA, 18 nt, Artificial Sequence
  Synthetic
ccuuaucuaacagagucc

SEQ ID NO: 534603 - RNA, 19 nt, Artificial Sequence
  Synthetic
gccuuaucuaacagagucc

SEQ ID NO: 534604 - RNA, 20 nt, Artificial Sequence
  Synthetic
ugccuuaucuaacagagucc

SEQ ID NO: 534605 - RNA, 21 nt, Artificial Sequence
  Synthetic
uugccuuaucuaacagagucc

SEQ ID NO: 534606 - RNA, 22 nt, Artificial Sequence
  Synthetic
uuugccuuaucuaacagagucc

SEQ ID NO: 534607 - RNA, 23 nt, Artificial Sequence
  Synthetic
uuuugccuuaucuaacagagucc

SEQ ID NO: 534608 - RNA, 24 nt, Artificial Sequence
  Synthetic
guuuugccuuaucuaacagagucc

SEQ ID NO: 534609 - RNA, 18 nt, Artificial Sequence
  Synthetic
caaauuuguugagagucc

SEQ ID NO: 534610 - RNA, 19 nt, Artificial Sequence
  Synthetic
gcaaauuuguugagagucc

SEQ ID NO: 534611 - RNA, 20 nt, Artificial Sequence
  Synthetic
agcaaauuuguugagagucc

SEQ ID NO: 534612 - RNA, 21 nt, Artificial Sequence
  Synthetic
aagcaaauuuguugagagucc

SEQ ID NO: 534613 - RNA, 22 nt, Artificial Sequence
  Synthetic
aaagcaaauuuguugagagucc

SEQ ID NO: 534614 - RNA, 23 nt, Artificial Sequence
  Synthetic
caaagcaaauuuguugagagucc

SEQ ID NO: 534615 - RNA, 24 nt, Artificial Sequence
  Synthetic
gcaaagcaaauuuguugagagucc

SEQ ID NO: 534616 - RNA, 18 nt, Artificial Sequence
  Synthetic
cucccugaacuagagucc

SEQ ID NO: 534617 - RNA, 19 nt, Artificial Sequence
  Synthetic
acucccugaacuagagucc

SEQ ID NO: 534618 - RNA, 20 nt, Artificial Sequence
  Synthetic
uacucccugaacuagagucc

SEQ ID NO: 534619 - RNA, 21 nt, Artificial Sequence
  Synthetic
auacucccugaacuagagucc

SEQ ID NO: 534620 - RNA, 22 nt, Artificial Sequence
  Synthetic
aauacucccugaacuagagucc

SEQ ID NO: 534621 - RNA, 23 nt, Artificial Sequence
  Synthetic
aaauacucccugaacuagagucc

SEQ ID NO: 534622 - RNA, 24 nt, Artificial Sequence
  Synthetic
uaaauacucccugaacuagagucc

SEQ ID NO: 534623 - RNA, 18 nt, Artificial Sequence
  Synthetic
ggggaccccugggagucc

SEQ ID NO: 534624 - RNA, 19 nt, Artificial Sequence
  Synthetic
uggggaccccugggagucc

SEQ ID NO: 534625 - RNA, 20 nt, Artificial Sequence
  Synthetic
cuggggaccccugggagucc

SEQ ID NO: 534626 - RNA, 21 nt, Artificial Sequence
  Synthetic
ucuggggaccccugggagucc

SEQ ID NO: 534627 - RNA, 22 nt, Artificial Sequence
  Synthetic
gucuggggaccccugggagucc

SEQ ID NO: 534628 - RNA, 23 nt, Artificial Sequence
  Synthetic
ggucuggggaccccugggagucc

SEQ ID NO: 534629 - RNA, 24 nt, Artificial Sequence
  Synthetic
uggucuggggaccccugggagucc

SEQ ID NO: 534630 - RNA, 18 nt, Artificial Sequence
  Synthetic
caaaauuggcuggagucc

SEQ ID NO: 534631 - RNA, 19 nt, Artificial Sequence
  Synthetic
ucaaaauuggcuggagucc

SEQ ID NO: 534632 - RNA, 20 nt, Artificial Sequence
  Synthetic
gucaaaauuggcuggagucc

SEQ ID NO: 534633 - RNA, 21 nt, Artificial Sequence
  Synthetic
ugucaaaauuggcuggagucc

SEQ ID NO: 534634 - RNA, 22 nt, Artificial Sequence
  Synthetic
cugucaaaauuggcuggagucc

SEQ ID NO: 534635 - RNA, 23 nt, Artificial Sequence
  Synthetic
gcugucaaaauuggcuggagucc

SEQ ID NO: 534636 - RNA, 24 nt, Artificial Sequence
  Synthetic
ugcugucaaaauuggcuggagucc

SEQ ID NO: 534637 - RNA, 18 nt, Artificial Sequence
  Synthetic
auuuuaugaacauagucc

SEQ ID NO: 534638 - RNA, 19 nt, Artificial Sequence
  Synthetic
uauuuuaugaacauagucc

SEQ ID NO: 534639 - RNA, 20 nt, Artificial Sequence
  Synthetic
uuauuuuaugaacauagucc

SEQ ID NO: 534640 - RNA, 21 nt, Artificial Sequence
  Synthetic
auuauuuuaugaacauagucc

SEQ ID NO: 534641 - RNA, 22 nt, Artificial Sequence
  Synthetic
uauuauuuuaugaacauagucc

SEQ ID NO: 534642 - RNA, 23 nt, Artificial Sequence
  Synthetic
cuauuauuuuaugaacauagucc

SEQ ID NO: 534643 - RNA, 24 nt, Artificial Sequence
  Synthetic
ucuauuauuuuaugaacauagucc

SEQ ID NO: 534644 - RNA, 18 nt, Artificial Sequence
  Synthetic
acaguguucucauagucc

SEQ ID NO: 534645 - RNA, 19 nt, Artificial Sequence
  Synthetic
aacaguguucucauagucc

SEQ ID NO: 534646 - RNA, 20 nt, Artificial Sequence
  Synthetic
aaacaguguucucauagucc

SEQ ID NO: 534647 - RNA, 21 nt, Artificial Sequence
  Synthetic
gaaacaguguucucauagucc

SEQ ID NO: 534648 - RNA, 22 nt, Artificial Sequence
  Synthetic
ugaaacaguguucucauagucc

SEQ ID NO: 534649 - RNA, 23 nt, Artificial Sequence
  Synthetic
augaaacaguguucucauagucc

SEQ ID NO: 534650 - RNA, 24 nt, Artificial Sequence
  Synthetic
caugaaacaguguucucauagucc

SEQ ID NO: 534651 - RNA, 18 nt, Artificial Sequence
  Synthetic
ugcauucucagauagucc

SEQ ID NO: 534652 - RNA, 19 nt, Artificial Sequence
  Synthetic
cugcauucucagauagucc

SEQ ID NO: 534653 - RNA, 20 nt, Artificial Sequence
  Synthetic
ucugcauucucagauagucc

SEQ ID NO: 534654 - RNA, 21 nt, Artificial Sequence
  Synthetic
cucugcauucucagauagucc

SEQ ID NO: 534655 - RNA, 22 nt, Artificial Sequence
  Synthetic
ccucugcauucucagauagucc

SEQ ID NO: 534656 - RNA, 23 nt, Artificial Sequence
  Synthetic
gccucugcauucucagauagucc

SEQ ID NO: 534657 - RNA, 24 nt, Artificial Sequence
  Synthetic
ugccucugcauucucagauagucc

SEQ ID NO: 534658 - RNA, 18 nt, Artificial Sequence
  Synthetic
uccuauucaggcuagucc

SEQ ID NO: 534659 - RNA, 19 nt, Artificial Sequence
  Synthetic
uuccuauucaggcuagucc

SEQ ID NO: 534660 - RNA, 20 nt, Artificial Sequence
  Synthetic
guuccuauucaggcuagucc

SEQ ID NO: 534661 - RNA, 21 nt, Artificial Sequence
  Synthetic
aguuccuauucaggcuagucc

SEQ ID NO: 534662 - RNA, 22 nt, Artificial Sequence
  Synthetic
aaguuccuauucaggcuagucc

SEQ ID NO: 534663 - RNA, 23 nt, Artificial Sequence
  Synthetic
caaguuccuauucaggcuagucc

SEQ ID NO: 534664 - RNA, 24 nt, Artificial Sequence
  Synthetic
acaaguuccuauucaggcuagucc

SEQ ID NO: 534665 - RNA, 18 nt, Artificial Sequence
  Synthetic
uaaguguguuauuagucc

SEQ ID NO: 534666 - RNA, 19 nt, Artificial Sequence
  Synthetic
cuaaguguguuauuagucc

SEQ ID NO: 534667 - RNA, 20 nt, Artificial Sequence
  Synthetic
gcuaaguguguuauuagucc

SEQ ID NO: 534668 - RNA, 21 nt, Artificial Sequence
  Synthetic
ggcuaaguguguuauuagucc

SEQ ID NO: 534669 - RNA, 22 nt, Artificial Sequence
  Synthetic
aggcuaaguguguuauuagucc

SEQ ID NO: 534670 - RNA, 23 nt, Artificial Sequence
  Synthetic
aaggcuaaguguguuauuagucc

SEQ ID NO: 534671 - RNA, 24 nt, Artificial Sequence
  Synthetic
gaaggcuaaguguguuauuagucc

SEQ ID NO: 534672 - RNA, 18 nt, Artificial Sequence
  Synthetic
caacucuuuacaacgucc

SEQ ID NO: 534673 - RNA, 19 nt, Artificial Sequence
  Synthetic
ccaacucuuuacaacgucc

SEQ ID NO: 534674 - RNA, 20 nt, Artificial Sequence
  Synthetic
cccaacucuuuacaacgucc

SEQ ID NO: 534675 - RNA, 21 nt, Artificial Sequence
  Synthetic
gcccaacucuuuacaacgucc

SEQ ID NO: 534676 - RNA, 22 nt, Artificial Sequence
  Synthetic
agcccaacucuuuacaacgucc

SEQ ID NO: 534677 - RNA, 23 nt, Artificial Sequence
  Synthetic
aagcccaacucuuuacaacgucc

SEQ ID NO: 534678 - RNA, 24 nt, Artificial Sequence
  Synthetic
aaagcccaacucuuuacaacgucc

SEQ ID NO: 534679 - RNA, 18 nt, Artificial Sequence
  Synthetic
cauaacccccacacgucc

SEQ ID NO: 534680 - RNA, 19 nt, Artificial Sequence
  Synthetic
ccauaacccccacacgucc

SEQ ID NO: 534681 - RNA, 20 nt, Artificial Sequence
  Synthetic
cccauaacccccacacgucc

SEQ ID NO: 534682 - RNA, 21 nt, Artificial Sequence
  Synthetic
ucccauaacccccacacgucc

SEQ ID NO: 534683 - RNA, 22 nt, Artificial Sequence
  Synthetic
uucccauaacccccacacgucc

SEQ ID NO: 534684 - RNA, 23 nt, Artificial Sequence
  Synthetic
guucccauaacccccacacgucc

SEQ ID NO: 534685 - RNA, 24 nt, Artificial Sequence
  Synthetic
uguucccauaacccccacacgucc

SEQ ID NO: 534686 - RNA, 18 nt, Artificial Sequence
  Synthetic
gcagaggaccuuacgucc

SEQ ID NO: 534687 - RNA, 19 nt, Artificial Sequence
  Synthetic
ugcagaggaccuuacgucc

SEQ ID NO: 534688 - RNA, 20 nt, Artificial Sequence
  Synthetic
augcagaggaccuuacgucc

SEQ ID NO: 534689 - RNA, 21 nt, Artificial Sequence
  Synthetic
aaugcagaggaccuuacgucc

SEQ ID NO: 534690 - RNA, 22 nt, Artificial Sequence
  Synthetic
aaaugcagaggaccuuacgucc

SEQ ID NO: 534691 - RNA, 23 nt, Artificial Sequence
  Synthetic
aaaaugcagaggaccuuacgucc

SEQ ID NO: 534692 - RNA, 24 nt, Artificial Sequence
  Synthetic
gaaaaugcagaggaccuuacgucc

SEQ ID NO: 534693 - RNA, 18 nt, Artificial Sequence
  Synthetic
uccugcagauaaaggucc

SEQ ID NO: 534694 - RNA, 19 nt, Artificial Sequence
  Synthetic
guccugcagauaaaggucc

SEQ ID NO: 534695 - RNA, 20 nt, Artificial Sequence
  Synthetic
uguccugcagauaaaggucc

SEQ ID NO: 534696 - RNA, 21 nt, Artificial Sequence
  Synthetic
uuguccugcagauaaaggucc

SEQ ID NO: 534697 - RNA, 22 nt, Artificial Sequence
  Synthetic
guuguccugcagauaaaggucc

SEQ ID NO: 534698 - RNA, 23 nt, Artificial Sequence
  Synthetic
aguuguccugcagauaaaggucc

SEQ ID NO: 534699 - RNA, 24 nt, Artificial Sequence
  Synthetic
aaguuguccugcagauaaaggucc

SEQ ID NO: 534700 - RNA, 18 nt, Artificial Sequence
  Synthetic
gaguaaaugucaaggucc

SEQ ID NO: 534701 - RNA, 19 nt, Artificial Sequence
  Synthetic
ugaguaaaugucaaggucc

SEQ ID NO: 534702 - RNA, 20 nt, Artificial Sequence
  Synthetic
gugaguaaaugucaaggucc

SEQ ID NO: 534703 - RNA, 21 nt, Artificial Sequence
  Synthetic
agugaguaaaugucaaggucc

SEQ ID NO: 534704 - RNA, 22 nt, Artificial Sequence
  Synthetic
aagugaguaaaugucaaggucc

SEQ ID NO: 534705 - RNA, 23 nt, Artificial Sequence
  Synthetic
aaagugaguaaaugucaaggucc

SEQ ID NO: 534706 - RNA, 24 nt, Artificial Sequence
  Synthetic
aaaagugaguaaaugucaaggucc

SEQ ID NO: 534707 - RNA, 18 nt, Artificial Sequence
  Synthetic
uugaacaucuugaggucc

SEQ ID NO: 534708 - RNA, 19 nt, Artificial Sequence
  Synthetic
cuugaacaucuugaggucc

SEQ ID NO: 534709 - RNA, 20 nt, Artificial Sequence
  Synthetic
gcuugaacaucuugaggucc

SEQ ID NO: 534710 - RNA, 21 nt, Artificial Sequence
  Synthetic
ugcuugaacaucuugaggucc

SEQ ID NO: 534711 - RNA, 22 nt, Artificial Sequence
  Synthetic
augcuugaacaucuugaggucc

SEQ ID NO: 534712 - RNA, 23 nt, Artificial Sequence
  Synthetic
gaugcuugaacaucuugaggucc

SEQ ID NO: 534713 - RNA, 24 nt, Artificial Sequence
  Synthetic
ggaugcuugaacaucuugaggucc

SEQ ID NO: 534714 - RNA, 18 nt, Artificial Sequence
  Synthetic
aggagcuaugcuaggucc

SEQ ID NO: 534715 - RNA, 19 nt, Artificial Sequence
  Synthetic
caggagcuaugcuaggucc

SEQ ID NO: 534716 - RNA, 20 nt, Artificial Sequence
  Synthetic
ccaggagcuaugcuaggucc

SEQ ID NO: 534717 - RNA, 21 nt, Artificial Sequence
  Synthetic
gccaggagcuaugcuaggucc

SEQ ID NO: 534718 - RNA, 22 nt, Artificial Sequence
  Synthetic
ugccaggagcuaugcuaggucc

SEQ ID NO: 534719 - RNA, 23 nt, Artificial Sequence
  Synthetic
uugccaggagcuaugcuaggucc

SEQ ID NO: 534720 - RNA, 24 nt, Artificial Sequence
  Synthetic
uuugccaggagcuaugcuaggucc

SEQ ID NO: 534721 - RNA, 18 nt, Artificial Sequence
  Synthetic
uucugcugcauuaggucc

SEQ ID NO: 534722 - RNA, 19 nt, Artificial Sequence
  Synthetic
guucugcugcauuaggucc

SEQ ID NO: 534723 - RNA, 20 nt, Artificial Sequence
  Synthetic
aguucugcugcauuaggucc

SEQ ID NO: 534724 - RNA, 21 nt, Artificial Sequence
  Synthetic
aaguucugcugcauuaggucc

SEQ ID NO: 534725 - RNA, 22 nt, Artificial Sequence
  Synthetic
caaguucugcugcauuaggucc

SEQ ID NO: 534726 - RNA, 23 nt, Artificial Sequence
  Synthetic
gcaaguucugcugcauuaggucc

SEQ ID NO: 534727 - RNA, 24 nt, Artificial Sequence
  Synthetic
ugcaaguucugcugcauuaggucc

SEQ ID NO: 534728 - RNA, 18 nt, Artificial Sequence
  Synthetic
uaaucauuuuaugggucc

SEQ ID NO: 534729 - RNA, 19 nt, Artificial Sequence
  Synthetic
auaaucauuuuaugggucc

SEQ ID NO: 534730 - RNA, 20 nt, Artificial Sequence
  Synthetic
uauaaucauuuuaugggucc

SEQ ID NO: 534731 - RNA, 21 nt, Artificial Sequence
  Synthetic
auauaaucauuuuaugggucc

SEQ ID NO: 534732 - RNA, 22 nt, Artificial Sequence
  Synthetic
uauauaaucauuuuaugggucc

SEQ ID NO: 534733 - RNA, 23 nt, Artificial Sequence
  Synthetic
auauauaaucauuuuaugggucc

SEQ ID NO: 534734 - RNA, 24 nt, Artificial Sequence
  Synthetic
gauauauaaucauuuuaugggucc

SEQ ID NO: 534735 - RNA, 18 nt, Artificial Sequence
  Synthetic
aauuucuuucaauggucc

SEQ ID NO: 534736 - RNA, 19 nt, Artificial Sequence
  Synthetic
gaauuucuuucaauggucc

SEQ ID NO: 534737 - RNA, 20 nt, Artificial Sequence
  Synthetic
agaauuucuuucaauggucc

SEQ ID NO: 534738 - RNA, 21 nt, Artificial Sequence
  Synthetic
gagaauuucuuucaauggucc

SEQ ID NO: 534739 - RNA, 22 nt, Artificial Sequence
  Synthetic
ugagaauuucuuucaauggucc

SEQ ID NO: 534740 - RNA, 23 nt, Artificial Sequence
  Synthetic
uugagaauuucuuucaauggucc

SEQ ID NO: 534741 - RNA, 24 nt, Artificial Sequence
  Synthetic
uuugagaauuucuuucaauggucc

SEQ ID NO: 534742 - RNA, 18 nt, Artificial Sequence
  Synthetic
uaacauuuuggcuggucc

SEQ ID NO: 534743 - RNA, 19 nt, Artificial Sequence
  Synthetic
guaacauuuuggcuggucc

SEQ ID NO: 534744 - RNA, 20 nt, Artificial Sequence
  Synthetic
gguaacauuuuggcuggucc

SEQ ID NO: 534745 - RNA, 21 nt, Artificial Sequence
  Synthetic
agguaacauuuuggcuggucc

SEQ ID NO: 534746 - RNA, 22 nt, Artificial Sequence
  Synthetic
uagguaacauuuuggcuggucc

SEQ ID NO: 534747 - RNA, 23 nt, Artificial Sequence
  Synthetic
auagguaacauuuuggcuggucc

SEQ ID NO: 534748 - RNA, 24 nt, Artificial Sequence
  Synthetic
gauagguaacauuuuggcuggucc

SEQ ID NO: 534749 - RNA, 18 nt, Artificial Sequence
  Synthetic
uuucuuaaaauguggucc

SEQ ID NO: 534750 - RNA, 19 nt, Artificial Sequence
  Synthetic
auuucuuaaaauguggucc

SEQ ID NO: 534751 - RNA, 20 nt, Artificial Sequence
  Synthetic
uauuucuuaaaauguggucc

SEQ ID NO: 534752 - RNA, 21 nt, Artificial Sequence
  Synthetic
auauuucuuaaaauguggucc

SEQ ID NO: 534753 - RNA, 22 nt, Artificial Sequence
  Synthetic
gauauuucuuaaaauguggucc

SEQ ID NO: 534754 - RNA, 23 nt, Artificial Sequence
  Synthetic
cgauauuucuuaaaauguggucc

SEQ ID NO: 534755 - RNA, 24 nt, Artificial Sequence
  Synthetic
ucgauauuucuuaaaauguggucc

SEQ ID NO: 534756 - RNA, 18 nt, Artificial Sequence
  Synthetic
auuucacguuuguggucc

SEQ ID NO: 534757 - RNA, 19 nt, Artificial Sequence
  Synthetic
gauuucacguuuguggucc

SEQ ID NO: 534758 - RNA, 20 nt, Artificial Sequence
  Synthetic
agauuucacguuuguggucc

SEQ ID NO: 534759 - RNA, 21 nt, Artificial Sequence
  Synthetic
aagauuucacguuuguggucc

SEQ ID NO: 534760 - RNA, 22 nt, Artificial Sequence
  Synthetic
uaagauuucacguuuguggucc

SEQ ID NO: 534761 - RNA, 23 nt, Artificial Sequence
  Synthetic
cuaagauuucacguuuguggucc

SEQ ID NO: 534762 - RNA, 24 nt, Artificial Sequence
  Synthetic
ucuaagauuucacguuuguggucc

SEQ ID NO: 534763 - RNA, 18 nt, Artificial Sequence
  Synthetic
uuuuuuuuuuuuuggucc

SEQ ID NO: 534764 - RNA, 19 nt, Artificial Sequence
  Synthetic
uuuuuuuuuuuuuuggucc

SEQ ID NO: 534765 - RNA, 20 nt, Artificial Sequence
  Synthetic
uuuuuuuuuuuuuuuggucc

SEQ ID NO: 534766 - RNA, 21 nt, Artificial Sequence
  Synthetic
uuuuuuuuuuuuuuuuggucc

SEQ ID NO: 534767 - RNA, 22 nt, Artificial Sequence
  Synthetic
uuuuuuuuuuuuuuuuuggucc

SEQ ID NO: 534768 - RNA, 23 nt, Artificial Sequence
  Synthetic
cuuuuuuuuuuuuuuuuuggucc

SEQ ID NO: 534769 - RNA, 24 nt, Artificial Sequence
  Synthetic
acuuuuuuuuuuuuuuuuuggucc

SEQ ID NO: 534770 - RNA, 18 nt, Artificial Sequence
  Synthetic
ugauacaggaaaaugucc

SEQ ID NO: 534771 - RNA, 19 nt, Artificial Sequence
  Synthetic
cugauacaggaaaaugucc

SEQ ID NO: 534772 - RNA, 20 nt, Artificial Sequence
  Synthetic
acugauacaggaaaaugucc

SEQ ID NO: 534773 - RNA, 21 nt, Artificial Sequence
  Synthetic
uacugauacaggaaaaugucc

SEQ ID NO: 534774 - RNA, 22 nt, Artificial Sequence
  Synthetic
guacugauacaggaaaaugucc

SEQ ID NO: 534775 - RNA, 23 nt, Artificial Sequence
  Synthetic
uguacugauacaggaaaaugucc

SEQ ID NO: 534776 - RNA, 24 nt, Artificial Sequence
  Synthetic
auguacugauacaggaaaaugucc

SEQ ID NO: 534777 - RNA, 18 nt, Artificial Sequence
  Synthetic
cuccugaaccaaaugucc

SEQ ID NO: 534778 - RNA, 19 nt, Artificial Sequence
  Synthetic
ucuccugaaccaaaugucc

SEQ ID NO: 534779 - RNA, 20 nt, Artificial Sequence
  Synthetic
cucuccugaaccaaaugucc

SEQ ID NO: 534780 - RNA, 21 nt, Artificial Sequence
  Synthetic
acucuccugaaccaaaugucc

SEQ ID NO: 534781 - RNA, 22 nt, Artificial Sequence
  Synthetic
uacucuccugaaccaaaugucc

SEQ ID NO: 534782 - RNA, 23 nt, Artificial Sequence
  Synthetic
cuacucuccugaaccaaaugucc

SEQ ID NO: 534783 - RNA, 24 nt, Artificial Sequence
  Synthetic
acuacucuccugaaccaaaugucc

SEQ ID NO: 534784 - RNA, 18 nt, Artificial Sequence
  Synthetic
ugaacaaucagaaugucc

SEQ ID NO: 534785 - RNA, 19 nt, Artificial Sequence
  Synthetic
gugaacaaucagaaugucc

SEQ ID NO: 534786 - RNA, 20 nt, Artificial Sequence
  Synthetic
agugaacaaucagaaugucc

SEQ ID NO: 534787 - RNA, 21 nt, Artificial Sequence
  Synthetic
uagugaacaaucagaaugucc

SEQ ID NO: 534788 - RNA, 22 nt, Artificial Sequence
  Synthetic
uuagugaacaaucagaaugucc

SEQ ID NO: 534789 - RNA, 23 nt, Artificial Sequence
  Synthetic
guuagugaacaaucagaaugucc

SEQ ID NO: 534790 - RNA, 24 nt, Artificial Sequence
  Synthetic
uguuagugaacaaucagaaugucc

SEQ ID NO: 534791 - RNA, 18 nt, Artificial Sequence
  Synthetic
aguaucauuagaaugucc

SEQ ID NO: 534792 - RNA, 19 nt, Artificial Sequence
  Synthetic
caguaucauuagaaugucc

SEQ ID NO: 534793 - RNA, 20 nt, Artificial Sequence
  Synthetic
acaguaucauuagaaugucc

SEQ ID NO: 534794 - RNA, 21 nt, Artificial Sequence
  Synthetic
aacaguaucauuagaaugucc

SEQ ID NO: 534795 - RNA, 22 nt, Artificial Sequence
  Synthetic
caacaguaucauuagaaugucc

SEQ ID NO: 534796 - RNA, 23 nt, Artificial Sequence
  Synthetic
acaacaguaucauuagaaugucc

SEQ ID NO: 534797 - RNA, 24 nt, Artificial Sequence
  Synthetic
aacaacaguaucauuagaaugucc

SEQ ID NO: 534798 - RNA, 18 nt, Artificial Sequence
  Synthetic
aggguucagaacaugucc

SEQ ID NO: 534799 - RNA, 19 nt, Artificial Sequence
  Synthetic
gaggguucagaacaugucc

SEQ ID NO: 534800 - RNA, 20 nt, Artificial Sequence
  Synthetic
ggaggguucagaacaugucc

SEQ ID NO: 534801 - RNA, 21 nt, Artificial Sequence
  Synthetic
gggaggguucagaacaugucc

SEQ ID NO: 534802 - RNA, 22 nt, Artificial Sequence
  Synthetic
agggaggguucagaacaugucc

SEQ ID NO: 534803 - RNA, 23 nt, Artificial Sequence
  Synthetic
aagggaggguucagaacaugucc

SEQ ID NO: 534804 - RNA, 24 nt, Artificial Sequence
  Synthetic
gaagggaggguucagaacaugucc

SEQ ID NO: 534805 - RNA, 18 nt, Artificial Sequence
  Synthetic
cugaauagucacaugucc

SEQ ID NO: 534806 - RNA, 19 nt, Artificial Sequence
  Synthetic
ccugaauagucacaugucc

SEQ ID NO: 534807 - RNA, 20 nt, Artificial Sequence
  Synthetic
cccugaauagucacaugucc

SEQ ID NO: 534808 - RNA, 21 nt, Artificial Sequence
  Synthetic
ccccugaauagucacaugucc

SEQ ID NO: 534809 - RNA, 22 nt, Artificial Sequence
  Synthetic
uccccugaauagucacaugucc

SEQ ID NO: 534810 - RNA, 23 nt, Artificial Sequence
  Synthetic
uuccccugaauagucacaugucc

SEQ ID NO: 534811 - RNA, 24 nt, Artificial Sequence
  Synthetic
uuuccccugaauagucacaugucc

SEQ ID NO: 534812 - RNA, 18 nt, Artificial Sequence
  Synthetic
auaauuaucaucaugucc

SEQ ID NO: 534813 - RNA, 19 nt, Artificial Sequence
  Synthetic
gauaauuaucaucaugucc

SEQ ID NO: 534814 - RNA, 20 nt, Artificial Sequence
  Synthetic
agauaauuaucaucaugucc

SEQ ID NO: 534815 - RNA, 21 nt, Artificial Sequence
  Synthetic
gagauaauuaucaucaugucc

SEQ ID NO: 534816 - RNA, 22 nt, Artificial Sequence
  Synthetic
ugagauaauuaucaucaugucc

SEQ ID NO: 534817 - RNA, 23 nt, Artificial Sequence
  Synthetic
cugagauaauuaucaucaugucc

SEQ ID NO: 534818 - RNA, 24 nt, Artificial Sequence
  Synthetic
ccugagauaauuaucaucaugucc

SEQ ID NO: 534819 - RNA, 18 nt, Artificial Sequence
  Synthetic
uuucuuucauugaugucc

SEQ ID NO: 534820 - RNA, 19 nt, Artificial Sequence
  Synthetic
cuuucuuucauugaugucc

SEQ ID NO: 534821 - RNA, 20 nt, Artificial Sequence
  Synthetic
acuuucuuucauugaugucc

SEQ ID NO: 534822 - RNA, 21 nt, Artificial Sequence
  Synthetic
cacuuucuuucauugaugucc

SEQ ID NO: 534823 - RNA, 22 nt, Artificial Sequence
  Synthetic
acacuuucuuucauugaugucc

SEQ ID NO: 534824 - RNA, 23 nt, Artificial Sequence
  Synthetic
uacacuuucuuucauugaugucc

SEQ ID NO: 534825 - RNA, 24 nt, Artificial Sequence
  Synthetic
auacacuuucuuucauugaugucc

SEQ ID NO: 534826 - RNA, 18 nt, Artificial Sequence
  Synthetic
gacuugcgauugaugucc

SEQ ID NO: 534827 - RNA, 19 nt, Artificial Sequence
  Synthetic
ugacuugcgauugaugucc

SEQ ID NO: 534828 - RNA, 20 nt, Artificial Sequence
  Synthetic
cugacuugcgauugaugucc

SEQ ID NO: 534829 - RNA, 21 nt, Artificial Sequence
  Synthetic
acugacuugcgauugaugucc

SEQ ID NO: 534830 - RNA, 22 nt, Artificial Sequence
  Synthetic
uacugacuugcgauugaugucc

SEQ ID NO: 534831 - RNA, 23 nt, Artificial Sequence
  Synthetic
cuacugacuugcgauugaugucc

SEQ ID NO: 534832 - RNA, 24 nt, Artificial Sequence
  Synthetic
ucuacugacuugcgauugaugucc

SEQ ID NO: 534833 - RNA, 18 nt, Artificial Sequence
  Synthetic
aguauaaacaauaugucc

SEQ ID NO: 534834 - RNA, 19 nt, Artificial Sequence
  Synthetic
caguauaaacaauaugucc

SEQ ID NO: 534835 - RNA, 20 nt, Artificial Sequence
  Synthetic
gcaguauaaacaauaugucc

SEQ ID NO: 534836 - RNA, 21 nt, Artificial Sequence
  Synthetic
ugcaguauaaacaauaugucc

SEQ ID NO: 534837 - RNA, 22 nt, Artificial Sequence
  Synthetic
uugcaguauaaacaauaugucc

SEQ ID NO: 534838 - RNA, 23 nt, Artificial Sequence
  Synthetic
auugcaguauaaacaauaugucc

SEQ ID NO: 534839 - RNA, 24 nt, Artificial Sequence
  Synthetic
aauugcaguauaaacaauaugucc

SEQ ID NO: 534840 - RNA, 18 nt, Artificial Sequence
  Synthetic
uuucugugccauaugucc

SEQ ID NO: 534841 - RNA, 19 nt, Artificial Sequence
  Synthetic
uuuucugugccauaugucc

SEQ ID NO: 534842 - RNA, 20 nt, Artificial Sequence
  Synthetic
uuuuucugugccauaugucc

SEQ ID NO: 534843 - RNA, 21 nt, Artificial Sequence
  Synthetic
uuuuuucugugccauaugucc

SEQ ID NO: 534844 - RNA, 22 nt, Artificial Sequence
  Synthetic
cuuuuuucugugccauaugucc

SEQ ID NO: 534845 - RNA, 23 nt, Artificial Sequence
  Synthetic
ucuuuuuucugugccauaugucc

SEQ ID NO: 534846 - RNA, 24 nt, Artificial Sequence
  Synthetic
aucuuuuuucugugccauaugucc

SEQ ID NO: 534847 - RNA, 18 nt, Artificial Sequence
  Synthetic
aaguuacccacuaugucc

SEQ ID NO: 534848 - RNA, 19 nt, Artificial Sequence
  Synthetic
aaaguuacccacuaugucc

SEQ ID NO: 534849 - RNA, 20 nt, Artificial Sequence
  Synthetic
caaaguuacccacuaugucc

SEQ ID NO: 534850 - RNA, 21 nt, Artificial Sequence
  Synthetic
ccaaaguuacccacuaugucc

SEQ ID NO: 534851 - RNA, 22 nt, Artificial Sequence
  Synthetic
cccaaaguuacccacuaugucc

SEQ ID NO: 534852 - RNA, 23 nt, Artificial Sequence
  Synthetic
gcccaaaguuacccacuaugucc

SEQ ID NO: 534853 - RNA, 24 nt, Artificial Sequence
  Synthetic
agcccaaaguuacccacuaugucc

SEQ ID NO: 534854 - RNA, 18 nt, Artificial Sequence
  Synthetic
cuaaaaugcacacugucc

SEQ ID NO: 534855 - RNA, 19 nt, Artificial Sequence
  Synthetic
ucuaaaaugcacacugucc

SEQ ID NO: 534856 - RNA, 20 nt, Artificial Sequence
  Synthetic
uucuaaaaugcacacugucc

SEQ ID NO: 534857 - RNA, 21 nt, Artificial Sequence
  Synthetic
uuucuaaaaugcacacugucc

SEQ ID NO: 534858 - RNA, 22 nt, Artificial Sequence
  Synthetic
cuuucuaaaaugcacacugucc

SEQ ID NO: 534859 - RNA, 23 nt, Artificial Sequence
  Synthetic
ccuuucuaaaaugcacacugucc

SEQ ID NO: 534860 - RNA, 24 nt, Artificial Sequence
  Synthetic
cccuuucuaaaaugcacacugucc

SEQ ID NO: 534861 - RNA, 18 nt, Artificial Sequence
  Synthetic
uugaagaaauuacugucc

SEQ ID NO: 534862 - RNA, 19 nt, Artificial Sequence
  Synthetic
auugaagaaauuacugucc

SEQ ID NO: 534863 - RNA, 20 nt, Artificial Sequence
  Synthetic
aauugaagaaauuacugucc

SEQ ID NO: 534864 - RNA, 21 nt, Artificial Sequence
  Synthetic
uaauugaagaaauuacugucc

SEQ ID NO: 534865 - RNA, 22 nt, Artificial Sequence
  Synthetic
auaauugaagaaauuacugucc

SEQ ID NO: 534866 - RNA, 23 nt, Artificial Sequence
  Synthetic
cauaauugaagaaauuacugucc

SEQ ID NO: 534867 - RNA, 24 nt, Artificial Sequence
  Synthetic
ucauaauugaagaaauuacugucc

SEQ ID NO: 534868 - RNA, 18 nt, Artificial Sequence
  Synthetic
ggcuuuuugccccugucc

SEQ ID NO: 534869 - RNA, 19 nt, Artificial Sequence
  Synthetic
uggcuuuuugccccugucc

SEQ ID NO: 534870 - RNA, 20 nt, Artificial Sequence
  Synthetic
guggcuuuuugccccugucc

SEQ ID NO: 534871 - RNA, 21 nt, Artificial Sequence
  Synthetic
gguggcuuuuugccccugucc

SEQ ID NO: 534872 - RNA, 22 nt, Artificial Sequence
  Synthetic
ugguggcuuuuugccccugucc

SEQ ID NO: 534873 - RNA, 23 nt, Artificial Sequence
  Synthetic
cugguggcuuuuugccccugucc

SEQ ID NO: 534874 - RNA, 24 nt, Artificial Sequence
  Synthetic
acugguggcuuuuugccccugucc

SEQ ID NO: 534875 - RNA, 18 nt, Artificial Sequence
  Synthetic
gcuacauuuuuccugucc

SEQ ID NO: 534876 - RNA, 19 nt, Artificial Sequence
  Synthetic
ggcuacauuuuuccugucc

SEQ ID NO: 534877 - RNA, 20 nt, Artificial Sequence
  Synthetic
uggcuacauuuuuccugucc

SEQ ID NO: 534878 - RNA, 21 nt, Artificial Sequence
  Synthetic
guggcuacauuuuuccugucc

SEQ ID NO: 534879 - RNA, 22 nt, Artificial Sequence
  Synthetic
aguggcuacauuuuuccugucc

SEQ ID NO: 534880 - RNA, 23 nt, Artificial Sequence
  Synthetic
aaguggcuacauuuuuccugucc

SEQ ID NO: 534881 - RNA, 24 nt, Artificial Sequence
  Synthetic
caaguggcuacauuuuuccugucc

SEQ ID NO: 534882 - RNA, 18 nt, Artificial Sequence
  Synthetic
aguuuuagaaaucugucc

SEQ ID NO: 534883 - RNA, 19 nt, Artificial Sequence
  Synthetic
uaguuuuagaaaucugucc

SEQ ID NO: 534884 - RNA, 20 nt, Artificial Sequence
  Synthetic
auaguuuuagaaaucugucc

SEQ ID NO: 534885 - RNA, 21 nt, Artificial Sequence
  Synthetic
uauaguuuuagaaaucugucc

SEQ ID NO: 534886 - RNA, 22 nt, Artificial Sequence
  Synthetic
auauaguuuuagaaaucugucc

SEQ ID NO: 534887 - RNA, 23 nt, Artificial Sequence
  Synthetic
uauauaguuuuagaaaucugucc

SEQ ID NO: 534888 - RNA, 24 nt, Artificial Sequence
  Synthetic
cuauauaguuuuagaaaucugucc

SEQ ID NO: 534889 - RNA, 18 nt, Artificial Sequence
  Synthetic
ccccguggugcucugucc

SEQ ID NO: 534890 - RNA, 19 nt, Artificial Sequence
  Synthetic
uccccguggugcucugucc

SEQ ID NO: 534891 - RNA, 20 nt, Artificial Sequence
  Synthetic
uuccccguggugcucugucc

SEQ ID NO: 534892 - RNA, 21 nt, Artificial Sequence
  Synthetic
cuuccccguggugcucugucc

SEQ ID NO: 534893 - RNA, 22 nt, Artificial Sequence
  Synthetic
ccuuccccguggugcucugucc

SEQ ID NO: 534894 - RNA, 23 nt, Artificial Sequence
  Synthetic
cccuuccccguggugcucugucc

SEQ ID NO: 534895 - RNA, 24 nt, Artificial Sequence
  Synthetic
ccccuuccccguggugcucugucc

SEQ ID NO: 534896 - RNA, 18 nt, Artificial Sequence
  Synthetic
gaaaauaauugucugucc

SEQ ID NO: 534897 - RNA, 19 nt, Artificial Sequence
  Synthetic
agaaaauaauugucugucc

SEQ ID NO: 534898 - RNA, 20 nt, Artificial Sequence
  Synthetic
gagaaaauaauugucugucc

SEQ ID NO: 534899 - RNA, 21 nt, Artificial Sequence
  Synthetic
ugagaaaauaauugucugucc

SEQ ID NO: 534900 - RNA, 22 nt, Artificial Sequence
  Synthetic
uugagaaaauaauugucugucc

SEQ ID NO: 534901 - RNA, 23 nt, Artificial Sequence
  Synthetic
uuugagaaaauaauugucugucc

SEQ ID NO: 534902 - RNA, 24 nt, Artificial Sequence
  Synthetic
auuugagaaaauaauugucugucc

SEQ ID NO: 534903 - RNA, 18 nt, Artificial Sequence
  Synthetic
aagacucauugucugucc

SEQ ID NO: 534904 - RNA, 19 nt, Artificial Sequence
  Synthetic
aaagacucauugucugucc

SEQ ID NO: 534905 - RNA, 20 nt, Artificial Sequence
  Synthetic
gaaagacucauugucugucc

SEQ ID NO: 534906 - RNA, 21 nt, Artificial Sequence
  Synthetic
ugaaagacucauugucugucc

SEQ ID NO: 534907 - RNA, 22 nt, Artificial Sequence
  Synthetic
uugaaagacucauugucugucc

SEQ ID NO: 534908 - RNA, 23 nt, Artificial Sequence
  Synthetic
auugaaagacucauugucugucc

SEQ ID NO: 534909 - RNA, 24 nt, Artificial Sequence
  Synthetic
cauugaaagacucauugucugucc

SEQ ID NO: 534910 - RNA, 18 nt, Artificial Sequence
  Synthetic
augagggaucaugugucc

SEQ ID NO: 534911 - RNA, 19 nt, Artificial Sequence
  Synthetic
uaugagggaucaugugucc

SEQ ID NO: 534912 - RNA, 20 nt, Artificial Sequence
  Synthetic
uuaugagggaucaugugucc

SEQ ID NO: 534913 - RNA, 21 nt, Artificial Sequence
  Synthetic
uuuaugagggaucaugugucc

SEQ ID NO: 534914 - RNA, 22 nt, Artificial Sequence
  Synthetic
cuuuaugagggaucaugugucc

SEQ ID NO: 534915 - RNA, 23 nt, Artificial Sequence
  Synthetic
acuuuaugagggaucaugugucc

SEQ ID NO: 534916 - RNA, 24 nt, Artificial Sequence
  Synthetic
cacuuuaugagggaucaugugucc

SEQ ID NO: 534917 - RNA, 18 nt, Artificial Sequence
  Synthetic
guucccgucccugugucc

SEQ ID NO: 534918 - RNA, 19 nt, Artificial Sequence
  Synthetic
uguucccgucccugugucc

SEQ ID NO: 534919 - RNA, 20 nt, Artificial Sequence
  Synthetic
auguucccgucccugugucc

SEQ ID NO: 534920 - RNA, 21 nt, Artificial Sequence
  Synthetic
gauguucccgucccugugucc

SEQ ID NO: 534921 - RNA, 22 nt, Artificial Sequence
  Synthetic
ugauguucccgucccugugucc

SEQ ID NO: 534922 - RNA, 23 nt, Artificial Sequence
  Synthetic
gugauguucccgucccugugucc

SEQ ID NO: 534923 - RNA, 24 nt, Artificial Sequence
  Synthetic
ugugauguucccgucccugugucc

SEQ ID NO: 534924 - RNA, 18 nt, Artificial Sequence
  Synthetic
acugcuuuagcugugucc

SEQ ID NO: 534925 - RNA, 19 nt, Artificial Sequence
  Synthetic
uacugcuuuagcugugucc

SEQ ID NO: 534926 - RNA, 20 nt, Artificial Sequence
  Synthetic
auacugcuuuagcugugucc

SEQ ID NO: 534927 - RNA, 21 nt, Artificial Sequence
  Synthetic
aauacugcuuuagcugugucc

SEQ ID NO: 534928 - RNA, 22 nt, Artificial Sequence
  Synthetic
aaauacugcuuuagcugugucc

SEQ ID NO: 534929 - RNA, 23 nt, Artificial Sequence
  Synthetic
uaaauacugcuuuagcugugucc

SEQ ID NO: 534930 - RNA, 24 nt, Artificial Sequence
  Synthetic
cuaaauacugcuuuagcugugucc

SEQ ID NO: 534931 - RNA, 18 nt, Artificial Sequence
  Synthetic
cguucugcacgugugucc

SEQ ID NO: 534932 - RNA, 19 nt, Artificial Sequence
  Synthetic
ccguucugcacgugugucc

SEQ ID NO: 534933 - RNA, 20 nt, Artificial Sequence
  Synthetic
cccguucugcacgugugucc

SEQ ID NO: 534934 - RNA, 21 nt, Artificial Sequence
  Synthetic
gcccguucugcacgugugucc

SEQ ID NO: 534935 - RNA, 22 nt, Artificial Sequence
  Synthetic
ugcccguucugcacgugugucc

SEQ ID NO: 534936 - RNA, 23 nt, Artificial Sequence
  Synthetic
cugcccguucugcacgugugucc

SEQ ID NO: 534937 - RNA, 24 nt, Artificial Sequence
  Synthetic
ccugcccguucugcacgugugucc

SEQ ID NO: 534938 - RNA, 18 nt, Artificial Sequence
  Synthetic
caauaccagugugugucc

SEQ ID NO: 534939 - RNA, 19 nt, Artificial Sequence
  Synthetic
ucaauaccagugugugucc

SEQ ID NO: 534940 - RNA, 20 nt, Artificial Sequence
  Synthetic
uucaauaccagugugugucc

SEQ ID NO: 534941 - RNA, 21 nt, Artificial Sequence
  Synthetic
auucaauaccagugugugucc

SEQ ID NO: 534942 - RNA, 22 nt, Artificial Sequence
  Synthetic
aauucaauaccagugugugucc

SEQ ID NO: 534943 - RNA, 23 nt, Artificial Sequence
  Synthetic
aaauucaauaccagugugugucc

SEQ ID NO: 534944 - RNA, 24 nt, Artificial Sequence
  Synthetic
aaaauucaauaccagugugugucc

SEQ ID NO: 534945 - RNA, 18 nt, Artificial Sequence
  Synthetic
uuaaaaacuuuugugucc

SEQ ID NO: 534946 - RNA, 19 nt, Artificial Sequence
  Synthetic
uuuaaaaacuuuugugucc

SEQ ID NO: 534947 - RNA, 20 nt, Artificial Sequence
  Synthetic
cuuuaaaaacuuuugugucc

SEQ ID NO: 534948 - RNA, 21 nt, Artificial Sequence
  Synthetic
ucuuuaaaaacuuuugugucc

SEQ ID NO: 534949 - RNA, 22 nt, Artificial Sequence
  Synthetic
aucuuuaaaaacuuuugugucc

SEQ ID NO: 534950 - RNA, 23 nt, Artificial Sequence
  Synthetic
uaucuuuaaaaacuuuugugucc

SEQ ID NO: 534951 - RNA, 24 nt, Artificial Sequence
  Synthetic
cuaucuuuaaaaacuuuugugucc

SEQ ID NO: 534952 - RNA, 18 nt, Artificial Sequence
  Synthetic
uacuuccaccccuugucc

SEQ ID NO: 534953 - RNA, 19 nt, Artificial Sequence
  Synthetic
uuacuuccaccccuugucc

SEQ ID NO: 534954 - RNA, 20 nt, Artificial Sequence
  Synthetic
cuuacuuccaccccuugucc

SEQ ID NO: 534955 - RNA, 21 nt, Artificial Sequence
  Synthetic
ccuuacuuccaccccuugucc

SEQ ID NO: 534956 - RNA, 22 nt, Artificial Sequence
  Synthetic
gccuuacuuccaccccuugucc

SEQ ID NO: 534957 - RNA, 23 nt, Artificial Sequence
  Synthetic
agccuuacuuccaccccuugucc

SEQ ID NO: 534958 - RNA, 24 nt, Artificial Sequence
  Synthetic
cagccuuacuuccaccccuugucc

SEQ ID NO: 534959 - RNA, 18 nt, Artificial Sequence
  Synthetic
cuacacagauguuugucc

SEQ ID NO: 534960 - RNA, 19 nt, Artificial Sequence
  Synthetic
acuacacagauguuugucc

SEQ ID NO: 534961 - RNA, 20 nt, Artificial Sequence
  Synthetic
uacuacacagauguuugucc

SEQ ID NO: 534962 - RNA, 21 nt, Artificial Sequence
  Synthetic
auacuacacagauguuugucc

SEQ ID NO: 534963 - RNA, 22 nt, Artificial Sequence
  Synthetic
aauacuacacagauguuugucc

SEQ ID NO: 534964 - RNA, 23 nt, Artificial Sequence
  Synthetic
gaauacuacacagauguuugucc

SEQ ID NO: 534965 - RNA, 24 nt, Artificial Sequence
  Synthetic
ggaauacuacacagauguuugucc

SEQ ID NO: 534966 - RNA, 18 nt, Artificial Sequence
  Synthetic
ucuugguaacaaaauucc

SEQ ID NO: 534967 - RNA, 19 nt, Artificial Sequence
  Synthetic
uucuugguaacaaaauucc

SEQ ID NO: 534968 - RNA, 20 nt, Artificial Sequence
  Synthetic
uuucuugguaacaaaauucc

SEQ ID NO: 534969 - RNA, 21 nt, Artificial Sequence
  Synthetic
uuuucuugguaacaaaauucc

SEQ ID NO: 534970 - RNA, 22 nt, Artificial Sequence
  Synthetic
uuuuucuugguaacaaaauucc

SEQ ID NO: 534971 - RNA, 23 nt, Artificial Sequence
  Synthetic
uuuuuucuugguaacaaaauucc

SEQ ID NO: 534972 - RNA, 24 nt, Artificial Sequence
  Synthetic
uuuuuuucuugguaacaaaauucc

SEQ ID NO: 534973 - RNA, 18 nt, Artificial Sequence
  Synthetic
aaaaaaugaacaaauucc

SEQ ID NO: 534974 - RNA, 19 nt, Artificial Sequence
  Synthetic
aaaaaaaugaacaaauucc

SEQ ID NO: 534975 - RNA, 20 nt, Artificial Sequence
  Synthetic
gaaaaaaaugaacaaauucc

SEQ ID NO: 534976 - RNA, 21 nt, Artificial Sequence
  Synthetic
agaaaaaaaugaacaaauucc

SEQ ID NO: 534977 - RNA, 22 nt, Artificial Sequence
  Synthetic
uagaaaaaaaugaacaaauucc

SEQ ID NO: 534978 - RNA, 23 nt, Artificial Sequence
  Synthetic
cuagaaaaaaaugaacaaauucc

SEQ ID NO: 534979 - RNA, 24 nt, Artificial Sequence
  Synthetic
ccuagaaaaaaaugaacaaauucc

SEQ ID NO: 534980 - RNA, 18 nt, Artificial Sequence
  Synthetic
gaagcacaaucaaauucc

SEQ ID NO: 534981 - RNA, 19 nt, Artificial Sequence
  Synthetic
ugaagcacaaucaaauucc

SEQ ID NO: 534982 - RNA, 20 nt, Artificial Sequence
  Synthetic
augaagcacaaucaaauucc

SEQ ID NO: 534983 - RNA, 21 nt, Artificial Sequence
  Synthetic
aaugaagcacaaucaaauucc

SEQ ID NO: 534984 - RNA, 22 nt, Artificial Sequence
  Synthetic
caaugaagcacaaucaaauucc

SEQ ID NO: 534985 - RNA, 23 nt, Artificial Sequence
  Synthetic
ucaaugaagcacaaucaaauucc

SEQ ID NO: 534986 - RNA, 24 nt, Artificial Sequence
  Synthetic
uucaaugaagcacaaucaaauucc

SEQ ID NO: 534987 - RNA, 18 nt, Artificial Sequence
  Synthetic
aaggugguaguaaauucc

SEQ ID NO: 534988 - RNA, 19 nt, Artificial Sequence
  Synthetic
uaaggugguaguaaauucc

SEQ ID NO: 534989 - RNA, 20 nt, Artificial Sequence
  Synthetic
uuaaggugguaguaaauucc

SEQ ID NO: 534990 - RNA, 21 nt, Artificial Sequence
  Synthetic
auuaaggugguaguaaauucc

SEQ ID NO: 534991 - RNA, 22 nt, Artificial Sequence
  Synthetic
cauuaaggugguaguaaauucc

SEQ ID NO: 534992 - RNA, 23 nt, Artificial Sequence
  Synthetic
ccauuaaggugguaguaaauucc

SEQ ID NO: 534993 - RNA, 24 nt, Artificial Sequence
  Synthetic
gccauuaaggugguaguaaauucc

SEQ ID NO: 534994 - RNA, 18 nt, Artificial Sequence
  Synthetic
aagaaaaucuuaaauucc

SEQ ID NO: 534995 - RNA, 19 nt, Artificial Sequence
  Synthetic
aaagaaaaucuuaaauucc

SEQ ID NO: 534996 - RNA, 20 nt, Artificial Sequence
  Synthetic
caaagaaaaucuuaaauucc

SEQ ID NO: 534997 - RNA, 21 nt, Artificial Sequence
  Synthetic
ccaaagaaaaucuuaaauucc

SEQ ID NO: 534998 - RNA, 22 nt, Artificial Sequence
  Synthetic
cccaaagaaaaucuuaaauucc

SEQ ID NO: 534999 - RNA, 23 nt, Artificial Sequence
  Synthetic
ccccaaagaaaaucuuaaauucc

SEQ ID NO: 535000 - RNA, 24 nt, Artificial Sequence
  Synthetic
uccccaaagaaaaucuuaaauucc

SEQ ID NO: 535001 - RNA, 18 nt, Artificial Sequence
  Synthetic
uguguucacaagaauucc

SEQ ID NO: 535002 - RNA, 19 nt, Artificial Sequence
  Synthetic
cuguguucacaagaauucc

SEQ ID NO: 535003 - RNA, 20 nt, Artificial Sequence
  Synthetic
ucuguguucacaagaauucc

SEQ ID NO: 535004 - RNA, 21 nt, Artificial Sequence
  Synthetic
uucuguguucacaagaauucc

SEQ ID NO: 535005 - RNA, 22 nt, Artificial Sequence
  Synthetic
auucuguguucacaagaauucc

SEQ ID NO: 535006 - RNA, 23 nt, Artificial Sequence
  Synthetic
uauucuguguucacaagaauucc

SEQ ID NO: 535007 - RNA, 24 nt, Artificial Sequence
  Synthetic
cuauucuguguucacaagaauucc

SEQ ID NO: 535008 - RNA, 18 nt, Artificial Sequence
  Synthetic
gcacagucuaagaauucc

SEQ ID NO: 535009 - RNA, 19 nt, Artificial Sequence
  Synthetic
agcacagucuaagaauucc

SEQ ID NO: 535010 - RNA, 20 nt, Artificial Sequence
  Synthetic
aagcacagucuaagaauucc

SEQ ID NO: 535011 - RNA, 21 nt, Artificial Sequence
  Synthetic
aaagcacagucuaagaauucc

SEQ ID NO: 535012 - RNA, 22 nt, Artificial Sequence
  Synthetic
caaagcacagucuaagaauucc

SEQ ID NO: 535013 - RNA, 23 nt, Artificial Sequence
  Synthetic
ucaaagcacagucuaagaauucc

SEQ ID NO: 535014 - RNA, 24 nt, Artificial Sequence
  Synthetic
uucaaagcacagucuaagaauucc

SEQ ID NO: 535015 - RNA, 18 nt, Artificial Sequence
  Synthetic
cugacuaaguagaauucc

SEQ ID NO: 535016 - RNA, 19 nt, Artificial Sequence
  Synthetic
ucugacuaaguagaauucc

SEQ ID NO: 535017 - RNA, 20 nt, Artificial Sequence
  Synthetic
aucugacuaaguagaauucc

SEQ ID NO: 535018 - RNA, 21 nt, Artificial Sequence
  Synthetic
uaucugacuaaguagaauucc

SEQ ID NO: 535019 - RNA, 22 nt, Artificial Sequence
  Synthetic
auaucugacuaaguagaauucc

SEQ ID NO: 535020 - RNA, 23 nt, Artificial Sequence
  Synthetic
cauaucugacuaaguagaauucc

SEQ ID NO: 535021 - RNA, 24 nt, Artificial Sequence
  Synthetic
acauaucugacuaaguagaauucc

SEQ ID NO: 535022 - RNA, 18 nt, Artificial Sequence
  Synthetic
aaugguuaaacgaauucc

SEQ ID NO: 535023 - RNA, 19 nt, Artificial Sequence
  Synthetic
uaaugguuaaacgaauucc

SEQ ID NO: 535024 - RNA, 20 nt, Artificial Sequence
  Synthetic
guaaugguuaaacgaauucc

SEQ ID NO: 535025 - RNA, 21 nt, Artificial Sequence
  Synthetic
uguaaugguuaaacgaauucc

SEQ ID NO: 535026 - RNA, 22 nt, Artificial Sequence
  Synthetic
guguaaugguuaaacgaauucc

SEQ ID NO: 535027 - RNA, 23 nt, Artificial Sequence
  Synthetic
uguguaaugguuaaacgaauucc

SEQ ID NO: 535028 - RNA, 24 nt, Artificial Sequence
  Synthetic
auguguaaugguuaaacgaauucc

SEQ ID NO: 535029 - RNA, 18 nt, Artificial Sequence
  Synthetic
cugaacuucaggaauucc

SEQ ID NO: 535030 - RNA, 19 nt, Artificial Sequence
  Synthetic
acugaacuucaggaauucc

SEQ ID NO: 535031 - RNA, 20 nt, Artificial Sequence
  Synthetic
aacugaacuucaggaauucc

SEQ ID NO: 535032 - RNA, 21 nt, Artificial Sequence
  Synthetic
caacugaacuucaggaauucc

SEQ ID NO: 535033 - RNA, 22 nt, Artificial Sequence
  Synthetic
gcaacugaacuucaggaauucc

SEQ ID NO: 535034 - RNA, 23 nt, Artificial Sequence
  Synthetic
ggcaacugaacuucaggaauucc

SEQ ID NO: 535035 - RNA, 24 nt, Artificial Sequence
  Synthetic
uggcaacugaacuucaggaauucc

SEQ ID NO: 535036 - RNA, 18 nt, Artificial Sequence
  Synthetic
uuggccacauggaauucc

SEQ ID NO: 535037 - RNA, 19 nt, Artificial Sequence
  Synthetic
uuuggccacauggaauucc

SEQ ID NO: 535038 - RNA, 20 nt, Artificial Sequence
  Synthetic
cuuuggccacauggaauucc

SEQ ID NO: 535039 - RNA, 21 nt, Artificial Sequence
  Synthetic
gcuuuggccacauggaauucc

SEQ ID NO: 535040 - RNA, 22 nt, Artificial Sequence
  Synthetic
ggcuuuggccacauggaauucc

SEQ ID NO: 535041 - RNA, 23 nt, Artificial Sequence
  Synthetic
uggcuuuggccacauggaauucc

SEQ ID NO: 535042 - RNA, 24 nt, Artificial Sequence
  Synthetic
uuggcuuuggccacauggaauucc

SEQ ID NO: 535043 - RNA, 18 nt, Artificial Sequence
  Synthetic
gaugccaugaaacauucc

SEQ ID NO: 535044 - RNA, 19 nt, Artificial Sequence
  Synthetic
agaugccaugaaacauucc

SEQ ID NO: 535045 - RNA, 20 nt, Artificial Sequence
  Synthetic
gagaugccaugaaacauucc

SEQ ID NO: 535046 - RNA, 21 nt, Artificial Sequence
  Synthetic
ggagaugccaugaaacauucc

SEQ ID NO: 535047 - RNA, 22 nt, Artificial Sequence
  Synthetic
cggagaugccaugaaacauucc

SEQ ID NO: 535048 - RNA, 23 nt, Artificial Sequence
  Synthetic
gcggagaugccaugaaacauucc

SEQ ID NO: 535049 - RNA, 24 nt, Artificial Sequence
  Synthetic
ugcggagaugccaugaaacauucc

SEQ ID NO: 535050 - RNA, 18 nt, Artificial Sequence
  Synthetic
uaugcuagagaacauucc

SEQ ID NO: 535051 - RNA, 19 nt, Artificial Sequence
  Synthetic
guaugcuagagaacauucc

SEQ ID NO: 535052 - RNA, 20 nt, Artificial Sequence
  Synthetic
aguaugcuagagaacauucc

SEQ ID NO: 535053 - RNA, 21 nt, Artificial Sequence
  Synthetic
gaguaugcuagagaacauucc

SEQ ID NO: 535054 - RNA, 22 nt, Artificial Sequence
  Synthetic
agaguaugcuagagaacauucc

SEQ ID NO: 535055 - RNA, 23 nt, Artificial Sequence
  Synthetic
aagaguaugcuagagaacauucc

SEQ ID NO: 535056 - RNA, 24 nt, Artificial Sequence
  Synthetic
gaagaguaugcuagagaacauucc

SEQ ID NO: 535057 - RNA, 18 nt, Artificial Sequence
  Synthetic
acagcaccagcacauucc

SEQ ID NO: 535058 - RNA, 19 nt, Artificial Sequence
  Synthetic
cacagcaccagcacauucc

SEQ ID NO: 535059 - RNA, 20 nt, Artificial Sequence
  Synthetic
ccacagcaccagcacauucc

SEQ ID NO: 535060 - RNA, 21 nt, Artificial Sequence
  Synthetic
cccacagcaccagcacauucc

SEQ ID NO: 535061 - RNA, 22 nt, Artificial Sequence
  Synthetic
gcccacagcaccagcacauucc

SEQ ID NO: 535062 - RNA, 23 nt, Artificial Sequence
  Synthetic
ggcccacagcaccagcacauucc

SEQ ID NO: 535063 - RNA, 24 nt, Artificial Sequence
  Synthetic
uggcccacagcaccagcacauucc

SEQ ID NO: 535064 - RNA, 18 nt, Artificial Sequence
  Synthetic
auuucuugaucacauucc

SEQ ID NO: 535065 - RNA, 19 nt, Artificial Sequence
  Synthetic
gauuucuugaucacauucc

SEQ ID NO: 535066 - RNA, 20 nt, Artificial Sequence
  Synthetic
ugauuucuugaucacauucc

SEQ ID NO: 535067 - RNA, 21 nt, Artificial Sequence
  Synthetic
augauuucuugaucacauucc

SEQ ID NO: 535068 - RNA, 22 nt, Artificial Sequence
  Synthetic
caugauuucuugaucacauucc

SEQ ID NO: 535069 - RNA, 23 nt, Artificial Sequence
  Synthetic
ucaugauuucuugaucacauucc

SEQ ID NO: 535070 - RNA, 24 nt, Artificial Sequence
  Synthetic
aucaugauuucuugaucacauucc

SEQ ID NO: 535071 - RNA, 18 nt, Artificial Sequence
  Synthetic
gugccuucaauacauucc

SEQ ID NO: 535072 - RNA, 19 nt, Artificial Sequence
  Synthetic
ugugccuucaauacauucc

SEQ ID NO: 535073 - RNA, 20 nt, Artificial Sequence
  Synthetic
cugugccuucaauacauucc

SEQ ID NO: 535074 - RNA, 21 nt, Artificial Sequence
  Synthetic
ucugugccuucaauacauucc

SEQ ID NO: 535075 - RNA, 22 nt, Artificial Sequence
  Synthetic
uucugugccuucaauacauucc

SEQ ID NO: 535076 - RNA, 23 nt, Artificial Sequence
  Synthetic
uuucugugccuucaauacauucc

SEQ ID NO: 535077 - RNA, 24 nt, Artificial Sequence
  Synthetic
cuuucugugccuucaauacauucc

SEQ ID NO: 535078 - RNA, 18 nt, Artificial Sequence
  Synthetic
aggaaauggauacauucc

SEQ ID NO: 535079 - RNA, 19 nt, Artificial Sequence
  Synthetic
gaggaaauggauacauucc

SEQ ID NO: 535080 - RNA, 20 nt, Artificial Sequence
  Synthetic
agaggaaauggauacauucc

SEQ ID NO: 535081 - RNA, 21 nt, Artificial Sequence
  Synthetic
uagaggaaauggauacauucc

SEQ ID NO: 535082 - RNA, 22 nt, Artificial Sequence
  Synthetic
cuagaggaaauggauacauucc

SEQ ID NO: 535083 - RNA, 23 nt, Artificial Sequence
  Synthetic
ucuagaggaaauggauacauucc

SEQ ID NO: 535084 - RNA, 24 nt, Artificial Sequence
  Synthetic
aucuagaggaaauggauacauucc

SEQ ID NO: 535085 - RNA, 18 nt, Artificial Sequence
  Synthetic
ccuggccuuuuacauucc

SEQ ID NO: 535086 - RNA, 19 nt, Artificial Sequence
  Synthetic
gccuggccuuuuacauucc

SEQ ID NO: 535087 - RNA, 20 nt, Artificial Sequence
  Synthetic
agccuggccuuuuacauucc

SEQ ID NO: 535088 - RNA, 21 nt, Artificial Sequence
  Synthetic
cagccuggccuuuuacauucc

SEQ ID NO: 535089 - RNA, 22 nt, Artificial Sequence
  Synthetic
ccagccuggccuuuuacauucc

SEQ ID NO: 535090 - RNA, 23 nt, Artificial Sequence
  Synthetic
uccagccuggccuuuuacauucc

SEQ ID NO: 535091 - RNA, 24 nt, Artificial Sequence
  Synthetic
auccagccuggccuuuuacauucc

SEQ ID NO: 535092 - RNA, 18 nt, Artificial Sequence
  Synthetic
uuauuugaaaaccauucc

SEQ ID NO: 535093 - RNA, 19 nt, Artificial Sequence
  Synthetic
auuauuugaaaaccauucc

SEQ ID NO: 535094 - RNA, 20 nt, Artificial Sequence
  Synthetic
cauuauuugaaaaccauucc

SEQ ID NO: 535095 - RNA, 21 nt, Artificial Sequence
  Synthetic
ucauuauuugaaaaccauucc

SEQ ID NO: 535096 - RNA, 22 nt, Artificial Sequence
  Synthetic
uucauuauuugaaaaccauucc

SEQ ID NO: 535097 - RNA, 23 nt, Artificial Sequence
  Synthetic
uuucauuauuugaaaaccauucc

SEQ ID NO: 535098 - RNA, 24 nt, Artificial Sequence
  Synthetic
uuuucauuauuugaaaaccauucc

SEQ ID NO: 535099 - RNA, 18 nt, Artificial Sequence
  Synthetic
caauucuugguccauucc

SEQ ID NO: 535100 - RNA, 19 nt, Artificial Sequence
  Synthetic
ucaauucuugguccauucc

SEQ ID NO: 535101 - RNA, 20 nt, Artificial Sequence
  Synthetic
cucaauucuugguccauucc

SEQ ID NO: 535102 - RNA, 21 nt, Artificial Sequence
  Synthetic
ucucaauucuugguccauucc

SEQ ID NO: 535103 - RNA, 22 nt, Artificial Sequence
  Synthetic
uucucaauucuugguccauucc

SEQ ID NO: 535104 - RNA, 23 nt, Artificial Sequence
  Synthetic
uuucucaauucuugguccauucc

SEQ ID NO: 535105 - RNA, 24 nt, Artificial Sequence
  Synthetic
auuucucaauucuugguccauucc

SEQ ID NO: 535106 - RNA, 18 nt, Artificial Sequence
  Synthetic
ccuacugggcugcauucc

SEQ ID NO: 535107 - RNA, 19 nt, Artificial Sequence
  Synthetic
accuacugggcugcauucc

SEQ ID NO: 535108 - RNA, 20 nt, Artificial Sequence
  Synthetic
gaccuacugggcugcauucc

SEQ ID NO: 535109 - RNA, 21 nt, Artificial Sequence
  Synthetic
agaccuacugggcugcauucc

SEQ ID NO: 535110 - RNA, 22 nt, Artificial Sequence
  Synthetic
gagaccuacugggcugcauucc

SEQ ID NO: 535111 - RNA, 23 nt, Artificial Sequence
  Synthetic
ugagaccuacugggcugcauucc

SEQ ID NO: 535112 - RNA, 24 nt, Artificial Sequence
  Synthetic
cugagaccuacugggcugcauucc

SEQ ID NO: 535113 - RNA, 18 nt, Artificial Sequence
  Synthetic
ucuuuuaauuugcauucc

SEQ ID NO: 535114 - RNA, 19 nt, Artificial Sequence
  Synthetic
aucuuuuaauuugcauucc

SEQ ID NO: 535115 - RNA, 20 nt, Artificial Sequence
  Synthetic
uaucuuuuaauuugcauucc

SEQ ID NO: 535116 - RNA, 21 nt, Artificial Sequence
  Synthetic
auaucuuuuaauuugcauucc

SEQ ID NO: 535117 - RNA, 22 nt, Artificial Sequence
  Synthetic
gauaucuuuuaauuugcauucc

SEQ ID NO: 535118 - RNA, 23 nt, Artificial Sequence
  Synthetic
ugauaucuuuuaauuugcauucc

SEQ ID NO: 535119 - RNA, 24 nt, Artificial Sequence
  Synthetic
uugauaucuuuuaauuugcauucc

SEQ ID NO: 535120 - RNA, 18 nt, Artificial Sequence
  Synthetic
cauuucuauucucauucc

SEQ ID NO: 535121 - RNA, 19 nt, Artificial Sequence
  Synthetic
ucauuucuauucucauucc

SEQ ID NO: 535122 - RNA, 20 nt, Artificial Sequence
  Synthetic
uucauuucuauucucauucc

SEQ ID NO: 535123 - RNA, 21 nt, Artificial Sequence
  Synthetic
uuucauuucuauucucauucc

SEQ ID NO: 535124 - RNA, 22 nt, Artificial Sequence
  Synthetic
cuuucauuucuauucucauucc

SEQ ID NO: 535125 - RNA, 23 nt, Artificial Sequence
  Synthetic
ucuuucauuucuauucucauucc

SEQ ID NO: 535126 - RNA, 24 nt, Artificial Sequence
  Synthetic
uucuuucauuucuauucucauucc

SEQ ID NO: 535127 - RNA, 18 nt, Artificial Sequence
  Synthetic
ugaauagccauucauucc

SEQ ID NO: 535128 - RNA, 19 nt, Artificial Sequence
  Synthetic
cugaauagccauucauucc

SEQ ID NO: 535129 - RNA, 20 nt, Artificial Sequence
  Synthetic
ccugaauagccauucauucc

SEQ ID NO: 535130 - RNA, 21 nt, Artificial Sequence
  Synthetic
gccugaauagccauucauucc

SEQ ID NO: 535131 - RNA, 22 nt, Artificial Sequence
  Synthetic
ugccugaauagccauucauucc

SEQ ID NO: 535132 - RNA, 23 nt, Artificial Sequence
  Synthetic
cugccugaauagccauucauucc

SEQ ID NO: 535133 - RNA, 24 nt, Artificial Sequence
  Synthetic
ccugccugaauagccauucauucc

SEQ ID NO: 535134 - RNA, 18 nt, Artificial Sequence
  Synthetic
acauccacuguucauucc

SEQ ID NO: 535135 - RNA, 19 nt, Artificial Sequence
  Synthetic
cacauccacuguucauucc

SEQ ID NO: 535136 - RNA, 20 nt, Artificial Sequence
  Synthetic
gcacauccacuguucauucc

SEQ ID NO: 535137 - RNA, 21 nt, Artificial Sequence
  Synthetic
agcacauccacuguucauucc

SEQ ID NO: 535138 - RNA, 22 nt, Artificial Sequence
  Synthetic
aagcacauccacuguucauucc

SEQ ID NO: 535139 - RNA, 23 nt, Artificial Sequence
  Synthetic
uaagcacauccacuguucauucc

SEQ ID NO: 535140 - RNA, 24 nt, Artificial Sequence
  Synthetic
auaagcacauccacuguucauucc

SEQ ID NO: 535141 - RNA, 18 nt, Artificial Sequence
  Synthetic
ggacaucuggcagauucc

SEQ ID NO: 535142 - RNA, 19 nt, Artificial Sequence
  Synthetic
uggacaucuggcagauucc

SEQ ID NO: 535143 - RNA, 20 nt, Artificial Sequence
  Synthetic
cuggacaucuggcagauucc

SEQ ID NO: 535144 - RNA, 21 nt, Artificial Sequence
  Synthetic
ccuggacaucuggcagauucc

SEQ ID NO: 535145 - RNA, 22 nt, Artificial Sequence
  Synthetic
cccuggacaucuggcagauucc

SEQ ID NO: 535146 - RNA, 23 nt, Artificial Sequence
  Synthetic
gcccuggacaucuggcagauucc

SEQ ID NO: 535147 - RNA, 24 nt, Artificial Sequence
  Synthetic
ugcccuggacaucuggcagauucc

SEQ ID NO: 535148 - RNA, 18 nt, Artificial Sequence
  Synthetic
uuaggugccugagauucc

SEQ ID NO: 535149 - RNA, 19 nt, Artificial Sequence
  Synthetic
uuuaggugccugagauucc

SEQ ID NO: 535150 - RNA, 20 nt, Artificial Sequence
  Synthetic
uuuuaggugccugagauucc

SEQ ID NO: 535151 - RNA, 21 nt, Artificial Sequence
  Synthetic
uuuuuaggugccugagauucc

SEQ ID NO: 535152 - RNA, 22 nt, Artificial Sequence
  Synthetic
auuuuuaggugccugagauucc

SEQ ID NO: 535153 - RNA, 23 nt, Artificial Sequence
  Synthetic
uauuuuuaggugccugagauucc

SEQ ID NO: 535154 - RNA, 24 nt, Artificial Sequence
  Synthetic
uuauuuuuaggugccugagauucc

SEQ ID NO: 535155 - RNA, 18 nt, Artificial Sequence
  Synthetic
aucuuuggaauagauucc

SEQ ID NO: 535156 - RNA, 19 nt, Artificial Sequence
  Synthetic
aaucuuuggaauagauucc

SEQ ID NO: 535157 - RNA, 20 nt, Artificial Sequence
  Synthetic
gaaucuuuggaauagauucc

SEQ ID NO: 535158 - RNA, 21 nt, Artificial Sequence
  Synthetic
agaaucuuuggaauagauucc

SEQ ID NO: 535159 - RNA, 22 nt, Artificial Sequence
  Synthetic
aagaaucuuuggaauagauucc

SEQ ID NO: 535160 - RNA, 23 nt, Artificial Sequence
  Synthetic
aaagaaucuuuggaauagauucc

SEQ ID NO: 535161 - RNA, 24 nt, Artificial Sequence
  Synthetic
gaaagaaucuuuggaauagauucc

SEQ ID NO: 535162 - RNA, 18 nt, Artificial Sequence
  Synthetic
agaacagagaaggauucc

SEQ ID NO: 535163 - RNA, 19 nt, Artificial Sequence
  Synthetic
aagaacagagaaggauucc

SEQ ID NO: 535164 - RNA, 20 nt, Artificial Sequence
  Synthetic
caagaacagagaaggauucc

SEQ ID NO: 535165 - RNA, 21 nt, Artificial Sequence
  Synthetic
ucaagaacagagaaggauucc

SEQ ID NO: 535166 - RNA, 22 nt, Artificial Sequence
  Synthetic
aucaagaacagagaaggauucc

SEQ ID NO: 535167 - RNA, 23 nt, Artificial Sequence
  Synthetic
gaucaagaacagagaaggauucc

SEQ ID NO: 535168 - RNA, 24 nt, Artificial Sequence
  Synthetic
ugaucaagaacagagaaggauucc

SEQ ID NO: 535169 - RNA, 18 nt, Artificial Sequence
  Synthetic
aucacuuugaaggauucc

SEQ ID NO: 535170 - RNA, 19 nt, Artificial Sequence
  Synthetic
uaucacuuugaaggauucc

SEQ ID NO: 535171 - RNA, 20 nt, Artificial Sequence
  Synthetic
cuaucacuuugaaggauucc

SEQ ID NO: 535172 - RNA, 21 nt, Artificial Sequence
  Synthetic
gcuaucacuuugaaggauucc

SEQ ID NO: 535173 - RNA, 22 nt, Artificial Sequence
  Synthetic
ugcuaucacuuugaaggauucc

SEQ ID NO: 535174 - RNA, 23 nt, Artificial Sequence
  Synthetic
augcuaucacuuugaaggauucc

SEQ ID NO: 535175 - RNA, 24 nt, Artificial Sequence
  Synthetic
uaugcuaucacuuugaaggauucc

SEQ ID NO: 535176 - RNA, 18 nt, Artificial Sequence
  Synthetic
aaucuuaaaagggauucc

SEQ ID NO: 535177 - RNA, 19 nt, Artificial Sequence
  Synthetic
aaaucuuaaaagggauucc

SEQ ID NO: 535178 - RNA, 20 nt, Artificial Sequence
  Synthetic
gaaaucuuaaaagggauucc

SEQ ID NO: 535179 - RNA, 21 nt, Artificial Sequence
  Synthetic
agaaaucuuaaaagggauucc

SEQ ID NO: 535180 - RNA, 22 nt, Artificial Sequence
  Synthetic
uagaaaucuuaaaagggauucc

SEQ ID NO: 535181 - RNA, 23 nt, Artificial Sequence
  Synthetic
cuagaaaucuuaaaagggauucc

SEQ ID NO: 535182 - RNA, 24 nt, Artificial Sequence
  Synthetic
ucuagaaaucuuaaaagggauucc

SEQ ID NO: 535183 - RNA, 18 nt, Artificial Sequence
  Synthetic
ugaacagguggggauucc

SEQ ID NO: 535184 - RNA, 19 nt, Artificial Sequence
  Synthetic
cugaacagguggggauucc

SEQ ID NO: 535185 - RNA, 20 nt, Artificial Sequence
  Synthetic
gcugaacagguggggauucc

SEQ ID NO: 535186 - RNA, 21 nt, Artificial Sequence
  Synthetic
agcugaacagguggggauucc

SEQ ID NO: 535187 - RNA, 22 nt, Artificial Sequence
  Synthetic
uagcugaacagguggggauucc

SEQ ID NO: 535188 - RNA, 23 nt, Artificial Sequence
  Synthetic
guagcugaacagguggggauucc

SEQ ID NO: 535189 - RNA, 24 nt, Artificial Sequence
  Synthetic
gguagcugaacagguggggauucc

SEQ ID NO: 535190 - RNA, 18 nt, Artificial Sequence
  Synthetic
caaugguauuuggauucc

SEQ ID NO: 535191 - RNA, 19 nt, Artificial Sequence
  Synthetic
gcaaugguauuuggauucc

SEQ ID NO: 535192 - RNA, 20 nt, Artificial Sequence
  Synthetic
ugcaaugguauuuggauucc

SEQ ID NO: 535193 - RNA, 21 nt, Artificial Sequence
  Synthetic
uugcaaugguauuuggauucc

SEQ ID NO: 535194 - RNA, 22 nt, Artificial Sequence
  Synthetic
auugcaaugguauuuggauucc

SEQ ID NO: 535195 - RNA, 23 nt, Artificial Sequence
  Synthetic
uauugcaaugguauuuggauucc

SEQ ID NO: 535196 - RNA, 24 nt, Artificial Sequence
  Synthetic
auauugcaaugguauuuggauucc

SEQ ID NO: 535197 - RNA, 18 nt, Artificial Sequence
  Synthetic
ggcuuuccuauugauucc

SEQ ID NO: 535198 - RNA, 19 nt, Artificial Sequence
  Synthetic
aggcuuuccuauugauucc

SEQ ID NO: 535199 - RNA, 20 nt, Artificial Sequence
  Synthetic
caggcuuuccuauugauucc

SEQ ID NO: 535200 - RNA, 21 nt, Artificial Sequence
  Synthetic
ucaggcuuuccuauugauucc

SEQ ID NO: 535201 - RNA, 22 nt, Artificial Sequence
  Synthetic
cucaggcuuuccuauugauucc

SEQ ID NO: 535202 - RNA, 23 nt, Artificial Sequence
  Synthetic
ucucaggcuuuccuauugauucc

SEQ ID NO: 535203 - RNA, 24 nt, Artificial Sequence
  Synthetic
cucucaggcuuuccuauugauucc

SEQ ID NO: 535204 - RNA, 18 nt, Artificial Sequence
  Synthetic
aaggcugaaaaauauucc

SEQ ID NO: 535205 - RNA, 19 nt, Artificial Sequence
  Synthetic
uaaggcugaaaaauauucc

SEQ ID NO: 535206 - RNA, 20 nt, Artificial Sequence
  Synthetic
uuaaggcugaaaaauauucc

SEQ ID NO: 535207 - RNA, 21 nt, Artificial Sequence
  Synthetic
uuuaaggcugaaaaauauucc

SEQ ID NO: 535208 - RNA, 22 nt, Artificial Sequence
  Synthetic
uuuuaaggcugaaaaauauucc

SEQ ID NO: 535209 - RNA, 23 nt, Artificial Sequence
  Synthetic
uuuuuaaggcugaaaaauauucc

SEQ ID NO: 535210 - RNA, 24 nt, Artificial Sequence
  Synthetic
cuuuuuaaggcugaaaaauauucc

SEQ ID NO: 535211 - RNA, 18 nt, Artificial Sequence
  Synthetic
cuaauuaaucaauauucc

SEQ ID NO: 535212 - RNA, 19 nt, Artificial Sequence
  Synthetic
gcuaauuaaucaauauucc

SEQ ID NO: 535213 - RNA, 20 nt, Artificial Sequence
  Synthetic
agcuaauuaaucaauauucc

SEQ ID NO: 535214 - RNA, 21 nt, Artificial Sequence
  Synthetic
uagcuaauuaaucaauauucc

SEQ ID NO: 535215 - RNA, 22 nt, Artificial Sequence
  Synthetic
cuagcuaauuaaucaauauucc

SEQ ID NO: 535216 - RNA, 23 nt, Artificial Sequence
  Synthetic
gcuagcuaauuaaucaauauucc

SEQ ID NO: 535217 - RNA, 24 nt, Artificial Sequence
  Synthetic
agcuagcuaauuaaucaauauucc

SEQ ID NO: 535218 - RNA, 18 nt, Artificial Sequence
  Synthetic
acugcccaagaauauucc

SEQ ID NO: 535219 - RNA, 19 nt, Artificial Sequence
  Synthetic
aacugcccaagaauauucc

SEQ ID NO: 535220 - RNA, 20 nt, Artificial Sequence
  Synthetic
caacugcccaagaauauucc

SEQ ID NO: 535221 - RNA, 21 nt, Artificial Sequence
  Synthetic
ccaacugcccaagaauauucc

SEQ ID NO: 535222 - RNA, 22 nt, Artificial Sequence
  Synthetic
gccaacugcccaagaauauucc

SEQ ID NO: 535223 - RNA, 23 nt, Artificial Sequence
  Synthetic
agccaacugcccaagaauauucc

SEQ ID NO: 535224 - RNA, 24 nt, Artificial Sequence
  Synthetic
cagccaacugcccaagaauauucc

SEQ ID NO: 535225 - RNA, 18 nt, Artificial Sequence
  Synthetic
gcuaaauaauaauauucc

SEQ ID NO: 535226 - RNA, 19 nt, Artificial Sequence
  Synthetic
ugcuaaauaauaauauucc

SEQ ID NO: 535227 - RNA, 20 nt, Artificial Sequence
  Synthetic
gugcuaaauaauaauauucc

SEQ ID NO: 535228 - RNA, 21 nt, Artificial Sequence
  Synthetic
ggugcuaaauaauaauauucc

SEQ ID NO: 535229 - RNA, 22 nt, Artificial Sequence
  Synthetic
uggugcuaaauaauaauauucc

SEQ ID NO: 535230 - RNA, 23 nt, Artificial Sequence
  Synthetic
uuggugcuaaauaauaauauucc

SEQ ID NO: 535231 - RNA, 24 nt, Artificial Sequence
  Synthetic
cuuggugcuaaauaauaauauucc

SEQ ID NO: 535232 - RNA, 18 nt, Artificial Sequence
  Synthetic
aauaacagcuaauauucc

SEQ ID NO: 535233 - RNA, 19 nt, Artificial Sequence
  Synthetic
caauaacagcuaauauucc

SEQ ID NO: 535234 - RNA, 20 nt, Artificial Sequence
  Synthetic
acaauaacagcuaauauucc

SEQ ID NO: 535235 - RNA, 21 nt, Artificial Sequence
  Synthetic
uacaauaacagcuaauauucc

SEQ ID NO: 535236 - RNA, 22 nt, Artificial Sequence
  Synthetic
auacaauaacagcuaauauucc

SEQ ID NO: 535237 - RNA, 23 nt, Artificial Sequence
  Synthetic
aauacaauaacagcuaauauucc

SEQ ID NO: 535238 - RNA, 24 nt, Artificial Sequence
  Synthetic
aaauacaauaacagcuaauauucc

SEQ ID NO: 535239 - RNA, 18 nt, Artificial Sequence
  Synthetic
aaagcaauuugauauucc

SEQ ID NO: 535240 - RNA, 19 nt, Artificial Sequence
  Synthetic
caaagcaauuugauauucc

SEQ ID NO: 535241 - RNA, 20 nt, Artificial Sequence
  Synthetic
acaaagcaauuugauauucc

SEQ ID NO: 535242 - RNA, 21 nt, Artificial Sequence
  Synthetic
cacaaagcaauuugauauucc

SEQ ID NO: 535243 - RNA, 22 nt, Artificial Sequence
  Synthetic
acacaaagcaauuugauauucc

SEQ ID NO: 535244 - RNA, 23 nt, Artificial Sequence
  Synthetic
gacacaaagcaauuugauauucc

SEQ ID NO: 535245 - RNA, 24 nt, Artificial Sequence
  Synthetic
ugacacaaagcaauuugauauucc

SEQ ID NO: 535246 - RNA, 18 nt, Artificial Sequence
  Synthetic
aguacacaaguauauucc

SEQ ID NO: 535247 - RNA, 19 nt, Artificial Sequence
  Synthetic
aaguacacaaguauauucc

SEQ ID NO: 535248 - RNA, 20 nt, Artificial Sequence
  Synthetic
uaaguacacaaguauauucc

SEQ ID NO: 535249 - RNA, 21 nt, Artificial Sequence
  Synthetic
uuaaguacacaaguauauucc

SEQ ID NO: 535250 - RNA, 22 nt, Artificial Sequence
  Synthetic
auuaaguacacaaguauauucc

SEQ ID NO: 535251 - RNA, 23 nt, Artificial Sequence
  Synthetic
cauuaaguacacaaguauauucc

SEQ ID NO: 535252 - RNA, 24 nt, Artificial Sequence
  Synthetic
ccauuaaguacacaaguauauucc

SEQ ID NO: 535253 - RNA, 18 nt, Artificial Sequence
  Synthetic
caaaaauaguuauauucc

SEQ ID NO: 535254 - RNA, 19 nt, Artificial Sequence
  Synthetic
acaaaaauaguuauauucc

SEQ ID NO: 535255 - RNA, 20 nt, Artificial Sequence
  Synthetic
uacaaaaauaguuauauucc

SEQ ID NO: 535256 - RNA, 21 nt, Artificial Sequence
  Synthetic
guacaaaaauaguuauauucc

SEQ ID NO: 535257 - RNA, 22 nt, Artificial Sequence
  Synthetic
gguacaaaaauaguuauauucc

SEQ ID NO: 535258 - RNA, 23 nt, Artificial Sequence
  Synthetic
agguacaaaaauaguuauauucc

SEQ ID NO: 535259 - RNA, 24 nt, Artificial Sequence
  Synthetic
gagguacaaaaauaguuauauucc

SEQ ID NO: 535260 - RNA, 18 nt, Artificial Sequence
  Synthetic
caauauuuauacuauucc

SEQ ID NO: 535261 - RNA, 19 nt, Artificial Sequence
  Synthetic
acaauauuuauacuauucc

SEQ ID NO: 535262 - RNA, 20 nt, Artificial Sequence
  Synthetic
cacaauauuuauacuauucc

SEQ ID NO: 535263 - RNA, 21 nt, Artificial Sequence
  Synthetic
ccacaauauuuauacuauucc

SEQ ID NO: 535264 - RNA, 22 nt, Artificial Sequence
  Synthetic
gccacaauauuuauacuauucc

SEQ ID NO: 535265 - RNA, 23 nt, Artificial Sequence
  Synthetic
ggccacaauauuuauacuauucc

SEQ ID NO: 535266 - RNA, 24 nt, Artificial Sequence
  Synthetic
uggccacaauauuuauacuauucc

SEQ ID NO: 535267 - RNA, 18 nt, Artificial Sequence
  Synthetic
ucagucauacucuauucc

SEQ ID NO: 535268 - RNA, 19 nt, Artificial Sequence
  Synthetic
uucagucauacucuauucc

SEQ ID NO: 535269 - RNA, 20 nt, Artificial Sequence
  Synthetic
auucagucauacucuauucc

SEQ ID NO: 535270 - RNA, 21 nt, Artificial Sequence
  Synthetic
cauucagucauacucuauucc

SEQ ID NO: 535271 - RNA, 22 nt, Artificial Sequence
  Synthetic
gcauucagucauacucuauucc

SEQ ID NO: 535272 - RNA, 23 nt, Artificial Sequence
  Synthetic
ugcauucagucauacucuauucc

SEQ ID NO: 535273 - RNA, 24 nt, Artificial Sequence
  Synthetic
gugcauucagucauacucuauucc

SEQ ID NO: 535274 - RNA, 18 nt, Artificial Sequence
  Synthetic
aauggaauucucuauucc

SEQ ID NO: 535275 - RNA, 19 nt, Artificial Sequence
  Synthetic
aaauggaauucucuauucc

SEQ ID NO: 535276 - RNA, 20 nt, Artificial Sequence
  Synthetic
caaauggaauucucuauucc

SEQ ID NO: 535277 - RNA, 21 nt, Artificial Sequence
  Synthetic
ccaaauggaauucucuauucc

SEQ ID NO: 535278 - RNA, 22 nt, Artificial Sequence
  Synthetic
cccaaauggaauucucuauucc

SEQ ID NO: 535279 - RNA, 23 nt, Artificial Sequence
  Synthetic
ucccaaauggaauucucuauucc

SEQ ID NO: 535280 - RNA, 24 nt, Artificial Sequence
  Synthetic
uucccaaauggaauucucuauucc

SEQ ID NO: 535281 - RNA, 18 nt, Artificial Sequence
  Synthetic
aaagacgaaggguauucc

SEQ ID NO: 535282 - RNA, 19 nt, Artificial Sequence
  Synthetic
gaaagacgaaggguauucc

SEQ ID NO: 535283 - RNA, 20 nt, Artificial Sequence
  Synthetic
agaaagacgaaggguauucc

SEQ ID NO: 535284 - RNA, 21 nt, Artificial Sequence
  Synthetic
aagaaagacgaaggguauucc

SEQ ID NO: 535285 - RNA, 22 nt, Artificial Sequence
  Synthetic
gaagaaagacgaaggguauucc

SEQ ID NO: 535286 - RNA, 23 nt, Artificial Sequence
  Synthetic
ugaagaaagacgaaggguauucc

SEQ ID NO: 535287 - RNA, 24 nt, Artificial Sequence
  Synthetic
augaagaaagacgaaggguauucc

SEQ ID NO: 535288 - RNA, 18 nt, Artificial Sequence
  Synthetic
uauauuugaugguauucc

SEQ ID NO: 535289 - RNA, 19 nt, Artificial Sequence
  Synthetic
uuauauuugaugguauucc

SEQ ID NO: 535290 - RNA, 20 nt, Artificial Sequence
  Synthetic
uuuauauuugaugguauucc

SEQ ID NO: 535291 - RNA, 21 nt, Artificial Sequence
  Synthetic
auuuauauuugaugguauucc

SEQ ID NO: 535292 - RNA, 22 nt, Artificial Sequence
  Synthetic
cauuuauauuugaugguauucc

SEQ ID NO: 535293 - RNA, 23 nt, Artificial Sequence
  Synthetic
acauuuauauuugaugguauucc

SEQ ID NO: 535294 - RNA, 24 nt, Artificial Sequence
  Synthetic
cacauuuauauuugaugguauucc

SEQ ID NO: 535295 - RNA, 18 nt, Artificial Sequence
  Synthetic
gcagagagaauguauucc

SEQ ID NO: 535296 - RNA, 19 nt, Artificial Sequence
  Synthetic
ggcagagagaauguauucc

SEQ ID NO: 535297 - RNA, 20 nt, Artificial Sequence
  Synthetic
cggcagagagaauguauucc

SEQ ID NO: 535298 - RNA, 21 nt, Artificial Sequence
  Synthetic
acggcagagagaauguauucc

SEQ ID NO: 535299 - RNA, 22 nt, Artificial Sequence
  Synthetic
gacggcagagagaauguauucc

SEQ ID NO: 535300 - RNA, 23 nt, Artificial Sequence
  Synthetic
ggacggcagagagaauguauucc

SEQ ID NO: 535301 - RNA, 24 nt, Artificial Sequence
  Synthetic
uggacggcagagagaauguauucc

SEQ ID NO: 535302 - RNA, 18 nt, Artificial Sequence
  Synthetic
gccaaaguuaauuauucc

SEQ ID NO: 535303 - RNA, 19 nt, Artificial Sequence
  Synthetic
agccaaaguuaauuauucc

SEQ ID NO: 535304 - RNA, 20 nt, Artificial Sequence
  Synthetic
aagccaaaguuaauuauucc

SEQ ID NO: 535305 - RNA, 21 nt, Artificial Sequence
  Synthetic
aaagccaaaguuaauuauucc

SEQ ID NO: 535306 - RNA, 22 nt, Artificial Sequence
  Synthetic
caaagccaaaguuaauuauucc

SEQ ID NO: 535307 - RNA, 23 nt, Artificial Sequence
  Synthetic
ucaaagccaaaguuaauuauucc

SEQ ID NO: 535308 - RNA, 24 nt, Artificial Sequence
  Synthetic
aucaaagccaaaguuaauuauucc

SEQ ID NO: 535309 - RNA, 18 nt, Artificial Sequence
  Synthetic
gggggggauauuuauucc

SEQ ID NO: 535310 - RNA, 19 nt, Artificial Sequence
  Synthetic
agggggggauauuuauucc

SEQ ID NO: 535311 - RNA, 20 nt, Artificial Sequence
  Synthetic
gagggggggauauuuauucc

SEQ ID NO: 535312 - RNA, 21 nt, Artificial Sequence
  Synthetic
ggagggggggauauuuauucc

SEQ ID NO: 535313 - RNA, 22 nt, Artificial Sequence
  Synthetic
aggagggggggauauuuauucc

SEQ ID NO: 535314 - RNA, 23 nt, Artificial Sequence
  Synthetic
aaggagggggggauauuuauucc

SEQ ID NO: 535315 - RNA, 24 nt, Artificial Sequence
  Synthetic
aaaggagggggggauauuuauucc

SEQ ID NO: 535316 - RNA, 18 nt, Artificial Sequence
  Synthetic
agguauaugcuuuauucc

SEQ ID NO: 535317 - RNA, 19 nt, Artificial Sequence
  Synthetic
gagguauaugcuuuauucc

SEQ ID NO: 535318 - RNA, 20 nt, Artificial Sequence
  Synthetic
ugagguauaugcuuuauucc

SEQ ID NO: 535319 - RNA, 21 nt, Artificial Sequence
  Synthetic
cugagguauaugcuuuauucc

SEQ ID NO: 535320 - RNA, 22 nt, Artificial Sequence
  Synthetic
ccugagguauaugcuuuauucc

SEQ ID NO: 535321 - RNA, 23 nt, Artificial Sequence
  Synthetic
gccugagguauaugcuuuauucc

SEQ ID NO: 535322 - RNA, 24 nt, Artificial Sequence
  Synthetic
ggccugagguauaugcuuuauucc

SEQ ID NO: 535323 - RNA, 18 nt, Artificial Sequence
  Synthetic
uguauauagguuuauucc

SEQ ID NO: 535324 - RNA, 19 nt, Artificial Sequence
  Synthetic
auguauauagguuuauucc

SEQ ID NO: 535325 - RNA, 20 nt, Artificial Sequence
  Synthetic
cauguauauagguuuauucc

SEQ ID NO: 535326 - RNA, 21 nt, Artificial Sequence
  Synthetic
ccauguauauagguuuauucc

SEQ ID NO: 535327 - RNA, 22 nt, Artificial Sequence
  Synthetic
gccauguauauagguuuauucc

SEQ ID NO: 535328 - RNA, 23 nt, Artificial Sequence
  Synthetic
ggccauguauauagguuuauucc

SEQ ID NO: 535329 - RNA, 24 nt, Artificial Sequence
  Synthetic
aggccauguauauagguuuauucc

SEQ ID NO: 535330 - RNA, 18 nt, Artificial Sequence
  Synthetic
accuggaaauuuuauucc

SEQ ID NO: 535331 - RNA, 19 nt, Artificial Sequence
  Synthetic
gaccuggaaauuuuauucc

SEQ ID NO: 535332 - RNA, 20 nt, Artificial Sequence
  Synthetic
ugaccuggaaauuuuauucc

SEQ ID NO: 535333 - RNA, 21 nt, Artificial Sequence
  Synthetic
uugaccuggaaauuuuauucc

SEQ ID NO: 535334 - RNA, 22 nt, Artificial Sequence
  Synthetic
uuugaccuggaaauuuuauucc

SEQ ID NO: 535335 - RNA, 23 nt, Artificial Sequence
  Synthetic
cuuugaccuggaaauuuuauucc

SEQ ID NO: 535336 - RNA, 24 nt, Artificial Sequence
  Synthetic
acuuugaccuggaaauuuuauucc

SEQ ID NO: 535337 - RNA, 18 nt, Artificial Sequence
  Synthetic
ggaaacucuggaacuucc

SEQ ID NO: 535338 - RNA, 19 nt, Artificial Sequence
  Synthetic
gggaaacucuggaacuucc

SEQ ID NO: 535339 - RNA, 20 nt, Artificial Sequence
  Synthetic
ugggaaacucuggaacuucc

SEQ ID NO: 535340 - RNA, 21 nt, Artificial Sequence
  Synthetic
augggaaacucuggaacuucc

SEQ ID NO: 535341 - RNA, 22 nt, Artificial Sequence
  Synthetic
uaugggaaacucuggaacuucc

SEQ ID NO: 535342 - RNA, 23 nt, Artificial Sequence
  Synthetic
guaugggaaacucuggaacuucc

SEQ ID NO: 535343 - RNA, 24 nt, Artificial Sequence
  Synthetic
aguaugggaaacucuggaacuucc

SEQ ID NO: 535344 - RNA, 18 nt, Artificial Sequence
  Synthetic
gaaaaguuuggaacuucc

SEQ ID NO: 535345 - RNA, 19 nt, Artificial Sequence
  Synthetic
ggaaaaguuuggaacuucc

SEQ ID NO: 535346 - RNA, 20 nt, Artificial Sequence
  Synthetic
uggaaaaguuuggaacuucc

SEQ ID NO: 535347 - RNA, 21 nt, Artificial Sequence
  Synthetic
guggaaaaguuuggaacuucc

SEQ ID NO: 535348 - RNA, 22 nt, Artificial Sequence
  Synthetic
uguggaaaaguuuggaacuucc

SEQ ID NO: 535349 - RNA, 23 nt, Artificial Sequence
  Synthetic
auguggaaaaguuuggaacuucc

SEQ ID NO: 535350 - RNA, 24 nt, Artificial Sequence
  Synthetic
aauguggaaaaguuuggaacuucc

SEQ ID NO: 535351 - RNA, 18 nt, Artificial Sequence
  Synthetic
ggaaaguuuggaacuucc

SEQ ID NO: 535352 - RNA, 19 nt, Artificial Sequence
  Synthetic
gggaaaguuuggaacuucc

SEQ ID NO: 535353 - RNA, 20 nt, Artificial Sequence
  Synthetic
ugggaaaguuuggaacuucc

SEQ ID NO: 535354 - RNA, 21 nt, Artificial Sequence
  Synthetic
gugggaaaguuuggaacuucc

SEQ ID NO: 535355 - RNA, 22 nt, Artificial Sequence
  Synthetic
ugugggaaaguuuggaacuucc

SEQ ID NO: 535356 - RNA, 23 nt, Artificial Sequence
  Synthetic
augugggaaaguuuggaacuucc

SEQ ID NO: 535357 - RNA, 24 nt, Artificial Sequence
  Synthetic
gaugugggaaaguuuggaacuucc

SEQ ID NO: 535358 - RNA, 18 nt, Artificial Sequence
  Synthetic
auccaaaaaguaacuucc

SEQ ID NO: 535359 - RNA, 19 nt, Artificial Sequence
  Synthetic
cauccaaaaaguaacuucc

SEQ ID NO: 535360 - RNA, 20 nt, Artificial Sequence
  Synthetic
gcauccaaaaaguaacuucc

SEQ ID NO: 535361 - RNA, 21 nt, Artificial Sequence
  Synthetic
agcauccaaaaaguaacuucc

SEQ ID NO: 535362 - RNA, 22 nt, Artificial Sequence
  Synthetic
cagcauccaaaaaguaacuucc

SEQ ID NO: 535363 - RNA, 23 nt, Artificial Sequence
  Synthetic
acagcauccaaaaaguaacuucc

SEQ ID NO: 535364 - RNA, 24 nt, Artificial Sequence
  Synthetic
gacagcauccaaaaaguaacuucc

SEQ ID NO: 535365 - RNA, 18 nt, Artificial Sequence
  Synthetic
uaaaaauaaguaacuucc

SEQ ID NO: 535366 - RNA, 19 nt, Artificial Sequence
  Synthetic
auaaaaauaaguaacuucc

SEQ ID NO: 535367 - RNA, 20 nt, Artificial Sequence
  Synthetic
uauaaaaauaaguaacuucc

SEQ ID NO: 535368 - RNA, 21 nt, Artificial Sequence
  Synthetic
guauaaaaauaaguaacuucc

SEQ ID NO: 535369 - RNA, 22 nt, Artificial Sequence
  Synthetic
uguauaaaaauaaguaacuucc

SEQ ID NO: 535370 - RNA, 23 nt, Artificial Sequence
  Synthetic
auguauaaaaauaaguaacuucc

SEQ ID NO: 535371 - RNA, 24 nt, Artificial Sequence
  Synthetic
uauguauaaaaauaaguaacuucc

SEQ ID NO: 535372 - RNA, 18 nt, Artificial Sequence
  Synthetic
acaucuaaaaacacuucc

SEQ ID NO: 535373 - RNA, 19 nt, Artificial Sequence
  Synthetic
uacaucuaaaaacacuucc

SEQ ID NO: 535374 - RNA, 20 nt, Artificial Sequence
  Synthetic
uuacaucuaaaaacacuucc

SEQ ID NO: 535375 - RNA, 21 nt, Artificial Sequence
  Synthetic
uuuacaucuaaaaacacuucc

SEQ ID NO: 535376 - RNA, 22 nt, Artificial Sequence
  Synthetic
cuuuacaucuaaaaacacuucc

SEQ ID NO: 535377 - RNA, 23 nt, Artificial Sequence
  Synthetic
acuuuacaucuaaaaacacuucc

SEQ ID NO: 535378 - RNA, 24 nt, Artificial Sequence
  Synthetic
uacuuuacaucuaaaaacacuucc

SEQ ID NO: 535379 - RNA, 18 nt, Artificial Sequence
  Synthetic
uaaaugaaacucacuucc

SEQ ID NO: 535380 - RNA, 19 nt, Artificial Sequence
  Synthetic
guaaaugaaacucacuucc

SEQ ID NO: 535381 - RNA, 20 nt, Artificial Sequence
  Synthetic
uguaaaugaaacucacuucc

SEQ ID NO: 535382 - RNA, 21 nt, Artificial Sequence
  Synthetic
auguaaaugaaacucacuucc

SEQ ID NO: 535383 - RNA, 22 nt, Artificial Sequence
  Synthetic
aauguaaaugaaacucacuucc

SEQ ID NO: 535384 - RNA, 23 nt, Artificial Sequence
  Synthetic
aaauguaaaugaaacucacuucc

SEQ ID NO: 535385 - RNA, 24 nt, Artificial Sequence
  Synthetic
aaaauguaaaugaaacucacuucc

SEQ ID NO: 535386 - RNA, 18 nt, Artificial Sequence
  Synthetic
cuucuuuuuccaccuucc

SEQ ID NO: 535387 - RNA, 19 nt, Artificial Sequence
  Synthetic
ccuucuuuuuccaccuucc

SEQ ID NO: 535388 - RNA, 20 nt, Artificial Sequence
  Synthetic
cccuucuuuuuccaccuucc

SEQ ID NO: 535389 - RNA, 21 nt, Artificial Sequence
  Synthetic
ucccuucuuuuuccaccuucc

SEQ ID NO: 535390 - RNA, 22 nt, Artificial Sequence
  Synthetic
uucccuucuuuuuccaccuucc

SEQ ID NO: 535391 - RNA, 23 nt, Artificial Sequence
  Synthetic
uuucccuucuuuuuccaccuucc

SEQ ID NO: 535392 - RNA, 24 nt, Artificial Sequence
  Synthetic
uuuucccuucuuuuuccaccuucc

SEQ ID NO: 535393 - RNA, 18 nt, Artificial Sequence
  Synthetic
uccagacaucacccuucc

SEQ ID NO: 535394 - RNA, 19 nt, Artificial Sequence
  Synthetic
uuccagacaucacccuucc

SEQ ID NO: 535395 - RNA, 20 nt, Artificial Sequence
  Synthetic
uuuccagacaucacccuucc

SEQ ID NO: 535396 - RNA, 21 nt, Artificial Sequence
  Synthetic
auuuccagacaucacccuucc

SEQ ID NO: 535397 - RNA, 22 nt, Artificial Sequence
  Synthetic
cauuuccagacaucacccuucc

SEQ ID NO: 535398 - RNA, 23 nt, Artificial Sequence
  Synthetic
ucauuuccagacaucacccuucc

SEQ ID NO: 535399 - RNA, 24 nt, Artificial Sequence
  Synthetic
aucauuuccagacaucacccuucc

SEQ ID NO: 535400 - RNA, 18 nt, Artificial Sequence
  Synthetic
ucuagauaucacccuucc

SEQ ID NO: 535401 - RNA, 19 nt, Artificial Sequence
  Synthetic
uucuagauaucacccuucc

SEQ ID NO: 535402 - RNA, 20 nt, Artificial Sequence
  Synthetic
uuucuagauaucacccuucc

SEQ ID NO: 535403 - RNA, 21 nt, Artificial Sequence
  Synthetic
uuuucuagauaucacccuucc

SEQ ID NO: 535404 - RNA, 22 nt, Artificial Sequence
  Synthetic
cuuuucuagauaucacccuucc

SEQ ID NO: 535405 - RNA, 23 nt, Artificial Sequence
  Synthetic
ucuuuucuagauaucacccuucc

SEQ ID NO: 535406 - RNA, 24 nt, Artificial Sequence
  Synthetic
aucuuuucuagauaucacccuucc

SEQ ID NO: 535407 - RNA, 18 nt, Artificial Sequence
  Synthetic
gauaauuucuccccuucc

SEQ ID NO: 535408 - RNA, 19 nt, Artificial Sequence
  Synthetic
ggauaauuucuccccuucc

SEQ ID NO: 535409 - RNA, 20 nt, Artificial Sequence
  Synthetic
uggauaauuucuccccuucc

SEQ ID NO: 535410 - RNA, 21 nt, Artificial Sequence
  Synthetic
auggauaauuucuccccuucc

SEQ ID NO: 535411 - RNA, 22 nt, Artificial Sequence
  Synthetic
aauggauaauuucuccccuucc

SEQ ID NO: 535412 - RNA, 23 nt, Artificial Sequence
  Synthetic
aaauggauaauuucuccccuucc

SEQ ID NO: 535413 - RNA, 24 nt, Artificial Sequence
  Synthetic
uaaauggauaauuucuccccuucc

SEQ ID NO: 535414 - RNA, 18 nt, Artificial Sequence
  Synthetic
auggcuuaaugcccuucc

SEQ ID NO: 535415 - RNA, 19 nt, Artificial Sequence
  Synthetic
aauggcuuaaugcccuucc

SEQ ID NO: 535416 - RNA, 20 nt, Artificial Sequence
  Synthetic
gaauggcuuaaugcccuucc

SEQ ID NO: 535417 - RNA, 21 nt, Artificial Sequence
  Synthetic
ugaauggcuuaaugcccuucc

SEQ ID NO: 535418 - RNA, 22 nt, Artificial Sequence
  Synthetic
uugaauggcuuaaugcccuucc

SEQ ID NO: 535419 - RNA, 23 nt, Artificial Sequence
  Synthetic
cuugaauggcuuaaugcccuucc

SEQ ID NO: 535420 - RNA, 24 nt, Artificial Sequence
  Synthetic
ucuugaauggcuuaaugcccuucc

SEQ ID NO: 535421 - RNA, 18 nt, Artificial Sequence
  Synthetic
gcauccaaugucccuucc

SEQ ID NO: 535422 - RNA, 19 nt, Artificial Sequence
  Synthetic
ugcauccaaugucccuucc

SEQ ID NO: 535423 - RNA, 20 nt, Artificial Sequence
  Synthetic
cugcauccaaugucccuucc

SEQ ID NO: 535424 - RNA, 21 nt, Artificial Sequence
  Synthetic
acugcauccaaugucccuucc

SEQ ID NO: 535425 - RNA, 22 nt, Artificial Sequence
  Synthetic
aacugcauccaaugucccuucc

SEQ ID NO: 535426 - RNA, 23 nt, Artificial Sequence
  Synthetic
caacugcauccaaugucccuucc

SEQ ID NO: 535427 - RNA, 24 nt, Artificial Sequence
  Synthetic
acaacugcauccaaugucccuucc

SEQ ID NO: 535428 - RNA, 18 nt, Artificial Sequence
  Synthetic
auuuucuaucagccuucc

SEQ ID NO: 535429 - RNA, 19 nt, Artificial Sequence
  Synthetic
aauuuucuaucagccuucc

SEQ ID NO: 535430 - RNA, 20 nt, Artificial Sequence
  Synthetic
uaauuuucuaucagccuucc

SEQ ID NO: 535431 - RNA, 21 nt, Artificial Sequence
  Synthetic
uuaauuuucuaucagccuucc

SEQ ID NO: 535432 - RNA, 22 nt, Artificial Sequence
  Synthetic
guuaauuuucuaucagccuucc

SEQ ID NO: 535433 - RNA, 23 nt, Artificial Sequence
  Synthetic
gguuaauuuucuaucagccuucc

SEQ ID NO: 535434 - RNA, 24 nt, Artificial Sequence
  Synthetic
agguuaauuuucuaucagccuucc

SEQ ID NO: 535435 - RNA, 18 nt, Artificial Sequence
  Synthetic
uaaggcagagagccuucc

SEQ ID NO: 535436 - RNA, 19 nt, Artificial Sequence
  Synthetic
cuaaggcagagagccuucc

SEQ ID NO: 535437 - RNA, 20 nt, Artificial Sequence
  Synthetic
acuaaggcagagagccuucc

SEQ ID NO: 535438 - RNA, 21 nt, Artificial Sequence
  Synthetic
uacuaaggcagagagccuucc

SEQ ID NO: 535439 - RNA, 22 nt, Artificial Sequence
  Synthetic
auacuaaggcagagagccuucc

SEQ ID NO: 535440 - RNA, 23 nt, Artificial Sequence
  Synthetic
aauacuaaggcagagagccuucc

SEQ ID NO: 535441 - RNA, 24 nt, Artificial Sequence
  Synthetic
gaauacuaaggcagagagccuucc

SEQ ID NO: 535442 - RNA, 18 nt, Artificial Sequence
  Synthetic
aaauccucugugccuucc

SEQ ID NO: 535443 - RNA, 19 nt, Artificial Sequence
  Synthetic
aaaauccucugugccuucc

SEQ ID NO: 535444 - RNA, 20 nt, Artificial Sequence
  Synthetic
gaaaauccucugugccuucc

SEQ ID NO: 535445 - RNA, 21 nt, Artificial Sequence
  Synthetic
ugaaaauccucugugccuucc

SEQ ID NO: 535446 - RNA, 22 nt, Artificial Sequence
  Synthetic
cugaaaauccucugugccuucc

SEQ ID NO: 535447 - RNA, 23 nt, Artificial Sequence
  Synthetic
gcugaaaauccucugugccuucc

SEQ ID NO: 535448 - RNA, 24 nt, Artificial Sequence
  Synthetic
ggcugaaaauccucugugccuucc

SEQ ID NO: 535449 - RNA, 18 nt, Artificial Sequence
  Synthetic
uuacaaauguugccuucc

SEQ ID NO: 535450 - RNA, 19 nt, Artificial Sequence
  Synthetic
auuacaaauguugccuucc

SEQ ID NO: 535451 - RNA, 20 nt, Artificial Sequence
  Synthetic
uauuacaaauguugccuucc

SEQ ID NO: 535452 - RNA, 21 nt, Artificial Sequence
  Synthetic
guauuacaaauguugccuucc

SEQ ID NO: 535453 - RNA, 22 nt, Artificial Sequence
  Synthetic
uguauuacaaauguugccuucc

SEQ ID NO: 535454 - RNA, 23 nt, Artificial Sequence
  Synthetic
cuguauuacaaauguugccuucc

SEQ ID NO: 535455 - RNA, 24 nt, Artificial Sequence
  Synthetic
acuguauuacaaauguugccuucc

SEQ ID NO: 535456 - RNA, 18 nt, Artificial Sequence
  Synthetic
aaaucgggaaaagcuucc

SEQ ID NO: 535457 - RNA, 19 nt, Artificial Sequence
  Synthetic
aaaaucgggaaaagcuucc

SEQ ID NO: 535458 - RNA, 20 nt, Artificial Sequence
  Synthetic
gaaaaucgggaaaagcuucc

SEQ ID NO: 535459 - RNA, 21 nt, Artificial Sequence
  Synthetic
agaaaaucgggaaaagcuucc

SEQ ID NO: 535460 - RNA, 22 nt, Artificial Sequence
  Synthetic
aagaaaaucgggaaaagcuucc

SEQ ID NO: 535461 - RNA, 23 nt, Artificial Sequence
  Synthetic
gaagaaaaucgggaaaagcuucc

SEQ ID NO: 535462 - RNA, 24 nt, Artificial Sequence
  Synthetic
ggaagaaaaucgggaaaagcuucc

SEQ ID NO: 535463 - RNA, 18 nt, Artificial Sequence
  Synthetic
gauauagaaugagcuucc

SEQ ID NO: 535464 - RNA, 19 nt, Artificial Sequence
  Synthetic
ugauauagaaugagcuucc

SEQ ID NO: 535465 - RNA, 20 nt, Artificial Sequence
  Synthetic
gugauauagaaugagcuucc

SEQ ID NO: 535466 - RNA, 21 nt, Artificial Sequence
  Synthetic
ugugauauagaaugagcuucc

SEQ ID NO: 535467 - RNA, 22 nt, Artificial Sequence
  Synthetic
gugugauauagaaugagcuucc

SEQ ID NO: 535468 - RNA, 23 nt, Artificial Sequence
  Synthetic
ugugugauauagaaugagcuucc

SEQ ID NO: 535469 - RNA, 24 nt, Artificial Sequence
  Synthetic
augugugauauagaaugagcuucc

SEQ ID NO: 535470 - RNA, 18 nt, Artificial Sequence
  Synthetic
cacaccagaugagcuucc

SEQ ID NO: 535471 - RNA, 19 nt, Artificial Sequence
  Synthetic
ucacaccagaugagcuucc

SEQ ID NO: 535472 - RNA, 20 nt, Artificial Sequence
  Synthetic
uucacaccagaugagcuucc

SEQ ID NO: 535473 - RNA, 21 nt, Artificial Sequence
  Synthetic
guucacaccagaugagcuucc

SEQ ID NO: 535474 - RNA, 22 nt, Artificial Sequence
  Synthetic
aguucacaccagaugagcuucc

SEQ ID NO: 535475 - RNA, 23 nt, Artificial Sequence
  Synthetic
aaguucacaccagaugagcuucc

SEQ ID NO: 535476 - RNA, 24 nt, Artificial Sequence
  Synthetic
aaaguucacaccagaugagcuucc

SEQ ID NO: 535477 - RNA, 18 nt, Artificial Sequence
  Synthetic
gaacuauguguagcuucc

SEQ ID NO: 535478 - RNA, 19 nt, Artificial Sequence
  Synthetic
ggaacuauguguagcuucc

SEQ ID NO: 535479 - RNA, 20 nt, Artificial Sequence
  Synthetic
gggaacuauguguagcuucc

SEQ ID NO: 535480 - RNA, 21 nt, Artificial Sequence
  Synthetic
ugggaacuauguguagcuucc

SEQ ID NO: 535481 - RNA, 22 nt, Artificial Sequence
  Synthetic
uugggaacuauguguagcuucc

SEQ ID NO: 535482 - RNA, 23 nt, Artificial Sequence
  Synthetic
uuugggaacuauguguagcuucc

SEQ ID NO: 535483 - RNA, 24 nt, Artificial Sequence
  Synthetic
uuuugggaacuauguguagcuucc

SEQ ID NO: 535484 - RNA, 18 nt, Artificial Sequence
  Synthetic
agcugagguaaggcuucc

SEQ ID NO: 535485 - RNA, 19 nt, Artificial Sequence
  Synthetic
cagcugagguaaggcuucc

SEQ ID NO: 535486 - RNA, 20 nt, Artificial Sequence
  Synthetic
ucagcugagguaaggcuucc

SEQ ID NO: 535487 - RNA, 21 nt, Artificial Sequence
  Synthetic
cucagcugagguaaggcuucc

SEQ ID NO: 535488 - RNA, 22 nt, Artificial Sequence
  Synthetic
ucucagcugagguaaggcuucc

SEQ ID NO: 535489 - RNA, 23 nt, Artificial Sequence
  Synthetic
gucucagcugagguaaggcuucc

SEQ ID NO: 535490 - RNA, 24 nt, Artificial Sequence
  Synthetic
ggucucagcugagguaaggcuucc

SEQ ID NO: 535491 - RNA, 18 nt, Artificial Sequence
  Synthetic
cuagaacugauggcuucc

SEQ ID NO: 535492 - RNA, 19 nt, Artificial Sequence
  Synthetic
ccuagaacugauggcuucc

SEQ ID NO: 535493 - RNA, 20 nt, Artificial Sequence
  Synthetic
uccuagaacugauggcuucc

SEQ ID NO: 535494 - RNA, 21 nt, Artificial Sequence
  Synthetic
auccuagaacugauggcuucc

SEQ ID NO: 535495 - RNA, 22 nt, Artificial Sequence
  Synthetic
gauccuagaacugauggcuucc

SEQ ID NO: 535496 - RNA, 23 nt, Artificial Sequence
  Synthetic
ggauccuagaacugauggcuucc

SEQ ID NO: 535497 - RNA, 24 nt, Artificial Sequence
  Synthetic
aggauccuagaacugauggcuucc

SEQ ID NO: 535498 - RNA, 18 nt, Artificial Sequence
  Synthetic
uccaaucuuuuggcuucc

SEQ ID NO: 535499 - RNA, 19 nt, Artificial Sequence
  Synthetic
auccaaucuuuuggcuucc

SEQ ID NO: 535500 - RNA, 20 nt, Artificial Sequence
  Synthetic
uauccaaucuuuuggcuucc

SEQ ID NO: 535501 - RNA, 21 nt, Artificial Sequence
  Synthetic
guauccaaucuuuuggcuucc

SEQ ID NO: 535502 - RNA, 22 nt, Artificial Sequence
  Synthetic
uguauccaaucuuuuggcuucc

SEQ ID NO: 535503 - RNA, 23 nt, Artificial Sequence
  Synthetic
cuguauccaaucuuuuggcuucc

SEQ ID NO: 535504 - RNA, 24 nt, Artificial Sequence
  Synthetic
gcuguauccaaucuuuuggcuucc

SEQ ID NO: 535505 - RNA, 18 nt, Artificial Sequence
  Synthetic
aacaagacuacugcuucc

SEQ ID NO: 535506 - RNA, 19 nt, Artificial Sequence
  Synthetic
aaacaagacuacugcuucc

SEQ ID NO: 535507 - RNA, 20 nt, Artificial Sequence
  Synthetic
gaaacaagacuacugcuucc

SEQ ID NO: 535508 - RNA, 21 nt, Artificial Sequence
  Synthetic
ugaaacaagacuacugcuucc

SEQ ID NO: 535509 - RNA, 22 nt, Artificial Sequence
  Synthetic
augaaacaagacuacugcuucc

SEQ ID NO: 535510 - RNA, 23 nt, Artificial Sequence
  Synthetic
caugaaacaagacuacugcuucc

SEQ ID NO: 535511 - RNA, 24 nt, Artificial Sequence
  Synthetic
ccaugaaacaagacuacugcuucc

SEQ ID NO: 535512 - RNA, 18 nt, Artificial Sequence
  Synthetic
aacgaaaggacaucuucc

SEQ ID NO: 535513 - RNA, 19 nt, Artificial Sequence
  Synthetic
uaacgaaaggacaucuucc

SEQ ID NO: 535514 - RNA, 20 nt, Artificial Sequence
  Synthetic
guaacgaaaggacaucuucc

SEQ ID NO: 535515 - RNA, 21 nt, Artificial Sequence
  Synthetic
aguaacgaaaggacaucuucc

SEQ ID NO: 535516 - RNA, 22 nt, Artificial Sequence
  Synthetic
gaguaacgaaaggacaucuucc

SEQ ID NO: 535517 - RNA, 23 nt, Artificial Sequence
  Synthetic
agaguaacgaaaggacaucuucc

SEQ ID NO: 535518 - RNA, 24 nt, Artificial Sequence
  Synthetic
cagaguaacgaaaggacaucuucc

SEQ ID NO: 535519 - RNA, 18 nt, Artificial Sequence
  Synthetic
guguuguguagaucuucc

SEQ ID NO: 535520 - RNA, 19 nt, Artificial Sequence
  Synthetic
aguguuguguagaucuucc

SEQ ID NO: 535521 - RNA, 20 nt, Artificial Sequence
  Synthetic
aaguguuguguagaucuucc

SEQ ID NO: 535522 - RNA, 21 nt, Artificial Sequence
  Synthetic
aaaguguuguguagaucuucc

SEQ ID NO: 535523 - RNA, 22 nt, Artificial Sequence
  Synthetic
uaaaguguuguguagaucuucc

SEQ ID NO: 535524 - RNA, 23 nt, Artificial Sequence
  Synthetic
cuaaaguguuguguagaucuucc

SEQ ID NO: 535525 - RNA, 24 nt, Artificial Sequence
  Synthetic
gcuaaaguguuguguagaucuucc

SEQ ID NO: 535526 - RNA, 18 nt, Artificial Sequence
  Synthetic
gcaauuuuaugaucuucc

SEQ ID NO: 535527 - RNA, 19 nt, Artificial Sequence
  Synthetic
agcaauuuuaugaucuucc

SEQ ID NO: 535528 - RNA, 20 nt, Artificial Sequence
  Synthetic
aagcaauuuuaugaucuucc

SEQ ID NO: 535529 - RNA, 21 nt, Artificial Sequence
  Synthetic
caagcaauuuuaugaucuucc

SEQ ID NO: 535530 - RNA, 22 nt, Artificial Sequence
  Synthetic
acaagcaauuuuaugaucuucc

SEQ ID NO: 535531 - RNA, 23 nt, Artificial Sequence
  Synthetic
aacaagcaauuuuaugaucuucc

SEQ ID NO: 535532 - RNA, 24 nt, Artificial Sequence
  Synthetic
aaacaagcaauuuuaugaucuucc

SEQ ID NO: 535533 - RNA, 18 nt, Artificial Sequence
  Synthetic
aguuucuguuacucuucc

SEQ ID NO: 535534 - RNA, 19 nt, Artificial Sequence
  Synthetic
gaguuucuguuacucuucc

SEQ ID NO: 535535 - RNA, 20 nt, Artificial Sequence
  Synthetic
ugaguuucuguuacucuucc

SEQ ID NO: 535536 - RNA, 21 nt, Artificial Sequence
  Synthetic
cugaguuucuguuacucuucc

SEQ ID NO: 535537 - RNA, 22 nt, Artificial Sequence
  Synthetic
acugaguuucuguuacucuucc

SEQ ID NO: 535538 - RNA, 23 nt, Artificial Sequence
  Synthetic
gacugaguuucuguuacucuucc

SEQ ID NO: 535539 - RNA, 24 nt, Artificial Sequence
  Synthetic
ugacugaguuucuguuacucuucc

SEQ ID NO: 535540 - RNA, 18 nt, Artificial Sequence
  Synthetic
ucauaccuaagcucuucc

SEQ ID NO: 535541 - RNA, 19 nt, Artificial Sequence
  Synthetic
aucauaccuaagcucuucc

SEQ ID NO: 535542 - RNA, 20 nt, Artificial Sequence
  Synthetic
gaucauaccuaagcucuucc

SEQ ID NO: 535543 - RNA, 21 nt, Artificial Sequence
  Synthetic
agaucauaccuaagcucuucc

SEQ ID NO: 535544 - RNA, 22 nt, Artificial Sequence
  Synthetic
cagaucauaccuaagcucuucc

SEQ ID NO: 535545 - RNA, 23 nt, Artificial Sequence
  Synthetic
acagaucauaccuaagcucuucc

SEQ ID NO: 535546 - RNA, 24 nt, Artificial Sequence
  Synthetic
aacagaucauaccuaagcucuucc

SEQ ID NO: 535547 - RNA, 18 nt, Artificial Sequence
  Synthetic
uguuuuucuuucucuucc

SEQ ID NO: 535548 - RNA, 19 nt, Artificial Sequence
  Synthetic
uuguuuuucuuucucuucc

SEQ ID NO: 535549 - RNA, 20 nt, Artificial Sequence
  Synthetic
guuguuuuucuuucucuucc

SEQ ID NO: 535550 - RNA, 21 nt, Artificial Sequence
  Synthetic
gguuguuuuucuuucucuucc

SEQ ID NO: 535551 - RNA, 22 nt, Artificial Sequence
  Synthetic
ggguuguuuuucuuucucuucc

SEQ ID NO: 535552 - RNA, 23 nt, Artificial Sequence
  Synthetic
uggguuguuuuucuuucucuucc

SEQ ID NO: 535553 - RNA, 24 nt, Artificial Sequence
  Synthetic
uuggguuguuuuucuuucucuucc

SEQ ID NO: 535554 - RNA, 18 nt, Artificial Sequence
  Synthetic
aaaagggcuaagucuucc

SEQ ID NO: 535555 - RNA, 19 nt, Artificial Sequence
  Synthetic
aaaaagggcuaagucuucc

SEQ ID NO: 535556 - RNA, 20 nt, Artificial Sequence
  Synthetic
gaaaaagggcuaagucuucc

SEQ ID NO: 535557 - RNA, 21 nt, Artificial Sequence
  Synthetic
ugaaaaagggcuaagucuucc

SEQ ID NO: 535558 - RNA, 22 nt, Artificial Sequence
  Synthetic
augaaaaagggcuaagucuucc

SEQ ID NO: 535559 - RNA, 23 nt, Artificial Sequence
  Synthetic
aaugaaaaagggcuaagucuucc

SEQ ID NO: 535560 - RNA, 24 nt, Artificial Sequence
  Synthetic
gaaugaaaaagggcuaagucuucc

SEQ ID NO: 535561 - RNA, 18 nt, Artificial Sequence
  Synthetic
acuauuugcuuuucuucc

SEQ ID NO: 535562 - RNA, 19 nt, Artificial Sequence
  Synthetic
cacuauuugcuuuucuucc

SEQ ID NO: 535563 - RNA, 20 nt, Artificial Sequence
  Synthetic
acacuauuugcuuuucuucc

SEQ ID NO: 535564 - RNA, 21 nt, Artificial Sequence
  Synthetic
aacacuauuugcuuuucuucc

SEQ ID NO: 535565 - RNA, 22 nt, Artificial Sequence
  Synthetic
uaacacuauuugcuuuucuucc

SEQ ID NO: 535566 - RNA, 23 nt, Artificial Sequence
  Synthetic
auaacacuauuugcuuuucuucc

SEQ ID NO: 535567 - RNA, 24 nt, Artificial Sequence
  Synthetic
uauaacacuauuugcuuuucuucc

SEQ ID NO: 535568 - RNA, 18 nt, Artificial Sequence
  Synthetic
agacaaaacaaaaguucc

SEQ ID NO: 535569 - RNA, 19 nt, Artificial Sequence
  Synthetic
uagacaaaacaaaaguucc

SEQ ID NO: 535570 - RNA, 20 nt, Artificial Sequence
  Synthetic
cuagacaaaacaaaaguucc

SEQ ID NO: 535571 - RNA, 21 nt, Artificial Sequence
  Synthetic
acuagacaaaacaaaaguucc

SEQ ID NO: 535572 - RNA, 22 nt, Artificial Sequence
  Synthetic
uacuagacaaaacaaaaguucc

SEQ ID NO: 535573 - RNA, 23 nt, Artificial Sequence
  Synthetic
auacuagacaaaacaaaaguucc

SEQ ID NO: 535574 - RNA, 24 nt, Artificial Sequence
  Synthetic
gauacuagacaaaacaaaaguucc

SEQ ID NO: 535575 - RNA, 18 nt, Artificial Sequence
  Synthetic
uaauuuuuuuaaaguucc

SEQ ID NO: 535576 - RNA, 19 nt, Artificial Sequence
  Synthetic
auaauuuuuuuaaaguucc

SEQ ID NO: 535577 - RNA, 20 nt, Artificial Sequence
  Synthetic
aauaauuuuuuuaaaguucc

SEQ ID NO: 535578 - RNA, 21 nt, Artificial Sequence
  Synthetic
aaauaauuuuuuuaaaguucc

SEQ ID NO: 535579 - RNA, 22 nt, Artificial Sequence
  Synthetic
uaaauaauuuuuuuaaaguucc

SEQ ID NO: 535580 - RNA, 23 nt, Artificial Sequence
  Synthetic
auaaauaauuuuuuuaaaguucc

SEQ ID NO: 535581 - RNA, 24 nt, Artificial Sequence
  Synthetic
aauaaauaauuuuuuuaaaguucc

SEQ ID NO: 535582 - RNA, 18 nt, Artificial Sequence
  Synthetic
uuuuuauguacaaguucc

SEQ ID NO: 535583 - RNA, 19 nt, Artificial Sequence
  Synthetic
cuuuuuauguacaaguucc

SEQ ID NO: 535584 - RNA, 20 nt, Artificial Sequence
  Synthetic
ucuuuuuauguacaaguucc

SEQ ID NO: 535585 - RNA, 21 nt, Artificial Sequence
  Synthetic
cucuuuuuauguacaaguucc

SEQ ID NO: 535586 - RNA, 22 nt, Artificial Sequence
  Synthetic
ucucuuuuuauguacaaguucc

SEQ ID NO: 535587 - RNA, 23 nt, Artificial Sequence
  Synthetic
cucucuuuuuauguacaaguucc

SEQ ID NO: 535588 - RNA, 24 nt, Artificial Sequence
  Synthetic
ucucucuuuuuauguacaaguucc

SEQ ID NO: 535589 - RNA, 18 nt, Artificial Sequence
  Synthetic
gccucaaguccaaguucc

SEQ ID NO: 535590 - RNA, 19 nt, Artificial Sequence
  Synthetic
ugccucaaguccaaguucc

SEQ ID NO: 535591 - RNA, 20 nt, Artificial Sequence
  Synthetic
gugccucaaguccaaguucc

SEQ ID NO: 535592 - RNA, 21 nt, Artificial Sequence
  Synthetic
ggugccucaaguccaaguucc

SEQ ID NO: 535593 - RNA, 22 nt, Artificial Sequence
  Synthetic
gggugccucaaguccaaguucc

SEQ ID NO: 535594 - RNA, 23 nt, Artificial Sequence
  Synthetic
ugggugccucaaguccaaguucc

SEQ ID NO: 535595 - RNA, 24 nt, Artificial Sequence
  Synthetic
uugggugccucaaguccaaguucc

SEQ ID NO: 535596 - RNA, 18 nt, Artificial Sequence
  Synthetic
cauggauggaacaguucc

SEQ ID NO: 535597 - RNA, 19 nt, Artificial Sequence
  Synthetic
acauggauggaacaguucc

SEQ ID NO: 535598 - RNA, 20 nt, Artificial Sequence
  Synthetic
aacauggauggaacaguucc

SEQ ID NO: 535599 - RNA, 21 nt, Artificial Sequence
  Synthetic
gaacauggauggaacaguucc

SEQ ID NO: 535600 - RNA, 22 nt, Artificial Sequence
  Synthetic
agaacauggauggaacaguucc

SEQ ID NO: 535601 - RNA, 23 nt, Artificial Sequence
  Synthetic
aagaacauggauggaacaguucc

SEQ ID NO: 535602 - RNA, 24 nt, Artificial Sequence
  Synthetic
gaagaacauggauggaacaguucc

SEQ ID NO: 535603 - RNA, 18 nt, Artificial Sequence
  Synthetic
aauaaauucuacaguucc

SEQ ID NO: 535604 - RNA, 19 nt, Artificial Sequence
  Synthetic
aaauaaauucuacaguucc

SEQ ID NO: 535605 - RNA, 20 nt, Artificial Sequence
  Synthetic
gaaauaaauucuacaguucc

SEQ ID NO: 535606 - RNA, 21 nt, Artificial Sequence
  Synthetic
ugaaauaaauucuacaguucc

SEQ ID NO: 535607 - RNA, 22 nt, Artificial Sequence
  Synthetic
cugaaauaaauucuacaguucc

SEQ ID NO: 535608 - RNA, 23 nt, Artificial Sequence
  Synthetic
acugaaauaaauucuacaguucc

SEQ ID NO: 535609 - RNA, 24 nt, Artificial Sequence
  Synthetic
uacugaaauaaauucuacaguucc

SEQ ID NO: 535610 - RNA, 18 nt, Artificial Sequence
  Synthetic
aaaaguaaccagaguucc

SEQ ID NO: 535611 - RNA, 19 nt, Artificial Sequence
  Synthetic
uaaaaguaaccagaguucc

SEQ ID NO: 535612 - RNA, 20 nt, Artificial Sequence
  Synthetic
cuaaaaguaaccagaguucc

SEQ ID NO: 535613 - RNA, 21 nt, Artificial Sequence
  Synthetic
ucuaaaaguaaccagaguucc

SEQ ID NO: 535614 - RNA, 22 nt, Artificial Sequence
  Synthetic
cucuaaaaguaaccagaguucc

SEQ ID NO: 535615 - RNA, 23 nt, Artificial Sequence
  Synthetic
ccucuaaaaguaaccagaguucc

SEQ ID NO: 535616 - RNA, 24 nt, Artificial Sequence
  Synthetic
accucuaaaaguaaccagaguucc

SEQ ID NO: 535617 - RNA, 18 nt, Artificial Sequence
  Synthetic
uucauauucuggaguucc

SEQ ID NO: 535618 - RNA, 19 nt, Artificial Sequence
  Synthetic
uuucauauucuggaguucc

SEQ ID NO: 535619 - RNA, 20 nt, Artificial Sequence
  Synthetic
guuucauauucuggaguucc

SEQ ID NO: 535620 - RNA, 21 nt, Artificial Sequence
  Synthetic
uguuucauauucuggaguucc

SEQ ID NO: 535621 - RNA, 22 nt, Artificial Sequence
  Synthetic
auguuucauauucuggaguucc

SEQ ID NO: 535622 - RNA, 23 nt, Artificial Sequence
  Synthetic
aauguuucauauucuggaguucc

SEQ ID NO: 535623 - RNA, 24 nt, Artificial Sequence
  Synthetic
aaauguuucauauucuggaguucc

SEQ ID NO: 535624 - RNA, 18 nt, Artificial Sequence
  Synthetic
uagaaaauguugaguucc

SEQ ID NO: 535625 - RNA, 19 nt, Artificial Sequence
  Synthetic
uuagaaaauguugaguucc

SEQ ID NO: 535626 - RNA, 20 nt, Artificial Sequence
  Synthetic
guuagaaaauguugaguucc

SEQ ID NO: 535627 - RNA, 21 nt, Artificial Sequence
  Synthetic
aguuagaaaauguugaguucc

SEQ ID NO: 535628 - RNA, 22 nt, Artificial Sequence
  Synthetic
aaguuagaaaauguugaguucc

SEQ ID NO: 535629 - RNA, 23 nt, Artificial Sequence
  Synthetic
gaaguuagaaaauguugaguucc

SEQ ID NO: 535630 - RNA, 24 nt, Artificial Sequence
  Synthetic
agaaguuagaaaauguugaguucc

SEQ ID NO: 535631 - RNA, 18 nt, Artificial Sequence
  Synthetic
ccaauaaaugauaguucc

SEQ ID NO: 535632 - RNA, 19 nt, Artificial Sequence
  Synthetic
cccaauaaaugauaguucc

SEQ ID NO: 535633 - RNA, 20 nt, Artificial Sequence
  Synthetic
acccaauaaaugauaguucc

SEQ ID NO: 535634 - RNA, 21 nt, Artificial Sequence
  Synthetic
uacccaauaaaugauaguucc

SEQ ID NO: 535635 - RNA, 22 nt, Artificial Sequence
  Synthetic
cuacccaauaaaugauaguucc

SEQ ID NO: 535636 - RNA, 23 nt, Artificial Sequence
  Synthetic
gcuacccaauaaaugauaguucc

SEQ ID NO: 535637 - RNA, 24 nt, Artificial Sequence
  Synthetic
agcuacccaauaaaugauaguucc

SEQ ID NO: 535638 - RNA, 18 nt, Artificial Sequence
  Synthetic
gugaucauagaagguucc

SEQ ID NO: 535639 - RNA, 19 nt, Artificial Sequence
  Synthetic
ggugaucauagaagguucc

SEQ ID NO: 535640 - RNA, 20 nt, Artificial Sequence
  Synthetic
gggugaucauagaagguucc

SEQ ID NO: 535641 - RNA, 21 nt, Artificial Sequence
  Synthetic
agggugaucauagaagguucc

SEQ ID NO: 535642 - RNA, 22 nt, Artificial Sequence
  Synthetic
aagggugaucauagaagguucc

SEQ ID NO: 535643 - RNA, 23 nt, Artificial Sequence
  Synthetic
aaagggugaucauagaagguucc

SEQ ID NO: 535644 - RNA, 24 nt, Artificial Sequence
  Synthetic
uaaagggugaucauagaagguucc

SEQ ID NO: 535645 - RNA, 18 nt, Artificial Sequence
  Synthetic
ggacgguauggagguucc

SEQ ID NO: 535646 - RNA, 19 nt, Artificial Sequence
  Synthetic
aggacgguauggagguucc

SEQ ID NO: 535647 - RNA, 20 nt, Artificial Sequence
  Synthetic
gaggacgguauggagguucc

SEQ ID NO: 535648 - RNA, 21 nt, Artificial Sequence
  Synthetic
ggaggacgguauggagguucc

SEQ ID NO: 535649 - RNA, 22 nt, Artificial Sequence
  Synthetic
uggaggacgguauggagguucc

SEQ ID NO: 535650 - RNA, 23 nt, Artificial Sequence
  Synthetic
auggaggacgguauggagguucc

SEQ ID NO: 535651 - RNA, 24 nt, Artificial Sequence
  Synthetic
uauggaggacgguauggagguucc

SEQ ID NO: 535652 - RNA, 18 nt, Artificial Sequence
  Synthetic
caugcauucaaauguucc

SEQ ID NO: 535653 - RNA, 19 nt, Artificial Sequence
  Synthetic
ccaugcauucaaauguucc

SEQ ID NO: 535654 - RNA, 20 nt, Artificial Sequence
  Synthetic
uccaugcauucaaauguucc

SEQ ID NO: 535655 - RNA, 21 nt, Artificial Sequence
  Synthetic
auccaugcauucaaauguucc

SEQ ID NO: 535656 - RNA, 22 nt, Artificial Sequence
  Synthetic
aauccaugcauucaaauguucc

SEQ ID NO: 535657 - RNA, 23 nt, Artificial Sequence
  Synthetic
aaauccaugcauucaaauguucc

SEQ ID NO: 535658 - RNA, 24 nt, Artificial Sequence
  Synthetic
caaauccaugcauucaaauguucc

SEQ ID NO: 535659 - RNA, 18 nt, Artificial Sequence
  Synthetic
guucucugucaauguucc

SEQ ID NO: 535660 - RNA, 19 nt, Artificial Sequence
  Synthetic
uguucucugucaauguucc

SEQ ID NO: 535661 - RNA, 20 nt, Artificial Sequence
  Synthetic
uuguucucugucaauguucc

SEQ ID NO: 535662 - RNA, 21 nt, Artificial Sequence
  Synthetic
cuuguucucugucaauguucc

SEQ ID NO: 535663 - RNA, 22 nt, Artificial Sequence
  Synthetic
gcuuguucucugucaauguucc

SEQ ID NO: 535664 - RNA, 23 nt, Artificial Sequence
  Synthetic
agcuuguucucugucaauguucc

SEQ ID NO: 535665 - RNA, 24 nt, Artificial Sequence
  Synthetic
uagcuuguucucugucaauguucc

SEQ ID NO: 535666 - RNA, 18 nt, Artificial Sequence
  Synthetic
ccuuauuuucaauguucc

SEQ ID NO: 535667 - RNA, 19 nt, Artificial Sequence
  Synthetic
accuuauuuucaauguucc

SEQ ID NO: 535668 - RNA, 20 nt, Artificial Sequence
  Synthetic
caccuuauuuucaauguucc

SEQ ID NO: 535669 - RNA, 21 nt, Artificial Sequence
  Synthetic
ucaccuuauuuucaauguucc

SEQ ID NO: 535670 - RNA, 22 nt, Artificial Sequence
  Synthetic
aucaccuuauuuucaauguucc

SEQ ID NO: 535671 - RNA, 23 nt, Artificial Sequence
  Synthetic
gaucaccuuauuuucaauguucc

SEQ ID NO: 535672 - RNA, 24 nt, Artificial Sequence
  Synthetic
ugaucaccuuauuuucaauguucc

SEQ ID NO: 535673 - RNA, 18 nt, Artificial Sequence
  Synthetic
uguagaaaaauauguucc

SEQ ID NO: 535674 - RNA, 19 nt, Artificial Sequence
  Synthetic
auguagaaaaauauguucc

SEQ ID NO: 535675 - RNA, 20 nt, Artificial Sequence
  Synthetic
aauguagaaaaauauguucc

SEQ ID NO: 535676 - RNA, 21 nt, Artificial Sequence
  Synthetic
aaauguagaaaaauauguucc

SEQ ID NO: 535677 - RNA, 22 nt, Artificial Sequence
  Synthetic
gaaauguagaaaaauauguucc

SEQ ID NO: 535678 - RNA, 23 nt, Artificial Sequence
  Synthetic
ggaaauguagaaaaauauguucc

SEQ ID NO: 535679 - RNA, 24 nt, Artificial Sequence
  Synthetic
gggaaauguagaaaaauauguucc

SEQ ID NO: 535680 - RNA, 18 nt, Artificial Sequence
  Synthetic
cagucucuuugcuguucc

SEQ ID NO: 535681 - RNA, 19 nt, Artificial Sequence
  Synthetic
ccagucucuuugcuguucc

SEQ ID NO: 535682 - RNA, 20 nt, Artificial Sequence
  Synthetic
accagucucuuugcuguucc

SEQ ID NO: 535683 - RNA, 21 nt, Artificial Sequence
  Synthetic
aaccagucucuuugcuguucc

SEQ ID NO: 535684 - RNA, 22 nt, Artificial Sequence
  Synthetic
caaccagucucuuugcuguucc

SEQ ID NO: 535685 - RNA, 23 nt, Artificial Sequence
  Synthetic
ucaaccagucucuuugcuguucc

SEQ ID NO: 535686 - RNA, 24 nt, Artificial Sequence
  Synthetic
aucaaccagucucuuugcuguucc

SEQ ID NO: 535687 - RNA, 18 nt, Artificial Sequence
  Synthetic
uuuucuuaaauguguucc

SEQ ID NO: 535688 - RNA, 19 nt, Artificial Sequence
  Synthetic
cuuuucuuaaauguguucc

SEQ ID NO: 535689 - RNA, 20 nt, Artificial Sequence
  Synthetic
ucuuuucuuaaauguguucc

SEQ ID NO: 535690 - RNA, 21 nt, Artificial Sequence
  Synthetic
aucuuuucuuaaauguguucc

SEQ ID NO: 535691 - RNA, 22 nt, Artificial Sequence
  Synthetic
aaucuuuucuuaaauguguucc

SEQ ID NO: 535692 - RNA, 23 nt, Artificial Sequence
  Synthetic
aaaucuuuucuuaaauguguucc

SEQ ID NO: 535693 - RNA, 24 nt, Artificial Sequence
  Synthetic
aaaaucuuuucuuaaauguguucc

SEQ ID NO: 535694 - RNA, 18 nt, Artificial Sequence
  Synthetic
cucuucaaucuguguucc

SEQ ID NO: 535695 - RNA, 19 nt, Artificial Sequence
  Synthetic
ucucuucaaucuguguucc

SEQ ID NO: 535696 - RNA, 20 nt, Artificial Sequence
  Synthetic
cucucuucaaucuguguucc

SEQ ID NO: 535697 - RNA, 21 nt, Artificial Sequence
  Synthetic
ucucucuucaaucuguguucc

SEQ ID NO: 535698 - RNA, 22 nt, Artificial Sequence
  Synthetic
cucucucuucaaucuguguucc

SEQ ID NO: 535699 - RNA, 23 nt, Artificial Sequence
  Synthetic
ucucucucuucaaucuguguucc

SEQ ID NO: 535700 - RNA, 24 nt, Artificial Sequence
  Synthetic
uucucucucuucaaucuguguucc

SEQ ID NO: 535701 - RNA, 18 nt, Artificial Sequence
  Synthetic
aagaaaacacauuguucc

SEQ ID NO: 535702 - RNA, 19 nt, Artificial Sequence
  Synthetic
caagaaaacacauuguucc

SEQ ID NO: 535703 - RNA, 20 nt, Artificial Sequence
  Synthetic
ccaagaaaacacauuguucc

SEQ ID NO: 535704 - RNA, 21 nt, Artificial Sequence
  Synthetic
gccaagaaaacacauuguucc

SEQ ID NO: 535705 - RNA, 22 nt, Artificial Sequence
  Synthetic
ugccaagaaaacacauuguucc

SEQ ID NO: 535706 - RNA, 23 nt, Artificial Sequence
  Synthetic
uugccaagaaaacacauuguucc

SEQ ID NO: 535707 - RNA, 24 nt, Artificial Sequence
  Synthetic
cuugccaagaaaacacauuguucc

SEQ ID NO: 535708 - RNA, 18 nt, Artificial Sequence
  Synthetic
uggaggugccauuguucc

SEQ ID NO: 535709 - RNA, 19 nt, Artificial Sequence
  Synthetic
guggaggugccauuguucc

SEQ ID NO: 535710 - RNA, 20 nt, Artificial Sequence
  Synthetic
uguggaggugccauuguucc

SEQ ID NO: 535711 - RNA, 21 nt, Artificial Sequence
  Synthetic
auguggaggugccauuguucc

SEQ ID NO: 535712 - RNA, 22 nt, Artificial Sequence
  Synthetic
aauguggaggugccauuguucc

SEQ ID NO: 535713 - RNA, 23 nt, Artificial Sequence
  Synthetic
aaauguggaggugccauuguucc

SEQ ID NO: 535714 - RNA, 24 nt, Artificial Sequence
  Synthetic
gaaauguggaggugccauuguucc

SEQ ID NO: 535715 - RNA, 18 nt, Artificial Sequence
  Synthetic
ggagagacagauuguucc

SEQ ID NO: 535716 - RNA, 19 nt, Artificial Sequence
  Synthetic
aggagagacagauuguucc

SEQ ID NO: 535717 - RNA, 20 nt, Artificial Sequence
  Synthetic
gaggagagacagauuguucc

SEQ ID NO: 535718 - RNA, 21 nt, Artificial Sequence
  Synthetic
agaggagagacagauuguucc

SEQ ID NO: 535719 - RNA, 22 nt, Artificial Sequence
  Synthetic
uagaggagagacagauuguucc

SEQ ID NO: 535720 - RNA, 23 nt, Artificial Sequence
  Synthetic
auagaggagagacagauuguucc

SEQ ID NO: 535721 - RNA, 24 nt, Artificial Sequence
  Synthetic
gauagaggagagacagauuguucc

SEQ ID NO: 535722 - RNA, 18 nt, Artificial Sequence
  Synthetic
guaaaauaucguuguucc

SEQ ID NO: 535723 - RNA, 19 nt, Artificial Sequence
  Synthetic
uguaaaauaucguuguucc

SEQ ID NO: 535724 - RNA, 20 nt, Artificial Sequence
  Synthetic
uuguaaaauaucguuguucc

SEQ ID NO: 535725 - RNA, 21 nt, Artificial Sequence
  Synthetic
uuuguaaaauaucguuguucc

SEQ ID NO: 535726 - RNA, 22 nt, Artificial Sequence
  Synthetic
guuuguaaaauaucguuguucc

SEQ ID NO: 535727 - RNA, 23 nt, Artificial Sequence
  Synthetic
gguuuguaaaauaucguuguucc

SEQ ID NO: 535728 - RNA, 24 nt, Artificial Sequence
  Synthetic
ggguuuguaaaauaucguuguucc

SEQ ID NO: 535729 - RNA, 18 nt, Artificial Sequence
  Synthetic
ccccaaacucaaauuucc

SEQ ID NO: 535730 - RNA, 19 nt, Artificial Sequence
  Synthetic
accccaaacucaaauuucc

SEQ ID NO: 535731 - RNA, 20 nt, Artificial Sequence
  Synthetic
aaccccaaacucaaauuucc

SEQ ID NO: 535732 - RNA, 21 nt, Artificial Sequence
  Synthetic
gaaccccaaacucaaauuucc

SEQ ID NO: 535733 - RNA, 22 nt, Artificial Sequence
  Synthetic
agaaccccaaacucaaauuucc

SEQ ID NO: 535734 - RNA, 23 nt, Artificial Sequence
  Synthetic
cagaaccccaaacucaaauuucc

SEQ ID NO: 535735 - RNA, 24 nt, Artificial Sequence
  Synthetic
ccagaaccccaaacucaaauuucc

SEQ ID NO: 535736 - RNA, 18 nt, Artificial Sequence
  Synthetic
ugggaaagauaaauuucc

SEQ ID NO: 535737 - RNA, 19 nt, Artificial Sequence
  Synthetic
uugggaaagauaaauuucc

SEQ ID NO: 535738 - RNA, 20 nt, Artificial Sequence
  Synthetic
uuugggaaagauaaauuucc

SEQ ID NO: 535739 - RNA, 21 nt, Artificial Sequence
  Synthetic
auuugggaaagauaaauuucc

SEQ ID NO: 535740 - RNA, 22 nt, Artificial Sequence
  Synthetic
cauuugggaaagauaaauuucc

SEQ ID NO: 535741 - RNA, 23 nt, Artificial Sequence
  Synthetic
acauuugggaaagauaaauuucc

SEQ ID NO: 535742 - RNA, 24 nt, Artificial Sequence
  Synthetic
uacauuugggaaagauaaauuucc

SEQ ID NO: 535743 - RNA, 18 nt, Artificial Sequence
  Synthetic
acauccuuuuaaauuucc

SEQ ID NO: 535744 - RNA, 19 nt, Artificial Sequence
  Synthetic
uacauccuuuuaaauuucc

SEQ ID NO: 535745 - RNA, 20 nt, Artificial Sequence
  Synthetic
cuacauccuuuuaaauuucc

SEQ ID NO: 535746 - RNA, 21 nt, Artificial Sequence
  Synthetic
ccuacauccuuuuaaauuucc

SEQ ID NO: 535747 - RNA, 22 nt, Artificial Sequence
  Synthetic
uccuacauccuuuuaaauuucc

SEQ ID NO: 535748 - RNA, 23 nt, Artificial Sequence
  Synthetic
auccuacauccuuuuaaauuucc

SEQ ID NO: 535749 - RNA, 24 nt, Artificial Sequence
  Synthetic
gauccuacauccuuuuaaauuucc

SEQ ID NO: 535750 - RNA, 18 nt, Artificial Sequence
  Synthetic
gaaucagagucaauuucc

SEQ ID NO: 535751 - RNA, 19 nt, Artificial Sequence
  Synthetic
ugaaucagagucaauuucc

SEQ ID NO: 535752 - RNA, 20 nt, Artificial Sequence
  Synthetic
uugaaucagagucaauuucc

SEQ ID NO: 535753 - RNA, 21 nt, Artificial Sequence
  Synthetic
uuugaaucagagucaauuucc

SEQ ID NO: 535754 - RNA, 22 nt, Artificial Sequence
  Synthetic
cuuugaaucagagucaauuucc

SEQ ID NO: 535755 - RNA, 23 nt, Artificial Sequence
  Synthetic
acuuugaaucagagucaauuucc

SEQ ID NO: 535756 - RNA, 24 nt, Artificial Sequence
  Synthetic
cacuuugaaucagagucaauuucc

SEQ ID NO: 535757 - RNA, 18 nt, Artificial Sequence
  Synthetic
aagagaaaaagaauuucc

SEQ ID NO: 535758 - RNA, 19 nt, Artificial Sequence
  Synthetic
caagagaaaaagaauuucc

SEQ ID NO: 535759 - RNA, 20 nt, Artificial Sequence
  Synthetic
gcaagagaaaaagaauuucc

SEQ ID NO: 535760 - RNA, 21 nt, Artificial Sequence
  Synthetic
cgcaagagaaaaagaauuucc

SEQ ID NO: 535761 - RNA, 22 nt, Artificial Sequence
  Synthetic
acgcaagagaaaaagaauuucc

SEQ ID NO: 535762 - RNA, 23 nt, Artificial Sequence
  Synthetic
aacgcaagagaaaaagaauuucc

SEQ ID NO: 535763 - RNA, 24 nt, Artificial Sequence
  Synthetic
caacgcaagagaaaaagaauuucc

SEQ ID NO: 535764 - RNA, 18 nt, Artificial Sequence
  Synthetic
uuaaaguguugaauuucc

SEQ ID NO: 535765 - RNA, 19 nt, Artificial Sequence
  Synthetic
auuaaaguguugaauuucc

SEQ ID NO: 535766 - RNA, 20 nt, Artificial Sequence
  Synthetic
uauuaaaguguugaauuucc

SEQ ID NO: 535767 - RNA, 21 nt, Artificial Sequence
  Synthetic
uuauuaaaguguugaauuucc

SEQ ID NO: 535768 - RNA, 22 nt, Artificial Sequence
  Synthetic
auuauuaaaguguugaauuucc

SEQ ID NO: 535769 - RNA, 23 nt, Artificial Sequence
  Synthetic
uauuauuaaaguguugaauuucc

SEQ ID NO: 535770 - RNA, 24 nt, Artificial Sequence
  Synthetic
cuauuauuaaaguguugaauuucc

SEQ ID NO: 535771 - RNA, 18 nt, Artificial Sequence
  Synthetic
auauuaaaaauaauuucc

SEQ ID NO: 535772 - RNA, 19 nt, Artificial Sequence
  Synthetic
uauauuaaaaauaauuucc

SEQ ID NO: 535773 - RNA, 20 nt, Artificial Sequence
  Synthetic
uuauauuaaaaauaauuucc

SEQ ID NO: 535774 - RNA, 21 nt, Artificial Sequence
  Synthetic
uuuauauuaaaaauaauuucc

SEQ ID NO: 535775 - RNA, 22 nt, Artificial Sequence
  Synthetic
cuuuauauuaaaaauaauuucc

SEQ ID NO: 535776 - RNA, 23 nt, Artificial Sequence
  Synthetic
ucuuuauauuaaaaauaauuucc

SEQ ID NO: 535777 - RNA, 24 nt, Artificial Sequence
  Synthetic
cucuuuauauuaaaaauaauuucc

SEQ ID NO: 535778 - RNA, 18 nt, Artificial Sequence
  Synthetic
auaauuugaauaauuucc

SEQ ID NO: 535779 - RNA, 19 nt, Artificial Sequence
  Synthetic
aauaauuugaauaauuucc

SEQ ID NO: 535780 - RNA, 20 nt, Artificial Sequence
  Synthetic
caauaauuugaauaauuucc

SEQ ID NO: 535781 - RNA, 21 nt, Artificial Sequence
  Synthetic
acaauaauuugaauaauuucc

SEQ ID NO: 535782 - RNA, 22 nt, Artificial Sequence
  Synthetic
gacaauaauuugaauaauuucc

SEQ ID NO: 535783 - RNA, 23 nt, Artificial Sequence
  Synthetic
agacaauaauuugaauaauuucc

SEQ ID NO: 535784 - RNA, 24 nt, Artificial Sequence
  Synthetic
aagacaauaauuugaauaauuucc

SEQ ID NO: 535785 - RNA, 18 nt, Artificial Sequence
  Synthetic
caaauuuuauuaauuucc

SEQ ID NO: 535786 - RNA, 19 nt, Artificial Sequence
  Synthetic
acaaauuuuauuaauuucc

SEQ ID NO: 535787 - RNA, 20 nt, Artificial Sequence
  Synthetic
aacaaauuuuauuaauuucc

SEQ ID NO: 535788 - RNA, 21 nt, Artificial Sequence
  Synthetic
gaacaaauuuuauuaauuucc

SEQ ID NO: 535789 - RNA, 22 nt, Artificial Sequence
  Synthetic
ugaacaaauuuuauuaauuucc

SEQ ID NO: 535790 - RNA, 23 nt, Artificial Sequence
  Synthetic
uugaacaaauuuuauuaauuucc

SEQ ID NO: 535791 - RNA, 24 nt, Artificial Sequence
  Synthetic
cuugaacaaauuuuauuaauuucc

SEQ ID NO: 535792 - RNA, 18 nt, Artificial Sequence
  Synthetic
guguccucucucauuucc

SEQ ID NO: 535793 - RNA, 19 nt, Artificial Sequence
  Synthetic
gguguccucucucauuucc

SEQ ID NO: 535794 - RNA, 20 nt, Artificial Sequence
  Synthetic
ugguguccucucucauuucc

SEQ ID NO: 535795 - RNA, 21 nt, Artificial Sequence
  Synthetic
gugguguccucucucauuucc

SEQ ID NO: 535796 - RNA, 22 nt, Artificial Sequence
  Synthetic
ugugguguccucucucauuucc

SEQ ID NO: 535797 - RNA, 23 nt, Artificial Sequence
  Synthetic
uugugguguccucucucauuucc

SEQ ID NO: 535798 - RNA, 24 nt, Artificial Sequence
  Synthetic
uuugugguguccucucucauuucc

SEQ ID NO: 535799 - RNA, 18 nt, Artificial Sequence
  Synthetic
uucuuuuccuucauuucc

SEQ ID NO: 535800 - RNA, 19 nt, Artificial Sequence
  Synthetic
cuucuuuuccuucauuucc

SEQ ID NO: 535801 - RNA, 20 nt, Artificial Sequence
  Synthetic
ccuucuuuuccuucauuucc

SEQ ID NO: 535802 - RNA, 21 nt, Artificial Sequence
  Synthetic
gccuucuuuuccuucauuucc

SEQ ID NO: 535803 - RNA, 22 nt, Artificial Sequence
  Synthetic
ugccuucuuuuccuucauuucc

SEQ ID NO: 535804 - RNA, 23 nt, Artificial Sequence
  Synthetic
uugccuucuuuuccuucauuucc

SEQ ID NO: 535805 - RNA, 24 nt, Artificial Sequence
  Synthetic
guugccuucuuuuccuucauuucc

SEQ ID NO: 535806 - RNA, 18 nt, Artificial Sequence
  Synthetic
acagucuaccagauuucc

SEQ ID NO: 535807 - RNA, 19 nt, Artificial Sequence
  Synthetic
uacagucuaccagauuucc

SEQ ID NO: 535808 - RNA, 20 nt, Artificial Sequence
  Synthetic
uuacagucuaccagauuucc

SEQ ID NO: 535809 - RNA, 21 nt, Artificial Sequence
  Synthetic
cuuacagucuaccagauuucc

SEQ ID NO: 535810 - RNA, 22 nt, Artificial Sequence
  Synthetic
gcuuacagucuaccagauuucc

SEQ ID NO: 535811 - RNA, 23 nt, Artificial Sequence
  Synthetic
ggcuuacagucuaccagauuucc

SEQ ID NO: 535812 - RNA, 24 nt, Artificial Sequence
  Synthetic
gggcuuacagucuaccagauuucc

SEQ ID NO: 535813 - RNA, 18 nt, Artificial Sequence
  Synthetic
gcagggucugagauuucc

SEQ ID NO: 535814 - RNA, 19 nt, Artificial Sequence
  Synthetic
ggcagggucugagauuucc

SEQ ID NO: 535815 - RNA, 20 nt, Artificial Sequence
  Synthetic
aggcagggucugagauuucc

SEQ ID NO: 535816 - RNA, 21 nt, Artificial Sequence
  Synthetic
caggcagggucugagauuucc

SEQ ID NO: 535817 - RNA, 22 nt, Artificial Sequence
  Synthetic
gcaggcagggucugagauuucc

SEQ ID NO: 535818 - RNA, 23 nt, Artificial Sequence
  Synthetic
agcaggcagggucugagauuucc

SEQ ID NO: 535819 - RNA, 24 nt, Artificial Sequence
  Synthetic
uagcaggcagggucugagauuucc

SEQ ID NO: 535820 - RNA, 18 nt, Artificial Sequence
  Synthetic
uccaaauaauggauuucc

SEQ ID NO: 535821 - RNA, 19 nt, Artificial Sequence
  Synthetic
auccaaauaauggauuucc

SEQ ID NO: 535822 - RNA, 20 nt, Artificial Sequence
  Synthetic
cauccaaauaauggauuucc

SEQ ID NO: 535823 - RNA, 21 nt, Artificial Sequence
  Synthetic
acauccaaauaauggauuucc

SEQ ID NO: 535824 - RNA, 22 nt, Artificial Sequence
  Synthetic
aacauccaaauaauggauuucc

SEQ ID NO: 535825 - RNA, 23 nt, Artificial Sequence
  Synthetic
aaacauccaaauaauggauuucc

SEQ ID NO: 535826 - RNA, 24 nt, Artificial Sequence
  Synthetic
aaaacauccaaauaauggauuucc

SEQ ID NO: 535827 - RNA, 18 nt, Artificial Sequence
  Synthetic
aauuaaaaaaauauuucc

SEQ ID NO: 535828 - RNA, 19 nt, Artificial Sequence
  Synthetic
aaauuaaaaaaauauuucc

SEQ ID NO: 535829 - RNA, 20 nt, Artificial Sequence
  Synthetic
aaaauuaaaaaaauauuucc

SEQ ID NO: 535830 - RNA, 21 nt, Artificial Sequence
  Synthetic
aaaaauuaaaaaaauauuucc

SEQ ID NO: 535831 - RNA, 22 nt, Artificial Sequence
  Synthetic
uaaaaauuaaaaaaauauuucc

SEQ ID NO: 535832 - RNA, 23 nt, Artificial Sequence
  Synthetic
uuaaaaauuaaaaaaauauuucc

SEQ ID NO: 535833 - RNA, 24 nt, Artificial Sequence
  Synthetic
auuaaaaauuaaaaaaauauuucc

SEQ ID NO: 535834 - RNA, 18 nt, Artificial Sequence
  Synthetic
uucauguuuaauauuucc

SEQ ID NO: 535835 - RNA, 19 nt, Artificial Sequence
  Synthetic
cuucauguuuaauauuucc

SEQ ID NO: 535836 - RNA, 20 nt, Artificial Sequence
  Synthetic
gcuucauguuuaauauuucc

SEQ ID NO: 535837 - RNA, 21 nt, Artificial Sequence
  Synthetic
agcuucauguuuaauauuucc

SEQ ID NO: 535838 - RNA, 22 nt, Artificial Sequence
  Synthetic
uagcuucauguuuaauauuucc

SEQ ID NO: 535839 - RNA, 23 nt, Artificial Sequence
  Synthetic
guagcuucauguuuaauauuucc

SEQ ID NO: 535840 - RNA, 24 nt, Artificial Sequence
  Synthetic
gguagcuucauguuuaauauuucc

SEQ ID NO: 535841 - RNA, 18 nt, Artificial Sequence
  Synthetic
cuaucuuagucuauuucc

SEQ ID NO: 535842 - RNA, 19 nt, Artificial Sequence
  Synthetic
ucuaucuuagucuauuucc

SEQ ID NO: 535843 - RNA, 20 nt, Artificial Sequence
  Synthetic
cucuaucuuagucuauuucc

SEQ ID NO: 535844 - RNA, 21 nt, Artificial Sequence
  Synthetic
ucucuaucuuagucuauuucc

SEQ ID NO: 535845 - RNA, 22 nt, Artificial Sequence
  Synthetic
cucucuaucuuagucuauuucc

SEQ ID NO: 535846 - RNA, 23 nt, Artificial Sequence
  Synthetic
acucucuaucuuagucuauuucc

SEQ ID NO: 535847 - RNA, 24 nt, Artificial Sequence
  Synthetic
aacucucuaucuuagucuauuucc

SEQ ID NO: 535848 - RNA, 18 nt, Artificial Sequence
  Synthetic
gauguugacgguauuucc

SEQ ID NO: 535849 - RNA, 19 nt, Artificial Sequence
  Synthetic
ggauguugacgguauuucc

SEQ ID NO: 535850 - RNA, 20 nt, Artificial Sequence
  Synthetic
uggauguugacgguauuucc

SEQ ID NO: 535851 - RNA, 21 nt, Artificial Sequence
  Synthetic
auggauguugacgguauuucc

SEQ ID NO: 535852 - RNA, 22 nt, Artificial Sequence
  Synthetic
aauggauguugacgguauuucc

SEQ ID NO: 535853 - RNA, 23 nt, Artificial Sequence
  Synthetic
aaauggauguugacgguauuucc

SEQ ID NO: 535854 - RNA, 24 nt, Artificial Sequence
  Synthetic
aaaauggauguugacgguauuucc

SEQ ID NO: 535855 - RNA, 18 nt, Artificial Sequence
  Synthetic
uacagauuauguauuucc

SEQ ID NO: 535856 - RNA, 19 nt, Artificial Sequence
  Synthetic
uuacagauuauguauuucc

SEQ ID NO: 535857 - RNA, 20 nt, Artificial Sequence
  Synthetic
uuuacagauuauguauuucc

SEQ ID NO: 535858 - RNA, 21 nt, Artificial Sequence
  Synthetic
auuuacagauuauguauuucc

SEQ ID NO: 535859 - RNA, 22 nt, Artificial Sequence
  Synthetic
aauuuacagauuauguauuucc

SEQ ID NO: 535860 - RNA, 23 nt, Artificial Sequence
  Synthetic
aaauuuacagauuauguauuucc

SEQ ID NO: 535861 - RNA, 24 nt, Artificial Sequence
  Synthetic
aaaauuuacagauuauguauuucc

SEQ ID NO: 535862 - RNA, 18 nt, Artificial Sequence
  Synthetic
ugcaugaccauuauuucc

SEQ ID NO: 535863 - RNA, 19 nt, Artificial Sequence
  Synthetic
gugcaugaccauuauuucc

SEQ ID NO: 535864 - RNA, 20 nt, Artificial Sequence
  Synthetic
ggugcaugaccauuauuucc

SEQ ID NO: 535865 - RNA, 21 nt, Artificial Sequence
  Synthetic
gggugcaugaccauuauuucc

SEQ ID NO: 535866 - RNA, 22 nt, Artificial Sequence
  Synthetic
agggugcaugaccauuauuucc

SEQ ID NO: 535867 - RNA, 23 nt, Artificial Sequence
  Synthetic
uagggugcaugaccauuauuucc

SEQ ID NO: 535868 - RNA, 24 nt, Artificial Sequence
  Synthetic
guagggugcaugaccauuauuucc

SEQ ID NO: 535869 - RNA, 21 nt, Artificial Sequence
  Synthetic
uuuguauccucuuuuauuucc

SEQ ID NO: 535870 - RNA, 22 nt, Artificial Sequence
  Synthetic
guuuguauccucuuuuauuucc

SEQ ID NO: 535871 - RNA, 23 nt, Artificial Sequence
  Synthetic
uguuuguauccucuuuuauuucc

SEQ ID NO: 535872 - RNA, 24 nt, Artificial Sequence
  Synthetic
uuguuuguauccucuuuuauuucc

SEQ ID NO: 535873 - RNA, 18 nt, Artificial Sequence
  Synthetic
gacuucaguccccuuucc

SEQ ID NO: 535874 - RNA, 19 nt, Artificial Sequence
  Synthetic
ugacuucaguccccuuucc

SEQ ID NO: 535875 - RNA, 20 nt, Artificial Sequence
  Synthetic
cugacuucaguccccuuucc

SEQ ID NO: 535876 - RNA, 21 nt, Artificial Sequence
  Synthetic
ccugacuucaguccccuuucc

SEQ ID NO: 535877 - RNA, 22 nt, Artificial Sequence
  Synthetic
cccugacuucaguccccuuucc

SEQ ID NO: 535878 - RNA, 23 nt, Artificial Sequence
  Synthetic
ucccugacuucaguccccuuucc

SEQ ID NO: 535879 - RNA, 24 nt, Artificial Sequence
  Synthetic
cucccugacuucaguccccuuucc

SEQ ID NO: 535880 - RNA, 18 nt, Artificial Sequence
  Synthetic
agagaaacuugccuuucc

SEQ ID NO: 535881 - RNA, 19 nt, Artificial Sequence
  Synthetic
gagagaaacuugccuuucc

SEQ ID NO: 535882 - RNA, 20 nt, Artificial Sequence
  Synthetic
ggagagaaacuugccuuucc

SEQ ID NO: 535883 - RNA, 21 nt, Artificial Sequence
  Synthetic
uggagagaaacuugccuuucc

SEQ ID NO: 535884 - RNA, 22 nt, Artificial Sequence
  Synthetic
auggagagaaacuugccuuucc

SEQ ID NO: 535885 - RNA, 23 nt, Artificial Sequence
  Synthetic
gauggagagaaacuugccuuucc

SEQ ID NO: 535886 - RNA, 24 nt, Artificial Sequence
  Synthetic
agauggagagaaacuugccuuucc

SEQ ID NO: 535887 - RNA, 18 nt, Artificial Sequence
  Synthetic
auucgaaaauggcuuucc

SEQ ID NO: 535888 - RNA, 19 nt, Artificial Sequence
  Synthetic
gauucgaaaauggcuuucc

SEQ ID NO: 535889 - RNA, 20 nt, Artificial Sequence
  Synthetic
agauucgaaaauggcuuucc

SEQ ID NO: 535890 - RNA, 21 nt, Artificial Sequence
  Synthetic
aagauucgaaaauggcuuucc

SEQ ID NO: 535891 - RNA, 22 nt, Artificial Sequence
  Synthetic
gaagauucgaaaauggcuuucc

SEQ ID NO: 535892 - RNA, 23 nt, Artificial Sequence
  Synthetic
ggaagauucgaaaauggcuuucc

SEQ ID NO: 535893 - RNA, 24 nt, Artificial Sequence
  Synthetic
gggaagauucgaaaauggcuuucc

SEQ ID NO: 535894 - RNA, 18 nt, Artificial Sequence
  Synthetic
auuuuacaauggcuuucc

SEQ ID NO: 535895 - RNA, 19 nt, Artificial Sequence
  Synthetic
cauuuuacaauggcuuucc

SEQ ID NO: 535896 - RNA, 20 nt, Artificial Sequence
  Synthetic
ccauuuuacaauggcuuucc

SEQ ID NO: 535897 - RNA, 21 nt, Artificial Sequence
  Synthetic
uccauuuuacaauggcuuucc

SEQ ID NO: 535898 - RNA, 22 nt, Artificial Sequence
  Synthetic
cuccauuuuacaauggcuuucc

SEQ ID NO: 535899 - RNA, 23 nt, Artificial Sequence
  Synthetic
ucuccauuuuacaauggcuuucc

SEQ ID NO: 535900 - RNA, 24 nt, Artificial Sequence
  Synthetic
aucuccauuuuacaauggcuuucc

SEQ ID NO: 535901 - RNA, 18 nt, Artificial Sequence
  Synthetic
ugcaagcuacuucuuucc

SEQ ID NO: 535902 - RNA, 19 nt, Artificial Sequence
  Synthetic
uugcaagcuacuucuuucc

SEQ ID NO: 535903 - RNA, 20 nt, Artificial Sequence
  Synthetic
uuugcaagcuacuucuuucc

SEQ ID NO: 535904 - RNA, 21 nt, Artificial Sequence
  Synthetic
auuugcaagcuacuucuuucc

SEQ ID NO: 535905 - RNA, 22 nt, Artificial Sequence
  Synthetic
uauuugcaagcuacuucuuucc

SEQ ID NO: 535906 - RNA, 23 nt, Artificial Sequence
  Synthetic
uuauuugcaagcuacuucuuucc

SEQ ID NO: 535907 - RNA, 24 nt, Artificial Sequence
  Synthetic
uuuauuugcaagcuacuucuuucc

SEQ ID NO: 535908 - RNA, 18 nt, Artificial Sequence
  Synthetic
acugcuauuucaguuucc

SEQ ID NO: 535909 - RNA, 19 nt, Artificial Sequence
  Synthetic
aacugcuauuucaguuucc

SEQ ID NO: 535910 - RNA, 20 nt, Artificial Sequence
  Synthetic
gaacugcuauuucaguuucc

SEQ ID NO: 535911 - RNA, 21 nt, Artificial Sequence
  Synthetic
ugaacugcuauuucaguuucc

SEQ ID NO: 535912 - RNA, 22 nt, Artificial Sequence
  Synthetic
uugaacugcuauuucaguuucc

SEQ ID NO: 535913 - RNA, 23 nt, Artificial Sequence
  Synthetic
cuugaacugcuauuucaguuucc

SEQ ID NO: 535914 - RNA, 24 nt, Artificial Sequence
  Synthetic
gcuugaacugcuauuucaguuucc

SEQ ID NO: 535915 - RNA, 18 nt, Artificial Sequence
  Synthetic
acuguaugccuaguuucc

SEQ ID NO: 535916 - RNA, 19 nt, Artificial Sequence
  Synthetic
aacuguaugccuaguuucc

SEQ ID NO: 535917 - RNA, 20 nt, Artificial Sequence
  Synthetic
aaacuguaugccuaguuucc

SEQ ID NO: 535918 - RNA, 21 nt, Artificial Sequence
  Synthetic
caaacuguaugccuaguuucc

SEQ ID NO: 535919 - RNA, 22 nt, Artificial Sequence
  Synthetic
acaaacuguaugccuaguuucc

SEQ ID NO: 535920 - RNA, 23 nt, Artificial Sequence
  Synthetic
aacaaacuguaugccuaguuucc

SEQ ID NO: 535921 - RNA, 24 nt, Artificial Sequence
  Synthetic
aaacaaacuguaugccuaguuucc

SEQ ID NO: 535922 - RNA, 18 nt, Artificial Sequence
  Synthetic
ucuucuguauucguuucc

SEQ ID NO: 535923 - RNA, 19 nt, Artificial Sequence
  Synthetic
cucuucuguauucguuucc

SEQ ID NO: 535924 - RNA, 20 nt, Artificial Sequence
  Synthetic
ccucuucuguauucguuucc

SEQ ID NO: 535925 - RNA, 21 nt, Artificial Sequence
  Synthetic
uccucuucuguauucguuucc

SEQ ID NO: 535926 - RNA, 22 nt, Artificial Sequence
  Synthetic
auccucuucuguauucguuucc

SEQ ID NO: 535927 - RNA, 23 nt, Artificial Sequence
  Synthetic
aauccucuucuguauucguuucc

SEQ ID NO: 535928 - RNA, 24 nt, Artificial Sequence
  Synthetic
aaauccucuucuguauucguuucc

SEQ ID NO: 535929 - RNA, 18 nt, Artificial Sequence
  Synthetic
acugaucaugagguuucc

SEQ ID NO: 535930 - RNA, 19 nt, Artificial Sequence
  Synthetic
aacugaucaugagguuucc

SEQ ID NO: 535931 - RNA, 20 nt, Artificial Sequence
  Synthetic
aaacugaucaugagguuucc

SEQ ID NO: 535932 - RNA, 21 nt, Artificial Sequence
  Synthetic
uaaacugaucaugagguuucc

SEQ ID NO: 535933 - RNA, 22 nt, Artificial Sequence
  Synthetic
uuaaacugaucaugagguuucc

SEQ ID NO: 535934 - RNA, 23 nt, Artificial Sequence
  Synthetic
auuaaacugaucaugagguuucc

SEQ ID NO: 535935 - RNA, 24 nt, Artificial Sequence
  Synthetic
uauuaaacugaucaugagguuucc

SEQ ID NO: 535936 - RNA, 18 nt, Artificial Sequence
  Synthetic
ucuacacaaaugguuucc

SEQ ID NO: 535937 - RNA, 19 nt, Artificial Sequence
  Synthetic
cucuacacaaaugguuucc

SEQ ID NO: 535938 - RNA, 20 nt, Artificial Sequence
  Synthetic
gcucuacacaaaugguuucc

SEQ ID NO: 535939 - RNA, 21 nt, Artificial Sequence
  Synthetic
ugcucuacacaaaugguuucc

SEQ ID NO: 535940 - RNA, 22 nt, Artificial Sequence
  Synthetic
augcucuacacaaaugguuucc

SEQ ID NO: 535941 - RNA, 23 nt, Artificial Sequence
  Synthetic
gaugcucuacacaaaugguuucc

SEQ ID NO: 535942 - RNA, 24 nt, Artificial Sequence
  Synthetic
agaugcucuacacaaaugguuucc

SEQ ID NO: 535943 - RNA, 18 nt, Artificial Sequence
  Synthetic
ggcuguaucaugguuucc

SEQ ID NO: 535944 - RNA, 19 nt, Artificial Sequence
  Synthetic
aggcuguaucaugguuucc

SEQ ID NO: 535945 - RNA, 20 nt, Artificial Sequence
  Synthetic
gaggcuguaucaugguuucc

SEQ ID NO: 535946 - RNA, 21 nt, Artificial Sequence
  Synthetic
agaggcuguaucaugguuucc

SEQ ID NO: 535947 - RNA, 22 nt, Artificial Sequence
  Synthetic
aagaggcuguaucaugguuucc

SEQ ID NO: 535948 - RNA, 23 nt, Artificial Sequence
  Synthetic
aaagaggcuguaucaugguuucc

SEQ ID NO: 535949 - RNA, 24 nt, Artificial Sequence
  Synthetic
gaaagaggcuguaucaugguuucc

SEQ ID NO: 535950 - RNA, 18 nt, Artificial Sequence
  Synthetic
uuuuaggcucugguuucc

SEQ ID NO: 535951 - RNA, 19 nt, Artificial Sequence
  Synthetic
auuuuaggcucugguuucc

SEQ ID NO: 535952 - RNA, 20 nt, Artificial Sequence
  Synthetic
cauuuuaggcucugguuucc

SEQ ID NO: 535953 - RNA, 21 nt, Artificial Sequence
  Synthetic
acauuuuaggcucugguuucc

SEQ ID NO: 535954 - RNA, 22 nt, Artificial Sequence
  Synthetic
aacauuuuaggcucugguuucc

SEQ ID NO: 535955 - RNA, 23 nt, Artificial Sequence
  Synthetic
caacauuuuaggcucugguuucc

SEQ ID NO: 535956 - RNA, 24 nt, Artificial Sequence
  Synthetic
gcaacauuuuaggcucugguuucc

SEQ ID NO: 535957 - RNA, 18 nt, Artificial Sequence
  Synthetic
uaccuaucagugguuucc

SEQ ID NO: 535958 - RNA, 19 nt, Artificial Sequence
  Synthetic
uuaccuaucagugguuucc

SEQ ID NO: 535959 - RNA, 20 nt, Artificial Sequence
  Synthetic
uuuaccuaucagugguuucc

SEQ ID NO: 535960 - RNA, 21 nt, Artificial Sequence
  Synthetic
uuuuaccuaucagugguuucc

SEQ ID NO: 535961 - RNA, 22 nt, Artificial Sequence
  Synthetic
cuuuuaccuaucagugguuucc

SEQ ID NO: 535962 - RNA, 23 nt, Artificial Sequence
  Synthetic
gcuuuuaccuaucagugguuucc

SEQ ID NO: 535963 - RNA, 24 nt, Artificial Sequence
  Synthetic
ugcuuuuaccuaucagugguuucc

SEQ ID NO: 535964 - RNA, 18 nt, Artificial Sequence
  Synthetic
aauagaauggugguuucc

SEQ ID NO: 535965 - RNA, 19 nt, Artificial Sequence
  Synthetic
aaauagaauggugguuucc

SEQ ID NO: 535966 - RNA, 20 nt, Artificial Sequence
  Synthetic
gaaauagaauggugguuucc

SEQ ID NO: 535967 - RNA, 21 nt, Artificial Sequence
  Synthetic
ggaaauagaauggugguuucc

SEQ ID NO: 535968 - RNA, 22 nt, Artificial Sequence
  Synthetic
aggaaauagaauggugguuucc

SEQ ID NO: 535969 - RNA, 23 nt, Artificial Sequence
  Synthetic
caggaaauagaauggugguuucc

SEQ ID NO: 535970 - RNA, 24 nt, Artificial Sequence
  Synthetic
acaggaaauagaauggugguuucc

SEQ ID NO: 535971 - RNA, 18 nt, Artificial Sequence
  Synthetic
agaccagaagauguuucc

SEQ ID NO: 535972 - RNA, 19 nt, Artificial Sequence
  Synthetic
gagaccagaagauguuucc

SEQ ID NO: 535973 - RNA, 20 nt, Artificial Sequence
  Synthetic
ggagaccagaagauguuucc

SEQ ID NO: 535974 - RNA, 21 nt, Artificial Sequence
  Synthetic
uggagaccagaagauguuucc

SEQ ID NO: 535975 - RNA, 22 nt, Artificial Sequence
  Synthetic
cuggagaccagaagauguuucc

SEQ ID NO: 535976 - RNA, 23 nt, Artificial Sequence
  Synthetic
ucuggagaccagaagauguuucc

SEQ ID NO: 535977 - RNA, 24 nt, Artificial Sequence
  Synthetic
aucuggagaccagaagauguuucc

SEQ ID NO: 535978 - RNA, 18 nt, Artificial Sequence
  Synthetic
ucccacagcacuguuucc

SEQ ID NO: 535979 - RNA, 19 nt, Artificial Sequence
  Synthetic
cucccacagcacuguuucc

SEQ ID NO: 535980 - RNA, 20 nt, Artificial Sequence
  Synthetic
gcucccacagcacuguuucc

SEQ ID NO: 535981 - RNA, 21 nt, Artificial Sequence
  Synthetic
ggcucccacagcacuguuucc

SEQ ID NO: 535982 - RNA, 22 nt, Artificial Sequence
  Synthetic
aggcucccacagcacuguuucc

SEQ ID NO: 535983 - RNA, 23 nt, Artificial Sequence
  Synthetic
uaggcucccacagcacuguuucc

SEQ ID NO: 535984 - RNA, 24 nt, Artificial Sequence
  Synthetic
cuaggcucccacagcacuguuucc

SEQ ID NO: 535985 - RNA, 18 nt, Artificial Sequence
  Synthetic
guuuuagagucuguuucc

SEQ ID NO: 535986 - RNA, 19 nt, Artificial Sequence
  Synthetic
uguuuuagagucuguuucc

SEQ ID NO: 535987 - RNA, 20 nt, Artificial Sequence
  Synthetic
auguuuuagagucuguuucc

SEQ ID NO: 535988 - RNA, 21 nt, Artificial Sequence
  Synthetic
aauguuuuagagucuguuucc

SEQ ID NO: 535989 - RNA, 22 nt, Artificial Sequence
  Synthetic
aaauguuuuagagucuguuucc

SEQ ID NO: 535990 - RNA, 23 nt, Artificial Sequence
  Synthetic
aaaauguuuuagagucuguuucc

SEQ ID NO: 535991 - RNA, 24 nt, Artificial Sequence
  Synthetic
aaaaauguuuuagagucuguuucc

SEQ ID NO: 535992 - RNA, 18 nt, Artificial Sequence
  Synthetic
cacaaaaaagaauuuucc

SEQ ID NO: 535993 - RNA, 19 nt, Artificial Sequence
  Synthetic
acacaaaaaagaauuuucc

SEQ ID NO: 535994 - RNA, 20 nt, Artificial Sequence
  Synthetic
aacacaaaaaagaauuuucc

SEQ ID NO: 535995 - RNA, 21 nt, Artificial Sequence
  Synthetic
gaacacaaaaaagaauuuucc

SEQ ID NO: 535996 - RNA, 22 nt, Artificial Sequence
  Synthetic
ugaacacaaaaaagaauuuucc

SEQ ID NO: 535997 - RNA, 23 nt, Artificial Sequence
  Synthetic
cugaacacaaaaaagaauuuucc

SEQ ID NO: 535998 - RNA, 24 nt, Artificial Sequence
  Synthetic
ucugaacacaaaaaagaauuuucc

SEQ ID NO: 535999 - RNA, 18 nt, Artificial Sequence
  Synthetic
uacuucuaugaauuuucc

SEQ ID NO: 536000 - RNA, 19 nt, Artificial Sequence
  Synthetic
cuacuucuaugaauuuucc

SEQ ID NO: 536001 - RNA, 20 nt, Artificial Sequence
  Synthetic
gcuacuucuaugaauuuucc

SEQ ID NO: 536002 - RNA, 21 nt, Artificial Sequence
  Synthetic
ugcuacuucuaugaauuuucc

SEQ ID NO: 536003 - RNA, 22 nt, Artificial Sequence
  Synthetic
augcuacuucuaugaauuuucc

SEQ ID NO: 536004 - RNA, 23 nt, Artificial Sequence
  Synthetic
aaugcuacuucuaugaauuuucc

SEQ ID NO: 536005 - RNA, 24 nt, Artificial Sequence
  Synthetic
aaaugcuacuucuaugaauuuucc

SEQ ID NO: 536006 - RNA, 18 nt, Artificial Sequence
  Synthetic
ugccuggaauaauuuucc

SEQ ID NO: 536007 - RNA, 19 nt, Artificial Sequence
  Synthetic
cugccuggaauaauuuucc

SEQ ID NO: 536008 - RNA, 20 nt, Artificial Sequence
  Synthetic
ccugccuggaauaauuuucc

SEQ ID NO: 536009 - RNA, 21 nt, Artificial Sequence
  Synthetic
cccugccuggaauaauuuucc

SEQ ID NO: 536010 - RNA, 22 nt, Artificial Sequence
  Synthetic
ucccugccuggaauaauuuucc

SEQ ID NO: 536011 - RNA, 23 nt, Artificial Sequence
  Synthetic
cucccugccuggaauaauuuucc

SEQ ID NO: 536012 - RNA, 24 nt, Artificial Sequence
  Synthetic
ucucccugccuggaauaauuuucc

SEQ ID NO: 536013 - RNA, 18 nt, Artificial Sequence
  Synthetic
uuaaaauucuaauuuucc

SEQ ID NO: 536014 - RNA, 19 nt, Artificial Sequence
  Synthetic
uuuaaaauucuaauuuucc

SEQ ID NO: 536015 - RNA, 20 nt, Artificial Sequence
  Synthetic
auuuaaaauucuaauuuucc

SEQ ID NO: 536016 - RNA, 21 nt, Artificial Sequence
  Synthetic
cauuuaaaauucuaauuuucc

SEQ ID NO: 536017 - RNA, 22 nt, Artificial Sequence
  Synthetic
gcauuuaaaauucuaauuuucc

SEQ ID NO: 536018 - RNA, 23 nt, Artificial Sequence
  Synthetic
ggcauuuaaaauucuaauuuucc

SEQ ID NO: 536019 - RNA, 24 nt, Artificial Sequence
  Synthetic
uggcauuuaaaauucuaauuuucc

SEQ ID NO: 536020 - RNA, 18 nt, Artificial Sequence
  Synthetic
gaagagagagcauuuucc

SEQ ID NO: 536021 - RNA, 19 nt, Artificial Sequence
  Synthetic
ugaagagagagcauuuucc

SEQ ID NO: 536022 - RNA, 20 nt, Artificial Sequence
  Synthetic
augaagagagagcauuuucc

SEQ ID NO: 536023 - RNA, 21 nt, Artificial Sequence
  Synthetic
gaugaagagagagcauuuucc

SEQ ID NO: 536024 - RNA, 22 nt, Artificial Sequence
  Synthetic
ggaugaagagagagcauuuucc

SEQ ID NO: 536025 - RNA, 23 nt, Artificial Sequence
  Synthetic
aggaugaagagagagcauuuucc

SEQ ID NO: 536026 - RNA, 24 nt, Artificial Sequence
  Synthetic
uaggaugaagagagagcauuuucc

SEQ ID NO: 536027 - RNA, 18 nt, Artificial Sequence
  Synthetic
agucuggggagauuuucc

SEQ ID NO: 536028 - RNA, 19 nt, Artificial Sequence
  Synthetic
uagucuggggagauuuucc

SEQ ID NO: 536029 - RNA, 20 nt, Artificial Sequence
  Synthetic
guagucuggggagauuuucc

SEQ ID NO: 536030 - RNA, 21 nt, Artificial Sequence
  Synthetic
aguagucuggggagauuuucc

SEQ ID NO: 536031 - RNA, 22 nt, Artificial Sequence
  Synthetic
uaguagucuggggagauuuucc

SEQ ID NO: 536032 - RNA, 23 nt, Artificial Sequence
  Synthetic
auaguagucuggggagauuuucc

SEQ ID NO: 536033 - RNA, 24 nt, Artificial Sequence
  Synthetic
cauaguagucuggggagauuuucc

SEQ ID NO: 536034 - RNA, 18 nt, Artificial Sequence
  Synthetic
auggccauugccuuuucc

SEQ ID NO: 536035 - RNA, 19 nt, Artificial Sequence
  Synthetic
gauggccauugccuuuucc

SEQ ID NO: 536036 - RNA, 20 nt, Artificial Sequence
  Synthetic
ugauggccauugccuuuucc

SEQ ID NO: 536037 - RNA, 21 nt, Artificial Sequence
  Synthetic
gugauggccauugccuuuucc

SEQ ID NO: 536038 - RNA, 22 nt, Artificial Sequence
  Synthetic
ugugauggccauugccuuuucc

SEQ ID NO: 536039 - RNA, 23 nt, Artificial Sequence
  Synthetic
augugauggccauugccuuuucc

SEQ ID NO: 536040 - RNA, 24 nt, Artificial Sequence
  Synthetic
aaugugauggccauugccuuuucc

SEQ ID NO: 536041 - RNA, 18 nt, Artificial Sequence
  Synthetic
auugcugacuccuuuucc

SEQ ID NO: 536042 - RNA, 19 nt, Artificial Sequence
  Synthetic
aauugcugacuccuuuucc

SEQ ID NO: 536043 - RNA, 20 nt, Artificial Sequence
  Synthetic
gaauugcugacuccuuuucc

SEQ ID NO: 536044 - RNA, 21 nt, Artificial Sequence
  Synthetic
ggaauugcugacuccuuuucc

SEQ ID NO: 536045 - RNA, 22 nt, Artificial Sequence
  Synthetic
aggaauugcugacuccuuuucc

SEQ ID NO: 536046 - RNA, 23 nt, Artificial Sequence
  Synthetic
uaggaauugcugacuccuuuucc

SEQ ID NO: 536047 - RNA, 24 nt, Artificial Sequence
  Synthetic
cuaggaauugcugacuccuuuucc

SEQ ID NO: 536048 - RNA, 18 nt, Artificial Sequence
  Synthetic
uggagcuagggcuuuucc

SEQ ID NO: 536049 - RNA, 19 nt, Artificial Sequence
  Synthetic
cuggagcuagggcuuuucc

SEQ ID NO: 536050 - RNA, 20 nt, Artificial Sequence
  Synthetic
ccuggagcuagggcuuuucc

SEQ ID NO: 536051 - RNA, 21 nt, Artificial Sequence
  Synthetic
cccuggagcuagggcuuuucc

SEQ ID NO: 536052 - RNA, 22 nt, Artificial Sequence
  Synthetic
acccuggagcuagggcuuuucc

SEQ ID NO: 536053 - RNA, 23 nt, Artificial Sequence
  Synthetic
cacccuggagcuagggcuuuucc

SEQ ID NO: 536054 - RNA, 24 nt, Artificial Sequence
  Synthetic
acacccuggagcuagggcuuuucc

SEQ ID NO: 536055 - RNA, 18 nt, Artificial Sequence
  Synthetic
auuuaaccuaucuuuucc

SEQ ID NO: 536056 - RNA, 19 nt, Artificial Sequence
  Synthetic
uauuuaaccuaucuuuucc

SEQ ID NO: 536057 - RNA, 20 nt, Artificial Sequence
  Synthetic
auauuuaaccuaucuuuucc

SEQ ID NO: 536058 - RNA, 21 nt, Artificial Sequence
  Synthetic
aauauuuaaccuaucuuuucc

SEQ ID NO: 536059 - RNA, 22 nt, Artificial Sequence
  Synthetic
uaauauuuaaccuaucuuuucc

SEQ ID NO: 536060 - RNA, 23 nt, Artificial Sequence
  Synthetic
uuaauauuuaaccuaucuuuucc

SEQ ID NO: 536061 - RNA, 24 nt, Artificial Sequence
  Synthetic
cuuaauauuuaaccuaucuuuucc

SEQ ID NO: 536062 - RNA, 18 nt, Artificial Sequence
  Synthetic
cucacucauuucuuuucc

SEQ ID NO: 536063 - RNA, 19 nt, Artificial Sequence
  Synthetic
ccucacucauuucuuuucc

SEQ ID NO: 536064 - RNA, 20 nt, Artificial Sequence
  Synthetic
accucacucauuucuuuucc

SEQ ID NO: 536065 - RNA, 21 nt, Artificial Sequence
  Synthetic
uaccucacucauuucuuuucc

SEQ ID NO: 536066 - RNA, 22 nt, Artificial Sequence
  Synthetic
cuaccucacucauuucuuuucc

SEQ ID NO: 536067 - RNA, 23 nt, Artificial Sequence
  Synthetic
ucuaccucacucauuucuuuucc

SEQ ID NO: 536068 - RNA, 24 nt, Artificial Sequence
  Synthetic
uucuaccucacucauuucuuuucc

SEQ ID NO: 536069 - RNA, 18 nt, Artificial Sequence
  Synthetic
auaauugcuuucuuuucc

SEQ ID NO: 536070 - RNA, 19 nt, Artificial Sequence
  Synthetic
uauaauugcuuucuuuucc

SEQ ID NO: 536071 - RNA, 20 nt, Artificial Sequence
  Synthetic
auauaauugcuuucuuuucc

SEQ ID NO: 536072 - RNA, 21 nt, Artificial Sequence
  Synthetic
uauauaauugcuuucuuuucc

SEQ ID NO: 536073 - RNA, 22 nt, Artificial Sequence
  Synthetic
auauauaauugcuuucuuuucc

SEQ ID NO: 536074 - RNA, 23 nt, Artificial Sequence
  Synthetic
cauauauaauugcuuucuuuucc

SEQ ID NO: 536075 - RNA, 24 nt, Artificial Sequence
  Synthetic
acauauauaauugcuuucuuuucc

SEQ ID NO: 536076 - RNA, 18 nt, Artificial Sequence
  Synthetic
cauauuaacaaguuuucc

SEQ ID NO: 536077 - RNA, 19 nt, Artificial Sequence
  Synthetic
gcauauuaacaaguuuucc

SEQ ID NO: 536078 - RNA, 20 nt, Artificial Sequence
  Synthetic
ugcauauuaacaaguuuucc

SEQ ID NO: 536079 - RNA, 21 nt, Artificial Sequence
  Synthetic
cugcauauuaacaaguuuucc

SEQ ID NO: 536080 - RNA, 22 nt, Artificial Sequence
  Synthetic
ucugcauauuaacaaguuuucc

SEQ ID NO: 536081 - RNA, 23 nt, Artificial Sequence
  Synthetic
aucugcauauuaacaaguuuucc

SEQ ID NO: 536082 - RNA, 24 nt, Artificial Sequence
  Synthetic
caucugcauauuaacaaguuuucc

SEQ ID NO: 536083 - RNA, 18 nt, Artificial Sequence
  Synthetic
caugguuguaaguuuucc

SEQ ID NO: 536084 - RNA, 19 nt, Artificial Sequence
  Synthetic
gcaugguuguaaguuuucc

SEQ ID NO: 536085 - RNA, 20 nt, Artificial Sequence
  Synthetic
ggcaugguuguaaguuuucc

SEQ ID NO: 536086 - RNA, 21 nt, Artificial Sequence
  Synthetic
uggcaugguuguaaguuuucc

SEQ ID NO: 536087 - RNA, 22 nt, Artificial Sequence
  Synthetic
cuggcaugguuguaaguuuucc

SEQ ID NO: 536088 - RNA, 23 nt, Artificial Sequence
  Synthetic
ucuggcaugguuguaaguuuucc

SEQ ID NO: 536089 - RNA, 24 nt, Artificial Sequence
  Synthetic
uucuggcaugguuguaaguuuucc

SEQ ID NO: 536090 - RNA, 18 nt, Artificial Sequence
  Synthetic
cuccuggcuuaguuuucc

SEQ ID NO: 536091 - RNA, 19 nt, Artificial Sequence
  Synthetic
ucuccuggcuuaguuuucc

SEQ ID NO: 536092 - RNA, 20 nt, Artificial Sequence
  Synthetic
cucuccuggcuuaguuuucc

SEQ ID NO: 536093 - RNA, 21 nt, Artificial Sequence
  Synthetic
ucucuccuggcuuaguuuucc

SEQ ID NO: 536094 - RNA, 22 nt, Artificial Sequence
  Synthetic
cucucuccuggcuuaguuuucc

SEQ ID NO: 536095 - RNA, 23 nt, Artificial Sequence
  Synthetic
ucucucuccuggcuuaguuuucc

SEQ ID NO: 536096 - RNA, 24 nt, Artificial Sequence
  Synthetic
uucucucuccuggcuuaguuuucc

SEQ ID NO: 536097 - RNA, 18 nt, Artificial Sequence
  Synthetic
ccagcagagagguuuucc

SEQ ID NO: 536098 - RNA, 19 nt, Artificial Sequence
  Synthetic
cccagcagagagguuuucc

SEQ ID NO: 536099 - RNA, 20 nt, Artificial Sequence
  Synthetic
ucccagcagagagguuuucc

SEQ ID NO: 536100 - RNA, 21 nt, Artificial Sequence
  Synthetic
gucccagcagagagguuuucc

SEQ ID NO: 536101 - RNA, 22 nt, Artificial Sequence
  Synthetic
ugucccagcagagagguuuucc

SEQ ID NO: 536102 - RNA, 23 nt, Artificial Sequence
  Synthetic
cugucccagcagagagguuuucc

SEQ ID NO: 536103 - RNA, 24 nt, Artificial Sequence
  Synthetic
acugucccagcagagagguuuucc

SEQ ID NO: 536104 - RNA, 18 nt, Artificial Sequence
  Synthetic
guggaagacaauuuuucc

SEQ ID NO: 536105 - RNA, 19 nt, Artificial Sequence
  Synthetic
uguggaagacaauuuuucc

SEQ ID NO: 536106 - RNA, 20 nt, Artificial Sequence
  Synthetic
uuguggaagacaauuuuucc

SEQ ID NO: 536107 - RNA, 21 nt, Artificial Sequence
  Synthetic
uuuguggaagacaauuuuucc

SEQ ID NO: 536108 - RNA, 22 nt, Artificial Sequence
  Synthetic
uuuuguggaagacaauuuuucc

SEQ ID NO: 536109 - RNA, 23 nt, Artificial Sequence
  Synthetic
auuuuguggaagacaauuuuucc

SEQ ID NO: 536110 - RNA, 24 nt, Artificial Sequence
  Synthetic
gauuuuguggaagacaauuuuucc

SEQ ID NO: 536111 - RNA, 18 nt, Artificial Sequence
  Synthetic
uucugaaagaauuuuucc

SEQ ID NO: 536112 - RNA, 19 nt, Artificial Sequence
  Synthetic
uuucugaaagaauuuuucc

SEQ ID NO: 536113 - RNA, 20 nt, Artificial Sequence
  Synthetic
uuuucugaaagaauuuuucc

SEQ ID NO: 536114 - RNA, 21 nt, Artificial Sequence
  Synthetic
cuuuucugaaagaauuuuucc

SEQ ID NO: 536115 - RNA, 22 nt, Artificial Sequence
  Synthetic
ucuuuucugaaagaauuuuucc

SEQ ID NO: 536116 - RNA, 23 nt, Artificial Sequence
  Synthetic
cucuuuucugaaagaauuuuucc

SEQ ID NO: 536117 - RNA, 24 nt, Artificial Sequence
  Synthetic
gcucuuuucugaaagaauuuuucc

SEQ ID NO: 536118 - RNA, 18 nt, Artificial Sequence
  Synthetic
gaugacuccccuuuuucc

SEQ ID NO: 536119 - RNA, 19 nt, Artificial Sequence
  Synthetic
ggaugacuccccuuuuucc

SEQ ID NO: 536120 - RNA, 20 nt, Artificial Sequence
  Synthetic
aggaugacuccccuuuuucc

SEQ ID NO: 536121 - RNA, 21 nt, Artificial Sequence
  Synthetic
uaggaugacuccccuuuuucc

SEQ ID NO: 536122 - RNA, 22 nt, Artificial Sequence
  Synthetic
auaggaugacuccccuuuuucc

SEQ ID NO: 536123 - RNA, 23 nt, Artificial Sequence
  Synthetic
gauaggaugacuccccuuuuucc

SEQ ID NO: 536124 - RNA, 24 nt, Artificial Sequence
  Synthetic
ggauaggaugacuccccuuuuucc

SEQ ID NO: 536125 - RNA, 18 nt, Artificial Sequence
  Synthetic
uuagccuucucuuuuucc

SEQ ID NO: 536126 - RNA, 19 nt, Artificial Sequence
  Synthetic
guuagccuucucuuuuucc

SEQ ID NO: 536127 - RNA, 20 nt, Artificial Sequence
  Synthetic
uguuagccuucucuuuuucc

SEQ ID NO: 536128 - RNA, 21 nt, Artificial Sequence
  Synthetic
auguuagccuucucuuuuucc

SEQ ID NO: 536129 - RNA, 22 nt, Artificial Sequence
  Synthetic
gauguuagccuucucuuuuucc

SEQ ID NO: 536130 - RNA, 23 nt, Artificial Sequence
  Synthetic
ugauguuagccuucucuuuuucc

SEQ ID NO: 536131 - RNA, 24 nt, Artificial Sequence
  Synthetic
uugauguuagccuucucuuuuucc

SEQ ID NO: 536132 - RNA, 18 nt, Artificial Sequence
  Synthetic
ggauuuuggucuuuuucc

SEQ ID NO: 536133 - RNA, 19 nt, Artificial Sequence
  Synthetic
aggauuuuggucuuuuucc

SEQ ID NO: 536134 - RNA, 20 nt, Artificial Sequence
  Synthetic
gaggauuuuggucuuuuucc

SEQ ID NO: 536135 - RNA, 21 nt, Artificial Sequence
  Synthetic
ugaggauuuuggucuuuuucc

SEQ ID NO: 536136 - RNA, 22 nt, Artificial Sequence
  Synthetic
uugaggauuuuggucuuuuucc

SEQ ID NO: 536137 - RNA, 23 nt, Artificial Sequence
  Synthetic
guugaggauuuuggucuuuuucc

SEQ ID NO: 536138 - RNA, 24 nt, Artificial Sequence
  Synthetic
uguugaggauuuuggucuuuuucc

SEQ ID NO: 536139 - RNA, 18 nt, Artificial Sequence
  Synthetic
caugaugugucuuuuucc

SEQ ID NO: 536140 - RNA, 19 nt, Artificial Sequence
  Synthetic
ccaugaugugucuuuuucc

SEQ ID NO: 536141 - RNA, 20 nt, Artificial Sequence
  Synthetic
accaugaugugucuuuuucc

SEQ ID NO: 536142 - RNA, 21 nt, Artificial Sequence
  Synthetic
uaccaugaugugucuuuuucc

SEQ ID NO: 536143 - RNA, 22 nt, Artificial Sequence
  Synthetic
cuaccaugaugugucuuuuucc

SEQ ID NO: 536144 - RNA, 23 nt, Artificial Sequence
  Synthetic
ccuaccaugaugugucuuuuucc

SEQ ID NO: 536145 - RNA, 24 nt, Artificial Sequence
  Synthetic
uccuaccaugaugugucuuuuucc

SEQ ID NO: 536146 - RNA, 18 nt, Artificial Sequence
  Synthetic
uaauacuauuguuuuucc

SEQ ID NO: 536147 - RNA, 19 nt, Artificial Sequence
  Synthetic
auaauacuauuguuuuucc

SEQ ID NO: 536148 - RNA, 20 nt, Artificial Sequence
  Synthetic
gauaauacuauuguuuuucc

SEQ ID NO: 536149 - RNA, 21 nt, Artificial Sequence
  Synthetic
cgauaauacuauuguuuuucc

SEQ ID NO: 536150 - RNA, 22 nt, Artificial Sequence
  Synthetic
ucgauaauacuauuguuuuucc

SEQ ID NO: 536151 - RNA, 23 nt, Artificial Sequence
  Synthetic
uucgauaauacuauuguuuuucc

SEQ ID NO: 536152 - RNA, 24 nt, Artificial Sequence
  Synthetic
uuucgauaauacuauuguuuuucc

SEQ ID NO: 536153 - RNA, 18 nt, Artificial Sequence
  Synthetic
uuucccugucuuuuuucc

SEQ ID NO: 536154 - RNA, 19 nt, Artificial Sequence
  Synthetic
uuuucccugucuuuuuucc

SEQ ID NO: 536155 - RNA, 20 nt, Artificial Sequence
  Synthetic
uuuuucccugucuuuuuucc

SEQ ID NO: 536156 - RNA, 21 nt, Artificial Sequence
  Synthetic
cuuuuucccugucuuuuuucc

SEQ ID NO: 536157 - RNA, 22 nt, Artificial Sequence
  Synthetic
ucuuuuucccugucuuuuuucc

SEQ ID NO: 536158 - RNA, 23 nt, Artificial Sequence
  Synthetic
uucuuuuucccugucuuuuuucc

SEQ ID NO: 536159 - RNA, 24 nt, Artificial Sequence
  Synthetic
cuucuuuuucccugucuuuuuucc

SEQ ID NO: 536160 - RNA, 18 nt, Artificial Sequence
  Synthetic
uagcccaucuuuuuuucc

SEQ ID NO: 536161 - RNA, 19 nt, Artificial Sequence
  Synthetic
uuagcccaucuuuuuuucc

SEQ ID NO: 536162 - RNA, 20 nt, Artificial Sequence
  Synthetic
uuuagcccaucuuuuuuucc

SEQ ID NO: 536163 - RNA, 21 nt, Artificial Sequence
  Synthetic
uuuuagcccaucuuuuuuucc

SEQ ID NO: 536164 - RNA, 22 nt, Artificial Sequence
  Synthetic
cuuuuagcccaucuuuuuuucc

SEQ ID NO: 536165 - RNA, 23 nt, Artificial Sequence
  Synthetic
ucuuuuagcccaucuuuuuuucc

SEQ ID NO: 536166 - RNA, 24 nt, Artificial Sequence
  Synthetic
aucuuuuagcccaucuuuuuuucc

SEQ ID NO: 536167 - RNA, 18 nt, Artificial Sequence
  Synthetic
gauauuuuuuuuuuuucc

SEQ ID NO: 536168 - RNA, 19 nt, Artificial Sequence
  Synthetic
agauauuuuuuuuuuuucc

SEQ ID NO: 536169 - RNA, 20 nt, Artificial Sequence
  Synthetic
uagauauuuuuuuuuuuucc

SEQ ID NO: 536170 - RNA, 21 nt, Artificial Sequence
  Synthetic
auagauauuuuuuuuuuuucc

SEQ ID NO: 536171 - RNA, 22 nt, Artificial Sequence
  Synthetic
uauagauauuuuuuuuuuuucc

SEQ ID NO: 536172 - RNA, 23 nt, Artificial Sequence
  Synthetic
cuauagauauuuuuuuuuuuucc

SEQ ID NO: 536173 - RNA, 24 nt, Artificial Sequence
  Synthetic
ucuauagauauuuuuuuuuuuucc

SEQ ID NO: 536174 - RNA, 18 nt, Artificial Sequence
  Synthetic
gugacuaugcacaaaagc

SEQ ID NO: 536175 - RNA, 19 nt, Artificial Sequence
  Synthetic
agugacuaugcacaaaagc

SEQ ID NO: 536176 - RNA, 20 nt, Artificial Sequence
  Synthetic
aagugacuaugcacaaaagc

SEQ ID NO: 536177 - RNA, 21 nt, Artificial Sequence
  Synthetic
uaagugacuaugcacaaaagc

SEQ ID NO: 536178 - RNA, 22 nt, Artificial Sequence
  Synthetic
uuaagugacuaugcacaaaagc

SEQ ID NO: 536179 - RNA, 23 nt, Artificial Sequence
  Synthetic
guuaagugacuaugcacaaaagc

SEQ ID NO: 536180 - RNA, 24 nt, Artificial Sequence
  Synthetic
aguuaagugacuaugcacaaaagc

SEQ ID NO: 536181 - RNA, 18 nt, Artificial Sequence
  Synthetic
uccuuccuagacaaaagc

SEQ ID NO: 536182 - RNA, 19 nt, Artificial Sequence
  Synthetic
uuccuuccuagacaaaagc

SEQ ID NO: 536183 - RNA, 20 nt, Artificial Sequence
  Synthetic
auuccuuccuagacaaaagc

SEQ ID NO: 536184 - RNA, 21 nt, Artificial Sequence
  Synthetic
uauuccuuccuagacaaaagc

SEQ ID NO: 536185 - RNA, 22 nt, Artificial Sequence
  Synthetic
uuauuccuuccuagacaaaagc

SEQ ID NO: 536186 - RNA, 23 nt, Artificial Sequence
  Synthetic
auuauuccuuccuagacaaaagc

SEQ ID NO: 536187 - RNA, 24 nt, Artificial Sequence
  Synthetic
aauuauuccuuccuagacaaaagc

SEQ ID NO: 536188 - RNA, 18 nt, Artificial Sequence
  Synthetic
gaaauagaaagcaaaagc

SEQ ID NO: 536189 - RNA, 19 nt, Artificial Sequence
  Synthetic
agaaauagaaagcaaaagc

SEQ ID NO: 536190 - RNA, 20 nt, Artificial Sequence
  Synthetic
uagaaauagaaagcaaaagc

SEQ ID NO: 536191 - RNA, 21 nt, Artificial Sequence
  Synthetic
guagaaauagaaagcaaaagc

SEQ ID NO: 536192 - RNA, 22 nt, Artificial Sequence
  Synthetic
aguagaaauagaaagcaaaagc

SEQ ID NO: 536193 - RNA, 23 nt, Artificial Sequence
  Synthetic
gaguagaaauagaaagcaaaagc

SEQ ID NO: 536194 - RNA, 24 nt, Artificial Sequence
  Synthetic
ggaguagaaauagaaagcaaaagc

SEQ ID NO: 536195 - RNA, 24 nt, Artificial Sequence
  Synthetic
guaucauacugaaugggcaaaagc

SEQ ID NO: 536196 - RNA, 18 nt, Artificial Sequence
  Synthetic
ucgggucaaugcaaaagc

SEQ ID NO: 536197 - RNA, 19 nt, Artificial Sequence
  Synthetic
uucgggucaaugcaaaagc

SEQ ID NO: 536198 - RNA, 20 nt, Artificial Sequence
  Synthetic
guucgggucaaugcaaaagc

SEQ ID NO: 536199 - RNA, 21 nt, Artificial Sequence
  Synthetic
uguucgggucaaugcaaaagc

SEQ ID NO: 536200 - RNA, 22 nt, Artificial Sequence
  Synthetic
auguucgggucaaugcaaaagc

SEQ ID NO: 536201 - RNA, 23 nt, Artificial Sequence
  Synthetic
uauguucgggucaaugcaaaagc

SEQ ID NO: 536202 - RNA, 24 nt, Artificial Sequence
  Synthetic
guauguucgggucaaugcaaaagc

SEQ ID NO: 536203 - RNA, 18 nt, Artificial Sequence
  Synthetic
ucacuuuaaaucaaaagc

SEQ ID NO: 536204 - RNA, 19 nt, Artificial Sequence
  Synthetic
cucacuuuaaaucaaaagc

SEQ ID NO: 536205 - RNA, 20 nt, Artificial Sequence
  Synthetic
ucucacuuuaaaucaaaagc

SEQ ID NO: 536206 - RNA, 21 nt, Artificial Sequence
  Synthetic
cucucacuuuaaaucaaaagc

SEQ ID NO: 536207 - RNA, 22 nt, Artificial Sequence
  Synthetic
ucucucacuuuaaaucaaaagc

SEQ ID NO: 536208 - RNA, 23 nt, Artificial Sequence
  Synthetic
gucucucacuuuaaaucaaaagc

SEQ ID NO: 536209 - RNA, 24 nt, Artificial Sequence
  Synthetic
ugucucucacuuuaaaucaaaagc

SEQ ID NO: 536210 - RNA, 18 nt, Artificial Sequence
  Synthetic
cacauagaauucaaaagc

SEQ ID NO: 536211 - RNA, 19 nt, Artificial Sequence
  Synthetic
ucacauagaauucaaaagc

SEQ ID NO: 536212 - RNA, 20 nt, Artificial Sequence
  Synthetic
aucacauagaauucaaaagc

SEQ ID NO: 536213 - RNA, 21 nt, Artificial Sequence
  Synthetic
aaucacauagaauucaaaagc

SEQ ID NO: 536214 - RNA, 22 nt, Artificial Sequence
  Synthetic
uaaucacauagaauucaaaagc

SEQ ID NO: 536215 - RNA, 23 nt, Artificial Sequence
  Synthetic
guaaucacauagaauucaaaagc

SEQ ID NO: 536216 - RNA, 24 nt, Artificial Sequence
  Synthetic
aguaaucacauagaauucaaaagc

SEQ ID NO: 536217 - RNA, 18 nt, Artificial Sequence
  Synthetic
aagguuuauuucaaaagc

SEQ ID NO: 536218 - RNA, 19 nt, Artificial Sequence
  Synthetic
uaagguuuauuucaaaagc

SEQ ID NO: 536219 - RNA, 20 nt, Artificial Sequence
  Synthetic
uuaagguuuauuucaaaagc

SEQ ID NO: 536220 - RNA, 21 nt, Artificial Sequence
  Synthetic
uuuaagguuuauuucaaaagc

SEQ ID NO: 536221 - RNA, 22 nt, Artificial Sequence
  Synthetic
uuuuaagguuuauuucaaaagc

SEQ ID NO: 536222 - RNA, 23 nt, Artificial Sequence
  Synthetic
uuuuuaagguuuauuucaaaagc

SEQ ID NO: 536223 - RNA, 24 nt, Artificial Sequence
  Synthetic
cuuuuuaagguuuauuucaaaagc

SEQ ID NO: 536224 - RNA, 18 nt, Artificial Sequence
  Synthetic
cucccaguaaagaaaagc

SEQ ID NO: 536225 - RNA, 19 nt, Artificial Sequence
  Synthetic
ucucccaguaaagaaaagc

SEQ ID NO: 536226 - RNA, 20 nt, Artificial Sequence
  Synthetic
cucucccaguaaagaaaagc

SEQ ID NO: 536227 - RNA, 21 nt, Artificial Sequence
  Synthetic
acucucccaguaaagaaaagc

SEQ ID NO: 536228 - RNA, 22 nt, Artificial Sequence
  Synthetic
aacucucccaguaaagaaaagc

SEQ ID NO: 536229 - RNA, 23 nt, Artificial Sequence
  Synthetic
aaacucucccaguaaagaaaagc

SEQ ID NO: 536230 - RNA, 24 nt, Artificial Sequence
  Synthetic
uaaacucucccaguaaagaaaagc

SEQ ID NO: 536231 - RNA, 18 nt, Artificial Sequence
  Synthetic
uaucgaagggagaaaagc

SEQ ID NO: 536232 - RNA, 19 nt, Artificial Sequence
  Synthetic
cuaucgaagggagaaaagc

SEQ ID NO: 536233 - RNA, 20 nt, Artificial Sequence
  Synthetic
ccuaucgaagggagaaaagc

SEQ ID NO: 536234 - RNA, 21 nt, Artificial Sequence
  Synthetic
uccuaucgaagggagaaaagc

SEQ ID NO: 536235 - RNA, 22 nt, Artificial Sequence
  Synthetic
uuccuaucgaagggagaaaagc

SEQ ID NO: 536236 - RNA, 23 nt, Artificial Sequence
  Synthetic
uuuccuaucgaagggagaaaagc

SEQ ID NO: 536237 - RNA, 24 nt, Artificial Sequence
  Synthetic
uuuuccuaucgaagggagaaaagc

SEQ ID NO: 536238 - RNA, 18 nt, Artificial Sequence
  Synthetic
uaaaagaacuagaaaagc

SEQ ID NO: 536239 - RNA, 19 nt, Artificial Sequence
  Synthetic
uuaaaagaacuagaaaagc

SEQ ID NO: 536240 - RNA, 20 nt, Artificial Sequence
  Synthetic
auuaaaagaacuagaaaagc

SEQ ID NO: 536241 - RNA, 21 nt, Artificial Sequence
  Synthetic
aauuaaaagaacuagaaaagc

SEQ ID NO: 536242 - RNA, 22 nt, Artificial Sequence
  Synthetic
caauuaaaagaacuagaaaagc

SEQ ID NO: 536243 - RNA, 23 nt, Artificial Sequence
  Synthetic
acaauuaaaagaacuagaaaagc

SEQ ID NO: 536244 - RNA, 24 nt, Artificial Sequence
  Synthetic
cacaauuaaaagaacuagaaaagc

SEQ ID NO: 536245 - RNA, 18 nt, Artificial Sequence
  Synthetic
cggaggcacacgaaaagc

SEQ ID NO: 536246 - RNA, 19 nt, Artificial Sequence
  Synthetic
gcggaggcacacgaaaagc

SEQ ID NO: 536247 - RNA, 20 nt, Artificial Sequence
  Synthetic
ggcggaggcacacgaaaagc

SEQ ID NO: 536248 - RNA, 21 nt, Artificial Sequence
  Synthetic
aggcggaggcacacgaaaagc

SEQ ID NO: 536249 - RNA, 22 nt, Artificial Sequence
  Synthetic
gaggcggaggcacacgaaaagc

SEQ ID NO: 536250 - RNA, 23 nt, Artificial Sequence
  Synthetic
ggaggcggaggcacacgaaaagc

SEQ ID NO: 536251 - RNA, 24 nt, Artificial Sequence
  Synthetic
gggaggcggaggcacacgaaaagc

SEQ ID NO: 536252 - RNA, 18 nt, Artificial Sequence
  Synthetic
ucuauuauaaugaaaagc

SEQ ID NO: 536253 - RNA, 19 nt, Artificial Sequence
  Synthetic
uucuauuauaaugaaaagc

SEQ ID NO: 536254 - RNA, 20 nt, Artificial Sequence
  Synthetic
auucuauuauaaugaaaagc

SEQ ID NO: 536255 - RNA, 21 nt, Artificial Sequence
  Synthetic
aauucuauuauaaugaaaagc

SEQ ID NO: 536256 - RNA, 22 nt, Artificial Sequence
  Synthetic
aaauucuauuauaaugaaaagc

SEQ ID NO: 536257 - RNA, 23 nt, Artificial Sequence
  Synthetic
aaaauucuauuauaaugaaaagc

SEQ ID NO: 536258 - RNA, 24 nt, Artificial Sequence
  Synthetic
uaaaauucuauuauaaugaaaagc

SEQ ID NO: 536259 - RNA, 18 nt, Artificial Sequence
  Synthetic
guuuuggcuaugaaaagc

SEQ ID NO: 536260 - RNA, 19 nt, Artificial Sequence
  Synthetic
uguuuuggcuaugaaaagc

SEQ ID NO: 536261 - RNA, 20 nt, Artificial Sequence
  Synthetic
auguuuuggcuaugaaaagc

SEQ ID NO: 536262 - RNA, 21 nt, Artificial Sequence
  Synthetic
aauguuuuggcuaugaaaagc

SEQ ID NO: 536263 - RNA, 22 nt, Artificial Sequence
  Synthetic
gaauguuuuggcuaugaaaagc

SEQ ID NO: 536264 - RNA, 23 nt, Artificial Sequence
  Synthetic
agaauguuuuggcuaugaaaagc

SEQ ID NO: 536265 - RNA, 24 nt, Artificial Sequence
  Synthetic
gagaauguuuuggcuaugaaaagc

SEQ ID NO: 536266 - RNA, 18 nt, Artificial Sequence
  Synthetic
auuaagucucugaaaagc

SEQ ID NO: 536267 - RNA, 19 nt, Artificial Sequence
  Synthetic
aauuaagucucugaaaagc

SEQ ID NO: 536268 - RNA, 20 nt, Artificial Sequence
  Synthetic
aaauuaagucucugaaaagc

SEQ ID NO: 536269 - RNA, 21 nt, Artificial Sequence
  Synthetic
gaaauuaagucucugaaaagc

SEQ ID NO: 536270 - RNA, 22 nt, Artificial Sequence
  Synthetic
agaaauuaagucucugaaaagc

SEQ ID NO: 536271 - RNA, 23 nt, Artificial Sequence
  Synthetic
cagaaauuaagucucugaaaagc

SEQ ID NO: 536272 - RNA, 24 nt, Artificial Sequence
  Synthetic
acagaaauuaagucucugaaaagc

SEQ ID NO: 536273 - RNA, 18 nt, Artificial Sequence
  Synthetic
auaugucaacauaaaagc

SEQ ID NO: 536274 - RNA, 19 nt, Artificial Sequence
  Synthetic
gauaugucaacauaaaagc

SEQ ID NO: 536275 - RNA, 20 nt, Artificial Sequence
  Synthetic
cgauaugucaacauaaaagc

SEQ ID NO: 536276 - RNA, 21 nt, Artificial Sequence
  Synthetic
acgauaugucaacauaaaagc

SEQ ID NO: 536277 - RNA, 22 nt, Artificial Sequence
  Synthetic
aacgauaugucaacauaaaagc

SEQ ID NO: 536278 - RNA, 23 nt, Artificial Sequence
  Synthetic
aaacgauaugucaacauaaaagc

SEQ ID NO: 536279 - RNA, 24 nt, Artificial Sequence
  Synthetic
gaaacgauaugucaacauaaaagc

SEQ ID NO: 536280 - RNA, 18 nt, Artificial Sequence
  Synthetic
aacucugaccauaaaagc

SEQ ID NO: 536281 - RNA, 19 nt, Artificial Sequence
  Synthetic
uaacucugaccauaaaagc

SEQ ID NO: 536282 - RNA, 20 nt, Artificial Sequence
  Synthetic
uuaacucugaccauaaaagc

SEQ ID NO: 536283 - RNA, 21 nt, Artificial Sequence
  Synthetic
guuaacucugaccauaaaagc

SEQ ID NO: 536284 - RNA, 22 nt, Artificial Sequence
  Synthetic
aguuaacucugaccauaaaagc

SEQ ID NO: 536285 - RNA, 23 nt, Artificial Sequence
  Synthetic
gaguuaacucugaccauaaaagc

SEQ ID NO: 536286 - RNA, 24 nt, Artificial Sequence
  Synthetic
agaguuaacucugaccauaaaagc

SEQ ID NO: 536287 - RNA, 18 nt, Artificial Sequence
  Synthetic
gaaagaguagcuaaaagc

SEQ ID NO: 536288 - RNA, 19 nt, Artificial Sequence
  Synthetic
agaaagaguagcuaaaagc

SEQ ID NO: 536289 - RNA, 20 nt, Artificial Sequence
  Synthetic
gagaaagaguagcuaaaagc

SEQ ID NO: 536290 - RNA, 21 nt, Artificial Sequence
  Synthetic
agagaaagaguagcuaaaagc

SEQ ID NO: 536291 - RNA, 22 nt, Artificial Sequence
  Synthetic
aagagaaagaguagcuaaaagc

SEQ ID NO: 536292 - RNA, 23 nt, Artificial Sequence
  Synthetic
gaagagaaagaguagcuaaaagc

SEQ ID NO: 536293 - RNA, 24 nt, Artificial Sequence
  Synthetic
ggaagagaaagaguagcuaaaagc

SEQ ID NO: 536294 - RNA, 18 nt, Artificial Sequence
  Synthetic
ucuuuucauuguaaaagc

SEQ ID NO: 536295 - RNA, 19 nt, Artificial Sequence
  Synthetic
uucuuuucauuguaaaagc

SEQ ID NO: 536296 - RNA, 20 nt, Artificial Sequence
  Synthetic
cuucuuuucauuguaaaagc

SEQ ID NO: 536297 - RNA, 21 nt, Artificial Sequence
  Synthetic
acuucuuuucauuguaaaagc

SEQ ID NO: 536298 - RNA, 22 nt, Artificial Sequence
  Synthetic
aacuucuuuucauuguaaaagc

SEQ ID NO: 536299 - RNA, 23 nt, Artificial Sequence
  Synthetic
gaacuucuuuucauuguaaaagc

SEQ ID NO: 536300 - RNA, 24 nt, Artificial Sequence
  Synthetic
ugaacuucuuuucauuguaaaagc

SEQ ID NO: 536301 - RNA, 18 nt, Artificial Sequence
  Synthetic
acauagagaguuaaaagc

SEQ ID NO: 536302 - RNA, 19 nt, Artificial Sequence
  Synthetic
uacauagagaguuaaaagc

SEQ ID NO: 536303 - RNA, 20 nt, Artificial Sequence
  Synthetic
uuacauagagaguuaaaagc

SEQ ID NO: 536304 - RNA, 21 nt, Artificial Sequence
  Synthetic
auuacauagagaguuaaaagc

SEQ ID NO: 536305 - RNA, 22 nt, Artificial Sequence
  Synthetic
uauuacauagagaguuaaaagc

SEQ ID NO: 536306 - RNA, 23 nt, Artificial Sequence
  Synthetic
auauuacauagagaguuaaaagc

SEQ ID NO: 536307 - RNA, 24 nt, Artificial Sequence
  Synthetic
uauauuacauagagaguuaaaagc

SEQ ID NO: 536308 - RNA, 18 nt, Artificial Sequence
  Synthetic
acaaaggauuuuaaaagc

SEQ ID NO: 536309 - RNA, 19 nt, Artificial Sequence
  Synthetic
uacaaaggauuuuaaaagc

SEQ ID NO: 536310 - RNA, 20 nt, Artificial Sequence
  Synthetic
auacaaaggauuuuaaaagc

SEQ ID NO: 536311 - RNA, 21 nt, Artificial Sequence
  Synthetic
aauacaaaggauuuuaaaagc

SEQ ID NO: 536312 - RNA, 22 nt, Artificial Sequence
  Synthetic
aaauacaaaggauuuuaaaagc

SEQ ID NO: 536313 - RNA, 23 nt, Artificial Sequence
  Synthetic
aaaauacaaaggauuuuaaaagc

SEQ ID NO: 536314 - RNA, 24 nt, Artificial Sequence
  Synthetic
gaaaauacaaaggauuuuaaaagc

SEQ ID NO: 536315 - RNA, 18 nt, Artificial Sequence
  Synthetic
aaagcuaaaaaacaaagc

SEQ ID NO: 536316 - RNA, 19 nt, Artificial Sequence
  Synthetic
aaaagcuaaaaaacaaagc

SEQ ID NO: 536317 - RNA, 20 nt, Artificial Sequence
  Synthetic
gaaaagcuaaaaaacaaagc

SEQ ID NO: 536318 - RNA, 21 nt, Artificial Sequence
  Synthetic
agaaaagcuaaaaaacaaagc

SEQ ID NO: 536319 - RNA, 22 nt, Artificial Sequence
  Synthetic
uagaaaagcuaaaaaacaaagc

SEQ ID NO: 536320 - RNA, 23 nt, Artificial Sequence
  Synthetic
auagaaaagcuaaaaaacaaagc

SEQ ID NO: 536321 - RNA, 24 nt, Artificial Sequence
  Synthetic
cauagaaaagcuaaaaaacaaagc

SEQ ID NO: 536322 - RNA, 18 nt, Artificial Sequence
  Synthetic
aacggcauaaaacaaagc

SEQ ID NO: 536323 - RNA, 19 nt, Artificial Sequence
  Synthetic
aaacggcauaaaacaaagc

SEQ ID NO: 536324 - RNA, 20 nt, Artificial Sequence
  Synthetic
aaaacggcauaaaacaaagc

SEQ ID NO: 536325 - RNA, 21 nt, Artificial Sequence
  Synthetic
gaaaacggcauaaaacaaagc

SEQ ID NO: 536326 - RNA, 22 nt, Artificial Sequence
  Synthetic
ggaaaacggcauaaaacaaagc

SEQ ID NO: 536327 - RNA, 23 nt, Artificial Sequence
  Synthetic
gggaaaacggcauaaaacaaagc

SEQ ID NO: 536328 - RNA, 24 nt, Artificial Sequence
  Synthetic
ugggaaaacggcauaaaacaaagc

SEQ ID NO: 536329 - RNA, 18 nt, Artificial Sequence
  Synthetic
uagcuuuauaaacaaagc

SEQ ID NO: 536330 - RNA, 19 nt, Artificial Sequence
  Synthetic
uuagcuuuauaaacaaagc

SEQ ID NO: 536331 - RNA, 20 nt, Artificial Sequence
  Synthetic
uuuagcuuuauaaacaaagc

SEQ ID NO: 536332 - RNA, 21 nt, Artificial Sequence
  Synthetic
uuuuagcuuuauaaacaaagc

SEQ ID NO: 536333 - RNA, 22 nt, Artificial Sequence
  Synthetic
cuuuuagcuuuauaaacaaagc

SEQ ID NO: 536334 - RNA, 23 nt, Artificial Sequence
  Synthetic
gcuuuuagcuuuauaaacaaagc

SEQ ID NO: 536335 - RNA, 24 nt, Artificial Sequence
  Synthetic
ugcuuuuagcuuuauaaacaaagc

SEQ ID NO: 536336 - RNA, 21 nt, Artificial Sequence
  Synthetic
ccuaagccaaaagaacaaagc

SEQ ID NO: 536337 - RNA, 22 nt, Artificial Sequence
  Synthetic
uccuaagccaaaagaacaaagc

SEQ ID NO: 536338 - RNA, 23 nt, Artificial Sequence
  Synthetic
auccuaagccaaaagaacaaagc

SEQ ID NO: 536339 - RNA, 24 nt, Artificial Sequence
  Synthetic
aauccuaagccaaaagaacaaagc

SEQ ID NO: 536340 - RNA, 18 nt, Artificial Sequence
  Synthetic
aaguaaaaugaacaaagc

SEQ ID NO: 536341 - RNA, 19 nt, Artificial Sequence
  Synthetic
uaaguaaaaugaacaaagc

SEQ ID NO: 536342 - RNA, 20 nt, Artificial Sequence
  Synthetic
cuaaguaaaaugaacaaagc

SEQ ID NO: 536343 - RNA, 21 nt, Artificial Sequence
  Synthetic
ccuaaguaaaaugaacaaagc

SEQ ID NO: 536344 - RNA, 22 nt, Artificial Sequence
  Synthetic
uccuaaguaaaaugaacaaagc

SEQ ID NO: 536345 - RNA, 23 nt, Artificial Sequence
  Synthetic
auccuaaguaaaaugaacaaagc

SEQ ID NO: 536346 - RNA, 24 nt, Artificial Sequence
  Synthetic
aauccuaaguaaaaugaacaaagc

SEQ ID NO: 536347 - RNA, 18 nt, Artificial Sequence
  Synthetic
aagcaagaauaacaaagc

SEQ ID NO: 536348 - RNA, 19 nt, Artificial Sequence
  Synthetic
uaagcaagaauaacaaagc

SEQ ID NO: 536349 - RNA, 20 nt, Artificial Sequence
  Synthetic
cuaagcaagaauaacaaagc

SEQ ID NO: 536350 - RNA, 21 nt, Artificial Sequence
  Synthetic
ccuaagcaagaauaacaaagc

SEQ ID NO: 536351 - RNA, 22 nt, Artificial Sequence
  Synthetic
uccuaagcaagaauaacaaagc

SEQ ID NO: 536352 - RNA, 23 nt, Artificial Sequence
  Synthetic
auccuaagcaagaauaacaaagc

SEQ ID NO: 536353 - RNA, 24 nt, Artificial Sequence
  Synthetic
aauccuaagcaagaauaacaaagc

SEQ ID NO: 536354 - RNA, 18 nt, Artificial Sequence
  Synthetic
cuccgcaccugacaaagc

SEQ ID NO: 536355 - RNA, 19 nt, Artificial Sequence
  Synthetic
gcuccgcaccugacaaagc

SEQ ID NO: 536356 - RNA, 20 nt, Artificial Sequence
  Synthetic
ggcuccgcaccugacaaagc

SEQ ID NO: 536357 - RNA, 21 nt, Artificial Sequence
  Synthetic
gggcuccgcaccugacaaagc

SEQ ID NO: 536358 - RNA, 22 nt, Artificial Sequence
  Synthetic
ugggcuccgcaccugacaaagc

SEQ ID NO: 536359 - RNA, 23 nt, Artificial Sequence
  Synthetic
gugggcuccgcaccugacaaagc

SEQ ID NO: 536360 - RNA, 24 nt, Artificial Sequence
  Synthetic
ugugggcuccgcaccugacaaagc

SEQ ID NO: 536361 - RNA, 18 nt, Artificial Sequence
  Synthetic
aauuaauucugacaaagc

SEQ ID NO: 536362 - RNA, 19 nt, Artificial Sequence
  Synthetic
aaauuaauucugacaaagc

SEQ ID NO: 536363 - RNA, 20 nt, Artificial Sequence
  Synthetic
aaaauuaauucugacaaagc

SEQ ID NO: 536364 - RNA, 21 nt, Artificial Sequence
  Synthetic
aaaaauuaauucugacaaagc

SEQ ID NO: 536365 - RNA, 22 nt, Artificial Sequence
  Synthetic
aaaaaauuaauucugacaaagc

SEQ ID NO: 536366 - RNA, 23 nt, Artificial Sequence
  Synthetic
aaaaaaauuaauucugacaaagc

SEQ ID NO: 536367 - RNA, 24 nt, Artificial Sequence
  Synthetic
uaaaaaaauuaauucugacaaagc

SEQ ID NO: 536368 - RNA, 18 nt, Artificial Sequence
  Synthetic
aaaaagcuucuacaaagc

SEQ ID NO: 536369 - RNA, 19 nt, Artificial Sequence
  Synthetic
uaaaaagcuucuacaaagc

SEQ ID NO: 536370 - RNA, 20 nt, Artificial Sequence
  Synthetic
cuaaaaagcuucuacaaagc

SEQ ID NO: 536371 - RNA, 21 nt, Artificial Sequence
  Synthetic
acuaaaaagcuucuacaaagc

SEQ ID NO: 536372 - RNA, 22 nt, Artificial Sequence
  Synthetic
aacuaaaaagcuucuacaaagc

SEQ ID NO: 536373 - RNA, 23 nt, Artificial Sequence
  Synthetic
aaacuaaaaagcuucuacaaagc

SEQ ID NO: 536374 - RNA, 24 nt, Artificial Sequence
  Synthetic
caaacuaaaaagcuucuacaaagc

SEQ ID NO: 536375 - RNA, 18 nt, Artificial Sequence
  Synthetic
uguaaccuuguacaaagc

SEQ ID NO: 536376 - RNA, 19 nt, Artificial Sequence
  Synthetic
uuguaaccuuguacaaagc

SEQ ID NO: 536377 - RNA, 20 nt, Artificial Sequence
  Synthetic
auuguaaccuuguacaaagc

SEQ ID NO: 536378 - RNA, 21 nt, Artificial Sequence
  Synthetic
uauuguaaccuuguacaaagc

SEQ ID NO: 536379 - RNA, 22 nt, Artificial Sequence
  Synthetic
uuauuguaaccuuguacaaagc

SEQ ID NO: 536380 - RNA, 23 nt, Artificial Sequence
  Synthetic
auuauuguaaccuuguacaaagc

SEQ ID NO: 536381 - RNA, 24 nt, Artificial Sequence
  Synthetic
cauuauuguaaccuuguacaaagc

SEQ ID NO: 536382 - RNA, 18 nt, Artificial Sequence
  Synthetic
aaacaggauagccaaagc

SEQ ID NO: 536383 - RNA, 19 nt, Artificial Sequence
  Synthetic
aaaacaggauagccaaagc

SEQ ID NO: 536384 - RNA, 20 nt, Artificial Sequence
  Synthetic
aaaaacaggauagccaaagc

SEQ ID NO: 536385 - RNA, 21 nt, Artificial Sequence
  Synthetic
aaaaaacaggauagccaaagc

SEQ ID NO: 536386 - RNA, 22 nt, Artificial Sequence
  Synthetic
uaaaaaacaggauagccaaagc

SEQ ID NO: 536387 - RNA, 23 nt, Artificial Sequence
  Synthetic
auaaaaaacaggauagccaaagc

SEQ ID NO: 536388 - RNA, 24 nt, Artificial Sequence
  Synthetic
gauaaaaaacaggauagccaaagc

SEQ ID NO: 536389 - RNA, 18 nt, Artificial Sequence
  Synthetic
acgucuuuccuccaaagc

SEQ ID NO: 536390 - RNA, 19 nt, Artificial Sequence
  Synthetic
aacgucuuuccuccaaagc

SEQ ID NO: 536391 - RNA, 20 nt, Artificial Sequence
  Synthetic
aaacgucuuuccuccaaagc

SEQ ID NO: 536392 - RNA, 21 nt, Artificial Sequence
  Synthetic
uaaacgucuuuccuccaaagc

SEQ ID NO: 536393 - RNA, 22 nt, Artificial Sequence
  Synthetic
uuaaacgucuuuccuccaaagc

SEQ ID NO: 536394 - RNA, 23 nt, Artificial Sequence
  Synthetic
uuuaaacgucuuuccuccaaagc

SEQ ID NO: 536395 - RNA, 24 nt, Artificial Sequence
  Synthetic
auuuaaacgucuuuccuccaaagc

SEQ ID NO: 536396 - RNA, 18 nt, Artificial Sequence
  Synthetic
aauaaacugaggcaaagc

SEQ ID NO: 536397 - RNA, 19 nt, Artificial Sequence
  Synthetic
caauaaacugaggcaaagc

SEQ ID NO: 536398 - RNA, 20 nt, Artificial Sequence
  Synthetic
ucaauaaacugaggcaaagc

SEQ ID NO: 536399 - RNA, 21 nt, Artificial Sequence
  Synthetic
aucaauaaacugaggcaaagc

SEQ ID NO: 536400 - RNA, 22 nt, Artificial Sequence
  Synthetic
caucaauaaacugaggcaaagc

SEQ ID NO: 536401 - RNA, 23 nt, Artificial Sequence
  Synthetic
ccaucaauaaacugaggcaaagc

SEQ ID NO: 536402 - RNA, 24 nt, Artificial Sequence
  Synthetic
gccaucaauaaacugaggcaaagc

SEQ ID NO: 536403 - RNA, 18 nt, Artificial Sequence
  Synthetic
caccauuucaaucaaagc

SEQ ID NO: 536404 - RNA, 19 nt, Artificial Sequence
  Synthetic
ccaccauuucaaucaaagc

SEQ ID NO: 536405 - RNA, 20 nt, Artificial Sequence
  Synthetic
uccaccauuucaaucaaagc

SEQ ID NO: 536406 - RNA, 21 nt, Artificial Sequence
  Synthetic
auccaccauuucaaucaaagc

SEQ ID NO: 536407 - RNA, 22 nt, Artificial Sequence
  Synthetic
uauccaccauuucaaucaaagc

SEQ ID NO: 536408 - RNA, 23 nt, Artificial Sequence
  Synthetic
auauccaccauuucaaucaaagc

SEQ ID NO: 536409 - RNA, 24 nt, Artificial Sequence
  Synthetic
uauauccaccauuucaaucaaagc

SEQ ID NO: 536410 - RNA, 18 nt, Artificial Sequence
  Synthetic
gacaguuuuaaucaaagc

SEQ ID NO: 536411 - RNA, 19 nt, Artificial Sequence
  Synthetic
agacaguuuuaaucaaagc

SEQ ID NO: 536412 - RNA, 20 nt, Artificial Sequence
  Synthetic
uagacaguuuuaaucaaagc

SEQ ID NO: 536413 - RNA, 21 nt, Artificial Sequence
  Synthetic
auagacaguuuuaaucaaagc

SEQ ID NO: 536414 - RNA, 22 nt, Artificial Sequence
  Synthetic
gauagacaguuuuaaucaaagc

SEQ ID NO: 536415 - RNA, 23 nt, Artificial Sequence
  Synthetic
ugauagacaguuuuaaucaaagc

SEQ ID NO: 536416 - RNA, 24 nt, Artificial Sequence
  Synthetic
gugauagacaguuuuaaucaaagc

SEQ ID NO: 536417 - RNA, 18 nt, Artificial Sequence
  Synthetic
guacauuaucaucaaagc

SEQ ID NO: 536418 - RNA, 19 nt, Artificial Sequence
  Synthetic
aguacauuaucaucaaagc

SEQ ID NO: 536419 - RNA, 20 nt, Artificial Sequence
  Synthetic
uaguacauuaucaucaaagc

SEQ ID NO: 536420 - RNA, 21 nt, Artificial Sequence
  Synthetic
auaguacauuaucaucaaagc

SEQ ID NO: 536421 - RNA, 22 nt, Artificial Sequence
  Synthetic
cauaguacauuaucaucaaagc

SEQ ID NO: 536422 - RNA, 23 nt, Artificial Sequence
  Synthetic
ccauaguacauuaucaucaaagc

SEQ ID NO: 536423 - RNA, 24 nt, Artificial Sequence
  Synthetic
cccauaguacauuaucaucaaagc

SEQ ID NO: 536424 - RNA, 18 nt, Artificial Sequence
  Synthetic
ugugaagcucuucaaagc

SEQ ID NO: 536425 - RNA, 19 nt, Artificial Sequence
  Synthetic
cugugaagcucuucaaagc

SEQ ID NO: 536426 - RNA, 20 nt, Artificial Sequence
  Synthetic
acugugaagcucuucaaagc

SEQ ID NO: 536427 - RNA, 21 nt, Artificial Sequence
  Synthetic
gacugugaagcucuucaaagc

SEQ ID NO: 536428 - RNA, 22 nt, Artificial Sequence
  Synthetic
agacugugaagcucuucaaagc

SEQ ID NO: 536429 - RNA, 23 nt, Artificial Sequence
  Synthetic
aagacugugaagcucuucaaagc

SEQ ID NO: 536430 - RNA, 24 nt, Artificial Sequence
  Synthetic
caagacugugaagcucuucaaagc

SEQ ID NO: 536431 - RNA, 18 nt, Artificial Sequence
  Synthetic
cauaucuaagaagaaagc

SEQ ID NO: 536432 - RNA, 19 nt, Artificial Sequence
  Synthetic
acauaucuaagaagaaagc

SEQ ID NO: 536433 - RNA, 20 nt, Artificial Sequence
  Synthetic
cacauaucuaagaagaaagc

SEQ ID NO: 536434 - RNA, 21 nt, Artificial Sequence
  Synthetic
acacauaucuaagaagaaagc

SEQ ID NO: 536435 - RNA, 22 nt, Artificial Sequence
  Synthetic
aacacauaucuaagaagaaagc

SEQ ID NO: 536436 - RNA, 23 nt, Artificial Sequence
  Synthetic
uaacacauaucuaagaagaaagc

SEQ ID NO: 536437 - RNA, 24 nt, Artificial Sequence
  Synthetic
auaacacauaucuaagaagaaagc

SEQ ID NO: 536438 - RNA, 18 nt, Artificial Sequence
  Synthetic
gauaguugagaagaaagc

SEQ ID NO: 536439 - RNA, 19 nt, Artificial Sequence
  Synthetic
agauaguugagaagaaagc

SEQ ID NO: 536440 - RNA, 20 nt, Artificial Sequence
  Synthetic
aagauaguugagaagaaagc

SEQ ID NO: 536441 - RNA, 21 nt, Artificial Sequence
  Synthetic
gaagauaguugagaagaaagc

SEQ ID NO: 536442 - RNA, 22 nt, Artificial Sequence
  Synthetic
agaagauaguugagaagaaagc

SEQ ID NO: 536443 - RNA, 23 nt, Artificial Sequence
  Synthetic
cagaagauaguugagaagaaagc

SEQ ID NO: 536444 - RNA, 24 nt, Artificial Sequence
  Synthetic
acagaagauaguugagaagaaagc

SEQ ID NO: 536445 - RNA, 18 nt, Artificial Sequence
  Synthetic
aaagcaagcgaagaaagc

SEQ ID NO: 536446 - RNA, 19 nt, Artificial Sequence
  Synthetic
gaaagcaagcgaagaaagc

SEQ ID NO: 536447 - RNA, 20 nt, Artificial Sequence
  Synthetic
agaaagcaagcgaagaaagc

SEQ ID NO: 536448 - RNA, 21 nt, Artificial Sequence
  Synthetic
aagaaagcaagcgaagaaagc

SEQ ID NO: 536449 - RNA, 22 nt, Artificial Sequence
  Synthetic
aaagaaagcaagcgaagaaagc

SEQ ID NO: 536450 - RNA, 23 nt, Artificial Sequence
  Synthetic
aaaagaaagcaagcgaagaaagc

SEQ ID NO: 536451 - RNA, 24 nt, Artificial Sequence
  Synthetic
gaaaagaaagcaagcgaagaaagc

SEQ ID NO: 536452 - RNA, 18 nt, Artificial Sequence
  Synthetic
uuuacaacugaagaaagc

SEQ ID NO: 536453 - RNA, 19 nt, Artificial Sequence
  Synthetic
uuuuacaacugaagaaagc

SEQ ID NO: 536454 - RNA, 20 nt, Artificial Sequence
  Synthetic
auuuuacaacugaagaaagc

SEQ ID NO: 536455 - RNA, 21 nt, Artificial Sequence
  Synthetic
gauuuuacaacugaagaaagc

SEQ ID NO: 536456 - RNA, 22 nt, Artificial Sequence
  Synthetic
agauuuuacaacugaagaaagc

SEQ ID NO: 536457 - RNA, 23 nt, Artificial Sequence
  Synthetic
cagauuuuacaacugaagaaagc

SEQ ID NO: 536458 - RNA, 24 nt, Artificial Sequence
  Synthetic
gcagauuuuacaacugaagaaagc

SEQ ID NO: 536459 - RNA, 18 nt, Artificial Sequence
  Synthetic
uuugguugauaagaaagc

SEQ ID NO: 536460 - RNA, 19 nt, Artificial Sequence
  Synthetic
cuuugguugauaagaaagc

SEQ ID NO: 536461 - RNA, 20 nt, Artificial Sequence
  Synthetic
ccuuugguugauaagaaagc

SEQ ID NO: 536462 - RNA, 21 nt, Artificial Sequence
  Synthetic
uccuuugguugauaagaaagc

SEQ ID NO: 536463 - RNA, 22 nt, Artificial Sequence
  Synthetic
cuccuuugguugauaagaaagc

SEQ ID NO: 536464 - RNA, 23 nt, Artificial Sequence
  Synthetic
ucuccuuugguugauaagaaagc

SEQ ID NO: 536465 - RNA, 24 nt, Artificial Sequence
  Synthetic
gucuccuuugguugauaagaaagc

SEQ ID NO: 536466 - RNA, 18 nt, Artificial Sequence
  Synthetic
cacacccaguaagaaagc

SEQ ID NO: 536467 - RNA, 19 nt, Artificial Sequence
  Synthetic
ucacacccaguaagaaagc

SEQ ID NO: 536468 - RNA, 20 nt, Artificial Sequence
  Synthetic
gucacacccaguaagaaagc

SEQ ID NO: 536469 - RNA, 21 nt, Artificial Sequence
  Synthetic
ugucacacccaguaagaaagc

SEQ ID NO: 536470 - RNA, 22 nt, Artificial Sequence
  Synthetic
cugucacacccaguaagaaagc

SEQ ID NO: 536471 - RNA, 23 nt, Artificial Sequence
  Synthetic
acugucacacccaguaagaaagc

SEQ ID NO: 536472 - RNA, 24 nt, Artificial Sequence
  Synthetic
uacugucacacccaguaagaaagc

SEQ ID NO: 536473 - RNA, 18 nt, Artificial Sequence
  Synthetic
augccuacaagagaaagc

SEQ ID NO: 536474 - RNA, 19 nt, Artificial Sequence
  Synthetic
aaugccuacaagagaaagc

SEQ ID NO: 536475 - RNA, 20 nt, Artificial Sequence
  Synthetic
aaaugccuacaagagaaagc

SEQ ID NO: 536476 - RNA, 21 nt, Artificial Sequence
  Synthetic
uaaaugccuacaagagaaagc

SEQ ID NO: 536477 - RNA, 22 nt, Artificial Sequence
  Synthetic
cuaaaugccuacaagagaaagc

SEQ ID NO: 536478 - RNA, 23 nt, Artificial Sequence
  Synthetic
acuaaaugccuacaagagaaagc

SEQ ID NO: 536479 - RNA, 24 nt, Artificial Sequence
  Synthetic
cacuaaaugccuacaagagaaagc

SEQ ID NO: 536480 - RNA, 18 nt, Artificial Sequence
  Synthetic
aaagaggguagagaaagc

SEQ ID NO: 536481 - RNA, 19 nt, Artificial Sequence
  Synthetic
gaaagaggguagagaaagc

SEQ ID NO: 536482 - RNA, 20 nt, Artificial Sequence
  Synthetic
agaaagaggguagagaaagc

SEQ ID NO: 536483 - RNA, 21 nt, Artificial Sequence
  Synthetic
cagaaagaggguagagaaagc

SEQ ID NO: 536484 - RNA, 22 nt, Artificial Sequence
  Synthetic
acagaaagaggguagagaaagc

SEQ ID NO: 536485 - RNA, 23 nt, Artificial Sequence
  Synthetic
uacagaaagaggguagagaaagc

SEQ ID NO: 536486 - RNA, 24 nt, Artificial Sequence
  Synthetic
auacagaaagaggguagagaaagc

SEQ ID NO: 536487 - RNA, 18 nt, Artificial Sequence
  Synthetic
uuuuaaaaaugagaaagc

SEQ ID NO: 536488 - RNA, 19 nt, Artificial Sequence
  Synthetic
auuuuaaaaaugagaaagc

SEQ ID NO: 536489 - RNA, 20 nt, Artificial Sequence
  Synthetic
uauuuuaaaaaugagaaagc

SEQ ID NO: 536490 - RNA, 21 nt, Artificial Sequence
  Synthetic
uuauuuuaaaaaugagaaagc

SEQ ID NO: 536491 - RNA, 22 nt, Artificial Sequence
  Synthetic
uuuauuuuaaaaaugagaaagc

SEQ ID NO: 536492 - RNA, 23 nt, Artificial Sequence
  Synthetic
uuuuauuuuaaaaaugagaaagc

SEQ ID NO: 536493 - RNA, 24 nt, Artificial Sequence
  Synthetic
auuuuauuuuaaaaaugagaaagc

SEQ ID NO: 536494 - RNA, 18 nt, Artificial Sequence
  Synthetic
ccuggugccugagaaagc

SEQ ID NO: 536495 - RNA, 19 nt, Artificial Sequence
  Synthetic
gccuggugccugagaaagc

SEQ ID NO: 536496 - RNA, 20 nt, Artificial Sequence
  Synthetic
ugccuggugccugagaaagc

SEQ ID NO: 536497 - RNA, 21 nt, Artificial Sequence
  Synthetic
cugccuggugccugagaaagc

SEQ ID NO: 536498 - RNA, 22 nt, Artificial Sequence
  Synthetic
acugccuggugccugagaaagc

SEQ ID NO: 536499 - RNA, 23 nt, Artificial Sequence
  Synthetic
aacugccuggugccugagaaagc

SEQ ID NO: 536500 - RNA, 24 nt, Artificial Sequence
  Synthetic
aaacugccuggugccugagaaagc

SEQ ID NO: 536501 - RNA, 18 nt, Artificial Sequence
  Synthetic
ggcaacugcuuagaaagc

SEQ ID NO: 536502 - RNA, 19 nt, Artificial Sequence
  Synthetic
aggcaacugcuuagaaagc

SEQ ID NO: 536503 - RNA, 20 nt, Artificial Sequence
  Synthetic
aaggcaacugcuuagaaagc

SEQ ID NO: 536504 - RNA, 21 nt, Artificial Sequence
  Synthetic
aaaggcaacugcuuagaaagc

SEQ ID NO: 536505 - RNA, 22 nt, Artificial Sequence
  Synthetic
gaaaggcaacugcuuagaaagc

SEQ ID NO: 536506 - RNA, 23 nt, Artificial Sequence
  Synthetic
agaaaggcaacugcuuagaaagc

SEQ ID NO: 536507 - RNA, 24 nt, Artificial Sequence
  Synthetic
aagaaaggcaacugcuuagaaagc

SEQ ID NO: 536508 - RNA, 18 nt, Artificial Sequence
  Synthetic
cuccuuacccacgaaagc

SEQ ID NO: 536509 - RNA, 19 nt, Artificial Sequence
  Synthetic
acuccuuacccacgaaagc

SEQ ID NO: 536510 - RNA, 20 nt, Artificial Sequence
  Synthetic
gacuccuuacccacgaaagc

SEQ ID NO: 536511 - RNA, 21 nt, Artificial Sequence
  Synthetic
ugacuccuuacccacgaaagc

SEQ ID NO: 536512 - RNA, 22 nt, Artificial Sequence
  Synthetic
cugacuccuuacccacgaaagc

SEQ ID NO: 536513 - RNA, 23 nt, Artificial Sequence
  Synthetic
ucugacuccuuacccacgaaagc

SEQ ID NO: 536514 - RNA, 24 nt, Artificial Sequence
  Synthetic
gucugacuccuuacccacgaaagc

SEQ ID NO: 536515 - RNA, 18 nt, Artificial Sequence
  Synthetic
ucggggagagaggaaagc

SEQ ID NO: 536516 - RNA, 19 nt, Artificial Sequence
  Synthetic
cucggggagagaggaaagc

SEQ ID NO: 536517 - RNA, 20 nt, Artificial Sequence
  Synthetic
gcucggggagagaggaaagc

SEQ ID NO: 536518 - RNA, 21 nt, Artificial Sequence
  Synthetic
agcucggggagagaggaaagc

SEQ ID NO: 536519 - RNA, 22 nt, Artificial Sequence
  Synthetic
gagcucggggagagaggaaagc

SEQ ID NO: 536520 - RNA, 23 nt, Artificial Sequence
  Synthetic
ggagcucggggagagaggaaagc

SEQ ID NO: 536521 - RNA, 24 nt, Artificial Sequence
  Synthetic
uggagcucggggagagaggaaagc

SEQ ID NO: 536522 - RNA, 18 nt, Artificial Sequence
  Synthetic
aggcuugcaggggaaagc

SEQ ID NO: 536523 - RNA, 19 nt, Artificial Sequence
  Synthetic
caggcuugcaggggaaagc

SEQ ID NO: 536524 - RNA, 20 nt, Artificial Sequence
  Synthetic
acaggcuugcaggggaaagc

SEQ ID NO: 536525 - RNA, 21 nt, Artificial Sequence
  Synthetic
aacaggcuugcaggggaaagc

SEQ ID NO: 536526 - RNA, 22 nt, Artificial Sequence
  Synthetic
aaacaggcuugcaggggaaagc

SEQ ID NO: 536527 - RNA, 23 nt, Artificial Sequence
  Synthetic
aaaacaggcuugcaggggaaagc

SEQ ID NO: 536528 - RNA, 24 nt, Artificial Sequence
  Synthetic
caaaacaggcuugcaggggaaagc

SEQ ID NO: 536529 - RNA, 18 nt, Artificial Sequence
  Synthetic
ugauauauaggggaaagc

SEQ ID NO: 536530 - RNA, 19 nt, Artificial Sequence
  Synthetic
cugauauauaggggaaagc

SEQ ID NO: 536531 - RNA, 20 nt, Artificial Sequence
  Synthetic
acugauauauaggggaaagc

SEQ ID NO: 536532 - RNA, 21 nt, Artificial Sequence
  Synthetic
aacugauauauaggggaaagc

SEQ ID NO: 536533 - RNA, 22 nt, Artificial Sequence
  Synthetic
uaacugauauauaggggaaagc

SEQ ID NO: 536534 - RNA, 23 nt, Artificial Sequence
  Synthetic
uuaacugauauauaggggaaagc

SEQ ID NO: 536535 - RNA, 24 nt, Artificial Sequence
  Synthetic
cuuaacugauauauaggggaaagc

SEQ ID NO: 536536 - RNA, 18 nt, Artificial Sequence
  Synthetic
ugaaccuauguggaaagc

SEQ ID NO: 536537 - RNA, 19 nt, Artificial Sequence
  Synthetic
augaaccuauguggaaagc

SEQ ID NO: 536538 - RNA, 20 nt, Artificial Sequence
  Synthetic
gaugaaccuauguggaaagc

SEQ ID NO: 536539 - RNA, 21 nt, Artificial Sequence
  Synthetic
agaugaaccuauguggaaagc

SEQ ID NO: 536540 - RNA, 22 nt, Artificial Sequence
  Synthetic
aagaugaaccuauguggaaagc

SEQ ID NO: 536541 - RNA, 23 nt, Artificial Sequence
  Synthetic
aaagaugaaccuauguggaaagc

SEQ ID NO: 536542 - RNA, 24 nt, Artificial Sequence
  Synthetic
uaaagaugaaccuauguggaaagc

SEQ ID NO: 536543 - RNA, 18 nt, Artificial Sequence
  Synthetic
auugcuuaagaugaaagc

SEQ ID NO: 536544 - RNA, 19 nt, Artificial Sequence
  Synthetic
uauugcuuaagaugaaagc

SEQ ID NO: 536545 - RNA, 20 nt, Artificial Sequence
  Synthetic
cuauugcuuaagaugaaagc

SEQ ID NO: 536546 - RNA, 21 nt, Artificial Sequence
  Synthetic
acuauugcuuaagaugaaagc

SEQ ID NO: 536547 - RNA, 22 nt, Artificial Sequence
  Synthetic
aacuauugcuuaagaugaaagc

SEQ ID NO: 536548 - RNA, 23 nt, Artificial Sequence
  Synthetic
aaacuauugcuuaagaugaaagc

SEQ ID NO: 536549 - RNA, 24 nt, Artificial Sequence
  Synthetic
gaaacuauugcuuaagaugaaagc

SEQ ID NO: 536550 - RNA, 18 nt, Artificial Sequence
  Synthetic
aaaugauucaaauaaagc

SEQ ID NO: 536551 - RNA, 19 nt, Artificial Sequence
  Synthetic
aaaaugauucaaauaaagc

SEQ ID NO: 536552 - RNA, 20 nt, Artificial Sequence
  Synthetic
aaaaaugauucaaauaaagc

SEQ ID NO: 536553 - RNA, 21 nt, Artificial Sequence
  Synthetic
aaaaaaugauucaaauaaagc

SEQ ID NO: 536554 - RNA, 22 nt, Artificial Sequence
  Synthetic
uaaaaaaugauucaaauaaagc

SEQ ID NO: 536555 - RNA, 23 nt, Artificial Sequence
  Synthetic
uuaaaaaaugauucaaauaaagc

SEQ ID NO: 536556 - RNA, 24 nt, Artificial Sequence
  Synthetic
uuuaaaaaaugauucaaauaaagc

SEQ ID NO: 536557 - RNA, 18 nt, Artificial Sequence
  Synthetic
auuuuaaaaggauaaagc

SEQ ID NO: 536558 - RNA, 19 nt, Artificial Sequence
  Synthetic
uauuuuaaaaggauaaagc

SEQ ID NO: 536559 - RNA, 20 nt, Artificial Sequence
  Synthetic
auauuuuaaaaggauaaagc

SEQ ID NO: 536560 - RNA, 21 nt, Artificial Sequence
  Synthetic
uauauuuuaaaaggauaaagc

SEQ ID NO: 536561 - RNA, 22 nt, Artificial Sequence
  Synthetic
auauauuuuaaaaggauaaagc

SEQ ID NO: 536562 - RNA, 23 nt, Artificial Sequence
  Synthetic
aauauauuuuaaaaggauaaagc

SEQ ID NO: 536563 - RNA, 24 nt, Artificial Sequence
  Synthetic
uaauauauuuuaaaaggauaaagc

SEQ ID NO: 536564 - RNA, 18 nt, Artificial Sequence
  Synthetic
gaggagcaaaacuaaagc

SEQ ID NO: 536565 - RNA, 19 nt, Artificial Sequence
  Synthetic
ugaggagcaaaacuaaagc

SEQ ID NO: 536566 - RNA, 20 nt, Artificial Sequence
  Synthetic
cugaggagcaaaacuaaagc

SEQ ID NO: 536567 - RNA, 21 nt, Artificial Sequence
  Synthetic
gcugaggagcaaaacuaaagc

SEQ ID NO: 536568 - RNA, 22 nt, Artificial Sequence
  Synthetic
ugcugaggagcaaaacuaaagc

SEQ ID NO: 536569 - RNA, 23 nt, Artificial Sequence
  Synthetic
gugcugaggagcaaaacuaaagc

SEQ ID NO: 536570 - RNA, 24 nt, Artificial Sequence
  Synthetic
agugcugaggagcaaaacuaaagc

SEQ ID NO: 536571 - RNA, 18 nt, Artificial Sequence
  Synthetic
uccaauauaugcuaaagc

SEQ ID NO: 536572 - RNA, 19 nt, Artificial Sequence
  Synthetic
uuccaauauaugcuaaagc

SEQ ID NO: 536573 - RNA, 20 nt, Artificial Sequence
  Synthetic
cuuccaauauaugcuaaagc

SEQ ID NO: 536574 - RNA, 21 nt, Artificial Sequence
  Synthetic
ccuuccaauauaugcuaaagc

SEQ ID NO: 536575 - RNA, 22 nt, Artificial Sequence
  Synthetic
gccuuccaauauaugcuaaagc

SEQ ID NO: 536576 - RNA, 23 nt, Artificial Sequence
  Synthetic
agccuuccaauauaugcuaaagc

SEQ ID NO: 536577 - RNA, 24 nt, Artificial Sequence
  Synthetic
aagccuuccaauauaugcuaaagc

SEQ ID NO: 536578 - RNA, 18 nt, Artificial Sequence
  Synthetic
guaaggggcagguaaagc

SEQ ID NO: 536579 - RNA, 19 nt, Artificial Sequence
  Synthetic
uguaaggggcagguaaagc

SEQ ID NO: 536580 - RNA, 20 nt, Artificial Sequence
  Synthetic
auguaaggggcagguaaagc

SEQ ID NO: 536581 - RNA, 21 nt, Artificial Sequence
  Synthetic
gauguaaggggcagguaaagc

SEQ ID NO: 536582 - RNA, 22 nt, Artificial Sequence
  Synthetic
ggauguaaggggcagguaaagc

SEQ ID NO: 536583 - RNA, 23 nt, Artificial Sequence
  Synthetic
aggauguaaggggcagguaaagc

SEQ ID NO: 536584 - RNA, 24 nt, Artificial Sequence
  Synthetic
caggauguaaggggcagguaaagc

SEQ ID NO: 536585 - RNA, 18 nt, Artificial Sequence
  Synthetic
uuuaucuucauuuaaagc

SEQ ID NO: 536586 - RNA, 19 nt, Artificial Sequence
  Synthetic
uuuuaucuucauuuaaagc

SEQ ID NO: 536587 - RNA, 20 nt, Artificial Sequence
  Synthetic
auuuuaucuucauuuaaagc

SEQ ID NO: 536588 - RNA, 21 nt, Artificial Sequence
  Synthetic
gauuuuaucuucauuuaaagc

SEQ ID NO: 536589 - RNA, 22 nt, Artificial Sequence
  Synthetic
ugauuuuaucuucauuuaaagc

SEQ ID NO: 536590 - RNA, 23 nt, Artificial Sequence
  Synthetic
augauuuuaucuucauuuaaagc

SEQ ID NO: 536591 - RNA, 24 nt, Artificial Sequence
  Synthetic
caugauuuuaucuucauuuaaagc

SEQ ID NO: 536592 - RNA, 18 nt, Artificial Sequence
  Synthetic
cacugaaagguuuaaagc

SEQ ID NO: 536593 - RNA, 19 nt, Artificial Sequence
  Synthetic
ccacugaaagguuuaaagc

SEQ ID NO: 536594 - RNA, 20 nt, Artificial Sequence
  Synthetic
uccacugaaagguuuaaagc

SEQ ID NO: 536595 - RNA, 21 nt, Artificial Sequence
  Synthetic
auccacugaaagguuuaaagc

SEQ ID NO: 536596 - RNA, 22 nt, Artificial Sequence
  Synthetic
aauccacugaaagguuuaaagc

SEQ ID NO: 536597 - RNA, 23 nt, Artificial Sequence
  Synthetic
gaauccacugaaagguuuaaagc

SEQ ID NO: 536598 - RNA, 24 nt, Artificial Sequence
  Synthetic
ggaauccacugaaagguuuaaagc

SEQ ID NO: 536599 - RNA, 18 nt, Artificial Sequence
  Synthetic
uuauuagaauuuuaaagc

SEQ ID NO: 536600 - RNA, 19 nt, Artificial Sequence
  Synthetic
guuauuagaauuuuaaagc

SEQ ID NO: 536601 - RNA, 20 nt, Artificial Sequence
  Synthetic
aguuauuagaauuuuaaagc

SEQ ID NO: 536602 - RNA, 21 nt, Artificial Sequence
  Synthetic
gaguuauuagaauuuuaaagc

SEQ ID NO: 536603 - RNA, 22 nt, Artificial Sequence
  Synthetic
agaguuauuagaauuuuaaagc

SEQ ID NO: 536604 - RNA, 23 nt, Artificial Sequence
  Synthetic
uagaguuauuagaauuuuaaagc

SEQ ID NO: 536605 - RNA, 24 nt, Artificial Sequence
  Synthetic
auagaguuauuagaauuuuaaagc

SEQ ID NO: 536606 - RNA, 18 nt, Artificial Sequence
  Synthetic
aauagguagagaacaagc

SEQ ID NO: 536607 - RNA, 19 nt, Artificial Sequence
  Synthetic
aaauagguagagaacaagc

SEQ ID NO: 536608 - RNA, 20 nt, Artificial Sequence
  Synthetic
gaaauagguagagaacaagc

SEQ ID NO: 536609 - RNA, 21 nt, Artificial Sequence
  Synthetic
ugaaauagguagagaacaagc

SEQ ID NO: 536610 - RNA, 22 nt, Artificial Sequence
  Synthetic
cugaaauagguagagaacaagc

SEQ ID NO: 536611 - RNA, 23 nt, Artificial Sequence
  Synthetic
acugaaauagguagagaacaagc

SEQ ID NO: 536612 - RNA, 24 nt, Artificial Sequence
  Synthetic
gacugaaauagguagagaacaagc

SEQ ID NO: 536613 - RNA, 18 nt, Artificial Sequence
  Synthetic
aaaugcuccaacacaagc

SEQ ID NO: 536614 - RNA, 19 nt, Artificial Sequence
  Synthetic
aaaaugcuccaacacaagc

SEQ ID NO: 536615 - RNA, 20 nt, Artificial Sequence
  Synthetic
aaaaaugcuccaacacaagc

SEQ ID NO: 536616 - RNA, 21 nt, Artificial Sequence
  Synthetic
aaaaaaugcuccaacacaagc

SEQ ID NO: 536617 - RNA, 22 nt, Artificial Sequence
  Synthetic
aaaaaaaugcuccaacacaagc

SEQ ID NO: 536618 - RNA, 23 nt, Artificial Sequence
  Synthetic
gaaaaaaaugcuccaacacaagc

SEQ ID NO: 536619 - RNA, 24 nt, Artificial Sequence
  Synthetic
ugaaaaaaaugcuccaacacaagc

SEQ ID NO: 536620 - RNA, 18 nt, Artificial Sequence
  Synthetic
aaaaugggucucacaagc

SEQ ID NO: 536621 - RNA, 19 nt, Artificial Sequence
  Synthetic
aaaaaugggucucacaagc

SEQ ID NO: 536622 - RNA, 20 nt, Artificial Sequence
  Synthetic
aaaaaaugggucucacaagc

SEQ ID NO: 536623 - RNA, 21 nt, Artificial Sequence
  Synthetic
caaaaaaugggucucacaagc

SEQ ID NO: 536624 - RNA, 22 nt, Artificial Sequence
  Synthetic
ccaaaaaaugggucucacaagc

SEQ ID NO: 536625 - RNA, 23 nt, Artificial Sequence
  Synthetic
uccaaaaaaugggucucacaagc

SEQ ID NO: 536626 - RNA, 24 nt, Artificial Sequence
  Synthetic
guccaaaaaaugggucucacaagc

SEQ ID NO: 536627 - RNA, 18 nt, Artificial Sequence
  Synthetic
aguuccuacuucacaagc

SEQ ID NO: 536628 - RNA, 19 nt, Artificial Sequence
  Synthetic
aaguuccuacuucacaagc

SEQ ID NO: 536629 - RNA, 20 nt, Artificial Sequence
  Synthetic
aaaguuccuacuucacaagc

SEQ ID NO: 536630 - RNA, 21 nt, Artificial Sequence
  Synthetic
caaaguuccuacuucacaagc

SEQ ID NO: 536631 - RNA, 22 nt, Artificial Sequence
  Synthetic
ucaaaguuccuacuucacaagc

SEQ ID NO: 536632 - RNA, 23 nt, Artificial Sequence
  Synthetic
aucaaaguuccuacuucacaagc

SEQ ID NO: 536633 - RNA, 24 nt, Artificial Sequence
  Synthetic
gaucaaaguuccuacuucacaagc

SEQ ID NO: 536634 - RNA, 18 nt, Artificial Sequence
  Synthetic
caggaguucaagacaagc

SEQ ID NO: 536635 - RNA, 19 nt, Artificial Sequence
  Synthetic
ucaggaguucaagacaagc

SEQ ID NO: 536636 - RNA, 20 nt, Artificial Sequence
  Synthetic
gucaggaguucaagacaagc

SEQ ID NO: 536637 - RNA, 21 nt, Artificial Sequence
  Synthetic
ggucaggaguucaagacaagc

SEQ ID NO: 536638 - RNA, 22 nt, Artificial Sequence
  Synthetic
aggucaggaguucaagacaagc

SEQ ID NO: 536639 - RNA, 23 nt, Artificial Sequence
  Synthetic
gaggucaggaguucaagacaagc

SEQ ID NO: 536640 - RNA, 24 nt, Artificial Sequence
  Synthetic
ugaggucaggaguucaagacaagc

SEQ ID NO: 536641 - RNA, 18 nt, Artificial Sequence
  Synthetic
uuaaagaccuagacaagc

SEQ ID NO: 536642 - RNA, 19 nt, Artificial Sequence
  Synthetic
cuuaaagaccuagacaagc

SEQ ID NO: 536643 - RNA, 20 nt, Artificial Sequence
  Synthetic
acuuaaagaccuagacaagc

SEQ ID NO: 536644 - RNA, 21 nt, Artificial Sequence
  Synthetic
aacuuaaagaccuagacaagc

SEQ ID NO: 536645 - RNA, 22 nt, Artificial Sequence
  Synthetic
caacuuaaagaccuagacaagc

SEQ ID NO: 536646 - RNA, 23 nt, Artificial Sequence
  Synthetic
gcaacuuaaagaccuagacaagc

SEQ ID NO: 536647 - RNA, 24 nt, Artificial Sequence
  Synthetic
ugcaacuuaaagaccuagacaagc

SEQ ID NO: 536648 - RNA, 18 nt, Artificial Sequence
  Synthetic
uauuacccccauacaagc

SEQ ID NO: 536649 - RNA, 19 nt, Artificial Sequence
  Synthetic
cuauuacccccauacaagc

SEQ ID NO: 536650 - RNA, 20 nt, Artificial Sequence
  Synthetic
ccuauuacccccauacaagc

SEQ ID NO: 536651 - RNA, 21 nt, Artificial Sequence
  Synthetic
cccuauuacccccauacaagc

SEQ ID NO: 536652 - RNA, 22 nt, Artificial Sequence
  Synthetic
gcccuauuacccccauacaagc

SEQ ID NO: 536653 - RNA, 23 nt, Artificial Sequence
  Synthetic
ugcccuauuacccccauacaagc

SEQ ID NO: 536654 - RNA, 24 nt, Artificial Sequence
  Synthetic
augcccuauuacccccauacaagc

SEQ ID NO: 536655 - RNA, 18 nt, Artificial Sequence
  Synthetic
gugucugggacuacaagc

SEQ ID NO: 536656 - RNA, 19 nt, Artificial Sequence
  Synthetic
ugugucugggacuacaagc

SEQ ID NO: 536657 - RNA, 20 nt, Artificial Sequence
  Synthetic
gugugucugggacuacaagc

SEQ ID NO: 536658 - RNA, 21 nt, Artificial Sequence
  Synthetic
agugugucugggacuacaagc

SEQ ID NO: 536659 - RNA, 22 nt, Artificial Sequence
  Synthetic
cagugugucugggacuacaagc

SEQ ID NO: 536660 - RNA, 23 nt, Artificial Sequence
  Synthetic
ccagugugucugggacuacaagc

SEQ ID NO: 536661 - RNA, 24 nt, Artificial Sequence
  Synthetic
uccagugugucugggacuacaagc

SEQ ID NO: 536662 - RNA, 19 nt, Artificial Sequence
  Synthetic
cggcagaaacccuacaagc

SEQ ID NO: 536663 - RNA, 20 nt, Artificial Sequence
  Synthetic
ucggcagaaacccuacaagc

SEQ ID NO: 536664 - RNA, 21 nt, Artificial Sequence
  Synthetic
cucggcagaaacccuacaagc

SEQ ID NO: 536665 - RNA, 22 nt, Artificial Sequence
  Synthetic
ucucggcagaaacccuacaagc

SEQ ID NO: 536666 - RNA, 23 nt, Artificial Sequence
  Synthetic
cucucggcagaaacccuacaagc

SEQ ID NO: 536667 - RNA, 24 nt, Artificial Sequence
  Synthetic
ucucucggcagaaacccuacaagc

SEQ ID NO: 536668 - RNA, 18 nt, Artificial Sequence
  Synthetic
cauucugccauuacaagc

SEQ ID NO: 536669 - RNA, 19 nt, Artificial Sequence
  Synthetic
ucauucugccauuacaagc

SEQ ID NO: 536670 - RNA, 20 nt, Artificial Sequence
  Synthetic
aucauucugccauuacaagc

SEQ ID NO: 536671 - RNA, 21 nt, Artificial Sequence
  Synthetic
uaucauucugccauuacaagc

SEQ ID NO: 536672 - RNA, 22 nt, Artificial Sequence
  Synthetic
uuaucauucugccauuacaagc

SEQ ID NO: 536673 - RNA, 23 nt, Artificial Sequence
  Synthetic
cuuaucauucugccauuacaagc

SEQ ID NO: 536674 - RNA, 24 nt, Artificial Sequence
  Synthetic
ucuuaucauucugccauuacaagc

SEQ ID NO: 536675 - RNA, 18 nt, Artificial Sequence
  Synthetic
aguguugggauuacaagc

SEQ ID NO: 536676 - RNA, 19 nt, Artificial Sequence
  Synthetic
aaguguugggauuacaagc

SEQ ID NO: 536677 - RNA, 20 nt, Artificial Sequence
  Synthetic
aaaguguugggauuacaagc

SEQ ID NO: 536678 - RNA, 21 nt, Artificial Sequence
  Synthetic
caaaguguugggauuacaagc

SEQ ID NO: 536679 - RNA, 22 nt, Artificial Sequence
  Synthetic
ccaaaguguugggauuacaagc

SEQ ID NO: 536680 - RNA, 23 nt, Artificial Sequence
  Synthetic
cccaaaguguugggauuacaagc

SEQ ID NO: 536681 - RNA, 24 nt, Artificial Sequence
  Synthetic
ucccaaaguguugggauuacaagc

SEQ ID NO: 536682 - RNA, 18 nt, Artificial Sequence
  Synthetic
caacaauuaaaaccaagc

SEQ ID NO: 536683 - RNA, 19 nt, Artificial Sequence
  Synthetic
acaacaauuaaaaccaagc

SEQ ID NO: 536684 - RNA, 20 nt, Artificial Sequence
  Synthetic
aacaacaauuaaaaccaagc

SEQ ID NO: 536685 - RNA, 21 nt, Artificial Sequence
  Synthetic
aaacaacaauuaaaaccaagc

SEQ ID NO: 536686 - RNA, 22 nt, Artificial Sequence
  Synthetic
aaaacaacaauuaaaaccaagc

SEQ ID NO: 536687 - RNA, 23 nt, Artificial Sequence
  Synthetic
uaaaacaacaauuaaaaccaagc

SEQ ID NO: 536688 - RNA, 24 nt, Artificial Sequence
  Synthetic
auaaaacaacaauuaaaaccaagc

SEQ ID NO: 536689 - RNA, 18 nt, Artificial Sequence
  Synthetic
gaaguaaggagaccaagc

SEQ ID NO: 536690 - RNA, 19 nt, Artificial Sequence
  Synthetic
agaaguaaggagaccaagc

SEQ ID NO: 536691 - RNA, 20 nt, Artificial Sequence
  Synthetic
uagaaguaaggagaccaagc

SEQ ID NO: 536692 - RNA, 21 nt, Artificial Sequence
  Synthetic
auagaaguaaggagaccaagc

SEQ ID NO: 536693 - RNA, 22 nt, Artificial Sequence
  Synthetic
aauagaaguaaggagaccaagc

SEQ ID NO: 536694 - RNA, 23 nt, Artificial Sequence
  Synthetic
gaauagaaguaaggagaccaagc

SEQ ID NO: 536695 - RNA, 24 nt, Artificial Sequence
  Synthetic
ggaauagaaguaaggagaccaagc

SEQ ID NO: 536696 - RNA, 18 nt, Artificial Sequence
  Synthetic
uauuaugcuugaccaagc

SEQ ID NO: 536697 - RNA, 19 nt, Artificial Sequence
  Synthetic
cuauuaugcuugaccaagc

SEQ ID NO: 536698 - RNA, 20 nt, Artificial Sequence
  Synthetic
acuauuaugcuugaccaagc

SEQ ID NO: 536699 - RNA, 21 nt, Artificial Sequence
  Synthetic
aacuauuaugcuugaccaagc

SEQ ID NO: 536700 - RNA, 22 nt, Artificial Sequence
  Synthetic
gaacuauuaugcuugaccaagc

SEQ ID NO: 536701 - RNA, 23 nt, Artificial Sequence
  Synthetic
agaacuauuaugcuugaccaagc

SEQ ID NO: 536702 - RNA, 24 nt, Artificial Sequence
  Synthetic
uagaacuauuaugcuugaccaagc

SEQ ID NO: 536703 - RNA, 18 nt, Artificial Sequence
  Synthetic
cuucugauggcuccaagc

SEQ ID NO: 536704 - RNA, 19 nt, Artificial Sequence
  Synthetic
ucuucugauggcuccaagc

SEQ ID NO: 536705 - RNA, 20 nt, Artificial Sequence
  Synthetic
aucuucugauggcuccaagc

SEQ ID NO: 536706 - RNA, 21 nt, Artificial Sequence
  Synthetic
caucuucugauggcuccaagc

SEQ ID NO: 536707 - RNA, 22 nt, Artificial Sequence
  Synthetic
ccaucuucugauggcuccaagc

SEQ ID NO: 536708 - RNA, 23 nt, Artificial Sequence
  Synthetic
accaucuucugauggcuccaagc

SEQ ID NO: 536709 - RNA, 24 nt, Artificial Sequence
  Synthetic
uaccaucuucugauggcuccaagc

SEQ ID NO: 536710 - RNA, 18 nt, Artificial Sequence
  Synthetic
agucaaugauuuccaagc

SEQ ID NO: 536711 - RNA, 19 nt, Artificial Sequence
  Synthetic
uagucaaugauuuccaagc

SEQ ID NO: 536712 - RNA, 20 nt, Artificial Sequence
  Synthetic
uuagucaaugauuuccaagc

SEQ ID NO: 536713 - RNA, 21 nt, Artificial Sequence
  Synthetic
uuuagucaaugauuuccaagc

SEQ ID NO: 536714 - RNA, 22 nt, Artificial Sequence
  Synthetic
uuuuagucaaugauuuccaagc

SEQ ID NO: 536715 - RNA, 23 nt, Artificial Sequence
  Synthetic
auuuuagucaaugauuuccaagc

SEQ ID NO: 536716 - RNA, 24 nt, Artificial Sequence
  Synthetic
aauuuuagucaaugauuuccaagc

SEQ ID NO: 536717 - RNA, 18 nt, Artificial Sequence
  Synthetic
cagggugaacaagcaagc

SEQ ID NO: 536718 - RNA, 19 nt, Artificial Sequence
  Synthetic
acagggugaacaagcaagc

SEQ ID NO: 536719 - RNA, 20 nt, Artificial Sequence
  Synthetic
uacagggugaacaagcaagc

SEQ ID NO: 536720 - RNA, 21 nt, Artificial Sequence
  Synthetic
auacagggugaacaagcaagc

SEQ ID NO: 536721 - RNA, 22 nt, Artificial Sequence
  Synthetic
uauacagggugaacaagcaagc

SEQ ID NO: 536722 - RNA, 23 nt, Artificial Sequence
  Synthetic
guauacagggugaacaagcaagc

SEQ ID NO: 536723 - RNA, 24 nt, Artificial Sequence
  Synthetic
gguauacagggugaacaagcaagc

SEQ ID NO: 536724 - RNA, 18 nt, Artificial Sequence
  Synthetic
gauuuacagucagcaagc

SEQ ID NO: 536725 - RNA, 19 nt, Artificial Sequence
  Synthetic
agauuuacagucagcaagc

SEQ ID NO: 536726 - RNA, 20 nt, Artificial Sequence
  Synthetic
aagauuuacagucagcaagc

SEQ ID NO: 536727 - RNA, 21 nt, Artificial Sequence
  Synthetic
caagauuuacagucagcaagc

SEQ ID NO: 536728 - RNA, 22 nt, Artificial Sequence
  Synthetic
ccaagauuuacagucagcaagc

SEQ ID NO: 536729 - RNA, 23 nt, Artificial Sequence
  Synthetic
cccaagauuuacagucagcaagc

SEQ ID NO: 536730 - RNA, 24 nt, Artificial Sequence
  Synthetic
ucccaagauuuacagucagcaagc

SEQ ID NO: 536731 - RNA, 18 nt, Artificial Sequence
  Synthetic
ucccccuauucagcaagc

SEQ ID NO: 536732 - RNA, 19 nt, Artificial Sequence
  Synthetic
aucccccuauucagcaagc

SEQ ID NO: 536733 - RNA, 20 nt, Artificial Sequence
  Synthetic
caucccccuauucagcaagc

SEQ ID NO: 536734 - RNA, 21 nt, Artificial Sequence
  Synthetic
gcaucccccuauucagcaagc

SEQ ID NO: 536735 - RNA, 22 nt, Artificial Sequence
  Synthetic
agcaucccccuauucagcaagc

SEQ ID NO: 536736 - RNA, 23 nt, Artificial Sequence
  Synthetic
aagcaucccccuauucagcaagc

SEQ ID NO: 536737 - RNA, 24 nt, Artificial Sequence
  Synthetic
aaagcaucccccuauucagcaagc

SEQ ID NO: 536738 - RNA, 18 nt, Artificial Sequence
  Synthetic
cucccuugccaggcaagc

SEQ ID NO: 536739 - RNA, 19 nt, Artificial Sequence
  Synthetic
ucucccuugccaggcaagc

SEQ ID NO: 536740 - RNA, 20 nt, Artificial Sequence
  Synthetic
uucucccuugccaggcaagc

SEQ ID NO: 536741 - RNA, 21 nt, Artificial Sequence
  Synthetic
auucucccuugccaggcaagc

SEQ ID NO: 536742 - RNA, 22 nt, Artificial Sequence
  Synthetic
cauucucccuugccaggcaagc

SEQ ID NO: 536743 - RNA, 23 nt, Artificial Sequence
  Synthetic
acauucucccuugccaggcaagc

SEQ ID NO: 536744 - RNA, 24 nt, Artificial Sequence
  Synthetic
cacauucucccuugccaggcaagc

SEQ ID NO: 536745 - RNA, 18 nt, Artificial Sequence
  Synthetic
ugugcaaucccugcaagc

SEQ ID NO: 536746 - RNA, 19 nt, Artificial Sequence
  Synthetic
gugugcaaucccugcaagc

SEQ ID NO: 536747 - RNA, 20 nt, Artificial Sequence
  Synthetic
ugugugcaaucccugcaagc

SEQ ID NO: 536748 - RNA, 21 nt, Artificial Sequence
  Synthetic
uugugugcaaucccugcaagc

SEQ ID NO: 536749 - RNA, 22 nt, Artificial Sequence
  Synthetic
uuugugugcaaucccugcaagc

SEQ ID NO: 536750 - RNA, 23 nt, Artificial Sequence
  Synthetic
cuuugugugcaaucccugcaagc

SEQ ID NO: 536751 - RNA, 24 nt, Artificial Sequence
  Synthetic
ccuuugugugcaaucccugcaagc

SEQ ID NO: 536752 - RNA, 18 nt, Artificial Sequence
  Synthetic
cagcauauaaaaucaagc

SEQ ID NO: 536753 - RNA, 19 nt, Artificial Sequence
  Synthetic
gcagcauauaaaaucaagc

SEQ ID NO: 536754 - RNA, 20 nt, Artificial Sequence
  Synthetic
ugcagcauauaaaaucaagc

SEQ ID NO: 536755 - RNA, 21 nt, Artificial Sequence
  Synthetic
uugcagcauauaaaaucaagc

SEQ ID NO: 536756 - RNA, 22 nt, Artificial Sequence
  Synthetic
auugcagcauauaaaaucaagc

SEQ ID NO: 536757 - RNA, 23 nt, Artificial Sequence
  Synthetic
uauugcagcauauaaaaucaagc

SEQ ID NO: 536758 - RNA, 24 nt, Artificial Sequence
  Synthetic
cuauugcagcauauaaaaucaagc

SEQ ID NO: 536759 - RNA, 18 nt, Artificial Sequence
  Synthetic
ucaauccauucaucaagc

SEQ ID NO: 536760 - RNA, 19 nt, Artificial Sequence
  Synthetic
uucaauccauucaucaagc

SEQ ID NO: 536761 - RNA, 20 nt, Artificial Sequence
  Synthetic
uuucaauccauucaucaagc

SEQ ID NO: 536762 - RNA, 21 nt, Artificial Sequence
  Synthetic
auuucaauccauucaucaagc

SEQ ID NO: 536763 - RNA, 22 nt, Artificial Sequence
  Synthetic
aauuucaauccauucaucaagc

SEQ ID NO: 536764 - RNA, 23 nt, Artificial Sequence
  Synthetic
uaauuucaauccauucaucaagc

SEQ ID NO: 536765 - RNA, 24 nt, Artificial Sequence
  Synthetic
auaauuucaauccauucaucaagc

SEQ ID NO: 536766 - RNA, 18 nt, Artificial Sequence
  Synthetic
gcaccacugcacucaagc

SEQ ID NO: 536767 - RNA, 19 nt, Artificial Sequence
  Synthetic
ugcaccacugcacucaagc

SEQ ID NO: 536768 - RNA, 20 nt, Artificial Sequence
  Synthetic
augcaccacugcacucaagc

SEQ ID NO: 536769 - RNA, 21 nt, Artificial Sequence
  Synthetic
aaugcaccacugcacucaagc

SEQ ID NO: 536770 - RNA, 22 nt, Artificial Sequence
  Synthetic
gaaugcaccacugcacucaagc

SEQ ID NO: 536771 - RNA, 23 nt, Artificial Sequence
  Synthetic
ugaaugcaccacugcacucaagc

SEQ ID NO: 536772 - RNA, 24 nt, Artificial Sequence
  Synthetic
augaaugcaccacugcacucaagc

SEQ ID NO: 536773 - RNA, 18 nt, Artificial Sequence
  Synthetic
caaauguguaucucaagc

SEQ ID NO: 536774 - RNA, 19 nt, Artificial Sequence
  Synthetic
ccaaauguguaucucaagc

SEQ ID NO: 536775 - RNA, 20 nt, Artificial Sequence
  Synthetic
cccaaauguguaucucaagc

SEQ ID NO: 536776 - RNA, 21 nt, Artificial Sequence
  Synthetic
acccaaauguguaucucaagc

SEQ ID NO: 536777 - RNA, 22 nt, Artificial Sequence
  Synthetic
cacccaaauguguaucucaagc

SEQ ID NO: 536778 - RNA, 23 nt, Artificial Sequence
  Synthetic
acacccaaauguguaucucaagc

SEQ ID NO: 536779 - RNA, 24 nt, Artificial Sequence
  Synthetic
gacacccaaauguguaucucaagc

SEQ ID NO: 536780 - RNA, 18 nt, Artificial Sequence
  Synthetic
agauuguaaaagucaagc

SEQ ID NO: 536781 - RNA, 19 nt, Artificial Sequence
  Synthetic
uagauuguaaaagucaagc

SEQ ID NO: 536782 - RNA, 20 nt, Artificial Sequence
  Synthetic
cuagauuguaaaagucaagc

SEQ ID NO: 536783 - RNA, 21 nt, Artificial Sequence
  Synthetic
gcuagauuguaaaagucaagc

SEQ ID NO: 536784 - RNA, 22 nt, Artificial Sequence
  Synthetic
ugcuagauuguaaaagucaagc

SEQ ID NO: 536785 - RNA, 23 nt, Artificial Sequence
  Synthetic
uugcuagauuguaaaagucaagc

SEQ ID NO: 536786 - RNA, 24 nt, Artificial Sequence
  Synthetic
uuugcuagauuguaaaagucaagc

SEQ ID NO: 536787 - RNA, 18 nt, Artificial Sequence
  Synthetic
cuugaucuagauucaagc

SEQ ID NO: 536788 - RNA, 19 nt, Artificial Sequence
  Synthetic
gcuugaucuagauucaagc

SEQ ID NO: 536789 - RNA, 20 nt, Artificial Sequence
  Synthetic
ggcuugaucuagauucaagc

SEQ ID NO: 536790 - RNA, 21 nt, Artificial Sequence
  Synthetic
aggcuugaucuagauucaagc

SEQ ID NO: 536791 - RNA, 22 nt, Artificial Sequence
  Synthetic
caggcuugaucuagauucaagc

SEQ ID NO: 536792 - RNA, 23 nt, Artificial Sequence
  Synthetic
gcaggcuugaucuagauucaagc

SEQ ID NO: 536793 - RNA, 24 nt, Artificial Sequence
  Synthetic
agcaggcuugaucuagauucaagc

SEQ ID NO: 536794 - RNA, 18 nt, Artificial Sequence
  Synthetic
aagccuugggcuucaagc

SEQ ID NO: 536795 - RNA, 19 nt, Artificial Sequence
  Synthetic
gaagccuugggcuucaagc

SEQ ID NO: 536796 - RNA, 20 nt, Artificial Sequence
  Synthetic
agaagccuugggcuucaagc

SEQ ID NO: 536797 - RNA, 21 nt, Artificial Sequence
  Synthetic
cagaagccuugggcuucaagc

SEQ ID NO: 536798 - RNA, 22 nt, Artificial Sequence
  Synthetic
gcagaagccuugggcuucaagc

SEQ ID NO: 536799 - RNA, 23 nt, Artificial Sequence
  Synthetic
ggcagaagccuugggcuucaagc

SEQ ID NO: 536800 - RNA, 24 nt, Artificial Sequence
  Synthetic
uggcagaagccuugggcuucaagc

SEQ ID NO: 536801 - RNA, 18 nt, Artificial Sequence
  Synthetic
ccacacaaaauuucaagc

SEQ ID NO: 536802 - RNA, 19 nt, Artificial Sequence
  Synthetic
accacacaaaauuucaagc

SEQ ID NO: 536803 - RNA, 20 nt, Artificial Sequence
  Synthetic
gaccacacaaaauuucaagc

SEQ ID NO: 536804 - RNA, 21 nt, Artificial Sequence
  Synthetic
agaccacacaaaauuucaagc

SEQ ID NO: 536805 - RNA, 22 nt, Artificial Sequence
  Synthetic
aagaccacacaaaauuucaagc

SEQ ID NO: 536806 - RNA, 23 nt, Artificial Sequence
  Synthetic
uaagaccacacaaaauuucaagc

SEQ ID NO: 536807 - RNA, 24 nt, Artificial Sequence
  Synthetic
guaagaccacacaaaauuucaagc

SEQ ID NO: 536808 - RNA, 18 nt, Artificial Sequence
  Synthetic
gagcuuccaauuucaagc

SEQ ID NO: 536809 - RNA, 19 nt, Artificial Sequence
  Synthetic
ggagcuuccaauuucaagc

SEQ ID NO: 536810 - RNA, 20 nt, Artificial Sequence
  Synthetic
aggagcuuccaauuucaagc

SEQ ID NO: 536811 - RNA, 21 nt, Artificial Sequence
  Synthetic
aaggagcuuccaauuucaagc

SEQ ID NO: 536812 - RNA, 22 nt, Artificial Sequence
  Synthetic
gaaggagcuuccaauuucaagc

SEQ ID NO: 536813 - RNA, 23 nt, Artificial Sequence
  Synthetic
ggaaggagcuuccaauuucaagc

SEQ ID NO: 536814 - RNA, 24 nt, Artificial Sequence
  Synthetic
uggaaggagcuuccaauuucaagc

SEQ ID NO: 536815 - RNA, 18 nt, Artificial Sequence
  Synthetic
cacauuauauuuucaagc

SEQ ID NO: 536816 - RNA, 19 nt, Artificial Sequence
  Synthetic
ccacauuauauuuucaagc

SEQ ID NO: 536817 - RNA, 20 nt, Artificial Sequence
  Synthetic
accacauuauauuuucaagc

SEQ ID NO: 536818 - RNA, 21 nt, Artificial Sequence
  Synthetic
uaccacauuauauuuucaagc

SEQ ID NO: 536819 - RNA, 22 nt, Artificial Sequence
  Synthetic
uuaccacauuauauuuucaagc

SEQ ID NO: 536820 - RNA, 23 nt, Artificial Sequence
  Synthetic
guuaccacauuauauuuucaagc

SEQ ID NO: 536821 - RNA, 24 nt, Artificial Sequence
  Synthetic
aguuaccacauuauauuuucaagc

SEQ ID NO: 536822 - RNA, 18 nt, Artificial Sequence
  Synthetic
guucuuuauuuuucaagc

SEQ ID NO: 536823 - RNA, 19 nt, Artificial Sequence
  Synthetic
uguucuuuauuuuucaagc

SEQ ID NO: 536824 - RNA, 20 nt, Artificial Sequence
  Synthetic
guguucuuuauuuuucaagc

SEQ ID NO: 536825 - RNA, 21 nt, Artificial Sequence
  Synthetic
aguguucuuuauuuuucaagc

SEQ ID NO: 536826 - RNA, 22 nt, Artificial Sequence
  Synthetic
aaguguucuuuauuuuucaagc

SEQ ID NO: 536827 - RNA, 23 nt, Artificial Sequence
  Synthetic
uaaguguucuuuauuuuucaagc

SEQ ID NO: 536828 - RNA, 24 nt, Artificial Sequence
  Synthetic
uuaaguguucuuuauuuuucaagc

SEQ ID NO: 536829 - RNA, 18 nt, Artificial Sequence
  Synthetic
auuuugcaggaaagaagc

SEQ ID NO: 536830 - RNA, 19 nt, Artificial Sequence
  Synthetic
cauuuugcaggaaagaagc

SEQ ID NO: 536831 - RNA, 20 nt, Artificial Sequence
  Synthetic
ucauuuugcaggaaagaagc

SEQ ID NO: 536832 - RNA, 21 nt, Artificial Sequence
  Synthetic
aucauuuugcaggaaagaagc

SEQ ID NO: 536833 - RNA, 22 nt, Artificial Sequence
  Synthetic
aaucauuuugcaggaaagaagc

SEQ ID NO: 536834 - RNA, 23 nt, Artificial Sequence
  Synthetic
uaaucauuuugcaggaaagaagc

SEQ ID NO: 536835 - RNA, 24 nt, Artificial Sequence
  Synthetic
uuaaucauuuugcaggaaagaagc

SEQ ID NO: 536836 - RNA, 18 nt, Artificial Sequence
  Synthetic
auauagaaauaaagaagc

SEQ ID NO: 536837 - RNA, 19 nt, Artificial Sequence
  Synthetic
aauauagaaauaaagaagc

SEQ ID NO: 536838 - RNA, 20 nt, Artificial Sequence
  Synthetic
uaauauagaaauaaagaagc

SEQ ID NO: 536839 - RNA, 21 nt, Artificial Sequence
  Synthetic
guaauauagaaauaaagaagc

SEQ ID NO: 536840 - RNA, 22 nt, Artificial Sequence
  Synthetic
gguaauauagaaauaaagaagc

SEQ ID NO: 536841 - RNA, 23 nt, Artificial Sequence
  Synthetic
agguaauauagaaauaaagaagc

SEQ ID NO: 536842 - RNA, 24 nt, Artificial Sequence
  Synthetic
uagguaauauagaaauaaagaagc

SEQ ID NO: 536843 - RNA, 18 nt, Artificial Sequence
  Synthetic
uuuaaaacauaaagaagc

SEQ ID NO: 536844 - RNA, 19 nt, Artificial Sequence
  Synthetic
cuuuaaaacauaaagaagc

SEQ ID NO: 536845 - RNA, 20 nt, Artificial Sequence
  Synthetic
acuuuaaaacauaaagaagc

SEQ ID NO: 536846 - RNA, 21 nt, Artificial Sequence
  Synthetic
uacuuuaaaacauaaagaagc

SEQ ID NO: 536847 - RNA, 22 nt, Artificial Sequence
  Synthetic
auacuuuaaaacauaaagaagc

SEQ ID NO: 536848 - RNA, 23 nt, Artificial Sequence
  Synthetic
uauacuuuaaaacauaaagaagc

SEQ ID NO: 536849 - RNA, 24 nt, Artificial Sequence
  Synthetic
auauacuuuaaaacauaaagaagc

SEQ ID NO: 536850 - RNA, 18 nt, Artificial Sequence
  Synthetic
ggauuacuacgaagaagc

SEQ ID NO: 536851 - RNA, 19 nt, Artificial Sequence
  Synthetic
aggauuacuacgaagaagc

SEQ ID NO: 536852 - RNA, 20 nt, Artificial Sequence
  Synthetic
uaggauuacuacgaagaagc

SEQ ID NO: 536853 - RNA, 21 nt, Artificial Sequence
  Synthetic
uuaggauuacuacgaagaagc

SEQ ID NO: 536854 - RNA, 22 nt, Artificial Sequence
  Synthetic
uuuaggauuacuacgaagaagc

SEQ ID NO: 536855 - RNA, 23 nt, Artificial Sequence
  Synthetic
auuuaggauuacuacgaagaagc

SEQ ID NO: 536856 - RNA, 24 nt, Artificial Sequence
  Synthetic
aauuuaggauuacuacgaagaagc

SEQ ID NO: 536857 - RNA, 18 nt, Artificial Sequence
  Synthetic
aacagaaaucgaagaagc

SEQ ID NO: 536858 - RNA, 19 nt, Artificial Sequence
  Synthetic
uaacagaaaucgaagaagc

SEQ ID NO: 536859 - RNA, 20 nt, Artificial Sequence
  Synthetic
auaacagaaaucgaagaagc

SEQ ID NO: 536860 - RNA, 21 nt, Artificial Sequence
  Synthetic
gauaacagaaaucgaagaagc

SEQ ID NO: 536861 - RNA, 22 nt, Artificial Sequence
  Synthetic
ggauaacagaaaucgaagaagc

SEQ ID NO: 536862 - RNA, 23 nt, Artificial Sequence
  Synthetic
gggauaacagaaaucgaagaagc

SEQ ID NO: 536863 - RNA, 24 nt, Artificial Sequence
  Synthetic
ggggauaacagaaaucgaagaagc

SEQ ID NO: 536864 - RNA, 18 nt, Artificial Sequence
  Synthetic
uggcaaagcggaagaagc

SEQ ID NO: 536865 - RNA, 19 nt, Artificial Sequence
  Synthetic
cuggcaaagcggaagaagc

SEQ ID NO: 536866 - RNA, 20 nt, Artificial Sequence
  Synthetic
ucuggcaaagcggaagaagc

SEQ ID NO: 536867 - RNA, 21 nt, Artificial Sequence
  Synthetic
cucuggcaaagcggaagaagc

SEQ ID NO: 536868 - RNA, 22 nt, Artificial Sequence
  Synthetic
ucucuggcaaagcggaagaagc

SEQ ID NO: 536869 - RNA, 23 nt, Artificial Sequence
  Synthetic
uucucuggcaaagcggaagaagc

SEQ ID NO: 536870 - RNA, 24 nt, Artificial Sequence
  Synthetic
cuucucuggcaaagcggaagaagc

SEQ ID NO: 536871 - RNA, 18 nt, Artificial Sequence
  Synthetic
accaugaauggaagaagc

SEQ ID NO: 536872 - RNA, 19 nt, Artificial Sequence
  Synthetic
caccaugaauggaagaagc

SEQ ID NO: 536873 - RNA, 20 nt, Artificial Sequence
  Synthetic
ucaccaugaauggaagaagc

SEQ ID NO: 536874 - RNA, 21 nt, Artificial Sequence
  Synthetic
uucaccaugaauggaagaagc

SEQ ID NO: 536875 - RNA, 22 nt, Artificial Sequence
  Synthetic
cuucaccaugaauggaagaagc

SEQ ID NO: 536876 - RNA, 23 nt, Artificial Sequence
  Synthetic
ccuucaccaugaauggaagaagc

SEQ ID NO: 536877 - RNA, 24 nt, Artificial Sequence
  Synthetic
cccuucaccaugaauggaagaagc

SEQ ID NO: 536878 - RNA, 18 nt, Artificial Sequence
  Synthetic
guuaacuuauuaagaagc

SEQ ID NO: 536879 - RNA, 19 nt, Artificial Sequence
  Synthetic
aguuaacuuauuaagaagc

SEQ ID NO: 536880 - RNA, 20 nt, Artificial Sequence
  Synthetic
aaguuaacuuauuaagaagc

SEQ ID NO: 536881 - RNA, 21 nt, Artificial Sequence
  Synthetic
aaaguuaacuuauuaagaagc

SEQ ID NO: 536882 - RNA, 22 nt, Artificial Sequence
  Synthetic
caaaguuaacuuauuaagaagc

SEQ ID NO: 536883 - RNA, 23 nt, Artificial Sequence
  Synthetic
acaaaguuaacuuauuaagaagc

SEQ ID NO: 536884 - RNA, 24 nt, Artificial Sequence
  Synthetic
cacaaaguuaacuuauuaagaagc

SEQ ID NO: 536885 - RNA, 18 nt, Artificial Sequence
  Synthetic
ccuggggcuaccagaagc

SEQ ID NO: 536886 - RNA, 19 nt, Artificial Sequence
  Synthetic
accuggggcuaccagaagc

SEQ ID NO: 536887 - RNA, 20 nt, Artificial Sequence
  Synthetic
caccuggggcuaccagaagc

SEQ ID NO: 536888 - RNA, 21 nt, Artificial Sequence
  Synthetic
acaccuggggcuaccagaagc

SEQ ID NO: 536889 - RNA, 22 nt, Artificial Sequence
  Synthetic
aacaccuggggcuaccagaagc

SEQ ID NO: 536890 - RNA, 23 nt, Artificial Sequence
  Synthetic
gaacaccuggggcuaccagaagc

SEQ ID NO: 536891 - RNA, 24 nt, Artificial Sequence
  Synthetic
ggaacaccuggggcuaccagaagc

SEQ ID NO: 536892 - RNA, 18 nt, Artificial Sequence
  Synthetic
ugauggagggccagaagc

SEQ ID NO: 536893 - RNA, 19 nt, Artificial Sequence
  Synthetic
uugauggagggccagaagc

SEQ ID NO: 536894 - RNA, 20 nt, Artificial Sequence
  Synthetic
uuugauggagggccagaagc

SEQ ID NO: 536895 - RNA, 21 nt, Artificial Sequence
  Synthetic
auuugauggagggccagaagc

SEQ ID NO: 536896 - RNA, 22 nt, Artificial Sequence
  Synthetic
cauuugauggagggccagaagc

SEQ ID NO: 536897 - RNA, 23 nt, Artificial Sequence
  Synthetic
ccauuugauggagggccagaagc

SEQ ID NO: 536898 - RNA, 24 nt, Artificial Sequence
  Synthetic
gccauuugauggagggccagaagc

SEQ ID NO: 536899 - RNA, 18 nt, Artificial Sequence
  Synthetic
cggcgaaauagcagaagc

SEQ ID NO: 536900 - RNA, 19 nt, Artificial Sequence
  Synthetic
ccggcgaaauagcagaagc

SEQ ID NO: 536901 - RNA, 20 nt, Artificial Sequence
  Synthetic
accggcgaaauagcagaagc

SEQ ID NO: 536902 - RNA, 21 nt, Artificial Sequence
  Synthetic
caccggcgaaauagcagaagc

SEQ ID NO: 536903 - RNA, 22 nt, Artificial Sequence
  Synthetic
gcaccggcgaaauagcagaagc

SEQ ID NO: 536904 - RNA, 23 nt, Artificial Sequence
  Synthetic
ugcaccggcgaaauagcagaagc

SEQ ID NO: 536905 - RNA, 24 nt, Artificial Sequence
  Synthetic
augcaccggcgaaauagcagaagc

SEQ ID NO: 536906 - RNA, 18 nt, Artificial Sequence
  Synthetic
uaacauauggucagaagc

SEQ ID NO: 536907 - RNA, 19 nt, Artificial Sequence
  Synthetic
auaacauauggucagaagc

SEQ ID NO: 536908 - RNA, 20 nt, Artificial Sequence
  Synthetic
cauaacauauggucagaagc

SEQ ID NO: 536909 - RNA, 21 nt, Artificial Sequence
  Synthetic
gcauaacauauggucagaagc

SEQ ID NO: 536910 - RNA, 22 nt, Artificial Sequence
  Synthetic
agcauaacauauggucagaagc

SEQ ID NO: 536911 - RNA, 23 nt, Artificial Sequence
  Synthetic
cagcauaacauauggucagaagc

SEQ ID NO: 536912 - RNA, 24 nt, Artificial Sequence
  Synthetic
gcagcauaacauauggucagaagc

SEQ ID NO: 536913 - RNA, 18 nt, Artificial Sequence
  Synthetic
aaagauaccaagagaagc

SEQ ID NO: 536914 - RNA, 19 nt, Artificial Sequence
  Synthetic
uaaagauaccaagagaagc

SEQ ID NO: 536915 - RNA, 20 nt, Artificial Sequence
  Synthetic
uuaaagauaccaagagaagc

SEQ ID NO: 536916 - RNA, 21 nt, Artificial Sequence
  Synthetic
cuuaaagauaccaagagaagc

SEQ ID NO: 536917 - RNA, 22 nt, Artificial Sequence
  Synthetic
ucuuaaagauaccaagagaagc

SEQ ID NO: 536918 - RNA, 23 nt, Artificial Sequence
  Synthetic
uucuuaaagauaccaagagaagc

SEQ ID NO: 536919 - RNA, 24 nt, Artificial Sequence
  Synthetic
uuucuuaaagauaccaagagaagc

SEQ ID NO: 536920 - RNA, 18 nt, Artificial Sequence
  Synthetic
ggaauugaagagagaagc

SEQ ID NO: 536921 - RNA, 19 nt, Artificial Sequence
  Synthetic
uggaauugaagagagaagc

SEQ ID NO: 536922 - RNA, 20 nt, Artificial Sequence
  Synthetic
uuggaauugaagagagaagc

SEQ ID NO: 536923 - RNA, 21 nt, Artificial Sequence
  Synthetic
uuuggaauugaagagagaagc

SEQ ID NO: 536924 - RNA, 22 nt, Artificial Sequence
  Synthetic
guuuggaauugaagagagaagc

SEQ ID NO: 536925 - RNA, 23 nt, Artificial Sequence
  Synthetic
aguuuggaauugaagagagaagc

SEQ ID NO: 536926 - RNA, 24 nt, Artificial Sequence
  Synthetic
gaguuuggaauugaagagagaagc

SEQ ID NO: 536927 - RNA, 18 nt, Artificial Sequence
  Synthetic
agagagagagagagaagc

SEQ ID NO: 536928 - RNA, 19 nt, Artificial Sequence
  Synthetic
gagagagagagagagaagc

SEQ ID NO: 536929 - RNA, 20 nt, Artificial Sequence
  Synthetic
agagagagagagagagaagc

SEQ ID NO: 536930 - RNA, 21 nt, Artificial Sequence
  Synthetic
gagagagagagagagagaagc

SEQ ID NO: 536931 - RNA, 22 nt, Artificial Sequence
  Synthetic
agagagagagagagagagaagc

SEQ ID NO: 536932 - RNA, 23 nt, Artificial Sequence
  Synthetic
gagagagagagagagagagaagc

SEQ ID NO: 536933 - RNA, 24 nt, Artificial Sequence
  Synthetic
agagagagagagagagagagaagc

SEQ ID NO: 536934 - RNA, 18 nt, Artificial Sequence
  Synthetic
aaagggagugagagaagc

SEQ ID NO: 536935 - RNA, 19 nt, Artificial Sequence
  Synthetic
aaaagggagugagagaagc

SEQ ID NO: 536936 - RNA, 20 nt, Artificial Sequence
  Synthetic
aaaaagggagugagagaagc

SEQ ID NO: 536937 - RNA, 21 nt, Artificial Sequence
  Synthetic
gaaaaagggagugagagaagc

SEQ ID NO: 536938 - RNA, 22 nt, Artificial Sequence
  Synthetic
agaaaaagggagugagagaagc

SEQ ID NO: 536939 - RNA, 23 nt, Artificial Sequence
  Synthetic
aagaaaaagggagugagagaagc

SEQ ID NO: 536940 - RNA, 24 nt, Artificial Sequence
  Synthetic
uaagaaaaagggagugagagaagc

SEQ ID NO: 536941 - RNA, 18 nt, Artificial Sequence
  Synthetic
caggauaaaaggagaagc

SEQ ID NO: 536942 - RNA, 19 nt, Artificial Sequence
  Synthetic
acaggauaaaaggagaagc

SEQ ID NO: 536943 - RNA, 20 nt, Artificial Sequence
  Synthetic
aacaggauaaaaggagaagc

SEQ ID NO: 536944 - RNA, 21 nt, Artificial Sequence
  Synthetic
uaacaggauaaaaggagaagc

SEQ ID NO: 536945 - RNA, 22 nt, Artificial Sequence
  Synthetic
uuaacaggauaaaaggagaagc

SEQ ID NO: 536946 - RNA, 23 nt, Artificial Sequence
  Synthetic
uuuaacaggauaaaaggagaagc

SEQ ID NO: 536947 - RNA, 24 nt, Artificial Sequence
  Synthetic
cuuuaacaggauaaaaggagaagc

SEQ ID NO: 536948 - RNA, 18 nt, Artificial Sequence
  Synthetic
ugagagcauaggagaagc

SEQ ID NO: 536949 - RNA, 19 nt, Artificial Sequence
  Synthetic
augagagcauaggagaagc

SEQ ID NO: 536950 - RNA, 20 nt, Artificial Sequence
  Synthetic
gaugagagcauaggagaagc

SEQ ID NO: 536951 - RNA, 21 nt, Artificial Sequence
  Synthetic
agaugagagcauaggagaagc

SEQ ID NO: 536952 - RNA, 22 nt, Artificial Sequence
  Synthetic
aagaugagagcauaggagaagc

SEQ ID NO: 536953 - RNA, 23 nt, Artificial Sequence
  Synthetic
caagaugagagcauaggagaagc

SEQ ID NO: 536954 - RNA, 24 nt, Artificial Sequence
  Synthetic
gcaagaugagagcauaggagaagc

SEQ ID NO: 536955 - RNA, 18 nt, Artificial Sequence
  Synthetic
acacgcgaacugagaagc

SEQ ID NO: 536956 - RNA, 19 nt, Artificial Sequence
  Synthetic
cacacgcgaacugagaagc

SEQ ID NO: 536957 - RNA, 20 nt, Artificial Sequence
  Synthetic
ccacacgcgaacugagaagc

SEQ ID NO: 536958 - RNA, 21 nt, Artificial Sequence
  Synthetic
accacacgcgaacugagaagc

SEQ ID NO: 536959 - RNA, 22 nt, Artificial Sequence
  Synthetic
aaccacacgcgaacugagaagc

SEQ ID NO: 536960 - RNA, 23 nt, Artificial Sequence
  Synthetic
uaaccacacgcgaacugagaagc

SEQ ID NO: 536961 - RNA, 24 nt, Artificial Sequence
  Synthetic
uuaaccacacgcgaacugagaagc

SEQ ID NO: 536962 - RNA, 18 nt, Artificial Sequence
  Synthetic
acgccaacuguuagaagc

SEQ ID NO: 536963 - RNA, 19 nt, Artificial Sequence
  Synthetic
aacgccaacuguuagaagc

SEQ ID NO: 536964 - RNA, 20 nt, Artificial Sequence
  Synthetic
aaacgccaacuguuagaagc

SEQ ID NO: 536965 - RNA, 21 nt, Artificial Sequence
  Synthetic
aaaacgccaacuguuagaagc

SEQ ID NO: 536966 - RNA, 22 nt, Artificial Sequence
  Synthetic
caaaacgccaacuguuagaagc

SEQ ID NO: 536967 - RNA, 23 nt, Artificial Sequence
  Synthetic
ccaaaacgccaacuguuagaagc

SEQ ID NO: 536968 - RNA, 24 nt, Artificial Sequence
  Synthetic
cccaaaacgccaacuguuagaagc

SEQ ID NO: 536969 - RNA, 18 nt, Artificial Sequence
  Synthetic
agggaaguuguuagaagc

SEQ ID NO: 536970 - RNA, 19 nt, Artificial Sequence
  Synthetic
uagggaaguuguuagaagc

SEQ ID NO: 536971 - RNA, 20 nt, Artificial Sequence
  Synthetic
auagggaaguuguuagaagc

SEQ ID NO: 536972 - RNA, 21 nt, Artificial Sequence
  Synthetic
aauagggaaguuguuagaagc

SEQ ID NO: 536973 - RNA, 22 nt, Artificial Sequence
  Synthetic
aaauagggaaguuguuagaagc

SEQ ID NO: 536974 - RNA, 23 nt, Artificial Sequence
  Synthetic
gaaauagggaaguuguuagaagc

SEQ ID NO: 536975 - RNA, 24 nt, Artificial Sequence
  Synthetic
ugaaauagggaaguuguuagaagc

SEQ ID NO: 536976 - RNA, 18 nt, Artificial Sequence
  Synthetic
cgaguguaucuacgaagc

SEQ ID NO: 536977 - RNA, 19 nt, Artificial Sequence
  Synthetic
ucgaguguaucuacgaagc

SEQ ID NO: 536978 - RNA, 20 nt, Artificial Sequence
  Synthetic
cucgaguguaucuacgaagc

SEQ ID NO: 536979 - RNA, 21 nt, Artificial Sequence
  Synthetic
acucgaguguaucuacgaagc

SEQ ID NO: 536980 - RNA, 22 nt, Artificial Sequence
  Synthetic
uacucgaguguaucuacgaagc

SEQ ID NO: 536981 - RNA, 23 nt, Artificial Sequence
  Synthetic
auacucgaguguaucuacgaagc

SEQ ID NO: 536982 - RNA, 24 nt, Artificial Sequence
  Synthetic
aauacucgaguguaucuacgaagc

SEQ ID NO: 536983 - RNA, 18 nt, Artificial Sequence
  Synthetic
gggaaucuaaaaggaagc

SEQ ID NO: 536984 - RNA, 19 nt, Artificial Sequence
  Synthetic
agggaaucuaaaaggaagc

SEQ ID NO: 536985 - RNA, 20 nt, Artificial Sequence
  Synthetic
cagggaaucuaaaaggaagc

SEQ ID NO: 536986 - RNA, 21 nt, Artificial Sequence
  Synthetic
gcagggaaucuaaaaggaagc

SEQ ID NO: 536987 - RNA, 22 nt, Artificial Sequence
  Synthetic
ugcagggaaucuaaaaggaagc

SEQ ID NO: 536988 - RNA, 23 nt, Artificial Sequence
  Synthetic
uugcagggaaucuaaaaggaagc

SEQ ID NO: 536989 - RNA, 24 nt, Artificial Sequence
  Synthetic
cuugcagggaaucuaaaaggaagc

SEQ ID NO: 536990 - RNA, 18 nt, Artificial Sequence
  Synthetic
ggauauugcagaggaagc

SEQ ID NO: 536991 - RNA, 19 nt, Artificial Sequence
  Synthetic
gggauauugcagaggaagc

SEQ ID NO: 536992 - RNA, 20 nt, Artificial Sequence
  Synthetic
ggggauauugcagaggaagc

SEQ ID NO: 536993 - RNA, 21 nt, Artificial Sequence
  Synthetic
aggggauauugcagaggaagc

SEQ ID NO: 536994 - RNA, 22 nt, Artificial Sequence
  Synthetic
gaggggauauugcagaggaagc

SEQ ID NO: 536995 - RNA, 23 nt, Artificial Sequence
  Synthetic
ugaggggauauugcagaggaagc

SEQ ID NO: 536996 - RNA, 24 nt, Artificial Sequence
  Synthetic
augaggggauauugcagaggaagc

SEQ ID NO: 536997 - RNA, 18 nt, Artificial Sequence
  Synthetic
gaaaguuggggaggaagc

SEQ ID NO: 536998 - RNA, 19 nt, Artificial Sequence
  Synthetic
agaaaguuggggaggaagc

SEQ ID NO: 536999 - RNA, 20 nt, Artificial Sequence
  Synthetic
aagaaaguuggggaggaagc

SEQ ID NO: 537000 - RNA, 21 nt, Artificial Sequence
  Synthetic
aaagaaaguuggggaggaagc

SEQ ID NO: 537001 - RNA, 22 nt, Artificial Sequence
  Synthetic
aaaagaaaguuggggaggaagc

SEQ ID NO: 537002 - RNA, 23 nt, Artificial Sequence
  Synthetic
aaaaagaaaguuggggaggaagc

SEQ ID NO: 537003 - RNA, 24 nt, Artificial Sequence
  Synthetic
caaaaagaaaguuggggaggaagc

SEQ ID NO: 537004 - RNA, 18 nt, Artificial Sequence
  Synthetic
cauuuaauguuaggaagc

SEQ ID NO: 537005 - RNA, 19 nt, Artificial Sequence
  Synthetic
acauuuaauguuaggaagc

SEQ ID NO: 537006 - RNA, 20 nt, Artificial Sequence
  Synthetic
gacauuuaauguuaggaagc

SEQ ID NO: 537007 - RNA, 21 nt, Artificial Sequence
  Synthetic
agacauuuaauguuaggaagc

SEQ ID NO: 537008 - RNA, 22 nt, Artificial Sequence
  Synthetic
aagacauuuaauguuaggaagc

SEQ ID NO: 537009 - RNA, 23 nt, Artificial Sequence
  Synthetic
gaagacauuuaauguuaggaagc

SEQ ID NO: 537010 - RNA, 24 nt, Artificial Sequence
  Synthetic
ugaagacauuuaauguuaggaagc

SEQ ID NO: 537011 - RNA, 18 nt, Artificial Sequence
  Synthetic
guauuuuguuacggaagc

SEQ ID NO: 537012 - RNA, 19 nt, Artificial Sequence
  Synthetic
gguauuuuguuacggaagc

SEQ ID NO: 537013 - RNA, 20 nt, Artificial Sequence
  Synthetic
ugguauuuuguuacggaagc

SEQ ID NO: 537014 - RNA, 21 nt, Artificial Sequence
  Synthetic
gugguauuuuguuacggaagc

SEQ ID NO: 537015 - RNA, 22 nt, Artificial Sequence
  Synthetic
ugugguauuuuguuacggaagc

SEQ ID NO: 537016 - RNA, 23 nt, Artificial Sequence
  Synthetic
cugugguauuuuguuacggaagc

SEQ ID NO: 537017 - RNA, 24 nt, Artificial Sequence
  Synthetic
ucugugguauuuuguuacggaagc

SEQ ID NO: 537018 - RNA, 18 nt, Artificial Sequence
  Synthetic
cuggaaucaaagggaagc

SEQ ID NO: 537019 - RNA, 19 nt, Artificial Sequence
  Synthetic
acuggaaucaaagggaagc

SEQ ID NO: 537020 - RNA, 20 nt, Artificial Sequence
  Synthetic
cacuggaaucaaagggaagc

SEQ ID NO: 537021 - RNA, 21 nt, Artificial Sequence
  Synthetic
gcacuggaaucaaagggaagc

SEQ ID NO: 537022 - RNA, 22 nt, Artificial Sequence
  Synthetic
agcacuggaaucaaagggaagc

SEQ ID NO: 537023 - RNA, 23 nt, Artificial Sequence
  Synthetic
aagcacuggaaucaaagggaagc

SEQ ID NO: 537024 - RNA, 24 nt, Artificial Sequence
  Synthetic
aaagcacuggaaucaaagggaagc

SEQ ID NO: 537025 - RNA, 18 nt, Artificial Sequence
  Synthetic
caaguugagaagggaagc

SEQ ID NO: 537026 - RNA, 19 nt, Artificial Sequence
  Synthetic
ucaaguugagaagggaagc

SEQ ID NO: 537027 - RNA, 20 nt, Artificial Sequence
  Synthetic
aucaaguugagaagggaagc

SEQ ID NO: 537028 - RNA, 21 nt, Artificial Sequence
  Synthetic
gaucaaguugagaagggaagc

SEQ ID NO: 537029 - RNA, 22 nt, Artificial Sequence
  Synthetic
ugaucaaguugagaagggaagc

SEQ ID NO: 537030 - RNA, 23 nt, Artificial Sequence
  Synthetic
gugaucaaguugagaagggaagc

SEQ ID NO: 537031 - RNA, 24 nt, Artificial Sequence
  Synthetic
ugugaucaaguugagaagggaagc

SEQ ID NO: 537032 - RNA, 18 nt, Artificial Sequence
  Synthetic
ugcagagaguugggaagc

SEQ ID NO: 537033 - RNA, 19 nt, Artificial Sequence
  Synthetic
gugcagagaguugggaagc

SEQ ID NO: 537034 - RNA, 20 nt, Artificial Sequence
  Synthetic
ugugcagagaguugggaagc

SEQ ID NO: 537035 - RNA, 21 nt, Artificial Sequence
  Synthetic
augugcagagaguugggaagc

SEQ ID NO: 537036 - RNA, 22 nt, Artificial Sequence
  Synthetic
caugugcagagaguugggaagc

SEQ ID NO: 537037 - RNA, 23 nt, Artificial Sequence
  Synthetic
acaugugcagagaguugggaagc

SEQ ID NO: 537038 - RNA, 24 nt, Artificial Sequence
  Synthetic
aacaugugcagagaguugggaagc

SEQ ID NO: 537039 - RNA, 18 nt, Artificial Sequence
  Synthetic
ugcaggcuuaauggaagc

SEQ ID NO: 537040 - RNA, 19 nt, Artificial Sequence
  Synthetic
uugcaggcuuaauggaagc

SEQ ID NO: 537041 - RNA, 20 nt, Artificial Sequence
  Synthetic
auugcaggcuuaauggaagc

SEQ ID NO: 537042 - RNA, 21 nt, Artificial Sequence
  Synthetic
uauugcaggcuuaauggaagc

SEQ ID NO: 537043 - RNA, 22 nt, Artificial Sequence
  Synthetic
auauugcaggcuuaauggaagc

SEQ ID NO: 537044 - RNA, 23 nt, Artificial Sequence
  Synthetic
gauauugcaggcuuaauggaagc

SEQ ID NO: 537045 - RNA, 24 nt, Artificial Sequence
  Synthetic
ggauauugcaggcuuaauggaagc

SEQ ID NO: 537046 - RNA, 18 nt, Artificial Sequence
  Synthetic
aacagaaaauauggaagc

SEQ ID NO: 537047 - RNA, 19 nt, Artificial Sequence
  Synthetic
caacagaaaauauggaagc

SEQ ID NO: 537048 - RNA, 20 nt, Artificial Sequence
  Synthetic
ucaacagaaaauauggaagc

SEQ ID NO: 537049 - RNA, 21 nt, Artificial Sequence
  Synthetic
uucaacagaaaauauggaagc

SEQ ID NO: 537050 - RNA, 22 nt, Artificial Sequence
  Synthetic
guucaacagaaaauauggaagc

SEQ ID NO: 537051 - RNA, 23 nt, Artificial Sequence
  Synthetic
cguucaacagaaaauauggaagc

SEQ ID NO: 537052 - RNA, 24 nt, Artificial Sequence
  Synthetic
ccguucaacagaaaauauggaagc

SEQ ID NO: 537053 - RNA, 18 nt, Artificial Sequence
  Synthetic
agauagguaaguggaagc

SEQ ID NO: 537054 - RNA, 19 nt, Artificial Sequence
  Synthetic
gagauagguaaguggaagc

SEQ ID NO: 537055 - RNA, 20 nt, Artificial Sequence
  Synthetic
ggagauagguaaguggaagc

SEQ ID NO: 537056 - RNA, 21 nt, Artificial Sequence
  Synthetic
aggagauagguaaguggaagc

SEQ ID NO: 537057 - RNA, 22 nt, Artificial Sequence
  Synthetic
aaggagauagguaaguggaagc

SEQ ID NO: 537058 - RNA, 23 nt, Artificial Sequence
  Synthetic
aaaggagauagguaaguggaagc

SEQ ID NO: 537059 - RNA, 24 nt, Artificial Sequence
  Synthetic
aaaaggagauagguaaguggaagc

SEQ ID NO: 537060 - RNA, 18 nt, Artificial Sequence
  Synthetic
agaggaaaaaaaugaagc

SEQ ID NO: 537061 - RNA, 19 nt, Artificial Sequence
  Synthetic
cagaggaaaaaaaugaagc

SEQ ID NO: 537062 - RNA, 20 nt, Artificial Sequence
  Synthetic
acagaggaaaaaaaugaagc

SEQ ID NO: 537063 - RNA, 21 nt, Artificial Sequence
  Synthetic
uacagaggaaaaaaaugaagc

SEQ ID NO: 537064 - RNA, 22 nt, Artificial Sequence
  Synthetic
uuacagaggaaaaaaaugaagc

SEQ ID NO: 537065 - RNA, 23 nt, Artificial Sequence
  Synthetic
guuacagaggaaaaaaaugaagc

SEQ ID NO: 537066 - RNA, 24 nt, Artificial Sequence
  Synthetic
uguuacagaggaaaaaaaugaagc

SEQ ID NO: 537067 - RNA, 18 nt, Artificial Sequence
  Synthetic
agacaaggaaaaugaagc

SEQ ID NO: 537068 - RNA, 19 nt, Artificial Sequence
  Synthetic
uagacaaggaaaaugaagc

SEQ ID NO: 537069 - RNA, 20 nt, Artificial Sequence
  Synthetic
auagacaaggaaaaugaagc

SEQ ID NO: 537070 - RNA, 21 nt, Artificial Sequence
  Synthetic
uauagacaaggaaaaugaagc

SEQ ID NO: 537071 - RNA, 22 nt, Artificial Sequence
  Synthetic
uuauagacaaggaaaaugaagc

SEQ ID NO: 537072 - RNA, 23 nt, Artificial Sequence
  Synthetic
uuuauagacaaggaaaaugaagc

SEQ ID NO: 537073 - RNA, 24 nt, Artificial Sequence
  Synthetic
uuuuauagacaaggaaaaugaagc

SEQ ID NO: 537074 - RNA, 18 nt, Artificial Sequence
  Synthetic
aucuucuagaaaugaagc

SEQ ID NO: 537075 - RNA, 19 nt, Artificial Sequence
  Synthetic
aaucuucuagaaaugaagc

SEQ ID NO: 537076 - RNA, 20 nt, Artificial Sequence
  Synthetic
caaucuucuagaaaugaagc

SEQ ID NO: 537077 - RNA, 21 nt, Artificial Sequence
  Synthetic
acaaucuucuagaaaugaagc

SEQ ID NO: 537078 - RNA, 22 nt, Artificial Sequence
  Synthetic
aacaaucuucuagaaaugaagc

SEQ ID NO: 537079 - RNA, 23 nt, Artificial Sequence
  Synthetic
aaacaaucuucuagaaaugaagc

SEQ ID NO: 537080 - RNA, 24 nt, Artificial Sequence
  Synthetic
caaacaaucuucuagaaaugaagc

SEQ ID NO: 537081 - RNA, 18 nt, Artificial Sequence
  Synthetic
aaaugaaugaaaugaagc

SEQ ID NO: 537082 - RNA, 19 nt, Artificial Sequence
  Synthetic
gaaaugaaugaaaugaagc

SEQ ID NO: 537083 - RNA, 20 nt, Artificial Sequence
  Synthetic
ugaaaugaaugaaaugaagc

SEQ ID NO: 537084 - RNA, 21 nt, Artificial Sequence
  Synthetic
augaaaugaaugaaaugaagc

SEQ ID NO: 537085 - RNA, 22 nt, Artificial Sequence
  Synthetic
gaugaaaugaaugaaaugaagc

SEQ ID NO: 537086 - RNA, 23 nt, Artificial Sequence
  Synthetic
agaugaaaugaaugaaaugaagc

SEQ ID NO: 537087 - RNA, 24 nt, Artificial Sequence
  Synthetic
aagaugaaaugaaugaaaugaagc

SEQ ID NO: 537088 - RNA, 18 nt, Artificial Sequence
  Synthetic
cacggacauggaugaagc

SEQ ID NO: 537089 - RNA, 19 nt, Artificial Sequence
  Synthetic
gcacggacauggaugaagc

SEQ ID NO: 537090 - RNA, 20 nt, Artificial Sequence
  Synthetic
ugcacggacauggaugaagc

SEQ ID NO: 537091 - RNA, 21 nt, Artificial Sequence
  Synthetic
uugcacggacauggaugaagc

SEQ ID NO: 537092 - RNA, 22 nt, Artificial Sequence
  Synthetic
uuugcacggacauggaugaagc

SEQ ID NO: 537093 - RNA, 23 nt, Artificial Sequence
  Synthetic
cuuugcacggacauggaugaagc

SEQ ID NO: 537094 - RNA, 24 nt, Artificial Sequence
  Synthetic
ccuuugcacggacauggaugaagc

SEQ ID NO: 537095 - RNA, 18 nt, Artificial Sequence
  Synthetic
aagggacauggaugaagc

SEQ ID NO: 537096 - RNA, 19 nt, Artificial Sequence
  Synthetic
gaagggacauggaugaagc

SEQ ID NO: 537097 - RNA, 20 nt, Artificial Sequence
  Synthetic
ugaagggacauggaugaagc

SEQ ID NO: 537098 - RNA, 21 nt, Artificial Sequence
  Synthetic
uugaagggacauggaugaagc

SEQ ID NO: 537099 - RNA, 22 nt, Artificial Sequence
  Synthetic
uuugaagggacauggaugaagc

SEQ ID NO: 537100 - RNA, 23 nt, Artificial Sequence
  Synthetic
cuuugaagggacauggaugaagc

SEQ ID NO: 537101 - RNA, 24 nt, Artificial Sequence
  Synthetic
ccuuugaagggacauggaugaagc

SEQ ID NO: 537102 - RNA, 18 nt, Artificial Sequence
  Synthetic
cagggacauggaugaagc

SEQ ID NO: 537103 - RNA, 19 nt, Artificial Sequence
  Synthetic
gcagggacauggaugaagc

SEQ ID NO: 537104 - RNA, 20 nt, Artificial Sequence
  Synthetic
ugcagggacauggaugaagc

SEQ ID NO: 537105 - RNA, 21 nt, Artificial Sequence
  Synthetic
uugcagggacauggaugaagc

SEQ ID NO: 537106 - RNA, 22 nt, Artificial Sequence
  Synthetic
uuugcagggacauggaugaagc

SEQ ID NO: 537107 - RNA, 23 nt, Artificial Sequence
  Synthetic
cuuugcagggacauggaugaagc

SEQ ID NO: 537108 - RNA, 24 nt, Artificial Sequence
  Synthetic
ccuuugcagggacauggaugaagc

SEQ ID NO: 537109 - RNA, 18 nt, Artificial Sequence
  Synthetic
aaagcaggaugaugaagc

SEQ ID NO: 537110 - RNA, 19 nt, Artificial Sequence
  Synthetic
caaagcaggaugaugaagc

SEQ ID NO: 537111 - RNA, 20 nt, Artificial Sequence
  Synthetic
ucaaagcaggaugaugaagc

SEQ ID NO: 537112 - RNA, 21 nt, Artificial Sequence
  Synthetic
gucaaagcaggaugaugaagc

SEQ ID NO: 537113 - RNA, 22 nt, Artificial Sequence
  Synthetic
ggucaaagcaggaugaugaagc

SEQ ID NO: 537114 - RNA, 23 nt, Artificial Sequence
  Synthetic
gggucaaagcaggaugaugaagc

SEQ ID NO: 537115 - RNA, 24 nt, Artificial Sequence
  Synthetic
ggggucaaagcaggaugaugaagc

SEQ ID NO: 537116 - RNA, 18 nt, Artificial Sequence
  Synthetic
gagguuaauuccugaagc

SEQ ID NO: 537117 - RNA, 19 nt, Artificial Sequence
  Synthetic
agagguuaauuccugaagc

SEQ ID NO: 537118 - RNA, 20 nt, Artificial Sequence
  Synthetic
cagagguuaauuccugaagc

SEQ ID NO: 537119 - RNA, 21 nt, Artificial Sequence
  Synthetic
ccagagguuaauuccugaagc

SEQ ID NO: 537120 - RNA, 22 nt, Artificial Sequence
  Synthetic
cccagagguuaauuccugaagc

SEQ ID NO: 537121 - RNA, 23 nt, Artificial Sequence
  Synthetic
gcccagagguuaauuccugaagc

SEQ ID NO: 537122 - RNA, 24 nt, Artificial Sequence
  Synthetic
agcccagagguuaauuccugaagc

SEQ ID NO: 537123 - RNA, 18 nt, Artificial Sequence
  Synthetic
ccuugccugagcugaagc

SEQ ID NO: 537124 - RNA, 19 nt, Artificial Sequence
  Synthetic
gccuugccugagcugaagc

SEQ ID NO: 537125 - RNA, 20 nt, Artificial Sequence
  Synthetic
ggccuugccugagcugaagc

SEQ ID NO: 537126 - RNA, 21 nt, Artificial Sequence
  Synthetic
gggccuugccugagcugaagc

SEQ ID NO: 537127 - RNA, 22 nt, Artificial Sequence
  Synthetic
agggccuugccugagcugaagc

SEQ ID NO: 537128 - RNA, 23 nt, Artificial Sequence
  Synthetic
cagggccuugccugagcugaagc

SEQ ID NO: 537129 - RNA, 24 nt, Artificial Sequence
  Synthetic
ccagggccuugccugagcugaagc

SEQ ID NO: 537130 - RNA, 18 nt, Artificial Sequence
  Synthetic
uacucaggaggcugaagc

SEQ ID NO: 537131 - RNA, 19 nt, Artificial Sequence
  Synthetic
cuacucaggaggcugaagc

SEQ ID NO: 537132 - RNA, 20 nt, Artificial Sequence
  Synthetic
gcuacucaggaggcugaagc

SEQ ID NO: 537133 - RNA, 21 nt, Artificial Sequence
  Synthetic
agcuacucaggaggcugaagc

SEQ ID NO: 537134 - RNA, 22 nt, Artificial Sequence
  Synthetic
cagcuacucaggaggcugaagc

SEQ ID NO: 537135 - RNA, 23 nt, Artificial Sequence
  Synthetic
ccagcuacucaggaggcugaagc

SEQ ID NO: 537136 - RNA, 24 nt, Artificial Sequence
  Synthetic
cccagcuacucaggaggcugaagc

SEQ ID NO: 537137 - RNA, 18 nt, Artificial Sequence
  Synthetic
gcuaaaaacugcugaagc

SEQ ID NO: 537138 - RNA, 19 nt, Artificial Sequence
  Synthetic
agcuaaaaacugcugaagc

SEQ ID NO: 537139 - RNA, 20 nt, Artificial Sequence
  Synthetic
cagcuaaaaacugcugaagc

SEQ ID NO: 537140 - RNA, 21 nt, Artificial Sequence
  Synthetic
ucagcuaaaaacugcugaagc

SEQ ID NO: 537141 - RNA, 22 nt, Artificial Sequence
  Synthetic
cucagcuaaaaacugcugaagc

SEQ ID NO: 537142 - RNA, 23 nt, Artificial Sequence
  Synthetic
ucucagcuaaaaacugcugaagc

SEQ ID NO: 537143 - RNA, 24 nt, Artificial Sequence
  Synthetic
aucucagcuaaaaacugcugaagc

SEQ ID NO: 537144 - RNA, 18 nt, Artificial Sequence
  Synthetic
agaagugcccagugaagc

SEQ ID NO: 537145 - RNA, 19 nt, Artificial Sequence
  Synthetic
aagaagugcccagugaagc

SEQ ID NO: 537146 - RNA, 20 nt, Artificial Sequence
  Synthetic
gaagaagugcccagugaagc

SEQ ID NO: 537147 - RNA, 21 nt, Artificial Sequence
  Synthetic
ggaagaagugcccagugaagc

SEQ ID NO: 537148 - RNA, 22 nt, Artificial Sequence
  Synthetic
aggaagaagugcccagugaagc

SEQ ID NO: 537149 - RNA, 23 nt, Artificial Sequence
  Synthetic
caggaagaagugcccagugaagc

SEQ ID NO: 537150 - RNA, 24 nt, Artificial Sequence
  Synthetic
gcaggaagaagugcccagugaagc

SEQ ID NO: 537151 - RNA, 18 nt, Artificial Sequence
  Synthetic
aaaagacuuaggugaagc

SEQ ID NO: 537152 - RNA, 19 nt, Artificial Sequence
  Synthetic
aaaaagacuuaggugaagc

SEQ ID NO: 537153 - RNA, 20 nt, Artificial Sequence
  Synthetic
aaaaaagacuuaggugaagc

SEQ ID NO: 537154 - RNA, 21 nt, Artificial Sequence
  Synthetic
aaaaaaagacuuaggugaagc

SEQ ID NO: 537155 - RNA, 22 nt, Artificial Sequence
  Synthetic
gaaaaaaagacuuaggugaagc

SEQ ID NO: 537156 - RNA, 23 nt, Artificial Sequence
  Synthetic
agaaaaaaagacuuaggugaagc

SEQ ID NO: 537157 - RNA, 24 nt, Artificial Sequence
  Synthetic
aagaaaaaaagacuuaggugaagc

SEQ ID NO: 537158 - RNA, 18 nt, Artificial Sequence
  Synthetic
aggagaauugcuugaagc

SEQ ID NO: 537159 - RNA, 19 nt, Artificial Sequence
  Synthetic
caggagaauugcuugaagc

SEQ ID NO: 537160 - RNA, 20 nt, Artificial Sequence
  Synthetic
gcaggagaauugcuugaagc

SEQ ID NO: 537161 - RNA, 21 nt, Artificial Sequence
  Synthetic
ggcaggagaauugcuugaagc

SEQ ID NO: 537162 - RNA, 22 nt, Artificial Sequence
  Synthetic
aggcaggagaauugcuugaagc

SEQ ID NO: 537163 - RNA, 23 nt, Artificial Sequence
  Synthetic
aaggcaggagaauugcuugaagc

SEQ ID NO: 537164 - RNA, 24 nt, Artificial Sequence
  Synthetic
uaaggcaggagaauugcuugaagc

SEQ ID NO: 537165 - RNA, 18 nt, Artificial Sequence
  Synthetic
aggaguauugcuugaagc

SEQ ID NO: 537166 - RNA, 19 nt, Artificial Sequence
  Synthetic
uaggaguauugcuugaagc

SEQ ID NO: 537167 - RNA, 20 nt, Artificial Sequence
  Synthetic
guaggaguauugcuugaagc

SEQ ID NO: 537168 - RNA, 21 nt, Artificial Sequence
  Synthetic
gguaggaguauugcuugaagc

SEQ ID NO: 537169 - RNA, 22 nt, Artificial Sequence
  Synthetic
agguaggaguauugcuugaagc

SEQ ID NO: 537170 - RNA, 23 nt, Artificial Sequence
  Synthetic
gagguaggaguauugcuugaagc

SEQ ID NO: 537171 - RNA, 24 nt, Artificial Sequence
  Synthetic
cgagguaggaguauugcuugaagc

SEQ ID NO: 537172 - RNA, 18 nt, Artificial Sequence
  Synthetic
ugaucugagucuugaagc

SEQ ID NO: 537173 - RNA, 19 nt, Artificial Sequence
  Synthetic
augaucugagucuugaagc

SEQ ID NO: 537174 - RNA, 20 nt, Artificial Sequence
  Synthetic
aaugaucugagucuugaagc

SEQ ID NO: 537175 - RNA, 21 nt, Artificial Sequence
  Synthetic
uaaugaucugagucuugaagc

SEQ ID NO: 537176 - RNA, 22 nt, Artificial Sequence
  Synthetic
auaaugaucugagucuugaagc

SEQ ID NO: 537177 - RNA, 23 nt, Artificial Sequence
  Synthetic
gauaaugaucugagucuugaagc

SEQ ID NO: 537178 - RNA, 24 nt, Artificial Sequence
  Synthetic
agauaaugaucugagucuugaagc

SEQ ID NO: 537179 - RNA, 18 nt, Artificial Sequence
  Synthetic
guauacauaaaaauaagc

SEQ ID NO: 537180 - RNA, 19 nt, Artificial Sequence
  Synthetic
uguauacauaaaaauaagc

SEQ ID NO: 537181 - RNA, 20 nt, Artificial Sequence
  Synthetic
auguauacauaaaaauaagc

SEQ ID NO: 537182 - RNA, 21 nt, Artificial Sequence
  Synthetic
uauguauacauaaaaauaagc

SEQ ID NO: 537183 - RNA, 22 nt, Artificial Sequence
  Synthetic
auauguauacauaaaaauaagc

SEQ ID NO: 537184 - RNA, 23 nt, Artificial Sequence
  Synthetic
uauauguauacauaaaaauaagc

SEQ ID NO: 537185 - RNA, 24 nt, Artificial Sequence
  Synthetic
cuauauguauacauaaaaauaagc

SEQ ID NO: 537186 - RNA, 18 nt, Artificial Sequence
  Synthetic
uuuauguauacaauaagc

SEQ ID NO: 537187 - RNA, 19 nt, Artificial Sequence
  Synthetic
auuuauguauacaauaagc

SEQ ID NO: 537188 - RNA, 20 nt, Artificial Sequence
  Synthetic
uauuuauguauacaauaagc

SEQ ID NO: 537189 - RNA, 21 nt, Artificial Sequence
  Synthetic
cuauuuauguauacaauaagc

SEQ ID NO: 537190 - RNA, 22 nt, Artificial Sequence
  Synthetic
ccuauuuauguauacaauaagc

SEQ ID NO: 537191 - RNA, 23 nt, Artificial Sequence
  Synthetic
gccuauuuauguauacaauaagc

SEQ ID NO: 537192 - RNA, 24 nt, Artificial Sequence
  Synthetic
ugccuauuuauguauacaauaagc

SEQ ID NO: 537193 - RNA, 18 nt, Artificial Sequence
  Synthetic
agggagaggggaauaagc

SEQ ID NO: 537194 - RNA, 19 nt, Artificial Sequence
  Synthetic
gagggagaggggaauaagc

SEQ ID NO: 537195 - RNA, 20 nt, Artificial Sequence
  Synthetic
ggagggagaggggaauaagc

SEQ ID NO: 537196 - RNA, 21 nt, Artificial Sequence
  Synthetic
gggagggagaggggaauaagc

SEQ ID NO: 537197 - RNA, 22 nt, Artificial Sequence
  Synthetic
agggagggagaggggaauaagc

SEQ ID NO: 537198 - RNA, 23 nt, Artificial Sequence
  Synthetic
gagggagggagaggggaauaagc

SEQ ID NO: 537199 - RNA, 24 nt, Artificial Sequence
  Synthetic
ggagggagggagaggggaauaagc

SEQ ID NO: 537200 - RNA, 18 nt, Artificial Sequence
  Synthetic
uaauuugcugccauaagc

SEQ ID NO: 537201 - RNA, 19 nt, Artificial Sequence
  Synthetic
uuaauuugcugccauaagc

SEQ ID NO: 537202 - RNA, 20 nt, Artificial Sequence
  Synthetic
uuuaauuugcugccauaagc

SEQ ID NO: 537203 - RNA, 21 nt, Artificial Sequence
  Synthetic
guuuaauuugcugccauaagc

SEQ ID NO: 537204 - RNA, 22 nt, Artificial Sequence
  Synthetic
uguuuaauuugcugccauaagc

SEQ ID NO: 537205 - RNA, 23 nt, Artificial Sequence
  Synthetic
auguuuaauuugcugccauaagc

SEQ ID NO: 537206 - RNA, 24 nt, Artificial Sequence
  Synthetic
uauguuuaauuugcugccauaagc

SEQ ID NO: 537207 - RNA, 18 nt, Artificial Sequence
  Synthetic
uucuuacauugcauaagc

SEQ ID NO: 537208 - RNA, 19 nt, Artificial Sequence
  Synthetic
auucuuacauugcauaagc

SEQ ID NO: 537209 - RNA, 20 nt, Artificial Sequence
  Synthetic
uauucuuacauugcauaagc

SEQ ID NO: 537210 - RNA, 21 nt, Artificial Sequence
  Synthetic
guauucuuacauugcauaagc

SEQ ID NO: 537211 - RNA, 22 nt, Artificial Sequence
  Synthetic
uguauucuuacauugcauaagc

SEQ ID NO: 537212 - RNA, 23 nt, Artificial Sequence
  Synthetic
auguauucuuacauugcauaagc

SEQ ID NO: 537213 - RNA, 24 nt, Artificial Sequence
  Synthetic
aauguauucuuacauugcauaagc

SEQ ID NO: 537214 - RNA, 18 nt, Artificial Sequence
  Synthetic
uacauauuacagauaagc

SEQ ID NO: 537215 - RNA, 19 nt, Artificial Sequence
  Synthetic
uuacauauuacagauaagc

SEQ ID NO: 537216 - RNA, 20 nt, Artificial Sequence
  Synthetic
guuacauauuacagauaagc

SEQ ID NO: 537217 - RNA, 21 nt, Artificial Sequence
  Synthetic
uguuacauauuacagauaagc

SEQ ID NO: 537218 - RNA, 22 nt, Artificial Sequence
  Synthetic
auguuacauauuacagauaagc

SEQ ID NO: 537219 - RNA, 23 nt, Artificial Sequence
  Synthetic
cauguuacauauuacagauaagc

SEQ ID NO: 537220 - RNA, 24 nt, Artificial Sequence
  Synthetic
ccauguuacauauuacagauaagc

SEQ ID NO: 537221 - RNA, 18 nt, Artificial Sequence
  Synthetic
uuuucucaccugauaagc

SEQ ID NO: 537222 - RNA, 19 nt, Artificial Sequence
  Synthetic
guuuucucaccugauaagc

SEQ ID NO: 537223 - RNA, 20 nt, Artificial Sequence
  Synthetic
aguuuucucaccugauaagc

SEQ ID NO: 537224 - RNA, 21 nt, Artificial Sequence
  Synthetic
caguuuucucaccugauaagc

SEQ ID NO: 537225 - RNA, 22 nt, Artificial Sequence
  Synthetic
acaguuuucucaccugauaagc

SEQ ID NO: 537226 - RNA, 23 nt, Artificial Sequence
  Synthetic
uacaguuuucucaccugauaagc

SEQ ID NO: 537227 - RNA, 24 nt, Artificial Sequence
  Synthetic
guacaguuuucucaccugauaagc

SEQ ID NO: 537228 - RNA, 18 nt, Artificial Sequence
  Synthetic
guguagagucauauaagc

SEQ ID NO: 537229 - RNA, 19 nt, Artificial Sequence
  Synthetic
aguguagagucauauaagc

SEQ ID NO: 537230 - RNA, 20 nt, Artificial Sequence
  Synthetic
gaguguagagucauauaagc

SEQ ID NO: 537231 - RNA, 21 nt, Artificial Sequence
  Synthetic
agaguguagagucauauaagc

SEQ ID NO: 537232 - RNA, 22 nt, Artificial Sequence
  Synthetic
aagaguguagagucauauaagc

SEQ ID NO: 537233 - RNA, 23 nt, Artificial Sequence
  Synthetic
uaagaguguagagucauauaagc

SEQ ID NO: 537234 - RNA, 24 nt, Artificial Sequence
  Synthetic
uuaagaguguagagucauauaagc

SEQ ID NO: 537235 - RNA, 18 nt, Artificial Sequence
  Synthetic
caggcuccagauauaagc

SEQ ID NO: 537236 - RNA, 19 nt, Artificial Sequence
  Synthetic
ccaggcuccagauauaagc

SEQ ID NO: 537237 - RNA, 20 nt, Artificial Sequence
  Synthetic
accaggcuccagauauaagc

SEQ ID NO: 537238 - RNA, 21 nt, Artificial Sequence
  Synthetic
aaccaggcuccagauauaagc

SEQ ID NO: 537239 - RNA, 22 nt, Artificial Sequence
  Synthetic
aaaccaggcuccagauauaagc

SEQ ID NO: 537240 - RNA, 23 nt, Artificial Sequence
  Synthetic
aaaaccaggcuccagauauaagc

SEQ ID NO: 537241 - RNA, 24 nt, Artificial Sequence
  Synthetic
gaaaaccaggcuccagauauaagc

SEQ ID NO: 537242 - RNA, 18 nt, Artificial Sequence
  Synthetic
auugaacaauauauaagc

SEQ ID NO: 537243 - RNA, 19 nt, Artificial Sequence
  Synthetic
uauugaacaauauauaagc

SEQ ID NO: 537244 - RNA, 20 nt, Artificial Sequence
  Synthetic
uuauugaacaauauauaagc

SEQ ID NO: 537245 - RNA, 21 nt, Artificial Sequence
  Synthetic
uuuauugaacaauauauaagc

SEQ ID NO: 537246 - RNA, 22 nt, Artificial Sequence
  Synthetic
uuuuauugaacaauauauaagc

SEQ ID NO: 537247 - RNA, 23 nt, Artificial Sequence
  Synthetic
auuuuauugaacaauauauaagc

SEQ ID NO: 537248 - RNA, 24 nt, Artificial Sequence
  Synthetic
uauuuuauugaacaauauauaagc

SEQ ID NO: 537249 - RNA, 18 nt, Artificial Sequence
  Synthetic
aguuccucauauauaagc

SEQ ID NO: 537250 - RNA, 19 nt, Artificial Sequence
  Synthetic
gaguuccucauauauaagc

SEQ ID NO: 537251 - RNA, 20 nt, Artificial Sequence
  Synthetic
agaguuccucauauauaagc

SEQ ID NO: 537252 - RNA, 21 nt, Artificial Sequence
  Synthetic
uagaguuccucauauauaagc

SEQ ID NO: 537253 - RNA, 22 nt, Artificial Sequence
  Synthetic
uuagaguuccucauauauaagc

SEQ ID NO: 537254 - RNA, 23 nt, Artificial Sequence
  Synthetic
auuagaguuccucauauauaagc

SEQ ID NO: 537255 - RNA, 24 nt, Artificial Sequence
  Synthetic
cauuagaguuccucauauauaagc

SEQ ID NO: 537256 - RNA, 18 nt, Artificial Sequence
  Synthetic
cauuuccuaauuauaagc

SEQ ID NO: 537257 - RNA, 19 nt, Artificial Sequence
  Synthetic
ccauuuccuaauuauaagc

SEQ ID NO: 537258 - RNA, 20 nt, Artificial Sequence
  Synthetic
accauuuccuaauuauaagc

SEQ ID NO: 537259 - RNA, 21 nt, Artificial Sequence
  Synthetic
caccauuuccuaauuauaagc

SEQ ID NO: 537260 - RNA, 22 nt, Artificial Sequence
  Synthetic
ucaccauuuccuaauuauaagc

SEQ ID NO: 537261 - RNA, 23 nt, Artificial Sequence
  Synthetic
gucaccauuuccuaauuauaagc

SEQ ID NO: 537262 - RNA, 24 nt, Artificial Sequence
  Synthetic
ggucaccauuuccuaauuauaagc

SEQ ID NO: 537263 - RNA, 18 nt, Artificial Sequence
  Synthetic
uucaauauauuuauaagc

SEQ ID NO: 537264 - RNA, 19 nt, Artificial Sequence
  Synthetic
auucaauauauuuauaagc

SEQ ID NO: 537265 - RNA, 20 nt, Artificial Sequence
  Synthetic
uauucaauauauuuauaagc

SEQ ID NO: 537266 - RNA, 21 nt, Artificial Sequence
  Synthetic
cuauucaauauauuuauaagc

SEQ ID NO: 537267 - RNA, 22 nt, Artificial Sequence
  Synthetic
ucuauucaauauauuuauaagc

SEQ ID NO: 537268 - RNA, 23 nt, Artificial Sequence
  Synthetic
aucuauucaauauauuuauaagc

SEQ ID NO: 537269 - RNA, 24 nt, Artificial Sequence
  Synthetic
caucuauucaauauauuuauaagc

SEQ ID NO: 537270 - RNA, 18 nt, Artificial Sequence
  Synthetic
uauacuuuuuuccuaagc

SEQ ID NO: 537271 - RNA, 19 nt, Artificial Sequence
  Synthetic
auauacuuuuuuccuaagc

SEQ ID NO: 537272 - RNA, 20 nt, Artificial Sequence
  Synthetic
uauauacuuuuuuccuaagc

SEQ ID NO: 537273 - RNA, 21 nt, Artificial Sequence
  Synthetic
auauauacuuuuuuccuaagc

SEQ ID NO: 537274 - RNA, 22 nt, Artificial Sequence
  Synthetic
aauauauacuuuuuuccuaagc

SEQ ID NO: 537275 - RNA, 23 nt, Artificial Sequence
  Synthetic
gaauauauacuuuuuuccuaagc

SEQ ID NO: 537276 - RNA, 24 nt, Artificial Sequence
  Synthetic
agaauauauacuuuuuuccuaagc

SEQ ID NO: 537277 - RNA, 18 nt, Artificial Sequence
  Synthetic
guguuuugaaaucuaagc

SEQ ID NO: 537278 - RNA, 19 nt, Artificial Sequence
  Synthetic
aguguuuugaaaucuaagc

SEQ ID NO: 537279 - RNA, 20 nt, Artificial Sequence
  Synthetic
uaguguuuugaaaucuaagc

SEQ ID NO: 537280 - RNA, 21 nt, Artificial Sequence
  Synthetic
auaguguuuugaaaucuaagc

SEQ ID NO: 537281 - RNA, 22 nt, Artificial Sequence
  Synthetic
gauaguguuuugaaaucuaagc

SEQ ID NO: 537282 - RNA, 23 nt, Artificial Sequence
  Synthetic
agauaguguuuugaaaucuaagc

SEQ ID NO: 537283 - RNA, 24 nt, Artificial Sequence
  Synthetic
gagauaguguuuugaaaucuaagc

SEQ ID NO: 537284 - RNA, 18 nt, Artificial Sequence
  Synthetic
ucagaauuugcucuaagc

SEQ ID NO: 537285 - RNA, 19 nt, Artificial Sequence
  Synthetic
cucagaauuugcucuaagc

SEQ ID NO: 537286 - RNA, 20 nt, Artificial Sequence
  Synthetic
ucucagaauuugcucuaagc

SEQ ID NO: 537287 - RNA, 21 nt, Artificial Sequence
  Synthetic
gucucagaauuugcucuaagc

SEQ ID NO: 537288 - RNA, 22 nt, Artificial Sequence
  Synthetic
cgucucagaauuugcucuaagc

SEQ ID NO: 537289 - RNA, 23 nt, Artificial Sequence
  Synthetic
acgucucagaauuugcucuaagc

SEQ ID NO: 537290 - RNA, 24 nt, Artificial Sequence
  Synthetic
cacgucucagaauuugcucuaagc

SEQ ID NO: 537291 - RNA, 18 nt, Artificial Sequence
  Synthetic
uuugaacucgagguaagc

SEQ ID NO: 537292 - RNA, 19 nt, Artificial Sequence
  Synthetic
cuuugaacucgagguaagc

SEQ ID NO: 537293 - RNA, 20 nt, Artificial Sequence
  Synthetic
acuuugaacucgagguaagc

SEQ ID NO: 537294 - RNA, 21 nt, Artificial Sequence
  Synthetic
aacuuugaacucgagguaagc

SEQ ID NO: 537295 - RNA, 22 nt, Artificial Sequence
  Synthetic
gaacuuugaacucgagguaagc

SEQ ID NO: 537296 - RNA, 23 nt, Artificial Sequence
  Synthetic
ugaacuuugaacucgagguaagc

SEQ ID NO: 537297 - RNA, 24 nt, Artificial Sequence
  Synthetic
cugaacuuugaacucgagguaagc

SEQ ID NO: 537298 - RNA, 18 nt, Artificial Sequence
  Synthetic
ggagcagcaccgguaagc

SEQ ID NO: 537299 - RNA, 19 nt, Artificial Sequence
  Synthetic
aggagcagcaccgguaagc

SEQ ID NO: 537300 - RNA, 20 nt, Artificial Sequence
  Synthetic
aaggagcagcaccgguaagc

SEQ ID NO: 537301 - RNA, 21 nt, Artificial Sequence
  Synthetic
gaaggagcagcaccgguaagc

SEQ ID NO: 537302 - RNA, 22 nt, Artificial Sequence
  Synthetic
ugaaggagcagcaccgguaagc

SEQ ID NO: 537303 - RNA, 23 nt, Artificial Sequence
  Synthetic
gugaaggagcagcaccgguaagc

SEQ ID NO: 537304 - RNA, 24 nt, Artificial Sequence
  Synthetic
ggugaaggagcagcaccgguaagc

SEQ ID NO: 537305 - RNA, 18 nt, Artificial Sequence
  Synthetic
ucagaaaagaauguaagc

SEQ ID NO: 537306 - RNA, 19 nt, Artificial Sequence
  Synthetic
uucagaaaagaauguaagc

SEQ ID NO: 537307 - RNA, 20 nt, Artificial Sequence
  Synthetic
uuucagaaaagaauguaagc

SEQ ID NO: 537308 - RNA, 21 nt, Artificial Sequence
  Synthetic
uuuucagaaaagaauguaagc

SEQ ID NO: 537309 - RNA, 22 nt, Artificial Sequence
  Synthetic
uuuuucagaaaagaauguaagc

SEQ ID NO: 537310 - RNA, 23 nt, Artificial Sequence
  Synthetic
auuuuucagaaaagaauguaagc

SEQ ID NO: 537311 - RNA, 24 nt, Artificial Sequence
  Synthetic
cauuuuucagaaaagaauguaagc

SEQ ID NO: 537312 - RNA, 18 nt, Artificial Sequence
  Synthetic
acaguguugcauguaagc

SEQ ID NO: 537313 - RNA, 19 nt, Artificial Sequence
  Synthetic
aacaguguugcauguaagc

SEQ ID NO: 537314 - RNA, 20 nt, Artificial Sequence
  Synthetic
caacaguguugcauguaagc

SEQ ID NO: 537315 - RNA, 21 nt, Artificial Sequence
  Synthetic
ccaacaguguugcauguaagc

SEQ ID NO: 537316 - RNA, 22 nt, Artificial Sequence
  Synthetic
uccaacaguguugcauguaagc

SEQ ID NO: 537317 - RNA, 23 nt, Artificial Sequence
  Synthetic
cuccaacaguguugcauguaagc

SEQ ID NO: 537318 - RNA, 24 nt, Artificial Sequence
  Synthetic
ucuccaacaguguugcauguaagc

SEQ ID NO: 537319 - RNA, 18 nt, Artificial Sequence
  Synthetic
agauguagggaauuaagc

SEQ ID NO: 537320 - RNA, 19 nt, Artificial Sequence
  Synthetic
aagauguagggaauuaagc

SEQ ID NO: 537321 - RNA, 20 nt, Artificial Sequence
  Synthetic
aaagauguagggaauuaagc

SEQ ID NO: 537322 - RNA, 21 nt, Artificial Sequence
  Synthetic
gaaagauguagggaauuaagc

SEQ ID NO: 537323 - RNA, 22 nt, Artificial Sequence
  Synthetic
ugaaagauguagggaauuaagc

SEQ ID NO: 537324 - RNA, 23 nt, Artificial Sequence
  Synthetic
augaaagauguagggaauuaagc

SEQ ID NO: 537325 - RNA, 24 nt, Artificial Sequence
  Synthetic
uaugaaagauguagggaauuaagc

SEQ ID NO: 537326 - RNA, 18 nt, Artificial Sequence
  Synthetic
cuacuuuaucccuuaagc

SEQ ID NO: 537327 - RNA, 19 nt, Artificial Sequence
  Synthetic
ucuacuuuaucccuuaagc

SEQ ID NO: 537328 - RNA, 20 nt, Artificial Sequence
  Synthetic
aucuacuuuaucccuuaagc

SEQ ID NO: 537329 - RNA, 21 nt, Artificial Sequence
  Synthetic
caucuacuuuaucccuuaagc

SEQ ID NO: 537330 - RNA, 22 nt, Artificial Sequence
  Synthetic
ccaucuacuuuaucccuuaagc

SEQ ID NO: 537331 - RNA, 23 nt, Artificial Sequence
  Synthetic
gccaucuacuuuaucccuuaagc

SEQ ID NO: 537332 - RNA, 24 nt, Artificial Sequence
  Synthetic
ugccaucuacuuuaucccuuaagc

SEQ ID NO: 537333 - RNA, 18 nt, Artificial Sequence
  Synthetic
auaaaucucagcuuaagc

SEQ ID NO: 537334 - RNA, 19 nt, Artificial Sequence
  Synthetic
gauaaaucucagcuuaagc

SEQ ID NO: 537335 - RNA, 20 nt, Artificial Sequence
  Synthetic
ugauaaaucucagcuuaagc

SEQ ID NO: 537336 - RNA, 21 nt, Artificial Sequence
  Synthetic
gugauaaaucucagcuuaagc

SEQ ID NO: 537337 - RNA, 22 nt, Artificial Sequence
  Synthetic
ugugauaaaucucagcuuaagc

SEQ ID NO: 537338 - RNA, 23 nt, Artificial Sequence
  Synthetic
gugugauaaaucucagcuuaagc

SEQ ID NO: 537339 - RNA, 24 nt, Artificial Sequence
  Synthetic
agugugauaaaucucagcuuaagc

SEQ ID NO: 537340 - RNA, 18 nt, Artificial Sequence
  Synthetic
ccagaugugguguuaagc

SEQ ID NO: 537341 - RNA, 19 nt, Artificial Sequence
  Synthetic
uccagaugugguguuaagc

SEQ ID NO: 537342 - RNA, 20 nt, Artificial Sequence
  Synthetic
guccagaugugguguuaagc

SEQ ID NO: 537343 - RNA, 21 nt, Artificial Sequence
  Synthetic
gguccagaugugguguuaagc

SEQ ID NO: 537344 - RNA, 22 nt, Artificial Sequence
  Synthetic
ugguccagaugugguguuaagc

SEQ ID NO: 537345 - RNA, 23 nt, Artificial Sequence
  Synthetic
gugguccagaugugguguuaagc

SEQ ID NO: 537346 - RNA, 24 nt, Artificial Sequence
  Synthetic
agugguccagaugugguguuaagc

SEQ ID NO: 537347 - RNA, 18 nt, Artificial Sequence
  Synthetic
augagugggucuuuaagc

SEQ ID NO: 537348 - RNA, 19 nt, Artificial Sequence
  Synthetic
caugagugggucuuuaagc

SEQ ID NO: 537349 - RNA, 20 nt, Artificial Sequence
  Synthetic
acaugagugggucuuuaagc

SEQ ID NO: 537350 - RNA, 21 nt, Artificial Sequence
  Synthetic
aacaugagugggucuuuaagc

SEQ ID NO: 537351 - RNA, 22 nt, Artificial Sequence
  Synthetic
aaacaugagugggucuuuaagc

SEQ ID NO: 537352 - RNA, 23 nt, Artificial Sequence
  Synthetic
caaacaugagugggucuuuaagc

SEQ ID NO: 537353 - RNA, 24 nt, Artificial Sequence
  Synthetic
acaaacaugagugggucuuuaagc

SEQ ID NO: 537354 - RNA, 18 nt, Artificial Sequence
  Synthetic
caggugaguauuuuaagc

SEQ ID NO: 537355 - RNA, 19 nt, Artificial Sequence
  Synthetic
ucaggugaguauuuuaagc

SEQ ID NO: 537356 - RNA, 20 nt, Artificial Sequence
  Synthetic
cucaggugaguauuuuaagc

SEQ ID NO: 537357 - RNA, 21 nt, Artificial Sequence
  Synthetic
gcucaggugaguauuuuaagc

SEQ ID NO: 537358 - RNA, 22 nt, Artificial Sequence
  Synthetic
agcucaggugaguauuuuaagc

SEQ ID NO: 537359 - RNA, 23 nt, Artificial Sequence
  Synthetic
gagcucaggugaguauuuuaagc

SEQ ID NO: 537360 - RNA, 24 nt, Artificial Sequence
  Synthetic
ugagcucaggugaguauuuuaagc

SEQ ID NO: 537361 - RNA, 18 nt, Artificial Sequence
  Synthetic
aauuaacaacaaaacagc

SEQ ID NO: 537362 - RNA, 19 nt, Artificial Sequence
  Synthetic
uaauuaacaacaaaacagc

SEQ ID NO: 537363 - RNA, 20 nt, Artificial Sequence
  Synthetic
uuaauuaacaacaaaacagc

SEQ ID NO: 537364 - RNA, 21 nt, Artificial Sequence
  Synthetic
guuaauuaacaacaaaacagc

SEQ ID NO: 537365 - RNA, 22 nt, Artificial Sequence
  Synthetic
aguuaauuaacaacaaaacagc

SEQ ID NO: 537366 - RNA, 23 nt, Artificial Sequence
  Synthetic
uaguuaauuaacaacaaaacagc

SEQ ID NO: 537367 - RNA, 24 nt, Artificial Sequence
  Synthetic
cuaguuaauuaacaacaaaacagc

SEQ ID NO: 537368 - RNA, 18 nt, Artificial Sequence
  Synthetic
ggcuggcauccaaacagc

SEQ ID NO: 537369 - RNA, 19 nt, Artificial Sequence
  Synthetic
uggcuggcauccaaacagc

SEQ ID NO: 537370 - RNA, 20 nt, Artificial Sequence
  Synthetic
auggcuggcauccaaacagc

SEQ ID NO: 537371 - RNA, 21 nt, Artificial Sequence
  Synthetic
uauggcuggcauccaaacagc

SEQ ID NO: 537372 - RNA, 22 nt, Artificial Sequence
  Synthetic
guauggcuggcauccaaacagc

SEQ ID NO: 537373 - RNA, 23 nt, Artificial Sequence
  Synthetic
aguauggcuggcauccaaacagc

SEQ ID NO: 537374 - RNA, 24 nt, Artificial Sequence
  Synthetic
caguauggcuggcauccaaacagc

SEQ ID NO: 537375 - RNA, 18 nt, Artificial Sequence
  Synthetic
uuagaaaggagaaacagc

SEQ ID NO: 537376 - RNA, 19 nt, Artificial Sequence
  Synthetic
guuagaaaggagaaacagc

SEQ ID NO: 537377 - RNA, 20 nt, Artificial Sequence
  Synthetic
gguuagaaaggagaaacagc

SEQ ID NO: 537378 - RNA, 21 nt, Artificial Sequence
  Synthetic
ugguuagaaaggagaaacagc

SEQ ID NO: 537379 - RNA, 22 nt, Artificial Sequence
  Synthetic
gugguuagaaaggagaaacagc

SEQ ID NO: 537380 - RNA, 23 nt, Artificial Sequence
  Synthetic
agugguuagaaaggagaaacagc

SEQ ID NO: 537381 - RNA, 24 nt, Artificial Sequence
  Synthetic
aagugguuagaaaggagaaacagc

SEQ ID NO: 537382 - RNA, 18 nt, Artificial Sequence
  Synthetic
accuagugaggaaacagc

SEQ ID NO: 537383 - RNA, 19 nt, Artificial Sequence
  Synthetic
gaccuagugaggaaacagc

SEQ ID NO: 537384 - RNA, 20 nt, Artificial Sequence
  Synthetic
agaccuagugaggaaacagc

SEQ ID NO: 537385 - RNA, 21 nt, Artificial Sequence
  Synthetic
aagaccuagugaggaaacagc

SEQ ID NO: 537386 - RNA, 22 nt, Artificial Sequence
  Synthetic
gaagaccuagugaggaaacagc

SEQ ID NO: 537387 - RNA, 23 nt, Artificial Sequence
  Synthetic
ggaagaccuagugaggaaacagc

SEQ ID NO: 537388 - RNA, 24 nt, Artificial Sequence
  Synthetic
gggaagaccuagugaggaaacagc

SEQ ID NO: 537389 - RNA, 18 nt, Artificial Sequence
  Synthetic
acaaguaaccuaaacagc

SEQ ID NO: 537390 - RNA, 19 nt, Artificial Sequence
  Synthetic
uacaaguaaccuaaacagc

SEQ ID NO: 537391 - RNA, 20 nt, Artificial Sequence
  Synthetic
guacaaguaaccuaaacagc

SEQ ID NO: 537392 - RNA, 21 nt, Artificial Sequence
  Synthetic
gguacaaguaaccuaaacagc

SEQ ID NO: 537393 - RNA, 22 nt, Artificial Sequence
  Synthetic
agguacaaguaaccuaaacagc

SEQ ID NO: 537394 - RNA, 23 nt, Artificial Sequence
  Synthetic
aagguacaaguaaccuaaacagc

SEQ ID NO: 537395 - RNA, 24 nt, Artificial Sequence
  Synthetic
caagguacaaguaaccuaaacagc

SEQ ID NO: 537396 - RNA, 18 nt, Artificial Sequence
  Synthetic
cacuaucacgacaacagc

SEQ ID NO: 537397 - RNA, 19 nt, Artificial Sequence
  Synthetic
ucacuaucacgacaacagc

SEQ ID NO: 537398 - RNA, 20 nt, Artificial Sequence
  Synthetic
uucacuaucacgacaacagc

SEQ ID NO: 537399 - RNA, 21 nt, Artificial Sequence
  Synthetic
auucacuaucacgacaacagc

SEQ ID NO: 537400 - RNA, 22 nt, Artificial Sequence
  Synthetic
cauucacuaucacgacaacagc

SEQ ID NO: 537401 - RNA, 23 nt, Artificial Sequence
  Synthetic
ucauucacuaucacgacaacagc

SEQ ID NO: 537402 - RNA, 24 nt, Artificial Sequence
  Synthetic
cucauucacuaucacgacaacagc

SEQ ID NO: 537403 - RNA, 18 nt, Artificial Sequence
  Synthetic
acccucugaagcaacagc

SEQ ID NO: 537404 - RNA, 19 nt, Artificial Sequence
  Synthetic
cacccucugaagcaacagc

SEQ ID NO: 537405 - RNA, 20 nt, Artificial Sequence
  Synthetic
gcacccucugaagcaacagc

SEQ ID NO: 537406 - RNA, 21 nt, Artificial Sequence
  Synthetic
ugcacccucugaagcaacagc

SEQ ID NO: 537407 - RNA, 22 nt, Artificial Sequence
  Synthetic
cugcacccucugaagcaacagc

SEQ ID NO: 537408 - RNA, 23 nt, Artificial Sequence
  Synthetic
ccugcacccucugaagcaacagc

SEQ ID NO: 537409 - RNA, 24 nt, Artificial Sequence
  Synthetic
gccugcacccucugaagcaacagc

SEQ ID NO: 537410 - RNA, 18 nt, Artificial Sequence
  Synthetic
ccggaguucaagaacagc

SEQ ID NO: 537411 - RNA, 19 nt, Artificial Sequence
  Synthetic
cccggaguucaagaacagc

SEQ ID NO: 537412 - RNA, 20 nt, Artificial Sequence
  Synthetic
ccccggaguucaagaacagc

SEQ ID NO: 537413 - RNA, 21 nt, Artificial Sequence
  Synthetic
gccccggaguucaagaacagc

SEQ ID NO: 537414 - RNA, 22 nt, Artificial Sequence
  Synthetic
agccccggaguucaagaacagc

SEQ ID NO: 537415 - RNA, 23 nt, Artificial Sequence
  Synthetic
gagccccggaguucaagaacagc

SEQ ID NO: 537416 - RNA, 24 nt, Artificial Sequence
  Synthetic
ugagccccggaguucaagaacagc

SEQ ID NO: 537417 - RNA, 18 nt, Artificial Sequence
  Synthetic
cacuaucaggagaacagc

SEQ ID NO: 537418 - RNA, 19 nt, Artificial Sequence
  Synthetic
ucacuaucaggagaacagc

SEQ ID NO: 537419 - RNA, 20 nt, Artificial Sequence
  Synthetic
cucacuaucaggagaacagc

SEQ ID NO: 537420 - RNA, 21 nt, Artificial Sequence
  Synthetic
acucacuaucaggagaacagc

SEQ ID NO: 537421 - RNA, 22 nt, Artificial Sequence
  Synthetic
cacucacuaucaggagaacagc

SEQ ID NO: 537422 - RNA, 23 nt, Artificial Sequence
  Synthetic
ucacucacuaucaggagaacagc

SEQ ID NO: 537423 - RNA, 24 nt, Artificial Sequence
  Synthetic
cucacucacuaucaggagaacagc

SEQ ID NO: 537424 - RNA, 20 nt, Artificial Sequence
  Synthetic
uucacuaucaggagaacagc

SEQ ID NO: 537425 - RNA, 21 nt, Artificial Sequence
  Synthetic
auucacuaucaggagaacagc

SEQ ID NO: 537426 - RNA, 22 nt, Artificial Sequence
  Synthetic
gauucacuaucaggagaacagc

SEQ ID NO: 537427 - RNA, 23 nt, Artificial Sequence
  Synthetic
ugauucacuaucaggagaacagc

SEQ ID NO: 537428 - RNA, 24 nt, Artificial Sequence
  Synthetic
augauucacuaucaggagaacagc

SEQ ID NO: 537429 - RNA, 18 nt, Artificial Sequence
  Synthetic
guggagagugagaacagc

SEQ ID NO: 537430 - RNA, 19 nt, Artificial Sequence
  Synthetic
aguggagagugagaacagc

SEQ ID NO: 537431 - RNA, 20 nt, Artificial Sequence
  Synthetic
aaguggagagugagaacagc

SEQ ID NO: 537432 - RNA, 21 nt, Artificial Sequence
  Synthetic
gaaguggagagugagaacagc

SEQ ID NO: 537433 - RNA, 22 nt, Artificial Sequence
  Synthetic
ggaaguggagagugagaacagc

SEQ ID NO: 537434 - RNA, 23 nt, Artificial Sequence
  Synthetic
aggaaguggagagugagaacagc

SEQ ID NO: 537435 - RNA, 24 nt, Artificial Sequence
  Synthetic
aaggaaguggagagugagaacagc

SEQ ID NO: 537436 - RNA, 18 nt, Artificial Sequence
  Synthetic
ggcaggaaaaauaacagc

SEQ ID NO: 537437 - RNA, 19 nt, Artificial Sequence
  Synthetic
gggcaggaaaaauaacagc

SEQ ID NO: 537438 - RNA, 20 nt, Artificial Sequence
  Synthetic
ggggcaggaaaaauaacagc

SEQ ID NO: 537439 - RNA, 21 nt, Artificial Sequence
  Synthetic
gggggcaggaaaaauaacagc

SEQ ID NO: 537440 - RNA, 22 nt, Artificial Sequence
  Synthetic
agggggcaggaaaaauaacagc

SEQ ID NO: 537441 - RNA, 23 nt, Artificial Sequence
  Synthetic
uagggggcaggaaaaauaacagc

SEQ ID NO: 537442 - RNA, 24 nt, Artificial Sequence
  Synthetic
uuagggggcaggaaaaauaacagc

SEQ ID NO: 537443 - RNA, 18 nt, Artificial Sequence
  Synthetic
ccucaauacaauaacagc

SEQ ID NO: 537444 - RNA, 19 nt, Artificial Sequence
  Synthetic
accucaauacaauaacagc

SEQ ID NO: 537445 - RNA, 20 nt, Artificial Sequence
  Synthetic
gaccucaauacaauaacagc

SEQ ID NO: 537446 - RNA, 21 nt, Artificial Sequence
  Synthetic
agaccucaauacaauaacagc

SEQ ID NO: 537447 - RNA, 22 nt, Artificial Sequence
  Synthetic
aagaccucaauacaauaacagc

SEQ ID NO: 537448 - RNA, 23 nt, Artificial Sequence
  Synthetic
aaagaccucaauacaauaacagc

SEQ ID NO: 537449 - RNA, 24 nt, Artificial Sequence
  Synthetic
gaaagaccucaauacaauaacagc

SEQ ID NO: 537450 - RNA, 18 nt, Artificial Sequence
  Synthetic
cagcagagagaacacagc

SEQ ID NO: 537451 - RNA, 19 nt, Artificial Sequence
  Synthetic
ccagcagagagaacacagc

SEQ ID NO: 537452 - RNA, 20 nt, Artificial Sequence
  Synthetic
uccagcagagagaacacagc

SEQ ID NO: 537453 - RNA, 21 nt, Artificial Sequence
  Synthetic
auccagcagagagaacacagc

SEQ ID NO: 537454 - RNA, 22 nt, Artificial Sequence
  Synthetic
uauccagcagagagaacacagc

SEQ ID NO: 537455 - RNA, 23 nt, Artificial Sequence
  Synthetic
uuauccagcagagagaacacagc

SEQ ID NO: 537456 - RNA, 24 nt, Artificial Sequence
  Synthetic
cuuauccagcagagagaacacagc

SEQ ID NO: 537457 - RNA, 18 nt, Artificial Sequence
  Synthetic
uacucaaggucacacagc

SEQ ID NO: 537458 - RNA, 19 nt, Artificial Sequence
  Synthetic
uuacucaaggucacacagc

SEQ ID NO: 537459 - RNA, 20 nt, Artificial Sequence
  Synthetic
cuuacucaaggucacacagc

SEQ ID NO: 537460 - RNA, 21 nt, Artificial Sequence
  Synthetic
acuuacucaaggucacacagc

SEQ ID NO: 537461 - RNA, 22 nt, Artificial Sequence
  Synthetic
aacuuacucaaggucacacagc

SEQ ID NO: 537462 - RNA, 23 nt, Artificial Sequence
  Synthetic
uaacuuacucaaggucacacagc

SEQ ID NO: 537463 - RNA, 24 nt, Artificial Sequence
  Synthetic
auaacuuacucaaggucacacagc

SEQ ID NO: 537464 - RNA, 18 nt, Artificial Sequence
  Synthetic
agucacaggugacacagc

SEQ ID NO: 537465 - RNA, 19 nt, Artificial Sequence
  Synthetic
gagucacaggugacacagc

SEQ ID NO: 537466 - RNA, 20 nt, Artificial Sequence
  Synthetic
ggagucacaggugacacagc

SEQ ID NO: 537467 - RNA, 21 nt, Artificial Sequence
  Synthetic
uggagucacaggugacacagc

SEQ ID NO: 537468 - RNA, 22 nt, Artificial Sequence
  Synthetic
uuggagucacaggugacacagc

SEQ ID NO: 537469 - RNA, 23 nt, Artificial Sequence
  Synthetic
guuggagucacaggugacacagc

SEQ ID NO: 537470 - RNA, 24 nt, Artificial Sequence
  Synthetic
aguuggagucacaggugacacagc

SEQ ID NO: 537471 - RNA, 18 nt, Artificial Sequence
  Synthetic
uauuugaaaauacacagc

SEQ ID NO: 537472 - RNA, 19 nt, Artificial Sequence
  Synthetic
cuauuugaaaauacacagc

SEQ ID NO: 537473 - RNA, 20 nt, Artificial Sequence
  Synthetic
ccuauuugaaaauacacagc

SEQ ID NO: 537474 - RNA, 21 nt, Artificial Sequence
  Synthetic
gccuauuugaaaauacacagc

SEQ ID NO: 537475 - RNA, 22 nt, Artificial Sequence
  Synthetic
agccuauuugaaaauacacagc

SEQ ID NO: 537476 - RNA, 23 nt, Artificial Sequence
  Synthetic
cagccuauuugaaaauacacagc

SEQ ID NO: 537477 - RNA, 24 nt, Artificial Sequence
  Synthetic
acagccuauuugaaaauacacagc

SEQ ID NO: 537478 - RNA, 18 nt, Artificial Sequence
  Synthetic
ugaaaaaaaagccacagc

SEQ ID NO: 537479 - RNA, 19 nt, Artificial Sequence
  Synthetic
uugaaaaaaaagccacagc

SEQ ID NO: 537480 - RNA, 20 nt, Artificial Sequence
  Synthetic
guugaaaaaaaagccacagc

SEQ ID NO: 537481 - RNA, 21 nt, Artificial Sequence
  Synthetic
aguugaaaaaaaagccacagc

SEQ ID NO: 537482 - RNA, 22 nt, Artificial Sequence
  Synthetic
caguugaaaaaaaagccacagc

SEQ ID NO: 537483 - RNA, 23 nt, Artificial Sequence
  Synthetic
acaguugaaaaaaaagccacagc

SEQ ID NO: 537484 - RNA, 24 nt, Artificial Sequence
  Synthetic
gacaguugaaaaaaaagccacagc

SEQ ID NO: 537485 - RNA, 18 nt, Artificial Sequence
  Synthetic
uugcuuuucauccacagc

SEQ ID NO: 537486 - RNA, 19 nt, Artificial Sequence
  Synthetic
cuugcuuuucauccacagc

SEQ ID NO: 537487 - RNA, 20 nt, Artificial Sequence
  Synthetic
gcuugcuuuucauccacagc

SEQ ID NO: 537488 - RNA, 21 nt, Artificial Sequence
  Synthetic
ugcuugcuuuucauccacagc

SEQ ID NO: 537489 - RNA, 22 nt, Artificial Sequence
  Synthetic
augcuugcuuuucauccacagc

SEQ ID NO: 537490 - RNA, 23 nt, Artificial Sequence
  Synthetic
gaugcuugcuuuucauccacagc

SEQ ID NO: 537491 - RNA, 24 nt, Artificial Sequence
  Synthetic
ugaugcuugcuuuucauccacagc

SEQ ID NO: 537492 - RNA, 18 nt, Artificial Sequence
  Synthetic
aaauuaacauuccacagc

SEQ ID NO: 537493 - RNA, 19 nt, Artificial Sequence
  Synthetic
uaaauuaacauuccacagc

SEQ ID NO: 537494 - RNA, 20 nt, Artificial Sequence
  Synthetic
auaaauuaacauuccacagc

SEQ ID NO: 537495 - RNA, 21 nt, Artificial Sequence
  Synthetic
uauaaauuaacauuccacagc

SEQ ID NO: 537496 - RNA, 22 nt, Artificial Sequence
  Synthetic
guauaaauuaacauuccacagc

SEQ ID NO: 537497 - RNA, 23 nt, Artificial Sequence
  Synthetic
uguauaaauuaacauuccacagc

SEQ ID NO: 537498 - RNA, 24 nt, Artificial Sequence
  Synthetic
auguauaaauuaacauuccacagc

SEQ ID NO: 537499 - RNA, 18 nt, Artificial Sequence
  Synthetic
ugggaguaaaagcacagc

SEQ ID NO: 537500 - RNA, 19 nt, Artificial Sequence
  Synthetic
uugggaguaaaagcacagc

SEQ ID NO: 537501 - RNA, 20 nt, Artificial Sequence
  Synthetic
guugggaguaaaagcacagc

SEQ ID NO: 537502 - RNA, 21 nt, Artificial Sequence
  Synthetic
uguugggaguaaaagcacagc

SEQ ID NO: 537503 - RNA, 22 nt, Artificial Sequence
  Synthetic
uuguugggaguaaaagcacagc

SEQ ID NO: 537504 - RNA, 23 nt, Artificial Sequence
  Synthetic
guuguugggaguaaaagcacagc

SEQ ID NO: 537505 - RNA, 24 nt, Artificial Sequence
  Synthetic
aguuguugggaguaaaagcacagc

SEQ ID NO: 537506 - RNA, 18 nt, Artificial Sequence
  Synthetic
caucuucucaggcacagc

SEQ ID NO: 537507 - RNA, 19 nt, Artificial Sequence
  Synthetic
acaucuucucaggcacagc

SEQ ID NO: 537508 - RNA, 20 nt, Artificial Sequence
  Synthetic
cacaucuucucaggcacagc

SEQ ID NO: 537509 - RNA, 21 nt, Artificial Sequence
  Synthetic
acacaucuucucaggcacagc

SEQ ID NO: 537510 - RNA, 22 nt, Artificial Sequence
  Synthetic
cacacaucuucucaggcacagc

SEQ ID NO: 537511 - RNA, 23 nt, Artificial Sequence
  Synthetic
ccacacaucuucucaggcacagc

SEQ ID NO: 537512 - RNA, 24 nt, Artificial Sequence
  Synthetic
gccacacaucuucucaggcacagc

SEQ ID NO: 537513 - RNA, 18 nt, Artificial Sequence
  Synthetic
cuaacauuagcagacagc

SEQ ID NO: 537514 - RNA, 19 nt, Artificial Sequence
  Synthetic
acuaacauuagcagacagc

SEQ ID NO: 537515 - RNA, 20 nt, Artificial Sequence
  Synthetic
gacuaacauuagcagacagc

SEQ ID NO: 537516 - RNA, 21 nt, Artificial Sequence
  Synthetic
ggacuaacauuagcagacagc

SEQ ID NO: 537517 - RNA, 22 nt, Artificial Sequence
  Synthetic
aggacuaacauuagcagacagc

SEQ ID NO: 537518 - RNA, 23 nt, Artificial Sequence
  Synthetic
aaggacuaacauuagcagacagc

SEQ ID NO: 537519 - RNA, 24 nt, Artificial Sequence
  Synthetic
gaaggacuaacauuagcagacagc

SEQ ID NO: 537520 - RNA, 18 nt, Artificial Sequence
  Synthetic
gaaccuaccagagacagc

SEQ ID NO: 537521 - RNA, 19 nt, Artificial Sequence
  Synthetic
ugaaccuaccagagacagc

SEQ ID NO: 537522 - RNA, 20 nt, Artificial Sequence
  Synthetic
cugaaccuaccagagacagc

SEQ ID NO: 537523 - RNA, 21 nt, Artificial Sequence
  Synthetic
gcugaaccuaccagagacagc

SEQ ID NO: 537524 - RNA, 22 nt, Artificial Sequence
  Synthetic
ggcugaaccuaccagagacagc

SEQ ID NO: 537525 - RNA, 23 nt, Artificial Sequence
  Synthetic
aggcugaaccuaccagagacagc

SEQ ID NO: 537526 - RNA, 24 nt, Artificial Sequence
  Synthetic
gaggcugaaccuaccagagacagc

SEQ ID NO: 537527 - RNA, 18 nt, Artificial Sequence
  Synthetic
agcaaacaacgagacagc

SEQ ID NO: 537528 - RNA, 19 nt, Artificial Sequence
  Synthetic
aagcaaacaacgagacagc

SEQ ID NO: 537529 - RNA, 20 nt, Artificial Sequence
  Synthetic
aaagcaaacaacgagacagc

SEQ ID NO: 537530 - RNA, 21 nt, Artificial Sequence
  Synthetic
caaagcaaacaacgagacagc

SEQ ID NO: 537531 - RNA, 22 nt, Artificial Sequence
  Synthetic
ucaaagcaaacaacgagacagc

SEQ ID NO: 537532 - RNA, 23 nt, Artificial Sequence
  Synthetic
uucaaagcaaacaacgagacagc

SEQ ID NO: 537533 - RNA, 24 nt, Artificial Sequence
  Synthetic
uuucaaagcaaacaacgagacagc

SEQ ID NO: 537534 - RNA, 18 nt, Artificial Sequence
  Synthetic
guccaccaaauagacagc

SEQ ID NO: 537535 - RNA, 19 nt, Artificial Sequence
  Synthetic
gguccaccaaauagacagc

SEQ ID NO: 537536 - RNA, 20 nt, Artificial Sequence
  Synthetic
ugguccaccaaauagacagc

SEQ ID NO: 537537 - RNA, 21 nt, Artificial Sequence
  Synthetic
cugguccaccaaauagacagc

SEQ ID NO: 537538 - RNA, 22 nt, Artificial Sequence
  Synthetic
gcugguccaccaaauagacagc

SEQ ID NO: 537539 - RNA, 23 nt, Artificial Sequence
  Synthetic
ggcugguccaccaaauagacagc

SEQ ID NO: 537540 - RNA, 24 nt, Artificial Sequence
  Synthetic
uggcugguccaccaaauagacagc

SEQ ID NO: 537541 - RNA, 18 nt, Artificial Sequence
  Synthetic
gagguccuacaggacagc

SEQ ID NO: 537542 - RNA, 19 nt, Artificial Sequence
  Synthetic
ggagguccuacaggacagc

SEQ ID NO: 537543 - RNA, 20 nt, Artificial Sequence
  Synthetic
uggagguccuacaggacagc

SEQ ID NO: 537544 - RNA, 21 nt, Artificial Sequence
  Synthetic
uuggagguccuacaggacagc

SEQ ID NO: 537545 - RNA, 22 nt, Artificial Sequence
  Synthetic
cuuggagguccuacaggacagc

SEQ ID NO: 537546 - RNA, 23 nt, Artificial Sequence
  Synthetic
ccuuggagguccuacaggacagc

SEQ ID NO: 537547 - RNA, 24 nt, Artificial Sequence
  Synthetic
accuuggagguccuacaggacagc

SEQ ID NO: 537548 - RNA, 18 nt, Artificial Sequence
  Synthetic
agcucacucagggacagc

SEQ ID NO: 537549 - RNA, 19 nt, Artificial Sequence
  Synthetic
aagcucacucagggacagc

SEQ ID NO: 537550 - RNA, 20 nt, Artificial Sequence
  Synthetic
gaagcucacucagggacagc

SEQ ID NO: 537551 - RNA, 21 nt, Artificial Sequence
  Synthetic
agaagcucacucagggacagc

SEQ ID NO: 537552 - RNA, 22 nt, Artificial Sequence
  Synthetic
cagaagcucacucagggacagc

SEQ ID NO: 537553 - RNA, 23 nt, Artificial Sequence
  Synthetic
gcagaagcucacucagggacagc

SEQ ID NO: 537554 - RNA, 24 nt, Artificial Sequence
  Synthetic
agcagaagcucacucagggacagc

SEQ ID NO: 537555 - RNA, 18 nt, Artificial Sequence
  Synthetic
gggauaaacugggacagc

SEQ ID NO: 537556 - RNA, 19 nt, Artificial Sequence
  Synthetic
agggauaaacugggacagc

SEQ ID NO: 537557 - RNA, 20 nt, Artificial Sequence
  Synthetic
cagggauaaacugggacagc

SEQ ID NO: 537558 - RNA, 21 nt, Artificial Sequence
  Synthetic
acagggauaaacugggacagc

SEQ ID NO: 537559 - RNA, 22 nt, Artificial Sequence
  Synthetic
aacagggauaaacugggacagc

SEQ ID NO: 537560 - RNA, 23 nt, Artificial Sequence
  Synthetic
uaacagggauaaacugggacagc

SEQ ID NO: 537561 - RNA, 24 nt, Artificial Sequence
  Synthetic
auaacagggauaaacugggacagc

SEQ ID NO: 537562 - RNA, 18 nt, Artificial Sequence
  Synthetic
uauuuauucacugacagc

SEQ ID NO: 537563 - RNA, 19 nt, Artificial Sequence
  Synthetic
cuauuuauucacugacagc

SEQ ID NO: 537564 - RNA, 20 nt, Artificial Sequence
  Synthetic
ucuauuuauucacugacagc

SEQ ID NO: 537565 - RNA, 21 nt, Artificial Sequence
  Synthetic
uucuauuuauucacugacagc

SEQ ID NO: 537566 - RNA, 22 nt, Artificial Sequence
  Synthetic
uuucuauuuauucacugacagc

SEQ ID NO: 537567 - RNA, 23 nt, Artificial Sequence
  Synthetic
uuuucuauuuauucacugacagc

SEQ ID NO: 537568 - RNA, 24 nt, Artificial Sequence
  Synthetic
auuuucuauuuauucacugacagc

SEQ ID NO: 537569 - RNA, 18 nt, Artificial Sequence
  Synthetic
aacauacgaggauacagc

SEQ ID NO: 537570 - RNA, 19 nt, Artificial Sequence
  Synthetic
caacauacgaggauacagc

SEQ ID NO: 537571 - RNA, 20 nt, Artificial Sequence
  Synthetic
ccaacauacgaggauacagc

SEQ ID NO: 537572 - RNA, 21 nt, Artificial Sequence
  Synthetic
cccaacauacgaggauacagc

SEQ ID NO: 537573 - RNA, 22 nt, Artificial Sequence
  Synthetic
ccccaacauacgaggauacagc

SEQ ID NO: 537574 - RNA, 23 nt, Artificial Sequence
  Synthetic
uccccaacauacgaggauacagc

SEQ ID NO: 537575 - RNA, 24 nt, Artificial Sequence
  Synthetic
cuccccaacauacgaggauacagc

SEQ ID NO: 537576 - RNA, 18 nt, Artificial Sequence
  Synthetic
gcaccacugcacuacagc

SEQ ID NO: 537577 - RNA, 19 nt, Artificial Sequence
  Synthetic
cgcaccacugcacuacagc

SEQ ID NO: 537578 - RNA, 20 nt, Artificial Sequence
  Synthetic
ucgcaccacugcacuacagc

SEQ ID NO: 537579 - RNA, 21 nt, Artificial Sequence
  Synthetic
aucgcaccacugcacuacagc

SEQ ID NO: 537580 - RNA, 22 nt, Artificial Sequence
  Synthetic
gaucgcaccacugcacuacagc

SEQ ID NO: 537581 - RNA, 23 nt, Artificial Sequence
  Synthetic
agaucgcaccacugcacuacagc

SEQ ID NO: 537582 - RNA, 24 nt, Artificial Sequence
  Synthetic
aagaucgcaccacugcacuacagc

SEQ ID NO: 537583 - RNA, 18 nt, Artificial Sequence
  Synthetic
ugguugauguccuacagc

SEQ ID NO: 537584 - RNA, 19 nt, Artificial Sequence
  Synthetic
cugguugauguccuacagc

SEQ ID NO: 537585 - RNA, 20 nt, Artificial Sequence
  Synthetic
ucugguugauguccuacagc

SEQ ID NO: 537586 - RNA, 21 nt, Artificial Sequence
  Synthetic
cucugguugauguccuacagc

SEQ ID NO: 537587 - RNA, 22 nt, Artificial Sequence
  Synthetic
acucugguugauguccuacagc

SEQ ID NO: 537588 - RNA, 23 nt, Artificial Sequence
  Synthetic
uacucugguugauguccuacagc

SEQ ID NO: 537589 - RNA, 24 nt, Artificial Sequence
  Synthetic
guacucugguugauguccuacagc

SEQ ID NO: 537590 - RNA, 18 nt, Artificial Sequence
  Synthetic
auagcgucaggcuacagc

SEQ ID NO: 537591 - RNA, 19 nt, Artificial Sequence
  Synthetic
cauagcgucaggcuacagc

SEQ ID NO: 537592 - RNA, 20 nt, Artificial Sequence
  Synthetic
ccauagcgucaggcuacagc

SEQ ID NO: 537593 - RNA, 21 nt, Artificial Sequence
  Synthetic
gccauagcgucaggcuacagc

SEQ ID NO: 537594 - RNA, 22 nt, Artificial Sequence
  Synthetic
agccauagcgucaggcuacagc

SEQ ID NO: 537595 - RNA, 23 nt, Artificial Sequence
  Synthetic
aagccauagcgucaggcuacagc

SEQ ID NO: 537596 - RNA, 24 nt, Artificial Sequence
  Synthetic
caagccauagcgucaggcuacagc

SEQ ID NO: 537597 - RNA, 18 nt, Artificial Sequence
  Synthetic
augauacauaucuacagc

SEQ ID NO: 537598 - RNA, 19 nt, Artificial Sequence
  Synthetic
gaugauacauaucuacagc

SEQ ID NO: 537599 - RNA, 20 nt, Artificial Sequence
  Synthetic
ggaugauacauaucuacagc

SEQ ID NO: 537600 - RNA, 21 nt, Artificial Sequence
  Synthetic
uggaugauacauaucuacagc

SEQ ID NO: 537601 - RNA, 22 nt, Artificial Sequence
  Synthetic
guggaugauacauaucuacagc

SEQ ID NO: 537602 - RNA, 23 nt, Artificial Sequence
  Synthetic
gguggaugauacauaucuacagc

SEQ ID NO: 537603 - RNA, 24 nt, Artificial Sequence
  Synthetic
ugguggaugauacauaucuacagc

SEQ ID NO: 537604 - RNA, 18 nt, Artificial Sequence
  Synthetic
auuggcuugggguacagc

SEQ ID NO: 537605 - RNA, 19 nt, Artificial Sequence
  Synthetic
cauuggcuugggguacagc

SEQ ID NO: 537606 - RNA, 20 nt, Artificial Sequence
  Synthetic
ucauuggcuugggguacagc

SEQ ID NO: 537607 - RNA, 21 nt, Artificial Sequence
  Synthetic
aucauuggcuugggguacagc

SEQ ID NO: 537608 - RNA, 22 nt, Artificial Sequence
  Synthetic
uaucauuggcuugggguacagc

SEQ ID NO: 537609 - RNA, 23 nt, Artificial Sequence
  Synthetic
auaucauuggcuugggguacagc

SEQ ID NO: 537610 - RNA, 24 nt, Artificial Sequence
  Synthetic
gauaucauuggcuugggguacagc

SEQ ID NO: 537611 - RNA, 18 nt, Artificial Sequence
  Synthetic
gcagaucuaauguacagc

SEQ ID NO: 537612 - RNA, 19 nt, Artificial Sequence
  Synthetic
ggcagaucuaauguacagc

SEQ ID NO: 537613 - RNA, 20 nt, Artificial Sequence
  Synthetic
uggcagaucuaauguacagc

SEQ ID NO: 537614 - RNA, 21 nt, Artificial Sequence
  Synthetic
auggcagaucuaauguacagc

SEQ ID NO: 537615 - RNA, 22 nt, Artificial Sequence
  Synthetic
aauggcagaucuaauguacagc

SEQ ID NO: 537616 - RNA, 23 nt, Artificial Sequence
  Synthetic
gaauggcagaucuaauguacagc

SEQ ID NO: 537617 - RNA, 24 nt, Artificial Sequence
  Synthetic
agaauggcagaucuaauguacagc

SEQ ID NO: 537618 - RNA, 18 nt, Artificial Sequence
  Synthetic
cugcacugacuguacagc

SEQ ID NO: 537619 - RNA, 19 nt, Artificial Sequence
  Synthetic
ucugcacugacuguacagc

SEQ ID NO: 537620 - RNA, 20 nt, Artificial Sequence
  Synthetic
uucugcacugacuguacagc

SEQ ID NO: 537621 - RNA, 21 nt, Artificial Sequence
  Synthetic
uuucugcacugacuguacagc

SEQ ID NO: 537622 - RNA, 22 nt, Artificial Sequence
  Synthetic
auuucugcacugacuguacagc

SEQ ID NO: 537623 - RNA, 23 nt, Artificial Sequence
  Synthetic
aauuucugcacugacuguacagc

SEQ ID NO: 537624 - RNA, 24 nt, Artificial Sequence
  Synthetic
caauuucugcacugacuguacagc

SEQ ID NO: 537625 - RNA, 18 nt, Artificial Sequence
  Synthetic
agagaccacuuuuacagc

SEQ ID NO: 537626 - RNA, 19 nt, Artificial Sequence
  Synthetic
cagagaccacuuuuacagc

SEQ ID NO: 537627 - RNA, 20 nt, Artificial Sequence
  Synthetic
ccagagaccacuuuuacagc

SEQ ID NO: 537628 - RNA, 21 nt, Artificial Sequence
  Synthetic
accagagaccacuuuuacagc

SEQ ID NO: 537629 - RNA, 22 nt, Artificial Sequence
  Synthetic
aaccagagaccacuuuuacagc

SEQ ID NO: 537630 - RNA, 23 nt, Artificial Sequence
  Synthetic
caaccagagaccacuuuuacagc

SEQ ID NO: 537631 - RNA, 24 nt, Artificial Sequence
  Synthetic
acaaccagagaccacuuuuacagc

SEQ ID NO: 537632 - RNA, 18 nt, Artificial Sequence
  Synthetic
cauuugaguauaaccagc

SEQ ID NO: 537633 - RNA, 19 nt, Artificial Sequence
  Synthetic
ccauuugaguauaaccagc

SEQ ID NO: 537634 - RNA, 20 nt, Artificial Sequence
  Synthetic
accauuugaguauaaccagc

SEQ ID NO: 537635 - RNA, 21 nt, Artificial Sequence
  Synthetic
aaccauuugaguauaaccagc

SEQ ID NO: 537636 - RNA, 22 nt, Artificial Sequence
  Synthetic
uaaccauuugaguauaaccagc

SEQ ID NO: 537637 - RNA, 23 nt, Artificial Sequence
  Synthetic
auaaccauuugaguauaaccagc

SEQ ID NO: 537638 - RNA, 24 nt, Artificial Sequence
  Synthetic
uauaaccauuugaguauaaccagc

SEQ ID NO: 537639 - RNA, 18 nt, Artificial Sequence
  Synthetic
cagcugcccuccaccagc

SEQ ID NO: 537640 - RNA, 19 nt, Artificial Sequence
  Synthetic
gcagcugcccuccaccagc

SEQ ID NO: 537641 - RNA, 20 nt, Artificial Sequence
  Synthetic
ggcagcugcccuccaccagc

SEQ ID NO: 537642 - RNA, 21 nt, Artificial Sequence
  Synthetic
aggcagcugcccuccaccagc

SEQ ID NO: 537643 - RNA, 22 nt, Artificial Sequence
  Synthetic
gaggcagcugcccuccaccagc

SEQ ID NO: 537644 - RNA, 23 nt, Artificial Sequence
  Synthetic
ggaggcagcugcccuccaccagc

SEQ ID NO: 537645 - RNA, 24 nt, Artificial Sequence
  Synthetic
aggaggcagcugcccuccaccagc

SEQ ID NO: 537646 - RNA, 18 nt, Artificial Sequence
  Synthetic
ugcuggggccucaccagc

SEQ ID NO: 537647 - RNA, 19 nt, Artificial Sequence
  Synthetic
gugcuggggccucaccagc

SEQ ID NO: 537648 - RNA, 20 nt, Artificial Sequence
  Synthetic
agugcuggggccucaccagc

SEQ ID NO: 537649 - RNA, 21 nt, Artificial Sequence
  Synthetic
aagugcuggggccucaccagc

SEQ ID NO: 537650 - RNA, 22 nt, Artificial Sequence
  Synthetic
gaagugcuggggccucaccagc

SEQ ID NO: 537651 - RNA, 23 nt, Artificial Sequence
  Synthetic
agaagugcuggggccucaccagc

SEQ ID NO: 537652 - RNA, 24 nt, Artificial Sequence
  Synthetic
gagaagugcuggggccucaccagc

SEQ ID NO: 537653 - RNA, 19 nt, Artificial Sequence
  Synthetic
ccaggaguucaagaccagc

SEQ ID NO: 537654 - RNA, 20 nt, Artificial Sequence
  Synthetic
uccaggaguucaagaccagc

SEQ ID NO: 537655 - RNA, 21 nt, Artificial Sequence
  Synthetic
uuccaggaguucaagaccagc

SEQ ID NO: 537656 - RNA, 22 nt, Artificial Sequence
  Synthetic
auuccaggaguucaagaccagc

SEQ ID NO: 537657 - RNA, 23 nt, Artificial Sequence
  Synthetic
gauuccaggaguucaagaccagc

SEQ ID NO: 537658 - RNA, 24 nt, Artificial Sequence
  Synthetic
ugauuccaggaguucaagaccagc

SEQ ID NO: 537659 - RNA, 18 nt, Artificial Sequence
  Synthetic
ucuaaaugucagaccagc

SEQ ID NO: 537660 - RNA, 19 nt, Artificial Sequence
  Synthetic
uucuaaaugucagaccagc

SEQ ID NO: 537661 - RNA, 20 nt, Artificial Sequence
  Synthetic
uuucuaaaugucagaccagc

SEQ ID NO: 537662 - RNA, 21 nt, Artificial Sequence
  Synthetic
uuuucuaaaugucagaccagc

SEQ ID NO: 537663 - RNA, 22 nt, Artificial Sequence
  Synthetic
uuuuucuaaaugucagaccagc

SEQ ID NO: 537664 - RNA, 23 nt, Artificial Sequence
  Synthetic
uuuuuucuaaaugucagaccagc

SEQ ID NO: 537665 - RNA, 24 nt, Artificial Sequence
  Synthetic
guuuuuucuaaaugucagaccagc

SEQ ID NO: 537666 - RNA, 18 nt, Artificial Sequence
  Synthetic
caggaguucgagaccagc

SEQ ID NO: 537667 - RNA, 19 nt, Artificial Sequence
  Synthetic
ccaggaguucgagaccagc

SEQ ID NO: 537668 - RNA, 20 nt, Artificial Sequence
  Synthetic
accaggaguucgagaccagc

SEQ ID NO: 537669 - RNA, 21 nt, Artificial Sequence
  Synthetic
gaccaggaguucgagaccagc

SEQ ID NO: 537670 - RNA, 22 nt, Artificial Sequence
  Synthetic
agaccaggaguucgagaccagc

SEQ ID NO: 537671 - RNA, 23 nt, Artificial Sequence
  Synthetic
gagaccaggaguucgagaccagc

SEQ ID NO: 537672 - RNA, 24 nt, Artificial Sequence
  Synthetic
ugagaccaggaguucgagaccagc

SEQ ID NO: 537673 - RNA, 18 nt, Artificial Sequence
  Synthetic
augugacgggagaccagc

SEQ ID NO: 537674 - RNA, 19 nt, Artificial Sequence
  Synthetic
aaugugacgggagaccagc

SEQ ID NO: 537675 - RNA, 20 nt, Artificial Sequence
  Synthetic
caaugugacgggagaccagc

SEQ ID NO: 537676 - RNA, 21 nt, Artificial Sequence
  Synthetic
gcaaugugacgggagaccagc

SEQ ID NO: 537677 - RNA, 22 nt, Artificial Sequence
  Synthetic
ugcaaugugacgggagaccagc

SEQ ID NO: 537678 - RNA, 23 nt, Artificial Sequence
  Synthetic
cugcaaugugacgggagaccagc

SEQ ID NO: 537679 - RNA, 24 nt, Artificial Sequence
  Synthetic
ccugcaaugugacgggagaccagc

SEQ ID NO: 537680 - RNA, 18 nt, Artificial Sequence
  Synthetic
cagaaguuugagaccagc

SEQ ID NO: 537681 - RNA, 19 nt, Artificial Sequence
  Synthetic
ucagaaguuugagaccagc

SEQ ID NO: 537682 - RNA, 20 nt, Artificial Sequence
  Synthetic
gucagaaguuugagaccagc

SEQ ID NO: 537683 - RNA, 21 nt, Artificial Sequence
  Synthetic
ggucagaaguuugagaccagc

SEQ ID NO: 537684 - RNA, 22 nt, Artificial Sequence
  Synthetic
aggucagaaguuugagaccagc

SEQ ID NO: 537685 - RNA, 23 nt, Artificial Sequence
  Synthetic
gaggucagaaguuugagaccagc

SEQ ID NO: 537686 - RNA, 24 nt, Artificial Sequence
  Synthetic
ugaggucagaaguuugagaccagc

SEQ ID NO: 537687 - RNA, 18 nt, Artificial Sequence
  Synthetic
gauauuugugggaccagc

SEQ ID NO: 537688 - RNA, 19 nt, Artificial Sequence
  Synthetic
ggauauuugugggaccagc

SEQ ID NO: 537689 - RNA, 20 nt, Artificial Sequence
  Synthetic
uggauauuugugggaccagc

SEQ ID NO: 537690 - RNA, 21 nt, Artificial Sequence
  Synthetic
auggauauuugugggaccagc

SEQ ID NO: 537691 - RNA, 22 nt, Artificial Sequence
  Synthetic
cauggauauuugugggaccagc

SEQ ID NO: 537692 - RNA, 23 nt, Artificial Sequence
  Synthetic
gcauggauauuugugggaccagc

SEQ ID NO: 537693 - RNA, 24 nt, Artificial Sequence
  Synthetic
ugcauggauauuugugggaccagc

SEQ ID NO: 537694 - RNA, 18 nt, Artificial Sequence
  Synthetic
caggaguuggauaccagc

SEQ ID NO: 537695 - RNA, 19 nt, Artificial Sequence
  Synthetic
ccaggaguuggauaccagc

SEQ ID NO: 537696 - RNA, 20 nt, Artificial Sequence
  Synthetic
cccaggaguuggauaccagc

SEQ ID NO: 537697 - RNA, 21 nt, Artificial Sequence
  Synthetic
gcccaggaguuggauaccagc

SEQ ID NO: 537698 - RNA, 22 nt, Artificial Sequence
  Synthetic
agcccaggaguuggauaccagc

SEQ ID NO: 537699 - RNA, 23 nt, Artificial Sequence
  Synthetic
gagcccaggaguuggauaccagc

SEQ ID NO: 537700 - RNA, 24 nt, Artificial Sequence
  Synthetic
ugagcccaggaguuggauaccagc

SEQ ID NO: 537701 - RNA, 18 nt, Artificial Sequence
  Synthetic
aaaaagcaauuuaccagc

SEQ ID NO: 537702 - RNA, 19 nt, Artificial Sequence
  Synthetic
uaaaaagcaauuuaccagc

SEQ ID NO: 537703 - RNA, 20 nt, Artificial Sequence
  Synthetic
uuaaaaagcaauuuaccagc

SEQ ID NO: 537704 - RNA, 21 nt, Artificial Sequence
  Synthetic
cuuaaaaagcaauuuaccagc

SEQ ID NO: 537705 - RNA, 22 nt, Artificial Sequence
  Synthetic
acuuaaaaagcaauuuaccagc

SEQ ID NO: 537706 - RNA, 23 nt, Artificial Sequence
  Synthetic
uacuuaaaaagcaauuuaccagc

SEQ ID NO: 537707 - RNA, 24 nt, Artificial Sequence
  Synthetic
uuacuuaaaaagcaauuuaccagc

SEQ ID NO: 537708 - RNA, 18 nt, Artificial Sequence
  Synthetic
cuuuccaagaaacccagc

SEQ ID NO: 537709 - RNA, 19 nt, Artificial Sequence
  Synthetic
gcuuuccaagaaacccagc

SEQ ID NO: 537710 - RNA, 20 nt, Artificial Sequence
  Synthetic
ggcuuuccaagaaacccagc

SEQ ID NO: 537711 - RNA, 21 nt, Artificial Sequence
  Synthetic
uggcuuuccaagaaacccagc

SEQ ID NO: 537712 - RNA, 22 nt, Artificial Sequence
  Synthetic
auggcuuuccaagaaacccagc

SEQ ID NO: 537713 - RNA, 23 nt, Artificial Sequence
  Synthetic
aauggcuuuccaagaaacccagc

SEQ ID NO: 537714 - RNA, 24 nt, Artificial Sequence
  Synthetic
caauggcuuuccaagaaacccagc

SEQ ID NO: 537715 - RNA, 18 nt, Artificial Sequence
  Synthetic
uaagcuaccacacccagc

SEQ ID NO: 537716 - RNA, 19 nt, Artificial Sequence
  Synthetic
guaagcuaccacacccagc

SEQ ID NO: 537717 - RNA, 20 nt, Artificial Sequence
  Synthetic
cguaagcuaccacacccagc

SEQ ID NO: 537718 - RNA, 21 nt, Artificial Sequence
  Synthetic
gcguaagcuaccacacccagc

SEQ ID NO: 537719 - RNA, 22 nt, Artificial Sequence
  Synthetic
ggcguaagcuaccacacccagc

SEQ ID NO: 537720 - RNA, 23 nt, Artificial Sequence
  Synthetic
aggcguaagcuaccacacccagc

SEQ ID NO: 537721 - RNA, 24 nt, Artificial Sequence
  Synthetic
gaggcguaagcuaccacacccagc

SEQ ID NO: 537722 - RNA, 18 nt, Artificial Sequence
  Synthetic
acagagaaggcacccagc

SEQ ID NO: 537723 - RNA, 19 nt, Artificial Sequence
  Synthetic
aacagagaaggcacccagc

SEQ ID NO: 537724 - RNA, 20 nt, Artificial Sequence
  Synthetic
caacagagaaggcacccagc

SEQ ID NO: 537725 - RNA, 21 nt, Artificial Sequence
  Synthetic
ccaacagagaaggcacccagc

SEQ ID NO: 537726 - RNA, 22 nt, Artificial Sequence
  Synthetic
cccaacagagaaggcacccagc

SEQ ID NO: 537727 - RNA, 23 nt, Artificial Sequence
  Synthetic
gcccaacagagaaggcacccagc

SEQ ID NO: 537728 - RNA, 24 nt, Artificial Sequence
  Synthetic
ggcccaacagagaaggcacccagc

SEQ ID NO: 537729 - RNA, 18 nt, Artificial Sequence
  Synthetic
gcaccauugcaccccagc

SEQ ID NO: 537730 - RNA, 19 nt, Artificial Sequence
  Synthetic
cgcaccauugcaccccagc

SEQ ID NO: 537731 - RNA, 20 nt, Artificial Sequence
  Synthetic
ucgcaccauugcaccccagc

SEQ ID NO: 537732 - RNA, 21 nt, Artificial Sequence
  Synthetic
aucgcaccauugcaccccagc

SEQ ID NO: 537733 - RNA, 22 nt, Artificial Sequence
  Synthetic
gaucgcaccauugcaccccagc

SEQ ID NO: 537734 - RNA, 23 nt, Artificial Sequence
  Synthetic
agaucgcaccauugcaccccagc

SEQ ID NO: 537735 - RNA, 24 nt, Artificial Sequence
  Synthetic
gagaucgcaccauugcaccccagc

SEQ ID NO: 537736 - RNA, 18 nt, Artificial Sequence
  Synthetic
auuugaacuagccccagc

SEQ ID NO: 537737 - RNA, 19 nt, Artificial Sequence
  Synthetic
uauuugaacuagccccagc

SEQ ID NO: 537738 - RNA, 20 nt, Artificial Sequence
  Synthetic
auauuugaacuagccccagc

SEQ ID NO: 537739 - RNA, 21 nt, Artificial Sequence
  Synthetic
aauauuugaacuagccccagc

SEQ ID NO: 537740 - RNA, 22 nt, Artificial Sequence
  Synthetic
gaauauuugaacuagccccagc

SEQ ID NO: 537741 - RNA, 23 nt, Artificial Sequence
  Synthetic
ggaauauuugaacuagccccagc

SEQ ID NO: 537742 - RNA, 24 nt, Artificial Sequence
  Synthetic
gggaauauuugaacuagccccagc

SEQ ID NO: 537743 - RNA, 18 nt, Artificial Sequence
  Synthetic
gcaugaaaggagcccagc

SEQ ID NO: 537744 - RNA, 19 nt, Artificial Sequence
  Synthetic
ggcaugaaaggagcccagc

SEQ ID NO: 537745 - RNA, 20 nt, Artificial Sequence
  Synthetic
cggcaugaaaggagcccagc

SEQ ID NO: 537746 - RNA, 21 nt, Artificial Sequence
  Synthetic
gcggcaugaaaggagcccagc

SEQ ID NO: 537747 - RNA, 22 nt, Artificial Sequence
  Synthetic
ugcggcaugaaaggagcccagc

SEQ ID NO: 537748 - RNA, 23 nt, Artificial Sequence
  Synthetic
cugcggcaugaaaggagcccagc

SEQ ID NO: 537749 - RNA, 24 nt, Artificial Sequence
  Synthetic
acugcggcaugaaaggagcccagc

SEQ ID NO: 537750 - RNA, 18 nt, Artificial Sequence
  Synthetic
ugagccaccgcgcccagc

SEQ ID NO: 537751 - RNA, 19 nt, Artificial Sequence
  Synthetic
gugagccaccgcgcccagc

SEQ ID NO: 537752 - RNA, 20 nt, Artificial Sequence
  Synthetic
cgugagccaccgcgcccagc

SEQ ID NO: 537753 - RNA, 21 nt, Artificial Sequence
  Synthetic
gcgugagccaccgcgcccagc

SEQ ID NO: 537754 - RNA, 22 nt, Artificial Sequence
  Synthetic
ggcgugagccaccgcgcccagc

SEQ ID NO: 537755 - RNA, 23 nt, Artificial Sequence
  Synthetic
aggcgugagccaccgcgcccagc

SEQ ID NO: 537756 - RNA, 24 nt, Artificial Sequence
  Synthetic
caggcgugagccaccgcgcccagc

SEQ ID NO: 537757 - RNA, 18 nt, Artificial Sequence
  Synthetic
gguaaagaagggcccagc

SEQ ID NO: 537758 - RNA, 19 nt, Artificial Sequence
  Synthetic
cgguaaagaagggcccagc

SEQ ID NO: 537759 - RNA, 20 nt, Artificial Sequence
  Synthetic
gcgguaaagaagggcccagc

SEQ ID NO: 537760 - RNA, 21 nt, Artificial Sequence
  Synthetic
ggcgguaaagaagggcccagc

SEQ ID NO: 537761 - RNA, 22 nt, Artificial Sequence
  Synthetic
gggcgguaaagaagggcccagc

SEQ ID NO: 537762 - RNA, 23 nt, Artificial Sequence
  Synthetic
ggggcgguaaagaagggcccagc

SEQ ID NO: 537763 - RNA, 24 nt, Artificial Sequence
  Synthetic
aggggcgguaaagaagggcccagc

SEQ ID NO: 537764 - RNA, 18 nt, Artificial Sequence
  Synthetic
caucuaauuugucccagc

SEQ ID NO: 537765 - RNA, 19 nt, Artificial Sequence
  Synthetic
ucaucuaauuugucccagc

SEQ ID NO: 537766 - RNA, 20 nt, Artificial Sequence
  Synthetic
uucaucuaauuugucccagc

SEQ ID NO: 537767 - RNA, 21 nt, Artificial Sequence
  Synthetic
auucaucuaauuugucccagc

SEQ ID NO: 537768 - RNA, 22 nt, Artificial Sequence
  Synthetic
uauucaucuaauuugucccagc

SEQ ID NO: 537769 - RNA, 23 nt, Artificial Sequence
  Synthetic
uuauucaucuaauuugucccagc

SEQ ID NO: 537770 - RNA, 24 nt, Artificial Sequence
  Synthetic
auuauucaucuaauuugucccagc

SEQ ID NO: 537771 - RNA, 18 nt, Artificial Sequence
  Synthetic
ucuaucuucaaagccagc

SEQ ID NO: 537772 - RNA, 19 nt, Artificial Sequence
  Synthetic
cucuaucuucaaagccagc

SEQ ID NO: 537773 - RNA, 20 nt, Artificial Sequence
  Synthetic
ucucuaucuucaaagccagc

SEQ ID NO: 537774 - RNA, 21 nt, Artificial Sequence
  Synthetic
uucucuaucuucaaagccagc

SEQ ID NO: 537775 - RNA, 22 nt, Artificial Sequence
  Synthetic
uuucucuaucuucaaagccagc

SEQ ID NO: 537776 - RNA, 23 nt, Artificial Sequence
  Synthetic
cuuucucuaucuucaaagccagc

SEQ ID NO: 537777 - RNA, 24 nt, Artificial Sequence
  Synthetic
ccuuucucuaucuucaaagccagc

SEQ ID NO: 537778 - RNA, 18 nt, Artificial Sequence
  Synthetic
uuguggauuauagccagc

SEQ ID NO: 537779 - RNA, 19 nt, Artificial Sequence
  Synthetic
auuguggauuauagccagc

SEQ ID NO: 537780 - RNA, 20 nt, Artificial Sequence
  Synthetic
aauuguggauuauagccagc

SEQ ID NO: 537781 - RNA, 21 nt, Artificial Sequence
  Synthetic
uaauuguggauuauagccagc

SEQ ID NO: 537782 - RNA, 22 nt, Artificial Sequence
  Synthetic
guaauuguggauuauagccagc

SEQ ID NO: 537783 - RNA, 23 nt, Artificial Sequence
  Synthetic
aguaauuguggauuauagccagc

SEQ ID NO: 537784 - RNA, 24 nt, Artificial Sequence
  Synthetic
uaguaauuguggauuauagccagc

SEQ ID NO: 537785 - RNA, 18 nt, Artificial Sequence
  Synthetic
caggaguucgaggccagc

SEQ ID NO: 537786 - RNA, 19 nt, Artificial Sequence
  Synthetic
ccaggaguucgaggccagc

SEQ ID NO: 537787 - RNA, 20 nt, Artificial Sequence
  Synthetic
cccaggaguucgaggccagc

SEQ ID NO: 537788 - RNA, 21 nt, Artificial Sequence
  Synthetic
gcccaggaguucgaggccagc

SEQ ID NO: 537789 - RNA, 22 nt, Artificial Sequence
  Synthetic
agcccaggaguucgaggccagc

SEQ ID NO: 537790 - RNA, 23 nt, Artificial Sequence
  Synthetic
gagcccaggaguucgaggccagc

SEQ ID NO: 537791 - RNA, 24 nt, Artificial Sequence
  Synthetic
ugagcccaggaguucgaggccagc

SEQ ID NO: 537792 - RNA, 18 nt, Artificial Sequence
  Synthetic
caccugccagaugccagc

SEQ ID NO: 537793 - RNA, 19 nt, Artificial Sequence
  Synthetic
gcaccugccagaugccagc

SEQ ID NO: 537794 - RNA, 20 nt, Artificial Sequence
  Synthetic
ggcaccugccagaugccagc

SEQ ID NO: 537795 - RNA, 21 nt, Artificial Sequence
  Synthetic
gggcaccugccagaugccagc

SEQ ID NO: 537796 - RNA, 22 nt, Artificial Sequence
  Synthetic
ggggcaccugccagaugccagc

SEQ ID NO: 537797 - RNA, 23 nt, Artificial Sequence
  Synthetic
aggggcaccugccagaugccagc

SEQ ID NO: 537798 - RNA, 24 nt, Artificial Sequence
  Synthetic
gaggggcaccugccagaugccagc

SEQ ID NO: 537799 - RNA, 18 nt, Artificial Sequence
  Synthetic
gagagaaugagugccagc

SEQ ID NO: 537800 - RNA, 19 nt, Artificial Sequence
  Synthetic
agagagaaugagugccagc

SEQ ID NO: 537801 - RNA, 20 nt, Artificial Sequence
  Synthetic
gagagagaaugagugccagc

SEQ ID NO: 537802 - RNA, 21 nt, Artificial Sequence
  Synthetic
ggagagagaaugagugccagc

SEQ ID NO: 537803 - RNA, 22 nt, Artificial Sequence
  Synthetic
aggagagagaaugagugccagc

SEQ ID NO: 537804 - RNA, 23 nt, Artificial Sequence
  Synthetic
uaggagagagaaugagugccagc

SEQ ID NO: 537805 - RNA, 24 nt, Artificial Sequence
  Synthetic
auaggagagagaaugagugccagc

SEQ ID NO: 537806 - RNA, 18 nt, Artificial Sequence
  Synthetic
gggagaaugagugccagc

SEQ ID NO: 537807 - RNA, 19 nt, Artificial Sequence
  Synthetic
agggagaaugagugccagc

SEQ ID NO: 537808 - RNA, 20 nt, Artificial Sequence
  Synthetic
gagggagaaugagugccagc

SEQ ID NO: 537809 - RNA, 21 nt, Artificial Sequence
  Synthetic
ggagggagaaugagugccagc

SEQ ID NO: 537810 - RNA, 22 nt, Artificial Sequence
  Synthetic
aggagggagaaugagugccagc

SEQ ID NO: 537811 - RNA, 23 nt, Artificial Sequence
  Synthetic
caggagggagaaugagugccagc

SEQ ID NO: 537812 - RNA, 24 nt, Artificial Sequence
  Synthetic
gcaggagggagaaugagugccagc

SEQ ID NO: 537813 - RNA, 18 nt, Artificial Sequence
  Synthetic
aaccaacugaaauccagc

SEQ ID NO: 537814 - RNA, 19 nt, Artificial Sequence
  Synthetic
aaaccaacugaaauccagc

SEQ ID NO: 537815 - RNA, 20 nt, Artificial Sequence
  Synthetic
caaaccaacugaaauccagc

SEQ ID NO: 537816 - RNA, 21 nt, Artificial Sequence
  Synthetic
acaaaccaacugaaauccagc

SEQ ID NO: 537817 - RNA, 22 nt, Artificial Sequence
  Synthetic
uacaaaccaacugaaauccagc

SEQ ID NO: 537818 - RNA, 23 nt, Artificial Sequence
  Synthetic
cuacaaaccaacugaaauccagc

SEQ ID NO: 537819 - RNA, 24 nt, Artificial Sequence
  Synthetic
acuacaaaccaacugaaauccagc

SEQ ID NO: 537820 - RNA, 18 nt, Artificial Sequence
  Synthetic
aaaggauuaacauccagc

SEQ ID NO: 537821 - RNA, 19 nt, Artificial Sequence
  Synthetic
caaaggauuaacauccagc

SEQ ID NO: 537822 - RNA, 20 nt, Artificial Sequence
  Synthetic
gcaaaggauuaacauccagc

SEQ ID NO: 537823 - RNA, 21 nt, Artificial Sequence
  Synthetic
agcaaaggauuaacauccagc

SEQ ID NO: 537824 - RNA, 22 nt, Artificial Sequence
  Synthetic
aagcaaaggauuaacauccagc

SEQ ID NO: 537825 - RNA, 23 nt, Artificial Sequence
  Synthetic
uaagcaaaggauuaacauccagc

SEQ ID NO: 537826 - RNA, 24 nt, Artificial Sequence
  Synthetic
auaagcaaaggauuaacauccagc

SEQ ID NO: 537827 - RNA, 18 nt, Artificial Sequence
  Synthetic
cugucacagcacuccagc

SEQ ID NO: 537828 - RNA, 19 nt, Artificial Sequence
  Synthetic
ccugucacagcacuccagc

SEQ ID NO: 537829 - RNA, 20 nt, Artificial Sequence
  Synthetic
uccugucacagcacuccagc

SEQ ID NO: 537830 - RNA, 21 nt, Artificial Sequence
  Synthetic
auccugucacagcacuccagc

SEQ ID NO: 537831 - RNA, 22 nt, Artificial Sequence
  Synthetic
gauccugucacagcacuccagc

SEQ ID NO: 537832 - RNA, 23 nt, Artificial Sequence
  Synthetic
agauccugucacagcacuccagc

SEQ ID NO: 537833 - RNA, 24 nt, Artificial Sequence
  Synthetic
gagauccugucacagcacuccagc

SEQ ID NO: 537834 - RNA, 18 nt, Artificial Sequence
  Synthetic
gcgccaccgcacuccagc

SEQ ID NO: 537835 - RNA, 19 nt, Artificial Sequence
  Synthetic
cgcgccaccgcacuccagc

SEQ ID NO: 537836 - RNA, 20 nt, Artificial Sequence
  Synthetic
ucgcgccaccgcacuccagc

SEQ ID NO: 537837 - RNA, 21 nt, Artificial Sequence
  Synthetic
aucgcgccaccgcacuccagc

SEQ ID NO: 537838 - RNA, 22 nt, Artificial Sequence
  Synthetic
gaucgcgccaccgcacuccagc

SEQ ID NO: 537839 - RNA, 23 nt, Artificial Sequence
  Synthetic
agaucgcgccaccgcacuccagc

SEQ ID NO: 537840 - RNA, 24 nt, Artificial Sequence
  Synthetic
gagaucgcgccaccgcacuccagc

SEQ ID NO: 537841 - RNA, 18 nt, Artificial Sequence
  Synthetic
gugccaccgcacuccagc

SEQ ID NO: 537842 - RNA, 19 nt, Artificial Sequence
  Synthetic
ugugccaccgcacuccagc

SEQ ID NO: 537843 - RNA, 20 nt, Artificial Sequence
  Synthetic
cugugccaccgcacuccagc

SEQ ID NO: 537844 - RNA, 21 nt, Artificial Sequence
  Synthetic
acugugccaccgcacuccagc

SEQ ID NO: 537845 - RNA, 22 nt, Artificial Sequence
  Synthetic
gacugugccaccgcacuccagc

SEQ ID NO: 537846 - RNA, 23 nt, Artificial Sequence
  Synthetic
agacugugccaccgcacuccagc

SEQ ID NO: 537847 - RNA, 24 nt, Artificial Sequence
  Synthetic
gagacugugccaccgcacuccagc

SEQ ID NO: 537848 - RNA, 18 nt, Artificial Sequence
  Synthetic
gcaucgcggcacuccagc

SEQ ID NO: 537849 - RNA, 19 nt, Artificial Sequence
  Synthetic
ugcaucgcggcacuccagc

SEQ ID NO: 537850 - RNA, 20 nt, Artificial Sequence
  Synthetic
uugcaucgcggcacuccagc

SEQ ID NO: 537851 - RNA, 21 nt, Artificial Sequence
  Synthetic
auugcaucgcggcacuccagc

SEQ ID NO: 537852 - RNA, 22 nt, Artificial Sequence
  Synthetic
gauugcaucgcggcacuccagc

SEQ ID NO: 537853 - RNA, 23 nt, Artificial Sequence
  Synthetic
ugauugcaucgcggcacuccagc

SEQ ID NO: 537854 - RNA, 24 nt, Artificial Sequence
  Synthetic
augauugcaucgcggcacuccagc

SEQ ID NO: 537855 - RNA, 18 nt, Artificial Sequence
  Synthetic
gcaccacugcacuccagc

SEQ ID NO: 537856 - RNA, 19 nt, Artificial Sequence
  Synthetic
cgcaccacugcacuccagc

SEQ ID NO: 537857 - RNA, 20 nt, Artificial Sequence
  Synthetic
ucgcaccacugcacuccagc

SEQ ID NO: 537858 - RNA, 21 nt, Artificial Sequence
  Synthetic
aucgcaccacugcacuccagc

SEQ ID NO: 537859 - RNA, 22 nt, Artificial Sequence
  Synthetic
gaucgcaccacugcacuccagc

SEQ ID NO: 537860 - RNA, 23 nt, Artificial Sequence
  Synthetic
agaucgcaccacugcacuccagc

SEQ ID NO: 537861 - RNA, 24 nt, Artificial Sequence
  Synthetic
gagaucgcaccacugcacuccagc

SEQ ID NO: 537862 - RNA, 19 nt, Artificial Sequence
  Synthetic
ggcaccacugcacuccagc

SEQ ID NO: 537863 - RNA, 20 nt, Artificial Sequence
  Synthetic
uggcaccacugcacuccagc

SEQ ID NO: 537864 - RNA, 21 nt, Artificial Sequence
  Synthetic
auggcaccacugcacuccagc

SEQ ID NO: 537865 - RNA, 22 nt, Artificial Sequence
  Synthetic
gauggcaccacugcacuccagc

SEQ ID NO: 537866 - RNA, 23 nt, Artificial Sequence
  Synthetic
agauggcaccacugcacuccagc

SEQ ID NO: 537867 - RNA, 24 nt, Artificial Sequence
  Synthetic
aagauggcaccacugcacuccagc

SEQ ID NO: 537868 - RNA, 21 nt, Artificial Sequence
  Synthetic
aucacgccacugcacuccagc

SEQ ID NO: 537869 - RNA, 22 nt, Artificial Sequence
  Synthetic
gaucacgccacugcacuccagc

SEQ ID NO: 537870 - RNA, 23 nt, Artificial Sequence
  Synthetic
agaucacgccacugcacuccagc

SEQ ID NO: 537871 - RNA, 24 nt, Artificial Sequence
  Synthetic
aagaucacgccacugcacuccagc

SEQ ID NO: 537872 - RNA, 24 nt, Artificial Sequence
  Synthetic
gagaucacgccacugcacuccagc

SEQ ID NO: 537873 - RNA, 18 nt, Artificial Sequence
  Synthetic
ccgccacugcacuccagc

SEQ ID NO: 537874 - RNA, 19 nt, Artificial Sequence
  Synthetic
cccgccacugcacuccagc

SEQ ID NO: 537875 - RNA, 20 nt, Artificial Sequence
  Synthetic
ucccgccacugcacuccagc

SEQ ID NO: 537876 - RNA, 21 nt, Artificial Sequence
  Synthetic
aucccgccacugcacuccagc

SEQ ID NO: 537877 - RNA, 22 nt, Artificial Sequence
  Synthetic
gaucccgccacugcacuccagc

SEQ ID NO: 537878 - RNA, 23 nt, Artificial Sequence
  Synthetic
agaucccgccacugcacuccagc

SEQ ID NO: 537879 - RNA, 24 nt, Artificial Sequence
  Synthetic
gagaucccgccacugcacuccagc

SEQ ID NO: 537880 - RNA, 18 nt, Artificial Sequence
  Synthetic
gugccacugcacuccagc

SEQ ID NO: 537881 - RNA, 19 nt, Artificial Sequence
  Synthetic
cgugccacugcacuccagc

SEQ ID NO: 537882 - RNA, 20 nt, Artificial Sequence
  Synthetic
ucgugccacugcacuccagc

SEQ ID NO: 537883 - RNA, 21 nt, Artificial Sequence
  Synthetic
aucgugccacugcacuccagc

SEQ ID NO: 537884 - RNA, 22 nt, Artificial Sequence
  Synthetic
gaucgugccacugcacuccagc

SEQ ID NO: 537885 - RNA, 23 nt, Artificial Sequence
  Synthetic
agaucgugccacugcacuccagc

SEQ ID NO: 537886 - RNA, 24 nt, Artificial Sequence
  Synthetic
gagaucgugccacugcacuccagc

SEQ ID NO: 537887 - RNA, 18 nt, Artificial Sequence
  Synthetic
augucacugcacuccagc

SEQ ID NO: 537888 - RNA, 19 nt, Artificial Sequence
  Synthetic
caugucacugcacuccagc

SEQ ID NO: 537889 - RNA, 20 nt, Artificial Sequence
  Synthetic
ucaugucacugcacuccagc

SEQ ID NO: 537890 - RNA, 21 nt, Artificial Sequence
  Synthetic
aucaugucacugcacuccagc

SEQ ID NO: 537891 - RNA, 22 nt, Artificial Sequence
  Synthetic
gaucaugucacugcacuccagc

SEQ ID NO: 537892 - RNA, 23 nt, Artificial Sequence
  Synthetic
ugaucaugucacugcacuccagc

SEQ ID NO: 537893 - RNA, 24 nt, Artificial Sequence
  Synthetic
gugaucaugucacugcacuccagc

SEQ ID NO: 537894 - RNA, 18 nt, Artificial Sequence
  Synthetic
gcaccgcugcacuccagc

SEQ ID NO: 537895 - RNA, 19 nt, Artificial Sequence
  Synthetic
cgcaccgcugcacuccagc

SEQ ID NO: 537896 - RNA, 20 nt, Artificial Sequence
  Synthetic
ucgcaccgcugcacuccagc

SEQ ID NO: 537897 - RNA, 21 nt, Artificial Sequence
  Synthetic
aucgcaccgcugcacuccagc

SEQ ID NO: 537898 - RNA, 22 nt, Artificial Sequence
  Synthetic
gaucgcaccgcugcacuccagc

SEQ ID NO: 537899 - RNA, 23 nt, Artificial Sequence
  Synthetic
agaucgcaccgcugcacuccagc

SEQ ID NO: 537900 - RNA, 24 nt, Artificial Sequence
  Synthetic
gagaucgcaccgcugcacuccagc

SEQ ID NO: 537901 - RNA, 18 nt, Artificial Sequence
  Synthetic
gcaacauugcacuccagc

SEQ ID NO: 537902 - RNA, 19 nt, Artificial Sequence
  Synthetic
ugcaacauugcacuccagc

SEQ ID NO: 537903 - RNA, 20 nt, Artificial Sequence
  Synthetic
uugcaacauugcacuccagc

SEQ ID NO: 537904 - RNA, 21 nt, Artificial Sequence
  Synthetic
auugcaacauugcacuccagc

SEQ ID NO: 537905 - RNA, 22 nt, Artificial Sequence
  Synthetic
gauugcaacauugcacuccagc

SEQ ID NO: 537906 - RNA, 23 nt, Artificial Sequence
  Synthetic
agauugcaacauugcacuccagc

SEQ ID NO: 537907 - RNA, 24 nt, Artificial Sequence
  Synthetic
gagauugcaacauugcacuccagc

SEQ ID NO: 537908 - RNA, 21 nt, Artificial Sequence
  Synthetic
aucgcaccauugcacuccagc

SEQ ID NO: 537909 - RNA, 22 nt, Artificial Sequence
  Synthetic
gaucgcaccauugcacuccagc

SEQ ID NO: 537910 - RNA, 23 nt, Artificial Sequence
  Synthetic
agaucgcaccauugcacuccagc

SEQ ID NO: 537911 - RNA, 24 nt, Artificial Sequence
  Synthetic
aagaucgcaccauugcacuccagc

SEQ ID NO: 537912 - RNA, 18 nt, Artificial Sequence
  Synthetic
gcgccauugcacuccagc

SEQ ID NO: 537913 - RNA, 19 nt, Artificial Sequence
  Synthetic
ugcgccauugcacuccagc

SEQ ID NO: 537914 - RNA, 20 nt, Artificial Sequence
  Synthetic
uugcgccauugcacuccagc

SEQ ID NO: 537915 - RNA, 21 nt, Artificial Sequence
  Synthetic
auugcgccauugcacuccagc

SEQ ID NO: 537916 - RNA, 22 nt, Artificial Sequence
  Synthetic
gauugcgccauugcacuccagc

SEQ ID NO: 537917 - RNA, 23 nt, Artificial Sequence
  Synthetic
agauugcgccauugcacuccagc

SEQ ID NO: 537918 - RNA, 24 nt, Artificial Sequence
  Synthetic
aagauugcgccauugcacuccagc

SEQ ID NO: 537919 - RNA, 21 nt, Artificial Sequence
  Synthetic
aucaugccauugcacuccagc

SEQ ID NO: 537920 - RNA, 22 nt, Artificial Sequence
  Synthetic
gaucaugccauugcacuccagc

SEQ ID NO: 537921 - RNA, 23 nt, Artificial Sequence
  Synthetic
agaucaugccauugcacuccagc

SEQ ID NO: 537922 - RNA, 24 nt, Artificial Sequence
  Synthetic
gagaucaugccauugcacuccagc

SEQ ID NO: 537923 - RNA, 21 nt, Artificial Sequence
  Synthetic
aucgugccauugcacuccagc

SEQ ID NO: 537924 - RNA, 22 nt, Artificial Sequence
  Synthetic
gaucgugccauugcacuccagc

SEQ ID NO: 537925 - RNA, 23 nt, Artificial Sequence
  Synthetic
agaucgugccauugcacuccagc

SEQ ID NO: 537926 - RNA, 24 nt, Artificial Sequence
  Synthetic
gagaucgugccauugcacuccagc

SEQ ID NO: 537927 - RNA, 18 nt, Artificial Sequence
  Synthetic
cugagauugcacuccagc

SEQ ID NO: 537928 - RNA, 19 nt, Artificial Sequence
  Synthetic
gcugagauugcacuccagc

SEQ ID NO: 537929 - RNA, 20 nt, Artificial Sequence
  Synthetic
agcugagauugcacuccagc

SEQ ID NO: 537930 - RNA, 21 nt, Artificial Sequence
  Synthetic
gagcugagauugcacuccagc

SEQ ID NO: 537931 - RNA, 22 nt, Artificial Sequence
  Synthetic
ugagcugagauugcacuccagc

SEQ ID NO: 537932 - RNA, 23 nt, Artificial Sequence
  Synthetic
gugagcugagauugcacuccagc

SEQ ID NO: 537933 - RNA, 24 nt, Artificial Sequence
  Synthetic
agugagcugagauugcacuccagc

SEQ ID NO: 537934 - RNA, 18 nt, Artificial Sequence
  Synthetic
gcgccaccucacuccagc

SEQ ID NO: 537935 - RNA, 19 nt, Artificial Sequence
  Synthetic
ugcgccaccucacuccagc

SEQ ID NO: 537936 - RNA, 20 nt, Artificial Sequence
  Synthetic
uugcgccaccucacuccagc

SEQ ID NO: 537937 - RNA, 21 nt, Artificial Sequence
  Synthetic
auugcgccaccucacuccagc

SEQ ID NO: 537938 - RNA, 22 nt, Artificial Sequence
  Synthetic
gauugcgccaccucacuccagc

SEQ ID NO: 537939 - RNA, 23 nt, Artificial Sequence
  Synthetic
agauugcgccaccucacuccagc

SEQ ID NO: 537940 - RNA, 24 nt, Artificial Sequence
  Synthetic
gagauugcgccaccucacuccagc

SEQ ID NO: 537941 - RNA, 18 nt, Artificial Sequence
  Synthetic
auuggaauguacuccagc

SEQ ID NO: 537942 - RNA, 19 nt, Artificial Sequence
  Synthetic
aauuggaauguacuccagc

SEQ ID NO: 537943 - RNA, 20 nt, Artificial Sequence
  Synthetic
aaauuggaauguacuccagc

SEQ ID NO: 537944 - RNA, 21 nt, Artificial Sequence
  Synthetic
aaaauuggaauguacuccagc

SEQ ID NO: 537945 - RNA, 22 nt, Artificial Sequence
  Synthetic
uaaaauuggaauguacuccagc

SEQ ID NO: 537946 - RNA, 23 nt, Artificial Sequence
  Synthetic
uuaaaauuggaauguacuccagc

SEQ ID NO: 537947 - RNA, 24 nt, Artificial Sequence
  Synthetic
uuuaaaauuggaauguacuccagc

SEQ ID NO: 537948 - RNA, 18 nt, Artificial Sequence
  Synthetic
gcgccacuguacuccagc

SEQ ID NO: 537949 - RNA, 19 nt, Artificial Sequence
  Synthetic
cgcgccacuguacuccagc

SEQ ID NO: 537950 - RNA, 20 nt, Artificial Sequence
  Synthetic
ucgcgccacuguacuccagc

SEQ ID NO: 537951 - RNA, 21 nt, Artificial Sequence
  Synthetic
aucgcgccacuguacuccagc

SEQ ID NO: 537952 - RNA, 22 nt, Artificial Sequence
  Synthetic
gaucgcgccacuguacuccagc

SEQ ID NO: 537953 - RNA, 23 nt, Artificial Sequence
  Synthetic
agaucgcgccacuguacuccagc

SEQ ID NO: 537954 - RNA, 24 nt, Artificial Sequence
  Synthetic
aagaucgcgccacuguacuccagc

SEQ ID NO: 537955 - RNA, 18 nt, Artificial Sequence
  Synthetic
gcaccacugcgcuccagc

SEQ ID NO: 537956 - RNA, 19 nt, Artificial Sequence
  Synthetic
ugcaccacugcgcuccagc

SEQ ID NO: 537957 - RNA, 20 nt, Artificial Sequence
  Synthetic
uugcaccacugcgcuccagc

SEQ ID NO: 537958 - RNA, 21 nt, Artificial Sequence
  Synthetic
auugcaccacugcgcuccagc

SEQ ID NO: 537959 - RNA, 22 nt, Artificial Sequence
  Synthetic
gauugcaccacugcgcuccagc

SEQ ID NO: 537960 - RNA, 23 nt, Artificial Sequence
  Synthetic
agauugcaccacugcgcuccagc

SEQ ID NO: 537961 - RNA, 24 nt, Artificial Sequence
  Synthetic
gagauugcaccacugcgcuccagc

SEQ ID NO: 537962 - RNA, 18 nt, Artificial Sequence
  Synthetic
cauggucacugcuccagc

SEQ ID NO: 537963 - RNA, 19 nt, Artificial Sequence
  Synthetic
ccauggucacugcuccagc

SEQ ID NO: 537964 - RNA, 20 nt, Artificial Sequence
  Synthetic
uccauggucacugcuccagc

SEQ ID NO: 537965 - RNA, 21 nt, Artificial Sequence
  Synthetic
cuccauggucacugcuccagc

SEQ ID NO: 537966 - RNA, 22 nt, Artificial Sequence
  Synthetic
acuccauggucacugcuccagc

SEQ ID NO: 537967 - RNA, 23 nt, Artificial Sequence
  Synthetic
uacuccauggucacugcuccagc

SEQ ID NO: 537968 - RNA, 24 nt, Artificial Sequence
  Synthetic
uuacuccauggucacugcuccagc

SEQ ID NO: 537969 - RNA, 18 nt, Artificial Sequence
  Synthetic
aucuacugccauuccagc

SEQ ID NO: 537970 - RNA, 19 nt, Artificial Sequence
  Synthetic
uaucuacugccauuccagc

SEQ ID NO: 537971 - RNA, 20 nt, Artificial Sequence
  Synthetic
auaucuacugccauuccagc

SEQ ID NO: 537972 - RNA, 21 nt, Artificial Sequence
  Synthetic
aauaucuacugccauuccagc

SEQ ID NO: 537973 - RNA, 22 nt, Artificial Sequence
  Synthetic
aaauaucuacugccauuccagc

SEQ ID NO: 537974 - RNA, 23 nt, Artificial Sequence
  Synthetic
caaauaucuacugccauuccagc

SEQ ID NO: 537975 - RNA, 24 nt, Artificial Sequence
  Synthetic
ccaaauaucuacugccauuccagc

SEQ ID NO: 537976 - RNA, 18 nt, Artificial Sequence
  Synthetic
ccugcuaagacuuccagc

SEQ ID NO: 537977 - RNA, 19 nt, Artificial Sequence
  Synthetic
cccugcuaagacuuccagc

SEQ ID NO: 537978 - RNA, 20 nt, Artificial Sequence
  Synthetic
ucccugcuaagacuuccagc

SEQ ID NO: 537979 - RNA, 21 nt, Artificial Sequence
  Synthetic
gucccugcuaagacuuccagc

SEQ ID NO: 537980 - RNA, 22 nt, Artificial Sequence
  Synthetic
ggucccugcuaagacuuccagc

SEQ ID NO: 537981 - RNA, 23 nt, Artificial Sequence
  Synthetic
uggucccugcuaagacuuccagc

SEQ ID NO: 537982 - RNA, 24 nt, Artificial Sequence
  Synthetic
cuggucccugcuaagacuuccagc

SEQ ID NO: 537983 - RNA, 18 nt, Artificial Sequence
  Synthetic
gacaagaugucuuccagc

SEQ ID NO: 537984 - RNA, 19 nt, Artificial Sequence
  Synthetic
agacaagaugucuuccagc

SEQ ID NO: 537985 - RNA, 20 nt, Artificial Sequence
  Synthetic
gagacaagaugucuuccagc

SEQ ID NO: 537986 - RNA, 21 nt, Artificial Sequence
  Synthetic
ggagacaagaugucuuccagc

SEQ ID NO: 537987 - RNA, 22 nt, Artificial Sequence
  Synthetic
uggagacaagaugucuuccagc

SEQ ID NO: 537988 - RNA, 23 nt, Artificial Sequence
  Synthetic
auggagacaagaugucuuccagc

SEQ ID NO: 537989 - RNA, 24 nt, Artificial Sequence
  Synthetic
gauggagacaagaugucuuccagc

SEQ ID NO: 537990 - RNA, 18 nt, Artificial Sequence
  Synthetic
uagcauagaaaaagcagc

SEQ ID NO: 537991 - RNA, 19 nt, Artificial Sequence
  Synthetic
uuagcauagaaaaagcagc

SEQ ID NO: 537992 - RNA, 20 nt, Artificial Sequence
  Synthetic
guuagcauagaaaaagcagc

SEQ ID NO: 537993 - RNA, 21 nt, Artificial Sequence
  Synthetic
uguuagcauagaaaaagcagc

SEQ ID NO: 537994 - RNA, 22 nt, Artificial Sequence
  Synthetic
uuguuagcauagaaaaagcagc

SEQ ID NO: 537995 - RNA, 23 nt, Artificial Sequence
  Synthetic
uuuguuagcauagaaaaagcagc

SEQ ID NO: 537996 - RNA, 24 nt, Artificial Sequence
  Synthetic
guuuguuagcauagaaaaagcagc

SEQ ID NO: 537997 - RNA, 18 nt, Artificial Sequence
  Synthetic
ccagccuguaaaagcagc

SEQ ID NO: 537998 - RNA, 19 nt, Artificial Sequence
  Synthetic
gccagccuguaaaagcagc

SEQ ID NO: 537999 - RNA, 20 nt, Artificial Sequence
  Synthetic
ugccagccuguaaaagcagc

SEQ ID NO: 538000 - RNA, 21 nt, Artificial Sequence
  Synthetic
augccagccuguaaaagcagc

SEQ ID NO: 538001 - RNA, 22 nt, Artificial Sequence
  Synthetic
aaugccagccuguaaaagcagc

SEQ ID NO: 538002 - RNA, 23 nt, Artificial Sequence
  Synthetic
caaugccagccuguaaaagcagc

SEQ ID NO: 538003 - RNA, 24 nt, Artificial Sequence
  Synthetic
ucaaugccagccuguaaaagcagc

SEQ ID NO: 538004 - RNA, 18 nt, Artificial Sequence
  Synthetic
cuagccugugaaagcagc

SEQ ID NO: 538005 - RNA, 19 nt, Artificial Sequence
  Synthetic
gcuagccugugaaagcagc

SEQ ID NO: 538006 - RNA, 20 nt, Artificial Sequence
  Synthetic
ugcuagccugugaaagcagc

SEQ ID NO: 538007 - RNA, 21 nt, Artificial Sequence
  Synthetic
augcuagccugugaaagcagc

SEQ ID NO: 538008 - RNA, 22 nt, Artificial Sequence
  Synthetic
aaugcuagccugugaaagcagc

SEQ ID NO: 538009 - RNA, 23 nt, Artificial Sequence
  Synthetic
caaugcuagccugugaaagcagc

SEQ ID NO: 538010 - RNA, 24 nt, Artificial Sequence
  Synthetic
ucaaugcuagccugugaaagcagc

SEQ ID NO: 538011 - RNA, 18 nt, Artificial Sequence
  Synthetic
ugcuguaauuccagcagc

SEQ ID NO: 538012 - RNA, 19 nt, Artificial Sequence
  Synthetic
gugcuguaauuccagcagc

SEQ ID NO: 538013 - RNA, 20 nt, Artificial Sequence
  Synthetic
agugcuguaauuccagcagc

SEQ ID NO: 538014 - RNA, 21 nt, Artificial Sequence
  Synthetic
cagugcuguaauuccagcagc

SEQ ID NO: 538015 - RNA, 22 nt, Artificial Sequence
  Synthetic
ucagugcuguaauuccagcagc

SEQ ID NO: 538016 - RNA, 23 nt, Artificial Sequence
  Synthetic
uucagugcuguaauuccagcagc

SEQ ID NO: 538017 - RNA, 24 nt, Artificial Sequence
  Synthetic
uuucagugcuguaauuccagcagc

SEQ ID NO: 538018 - RNA, 18 nt, Artificial Sequence
  Synthetic
agcagcagcagcagcagc

SEQ ID NO: 538019 - RNA, 19 nt, Artificial Sequence
  Synthetic
uagcagcagcagcagcagc

SEQ ID NO: 538020 - RNA, 20 nt, Artificial Sequence
  Synthetic
auagcagcagcagcagcagc

SEQ ID NO: 538021 - RNA, 21 nt, Artificial Sequence
  Synthetic
cauagcagcagcagcagcagc

SEQ ID NO: 538022 - RNA, 22 nt, Artificial Sequence
  Synthetic
ccauagcagcagcagcagcagc

SEQ ID NO: 538023 - RNA, 23 nt, Artificial Sequence
  Synthetic
accauagcagcagcagcagcagc

SEQ ID NO: 538024 - RNA, 24 nt, Artificial Sequence
  Synthetic
aaccauagcagcagcagcagcagc

SEQ ID NO: 538025 - RNA, 18 nt, Artificial Sequence
  Synthetic
uaugucuuuaucagcagc

SEQ ID NO: 538026 - RNA, 19 nt, Artificial Sequence
  Synthetic
guaugucuuuaucagcagc

SEQ ID NO: 538027 - RNA, 20 nt, Artificial Sequence
  Synthetic
uguaugucuuuaucagcagc

SEQ ID NO: 538028 - RNA, 21 nt, Artificial Sequence
  Synthetic
auguaugucuuuaucagcagc

SEQ ID NO: 538029 - RNA, 22 nt, Artificial Sequence
  Synthetic
cauguaugucuuuaucagcagc

SEQ ID NO: 538030 - RNA, 23 nt, Artificial Sequence
  Synthetic
ucauguaugucuuuaucagcagc

SEQ ID NO: 538031 - RNA, 24 nt, Artificial Sequence
  Synthetic
cucauguaugucuuuaucagcagc

SEQ ID NO: 538032 - RNA, 18 nt, Artificial Sequence
  Synthetic
cucagccuccagagcagc

SEQ ID NO: 538033 - RNA, 19 nt, Artificial Sequence
  Synthetic
ccucagccuccagagcagc

SEQ ID NO: 538034 - RNA, 20 nt, Artificial Sequence
  Synthetic
gccucagccuccagagcagc

SEQ ID NO: 538035 - RNA, 21 nt, Artificial Sequence
  Synthetic
ugccucagccuccagagcagc

SEQ ID NO: 538036 - RNA, 22 nt, Artificial Sequence
  Synthetic
cugccucagccuccagagcagc

SEQ ID NO: 538037 - RNA, 23 nt, Artificial Sequence
  Synthetic
ucugccucagccuccagagcagc

SEQ ID NO: 538038 - RNA, 24 nt, Artificial Sequence
  Synthetic
uucugccucagccuccagagcagc

SEQ ID NO: 538039 - RNA, 18 nt, Artificial Sequence
  Synthetic
gcaguucuuuagagcagc

SEQ ID NO: 538040 - RNA, 19 nt, Artificial Sequence
  Synthetic
ggcaguucuuuagagcagc

SEQ ID NO: 538041 - RNA, 20 nt, Artificial Sequence
  Synthetic
gggcaguucuuuagagcagc

SEQ ID NO: 538042 - RNA, 21 nt, Artificial Sequence
  Synthetic
ugggcaguucuuuagagcagc

SEQ ID NO: 538043 - RNA, 22 nt, Artificial Sequence
  Synthetic
uugggcaguucuuuagagcagc

SEQ ID NO: 538044 - RNA, 23 nt, Artificial Sequence
  Synthetic
cuugggcaguucuuuagagcagc

SEQ ID NO: 538045 - RNA, 24 nt, Artificial Sequence
  Synthetic
ucuugggcaguucuuuagagcagc

SEQ ID NO: 538046 - RNA, 18 nt, Artificial Sequence
  Synthetic
ugcaguaccuugagcagc

SEQ ID NO: 538047 - RNA, 19 nt, Artificial Sequence
  Synthetic
cugcaguaccuugagcagc

SEQ ID NO: 538048 - RNA, 20 nt, Artificial Sequence
  Synthetic
ucugcaguaccuugagcagc

SEQ ID NO: 538049 - RNA, 21 nt, Artificial Sequence
  Synthetic
aucugcaguaccuugagcagc

SEQ ID NO: 538050 - RNA, 22 nt, Artificial Sequence
  Synthetic
uaucugcaguaccuugagcagc

SEQ ID NO: 538051 - RNA, 23 nt, Artificial Sequence
  Synthetic
auaucugcaguaccuugagcagc

SEQ ID NO: 538052 - RNA, 24 nt, Artificial Sequence
  Synthetic
aauaucugcaguaccuugagcagc

SEQ ID NO: 538053 - RNA, 18 nt, Artificial Sequence
  Synthetic
cauuucuauuauagcagc

SEQ ID NO: 538054 - RNA, 19 nt, Artificial Sequence
  Synthetic
gcauuucuauuauagcagc

SEQ ID NO: 538055 - RNA, 20 nt, Artificial Sequence
  Synthetic
ggcauuucuauuauagcagc

SEQ ID NO: 538056 - RNA, 21 nt, Artificial Sequence
  Synthetic
uggcauuucuauuauagcagc

SEQ ID NO: 538057 - RNA, 22 nt, Artificial Sequence
  Synthetic
auggcauuucuauuauagcagc

SEQ ID NO: 538058 - RNA, 23 nt, Artificial Sequence
  Synthetic
uauggcauuucuauuauagcagc

SEQ ID NO: 538059 - RNA, 24 nt, Artificial Sequence
  Synthetic
uuauggcauuucuauuauagcagc

SEQ ID NO: 538060 - RNA, 18 nt, Artificial Sequence
  Synthetic
guaguucuuuauagcagc

SEQ ID NO: 538061 - RNA, 19 nt, Artificial Sequence
  Synthetic
gguaguucuuuauagcagc

SEQ ID NO: 538062 - RNA, 20 nt, Artificial Sequence
  Synthetic
agguaguucuuuauagcagc

SEQ ID NO: 538063 - RNA, 21 nt, Artificial Sequence
  Synthetic
cagguaguucuuuauagcagc

SEQ ID NO: 538064 - RNA, 22 nt, Artificial Sequence
  Synthetic
ucagguaguucuuuauagcagc

SEQ ID NO: 538065 - RNA, 23 nt, Artificial Sequence
  Synthetic
cucagguaguucuuuauagcagc

SEQ ID NO: 538066 - RNA, 24 nt, Artificial Sequence
  Synthetic
ucucagguaguucuuuauagcagc

SEQ ID NO: 538067 - RNA, 18 nt, Artificial Sequence
  Synthetic
gcauuauuuuauagcagc

SEQ ID NO: 538068 - RNA, 19 nt, Artificial Sequence
  Synthetic
ggcauuauuuuauagcagc

SEQ ID NO: 538069 - RNA, 20 nt, Artificial Sequence
  Synthetic
uggcauuauuuuauagcagc

SEQ ID NO: 538070 - RNA, 21 nt, Artificial Sequence
  Synthetic
auggcauuauuuuauagcagc

SEQ ID NO: 538071 - RNA, 22 nt, Artificial Sequence
  Synthetic
uauggcauuauuuuauagcagc

SEQ ID NO: 538072 - RNA, 23 nt, Artificial Sequence
  Synthetic
cuauggcauuauuuuauagcagc

SEQ ID NO: 538073 - RNA, 24 nt, Artificial Sequence
  Synthetic
ucuauggcauuauuuuauagcagc

SEQ ID NO: 538074 - RNA, 18 nt, Artificial Sequence
  Synthetic
cuguauucaaguagcagc

SEQ ID NO: 538075 - RNA, 19 nt, Artificial Sequence
  Synthetic
acuguauucaaguagcagc

SEQ ID NO: 538076 - RNA, 20 nt, Artificial Sequence
  Synthetic
aacuguauucaaguagcagc

SEQ ID NO: 538077 - RNA, 21 nt, Artificial Sequence
  Synthetic
caacuguauucaaguagcagc

SEQ ID NO: 538078 - RNA, 22 nt, Artificial Sequence
  Synthetic
ccaacuguauucaaguagcagc

SEQ ID NO: 538079 - RNA, 23 nt, Artificial Sequence
  Synthetic
gccaacuguauucaaguagcagc

SEQ ID NO: 538080 - RNA, 24 nt, Artificial Sequence
  Synthetic
ggccaacuguauucaaguagcagc

SEQ ID NO: 538081 - RNA, 18 nt, Artificial Sequence
  Synthetic
gaagaggugaaaggcagc

SEQ ID NO: 538082 - RNA, 19 nt, Artificial Sequence
  Synthetic
ugaagaggugaaaggcagc

SEQ ID NO: 538083 - RNA, 20 nt, Artificial Sequence
  Synthetic
cugaagaggugaaaggcagc

SEQ ID NO: 538084 - RNA, 21 nt, Artificial Sequence
  Synthetic
acugaagaggugaaaggcagc

SEQ ID NO: 538085 - RNA, 22 nt, Artificial Sequence
  Synthetic
aacugaagaggugaaaggcagc

SEQ ID NO: 538086 - RNA, 23 nt, Artificial Sequence
  Synthetic
gaacugaagaggugaaaggcagc

SEQ ID NO: 538087 - RNA, 24 nt, Artificial Sequence
  Synthetic
agaacugaagaggugaaaggcagc

SEQ ID NO: 538088 - RNA, 18 nt, Artificial Sequence
  Synthetic
uauguaaauaagggcagc

SEQ ID NO: 538089 - RNA, 19 nt, Artificial Sequence
  Synthetic
guauguaaauaagggcagc

SEQ ID NO: 538090 - RNA, 20 nt, Artificial Sequence
  Synthetic
aguauguaaauaagggcagc

SEQ ID NO: 538091 - RNA, 21 nt, Artificial Sequence
  Synthetic
caguauguaaauaagggcagc

SEQ ID NO: 538092 - RNA, 22 nt, Artificial Sequence
  Synthetic
ucaguauguaaauaagggcagc

SEQ ID NO: 538093 - RNA, 23 nt, Artificial Sequence
  Synthetic
cucaguauguaaauaagggcagc

SEQ ID NO: 538094 - RNA, 24 nt, Artificial Sequence
  Synthetic
ucucaguauguaaauaagggcagc

SEQ ID NO: 538095 - RNA, 18 nt, Artificial Sequence
  Synthetic
ugauguggugcgggcagc

SEQ ID NO: 538096 - RNA, 19 nt, Artificial Sequence
  Synthetic
augauguggugcgggcagc

SEQ ID NO: 538097 - RNA, 20 nt, Artificial Sequence
  Synthetic
caugauguggugcgggcagc

SEQ ID NO: 538098 - RNA, 21 nt, Artificial Sequence
  Synthetic
ucaugauguggugcgggcagc

SEQ ID NO: 538099 - RNA, 22 nt, Artificial Sequence
  Synthetic
cucaugauguggugcgggcagc

SEQ ID NO: 538100 - RNA, 23 nt, Artificial Sequence
  Synthetic
acucaugauguggugcgggcagc

SEQ ID NO: 538101 - RNA, 24 nt, Artificial Sequence
  Synthetic
cacucaugauguggugcgggcagc

SEQ ID NO: 538102 - RNA, 18 nt, Artificial Sequence
  Synthetic
uguagcacaaauggcagc

SEQ ID NO: 538103 - RNA, 19 nt, Artificial Sequence
  Synthetic
auguagcacaaauggcagc

SEQ ID NO: 538104 - RNA, 20 nt, Artificial Sequence
  Synthetic
cauguagcacaaauggcagc

SEQ ID NO: 538105 - RNA, 21 nt, Artificial Sequence
  Synthetic
ucauguagcacaaauggcagc

SEQ ID NO: 538106 - RNA, 22 nt, Artificial Sequence
  Synthetic
uucauguagcacaaauggcagc

SEQ ID NO: 538107 - RNA, 23 nt, Artificial Sequence
  Synthetic
cuucauguagcacaaauggcagc

SEQ ID NO: 538108 - RNA, 24 nt, Artificial Sequence
  Synthetic
ucuucauguagcacaaauggcagc

SEQ ID NO: 538109 - RNA, 18 nt, Artificial Sequence
  Synthetic
cacauucuacauggcagc

SEQ ID NO: 538110 - RNA, 19 nt, Artificial Sequence
  Synthetic
acacauucuacauggcagc

SEQ ID NO: 538111 - RNA, 20 nt, Artificial Sequence
  Synthetic
aacacauucuacauggcagc

SEQ ID NO: 538112 - RNA, 21 nt, Artificial Sequence
  Synthetic
aaacacauucuacauggcagc

SEQ ID NO: 538113 - RNA, 22 nt, Artificial Sequence
  Synthetic
aaaacacauucuacauggcagc

SEQ ID NO: 538114 - RNA, 23 nt, Artificial Sequence
  Synthetic
aaaaacacauucuacauggcagc

SEQ ID NO: 538115 - RNA, 24 nt, Artificial Sequence
  Synthetic
caaaaacacauucuacauggcagc

SEQ ID NO: 538116 - RNA, 18 nt, Artificial Sequence
  Synthetic
auauuccaagauggcagc

SEQ ID NO: 538117 - RNA, 19 nt, Artificial Sequence
  Synthetic
cauauuccaagauggcagc

SEQ ID NO: 538118 - RNA, 20 nt, Artificial Sequence
  Synthetic
gcauauuccaagauggcagc

SEQ ID NO: 538119 - RNA, 21 nt, Artificial Sequence
  Synthetic
ugcauauuccaagauggcagc

SEQ ID NO: 538120 - RNA, 22 nt, Artificial Sequence
  Synthetic
uugcauauuccaagauggcagc

SEQ ID NO: 538121 - RNA, 23 nt, Artificial Sequence
  Synthetic
uuugcauauuccaagauggcagc

SEQ ID NO: 538122 - RNA, 24 nt, Artificial Sequence
  Synthetic
auuugcauauuccaagauggcagc

SEQ ID NO: 538123 - RNA, 18 nt, Artificial Sequence
  Synthetic
auagucuccuuuggcagc

SEQ ID NO: 538124 - RNA, 19 nt, Artificial Sequence
  Synthetic
uauagucuccuuuggcagc

SEQ ID NO: 538125 - RNA, 20 nt, Artificial Sequence
  Synthetic
guauagucuccuuuggcagc

SEQ ID NO: 538126 - RNA, 21 nt, Artificial Sequence
  Synthetic
aguauagucuccuuuggcagc

SEQ ID NO: 538127 - RNA, 22 nt, Artificial Sequence
  Synthetic
caguauagucuccuuuggcagc

SEQ ID NO: 538128 - RNA, 23 nt, Artificial Sequence
  Synthetic
gcaguauagucuccuuuggcagc

SEQ ID NO: 538129 - RNA, 24 nt, Artificial Sequence
  Synthetic
ugcaguauagucuccuuuggcagc

SEQ ID NO: 538130 - RNA, 18 nt, Artificial Sequence
  Synthetic
agugggaaauaaugcagc

SEQ ID NO: 538131 - RNA, 19 nt, Artificial Sequence
  Synthetic
uagugggaaauaaugcagc

SEQ ID NO: 538132 - RNA, 20 nt, Artificial Sequence
  Synthetic
auagugggaaauaaugcagc

SEQ ID NO: 538133 - RNA, 21 nt, Artificial Sequence
  Synthetic
aauagugggaaauaaugcagc

SEQ ID NO: 538134 - RNA, 22 nt, Artificial Sequence
  Synthetic
aaauagugggaaauaaugcagc

SEQ ID NO: 538135 - RNA, 23 nt, Artificial Sequence
  Synthetic
uaaauagugggaaauaaugcagc

SEQ ID NO: 538136 - RNA, 24 nt, Artificial Sequence
  Synthetic
uuaaauagugggaaauaaugcagc

SEQ ID NO: 538137 - RNA, 18 nt, Artificial Sequence
  Synthetic
acuaggacagcaugcagc

SEQ ID NO: 538138 - RNA, 19 nt, Artificial Sequence
  Synthetic
cacuaggacagcaugcagc

SEQ ID NO: 538139 - RNA, 20 nt, Artificial Sequence
  Synthetic
gcacuaggacagcaugcagc

SEQ ID NO: 538140 - RNA, 21 nt, Artificial Sequence
  Synthetic
agcacuaggacagcaugcagc

SEQ ID NO: 538141 - RNA, 22 nt, Artificial Sequence
  Synthetic
gagcacuaggacagcaugcagc

SEQ ID NO: 538142 - RNA, 23 nt, Artificial Sequence
  Synthetic
agagcacuaggacagcaugcagc

SEQ ID NO: 538143 - RNA, 24 nt, Artificial Sequence
  Synthetic
aagagcacuaggacagcaugcagc

SEQ ID NO: 538144 - RNA, 18 nt, Artificial Sequence
  Synthetic
caacaagucagaugcagc

SEQ ID NO: 538145 - RNA, 19 nt, Artificial Sequence
  Synthetic
ucaacaagucagaugcagc

SEQ ID NO: 538146 - RNA, 20 nt, Artificial Sequence
  Synthetic
gucaacaagucagaugcagc

SEQ ID NO: 538147 - RNA, 21 nt, Artificial Sequence
  Synthetic
ugucaacaagucagaugcagc

SEQ ID NO: 538148 - RNA, 22 nt, Artificial Sequence
  Synthetic
uugucaacaagucagaugcagc

SEQ ID NO: 538149 - RNA, 23 nt, Artificial Sequence
  Synthetic
guugucaacaagucagaugcagc

SEQ ID NO: 538150 - RNA, 24 nt, Artificial Sequence
  Synthetic
aguugucaacaagucagaugcagc

SEQ ID NO: 538151 - RNA, 18 nt, Artificial Sequence
  Synthetic
cagcaacauggaugcagc

SEQ ID NO: 538152 - RNA, 19 nt, Artificial Sequence
  Synthetic
gcagcaacauggaugcagc

SEQ ID NO: 538153 - RNA, 20 nt, Artificial Sequence
  Synthetic
ugcagcaacauggaugcagc

SEQ ID NO: 538154 - RNA, 21 nt, Artificial Sequence
  Synthetic
uugcagcaacauggaugcagc

SEQ ID NO: 538155 - RNA, 22 nt, Artificial Sequence
  Synthetic
uuugcagcaacauggaugcagc

SEQ ID NO: 538156 - RNA, 23 nt, Artificial Sequence
  Synthetic
cuuugcagcaacauggaugcagc

SEQ ID NO: 538157 - RNA, 24 nt, Artificial Sequence
  Synthetic
ccuuugcagcaacauggaugcagc

SEQ ID NO: 538158 - RNA, 21 nt, Artificial Sequence
  Synthetic
caccauggaauacuaugcagc

SEQ ID NO: 538159 - RNA, 22 nt, Artificial Sequence
  Synthetic
acaccauggaauacuaugcagc

SEQ ID NO: 538160 - RNA, 23 nt, Artificial Sequence
  Synthetic
uacaccauggaauacuaugcagc

SEQ ID NO: 538161 - RNA, 24 nt, Artificial Sequence
  Synthetic
auacaccauggaauacuaugcagc

SEQ ID NO: 538162 - RNA, 18 nt, Artificial Sequence
  Synthetic
uagaaucucaacugcagc

SEQ ID NO: 538163 - RNA, 19 nt, Artificial Sequence
  Synthetic
auagaaucucaacugcagc

SEQ ID NO: 538164 - RNA, 20 nt, Artificial Sequence
  Synthetic
uauagaaucucaacugcagc

SEQ ID NO: 538165 - RNA, 21 nt, Artificial Sequence
  Synthetic
uuauagaaucucaacugcagc

SEQ ID NO: 538166 - RNA, 22 nt, Artificial Sequence
  Synthetic
uuuauagaaucucaacugcagc

SEQ ID NO: 538167 - RNA, 23 nt, Artificial Sequence
  Synthetic
guuuauagaaucucaacugcagc

SEQ ID NO: 538168 - RNA, 24 nt, Artificial Sequence
  Synthetic
aguuuauagaaucucaacugcagc

SEQ ID NO: 538169 - RNA, 18 nt, Artificial Sequence
  Synthetic
auuguuuguuacugcagc

SEQ ID NO: 538170 - RNA, 19 nt, Artificial Sequence
  Synthetic
cauuguuuguuacugcagc

SEQ ID NO: 538171 - RNA, 20 nt, Artificial Sequence
  Synthetic
ucauuguuuguuacugcagc

SEQ ID NO: 538172 - RNA, 21 nt, Artificial Sequence
  Synthetic
gucauuguuuguuacugcagc

SEQ ID NO: 538173 - RNA, 22 nt, Artificial Sequence
  Synthetic
ugucauuguuuguuacugcagc

SEQ ID NO: 538174 - RNA, 23 nt, Artificial Sequence
  Synthetic
uugucauuguuuguuacugcagc

SEQ ID NO: 538175 - RNA, 24 nt, Artificial Sequence
  Synthetic
uuugucauuguuuguuacugcagc

SEQ ID NO: 538176 - RNA, 18 nt, Artificial Sequence
  Synthetic
auguggaauugcugcagc

SEQ ID NO: 538177 - RNA, 19 nt, Artificial Sequence
  Synthetic
uauguggaauugcugcagc

SEQ ID NO: 538178 - RNA, 20 nt, Artificial Sequence
  Synthetic
cuauguggaauugcugcagc

SEQ ID NO: 538179 - RNA, 21 nt, Artificial Sequence
  Synthetic
ccuauguggaauugcugcagc

SEQ ID NO: 538180 - RNA, 22 nt, Artificial Sequence
  Synthetic
accuauguggaauugcugcagc

SEQ ID NO: 538181 - RNA, 23 nt, Artificial Sequence
  Synthetic
uaccuauguggaauugcugcagc

SEQ ID NO: 538182 - RNA, 24 nt, Artificial Sequence
  Synthetic
cuaccuauguggaauugcugcagc

SEQ ID NO: 538183 - RNA, 18 nt, Artificial Sequence
  Synthetic
gugauucuaacgugcagc

SEQ ID NO: 538184 - RNA, 19 nt, Artificial Sequence
  Synthetic
agugauucuaacgugcagc

SEQ ID NO: 538185 - RNA, 20 nt, Artificial Sequence
  Synthetic
uagugauucuaacgugcagc

SEQ ID NO: 538186 - RNA, 21 nt, Artificial Sequence
  Synthetic
cuagugauucuaacgugcagc

SEQ ID NO: 538187 - RNA, 22 nt, Artificial Sequence
  Synthetic
ccuagugauucuaacgugcagc

SEQ ID NO: 538188 - RNA, 23 nt, Artificial Sequence
  Synthetic
cccuagugauucuaacgugcagc

SEQ ID NO: 538189 - RNA, 24 nt, Artificial Sequence
  Synthetic
ccccuagugauucuaacgugcagc

SEQ ID NO: 538190 - RNA, 18 nt, Artificial Sequence
  Synthetic
uuccuuucugggugcagc

SEQ ID NO: 538191 - RNA, 19 nt, Artificial Sequence
  Synthetic
guuccuuucugggugcagc

SEQ ID NO: 538192 - RNA, 20 nt, Artificial Sequence
  Synthetic
cguuccuuucugggugcagc

SEQ ID NO: 538193 - RNA, 21 nt, Artificial Sequence
  Synthetic
ccguuccuuucugggugcagc

SEQ ID NO: 538194 - RNA, 22 nt, Artificial Sequence
  Synthetic
gccguuccuuucugggugcagc

SEQ ID NO: 538195 - RNA, 23 nt, Artificial Sequence
  Synthetic
agccguuccuuucugggugcagc

SEQ ID NO: 538196 - RNA, 24 nt, Artificial Sequence
  Synthetic
aagccguuccuuucugggugcagc

SEQ ID NO: 538197 - RNA, 18 nt, Artificial Sequence
  Synthetic
aagucccaacugugcagc

SEQ ID NO: 538198 - RNA, 19 nt, Artificial Sequence
  Synthetic
caagucccaacugugcagc

SEQ ID NO: 538199 - RNA, 20 nt, Artificial Sequence
  Synthetic
ucaagucccaacugugcagc

SEQ ID NO: 538200 - RNA, 21 nt, Artificial Sequence
  Synthetic
aucaagucccaacugugcagc

SEQ ID NO: 538201 - RNA, 22 nt, Artificial Sequence
  Synthetic
uaucaagucccaacugugcagc

SEQ ID NO: 538202 - RNA, 23 nt, Artificial Sequence
  Synthetic
auaucaagucccaacugugcagc

SEQ ID NO: 538203 - RNA, 24 nt, Artificial Sequence
  Synthetic
cauaucaagucccaacugugcagc

SEQ ID NO: 538204 - RNA, 18 nt, Artificial Sequence
  Synthetic
cagggaauacugugcagc

SEQ ID NO: 538205 - RNA, 19 nt, Artificial Sequence
  Synthetic
ccagggaauacugugcagc

SEQ ID NO: 538206 - RNA, 20 nt, Artificial Sequence
  Synthetic
accagggaauacugugcagc

SEQ ID NO: 538207 - RNA, 21 nt, Artificial Sequence
  Synthetic
caccagggaauacugugcagc

SEQ ID NO: 538208 - RNA, 22 nt, Artificial Sequence
  Synthetic
acaccagggaauacugugcagc

SEQ ID NO: 538209 - RNA, 23 nt, Artificial Sequence
  Synthetic
uacaccagggaauacugugcagc

SEQ ID NO: 538210 - RNA, 24 nt, Artificial Sequence
  Synthetic
auacaccagggaauacugugcagc

SEQ ID NO: 538211 - RNA, 18 nt, Artificial Sequence
  Synthetic
guucagaaaauuugcagc

SEQ ID NO: 538212 - RNA, 19 nt, Artificial Sequence
  Synthetic
aguucagaaaauuugcagc

SEQ ID NO: 538213 - RNA, 20 nt, Artificial Sequence
  Synthetic
aaguucagaaaauuugcagc

SEQ ID NO: 538214 - RNA, 21 nt, Artificial Sequence
  Synthetic
aaaguucagaaaauuugcagc

SEQ ID NO: 538215 - RNA, 22 nt, Artificial Sequence
  Synthetic
aaaaguucagaaaauuugcagc

SEQ ID NO: 538216 - RNA, 23 nt, Artificial Sequence
  Synthetic
uaaaaguucagaaaauuugcagc

SEQ ID NO: 538217 - RNA, 24 nt, Artificial Sequence
  Synthetic
auaaaaguucagaaaauuugcagc

SEQ ID NO: 538218 - RNA, 18 nt, Artificial Sequence
  Synthetic
uaagaaaguaaaaucagc

SEQ ID NO: 538219 - RNA, 19 nt, Artificial Sequence
  Synthetic
uuaagaaaguaaaaucagc

SEQ ID NO: 538220 - RNA, 20 nt, Artificial Sequence
  Synthetic
auuaagaaaguaaaaucagc

SEQ ID NO: 538221 - RNA, 21 nt, Artificial Sequence
  Synthetic
cauuaagaaaguaaaaucagc

SEQ ID NO: 538222 - RNA, 22 nt, Artificial Sequence
  Synthetic
acauuaagaaaguaaaaucagc

SEQ ID NO: 538223 - RNA, 23 nt, Artificial Sequence
  Synthetic
uacauuaagaaaguaaaaucagc

SEQ ID NO: 538224 - RNA, 24 nt, Artificial Sequence
  Synthetic
auacauuaagaaaguaaaaucagc

SEQ ID NO: 538225 - RNA, 18 nt, Artificial Sequence
  Synthetic
augagaguuuaaaucagc

SEQ ID NO: 538226 - RNA, 19 nt, Artificial Sequence
  Synthetic
uaugagaguuuaaaucagc

SEQ ID NO: 538227 - RNA, 20 nt, Artificial Sequence
  Synthetic
auaugagaguuuaaaucagc

SEQ ID NO: 538228 - RNA, 21 nt, Artificial Sequence
  Synthetic
aauaugagaguuuaaaucagc

SEQ ID NO: 538229 - RNA, 22 nt, Artificial Sequence
  Synthetic
aaauaugagaguuuaaaucagc

SEQ ID NO: 538230 - RNA, 23 nt, Artificial Sequence
  Synthetic
aaaauaugagaguuuaaaucagc

SEQ ID NO: 538231 - RNA, 24 nt, Artificial Sequence
  Synthetic
gaaaauaugagaguuuaaaucagc

SEQ ID NO: 538232 - RNA, 18 nt, Artificial Sequence
  Synthetic
ucaaccucacuaaucagc

SEQ ID NO: 538233 - RNA, 19 nt, Artificial Sequence
  Synthetic
aucaaccucacuaaucagc

SEQ ID NO: 538234 - RNA, 20 nt, Artificial Sequence
  Synthetic
gaucaaccucacuaaucagc

SEQ ID NO: 538235 - RNA, 21 nt, Artificial Sequence
  Synthetic
ugaucaaccucacuaaucagc

SEQ ID NO: 538236 - RNA, 22 nt, Artificial Sequence
  Synthetic
augaucaaccucacuaaucagc

SEQ ID NO: 538237 - RNA, 23 nt, Artificial Sequence
  Synthetic
aaugaucaaccucacuaaucagc

SEQ ID NO: 538238 - RNA, 24 nt, Artificial Sequence
  Synthetic
aaaugaucaaccucacuaaucagc

SEQ ID NO: 538239 - RNA, 18 nt, Artificial Sequence
  Synthetic
caucacuaaugcaucagc

SEQ ID NO: 538240 - RNA, 19 nt, Artificial Sequence
  Synthetic
acaucacuaaugcaucagc

SEQ ID NO: 538241 - RNA, 20 nt, Artificial Sequence
  Synthetic
uacaucacuaaugcaucagc

SEQ ID NO: 538242 - RNA, 21 nt, Artificial Sequence
  Synthetic
uuacaucacuaaugcaucagc

SEQ ID NO: 538243 - RNA, 22 nt, Artificial Sequence
  Synthetic
uuuacaucacuaaugcaucagc

SEQ ID NO: 538244 - RNA, 23 nt, Artificial Sequence
  Synthetic
uuuuacaucacuaaugcaucagc

SEQ ID NO: 538245 - RNA, 24 nt, Artificial Sequence
  Synthetic
cuuuuacaucacuaaugcaucagc

SEQ ID NO: 538246 - RNA, 18 nt, Artificial Sequence
  Synthetic
uggcaguauuucaucagc

SEQ ID NO: 538247 - RNA, 19 nt, Artificial Sequence
  Synthetic
guggcaguauuucaucagc

SEQ ID NO: 538248 - RNA, 20 nt, Artificial Sequence
  Synthetic
uguggcaguauuucaucagc

SEQ ID NO: 538249 - RNA, 21 nt, Artificial Sequence
  Synthetic
auguggcaguauuucaucagc

SEQ ID NO: 538250 - RNA, 22 nt, Artificial Sequence
  Synthetic
gauguggcaguauuucaucagc

SEQ ID NO: 538251 - RNA, 23 nt, Artificial Sequence
  Synthetic
ugauguggcaguauuucaucagc

SEQ ID NO: 538252 - RNA, 24 nt, Artificial Sequence
  Synthetic
cugauguggcaguauuucaucagc

SEQ ID NO: 538253 - RNA, 20 nt, Artificial Sequence
  Synthetic
gccaggaguuugagaucagc

SEQ ID NO: 538254 - RNA, 21 nt, Artificial Sequence
  Synthetic
agccaggaguuugagaucagc

SEQ ID NO: 538255 - RNA, 22 nt, Artificial Sequence
  Synthetic
aagccaggaguuugagaucagc

SEQ ID NO: 538256 - RNA, 23 nt, Artificial Sequence
  Synthetic
gaagccaggaguuugagaucagc

SEQ ID NO: 538257 - RNA, 24 nt, Artificial Sequence
  Synthetic
ugaagccaggaguuugagaucagc

SEQ ID NO: 538258 - RNA, 18 nt, Artificial Sequence
  Synthetic
cuacaacagucuaucagc

SEQ ID NO: 538259 - RNA, 19 nt, Artificial Sequence
  Synthetic
ucuacaacagucuaucagc

SEQ ID NO: 538260 - RNA, 20 nt, Artificial Sequence
  Synthetic
cucuacaacagucuaucagc

SEQ ID NO: 538261 - RNA, 21 nt, Artificial Sequence
  Synthetic
gcucuacaacagucuaucagc

SEQ ID NO: 538262 - RNA, 22 nt, Artificial Sequence
  Synthetic
ugcucuacaacagucuaucagc

SEQ ID NO: 538263 - RNA, 23 nt, Artificial Sequence
  Synthetic
cugcucuacaacagucuaucagc

SEQ ID NO: 538264 - RNA, 24 nt, Artificial Sequence
  Synthetic
ucugcucuacaacagucuaucagc

SEQ ID NO: 538265 - RNA, 18 nt, Artificial Sequence
  Synthetic
guaguucucauuaucagc

SEQ ID NO: 538266 - RNA, 19 nt, Artificial Sequence
  Synthetic
uguaguucucauuaucagc

SEQ ID NO: 538267 - RNA, 20 nt, Artificial Sequence
  Synthetic
uuguaguucucauuaucagc

SEQ ID NO: 538268 - RNA, 21 nt, Artificial Sequence
  Synthetic
uuuguaguucucauuaucagc

SEQ ID NO: 538269 - RNA, 22 nt, Artificial Sequence
  Synthetic
guuuguaguucucauuaucagc

SEQ ID NO: 538270 - RNA, 23 nt, Artificial Sequence
  Synthetic
gguuuguaguucucauuaucagc

SEQ ID NO: 538271 - RNA, 24 nt, Artificial Sequence
  Synthetic
ugguuuguaguucucauuaucagc

SEQ ID NO: 538272 - RNA, 18 nt, Artificial Sequence
  Synthetic
uuccaaucagaacucagc

SEQ ID NO: 538273 - RNA, 19 nt, Artificial Sequence
  Synthetic
cuuccaaucagaacucagc

SEQ ID NO: 538274 - RNA, 20 nt, Artificial Sequence
  Synthetic
gcuuccaaucagaacucagc

SEQ ID NO: 538275 - RNA, 21 nt, Artificial Sequence
  Synthetic
agcuuccaaucagaacucagc

SEQ ID NO: 538276 - RNA, 22 nt, Artificial Sequence
  Synthetic
cagcuuccaaucagaacucagc

SEQ ID NO: 538277 - RNA, 23 nt, Artificial Sequence
  Synthetic
ccagcuuccaaucagaacucagc

SEQ ID NO: 538278 - RNA, 24 nt, Artificial Sequence
  Synthetic
cccagcuuccaaucagaacucagc

SEQ ID NO: 538279 - RNA, 18 nt, Artificial Sequence
  Synthetic
uugucuaaugaacucagc

SEQ ID NO: 538280 - RNA, 19 nt, Artificial Sequence
  Synthetic
uuugucuaaugaacucagc

SEQ ID NO: 538281 - RNA, 20 nt, Artificial Sequence
  Synthetic
guuugucuaaugaacucagc

SEQ ID NO: 538282 - RNA, 21 nt, Artificial Sequence
  Synthetic
uguuugucuaaugaacucagc

SEQ ID NO: 538283 - RNA, 22 nt, Artificial Sequence
  Synthetic
uuguuugucuaaugaacucagc

SEQ ID NO: 538284 - RNA, 23 nt, Artificial Sequence
  Synthetic
auuguuugucuaaugaacucagc

SEQ ID NO: 538285 - RNA, 24 nt, Artificial Sequence
  Synthetic
gauuguuugucuaaugaacucagc

SEQ ID NO: 538286 - RNA, 18 nt, Artificial Sequence
  Synthetic
ggaacagcuuaacucagc

SEQ ID NO: 538287 - RNA, 19 nt, Artificial Sequence
  Synthetic
gggaacagcuuaacucagc

SEQ ID NO: 538288 - RNA, 20 nt, Artificial Sequence
  Synthetic
ggggaacagcuuaacucagc

SEQ ID NO: 538289 - RNA, 21 nt, Artificial Sequence
  Synthetic
gggggaacagcuuaacucagc

SEQ ID NO: 538290 - RNA, 22 nt, Artificial Sequence
  Synthetic
cgggggaacagcuuaacucagc

SEQ ID NO: 538291 - RNA, 23 nt, Artificial Sequence
  Synthetic
ucgggggaacagcuuaacucagc

SEQ ID NO: 538292 - RNA, 24 nt, Artificial Sequence
  Synthetic
cucgggggaacagcuuaacucagc

SEQ ID NO: 538293 - RNA, 18 nt, Artificial Sequence
  Synthetic
aguggccuuuaacucagc

SEQ ID NO: 538294 - RNA, 19 nt, Artificial Sequence
  Synthetic
caguggccuuuaacucagc

SEQ ID NO: 538295 - RNA, 20 nt, Artificial Sequence
  Synthetic
acaguggccuuuaacucagc

SEQ ID NO: 538296 - RNA, 21 nt, Artificial Sequence
  Synthetic
cacaguggccuuuaacucagc

SEQ ID NO: 538297 - RNA, 22 nt, Artificial Sequence
  Synthetic
gcacaguggccuuuaacucagc

SEQ ID NO: 538298 - RNA, 23 nt, Artificial Sequence
  Synthetic
agcacaguggccuuuaacucagc

SEQ ID NO: 538299 - RNA, 24 nt, Artificial Sequence
  Synthetic
gagcacaguggccuuuaacucagc

SEQ ID NO: 538300 - RNA, 18 nt, Artificial Sequence
  Synthetic
cuugcuuugucacucagc

SEQ ID NO: 538301 - RNA, 19 nt, Artificial Sequence
  Synthetic
ucuugcuuugucacucagc

SEQ ID NO: 538302 - RNA, 20 nt, Artificial Sequence
  Synthetic
gucuugcuuugucacucagc

SEQ ID NO: 538303 - RNA, 21 nt, Artificial Sequence
  Synthetic
ggucuugcuuugucacucagc

SEQ ID NO: 538304 - RNA, 22 nt, Artificial Sequence
  Synthetic
aggucuugcuuugucacucagc

SEQ ID NO: 538305 - RNA, 23 nt, Artificial Sequence
  Synthetic
aaggucuugcuuugucacucagc

SEQ ID NO: 538306 - RNA, 24 nt, Artificial Sequence
  Synthetic
caaggucuugcuuugucacucagc

SEQ ID NO: 538307 - RNA, 18 nt, Artificial Sequence
  Synthetic
aucugagaccaccucagc

SEQ ID NO: 538308 - RNA, 19 nt, Artificial Sequence
  Synthetic
caucugagaccaccucagc

SEQ ID NO: 538309 - RNA, 20 nt, Artificial Sequence
  Synthetic
ccaucugagaccaccucagc

SEQ ID NO: 538310 - RNA, 21 nt, Artificial Sequence
  Synthetic
uccaucugagaccaccucagc

SEQ ID NO: 538311 - RNA, 22 nt, Artificial Sequence
  Synthetic
cuccaucugagaccaccucagc

SEQ ID NO: 538312 - RNA, 23 nt, Artificial Sequence
  Synthetic
ucuccaucugagaccaccucagc

SEQ ID NO: 538313 - RNA, 24 nt, Artificial Sequence
  Synthetic
aucuccaucugagaccaccucagc

SEQ ID NO: 538314 - RNA, 18 nt, Artificial Sequence
  Synthetic
gacugugauaugcucagc

SEQ ID NO: 538315 - RNA, 19 nt, Artificial Sequence
  Synthetic
ggacugugauaugcucagc

SEQ ID NO: 538316 - RNA, 20 nt, Artificial Sequence
  Synthetic
gggacugugauaugcucagc

SEQ ID NO: 538317 - RNA, 21 nt, Artificial Sequence
  Synthetic
agggacugugauaugcucagc

SEQ ID NO: 538318 - RNA, 22 nt, Artificial Sequence
  Synthetic
aagggacugugauaugcucagc

SEQ ID NO: 538319 - RNA, 23 nt, Artificial Sequence
  Synthetic
uaagggacugugauaugcucagc

SEQ ID NO: 538320 - RNA, 24 nt, Artificial Sequence
  Synthetic
guaagggacugugauaugcucagc

SEQ ID NO: 538321 - RNA, 18 nt, Artificial Sequence
  Synthetic
ugucaguuguaucucagc

SEQ ID NO: 538322 - RNA, 19 nt, Artificial Sequence
  Synthetic
cugucaguuguaucucagc

SEQ ID NO: 538323 - RNA, 20 nt, Artificial Sequence
  Synthetic
ucugucaguuguaucucagc

SEQ ID NO: 538324 - RNA, 21 nt, Artificial Sequence
  Synthetic
aucugucaguuguaucucagc

SEQ ID NO: 538325 - RNA, 22 nt, Artificial Sequence
  Synthetic
uaucugucaguuguaucucagc

SEQ ID NO: 538326 - RNA, 23 nt, Artificial Sequence
  Synthetic
auaucugucaguuguaucucagc

SEQ ID NO: 538327 - RNA, 24 nt, Artificial Sequence
  Synthetic
uauaucugucaguuguaucucagc

SEQ ID NO: 538328 - RNA, 18 nt, Artificial Sequence
  Synthetic
cuugauuuggcucucagc

SEQ ID NO: 538329 - RNA, 19 nt, Artificial Sequence
  Synthetic
ucuugauuuggcucucagc

SEQ ID NO: 538330 - RNA, 20 nt, Artificial Sequence
  Synthetic
uucuugauuuggcucucagc

SEQ ID NO: 538331 - RNA, 21 nt, Artificial Sequence
  Synthetic
auucuugauuuggcucucagc

SEQ ID NO: 538332 - RNA, 22 nt, Artificial Sequence
  Synthetic
cauucuugauuuggcucucagc

SEQ ID NO: 538333 - RNA, 23 nt, Artificial Sequence
  Synthetic
gcauucuugauuuggcucucagc

SEQ ID NO: 538334 - RNA, 24 nt, Artificial Sequence
  Synthetic
ugcauucuugauuuggcucucagc

SEQ ID NO: 538335 - RNA, 18 nt, Artificial Sequence
  Synthetic
gggauaugcucucucagc

SEQ ID NO: 538336 - RNA, 19 nt, Artificial Sequence
  Synthetic
agggauaugcucucucagc

SEQ ID NO: 538337 - RNA, 20 nt, Artificial Sequence
  Synthetic
aagggauaugcucucucagc

SEQ ID NO: 538338 - RNA, 21 nt, Artificial Sequence
  Synthetic
gaagggauaugcucucucagc

SEQ ID NO: 538339 - RNA, 22 nt, Artificial Sequence
  Synthetic
agaagggauaugcucucucagc

SEQ ID NO: 538340 - RNA, 23 nt, Artificial Sequence
  Synthetic
gagaagggauaugcucucucagc

SEQ ID NO: 538341 - RNA, 24 nt, Artificial Sequence
  Synthetic
agagaagggauaugcucucucagc

SEQ ID NO: 538342 - RNA, 18 nt, Artificial Sequence
  Synthetic
ugucagcugugucucagc

SEQ ID NO: 538343 - RNA, 19 nt, Artificial Sequence
  Synthetic
cugucagcugugucucagc

SEQ ID NO: 538344 - RNA, 20 nt, Artificial Sequence
  Synthetic
ucugucagcugugucucagc

SEQ ID NO: 538345 - RNA, 21 nt, Artificial Sequence
  Synthetic
aucugucagcugugucucagc

SEQ ID NO: 538346 - RNA, 22 nt, Artificial Sequence
  Synthetic
uaucugucagcugugucucagc

SEQ ID NO: 538347 - RNA, 23 nt, Artificial Sequence
  Synthetic
auaucugucagcugugucucagc

SEQ ID NO: 538348 - RNA, 24 nt, Artificial Sequence
  Synthetic
uauaucugucagcugugucucagc

SEQ ID NO: 538349 - RNA, 18 nt, Artificial Sequence
  Synthetic
caggagggaaaagucagc

SEQ ID NO: 538350 - RNA, 19 nt, Artificial Sequence
  Synthetic
ccaggagggaaaagucagc

SEQ ID NO: 538351 - RNA, 20 nt, Artificial Sequence
  Synthetic
accaggagggaaaagucagc

SEQ ID NO: 538352 - RNA, 21 nt, Artificial Sequence
  Synthetic
gaccaggagggaaaagucagc

SEQ ID NO: 538353 - RNA, 22 nt, Artificial Sequence
  Synthetic
ggaccaggagggaaaagucagc

SEQ ID NO: 538354 - RNA, 23 nt, Artificial Sequence
  Synthetic
aggaccaggagggaaaagucagc

SEQ ID NO: 538355 - RNA, 24 nt, Artificial Sequence
  Synthetic
caggaccaggagggaaaagucagc

SEQ ID NO: 538356 - RNA, 18 nt, Artificial Sequence
  Synthetic
uaaguggcauaagucagc

SEQ ID NO: 538357 - RNA, 19 nt, Artificial Sequence
  Synthetic
guaaguggcauaagucagc

SEQ ID NO: 538358 - RNA, 20 nt, Artificial Sequence
  Synthetic
aguaaguggcauaagucagc

SEQ ID NO: 538359 - RNA, 21 nt, Artificial Sequence
  Synthetic
aaguaaguggcauaagucagc

SEQ ID NO: 538360 - RNA, 22 nt, Artificial Sequence
  Synthetic
gaaguaaguggcauaagucagc

SEQ ID NO: 538361 - RNA, 23 nt, Artificial Sequence
  Synthetic
ugaaguaaguggcauaagucagc

SEQ ID NO: 538362 - RNA, 24 nt, Artificial Sequence
  Synthetic
uugaaguaaguggcauaagucagc

SEQ ID NO: 538363 - RNA, 18 nt, Artificial Sequence
  Synthetic
uaaaggacuucagucagc

SEQ ID NO: 538364 - RNA, 19 nt, Artificial Sequence
  Synthetic
cuaaaggacuucagucagc

SEQ ID NO: 538365 - RNA, 20 nt, Artificial Sequence
  Synthetic
acuaaaggacuucagucagc

SEQ ID NO: 538366 - RNA, 21 nt, Artificial Sequence
  Synthetic
gacuaaaggacuucagucagc

SEQ ID NO: 538367 - RNA, 22 nt, Artificial Sequence
  Synthetic
agacuaaaggacuucagucagc

SEQ ID NO: 538368 - RNA, 23 nt, Artificial Sequence
  Synthetic
cagacuaaaggacuucagucagc

SEQ ID NO: 538369 - RNA, 24 nt, Artificial Sequence
  Synthetic
gcagacuaaaggacuucagucagc

SEQ ID NO: 538370 - RNA, 18 nt, Artificial Sequence
  Synthetic
uuucaguauauagucagc

SEQ ID NO: 538371 - RNA, 19 nt, Artificial Sequence
  Synthetic
auuucaguauauagucagc

SEQ ID NO: 538372 - RNA, 20 nt, Artificial Sequence
  Synthetic
uauuucaguauauagucagc

SEQ ID NO: 538373 - RNA, 21 nt, Artificial Sequence
  Synthetic
auauuucaguauauagucagc

SEQ ID NO: 538374 - RNA, 22 nt, Artificial Sequence
  Synthetic
aauauuucaguauauagucagc

SEQ ID NO: 538375 - RNA, 23 nt, Artificial Sequence
  Synthetic
aaauauuucaguauauagucagc

SEQ ID NO: 538376 - RNA, 24 nt, Artificial Sequence
  Synthetic
uaaauauuucaguauauagucagc

SEQ ID NO: 538377 - RNA, 18 nt, Artificial Sequence
  Synthetic
uuuuguaagcuugucagc

SEQ ID NO: 538378 - RNA, 19 nt, Artificial Sequence
  Synthetic
uuuuuguaagcuugucagc

SEQ ID NO: 538379 - RNA, 20 nt, Artificial Sequence
  Synthetic
auuuuuguaagcuugucagc

SEQ ID NO: 538380 - RNA, 21 nt, Artificial Sequence
  Synthetic
uauuuuuguaagcuugucagc

SEQ ID NO: 538381 - RNA, 22 nt, Artificial Sequence
  Synthetic
uuauuuuuguaagcuugucagc

SEQ ID NO: 538382 - RNA, 23 nt, Artificial Sequence
  Synthetic
uuuauuuuuguaagcuugucagc

SEQ ID NO: 538383 - RNA, 24 nt, Artificial Sequence
  Synthetic
uuuuauuuuuguaagcuugucagc

SEQ ID NO: 538384 - RNA, 18 nt, Artificial Sequence
  Synthetic
gaaaagggugcauucagc

SEQ ID NO: 538385 - RNA, 19 nt, Artificial Sequence
  Synthetic
agaaaagggugcauucagc

SEQ ID NO: 538386 - RNA, 20 nt, Artificial Sequence
  Synthetic
gagaaaagggugcauucagc

SEQ ID NO: 538387 - RNA, 21 nt, Artificial Sequence
  Synthetic
ggagaaaagggugcauucagc

SEQ ID NO: 538388 - RNA, 22 nt, Artificial Sequence
  Synthetic
uggagaaaagggugcauucagc

SEQ ID NO: 538389 - RNA, 23 nt, Artificial Sequence
  Synthetic
auggagaaaagggugcauucagc

SEQ ID NO: 538390 - RNA, 24 nt, Artificial Sequence
  Synthetic
cauggagaaaagggugcauucagc

SEQ ID NO: 538391 - RNA, 18 nt, Artificial Sequence
  Synthetic
ucaucacccauauucagc

SEQ ID NO: 538392 - RNA, 19 nt, Artificial Sequence
  Synthetic
aucaucacccauauucagc

SEQ ID NO: 538393 - RNA, 20 nt, Artificial Sequence
  Synthetic
uaucaucacccauauucagc

SEQ ID NO: 538394 - RNA, 21 nt, Artificial Sequence
  Synthetic
auaucaucacccauauucagc

SEQ ID NO: 538395 - RNA, 22 nt, Artificial Sequence
  Synthetic
aauaucaucacccauauucagc

SEQ ID NO: 538396 - RNA, 23 nt, Artificial Sequence
  Synthetic
aaauaucaucacccauauucagc

SEQ ID NO: 538397 - RNA, 24 nt, Artificial Sequence
  Synthetic
gaaauaucaucacccauauucagc

SEQ ID NO: 538398 - RNA, 18 nt, Artificial Sequence
  Synthetic
aauaauuaguaguucagc

SEQ ID NO: 538399 - RNA, 19 nt, Artificial Sequence
  Synthetic
uaauaauuaguaguucagc

SEQ ID NO: 538400 - RNA, 20 nt, Artificial Sequence
  Synthetic
uuaauaauuaguaguucagc

SEQ ID NO: 538401 - RNA, 21 nt, Artificial Sequence
  Synthetic
auuaauaauuaguaguucagc

SEQ ID NO: 538402 - RNA, 22 nt, Artificial Sequence
  Synthetic
uauuaauaauuaguaguucagc

SEQ ID NO: 538403 - RNA, 23 nt, Artificial Sequence
  Synthetic
auauuaauaauuaguaguucagc

SEQ ID NO: 538404 - RNA, 24 nt, Artificial Sequence
  Synthetic
gauauuaauaauuaguaguucagc

SEQ ID NO: 538405 - RNA, 18 nt, Artificial Sequence
  Synthetic
gcacaacaaagguucagc

SEQ ID NO: 538406 - RNA, 19 nt, Artificial Sequence
  Synthetic
ggcacaacaaagguucagc

SEQ ID NO: 538407 - RNA, 20 nt, Artificial Sequence
  Synthetic
uggcacaacaaagguucagc

SEQ ID NO: 538408 - RNA, 21 nt, Artificial Sequence
  Synthetic
cuggcacaacaaagguucagc

SEQ ID NO: 538409 - RNA, 22 nt, Artificial Sequence
  Synthetic
ccuggcacaacaaagguucagc

SEQ ID NO: 538410 - RNA, 23 nt, Artificial Sequence
  Synthetic
uccuggcacaacaaagguucagc

SEQ ID NO: 538411 - RNA, 24 nt, Artificial Sequence
  Synthetic
cuccuggcacaacaaagguucagc

SEQ ID NO: 538412 - RNA, 18 nt, Artificial Sequence
  Synthetic
cuauuccaaaauuucagc

SEQ ID NO: 538413 - RNA, 19 nt, Artificial Sequence
  Synthetic
gcuauuccaaaauuucagc

SEQ ID NO: 538414 - RNA, 20 nt, Artificial Sequence
  Synthetic
agcuauuccaaaauuucagc

SEQ ID NO: 538415 - RNA, 21 nt, Artificial Sequence
  Synthetic
aagcuauuccaaaauuucagc

SEQ ID NO: 538416 - RNA, 22 nt, Artificial Sequence
  Synthetic
uaagcuauuccaaaauuucagc

SEQ ID NO: 538417 - RNA, 23 nt, Artificial Sequence
  Synthetic
uuaagcuauuccaaaauuucagc

SEQ ID NO: 538418 - RNA, 24 nt, Artificial Sequence
  Synthetic
uuuaagcuauuccaaaauuucagc

SEQ ID NO: 538419 - RNA, 18 nt, Artificial Sequence
  Synthetic
agaagguugaauuucagc

SEQ ID NO: 538420 - RNA, 19 nt, Artificial Sequence
  Synthetic
aagaagguugaauuucagc

SEQ ID NO: 538421 - RNA, 20 nt, Artificial Sequence
  Synthetic
aaagaagguugaauuucagc

SEQ ID NO: 538422 - RNA, 21 nt, Artificial Sequence
  Synthetic
gaaagaagguugaauuucagc

SEQ ID NO: 538423 - RNA, 22 nt, Artificial Sequence
  Synthetic
agaaagaagguugaauuucagc

SEQ ID NO: 538424 - RNA, 23 nt, Artificial Sequence
  Synthetic
aagaaagaagguugaauuucagc

SEQ ID NO: 538425 - RNA, 24 nt, Artificial Sequence
  Synthetic
gaagaaagaagguugaauuucagc

SEQ ID NO: 538426 - RNA, 18 nt, Artificial Sequence
  Synthetic
ugcuucccuaauuucagc

SEQ ID NO: 538427 - RNA, 19 nt, Artificial Sequence
  Synthetic
augcuucccuaauuucagc

SEQ ID NO: 538428 - RNA, 20 nt, Artificial Sequence
  Synthetic
aaugcuucccuaauuucagc

SEQ ID NO: 538429 - RNA, 21 nt, Artificial Sequence
  Synthetic
aaaugcuucccuaauuucagc

SEQ ID NO: 538430 - RNA, 22 nt, Artificial Sequence
  Synthetic
aaaaugcuucccuaauuucagc

SEQ ID NO: 538431 - RNA, 23 nt, Artificial Sequence
  Synthetic
uaaaaugcuucccuaauuucagc

SEQ ID NO: 538432 - RNA, 24 nt, Artificial Sequence
  Synthetic
cuaaaaugcuucccuaauuucagc

SEQ ID NO: 538433 - RNA, 18 nt, Artificial Sequence
  Synthetic
acggagauaucuuucagc

SEQ ID NO: 538434 - RNA, 19 nt, Artificial Sequence
  Synthetic
aacggagauaucuuucagc

SEQ ID NO: 538435 - RNA, 20 nt, Artificial Sequence
  Synthetic
gaacggagauaucuuucagc

SEQ ID NO: 538436 - RNA, 21 nt, Artificial Sequence
  Synthetic
ggaacggagauaucuuucagc

SEQ ID NO: 538437 - RNA, 22 nt, Artificial Sequence
  Synthetic
gggaacggagauaucuuucagc

SEQ ID NO: 538438 - RNA, 23 nt, Artificial Sequence
  Synthetic
ggggaacggagauaucuuucagc

SEQ ID NO: 538439 - RNA, 24 nt, Artificial Sequence
  Synthetic
uggggaacggagauaucuuucagc

SEQ ID NO: 538440 - RNA, 18 nt, Artificial Sequence
  Synthetic
cuguguaacauuuucagc

SEQ ID NO: 538441 - RNA, 19 nt, Artificial Sequence
  Synthetic
ccuguguaacauuuucagc

SEQ ID NO: 538442 - RNA, 20 nt, Artificial Sequence
  Synthetic
uccuguguaacauuuucagc

SEQ ID NO: 538443 - RNA, 21 nt, Artificial Sequence
  Synthetic
uuccuguguaacauuuucagc

SEQ ID NO: 538444 - RNA, 22 nt, Artificial Sequence
  Synthetic
cuuccuguguaacauuuucagc

SEQ ID NO: 538445 - RNA, 23 nt, Artificial Sequence
  Synthetic
ucuuccuguguaacauuuucagc

SEQ ID NO: 538446 - RNA, 24 nt, Artificial Sequence
  Synthetic
gucuuccuguguaacauuuucagc

SEQ ID NO: 538447 - RNA, 18 nt, Artificial Sequence
  Synthetic
ucagaguuggaaaagagc

SEQ ID NO: 538448 - RNA, 19 nt, Artificial Sequence
  Synthetic
aucagaguuggaaaagagc

SEQ ID NO: 538449 - RNA, 20 nt, Artificial Sequence
  Synthetic
aaucagaguuggaaaagagc

SEQ ID NO: 538450 - RNA, 21 nt, Artificial Sequence
  Synthetic
gaaucagaguuggaaaagagc

SEQ ID NO: 538451 - RNA, 22 nt, Artificial Sequence
  Synthetic
agaaucagaguuggaaaagagc

SEQ ID NO: 538452 - RNA, 23 nt, Artificial Sequence
  Synthetic
aagaaucagaguuggaaaagagc

SEQ ID NO: 538453 - RNA, 24 nt, Artificial Sequence
  Synthetic
gaagaaucagaguuggaaaagagc

SEQ ID NO: 538454 - RNA, 18 nt, Artificial Sequence
  Synthetic
uuuggucaaucaaagagc

SEQ ID NO: 538455 - RNA, 19 nt, Artificial Sequence
  Synthetic
cuuuggucaaucaaagagc

SEQ ID NO: 538456 - RNA, 20 nt, Artificial Sequence
  Synthetic
gcuuuggucaaucaaagagc

SEQ ID NO: 538457 - RNA, 21 nt, Artificial Sequence
  Synthetic
agcuuuggucaaucaaagagc

SEQ ID NO: 538458 - RNA, 22 nt, Artificial Sequence
  Synthetic
aagcuuuggucaaucaaagagc

SEQ ID NO: 538459 - RNA, 23 nt, Artificial Sequence
  Synthetic
uaagcuuuggucaaucaaagagc

SEQ ID NO: 538460 - RNA, 24 nt, Artificial Sequence
  Synthetic
uuaagcuuuggucaaucaaagagc

SEQ ID NO: 538461 - RNA, 18 nt, Artificial Sequence
  Synthetic
augccuacaucaaagagc

SEQ ID NO: 538462 - RNA, 19 nt, Artificial Sequence
  Synthetic
aaugccuacaucaaagagc

SEQ ID NO: 538463 - RNA, 20 nt, Artificial Sequence
  Synthetic
aaaugccuacaucaaagagc

SEQ ID NO: 538464 - RNA, 21 nt, Artificial Sequence
  Synthetic
caaaugccuacaucaaagagc

SEQ ID NO: 538465 - RNA, 22 nt, Artificial Sequence
  Synthetic
ccaaaugccuacaucaaagagc

SEQ ID NO: 538466 - RNA, 23 nt, Artificial Sequence
  Synthetic
accaaaugccuacaucaaagagc

SEQ ID NO: 538467 - RNA, 24 nt, Artificial Sequence
  Synthetic
caccaaaugccuacaucaaagagc

SEQ ID NO: 538468 - RNA, 18 nt, Artificial Sequence
  Synthetic
ucaaaauggggaaagagc

SEQ ID NO: 538469 - RNA, 19 nt, Artificial Sequence
  Synthetic
cucaaaauggggaaagagc

SEQ ID NO: 538470 - RNA, 20 nt, Artificial Sequence
  Synthetic
gcucaaaauggggaaagagc

SEQ ID NO: 538471 - RNA, 21 nt, Artificial Sequence
  Synthetic
agcucaaaauggggaaagagc

SEQ ID NO: 538472 - RNA, 22 nt, Artificial Sequence
  Synthetic
aagcucaaaauggggaaagagc

SEQ ID NO: 538473 - RNA, 23 nt, Artificial Sequence
  Synthetic
aaagcucaaaauggggaaagagc

SEQ ID NO: 538474 - RNA, 24 nt, Artificial Sequence
  Synthetic
aaaagcucaaaauggggaaagagc

SEQ ID NO: 538475 - RNA, 18 nt, Artificial Sequence
  Synthetic
ccucccagaauaaagagc

SEQ ID NO: 538476 - RNA, 19 nt, Artificial Sequence
  Synthetic
gccucccagaauaaagagc

SEQ ID NO: 538477 - RNA, 20 nt, Artificial Sequence
  Synthetic
agccucccagaauaaagagc

SEQ ID NO: 538478 - RNA, 21 nt, Artificial Sequence
  Synthetic
cagccucccagaauaaagagc

SEQ ID NO: 538479 - RNA, 22 nt, Artificial Sequence
  Synthetic
ucagccucccagaauaaagagc

SEQ ID NO: 538480 - RNA, 23 nt, Artificial Sequence
  Synthetic
gucagccucccagaauaaagagc

SEQ ID NO: 538481 - RNA, 24 nt, Artificial Sequence
  Synthetic
ggucagccucccagaauaaagagc

SEQ ID NO: 538482 - RNA, 18 nt, Artificial Sequence
  Synthetic
uguccuuuuaagaagagc

SEQ ID NO: 538483 - RNA, 19 nt, Artificial Sequence
  Synthetic
guguccuuuuaagaagagc

SEQ ID NO: 538484 - RNA, 20 nt, Artificial Sequence
  Synthetic
aguguccuuuuaagaagagc

SEQ ID NO: 538485 - RNA, 21 nt, Artificial Sequence
  Synthetic
uaguguccuuuuaagaagagc

SEQ ID NO: 538486 - RNA, 22 nt, Artificial Sequence
  Synthetic
uuaguguccuuuuaagaagagc

SEQ ID NO: 538487 - RNA, 23 nt, Artificial Sequence
  Synthetic
auuaguguccuuuuaagaagagc

SEQ ID NO: 538488 - RNA, 24 nt, Artificial Sequence
  Synthetic
gauuaguguccuuuuaagaagagc

SEQ ID NO: 538489 - RNA, 18 nt, Artificial Sequence
  Synthetic
agugggagacagaagagc

SEQ ID NO: 538490 - RNA, 19 nt, Artificial Sequence
  Synthetic
uagugggagacagaagagc

SEQ ID NO: 538491 - RNA, 20 nt, Artificial Sequence
  Synthetic
cuagugggagacagaagagc

SEQ ID NO: 538492 - RNA, 21 nt, Artificial Sequence
  Synthetic
acuagugggagacagaagagc

SEQ ID NO: 538493 - RNA, 22 nt, Artificial Sequence
  Synthetic
cacuagugggagacagaagagc

SEQ ID NO: 538494 - RNA, 23 nt, Artificial Sequence
  Synthetic
acacuagugggagacagaagagc

SEQ ID NO: 538495 - RNA, 24 nt, Artificial Sequence
  Synthetic
cacacuagugggagacagaagagc

SEQ ID NO: 538496 - RNA, 18 nt, Artificial Sequence
  Synthetic
aaaagggcaaggaagagc

SEQ ID NO: 538497 - RNA, 19 nt, Artificial Sequence
  Synthetic
uaaaagggcaaggaagagc

SEQ ID NO: 538498 - RNA, 20 nt, Artificial Sequence
  Synthetic
uuaaaagggcaaggaagagc

SEQ ID NO: 538499 - RNA, 21 nt, Artificial Sequence
  Synthetic
uuuaaaagggcaaggaagagc

SEQ ID NO: 538500 - RNA, 22 nt, Artificial Sequence
  Synthetic
uuuuaaaagggcaaggaagagc

SEQ ID NO: 538501 - RNA, 23 nt, Artificial Sequence
  Synthetic
cuuuuaaaagggcaaggaagagc

SEQ ID NO: 538502 - RNA, 24 nt, Artificial Sequence
  Synthetic
ccuuuuaaaagggcaaggaagagc

SEQ ID NO: 538503 - RNA, 18 nt, Artificial Sequence
  Synthetic
aauagaguagggaagagc

SEQ ID NO: 538504 - RNA, 19 nt, Artificial Sequence
  Synthetic
aaauagaguagggaagagc

SEQ ID NO: 538505 - RNA, 20 nt, Artificial Sequence
  Synthetic
gaaauagaguagggaagagc

SEQ ID NO: 538506 - RNA, 21 nt, Artificial Sequence
  Synthetic
agaaauagaguagggaagagc

SEQ ID NO: 538507 - RNA, 22 nt, Artificial Sequence
  Synthetic
aagaaauagaguagggaagagc

SEQ ID NO: 538508 - RNA, 23 nt, Artificial Sequence
  Synthetic
caagaaauagaguagggaagagc

SEQ ID NO: 538509 - RNA, 24 nt, Artificial Sequence
  Synthetic
ccaagaaauagaguagggaagagc

SEQ ID NO: 538510 - RNA, 18 nt, Artificial Sequence
  Synthetic
uguucauuagugaagagc

SEQ ID NO: 538511 - RNA, 19 nt, Artificial Sequence
  Synthetic
uuguucauuagugaagagc

SEQ ID NO: 538512 - RNA, 20 nt, Artificial Sequence
  Synthetic
auuguucauuagugaagagc

SEQ ID NO: 538513 - RNA, 21 nt, Artificial Sequence
  Synthetic
cauuguucauuagugaagagc

SEQ ID NO: 538514 - RNA, 22 nt, Artificial Sequence
  Synthetic
gcauuguucauuagugaagagc

SEQ ID NO: 538515 - RNA, 23 nt, Artificial Sequence
  Synthetic
agcauuguucauuagugaagagc

SEQ ID NO: 538516 - RNA, 24 nt, Artificial Sequence
  Synthetic
cagcauuguucauuagugaagagc

SEQ ID NO: 538517 - RNA, 18 nt, Artificial Sequence
  Synthetic
auagccugggcuaagagc

SEQ ID NO: 538518 - RNA, 19 nt, Artificial Sequence
  Synthetic
cauagccugggcuaagagc

SEQ ID NO: 538519 - RNA, 20 nt, Artificial Sequence
  Synthetic
ucauagccugggcuaagagc

SEQ ID NO: 538520 - RNA, 21 nt, Artificial Sequence
  Synthetic
gucauagccugggcuaagagc

SEQ ID NO: 538521 - RNA, 22 nt, Artificial Sequence
  Synthetic
agucauagccugggcuaagagc

SEQ ID NO: 538522 - RNA, 23 nt, Artificial Sequence
  Synthetic
uagucauagccugggcuaagagc

SEQ ID NO: 538523 - RNA, 24 nt, Artificial Sequence
  Synthetic
cuagucauagccugggcuaagagc

SEQ ID NO: 538524 - RNA, 18 nt, Artificial Sequence
  Synthetic
ccuguaauaaguaagagc

SEQ ID NO: 538525 - RNA, 19 nt, Artificial Sequence
  Synthetic
uccuguaauaaguaagagc

SEQ ID NO: 538526 - RNA, 20 nt, Artificial Sequence
  Synthetic
cuccuguaauaaguaagagc

SEQ ID NO: 538527 - RNA, 21 nt, Artificial Sequence
  Synthetic
ccuccuguaauaaguaagagc

SEQ ID NO: 538528 - RNA, 22 nt, Artificial Sequence
  Synthetic
cccuccuguaauaaguaagagc

SEQ ID NO: 538529 - RNA, 23 nt, Artificial Sequence
  Synthetic
acccuccuguaauaaguaagagc

SEQ ID NO: 538530 - RNA, 24 nt, Artificial Sequence
  Synthetic
uacccuccuguaauaaguaagagc

SEQ ID NO: 538531 - RNA, 18 nt, Artificial Sequence
  Synthetic
aacaaguaaguuaagagc

SEQ ID NO: 538532 - RNA, 19 nt, Artificial Sequence
  Synthetic
aaacaaguaaguuaagagc

SEQ ID NO: 538533 - RNA, 20 nt, Artificial Sequence
  Synthetic
aaaacaaguaaguuaagagc

SEQ ID NO: 538534 - RNA, 21 nt, Artificial Sequence
  Synthetic
uaaaacaaguaaguuaagagc

SEQ ID NO: 538535 - RNA, 22 nt, Artificial Sequence
  Synthetic
guaaaacaaguaaguuaagagc

SEQ ID NO: 538536 - RNA, 23 nt, Artificial Sequence
  Synthetic
aguaaaacaaguaaguuaagagc

SEQ ID NO: 538537 - RNA, 24 nt, Artificial Sequence
  Synthetic
caguaaaacaaguaaguuaagagc

SEQ ID NO: 538538 - RNA, 18 nt, Artificial Sequence
  Synthetic
aguaaagcaaaacagagc

SEQ ID NO: 538539 - RNA, 19 nt, Artificial Sequence
  Synthetic
caguaaagcaaaacagagc

SEQ ID NO: 538540 - RNA, 20 nt, Artificial Sequence
  Synthetic
gcaguaaagcaaaacagagc

SEQ ID NO: 538541 - RNA, 21 nt, Artificial Sequence
  Synthetic
ggcaguaaagcaaaacagagc

SEQ ID NO: 538542 - RNA, 22 nt, Artificial Sequence
  Synthetic
aggcaguaaagcaaaacagagc

SEQ ID NO: 538543 - RNA, 23 nt, Artificial Sequence
  Synthetic
aaggcaguaaagcaaaacagagc

SEQ ID NO: 538544 - RNA, 24 nt, Artificial Sequence
  Synthetic
aaaggcaguaaagcaaaacagagc

SEQ ID NO: 538545 - RNA, 18 nt, Artificial Sequence
  Synthetic
uauaauggagcacagagc

SEQ ID NO: 538546 - RNA, 19 nt, Artificial Sequence
  Synthetic
guauaauggagcacagagc

SEQ ID NO: 538547 - RNA, 20 nt, Artificial Sequence
  Synthetic
uguauaauggagcacagagc

SEQ ID NO: 538548 - RNA, 21 nt, Artificial Sequence
  Synthetic
auguauaauggagcacagagc

SEQ ID NO: 538549 - RNA, 22 nt, Artificial Sequence
  Synthetic
aauguauaauggagcacagagc

SEQ ID NO: 538550 - RNA, 23 nt, Artificial Sequence
  Synthetic
caauguauaauggagcacagagc

SEQ ID NO: 538551 - RNA, 24 nt, Artificial Sequence
  Synthetic
gcaauguauaauggagcacagagc

SEQ ID NO: 538552 - RNA, 18 nt, Artificial Sequence
  Synthetic
agcucuguaagacagagc

SEQ ID NO: 538553 - RNA, 19 nt, Artificial Sequence
  Synthetic
uagcucuguaagacagagc

SEQ ID NO: 538554 - RNA, 20 nt, Artificial Sequence
  Synthetic
guagcucuguaagacagagc

SEQ ID NO: 538555 - RNA, 21 nt, Artificial Sequence
  Synthetic
cguagcucuguaagacagagc

SEQ ID NO: 538556 - RNA, 22 nt, Artificial Sequence
  Synthetic
ccguagcucuguaagacagagc

SEQ ID NO: 538557 - RNA, 23 nt, Artificial Sequence
  Synthetic
uccguagcucuguaagacagagc

SEQ ID NO: 538558 - RNA, 24 nt, Artificial Sequence
  Synthetic
auccguagcucuguaagacagagc

SEQ ID NO: 538559 - RNA, 18 nt, Artificial Sequence
  Synthetic
gacagacagagacagagc

SEQ ID NO: 538560 - RNA, 19 nt, Artificial Sequence
  Synthetic
agacagacagagacagagc

SEQ ID NO: 538561 - RNA, 20 nt, Artificial Sequence
  Synthetic
gagacagacagagacagagc

SEQ ID NO: 538562 - RNA, 21 nt, Artificial Sequence
  Synthetic
agagacagacagagacagagc

SEQ ID NO: 538563 - RNA, 22 nt, Artificial Sequence
  Synthetic
gagagacagacagagacagagc

SEQ ID NO: 538564 - RNA, 23 nt, Artificial Sequence
  Synthetic
agagagacagacagagacagagc

SEQ ID NO: 538565 - RNA, 24 nt, Artificial Sequence
  Synthetic
aagagagacagacagagacagagc

SEQ ID NO: 538566 - RNA, 18 nt, Artificial Sequence
  Synthetic
gaaugaaauagacagagc

SEQ ID NO: 538567 - RNA, 19 nt, Artificial Sequence
  Synthetic
ugaaugaaauagacagagc

SEQ ID NO: 538568 - RNA, 20 nt, Artificial Sequence
  Synthetic
gugaaugaaauagacagagc

SEQ ID NO: 538569 - RNA, 21 nt, Artificial Sequence
  Synthetic
ggugaaugaaauagacagagc

SEQ ID NO: 538570 - RNA, 22 nt, Artificial Sequence
  Synthetic
gggugaaugaaauagacagagc

SEQ ID NO: 538571 - RNA, 23 nt, Artificial Sequence
  Synthetic
ugggugaaugaaauagacagagc

SEQ ID NO: 538572 - RNA, 24 nt, Artificial Sequence
  Synthetic
cugggugaaugaaauagacagagc

SEQ ID NO: 538573 - RNA, 18 nt, Artificial Sequence
  Synthetic
gcuaccugcggacagagc

SEQ ID NO: 538574 - RNA, 19 nt, Artificial Sequence
  Synthetic
ugcuaccugcggacagagc

SEQ ID NO: 538575 - RNA, 20 nt, Artificial Sequence
  Synthetic
gugcuaccugcggacagagc

SEQ ID NO: 538576 - RNA, 21 nt, Artificial Sequence
  Synthetic
agugcuaccugcggacagagc

SEQ ID NO: 538577 - RNA, 22 nt, Artificial Sequence
  Synthetic
cagugcuaccugcggacagagc

SEQ ID NO: 538578 - RNA, 23 nt, Artificial Sequence
  Synthetic
ccagugcuaccugcggacagagc

SEQ ID NO: 538579 - RNA, 24 nt, Artificial Sequence
  Synthetic
cccagugcuaccugcggacagagc

SEQ ID NO: 538580 - RNA, 18 nt, Artificial Sequence
  Synthetic
cagccugagugacagagc

SEQ ID NO: 538581 - RNA, 19 nt, Artificial Sequence
  Synthetic
ccagccugagugacagagc

SEQ ID NO: 538582 - RNA, 20 nt, Artificial Sequence
  Synthetic
uccagccugagugacagagc

SEQ ID NO: 538583 - RNA, 21 nt, Artificial Sequence
  Synthetic
uuccagccugagugacagagc

SEQ ID NO: 538584 - RNA, 22 nt, Artificial Sequence
  Synthetic
auuccagccugagugacagagc

SEQ ID NO: 538585 - RNA, 23 nt, Artificial Sequence
  Synthetic
cauuccagccugagugacagagc

SEQ ID NO: 538586 - RNA, 24 nt, Artificial Sequence
  Synthetic
gcauuccagccugagugacagagc

SEQ ID NO: 538587 - RNA, 18 nt, Artificial Sequence
  Synthetic
cuuuuacauucccagagc

SEQ ID NO: 538588 - RNA, 19 nt, Artificial Sequence
  Synthetic
ccuuuuacauucccagagc

SEQ ID NO: 538589 - RNA, 20 nt, Artificial Sequence
  Synthetic
gccuuuuacauucccagagc

SEQ ID NO: 538590 - RNA, 21 nt, Artificial Sequence
  Synthetic
ggccuuuuacauucccagagc

SEQ ID NO: 538591 - RNA, 22 nt, Artificial Sequence
  Synthetic
uggccuuuuacauucccagagc

SEQ ID NO: 538592 - RNA, 23 nt, Artificial Sequence
  Synthetic
cuggccuuuuacauucccagagc

SEQ ID NO: 538593 - RNA, 24 nt, Artificial Sequence
  Synthetic
ccuggccuuuuacauucccagagc

SEQ ID NO: 538594 - RNA, 18 nt, Artificial Sequence
  Synthetic
caaguuaaguggcagagc

SEQ ID NO: 538595 - RNA, 19 nt, Artificial Sequence
  Synthetic
acaaguuaaguggcagagc

SEQ ID NO: 538596 - RNA, 20 nt, Artificial Sequence
  Synthetic
uacaaguuaaguggcagagc

SEQ ID NO: 538597 - RNA, 21 nt, Artificial Sequence
  Synthetic
auacaaguuaaguggcagagc

SEQ ID NO: 538598 - RNA, 22 nt, Artificial Sequence
  Synthetic
uauacaaguuaaguggcagagc

SEQ ID NO: 538599 - RNA, 23 nt, Artificial Sequence
  Synthetic
guauacaaguuaaguggcagagc

SEQ ID NO: 538600 - RNA, 24 nt, Artificial Sequence
  Synthetic
uguauacaaguuaaguggcagagc

SEQ ID NO: 538601 - RNA, 18 nt, Artificial Sequence
  Synthetic
gagacacagagagagagc

SEQ ID NO: 538602 - RNA, 19 nt, Artificial Sequence
  Synthetic
agagacacagagagagagc

SEQ ID NO: 538603 - RNA, 20 nt, Artificial Sequence
  Synthetic
gagagacacagagagagagc

SEQ ID NO: 538604 - RNA, 21 nt, Artificial Sequence
  Synthetic
agagagacacagagagagagc

SEQ ID NO: 538605 - RNA, 22 nt, Artificial Sequence
  Synthetic
gagagagacacagagagagagc

SEQ ID NO: 538606 - RNA, 23 nt, Artificial Sequence
  Synthetic
ugagagagacacagagagagagc

SEQ ID NO: 538607 - RNA, 24 nt, Artificial Sequence
  Synthetic
gugagagagacacagagagagagc

SEQ ID NO: 538608 - RNA, 18 nt, Artificial Sequence
  Synthetic
aauggcgaacaggagagc

SEQ ID NO: 538609 - RNA, 19 nt, Artificial Sequence
  Synthetic
aaauggcgaacaggagagc

SEQ ID NO: 538610 - RNA, 20 nt, Artificial Sequence
  Synthetic
uaaauggcgaacaggagagc

SEQ ID NO: 538611 - RNA, 21 nt, Artificial Sequence
  Synthetic
guaaauggcgaacaggagagc

SEQ ID NO: 538612 - RNA, 22 nt, Artificial Sequence
  Synthetic
gguaaauggcgaacaggagagc

SEQ ID NO: 538613 - RNA, 23 nt, Artificial Sequence
  Synthetic
ggguaaauggcgaacaggagagc

SEQ ID NO: 538614 - RNA, 24 nt, Artificial Sequence
  Synthetic
aggguaaauggcgaacaggagagc

SEQ ID NO: 538615 - RNA, 18 nt, Artificial Sequence
  Synthetic
gaggagcaggaggagagc

SEQ ID NO: 538616 - RNA, 19 nt, Artificial Sequence
  Synthetic
agaggagcaggaggagagc

SEQ ID NO: 538617 - RNA, 20 nt, Artificial Sequence
  Synthetic
gagaggagcaggaggagagc

SEQ ID NO: 538618 - RNA, 21 nt, Artificial Sequence
  Synthetic
ggagaggagcaggaggagagc

SEQ ID NO: 538619 - RNA, 22 nt, Artificial Sequence
  Synthetic
uggagaggagcaggaggagagc

SEQ ID NO: 538620 - RNA, 23 nt, Artificial Sequence
  Synthetic
uuggagaggagcaggaggagagc

SEQ ID NO: 538621 - RNA, 24 nt, Artificial Sequence
  Synthetic
uuuggagaggagcaggaggagagc

SEQ ID NO: 538622 - RNA, 18 nt, Artificial Sequence
  Synthetic
gaaggcaaaggggagagc

SEQ ID NO: 538623 - RNA, 19 nt, Artificial Sequence
  Synthetic
ggaaggcaaaggggagagc

SEQ ID NO: 538624 - RNA, 20 nt, Artificial Sequence
  Synthetic
uggaaggcaaaggggagagc

SEQ ID NO: 538625 - RNA, 21 nt, Artificial Sequence
  Synthetic
guggaaggcaaaggggagagc

SEQ ID NO: 538626 - RNA, 22 nt, Artificial Sequence
  Synthetic
gguggaaggcaaaggggagagc

SEQ ID NO: 538627 - RNA, 23 nt, Artificial Sequence
  Synthetic
ugguggaaggcaaaggggagagc

SEQ ID NO: 538628 - RNA, 24 nt, Artificial Sequence
  Synthetic
augguggaaggcaaaggggagagc

SEQ ID NO: 538629 - RNA, 18 nt, Artificial Sequence
  Synthetic
caugagauccaugagagc

SEQ ID NO: 538630 - RNA, 19 nt, Artificial Sequence
  Synthetic
ccaugagauccaugagagc

SEQ ID NO: 538631 - RNA, 20 nt, Artificial Sequence
  Synthetic
accaugagauccaugagagc

SEQ ID NO: 538632 - RNA, 21 nt, Artificial Sequence
  Synthetic
gaccaugagauccaugagagc

SEQ ID NO: 538633 - RNA, 22 nt, Artificial Sequence
  Synthetic
agaccaugagauccaugagagc

SEQ ID NO: 538634 - RNA, 23 nt, Artificial Sequence
  Synthetic
uagaccaugagauccaugagagc

SEQ ID NO: 538635 - RNA, 24 nt, Artificial Sequence
  Synthetic
cuagaccaugagauccaugagagc

SEQ ID NO: 538636 - RNA, 18 nt, Artificial Sequence
  Synthetic
cuuuucauaacugagagc

SEQ ID NO: 538637 - RNA, 19 nt, Artificial Sequence
  Synthetic
gcuuuucauaacugagagc

SEQ ID NO: 538638 - RNA, 20 nt, Artificial Sequence
  Synthetic
ugcuuuucauaacugagagc

SEQ ID NO: 538639 - RNA, 21 nt, Artificial Sequence
  Synthetic
cugcuuuucauaacugagagc

SEQ ID NO: 538640 - RNA, 22 nt, Artificial Sequence
  Synthetic
ucugcuuuucauaacugagagc

SEQ ID NO: 538641 - RNA, 23 nt, Artificial Sequence
  Synthetic
cucugcuuuucauaacugagagc

SEQ ID NO: 538642 - RNA, 24 nt, Artificial Sequence
  Synthetic
ucucugcuuuucauaacugagagc

SEQ ID NO: 538643 - RNA, 18 nt, Artificial Sequence
  Synthetic
gucacacggagugagagc

SEQ ID NO: 538644 - RNA, 19 nt, Artificial Sequence
  Synthetic
ggucacacggagugagagc

SEQ ID NO: 538645 - RNA, 20 nt, Artificial Sequence
  Synthetic
uggucacacggagugagagc

SEQ ID NO: 538646 - RNA, 21 nt, Artificial Sequence
  Synthetic
guggucacacggagugagagc

SEQ ID NO: 538647 - RNA, 22 nt, Artificial Sequence
  Synthetic
aguggucacacggagugagagc

SEQ ID NO: 538648 - RNA, 23 nt, Artificial Sequence
  Synthetic
gaguggucacacggagugagagc

SEQ ID NO: 538649 - RNA, 24 nt, Artificial Sequence
  Synthetic
ugaguggucacacggagugagagc

SEQ ID NO: 538650 - RNA, 18 nt, Artificial Sequence
  Synthetic
caauucuagcccuagagc

SEQ ID NO: 538651 - RNA, 19 nt, Artificial Sequence
  Synthetic
ccaauucuagcccuagagc

SEQ ID NO: 538652 - RNA, 20 nt, Artificial Sequence
  Synthetic
gccaauucuagcccuagagc

SEQ ID NO: 538653 - RNA, 21 nt, Artificial Sequence
  Synthetic
ugccaauucuagcccuagagc

SEQ ID NO: 538654 - RNA, 22 nt, Artificial Sequence
  Synthetic
augccaauucuagcccuagagc

SEQ ID NO: 538655 - RNA, 23 nt, Artificial Sequence
  Synthetic
aaugccaauucuagcccuagagc

SEQ ID NO: 538656 - RNA, 24 nt, Artificial Sequence
  Synthetic
caaugccaauucuagcccuagagc

SEQ ID NO: 538657 - RNA, 18 nt, Artificial Sequence
  Synthetic
ccauuuaagaaguagagc

SEQ ID NO: 538658 - RNA, 19 nt, Artificial Sequence
  Synthetic
accauuuaagaaguagagc

SEQ ID NO: 538659 - RNA, 20 nt, Artificial Sequence
  Synthetic
uaccauuuaagaaguagagc

SEQ ID NO: 538660 - RNA, 21 nt, Artificial Sequence
  Synthetic
cuaccauuuaagaaguagagc

SEQ ID NO: 538661 - RNA, 22 nt, Artificial Sequence
  Synthetic
ccuaccauuuaagaaguagagc

SEQ ID NO: 538662 - RNA, 23 nt, Artificial Sequence
  Synthetic
cccuaccauuuaagaaguagagc

SEQ ID NO: 538663 - RNA, 24 nt, Artificial Sequence
  Synthetic
ucccuaccauuuaagaaguagagc

SEQ ID NO: 538664 - RNA, 18 nt, Artificial Sequence
  Synthetic
aucacagaauauuagagc

SEQ ID NO: 538665 - RNA, 19 nt, Artificial Sequence
  Synthetic
aaucacagaauauuagagc

SEQ ID NO: 538666 - RNA, 20 nt, Artificial Sequence
  Synthetic
aaaucacagaauauuagagc

SEQ ID NO: 538667 - RNA, 21 nt, Artificial Sequence
  Synthetic
caaaucacagaauauuagagc

SEQ ID NO: 538668 - RNA, 22 nt, Artificial Sequence
  Synthetic
ccaaaucacagaauauuagagc

SEQ ID NO: 538669 - RNA, 23 nt, Artificial Sequence
  Synthetic
accaaaucacagaauauuagagc

SEQ ID NO: 538670 - RNA, 24 nt, Artificial Sequence
  Synthetic
uaccaaaucacagaauauuagagc

SEQ ID NO: 538671 - RNA, 18 nt, Artificial Sequence
  Synthetic
aagcauugaccuuagagc

SEQ ID NO: 538672 - RNA, 19 nt, Artificial Sequence
  Synthetic
caagcauugaccuuagagc

SEQ ID NO: 538673 - RNA, 20 nt, Artificial Sequence
  Synthetic
ccaagcauugaccuuagagc

SEQ ID NO: 538674 - RNA, 21 nt, Artificial Sequence
  Synthetic
gccaagcauugaccuuagagc

SEQ ID NO: 538675 - RNA, 22 nt, Artificial Sequence
  Synthetic
ugccaagcauugaccuuagagc

SEQ ID NO: 538676 - RNA, 23 nt, Artificial Sequence
  Synthetic
augccaagcauugaccuuagagc

SEQ ID NO: 538677 - RNA, 24 nt, Artificial Sequence
  Synthetic
uaugccaagcauugaccuuagagc

SEQ ID NO: 538678 - RNA, 18 nt, Artificial Sequence
  Synthetic
aaaugggcugguuagagc

SEQ ID NO: 538679 - RNA, 19 nt, Artificial Sequence
  Synthetic
caaaugggcugguuagagc

SEQ ID NO: 538680 - RNA, 20 nt, Artificial Sequence
  Synthetic
ucaaaugggcugguuagagc

SEQ ID NO: 538681 - RNA, 21 nt, Artificial Sequence
  Synthetic
cucaaaugggcugguuagagc

SEQ ID NO: 538682 - RNA, 22 nt, Artificial Sequence
  Synthetic
ccucaaaugggcugguuagagc

SEQ ID NO: 538683 - RNA, 23 nt, Artificial Sequence
  Synthetic
gccucaaaugggcugguuagagc

SEQ ID NO: 538684 - RNA, 24 nt, Artificial Sequence
  Synthetic
agccucaaaugggcugguuagagc

SEQ ID NO: 538685 - RNA, 18 nt, Artificial Sequence
  Synthetic
aaaaggcaacauucgagc

SEQ ID NO: 538686 - RNA, 19 nt, Artificial Sequence
  Synthetic
aaaaaggcaacauucgagc

SEQ ID NO: 538687 - RNA, 20 nt, Artificial Sequence
  Synthetic
gaaaaaggcaacauucgagc

SEQ ID NO: 538688 - RNA, 21 nt, Artificial Sequence
  Synthetic
agaaaaaggcaacauucgagc

SEQ ID NO: 538689 - RNA, 22 nt, Artificial Sequence
  Synthetic
uagaaaaaggcaacauucgagc

SEQ ID NO: 538690 - RNA, 23 nt, Artificial Sequence
  Synthetic
uuagaaaaaggcaacauucgagc

SEQ ID NO: 538691 - RNA, 24 nt, Artificial Sequence
  Synthetic
uuuagaaaaaggcaacauucgagc

SEQ ID NO: 538692 - RNA, 18 nt, Artificial Sequence
  Synthetic
gauucaaaauuuucgagc

SEQ ID NO: 538693 - RNA, 19 nt, Artificial Sequence
  Synthetic
ugauucaaaauuuucgagc

SEQ ID NO: 538694 - RNA, 20 nt, Artificial Sequence
  Synthetic
uugauucaaaauuuucgagc

SEQ ID NO: 538695 - RNA, 21 nt, Artificial Sequence
  Synthetic
auugauucaaaauuuucgagc

SEQ ID NO: 538696 - RNA, 22 nt, Artificial Sequence
  Synthetic
aauugauucaaaauuuucgagc

SEQ ID NO: 538697 - RNA, 23 nt, Artificial Sequence
  Synthetic
aaauugauucaaaauuuucgagc

SEQ ID NO: 538698 - RNA, 24 nt, Artificial Sequence
  Synthetic
aaaauugauucaaaauuuucgagc

SEQ ID NO: 538699 - RNA, 18 nt, Artificial Sequence
  Synthetic
cuugggccaucaaggagc

SEQ ID NO: 538700 - RNA, 19 nt, Artificial Sequence
  Synthetic
gcuugggccaucaaggagc

SEQ ID NO: 538701 - RNA, 20 nt, Artificial Sequence
  Synthetic
ggcuugggccaucaaggagc

SEQ ID NO: 538702 - RNA, 21 nt, Artificial Sequence
  Synthetic
uggcuugggccaucaaggagc

SEQ ID NO: 538703 - RNA, 22 nt, Artificial Sequence
  Synthetic
guggcuugggccaucaaggagc

SEQ ID NO: 538704 - RNA, 23 nt, Artificial Sequence
  Synthetic
aguggcuugggccaucaaggagc

SEQ ID NO: 538705 - RNA, 24 nt, Artificial Sequence
  Synthetic
gaguggcuugggccaucaaggagc

SEQ ID NO: 538706 - RNA, 18 nt, Artificial Sequence
  Synthetic
agaauaaauugaaggagc

SEQ ID NO: 538707 - RNA, 19 nt, Artificial Sequence
  Synthetic
gagaauaaauugaaggagc

SEQ ID NO: 538708 - RNA, 20 nt, Artificial Sequence
  Synthetic
agagaauaaauugaaggagc

SEQ ID NO: 538709 - RNA, 21 nt, Artificial Sequence
  Synthetic
uagagaauaaauugaaggagc

SEQ ID NO: 538710 - RNA, 22 nt, Artificial Sequence
  Synthetic
guagagaauaaauugaaggagc

SEQ ID NO: 538711 - RNA, 23 nt, Artificial Sequence
  Synthetic
aguagagaauaaauugaaggagc

SEQ ID NO: 538712 - RNA, 24 nt, Artificial Sequence
  Synthetic
gaguagagaauaaauugaaggagc

SEQ ID NO: 538713 - RNA, 18 nt, Artificial Sequence
  Synthetic
uugucaucccuaaggagc

SEQ ID NO: 538714 - RNA, 19 nt, Artificial Sequence
  Synthetic
guugucaucccuaaggagc

SEQ ID NO: 538715 - RNA, 20 nt, Artificial Sequence
  Synthetic
uguugucaucccuaaggagc

SEQ ID NO: 538716 - RNA, 21 nt, Artificial Sequence
  Synthetic
cuguugucaucccuaaggagc

SEQ ID NO: 538717 - RNA, 22 nt, Artificial Sequence
  Synthetic
ccuguugucaucccuaaggagc

SEQ ID NO: 538718 - RNA, 23 nt, Artificial Sequence
  Synthetic
uccuguugucaucccuaaggagc

SEQ ID NO: 538719 - RNA, 24 nt, Artificial Sequence
  Synthetic
cuccuguugucaucccuaaggagc

SEQ ID NO: 538720 - RNA, 18 nt, Artificial Sequence
  Synthetic
aacaaaaauuuaaggagc

SEQ ID NO: 538721 - RNA, 19 nt, Artificial Sequence
  Synthetic
aaacaaaaauuuaaggagc

SEQ ID NO: 538722 - RNA, 20 nt, Artificial Sequence
  Synthetic
caaacaaaaauuuaaggagc

SEQ ID NO: 538723 - RNA, 21 nt, Artificial Sequence
  Synthetic
acaaacaaaaauuuaaggagc

SEQ ID NO: 538724 - RNA, 22 nt, Artificial Sequence
  Synthetic
aacaaacaaaaauuuaaggagc

SEQ ID NO: 538725 - RNA, 23 nt, Artificial Sequence
  Synthetic
aaacaaacaaaaauuuaaggagc

SEQ ID NO: 538726 - RNA, 24 nt, Artificial Sequence
  Synthetic
caaacaaacaaaaauuuaaggagc

SEQ ID NO: 538727 - RNA, 18 nt, Artificial Sequence
  Synthetic
agaccucuugacaggagc

SEQ ID NO: 538728 - RNA, 19 nt, Artificial Sequence
  Synthetic
aagaccucuugacaggagc

SEQ ID NO: 538729 - RNA, 20 nt, Artificial Sequence
  Synthetic
caagaccucuugacaggagc

SEQ ID NO: 538730 - RNA, 21 nt, Artificial Sequence
  Synthetic
acaagaccucuugacaggagc

SEQ ID NO: 538731 - RNA, 22 nt, Artificial Sequence
  Synthetic
gacaagaccucuugacaggagc

SEQ ID NO: 538732 - RNA, 23 nt, Artificial Sequence
  Synthetic
ggacaagaccucuugacaggagc

SEQ ID NO: 538733 - RNA, 24 nt, Artificial Sequence
  Synthetic
gggacaagaccucuugacaggagc

SEQ ID NO: 538734 - RNA, 21 nt, Artificial Sequence
  Synthetic
agaucaccugaggucaggagc

SEQ ID NO: 538735 - RNA, 22 nt, Artificial Sequence
  Synthetic
cagaucaccugaggucaggagc

SEQ ID NO: 538736 - RNA, 23 nt, Artificial Sequence
  Synthetic
gcagaucaccugaggucaggagc

SEQ ID NO: 538737 - RNA, 24 nt, Artificial Sequence
  Synthetic
ggcagaucaccugaggucaggagc

SEQ ID NO: 538738 - RNA, 18 nt, Artificial Sequence
  Synthetic
gcaaaagaugucaggagc

SEQ ID NO: 538739 - RNA, 19 nt, Artificial Sequence
  Synthetic
agcaaaagaugucaggagc

SEQ ID NO: 538740 - RNA, 20 nt, Artificial Sequence
  Synthetic
cagcaaaagaugucaggagc

SEQ ID NO: 538741 - RNA, 21 nt, Artificial Sequence
  Synthetic
gcagcaaaagaugucaggagc

SEQ ID NO: 538742 - RNA, 22 nt, Artificial Sequence
  Synthetic
agcagcaaaagaugucaggagc

SEQ ID NO: 538743 - RNA, 23 nt, Artificial Sequence
  Synthetic
cagcagcaaaagaugucaggagc

SEQ ID NO: 538744 - RNA, 24 nt, Artificial Sequence
  Synthetic
ucagcagcaaaagaugucaggagc

SEQ ID NO: 538745 - RNA, 18 nt, Artificial Sequence
  Synthetic
gccauuuuggagaggagc

SEQ ID NO: 538746 - RNA, 19 nt, Artificial Sequence
  Synthetic
ugccauuuuggagaggagc

SEQ ID NO: 538747 - RNA, 20 nt, Artificial Sequence
  Synthetic
cugccauuuuggagaggagc

SEQ ID NO: 538748 - RNA, 21 nt, Artificial Sequence
  Synthetic
gcugccauuuuggagaggagc

SEQ ID NO: 538749 - RNA, 22 nt, Artificial Sequence
  Synthetic
agcugccauuuuggagaggagc

SEQ ID NO: 538750 - RNA, 23 nt, Artificial Sequence
  Synthetic
cagcugccauuuuggagaggagc

SEQ ID NO: 538751 - RNA, 24 nt, Artificial Sequence
  Synthetic
ccagcugccauuuuggagaggagc

SEQ ID NO: 538752 - RNA, 18 nt, Artificial Sequence
  Synthetic
ccccacagugggaggagc

SEQ ID NO: 538753 - RNA, 19 nt, Artificial Sequence
  Synthetic
uccccacagugggaggagc

SEQ ID NO: 538754 - RNA, 20 nt, Artificial Sequence
  Synthetic
guccccacagugggaggagc

SEQ ID NO: 538755 - RNA, 21 nt, Artificial Sequence
  Synthetic
uguccccacagugggaggagc

SEQ ID NO: 538756 - RNA, 22 nt, Artificial Sequence
  Synthetic
uuguccccacagugggaggagc

SEQ ID NO: 538757 - RNA, 23 nt, Artificial Sequence
  Synthetic
cuuguccccacagugggaggagc

SEQ ID NO: 538758 - RNA, 24 nt, Artificial Sequence
  Synthetic
ccuuguccccacagugggaggagc

SEQ ID NO: 538759 - RNA, 18 nt, Artificial Sequence
  Synthetic
guggagggugggaggagc

SEQ ID NO: 538760 - RNA, 19 nt, Artificial Sequence
  Synthetic
uguggagggugggaggagc

SEQ ID NO: 538761 - RNA, 20 nt, Artificial Sequence
  Synthetic
guguggagggugggaggagc

SEQ ID NO: 538762 - RNA, 21 nt, Artificial Sequence
  Synthetic
aguguggagggugggaggagc

SEQ ID NO: 538763 - RNA, 22 nt, Artificial Sequence
  Synthetic
gaguguggagggugggaggagc

SEQ ID NO: 538764 - RNA, 23 nt, Artificial Sequence
  Synthetic
agaguguggagggugggaggagc

SEQ ID NO: 538765 - RNA, 24 nt, Artificial Sequence
  Synthetic
uagaguguggagggugggaggagc

SEQ ID NO: 538766 - RNA, 18 nt, Artificial Sequence
  Synthetic
ugaauggauuggaggagc

SEQ ID NO: 538767 - RNA, 19 nt, Artificial Sequence
  Synthetic
augaauggauuggaggagc

SEQ ID NO: 538768 - RNA, 20 nt, Artificial Sequence
  Synthetic
gaugaauggauuggaggagc

SEQ ID NO: 538769 - RNA, 21 nt, Artificial Sequence
  Synthetic
ggaugaauggauuggaggagc

SEQ ID NO: 538770 - RNA, 22 nt, Artificial Sequence
  Synthetic
aggaugaauggauuggaggagc

SEQ ID NO: 538771 - RNA, 23 nt, Artificial Sequence
  Synthetic
gaggaugaauggauuggaggagc

SEQ ID NO: 538772 - RNA, 24 nt, Artificial Sequence
  Synthetic
ggaggaugaauggauuggaggagc

SEQ ID NO: 538773 - RNA, 18 nt, Artificial Sequence
  Synthetic
ggaaaaauacugaggagc

SEQ ID NO: 538774 - RNA, 19 nt, Artificial Sequence
  Synthetic
gggaaaaauacugaggagc

SEQ ID NO: 538775 - RNA, 20 nt, Artificial Sequence
  Synthetic
ugggaaaaauacugaggagc

SEQ ID NO: 538776 - RNA, 21 nt, Artificial Sequence
  Synthetic
gugggaaaaauacugaggagc

SEQ ID NO: 538777 - RNA, 22 nt, Artificial Sequence
  Synthetic
agugggaaaaauacugaggagc

SEQ ID NO: 538778 - RNA, 23 nt, Artificial Sequence
  Synthetic
aagugggaaaaauacugaggagc

SEQ ID NO: 538779 - RNA, 24 nt, Artificial Sequence
  Synthetic
aaagugggaaaaauacugaggagc

SEQ ID NO: 538780 - RNA, 18 nt, Artificial Sequence
  Synthetic
agaaagaacuuacggagc

SEQ ID NO: 538781 - RNA, 19 nt, Artificial Sequence
  Synthetic
cagaaagaacuuacggagc

SEQ ID NO: 538782 - RNA, 20 nt, Artificial Sequence
  Synthetic
ucagaaagaacuuacggagc

SEQ ID NO: 538783 - RNA, 21 nt, Artificial Sequence
  Synthetic
cucagaaagaacuuacggagc

SEQ ID NO: 538784 - RNA, 22 nt, Artificial Sequence
  Synthetic
acucagaaagaacuuacggagc

SEQ ID NO: 538785 - RNA, 23 nt, Artificial Sequence
  Synthetic
gacucagaaagaacuuacggagc

SEQ ID NO: 538786 - RNA, 24 nt, Artificial Sequence
  Synthetic
agacucagaaagaacuuacggagc

SEQ ID NO: 538787 - RNA, 18 nt, Artificial Sequence
  Synthetic
uugggagaggagcggagc

SEQ ID NO: 538788 - RNA, 19 nt, Artificial Sequence
  Synthetic
guugggagaggagcggagc

SEQ ID NO: 538789 - RNA, 20 nt, Artificial Sequence
  Synthetic
gguugggagaggagcggagc

SEQ ID NO: 538790 - RNA, 21 nt, Artificial Sequence
  Synthetic
agguugggagaggagcggagc

SEQ ID NO: 538791 - RNA, 22 nt, Artificial Sequence
  Synthetic
aagguugggagaggagcggagc

SEQ ID NO: 538792 - RNA, 23 nt, Artificial Sequence
  Synthetic
aaagguugggagaggagcggagc

SEQ ID NO: 538793 - RNA, 24 nt, Artificial Sequence
  Synthetic
aaaagguugggagaggagcggagc

SEQ ID NO: 538794 - RNA, 18 nt, Artificial Sequence
  Synthetic
uaaaugaaaacucggagc

SEQ ID NO: 538795 - RNA, 19 nt, Artificial Sequence
  Synthetic
auaaaugaaaacucggagc

SEQ ID NO: 538796 - RNA, 20 nt, Artificial Sequence
  Synthetic
aauaaaugaaaacucggagc

SEQ ID NO: 538797 - RNA, 21 nt, Artificial Sequence
  Synthetic
aaauaaaugaaaacucggagc

SEQ ID NO: 538798 - RNA, 22 nt, Artificial Sequence
  Synthetic
aaaauaaaugaaaacucggagc

SEQ ID NO: 538799 - RNA, 23 nt, Artificial Sequence
  Synthetic
aaaaauaaaugaaaacucggagc

SEQ ID NO: 538800 - RNA, 24 nt, Artificial Sequence
  Synthetic
aaaaaauaaaugaaaacucggagc

SEQ ID NO: 538801 - RNA, 18 nt, Artificial Sequence
  Synthetic
guuaguacaacagggagc

SEQ ID NO: 538802 - RNA, 19 nt, Artificial Sequence
  Synthetic
uguuaguacaacagggagc

SEQ ID NO: 538803 - RNA, 20 nt, Artificial Sequence
  Synthetic
auguuaguacaacagggagc

SEQ ID NO: 538804 - RNA, 21 nt, Artificial Sequence
  Synthetic
cauguuaguacaacagggagc

SEQ ID NO: 538805 - RNA, 22 nt, Artificial Sequence
  Synthetic
acauguuaguacaacagggagc

SEQ ID NO: 538806 - RNA, 23 nt, Artificial Sequence
  Synthetic
aacauguuaguacaacagggagc

SEQ ID NO: 538807 - RNA, 24 nt, Artificial Sequence
  Synthetic
aaacauguuaguacaacagggagc

SEQ ID NO: 538808 - RNA, 18 nt, Artificial Sequence
  Synthetic
uuaaauaaaucagggagc

SEQ ID NO: 538809 - RNA, 19 nt, Artificial Sequence
  Synthetic
auuaaauaaaucagggagc

SEQ ID NO: 538810 - RNA, 20 nt, Artificial Sequence
  Synthetic
uauuaaauaaaucagggagc

SEQ ID NO: 538811 - RNA, 21 nt, Artificial Sequence
  Synthetic
auauuaaauaaaucagggagc

SEQ ID NO: 538812 - RNA, 22 nt, Artificial Sequence
  Synthetic
cauauuaaauaaaucagggagc

SEQ ID NO: 538813 - RNA, 23 nt, Artificial Sequence
  Synthetic
ucauauuaaauaaaucagggagc

SEQ ID NO: 538814 - RNA, 24 nt, Artificial Sequence
  Synthetic
gucauauuaaauaaaucagggagc

SEQ ID NO: 538815 - RNA, 18 nt, Artificial Sequence
  Synthetic
cuuuuugugugggggagc

SEQ ID NO: 538816 - RNA, 19 nt, Artificial Sequence
  Synthetic
ucuuuuugugugggggagc

SEQ ID NO: 538817 - RNA, 20 nt, Artificial Sequence
  Synthetic
uucuuuuugugugggggagc

SEQ ID NO: 538818 - RNA, 21 nt, Artificial Sequence
  Synthetic
auucuuuuugugugggggagc

SEQ ID NO: 538819 - RNA, 22 nt, Artificial Sequence
  Synthetic
cauucuuuuugugugggggagc

SEQ ID NO: 538820 - RNA, 23 nt, Artificial Sequence
  Synthetic
ccauucuuuuugugugggggagc

SEQ ID NO: 538821 - RNA, 24 nt, Artificial Sequence
  Synthetic
accauucuuuuugugugggggagc

SEQ ID NO: 538822 - RNA, 18 nt, Artificial Sequence
  Synthetic
ggacucuaaguggggagc

SEQ ID NO: 538823 - RNA, 19 nt, Artificial Sequence
  Synthetic
gggacucuaaguggggagc

SEQ ID NO: 538824 - RNA, 20 nt, Artificial Sequence
  Synthetic
ggggacucuaaguggggagc

SEQ ID NO: 538825 - RNA, 21 nt, Artificial Sequence
  Synthetic
uggggacucuaaguggggagc

SEQ ID NO: 538826 - RNA, 22 nt, Artificial Sequence
  Synthetic
uuggggacucuaaguggggagc

SEQ ID NO: 538827 - RNA, 23 nt, Artificial Sequence
  Synthetic
uuuggggacucuaaguggggagc

SEQ ID NO: 538828 - RNA, 24 nt, Artificial Sequence
  Synthetic
cuuuggggacucuaaguggggagc

SEQ ID NO: 538829 - RNA, 18 nt, Artificial Sequence
  Synthetic
cugcaugaagaugggagc

SEQ ID NO: 538830 - RNA, 19 nt, Artificial Sequence
  Synthetic
acugcaugaagaugggagc

SEQ ID NO: 538831 - RNA, 20 nt, Artificial Sequence
  Synthetic
uacugcaugaagaugggagc

SEQ ID NO: 538832 - RNA, 21 nt, Artificial Sequence
  Synthetic
cuacugcaugaagaugggagc

SEQ ID NO: 538833 - RNA, 22 nt, Artificial Sequence
  Synthetic
ccuacugcaugaagaugggagc

SEQ ID NO: 538834 - RNA, 23 nt, Artificial Sequence
  Synthetic
accuacugcaugaagaugggagc

SEQ ID NO: 538835 - RNA, 24 nt, Artificial Sequence
  Synthetic
uaccuacugcaugaagaugggagc

SEQ ID NO: 538836 - RNA, 18 nt, Artificial Sequence
  Synthetic
aaggcaugauaugggagc

SEQ ID NO: 538837 - RNA, 19 nt, Artificial Sequence
  Synthetic
aaaggcaugauaugggagc

SEQ ID NO: 538838 - RNA, 20 nt, Artificial Sequence
  Synthetic
aaaaggcaugauaugggagc

SEQ ID NO: 538839 - RNA, 21 nt, Artificial Sequence
  Synthetic
caaaaggcaugauaugggagc

SEQ ID NO: 538840 - RNA, 22 nt, Artificial Sequence
  Synthetic
acaaaaggcaugauaugggagc

SEQ ID NO: 538841 - RNA, 23 nt, Artificial Sequence
  Synthetic
aacaaaaggcaugauaugggagc

SEQ ID NO: 538842 - RNA, 24 nt, Artificial Sequence
  Synthetic
aaacaaaaggcaugauaugggagc

SEQ ID NO: 538843 - RNA, 18 nt, Artificial Sequence
  Synthetic
ucaccugagguugggagc

SEQ ID NO: 538844 - RNA, 19 nt, Artificial Sequence
  Synthetic
aucaccugagguugggagc

SEQ ID NO: 538845 - RNA, 20 nt, Artificial Sequence
  Synthetic
gaucaccugagguugggagc

SEQ ID NO: 538846 - RNA, 21 nt, Artificial Sequence
  Synthetic
ggaucaccugagguugggagc

SEQ ID NO: 538847 - RNA, 22 nt, Artificial Sequence
  Synthetic
uggaucaccugagguugggagc

SEQ ID NO: 538848 - RNA, 23 nt, Artificial Sequence
  Synthetic
guggaucaccugagguugggagc

SEQ ID NO: 538849 - RNA, 24 nt, Artificial Sequence
  Synthetic
gguggaucaccugagguugggagc

SEQ ID NO: 538850 - RNA, 18 nt, Artificial Sequence
  Synthetic
aguaugucuuuugggagc

SEQ ID NO: 538851 - RNA, 19 nt, Artificial Sequence
  Synthetic
uaguaugucuuuugggagc

SEQ ID NO: 538852 - RNA, 20 nt, Artificial Sequence
  Synthetic
uuaguaugucuuuugggagc

SEQ ID NO: 538853 - RNA, 21 nt, Artificial Sequence
  Synthetic
uuuaguaugucuuuugggagc

SEQ ID NO: 538854 - RNA, 22 nt, Artificial Sequence
  Synthetic
uuuuaguaugucuuuugggagc

SEQ ID NO: 538855 - RNA, 23 nt, Artificial Sequence
  Synthetic
cuuuuaguaugucuuuugggagc

SEQ ID NO: 538856 - RNA, 24 nt, Artificial Sequence
  Synthetic
gcuuuuaguaugucuuuugggagc

SEQ ID NO: 538857 - RNA, 18 nt, Artificial Sequence
  Synthetic
auuugacaugcauggagc

SEQ ID NO: 538858 - RNA, 19 nt, Artificial Sequence
  Synthetic
gauuugacaugcauggagc

SEQ ID NO: 538859 - RNA, 20 nt, Artificial Sequence
  Synthetic
ggauuugacaugcauggagc

SEQ ID NO: 538860 - RNA, 21 nt, Artificial Sequence
  Synthetic
uggauuugacaugcauggagc

SEQ ID NO: 538861 - RNA, 22 nt, Artificial Sequence
  Synthetic
uuggauuugacaugcauggagc

SEQ ID NO: 538862 - RNA, 23 nt, Artificial Sequence
  Synthetic
auuggauuugacaugcauggagc

SEQ ID NO: 538863 - RNA, 24 nt, Artificial Sequence
  Synthetic
cauuggauuugacaugcauggagc

SEQ ID NO: 538864 - RNA, 18 nt, Artificial Sequence
  Synthetic
cagcaacauggauggagc

SEQ ID NO: 538865 - RNA, 19 nt, Artificial Sequence
  Synthetic
gcagcaacauggauggagc

SEQ ID NO: 538866 - RNA, 20 nt, Artificial Sequence
  Synthetic
ugcagcaacauggauggagc

SEQ ID NO: 538867 - RNA, 21 nt, Artificial Sequence
  Synthetic
uugcagcaacauggauggagc

SEQ ID NO: 538868 - RNA, 22 nt, Artificial Sequence
  Synthetic
uuugcagcaacauggauggagc

SEQ ID NO: 538869 - RNA, 23 nt, Artificial Sequence
  Synthetic
cuuugcagcaacauggauggagc

SEQ ID NO: 538870 - RNA, 24 nt, Artificial Sequence
  Synthetic
ucuuugcagcaacauggauggagc

SEQ ID NO: 538871 - RNA, 18 nt, Artificial Sequence
  Synthetic
gacacauugugauggagc

SEQ ID NO: 538872 - RNA, 19 nt, Artificial Sequence
  Synthetic
ggacacauugugauggagc

SEQ ID NO: 538873 - RNA, 20 nt, Artificial Sequence
  Synthetic
uggacacauugugauggagc

SEQ ID NO: 538874 - RNA, 21 nt, Artificial Sequence
  Synthetic
uuggacacauugugauggagc

SEQ ID NO: 538875 - RNA, 22 nt, Artificial Sequence
  Synthetic
uuuggacacauugugauggagc

SEQ ID NO: 538876 - RNA, 23 nt, Artificial Sequence
  Synthetic
auuuggacacauugugauggagc

SEQ ID NO: 538877 - RNA, 24 nt, Artificial Sequence
  Synthetic
aauuuggacacauugugauggagc

SEQ ID NO: 538878 - RNA, 18 nt, Artificial Sequence
  Synthetic
uugguccucaacuggagc

SEQ ID NO: 538879 - RNA, 19 nt, Artificial Sequence
  Synthetic
guugguccucaacuggagc

SEQ ID NO: 538880 - RNA, 20 nt, Artificial Sequence
  Synthetic
uguugguccucaacuggagc

SEQ ID NO: 538881 - RNA, 21 nt, Artificial Sequence
  Synthetic
auguugguccucaacuggagc

SEQ ID NO: 538882 - RNA, 22 nt, Artificial Sequence
  Synthetic
uauguugguccucaacuggagc

SEQ ID NO: 538883 - RNA, 23 nt, Artificial Sequence
  Synthetic
auauguugguccucaacuggagc

SEQ ID NO: 538884 - RNA, 24 nt, Artificial Sequence
  Synthetic
gauauguugguccucaacuggagc

SEQ ID NO: 538885 - RNA, 18 nt, Artificial Sequence
  Synthetic
ggaccaacacccuggagc

SEQ ID NO: 538886 - RNA, 19 nt, Artificial Sequence
  Synthetic
uggaccaacacccuggagc

SEQ ID NO: 538887 - RNA, 20 nt, Artificial Sequence
  Synthetic
uuggaccaacacccuggagc

SEQ ID NO: 538888 - RNA, 21 nt, Artificial Sequence
  Synthetic
uuuggaccaacacccuggagc

SEQ ID NO: 538889 - RNA, 22 nt, Artificial Sequence
  Synthetic
guuuggaccaacacccuggagc

SEQ ID NO: 538890 - RNA, 23 nt, Artificial Sequence
  Synthetic
gguuuggaccaacacccuggagc

SEQ ID NO: 538891 - RNA, 24 nt, Artificial Sequence
  Synthetic
ugguuuggaccaacacccuggagc

SEQ ID NO: 538892 - RNA, 18 nt, Artificial Sequence
  Synthetic
aaucaagagaucuggagc

SEQ ID NO: 538893 - RNA, 19 nt, Artificial Sequence
  Synthetic
aaaucaagagaucuggagc

SEQ ID NO: 538894 - RNA, 20 nt, Artificial Sequence
  Synthetic
uaaaucaagagaucuggagc

SEQ ID NO: 538895 - RNA, 21 nt, Artificial Sequence
  Synthetic
auaaaucaagagaucuggagc

SEQ ID NO: 538896 - RNA, 22 nt, Artificial Sequence
  Synthetic
aauaaaucaagagaucuggagc

SEQ ID NO: 538897 - RNA, 23 nt, Artificial Sequence
  Synthetic
uaauaaaucaagagaucuggagc

SEQ ID NO: 538898 - RNA, 24 nt, Artificial Sequence
  Synthetic
uuaauaaaucaagagaucuggagc

SEQ ID NO: 538899 - RNA, 18 nt, Artificial Sequence
  Synthetic
gagcagaaacucuggagc

SEQ ID NO: 538900 - RNA, 19 nt, Artificial Sequence
  Synthetic
agagcagaaacucuggagc

SEQ ID NO: 538901 - RNA, 20 nt, Artificial Sequence
  Synthetic
aagagcagaaacucuggagc

SEQ ID NO: 538902 - RNA, 21 nt, Artificial Sequence
  Synthetic
uaagagcagaaacucuggagc

SEQ ID NO: 538903 - RNA, 22 nt, Artificial Sequence
  Synthetic
uuaagagcagaaacucuggagc

SEQ ID NO: 538904 - RNA, 23 nt, Artificial Sequence
  Synthetic
cuuaagagcagaaacucuggagc

SEQ ID NO: 538905 - RNA, 24 nt, Artificial Sequence
  Synthetic
gcuuaagagcagaaacucuggagc

SEQ ID NO: 538906 - RNA, 18 nt, Artificial Sequence
  Synthetic
acuagaauaaaguggagc

SEQ ID NO: 538907 - RNA, 19 nt, Artificial Sequence
  Synthetic
aacuagaauaaaguggagc

SEQ ID NO: 538908 - RNA, 20 nt, Artificial Sequence
  Synthetic
gaacuagaauaaaguggagc

SEQ ID NO: 538909 - RNA, 21 nt, Artificial Sequence
  Synthetic
agaacuagaauaaaguggagc

SEQ ID NO: 538910 - RNA, 22 nt, Artificial Sequence
  Synthetic
gagaacuagaauaaaguggagc

SEQ ID NO: 538911 - RNA, 23 nt, Artificial Sequence
  Synthetic
agagaacuagaauaaaguggagc

SEQ ID NO: 538912 - RNA, 24 nt, Artificial Sequence
  Synthetic
aagagaacuagaauaaaguggagc

SEQ ID NO: 538913 - RNA, 18 nt, Artificial Sequence
  Synthetic
ucaaggcuacuguggagc

SEQ ID NO: 538914 - RNA, 19 nt, Artificial Sequence
  Synthetic
uucaaggcuacuguggagc

SEQ ID NO: 538915 - RNA, 20 nt, Artificial Sequence
  Synthetic
uuucaaggcuacuguggagc

SEQ ID NO: 538916 - RNA, 21 nt, Artificial Sequence
  Synthetic
uuuucaaggcuacuguggagc

SEQ ID NO: 538917 - RNA, 22 nt, Artificial Sequence
  Synthetic
auuuucaaggcuacuguggagc

SEQ ID NO: 538918 - RNA, 23 nt, Artificial Sequence
  Synthetic
gauuuucaaggcuacuguggagc

SEQ ID NO: 538919 - RNA, 24 nt, Artificial Sequence
  Synthetic
ugauuuucaaggcuacuguggagc

SEQ ID NO: 538920 - RNA, 18 nt, Artificial Sequence
  Synthetic
acauuuaggauuuggagc

SEQ ID NO: 538921 - RNA, 19 nt, Artificial Sequence
  Synthetic
uacauuuaggauuuggagc

SEQ ID NO: 538922 - RNA, 20 nt, Artificial Sequence
  Synthetic
uuacauuuaggauuuggagc

SEQ ID NO: 538923 - RNA, 21 nt, Artificial Sequence
  Synthetic
uuuacauuuaggauuuggagc

SEQ ID NO: 538924 - RNA, 22 nt, Artificial Sequence
  Synthetic
cuuuacauuuaggauuuggagc

SEQ ID NO: 538925 - RNA, 23 nt, Artificial Sequence
  Synthetic
ucuuuacauuuaggauuuggagc

SEQ ID NO: 538926 - RNA, 24 nt, Artificial Sequence
  Synthetic
uucuuuacauuuaggauuuggagc

SEQ ID NO: 538927 - RNA, 21 nt, Artificial Sequence
  Synthetic
ugauucuuccuacccaugagc

SEQ ID NO: 538928 - RNA, 22 nt, Artificial Sequence
  Synthetic
uugauucuuccuacccaugagc

SEQ ID NO: 538929 - RNA, 23 nt, Artificial Sequence
  Synthetic
auugauucuuccuacccaugagc

SEQ ID NO: 538930 - RNA, 24 nt, Artificial Sequence
  Synthetic
uauugauucuuccuacccaugagc

SEQ ID NO: 538931 - RNA, 18 nt, Artificial Sequence
  Synthetic
ggaauaauaaggaugagc

SEQ ID NO: 538932 - RNA, 19 nt, Artificial Sequence
  Synthetic
uggaauaauaaggaugagc

SEQ ID NO: 538933 - RNA, 20 nt, Artificial Sequence
  Synthetic
uuggaauaauaaggaugagc

SEQ ID NO: 538934 - RNA, 21 nt, Artificial Sequence
  Synthetic
uuuggaauaauaaggaugagc

SEQ ID NO: 538935 - RNA, 22 nt, Artificial Sequence
  Synthetic
auuuggaauaauaaggaugagc

SEQ ID NO: 538936 - RNA, 23 nt, Artificial Sequence
  Synthetic
cauuuggaauaauaaggaugagc

SEQ ID NO: 538937 - RNA, 24 nt, Artificial Sequence
  Synthetic
ucauuuggaauaauaaggaugagc

SEQ ID NO: 538938 - RNA, 18 nt, Artificial Sequence
  Synthetic
gucacuaaaaugaugagc

SEQ ID NO: 538939 - RNA, 19 nt, Artificial Sequence
  Synthetic
ugucacuaaaaugaugagc

SEQ ID NO: 538940 - RNA, 20 nt, Artificial Sequence
  Synthetic
uugucacuaaaaugaugagc

SEQ ID NO: 538941 - RNA, 21 nt, Artificial Sequence
  Synthetic
uuugucacuaaaaugaugagc

SEQ ID NO: 538942 - RNA, 22 nt, Artificial Sequence
  Synthetic
uuuugucacuaaaaugaugagc

SEQ ID NO: 538943 - RNA, 23 nt, Artificial Sequence
  Synthetic
guuuugucacuaaaaugaugagc

SEQ ID NO: 538944 - RNA, 24 nt, Artificial Sequence
  Synthetic
uguuuugucacuaaaaugaugagc

SEQ ID NO: 538945 - RNA, 18 nt, Artificial Sequence
  Synthetic
ucccauccgccuaugagc

SEQ ID NO: 538946 - RNA, 19 nt, Artificial Sequence
  Synthetic
gucccauccgccuaugagc

SEQ ID NO: 538947 - RNA, 20 nt, Artificial Sequence
  Synthetic
agucccauccgccuaugagc

SEQ ID NO: 538948 - RNA, 21 nt, Artificial Sequence
  Synthetic
aagucccauccgccuaugagc

SEQ ID NO: 538949 - RNA, 22 nt, Artificial Sequence
  Synthetic
caagucccauccgccuaugagc

SEQ ID NO: 538950 - RNA, 23 nt, Artificial Sequence
  Synthetic
gcaagucccauccgccuaugagc

SEQ ID NO: 538951 - RNA, 24 nt, Artificial Sequence
  Synthetic
agcaagucccauccgccuaugagc

SEQ ID NO: 538952 - RNA, 18 nt, Artificial Sequence
  Synthetic
ugaauuugguuuaugagc

SEQ ID NO: 538953 - RNA, 19 nt, Artificial Sequence
  Synthetic
augaauuugguuuaugagc

SEQ ID NO: 538954 - RNA, 20 nt, Artificial Sequence
  Synthetic
aaugaauuugguuuaugagc

SEQ ID NO: 538955 - RNA, 21 nt, Artificial Sequence
  Synthetic
aaaugaauuugguuuaugagc

SEQ ID NO: 538956 - RNA, 22 nt, Artificial Sequence
  Synthetic
gaaaugaauuugguuuaugagc

SEQ ID NO: 538957 - RNA, 23 nt, Artificial Sequence
  Synthetic
ugaaaugaauuugguuuaugagc

SEQ ID NO: 538958 - RNA, 24 nt, Artificial Sequence
  Synthetic
gugaaaugaauuugguuuaugagc

SEQ ID NO: 538959 - RNA, 18 nt, Artificial Sequence
  Synthetic
uaauuaacuacccugagc

SEQ ID NO: 538960 - RNA, 19 nt, Artificial Sequence
  Synthetic
cuaauuaacuacccugagc

SEQ ID NO: 538961 - RNA, 20 nt, Artificial Sequence
  Synthetic
ucuaauuaacuacccugagc

SEQ ID NO: 538962 - RNA, 21 nt, Artificial Sequence
  Synthetic
gucuaauuaacuacccugagc

SEQ ID NO: 538963 - RNA, 22 nt, Artificial Sequence
  Synthetic
ugucuaauuaacuacccugagc

SEQ ID NO: 538964 - RNA, 23 nt, Artificial Sequence
  Synthetic
gugucuaauuaacuacccugagc

SEQ ID NO: 538965 - RNA, 24 nt, Artificial Sequence
  Synthetic
agugucuaauuaacuacccugagc

SEQ ID NO: 538966 - RNA, 18 nt, Artificial Sequence
  Synthetic
agugaggaaaagcugagc

SEQ ID NO: 538967 - RNA, 19 nt, Artificial Sequence
  Synthetic
cagugaggaaaagcugagc

SEQ ID NO: 538968 - RNA, 20 nt, Artificial Sequence
  Synthetic
acagugaggaaaagcugagc

SEQ ID NO: 538969 - RNA, 21 nt, Artificial Sequence
  Synthetic
aacagugaggaaaagcugagc

SEQ ID NO: 538970 - RNA, 22 nt, Artificial Sequence
  Synthetic
aaacagugaggaaaagcugagc

SEQ ID NO: 538971 - RNA, 23 nt, Artificial Sequence
  Synthetic
uaaacagugaggaaaagcugagc

SEQ ID NO: 538972 - RNA, 24 nt, Artificial Sequence
  Synthetic
auaaacagugaggaaaagcugagc

SEQ ID NO: 538973 - RNA, 18 nt, Artificial Sequence
  Synthetic
gaaaaaggcccgcugagc

SEQ ID NO: 538974 - RNA, 19 nt, Artificial Sequence
  Synthetic
agaaaaaggcccgcugagc

SEQ ID NO: 538975 - RNA, 20 nt, Artificial Sequence
  Synthetic
gagaaaaaggcccgcugagc

SEQ ID NO: 538976 - RNA, 21 nt, Artificial Sequence
  Synthetic
ggagaaaaaggcccgcugagc

SEQ ID NO: 538977 - RNA, 22 nt, Artificial Sequence
  Synthetic
gggagaaaaaggcccgcugagc

SEQ ID NO: 538978 - RNA, 23 nt, Artificial Sequence
  Synthetic
ggggagaaaaaggcccgcugagc

SEQ ID NO: 538979 - RNA, 24 nt, Artificial Sequence
  Synthetic
uggggagaaaaaggcccgcugagc

SEQ ID NO: 538980 - RNA, 18 nt, Artificial Sequence
  Synthetic
augugguguuuucugagc

SEQ ID NO: 538981 - RNA, 19 nt, Artificial Sequence
  Synthetic
uaugugguguuuucugagc

SEQ ID NO: 538982 - RNA, 20 nt, Artificial Sequence
  Synthetic
guaugugguguuuucugagc

SEQ ID NO: 538983 - RNA, 21 nt, Artificial Sequence
  Synthetic
uguaugugguguuuucugagc

SEQ ID NO: 538984 - RNA, 22 nt, Artificial Sequence
  Synthetic
uuguaugugguguuuucugagc

SEQ ID NO: 538985 - RNA, 23 nt, Artificial Sequence
  Synthetic
cuuguaugugguguuuucugagc

SEQ ID NO: 538986 - RNA, 24 nt, Artificial Sequence
  Synthetic
gcuuguaugugguguuuucugagc

SEQ ID NO: 538987 - RNA, 18 nt, Artificial Sequence
  Synthetic
aaagaaugcagagugagc

SEQ ID NO: 538988 - RNA, 19 nt, Artificial Sequence
  Synthetic
caaagaaugcagagugagc

SEQ ID NO: 538989 - RNA, 20 nt, Artificial Sequence
  Synthetic
ccaaagaaugcagagugagc

SEQ ID NO: 538990 - RNA, 21 nt, Artificial Sequence
  Synthetic
uccaaagaaugcagagugagc

SEQ ID NO: 538991 - RNA, 22 nt, Artificial Sequence
  Synthetic
auccaaagaaugcagagugagc

SEQ ID NO: 538992 - RNA, 23 nt, Artificial Sequence
  Synthetic
uauccaaagaaugcagagugagc

SEQ ID NO: 538993 - RNA, 24 nt, Artificial Sequence
  Synthetic
cuauccaaagaaugcagagugagc

SEQ ID NO: 538994 - RNA, 18 nt, Artificial Sequence
  Synthetic
gaaaauguaugagugagc

SEQ ID NO: 538995 - RNA, 19 nt, Artificial Sequence
  Synthetic
ugaaaauguaugagugagc

SEQ ID NO: 538996 - RNA, 20 nt, Artificial Sequence
  Synthetic
cugaaaauguaugagugagc

SEQ ID NO: 538997 - RNA, 21 nt, Artificial Sequence
  Synthetic
acugaaaauguaugagugagc

SEQ ID NO: 538998 - RNA, 22 nt, Artificial Sequence
  Synthetic
gacugaaaauguaugagugagc

SEQ ID NO: 538999 - RNA, 23 nt, Artificial Sequence
  Synthetic
ugacugaaaauguaugagugagc

SEQ ID NO: 539000 - RNA, 24 nt, Artificial Sequence
  Synthetic
cugacugaaaauguaugagugagc

SEQ ID NO: 539001 - RNA, 18 nt, Artificial Sequence
  Synthetic
gaguggaaucuagugagc

SEQ ID NO: 539002 - RNA, 19 nt, Artificial Sequence
  Synthetic
ugaguggaaucuagugagc

SEQ ID NO: 539003 - RNA, 20 nt, Artificial Sequence
  Synthetic
gugaguggaaucuagugagc

SEQ ID NO: 539004 - RNA, 21 nt, Artificial Sequence
  Synthetic
ggugaguggaaucuagugagc

SEQ ID NO: 539005 - RNA, 22 nt, Artificial Sequence
  Synthetic
gggugaguggaaucuagugagc

SEQ ID NO: 539006 - RNA, 23 nt, Artificial Sequence
  Synthetic
agggugaguggaaucuagugagc

SEQ ID NO: 539007 - RNA, 24 nt, Artificial Sequence
  Synthetic
cagggugaguggaaucuagugagc

SEQ ID NO: 539008 - RNA, 18 nt, Artificial Sequence
  Synthetic
gcaaaguccaaggugagc

SEQ ID NO: 539009 - RNA, 19 nt, Artificial Sequence
  Synthetic
ggcaaaguccaaggugagc

SEQ ID NO: 539010 - RNA, 20 nt, Artificial Sequence
  Synthetic
aggcaaaguccaaggugagc

SEQ ID NO: 539011 - RNA, 21 nt, Artificial Sequence
  Synthetic
uaggcaaaguccaaggugagc

SEQ ID NO: 539012 - RNA, 22 nt, Artificial Sequence
  Synthetic
auaggcaaaguccaaggugagc

SEQ ID NO: 539013 - RNA, 23 nt, Artificial Sequence
  Synthetic
gauaggcaaaguccaaggugagc

SEQ ID NO: 539014 - RNA, 24 nt, Artificial Sequence
  Synthetic
ggauaggcaaaguccaaggugagc

SEQ ID NO: 539015 - RNA, 18 nt, Artificial Sequence
  Synthetic
cuggguugucaugugagc

SEQ ID NO: 539016 - RNA, 19 nt, Artificial Sequence
  Synthetic
gcuggguugucaugugagc

SEQ ID NO: 539017 - RNA, 20 nt, Artificial Sequence
  Synthetic
cgcuggguugucaugugagc

SEQ ID NO: 539018 - RNA, 21 nt, Artificial Sequence
  Synthetic
acgcuggguugucaugugagc

SEQ ID NO: 539019 - RNA, 22 nt, Artificial Sequence
  Synthetic
uacgcuggguugucaugugagc

SEQ ID NO: 539020 - RNA, 23 nt, Artificial Sequence
  Synthetic
auacgcuggguugucaugugagc

SEQ ID NO: 539021 - RNA, 24 nt, Artificial Sequence
  Synthetic
cauacgcuggguugucaugugagc

SEQ ID NO: 539022 - RNA, 18 nt, Artificial Sequence
  Synthetic
ucacacgugccugugagc

SEQ ID NO: 539023 - RNA, 19 nt, Artificial Sequence
  Synthetic
uucacacgugccugugagc

SEQ ID NO: 539024 - RNA, 20 nt, Artificial Sequence
  Synthetic
auucacacgugccugugagc

SEQ ID NO: 539025 - RNA, 21 nt, Artificial Sequence
  Synthetic
cauucacacgugccugugagc

SEQ ID NO: 539026 - RNA, 22 nt, Artificial Sequence
  Synthetic
ucauucacacgugccugugagc

SEQ ID NO: 539027 - RNA, 23 nt, Artificial Sequence
  Synthetic
gucauucacacgugccugugagc

SEQ ID NO: 539028 - RNA, 24 nt, Artificial Sequence
  Synthetic
ugucauucacacgugccugugagc

SEQ ID NO: 539029 - RNA, 18 nt, Artificial Sequence
  Synthetic
agccugggacaauugagc

SEQ ID NO: 539030 - RNA, 19 nt, Artificial Sequence
  Synthetic
gagccugggacaauugagc

SEQ ID NO: 539031 - RNA, 20 nt, Artificial Sequence
  Synthetic
ugagccugggacaauugagc

SEQ ID NO: 539032 - RNA, 21 nt, Artificial Sequence
  Synthetic
gugagccugggacaauugagc

SEQ ID NO: 539033 - RNA, 22 nt, Artificial Sequence
  Synthetic
ggugagccugggacaauugagc

SEQ ID NO: 539034 - RNA, 23 nt, Artificial Sequence
  Synthetic
aggugagccugggacaauugagc

SEQ ID NO: 539035 - RNA, 24 nt, Artificial Sequence
  Synthetic
aaggugagccugggacaauugagc

SEQ ID NO: 539036 - RNA, 18 nt, Artificial Sequence
  Synthetic
aagcaggcaguauugagc

SEQ ID NO: 539037 - RNA, 19 nt, Artificial Sequence
  Synthetic
gaagcaggcaguauugagc

SEQ ID NO: 539038 - RNA, 20 nt, Artificial Sequence
  Synthetic
ugaagcaggcaguauugagc

SEQ ID NO: 539039 - RNA, 21 nt, Artificial Sequence
  Synthetic
augaagcaggcaguauugagc

SEQ ID NO: 539040 - RNA, 22 nt, Artificial Sequence
  Synthetic
caugaagcaggcaguauugagc

SEQ ID NO: 539041 - RNA, 23 nt, Artificial Sequence
  Synthetic
ucaugaagcaggcaguauugagc

SEQ ID NO: 539042 - RNA, 24 nt, Artificial Sequence
  Synthetic
cucaugaagcaggcaguauugagc

SEQ ID NO: 539043 - RNA, 18 nt, Artificial Sequence
  Synthetic
cugcucccucccuugagc

SEQ ID NO: 539044 - RNA, 19 nt, Artificial Sequence
  Synthetic
ucugcucccucccuugagc

SEQ ID NO: 539045 - RNA, 20 nt, Artificial Sequence
  Synthetic
uucugcucccucccuugagc

SEQ ID NO: 539046 - RNA, 21 nt, Artificial Sequence
  Synthetic
guucugcucccucccuugagc

SEQ ID NO: 539047 - RNA, 22 nt, Artificial Sequence
  Synthetic
uguucugcucccucccuugagc

SEQ ID NO: 539048 - RNA, 23 nt, Artificial Sequence
  Synthetic
auguucugcucccucccuugagc

SEQ ID NO: 539049 - RNA, 24 nt, Artificial Sequence
  Synthetic
aauguucugcucccucccuugagc

SEQ ID NO: 539050 - RNA, 18 nt, Artificial Sequence
  Synthetic
cgaggacuugccuugagc

SEQ ID NO: 539051 - RNA, 19 nt, Artificial Sequence
  Synthetic
acgaggacuugccuugagc

SEQ ID NO: 539052 - RNA, 20 nt, Artificial Sequence
  Synthetic
cacgaggacuugccuugagc

SEQ ID NO: 539053 - RNA, 21 nt, Artificial Sequence
  Synthetic
ccacgaggacuugccuugagc

SEQ ID NO: 539054 - RNA, 22 nt, Artificial Sequence
  Synthetic
uccacgaggacuugccuugagc

SEQ ID NO: 539055 - RNA, 23 nt, Artificial Sequence
  Synthetic
guccacgaggacuugccuugagc

SEQ ID NO: 539056 - RNA, 24 nt, Artificial Sequence
  Synthetic
gguccacgaggacuugccuugagc

SEQ ID NO: 539057 - RNA, 18 nt, Artificial Sequence
  Synthetic
acaagaaacuccuugagc

SEQ ID NO: 539058 - RNA, 19 nt, Artificial Sequence
  Synthetic
aacaagaaacuccuugagc

SEQ ID NO: 539059 - RNA, 20 nt, Artificial Sequence
  Synthetic
caacaagaaacuccuugagc

SEQ ID NO: 539060 - RNA, 21 nt, Artificial Sequence
  Synthetic
gcaacaagaaacuccuugagc

SEQ ID NO: 539061 - RNA, 22 nt, Artificial Sequence
  Synthetic
ggcaacaagaaacuccuugagc

SEQ ID NO: 539062 - RNA, 23 nt, Artificial Sequence
  Synthetic
aggcaacaagaaacuccuugagc

SEQ ID NO: 539063 - RNA, 24 nt, Artificial Sequence
  Synthetic
gaggcaacaagaaacuccuugagc

SEQ ID NO: 539064 - RNA, 18 nt, Artificial Sequence
  Synthetic
cacuuuugugcuuugagc

SEQ ID NO: 539065 - RNA, 19 nt, Artificial Sequence
  Synthetic
ucacuuuugugcuuugagc

SEQ ID NO: 539066 - RNA, 20 nt, Artificial Sequence
  Synthetic
gucacuuuugugcuuugagc

SEQ ID NO: 539067 - RNA, 21 nt, Artificial Sequence
  Synthetic
ugucacuuuugugcuuugagc

SEQ ID NO: 539068 - RNA, 22 nt, Artificial Sequence
  Synthetic
augucacuuuugugcuuugagc

SEQ ID NO: 539069 - RNA, 23 nt, Artificial Sequence
  Synthetic
uaugucacuuuugugcuuugagc

SEQ ID NO: 539070 - RNA, 24 nt, Artificial Sequence
  Synthetic
guaugucacuuuugugcuuugagc

SEQ ID NO: 539071 - RNA, 18 nt, Artificial Sequence
  Synthetic
aaguguccauuuuugagc

SEQ ID NO: 539072 - RNA, 19 nt, Artificial Sequence
  Synthetic
aaaguguccauuuuugagc

SEQ ID NO: 539073 - RNA, 20 nt, Artificial Sequence
  Synthetic
caaaguguccauuuuugagc

SEQ ID NO: 539074 - RNA, 21 nt, Artificial Sequence
  Synthetic
acaaaguguccauuuuugagc

SEQ ID NO: 539075 - RNA, 22 nt, Artificial Sequence
  Synthetic
gacaaaguguccauuuuugagc

SEQ ID NO: 539076 - RNA, 23 nt, Artificial Sequence
  Synthetic
ggacaaaguguccauuuuugagc

SEQ ID NO: 539077 - RNA, 24 nt, Artificial Sequence
  Synthetic
uggacaaaguguccauuuuugagc

SEQ ID NO: 539078 - RNA, 18 nt, Artificial Sequence
  Synthetic
uuuaaaagaaaaaauagc

SEQ ID NO: 539079 - RNA, 19 nt, Artificial Sequence
  Synthetic
uuuuaaaagaaaaaauagc

SEQ ID NO: 539080 - RNA, 20 nt, Artificial Sequence
  Synthetic
auuuuaaaagaaaaaauagc

SEQ ID NO: 539081 - RNA, 21 nt, Artificial Sequence
  Synthetic
aauuuuaaaagaaaaaauagc

SEQ ID NO: 539082 - RNA, 22 nt, Artificial Sequence
  Synthetic
caauuuuaaaagaaaaaauagc

SEQ ID NO: 539083 - RNA, 23 nt, Artificial Sequence
  Synthetic
ucaauuuuaaaagaaaaaauagc

SEQ ID NO: 539084 - RNA, 24 nt, Artificial Sequence
  Synthetic
cucaauuuuaaaagaaaaaauagc

SEQ ID NO: 539085 - RNA, 18 nt, Artificial Sequence
  Synthetic
cacuuuugaacaaauagc

SEQ ID NO: 539086 - RNA, 19 nt, Artificial Sequence
  Synthetic
gcacuuuugaacaaauagc

SEQ ID NO: 539087 - RNA, 20 nt, Artificial Sequence
  Synthetic
ugcacuuuugaacaaauagc

SEQ ID NO: 539088 - RNA, 21 nt, Artificial Sequence
  Synthetic
uugcacuuuugaacaaauagc

SEQ ID NO: 539089 - RNA, 22 nt, Artificial Sequence
  Synthetic
guugcacuuuugaacaaauagc

SEQ ID NO: 539090 - RNA, 23 nt, Artificial Sequence
  Synthetic
aguugcacuuuugaacaaauagc

SEQ ID NO: 539091 - RNA, 24 nt, Artificial Sequence
  Synthetic
uaguugcacuuuugaacaaauagc

SEQ ID NO: 539092 - RNA, 18 nt, Artificial Sequence
  Synthetic
auuucaacuagaaauagc

SEQ ID NO: 539093 - RNA, 19 nt, Artificial Sequence
  Synthetic
cauuucaacuagaaauagc

SEQ ID NO: 539094 - RNA, 20 nt, Artificial Sequence
  Synthetic
gcauuucaacuagaaauagc

SEQ ID NO: 539095 - RNA, 21 nt, Artificial Sequence
  Synthetic
agcauuucaacuagaaauagc

SEQ ID NO: 539096 - RNA, 22 nt, Artificial Sequence
  Synthetic
uagcauuucaacuagaaauagc

SEQ ID NO: 539097 - RNA, 23 nt, Artificial Sequence
  Synthetic
uuagcauuucaacuagaaauagc

SEQ ID NO: 539098 - RNA, 24 nt, Artificial Sequence
  Synthetic
auuagcauuucaacuagaaauagc

SEQ ID NO: 539099 - RNA, 18 nt, Artificial Sequence
  Synthetic
aacaaaggaaacaauagc

SEQ ID NO: 539100 - RNA, 19 nt, Artificial Sequence
  Synthetic
gaacaaaggaaacaauagc

SEQ ID NO: 539101 - RNA, 20 nt, Artificial Sequence
  Synthetic
agaacaaaggaaacaauagc

SEQ ID NO: 539102 - RNA, 21 nt, Artificial Sequence
  Synthetic
gagaacaaaggaaacaauagc

SEQ ID NO: 539103 - RNA, 22 nt, Artificial Sequence
  Synthetic
agagaacaaaggaaacaauagc

SEQ ID NO: 539104 - RNA, 23 nt, Artificial Sequence
  Synthetic
aagagaacaaaggaaacaauagc

SEQ ID NO: 539105 - RNA, 24 nt, Artificial Sequence
  Synthetic
gaagagaacaaaggaaacaauagc

SEQ ID NO: 539106 - RNA, 18 nt, Artificial Sequence
  Synthetic
aaugauauuuacaauagc

SEQ ID NO: 539107 - RNA, 19 nt, Artificial Sequence
  Synthetic
gaaugauauuuacaauagc

SEQ ID NO: 539108 - RNA, 20 nt, Artificial Sequence
  Synthetic
ugaaugauauuuacaauagc

SEQ ID NO: 539109 - RNA, 21 nt, Artificial Sequence
  Synthetic
gugaaugauauuuacaauagc

SEQ ID NO: 539110 - RNA, 22 nt, Artificial Sequence
  Synthetic
agugaaugauauuuacaauagc

SEQ ID NO: 539111 - RNA, 23 nt, Artificial Sequence
  Synthetic
cagugaaugauauuuacaauagc

SEQ ID NO: 539112 - RNA, 24 nt, Artificial Sequence
  Synthetic
ccagugaaugauauuuacaauagc

SEQ ID NO: 539113 - RNA, 18 nt, Artificial Sequence
  Synthetic
ucaauguguggcaauagc

SEQ ID NO: 539114 - RNA, 19 nt, Artificial Sequence
  Synthetic
gucaauguguggcaauagc

SEQ ID NO: 539115 - RNA, 20 nt, Artificial Sequence
  Synthetic
cgucaauguguggcaauagc

SEQ ID NO: 539116 - RNA, 21 nt, Artificial Sequence
  Synthetic
acgucaauguguggcaauagc

SEQ ID NO: 539117 - RNA, 22 nt, Artificial Sequence
  Synthetic
uacgucaauguguggcaauagc

SEQ ID NO: 539118 - RNA, 23 nt, Artificial Sequence
  Synthetic
auacgucaauguguggcaauagc

SEQ ID NO: 539119 - RNA, 24 nt, Artificial Sequence
  Synthetic
aauacgucaauguguggcaauagc

SEQ ID NO: 539120 - RNA, 18 nt, Artificial Sequence
  Synthetic
cuccuacaacucaauagc

SEQ ID NO: 539121 - RNA, 19 nt, Artificial Sequence
  Synthetic
acuccuacaacucaauagc

SEQ ID NO: 539122 - RNA, 20 nt, Artificial Sequence
  Synthetic
aacuccuacaacucaauagc

SEQ ID NO: 539123 - RNA, 21 nt, Artificial Sequence
  Synthetic
gaacuccuacaacucaauagc

SEQ ID NO: 539124 - RNA, 22 nt, Artificial Sequence
  Synthetic
ggaacuccuacaacucaauagc

SEQ ID NO: 539125 - RNA, 23 nt, Artificial Sequence
  Synthetic
aggaacuccuacaacucaauagc

SEQ ID NO: 539126 - RNA, 24 nt, Artificial Sequence
  Synthetic
aaggaacuccuacaacucaauagc

SEQ ID NO: 539127 - RNA, 18 nt, Artificial Sequence
  Synthetic
ccagguaaaaagaauagc

SEQ ID NO: 539128 - RNA, 19 nt, Artificial Sequence
  Synthetic
uccagguaaaaagaauagc

SEQ ID NO: 539129 - RNA, 20 nt, Artificial Sequence
  Synthetic
uuccagguaaaaagaauagc

SEQ ID NO: 539130 - RNA, 21 nt, Artificial Sequence
  Synthetic
auuccagguaaaaagaauagc

SEQ ID NO: 539131 - RNA, 22 nt, Artificial Sequence
  Synthetic
uauuccagguaaaaagaauagc

SEQ ID NO: 539132 - RNA, 23 nt, Artificial Sequence
  Synthetic
auauuccagguaaaaagaauagc

SEQ ID NO: 539133 - RNA, 24 nt, Artificial Sequence
  Synthetic
aauauuccagguaaaaagaauagc

SEQ ID NO: 539134 - RNA, 18 nt, Artificial Sequence
  Synthetic
cacuaucaugagaauagc

SEQ ID NO: 539135 - RNA, 19 nt, Artificial Sequence
  Synthetic
ccacuaucaugagaauagc

SEQ ID NO: 539136 - RNA, 20 nt, Artificial Sequence
  Synthetic
cccacuaucaugagaauagc

SEQ ID NO: 539137 - RNA, 21 nt, Artificial Sequence
  Synthetic
acccacuaucaugagaauagc

SEQ ID NO: 539138 - RNA, 22 nt, Artificial Sequence
  Synthetic
cacccacuaucaugagaauagc

SEQ ID NO: 539139 - RNA, 23 nt, Artificial Sequence
  Synthetic
ucacccacuaucaugagaauagc

SEQ ID NO: 539140 - RNA, 24 nt, Artificial Sequence
  Synthetic
aucacccacuaucaugagaauagc

SEQ ID NO: 539141 - RNA, 18 nt, Artificial Sequence
  Synthetic
cugcucuagcggaauagc

SEQ ID NO: 539142 - RNA, 19 nt, Artificial Sequence
  Synthetic
acugcucuagcggaauagc

SEQ ID NO: 539143 - RNA, 20 nt, Artificial Sequence
  Synthetic
cacugcucuagcggaauagc

SEQ ID NO: 539144 - RNA, 21 nt, Artificial Sequence
  Synthetic
gcacugcucuagcggaauagc

SEQ ID NO: 539145 - RNA, 22 nt, Artificial Sequence
  Synthetic
agcacugcucuagcggaauagc

SEQ ID NO: 539146 - RNA, 23 nt, Artificial Sequence
  Synthetic
aagcacugcucuagcggaauagc

SEQ ID NO: 539147 - RNA, 24 nt, Artificial Sequence
  Synthetic
gaagcacugcucuagcggaauagc

SEQ ID NO: 539148 - RNA, 18 nt, Artificial Sequence
  Synthetic
aaucucacuuauaauagc

SEQ ID NO: 539149 - RNA, 19 nt, Artificial Sequence
  Synthetic
caaucucacuuauaauagc

SEQ ID NO: 539150 - RNA, 20 nt, Artificial Sequence
  Synthetic
acaaucucacuuauaauagc

SEQ ID NO: 539151 - RNA, 21 nt, Artificial Sequence
  Synthetic
aacaaucucacuuauaauagc

SEQ ID NO: 539152 - RNA, 22 nt, Artificial Sequence
  Synthetic
aaacaaucucacuuauaauagc

SEQ ID NO: 539153 - RNA, 23 nt, Artificial Sequence
  Synthetic
gaaacaaucucacuuauaauagc

SEQ ID NO: 539154 - RNA, 24 nt, Artificial Sequence
  Synthetic
ggaaacaaucucacuuauaauagc

SEQ ID NO: 539155 - RNA, 18 nt, Artificial Sequence
  Synthetic
aaauugcuaauuaauagc

SEQ ID NO: 539156 - RNA, 19 nt, Artificial Sequence
  Synthetic
uaaauugcuaauuaauagc

SEQ ID NO: 539157 - RNA, 20 nt, Artificial Sequence
  Synthetic
uuaaauugcuaauuaauagc

SEQ ID NO: 539158 - RNA, 21 nt, Artificial Sequence
  Synthetic
auuaaauugcuaauuaauagc

SEQ ID NO: 539159 - RNA, 22 nt, Artificial Sequence
  Synthetic
uauuaaauugcuaauuaauagc

SEQ ID NO: 539160 - RNA, 23 nt, Artificial Sequence
  Synthetic
cuauuaaauugcuaauuaauagc

SEQ ID NO: 539161 - RNA, 24 nt, Artificial Sequence
  Synthetic
ucuauuaaauugcuaauuaauagc

SEQ ID NO: 539162 - RNA, 18 nt, Artificial Sequence
  Synthetic
uaagagaaacuuaauagc

SEQ ID NO: 539163 - RNA, 19 nt, Artificial Sequence
  Synthetic
cuaagagaaacuuaauagc

SEQ ID NO: 539164 - RNA, 20 nt, Artificial Sequence
  Synthetic
ucuaagagaaacuuaauagc

SEQ ID NO: 539165 - RNA, 21 nt, Artificial Sequence
  Synthetic
aucuaagagaaacuuaauagc

SEQ ID NO: 539166 - RNA, 22 nt, Artificial Sequence
  Synthetic
gaucuaagagaaacuuaauagc

SEQ ID NO: 539167 - RNA, 23 nt, Artificial Sequence
  Synthetic
ggaucuaagagaaacuuaauagc

SEQ ID NO: 539168 - RNA, 24 nt, Artificial Sequence
  Synthetic
aggaucuaagagaaacuuaauagc

SEQ ID NO: 539169 - RNA, 18 nt, Artificial Sequence
  Synthetic
gaacaaguugaacauagc

SEQ ID NO: 539170 - RNA, 19 nt, Artificial Sequence
  Synthetic
agaacaaguugaacauagc

SEQ ID NO: 539171 - RNA, 20 nt, Artificial Sequence
  Synthetic
aagaacaaguugaacauagc

SEQ ID NO: 539172 - RNA, 21 nt, Artificial Sequence
  Synthetic
uaagaacaaguugaacauagc

SEQ ID NO: 539173 - RNA, 22 nt, Artificial Sequence
  Synthetic
uuaagaacaaguugaacauagc

SEQ ID NO: 539174 - RNA, 23 nt, Artificial Sequence
  Synthetic
uuuaagaacaaguugaacauagc

SEQ ID NO: 539175 - RNA, 24 nt, Artificial Sequence
  Synthetic
uuuuaagaacaaguugaacauagc

SEQ ID NO: 539176 - RNA, 18 nt, Artificial Sequence
  Synthetic
auaacuucuagucauagc

SEQ ID NO: 539177 - RNA, 19 nt, Artificial Sequence
  Synthetic
gauaacuucuagucauagc

SEQ ID NO: 539178 - RNA, 20 nt, Artificial Sequence
  Synthetic
agauaacuucuagucauagc

SEQ ID NO: 539179 - RNA, 21 nt, Artificial Sequence
  Synthetic
uagauaacuucuagucauagc

SEQ ID NO: 539180 - RNA, 22 nt, Artificial Sequence
  Synthetic
cuagauaacuucuagucauagc

SEQ ID NO: 539181 - RNA, 23 nt, Artificial Sequence
  Synthetic
ccuagauaacuucuagucauagc

SEQ ID NO: 539182 - RNA, 24 nt, Artificial Sequence
  Synthetic
uccuagauaacuucuagucauagc

SEQ ID NO: 539183 - RNA, 18 nt, Artificial Sequence
  Synthetic
aaaagaguuggucauagc

SEQ ID NO: 539184 - RNA, 19 nt, Artificial Sequence
  Synthetic
gaaaagaguuggucauagc

SEQ ID NO: 539185 - RNA, 20 nt, Artificial Sequence
  Synthetic
ggaaaagaguuggucauagc

SEQ ID NO: 539186 - RNA, 21 nt, Artificial Sequence
  Synthetic
aggaaaagaguuggucauagc

SEQ ID NO: 539187 - RNA, 22 nt, Artificial Sequence
  Synthetic
gaggaaaagaguuggucauagc

SEQ ID NO: 539188 - RNA, 23 nt, Artificial Sequence
  Synthetic
ugaggaaaagaguuggucauagc

SEQ ID NO: 539189 - RNA, 24 nt, Artificial Sequence
  Synthetic
cugaggaaaagaguuggucauagc

SEQ ID NO: 539190 - RNA, 21 nt, Artificial Sequence
  Synthetic
gccaucuaggacuuucauagc

SEQ ID NO: 539191 - RNA, 22 nt, Artificial Sequence
  Synthetic
ugccaucuaggacuuucauagc

SEQ ID NO: 539192 - RNA, 23 nt, Artificial Sequence
  Synthetic
augccaucuaggacuuucauagc

SEQ ID NO: 539193 - RNA, 24 nt, Artificial Sequence
  Synthetic
gaugccaucuaggacuuucauagc

SEQ ID NO: 539194 - RNA, 18 nt, Artificial Sequence
  Synthetic
ggcugagccucagauagc

SEQ ID NO: 539195 - RNA, 19 nt, Artificial Sequence
  Synthetic
uggcugagccucagauagc

SEQ ID NO: 539196 - RNA, 20 nt, Artificial Sequence
  Synthetic
cuggcugagccucagauagc

SEQ ID NO: 539197 - RNA, 21 nt, Artificial Sequence
  Synthetic
acuggcugagccucagauagc

SEQ ID NO: 539198 - RNA, 22 nt, Artificial Sequence
  Synthetic
aacuggcugagccucagauagc

SEQ ID NO: 539199 - RNA, 23 nt, Artificial Sequence
  Synthetic
aaacuggcugagccucagauagc

SEQ ID NO: 539200 - RNA, 24 nt, Artificial Sequence
  Synthetic
uaaacuggcugagccucagauagc

SEQ ID NO: 539201 - RNA, 18 nt, Artificial Sequence
  Synthetic
aguuuuuauugugauagc

SEQ ID NO: 539202 - RNA, 19 nt, Artificial Sequence
  Synthetic
caguuuuuauugugauagc

SEQ ID NO: 539203 - RNA, 20 nt, Artificial Sequence
  Synthetic
acaguuuuuauugugauagc

SEQ ID NO: 539204 - RNA, 21 nt, Artificial Sequence
  Synthetic
aacaguuuuuauugugauagc

SEQ ID NO: 539205 - RNA, 22 nt, Artificial Sequence
  Synthetic
caacaguuuuuauugugauagc

SEQ ID NO: 539206 - RNA, 23 nt, Artificial Sequence
  Synthetic
gcaacaguuuuuauugugauagc

SEQ ID NO: 539207 - RNA, 24 nt, Artificial Sequence
  Synthetic
agcaacaguuuuuauugugauagc

SEQ ID NO: 539208 - RNA, 18 nt, Artificial Sequence
  Synthetic
aaaguaacuaaauauagc

SEQ ID NO: 539209 - RNA, 19 nt, Artificial Sequence
  Synthetic
uaaaguaacuaaauauagc

SEQ ID NO: 539210 - RNA, 20 nt, Artificial Sequence
  Synthetic
auaaaguaacuaaauauagc

SEQ ID NO: 539211 - RNA, 21 nt, Artificial Sequence
  Synthetic
aauaaaguaacuaaauauagc

SEQ ID NO: 539212 - RNA, 22 nt, Artificial Sequence
  Synthetic
uaauaaaguaacuaaauauagc

SEQ ID NO: 539213 - RNA, 23 nt, Artificial Sequence
  Synthetic
auaauaaaguaacuaaauauagc

SEQ ID NO: 539214 - RNA, 24 nt, Artificial Sequence
  Synthetic
aauaauaaaguaacuaaauauagc

SEQ ID NO: 539215 - RNA, 18 nt, Artificial Sequence
  Synthetic
uaaacaaccacauauagc

SEQ ID NO: 539216 - RNA, 19 nt, Artificial Sequence
  Synthetic
uuaaacaaccacauauagc

SEQ ID NO: 539217 - RNA, 20 nt, Artificial Sequence
  Synthetic
uuuaaacaaccacauauagc

SEQ ID NO: 539218 - RNA, 21 nt, Artificial Sequence
  Synthetic
uuuuaaacaaccacauauagc

SEQ ID NO: 539219 - RNA, 22 nt, Artificial Sequence
  Synthetic
cuuuuaaacaaccacauauagc

SEQ ID NO: 539220 - RNA, 23 nt, Artificial Sequence
  Synthetic
ucuuuuaaacaaccacauauagc

SEQ ID NO: 539221 - RNA, 24 nt, Artificial Sequence
  Synthetic
cucuuuuaaacaaccacauauagc

SEQ ID NO: 539222 - RNA, 18 nt, Artificial Sequence
  Synthetic
uccuuuugguuauauagc

SEQ ID NO: 539223 - RNA, 19 nt, Artificial Sequence
  Synthetic
cuccuuuugguuauauagc

SEQ ID NO: 539224 - RNA, 20 nt, Artificial Sequence
  Synthetic
ucuccuuuugguuauauagc

SEQ ID NO: 539225 - RNA, 21 nt, Artificial Sequence
  Synthetic
uucuccuuuugguuauauagc

SEQ ID NO: 539226 - RNA, 22 nt, Artificial Sequence
  Synthetic
uuucuccuuuugguuauauagc

SEQ ID NO: 539227 - RNA, 23 nt, Artificial Sequence
  Synthetic
cuuucuccuuuugguuauauagc

SEQ ID NO: 539228 - RNA, 24 nt, Artificial Sequence
  Synthetic
gcuuucuccuuuugguuauauagc

SEQ ID NO: 539229 - RNA, 18 nt, Artificial Sequence
  Synthetic
ccacaggugaucuauagc

SEQ ID NO: 539230 - RNA, 19 nt, Artificial Sequence
  Synthetic
uccacaggugaucuauagc

SEQ ID NO: 539231 - RNA, 20 nt, Artificial Sequence
  Synthetic
cuccacaggugaucuauagc

SEQ ID NO: 539232 - RNA, 21 nt, Artificial Sequence
  Synthetic
ucuccacaggugaucuauagc

SEQ ID NO: 539233 - RNA, 22 nt, Artificial Sequence
  Synthetic
uucuccacaggugaucuauagc

SEQ ID NO: 539234 - RNA, 23 nt, Artificial Sequence
  Synthetic
auucuccacaggugaucuauagc

SEQ ID NO: 539235 - RNA, 24 nt, Artificial Sequence
  Synthetic
cauucuccacaggugaucuauagc

SEQ ID NO: 539236 - RNA, 18 nt, Artificial Sequence
  Synthetic
cugaaacaauucuauagc

SEQ ID NO: 539237 - RNA, 19 nt, Artificial Sequence
  Synthetic
ucugaaacaauucuauagc

SEQ ID NO: 539238 - RNA, 20 nt, Artificial Sequence
  Synthetic
aucugaaacaauucuauagc

SEQ ID NO: 539239 - RNA, 21 nt, Artificial Sequence
  Synthetic
aaucugaaacaauucuauagc

SEQ ID NO: 539240 - RNA, 22 nt, Artificial Sequence
  Synthetic
gaaucugaaacaauucuauagc

SEQ ID NO: 539241 - RNA, 23 nt, Artificial Sequence
  Synthetic
ugaaucugaaacaauucuauagc

SEQ ID NO: 539242 - RNA, 24 nt, Artificial Sequence
  Synthetic
augaaucugaaacaauucuauagc

SEQ ID NO: 539243 - RNA, 18 nt, Artificial Sequence
  Synthetic
auccaaaaaguguauagc

SEQ ID NO: 539244 - RNA, 19 nt, Artificial Sequence
  Synthetic
cauccaaaaaguguauagc

SEQ ID NO: 539245 - RNA, 20 nt, Artificial Sequence
  Synthetic
acauccaaaaaguguauagc

SEQ ID NO: 539246 - RNA, 21 nt, Artificial Sequence
  Synthetic
cacauccaaaaaguguauagc

SEQ ID NO: 539247 - RNA, 22 nt, Artificial Sequence
  Synthetic
acacauccaaaaaguguauagc

SEQ ID NO: 539248 - RNA, 23 nt, Artificial Sequence
  Synthetic
gacacauccaaaaaguguauagc

SEQ ID NO: 539249 - RNA, 24 nt, Artificial Sequence
  Synthetic
agacacauccaaaaaguguauagc

SEQ ID NO: 539250 - RNA, 18 nt, Artificial Sequence
  Synthetic
aaaguaaaaaauuauagc

SEQ ID NO: 539251 - RNA, 19 nt, Artificial Sequence
  Synthetic
aaaaguaaaaaauuauagc

SEQ ID NO: 539252 - RNA, 20 nt, Artificial Sequence
  Synthetic
aaaaaguaaaaaauuauagc

SEQ ID NO: 539253 - RNA, 21 nt, Artificial Sequence
  Synthetic
gaaaaaguaaaaaauuauagc

SEQ ID NO: 539254 - RNA, 22 nt, Artificial Sequence
  Synthetic
ggaaaaaguaaaaaauuauagc

SEQ ID NO: 539255 - RNA, 23 nt, Artificial Sequence
  Synthetic
aggaaaaaguaaaaaauuauagc

SEQ ID NO: 539256 - RNA, 24 nt, Artificial Sequence
  Synthetic
gaggaaaaaguaaaaaauuauagc

SEQ ID NO: 539257 - RNA, 18 nt, Artificial Sequence
  Synthetic
uucucaggcuauuauagc

SEQ ID NO: 539258 - RNA, 19 nt, Artificial Sequence
  Synthetic
uuucucaggcuauuauagc

SEQ ID NO: 539259 - RNA, 20 nt, Artificial Sequence
  Synthetic
auuucucaggcuauuauagc

SEQ ID NO: 539260 - RNA, 21 nt, Artificial Sequence
  Synthetic
gauuucucaggcuauuauagc

SEQ ID NO: 539261 - RNA, 22 nt, Artificial Sequence
  Synthetic
cgauuucucaggcuauuauagc

SEQ ID NO: 539262 - RNA, 23 nt, Artificial Sequence
  Synthetic
ccgauuucucaggcuauuauagc

SEQ ID NO: 539263 - RNA, 24 nt, Artificial Sequence
  Synthetic
accgauuucucaggcuauuauagc

SEQ ID NO: 539264 - RNA, 18 nt, Artificial Sequence
  Synthetic
uucuaggauucuuauagc

SEQ ID NO: 539265 - RNA, 19 nt, Artificial Sequence
  Synthetic
auucuaggauucuuauagc

SEQ ID NO: 539266 - RNA, 20 nt, Artificial Sequence
  Synthetic
uauucuaggauucuuauagc

SEQ ID NO: 539267 - RNA, 21 nt, Artificial Sequence
  Synthetic
uuauucuaggauucuuauagc

SEQ ID NO: 539268 - RNA, 22 nt, Artificial Sequence
  Synthetic
uuuauucuaggauucuuauagc

SEQ ID NO: 539269 - RNA, 23 nt, Artificial Sequence
  Synthetic
uuuuauucuaggauucuuauagc

SEQ ID NO: 539270 - RNA, 24 nt, Artificial Sequence
  Synthetic
auuuuauucuaggauucuuauagc

SEQ ID NO: 539271 - RNA, 18 nt, Artificial Sequence
  Synthetic
uuuaucauauuuuauagc

SEQ ID NO: 539272 - RNA, 19 nt, Artificial Sequence
  Synthetic
auuuaucauauuuuauagc

SEQ ID NO: 539273 - RNA, 20 nt, Artificial Sequence
  Synthetic
uauuuaucauauuuuauagc

SEQ ID NO: 539274 - RNA, 21 nt, Artificial Sequence
  Synthetic
auauuuaucauauuuuauagc

SEQ ID NO: 539275 - RNA, 22 nt, Artificial Sequence
  Synthetic
uauauuuaucauauuuuauagc

SEQ ID NO: 539276 - RNA, 23 nt, Artificial Sequence
  Synthetic
auauauuuaucauauuuuauagc

SEQ ID NO: 539277 - RNA, 24 nt, Artificial Sequence
  Synthetic
cauauauuuaucauauuuuauagc

SEQ ID NO: 539278 - RNA, 18 nt, Artificial Sequence
  Synthetic
cguaccagaaguacuagc

SEQ ID NO: 539279 - RNA, 19 nt, Artificial Sequence
  Synthetic
ucguaccagaaguacuagc

SEQ ID NO: 539280 - RNA, 20 nt, Artificial Sequence
  Synthetic
aucguaccagaaguacuagc

SEQ ID NO: 539281 - RNA, 21 nt, Artificial Sequence
  Synthetic
aaucguaccagaaguacuagc

SEQ ID NO: 539282 - RNA, 22 nt, Artificial Sequence
  Synthetic
aaaucguaccagaaguacuagc

SEQ ID NO: 539283 - RNA, 23 nt, Artificial Sequence
  Synthetic
aaaaucguaccagaaguacuagc

SEQ ID NO: 539284 - RNA, 24 nt, Artificial Sequence
  Synthetic
caaaaucguaccagaaguacuagc

SEQ ID NO: 539285 - RNA, 18 nt, Artificial Sequence
  Synthetic
aaccugugauguacuagc

SEQ ID NO: 539286 - RNA, 19 nt, Artificial Sequence
  Synthetic
aaaccugugauguacuagc

SEQ ID NO: 539287 - RNA, 20 nt, Artificial Sequence
  Synthetic
aaaaccugugauguacuagc

SEQ ID NO: 539288 - RNA, 21 nt, Artificial Sequence
  Synthetic
uaaaaccugugauguacuagc

SEQ ID NO: 539289 - RNA, 22 nt, Artificial Sequence
  Synthetic
uuaaaaccugugauguacuagc

SEQ ID NO: 539290 - RNA, 23 nt, Artificial Sequence
  Synthetic
auuaaaaccugugauguacuagc

SEQ ID NO: 539291 - RNA, 24 nt, Artificial Sequence
  Synthetic
uauuaaaaccugugauguacuagc

SEQ ID NO: 539292 - RNA, 18 nt, Artificial Sequence
  Synthetic
uugcagcuggauccuagc

SEQ ID NO: 539293 - RNA, 19 nt, Artificial Sequence
  Synthetic
cuugcagcuggauccuagc

SEQ ID NO: 539294 - RNA, 20 nt, Artificial Sequence
  Synthetic
gcuugcagcuggauccuagc

SEQ ID NO: 539295 - RNA, 21 nt, Artificial Sequence
  Synthetic
ggcuugcagcuggauccuagc

SEQ ID NO: 539296 - RNA, 22 nt, Artificial Sequence
  Synthetic
uggcuugcagcuggauccuagc

SEQ ID NO: 539297 - RNA, 23 nt, Artificial Sequence
  Synthetic
cuggcuugcagcuggauccuagc

SEQ ID NO: 539298 - RNA, 24 nt, Artificial Sequence
  Synthetic
gcuggcuugcagcuggauccuagc

SEQ ID NO: 539299 - RNA, 18 nt, Artificial Sequence
  Synthetic
aguacugggaguccuagc

SEQ ID NO: 539300 - RNA, 19 nt, Artificial Sequence
  Synthetic
uaguacugggaguccuagc

SEQ ID NO: 539301 - RNA, 20 nt, Artificial Sequence
  Synthetic
uuaguacugggaguccuagc

SEQ ID NO: 539302 - RNA, 21 nt, Artificial Sequence
  Synthetic
cuuaguacugggaguccuagc

SEQ ID NO: 539303 - RNA, 22 nt, Artificial Sequence
  Synthetic
acuuaguacugggaguccuagc

SEQ ID NO: 539304 - RNA, 23 nt, Artificial Sequence
  Synthetic
aacuuaguacugggaguccuagc

SEQ ID NO: 539305 - RNA, 24 nt, Artificial Sequence
  Synthetic
uaacuuaguacugggaguccuagc

SEQ ID NO: 539306 - RNA, 18 nt, Artificial Sequence
  Synthetic
uaagucaggucagcuagc

SEQ ID NO: 539307 - RNA, 19 nt, Artificial Sequence
  Synthetic
guaagucaggucagcuagc

SEQ ID NO: 539308 - RNA, 20 nt, Artificial Sequence
  Synthetic
uguaagucaggucagcuagc

SEQ ID NO: 539309 - RNA, 21 nt, Artificial Sequence
  Synthetic
uuguaagucaggucagcuagc

SEQ ID NO: 539310 - RNA, 22 nt, Artificial Sequence
  Synthetic
cuuguaagucaggucagcuagc

SEQ ID NO: 539311 - RNA, 23 nt, Artificial Sequence
  Synthetic
ucuuguaagucaggucagcuagc

SEQ ID NO: 539312 - RNA, 24 nt, Artificial Sequence
  Synthetic
uucuuguaagucaggucagcuagc

SEQ ID NO: 539313 - RNA, 18 nt, Artificial Sequence
  Synthetic
aagagcagauuugcuagc

SEQ ID NO: 539314 - RNA, 19 nt, Artificial Sequence
  Synthetic
uaagagcagauuugcuagc

SEQ ID NO: 539315 - RNA, 20 nt, Artificial Sequence
  Synthetic
uuaagagcagauuugcuagc

SEQ ID NO: 539316 - RNA, 21 nt, Artificial Sequence
  Synthetic
uuuaagagcagauuugcuagc

SEQ ID NO: 539317 - RNA, 22 nt, Artificial Sequence
  Synthetic
cuuuaagagcagauuugcuagc

SEQ ID NO: 539318 - RNA, 23 nt, Artificial Sequence
  Synthetic
ucuuuaagagcagauuugcuagc

SEQ ID NO: 539319 - RNA, 24 nt, Artificial Sequence
  Synthetic
uucuuuaagagcagauuugcuagc

SEQ ID NO: 539320 - RNA, 18 nt, Artificial Sequence
  Synthetic
cuugaagcuuucucuagc

SEQ ID NO: 539321 - RNA, 19 nt, Artificial Sequence
  Synthetic
acuugaagcuuucucuagc

SEQ ID NO: 539322 - RNA, 20 nt, Artificial Sequence
  Synthetic
aacuugaagcuuucucuagc

SEQ ID NO: 539323 - RNA, 21 nt, Artificial Sequence
  Synthetic
gaacuugaagcuuucucuagc

SEQ ID NO: 539324 - RNA, 22 nt, Artificial Sequence
  Synthetic
agaacuugaagcuuucucuagc

SEQ ID NO: 539325 - RNA, 23 nt, Artificial Sequence
  Synthetic
aagaacuugaagcuuucucuagc

SEQ ID NO: 539326 - RNA, 24 nt, Artificial Sequence
  Synthetic
gaagaacuugaagcuuucucuagc

SEQ ID NO: 539327 - RNA, 18 nt, Artificial Sequence
  Synthetic
agugauagguagucuagc

SEQ ID NO: 539328 - RNA, 19 nt, Artificial Sequence
  Synthetic
aagugauagguagucuagc

SEQ ID NO: 539329 - RNA, 20 nt, Artificial Sequence
  Synthetic
aaagugauagguagucuagc

SEQ ID NO: 539330 - RNA, 21 nt, Artificial Sequence
  Synthetic
gaaagugauagguagucuagc

SEQ ID NO: 539331 - RNA, 22 nt, Artificial Sequence
  Synthetic
cgaaagugauagguagucuagc

SEQ ID NO: 539332 - RNA, 23 nt, Artificial Sequence
  Synthetic
acgaaagugauagguagucuagc

SEQ ID NO: 539333 - RNA, 24 nt, Artificial Sequence
  Synthetic
gacgaaagugauagguagucuagc

SEQ ID NO: 539334 - RNA, 18 nt, Artificial Sequence
  Synthetic
uucuuuuguucuucuagc

SEQ ID NO: 539335 - RNA, 19 nt, Artificial Sequence
  Synthetic
auucuuuuguucuucuagc

SEQ ID NO: 539336 - RNA, 20 nt, Artificial Sequence
  Synthetic
uauucuuuuguucuucuagc

SEQ ID NO: 539337 - RNA, 21 nt, Artificial Sequence
  Synthetic
auauucuuuuguucuucuagc

SEQ ID NO: 539338 - RNA, 22 nt, Artificial Sequence
  Synthetic
gauauucuuuuguucuucuagc

SEQ ID NO: 539339 - RNA, 23 nt, Artificial Sequence
  Synthetic
agauauucuuuuguucuucuagc

SEQ ID NO: 539340 - RNA, 24 nt, Artificial Sequence
  Synthetic
aagauauucuuuuguucuucuagc

SEQ ID NO: 539341 - RNA, 18 nt, Artificial Sequence
  Synthetic
gaaccuaaaguuucuagc

SEQ ID NO: 539342 - RNA, 19 nt, Artificial Sequence
  Synthetic
ugaaccuaaaguuucuagc

SEQ ID NO: 539343 - RNA, 20 nt, Artificial Sequence
  Synthetic
augaaccuaaaguuucuagc

SEQ ID NO: 539344 - RNA, 21 nt, Artificial Sequence
  Synthetic
gaugaaccuaaaguuucuagc

SEQ ID NO: 539345 - RNA, 22 nt, Artificial Sequence
  Synthetic
ggaugaaccuaaaguuucuagc

SEQ ID NO: 539346 - RNA, 23 nt, Artificial Sequence
  Synthetic
aggaugaaccuaaaguuucuagc

SEQ ID NO: 539347 - RNA, 24 nt, Artificial Sequence
  Synthetic
aaggaugaaccuaaaguuucuagc

SEQ ID NO: 539348 - RNA, 18 nt, Artificial Sequence
  Synthetic
ugugggauuacaaguagc

SEQ ID NO: 539349 - RNA, 19 nt, Artificial Sequence
  Synthetic
augugggauuacaaguagc

SEQ ID NO: 539350 - RNA, 20 nt, Artificial Sequence
  Synthetic
gaugugggauuacaaguagc

SEQ ID NO: 539351 - RNA, 21 nt, Artificial Sequence
  Synthetic
agaugugggauuacaaguagc

SEQ ID NO: 539352 - RNA, 22 nt, Artificial Sequence
  Synthetic
aagaugugggauuacaaguagc

SEQ ID NO: 539353 - RNA, 23 nt, Artificial Sequence
  Synthetic
caagaugugggauuacaaguagc

SEQ ID NO: 539354 - RNA, 24 nt, Artificial Sequence
  Synthetic
acaagaugugggauuacaaguagc

SEQ ID NO: 539355 - RNA, 21 nt, Artificial Sequence
  Synthetic
ugccucagccucccaaguagc

SEQ ID NO: 539356 - RNA, 22 nt, Artificial Sequence
  Synthetic
cugccucagccucccaaguagc

SEQ ID NO: 539357 - RNA, 23 nt, Artificial Sequence
  Synthetic
ccugccucagccucccaaguagc

SEQ ID NO: 539358 - RNA, 24 nt, Artificial Sequence
  Synthetic
cccugccucagccucccaaguagc

SEQ ID NO: 539359 - RNA, 24 nt, Artificial Sequence
  Synthetic
uccugccucagccucccaaguagc

SEQ ID NO: 539360 - RNA, 23 nt, Artificial Sequence
  Synthetic
ucugccucagccucccaaguagc

SEQ ID NO: 539361 - RNA, 24 nt, Artificial Sequence
  Synthetic
uucugccucagccucccaaguagc

SEQ ID NO: 539362 - RNA, 18 nt, Artificial Sequence
  Synthetic
cucagcuucccaaguagc

SEQ ID NO: 539363 - RNA, 19 nt, Artificial Sequence
  Synthetic
ccucagcuucccaaguagc

SEQ ID NO: 539364 - RNA, 20 nt, Artificial Sequence
  Synthetic
gccucagcuucccaaguagc

SEQ ID NO: 539365 - RNA, 21 nt, Artificial Sequence
  Synthetic
ugccucagcuucccaaguagc

SEQ ID NO: 539366 - RNA, 22 nt, Artificial Sequence
  Synthetic
uugccucagcuucccaaguagc

SEQ ID NO: 539367 - RNA, 23 nt, Artificial Sequence
  Synthetic
cuugccucagcuucccaaguagc

SEQ ID NO: 539368 - RNA, 24 nt, Artificial Sequence
  Synthetic
ucuugccucagcuucccaaguagc

SEQ ID NO: 539369 - RNA, 18 nt, Artificial Sequence
  Synthetic
gaaguagguagcaguagc

SEQ ID NO: 539370 - RNA, 19 nt, Artificial Sequence
  Synthetic
ggaaguagguagcaguagc

SEQ ID NO: 539371 - RNA, 20 nt, Artificial Sequence
  Synthetic
gggaaguagguagcaguagc

SEQ ID NO: 539372 - RNA, 21 nt, Artificial Sequence
  Synthetic
ugggaaguagguagcaguagc

SEQ ID NO: 539373 - RNA, 22 nt, Artificial Sequence
  Synthetic
cugggaaguagguagcaguagc

SEQ ID NO: 539374 - RNA, 23 nt, Artificial Sequence
  Synthetic
gcugggaaguagguagcaguagc

SEQ ID NO: 539375 - RNA, 24 nt, Artificial Sequence
  Synthetic
ggcugggaaguagguagcaguagc

SEQ ID NO: 539376 - RNA, 18 nt, Artificial Sequence
  Synthetic
cuuaaccucccgaguagc

SEQ ID NO: 539377 - RNA, 19 nt, Artificial Sequence
  Synthetic
ccuuaaccucccgaguagc

SEQ ID NO: 539378 - RNA, 20 nt, Artificial Sequence
  Synthetic
gccuuaaccucccgaguagc

SEQ ID NO: 539379 - RNA, 21 nt, Artificial Sequence
  Synthetic
ugccuuaaccucccgaguagc

SEQ ID NO: 539380 - RNA, 22 nt, Artificial Sequence
  Synthetic
cugccuuaaccucccgaguagc

SEQ ID NO: 539381 - RNA, 23 nt, Artificial Sequence
  Synthetic
ccugccuuaaccucccgaguagc

SEQ ID NO: 539382 - RNA, 24 nt, Artificial Sequence
  Synthetic
uccugccuuaaccucccgaguagc

SEQ ID NO: 539383 - RNA, 18 nt, Artificial Sequence
  Synthetic
cucagccucccgaguagc

SEQ ID NO: 539384 - RNA, 21 nt, Artificial Sequence
  Synthetic
ugccucagccucccgaguagc

SEQ ID NO: 539385 - RNA, 22 nt, Artificial Sequence
  Synthetic
cugccucagccucccgaguagc

SEQ ID NO: 539386 - RNA, 23 nt, Artificial Sequence
  Synthetic
ccugccucagccucccgaguagc

SEQ ID NO: 539387 - RNA, 24 nt, Artificial Sequence
  Synthetic
uccugccucagccucccgaguagc

SEQ ID NO: 539388 - RNA, 19 nt, Artificial Sequence
  Synthetic
ucucagccucccgaguagc

SEQ ID NO: 539389 - RNA, 20 nt, Artificial Sequence
  Synthetic
gucucagccucccgaguagc

SEQ ID NO: 539390 - RNA, 21 nt, Artificial Sequence
  Synthetic
ugucucagccucccgaguagc

SEQ ID NO: 539391 - RNA, 22 nt, Artificial Sequence
  Synthetic
cugucucagccucccgaguagc

SEQ ID NO: 539392 - RNA, 23 nt, Artificial Sequence
  Synthetic
ccugucucagccucccgaguagc

SEQ ID NO: 539393 - RNA, 24 nt, Artificial Sequence
  Synthetic
uccugucucagccucccgaguagc

SEQ ID NO: 539394 - RNA, 18 nt, Artificial Sequence
  Synthetic
uucagccucccgaguagc

SEQ ID NO: 539395 - RNA, 19 nt, Artificial Sequence
  Synthetic
cuucagccucccgaguagc

SEQ ID NO: 539396 - RNA, 20 nt, Artificial Sequence
  Synthetic
gcuucagccucccgaguagc

SEQ ID NO: 539397 - RNA, 21 nt, Artificial Sequence
  Synthetic
ugcuucagccucccgaguagc

SEQ ID NO: 539398 - RNA, 22 nt, Artificial Sequence
  Synthetic
cugcuucagccucccgaguagc

SEQ ID NO: 539399 - RNA, 23 nt, Artificial Sequence
  Synthetic
ucugcuucagccucccgaguagc

SEQ ID NO: 539400 - RNA, 24 nt, Artificial Sequence
  Synthetic
uucugcuucagccucccgaguagc

SEQ ID NO: 539401 - RNA, 18 nt, Artificial Sequence
  Synthetic
aguagccucccgaguagc

SEQ ID NO: 539402 - RNA, 19 nt, Artificial Sequence
  Synthetic
caguagccucccgaguagc

SEQ ID NO: 539403 - RNA, 20 nt, Artificial Sequence
  Synthetic
gcaguagccucccgaguagc

SEQ ID NO: 539404 - RNA, 21 nt, Artificial Sequence
  Synthetic
ugcaguagccucccgaguagc

SEQ ID NO: 539405 - RNA, 22 nt, Artificial Sequence
  Synthetic
gugcaguagccucccgaguagc

SEQ ID NO: 539406 - RNA, 23 nt, Artificial Sequence
  Synthetic
agugcaguagccucccgaguagc

SEQ ID NO: 539407 - RNA, 24 nt, Artificial Sequence
  Synthetic
gagugcaguagccucccgaguagc

SEQ ID NO: 539408 - RNA, 18 nt, Artificial Sequence
  Synthetic
agccuccucccgaguagc

SEQ ID NO: 539409 - RNA, 19 nt, Artificial Sequence
  Synthetic
cagccuccucccgaguagc

SEQ ID NO: 539410 - RNA, 20 nt, Artificial Sequence
  Synthetic
ucagccuccucccgaguagc

SEQ ID NO: 539411 - RNA, 21 nt, Artificial Sequence
  Synthetic
cucagccuccucccgaguagc

SEQ ID NO: 539412 - RNA, 22 nt, Artificial Sequence
  Synthetic
ccucagccuccucccgaguagc

SEQ ID NO: 539413 - RNA, 23 nt, Artificial Sequence
  Synthetic
gccucagccuccucccgaguagc

SEQ ID NO: 539414 - RNA, 24 nt, Artificial Sequence
  Synthetic
ugccucagccuccucccgaguagc

SEQ ID NO: 539415 - RNA, 18 nt, Artificial Sequence
  Synthetic
cucaggcucccgaguagc

SEQ ID NO: 539416 - RNA, 19 nt, Artificial Sequence
  Synthetic
ccucaggcucccgaguagc

SEQ ID NO: 539417 - RNA, 20 nt, Artificial Sequence
  Synthetic
accucaggcucccgaguagc

SEQ ID NO: 539418 - RNA, 21 nt, Artificial Sequence
  Synthetic
uaccucaggcucccgaguagc

SEQ ID NO: 539419 - RNA, 22 nt, Artificial Sequence
  Synthetic
cuaccucaggcucccgaguagc

SEQ ID NO: 539420 - RNA, 23 nt, Artificial Sequence
  Synthetic
ucuaccucaggcucccgaguagc

SEQ ID NO: 539421 - RNA, 24 nt, Artificial Sequence
  Synthetic
uucuaccucaggcucccgaguagc

SEQ ID NO: 539422 - RNA, 21 nt, Artificial Sequence
  Synthetic
cgccucagcuucccgaguagc

SEQ ID NO: 539423 - RNA, 22 nt, Artificial Sequence
  Synthetic
ccgccucagcuucccgaguagc

SEQ ID NO: 539424 - RNA, 23 nt, Artificial Sequence
  Synthetic
cccgccucagcuucccgaguagc

SEQ ID NO: 539425 - RNA, 24 nt, Artificial Sequence
  Synthetic
ucccgccucagcuucccgaguagc

SEQ ID NO: 539426 - RNA, 18 nt, Artificial Sequence
  Synthetic
cucagccucaggaguagc

SEQ ID NO: 539427 - RNA, 19 nt, Artificial Sequence
  Synthetic
ccucagccucaggaguagc

SEQ ID NO: 539428 - RNA, 20 nt, Artificial Sequence
  Synthetic
gccucagccucaggaguagc

SEQ ID NO: 539429 - RNA, 21 nt, Artificial Sequence
  Synthetic
ugccucagccucaggaguagc

SEQ ID NO: 539430 - RNA, 22 nt, Artificial Sequence
  Synthetic
cugccucagccucaggaguagc

SEQ ID NO: 539431 - RNA, 23 nt, Artificial Sequence
  Synthetic
ccugccucagccucaggaguagc

SEQ ID NO: 539432 - RNA, 24 nt, Artificial Sequence
  Synthetic
uccugccucagccucaggaguagc

SEQ ID NO: 539433 - RNA, 18 nt, Artificial Sequence
  Synthetic
gcugaucaguggaguagc

SEQ ID NO: 539434 - RNA, 19 nt, Artificial Sequence
  Synthetic
ggcugaucaguggaguagc

SEQ ID NO: 539435 - RNA, 20 nt, Artificial Sequence
  Synthetic
uggcugaucaguggaguagc

SEQ ID NO: 539436 - RNA, 21 nt, Artificial Sequence
  Synthetic
auggcugaucaguggaguagc

SEQ ID NO: 539437 - RNA, 22 nt, Artificial Sequence
  Synthetic
aauggcugaucaguggaguagc

SEQ ID NO: 539438 - RNA, 23 nt, Artificial Sequence
  Synthetic
gaauggcugaucaguggaguagc

SEQ ID NO: 539439 - RNA, 24 nt, Artificial Sequence
  Synthetic
ggaauggcugaucaguggaguagc

SEQ ID NO: 539440 - RNA, 21 nt, Artificial Sequence
  Synthetic
cgccucagccuccugaguagc

SEQ ID NO: 539441 - RNA, 22 nt, Artificial Sequence
  Synthetic
ccgccucagccuccugaguagc

SEQ ID NO: 539442 - RNA, 23 nt, Artificial Sequence
  Synthetic
cccgccucagccuccugaguagc

SEQ ID NO: 539443 - RNA, 24 nt, Artificial Sequence
  Synthetic
ucccgccucagccuccugaguagc

SEQ ID NO: 539444 - RNA, 21 nt, Artificial Sequence
  Synthetic
ugccucagccuccugaguagc

SEQ ID NO: 539445 - RNA, 22 nt, Artificial Sequence
  Synthetic
cugccucagccuccugaguagc

SEQ ID NO: 539446 - RNA, 23 nt, Artificial Sequence
  Synthetic
ccugccucagccuccugaguagc

SEQ ID NO: 539447 - RNA, 24 nt, Artificial Sequence
  Synthetic
uccugccucagccuccugaguagc

SEQ ID NO: 539448 - RNA, 19 nt, Artificial Sequence
  Synthetic
ucucagccuccugaguagc

SEQ ID NO: 539449 - RNA, 20 nt, Artificial Sequence
  Synthetic
aucucagccuccugaguagc

SEQ ID NO: 539450 - RNA, 21 nt, Artificial Sequence
  Synthetic
caucucagccuccugaguagc

SEQ ID NO: 539451 - RNA, 22 nt, Artificial Sequence
  Synthetic
ccaucucagccuccugaguagc

SEQ ID NO: 539452 - RNA, 23 nt, Artificial Sequence
  Synthetic
cccaucucagccuccugaguagc

SEQ ID NO: 539453 - RNA, 24 nt, Artificial Sequence
  Synthetic
ucccaucucagccuccugaguagc

SEQ ID NO: 539454 - RNA, 18 nt, Artificial Sequence
  Synthetic
gaccacacuuugaguagc

SEQ ID NO: 539455 - RNA, 19 nt, Artificial Sequence
  Synthetic
agaccacacuuugaguagc

SEQ ID NO: 539456 - RNA, 20 nt, Artificial Sequence
  Synthetic
gagaccacacuuugaguagc

SEQ ID NO: 539457 - RNA, 21 nt, Artificial Sequence
  Synthetic
agagaccacacuuugaguagc

SEQ ID NO: 539458 - RNA, 22 nt, Artificial Sequence
  Synthetic
cagagaccacacuuugaguagc

SEQ ID NO: 539459 - RNA, 23 nt, Artificial Sequence
  Synthetic
ccagagaccacacuuugaguagc

SEQ ID NO: 539460 - RNA, 24 nt, Artificial Sequence
  Synthetic
accagagaccacacuuugaguagc

SEQ ID NO: 539461 - RNA, 18 nt, Artificial Sequence
  Synthetic
agugaaaacaauaguagc

SEQ ID NO: 539462 - RNA, 19 nt, Artificial Sequence
  Synthetic
aagugaaaacaauaguagc

SEQ ID NO: 539463 - RNA, 20 nt, Artificial Sequence
  Synthetic
caagugaaaacaauaguagc

SEQ ID NO: 539464 - RNA, 21 nt, Artificial Sequence
  Synthetic
acaagugaaaacaauaguagc

SEQ ID NO: 539465 - RNA, 22 nt, Artificial Sequence
  Synthetic
uacaagugaaaacaauaguagc

SEQ ID NO: 539466 - RNA, 23 nt, Artificial Sequence
  Synthetic
cuacaagugaaaacaauaguagc

SEQ ID NO: 539467 - RNA, 24 nt, Artificial Sequence
  Synthetic
acuacaagugaaaacaauaguagc

SEQ ID NO: 539468 - RNA, 18 nt, Artificial Sequence
  Synthetic
acuggaaacaauaguagc

SEQ ID NO: 539469 - RNA, 19 nt, Artificial Sequence
  Synthetic
cacuggaaacaauaguagc

SEQ ID NO: 539470 - RNA, 20 nt, Artificial Sequence
  Synthetic
acacuggaaacaauaguagc

SEQ ID NO: 539471 - RNA, 21 nt, Artificial Sequence
  Synthetic
uacacuggaaacaauaguagc

SEQ ID NO: 539472 - RNA, 22 nt, Artificial Sequence
  Synthetic
uuacacuggaaacaauaguagc

SEQ ID NO: 539473 - RNA, 23 nt, Artificial Sequence
  Synthetic
uuuacacuggaaacaauaguagc

SEQ ID NO: 539474 - RNA, 24 nt, Artificial Sequence
  Synthetic
cuuuacacuggaaacaauaguagc

SEQ ID NO: 539475 - RNA, 18 nt, Artificial Sequence
  Synthetic
uggacagcauuuaguagc

SEQ ID NO: 539476 - RNA, 19 nt, Artificial Sequence
  Synthetic
guggacagcauuuaguagc

SEQ ID NO: 539477 - RNA, 20 nt, Artificial Sequence
  Synthetic
aguggacagcauuuaguagc

SEQ ID NO: 539478 - RNA, 21 nt, Artificial Sequence
  Synthetic
gaguggacagcauuuaguagc

SEQ ID NO: 539479 - RNA, 22 nt, Artificial Sequence
  Synthetic
ugaguggacagcauuuaguagc

SEQ ID NO: 539480 - RNA, 23 nt, Artificial Sequence
  Synthetic
gugaguggacagcauuuaguagc

SEQ ID NO: 539481 - RNA, 24 nt, Artificial Sequence
  Synthetic
ugugaguggacagcauuuaguagc

SEQ ID NO: 539482 - RNA, 18 nt, Artificial Sequence
  Synthetic
auuuuugacaaagguagc

SEQ ID NO: 539483 - RNA, 19 nt, Artificial Sequence
  Synthetic
gauuuuugacaaagguagc

SEQ ID NO: 539484 - RNA, 20 nt, Artificial Sequence
  Synthetic
ugauuuuugacaaagguagc

SEQ ID NO: 539485 - RNA, 21 nt, Artificial Sequence
  Synthetic
uugauuuuugacaaagguagc

SEQ ID NO: 539486 - RNA, 22 nt, Artificial Sequence
  Synthetic
auugauuuuugacaaagguagc

SEQ ID NO: 539487 - RNA, 23 nt, Artificial Sequence
  Synthetic
aauugauuuuugacaaagguagc

SEQ ID NO: 539488 - RNA, 24 nt, Artificial Sequence
  Synthetic
caauugauuuuugacaaagguagc

SEQ ID NO: 539489 - RNA, 18 nt, Artificial Sequence
  Synthetic
aauugacuggaagguagc

SEQ ID NO: 539490 - RNA, 19 nt, Artificial Sequence
  Synthetic
gaauugacuggaagguagc

SEQ ID NO: 539491 - RNA, 20 nt, Artificial Sequence
  Synthetic
ggaauugacuggaagguagc

SEQ ID NO: 539492 - RNA, 21 nt, Artificial Sequence
  Synthetic
gggaauugacuggaagguagc

SEQ ID NO: 539493 - RNA, 22 nt, Artificial Sequence
  Synthetic
ugggaauugacuggaagguagc

SEQ ID NO: 539494 - RNA, 23 nt, Artificial Sequence
  Synthetic
cugggaauugacuggaagguagc

SEQ ID NO: 539495 - RNA, 24 nt, Artificial Sequence
  Synthetic
gcugggaauugacuggaagguagc

SEQ ID NO: 539496 - RNA, 18 nt, Artificial Sequence
  Synthetic
cucagccucccagguagc

SEQ ID NO: 539497 - RNA, 19 nt, Artificial Sequence
  Synthetic
ccucagccucccagguagc

SEQ ID NO: 539498 - RNA, 20 nt, Artificial Sequence
  Synthetic
gccucagccucccagguagc

SEQ ID NO: 539499 - RNA, 21 nt, Artificial Sequence
  Synthetic
ugccucagccucccagguagc

SEQ ID NO: 539500 - RNA, 22 nt, Artificial Sequence
  Synthetic
augccucagccucccagguagc

SEQ ID NO: 539501 - RNA, 23 nt, Artificial Sequence
  Synthetic
caugccucagccucccagguagc

SEQ ID NO: 539502 - RNA, 24 nt, Artificial Sequence
  Synthetic
ucaugccucagccucccagguagc

SEQ ID NO: 539503 - RNA, 18 nt, Artificial Sequence
  Synthetic
uacggguagagagguagc

SEQ ID NO: 539504 - RNA, 19 nt, Artificial Sequence
  Synthetic
uuacggguagagagguagc

SEQ ID NO: 539505 - RNA, 20 nt, Artificial Sequence
  Synthetic
cuuacggguagagagguagc

SEQ ID NO: 539506 - RNA, 21 nt, Artificial Sequence
  Synthetic
acuuacggguagagagguagc

SEQ ID NO: 539507 - RNA, 22 nt, Artificial Sequence
  Synthetic
cacuuacggguagagagguagc

SEQ ID NO: 539508 - RNA, 23 nt, Artificial Sequence
  Synthetic
acacuuacggguagagagguagc

SEQ ID NO: 539509 - RNA, 24 nt, Artificial Sequence
  Synthetic
cacacuuacggguagagagguagc

SEQ ID NO: 539510 - RNA, 18 nt, Artificial Sequence
  Synthetic
uugaucaucuuagguagc

SEQ ID NO: 539511 - RNA, 19 nt, Artificial Sequence
  Synthetic
uuugaucaucuuagguagc

SEQ ID NO: 539512 - RNA, 20 nt, Artificial Sequence
  Synthetic
uuuugaucaucuuagguagc

SEQ ID NO: 539513 - RNA, 21 nt, Artificial Sequence
  Synthetic
uuuuugaucaucuuagguagc

SEQ ID NO: 539514 - RNA, 22 nt, Artificial Sequence
  Synthetic
uuuuuugaucaucuuagguagc

SEQ ID NO: 539515 - RNA, 23 nt, Artificial Sequence
  Synthetic
cuuuuuugaucaucuuagguagc

SEQ ID NO: 539516 - RNA, 24 nt, Artificial Sequence
  Synthetic
ucuuuuuugaucaucuuagguagc

SEQ ID NO: 539517 - RNA, 18 nt, Artificial Sequence
  Synthetic
uggcauuaugucgguagc

SEQ ID NO: 539518 - RNA, 19 nt, Artificial Sequence
  Synthetic
guggcauuaugucgguagc

SEQ ID NO: 539519 - RNA, 20 nt, Artificial Sequence
  Synthetic
aguggcauuaugucgguagc

SEQ ID NO: 539520 - RNA, 21 nt, Artificial Sequence
  Synthetic
caguggcauuaugucgguagc

SEQ ID NO: 539521 - RNA, 22 nt, Artificial Sequence
  Synthetic
ucaguggcauuaugucgguagc

SEQ ID NO: 539522 - RNA, 23 nt, Artificial Sequence
  Synthetic
cucaguggcauuaugucgguagc

SEQ ID NO: 539523 - RNA, 24 nt, Artificial Sequence
  Synthetic
acucaguggcauuaugucgguagc

SEQ ID NO: 539524 - RNA, 18 nt, Artificial Sequence
  Synthetic
cccagccuuucggguagc

SEQ ID NO: 539525 - RNA, 19 nt, Artificial Sequence
  Synthetic
ccccagccuuucggguagc

SEQ ID NO: 539526 - RNA, 20 nt, Artificial Sequence
  Synthetic
gccccagccuuucggguagc

SEQ ID NO: 539527 - RNA, 21 nt, Artificial Sequence
  Synthetic
ugccccagccuuucggguagc

SEQ ID NO: 539528 - RNA, 22 nt, Artificial Sequence
  Synthetic
cugccccagccuuucggguagc

SEQ ID NO: 539529 - RNA, 23 nt, Artificial Sequence
  Synthetic
ccugccccagccuuucggguagc

SEQ ID NO: 539530 - RNA, 24 nt, Artificial Sequence
  Synthetic
uccugccccagccuuucggguagc

SEQ ID NO: 539531 - RNA, 18 nt, Artificial Sequence
  Synthetic
cuuauccauggggguagc

SEQ ID NO: 539532 - RNA, 19 nt, Artificial Sequence
  Synthetic
gcuuauccauggggguagc

SEQ ID NO: 539533 - RNA, 20 nt, Artificial Sequence
  Synthetic
ugcuuauccauggggguagc

SEQ ID NO: 539534 - RNA, 21 nt, Artificial Sequence
  Synthetic
augcuuauccauggggguagc

SEQ ID NO: 539535 - RNA, 22 nt, Artificial Sequence
  Synthetic
aaugcuuauccauggggguagc

SEQ ID NO: 539536 - RNA, 23 nt, Artificial Sequence
  Synthetic
uaaugcuuauccauggggguagc

SEQ ID NO: 539537 - RNA, 24 nt, Artificial Sequence
  Synthetic
auaaugcuuauccauggggguagc

SEQ ID NO: 539538 - RNA, 18 nt, Artificial Sequence
  Synthetic
cucagccuccuggguagc

SEQ ID NO: 539539 - RNA, 19 nt, Artificial Sequence
  Synthetic
ccucagccuccuggguagc

SEQ ID NO: 539540 - RNA, 20 nt, Artificial Sequence
  Synthetic
accucagccuccuggguagc

SEQ ID NO: 539541 - RNA, 21 nt, Artificial Sequence
  Synthetic
uaccucagccuccuggguagc

SEQ ID NO: 539542 - RNA, 22 nt, Artificial Sequence
  Synthetic
guaccucagccuccuggguagc

SEQ ID NO: 539543 - RNA, 23 nt, Artificial Sequence
  Synthetic
gguaccucagccuccuggguagc

SEQ ID NO: 539544 - RNA, 24 nt, Artificial Sequence
  Synthetic
ugguaccucagccuccuggguagc

SEQ ID NO: 539545 - RNA, 18 nt, Artificial Sequence
  Synthetic
acucaugggcaugguagc

SEQ ID NO: 539546 - RNA, 19 nt, Artificial Sequence
  Synthetic
cacucaugggcaugguagc

SEQ ID NO: 539547 - RNA, 20 nt, Artificial Sequence
  Synthetic
ccacucaugggcaugguagc

SEQ ID NO: 539548 - RNA, 21 nt, Artificial Sequence
  Synthetic
uccacucaugggcaugguagc

SEQ ID NO: 539549 - RNA, 22 nt, Artificial Sequence
  Synthetic
auccacucaugggcaugguagc

SEQ ID NO: 539550 - RNA, 23 nt, Artificial Sequence
  Synthetic
cauccacucaugggcaugguagc

SEQ ID NO: 539551 - RNA, 24 nt, Artificial Sequence
  Synthetic
ucauccacucaugggcaugguagc

SEQ ID NO: 539552 - RNA, 18 nt, Artificial Sequence
  Synthetic
ugacgucacacugguagc

SEQ ID NO: 539553 - RNA, 19 nt, Artificial Sequence
  Synthetic
augacgucacacugguagc

SEQ ID NO: 539554 - RNA, 20 nt, Artificial Sequence
  Synthetic
aaugacgucacacugguagc

SEQ ID NO: 539555 - RNA, 21 nt, Artificial Sequence
  Synthetic
caaugacgucacacugguagc

SEQ ID NO: 539556 - RNA, 22 nt, Artificial Sequence
  Synthetic
ucaaugacgucacacugguagc

SEQ ID NO: 539557 - RNA, 23 nt, Artificial Sequence
  Synthetic
uucaaugacgucacacugguagc

SEQ ID NO: 539558 - RNA, 24 nt, Artificial Sequence
  Synthetic
auucaaugacgucacacugguagc

SEQ ID NO: 539559 - RNA, 18 nt, Artificial Sequence
  Synthetic
uuauuuuuaaaauguagc

SEQ ID NO: 539560 - RNA, 19 nt, Artificial Sequence
  Synthetic
uuuauuuuuaaaauguagc

SEQ ID NO: 539561 - RNA, 20 nt, Artificial Sequence
  Synthetic
auuuauuuuuaaaauguagc

SEQ ID NO: 539562 - RNA, 21 nt, Artificial Sequence
  Synthetic
cauuuauuuuuaaaauguagc

SEQ ID NO: 539563 - RNA, 22 nt, Artificial Sequence
  Synthetic
acauuuauuuuuaaaauguagc

SEQ ID NO: 539564 - RNA, 23 nt, Artificial Sequence
  Synthetic
aacauuuauuuuuaaaauguagc

SEQ ID NO: 539565 - RNA, 24 nt, Artificial Sequence
  Synthetic
uaacauuuauuuuuaaaauguagc

SEQ ID NO: 539566 - RNA, 18 nt, Artificial Sequence
  Synthetic
cucagacucccauguagc

SEQ ID NO: 539567 - RNA, 19 nt, Artificial Sequence
  Synthetic
ccucagacucccauguagc

SEQ ID NO: 539568 - RNA, 20 nt, Artificial Sequence
  Synthetic
accucagacucccauguagc

SEQ ID NO: 539569 - RNA, 21 nt, Artificial Sequence
  Synthetic
caccucagacucccauguagc

SEQ ID NO: 539570 - RNA, 22 nt, Artificial Sequence
  Synthetic
ccaccucagacucccauguagc

SEQ ID NO: 539571 - RNA, 23 nt, Artificial Sequence
  Synthetic
cccaccucagacucccauguagc

SEQ ID NO: 539572 - RNA, 24 nt, Artificial Sequence
  Synthetic
ucccaccucagacucccauguagc

SEQ ID NO: 539573 - RNA, 18 nt, Artificial Sequence
  Synthetic
uuauuauucccauguagc

SEQ ID NO: 539574 - RNA, 19 nt, Artificial Sequence
  Synthetic
auuauuauucccauguagc

SEQ ID NO: 539575 - RNA, 20 nt, Artificial Sequence
  Synthetic
uauuauuauucccauguagc

SEQ ID NO: 539576 - RNA, 21 nt, Artificial Sequence
  Synthetic
uuauuauuauucccauguagc

SEQ ID NO: 539577 - RNA, 22 nt, Artificial Sequence
  Synthetic
uuuauuauuauucccauguagc

SEQ ID NO: 539578 - RNA, 23 nt, Artificial Sequence
  Synthetic
auuuauuauuauucccauguagc

SEQ ID NO: 539579 - RNA, 24 nt, Artificial Sequence
  Synthetic
cauuuauuauuauucccauguagc

SEQ ID NO: 539580 - RNA, 18 nt, Artificial Sequence
  Synthetic
uuugcuaaaaaguguagc

SEQ ID NO: 539581 - RNA, 19 nt, Artificial Sequence
  Synthetic
guuugcuaaaaaguguagc

SEQ ID NO: 539582 - RNA, 20 nt, Artificial Sequence
  Synthetic
uguuugcuaaaaaguguagc

SEQ ID NO: 539583 - RNA, 21 nt, Artificial Sequence
  Synthetic
cuguuugcuaaaaaguguagc

SEQ ID NO: 539584 - RNA, 22 nt, Artificial Sequence
  Synthetic
acuguuugcuaaaaaguguagc

SEQ ID NO: 539585 - RNA, 23 nt, Artificial Sequence
  Synthetic
aacuguuugcuaaaaaguguagc

SEQ ID NO: 539586 - RNA, 24 nt, Artificial Sequence
  Synthetic
aaacuguuugcuaaaaaguguagc

SEQ ID NO: 539587 - RNA, 18 nt, Artificial Sequence
  Synthetic
gaauugaugaaguguagc

SEQ ID NO: 539588 - RNA, 19 nt, Artificial Sequence
  Synthetic
ugaauugaugaaguguagc

SEQ ID NO: 539589 - RNA, 20 nt, Artificial Sequence
  Synthetic
augaauugaugaaguguagc

SEQ ID NO: 539590 - RNA, 21 nt, Artificial Sequence
  Synthetic
aaugaauugaugaaguguagc

SEQ ID NO: 539591 - RNA, 22 nt, Artificial Sequence
  Synthetic
aaaugaauugaugaaguguagc

SEQ ID NO: 539592 - RNA, 23 nt, Artificial Sequence
  Synthetic
gaaaugaauugaugaaguguagc

SEQ ID NO: 539593 - RNA, 24 nt, Artificial Sequence
  Synthetic
ggaaaugaauugaugaaguguagc

SEQ ID NO: 539594 - RNA, 18 nt, Artificial Sequence
  Synthetic
aucuguggucuuuguagc

SEQ ID NO: 539595 - RNA, 19 nt, Artificial Sequence
  Synthetic
caucuguggucuuuguagc

SEQ ID NO: 539596 - RNA, 20 nt, Artificial Sequence
  Synthetic
acaucuguggucuuuguagc

SEQ ID NO: 539597 - RNA, 21 nt, Artificial Sequence
  Synthetic
aacaucuguggucuuuguagc

SEQ ID NO: 539598 - RNA, 22 nt, Artificial Sequence
  Synthetic
gaacaucuguggucuuuguagc

SEQ ID NO: 539599 - RNA, 23 nt, Artificial Sequence
  Synthetic
ugaacaucuguggucuuuguagc

SEQ ID NO: 539600 - RNA, 24 nt, Artificial Sequence
  Synthetic
augaacaucuguggucuuuguagc

SEQ ID NO: 539601 - RNA, 18 nt, Artificial Sequence
  Synthetic
uggaaagaaaaaauuagc

SEQ ID NO: 539602 - RNA, 19 nt, Artificial Sequence
  Synthetic
auggaaagaaaaaauuagc

SEQ ID NO: 539603 - RNA, 20 nt, Artificial Sequence
  Synthetic
uauggaaagaaaaaauuagc

SEQ ID NO: 539604 - RNA, 21 nt, Artificial Sequence
  Synthetic
cuauggaaagaaaaaauuagc

SEQ ID NO: 539605 - RNA, 22 nt, Artificial Sequence
  Synthetic
ucuauggaaagaaaaaauuagc

SEQ ID NO: 539606 - RNA, 23 nt, Artificial Sequence
  Synthetic
aucuauggaaagaaaaaauuagc

SEQ ID NO: 539607 - RNA, 24 nt, Artificial Sequence
  Synthetic
gaucuauggaaagaaaaaauuagc

SEQ ID NO: 539608 - RNA, 18 nt, Artificial Sequence
  Synthetic
ugaugaugcugaauuagc

SEQ ID NO: 539609 - RNA, 19 nt, Artificial Sequence
  Synthetic
augaugaugcugaauuagc

SEQ ID NO: 539610 - RNA, 20 nt, Artificial Sequence
  Synthetic
gaugaugaugcugaauuagc

SEQ ID NO: 539611 - RNA, 21 nt, Artificial Sequence
  Synthetic
ggaugaugaugcugaauuagc

SEQ ID NO: 539612 - RNA, 22 nt, Artificial Sequence
  Synthetic
aggaugaugaugcugaauuagc

SEQ ID NO: 539613 - RNA, 23 nt, Artificial Sequence
  Synthetic
caggaugaugaugcugaauuagc

SEQ ID NO: 539614 - RNA, 24 nt, Artificial Sequence
  Synthetic
ucaggaugaugaugcugaauuagc

SEQ ID NO: 539615 - RNA, 18 nt, Artificial Sequence
  Synthetic
guauaaaggcuaauuagc

SEQ ID NO: 539616 - RNA, 19 nt, Artificial Sequence
  Synthetic
aguauaaaggcuaauuagc

SEQ ID NO: 539617 - RNA, 20 nt, Artificial Sequence
  Synthetic
uaguauaaaggcuaauuagc

SEQ ID NO: 539618 - RNA, 21 nt, Artificial Sequence
  Synthetic
cuaguauaaaggcuaauuagc

SEQ ID NO: 539619 - RNA, 22 nt, Artificial Sequence
  Synthetic
ccuaguauaaaggcuaauuagc

SEQ ID NO: 539620 - RNA, 23 nt, Artificial Sequence
  Synthetic
gccuaguauaaaggcuaauuagc

SEQ ID NO: 539621 - RNA, 24 nt, Artificial Sequence
  Synthetic
ugccuaguauaaaggcuaauuagc

SEQ ID NO: 539622 - RNA, 18 nt, Artificial Sequence
  Synthetic
cuugagacaggcauuagc

SEQ ID NO: 539623 - RNA, 19 nt, Artificial Sequence
  Synthetic
ucuugagacaggcauuagc

SEQ ID NO: 539624 - RNA, 20 nt, Artificial Sequence
  Synthetic
uucuugagacaggcauuagc

SEQ ID NO: 539625 - RNA, 21 nt, Artificial Sequence
  Synthetic
uuucuugagacaggcauuagc

SEQ ID NO: 539626 - RNA, 22 nt, Artificial Sequence
  Synthetic
uuuucuugagacaggcauuagc

SEQ ID NO: 539627 - RNA, 23 nt, Artificial Sequence
  Synthetic
auuuucuugagacaggcauuagc

SEQ ID NO: 539628 - RNA, 24 nt, Artificial Sequence
  Synthetic
aauuuucuugagacaggcauuagc

SEQ ID NO: 539629 - RNA, 18 nt, Artificial Sequence
  Synthetic
uuugggcccaucauuagc

SEQ ID NO: 539630 - RNA, 19 nt, Artificial Sequence
  Synthetic
cuuugggcccaucauuagc

SEQ ID NO: 539631 - RNA, 20 nt, Artificial Sequence
  Synthetic
acuuugggcccaucauuagc

SEQ ID NO: 539632 - RNA, 21 nt, Artificial Sequence
  Synthetic
aacuuugggcccaucauuagc

SEQ ID NO: 539633 - RNA, 22 nt, Artificial Sequence
  Synthetic
uaacuuugggcccaucauuagc

SEQ ID NO: 539634 - RNA, 23 nt, Artificial Sequence
  Synthetic
auaacuuugggcccaucauuagc

SEQ ID NO: 539635 - RNA, 24 nt, Artificial Sequence
  Synthetic
uauaacuuugggcccaucauuagc

SEQ ID NO: 539636 - RNA, 18 nt, Artificial Sequence
  Synthetic
uacucaugcaucauuagc

SEQ ID NO: 539637 - RNA, 19 nt, Artificial Sequence
  Synthetic
auacucaugcaucauuagc

SEQ ID NO: 539638 - RNA, 20 nt, Artificial Sequence
  Synthetic
gauacucaugcaucauuagc

SEQ ID NO: 539639 - RNA, 21 nt, Artificial Sequence
  Synthetic
agauacucaugcaucauuagc

SEQ ID NO: 539640 - RNA, 22 nt, Artificial Sequence
  Synthetic
uagauacucaugcaucauuagc

SEQ ID NO: 539641 - RNA, 23 nt, Artificial Sequence
  Synthetic
auagauacucaugcaucauuagc

SEQ ID NO: 539642 - RNA, 24 nt, Artificial Sequence
  Synthetic
uauagauacucaugcaucauuagc

SEQ ID NO: 539643 - RNA, 18 nt, Artificial Sequence
  Synthetic
auaacugcuaugauuagc

SEQ ID NO: 539644 - RNA, 19 nt, Artificial Sequence
  Synthetic
gauaacugcuaugauuagc

SEQ ID NO: 539645 - RNA, 20 nt, Artificial Sequence
  Synthetic
ggauaacugcuaugauuagc

SEQ ID NO: 539646 - RNA, 21 nt, Artificial Sequence
  Synthetic
aggauaacugcuaugauuagc

SEQ ID NO: 539647 - RNA, 22 nt, Artificial Sequence
  Synthetic
aaggauaacugcuaugauuagc

SEQ ID NO: 539648 - RNA, 23 nt, Artificial Sequence
  Synthetic
caaggauaacugcuaugauuagc

SEQ ID NO: 539649 - RNA, 24 nt, Artificial Sequence
  Synthetic
ccaaggauaacugcuaugauuagc

SEQ ID NO: 539650 - RNA, 18 nt, Artificial Sequence
  Synthetic
ggaaggaaggugauuagc

SEQ ID NO: 539651 - RNA, 19 nt, Artificial Sequence
  Synthetic
gggaaggaaggugauuagc

SEQ ID NO: 539652 - RNA, 20 nt, Artificial Sequence
  Synthetic
ggggaaggaaggugauuagc

SEQ ID NO: 539653 - RNA, 21 nt, Artificial Sequence
  Synthetic
gggggaaggaaggugauuagc

SEQ ID NO: 539654 - RNA, 22 nt, Artificial Sequence
  Synthetic
ggggggaaggaaggugauuagc

SEQ ID NO: 539655 - RNA, 23 nt, Artificial Sequence
  Synthetic
uggggggaaggaaggugauuagc

SEQ ID NO: 539656 - RNA, 24 nt, Artificial Sequence
  Synthetic
cuggggggaaggaaggugauuagc

SEQ ID NO: 539657 - RNA, 18 nt, Artificial Sequence
  Synthetic
acaauguuguauauuagc

SEQ ID NO: 539658 - RNA, 19 nt, Artificial Sequence
  Synthetic
cacaauguuguauauuagc

SEQ ID NO: 539659 - RNA, 20 nt, Artificial Sequence
  Synthetic
ccacaauguuguauauuagc

SEQ ID NO: 539660 - RNA, 21 nt, Artificial Sequence
  Synthetic
accacaauguuguauauuagc

SEQ ID NO: 539661 - RNA, 22 nt, Artificial Sequence
  Synthetic
aaccacaauguuguauauuagc

SEQ ID NO: 539662 - RNA, 23 nt, Artificial Sequence
  Synthetic
gaaccacaauguuguauauuagc

SEQ ID NO: 539663 - RNA, 24 nt, Artificial Sequence
  Synthetic
ggaaccacaauguuguauauuagc

SEQ ID NO: 539664 - RNA, 18 nt, Artificial Sequence
  Synthetic
guucugcauuuacuuagc

SEQ ID NO: 539665 - RNA, 19 nt, Artificial Sequence
  Synthetic
gguucugcauuuacuuagc

SEQ ID NO: 539666 - RNA, 20 nt, Artificial Sequence
  Synthetic
ugguucugcauuuacuuagc

SEQ ID NO: 539667 - RNA, 21 nt, Artificial Sequence
  Synthetic
augguucugcauuuacuuagc

SEQ ID NO: 539668 - RNA, 22 nt, Artificial Sequence
  Synthetic
aaugguucugcauuuacuuagc

SEQ ID NO: 539669 - RNA, 23 nt, Artificial Sequence
  Synthetic
caaugguucugcauuuacuuagc

SEQ ID NO: 539670 - RNA, 24 nt, Artificial Sequence
  Synthetic
acaaugguucugcauuuacuuagc

SEQ ID NO: 539671 - RNA, 18 nt, Artificial Sequence
  Synthetic
guguucaaagcccuuagc

SEQ ID NO: 539672 - RNA, 19 nt, Artificial Sequence
  Synthetic
uguguucaaagcccuuagc

SEQ ID NO: 539673 - RNA, 20 nt, Artificial Sequence
  Synthetic
auguguucaaagcccuuagc

SEQ ID NO: 539674 - RNA, 21 nt, Artificial Sequence
  Synthetic
aauguguucaaagcccuuagc

SEQ ID NO: 539675 - RNA, 22 nt, Artificial Sequence
  Synthetic
uaauguguucaaagcccuuagc

SEQ ID NO: 539676 - RNA, 23 nt, Artificial Sequence
  Synthetic
guaauguguucaaagcccuuagc

SEQ ID NO: 539677 - RNA, 24 nt, Artificial Sequence
  Synthetic
gguaauguguucaaagcccuuagc

SEQ ID NO: 539678 - RNA, 18 nt, Artificial Sequence
  Synthetic
ugcuaaaaaaaucuuagc

SEQ ID NO: 539679 - RNA, 19 nt, Artificial Sequence
  Synthetic
augcuaaaaaaaucuuagc

SEQ ID NO: 539680 - RNA, 20 nt, Artificial Sequence
  Synthetic
uaugcuaaaaaaaucuuagc

SEQ ID NO: 539681 - RNA, 21 nt, Artificial Sequence
  Synthetic
uuaugcuaaaaaaaucuuagc

SEQ ID NO: 539682 - RNA, 22 nt, Artificial Sequence
  Synthetic
auuaugcuaaaaaaaucuuagc

SEQ ID NO: 539683 - RNA, 23 nt, Artificial Sequence
  Synthetic
cauuaugcuaaaaaaaucuuagc

SEQ ID NO: 539684 - RNA, 24 nt, Artificial Sequence
  Synthetic
gcauuaugcuaaaaaaaucuuagc

SEQ ID NO: 539685 - RNA, 18 nt, Artificial Sequence
  Synthetic
uguguggcagcucuuagc

SEQ ID NO: 539686 - RNA, 19 nt, Artificial Sequence
  Synthetic
cuguguggcagcucuuagc

SEQ ID NO: 539687 - RNA, 20 nt, Artificial Sequence
  Synthetic
acuguguggcagcucuuagc

SEQ ID NO: 539688 - RNA, 21 nt, Artificial Sequence
  Synthetic
gacuguguggcagcucuuagc

SEQ ID NO: 539689 - RNA, 22 nt, Artificial Sequence
  Synthetic
ggacuguguggcagcucuuagc

SEQ ID NO: 539690 - RNA, 23 nt, Artificial Sequence
  Synthetic
gggacuguguggcagcucuuagc

SEQ ID NO: 539691 - RNA, 24 nt, Artificial Sequence
  Synthetic
agggacuguguggcagcucuuagc

SEQ ID NO: 539692 - RNA, 18 nt, Artificial Sequence
  Synthetic
ucagccucccaaguuagc

SEQ ID NO: 539693 - RNA, 19 nt, Artificial Sequence
  Synthetic
uucagccucccaaguuagc

SEQ ID NO: 539694 - RNA, 20 nt, Artificial Sequence
  Synthetic
cuucagccucccaaguuagc

SEQ ID NO: 539695 - RNA, 21 nt, Artificial Sequence
  Synthetic
gcuucagccucccaaguuagc

SEQ ID NO: 539696 - RNA, 22 nt, Artificial Sequence
  Synthetic
ugcuucagccucccaaguuagc

SEQ ID NO: 539697 - RNA, 23 nt, Artificial Sequence
  Synthetic
cugcuucagccucccaaguuagc

SEQ ID NO: 539698 - RNA, 24 nt, Artificial Sequence
  Synthetic
ccugcuucagccucccaaguuagc

SEQ ID NO: 539699 - RNA, 18 nt, Artificial Sequence
  Synthetic
guauucauauaaguuagc

SEQ ID NO: 539700 - RNA, 19 nt, Artificial Sequence
  Synthetic
uguauucauauaaguuagc

SEQ ID NO: 539701 - RNA, 20 nt, Artificial Sequence
  Synthetic
uuguauucauauaaguuagc

SEQ ID NO: 539702 - RNA, 21 nt, Artificial Sequence
  Synthetic
uuuguauucauauaaguuagc

SEQ ID NO: 539703 - RNA, 22 nt, Artificial Sequence
  Synthetic
uuuuguauucauauaaguuagc

SEQ ID NO: 539704 - RNA, 23 nt, Artificial Sequence
  Synthetic
uuuuuguauucauauaaguuagc

SEQ ID NO: 539705 - RNA, 24 nt, Artificial Sequence
  Synthetic
auuuuuguauucauauaaguuagc

SEQ ID NO: 539706 - RNA, 18 nt, Artificial Sequence
  Synthetic
agaagggaaggaguuagc

SEQ ID NO: 539707 - RNA, 19 nt, Artificial Sequence
  Synthetic
gagaagggaaggaguuagc

SEQ ID NO: 539708 - RNA, 20 nt, Artificial Sequence
  Synthetic
agagaagggaaggaguuagc

SEQ ID NO: 539709 - RNA, 21 nt, Artificial Sequence
  Synthetic
aagagaagggaaggaguuagc

SEQ ID NO: 539710 - RNA, 22 nt, Artificial Sequence
  Synthetic
aaagagaagggaaggaguuagc

SEQ ID NO: 539711 - RNA, 23 nt, Artificial Sequence
  Synthetic
aaaagagaagggaaggaguuagc

SEQ ID NO: 539712 - RNA, 24 nt, Artificial Sequence
  Synthetic
gaaaagagaagggaaggaguuagc

SEQ ID NO: 539713 - RNA, 18 nt, Artificial Sequence
  Synthetic
gagagaauuuauguuagc

SEQ ID NO: 539714 - RNA, 19 nt, Artificial Sequence
  Synthetic
ggagagaauuuauguuagc

SEQ ID NO: 539715 - RNA, 20 nt, Artificial Sequence
  Synthetic
uggagagaauuuauguuagc

SEQ ID NO: 539716 - RNA, 21 nt, Artificial Sequence
  Synthetic
auggagagaauuuauguuagc

SEQ ID NO: 539717 - RNA, 22 nt, Artificial Sequence
  Synthetic
aauggagagaauuuauguuagc

SEQ ID NO: 539718 - RNA, 23 nt, Artificial Sequence
  Synthetic
aaauggagagaauuuauguuagc

SEQ ID NO: 539719 - RNA, 24 nt, Artificial Sequence
  Synthetic
aaaauggagagaauuuauguuagc

SEQ ID NO: 539720 - RNA, 18 nt, Artificial Sequence
  Synthetic
acauuucuucuuguuagc

SEQ ID NO: 539721 - RNA, 19 nt, Artificial Sequence
  Synthetic
aacauuucuucuuguuagc

SEQ ID NO: 539722 - RNA, 20 nt, Artificial Sequence
  Synthetic
uaacauuucuucuuguuagc

SEQ ID NO: 539723 - RNA, 21 nt, Artificial Sequence
  Synthetic
uuaacauuucuucuuguuagc

SEQ ID NO: 539724 - RNA, 22 nt, Artificial Sequence
  Synthetic
auuaacauuucuucuuguuagc

SEQ ID NO: 539725 - RNA, 23 nt, Artificial Sequence
  Synthetic
cauuaacauuucuucuuguuagc

SEQ ID NO: 539726 - RNA, 24 nt, Artificial Sequence
  Synthetic
ccauuaacauuucuucuuguuagc

SEQ ID NO: 539727 - RNA, 18 nt, Artificial Sequence
  Synthetic
uuuaagaaacaauuuagc

SEQ ID NO: 539728 - RNA, 19 nt, Artificial Sequence
  Synthetic
auuuaagaaacaauuuagc

SEQ ID NO: 539729 - RNA, 20 nt, Artificial Sequence
  Synthetic
cauuuaagaaacaauuuagc

SEQ ID NO: 539730 - RNA, 21 nt, Artificial Sequence
  Synthetic
ucauuuaagaaacaauuuagc

SEQ ID NO: 539731 - RNA, 22 nt, Artificial Sequence
  Synthetic
uucauuuaagaaacaauuuagc

SEQ ID NO: 539732 - RNA, 23 nt, Artificial Sequence
  Synthetic
uuucauuuaagaaacaauuuagc

SEQ ID NO: 539733 - RNA, 24 nt, Artificial Sequence
  Synthetic
guuucauuuaagaaacaauuuagc

SEQ ID NO: 539734 - RNA, 18 nt, Artificial Sequence
  Synthetic
ugagaaaaacacuuuagc

SEQ ID NO: 539735 - RNA, 19 nt, Artificial Sequence
  Synthetic
gugagaaaaacacuuuagc

SEQ ID NO: 539736 - RNA, 20 nt, Artificial Sequence
  Synthetic
ugugagaaaaacacuuuagc

SEQ ID NO: 539737 - RNA, 21 nt, Artificial Sequence
  Synthetic
uugugagaaaaacacuuuagc

SEQ ID NO: 539738 - RNA, 22 nt, Artificial Sequence
  Synthetic
guugugagaaaaacacuuuagc

SEQ ID NO: 539739 - RNA, 23 nt, Artificial Sequence
  Synthetic
aguugugagaaaaacacuuuagc

SEQ ID NO: 539740 - RNA, 24 nt, Artificial Sequence
  Synthetic
aaguugugagaaaaacacuuuagc

SEQ ID NO: 539741 - RNA, 18 nt, Artificial Sequence
  Synthetic
ccauacaguuucuuuagc

SEQ ID NO: 539742 - RNA, 19 nt, Artificial Sequence
  Synthetic
cccauacaguuucuuuagc

SEQ ID NO: 539743 - RNA, 20 nt, Artificial Sequence
  Synthetic
ucccauacaguuucuuuagc

SEQ ID NO: 539744 - RNA, 21 nt, Artificial Sequence
  Synthetic
uucccauacaguuucuuuagc

SEQ ID NO: 539745 - RNA, 22 nt, Artificial Sequence
  Synthetic
uuucccauacaguuucuuuagc

SEQ ID NO: 539746 - RNA, 23 nt, Artificial Sequence
  Synthetic
guuucccauacaguuucuuuagc

SEQ ID NO: 539747 - RNA, 24 nt, Artificial Sequence
  Synthetic
uguuucccauacaguuucuuuagc

SEQ ID NO: 539748 - RNA, 18 nt, Artificial Sequence
  Synthetic
cacauccgguuguuuagc

SEQ ID NO: 539749 - RNA, 19 nt, Artificial Sequence
  Synthetic
ccacauccgguuguuuagc

SEQ ID NO: 539750 - RNA, 20 nt, Artificial Sequence
  Synthetic
uccacauccgguuguuuagc

SEQ ID NO: 539751 - RNA, 21 nt, Artificial Sequence
  Synthetic
uuccacauccgguuguuuagc

SEQ ID NO: 539752 - RNA, 22 nt, Artificial Sequence
  Synthetic
cuuccacauccgguuguuuagc

SEQ ID NO: 539753 - RNA, 23 nt, Artificial Sequence
  Synthetic
ucuuccacauccgguuguuuagc

SEQ ID NO: 539754 - RNA, 24 nt, Artificial Sequence
  Synthetic
cucuuccacauccgguuguuuagc

SEQ ID NO: 539755 - RNA, 18 nt, Artificial Sequence
  Synthetic
uucacacauauuuuuagc

SEQ ID NO: 539756 - RNA, 19 nt, Artificial Sequence
  Synthetic
uuucacacauauuuuuagc

SEQ ID NO: 539757 - RNA, 20 nt, Artificial Sequence
  Synthetic
cuuucacacauauuuuuagc

SEQ ID NO: 539758 - RNA, 21 nt, Artificial Sequence
  Synthetic
acuuucacacauauuuuuagc

SEQ ID NO: 539759 - RNA, 22 nt, Artificial Sequence
  Synthetic
cacuuucacacauauuuuuagc

SEQ ID NO: 539760 - RNA, 23 nt, Artificial Sequence
  Synthetic
ccacuuucacacauauuuuuagc

SEQ ID NO: 539761 - RNA, 24 nt, Artificial Sequence
  Synthetic
gccacuuucacacauauuuuuagc

SEQ ID NO: 539762 - RNA, 18 nt, Artificial Sequence
  Synthetic
caugagggcacucaacgc

SEQ ID NO: 539763 - RNA, 19 nt, Artificial Sequence
  Synthetic
ucaugagggcacucaacgc

SEQ ID NO: 539764 - RNA, 20 nt, Artificial Sequence
  Synthetic
aucaugagggcacucaacgc

SEQ ID NO: 539765 - RNA, 21 nt, Artificial Sequence
  Synthetic
caucaugagggcacucaacgc

SEQ ID NO: 539766 - RNA, 22 nt, Artificial Sequence
  Synthetic
ucaucaugagggcacucaacgc

SEQ ID NO: 539767 - RNA, 23 nt, Artificial Sequence
  Synthetic
aucaucaugagggcacucaacgc

SEQ ID NO: 539768 - RNA, 24 nt, Artificial Sequence
  Synthetic
aaucaucaugagggcacucaacgc

SEQ ID NO: 539769 - RNA, 18 nt, Artificial Sequence
  Synthetic
uauuacuuaguucaacgc

SEQ ID NO: 539770 - RNA, 19 nt, Artificial Sequence
  Synthetic
auauuacuuaguucaacgc

SEQ ID NO: 539771 - RNA, 20 nt, Artificial Sequence
  Synthetic
uauauuacuuaguucaacgc

SEQ ID NO: 539772 - RNA, 21 nt, Artificial Sequence
  Synthetic
guauauuacuuaguucaacgc

SEQ ID NO: 539773 - RNA, 22 nt, Artificial Sequence
  Synthetic
uguauauuacuuaguucaacgc

SEQ ID NO: 539774 - RNA, 23 nt, Artificial Sequence
  Synthetic
auguauauuacuuaguucaacgc

SEQ ID NO: 539775 - RNA, 24 nt, Artificial Sequence
  Synthetic
uauguauauuacuuaguucaacgc

SEQ ID NO: 539776 - RNA, 18 nt, Artificial Sequence
  Synthetic
acagcauguuacuaacgc

SEQ ID NO: 539777 - RNA, 19 nt, Artificial Sequence
  Synthetic
uacagcauguuacuaacgc

SEQ ID NO: 539778 - RNA, 20 nt, Artificial Sequence
  Synthetic
guacagcauguuacuaacgc

SEQ ID NO: 539779 - RNA, 21 nt, Artificial Sequence
  Synthetic
uguacagcauguuacuaacgc

SEQ ID NO: 539780 - RNA, 22 nt, Artificial Sequence
  Synthetic
cuguacagcauguuacuaacgc

SEQ ID NO: 539781 - RNA, 23 nt, Artificial Sequence
  Synthetic
gcuguacagcauguuacuaacgc

SEQ ID NO: 539782 - RNA, 24 nt, Artificial Sequence
  Synthetic
ugcuguacagcauguuacuaacgc

SEQ ID NO: 539783 - RNA, 18 nt, Artificial Sequence
  Synthetic
ucauaagcaaauuaacgc

SEQ ID NO: 539784 - RNA, 19 nt, Artificial Sequence
  Synthetic
aucauaagcaaauuaacgc

SEQ ID NO: 539785 - RNA, 20 nt, Artificial Sequence
  Synthetic
aaucauaagcaaauuaacgc

SEQ ID NO: 539786 - RNA, 21 nt, Artificial Sequence
  Synthetic
uaaucauaagcaaauuaacgc

SEQ ID NO: 539787 - RNA, 22 nt, Artificial Sequence
  Synthetic
auaaucauaagcaaauuaacgc

SEQ ID NO: 539788 - RNA, 23 nt, Artificial Sequence
  Synthetic
cauaaucauaagcaaauuaacgc

SEQ ID NO: 539789 - RNA, 24 nt, Artificial Sequence
  Synthetic
ccauaaucauaagcaaauuaacgc

SEQ ID NO: 539790 - RNA, 18 nt, Artificial Sequence
  Synthetic
uccuaagcacguuaacgc

SEQ ID NO: 539791 - RNA, 19 nt, Artificial Sequence
  Synthetic
auccuaagcacguuaacgc

SEQ ID NO: 539792 - RNA, 20 nt, Artificial Sequence
  Synthetic
uauccuaagcacguuaacgc

SEQ ID NO: 539793 - RNA, 21 nt, Artificial Sequence
  Synthetic
cuauccuaagcacguuaacgc

SEQ ID NO: 539794 - RNA, 22 nt, Artificial Sequence
  Synthetic
acuauccuaagcacguuaacgc

SEQ ID NO: 539795 - RNA, 23 nt, Artificial Sequence
  Synthetic
cacuauccuaagcacguuaacgc

SEQ ID NO: 539796 - RNA, 24 nt, Artificial Sequence
  Synthetic
ccacuauccuaagcacguuaacgc

SEQ ID NO: 539797 - RNA, 18 nt, Artificial Sequence
  Synthetic
aaaaggcaacaaacacgc

SEQ ID NO: 539798 - RNA, 19 nt, Artificial Sequence
  Synthetic
aaaaaggcaacaaacacgc

SEQ ID NO: 539799 - RNA, 20 nt, Artificial Sequence
  Synthetic
caaaaaggcaacaaacacgc

SEQ ID NO: 539800 - RNA, 21 nt, Artificial Sequence
  Synthetic
gcaaaaaggcaacaaacacgc

SEQ ID NO: 539801 - RNA, 22 nt, Artificial Sequence
  Synthetic
ggcaaaaaggcaacaaacacgc

SEQ ID NO: 539802 - RNA, 23 nt, Artificial Sequence
  Synthetic
uggcaaaaaggcaacaaacacgc

SEQ ID NO: 539803 - RNA, 24 nt, Artificial Sequence
  Synthetic
guggcaaaaaggcaacaaacacgc

SEQ ID NO: 539804 - RNA, 18 nt, Artificial Sequence
  Synthetic
uccagugccuuuucacgc

SEQ ID NO: 539805 - RNA, 19 nt, Artificial Sequence
  Synthetic
auccagugccuuuucacgc

SEQ ID NO: 539806 - RNA, 20 nt, Artificial Sequence
  Synthetic
uauccagugccuuuucacgc

SEQ ID NO: 539807 - RNA, 21 nt, Artificial Sequence
  Synthetic
auauccagugccuuuucacgc

SEQ ID NO: 539808 - RNA, 22 nt, Artificial Sequence
  Synthetic
aauauccagugccuuuucacgc

SEQ ID NO: 539809 - RNA, 23 nt, Artificial Sequence
  Synthetic
aaauauccagugccuuuucacgc

SEQ ID NO: 539810 - RNA, 24 nt, Artificial Sequence
  Synthetic
caaauauccagugccuuuucacgc

SEQ ID NO: 539811 - RNA, 18 nt, Artificial Sequence
  Synthetic
gagaaaauguggagacgc

SEQ ID NO: 539812 - RNA, 19 nt, Artificial Sequence
  Synthetic
agagaaaauguggagacgc

SEQ ID NO: 539813 - RNA, 20 nt, Artificial Sequence
  Synthetic
aagagaaaauguggagacgc

SEQ ID NO: 539814 - RNA, 21 nt, Artificial Sequence
  Synthetic
gaagagaaaauguggagacgc

SEQ ID NO: 539815 - RNA, 22 nt, Artificial Sequence
  Synthetic
agaagagaaaauguggagacgc

SEQ ID NO: 539816 - RNA, 23 nt, Artificial Sequence
  Synthetic
cagaagagaaaauguggagacgc

SEQ ID NO: 539817 - RNA, 24 nt, Artificial Sequence
  Synthetic
gcagaagagaaaauguggagacgc

SEQ ID NO: 539818 - RNA, 18 nt, Artificial Sequence
  Synthetic
uaguuccucacuagacgc

SEQ ID NO: 539819 - RNA, 19 nt, Artificial Sequence
  Synthetic
uuaguuccucacuagacgc

SEQ ID NO: 539820 - RNA, 20 nt, Artificial Sequence
  Synthetic
uuuaguuccucacuagacgc

SEQ ID NO: 539821 - RNA, 21 nt, Artificial Sequence
  Synthetic
uuuuaguuccucacuagacgc

SEQ ID NO: 539822 - RNA, 22 nt, Artificial Sequence
  Synthetic
uuuuuaguuccucacuagacgc

SEQ ID NO: 539823 - RNA, 23 nt, Artificial Sequence
  Synthetic
guuuuuaguuccucacuagacgc

SEQ ID NO: 539824 - RNA, 24 nt, Artificial Sequence
  Synthetic
uguuuuuaguuccucacuagacgc

SEQ ID NO: 539825 - RNA, 18 nt, Artificial Sequence
  Synthetic
augagaacaccuggacgc

SEQ ID NO: 539826 - RNA, 19 nt, Artificial Sequence
  Synthetic
aaugagaacaccuggacgc

SEQ ID NO: 539827 - RNA, 20 nt, Artificial Sequence
  Synthetic
caaugagaacaccuggacgc

SEQ ID NO: 539828 - RNA, 21 nt, Artificial Sequence
  Synthetic
acaaugagaacaccuggacgc

SEQ ID NO: 539829 - RNA, 22 nt, Artificial Sequence
  Synthetic
aacaaugagaacaccuggacgc

SEQ ID NO: 539830 - RNA, 23 nt, Artificial Sequence
  Synthetic
gaacaaugagaacaccuggacgc

SEQ ID NO: 539831 - RNA, 24 nt, Artificial Sequence
  Synthetic
ugaacaaugagaacaccuggacgc

SEQ ID NO: 539832 - RNA, 18 nt, Artificial Sequence
  Synthetic
ugcucgggaggaugacgc

SEQ ID NO: 539833 - RNA, 19 nt, Artificial Sequence
  Synthetic
cugcucgggaggaugacgc

SEQ ID NO: 539834 - RNA, 20 nt, Artificial Sequence
  Synthetic
gcugcucgggaggaugacgc

SEQ ID NO: 539835 - RNA, 21 nt, Artificial Sequence
  Synthetic
agcugcucgggaggaugacgc

SEQ ID NO: 539836 - RNA, 22 nt, Artificial Sequence
  Synthetic
cagcugcucgggaggaugacgc

SEQ ID NO: 539837 - RNA, 23 nt, Artificial Sequence
  Synthetic
ccagcugcucgggaggaugacgc

SEQ ID NO: 539838 - RNA, 24 nt, Artificial Sequence
  Synthetic
cccagcugcucgggaggaugacgc

SEQ ID NO: 539839 - RNA, 18 nt, Artificial Sequence
  Synthetic
auaguuccuuugugacgc

SEQ ID NO: 539840 - RNA, 19 nt, Artificial Sequence
  Synthetic
gauaguuccuuugugacgc

SEQ ID NO: 539841 - RNA, 20 nt, Artificial Sequence
  Synthetic
agauaguuccuuugugacgc

SEQ ID NO: 539842 - RNA, 21 nt, Artificial Sequence
  Synthetic
gagauaguuccuuugugacgc

SEQ ID NO: 539843 - RNA, 22 nt, Artificial Sequence
  Synthetic
ugagauaguuccuuugugacgc

SEQ ID NO: 539844 - RNA, 23 nt, Artificial Sequence
  Synthetic
uugagauaguuccuuugugacgc

SEQ ID NO: 539845 - RNA, 24 nt, Artificial Sequence
  Synthetic
cuugagauaguuccuuugugacgc

SEQ ID NO: 539846 - RNA, 18 nt, Artificial Sequence
  Synthetic
gauaacucuucuguacgc

SEQ ID NO: 539847 - RNA, 19 nt, Artificial Sequence
  Synthetic
ugauaacucuucuguacgc

SEQ ID NO: 539848 - RNA, 20 nt, Artificial Sequence
  Synthetic
augauaacucuucuguacgc

SEQ ID NO: 539849 - RNA, 21 nt, Artificial Sequence
  Synthetic
aaugauaacucuucuguacgc

SEQ ID NO: 539850 - RNA, 22 nt, Artificial Sequence
  Synthetic
uaaugauaacucuucuguacgc

SEQ ID NO: 539851 - RNA, 23 nt, Artificial Sequence
  Synthetic
cuaaugauaacucuucuguacgc

SEQ ID NO: 539852 - RNA, 24 nt, Artificial Sequence
  Synthetic
ccuaaugauaacucuucuguacgc

SEQ ID NO: 539853 - RNA, 18 nt, Artificial Sequence
  Synthetic
accuugugaucugcccgc

SEQ ID NO: 539854 - RNA, 19 nt, Artificial Sequence
  Synthetic
gaccuugugaucugcccgc

SEQ ID NO: 539855 - RNA, 20 nt, Artificial Sequence
  Synthetic
ugaccuugugaucugcccgc

SEQ ID NO: 539856 - RNA, 21 nt, Artificial Sequence
  Synthetic
cugaccuugugaucugcccgc

SEQ ID NO: 539857 - RNA, 22 nt, Artificial Sequence
  Synthetic
ccugaccuugugaucugcccgc

SEQ ID NO: 539858 - RNA, 23 nt, Artificial Sequence
  Synthetic
uccugaccuugugaucugcccgc

SEQ ID NO: 539859 - RNA, 24 nt, Artificial Sequence
  Synthetic
cuccugaccuugugaucugcccgc

SEQ ID NO: 539860 - RNA, 18 nt, Artificial Sequence
  Synthetic
ugggcuucuagaucccgc

SEQ ID NO: 539861 - RNA, 19 nt, Artificial Sequence
  Synthetic
augggcuucuagaucccgc

SEQ ID NO: 539862 - RNA, 20 nt, Artificial Sequence
  Synthetic
caugggcuucuagaucccgc

SEQ ID NO: 539863 - RNA, 21 nt, Artificial Sequence
  Synthetic
acaugggcuucuagaucccgc

SEQ ID NO: 539864 - RNA, 22 nt, Artificial Sequence
  Synthetic
cacaugggcuucuagaucccgc

SEQ ID NO: 539865 - RNA, 23 nt, Artificial Sequence
  Synthetic
gcacaugggcuucuagaucccgc

SEQ ID NO: 539866 - RNA, 24 nt, Artificial Sequence
  Synthetic
agcacaugggcuucuagaucccgc

SEQ ID NO: 539867 - RNA, 18 nt, Artificial Sequence
  Synthetic
aggcaaguauucucccgc

SEQ ID NO: 539868 - RNA, 19 nt, Artificial Sequence
  Synthetic
uaggcaaguauucucccgc

SEQ ID NO: 539869 - RNA, 20 nt, Artificial Sequence
  Synthetic
cuaggcaaguauucucccgc

SEQ ID NO: 539870 - RNA, 21 nt, Artificial Sequence
  Synthetic
ucuaggcaaguauucucccgc

SEQ ID NO: 539871 - RNA, 22 nt, Artificial Sequence
  Synthetic
cucuaggcaaguauucucccgc

SEQ ID NO: 539872 - RNA, 23 nt, Artificial Sequence
  Synthetic
ucucuaggcaaguauucucccgc

SEQ ID NO: 539873 - RNA, 24 nt, Artificial Sequence
  Synthetic
uucucuaggcaaguauucucccgc

SEQ ID NO: 539874 - RNA, 18 nt, Artificial Sequence
  Synthetic
augaaaacauauggccgc

SEQ ID NO: 539875 - RNA, 19 nt, Artificial Sequence
  Synthetic
aaugaaaacauauggccgc

SEQ ID NO: 539876 - RNA, 20 nt, Artificial Sequence
  Synthetic
caaugaaaacauauggccgc

SEQ ID NO: 539877 - RNA, 21 nt, Artificial Sequence
  Synthetic
acaaugaaaacauauggccgc

SEQ ID NO: 539878 - RNA, 22 nt, Artificial Sequence
  Synthetic
aacaaugaaaacauauggccgc

SEQ ID NO: 539879 - RNA, 23 nt, Artificial Sequence
  Synthetic
gaacaaugaaaacauauggccgc

SEQ ID NO: 539880 - RNA, 24 nt, Artificial Sequence
  Synthetic
ugaacaaugaaaacauauggccgc

SEQ ID NO: 539881 - RNA, 18 nt, Artificial Sequence
  Synthetic
gagagcuuagaaugccgc

SEQ ID NO: 539882 - RNA, 19 nt, Artificial Sequence
  Synthetic
ugagagcuuagaaugccgc

SEQ ID NO: 539883 - RNA, 20 nt, Artificial Sequence
  Synthetic
augagagcuuagaaugccgc

SEQ ID NO: 539884 - RNA, 21 nt, Artificial Sequence
  Synthetic
aaugagagcuuagaaugccgc

SEQ ID NO: 539885 - RNA, 22 nt, Artificial Sequence
  Synthetic
caaugagagcuuagaaugccgc

SEQ ID NO: 539886 - RNA, 23 nt, Artificial Sequence
  Synthetic
ccaaugagagcuuagaaugccgc

SEQ ID NO: 539887 - RNA, 24 nt, Artificial Sequence
  Synthetic
gccaaugagagcuuagaaugccgc

SEQ ID NO: 539888 - RNA, 18 nt, Artificial Sequence
  Synthetic
caauuaacauuuauccgc

SEQ ID NO: 539889 - RNA, 19 nt, Artificial Sequence
  Synthetic
acaauuaacauuuauccgc

SEQ ID NO: 539890 - RNA, 20 nt, Artificial Sequence
  Synthetic
aacaauuaacauuuauccgc

SEQ ID NO: 539891 - RNA, 21 nt, Artificial Sequence
  Synthetic
aaacaauuaacauuuauccgc

SEQ ID NO: 539892 - RNA, 22 nt, Artificial Sequence
  Synthetic
aaaacaauuaacauuuauccgc

SEQ ID NO: 539893 - RNA, 23 nt, Artificial Sequence
  Synthetic
caaaacaauuaacauuuauccgc

SEQ ID NO: 539894 - RNA, 24 nt, Artificial Sequence
  Synthetic
acaaaacaauuaacauuuauccgc

SEQ ID NO: 539895 - RNA, 18 nt, Artificial Sequence
  Synthetic
cucagccucccaaagcgc

SEQ ID NO: 539896 - RNA, 19 nt, Artificial Sequence
  Synthetic
ccucagccucccaaagcgc

SEQ ID NO: 539897 - RNA, 20 nt, Artificial Sequence
  Synthetic
gccucagccucccaaagcgc

SEQ ID NO: 539898 - RNA, 21 nt, Artificial Sequence
  Synthetic
ugccucagccucccaaagcgc

SEQ ID NO: 539899 - RNA, 22 nt, Artificial Sequence
  Synthetic
cugccucagccucccaaagcgc

SEQ ID NO: 539900 - RNA, 23 nt, Artificial Sequence
  Synthetic
ccugccucagccucccaaagcgc

SEQ ID NO: 539901 - RNA, 24 nt, Artificial Sequence
  Synthetic
accugccucagccucccaaagcgc

SEQ ID NO: 539902 - RNA, 18 nt, Artificial Sequence
  Synthetic
guuuugauuuacaagcgc

SEQ ID NO: 539903 - RNA, 19 nt, Artificial Sequence
  Synthetic
gguuuugauuuacaagcgc

SEQ ID NO: 539904 - RNA, 20 nt, Artificial Sequence
  Synthetic
agguuuugauuuacaagcgc

SEQ ID NO: 539905 - RNA, 21 nt, Artificial Sequence
  Synthetic
aagguuuugauuuacaagcgc

SEQ ID NO: 539906 - RNA, 22 nt, Artificial Sequence
  Synthetic
uaagguuuugauuuacaagcgc

SEQ ID NO: 539907 - RNA, 23 nt, Artificial Sequence
  Synthetic
cuaagguuuugauuuacaagcgc

SEQ ID NO: 539908 - RNA, 24 nt, Artificial Sequence
  Synthetic
gcuaagguuuugauuuacaagcgc

SEQ ID NO: 539909 - RNA, 18 nt, Artificial Sequence
  Synthetic
gaagcuugggccaagcgc

SEQ ID NO: 539910 - RNA, 19 nt, Artificial Sequence
  Synthetic
ugaagcuugggccaagcgc

SEQ ID NO: 539911 - RNA, 20 nt, Artificial Sequence
  Synthetic
augaagcuugggccaagcgc

SEQ ID NO: 539912 - RNA, 21 nt, Artificial Sequence
  Synthetic
aaugaagcuugggccaagcgc

SEQ ID NO: 539913 - RNA, 22 nt, Artificial Sequence
  Synthetic
aaaugaagcuugggccaagcgc

SEQ ID NO: 539914 - RNA, 23 nt, Artificial Sequence
  Synthetic
gaaaugaagcuugggccaagcgc

SEQ ID NO: 539915 - RNA, 24 nt, Artificial Sequence
  Synthetic
agaaaugaagcuugggccaagcgc

SEQ ID NO: 539916 - RNA, 18 nt, Artificial Sequence
  Synthetic
cugaggcaugagaagcgc

SEQ ID NO: 539917 - RNA, 19 nt, Artificial Sequence
  Synthetic
gcugaggcaugagaagcgc

SEQ ID NO: 539918 - RNA, 20 nt, Artificial Sequence
  Synthetic
ggcugaggcaugagaagcgc

SEQ ID NO: 539919 - RNA, 21 nt, Artificial Sequence
  Synthetic
gggcugaggcaugagaagcgc

SEQ ID NO: 539920 - RNA, 22 nt, Artificial Sequence
  Synthetic
ggggcugaggcaugagaagcgc

SEQ ID NO: 539921 - RNA, 23 nt, Artificial Sequence
  Synthetic
gggggcugaggcaugagaagcgc

SEQ ID NO: 539922 - RNA, 24 nt, Artificial Sequence
  Synthetic
agggggcugaggcaugagaagcgc

SEQ ID NO: 539923 - RNA, 18 nt, Artificial Sequence
  Synthetic
cuggccuggagguagcgc

SEQ ID NO: 539924 - RNA, 19 nt, Artificial Sequence
  Synthetic
acuggccuggagguagcgc

SEQ ID NO: 539925 - RNA, 20 nt, Artificial Sequence
  Synthetic
aacuggccuggagguagcgc

SEQ ID NO: 539926 - RNA, 21 nt, Artificial Sequence
  Synthetic
gaacuggccuggagguagcgc

SEQ ID NO: 539927 - RNA, 22 nt, Artificial Sequence
  Synthetic
ggaacuggccuggagguagcgc

SEQ ID NO: 539928 - RNA, 23 nt, Artificial Sequence
  Synthetic
aggaacuggccuggagguagcgc

SEQ ID NO: 539929 - RNA, 24 nt, Artificial Sequence
  Synthetic
gaggaacuggccuggagguagcgc

SEQ ID NO: 539930 - RNA, 18 nt, Artificial Sequence
  Synthetic
uugagaauucccuggcgc

SEQ ID NO: 539931 - RNA, 19 nt, Artificial Sequence
  Synthetic
uuugagaauucccuggcgc

SEQ ID NO: 539932 - RNA, 20 nt, Artificial Sequence
  Synthetic
guuugagaauucccuggcgc

SEQ ID NO: 539933 - RNA, 21 nt, Artificial Sequence
  Synthetic
uguuugagaauucccuggcgc

SEQ ID NO: 539934 - RNA, 22 nt, Artificial Sequence
  Synthetic
uuguuugagaauucccuggcgc

SEQ ID NO: 539935 - RNA, 23 nt, Artificial Sequence
  Synthetic
auuguuugagaauucccuggcgc

SEQ ID NO: 539936 - RNA, 24 nt, Artificial Sequence
  Synthetic
aauuguuugagaauucccuggcgc

SEQ ID NO: 539937 - RNA, 18 nt, Artificial Sequence
  Synthetic
agcagggccugguggcgc

SEQ ID NO: 539938 - RNA, 19 nt, Artificial Sequence
  Synthetic
uagcagggccugguggcgc

SEQ ID NO: 539939 - RNA, 20 nt, Artificial Sequence
  Synthetic
uuagcagggccugguggcgc

SEQ ID NO: 539940 - RNA, 21 nt, Artificial Sequence
  Synthetic
cuuagcagggccugguggcgc

SEQ ID NO: 539941 - RNA, 22 nt, Artificial Sequence
  Synthetic
acuuagcagggccugguggcgc

SEQ ID NO: 539942 - RNA, 23 nt, Artificial Sequence
  Synthetic
aacuuagcagggccugguggcgc

SEQ ID NO: 539943 - RNA, 24 nt, Artificial Sequence
  Synthetic
aaacuuagcagggccugguggcgc

SEQ ID NO: 539944 - RNA, 18 nt, Artificial Sequence
  Synthetic
aggcgugagccacugcgc

SEQ ID NO: 539945 - RNA, 19 nt, Artificial Sequence
  Synthetic
caggcgugagccacugcgc

SEQ ID NO: 539946 - RNA, 20 nt, Artificial Sequence
  Synthetic
acaggcgugagccacugcgc

SEQ ID NO: 539947 - RNA, 21 nt, Artificial Sequence
  Synthetic
uacaggcgugagccacugcgc

SEQ ID NO: 539948 - RNA, 22 nt, Artificial Sequence
  Synthetic
uuacaggcgugagccacugcgc

SEQ ID NO: 539949 - RNA, 23 nt, Artificial Sequence
  Synthetic
auuacaggcgugagccacugcgc

SEQ ID NO: 539950 - RNA, 24 nt, Artificial Sequence
  Synthetic
gauuacaggcgugagccacugcgc

SEQ ID NO: 539951 - RNA, 18 nt, Artificial Sequence
  Synthetic
uaauacguggaccugcgc

SEQ ID NO: 539952 - RNA, 19 nt, Artificial Sequence
  Synthetic
auaauacguggaccugcgc

SEQ ID NO: 539953 - RNA, 20 nt, Artificial Sequence
  Synthetic
aauaauacguggaccugcgc

SEQ ID NO: 539954 - RNA, 21 nt, Artificial Sequence
  Synthetic
aaauaauacguggaccugcgc

SEQ ID NO: 539955 - RNA, 22 nt, Artificial Sequence
  Synthetic
caaauaauacguggaccugcgc

SEQ ID NO: 539956 - RNA, 23 nt, Artificial Sequence
  Synthetic
acaaauaauacguggaccugcgc

SEQ ID NO: 539957 - RNA, 24 nt, Artificial Sequence
  Synthetic
gacaaauaauacguggaccugcgc

SEQ ID NO: 539958 - RNA, 18 nt, Artificial Sequence
  Synthetic
gugugcgcgcgcgugcgc

SEQ ID NO: 539959 - RNA, 19 nt, Artificial Sequence
  Synthetic
ugugugcgcgcgcgugcgc

SEQ ID NO: 539960 - RNA, 20 nt, Artificial Sequence
  Synthetic
gugugugcgcgcgcgugcgc

SEQ ID NO: 539961 - RNA, 21 nt, Artificial Sequence
  Synthetic
ugugugugcgcgcgcgugcgc

SEQ ID NO: 539962 - RNA, 22 nt, Artificial Sequence
  Synthetic
gugugugugcgcgcgcgugcgc

SEQ ID NO: 539963 - RNA, 23 nt, Artificial Sequence
  Synthetic
ugugugugugcgcgcgcgugcgc

SEQ ID NO: 539964 - RNA, 24 nt, Artificial Sequence
  Synthetic
gugugugugugcgcgcgcgugcgc

SEQ ID NO: 539965 - RNA, 18 nt, Artificial Sequence
  Synthetic
acuacucaaagugugcgc

SEQ ID NO: 539966 - RNA, 19 nt, Artificial Sequence
  Synthetic
uacuacucaaagugugcgc

SEQ ID NO: 539967 - RNA, 20 nt, Artificial Sequence
  Synthetic
cuacuacucaaagugugcgc

SEQ ID NO: 539968 - RNA, 21 nt, Artificial Sequence
  Synthetic
ccuacuacucaaagugugcgc

SEQ ID NO: 539969 - RNA, 22 nt, Artificial Sequence
  Synthetic
cccuacuacucaaagugugcgc

SEQ ID NO: 539970 - RNA, 23 nt, Artificial Sequence
  Synthetic
gcccuacuacucaaagugugcgc

SEQ ID NO: 539971 - RNA, 24 nt, Artificial Sequence
  Synthetic
agcccuacuacucaaagugugcgc

SEQ ID NO: 539972 - RNA, 18 nt, Artificial Sequence
  Synthetic
cugaagcaggagaaucgc

SEQ ID NO: 539973 - RNA, 19 nt, Artificial Sequence
  Synthetic
gcugaagcaggagaaucgc

SEQ ID NO: 539974 - RNA, 20 nt, Artificial Sequence
  Synthetic
ggcugaagcaggagaaucgc

SEQ ID NO: 539975 - RNA, 21 nt, Artificial Sequence
  Synthetic
aggcugaagcaggagaaucgc

SEQ ID NO: 539976 - RNA, 22 nt, Artificial Sequence
  Synthetic
gaggcugaagcaggagaaucgc

SEQ ID NO: 539977 - RNA, 23 nt, Artificial Sequence
  Synthetic
ggaggcugaagcaggagaaucgc

SEQ ID NO: 539978 - RNA, 24 nt, Artificial Sequence
  Synthetic
aggaggcugaagcaggagaaucgc

SEQ ID NO: 539979 - RNA, 18 nt, Artificial Sequence
  Synthetic
cugaggcaggagaaucgc

SEQ ID NO: 539980 - RNA, 19 nt, Artificial Sequence
  Synthetic
gcugaggcaggagaaucgc

SEQ ID NO: 539981 - RNA, 20 nt, Artificial Sequence
  Synthetic
agcugaggcaggagaaucgc

SEQ ID NO: 539982 - RNA, 21 nt, Artificial Sequence
  Synthetic
aagcugaggcaggagaaucgc

SEQ ID NO: 539983 - RNA, 22 nt, Artificial Sequence
  Synthetic
gaagcugaggcaggagaaucgc

SEQ ID NO: 539984 - RNA, 23 nt, Artificial Sequence
  Synthetic
ggaagcugaggcaggagaaucgc

SEQ ID NO: 539985 - RNA, 24 nt, Artificial Sequence
  Synthetic
gggaagcugaggcaggagaaucgc

SEQ ID NO: 539986 - RNA, 21 nt, Artificial Sequence
  Synthetic
aggcugaggcaggagaaucgc

SEQ ID NO: 539987 - RNA, 22 nt, Artificial Sequence
  Synthetic
aaggcugaggcaggagaaucgc

SEQ ID NO: 539988 - RNA, 23 nt, Artificial Sequence
  Synthetic
gaaggcugaggcaggagaaucgc

SEQ ID NO: 539989 - RNA, 24 nt, Artificial Sequence
  Synthetic
ggaaggcugaggcaggagaaucgc

SEQ ID NO: 539990 - RNA, 22 nt, Artificial Sequence
  Synthetic
gaggcugaggcaggagaaucgc

SEQ ID NO: 539991 - RNA, 23 nt, Artificial Sequence
  Synthetic
ggaggcugaggcaggagaaucgc

SEQ ID NO: 539992 - RNA, 24 nt, Artificial Sequence
  Synthetic
aggaggcugaggcaggagaaucgc

SEQ ID NO: 539993 - RNA, 24 nt, Artificial Sequence
  Synthetic
gggaggcugaggcaggagaaucgc

SEQ ID NO: 539994 - RNA, 21 nt, Artificial Sequence
  Synthetic
uggcugaggcaggagaaucgc

SEQ ID NO: 539995 - RNA, 22 nt, Artificial Sequence
  Synthetic
auggcugaggcaggagaaucgc

SEQ ID NO: 539996 - RNA, 23 nt, Artificial Sequence
  Synthetic
gauggcugaggcaggagaaucgc

SEQ ID NO: 539997 - RNA, 24 nt, Artificial Sequence
  Synthetic
agauggcugaggcaggagaaucgc

SEQ ID NO: 539998 - RNA, 18 nt, Artificial Sequence
  Synthetic
ggaacugcaccucaucgc

SEQ ID NO: 539999 - RNA, 19 nt, Artificial Sequence
  Synthetic
uggaacugcaccucaucgc

SEQ ID NO: 540000 - RNA, 20 nt, Artificial Sequence
  Synthetic
guggaacugcaccucaucgc

SEQ ID NO: 540001 - RNA, 21 nt, Artificial Sequence
  Synthetic
uguggaacugcaccucaucgc

SEQ ID NO: 540002 - RNA, 22 nt, Artificial Sequence
  Synthetic
guguggaacugcaccucaucgc

SEQ ID NO: 540003 - RNA, 23 nt, Artificial Sequence
  Synthetic
cguguggaacugcaccucaucgc

SEQ ID NO: 540004 - RNA, 24 nt, Artificial Sequence
  Synthetic
ucguguggaacugcaccucaucgc

SEQ ID NO: 540005 - RNA, 18 nt, Artificial Sequence
  Synthetic
uggaggcaagcagaucgc

SEQ ID NO: 540006 - RNA, 19 nt, Artificial Sequence
  Synthetic
guggaggcaagcagaucgc

SEQ ID NO: 540007 - RNA, 20 nt, Artificial Sequence
  Synthetic
gguggaggcaagcagaucgc

SEQ ID NO: 540008 - RNA, 21 nt, Artificial Sequence
  Synthetic
ggguggaggcaagcagaucgc

SEQ ID NO: 540009 - RNA, 22 nt, Artificial Sequence
  Synthetic
gggguggaggcaagcagaucgc

SEQ ID NO: 540010 - RNA, 23 nt, Artificial Sequence
  Synthetic
agggguggaggcaagcagaucgc

SEQ ID NO: 540011 - RNA, 24 nt, Artificial Sequence
  Synthetic
uagggguggaggcaagcagaucgc

SEQ ID NO: 540012 - RNA, 18 nt, Artificial Sequence
  Synthetic
cugagguuggaggaucgc

SEQ ID NO: 540013 - RNA, 19 nt, Artificial Sequence
  Synthetic
gcugagguuggaggaucgc

SEQ ID NO: 540014 - RNA, 20 nt, Artificial Sequence
  Synthetic
ggcugagguuggaggaucgc

SEQ ID NO: 540015 - RNA, 21 nt, Artificial Sequence
  Synthetic
aggcugagguuggaggaucgc

SEQ ID NO: 540016 - RNA, 22 nt, Artificial Sequence
  Synthetic
gaggcugagguuggaggaucgc

SEQ ID NO: 540017 - RNA, 23 nt, Artificial Sequence
  Synthetic
ggaggcugagguuggaggaucgc

SEQ ID NO: 540018 - RNA, 24 nt, Artificial Sequence
  Synthetic
aggaggcugagguuggaggaucgc

SEQ ID NO: 540019 - RNA, 18 nt, Artificial Sequence
  Synthetic
cugaggcggguggaucgc

SEQ ID NO: 540020 - RNA, 19 nt, Artificial Sequence
  Synthetic
gcugaggcggguggaucgc

SEQ ID NO: 540021 - RNA, 20 nt, Artificial Sequence
  Synthetic
ggcugaggcggguggaucgc

SEQ ID NO: 540022 - RNA, 21 nt, Artificial Sequence
  Synthetic
aggcugaggcggguggaucgc

SEQ ID NO: 540023 - RNA, 22 nt, Artificial Sequence
  Synthetic
gaggcugaggcggguggaucgc

SEQ ID NO: 540024 - RNA, 23 nt, Artificial Sequence
  Synthetic
ggaggcugaggcggguggaucgc

SEQ ID NO: 540025 - RNA, 24 nt, Artificial Sequence
  Synthetic
gggaggcugaggcggguggaucgc

SEQ ID NO: 540026 - RNA, 18 nt, Artificial Sequence
  Synthetic
aaauugauuuaauaucgc

SEQ ID NO: 540027 - RNA, 19 nt, Artificial Sequence
  Synthetic
caaauugauuuaauaucgc

SEQ ID NO: 540028 - RNA, 20 nt, Artificial Sequence
  Synthetic
gcaaauugauuuaauaucgc

SEQ ID NO: 540029 - RNA, 21 nt, Artificial Sequence
  Synthetic
ugcaaauugauuuaauaucgc

SEQ ID NO: 540030 - RNA, 22 nt, Artificial Sequence
  Synthetic
cugcaaauugauuuaauaucgc

SEQ ID NO: 540031 - RNA, 23 nt, Artificial Sequence
  Synthetic
ucugcaaauugauuuaauaucgc

SEQ ID NO: 540032 - RNA, 24 nt, Artificial Sequence
  Synthetic
aucugcaaauugauuuaauaucgc

SEQ ID NO: 540033 - RNA, 18 nt, Artificial Sequence
  Synthetic
uucucagcaaacuaucgc

SEQ ID NO: 540034 - RNA, 19 nt, Artificial Sequence
  Synthetic
auucucagcaaacuaucgc

SEQ ID NO: 540035 - RNA, 20 nt, Artificial Sequence
  Synthetic
cauucucagcaaacuaucgc

SEQ ID NO: 540036 - RNA, 21 nt, Artificial Sequence
  Synthetic
ucauucucagcaaacuaucgc

SEQ ID NO: 540037 - RNA, 22 nt, Artificial Sequence
  Synthetic
aucauucucagcaaacuaucgc

SEQ ID NO: 540038 - RNA, 23 nt, Artificial Sequence
  Synthetic
caucauucucagcaaacuaucgc

SEQ ID NO: 540039 - RNA, 24 nt, Artificial Sequence
  Synthetic
ccaucauucucagcaaacuaucgc

SEQ ID NO: 540040 - RNA, 19 nt, Artificial Sequence
  Synthetic
uuucucagcaaacuaucgc

SEQ ID NO: 540041 - RNA, 20 nt, Artificial Sequence
  Synthetic
uuuucucagcaaacuaucgc

SEQ ID NO: 540042 - RNA, 21 nt, Artificial Sequence
  Synthetic
guuuucucagcaaacuaucgc

SEQ ID NO: 540043 - RNA, 22 nt, Artificial Sequence
  Synthetic
gguuuucucagcaaacuaucgc

SEQ ID NO: 540044 - RNA, 23 nt, Artificial Sequence
  Synthetic
ugguuuucucagcaaacuaucgc

SEQ ID NO: 540045 - RNA, 24 nt, Artificial Sequence
  Synthetic
gugguuuucucagcaaacuaucgc

SEQ ID NO: 540046 - RNA, 24 nt, Artificial Sequence
  Synthetic
acaucauucucaguaaacuaucgc

SEQ ID NO: 540047 - RNA, 24 nt, Artificial Sequence
  Synthetic
ucaucauucucaguaaacuaucgc

SEQ ID NO: 540048 - RNA, 18 nt, Artificial Sequence
  Synthetic
uaucaaguaggcccucgc

SEQ ID NO: 540049 - RNA, 19 nt, Artificial Sequence
  Synthetic
auaucaaguaggcccucgc

SEQ ID NO: 540050 - RNA, 20 nt, Artificial Sequence
  Synthetic
cauaucaaguaggcccucgc

SEQ ID NO: 540051 - RNA, 21 nt, Artificial Sequence
  Synthetic
acauaucaaguaggcccucgc

SEQ ID NO: 540052 - RNA, 22 nt, Artificial Sequence
  Synthetic
gacauaucaaguaggcccucgc

SEQ ID NO: 540053 - RNA, 23 nt, Artificial Sequence
  Synthetic
ugacauaucaaguaggcccucgc

SEQ ID NO: 540054 - RNA, 24 nt, Artificial Sequence
  Synthetic
augacauaucaaguaggcccucgc

SEQ ID NO: 540055 - RNA, 18 nt, Artificial Sequence
  Synthetic
gagaugagaaguugucgc

SEQ ID NO: 540056 - RNA, 19 nt, Artificial Sequence
  Synthetic
agagaugagaaguugucgc

SEQ ID NO: 540057 - RNA, 20 nt, Artificial Sequence
  Synthetic
cagagaugagaaguugucgc

SEQ ID NO: 540058 - RNA, 21 nt, Artificial Sequence
  Synthetic
ccagagaugagaaguugucgc

SEQ ID NO: 540059 - RNA, 22 nt, Artificial Sequence
  Synthetic
accagagaugagaaguugucgc

SEQ ID NO: 540060 - RNA, 23 nt, Artificial Sequence
  Synthetic
caccagagaugagaaguugucgc

SEQ ID NO: 540061 - RNA, 24 nt, Artificial Sequence
  Synthetic
ucaccagagaugagaaguugucgc

SEQ ID NO: 540062 - RNA, 18 nt, Artificial Sequence
  Synthetic
aaacuuaugcauauucgc

SEQ ID NO: 540063 - RNA, 19 nt, Artificial Sequence
  Synthetic
uaaacuuaugcauauucgc

SEQ ID NO: 540064 - RNA, 20 nt, Artificial Sequence
  Synthetic
auaaacuuaugcauauucgc

SEQ ID NO: 540065 - RNA, 21 nt, Artificial Sequence
  Synthetic
cauaaacuuaugcauauucgc

SEQ ID NO: 540066 - RNA, 22 nt, Artificial Sequence
  Synthetic
acauaaacuuaugcauauucgc

SEQ ID NO: 540067 - RNA, 23 nt, Artificial Sequence
  Synthetic
aacauaaacuuaugcauauucgc

SEQ ID NO: 540068 - RNA, 24 nt, Artificial Sequence
  Synthetic
uaacauaaacuuaugcauauucgc

SEQ ID NO: 540069 - RNA, 18 nt, Artificial Sequence
  Synthetic
aggcuucugaaccuucgc

SEQ ID NO: 540070 - RNA, 19 nt, Artificial Sequence
  Synthetic
caggcuucugaaccuucgc

SEQ ID NO: 540071 - RNA, 20 nt, Artificial Sequence
  Synthetic
ucaggcuucugaaccuucgc

SEQ ID NO: 540072 - RNA, 21 nt, Artificial Sequence
  Synthetic
gucaggcuucugaaccuucgc

SEQ ID NO: 540073 - RNA, 22 nt, Artificial Sequence
  Synthetic
agucaggcuucugaaccuucgc

SEQ ID NO: 540074 - RNA, 23 nt, Artificial Sequence
  Synthetic
uagucaggcuucugaaccuucgc

SEQ ID NO: 540075 - RNA, 24 nt, Artificial Sequence
  Synthetic
uuagucaggcuucugaaccuucgc

SEQ ID NO: 540076 - RNA, 18 nt, Artificial Sequence
  Synthetic
aaagugcaaagaguucgc

SEQ ID NO: 540077 - RNA, 19 nt, Artificial Sequence
  Synthetic
aaaagugcaaagaguucgc

SEQ ID NO: 540078 - RNA, 20 nt, Artificial Sequence
  Synthetic
uaaaagugcaaagaguucgc

SEQ ID NO: 540079 - RNA, 21 nt, Artificial Sequence
  Synthetic
auaaaagugcaaagaguucgc

SEQ ID NO: 540080 - RNA, 22 nt, Artificial Sequence
  Synthetic
gauaaaagugcaaagaguucgc

SEQ ID NO: 540081 - RNA, 23 nt, Artificial Sequence
  Synthetic
ugauaaaagugcaaagaguucgc

SEQ ID NO: 540082 - RNA, 24 nt, Artificial Sequence
  Synthetic
gugauaaaagugcaaagaguucgc

SEQ ID NO: 540083 - RNA, 18 nt, Artificial Sequence
  Synthetic
ugagggugggguuuucgc

SEQ ID NO: 540084 - RNA, 19 nt, Artificial Sequence
  Synthetic
uugagggugggguuuucgc

SEQ ID NO: 540085 - RNA, 20 nt, Artificial Sequence
  Synthetic
cuugagggugggguuuucgc

SEQ ID NO: 540086 - RNA, 21 nt, Artificial Sequence
  Synthetic
gcuugagggugggguuuucgc

SEQ ID NO: 540087 - RNA, 22 nt, Artificial Sequence
  Synthetic
ggcuugagggugggguuuucgc

SEQ ID NO: 540088 - RNA, 23 nt, Artificial Sequence
  Synthetic
uggcuugagggugggguuuucgc

SEQ ID NO: 540089 - RNA, 24 nt, Artificial Sequence
  Synthetic
uuggcuugagggugggguuuucgc

SEQ ID NO: 540090 - RNA, 18 nt, Artificial Sequence
  Synthetic
ugaaaaucugaaaaaggc

SEQ ID NO: 540091 - RNA, 19 nt, Artificial Sequence
  Synthetic
cugaaaaucugaaaaaggc

SEQ ID NO: 540092 - RNA, 20 nt, Artificial Sequence
  Synthetic
ccugaaaaucugaaaaaggc

SEQ ID NO: 540093 - RNA, 21 nt, Artificial Sequence
  Synthetic
uccugaaaaucugaaaaaggc

SEQ ID NO: 540094 - RNA, 22 nt, Artificial Sequence
  Synthetic
cuccugaaaaucugaaaaaggc

SEQ ID NO: 540095 - RNA, 23 nt, Artificial Sequence
  Synthetic
ucuccugaaaaucugaaaaaggc

SEQ ID NO: 540096 - RNA, 24 nt, Artificial Sequence
  Synthetic
gucuccugaaaaucugaaaaaggc

SEQ ID NO: 540097 - RNA, 18 nt, Artificial Sequence
  Synthetic
agcacuuaagcaaaaggc

SEQ ID NO: 540098 - RNA, 19 nt, Artificial Sequence
  Synthetic
aagcacuuaagcaaaaggc

SEQ ID NO: 540099 - RNA, 20 nt, Artificial Sequence
  Synthetic
aaagcacuuaagcaaaaggc

SEQ ID NO: 540100 - RNA, 21 nt, Artificial Sequence
  Synthetic
gaaagcacuuaagcaaaaggc

SEQ ID NO: 540101 - RNA, 22 nt, Artificial Sequence
  Synthetic
ggaaagcacuuaagcaaaaggc

SEQ ID NO: 540102 - RNA, 23 nt, Artificial Sequence
  Synthetic
aggaaagcacuuaagcaaaaggc

SEQ ID NO: 540103 - RNA, 24 nt, Artificial Sequence
  Synthetic
uaggaaagcacuuaagcaaaaggc

SEQ ID NO: 540104 - RNA, 18 nt, Artificial Sequence
  Synthetic
acagacaugaacaaaggc

SEQ ID NO: 540105 - RNA, 19 nt, Artificial Sequence
  Synthetic
gacagacaugaacaaaggc

SEQ ID NO: 540106 - RNA, 20 nt, Artificial Sequence
  Synthetic
agacagacaugaacaaaggc

SEQ ID NO: 540107 - RNA, 21 nt, Artificial Sequence
  Synthetic
aagacagacaugaacaaaggc

SEQ ID NO: 540108 - RNA, 22 nt, Artificial Sequence
  Synthetic
aaagacagacaugaacaaaggc

SEQ ID NO: 540109 - RNA, 23 nt, Artificial Sequence
  Synthetic
gaaagacagacaugaacaaaggc

SEQ ID NO: 540110 - RNA, 24 nt, Artificial Sequence
  Synthetic
ggaaagacagacaugaacaaaggc

SEQ ID NO: 540111 - RNA, 18 nt, Artificial Sequence
  Synthetic
accauucaggacaaaggc

SEQ ID NO: 540112 - RNA, 19 nt, Artificial Sequence
  Synthetic
uaccauucaggacaaaggc

SEQ ID NO: 540113 - RNA, 20 nt, Artificial Sequence
  Synthetic
auaccauucaggacaaaggc

SEQ ID NO: 540114 - RNA, 21 nt, Artificial Sequence
  Synthetic
aauaccauucaggacaaaggc

SEQ ID NO: 540115 - RNA, 22 nt, Artificial Sequence
  Synthetic
caauaccauucaggacaaaggc

SEQ ID NO: 540116 - RNA, 23 nt, Artificial Sequence
  Synthetic
gcaauaccauucaggacaaaggc

SEQ ID NO: 540117 - RNA, 24 nt, Artificial Sequence
  Synthetic
ggcaauaccauucaggacaaaggc

SEQ ID NO: 540118 - RNA, 18 nt, Artificial Sequence
  Synthetic
gaauuccacuccaaaggc

SEQ ID NO: 540119 - RNA, 19 nt, Artificial Sequence
  Synthetic
agaauuccacuccaaaggc

SEQ ID NO: 540120 - RNA, 20 nt, Artificial Sequence
  Synthetic
aagaauuccacuccaaaggc

SEQ ID NO: 540121 - RNA, 21 nt, Artificial Sequence
  Synthetic
gaagaauuccacuccaaaggc

SEQ ID NO: 540122 - RNA, 22 nt, Artificial Sequence
  Synthetic
ugaagaauuccacuccaaaggc

SEQ ID NO: 540123 - RNA, 23 nt, Artificial Sequence
  Synthetic
uugaagaauuccacuccaaaggc

SEQ ID NO: 540124 - RNA, 24 nt, Artificial Sequence
  Synthetic
cuugaagaauuccacuccaaaggc

SEQ ID NO: 540125 - RNA, 18 nt, Artificial Sequence
  Synthetic
cugucugaguccaaaggc

SEQ ID NO: 540126 - RNA, 19 nt, Artificial Sequence
  Synthetic
ccugucugaguccaaaggc

SEQ ID NO: 540127 - RNA, 20 nt, Artificial Sequence
  Synthetic
uccugucugaguccaaaggc

SEQ ID NO: 540128 - RNA, 21 nt, Artificial Sequence
  Synthetic
uuccugucugaguccaaaggc

SEQ ID NO: 540129 - RNA, 22 nt, Artificial Sequence
  Synthetic
guuccugucugaguccaaaggc

SEQ ID NO: 540130 - RNA, 23 nt, Artificial Sequence
  Synthetic
aguuccugucugaguccaaaggc

SEQ ID NO: 540131 - RNA, 24 nt, Artificial Sequence
  Synthetic
uaguuccugucugaguccaaaggc

SEQ ID NO: 540132 - RNA, 18 nt, Artificial Sequence
  Synthetic
auucacaauagcaaaggc

SEQ ID NO: 540133 - RNA, 19 nt, Artificial Sequence
  Synthetic
cauucacaauagcaaaggc

SEQ ID NO: 540134 - RNA, 20 nt, Artificial Sequence
  Synthetic
ccauucacaauagcaaaggc

SEQ ID NO: 540135 - RNA, 21 nt, Artificial Sequence
  Synthetic
accauucacaauagcaaaggc

SEQ ID NO: 540136 - RNA, 22 nt, Artificial Sequence
  Synthetic
caccauucacaauagcaaaggc

SEQ ID NO: 540137 - RNA, 23 nt, Artificial Sequence
  Synthetic
gcaccauucacaauagcaaaggc

SEQ ID NO: 540138 - RNA, 24 nt, Artificial Sequence
  Synthetic
agcaccauucacaauagcaaaggc

SEQ ID NO: 540139 - RNA, 18 nt, Artificial Sequence
  Synthetic
uugguaacuugcaaaggc

SEQ ID NO: 540140 - RNA, 19 nt, Artificial Sequence
  Synthetic
guugguaacuugcaaaggc

SEQ ID NO: 540141 - RNA, 20 nt, Artificial Sequence
  Synthetic
aguugguaacuugcaaaggc

SEQ ID NO: 540142 - RNA, 21 nt, Artificial Sequence
  Synthetic
gaguugguaacuugcaaaggc

SEQ ID NO: 540143 - RNA, 22 nt, Artificial Sequence
  Synthetic
agaguugguaacuugcaaaggc

SEQ ID NO: 540144 - RNA, 23 nt, Artificial Sequence
  Synthetic
uagaguugguaacuugcaaaggc

SEQ ID NO: 540145 - RNA, 24 nt, Artificial Sequence
  Synthetic
uuagaguugguaacuugcaaaggc

SEQ ID NO: 540146 - RNA, 18 nt, Artificial Sequence
  Synthetic
uguccuugccucaaaggc

SEQ ID NO: 540147 - RNA, 19 nt, Artificial Sequence
  Synthetic
guguccuugccucaaaggc

SEQ ID NO: 540148 - RNA, 20 nt, Artificial Sequence
  Synthetic
aguguccuugccucaaaggc

SEQ ID NO: 540149 - RNA, 21 nt, Artificial Sequence
  Synthetic
caguguccuugccucaaaggc

SEQ ID NO: 540150 - RNA, 22 nt, Artificial Sequence
  Synthetic
acaguguccuugccucaaaggc

SEQ ID NO: 540151 - RNA, 23 nt, Artificial Sequence
  Synthetic
gacaguguccuugccucaaaggc

SEQ ID NO: 540152 - RNA, 24 nt, Artificial Sequence
  Synthetic
agacaguguccuugccucaaaggc

SEQ ID NO: 540153 - RNA, 18 nt, Artificial Sequence
  Synthetic
caauucaagcucaaaggc

SEQ ID NO: 540154 - RNA, 19 nt, Artificial Sequence
  Synthetic
ucaauucaagcucaaaggc

SEQ ID NO: 540155 - RNA, 20 nt, Artificial Sequence
  Synthetic
uucaauucaagcucaaaggc

SEQ ID NO: 540156 - RNA, 21 nt, Artificial Sequence
  Synthetic
uuucaauucaagcucaaaggc

SEQ ID NO: 540157 - RNA, 22 nt, Artificial Sequence
  Synthetic
guuucaauucaagcucaaaggc

SEQ ID NO: 540158 - RNA, 23 nt, Artificial Sequence
  Synthetic
gguuucaauucaagcucaaaggc

SEQ ID NO: 540159 - RNA, 24 nt, Artificial Sequence
  Synthetic
agguuucaauucaagcucaaaggc

SEQ ID NO: 540160 - RNA, 18 nt, Artificial Sequence
  Synthetic
aggucaggacagaaaggc

SEQ ID NO: 540161 - RNA, 19 nt, Artificial Sequence
  Synthetic
aaggucaggacagaaaggc

SEQ ID NO: 540162 - RNA, 20 nt, Artificial Sequence
  Synthetic
gaaggucaggacagaaaggc

SEQ ID NO: 540163 - RNA, 21 nt, Artificial Sequence
  Synthetic
agaaggucaggacagaaaggc

SEQ ID NO: 540164 - RNA, 22 nt, Artificial Sequence
  Synthetic
aagaaggucaggacagaaaggc

SEQ ID NO: 540165 - RNA, 23 nt, Artificial Sequence
  Synthetic
caagaaggucaggacagaaaggc

SEQ ID NO: 540166 - RNA, 24 nt, Artificial Sequence
  Synthetic
acaagaaggucaggacagaaaggc

SEQ ID NO: 540167 - RNA, 18 nt, Artificial Sequence
  Synthetic
guauuucuuuagaaaggc

SEQ ID NO: 540168 - RNA, 19 nt, Artificial Sequence
  Synthetic
uguauuucuuuagaaaggc

SEQ ID NO: 540169 - RNA, 20 nt, Artificial Sequence
  Synthetic
uuguauuucuuuagaaaggc

SEQ ID NO: 540170 - RNA, 21 nt, Artificial Sequence
  Synthetic
uuuguauuucuuuagaaaggc

SEQ ID NO: 540171 - RNA, 22 nt, Artificial Sequence
  Synthetic
cuuuguauuucuuuagaaaggc

SEQ ID NO: 540172 - RNA, 23 nt, Artificial Sequence
  Synthetic
acuuuguauuucuuuagaaaggc

SEQ ID NO: 540173 - RNA, 24 nt, Artificial Sequence
  Synthetic
aacuuuguauuucuuuagaaaggc

SEQ ID NO: 540174 - RNA, 18 nt, Artificial Sequence
  Synthetic
gaggcauugaggaaaggc

SEQ ID NO: 540175 - RNA, 19 nt, Artificial Sequence
  Synthetic
agaggcauugaggaaaggc

SEQ ID NO: 540176 - RNA, 20 nt, Artificial Sequence
  Synthetic
aagaggcauugaggaaaggc

SEQ ID NO: 540177 - RNA, 21 nt, Artificial Sequence
  Synthetic
aaagaggcauugaggaaaggc

SEQ ID NO: 540178 - RNA, 22 nt, Artificial Sequence
  Synthetic
aaaagaggcauugaggaaaggc

SEQ ID NO: 540179 - RNA, 23 nt, Artificial Sequence
  Synthetic
uaaaagaggcauugaggaaaggc

SEQ ID NO: 540180 - RNA, 24 nt, Artificial Sequence
  Synthetic
cuaaaagaggcauugaggaaaggc

SEQ ID NO: 540181 - RNA, 18 nt, Artificial Sequence
  Synthetic
gaguaaacuuggaaaggc

SEQ ID NO: 540182 - RNA, 19 nt, Artificial Sequence
  Synthetic
agaguaaacuuggaaaggc

SEQ ID NO: 540183 - RNA, 20 nt, Artificial Sequence
  Synthetic
aagaguaaacuuggaaaggc

SEQ ID NO: 540184 - RNA, 21 nt, Artificial Sequence
  Synthetic
gaagaguaaacuuggaaaggc

SEQ ID NO: 540185 - RNA, 22 nt, Artificial Sequence
  Synthetic
agaagaguaaacuuggaaaggc

SEQ ID NO: 540186 - RNA, 23 nt, Artificial Sequence
  Synthetic
uagaagaguaaacuuggaaaggc

SEQ ID NO: 540187 - RNA, 24 nt, Artificial Sequence
  Synthetic
guagaagaguaaacuuggaaaggc

SEQ ID NO: 540188 - RNA, 18 nt, Artificial Sequence
  Synthetic
ugccauuuccauaaaggc

SEQ ID NO: 540189 - RNA, 19 nt, Artificial Sequence
  Synthetic
augccauuuccauaaaggc

SEQ ID NO: 540190 - RNA, 20 nt, Artificial Sequence
  Synthetic
aaugccauuuccauaaaggc

SEQ ID NO: 540191 - RNA, 21 nt, Artificial Sequence
  Synthetic
uaaugccauuuccauaaaggc

SEQ ID NO: 540192 - RNA, 22 nt, Artificial Sequence
  Synthetic
auaaugccauuuccauaaaggc

SEQ ID NO: 540193 - RNA, 23 nt, Artificial Sequence
  Synthetic
aauaaugccauuuccauaaaggc

SEQ ID NO: 540194 - RNA, 24 nt, Artificial Sequence
  Synthetic
caauaaugccauuuccauaaaggc

SEQ ID NO: 540195 - RNA, 18 nt, Artificial Sequence
  Synthetic
uguugacuuuauaaaggc

SEQ ID NO: 540196 - RNA, 19 nt, Artificial Sequence
  Synthetic
guguugacuuuauaaaggc

SEQ ID NO: 540197 - RNA, 20 nt, Artificial Sequence
  Synthetic
aguguugacuuuauaaaggc

SEQ ID NO: 540198 - RNA, 21 nt, Artificial Sequence
  Synthetic
aaguguugacuuuauaaaggc

SEQ ID NO: 540199 - RNA, 22 nt, Artificial Sequence
  Synthetic
uaaguguugacuuuauaaaggc

SEQ ID NO: 540200 - RNA, 23 nt, Artificial Sequence
  Synthetic
uuaaguguugacuuuauaaaggc

SEQ ID NO: 540201 - RNA, 24 nt, Artificial Sequence
  Synthetic
auuaaguguugacuuuauaaaggc

SEQ ID NO: 540202 - RNA, 18 nt, Artificial Sequence
  Synthetic
cucagacaaaaacaaggc

SEQ ID NO: 540203 - RNA, 19 nt, Artificial Sequence
  Synthetic
acucagacaaaaacaaggc

SEQ ID NO: 540204 - RNA, 20 nt, Artificial Sequence
  Synthetic
gacucagacaaaaacaaggc

SEQ ID NO: 540205 - RNA, 21 nt, Artificial Sequence
  Synthetic
agacucagacaaaaacaaggc

SEQ ID NO: 540206 - RNA, 22 nt, Artificial Sequence
  Synthetic
cagacucagacaaaaacaaggc

SEQ ID NO: 540207 - RNA, 23 nt, Artificial Sequence
  Synthetic
gcagacucagacaaaaacaaggc

SEQ ID NO: 540208 - RNA, 24 nt, Artificial Sequence
  Synthetic
ugcagacucagacaaaaacaaggc

SEQ ID NO: 540209 - RNA, 18 nt, Artificial Sequence
  Synthetic
agcaaggcaagacaaggc

SEQ ID NO: 540210 - RNA, 19 nt, Artificial Sequence
  Synthetic
aagcaaggcaagacaaggc

SEQ ID NO: 540211 - RNA, 20 nt, Artificial Sequence
  Synthetic
aaagcaaggcaagacaaggc

SEQ ID NO: 540212 - RNA, 21 nt, Artificial Sequence
  Synthetic
aaaagcaaggcaagacaaggc

SEQ ID NO: 540213 - RNA, 22 nt, Artificial Sequence
  Synthetic
gaaaagcaaggcaagacaaggc

SEQ ID NO: 540214 - RNA, 23 nt, Artificial Sequence
  Synthetic
ugaaaagcaaggcaagacaaggc

SEQ ID NO: 540215 - RNA, 24 nt, Artificial Sequence
  Synthetic
uugaaaagcaaggcaagacaaggc

SEQ ID NO: 540216 - RNA, 18 nt, Artificial Sequence
  Synthetic
ggagcugaaaaccaaggc

SEQ ID NO: 540217 - RNA, 19 nt, Artificial Sequence
  Synthetic
uggagcugaaaaccaaggc

SEQ ID NO: 540218 - RNA, 20 nt, Artificial Sequence
  Synthetic
auggagcugaaaaccaaggc

SEQ ID NO: 540219 - RNA, 21 nt, Artificial Sequence
  Synthetic
gauggagcugaaaaccaaggc

SEQ ID NO: 540220 - RNA, 22 nt, Artificial Sequence
  Synthetic
ugauggagcugaaaaccaaggc

SEQ ID NO: 540221 - RNA, 23 nt, Artificial Sequence
  Synthetic
cugauggagcugaaaaccaaggc

SEQ ID NO: 540222 - RNA, 24 nt, Artificial Sequence
  Synthetic
gcugauggagcugaaaaccaaggc

SEQ ID NO: 540223 - RNA, 18 nt, Artificial Sequence
  Synthetic
aaaauaaaaucccaaggc

SEQ ID NO: 540224 - RNA, 19 nt, Artificial Sequence
  Synthetic
caaaauaaaaucccaaggc

SEQ ID NO: 540225 - RNA, 20 nt, Artificial Sequence
  Synthetic
ccaaaauaaaaucccaaggc

SEQ ID NO: 540226 - RNA, 21 nt, Artificial Sequence
  Synthetic
gccaaaauaaaaucccaaggc

SEQ ID NO: 540227 - RNA, 22 nt, Artificial Sequence
  Synthetic
agccaaaauaaaaucccaaggc

SEQ ID NO: 540228 - RNA, 23 nt, Artificial Sequence
  Synthetic
aagccaaaauaaaaucccaaggc

SEQ ID NO: 540229 - RNA, 24 nt, Artificial Sequence
  Synthetic
aaagccaaaauaaaaucccaaggc

SEQ ID NO: 540230 - RNA, 18 nt, Artificial Sequence
  Synthetic
ucuauugaaaagcaaggc

SEQ ID NO: 540231 - RNA, 19 nt, Artificial Sequence
  Synthetic
gucuauugaaaagcaaggc

SEQ ID NO: 540232 - RNA, 20 nt, Artificial Sequence
  Synthetic
agucuauugaaaagcaaggc

SEQ ID NO: 540233 - RNA, 21 nt, Artificial Sequence
  Synthetic
aagucuauugaaaagcaaggc

SEQ ID NO: 540234 - RNA, 22 nt, Artificial Sequence
  Synthetic
gaagucuauugaaaagcaaggc

SEQ ID NO: 540235 - RNA, 23 nt, Artificial Sequence
  Synthetic
ggaagucuauugaaaagcaaggc

SEQ ID NO: 540236 - RNA, 24 nt, Artificial Sequence
  Synthetic
uggaagucuauugaaaagcaaggc

SEQ ID NO: 540237 - RNA, 18 nt, Artificial Sequence
  Synthetic
gagugcugaaagcaaggc

SEQ ID NO: 540238 - RNA, 19 nt, Artificial Sequence
  Synthetic
cgagugcugaaagcaaggc

SEQ ID NO: 540239 - RNA, 20 nt, Artificial Sequence
  Synthetic
gcgagugcugaaagcaaggc

SEQ ID NO: 540240 - RNA, 21 nt, Artificial Sequence
  Synthetic
ugcgagugcugaaagcaaggc

SEQ ID NO: 540241 - RNA, 22 nt, Artificial Sequence
  Synthetic
cugcgagugcugaaagcaaggc

SEQ ID NO: 540242 - RNA, 23 nt, Artificial Sequence
  Synthetic
gcugcgagugcugaaagcaaggc

SEQ ID NO: 540243 - RNA, 24 nt, Artificial Sequence
  Synthetic
ggcugcgagugcugaaagcaaggc

SEQ ID NO: 540244 - RNA, 18 nt, Artificial Sequence
  Synthetic
gcuuaacaugugcaaggc

SEQ ID NO: 540245 - RNA, 19 nt, Artificial Sequence
  Synthetic
ugcuuaacaugugcaaggc

SEQ ID NO: 540246 - RNA, 20 nt, Artificial Sequence
  Synthetic
gugcuuaacaugugcaaggc

SEQ ID NO: 540247 - RNA, 21 nt, Artificial Sequence
  Synthetic
ugugcuuaacaugugcaaggc

SEQ ID NO: 540248 - RNA, 22 nt, Artificial Sequence
  Synthetic
augugcuuaacaugugcaaggc

SEQ ID NO: 540249 - RNA, 23 nt, Artificial Sequence
  Synthetic
uaugugcuuaacaugugcaaggc

SEQ ID NO: 540250 - RNA, 24 nt, Artificial Sequence
  Synthetic
cuaugugcuuaacaugugcaaggc

SEQ ID NO: 540251 - RNA, 18 nt, Artificial Sequence
  Synthetic
ggcuuuccuccucaaggc

SEQ ID NO: 540252 - RNA, 19 nt, Artificial Sequence
  Synthetic
aggcuuuccuccucaaggc

SEQ ID NO: 540253 - RNA, 20 nt, Artificial Sequence
  Synthetic
gaggcuuuccuccucaaggc

SEQ ID NO: 540254 - RNA, 21 nt, Artificial Sequence
  Synthetic
ggaggcuuuccuccucaaggc

SEQ ID NO: 540255 - RNA, 22 nt, Artificial Sequence
  Synthetic
aggaggcuuuccuccucaaggc

SEQ ID NO: 540256 - RNA, 23 nt, Artificial Sequence
  Synthetic
gaggaggcuuuccuccucaaggc

SEQ ID NO: 540257 - RNA, 24 nt, Artificial Sequence
  Synthetic
ugaggaggcuuuccuccucaaggc

SEQ ID NO: 540258 - RNA, 18 nt, Artificial Sequence
  Synthetic
gagaagguaagucaaggc

SEQ ID NO: 540259 - RNA, 19 nt, Artificial Sequence
  Synthetic
ugagaagguaagucaaggc

SEQ ID NO: 540260 - RNA, 20 nt, Artificial Sequence
  Synthetic
cugagaagguaagucaaggc

SEQ ID NO: 540261 - RNA, 21 nt, Artificial Sequence
  Synthetic
gcugagaagguaagucaaggc

SEQ ID NO: 540262 - RNA, 22 nt, Artificial Sequence
  Synthetic
ggcugagaagguaagucaaggc

SEQ ID NO: 540263 - RNA, 23 nt, Artificial Sequence
  Synthetic
uggcugagaagguaagucaaggc

SEQ ID NO: 540264 - RNA, 24 nt, Artificial Sequence
  Synthetic
auggcugagaagguaagucaaggc

SEQ ID NO: 540265 - RNA, 18 nt, Artificial Sequence
  Synthetic
caaaagcuagcagaaggc

SEQ ID NO: 540266 - RNA, 19 nt, Artificial Sequence
  Synthetic
ucaaaagcuagcagaaggc

SEQ ID NO: 540267 - RNA, 20 nt, Artificial Sequence
  Synthetic
uucaaaagcuagcagaaggc

SEQ ID NO: 540268 - RNA, 21 nt, Artificial Sequence
  Synthetic
auucaaaagcuagcagaaggc

SEQ ID NO: 540269 - RNA, 22 nt, Artificial Sequence
  Synthetic
cauucaaaagcuagcagaaggc

SEQ ID NO: 540270 - RNA, 23 nt, Artificial Sequence
  Synthetic
acauucaaaagcuagcagaaggc

SEQ ID NO: 540271 - RNA, 24 nt, Artificial Sequence
  Synthetic
cacauucaaaagcuagcagaaggc

SEQ ID NO: 540272 - RNA, 18 nt, Artificial Sequence
  Synthetic
aagacaaggcaggaaggc

SEQ ID NO: 540273 - RNA, 19 nt, Artificial Sequence
  Synthetic
caagacaaggcaggaaggc

SEQ ID NO: 540274 - RNA, 20 nt, Artificial Sequence
  Synthetic
gcaagacaaggcaggaaggc

SEQ ID NO: 540275 - RNA, 21 nt, Artificial Sequence
  Synthetic
ggcaagacaaggcaggaaggc

SEQ ID NO: 540276 - RNA, 22 nt, Artificial Sequence
  Synthetic
aggcaagacaaggcaggaaggc

SEQ ID NO: 540277 - RNA, 23 nt, Artificial Sequence
  Synthetic
aaggcaagacaaggcaggaaggc

SEQ ID NO: 540278 - RNA, 24 nt, Artificial Sequence
  Synthetic
caaggcaagacaaggcaggaaggc

SEQ ID NO: 540279 - RNA, 18 nt, Artificial Sequence
  Synthetic
aauggggucucggaaggc

SEQ ID NO: 540280 - RNA, 19 nt, Artificial Sequence
  Synthetic
aaauggggucucggaaggc

SEQ ID NO: 540281 - RNA, 20 nt, Artificial Sequence
  Synthetic
gaaauggggucucggaaggc

SEQ ID NO: 540282 - RNA, 21 nt, Artificial Sequence
  Synthetic
ugaaauggggucucggaaggc

SEQ ID NO: 540283 - RNA, 22 nt, Artificial Sequence
  Synthetic
cugaaauggggucucggaaggc

SEQ ID NO: 540284 - RNA, 23 nt, Artificial Sequence
  Synthetic
ucugaaauggggucucggaaggc

SEQ ID NO: 540285 - RNA, 24 nt, Artificial Sequence
  Synthetic
cucugaaauggggucucggaaggc

SEQ ID NO: 540286 - RNA, 18 nt, Artificial Sequence
  Synthetic
agagaagcgggggaaggc

SEQ ID NO: 540287 - RNA, 19 nt, Artificial Sequence
  Synthetic
gagagaagcgggggaaggc

SEQ ID NO: 540288 - RNA, 20 nt, Artificial Sequence
  Synthetic
agagagaagcgggggaaggc

SEQ ID NO: 540289 - RNA, 21 nt, Artificial Sequence
  Synthetic
gagagagaagcgggggaaggc

SEQ ID NO: 540290 - RNA, 22 nt, Artificial Sequence
  Synthetic
agagagagaagcgggggaaggc

SEQ ID NO: 540291 - RNA, 23 nt, Artificial Sequence
  Synthetic
gagagagagaagcgggggaaggc

SEQ ID NO: 540292 - RNA, 24 nt, Artificial Sequence
  Synthetic
agagagagagaagcgggggaaggc

SEQ ID NO: 540293 - RNA, 18 nt, Artificial Sequence
  Synthetic
gauccuccuggggaaggc

SEQ ID NO: 540294 - RNA, 19 nt, Artificial Sequence
  Synthetic
agauccuccuggggaaggc

SEQ ID NO: 540295 - RNA, 20 nt, Artificial Sequence
  Synthetic
gagauccuccuggggaaggc

SEQ ID NO: 540296 - RNA, 21 nt, Artificial Sequence
  Synthetic
agagauccuccuggggaaggc

SEQ ID NO: 540297 - RNA, 22 nt, Artificial Sequence
  Synthetic
cagagauccuccuggggaaggc

SEQ ID NO: 540298 - RNA, 23 nt, Artificial Sequence
  Synthetic
ucagagauccuccuggggaaggc

SEQ ID NO: 540299 - RNA, 24 nt, Artificial Sequence
  Synthetic
uucagagauccuccuggggaaggc

SEQ ID NO: 540300 - RNA, 18 nt, Artificial Sequence
  Synthetic
uugagguccuuggaaggc

SEQ ID NO: 540301 - RNA, 19 nt, Artificial Sequence
  Synthetic
cuugagguccuuggaaggc

SEQ ID NO: 540302 - RNA, 20 nt, Artificial Sequence
  Synthetic
ucuugagguccuuggaaggc

SEQ ID NO: 540303 - RNA, 21 nt, Artificial Sequence
  Synthetic
aucuugagguccuuggaaggc

SEQ ID NO: 540304 - RNA, 22 nt, Artificial Sequence
  Synthetic
caucuugagguccuuggaaggc

SEQ ID NO: 540305 - RNA, 23 nt, Artificial Sequence
  Synthetic
acaucuugagguccuuggaaggc

SEQ ID NO: 540306 - RNA, 24 nt, Artificial Sequence
  Synthetic
aacaucuugagguccuuggaaggc

SEQ ID NO: 540307 - RNA, 18 nt, Artificial Sequence
  Synthetic
ugguuaaagucugaaggc

SEQ ID NO: 540308 - RNA, 19 nt, Artificial Sequence
  Synthetic
gugguuaaagucugaaggc

SEQ ID NO: 540309 - RNA, 20 nt, Artificial Sequence
  Synthetic
ugugguuaaagucugaaggc

SEQ ID NO: 540310 - RNA, 21 nt, Artificial Sequence
  Synthetic
uugugguuaaagucugaaggc

SEQ ID NO: 540311 - RNA, 22 nt, Artificial Sequence
  Synthetic
auugugguuaaagucugaaggc

SEQ ID NO: 540312 - RNA, 23 nt, Artificial Sequence
  Synthetic
uauugugguuaaagucugaaggc

SEQ ID NO: 540313 - RNA, 24 nt, Artificial Sequence
  Synthetic
auauugugguuaaagucugaaggc

SEQ ID NO: 540314 - RNA, 18 nt, Artificial Sequence
  Synthetic
cagggucagagugaaggc

SEQ ID NO: 540315 - RNA, 19 nt, Artificial Sequence
  Synthetic
gcagggucagagugaaggc

SEQ ID NO: 540316 - RNA, 20 nt, Artificial Sequence
  Synthetic
agcagggucagagugaaggc

SEQ ID NO: 540317 - RNA, 21 nt, Artificial Sequence
  Synthetic
uagcagggucagagugaaggc

SEQ ID NO: 540318 - RNA, 22 nt, Artificial Sequence
  Synthetic
guagcagggucagagugaaggc

SEQ ID NO: 540319 - RNA, 23 nt, Artificial Sequence
  Synthetic
uguagcagggucagagugaaggc

SEQ ID NO: 540320 - RNA, 24 nt, Artificial Sequence
  Synthetic
auguagcagggucagagugaaggc

SEQ ID NO: 540321 - RNA, 18 nt, Artificial Sequence
  Synthetic
ggaaguagacuugaaggc

SEQ ID NO: 540322 - RNA, 19 nt, Artificial Sequence
  Synthetic
cggaaguagacuugaaggc

SEQ ID NO: 540323 - RNA, 20 nt, Artificial Sequence
  Synthetic
acggaaguagacuugaaggc

SEQ ID NO: 540324 - RNA, 21 nt, Artificial Sequence
  Synthetic
aacggaaguagacuugaaggc

SEQ ID NO: 540325 - RNA, 22 nt, Artificial Sequence
  Synthetic
caacggaaguagacuugaaggc

SEQ ID NO: 540326 - RNA, 23 nt, Artificial Sequence
  Synthetic
gcaacggaaguagacuugaaggc

SEQ ID NO: 540327 - RNA, 24 nt, Artificial Sequence
  Synthetic
ugcaacggaaguagacuugaaggc

SEQ ID NO: 540328 - RNA, 18 nt, Artificial Sequence
  Synthetic
uuauuaggauaauaaggc

SEQ ID NO: 540329 - RNA, 19 nt, Artificial Sequence
  Synthetic
guuauuaggauaauaaggc

SEQ ID NO: 540330 - RNA, 20 nt, Artificial Sequence
  Synthetic
uguuauuaggauaauaaggc

SEQ ID NO: 540331 - RNA, 21 nt, Artificial Sequence
  Synthetic
guguuauuaggauaauaaggc

SEQ ID NO: 540332 - RNA, 22 nt, Artificial Sequence
  Synthetic
uguguuauuaggauaauaaggc

SEQ ID NO: 540333 - RNA, 23 nt, Artificial Sequence
  Synthetic
auguguuauuaggauaauaaggc

SEQ ID NO: 540334 - RNA, 24 nt, Artificial Sequence
  Synthetic
gauguguuauuaggauaauaaggc

SEQ ID NO: 540335 - RNA, 18 nt, Artificial Sequence
  Synthetic
acaugagaucacuaaggc

SEQ ID NO: 540336 - RNA, 19 nt, Artificial Sequence
  Synthetic
cacaugagaucacuaaggc

SEQ ID NO: 540337 - RNA, 20 nt, Artificial Sequence
  Synthetic
acacaugagaucacuaaggc

SEQ ID NO: 540338 - RNA, 21 nt, Artificial Sequence
  Synthetic
cacacaugagaucacuaaggc

SEQ ID NO: 540339 - RNA, 22 nt, Artificial Sequence
  Synthetic
ucacacaugagaucacuaaggc

SEQ ID NO: 540340 - RNA, 23 nt, Artificial Sequence
  Synthetic
cucacacaugagaucacuaaggc

SEQ ID NO: 540341 - RNA, 24 nt, Artificial Sequence
  Synthetic
acucacacaugagaucacuaaggc

SEQ ID NO: 540342 - RNA, 18 nt, Artificial Sequence
  Synthetic
uacucgggaggcuaaggc

SEQ ID NO: 540343 - RNA, 19 nt, Artificial Sequence
  Synthetic
cuacucgggaggcuaaggc

SEQ ID NO: 540344 - RNA, 20 nt, Artificial Sequence
  Synthetic
gcuacucgggaggcuaaggc

SEQ ID NO: 540345 - RNA, 21 nt, Artificial Sequence
  Synthetic
agcuacucgggaggcuaaggc

SEQ ID NO: 540346 - RNA, 22 nt, Artificial Sequence
  Synthetic
cagcuacucgggaggcuaaggc

SEQ ID NO: 540347 - RNA, 23 nt, Artificial Sequence
  Synthetic
ccagcuacucgggaggcuaaggc

SEQ ID NO: 540348 - RNA, 24 nt, Artificial Sequence
  Synthetic
cccagcuacucgggaggcuaaggc

SEQ ID NO: 540349 - RNA, 18 nt, Artificial Sequence
  Synthetic
acugggauuggguaaggc

SEQ ID NO: 540350 - RNA, 19 nt, Artificial Sequence
  Synthetic
cacugggauuggguaaggc

SEQ ID NO: 540351 - RNA, 20 nt, Artificial Sequence
  Synthetic
gcacugggauuggguaaggc

SEQ ID NO: 540352 - RNA, 21 nt, Artificial Sequence
  Synthetic
ugcacugggauuggguaaggc

SEQ ID NO: 540353 - RNA, 22 nt, Artificial Sequence
  Synthetic
cugcacugggauuggguaaggc

SEQ ID NO: 540354 - RNA, 23 nt, Artificial Sequence
  Synthetic
gcugcacugggauuggguaaggc

SEQ ID NO: 540355 - RNA, 24 nt, Artificial Sequence
  Synthetic
agcugcacugggauuggguaaggc

SEQ ID NO: 540356 - RNA, 18 nt, Artificial Sequence
  Synthetic
guuaugaaacuguaaggc

SEQ ID NO: 540357 - RNA, 19 nt, Artificial Sequence
  Synthetic
uguuaugaaacuguaaggc

SEQ ID NO: 540358 - RNA, 20 nt, Artificial Sequence
  Synthetic
cuguuaugaaacuguaaggc

SEQ ID NO: 540359 - RNA, 21 nt, Artificial Sequence
  Synthetic
ucuguuaugaaacuguaaggc

SEQ ID NO: 540360 - RNA, 22 nt, Artificial Sequence
  Synthetic
cucuguuaugaaacuguaaggc

SEQ ID NO: 540361 - RNA, 23 nt, Artificial Sequence
  Synthetic
ccucuguuaugaaacuguaaggc

SEQ ID NO: 540362 - RNA, 24 nt, Artificial Sequence
  Synthetic
uccucuguuaugaaacuguaaggc

SEQ ID NO: 540363 - RNA, 18 nt, Artificial Sequence
  Synthetic
aucugagaagacacaggc

SEQ ID NO: 540364 - RNA, 19 nt, Artificial Sequence
  Synthetic
uaucugagaagacacaggc

SEQ ID NO: 540365 - RNA, 20 nt, Artificial Sequence
  Synthetic
auaucugagaagacacaggc

SEQ ID NO: 540366 - RNA, 21 nt, Artificial Sequence
  Synthetic
cauaucugagaagacacaggc

SEQ ID NO: 540367 - RNA, 22 nt, Artificial Sequence
  Synthetic
acauaucugagaagacacaggc

SEQ ID NO: 540368 - RNA, 23 nt, Artificial Sequence
  Synthetic
cacauaucugagaagacacaggc

SEQ ID NO: 540369 - RNA, 24 nt, Artificial Sequence
  Synthetic
gcacauaucugagaagacacaggc

SEQ ID NO: 540370 - RNA, 18 nt, Artificial Sequence
  Synthetic
uaaagguaaaagacaggc

SEQ ID NO: 540371 - RNA, 19 nt, Artificial Sequence
  Synthetic
auaaagguaaaagacaggc

SEQ ID NO: 540372 - RNA, 20 nt, Artificial Sequence
  Synthetic
cauaaagguaaaagacaggc

SEQ ID NO: 540373 - RNA, 21 nt, Artificial Sequence
  Synthetic
acauaaagguaaaagacaggc

SEQ ID NO: 540374 - RNA, 22 nt, Artificial Sequence
  Synthetic
aacauaaagguaaaagacaggc

SEQ ID NO: 540375 - RNA, 23 nt, Artificial Sequence
  Synthetic
uaacauaaagguaaaagacaggc

SEQ ID NO: 540376 - RNA, 24 nt, Artificial Sequence
  Synthetic
uuaacauaaagguaaaagacaggc

SEQ ID NO: 540377 - RNA, 18 nt, Artificial Sequence
  Synthetic
uuugacugggagacaggc

SEQ ID NO: 540378 - RNA, 19 nt, Artificial Sequence
  Synthetic
cuuugacugggagacaggc

SEQ ID NO: 540379 - RNA, 20 nt, Artificial Sequence
  Synthetic
ucuuugacugggagacaggc

SEQ ID NO: 540380 - RNA, 21 nt, Artificial Sequence
  Synthetic
cucuuugacugggagacaggc

SEQ ID NO: 540381 - RNA, 22 nt, Artificial Sequence
  Synthetic
ucucuuugacugggagacaggc

SEQ ID NO: 540382 - RNA, 23 nt, Artificial Sequence
  Synthetic
uucucuuugacugggagacaggc

SEQ ID NO: 540383 - RNA, 24 nt, Artificial Sequence
  Synthetic
auucucuuugacugggagacaggc

SEQ ID NO: 540384 - RNA, 18 nt, Artificial Sequence
  Synthetic
uaggcaugaaggacaggc

SEQ ID NO: 540385 - RNA, 19 nt, Artificial Sequence
  Synthetic
auaggcaugaaggacaggc

SEQ ID NO: 540386 - RNA, 20 nt, Artificial Sequence
  Synthetic
aauaggcaugaaggacaggc

SEQ ID NO: 540387 - RNA, 21 nt, Artificial Sequence
  Synthetic
gaauaggcaugaaggacaggc

SEQ ID NO: 540388 - RNA, 22 nt, Artificial Sequence
  Synthetic
ugaauaggcaugaaggacaggc

SEQ ID NO: 540389 - RNA, 23 nt, Artificial Sequence
  Synthetic
augaauaggcaugaaggacaggc

SEQ ID NO: 540390 - RNA, 24 nt, Artificial Sequence
  Synthetic
gaugaauaggcaugaaggacaggc

SEQ ID NO: 540391 - RNA, 18 nt, Artificial Sequence
  Synthetic
agcacugagaugacaggc

SEQ ID NO: 540392 - RNA, 19 nt, Artificial Sequence
  Synthetic
aagcacugagaugacaggc

SEQ ID NO: 540393 - RNA, 20 nt, Artificial Sequence
  Synthetic
aaagcacugagaugacaggc

SEQ ID NO: 540394 - RNA, 21 nt, Artificial Sequence
  Synthetic
caaagcacugagaugacaggc

SEQ ID NO: 540395 - RNA, 22 nt, Artificial Sequence
  Synthetic
ccaaagcacugagaugacaggc

SEQ ID NO: 540396 - RNA, 23 nt, Artificial Sequence
  Synthetic
cccaaagcacugagaugacaggc

SEQ ID NO: 540397 - RNA, 24 nt, Artificial Sequence
  Synthetic
ucccaaagcacugagaugacaggc

SEQ ID NO: 540398 - RNA, 18 nt, Artificial Sequence
  Synthetic
accauucaggauacaggc

SEQ ID NO: 540399 - RNA, 19 nt, Artificial Sequence
  Synthetic
uaccauucaggauacaggc

SEQ ID NO: 540400 - RNA, 20 nt, Artificial Sequence
  Synthetic
auaccauucaggauacaggc

SEQ ID NO: 540401 - RNA, 21 nt, Artificial Sequence
  Synthetic
aauaccauucaggauacaggc

SEQ ID NO: 540402 - RNA, 22 nt, Artificial Sequence
  Synthetic
caauaccauucaggauacaggc

SEQ ID NO: 540403 - RNA, 23 nt, Artificial Sequence
  Synthetic
gcaauaccauucaggauacaggc

SEQ ID NO: 540404 - RNA, 24 nt, Artificial Sequence
  Synthetic
ggcaauaccauucaggauacaggc

SEQ ID NO: 540405 - RNA, 18 nt, Artificial Sequence
  Synthetic
ggagccagagcuacaggc

SEQ ID NO: 540406 - RNA, 19 nt, Artificial Sequence
  Synthetic
gggagccagagcuacaggc

SEQ ID NO: 540407 - RNA, 20 nt, Artificial Sequence
  Synthetic
ugggagccagagcuacaggc

SEQ ID NO: 540408 - RNA, 21 nt, Artificial Sequence
  Synthetic
augggagccagagcuacaggc

SEQ ID NO: 540409 - RNA, 22 nt, Artificial Sequence
  Synthetic
gaugggagccagagcuacaggc

SEQ ID NO: 540410 - RNA, 23 nt, Artificial Sequence
  Synthetic
agaugggagccagagcuacaggc

SEQ ID NO: 540411 - RNA, 24 nt, Artificial Sequence
  Synthetic
aagaugggagccagagcuacaggc

SEQ ID NO: 540412 - RNA, 18 nt, Artificial Sequence
  Synthetic
gccacagggaguacaggc

SEQ ID NO: 540413 - RNA, 19 nt, Artificial Sequence
  Synthetic
agccacagggaguacaggc

SEQ ID NO: 540414 - RNA, 20 nt, Artificial Sequence
  Synthetic
uagccacagggaguacaggc

SEQ ID NO: 540415 - RNA, 21 nt, Artificial Sequence
  Synthetic
guagccacagggaguacaggc

SEQ ID NO: 540416 - RNA, 22 nt, Artificial Sequence
  Synthetic
gguagccacagggaguacaggc

SEQ ID NO: 540417 - RNA, 23 nt, Artificial Sequence
  Synthetic
agguagccacagggaguacaggc

SEQ ID NO: 540418 - RNA, 24 nt, Artificial Sequence
  Synthetic
uagguagccacagggaguacaggc

SEQ ID NO: 540419 - RNA, 18 nt, Artificial Sequence
  Synthetic
agcgcugagauuacaggc

SEQ ID NO: 540420 - RNA, 19 nt, Artificial Sequence
  Synthetic
aagcgcugagauuacaggc

SEQ ID NO: 540421 - RNA, 20 nt, Artificial Sequence
  Synthetic
gaagcgcugagauuacaggc

SEQ ID NO: 540422 - RNA, 21 nt, Artificial Sequence
  Synthetic
ugaagcgcugagauuacaggc

SEQ ID NO: 540423 - RNA, 22 nt, Artificial Sequence
  Synthetic
cugaagcgcugagauuacaggc

SEQ ID NO: 540424 - RNA, 23 nt, Artificial Sequence
  Synthetic
ccugaagcgcugagauuacaggc

SEQ ID NO: 540425 - RNA, 24 nt, Artificial Sequence
  Synthetic
uccugaagcgcugagauuacaggc

SEQ ID NO: 540426 - RNA, 18 nt, Artificial Sequence
  Synthetic
agugcugagauuacaggc

SEQ ID NO: 540427 - RNA, 19 nt, Artificial Sequence
  Synthetic
aagugcugagauuacaggc

SEQ ID NO: 540428 - RNA, 20 nt, Artificial Sequence
  Synthetic
aaagugcugagauuacaggc

SEQ ID NO: 540429 - RNA, 21 nt, Artificial Sequence
  Synthetic
caaagugcugagauuacaggc

SEQ ID NO: 540430 - RNA, 22 nt, Artificial Sequence
  Synthetic
ccaaagugcugagauuacaggc

SEQ ID NO: 540431 - RNA, 23 nt, Artificial Sequence
  Synthetic
cccaaagugcugagauuacaggc

SEQ ID NO: 540432 - RNA, 24 nt, Artificial Sequence
  Synthetic
ucccaaagugcugagauuacaggc

SEQ ID NO: 540433 - RNA, 18 nt, Artificial Sequence
  Synthetic
agugcugcgauuacaggc

SEQ ID NO: 540434 - RNA, 19 nt, Artificial Sequence
  Synthetic
aagugcugcgauuacaggc

SEQ ID NO: 540435 - RNA, 20 nt, Artificial Sequence
  Synthetic
aaagugcugcgauuacaggc

SEQ ID NO: 540436 - RNA, 21 nt, Artificial Sequence
  Synthetic
caaagugcugcgauuacaggc

SEQ ID NO: 540437 - RNA, 22 nt, Artificial Sequence
  Synthetic
ccaaagugcugcgauuacaggc

SEQ ID NO: 540438 - RNA, 23 nt, Artificial Sequence
  Synthetic
cccaaagugcugcgauuacaggc

SEQ ID NO: 540439 - RNA, 24 nt, Artificial Sequence
  Synthetic
ucccaaagugcugcgauuacaggc

SEQ ID NO: 540440 - RNA, 18 nt, Artificial Sequence
  Synthetic
agcacagggauuacaggc

SEQ ID NO: 540441 - RNA, 19 nt, Artificial Sequence
  Synthetic
aagcacagggauuacaggc

SEQ ID NO: 540442 - RNA, 20 nt, Artificial Sequence
  Synthetic
aaagcacagggauuacaggc

SEQ ID NO: 540443 - RNA, 21 nt, Artificial Sequence
  Synthetic
caaagcacagggauuacaggc

SEQ ID NO: 540444 - RNA, 22 nt, Artificial Sequence
  Synthetic
ccaaagcacagggauuacaggc

SEQ ID NO: 540445 - RNA, 23 nt, Artificial Sequence
  Synthetic
cccaaagcacagggauuacaggc

SEQ ID NO: 540446 - RNA, 24 nt, Artificial Sequence
  Synthetic
ucccaaagcacagggauuacaggc

SEQ ID NO: 540447 - RNA, 24 nt, Artificial Sequence
  Synthetic
acccaaagugcugggauuacaggc

SEQ ID NO: 540448 - RNA, 20 nt, Artificial Sequence
  Synthetic
caagugcugggauuacaggc

SEQ ID NO: 540449 - RNA, 21 nt, Artificial Sequence
  Synthetic
ccaagugcugggauuacaggc

SEQ ID NO: 540450 - RNA, 22 nt, Artificial Sequence
  Synthetic
cccaagugcugggauuacaggc

SEQ ID NO: 540451 - RNA, 23 nt, Artificial Sequence
  Synthetic
ccccaagugcugggauuacaggc

SEQ ID NO: 540452 - RNA, 24 nt, Artificial Sequence
  Synthetic
uccccaagugcugggauuacaggc

SEQ ID NO: 540453 - RNA, 20 nt, Artificial Sequence
  Synthetic
gaagugcugggauuacaggc

SEQ ID NO: 540454 - RNA, 21 nt, Artificial Sequence
  Synthetic
cgaagugcugggauuacaggc

SEQ ID NO: 540455 - RNA, 22 nt, Artificial Sequence
  Synthetic
ccgaagugcugggauuacaggc

SEQ ID NO: 540456 - RNA, 23 nt, Artificial Sequence
  Synthetic
cccgaagugcugggauuacaggc

SEQ ID NO: 540457 - RNA, 24 nt, Artificial Sequence
  Synthetic
ucccgaagugcugggauuacaggc

SEQ ID NO: 540458 - RNA, 24 nt, Artificial Sequence
  Synthetic
ucccagagugcugggauuacaggc

SEQ ID NO: 540459 - RNA, 18 nt, Artificial Sequence
  Synthetic
auugcugggauuacaggc

SEQ ID NO: 540460 - RNA, 19 nt, Artificial Sequence
  Synthetic
aauugcugggauuacaggc

SEQ ID NO: 540461 - RNA, 20 nt, Artificial Sequence
  Synthetic
aaauugcugggauuacaggc

SEQ ID NO: 540462 - RNA, 21 nt, Artificial Sequence
  Synthetic
caaauugcugggauuacaggc

SEQ ID NO: 540463 - RNA, 22 nt, Artificial Sequence
  Synthetic
ucaaauugcugggauuacaggc

SEQ ID NO: 540464 - RNA, 23 nt, Artificial Sequence
  Synthetic
cucaaauugcugggauuacaggc

SEQ ID NO: 540465 - RNA, 24 nt, Artificial Sequence
  Synthetic
ucucaaauugcugggauuacaggc

SEQ ID NO: 540466 - RNA, 18 nt, Artificial Sequence
  Synthetic
auccuugggauuacaggc

SEQ ID NO: 540467 - RNA, 19 nt, Artificial Sequence
  Synthetic
aauccuugggauuacaggc

SEQ ID NO: 540468 - RNA, 20 nt, Artificial Sequence
  Synthetic
aaauccuugggauuacaggc

SEQ ID NO: 540469 - RNA, 21 nt, Artificial Sequence
  Synthetic
caaauccuugggauuacaggc

SEQ ID NO: 540470 - RNA, 22 nt, Artificial Sequence
  Synthetic
ccaaauccuugggauuacaggc

SEQ ID NO: 540471 - RNA, 23 nt, Artificial Sequence
  Synthetic
cccaaauccuugggauuacaggc

SEQ ID NO: 540472 - RNA, 24 nt, Artificial Sequence
  Synthetic
ucccaaauccuugggauuacaggc

SEQ ID NO: 540473 - RNA, 18 nt, Artificial Sequence
  Synthetic
aguguugggauuacaggc

SEQ ID NO: 540474 - RNA, 19 nt, Artificial Sequence
  Synthetic
aaguguugggauuacaggc

SEQ ID NO: 540475 - RNA, 20 nt, Artificial Sequence
  Synthetic
aaaguguugggauuacaggc

SEQ ID NO: 540476 - RNA, 21 nt, Artificial Sequence
  Synthetic
caaaguguugggauuacaggc

SEQ ID NO: 540477 - RNA, 22 nt, Artificial Sequence
  Synthetic
ccaaaguguugggauuacaggc

SEQ ID NO: 540478 - RNA, 23 nt, Artificial Sequence
  Synthetic
cccaaaguguugggauuacaggc

SEQ ID NO: 540479 - RNA, 24 nt, Artificial Sequence
  Synthetic
ccccaaaguguugggauuacaggc

SEQ ID NO: 540480 - RNA, 18 nt, Artificial Sequence
  Synthetic
agugcuuggauuacaggc

SEQ ID NO: 540481 - RNA, 19 nt, Artificial Sequence
  Synthetic
aagugcuuggauuacaggc

SEQ ID NO: 540482 - RNA, 20 nt, Artificial Sequence
  Synthetic
aaagugcuuggauuacaggc

SEQ ID NO: 540483 - RNA, 21 nt, Artificial Sequence
  Synthetic
caaagugcuuggauuacaggc

SEQ ID NO: 540484 - RNA, 22 nt, Artificial Sequence
  Synthetic
ccaaagugcuuggauuacaggc

SEQ ID NO: 540485 - RNA, 23 nt, Artificial Sequence
  Synthetic
cccaaagugcuuggauuacaggc

SEQ ID NO: 540486 - RNA, 24 nt, Artificial Sequence
  Synthetic
ucccaaagugcuuggauuacaggc

SEQ ID NO: 540487 - RNA, 24 nt, Artificial Sequence
  Synthetic
ucccaaagugcugguauuacaggc

SEQ ID NO: 540488 - RNA, 18 nt, Artificial Sequence
  Synthetic
agugcugggguuacaggc

SEQ ID NO: 540489 - RNA, 19 nt, Artificial Sequence
  Synthetic
aagugcugggguuacaggc

SEQ ID NO: 540490 - RNA, 20 nt, Artificial Sequence
  Synthetic
aaagugcugggguuacaggc

SEQ ID NO: 540491 - RNA, 21 nt, Artificial Sequence
  Synthetic
caaagugcugggguuacaggc

SEQ ID NO: 540492 - RNA, 22 nt, Artificial Sequence
  Synthetic
ccaaagugcugggguuacaggc

SEQ ID NO: 540493 - RNA, 23 nt, Artificial Sequence
  Synthetic
cccaaagugcugggguuacaggc

SEQ ID NO: 540494 - RNA, 24 nt, Artificial Sequence
  Synthetic
ucccaaagugcugggguuacaggc

SEQ ID NO: 540495 - RNA, 18 nt, Artificial Sequence
  Synthetic
uucucccauuuuacaggc

SEQ ID NO: 540496 - RNA, 19 nt, Artificial Sequence
  Synthetic
uuucucccauuuuacaggc

SEQ ID NO: 540497 - RNA, 20 nt, Artificial Sequence
  Synthetic
auuucucccauuuuacaggc

SEQ ID NO: 540498 - RNA, 21 nt, Artificial Sequence
  Synthetic
cauuucucccauuuuacaggc

SEQ ID NO: 540499 - RNA, 22 nt, Artificial Sequence
  Synthetic
acauuucucccauuuuacaggc

SEQ ID NO: 540500 - RNA, 23 nt, Artificial Sequence
  Synthetic
uacauuucucccauuuuacaggc

SEQ ID NO: 540501 - RNA, 24 nt, Artificial Sequence
  Synthetic
auacauuucucccauuuuacaggc

SEQ ID NO: 540502 - RNA, 18 nt, Artificial Sequence
  Synthetic
ugcgccacugcaccaggc

SEQ ID NO: 540503 - RNA, 19 nt, Artificial Sequence
  Synthetic
cugcgccacugcaccaggc

SEQ ID NO: 540504 - RNA, 20 nt, Artificial Sequence
  Synthetic
gcugcgccacugcaccaggc

SEQ ID NO: 540505 - RNA, 21 nt, Artificial Sequence
  Synthetic
ggcugcgccacugcaccaggc

SEQ ID NO: 540506 - RNA, 22 nt, Artificial Sequence
  Synthetic
aggcugcgccacugcaccaggc

SEQ ID NO: 540507 - RNA, 23 nt, Artificial Sequence
  Synthetic
caggcugcgccacugcaccaggc

SEQ ID NO: 540508 - RNA, 24 nt, Artificial Sequence
  Synthetic
acaggcugcgccacugcaccaggc

SEQ ID NO: 540509 - RNA, 18 nt, Artificial Sequence
  Synthetic
uuucuaaguggaccaggc

SEQ ID NO: 540510 - RNA, 19 nt, Artificial Sequence
  Synthetic
cuuucuaaguggaccaggc

SEQ ID NO: 540511 - RNA, 20 nt, Artificial Sequence
  Synthetic
acuuucuaaguggaccaggc

SEQ ID NO: 540512 - RNA, 21 nt, Artificial Sequence
  Synthetic
gacuuucuaaguggaccaggc

SEQ ID NO: 540513 - RNA, 22 nt, Artificial Sequence
  Synthetic
agacuuucuaaguggaccaggc

SEQ ID NO: 540514 - RNA, 23 nt, Artificial Sequence
  Synthetic
uagacuuucuaaguggaccaggc

SEQ ID NO: 540515 - RNA, 24 nt, Artificial Sequence
  Synthetic
guagacuuucuaaguggaccaggc

SEQ ID NO: 540516 - RNA, 21 nt, Artificial Sequence
  Synthetic
gucucacucugucacccaggc

SEQ ID NO: 540517 - RNA, 22 nt, Artificial Sequence
  Synthetic
ggucucacucugucacccaggc

SEQ ID NO: 540518 - RNA, 23 nt, Artificial Sequence
  Synthetic
gggucucacucugucacccaggc

SEQ ID NO: 540519 - RNA, 24 nt, Artificial Sequence
  Synthetic
agggucucacucugucacccaggc

SEQ ID NO: 540520 - RNA, 21 nt, Artificial Sequence
  Synthetic
gucucgcucugucacccaggc

SEQ ID NO: 540521 - RNA, 22 nt, Artificial Sequence
  Synthetic
agucucgcucugucacccaggc

SEQ ID NO: 540522 - RNA, 23 nt, Artificial Sequence
  Synthetic
gagucucgcucugucacccaggc

SEQ ID NO: 540523 - RNA, 24 nt, Artificial Sequence
  Synthetic
agagucucgcucugucacccaggc

SEQ ID NO: 540524 - RNA, 18 nt, Artificial Sequence
  Synthetic
agaaccauaaccccaggc

SEQ ID NO: 540525 - RNA, 19 nt, Artificial Sequence
  Synthetic
gagaaccauaaccccaggc

SEQ ID NO: 540526 - RNA, 20 nt, Artificial Sequence
  Synthetic
ugagaaccauaaccccaggc

SEQ ID NO: 540527 - RNA, 21 nt, Artificial Sequence
  Synthetic
augagaaccauaaccccaggc

SEQ ID NO: 540528 - RNA, 22 nt, Artificial Sequence
  Synthetic
aaugagaaccauaaccccaggc

SEQ ID NO: 540529 - RNA, 23 nt, Artificial Sequence
  Synthetic
caaugagaaccauaaccccaggc

SEQ ID NO: 540530 - RNA, 24 nt, Artificial Sequence
  Synthetic
ucaaugagaaccauaaccccaggc

SEQ ID NO: 540531 - RNA, 21 nt, Artificial Sequence
  Synthetic
gucuugcucuguugcccaggc

SEQ ID NO: 540532 - RNA, 22 nt, Artificial Sequence
  Synthetic
agucuugcucuguugcccaggc

SEQ ID NO: 540533 - RNA, 23 nt, Artificial Sequence
  Synthetic
gagucuugcucuguugcccaggc

SEQ ID NO: 540534 - RNA, 24 nt, Artificial Sequence
  Synthetic
agagucuugcucuguugcccaggc

SEQ ID NO: 540535 - RNA, 21 nt, Artificial Sequence
  Synthetic
uuucacucuuguugcccaggc

SEQ ID NO: 540536 - RNA, 22 nt, Artificial Sequence
  Synthetic
guuucacucuuguugcccaggc

SEQ ID NO: 540537 - RNA, 23 nt, Artificial Sequence
  Synthetic
aguuucacucuuguugcccaggc

SEQ ID NO: 540538 - RNA, 24 nt, Artificial Sequence
  Synthetic
gaguuucacucuuguugcccaggc

SEQ ID NO: 540539 - RNA, 18 nt, Artificial Sequence
  Synthetic
uuacaaaaggagccaggc

SEQ ID NO: 540540 - RNA, 19 nt, Artificial Sequence
  Synthetic
uuuacaaaaggagccaggc

SEQ ID NO: 540541 - RNA, 20 nt, Artificial Sequence
  Synthetic
cuuuacaaaaggagccaggc

SEQ ID NO: 540542 - RNA, 21 nt, Artificial Sequence
  Synthetic
ucuuuacaaaaggagccaggc

SEQ ID NO: 540543 - RNA, 22 nt, Artificial Sequence
  Synthetic
uucuuuacaaaaggagccaggc

SEQ ID NO: 540544 - RNA, 23 nt, Artificial Sequence
  Synthetic
cuucuuuacaaaaggagccaggc

SEQ ID NO: 540545 - RNA, 24 nt, Artificial Sequence
  Synthetic
ccuucuuuacaaaaggagccaggc

SEQ ID NO: 540546 - RNA, 18 nt, Artificial Sequence
  Synthetic
acagauagauagccaggc

SEQ ID NO: 540547 - RNA, 19 nt, Artificial Sequence
  Synthetic
uacagauagauagccaggc

SEQ ID NO: 540548 - RNA, 20 nt, Artificial Sequence
  Synthetic
auacagauagauagccaggc

SEQ ID NO: 540549 - RNA, 21 nt, Artificial Sequence
  Synthetic
aauacagauagauagccaggc

SEQ ID NO: 540550 - RNA, 22 nt, Artificial Sequence
  Synthetic
aaauacagauagauagccaggc

SEQ ID NO: 540551 - RNA, 23 nt, Artificial Sequence
  Synthetic
aaaauacagauagauagccaggc

SEQ ID NO: 540552 - RNA, 24 nt, Artificial Sequence
  Synthetic
aaaaauacagauagauagccaggc

SEQ ID NO: 540553 - RNA, 18 nt, Artificial Sequence
  Synthetic
ucuucagagccagcaggc

SEQ ID NO: 540554 - RNA, 19 nt, Artificial Sequence
  Synthetic
cucuucagagccagcaggc

SEQ ID NO: 540555 - RNA, 20 nt, Artificial Sequence
  Synthetic
ucucuucagagccagcaggc

SEQ ID NO: 540556 - RNA, 21 nt, Artificial Sequence
  Synthetic
cucucuucagagccagcaggc

SEQ ID NO: 540557 - RNA, 22 nt, Artificial Sequence
  Synthetic
gcucucuucagagccagcaggc

SEQ ID NO: 540558 - RNA, 23 nt, Artificial Sequence
  Synthetic
ugcucucuucagagccagcaggc

SEQ ID NO: 540559 - RNA, 24 nt, Artificial Sequence
  Synthetic
cugcucucuucagagccagcaggc

SEQ ID NO: 540560 - RNA, 18 nt, Artificial Sequence
  Synthetic
gcuugcuauagggcaggc

SEQ ID NO: 540561 - RNA, 19 nt, Artificial Sequence
  Synthetic
ggcuugcuauagggcaggc

SEQ ID NO: 540562 - RNA, 20 nt, Artificial Sequence
  Synthetic
gggcuugcuauagggcaggc

SEQ ID NO: 540563 - RNA, 21 nt, Artificial Sequence
  Synthetic
ggggcuugcuauagggcaggc

SEQ ID NO: 540564 - RNA, 22 nt, Artificial Sequence
  Synthetic
aggggcuugcuauagggcaggc

SEQ ID NO: 540565 - RNA, 23 nt, Artificial Sequence
  Synthetic
gaggggcuugcuauagggcaggc

SEQ ID NO: 540566 - RNA, 24 nt, Artificial Sequence
  Synthetic
ggaggggcuugcuauagggcaggc

SEQ ID NO: 540567 - RNA, 18 nt, Artificial Sequence
  Synthetic
agcgcugggagugcaggc

SEQ ID NO: 540568 - RNA, 19 nt, Artificial Sequence
  Synthetic
aagcgcugggagugcaggc

SEQ ID NO: 540569 - RNA, 20 nt, Artificial Sequence
  Synthetic
aaagcgcugggagugcaggc

SEQ ID NO: 540570 - RNA, 21 nt, Artificial Sequence
  Synthetic
caaagcgcugggagugcaggc

SEQ ID NO: 540571 - RNA, 22 nt, Artificial Sequence
  Synthetic
ccaaagcgcugggagugcaggc

SEQ ID NO: 540572 - RNA, 23 nt, Artificial Sequence
  Synthetic
cccaaagcgcugggagugcaggc

SEQ ID NO: 540573 - RNA, 24 nt, Artificial Sequence
  Synthetic
ucccaaagcgcugggagugcaggc

SEQ ID NO: 540574 - RNA, 18 nt, Artificial Sequence
  Synthetic
ugugcugggauugcaggc

SEQ ID NO: 540575 - RNA, 19 nt, Artificial Sequence
  Synthetic
augugcugggauugcaggc

SEQ ID NO: 540576 - RNA, 20 nt, Artificial Sequence
  Synthetic
aaugugcugggauugcaggc

SEQ ID NO: 540577 - RNA, 21 nt, Artificial Sequence
  Synthetic
caaugugcugggauugcaggc

SEQ ID NO: 540578 - RNA, 22 nt, Artificial Sequence
  Synthetic
ccaaugugcugggauugcaggc

SEQ ID NO: 540579 - RNA, 23 nt, Artificial Sequence
  Synthetic
cccaaugugcugggauugcaggc

SEQ ID NO: 540580 - RNA, 24 nt, Artificial Sequence
  Synthetic
ucccaaugugcugggauugcaggc

SEQ ID NO: 540581 - RNA, 20 nt, Artificial Sequence
  Synthetic
ccuggccagggcaaucaggc

SEQ ID NO: 540582 - RNA, 21 nt, Artificial Sequence
  Synthetic
uccuggccagggcaaucaggc

SEQ ID NO: 540583 - RNA, 22 nt, Artificial Sequence
  Synthetic
guccuggccagggcaaucaggc

SEQ ID NO: 540584 - RNA, 23 nt, Artificial Sequence
  Synthetic
aguccuggccagggcaaucaggc

SEQ ID NO: 540585 - RNA, 24 nt, Artificial Sequence
  Synthetic
aaguccuggccagggcaaucaggc

SEQ ID NO: 540586 - RNA, 21 nt, Artificial Sequence
  Synthetic
uucuggccagggcaaucaggc

SEQ ID NO: 540587 - RNA, 22 nt, Artificial Sequence
  Synthetic
guucuggccagggcaaucaggc

SEQ ID NO: 540588 - RNA, 23 nt, Artificial Sequence
  Synthetic
aguucuggccagggcaaucaggc

SEQ ID NO: 540589 - RNA, 24 nt, Artificial Sequence
  Synthetic
aaguucuggccagggcaaucaggc

SEQ ID NO: 540590 - RNA, 18 nt, Artificial Sequence
  Synthetic
uggccagggcgaucaggc

SEQ ID NO: 540591 - RNA, 19 nt, Artificial Sequence
  Synthetic
cuggccagggcgaucaggc

SEQ ID NO: 540592 - RNA, 20 nt, Artificial Sequence
  Synthetic
ucuggccagggcgaucaggc

SEQ ID NO: 540593 - RNA, 21 nt, Artificial Sequence
  Synthetic
uucuggccagggcgaucaggc

SEQ ID NO: 540594 - RNA, 22 nt, Artificial Sequence
  Synthetic
guucuggccagggcgaucaggc

SEQ ID NO: 540595 - RNA, 23 nt, Artificial Sequence
  Synthetic
aguucuggccagggcgaucaggc

SEQ ID NO: 540596 - RNA, 24 nt, Artificial Sequence
  Synthetic
aaguucuggccagggcgaucaggc

SEQ ID NO: 540597 - RNA, 18 nt, Artificial Sequence
  Synthetic
uuuccauauuucucaggc

SEQ ID NO: 540598 - RNA, 19 nt, Artificial Sequence
  Synthetic
auuuccauauuucucaggc

SEQ ID NO: 540599 - RNA, 20 nt, Artificial Sequence
  Synthetic
aauuuccauauuucucaggc

SEQ ID NO: 540600 - RNA, 21 nt, Artificial Sequence
  Synthetic
aaauuuccauauuucucaggc

SEQ ID NO: 540601 - RNA, 22 nt, Artificial Sequence
  Synthetic
caaauuuccauauuucucaggc

SEQ ID NO: 540602 - RNA, 23 nt, Artificial Sequence
  Synthetic
ccaaauuuccauauuucucaggc

SEQ ID NO: 540603 - RNA, 24 nt, Artificial Sequence
  Synthetic
gccaaauuuccauauuucucaggc

SEQ ID NO: 540604 - RNA, 18 nt, Artificial Sequence
  Synthetic
gcagcaguuacgucaggc

SEQ ID NO: 540605 - RNA, 19 nt, Artificial Sequence
  Synthetic
ugcagcaguuacgucaggc

SEQ ID NO: 540606 - RNA, 20 nt, Artificial Sequence
  Synthetic
augcagcaguuacgucaggc

SEQ ID NO: 540607 - RNA, 21 nt, Artificial Sequence
  Synthetic
aaugcagcaguuacgucaggc

SEQ ID NO: 540608 - RNA, 22 nt, Artificial Sequence
  Synthetic
caaugcagcaguuacgucaggc

SEQ ID NO: 540609 - RNA, 23 nt, Artificial Sequence
  Synthetic
acaaugcagcaguuacgucaggc

SEQ ID NO: 540610 - RNA, 24 nt, Artificial Sequence
  Synthetic
uacaaugcagcaguuacgucaggc

SEQ ID NO: 540611 - RNA, 18 nt, Artificial Sequence
  Synthetic
aaugaacauauuucaggc

SEQ ID NO: 540612 - RNA, 19 nt, Artificial Sequence
  Synthetic
aaaugaacauauuucaggc

SEQ ID NO: 540613 - RNA, 20 nt, Artificial Sequence
  Synthetic
uaaaugaacauauuucaggc

SEQ ID NO: 540614 - RNA, 21 nt, Artificial Sequence
  Synthetic
guaaaugaacauauuucaggc

SEQ ID NO: 540615 - RNA, 22 nt, Artificial Sequence
  Synthetic
aguaaaugaacauauuucaggc

SEQ ID NO: 540616 - RNA, 23 nt, Artificial Sequence
  Synthetic
aaguaaaugaacauauuucaggc

SEQ ID NO: 540617 - RNA, 24 nt, Artificial Sequence
  Synthetic
aaaguaaaugaacauauuucaggc

SEQ ID NO: 540618 - RNA, 18 nt, Artificial Sequence
  Synthetic
ccucaaucuagaagaggc

SEQ ID NO: 540619 - RNA, 19 nt, Artificial Sequence
  Synthetic
gccucaaucuagaagaggc

SEQ ID NO: 540620 - RNA, 20 nt, Artificial Sequence
  Synthetic
ugccucaaucuagaagaggc

SEQ ID NO: 540621 - RNA, 21 nt, Artificial Sequence
  Synthetic
gugccucaaucuagaagaggc

SEQ ID NO: 540622 - RNA, 22 nt, Artificial Sequence
  Synthetic
ugugccucaaucuagaagaggc

SEQ ID NO: 540623 - RNA, 23 nt, Artificial Sequence
  Synthetic
augugccucaaucuagaagaggc

SEQ ID NO: 540624 - RNA, 24 nt, Artificial Sequence
  Synthetic
aaugugccucaaucuagaagaggc

SEQ ID NO: 540625 - RNA, 18 nt, Artificial Sequence
  Synthetic
cuacauagaggaagaggc

SEQ ID NO: 540626 - RNA, 19 nt, Artificial Sequence
  Synthetic
ucuacauagaggaagaggc

SEQ ID NO: 540627 - RNA, 20 nt, Artificial Sequence
  Synthetic
gucuacauagaggaagaggc

SEQ ID NO: 540628 - RNA, 21 nt, Artificial Sequence
  Synthetic
agucuacauagaggaagaggc

SEQ ID NO: 540629 - RNA, 22 nt, Artificial Sequence
  Synthetic
gagucuacauagaggaagaggc

SEQ ID NO: 540630 - RNA, 23 nt, Artificial Sequence
  Synthetic
ggagucuacauagaggaagaggc

SEQ ID NO: 540631 - RNA, 24 nt, Artificial Sequence
  Synthetic
uggagucuacauagaggaagaggc

SEQ ID NO: 540632 - RNA, 18 nt, Artificial Sequence
  Synthetic
ggacagcauggaagaggc

SEQ ID NO: 540633 - RNA, 19 nt, Artificial Sequence
  Synthetic
gggacagcauggaagaggc

SEQ ID NO: 540634 - RNA, 20 nt, Artificial Sequence
  Synthetic
agggacagcauggaagaggc

SEQ ID NO: 540635 - RNA, 21 nt, Artificial Sequence
  Synthetic
cagggacagcauggaagaggc

SEQ ID NO: 540636 - RNA, 22 nt, Artificial Sequence
  Synthetic
ucagggacagcauggaagaggc

SEQ ID NO: 540637 - RNA, 23 nt, Artificial Sequence
  Synthetic
cucagggacagcauggaagaggc

SEQ ID NO: 540638 - RNA, 24 nt, Artificial Sequence
  Synthetic
acucagggacagcauggaagaggc

SEQ ID NO: 540639 - RNA, 18 nt, Artificial Sequence
  Synthetic
ccagaagcuggaagaggc

SEQ ID NO: 540640 - RNA, 19 nt, Artificial Sequence
  Synthetic
accagaagcuggaagaggc

SEQ ID NO: 540641 - RNA, 20 nt, Artificial Sequence
  Synthetic
uaccagaagcuggaagaggc

SEQ ID NO: 540642 - RNA, 21 nt, Artificial Sequence
  Synthetic
cuaccagaagcuggaagaggc

SEQ ID NO: 540643 - RNA, 22 nt, Artificial Sequence
  Synthetic
gcuaccagaagcuggaagaggc

SEQ ID NO: 540644 - RNA, 23 nt, Artificial Sequence
  Synthetic
ggcuaccagaagcuggaagaggc

SEQ ID NO: 540645 - RNA, 24 nt, Artificial Sequence
  Synthetic
gggcuaccagaagcuggaagaggc

SEQ ID NO: 540646 - RNA, 18 nt, Artificial Sequence
  Synthetic
caggaugagauaagaggc

SEQ ID NO: 540647 - RNA, 19 nt, Artificial Sequence
  Synthetic
acaggaugagauaagaggc

SEQ ID NO: 540648 - RNA, 20 nt, Artificial Sequence
  Synthetic
cacaggaugagauaagaggc

SEQ ID NO: 540649 - RNA, 21 nt, Artificial Sequence
  Synthetic
ucacaggaugagauaagaggc

SEQ ID NO: 540650 - RNA, 22 nt, Artificial Sequence
  Synthetic
gucacaggaugagauaagaggc

SEQ ID NO: 540651 - RNA, 23 nt, Artificial Sequence
  Synthetic
agucacaggaugagauaagaggc

SEQ ID NO: 540652 - RNA, 24 nt, Artificial Sequence
  Synthetic
uagucacaggaugagauaagaggc

SEQ ID NO: 540653 - RNA, 18 nt, Artificial Sequence
  Synthetic
auggaacagaacagaggc

SEQ ID NO: 540654 - RNA, 19 nt, Artificial Sequence
  Synthetic
aauggaacagaacagaggc

SEQ ID NO: 540655 - RNA, 20 nt, Artificial Sequence
  Synthetic
caauggaacagaacagaggc

SEQ ID NO: 540656 - RNA, 21 nt, Artificial Sequence
  Synthetic
ccaauggaacagaacagaggc

SEQ ID NO: 540657 - RNA, 22 nt, Artificial Sequence
  Synthetic
accaauggaacagaacagaggc

SEQ ID NO: 540658 - RNA, 23 nt, Artificial Sequence
  Synthetic
gaccaauggaacagaacagaggc

SEQ ID NO: 540659 - RNA, 24 nt, Artificial Sequence
  Synthetic
agaccaauggaacagaacagaggc

SEQ ID NO: 540660 - RNA, 18 nt, Artificial Sequence
  Synthetic
cuacuggaagacagaggc

SEQ ID NO: 540661 - RNA, 19 nt, Artificial Sequence
  Synthetic
gcuacuggaagacagaggc

SEQ ID NO: 540662 - RNA, 20 nt, Artificial Sequence
  Synthetic
agcuacuggaagacagaggc

SEQ ID NO: 540663 - RNA, 21 nt, Artificial Sequence
  Synthetic
cagcuacuggaagacagaggc

SEQ ID NO: 540664 - RNA, 22 nt, Artificial Sequence
  Synthetic
ccagcuacuggaagacagaggc

SEQ ID NO: 540665 - RNA, 23 nt, Artificial Sequence
  Synthetic
cccagcuacuggaagacagaggc

SEQ ID NO: 540666 - RNA, 24 nt, Artificial Sequence
  Synthetic
ucccagcuacuggaagacagaggc

SEQ ID NO: 540667 - RNA, 18 nt, Artificial Sequence
  Synthetic
uuuauagauaccagaggc

SEQ ID NO: 540668 - RNA, 19 nt, Artificial Sequence
  Synthetic
uuuuauagauaccagaggc

SEQ ID NO: 540669 - RNA, 20 nt, Artificial Sequence
  Synthetic
uuuuuauagauaccagaggc

SEQ ID NO: 540670 - RNA, 21 nt, Artificial Sequence
  Synthetic
uuuuuuauagauaccagaggc

SEQ ID NO: 540671 - RNA, 22 nt, Artificial Sequence
  Synthetic
uuuuuuuauagauaccagaggc

SEQ ID NO: 540672 - RNA, 23 nt, Artificial Sequence
  Synthetic
uuuuuuuuauagauaccagaggc

SEQ ID NO: 540673 - RNA, 24 nt, Artificial Sequence
  Synthetic
uuuuuuuuuauagauaccagaggc

SEQ ID NO: 540674 - RNA, 18 nt, Artificial Sequence
  Synthetic
aagguaguugccagaggc

SEQ ID NO: 540675 - RNA, 19 nt, Artificial Sequence
  Synthetic
aaagguaguugccagaggc

SEQ ID NO: 540676 - RNA, 20 nt, Artificial Sequence
  Synthetic
gaaagguaguugccagaggc

SEQ ID NO: 540677 - RNA, 21 nt, Artificial Sequence
  Synthetic
agaaagguaguugccagaggc

SEQ ID NO: 540678 - RNA, 22 nt, Artificial Sequence
  Synthetic
uagaaagguaguugccagaggc

SEQ ID NO: 540679 - RNA, 23 nt, Artificial Sequence
  Synthetic
guagaaagguaguugccagaggc

SEQ ID NO: 540680 - RNA, 24 nt, Artificial Sequence
  Synthetic
aguagaaagguaguugccagaggc

SEQ ID NO: 540681 - RNA, 18 nt, Artificial Sequence
  Synthetic
gucagaaguuccagaggc

SEQ ID NO: 540682 - RNA, 19 nt, Artificial Sequence
  Synthetic
ggucagaaguuccagaggc

SEQ ID NO: 540683 - RNA, 20 nt, Artificial Sequence
  Synthetic
gggucagaaguuccagaggc

SEQ ID NO: 540684 - RNA, 21 nt, Artificial Sequence
  Synthetic
ugggucagaaguuccagaggc

SEQ ID NO: 540685 - RNA, 22 nt, Artificial Sequence
  Synthetic
augggucagaaguuccagaggc

SEQ ID NO: 540686 - RNA, 23 nt, Artificial Sequence
  Synthetic
caugggucagaaguuccagaggc

SEQ ID NO: 540687 - RNA, 24 nt, Artificial Sequence
  Synthetic
ccaugggucagaaguuccagaggc

SEQ ID NO: 540688 - RNA, 18 nt, Artificial Sequence
  Synthetic
aguaacacaagcagaggc

SEQ ID NO: 540689 - RNA, 19 nt, Artificial Sequence
  Synthetic
aaguaacacaagcagaggc

SEQ ID NO: 540690 - RNA, 20 nt, Artificial Sequence
  Synthetic
gaaguaacacaagcagaggc

SEQ ID NO: 540691 - RNA, 21 nt, Artificial Sequence
  Synthetic
agaaguaacacaagcagaggc

SEQ ID NO: 540692 - RNA, 22 nt, Artificial Sequence
  Synthetic
uagaaguaacacaagcagaggc

SEQ ID NO: 540693 - RNA, 23 nt, Artificial Sequence
  Synthetic
cuagaaguaacacaagcagaggc

SEQ ID NO: 540694 - RNA, 24 nt, Artificial Sequence
  Synthetic
acuagaaguaacacaagcagaggc

SEQ ID NO: 540695 - RNA, 18 nt, Artificial Sequence
  Synthetic
aggcagggaaucagaggc

SEQ ID NO: 540696 - RNA, 19 nt, Artificial Sequence
  Synthetic
caggcagggaaucagaggc

SEQ ID NO: 540697 - RNA, 20 nt, Artificial Sequence
  Synthetic
ccaggcagggaaucagaggc

SEQ ID NO: 540698 - RNA, 21 nt, Artificial Sequence
  Synthetic
accaggcagggaaucagaggc

SEQ ID NO: 540699 - RNA, 22 nt, Artificial Sequence
  Synthetic
gaccaggcagggaaucagaggc

SEQ ID NO: 540700 - RNA, 23 nt, Artificial Sequence
  Synthetic
ggaccaggcagggaaucagaggc

SEQ ID NO: 540701 - RNA, 24 nt, Artificial Sequence
  Synthetic
uggaccaggcagggaaucagaggc

SEQ ID NO: 540702 - RNA, 18 nt, Artificial Sequence
  Synthetic
ucgaaagccaagagaggc

SEQ ID NO: 540703 - RNA, 19 nt, Artificial Sequence
  Synthetic
gucgaaagccaagagaggc

SEQ ID NO: 540704 - RNA, 20 nt, Artificial Sequence
  Synthetic
ugucgaaagccaagagaggc

SEQ ID NO: 540705 - RNA, 21 nt, Artificial Sequence
  Synthetic
augucgaaagccaagagaggc

SEQ ID NO: 540706 - RNA, 22 nt, Artificial Sequence
  Synthetic
caugucgaaagccaagagaggc

SEQ ID NO: 540707 - RNA, 23 nt, Artificial Sequence
  Synthetic
gcaugucgaaagccaagagaggc

SEQ ID NO: 540708 - RNA, 24 nt, Artificial Sequence
  Synthetic
ggcaugucgaaagccaagagaggc

SEQ ID NO: 540709 - RNA, 18 nt, Artificial Sequence
  Synthetic
aggagcaagaagagaggc

SEQ ID NO: 540710 - RNA, 19 nt, Artificial Sequence
  Synthetic
aaggagcaagaagagaggc

SEQ ID NO: 540711 - RNA, 20 nt, Artificial Sequence
  Synthetic
gaaggagcaagaagagaggc

SEQ ID NO: 540712 - RNA, 21 nt, Artificial Sequence
  Synthetic
ugaaggagcaagaagagaggc

SEQ ID NO: 540713 - RNA, 22 nt, Artificial Sequence
  Synthetic
uugaaggagcaagaagagaggc

SEQ ID NO: 540714 - RNA, 23 nt, Artificial Sequence
  Synthetic
auugaaggagcaagaagagaggc

SEQ ID NO: 540715 - RNA, 24 nt, Artificial Sequence
  Synthetic
aauugaaggagcaagaagagaggc

SEQ ID NO: 540716 - RNA, 18 nt, Artificial Sequence
  Synthetic
agcauugauaagagaggc

SEQ ID NO: 540717 - RNA, 19 nt, Artificial Sequence
  Synthetic
gagcauugauaagagaggc

SEQ ID NO: 540718 - RNA, 20 nt, Artificial Sequence
  Synthetic
ggagcauugauaagagaggc

SEQ ID NO: 540719 - RNA, 21 nt, Artificial Sequence
  Synthetic
gggagcauugauaagagaggc

SEQ ID NO: 540720 - RNA, 22 nt, Artificial Sequence
  Synthetic
agggagcauugauaagagaggc

SEQ ID NO: 540721 - RNA, 23 nt, Artificial Sequence
  Synthetic
aagggagcauugauaagagaggc

SEQ ID NO: 540722 - RNA, 24 nt, Artificial Sequence
  Synthetic
gaagggagcauugauaagagaggc

SEQ ID NO: 540723 - RNA, 18 nt, Artificial Sequence
  Synthetic
augaaauaggugagaggc

SEQ ID NO: 540724 - RNA, 19 nt, Artificial Sequence
  Synthetic
gaugaaauaggugagaggc

SEQ ID NO: 540725 - RNA, 20 nt, Artificial Sequence
  Synthetic
agaugaaauaggugagaggc

SEQ ID NO: 540726 - RNA, 21 nt, Artificial Sequence
  Synthetic
uagaugaaauaggugagaggc

SEQ ID NO: 540727 - RNA, 22 nt, Artificial Sequence
  Synthetic
auagaugaaauaggugagaggc

SEQ ID NO: 540728 - RNA, 23 nt, Artificial Sequence
  Synthetic
aauagaugaaauaggugagaggc

SEQ ID NO: 540729 - RNA, 24 nt, Artificial Sequence
  Synthetic
gaauagaugaaauaggugagaggc

SEQ ID NO: 540730 - RNA, 18 nt, Artificial Sequence
  Synthetic
uuauuacauuauagaggc

SEQ ID NO: 540731 - RNA, 19 nt, Artificial Sequence
  Synthetic
auuauuacauuauagaggc

SEQ ID NO: 540732 - RNA, 20 nt, Artificial Sequence
  Synthetic
cauuauuacauuauagaggc

SEQ ID NO: 540733 - RNA, 21 nt, Artificial Sequence
  Synthetic
acauuauuacauuauagaggc

SEQ ID NO: 540734 - RNA, 22 nt, Artificial Sequence
  Synthetic
gacauuauuacauuauagaggc

SEQ ID NO: 540735 - RNA, 23 nt, Artificial Sequence
  Synthetic
agacauuauuacauuauagaggc

SEQ ID NO: 540736 - RNA, 24 nt, Artificial Sequence
  Synthetic
aagacauuauuacauuauagaggc

SEQ ID NO: 540737 - RNA, 18 nt, Artificial Sequence
  Synthetic
ggcaagaacauuagaggc

SEQ ID NO: 540738 - RNA, 19 nt, Artificial Sequence
  Synthetic
aggcaagaacauuagaggc

SEQ ID NO: 540739 - RNA, 20 nt, Artificial Sequence
  Synthetic
gaggcaagaacauuagaggc

SEQ ID NO: 540740 - RNA, 21 nt, Artificial Sequence
  Synthetic
agaggcaagaacauuagaggc

SEQ ID NO: 540741 - RNA, 22 nt, Artificial Sequence
  Synthetic
uagaggcaagaacauuagaggc

SEQ ID NO: 540742 - RNA, 23 nt, Artificial Sequence
  Synthetic
uuagaggcaagaacauuagaggc

SEQ ID NO: 540743 - RNA, 24 nt, Artificial Sequence
  Synthetic
auuagaggcaagaacauuagaggc

SEQ ID NO: 540744 - RNA, 18 nt, Artificial Sequence
  Synthetic
aaaagguacauuagaggc

SEQ ID NO: 540745 - RNA, 19 nt, Artificial Sequence
  Synthetic
gaaaagguacauuagaggc

SEQ ID NO: 540746 - RNA, 20 nt, Artificial Sequence
  Synthetic
ugaaaagguacauuagaggc

SEQ ID NO: 540747 - RNA, 21 nt, Artificial Sequence
  Synthetic
gugaaaagguacauuagaggc

SEQ ID NO: 540748 - RNA, 22 nt, Artificial Sequence
  Synthetic
agugaaaagguacauuagaggc

SEQ ID NO: 540749 - RNA, 23 nt, Artificial Sequence
  Synthetic
cagugaaaagguacauuagaggc

SEQ ID NO: 540750 - RNA, 24 nt, Artificial Sequence
  Synthetic
gcagugaaaagguacauuagaggc

SEQ ID NO: 540751 - RNA, 18 nt, Artificial Sequence
  Synthetic
cucaauggucagcgaggc

SEQ ID NO: 540752 - RNA, 19 nt, Artificial Sequence
  Synthetic
ucucaauggucagcgaggc

SEQ ID NO: 540753 - RNA, 20 nt, Artificial Sequence
  Synthetic
uucucaauggucagcgaggc

SEQ ID NO: 540754 - RNA, 21 nt, Artificial Sequence
  Synthetic
auucucaauggucagcgaggc

SEQ ID NO: 540755 - RNA, 22 nt, Artificial Sequence
  Synthetic
cauucucaauggucagcgaggc

SEQ ID NO: 540756 - RNA, 23 nt, Artificial Sequence
  Synthetic
ccauucucaauggucagcgaggc

SEQ ID NO: 540757 - RNA, 24 nt, Artificial Sequence
  Synthetic
uccauucucaauggucagcgaggc

SEQ ID NO: 540758 - RNA, 18 nt, Artificial Sequence
  Synthetic
uaaaaaggaaaaggaggc

SEQ ID NO: 540759 - RNA, 19 nt, Artificial Sequence
  Synthetic
auaaaaaggaaaaggaggc

SEQ ID NO: 540760 - RNA, 20 nt, Artificial Sequence
  Synthetic
gauaaaaaggaaaaggaggc

SEQ ID NO: 540761 - RNA, 21 nt, Artificial Sequence
  Synthetic
agauaaaaaggaaaaggaggc

SEQ ID NO: 540762 - RNA, 22 nt, Artificial Sequence
  Synthetic
aagauaaaaaggaaaaggaggc

SEQ ID NO: 540763 - RNA, 23 nt, Artificial Sequence
  Synthetic
aaagauaaaaaggaaaaggaggc

SEQ ID NO: 540764 - RNA, 24 nt, Artificial Sequence
  Synthetic
gaaagauaaaaaggaaaaggaggc

SEQ ID NO: 540765 - RNA, 18 nt, Artificial Sequence
  Synthetic
aauggagagacaggaggc

SEQ ID NO: 540766 - RNA, 19 nt, Artificial Sequence
  Synthetic
gaauggagagacaggaggc

SEQ ID NO: 540767 - RNA, 20 nt, Artificial Sequence
  Synthetic
agaauggagagacaggaggc

SEQ ID NO: 540768 - RNA, 21 nt, Artificial Sequence
  Synthetic
aagaauggagagacaggaggc

SEQ ID NO: 540769 - RNA, 22 nt, Artificial Sequence
  Synthetic
aaagaauggagagacaggaggc

SEQ ID NO: 540770 - RNA, 23 nt, Artificial Sequence
  Synthetic
gaaagaauggagagacaggaggc

SEQ ID NO: 540771 - RNA, 24 nt, Artificial Sequence
  Synthetic
agaaagaauggagagacaggaggc

SEQ ID NO: 540772 - RNA, 18 nt, Artificial Sequence
  Synthetic
ucaacuggagcaggaggc

SEQ ID NO: 540773 - RNA, 19 nt, Artificial Sequence
  Synthetic
cucaacuggagcaggaggc

SEQ ID NO: 540774 - RNA, 20 nt, Artificial Sequence
  Synthetic
ccucaacuggagcaggaggc

SEQ ID NO: 540775 - RNA, 21 nt, Artificial Sequence
  Synthetic
uccucaacuggagcaggaggc

SEQ ID NO: 540776 - RNA, 22 nt, Artificial Sequence
  Synthetic
guccucaacuggagcaggaggc

SEQ ID NO: 540777 - RNA, 23 nt, Artificial Sequence
  Synthetic
gguccucaacuggagcaggaggc

SEQ ID NO: 540778 - RNA, 24 nt, Artificial Sequence
  Synthetic
ugguccucaacuggagcaggaggc

SEQ ID NO: 540779 - RNA, 18 nt, Artificial Sequence
  Synthetic
gucucccagucaggaggc

SEQ ID NO: 540780 - RNA, 19 nt, Artificial Sequence
  Synthetic
ugucucccagucaggaggc

SEQ ID NO: 540781 - RNA, 20 nt, Artificial Sequence
  Synthetic
gugucucccagucaggaggc

SEQ ID NO: 540782 - RNA, 21 nt, Artificial Sequence
  Synthetic
ggugucucccagucaggaggc

SEQ ID NO: 540783 - RNA, 22 nt, Artificial Sequence
  Synthetic
aggugucucccagucaggaggc

SEQ ID NO: 540784 - RNA, 23 nt, Artificial Sequence
  Synthetic
gaggugucucccagucaggaggc

SEQ ID NO: 540785 - RNA, 24 nt, Artificial Sequence
  Synthetic
ggaggugucucccagucaggaggc

SEQ ID NO: 540786 - RNA, 18 nt, Artificial Sequence
  Synthetic
accucaaagagaggaggc

SEQ ID NO: 540787 - RNA, 19 nt, Artificial Sequence
  Synthetic
aaccucaaagagaggaggc

SEQ ID NO: 540788 - RNA, 20 nt, Artificial Sequence
  Synthetic
gaaccucaaagagaggaggc

SEQ ID NO: 540789 - RNA, 21 nt, Artificial Sequence
  Synthetic
ggaaccucaaagagaggaggc

SEQ ID NO: 540790 - RNA, 22 nt, Artificial Sequence
  Synthetic
aggaaccucaaagagaggaggc

SEQ ID NO: 540791 - RNA, 23 nt, Artificial Sequence
  Synthetic
gaggaaccucaaagagaggaggc

SEQ ID NO: 540792 - RNA, 24 nt, Artificial Sequence
  Synthetic
ggaggaaccucaaagagaggaggc

SEQ ID NO: 540793 - RNA, 18 nt, Artificial Sequence
  Synthetic
aaaccaauguacggaggc

SEQ ID NO: 540794 - RNA, 19 nt, Artificial Sequence
  Synthetic
gaaaccaauguacggaggc

SEQ ID NO: 540795 - RNA, 20 nt, Artificial Sequence
  Synthetic
agaaaccaauguacggaggc

SEQ ID NO: 540796 - RNA, 21 nt, Artificial Sequence
  Synthetic
aagaaaccaauguacggaggc

SEQ ID NO: 540797 - RNA, 22 nt, Artificial Sequence
  Synthetic
uaagaaaccaauguacggaggc

SEQ ID NO: 540798 - RNA, 23 nt, Artificial Sequence
  Synthetic
cuaagaaaccaauguacggaggc

SEQ ID NO: 540799 - RNA, 24 nt, Artificial Sequence
  Synthetic
gcuaagaaaccaauguacggaggc

SEQ ID NO: 540800 - RNA, 18 nt, Artificial Sequence
  Synthetic
uucagggacuugggaggc

SEQ ID NO: 540801 - RNA, 19 nt, Artificial Sequence
  Synthetic
guucagggacuugggaggc

SEQ ID NO: 540802 - RNA, 20 nt, Artificial Sequence
  Synthetic
aguucagggacuugggaggc

SEQ ID NO: 540803 - RNA, 21 nt, Artificial Sequence
  Synthetic
caguucagggacuugggaggc

SEQ ID NO: 540804 - RNA, 22 nt, Artificial Sequence
  Synthetic
ccaguucagggacuugggaggc

SEQ ID NO: 540805 - RNA, 23 nt, Artificial Sequence
  Synthetic
uccaguucagggacuugggaggc

SEQ ID NO: 540806 - RNA, 24 nt, Artificial Sequence
  Synthetic
uuccaguucagggacuugggaggc

SEQ ID NO: 540807 - RNA, 18 nt, Artificial Sequence
  Synthetic
cucagcguuuugggaggc

SEQ ID NO: 540808 - RNA, 19 nt, Artificial Sequence
  Synthetic
ucucagcguuuugggaggc

SEQ ID NO: 540809 - RNA, 20 nt, Artificial Sequence
  Synthetic
aucucagcguuuugggaggc

SEQ ID NO: 540810 - RNA, 21 nt, Artificial Sequence
  Synthetic
aaucucagcguuuugggaggc

SEQ ID NO: 540811 - RNA, 22 nt, Artificial Sequence
  Synthetic
uaaucucagcguuuugggaggc

SEQ ID NO: 540812 - RNA, 23 nt, Artificial Sequence
  Synthetic
guaaucucagcguuuugggaggc

SEQ ID NO: 540813 - RNA, 24 nt, Artificial Sequence
  Synthetic
uguaaucucagcguuuugggaggc

SEQ ID NO: 540814 - RNA, 18 nt, Artificial Sequence
  Synthetic
gaauggaagaauggaggc

SEQ ID NO: 540815 - RNA, 19 nt, Artificial Sequence
  Synthetic
agaauggaagaauggaggc

SEQ ID NO: 540816 - RNA, 20 nt, Artificial Sequence
  Synthetic
uagaauggaagaauggaggc

SEQ ID NO: 540817 - RNA, 21 nt, Artificial Sequence
  Synthetic
uuagaauggaagaauggaggc

SEQ ID NO: 540818 - RNA, 22 nt, Artificial Sequence
  Synthetic
auuagaauggaagaauggaggc

SEQ ID NO: 540819 - RNA, 23 nt, Artificial Sequence
  Synthetic
cauuagaauggaagaauggaggc

SEQ ID NO: 540820 - RNA, 24 nt, Artificial Sequence
  Synthetic
ccauuagaauggaagaauggaggc

SEQ ID NO: 540821 - RNA, 18 nt, Artificial Sequence
  Synthetic
cauggcucugauggaggc

SEQ ID NO: 540822 - RNA, 19 nt, Artificial Sequence
  Synthetic
ucauggcucugauggaggc

SEQ ID NO: 540823 - RNA, 20 nt, Artificial Sequence
  Synthetic
aucauggcucugauggaggc

SEQ ID NO: 540824 - RNA, 21 nt, Artificial Sequence
  Synthetic
gaucauggcucugauggaggc

SEQ ID NO: 540825 - RNA, 22 nt, Artificial Sequence
  Synthetic
ugaucauggcucugauggaggc

SEQ ID NO: 540826 - RNA, 23 nt, Artificial Sequence
  Synthetic
gugaucauggcucugauggaggc

SEQ ID NO: 540827 - RNA, 24 nt, Artificial Sequence
  Synthetic
agugaucauggcucugauggaggc

SEQ ID NO: 540828 - RNA, 18 nt, Artificial Sequence
  Synthetic
cacccuccaucuggaggc

SEQ ID NO: 540829 - RNA, 19 nt, Artificial Sequence
  Synthetic
ucacccuccaucuggaggc

SEQ ID NO: 540830 - RNA, 20 nt, Artificial Sequence
  Synthetic
aucacccuccaucuggaggc

SEQ ID NO: 540831 - RNA, 21 nt, Artificial Sequence
  Synthetic
uaucacccuccaucuggaggc

SEQ ID NO: 540832 - RNA, 22 nt, Artificial Sequence
  Synthetic
cuaucacccuccaucuggaggc

SEQ ID NO: 540833 - RNA, 23 nt, Artificial Sequence
  Synthetic
gcuaucacccuccaucuggaggc

SEQ ID NO: 540834 - RNA, 24 nt, Artificial Sequence
  Synthetic
ugcuaucacccuccaucuggaggc

SEQ ID NO: 540835 - RNA, 18 nt, Artificial Sequence
  Synthetic
acucacaguucuggaggc

SEQ ID NO: 540836 - RNA, 19 nt, Artificial Sequence
  Synthetic
cacucacaguucuggaggc

SEQ ID NO: 540837 - RNA, 20 nt, Artificial Sequence
  Synthetic
ucacucacaguucuggaggc

SEQ ID NO: 540838 - RNA, 21 nt, Artificial Sequence
  Synthetic
uucacucacaguucuggaggc

SEQ ID NO: 540839 - RNA, 22 nt, Artificial Sequence
  Synthetic
auucacucacaguucuggaggc

SEQ ID NO: 540840 - RNA, 23 nt, Artificial Sequence
  Synthetic
uauucacucacaguucuggaggc

SEQ ID NO: 540841 - RNA, 24 nt, Artificial Sequence
  Synthetic
guauucacucacaguucuggaggc

SEQ ID NO: 540842 - RNA, 18 nt, Artificial Sequence
  Synthetic
gcuuauaguucuggaggc

SEQ ID NO: 540843 - RNA, 19 nt, Artificial Sequence
  Synthetic
ugcuuauaguucuggaggc

SEQ ID NO: 540844 - RNA, 20 nt, Artificial Sequence
  Synthetic
uugcuuauaguucuggaggc

SEQ ID NO: 540845 - RNA, 21 nt, Artificial Sequence
  Synthetic
auugcuuauaguucuggaggc

SEQ ID NO: 540846 - RNA, 22 nt, Artificial Sequence
  Synthetic
uauugcuuauaguucuggaggc

SEQ ID NO: 540847 - RNA, 23 nt, Artificial Sequence
  Synthetic
uuauugcuuauaguucuggaggc

SEQ ID NO: 540848 - RNA, 24 nt, Artificial Sequence
  Synthetic
uuuauugcuuauaguucuggaggc

SEQ ID NO: 540849 - RNA, 18 nt, Artificial Sequence
  Synthetic
uagaaauaacuuggaggc

SEQ ID NO: 540850 - RNA, 19 nt, Artificial Sequence
  Synthetic
auagaaauaacuuggaggc

SEQ ID NO: 540851 - RNA, 20 nt, Artificial Sequence
  Synthetic
cauagaaauaacuuggaggc

SEQ ID NO: 540852 - RNA, 21 nt, Artificial Sequence
  Synthetic
gcauagaaauaacuuggaggc

SEQ ID NO: 540853 - RNA, 22 nt, Artificial Sequence
  Synthetic
ugcauagaaauaacuuggaggc

SEQ ID NO: 540854 - RNA, 23 nt, Artificial Sequence
  Synthetic
augcauagaaauaacuuggaggc

SEQ ID NO: 540855 - RNA, 24 nt, Artificial Sequence
  Synthetic
uaugcauagaaauaacuuggaggc

SEQ ID NO: 540856 - RNA, 18 nt, Artificial Sequence
  Synthetic
ccaggacugagaugaggc

SEQ ID NO: 540857 - RNA, 19 nt, Artificial Sequence
  Synthetic
uccaggacugagaugaggc

SEQ ID NO: 540858 - RNA, 20 nt, Artificial Sequence
  Synthetic
uuccaggacugagaugaggc

SEQ ID NO: 540859 - RNA, 21 nt, Artificial Sequence
  Synthetic
uuuccaggacugagaugaggc

SEQ ID NO: 540860 - RNA, 22 nt, Artificial Sequence
  Synthetic
cuuuccaggacugagaugaggc

SEQ ID NO: 540861 - RNA, 23 nt, Artificial Sequence
  Synthetic
ucuuuccaggacugagaugaggc

SEQ ID NO: 540862 - RNA, 24 nt, Artificial Sequence
  Synthetic
aucuuuccaggacugagaugaggc

SEQ ID NO: 540863 - RNA, 18 nt, Artificial Sequence
  Synthetic
gcaggucugagaugaggc

SEQ ID NO: 540864 - RNA, 19 nt, Artificial Sequence
  Synthetic
agcaggucugagaugaggc

SEQ ID NO: 540865 - RNA, 20 nt, Artificial Sequence
  Synthetic
aagcaggucugagaugaggc

SEQ ID NO: 540866 - RNA, 21 nt, Artificial Sequence
  Synthetic
caagcaggucugagaugaggc

SEQ ID NO: 540867 - RNA, 22 nt, Artificial Sequence
  Synthetic
ucaagcaggucugagaugaggc

SEQ ID NO: 540868 - RNA, 23 nt, Artificial Sequence
  Synthetic
aucaagcaggucugagaugaggc

SEQ ID NO: 540869 - RNA, 24 nt, Artificial Sequence
  Synthetic
gaucaagcaggucugagaugaggc

SEQ ID NO: 540870 - RNA, 18 nt, Artificial Sequence
  Synthetic
auuuuaagaggaugaggc

SEQ ID NO: 540871 - RNA, 19 nt, Artificial Sequence
  Synthetic
cauuuuaagaggaugaggc

SEQ ID NO: 540872 - RNA, 20 nt, Artificial Sequence
  Synthetic
ccauuuuaagaggaugaggc

SEQ ID NO: 540873 - RNA, 21 nt, Artificial Sequence
  Synthetic
accauuuuaagaggaugaggc

SEQ ID NO: 540874 - RNA, 22 nt, Artificial Sequence
  Synthetic
caccauuuuaagaggaugaggc

SEQ ID NO: 540875 - RNA, 23 nt, Artificial Sequence
  Synthetic
ccaccauuuuaagaggaugaggc

SEQ ID NO: 540876 - RNA, 24 nt, Artificial Sequence
  Synthetic
cccaccauuuuaagaggaugaggc

SEQ ID NO: 540877 - RNA, 18 nt, Artificial Sequence
  Synthetic
uuaugaggaaacugaggc

SEQ ID NO: 540878 - RNA, 19 nt, Artificial Sequence
  Synthetic
uuuaugaggaaacugaggc

SEQ ID NO: 540879 - RNA, 20 nt, Artificial Sequence
  Synthetic
cuuuaugaggaaacugaggc

SEQ ID NO: 540880 - RNA, 21 nt, Artificial Sequence
  Synthetic
acuuuaugaggaaacugaggc

SEQ ID NO: 540881 - RNA, 22 nt, Artificial Sequence
  Synthetic
aacuuuaugaggaaacugaggc

SEQ ID NO: 540882 - RNA, 23 nt, Artificial Sequence
  Synthetic
aaacuuuaugaggaaacugaggc

SEQ ID NO: 540883 - RNA, 24 nt, Artificial Sequence
  Synthetic
aaaacuuuaugaggaaacugaggc

SEQ ID NO: 540884 - RNA, 21 nt, Artificial Sequence
  Synthetic
agcuacucgggaagcugaggc

SEQ ID NO: 540885 - RNA, 22 nt, Artificial Sequence
  Synthetic
cagcuacucgggaagcugaggc

SEQ ID NO: 540886 - RNA, 23 nt, Artificial Sequence
  Synthetic
ccagcuacucgggaagcugaggc

SEQ ID NO: 540887 - RNA, 24 nt, Artificial Sequence
  Synthetic
cccagcuacucgggaagcugaggc

SEQ ID NO: 540888 - RNA, 18 nt, Artificial Sequence
  Synthetic
uguagucccagcugaggc

SEQ ID NO: 540889 - RNA, 19 nt, Artificial Sequence
  Synthetic
cuguagucccagcugaggc

SEQ ID NO: 540890 - RNA, 20 nt, Artificial Sequence
  Synthetic
ccuguagucccagcugaggc

SEQ ID NO: 540891 - RNA, 21 nt, Artificial Sequence
  Synthetic
gccuguagucccagcugaggc

SEQ ID NO: 540892 - RNA, 22 nt, Artificial Sequence
  Synthetic
ugccuguagucccagcugaggc

SEQ ID NO: 540893 - RNA, 23 nt, Artificial Sequence
  Synthetic
gugccuguagucccagcugaggc

SEQ ID NO: 540894 - RNA, 24 nt, Artificial Sequence
  Synthetic
ggugccuguagucccagcugaggc

SEQ ID NO: 540895 - RNA, 18 nt, Artificial Sequence
  Synthetic
uacuuggaaggcugaggc

SEQ ID NO: 540896 - RNA, 19 nt, Artificial Sequence
  Synthetic
cuacuuggaaggcugaggc

SEQ ID NO: 540897 - RNA, 20 nt, Artificial Sequence
  Synthetic
gcuacuuggaaggcugaggc

SEQ ID NO: 540898 - RNA, 21 nt, Artificial Sequence
  Synthetic
agcuacuuggaaggcugaggc

SEQ ID NO: 540899 - RNA, 22 nt, Artificial Sequence
  Synthetic
cagcuacuuggaaggcugaggc

SEQ ID NO: 540900 - RNA, 23 nt, Artificial Sequence
  Synthetic
ccagcuacuuggaaggcugaggc

SEQ ID NO: 540901 - RNA, 24 nt, Artificial Sequence
  Synthetic
cccagcuacuuggaaggcugaggc

SEQ ID NO: 540902 - RNA, 18 nt, Artificial Sequence
  Synthetic
uacucaagaggcugaggc

SEQ ID NO: 540903 - RNA, 19 nt, Artificial Sequence
  Synthetic
cuacucaagaggcugaggc

SEQ ID NO: 540904 - RNA, 20 nt, Artificial Sequence
  Synthetic
gcuacucaagaggcugaggc

SEQ ID NO: 540905 - RNA, 21 nt, Artificial Sequence
  Synthetic
agcuacucaagaggcugaggc

SEQ ID NO: 540906 - RNA, 22 nt, Artificial Sequence
  Synthetic
cagcuacucaagaggcugaggc

SEQ ID NO: 540907 - RNA, 23 nt, Artificial Sequence
  Synthetic
ccagcuacucaagaggcugaggc

SEQ ID NO: 540908 - RNA, 24 nt, Artificial Sequence
  Synthetic
cccagcuacucaagaggcugaggc

SEQ ID NO: 540909 - RNA, 21 nt, Artificial Sequence
  Synthetic
agcuacucaggaggcugaggc

SEQ ID NO: 540910 - RNA, 22 nt, Artificial Sequence
  Synthetic
cagcuacucaggaggcugaggc

SEQ ID NO: 540911 - RNA, 23 nt, Artificial Sequence
  Synthetic
ccagcuacucaggaggcugaggc

SEQ ID NO: 540912 - RNA, 24 nt, Artificial Sequence
  Synthetic
cccagcuacucaggaggcugaggc

SEQ ID NO: 540913 - RNA, 23 nt, Artificial Sequence
  Synthetic
ucagcuacucaggaggcugaggc

SEQ ID NO: 540914 - RNA, 24 nt, Artificial Sequence
  Synthetic
cucagcuacucaggaggcugaggc

SEQ ID NO: 540915 - RNA, 22 nt, Artificial Sequence
  Synthetic
uagcuacucaggaggcugaggc

SEQ ID NO: 540916 - RNA, 23 nt, Artificial Sequence
  Synthetic
cuagcuacucaggaggcugaggc

SEQ ID NO: 540917 - RNA, 24 nt, Artificial Sequence
  Synthetic
ccuagcuacucaggaggcugaggc

SEQ ID NO: 540918 - RNA, 18 nt, Artificial Sequence
  Synthetic
uauucaggaggcugaggc

SEQ ID NO: 540919 - RNA, 19 nt, Artificial Sequence
  Synthetic
cuauucaggaggcugaggc

SEQ ID NO: 540920 - RNA, 20 nt, Artificial Sequence
  Synthetic
gcuauucaggaggcugaggc

SEQ ID NO: 540921 - RNA, 21 nt, Artificial Sequence
  Synthetic
agcuauucaggaggcugaggc

SEQ ID NO: 540922 - RNA, 22 nt, Artificial Sequence
  Synthetic
cagcuauucaggaggcugaggc

SEQ ID NO: 540923 - RNA, 23 nt, Artificial Sequence
  Synthetic
ccagcuauucaggaggcugaggc

SEQ ID NO: 540924 - RNA, 24 nt, Artificial Sequence
  Synthetic
cccagcuauucaggaggcugaggc

SEQ ID NO: 540925 - RNA, 18 nt, Artificial Sequence
  Synthetic
uacuucggaggcugaggc

SEQ ID NO: 540926 - RNA, 19 nt, Artificial Sequence
  Synthetic
guacuucggaggcugaggc

SEQ ID NO: 540927 - RNA, 20 nt, Artificial Sequence
  Synthetic
gguacuucggaggcugaggc

SEQ ID NO: 540928 - RNA, 21 nt, Artificial Sequence
  Synthetic
agguacuucggaggcugaggc

SEQ ID NO: 540929 - RNA, 22 nt, Artificial Sequence
  Synthetic
cagguacuucggaggcugaggc

SEQ ID NO: 540930 - RNA, 23 nt, Artificial Sequence
  Synthetic
ccagguacuucggaggcugaggc

SEQ ID NO: 540931 - RNA, 24 nt, Artificial Sequence
  Synthetic
cccagguacuucggaggcugaggc

SEQ ID NO: 540932 - RNA, 21 nt, Artificial Sequence
  Synthetic
agcuacuagggaggcugaggc

SEQ ID NO: 540933 - RNA, 22 nt, Artificial Sequence
  Synthetic
cagcuacuagggaggcugaggc

SEQ ID NO: 540934 - RNA, 23 nt, Artificial Sequence
  Synthetic
ccagcuacuagggaggcugaggc

SEQ ID NO: 540935 - RNA, 24 nt, Artificial Sequence
  Synthetic
cccagcuacuagggaggcugaggc

SEQ ID NO: 540936 - RNA, 18 nt, Artificial Sequence
  Synthetic
uacacgggaggcugaggc

SEQ ID NO: 540937 - RNA, 19 nt, Artificial Sequence
  Synthetic
cuacacgggaggcugaggc

SEQ ID NO: 540938 - RNA, 20 nt, Artificial Sequence
  Synthetic
gcuacacgggaggcugaggc

SEQ ID NO: 540939 - RNA, 21 nt, Artificial Sequence
  Synthetic
agcuacacgggaggcugaggc

SEQ ID NO: 540940 - RNA, 22 nt, Artificial Sequence
  Synthetic
cagcuacacgggaggcugaggc

SEQ ID NO: 540941 - RNA, 23 nt, Artificial Sequence
  Synthetic
ccagcuacacgggaggcugaggc

SEQ ID NO: 540942 - RNA, 24 nt, Artificial Sequence
  Synthetic
cccagcuacacgggaggcugaggc

SEQ ID NO: 540943 - RNA, 18 nt, Artificial Sequence
  Synthetic
uacucgggaggcugaggc

SEQ ID NO: 540944 - RNA, 21 nt, Artificial Sequence
  Synthetic
agcuacucgggaggcugaggc

SEQ ID NO: 540945 - RNA, 22 nt, Artificial Sequence
  Synthetic
cagcuacucgggaggcugaggc

SEQ ID NO: 540946 - RNA, 23 nt, Artificial Sequence
  Synthetic
ccagcuacucgggaggcugaggc

SEQ ID NO: 540947 - RNA, 24 nt, Artificial Sequence
  Synthetic
accagcuacucgggaggcugaggc

SEQ ID NO: 540948 - RNA, 19 nt, Artificial Sequence
  Synthetic
uuacucgggaggcugaggc

SEQ ID NO: 540949 - RNA, 20 nt, Artificial Sequence
  Synthetic
guuacucgggaggcugaggc

SEQ ID NO: 540950 - RNA, 21 nt, Artificial Sequence
  Synthetic
aguuacucgggaggcugaggc

SEQ ID NO: 540951 - RNA, 22 nt, Artificial Sequence
  Synthetic
caguuacucgggaggcugaggc

SEQ ID NO: 540952 - RNA, 23 nt, Artificial Sequence
  Synthetic
ccaguuacucgggaggcugaggc

SEQ ID NO: 540953 - RNA, 24 nt, Artificial Sequence
  Synthetic
cccaguuacucgggaggcugaggc

SEQ ID NO: 540954 - RNA, 18 nt, Artificial Sequence
  Synthetic
ugcucgggaggcugaggc

SEQ ID NO: 540955 - RNA, 19 nt, Artificial Sequence
  Synthetic
cugcucgggaggcugaggc

SEQ ID NO: 540956 - RNA, 20 nt, Artificial Sequence
  Synthetic
gcugcucgggaggcugaggc

SEQ ID NO: 540957 - RNA, 21 nt, Artificial Sequence
  Synthetic
agcugcucgggaggcugaggc

SEQ ID NO: 540958 - RNA, 22 nt, Artificial Sequence
  Synthetic
cagcugcucgggaggcugaggc

SEQ ID NO: 540959 - RNA, 23 nt, Artificial Sequence
  Synthetic
ccagcugcucgggaggcugaggc

SEQ ID NO: 540960 - RNA, 24 nt, Artificial Sequence
  Synthetic
accagcugcucgggaggcugaggc

SEQ ID NO: 540961 - RNA, 18 nt, Artificial Sequence
  Synthetic
uacgggggaggcugaggc

SEQ ID NO: 540962 - RNA, 19 nt, Artificial Sequence
  Synthetic
cuacgggggaggcugaggc

SEQ ID NO: 540963 - RNA, 20 nt, Artificial Sequence
  Synthetic
gcuacgggggaggcugaggc

SEQ ID NO: 540964 - RNA, 21 nt, Artificial Sequence
  Synthetic
agcuacgggggaggcugaggc

SEQ ID NO: 540965 - RNA, 22 nt, Artificial Sequence
  Synthetic
cagcuacgggggaggcugaggc

SEQ ID NO: 540966 - RNA, 23 nt, Artificial Sequence
  Synthetic
ccagcuacgggggaggcugaggc

SEQ ID NO: 540967 - RNA, 24 nt, Artificial Sequence
  Synthetic
cccagcuacgggggaggcugaggc

SEQ ID NO: 540968 - RNA, 23 nt, Artificial Sequence
  Synthetic
ccagcuacuugggaggcugaggc

SEQ ID NO: 540969 - RNA, 24 nt, Artificial Sequence
  Synthetic
cccagcuacuugggaggcugaggc

SEQ ID NO: 540970 - RNA, 23 nt, Artificial Sequence
  Synthetic
ucagcuacuugggaggcugaggc

SEQ ID NO: 540971 - RNA, 24 nt, Artificial Sequence
  Synthetic
cucagcuacuugggaggcugaggc

SEQ ID NO: 540972 - RNA, 18 nt, Artificial Sequence
  Synthetic
acuuugggaggcugaggc

SEQ ID NO: 540973 - RNA, 19 nt, Artificial Sequence
  Synthetic
cacuuugggaggcugaggc

SEQ ID NO: 540974 - RNA, 20 nt, Artificial Sequence
  Synthetic
gcacuuugggaggcugaggc

SEQ ID NO: 540975 - RNA, 21 nt, Artificial Sequence
  Synthetic
agcacuuugggaggcugaggc

SEQ ID NO: 540976 - RNA, 22 nt, Artificial Sequence
  Synthetic
cagcacuuugggaggcugaggc

SEQ ID NO: 540977 - RNA, 23 nt, Artificial Sequence
  Synthetic
ccagcacuuugggaggcugaggc

SEQ ID NO: 540978 - RNA, 24 nt, Artificial Sequence
  Synthetic
cccagcacuuugggaggcugaggc

SEQ ID NO: 540979 - RNA, 18 nt, Artificial Sequence
  Synthetic
cacucuggaggcugaggc

SEQ ID NO: 540980 - RNA, 19 nt, Artificial Sequence
  Synthetic
ccacucuggaggcugaggc

SEQ ID NO: 540981 - RNA, 20 nt, Artificial Sequence
  Synthetic
gccacucuggaggcugaggc

SEQ ID NO: 540982 - RNA, 21 nt, Artificial Sequence
  Synthetic
agccacucuggaggcugaggc

SEQ ID NO: 540983 - RNA, 22 nt, Artificial Sequence
  Synthetic
cagccacucuggaggcugaggc

SEQ ID NO: 540984 - RNA, 23 nt, Artificial Sequence
  Synthetic
ccagccacucuggaggcugaggc

SEQ ID NO: 540985 - RNA, 24 nt, Artificial Sequence
  Synthetic
cccagccacucuggaggcugaggc

SEQ ID NO: 540986 - RNA, 18 nt, Artificial Sequence
  Synthetic
uacucuggaggcugaggc

SEQ ID NO: 540987 - RNA, 19 nt, Artificial Sequence
  Synthetic
cuacucuggaggcugaggc

SEQ ID NO: 540988 - RNA, 20 nt, Artificial Sequence
  Synthetic
gcuacucuggaggcugaggc

SEQ ID NO: 540989 - RNA, 21 nt, Artificial Sequence
  Synthetic
agcuacucuggaggcugaggc

SEQ ID NO: 540990 - RNA, 22 nt, Artificial Sequence
  Synthetic
cagcuacucuggaggcugaggc

SEQ ID NO: 540991 - RNA, 23 nt, Artificial Sequence
  Synthetic
ccagcuacucuggaggcugaggc

SEQ ID NO: 540992 - RNA, 24 nt, Artificial Sequence
  Synthetic
cccagcuacucuggaggcugaggc

SEQ ID NO: 540993 - RNA, 21 nt, Artificial Sequence
  Synthetic
agcuacucgguaggcugaggc

SEQ ID NO: 540994 - RNA, 22 nt, Artificial Sequence
  Synthetic
cagcuacucgguaggcugaggc

SEQ ID NO: 540995 - RNA, 23 nt, Artificial Sequence
  Synthetic
ccagcuacucgguaggcugaggc

SEQ ID NO: 540996 - RNA, 24 nt, Artificial Sequence
  Synthetic
cccagcuacucgguaggcugaggc

SEQ ID NO: 540997 - RNA, 24 nt, Artificial Sequence
  Synthetic
gccagcuacucgguaggcugaggc

SEQ ID NO: 540998 - RNA, 18 nt, Artificial Sequence
  Synthetic
uacucagggggcugaggc

SEQ ID NO: 540999 - RNA, 19 nt, Artificial Sequence
  Synthetic
cuacucagggggcugaggc

SEQ ID NO: 541000 - RNA, 20 nt, Artificial Sequence
  Synthetic
gcuacucagggggcugaggc

SEQ ID NO: 541001 - RNA, 21 nt, Artificial Sequence
  Synthetic
agcuacucagggggcugaggc

SEQ ID NO: 541002 - RNA, 22 nt, Artificial Sequence
  Synthetic
cagcuacucagggggcugaggc

SEQ ID NO: 541003 - RNA, 23 nt, Artificial Sequence
  Synthetic
ccagcuacucagggggcugaggc

SEQ ID NO: 541004 - RNA, 24 nt, Artificial Sequence
  Synthetic
accagcuacucagggggcugaggc

SEQ ID NO: 541005 - RNA, 18 nt, Artificial Sequence
  Synthetic
uacucagauggcugaggc

SEQ ID NO: 541006 - RNA, 19 nt, Artificial Sequence
  Synthetic
cuacucagauggcugaggc

SEQ ID NO: 541007 - RNA, 20 nt, Artificial Sequence
  Synthetic
gcuacucagauggcugaggc

SEQ ID NO: 541008 - RNA, 21 nt, Artificial Sequence
  Synthetic
agcuacucagauggcugaggc

SEQ ID NO: 541009 - RNA, 22 nt, Artificial Sequence
  Synthetic
cagcuacucagauggcugaggc

SEQ ID NO: 541010 - RNA, 23 nt, Artificial Sequence
  Synthetic
ccagcuacucagauggcugaggc

SEQ ID NO: 541011 - RNA, 24 nt, Artificial Sequence
  Synthetic
cccagcuacucagauggcugaggc

SEQ ID NO: 541012 - RNA, 18 nt, Artificial Sequence
  Synthetic
uacuuggcagucugaggc

SEQ ID NO: 541013 - RNA, 19 nt, Artificial Sequence
  Synthetic
cuacuuggcagucugaggc

SEQ ID NO: 541014 - RNA, 20 nt, Artificial Sequence
  Synthetic
gcuacuuggcagucugaggc

SEQ ID NO: 541015 - RNA, 21 nt, Artificial Sequence
  Synthetic
agcuacuuggcagucugaggc

SEQ ID NO: 541016 - RNA, 22 nt, Artificial Sequence
  Synthetic
uagcuacuuggcagucugaggc

SEQ ID NO: 541017 - RNA, 23 nt, Artificial Sequence
  Synthetic
cuagcuacuuggcagucugaggc

SEQ ID NO: 541018 - RNA, 24 nt, Artificial Sequence
  Synthetic
ccuagcuacuuggcagucugaggc

SEQ ID NO: 541019 - RNA, 18 nt, Artificial Sequence
  Synthetic
ggguggaugacuugaggc

SEQ ID NO: 541020 - RNA, 19 nt, Artificial Sequence
  Synthetic
cggguggaugacuugaggc

SEQ ID NO: 541021 - RNA, 20 nt, Artificial Sequence
  Synthetic
ucggguggaugacuugaggc

SEQ ID NO: 541022 - RNA, 21 nt, Artificial Sequence
  Synthetic
gucggguggaugacuugaggc

SEQ ID NO: 541023 - RNA, 22 nt, Artificial Sequence
  Synthetic
agucggguggaugacuugaggc

SEQ ID NO: 541024 - RNA, 23 nt, Artificial Sequence
  Synthetic
gagucggguggaugacuugaggc

SEQ ID NO: 541025 - RNA, 24 nt, Artificial Sequence
  Synthetic
ugagucggguggaugacuugaggc

SEQ ID NO: 541026 - RNA, 18 nt, Artificial Sequence
  Synthetic
aacucuggagguugaggc

SEQ ID NO: 541027 - RNA, 19 nt, Artificial Sequence
  Synthetic
caacucuggagguugaggc

SEQ ID NO: 541028 - RNA, 20 nt, Artificial Sequence
  Synthetic
gcaacucuggagguugaggc

SEQ ID NO: 541029 - RNA, 21 nt, Artificial Sequence
  Synthetic
agcaacucuggagguugaggc

SEQ ID NO: 541030 - RNA, 22 nt, Artificial Sequence
  Synthetic
cagcaacucuggagguugaggc

SEQ ID NO: 541031 - RNA, 23 nt, Artificial Sequence
  Synthetic
ccagcaacucuggagguugaggc

SEQ ID NO: 541032 - RNA, 24 nt, Artificial Sequence
  Synthetic
cccagcaacucuggagguugaggc

SEQ ID NO: 541033 - RNA, 18 nt, Artificial Sequence
  Synthetic
ugcgcuuuuaaaauaggc

SEQ ID NO: 541034 - RNA, 19 nt, Artificial Sequence
  Synthetic
uugcgcuuuuaaaauaggc

SEQ ID NO: 541035 - RNA, 20 nt, Artificial Sequence
  Synthetic
uuugcgcuuuuaaaauaggc

SEQ ID NO: 541036 - RNA, 21 nt, Artificial Sequence
  Synthetic
uuuugcgcuuuuaaaauaggc

SEQ ID NO: 541037 - RNA, 22 nt, Artificial Sequence
  Synthetic
uuuuugcgcuuuuaaaauaggc

SEQ ID NO: 541038 - RNA, 23 nt, Artificial Sequence
  Synthetic
guuuuugcgcuuuuaaaauaggc

SEQ ID NO: 541039 - RNA, 24 nt, Artificial Sequence
  Synthetic
aguuuuugcgcuuuuaaaauaggc

SEQ ID NO: 541040 - RNA, 18 nt, Artificial Sequence
  Synthetic
ggagagggaugaauaggc

SEQ ID NO: 541041 - RNA, 19 nt, Artificial Sequence
  Synthetic
uggagagggaugaauaggc

SEQ ID NO: 541042 - RNA, 20 nt, Artificial Sequence
  Synthetic
cuggagagggaugaauaggc

SEQ ID NO: 541043 - RNA, 21 nt, Artificial Sequence
  Synthetic
acuggagagggaugaauaggc

SEQ ID NO: 541044 - RNA, 22 nt, Artificial Sequence
  Synthetic
uacuggagagggaugaauaggc

SEQ ID NO: 541045 - RNA, 23 nt, Artificial Sequence
  Synthetic
auacuggagagggaugaauaggc

SEQ ID NO: 541046 - RNA, 24 nt, Artificial Sequence
  Synthetic
cauacuggagagggaugaauaggc

SEQ ID NO: 541047 - RNA, 18 nt, Artificial Sequence
  Synthetic
caugcuuguugaauaggc

SEQ ID NO: 541048 - RNA, 19 nt, Artificial Sequence
  Synthetic
ucaugcuuguugaauaggc

SEQ ID NO: 541049 - RNA, 20 nt, Artificial Sequence
  Synthetic
cucaugcuuguugaauaggc

SEQ ID NO: 541050 - RNA, 21 nt, Artificial Sequence
  Synthetic
acucaugcuuguugaauaggc

SEQ ID NO: 541051 - RNA, 22 nt, Artificial Sequence
  Synthetic
uacucaugcuuguugaauaggc

SEQ ID NO: 541052 - RNA, 23 nt, Artificial Sequence
  Synthetic
auacucaugcuuguugaauaggc

SEQ ID NO: 541053 - RNA, 24 nt, Artificial Sequence
  Synthetic
aauacucaugcuuguugaauaggc

SEQ ID NO: 541054 - RNA, 18 nt, Artificial Sequence
  Synthetic
aagggacaacacauaggc

SEQ ID NO: 541055 - RNA, 19 nt, Artificial Sequence
  Synthetic
gaagggacaacacauaggc

SEQ ID NO: 541056 - RNA, 20 nt, Artificial Sequence
  Synthetic
cgaagggacaacacauaggc

SEQ ID NO: 541057 - RNA, 21 nt, Artificial Sequence
  Synthetic
gcgaagggacaacacauaggc

SEQ ID NO: 541058 - RNA, 22 nt, Artificial Sequence
  Synthetic
ugcgaagggacaacacauaggc

SEQ ID NO: 541059 - RNA, 23 nt, Artificial Sequence
  Synthetic
cugcgaagggacaacacauaggc

SEQ ID NO: 541060 - RNA, 24 nt, Artificial Sequence
  Synthetic
gcugcgaagggacaacacauaggc

SEQ ID NO: 541061 - RNA, 24 nt, Artificial Sequence
  Synthetic
ggcauuaccauucaggacauaggc

SEQ ID NO: 541062 - RNA, 18 nt, Artificial Sequence
  Synthetic
agugcuaggaucauaggc

SEQ ID NO: 541063 - RNA, 19 nt, Artificial Sequence
  Synthetic
aagugcuaggaucauaggc

SEQ ID NO: 541064 - RNA, 20 nt, Artificial Sequence
  Synthetic
aaagugcuaggaucauaggc

SEQ ID NO: 541065 - RNA, 21 nt, Artificial Sequence
  Synthetic
caaagugcuaggaucauaggc

SEQ ID NO: 541066 - RNA, 22 nt, Artificial Sequence
  Synthetic
ccaaagugcuaggaucauaggc

SEQ ID NO: 541067 - RNA, 23 nt, Artificial Sequence
  Synthetic
uccaaagugcuaggaucauaggc

SEQ ID NO: 541068 - RNA, 24 nt, Artificial Sequence
  Synthetic
uuccaaagugcuaggaucauaggc

SEQ ID NO: 541069 - RNA, 18 nt, Artificial Sequence
  Synthetic
auacuaaaauucauaggc

SEQ ID NO: 541070 - RNA, 19 nt, Artificial Sequence
  Synthetic
uauacuaaaauucauaggc

SEQ ID NO: 541071 - RNA, 20 nt, Artificial Sequence
  Synthetic
uuauacuaaaauucauaggc

SEQ ID NO: 541072 - RNA, 21 nt, Artificial Sequence
  Synthetic
auuauacuaaaauucauaggc

SEQ ID NO: 541073 - RNA, 22 nt, Artificial Sequence
  Synthetic
uauuauacuaaaauucauaggc

SEQ ID NO: 541074 - RNA, 23 nt, Artificial Sequence
  Synthetic
cuauuauacuaaaauucauaggc

SEQ ID NO: 541075 - RNA, 24 nt, Artificial Sequence
  Synthetic
ucuauuauacuaaaauucauaggc

SEQ ID NO: 541076 - RNA, 18 nt, Artificial Sequence
  Synthetic
guagcugggauuauaggc

SEQ ID NO: 541077 - RNA, 19 nt, Artificial Sequence
  Synthetic
aguagcugggauuauaggc

SEQ ID NO: 541078 - RNA, 20 nt, Artificial Sequence
  Synthetic
uaguagcugggauuauaggc

SEQ ID NO: 541079 - RNA, 21 nt, Artificial Sequence
  Synthetic
cuaguagcugggauuauaggc

SEQ ID NO: 541080 - RNA, 22 nt, Artificial Sequence
  Synthetic
ccuaguagcugggauuauaggc

SEQ ID NO: 541081 - RNA, 23 nt, Artificial Sequence
  Synthetic
cccuaguagcugggauuauaggc

SEQ ID NO: 541082 - RNA, 24 nt, Artificial Sequence
  Synthetic
ucccuaguagcugggauuauaggc

SEQ ID NO: 541083 - RNA, 21 nt, Artificial Sequence
  Synthetic
caaagugcugggauuauaggc

SEQ ID NO: 541084 - RNA, 22 nt, Artificial Sequence
  Synthetic
ccaaagugcugggauuauaggc

SEQ ID NO: 541085 - RNA, 23 nt, Artificial Sequence
  Synthetic
cccaaagugcugggauuauaggc

SEQ ID NO: 541086 - RNA, 24 nt, Artificial Sequence
  Synthetic
ucccaaagugcugggauuauaggc

SEQ ID NO: 541087 - RNA, 22 nt, Artificial Sequence
  Synthetic
gcaaagugcugggauuauaggc

SEQ ID NO: 541088 - RNA, 23 nt, Artificial Sequence
  Synthetic
cgcaaagugcugggauuauaggc

SEQ ID NO: 541089 - RNA, 24 nt, Artificial Sequence
  Synthetic
ucgcaaagugcugggauuauaggc

SEQ ID NO: 541090 - RNA, 18 nt, Artificial Sequence
  Synthetic
uuaaaaauauuuauaggc

SEQ ID NO: 541091 - RNA, 19 nt, Artificial Sequence
  Synthetic
auuaaaaauauuuauaggc

SEQ ID NO: 541092 - RNA, 20 nt, Artificial Sequence
  Synthetic
aauuaaaaauauuuauaggc

SEQ ID NO: 541093 - RNA, 21 nt, Artificial Sequence
  Synthetic
uaauuaaaaauauuuauaggc

SEQ ID NO: 541094 - RNA, 22 nt, Artificial Sequence
  Synthetic
uuaauuaaaaauauuuauaggc

SEQ ID NO: 541095 - RNA, 23 nt, Artificial Sequence
  Synthetic
guuaauuaaaaauauuuauaggc

SEQ ID NO: 541096 - RNA, 24 nt, Artificial Sequence
  Synthetic
aguuaauuaaaaauauuuauaggc

SEQ ID NO: 541097 - RNA, 18 nt, Artificial Sequence
  Synthetic
augcguuaagcccuaggc

SEQ ID NO: 541098 - RNA, 19 nt, Artificial Sequence
  Synthetic
uaugcguuaagcccuaggc

SEQ ID NO: 541099 - RNA, 20 nt, Artificial Sequence
  Synthetic
cuaugcguuaagcccuaggc

SEQ ID NO: 541100 - RNA, 21 nt, Artificial Sequence
  Synthetic
gcuaugcguuaagcccuaggc

SEQ ID NO: 541101 - RNA, 22 nt, Artificial Sequence
  Synthetic
ugcuaugcguuaagcccuaggc

SEQ ID NO: 541102 - RNA, 23 nt, Artificial Sequence
  Synthetic
cugcuaugcguuaagcccuaggc

SEQ ID NO: 541103 - RNA, 24 nt, Artificial Sequence
  Synthetic
ccugcuaugcguuaagcccuaggc

SEQ ID NO: 541104 - RNA, 18 nt, Artificial Sequence
  Synthetic
gaauguaaaacucuaggc

SEQ ID NO: 541105 - RNA, 19 nt, Artificial Sequence
  Synthetic
ugaauguaaaacucuaggc

SEQ ID NO: 541106 - RNA, 20 nt, Artificial Sequence
  Synthetic
cugaauguaaaacucuaggc

SEQ ID NO: 541107 - RNA, 21 nt, Artificial Sequence
  Synthetic
acugaauguaaaacucuaggc

SEQ ID NO: 541108 - RNA, 22 nt, Artificial Sequence
  Synthetic
aacugaauguaaaacucuaggc

SEQ ID NO: 541109 - RNA, 23 nt, Artificial Sequence
  Synthetic
uaacugaauguaaaacucuaggc

SEQ ID NO: 541110 - RNA, 24 nt, Artificial Sequence
  Synthetic
guaacugaauguaaaacucuaggc

SEQ ID NO: 541111 - RNA, 18 nt, Artificial Sequence
  Synthetic
uuccacagaucucuaggc

SEQ ID NO: 541112 - RNA, 19 nt, Artificial Sequence
  Synthetic
uuuccacagaucucuaggc

SEQ ID NO: 541113 - RNA, 20 nt, Artificial Sequence
  Synthetic
auuuccacagaucucuaggc

SEQ ID NO: 541114 - RNA, 21 nt, Artificial Sequence
  Synthetic
aauuuccacagaucucuaggc

SEQ ID NO: 541115 - RNA, 22 nt, Artificial Sequence
  Synthetic
aaauuuccacagaucucuaggc

SEQ ID NO: 541116 - RNA, 23 nt, Artificial Sequence
  Synthetic
caaauuuccacagaucucuaggc

SEQ ID NO: 541117 - RNA, 24 nt, Artificial Sequence
  Synthetic
ucaaauuuccacagaucucuaggc

SEQ ID NO: 541118 - RNA, 18 nt, Artificial Sequence
  Synthetic
aaauuccagagucuaggc

SEQ ID NO: 541119 - RNA, 19 nt, Artificial Sequence
  Synthetic
gaaauuccagagucuaggc

SEQ ID NO: 541120 - RNA, 20 nt, Artificial Sequence
  Synthetic
ugaaauuccagagucuaggc

SEQ ID NO: 541121 - RNA, 21 nt, Artificial Sequence
  Synthetic
cugaaauuccagagucuaggc

SEQ ID NO: 541122 - RNA, 22 nt, Artificial Sequence
  Synthetic
acugaaauuccagagucuaggc

SEQ ID NO: 541123 - RNA, 23 nt, Artificial Sequence
  Synthetic
gacugaaauuccagagucuaggc

SEQ ID NO: 541124 - RNA, 24 nt, Artificial Sequence
  Synthetic
agacugaaauuccagagucuaggc

SEQ ID NO: 541125 - RNA, 18 nt, Artificial Sequence
  Synthetic
gaguacaguugaguaggc

SEQ ID NO: 541126 - RNA, 19 nt, Artificial Sequence
  Synthetic
agaguacaguugaguaggc

SEQ ID NO: 541127 - RNA, 20 nt, Artificial Sequence
  Synthetic
aagaguacaguugaguaggc

SEQ ID NO: 541128 - RNA, 21 nt, Artificial Sequence
  Synthetic
caagaguacaguugaguaggc

SEQ ID NO: 541129 - RNA, 22 nt, Artificial Sequence
  Synthetic
acaagaguacaguugaguaggc

SEQ ID NO: 541130 - RNA, 23 nt, Artificial Sequence
  Synthetic
cacaagaguacaguugaguaggc

SEQ ID NO: 541131 - RNA, 24 nt, Artificial Sequence
  Synthetic
ucacaagaguacaguugaguaggc

SEQ ID NO: 541132 - RNA, 18 nt, Artificial Sequence
  Synthetic
aacucugauuuaguaggc

SEQ ID NO: 541133 - RNA, 19 nt, Artificial Sequence
  Synthetic
aaacucugauuuaguaggc

SEQ ID NO: 541134 - RNA, 20 nt, Artificial Sequence
  Synthetic
aaaacucugauuuaguaggc

SEQ ID NO: 541135 - RNA, 21 nt, Artificial Sequence
  Synthetic
aaaaacucugauuuaguaggc

SEQ ID NO: 541136 - RNA, 22 nt, Artificial Sequence
  Synthetic
caaaaacucugauuuaguaggc

SEQ ID NO: 541137 - RNA, 23 nt, Artificial Sequence
  Synthetic
ccaaaaacucugauuuaguaggc

SEQ ID NO: 541138 - RNA, 24 nt, Artificial Sequence
  Synthetic
cccaaaaacucugauuuaguaggc

SEQ ID NO: 541139 - RNA, 18 nt, Artificial Sequence
  Synthetic
accauucaggacguaggc

SEQ ID NO: 541140 - RNA, 19 nt, Artificial Sequence
  Synthetic
uaccauucaggacguaggc

SEQ ID NO: 541141 - RNA, 20 nt, Artificial Sequence
  Synthetic
auaccauucaggacguaggc

SEQ ID NO: 541142 - RNA, 21 nt, Artificial Sequence
  Synthetic
aauaccauucaggacguaggc

SEQ ID NO: 541143 - RNA, 22 nt, Artificial Sequence
  Synthetic
caauaccauucaggacguaggc

SEQ ID NO: 541144 - RNA, 23 nt, Artificial Sequence
  Synthetic
gcaauaccauucaggacguaggc

SEQ ID NO: 541145 - RNA, 24 nt, Artificial Sequence
  Synthetic
ggcaauaccauucaggacguaggc

SEQ ID NO: 541146 - RNA, 18 nt, Artificial Sequence
  Synthetic
gaucaacaaaugguaggc

SEQ ID NO: 541147 - RNA, 19 nt, Artificial Sequence
  Synthetic
ugaucaacaaaugguaggc

SEQ ID NO: 541148 - RNA, 20 nt, Artificial Sequence
  Synthetic
gugaucaacaaaugguaggc

SEQ ID NO: 541149 - RNA, 21 nt, Artificial Sequence
  Synthetic
ggugaucaacaaaugguaggc

SEQ ID NO: 541150 - RNA, 22 nt, Artificial Sequence
  Synthetic
aggugaucaacaaaugguaggc

SEQ ID NO: 541151 - RNA, 23 nt, Artificial Sequence
  Synthetic
aaggugaucaacaaaugguaggc

SEQ ID NO: 541152 - RNA, 24 nt, Artificial Sequence
  Synthetic
caaggugaucaacaaaugguaggc

SEQ ID NO: 541153 - RNA, 18 nt, Artificial Sequence
  Synthetic
aauauuaaguuuguaggc

SEQ ID NO: 541154 - RNA, 19 nt, Artificial Sequence
  Synthetic
caauauuaaguuuguaggc

SEQ ID NO: 541155 - RNA, 20 nt, Artificial Sequence
  Synthetic
acaauauuaaguuuguaggc

SEQ ID NO: 541156 - RNA, 21 nt, Artificial Sequence
  Synthetic
aacaauauuaaguuuguaggc

SEQ ID NO: 541157 - RNA, 22 nt, Artificial Sequence
  Synthetic
aaacaauauuaaguuuguaggc

SEQ ID NO: 541158 - RNA, 23 nt, Artificial Sequence
  Synthetic
aaaacaauauuaaguuuguaggc

SEQ ID NO: 541159 - RNA, 24 nt, Artificial Sequence
  Synthetic
gaaaacaauauuaaguuuguaggc

SEQ ID NO: 541160 - RNA, 18 nt, Artificial Sequence
  Synthetic
uagccagagcaauuaggc

SEQ ID NO: 541161 - RNA, 19 nt, Artificial Sequence
  Synthetic
cuagccagagcaauuaggc

SEQ ID NO: 541162 - RNA, 20 nt, Artificial Sequence
  Synthetic
ccuagccagagcaauuaggc

SEQ ID NO: 541163 - RNA, 21 nt, Artificial Sequence
  Synthetic
uccuagccagagcaauuaggc

SEQ ID NO: 541164 - RNA, 22 nt, Artificial Sequence
  Synthetic
guccuagccagagcaauuaggc

SEQ ID NO: 541165 - RNA, 23 nt, Artificial Sequence
  Synthetic
aguccuagccagagcaauuaggc

SEQ ID NO: 541166 - RNA, 24 nt, Artificial Sequence
  Synthetic
gaguccuagccagagcaauuaggc

SEQ ID NO: 541167 - RNA, 18 nt, Artificial Sequence
  Synthetic
acuauuaugcaauuaggc

SEQ ID NO: 541168 - RNA, 19 nt, Artificial Sequence
  Synthetic
aacuauuaugcaauuaggc

SEQ ID NO: 541169 - RNA, 20 nt, Artificial Sequence
  Synthetic
aaacuauuaugcaauuaggc

SEQ ID NO: 541170 - RNA, 21 nt, Artificial Sequence
  Synthetic
uaaacuauuaugcaauuaggc

SEQ ID NO: 541171 - RNA, 22 nt, Artificial Sequence
  Synthetic
uuaaacuauuaugcaauuaggc

SEQ ID NO: 541172 - RNA, 23 nt, Artificial Sequence
  Synthetic
guuaaacuauuaugcaauuaggc

SEQ ID NO: 541173 - RNA, 24 nt, Artificial Sequence
  Synthetic
uguuaaacuauuaugcaauuaggc

SEQ ID NO: 541174 - RNA, 18 nt, Artificial Sequence
  Synthetic
uggagaugucaauuaggc

SEQ ID NO: 541175 - RNA, 19 nt, Artificial Sequence
  Synthetic
guggagaugucaauuaggc

SEQ ID NO: 541176 - RNA, 20 nt, Artificial Sequence
  Synthetic
aguggagaugucaauuaggc

SEQ ID NO: 541177 - RNA, 21 nt, Artificial Sequence
  Synthetic
aaguggagaugucaauuaggc

SEQ ID NO: 541178 - RNA, 22 nt, Artificial Sequence
  Synthetic
uaaguggagaugucaauuaggc

SEQ ID NO: 541179 - RNA, 23 nt, Artificial Sequence
  Synthetic
uuaaguggagaugucaauuaggc

SEQ ID NO: 541180 - RNA, 24 nt, Artificial Sequence
  Synthetic
uuuaaguggagaugucaauuaggc

SEQ ID NO: 541181 - RNA, 18 nt, Artificial Sequence
  Synthetic
acauucuuugacuuaggc

SEQ ID NO: 541182 - RNA, 19 nt, Artificial Sequence
  Synthetic
uacauucuuugacuuaggc

SEQ ID NO: 541183 - RNA, 20 nt, Artificial Sequence
  Synthetic
uuacauucuuugacuuaggc

SEQ ID NO: 541184 - RNA, 21 nt, Artificial Sequence
  Synthetic
uuuacauucuuugacuuaggc

SEQ ID NO: 541185 - RNA, 22 nt, Artificial Sequence
  Synthetic
uuuuacauucuuugacuuaggc

SEQ ID NO: 541186 - RNA, 23 nt, Artificial Sequence
  Synthetic
auuuuacauucuuugacuuaggc

SEQ ID NO: 541187 - RNA, 24 nt, Artificial Sequence
  Synthetic
cauuuuacauucuuugacuuaggc

SEQ ID NO: 541188 - RNA, 18 nt, Artificial Sequence
  Synthetic
aacaugaauaauuuaggc

SEQ ID NO: 541189 - RNA, 19 nt, Artificial Sequence
  Synthetic
gaacaugaauaauuuaggc

SEQ ID NO: 541190 - RNA, 20 nt, Artificial Sequence
  Synthetic
cgaacaugaauaauuuaggc

SEQ ID NO: 541191 - RNA, 21 nt, Artificial Sequence
  Synthetic
ccgaacaugaauaauuuaggc

SEQ ID NO: 541192 - RNA, 22 nt, Artificial Sequence
  Synthetic
cccgaacaugaauaauuuaggc

SEQ ID NO: 541193 - RNA, 23 nt, Artificial Sequence
  Synthetic
ccccgaacaugaauaauuuaggc

SEQ ID NO: 541194 - RNA, 24 nt, Artificial Sequence
  Synthetic
cccccgaacaugaauaauuuaggc

SEQ ID NO: 541195 - RNA, 18 nt, Artificial Sequence
  Synthetic
cuccaaagggauuuaggc

SEQ ID NO: 541196 - RNA, 19 nt, Artificial Sequence
  Synthetic
ucuccaaagggauuuaggc

SEQ ID NO: 541197 - RNA, 20 nt, Artificial Sequence
  Synthetic
uucuccaaagggauuuaggc

SEQ ID NO: 541198 - RNA, 21 nt, Artificial Sequence
  Synthetic
guucuccaaagggauuuaggc

SEQ ID NO: 541199 - RNA, 22 nt, Artificial Sequence
  Synthetic
aguucuccaaagggauuuaggc

SEQ ID NO: 541200 - RNA, 23 nt, Artificial Sequence
  Synthetic
gaguucuccaaagggauuuaggc

SEQ ID NO: 541201 - RNA, 24 nt, Artificial Sequence
  Synthetic
ggaguucuccaaagggauuuaggc

SEQ ID NO: 541202 - RNA, 18 nt, Artificial Sequence
  Synthetic
gcuaacgccauuuuaggc

SEQ ID NO: 541203 - RNA, 19 nt, Artificial Sequence
  Synthetic
ggcuaacgccauuuuaggc

SEQ ID NO: 541204 - RNA, 20 nt, Artificial Sequence
  Synthetic
gggcuaacgccauuuuaggc

SEQ ID NO: 541205 - RNA, 21 nt, Artificial Sequence
  Synthetic
ggggcuaacgccauuuuaggc

SEQ ID NO: 541206 - RNA, 22 nt, Artificial Sequence
  Synthetic
uggggcuaacgccauuuuaggc

SEQ ID NO: 541207 - RNA, 23 nt, Artificial Sequence
  Synthetic
uuggggcuaacgccauuuuaggc

SEQ ID NO: 541208 - RNA, 24 nt, Artificial Sequence
  Synthetic
cuuggggcuaacgccauuuuaggc

SEQ ID NO: 541209 - RNA, 18 nt, Artificial Sequence
  Synthetic
acgcagccauucgacggc

SEQ ID NO: 541210 - RNA, 19 nt, Artificial Sequence
  Synthetic
gacgcagccauucgacggc

SEQ ID NO: 541211 - RNA, 20 nt, Artificial Sequence
  Synthetic
ugacgcagccauucgacggc

SEQ ID NO: 541212 - RNA, 21 nt, Artificial Sequence
  Synthetic
uugacgcagccauucgacggc

SEQ ID NO: 541213 - RNA, 22 nt, Artificial Sequence
  Synthetic
uuugacgcagccauucgacggc

SEQ ID NO: 541214 - RNA, 23 nt, Artificial Sequence
  Synthetic
guuugacgcagccauucgacggc

SEQ ID NO: 541215 - RNA, 24 nt, Artificial Sequence
  Synthetic
aguuugacgcagccauucgacggc

SEQ ID NO: 541216 - RNA, 18 nt, Artificial Sequence
  Synthetic
aguagaagaaacaccggc

SEQ ID NO: 541217 - RNA, 19 nt, Artificial Sequence
  Synthetic
gaguagaagaaacaccggc

SEQ ID NO: 541218 - RNA, 20 nt, Artificial Sequence
  Synthetic
agaguagaagaaacaccggc

SEQ ID NO: 541219 - RNA, 21 nt, Artificial Sequence
  Synthetic
uagaguagaagaaacaccggc

SEQ ID NO: 541220 - RNA, 22 nt, Artificial Sequence
  Synthetic
auagaguagaagaaacaccggc

SEQ ID NO: 541221 - RNA, 23 nt, Artificial Sequence
  Synthetic
cauagaguagaagaaacaccggc

SEQ ID NO: 541222 - RNA, 24 nt, Artificial Sequence
  Synthetic
ucauagaguagaagaaacaccggc

SEQ ID NO: 541223 - RNA, 18 nt, Artificial Sequence
  Synthetic
gaccacgaacccaccggc

SEQ ID NO: 541224 - RNA, 19 nt, Artificial Sequence
  Synthetic
agaccacgaacccaccggc

SEQ ID NO: 541225 - RNA, 20 nt, Artificial Sequence
  Synthetic
gagaccacgaacccaccggc

SEQ ID NO: 541226 - RNA, 21 nt, Artificial Sequence
  Synthetic
cgagaccacgaacccaccggc

SEQ ID NO: 541227 - RNA, 22 nt, Artificial Sequence
  Synthetic
gcgagaccacgaacccaccggc

SEQ ID NO: 541228 - RNA, 23 nt, Artificial Sequence
  Synthetic
agcgagaccacgaacccaccggc

SEQ ID NO: 541229 - RNA, 24 nt, Artificial Sequence
  Synthetic
cagcgagaccacgaacccaccggc

SEQ ID NO: 541230 - RNA, 18 nt, Artificial Sequence
  Synthetic
ugagccaccacgcccggc

SEQ ID NO: 541231 - RNA, 19 nt, Artificial Sequence
  Synthetic
gugagccaccacgcccggc

SEQ ID NO: 541232 - RNA, 20 nt, Artificial Sequence
  Synthetic
cgugagccaccacgcccggc

SEQ ID NO: 541233 - RNA, 21 nt, Artificial Sequence
  Synthetic
gcgugagccaccacgcccggc

SEQ ID NO: 541234 - RNA, 22 nt, Artificial Sequence
  Synthetic
ggcgugagccaccacgcccggc

SEQ ID NO: 541235 - RNA, 23 nt, Artificial Sequence
  Synthetic
aggcgugagccaccacgcccggc

SEQ ID NO: 541236 - RNA, 24 nt, Artificial Sequence
  Synthetic
caggcgugagccaccacgcccggc

SEQ ID NO: 541237 - RNA, 18 nt, Artificial Sequence
  Synthetic
ugagcuacugcgcccggc

SEQ ID NO: 541238 - RNA, 19 nt, Artificial Sequence
  Synthetic
augagcuacugcgcccggc

SEQ ID NO: 541239 - RNA, 20 nt, Artificial Sequence
  Synthetic
caugagcuacugcgcccggc

SEQ ID NO: 541240 - RNA, 21 nt, Artificial Sequence
  Synthetic
gcaugagcuacugcgcccggc

SEQ ID NO: 541241 - RNA, 22 nt, Artificial Sequence
  Synthetic
ggcaugagcuacugcgcccggc

SEQ ID NO: 541242 - RNA, 23 nt, Artificial Sequence
  Synthetic
aggcaugagcuacugcgcccggc

SEQ ID NO: 541243 - RNA, 24 nt, Artificial Sequence
  Synthetic
caggcaugagcuacugcgcccggc

SEQ ID NO: 541244 - RNA, 18 nt, Artificial Sequence
  Synthetic
agcaggaagagagccggc

SEQ ID NO: 541245 - RNA, 19 nt, Artificial Sequence
  Synthetic
aagcaggaagagagccggc

SEQ ID NO: 541246 - RNA, 20 nt, Artificial Sequence
  Synthetic
gaagcaggaagagagccggc

SEQ ID NO: 541247 - RNA, 21 nt, Artificial Sequence
  Synthetic
agaagcaggaagagagccggc

SEQ ID NO: 541248 - RNA, 22 nt, Artificial Sequence
  Synthetic
cagaagcaggaagagagccggc

SEQ ID NO: 541249 - RNA, 23 nt, Artificial Sequence
  Synthetic
gcagaagcaggaagagagccggc

SEQ ID NO: 541250 - RNA, 24 nt, Artificial Sequence
  Synthetic
agcagaagcaggaagagagccggc

SEQ ID NO: 541251 - RNA, 18 nt, Artificial Sequence
  Synthetic
aaaacauguguuagcggc

SEQ ID NO: 541252 - RNA, 19 nt, Artificial Sequence
  Synthetic
aaaaacauguguuagcggc

SEQ ID NO: 541253 - RNA, 20 nt, Artificial Sequence
  Synthetic
uaaaaacauguguuagcggc

SEQ ID NO: 541254 - RNA, 21 nt, Artificial Sequence
  Synthetic
uuaaaaacauguguuagcggc

SEQ ID NO: 541255 - RNA, 22 nt, Artificial Sequence
  Synthetic
uuuaaaaacauguguuagcggc

SEQ ID NO: 541256 - RNA, 23 nt, Artificial Sequence
  Synthetic
uuuuaaaaacauguguuagcggc

SEQ ID NO: 541257 - RNA, 24 nt, Artificial Sequence
  Synthetic
uuuuuaaaaacauguguuagcggc

SEQ ID NO: 541258 - RNA, 18 nt, Artificial Sequence
  Synthetic
acacacuugcacugcggc

SEQ ID NO: 541259 - RNA, 19 nt, Artificial Sequence
  Synthetic
cacacacuugcacugcggc

SEQ ID NO: 541260 - RNA, 20 nt, Artificial Sequence
  Synthetic
ucacacacuugcacugcggc

SEQ ID NO: 541261 - RNA, 21 nt, Artificial Sequence
  Synthetic
aucacacacuugcacugcggc

SEQ ID NO: 541262 - RNA, 22 nt, Artificial Sequence
  Synthetic
uaucacacacuugcacugcggc

SEQ ID NO: 541263 - RNA, 23 nt, Artificial Sequence
  Synthetic
auaucacacacuugcacugcggc

SEQ ID NO: 541264 - RNA, 24 nt, Artificial Sequence
  Synthetic
uauaucacacacuugcacugcggc

SEQ ID NO: 541265 - RNA, 18 nt, Artificial Sequence
  Synthetic
cucauggagaaccucggc

SEQ ID NO: 541266 - RNA, 19 nt, Artificial Sequence
  Synthetic
ccucauggagaaccucggc

SEQ ID NO: 541267 - RNA, 20 nt, Artificial Sequence
  Synthetic
accucauggagaaccucggc

SEQ ID NO: 541268 - RNA, 21 nt, Artificial Sequence
  Synthetic
gaccucauggagaaccucggc

SEQ ID NO: 541269 - RNA, 22 nt, Artificial Sequence
  Synthetic
agaccucauggagaaccucggc

SEQ ID NO: 541270 - RNA, 23 nt, Artificial Sequence
  Synthetic
aagaccucauggagaaccucggc

SEQ ID NO: 541271 - RNA, 24 nt, Artificial Sequence
  Synthetic
gaagaccucauggagaaccucggc

SEQ ID NO: 541272 - RNA, 18 nt, Artificial Sequence
  Synthetic
cauuuacugaaaaagggc

SEQ ID NO: 541273 - RNA, 19 nt, Artificial Sequence
  Synthetic
ucauuuacugaaaaagggc

SEQ ID NO: 541274 - RNA, 20 nt, Artificial Sequence
  Synthetic
uucauuuacugaaaaagggc

SEQ ID NO: 541275 - RNA, 21 nt, Artificial Sequence
  Synthetic
auucauuuacugaaaaagggc

SEQ ID NO: 541276 - RNA, 22 nt, Artificial Sequence
  Synthetic
uauucauuuacugaaaaagggc

SEQ ID NO: 541277 - RNA, 23 nt, Artificial Sequence
  Synthetic
uuauucauuuacugaaaaagggc

SEQ ID NO: 541278 - RNA, 24 nt, Artificial Sequence
  Synthetic
uuuauucauuuacugaaaaagggc

SEQ ID NO: 541279 - RNA, 18 nt, Artificial Sequence
  Synthetic
gugaagccuaaaaagggc

SEQ ID NO: 541280 - RNA, 19 nt, Artificial Sequence
  Synthetic
ugugaagccuaaaaagggc

SEQ ID NO: 541281 - RNA, 20 nt, Artificial Sequence
  Synthetic
augugaagccuaaaaagggc

SEQ ID NO: 541282 - RNA, 21 nt, Artificial Sequence
  Synthetic
uaugugaagccuaaaaagggc

SEQ ID NO: 541283 - RNA, 22 nt, Artificial Sequence
  Synthetic
guaugugaagccuaaaaagggc

SEQ ID NO: 541284 - RNA, 23 nt, Artificial Sequence
  Synthetic
gguaugugaagccuaaaaagggc

SEQ ID NO: 541285 - RNA, 24 nt, Artificial Sequence
  Synthetic
cgguaugugaagccuaaaaagggc

SEQ ID NO: 541286 - RNA, 18 nt, Artificial Sequence
  Synthetic
ucugccuuuuaaaagggc

SEQ ID NO: 541287 - RNA, 19 nt, Artificial Sequence
  Synthetic
cucugccuuuuaaaagggc

SEQ ID NO: 541288 - RNA, 20 nt, Artificial Sequence
  Synthetic
ccucugccuuuuaaaagggc

SEQ ID NO: 541289 - RNA, 21 nt, Artificial Sequence
  Synthetic
uccucugccuuuuaaaagggc

SEQ ID NO: 541290 - RNA, 22 nt, Artificial Sequence
  Synthetic
auccucugccuuuuaaaagggc

SEQ ID NO: 541291 - RNA, 23 nt, Artificial Sequence
  Synthetic
gauccucugccuuuuaaaagggc

SEQ ID NO: 541292 - RNA, 24 nt, Artificial Sequence
  Synthetic
ggauccucugccuuuuaaaagggc

SEQ ID NO: 541293 - RNA, 18 nt, Artificial Sequence
  Synthetic
aacuggaagccaaagggc

SEQ ID NO: 541294 - RNA, 19 nt, Artificial Sequence
  Synthetic
caacuggaagccaaagggc

SEQ ID NO: 541295 - RNA, 20 nt, Artificial Sequence
  Synthetic
ccaacuggaagccaaagggc

SEQ ID NO: 541296 - RNA, 21 nt, Artificial Sequence
  Synthetic
accaacuggaagccaaagggc

SEQ ID NO: 541297 - RNA, 22 nt, Artificial Sequence
  Synthetic
aaccaacuggaagccaaagggc

SEQ ID NO: 541298 - RNA, 23 nt, Artificial Sequence
  Synthetic
aaaccaacuggaagccaaagggc

SEQ ID NO: 541299 - RNA, 24 nt, Artificial Sequence
  Synthetic
uaaaccaacuggaagccaaagggc

SEQ ID NO: 541300 - RNA, 18 nt, Artificial Sequence
  Synthetic
aaaagagucugaaagggc

SEQ ID NO: 541301 - RNA, 19 nt, Artificial Sequence
  Synthetic
caaaagagucugaaagggc

SEQ ID NO: 541302 - RNA, 20 nt, Artificial Sequence
  Synthetic
ccaaaagagucugaaagggc

SEQ ID NO: 541303 - RNA, 21 nt, Artificial Sequence
  Synthetic
accaaaagagucugaaagggc

SEQ ID NO: 541304 - RNA, 22 nt, Artificial Sequence
  Synthetic
uaccaaaagagucugaaagggc

SEQ ID NO: 541305 - RNA, 23 nt, Artificial Sequence
  Synthetic
uuaccaaaagagucugaaagggc

SEQ ID NO: 541306 - RNA, 24 nt, Artificial Sequence
  Synthetic
auuaccaaaagagucugaaagggc

SEQ ID NO: 541307 - RNA, 18 nt, Artificial Sequence
  Synthetic
uucucugagaucaagggc

SEQ ID NO: 541308 - RNA, 19 nt, Artificial Sequence
  Synthetic
auucucugagaucaagggc

SEQ ID NO: 541309 - RNA, 20 nt, Artificial Sequence
  Synthetic
uauucucugagaucaagggc

SEQ ID NO: 541310 - RNA, 21 nt, Artificial Sequence
  Synthetic
guauucucugagaucaagggc

SEQ ID NO: 541311 - RNA, 22 nt, Artificial Sequence
  Synthetic
uguauucucugagaucaagggc

SEQ ID NO: 541312 - RNA, 23 nt, Artificial Sequence
  Synthetic
uuguauucucugagaucaagggc

SEQ ID NO: 541313 - RNA, 24 nt, Artificial Sequence
  Synthetic
auuguauucucugagaucaagggc

SEQ ID NO: 541314 - RNA, 18 nt, Artificial Sequence
  Synthetic
cuggagacucagaagggc

SEQ ID NO: 541315 - RNA, 19 nt, Artificial Sequence
  Synthetic
acuggagacucagaagggc

SEQ ID NO: 541316 - RNA, 20 nt, Artificial Sequence
  Synthetic
cacuggagacucagaagggc

SEQ ID NO: 541317 - RNA, 21 nt, Artificial Sequence
  Synthetic
acacuggagacucagaagggc

SEQ ID NO: 541318 - RNA, 22 nt, Artificial Sequence
  Synthetic
gacacuggagacucagaagggc

SEQ ID NO: 541319 - RNA, 23 nt, Artificial Sequence
  Synthetic
agacacuggagacucagaagggc

SEQ ID NO: 541320 - RNA, 24 nt, Artificial Sequence
  Synthetic
uagacacuggagacucagaagggc

SEQ ID NO: 541321 - RNA, 18 nt, Artificial Sequence
  Synthetic
ggcagaagguagaagggc

SEQ ID NO: 541322 - RNA, 19 nt, Artificial Sequence
  Synthetic
aggcagaagguagaagggc

SEQ ID NO: 541323 - RNA, 20 nt, Artificial Sequence
  Synthetic
aaggcagaagguagaagggc

SEQ ID NO: 541324 - RNA, 21 nt, Artificial Sequence
  Synthetic
caaggcagaagguagaagggc

SEQ ID NO: 541325 - RNA, 22 nt, Artificial Sequence
  Synthetic
acaaggcagaagguagaagggc

SEQ ID NO: 541326 - RNA, 23 nt, Artificial Sequence
  Synthetic
cacaaggcagaagguagaagggc

SEQ ID NO: 541327 - RNA, 24 nt, Artificial Sequence
  Synthetic
ucacaaggcagaagguagaagggc

SEQ ID NO: 541328 - RNA, 18 nt, Artificial Sequence
  Synthetic
uuauuagaucugaagggc

SEQ ID NO: 541329 - RNA, 19 nt, Artificial Sequence
  Synthetic
guuauuagaucugaagggc

SEQ ID NO: 541330 - RNA, 20 nt, Artificial Sequence
  Synthetic
aguuauuagaucugaagggc

SEQ ID NO: 541331 - RNA, 21 nt, Artificial Sequence
  Synthetic
gaguuauuagaucugaagggc

SEQ ID NO: 541332 - RNA, 22 nt, Artificial Sequence
  Synthetic
ggaguuauuagaucugaagggc

SEQ ID NO: 541333 - RNA, 23 nt, Artificial Sequence
  Synthetic
uggaguuauuagaucugaagggc

SEQ ID NO: 541334 - RNA, 24 nt, Artificial Sequence
  Synthetic
uuggaguuauuagaucugaagggc

SEQ ID NO: 541335 - RNA, 18 nt, Artificial Sequence
  Synthetic
gacucaucagugaagggc

SEQ ID NO: 541336 - RNA, 19 nt, Artificial Sequence
  Synthetic
ugacucaucagugaagggc

SEQ ID NO: 541337 - RNA, 20 nt, Artificial Sequence
  Synthetic
gugacucaucagugaagggc

SEQ ID NO: 541338 - RNA, 21 nt, Artificial Sequence
  Synthetic
agugacucaucagugaagggc

SEQ ID NO: 541339 - RNA, 22 nt, Artificial Sequence
  Synthetic
gagugacucaucagugaagggc

SEQ ID NO: 541340 - RNA, 23 nt, Artificial Sequence
  Synthetic
agagugacucaucagugaagggc

SEQ ID NO: 541341 - RNA, 24 nt, Artificial Sequence
  Synthetic
aagagugacucaucagugaagggc

SEQ ID NO: 541342 - RNA, 18 nt, Artificial Sequence
  Synthetic
cuucacagugauaagggc

SEQ ID NO: 541343 - RNA, 19 nt, Artificial Sequence
  Synthetic
acuucacagugauaagggc

SEQ ID NO: 541344 - RNA, 20 nt, Artificial Sequence
  Synthetic
gacuucacagugauaagggc

SEQ ID NO: 541345 - RNA, 21 nt, Artificial Sequence
  Synthetic
ugacuucacagugauaagggc

SEQ ID NO: 541346 - RNA, 22 nt, Artificial Sequence
  Synthetic
uugacuucacagugauaagggc

SEQ ID NO: 541347 - RNA, 23 nt, Artificial Sequence
  Synthetic
cuugacuucacagugauaagggc

SEQ ID NO: 541348 - RNA, 24 nt, Artificial Sequence
  Synthetic
gcuugacuucacagugauaagggc

SEQ ID NO: 541349 - RNA, 18 nt, Artificial Sequence
  Synthetic
acugaucaguauaagggc

SEQ ID NO: 541350 - RNA, 19 nt, Artificial Sequence
  Synthetic
uacugaucaguauaagggc

SEQ ID NO: 541351 - RNA, 20 nt, Artificial Sequence
  Synthetic
auacugaucaguauaagggc

SEQ ID NO: 541352 - RNA, 21 nt, Artificial Sequence
  Synthetic
cauacugaucaguauaagggc

SEQ ID NO: 541353 - RNA, 22 nt, Artificial Sequence
  Synthetic
acauacugaucaguauaagggc

SEQ ID NO: 541354 - RNA, 23 nt, Artificial Sequence
  Synthetic
aacauacugaucaguauaagggc

SEQ ID NO: 541355 - RNA, 24 nt, Artificial Sequence
  Synthetic
gaacauacugaucaguauaagggc

SEQ ID NO: 541356 - RNA, 18 nt, Artificial Sequence
  Synthetic
cugggagcuccuaagggc

SEQ ID NO: 541357 - RNA, 19 nt, Artificial Sequence
  Synthetic
ucugggagcuccuaagggc

SEQ ID NO: 541358 - RNA, 20 nt, Artificial Sequence
  Synthetic
cucugggagcuccuaagggc

SEQ ID NO: 541359 - RNA, 21 nt, Artificial Sequence
  Synthetic
acucugggagcuccuaagggc

SEQ ID NO: 541360 - RNA, 22 nt, Artificial Sequence
  Synthetic
uacucugggagcuccuaagggc

SEQ ID NO: 541361 - RNA, 23 nt, Artificial Sequence
  Synthetic
cuacucugggagcuccuaagggc

SEQ ID NO: 541362 - RNA, 24 nt, Artificial Sequence
  Synthetic
gcuacucugggagcuccuaagggc

SEQ ID NO: 541363 - RNA, 18 nt, Artificial Sequence
  Synthetic
auggugguugcuaagggc

SEQ ID NO: 541364 - RNA, 19 nt, Artificial Sequence
  Synthetic
aauggugguugcuaagggc

SEQ ID NO: 541365 - RNA, 20 nt, Artificial Sequence
  Synthetic
caauggugguugcuaagggc

SEQ ID NO: 541366 - RNA, 21 nt, Artificial Sequence
  Synthetic
acaauggugguugcuaagggc

SEQ ID NO: 541367 - RNA, 22 nt, Artificial Sequence
  Synthetic
uacaauggugguugcuaagggc

SEQ ID NO: 541368 - RNA, 23 nt, Artificial Sequence
  Synthetic
guacaauggugguugcuaagggc

SEQ ID NO: 541369 - RNA, 24 nt, Artificial Sequence
  Synthetic
aguacaauggugguugcuaagggc

SEQ ID NO: 541370 - RNA, 18 nt, Artificial Sequence
  Synthetic
ccauuaucaauuaagggc

SEQ ID NO: 541371 - RNA, 19 nt, Artificial Sequence
  Synthetic
accauuaucaauuaagggc

SEQ ID NO: 541372 - RNA, 20 nt, Artificial Sequence
  Synthetic
uaccauuaucaauuaagggc

SEQ ID NO: 541373 - RNA, 21 nt, Artificial Sequence
  Synthetic
cuaccauuaucaauuaagggc

SEQ ID NO: 541374 - RNA, 22 nt, Artificial Sequence
  Synthetic
ccuaccauuaucaauuaagggc

SEQ ID NO: 541375 - RNA, 23 nt, Artificial Sequence
  Synthetic
uccuaccauuaucaauuaagggc

SEQ ID NO: 541376 - RNA, 24 nt, Artificial Sequence
  Synthetic
guccuaccauuaucaauuaagggc

SEQ ID NO: 541377 - RNA, 18 nt, Artificial Sequence
  Synthetic
agggggaugaaacagggc

SEQ ID NO: 541378 - RNA, 19 nt, Artificial Sequence
  Synthetic
uagggggaugaaacagggc

SEQ ID NO: 541379 - RNA, 20 nt, Artificial Sequence
  Synthetic
guagggggaugaaacagggc

SEQ ID NO: 541380 - RNA, 21 nt, Artificial Sequence
  Synthetic
gguagggggaugaaacagggc

SEQ ID NO: 541381 - RNA, 22 nt, Artificial Sequence
  Synthetic
ggguagggggaugaaacagggc

SEQ ID NO: 541382 - RNA, 23 nt, Artificial Sequence
  Synthetic
aggguagggggaugaaacagggc

SEQ ID NO: 541383 - RNA, 24 nt, Artificial Sequence
  Synthetic
uaggguagggggaugaaacagggc

SEQ ID NO: 541384 - RNA, 18 nt, Artificial Sequence
  Synthetic
aacacauagacacagggc

SEQ ID NO: 541385 - RNA, 19 nt, Artificial Sequence
  Synthetic
gaacacauagacacagggc

SEQ ID NO: 541386 - RNA, 20 nt, Artificial Sequence
  Synthetic
agaacacauagacacagggc

SEQ ID NO: 541387 - RNA, 21 nt, Artificial Sequence
  Synthetic
gagaacacauagacacagggc

SEQ ID NO: 541388 - RNA, 22 nt, Artificial Sequence
  Synthetic
ugagaacacauagacacagggc

SEQ ID NO: 541389 - RNA, 23 nt, Artificial Sequence
  Synthetic
augagaacacauagacacagggc

SEQ ID NO: 541390 - RNA, 24 nt, Artificial Sequence
  Synthetic
gaugagaacacauagacacagggc

SEQ ID NO: 541391 - RNA, 18 nt, Artificial Sequence
  Synthetic
gaagcaggaagacagggc

SEQ ID NO: 541392 - RNA, 19 nt, Artificial Sequence
  Synthetic
agaagcaggaagacagggc

SEQ ID NO: 541393 - RNA, 20 nt, Artificial Sequence
  Synthetic
gagaagcaggaagacagggc

SEQ ID NO: 541394 - RNA, 21 nt, Artificial Sequence
  Synthetic
agagaagcaggaagacagggc

SEQ ID NO: 541395 - RNA, 22 nt, Artificial Sequence
  Synthetic
gagagaagcaggaagacagggc

SEQ ID NO: 541396 - RNA, 23 nt, Artificial Sequence
  Synthetic
ugagagaagcaggaagacagggc

SEQ ID NO: 541397 - RNA, 24 nt, Artificial Sequence
  Synthetic
gugagagaagcaggaagacagggc

SEQ ID NO: 541398 - RNA, 18 nt, Artificial Sequence
  Synthetic
ggucuguggccccagggc

SEQ ID NO: 541399 - RNA, 19 nt, Artificial Sequence
  Synthetic
uggucuguggccccagggc

SEQ ID NO: 541400 - RNA, 20 nt, Artificial Sequence
  Synthetic
cuggucuguggccccagggc

SEQ ID NO: 541401 - RNA, 21 nt, Artificial Sequence
  Synthetic
acuggucuguggccccagggc

SEQ ID NO: 541402 - RNA, 22 nt, Artificial Sequence
  Synthetic
uacuggucuguggccccagggc

SEQ ID NO: 541403 - RNA, 23 nt, Artificial Sequence
  Synthetic
guacuggucuguggccccagggc

SEQ ID NO: 541404 - RNA, 24 nt, Artificial Sequence
  Synthetic
uguacuggucuguggccccagggc

SEQ ID NO: 541405 - RNA, 18 nt, Artificial Sequence
  Synthetic
gaaaagcaaggccagggc

SEQ ID NO: 541406 - RNA, 19 nt, Artificial Sequence
  Synthetic
ugaaaagcaaggccagggc

SEQ ID NO: 541407 - RNA, 20 nt, Artificial Sequence
  Synthetic
uugaaaagcaaggccagggc

SEQ ID NO: 541408 - RNA, 21 nt, Artificial Sequence
  Synthetic
auugaaaagcaaggccagggc

SEQ ID NO: 541409 - RNA, 22 nt, Artificial Sequence
  Synthetic
uauugaaaagcaaggccagggc

SEQ ID NO: 541410 - RNA, 23 nt, Artificial Sequence
  Synthetic
cuauugaaaagcaaggccagggc

SEQ ID NO: 541411 - RNA, 24 nt, Artificial Sequence
  Synthetic
ucuauugaaaagcaaggccagggc

SEQ ID NO: 541412 - RNA, 18 nt, Artificial Sequence
  Synthetic
guagcaucugagcagggc

SEQ ID NO: 541413 - RNA, 19 nt, Artificial Sequence
  Synthetic
uguagcaucugagcagggc

SEQ ID NO: 541414 - RNA, 20 nt, Artificial Sequence
  Synthetic
auguagcaucugagcagggc

SEQ ID NO: 541415 - RNA, 21 nt, Artificial Sequence
  Synthetic
aauguagcaucugagcagggc

SEQ ID NO: 541416 - RNA, 22 nt, Artificial Sequence
  Synthetic
aaauguagcaucugagcagggc

SEQ ID NO: 541417 - RNA, 23 nt, Artificial Sequence
  Synthetic
aaaauguagcaucugagcagggc

SEQ ID NO: 541418 - RNA, 24 nt, Artificial Sequence
  Synthetic
gaaaauguagcaucugagcagggc

SEQ ID NO: 541419 - RNA, 18 nt, Artificial Sequence
  Synthetic
acagcugguaugcagggc

SEQ ID NO: 541420 - RNA, 19 nt, Artificial Sequence
  Synthetic
cacagcugguaugcagggc

SEQ ID NO: 541421 - RNA, 20 nt, Artificial Sequence
  Synthetic
ccacagcugguaugcagggc

SEQ ID NO: 541422 - RNA, 21 nt, Artificial Sequence
  Synthetic
gccacagcugguaugcagggc

SEQ ID NO: 541423 - RNA, 22 nt, Artificial Sequence
  Synthetic
agccacagcugguaugcagggc

SEQ ID NO: 541424 - RNA, 23 nt, Artificial Sequence
  Synthetic
gagccacagcugguaugcagggc

SEQ ID NO: 541425 - RNA, 24 nt, Artificial Sequence
  Synthetic
ugagccacagcugguaugcagggc

SEQ ID NO: 541426 - RNA, 18 nt, Artificial Sequence
  Synthetic
ucaggcaucagucagggc

SEQ ID NO: 541427 - RNA, 19 nt, Artificial Sequence
  Synthetic
gucaggcaucagucagggc

SEQ ID NO: 541428 - RNA, 20 nt, Artificial Sequence
  Synthetic
ugucaggcaucagucagggc

SEQ ID NO: 541429 - RNA, 21 nt, Artificial Sequence
  Synthetic
augucaggcaucagucagggc

SEQ ID NO: 541430 - RNA, 22 nt, Artificial Sequence
  Synthetic
aaugucaggcaucagucagggc

SEQ ID NO: 541431 - RNA, 23 nt, Artificial Sequence
  Synthetic
caaugucaggcaucagucagggc

SEQ ID NO: 541432 - RNA, 24 nt, Artificial Sequence
  Synthetic
ucaaugucaggcaucagucagggc

SEQ ID NO: 541433 - RNA, 18 nt, Artificial Sequence
  Synthetic
ccccucagaguucagggc

SEQ ID NO: 541434 - RNA, 19 nt, Artificial Sequence
  Synthetic
accccucagaguucagggc

SEQ ID NO: 541435 - RNA, 20 nt, Artificial Sequence
  Synthetic
aaccccucagaguucagggc

SEQ ID NO: 541436 - RNA, 21 nt, Artificial Sequence
  Synthetic
aaaccccucagaguucagggc

SEQ ID NO: 541437 - RNA, 22 nt, Artificial Sequence
  Synthetic
caaaccccucagaguucagggc

SEQ ID NO: 541438 - RNA, 23 nt, Artificial Sequence
  Synthetic
gcaaaccccucagaguucagggc

SEQ ID NO: 541439 - RNA, 24 nt, Artificial Sequence
  Synthetic
agcaaaccccucagaguucagggc

SEQ ID NO: 541440 - RNA, 18 nt, Artificial Sequence
  Synthetic
aaaugagaguuucagggc

SEQ ID NO: 541441 - RNA, 19 nt, Artificial Sequence
  Synthetic
caaaugagaguuucagggc

SEQ ID NO: 541442 - RNA, 20 nt, Artificial Sequence
  Synthetic
ucaaaugagaguuucagggc

SEQ ID NO: 541443 - RNA, 21 nt, Artificial Sequence
  Synthetic
uucaaaugagaguuucagggc

SEQ ID NO: 541444 - RNA, 22 nt, Artificial Sequence
  Synthetic
auucaaaugagaguuucagggc

SEQ ID NO: 541445 - RNA, 23 nt, Artificial Sequence
  Synthetic
cauucaaaugagaguuucagggc

SEQ ID NO: 541446 - RNA, 24 nt, Artificial Sequence
  Synthetic
gcauucaaaugagaguuucagggc

SEQ ID NO: 541447 - RNA, 18 nt, Artificial Sequence
  Synthetic
uggaucauaaaggagggc

SEQ ID NO: 541448 - RNA, 19 nt, Artificial Sequence
  Synthetic
cuggaucauaaaggagggc

SEQ ID NO: 541449 - RNA, 20 nt, Artificial Sequence
  Synthetic
acuggaucauaaaggagggc

SEQ ID NO: 541450 - RNA, 21 nt, Artificial Sequence
  Synthetic
aacuggaucauaaaggagggc

SEQ ID NO: 541451 - RNA, 22 nt, Artificial Sequence
  Synthetic
caacuggaucauaaaggagggc

SEQ ID NO: 541452 - RNA, 23 nt, Artificial Sequence
  Synthetic
gcaacuggaucauaaaggagggc

SEQ ID NO: 541453 - RNA, 24 nt, Artificial Sequence
  Synthetic
agcaacuggaucauaaaggagggc

SEQ ID NO: 541454 - RNA, 18 nt, Artificial Sequence
  Synthetic
agaaugaaaagggagggc

SEQ ID NO: 541455 - RNA, 19 nt, Artificial Sequence
  Synthetic
gagaaugaaaagggagggc

SEQ ID NO: 541456 - RNA, 20 nt, Artificial Sequence
  Synthetic
ggagaaugaaaagggagggc

SEQ ID NO: 541457 - RNA, 21 nt, Artificial Sequence
  Synthetic
aggagaaugaaaagggagggc

SEQ ID NO: 541458 - RNA, 22 nt, Artificial Sequence
  Synthetic
caggagaaugaaaagggagggc

SEQ ID NO: 541459 - RNA, 23 nt, Artificial Sequence
  Synthetic
ccaggagaaugaaaagggagggc

SEQ ID NO: 541460 - RNA, 24 nt, Artificial Sequence
  Synthetic
uccaggagaaugaaaagggagggc

SEQ ID NO: 541461 - RNA, 18 nt, Artificial Sequence
  Synthetic
ggugcacucagggagggc

SEQ ID NO: 541462 - RNA, 19 nt, Artificial Sequence
  Synthetic
uggugcacucagggagggc

SEQ ID NO: 541463 - RNA, 20 nt, Artificial Sequence
  Synthetic
guggugcacucagggagggc

SEQ ID NO: 541464 - RNA, 21 nt, Artificial Sequence
  Synthetic
gguggugcacucagggagggc

SEQ ID NO: 541465 - RNA, 22 nt, Artificial Sequence
  Synthetic
ggguggugcacucagggagggc

SEQ ID NO: 541466 - RNA, 23 nt, Artificial Sequence
  Synthetic
aggguggugcacucagggagggc

SEQ ID NO: 541467 - RNA, 24 nt, Artificial Sequence
  Synthetic
gaggguggugcacucagggagggc

SEQ ID NO: 541468 - RNA, 18 nt, Artificial Sequence
  Synthetic
cuuacauggugggagggc

SEQ ID NO: 541469 - RNA, 19 nt, Artificial Sequence
  Synthetic
ccuuacauggugggagggc

SEQ ID NO: 541470 - RNA, 20 nt, Artificial Sequence
  Synthetic
uccuuacauggugggagggc

SEQ ID NO: 541471 - RNA, 21 nt, Artificial Sequence
  Synthetic
guccuuacauggugggagggc

SEQ ID NO: 541472 - RNA, 22 nt, Artificial Sequence
  Synthetic
uguccuuacauggugggagggc

SEQ ID NO: 541473 - RNA, 23 nt, Artificial Sequence
  Synthetic
guguccuuacauggugggagggc

SEQ ID NO: 541474 - RNA, 24 nt, Artificial Sequence
  Synthetic
uguguccuuacauggugggagggc

SEQ ID NO: 541475 - RNA, 18 nt, Artificial Sequence
  Synthetic
agccauuugauggagggc

SEQ ID NO: 541476 - RNA, 19 nt, Artificial Sequence
  Synthetic
gagccauuugauggagggc

SEQ ID NO: 541477 - RNA, 20 nt, Artificial Sequence
  Synthetic
ggagccauuugauggagggc

SEQ ID NO: 541478 - RNA, 21 nt, Artificial Sequence
  Synthetic
gggagccauuugauggagggc

SEQ ID NO: 541479 - RNA, 22 nt, Artificial Sequence
  Synthetic
agggagccauuugauggagggc

SEQ ID NO: 541480 - RNA, 23 nt, Artificial Sequence
  Synthetic
gagggagccauuugauggagggc

SEQ ID NO: 541481 - RNA, 24 nt, Artificial Sequence
  Synthetic
agagggagccauuugauggagggc

SEQ ID NO: 541482 - RNA, 18 nt, Artificial Sequence
  Synthetic
ugugaaauagaugagggc

SEQ ID NO: 541483 - RNA, 19 nt, Artificial Sequence
  Synthetic
cugugaaauagaugagggc

SEQ ID NO: 541484 - RNA, 20 nt, Artificial Sequence
  Synthetic
acugugaaauagaugagggc

SEQ ID NO: 541485 - RNA, 21 nt, Artificial Sequence
  Synthetic
uacugugaaauagaugagggc

SEQ ID NO: 541486 - RNA, 22 nt, Artificial Sequence
  Synthetic
cuacugugaaauagaugagggc

SEQ ID NO: 541487 - RNA, 23 nt, Artificial Sequence
  Synthetic
acuacugugaaauagaugagggc

SEQ ID NO: 541488 - RNA, 24 nt, Artificial Sequence
  Synthetic
uacuacugugaaauagaugagggc

SEQ ID NO: 541489 - RNA, 18 nt, Artificial Sequence
  Synthetic
ucugucuucgaugagggc

SEQ ID NO: 541490 - RNA, 19 nt, Artificial Sequence
  Synthetic
gucugucuucgaugagggc

SEQ ID NO: 541491 - RNA, 20 nt, Artificial Sequence
  Synthetic
ugucugucuucgaugagggc

SEQ ID NO: 541492 - RNA, 21 nt, Artificial Sequence
  Synthetic
cugucugucuucgaugagggc

SEQ ID NO: 541493 - RNA, 22 nt, Artificial Sequence
  Synthetic
ucugucugucuucgaugagggc

SEQ ID NO: 541494 - RNA, 23 nt, Artificial Sequence
  Synthetic
cucugucugucuucgaugagggc

SEQ ID NO: 541495 - RNA, 24 nt, Artificial Sequence
  Synthetic
gcucugucugucuucgaugagggc

SEQ ID NO: 541496 - RNA, 18 nt, Artificial Sequence
  Synthetic
aacugcugaagcuagggc

SEQ ID NO: 541497 - RNA, 19 nt, Artificial Sequence
  Synthetic
aaacugcugaagcuagggc

SEQ ID NO: 541498 - RNA, 20 nt, Artificial Sequence
  Synthetic
aaaacugcugaagcuagggc

SEQ ID NO: 541499 - RNA, 21 nt, Artificial Sequence
  Synthetic
aaaaacugcugaagcuagggc

SEQ ID NO: 541500 - RNA, 22 nt, Artificial Sequence
  Synthetic
uaaaaacugcugaagcuagggc

SEQ ID NO: 541501 - RNA, 23 nt, Artificial Sequence
  Synthetic
cuaaaaacugcugaagcuagggc

SEQ ID NO: 541502 - RNA, 24 nt, Artificial Sequence
  Synthetic
gcuaaaaacugcugaagcuagggc

SEQ ID NO: 541503 - RNA, 18 nt, Artificial Sequence
  Synthetic
auguccagguaguagggc

SEQ ID NO: 541504 - RNA, 19 nt, Artificial Sequence
  Synthetic
cauguccagguaguagggc

SEQ ID NO: 541505 - RNA, 20 nt, Artificial Sequence
  Synthetic
ucauguccagguaguagggc

SEQ ID NO: 541506 - RNA, 21 nt, Artificial Sequence
  Synthetic
gucauguccagguaguagggc

SEQ ID NO: 541507 - RNA, 22 nt, Artificial Sequence
  Synthetic
ugucauguccagguaguagggc

SEQ ID NO: 541508 - RNA, 23 nt, Artificial Sequence
  Synthetic
augucauguccagguaguagggc

SEQ ID NO: 541509 - RNA, 24 nt, Artificial Sequence
  Synthetic
caugucauguccagguaguagggc

SEQ ID NO: 541510 - RNA, 18 nt, Artificial Sequence
  Synthetic
uuggaugaaggguagggc

SEQ ID NO: 541511 - RNA, 19 nt, Artificial Sequence
  Synthetic
uuuggaugaaggguagggc

SEQ ID NO: 541512 - RNA, 20 nt, Artificial Sequence
  Synthetic
cuuuggaugaaggguagggc

SEQ ID NO: 541513 - RNA, 21 nt, Artificial Sequence
  Synthetic
ccuuuggaugaaggguagggc

SEQ ID NO: 541514 - RNA, 22 nt, Artificial Sequence
  Synthetic
accuuuggaugaaggguagggc

SEQ ID NO: 541515 - RNA, 23 nt, Artificial Sequence
  Synthetic
aaccuuuggaugaaggguagggc

SEQ ID NO: 541516 - RNA, 24 nt, Artificial Sequence
  Synthetic
uaaccuuuggaugaaggguagggc

SEQ ID NO: 541517 - RNA, 18 nt, Artificial Sequence
  Synthetic
cugguuucauuuuagggc

SEQ ID NO: 541518 - RNA, 19 nt, Artificial Sequence
  Synthetic
gcugguuucauuuuagggc

SEQ ID NO: 541519 - RNA, 20 nt, Artificial Sequence
  Synthetic
ugcugguuucauuuuagggc

SEQ ID NO: 541520 - RNA, 21 nt, Artificial Sequence
  Synthetic
uugcugguuucauuuuagggc

SEQ ID NO: 541521 - RNA, 22 nt, Artificial Sequence
  Synthetic
uuugcugguuucauuuuagggc

SEQ ID NO: 541522 - RNA, 23 nt, Artificial Sequence
  Synthetic
uuuugcugguuucauuuuagggc

SEQ ID NO: 541523 - RNA, 24 nt, Artificial Sequence
  Synthetic
cuuuugcugguuucauuuuagggc

SEQ ID NO: 541524 - RNA, 18 nt, Artificial Sequence
  Synthetic
ggaaaacagaccacgggc

SEQ ID NO: 541525 - RNA, 19 nt, Artificial Sequence
  Synthetic
aggaaaacagaccacgggc

SEQ ID NO: 541526 - RNA, 20 nt, Artificial Sequence
  Synthetic
gaggaaaacagaccacgggc

SEQ ID NO: 541527 - RNA, 21 nt, Artificial Sequence
  Synthetic
agaggaaaacagaccacgggc

SEQ ID NO: 541528 - RNA, 22 nt, Artificial Sequence
  Synthetic
cagaggaaaacagaccacgggc

SEQ ID NO: 541529 - RNA, 23 nt, Artificial Sequence
  Synthetic
acagaggaaaacagaccacgggc

SEQ ID NO: 541530 - RNA, 24 nt, Artificial Sequence
  Synthetic
aacagaggaaaacagaccacgggc

SEQ ID NO: 541531 - RNA, 18 nt, Artificial Sequence
  Synthetic
aagaccgguaagacgggc

SEQ ID NO: 541532 - RNA, 19 nt, Artificial Sequence
  Synthetic
caagaccgguaagacgggc

SEQ ID NO: 541533 - RNA, 20 nt, Artificial Sequence
  Synthetic
ucaagaccgguaagacgggc

SEQ ID NO: 541534 - RNA, 21 nt, Artificial Sequence
  Synthetic
aucaagaccgguaagacgggc

SEQ ID NO: 541535 - RNA, 22 nt, Artificial Sequence
  Synthetic
gaucaagaccgguaagacgggc

SEQ ID NO: 541536 - RNA, 23 nt, Artificial Sequence
  Synthetic
cgaucaagaccgguaagacgggc

SEQ ID NO: 541537 - RNA, 24 nt, Artificial Sequence
  Synthetic
ccgaucaagaccgguaagacgggc

SEQ ID NO: 541538 - RNA, 18 nt, Artificial Sequence
  Synthetic
uuauucacagugacgggc

SEQ ID NO: 541539 - RNA, 19 nt, Artificial Sequence
  Synthetic
uuuauucacagugacgggc

SEQ ID NO: 541540 - RNA, 20 nt, Artificial Sequence
  Synthetic
uuuuauucacagugacgggc

SEQ ID NO: 541541 - RNA, 21 nt, Artificial Sequence
  Synthetic
auuuuauucacagugacgggc

SEQ ID NO: 541542 - RNA, 22 nt, Artificial Sequence
  Synthetic
uauuuuauucacagugacgggc

SEQ ID NO: 541543 - RNA, 23 nt, Artificial Sequence
  Synthetic
auauuuuauucacagugacgggc

SEQ ID NO: 541544 - RNA, 24 nt, Artificial Sequence
  Synthetic
aauauuuuauucacagugacgggc

SEQ ID NO: 541545 - RNA, 18 nt, Artificial Sequence
  Synthetic
cugagcccaacaccgggc

SEQ ID NO: 541546 - RNA, 19 nt, Artificial Sequence
  Synthetic
acugagcccaacaccgggc

SEQ ID NO: 541547 - RNA, 20 nt, Artificial Sequence
  Synthetic
gacugagcccaacaccgggc

SEQ ID NO: 541548 - RNA, 21 nt, Artificial Sequence
  Synthetic
agacugagcccaacaccgggc

SEQ ID NO: 541549 - RNA, 22 nt, Artificial Sequence
  Synthetic
uagacugagcccaacaccgggc

SEQ ID NO: 541550 - RNA, 23 nt, Artificial Sequence
  Synthetic
auagacugagcccaacaccgggc

SEQ ID NO: 541551 - RNA, 24 nt, Artificial Sequence
  Synthetic
cauagacugagcccaacaccgggc

SEQ ID NO: 541552 - RNA, 18 nt, Artificial Sequence
  Synthetic
uaagauucucucccgggc

SEQ ID NO: 541553 - RNA, 19 nt, Artificial Sequence
  Synthetic
guaagauucucucccgggc

SEQ ID NO: 541554 - RNA, 20 nt, Artificial Sequence
  Synthetic
uguaagauucucucccgggc

SEQ ID NO: 541555 - RNA, 21 nt, Artificial Sequence
  Synthetic
uuguaagauucucucccgggc

SEQ ID NO: 541556 - RNA, 22 nt, Artificial Sequence
  Synthetic
guuguaagauucucucccgggc

SEQ ID NO: 541557 - RNA, 23 nt, Artificial Sequence
  Synthetic
gguuguaagauucucucccgggc

SEQ ID NO: 541558 - RNA, 24 nt, Artificial Sequence
  Synthetic
ggguuguaagauucucucccgggc

SEQ ID NO: 541559 - RNA, 18 nt, Artificial Sequence
  Synthetic
aaguugaaugaaucgggc

SEQ ID NO: 541560 - RNA, 19 nt, Artificial Sequence
  Synthetic
caaguugaaugaaucgggc

SEQ ID NO: 541561 - RNA, 20 nt, Artificial Sequence
  Synthetic
acaaguugaaugaaucgggc

SEQ ID NO: 541562 - RNA, 21 nt, Artificial Sequence
  Synthetic
cacaaguugaaugaaucgggc

SEQ ID NO: 541563 - RNA, 22 nt, Artificial Sequence
  Synthetic
ucacaaguugaaugaaucgggc

SEQ ID NO: 541564 - RNA, 23 nt, Artificial Sequence
  Synthetic
uucacaaguugaaugaaucgggc

SEQ ID NO: 541565 - RNA, 24 nt, Artificial Sequence
  Synthetic
cuucacaaguugaaugaaucgggc

SEQ ID NO: 541566 - RNA, 18 nt, Artificial Sequence
  Synthetic
aguguuauaaaaaggggc

SEQ ID NO: 541567 - RNA, 19 nt, Artificial Sequence
  Synthetic
gaguguuauaaaaaggggc

SEQ ID NO: 541568 - RNA, 20 nt, Artificial Sequence
  Synthetic
ugaguguuauaaaaaggggc

SEQ ID NO: 541569 - RNA, 21 nt, Artificial Sequence
  Synthetic
augaguguuauaaaaaggggc

SEQ ID NO: 541570 - RNA, 22 nt, Artificial Sequence
  Synthetic
caugaguguuauaaaaaggggc

SEQ ID NO: 541571 - RNA, 23 nt, Artificial Sequence
  Synthetic
acaugaguguuauaaaaaggggc

SEQ ID NO: 541572 - RNA, 24 nt, Artificial Sequence
  Synthetic
uacaugaguguuauaaaaaggggc

SEQ ID NO: 541573 - RNA, 18 nt, Artificial Sequence
  Synthetic
ucagaagacacaaggggc

SEQ ID NO: 541574 - RNA, 19 nt, Artificial Sequence
  Synthetic
uucagaagacacaaggggc

SEQ ID NO: 541575 - RNA, 20 nt, Artificial Sequence
  Synthetic
uuucagaagacacaaggggc

SEQ ID NO: 541576 - RNA, 21 nt, Artificial Sequence
  Synthetic
uuuucagaagacacaaggggc

SEQ ID NO: 541577 - RNA, 22 nt, Artificial Sequence
  Synthetic
uuuuucagaagacacaaggggc

SEQ ID NO: 541578 - RNA, 23 nt, Artificial Sequence
  Synthetic
cuuuuucagaagacacaaggggc

SEQ ID NO: 541579 - RNA, 24 nt, Artificial Sequence
  Synthetic
gcuuuuucagaagacacaaggggc

SEQ ID NO: 541580 - RNA, 18 nt, Artificial Sequence
  Synthetic
cuggugguugccaggggc

SEQ ID NO: 541581 - RNA, 19 nt, Artificial Sequence
  Synthetic
acuggugguugccaggggc

SEQ ID NO: 541582 - RNA, 20 nt, Artificial Sequence
  Synthetic
gacuggugguugccaggggc

SEQ ID NO: 541583 - RNA, 21 nt, Artificial Sequence
  Synthetic
ggacuggugguugccaggggc

SEQ ID NO: 541584 - RNA, 22 nt, Artificial Sequence
  Synthetic
uggacuggugguugccaggggc

SEQ ID NO: 541585 - RNA, 23 nt, Artificial Sequence
  Synthetic
cuggacuggugguugccaggggc

SEQ ID NO: 541586 - RNA, 24 nt, Artificial Sequence
  Synthetic
acuggacuggugguugccaggggc

SEQ ID NO: 541587 - RNA, 18 nt, Artificial Sequence
  Synthetic
auggugguuuccaggggc

SEQ ID NO: 541588 - RNA, 19 nt, Artificial Sequence
  Synthetic
aauggugguuuccaggggc

SEQ ID NO: 541589 - RNA, 20 nt, Artificial Sequence
  Synthetic
gaauggugguuuccaggggc

SEQ ID NO: 541590 - RNA, 21 nt, Artificial Sequence
  Synthetic
agaauggugguuuccaggggc

SEQ ID NO: 541591 - RNA, 22 nt, Artificial Sequence
  Synthetic
uagaauggugguuuccaggggc

SEQ ID NO: 541592 - RNA, 23 nt, Artificial Sequence
  Synthetic
auagaauggugguuuccaggggc

SEQ ID NO: 541593 - RNA, 24 nt, Artificial Sequence
  Synthetic
aauagaauggugguuuccaggggc

SEQ ID NO: 541594 - RNA, 18 nt, Artificial Sequence
  Synthetic
gggaaucaagggaggggc

SEQ ID NO: 541595 - RNA, 19 nt, Artificial Sequence
  Synthetic
ugggaaucaagggaggggc

SEQ ID NO: 541596 - RNA, 20 nt, Artificial Sequence
  Synthetic
cugggaaucaagggaggggc

SEQ ID NO: 541597 - RNA, 21 nt, Artificial Sequence
  Synthetic
ccugggaaucaagggaggggc

SEQ ID NO: 541598 - RNA, 22 nt, Artificial Sequence
  Synthetic
accugggaaucaagggaggggc

SEQ ID NO: 541599 - RNA, 23 nt, Artificial Sequence
  Synthetic
aaccugggaaucaagggaggggc

SEQ ID NO: 541600 - RNA, 24 nt, Artificial Sequence
  Synthetic
uaaccugggaaucaagggaggggc

SEQ ID NO: 541601 - RNA, 18 nt, Artificial Sequence
  Synthetic
gugccauuugggaggggc

SEQ ID NO: 541602 - RNA, 19 nt, Artificial Sequence
  Synthetic
cgugccauuugggaggggc

SEQ ID NO: 541603 - RNA, 20 nt, Artificial Sequence
  Synthetic
acgugccauuugggaggggc

SEQ ID NO: 541604 - RNA, 21 nt, Artificial Sequence
  Synthetic
gacgugccauuugggaggggc

SEQ ID NO: 541605 - RNA, 22 nt, Artificial Sequence
  Synthetic
agacgugccauuugggaggggc

SEQ ID NO: 541606 - RNA, 23 nt, Artificial Sequence
  Synthetic
aagacgugccauuugggaggggc

SEQ ID NO: 541607 - RNA, 24 nt, Artificial Sequence
  Synthetic
gaagacgugccauuugggaggggc

SEQ ID NO: 541608 - RNA, 22 nt, Artificial Sequence
  Synthetic
ggacaugagauuugggaggggc

SEQ ID NO: 541609 - RNA, 23 nt, Artificial Sequence
  Synthetic
gggacaugagauuugggaggggc

SEQ ID NO: 541610 - RNA, 24 nt, Artificial Sequence
  Synthetic
agggacaugagauuugggaggggc

SEQ ID NO: 541611 - RNA, 18 nt, Artificial Sequence
  Synthetic
ugucaaggggugaggggc

SEQ ID NO: 541612 - RNA, 19 nt, Artificial Sequence
  Synthetic
cugucaaggggugaggggc

SEQ ID NO: 541613 - RNA, 20 nt, Artificial Sequence
  Synthetic
ccugucaaggggugaggggc

SEQ ID NO: 541614 - RNA, 21 nt, Artificial Sequence
  Synthetic
gccugucaaggggugaggggc

SEQ ID NO: 541615 - RNA, 22 nt, Artificial Sequence
  Synthetic
ggccugucaaggggugaggggc

SEQ ID NO: 541616 - RNA, 23 nt, Artificial Sequence
  Synthetic
gggccugucaaggggugaggggc

SEQ ID NO: 541617 - RNA, 24 nt, Artificial Sequence
  Synthetic
ggggccugucaaggggugaggggc

SEQ ID NO: 541618 - RNA, 18 nt, Artificial Sequence
  Synthetic
aacggucaguuuaggggc

SEQ ID NO: 541619 - RNA, 19 nt, Artificial Sequence
  Synthetic
gaacggucaguuuaggggc

SEQ ID NO: 541620 - RNA, 20 nt, Artificial Sequence
  Synthetic
agaacggucaguuuaggggc

SEQ ID NO: 541621 - RNA, 21 nt, Artificial Sequence
  Synthetic
aagaacggucaguuuaggggc

SEQ ID NO: 541622 - RNA, 22 nt, Artificial Sequence
  Synthetic
uaagaacggucaguuuaggggc

SEQ ID NO: 541623 - RNA, 23 nt, Artificial Sequence
  Synthetic
uuaagaacggucaguuuaggggc

SEQ ID NO: 541624 - RNA, 24 nt, Artificial Sequence
  Synthetic
uuuaagaacggucaguuuaggggc

SEQ ID NO: 541625 - RNA, 18 nt, Artificial Sequence
  Synthetic
gacugucaauuagggggc

SEQ ID NO: 541626 - RNA, 19 nt, Artificial Sequence
  Synthetic
ggacugucaauuagggggc

SEQ ID NO: 541627 - RNA, 20 nt, Artificial Sequence
  Synthetic
aggacugucaauuagggggc

SEQ ID NO: 541628 - RNA, 21 nt, Artificial Sequence
  Synthetic
gaggacugucaauuagggggc

SEQ ID NO: 541629 - RNA, 22 nt, Artificial Sequence
  Synthetic
ggaggacugucaauuagggggc

SEQ ID NO: 541630 - RNA, 23 nt, Artificial Sequence
  Synthetic
uggaggacugucaauuagggggc

SEQ ID NO: 541631 - RNA, 24 nt, Artificial Sequence
  Synthetic
auggaggacugucaauuagggggc

SEQ ID NO: 541632 - RNA, 18 nt, Artificial Sequence
  Synthetic
uguuggcggguggggggc

SEQ ID NO: 541633 - RNA, 19 nt, Artificial Sequence
  Synthetic
cuguuggcggguggggggc

SEQ ID NO: 541634 - RNA, 20 nt, Artificial Sequence
  Synthetic
ccuguuggcggguggggggc

SEQ ID NO: 541635 - RNA, 21 nt, Artificial Sequence
  Synthetic
gccuguuggcggguggggggc

SEQ ID NO: 541636 - RNA, 22 nt, Artificial Sequence
  Synthetic
ggccuguuggcggguggggggc

SEQ ID NO: 541637 - RNA, 23 nt, Artificial Sequence
  Synthetic
gggccuguuggcggguggggggc

SEQ ID NO: 541638 - RNA, 24 nt, Artificial Sequence
  Synthetic
ggggccuguuggcggguggggggc

SEQ ID NO: 541639 - RNA, 18 nt, Artificial Sequence
  Synthetic
ugucaggggguggggggc

SEQ ID NO: 541640 - RNA, 19 nt, Artificial Sequence
  Synthetic
cugucaggggguggggggc

SEQ ID NO: 541641 - RNA, 20 nt, Artificial Sequence
  Synthetic
ccugucaggggguggggggc

SEQ ID NO: 541642 - RNA, 21 nt, Artificial Sequence
  Synthetic
gccugucaggggguggggggc

SEQ ID NO: 541643 - RNA, 22 nt, Artificial Sequence
  Synthetic
ggccugucaggggguggggggc

SEQ ID NO: 541644 - RNA, 23 nt, Artificial Sequence
  Synthetic
gggccugucaggggguggggggc

SEQ ID NO: 541645 - RNA, 24 nt, Artificial Sequence
  Synthetic
ggggccugucaggggguggggggc

SEQ ID NO: 541646 - RNA, 18 nt, Artificial Sequence
  Synthetic
ugucgugggguggggggc

SEQ ID NO: 541647 - RNA, 19 nt, Artificial Sequence
  Synthetic
cugucgugggguggggggc

SEQ ID NO: 541648 - RNA, 20 nt, Artificial Sequence
  Synthetic
ccugucgugggguggggggc

SEQ ID NO: 541649 - RNA, 21 nt, Artificial Sequence
  Synthetic
gccugucgugggguggggggc

SEQ ID NO: 541650 - RNA, 22 nt, Artificial Sequence
  Synthetic
ggccugucgugggguggggggc

SEQ ID NO: 541651 - RNA, 23 nt, Artificial Sequence
  Synthetic
gggccugucgugggguggggggc

SEQ ID NO: 541652 - RNA, 24 nt, Artificial Sequence
  Synthetic
ggggccugucgugggguggggggc

SEQ ID NO: 541653 - RNA, 18 nt, Artificial Sequence
  Synthetic
uuuccaggggcugggggc

SEQ ID NO: 541654 - RNA, 19 nt, Artificial Sequence
  Synthetic
guuuccaggggcugggggc

SEQ ID NO: 541655 - RNA, 20 nt, Artificial Sequence
  Synthetic
gguuuccaggggcugggggc

SEQ ID NO: 541656 - RNA, 21 nt, Artificial Sequence
  Synthetic
ugguuuccaggggcugggggc

SEQ ID NO: 541657 - RNA, 22 nt, Artificial Sequence
  Synthetic
gugguuuccaggggcugggggc

SEQ ID NO: 541658 - RNA, 23 nt, Artificial Sequence
  Synthetic
ggugguuuccaggggcugggggc

SEQ ID NO: 541659 - RNA, 24 nt, Artificial Sequence
  Synthetic
uggugguuuccaggggcugggggc

SEQ ID NO: 541660 - RNA, 18 nt, Artificial Sequence
  Synthetic
auccugaaaaaauggggc

SEQ ID NO: 541661 - RNA, 19 nt, Artificial Sequence
  Synthetic
aauccugaaaaaauggggc

SEQ ID NO: 541662 - RNA, 20 nt, Artificial Sequence
  Synthetic
aaauccugaaaaaauggggc

SEQ ID NO: 541663 - RNA, 21 nt, Artificial Sequence
  Synthetic
aaaauccugaaaaaauggggc

SEQ ID NO: 541664 - RNA, 22 nt, Artificial Sequence
  Synthetic
caaaauccugaaaaaauggggc

SEQ ID NO: 541665 - RNA, 23 nt, Artificial Sequence
  Synthetic
acaaaauccugaaaaaauggggc

SEQ ID NO: 541666 - RNA, 24 nt, Artificial Sequence
  Synthetic
uacaaaauccugaaaaaauggggc

SEQ ID NO: 541667 - RNA, 18 nt, Artificial Sequence
  Synthetic
aacaggagagcauggggc

SEQ ID NO: 541668 - RNA, 19 nt, Artificial Sequence
  Synthetic
gaacaggagagcauggggc

SEQ ID NO: 541669 - RNA, 20 nt, Artificial Sequence
  Synthetic
cgaacaggagagcauggggc

SEQ ID NO: 541670 - RNA, 21 nt, Artificial Sequence
  Synthetic
gcgaacaggagagcauggggc

SEQ ID NO: 541671 - RNA, 22 nt, Artificial Sequence
  Synthetic
ggcgaacaggagagcauggggc

SEQ ID NO: 541672 - RNA, 23 nt, Artificial Sequence
  Synthetic
uggcgaacaggagagcauggggc

SEQ ID NO: 541673 - RNA, 24 nt, Artificial Sequence
  Synthetic
auggcgaacaggagagcauggggc

SEQ ID NO: 541674 - RNA, 18 nt, Artificial Sequence
  Synthetic
cuuaggggaagauggggc

SEQ ID NO: 541675 - RNA, 19 nt, Artificial Sequence
  Synthetic
gcuuaggggaagauggggc

SEQ ID NO: 541676 - RNA, 20 nt, Artificial Sequence
  Synthetic
agcuuaggggaagauggggc

SEQ ID NO: 541677 - RNA, 21 nt, Artificial Sequence
  Synthetic
aagcuuaggggaagauggggc

SEQ ID NO: 541678 - RNA, 22 nt, Artificial Sequence
  Synthetic
gaagcuuaggggaagauggggc

SEQ ID NO: 541679 - RNA, 23 nt, Artificial Sequence
  Synthetic
agaagcuuaggggaagauggggc

SEQ ID NO: 541680 - RNA, 24 nt, Artificial Sequence
  Synthetic
uagaagcuuaggggaagauggggc

SEQ ID NO: 541681 - RNA, 18 nt, Artificial Sequence
  Synthetic
gccacaguaggauggggc

SEQ ID NO: 541682 - RNA, 19 nt, Artificial Sequence
  Synthetic
agccacaguaggauggggc

SEQ ID NO: 541683 - RNA, 20 nt, Artificial Sequence
  Synthetic
cagccacaguaggauggggc

SEQ ID NO: 541684 - RNA, 21 nt, Artificial Sequence
  Synthetic
ucagccacaguaggauggggc

SEQ ID NO: 541685 - RNA, 22 nt, Artificial Sequence
  Synthetic
cucagccacaguaggauggggc

SEQ ID NO: 541686 - RNA, 23 nt, Artificial Sequence
  Synthetic
gcucagccacaguaggauggggc

SEQ ID NO: 541687 - RNA, 24 nt, Artificial Sequence
  Synthetic
agcucagccacaguaggauggggc

SEQ ID NO: 541688 - RNA, 18 nt, Artificial Sequence
  Synthetic
aaaagcaaaaacuggggc

SEQ ID NO: 541689 - RNA, 19 nt, Artificial Sequence
  Synthetic
aaaaagcaaaaacuggggc

SEQ ID NO: 541690 - RNA, 20 nt, Artificial Sequence
  Synthetic
caaaaagcaaaaacuggggc

SEQ ID NO: 541691 - RNA, 21 nt, Artificial Sequence
  Synthetic
gcaaaaagcaaaaacuggggc

SEQ ID NO: 541692 - RNA, 22 nt, Artificial Sequence
  Synthetic
agcaaaaagcaaaaacuggggc

SEQ ID NO: 541693 - RNA, 23 nt, Artificial Sequence
  Synthetic
aagcaaaaagcaaaaacuggggc

SEQ ID NO: 541694 - RNA, 24 nt, Artificial Sequence
  Synthetic
aaagcaaaaagcaaaaacuggggc

SEQ ID NO: 541695 - RNA, 18 nt, Artificial Sequence
  Synthetic
uaaaagucaagcuggggc

SEQ ID NO: 541696 - RNA, 19 nt, Artificial Sequence
  Synthetic
guaaaagucaagcuggggc

SEQ ID NO: 541697 - RNA, 20 nt, Artificial Sequence
  Synthetic
uguaaaagucaagcuggggc

SEQ ID NO: 541698 - RNA, 21 nt, Artificial Sequence
  Synthetic
uuguaaaagucaagcuggggc

SEQ ID NO: 541699 - RNA, 22 nt, Artificial Sequence
  Synthetic
auuguaaaagucaagcuggggc

SEQ ID NO: 541700 - RNA, 23 nt, Artificial Sequence
  Synthetic
gauuguaaaagucaagcuggggc

SEQ ID NO: 541701 - RNA, 24 nt, Artificial Sequence
  Synthetic
agauuguaaaagucaagcuggggc

SEQ ID NO: 541702 - RNA, 18 nt, Artificial Sequence
  Synthetic
ugucauggauucuggggc

SEQ ID NO: 541703 - RNA, 19 nt, Artificial Sequence
  Synthetic
augucauggauucuggggc

SEQ ID NO: 541704 - RNA, 20 nt, Artificial Sequence
  Synthetic
gaugucauggauucuggggc

SEQ ID NO: 541705 - RNA, 21 nt, Artificial Sequence
  Synthetic
ugaugucauggauucuggggc

SEQ ID NO: 541706 - RNA, 22 nt, Artificial Sequence
  Synthetic
uugaugucauggauucuggggc

SEQ ID NO: 541707 - RNA, 23 nt, Artificial Sequence
  Synthetic
cuugaugucauggauucuggggc

SEQ ID NO: 541708 - RNA, 24 nt, Artificial Sequence
  Synthetic
gcuugaugucauggauucuggggc

SEQ ID NO: 541709 - RNA, 18 nt, Artificial Sequence
  Synthetic
acaguucugaaguggggc

SEQ ID NO: 541710 - RNA, 19 nt, Artificial Sequence
  Synthetic
aacaguucugaaguggggc

SEQ ID NO: 541711 - RNA, 20 nt, Artificial Sequence
  Synthetic
caacaguucugaaguggggc

SEQ ID NO: 541712 - RNA, 21 nt, Artificial Sequence
  Synthetic
ucaacaguucugaaguggggc

SEQ ID NO: 541713 - RNA, 22 nt, Artificial Sequence
  Synthetic
uucaacaguucugaaguggggc

SEQ ID NO: 541714 - RNA, 23 nt, Artificial Sequence
  Synthetic
auucaacaguucugaaguggggc

SEQ ID NO: 541715 - RNA, 24 nt, Artificial Sequence
  Synthetic
gauucaacaguucugaaguggggc

SEQ ID NO: 541716 - RNA, 18 nt, Artificial Sequence
  Synthetic
acaguuuugaaguggggc

SEQ ID NO: 541717 - RNA, 19 nt, Artificial Sequence
  Synthetic
aacaguuuugaaguggggc

SEQ ID NO: 541718 - RNA, 20 nt, Artificial Sequence
  Synthetic
caacaguuuugaaguggggc

SEQ ID NO: 541719 - RNA, 21 nt, Artificial Sequence
  Synthetic
ucaacaguuuugaaguggggc

SEQ ID NO: 541720 - RNA, 22 nt, Artificial Sequence
  Synthetic
uucaacaguuuugaaguggggc

SEQ ID NO: 541721 - RNA, 23 nt, Artificial Sequence
  Synthetic
auucaacaguuuugaaguggggc

SEQ ID NO: 541722 - RNA, 24 nt, Artificial Sequence
  Synthetic
gauucaacaguuuugaaguggggc

SEQ ID NO: 541723 - RNA, 18 nt, Artificial Sequence
  Synthetic
acuagaugccaguggggc

SEQ ID NO: 541724 - RNA, 19 nt, Artificial Sequence
  Synthetic
aacuagaugccaguggggc

SEQ ID NO: 541725 - RNA, 20 nt, Artificial Sequence
  Synthetic
uaacuagaugccaguggggc

SEQ ID NO: 541726 - RNA, 21 nt, Artificial Sequence
  Synthetic
cuaacuagaugccaguggggc

SEQ ID NO: 541727 - RNA, 22 nt, Artificial Sequence
  Synthetic
ucuaacuagaugccaguggggc

SEQ ID NO: 541728 - RNA, 23 nt, Artificial Sequence
  Synthetic
cucuaacuagaugccaguggggc

SEQ ID NO: 541729 - RNA, 24 nt, Artificial Sequence
  Synthetic
gcucuaacuagaugccaguggggc

SEQ ID NO: 541730 - RNA, 18 nt, Artificial Sequence
  Synthetic
aaugccuuuagguggggc

SEQ ID NO: 541731 - RNA, 19 nt, Artificial Sequence
  Synthetic
gaaugccuuuagguggggc

SEQ ID NO: 541732 - RNA, 20 nt, Artificial Sequence
  Synthetic
ugaaugccuuuagguggggc

SEQ ID NO: 541733 - RNA, 21 nt, Artificial Sequence
  Synthetic
uugaaugccuuuagguggggc

SEQ ID NO: 541734 - RNA, 22 nt, Artificial Sequence
  Synthetic
uuugaaugccuuuagguggggc

SEQ ID NO: 541735 - RNA, 23 nt, Artificial Sequence
  Synthetic
auuugaaugccuuuagguggggc

SEQ ID NO: 541736 - RNA, 24 nt, Artificial Sequence
  Synthetic
gauuugaaugccuuuagguggggc

SEQ ID NO: 541737 - RNA, 18 nt, Artificial Sequence
  Synthetic
caggggcugggguggggc

SEQ ID NO: 541738 - RNA, 19 nt, Artificial Sequence
  Synthetic
ccaggggcugggguggggc

SEQ ID NO: 541739 - RNA, 20 nt, Artificial Sequence
  Synthetic
uccaggggcugggguggggc

SEQ ID NO: 541740 - RNA, 21 nt, Artificial Sequence
  Synthetic
uuccaggggcugggguggggc

SEQ ID NO: 541741 - RNA, 22 nt, Artificial Sequence
  Synthetic
uuuccaggggcugggguggggc

SEQ ID NO: 541742 - RNA, 23 nt, Artificial Sequence
  Synthetic
guuuccaggggcugggguggggc

SEQ ID NO: 541743 - RNA, 24 nt, Artificial Sequence
  Synthetic
gguuuccaggggcugggguggggc

SEQ ID NO: 541744 - RNA, 18 nt, Artificial Sequence
  Synthetic
cucgguguauauuggggc

SEQ ID NO: 541745 - RNA, 19 nt, Artificial Sequence
  Synthetic
ccucgguguauauuggggc

SEQ ID NO: 541746 - RNA, 20 nt, Artificial Sequence
  Synthetic
cccucgguguauauuggggc

SEQ ID NO: 541747 - RNA, 21 nt, Artificial Sequence
  Synthetic
gcccucgguguauauuggggc

SEQ ID NO: 541748 - RNA, 22 nt, Artificial Sequence
  Synthetic
agcccucgguguauauuggggc

SEQ ID NO: 541749 - RNA, 23 nt, Artificial Sequence
  Synthetic
cagcccucgguguauauuggggc

SEQ ID NO: 541750 - RNA, 24 nt, Artificial Sequence
  Synthetic
acagcccucgguguauauuggggc

SEQ ID NO: 541751 - RNA, 18 nt, Artificial Sequence
  Synthetic
auaggugccuauuggggc

SEQ ID NO: 541752 - RNA, 19 nt, Artificial Sequence
  Synthetic
aauaggugccuauuggggc

SEQ ID NO: 541753 - RNA, 20 nt, Artificial Sequence
  Synthetic
gaauaggugccuauuggggc

SEQ ID NO: 541754 - RNA, 21 nt, Artificial Sequence
  Synthetic
agaauaggugccuauuggggc

SEQ ID NO: 541755 - RNA, 22 nt, Artificial Sequence
  Synthetic
aagaauaggugccuauuggggc

SEQ ID NO: 541756 - RNA, 23 nt, Artificial Sequence
  Synthetic
gaagaauaggugccuauuggggc

SEQ ID NO: 541757 - RNA, 24 nt, Artificial Sequence
  Synthetic
agaagaauaggugccuauuggggc

SEQ ID NO: 541758 - RNA, 18 nt, Artificial Sequence
  Synthetic
ggguggaucuauuggggc

SEQ ID NO: 541759 - RNA, 19 nt, Artificial Sequence
  Synthetic
aggguggaucuauuggggc

SEQ ID NO: 541760 - RNA, 20 nt, Artificial Sequence
  Synthetic
caggguggaucuauuggggc

SEQ ID NO: 541761 - RNA, 21 nt, Artificial Sequence
  Synthetic
acaggguggaucuauuggggc

SEQ ID NO: 541762 - RNA, 22 nt, Artificial Sequence
  Synthetic
gacaggguggaucuauuggggc

SEQ ID NO: 541763 - RNA, 23 nt, Artificial Sequence
  Synthetic
ggacaggguggaucuauuggggc

SEQ ID NO: 541764 - RNA, 24 nt, Artificial Sequence
  Synthetic
aggacaggguggaucuauuggggc

SEQ ID NO: 541765 - RNA, 18 nt, Artificial Sequence
  Synthetic
acauagggcuuuuggggc

SEQ ID NO: 541766 - RNA, 19 nt, Artificial Sequence
  Synthetic
gacauagggcuuuuggggc

SEQ ID NO: 541767 - RNA, 20 nt, Artificial Sequence
  Synthetic
agacauagggcuuuuggggc

SEQ ID NO: 541768 - RNA, 21 nt, Artificial Sequence
  Synthetic
cagacauagggcuuuuggggc

SEQ ID NO: 541769 - RNA, 22 nt, Artificial Sequence
  Synthetic
gcagacauagggcuuuuggggc

SEQ ID NO: 541770 - RNA, 23 nt, Artificial Sequence
  Synthetic
ugcagacauagggcuuuuggggc

SEQ ID NO: 541771 - RNA, 24 nt, Artificial Sequence
  Synthetic
cugcagacauagggcuuuuggggc

SEQ ID NO: 541772 - RNA, 18 nt, Artificial Sequence
  Synthetic
acagaguaaucaaugggc

SEQ ID NO: 541773 - RNA, 19 nt, Artificial Sequence
  Synthetic
cacagaguaaucaaugggc

SEQ ID NO: 541774 - RNA, 20 nt, Artificial Sequence
  Synthetic
acacagaguaaucaaugggc

SEQ ID NO: 541775 - RNA, 21 nt, Artificial Sequence
  Synthetic
aacacagaguaaucaaugggc

SEQ ID NO: 541776 - RNA, 22 nt, Artificial Sequence
  Synthetic
aaacacagaguaaucaaugggc

SEQ ID NO: 541777 - RNA, 23 nt, Artificial Sequence
  Synthetic
aaaacacagaguaaucaaugggc

SEQ ID NO: 541778 - RNA, 24 nt, Artificial Sequence
  Synthetic
uaaaacacagaguaaucaaugggc

SEQ ID NO: 541779 - RNA, 18 nt, Artificial Sequence
  Synthetic
auuuaaagaguaaugggc

SEQ ID NO: 541780 - RNA, 19 nt, Artificial Sequence
  Synthetic
cauuuaaagaguaaugggc

SEQ ID NO: 541781 - RNA, 20 nt, Artificial Sequence
  Synthetic
ucauuuaaagaguaaugggc

SEQ ID NO: 541782 - RNA, 21 nt, Artificial Sequence
  Synthetic
uucauuuaaagaguaaugggc

SEQ ID NO: 541783 - RNA, 22 nt, Artificial Sequence
  Synthetic
uuucauuuaaagaguaaugggc

SEQ ID NO: 541784 - RNA, 23 nt, Artificial Sequence
  Synthetic
auuucauuuaaagaguaaugggc

SEQ ID NO: 541785 - RNA, 24 nt, Artificial Sequence
  Synthetic
gauuucauuuaaagaguaaugggc

SEQ ID NO: 541786 - RNA, 18 nt, Artificial Sequence
  Synthetic
gguacuauguuaaugggc

SEQ ID NO: 541787 - RNA, 19 nt, Artificial Sequence
  Synthetic
cgguacuauguuaaugggc

SEQ ID NO: 541788 - RNA, 20 nt, Artificial Sequence
  Synthetic
gcgguacuauguuaaugggc

SEQ ID NO: 541789 - RNA, 21 nt, Artificial Sequence
  Synthetic
ugcgguacuauguuaaugggc

SEQ ID NO: 541790 - RNA, 22 nt, Artificial Sequence
  Synthetic
uugcgguacuauguuaaugggc

SEQ ID NO: 541791 - RNA, 23 nt, Artificial Sequence
  Synthetic
auugcgguacuauguuaaugggc

SEQ ID NO: 541792 - RNA, 24 nt, Artificial Sequence
  Synthetic
uauugcgguacuauguuaaugggc

SEQ ID NO: 541793 - RNA, 18 nt, Artificial Sequence
  Synthetic
uguaauuggcccaugggc

SEQ ID NO: 541794 - RNA, 19 nt, Artificial Sequence
  Synthetic
guguaauuggcccaugggc

SEQ ID NO: 541795 - RNA, 20 nt, Artificial Sequence
  Synthetic
gguguaauuggcccaugggc

SEQ ID NO: 541796 - RNA, 21 nt, Artificial Sequence
  Synthetic
ggguguaauuggcccaugggc

SEQ ID NO: 541797 - RNA, 22 nt, Artificial Sequence
  Synthetic
uggguguaauuggcccaugggc

SEQ ID NO: 541798 - RNA, 23 nt, Artificial Sequence
  Synthetic
guggguguaauuggcccaugggc

SEQ ID NO: 541799 - RNA, 24 nt, Artificial Sequence
  Synthetic
gguggguguaauuggcccaugggc

SEQ ID NO: 541800 - RNA, 18 nt, Artificial Sequence
  Synthetic
caggacaaaggcaugggc

SEQ ID NO: 541801 - RNA, 19 nt, Artificial Sequence
  Synthetic
ucaggacaaaggcaugggc

SEQ ID NO: 541802 - RNA, 20 nt, Artificial Sequence
  Synthetic
uucaggacaaaggcaugggc

SEQ ID NO: 541803 - RNA, 21 nt, Artificial Sequence
  Synthetic
auucaggacaaaggcaugggc

SEQ ID NO: 541804 - RNA, 22 nt, Artificial Sequence
  Synthetic
cauucaggacaaaggcaugggc

SEQ ID NO: 541805 - RNA, 23 nt, Artificial Sequence
  Synthetic
ccauucaggacaaaggcaugggc

SEQ ID NO: 541806 - RNA, 24 nt, Artificial Sequence
  Synthetic
accauucaggacaaaggcaugggc

SEQ ID NO: 541807 - RNA, 18 nt, Artificial Sequence
  Synthetic
caggacguaggcaugggc

SEQ ID NO: 541808 - RNA, 19 nt, Artificial Sequence
  Synthetic
ucaggacguaggcaugggc

SEQ ID NO: 541809 - RNA, 20 nt, Artificial Sequence
  Synthetic
uucaggacguaggcaugggc

SEQ ID NO: 541810 - RNA, 21 nt, Artificial Sequence
  Synthetic
auucaggacguaggcaugggc

SEQ ID NO: 541811 - RNA, 22 nt, Artificial Sequence
  Synthetic
cauucaggacguaggcaugggc

SEQ ID NO: 541812 - RNA, 23 nt, Artificial Sequence
  Synthetic
ccauucaggacguaggcaugggc

SEQ ID NO: 541813 - RNA, 24 nt, Artificial Sequence
  Synthetic
accauucaggacguaggcaugggc

SEQ ID NO: 541814 - RNA, 18 nt, Artificial Sequence
  Synthetic
acacuuaagucuaugggc

SEQ ID NO: 541815 - RNA, 19 nt, Artificial Sequence
  Synthetic
aacacuuaagucuaugggc

SEQ ID NO: 541816 - RNA, 20 nt, Artificial Sequence
  Synthetic
aaacacuuaagucuaugggc

SEQ ID NO: 541817 - RNA, 21 nt, Artificial Sequence
  Synthetic
gaaacacuuaagucuaugggc

SEQ ID NO: 541818 - RNA, 22 nt, Artificial Sequence
  Synthetic
agaaacacuuaagucuaugggc

SEQ ID NO: 541819 - RNA, 23 nt, Artificial Sequence
  Synthetic
aagaaacacuuaagucuaugggc

SEQ ID NO: 541820 - RNA, 24 nt, Artificial Sequence
  Synthetic
aaagaaacacuuaagucuaugggc

SEQ ID NO: 541821 - RNA, 18 nt, Artificial Sequence
  Synthetic
uugggaugugguaugggc

SEQ ID NO: 541822 - RNA, 19 nt, Artificial Sequence
  Synthetic
guugggaugugguaugggc

SEQ ID NO: 541823 - RNA, 20 nt, Artificial Sequence
  Synthetic
aguugggaugugguaugggc

SEQ ID NO: 541824 - RNA, 21 nt, Artificial Sequence
  Synthetic
aaguugggaugugguaugggc

SEQ ID NO: 541825 - RNA, 22 nt, Artificial Sequence
  Synthetic
uaaguugggaugugguaugggc

SEQ ID NO: 541826 - RNA, 23 nt, Artificial Sequence
  Synthetic
uuaaguugggaugugguaugggc

SEQ ID NO: 541827 - RNA, 24 nt, Artificial Sequence
  Synthetic
guuaaguugggaugugguaugggc

SEQ ID NO: 541828 - RNA, 18 nt, Artificial Sequence
  Synthetic
aaaaugauuauacugggc

SEQ ID NO: 541829 - RNA, 19 nt, Artificial Sequence
  Synthetic
aaaaaugauuauacugggc

SEQ ID NO: 541830 - RNA, 20 nt, Artificial Sequence
  Synthetic
gaaaaaugauuauacugggc

SEQ ID NO: 541831 - RNA, 21 nt, Artificial Sequence
  Synthetic
ugaaaaaugauuauacugggc

SEQ ID NO: 541832 - RNA, 22 nt, Artificial Sequence
  Synthetic
augaaaaaugauuauacugggc

SEQ ID NO: 541833 - RNA, 23 nt, Artificial Sequence
  Synthetic
uaugaaaaaugauuauacugggc

SEQ ID NO: 541834 - RNA, 24 nt, Artificial Sequence
  Synthetic
uuaugaaaaaugauuauacugggc

SEQ ID NO: 541835 - RNA, 18 nt, Artificial Sequence
  Synthetic
cugcacuacagccugggc

SEQ ID NO: 541836 - RNA, 19 nt, Artificial Sequence
  Synthetic
acugcacuacagccugggc

SEQ ID NO: 541837 - RNA, 20 nt, Artificial Sequence
  Synthetic
cacugcacuacagccugggc

SEQ ID NO: 541838 - RNA, 21 nt, Artificial Sequence
  Synthetic
ccacugcacuacagccugggc

SEQ ID NO: 541839 - RNA, 22 nt, Artificial Sequence
  Synthetic
accacugcacuacagccugggc

SEQ ID NO: 541840 - RNA, 23 nt, Artificial Sequence
  Synthetic
caccacugcacuacagccugggc

SEQ ID NO: 541841 - RNA, 24 nt, Artificial Sequence
  Synthetic
gcaccacugcacuacagccugggc

SEQ ID NO: 541842 - RNA, 18 nt, Artificial Sequence
  Synthetic
ggcuuuuggggccugggc

SEQ ID NO: 541843 - RNA, 19 nt, Artificial Sequence
  Synthetic
gggcuuuuggggccugggc

SEQ ID NO: 541844 - RNA, 20 nt, Artificial Sequence
  Synthetic
agggcuuuuggggccugggc

SEQ ID NO: 541845 - RNA, 21 nt, Artificial Sequence
  Synthetic
uagggcuuuuggggccugggc

SEQ ID NO: 541846 - RNA, 22 nt, Artificial Sequence
  Synthetic
auagggcuuuuggggccugggc

SEQ ID NO: 541847 - RNA, 23 nt, Artificial Sequence
  Synthetic
cauagggcuuuuggggccugggc

SEQ ID NO: 541848 - RNA, 24 nt, Artificial Sequence
  Synthetic
acauagggcuuuuggggccugggc

SEQ ID NO: 541849 - RNA, 18 nt, Artificial Sequence
  Synthetic
cugucuuugugccugggc

SEQ ID NO: 541850 - RNA, 19 nt, Artificial Sequence
  Synthetic
gcugucuuugugccugggc

SEQ ID NO: 541851 - RNA, 20 nt, Artificial Sequence
  Synthetic
ugcugucuuugugccugggc

SEQ ID NO: 541852 - RNA, 21 nt, Artificial Sequence
  Synthetic
cugcugucuuugugccugggc

SEQ ID NO: 541853 - RNA, 22 nt, Artificial Sequence
  Synthetic
acugcugucuuugugccugggc

SEQ ID NO: 541854 - RNA, 23 nt, Artificial Sequence
  Synthetic
uacugcugucuuugugccugggc

SEQ ID NO: 541855 - RNA, 24 nt, Artificial Sequence
  Synthetic
uuacugcugucuuugugccugggc

SEQ ID NO: 541856 - RNA, 18 nt, Artificial Sequence
  Synthetic
gagaagaaugagcugggc

SEQ ID NO: 541857 - RNA, 19 nt, Artificial Sequence
  Synthetic
agagaagaaugagcugggc

SEQ ID NO: 541858 - RNA, 20 nt, Artificial Sequence
  Synthetic
aagagaagaaugagcugggc

SEQ ID NO: 541859 - RNA, 21 nt, Artificial Sequence
  Synthetic
gaagagaagaaugagcugggc

SEQ ID NO: 541860 - RNA, 22 nt, Artificial Sequence
  Synthetic
agaagagaagaaugagcugggc

SEQ ID NO: 541861 - RNA, 23 nt, Artificial Sequence
  Synthetic
aagaagagaagaaugagcugggc

SEQ ID NO: 541862 - RNA, 24 nt, Artificial Sequence
  Synthetic
aaagaagagaagaaugagcugggc

SEQ ID NO: 541863 - RNA, 18 nt, Artificial Sequence
  Synthetic
uucaagccugggcugggc

SEQ ID NO: 541864 - RNA, 19 nt, Artificial Sequence
  Synthetic
cuucaagccugggcugggc

SEQ ID NO: 541865 - RNA, 20 nt, Artificial Sequence
  Synthetic
gcuucaagccugggcugggc

SEQ ID NO: 541866 - RNA, 21 nt, Artificial Sequence
  Synthetic
ggcuucaagccugggcugggc

SEQ ID NO: 541867 - RNA, 22 nt, Artificial Sequence
  Synthetic
gggcuucaagccugggcugggc

SEQ ID NO: 541868 - RNA, 23 nt, Artificial Sequence
  Synthetic
ugggcuucaagccugggcugggc

SEQ ID NO: 541869 - RNA, 24 nt, Artificial Sequence
  Synthetic
uugggcuucaagccugggcugggc

SEQ ID NO: 541870 - RNA, 18 nt, Artificial Sequence
  Synthetic
acaccgucuaaucugggc

SEQ ID NO: 541871 - RNA, 19 nt, Artificial Sequence
  Synthetic
gacaccgucuaaucugggc

SEQ ID NO: 541872 - RNA, 20 nt, Artificial Sequence
  Synthetic
ugacaccgucuaaucugggc

SEQ ID NO: 541873 - RNA, 21 nt, Artificial Sequence
  Synthetic
gugacaccgucuaaucugggc

SEQ ID NO: 541874 - RNA, 22 nt, Artificial Sequence
  Synthetic
agugacaccgucuaaucugggc

SEQ ID NO: 541875 - RNA, 23 nt, Artificial Sequence
  Synthetic
aagugacaccgucuaaucugggc

SEQ ID NO: 541876 - RNA, 24 nt, Artificial Sequence
  Synthetic
gaagugacaccgucuaaucugggc

SEQ ID NO: 541877 - RNA, 18 nt, Artificial Sequence
  Synthetic
gcacugguucaucugggc

SEQ ID NO: 541878 - RNA, 19 nt, Artificial Sequence
  Synthetic
ugcacugguucaucugggc

SEQ ID NO: 541879 - RNA, 20 nt, Artificial Sequence
  Synthetic
uugcacugguucaucugggc

SEQ ID NO: 541880 - RNA, 21 nt, Artificial Sequence
  Synthetic
auugcacugguucaucugggc

SEQ ID NO: 541881 - RNA, 22 nt, Artificial Sequence
  Synthetic
gauugcacugguucaucugggc

SEQ ID NO: 541882 - RNA, 23 nt, Artificial Sequence
  Synthetic
agauugcacugguucaucugggc

SEQ ID NO: 541883 - RNA, 24 nt, Artificial Sequence
  Synthetic
uagauugcacugguucaucugggc

SEQ ID NO: 541884 - RNA, 18 nt, Artificial Sequence
  Synthetic
ucuagaugugaucugggc

SEQ ID NO: 541885 - RNA, 19 nt, Artificial Sequence
  Synthetic
gucuagaugugaucugggc

SEQ ID NO: 541886 - RNA, 20 nt, Artificial Sequence
  Synthetic
ggucuagaugugaucugggc

SEQ ID NO: 541887 - RNA, 21 nt, Artificial Sequence
  Synthetic
uggucuagaugugaucugggc

SEQ ID NO: 541888 - RNA, 22 nt, Artificial Sequence
  Synthetic
uuggucuagaugugaucugggc

SEQ ID NO: 541889 - RNA, 23 nt, Artificial Sequence
  Synthetic
auuggucuagaugugaucugggc

SEQ ID NO: 541890 - RNA, 24 nt, Artificial Sequence
  Synthetic
aauuggucuagaugugaucugggc

SEQ ID NO: 541891 - RNA, 18 nt, Artificial Sequence
  Synthetic
gggggaagacuucugggc

SEQ ID NO: 541892 - RNA, 19 nt, Artificial Sequence
  Synthetic
cgggggaagacuucugggc

SEQ ID NO: 541893 - RNA, 20 nt, Artificial Sequence
  Synthetic
ucgggggaagacuucugggc

SEQ ID NO: 541894 - RNA, 21 nt, Artificial Sequence
  Synthetic
aucgggggaagacuucugggc

SEQ ID NO: 541895 - RNA, 22 nt, Artificial Sequence
  Synthetic
caucgggggaagacuucugggc

SEQ ID NO: 541896 - RNA, 23 nt, Artificial Sequence
  Synthetic
ucaucgggggaagacuucugggc

SEQ ID NO: 541897 - RNA, 24 nt, Artificial Sequence
  Synthetic
uucaucgggggaagacuucugggc

SEQ ID NO: 541898 - RNA, 18 nt, Artificial Sequence
  Synthetic
ucucaaacuugagugggc

SEQ ID NO: 541899 - RNA, 19 nt, Artificial Sequence
  Synthetic
uucucaaacuugagugggc

SEQ ID NO: 541900 - RNA, 20 nt, Artificial Sequence
  Synthetic
guucucaaacuugagugggc

SEQ ID NO: 541901 - RNA, 21 nt, Artificial Sequence
  Synthetic
gguucucaaacuugagugggc

SEQ ID NO: 541902 - RNA, 22 nt, Artificial Sequence
  Synthetic
ugguucucaaacuugagugggc

SEQ ID NO: 541903 - RNA, 23 nt, Artificial Sequence
  Synthetic
gugguucucaaacuugagugggc

SEQ ID NO: 541904 - RNA, 24 nt, Artificial Sequence
  Synthetic
agugguucucaaacuugagugggc

SEQ ID NO: 541905 - RNA, 18 nt, Artificial Sequence
  Synthetic
caggacauaggcgugggc

SEQ ID NO: 541906 - RNA, 19 nt, Artificial Sequence
  Synthetic
ucaggacauaggcgugggc

SEQ ID NO: 541907 - RNA, 20 nt, Artificial Sequence
  Synthetic
uucaggacauaggcgugggc

SEQ ID NO: 541908 - RNA, 21 nt, Artificial Sequence
  Synthetic
auucaggacauaggcgugggc

SEQ ID NO: 541909 - RNA, 22 nt, Artificial Sequence
  Synthetic
cauucaggacauaggcgugggc

SEQ ID NO: 541910 - RNA, 23 nt, Artificial Sequence
  Synthetic
ccauucaggacauaggcgugggc

SEQ ID NO: 541911 - RNA, 24 nt, Artificial Sequence
  Synthetic
accauucaggacauaggcgugggc

SEQ ID NO: 541912 - RNA, 18 nt, Artificial Sequence
  Synthetic
uccaccugcaaggugggc

SEQ ID NO: 541913 - RNA, 19 nt, Artificial Sequence
  Synthetic
auccaccugcaaggugggc

SEQ ID NO: 541914 - RNA, 20 nt, Artificial Sequence
  Synthetic
gauccaccugcaaggugggc

SEQ ID NO: 541915 - RNA, 21 nt, Artificial Sequence
  Synthetic
ggauccaccugcaaggugggc

SEQ ID NO: 541916 - RNA, 22 nt, Artificial Sequence
  Synthetic
uggauccaccugcaaggugggc

SEQ ID NO: 541917 - RNA, 23 nt, Artificial Sequence
  Synthetic
auggauccaccugcaaggugggc

SEQ ID NO: 541918 - RNA, 24 nt, Artificial Sequence
  Synthetic
uauggauccaccugcaaggugggc

SEQ ID NO: 541919 - RNA, 18 nt, Artificial Sequence
  Synthetic
aguggguguaaggugggc

SEQ ID NO: 541920 - RNA, 19 nt, Artificial Sequence
  Synthetic
caguggguguaaggugggc

SEQ ID NO: 541921 - RNA, 20 nt, Artificial Sequence
  Synthetic
ucaguggguguaaggugggc

SEQ ID NO: 541922 - RNA, 21 nt, Artificial Sequence
  Synthetic
uucaguggguguaaggugggc

SEQ ID NO: 541923 - RNA, 22 nt, Artificial Sequence
  Synthetic
auucaguggguguaaggugggc

SEQ ID NO: 541924 - RNA, 23 nt, Artificial Sequence
  Synthetic
gauucaguggguguaaggugggc

SEQ ID NO: 541925 - RNA, 24 nt, Artificial Sequence
  Synthetic
ugauucaguggguguaaggugggc

SEQ ID NO: 541926 - RNA, 18 nt, Artificial Sequence
  Synthetic
uuacagagagaggugggc

SEQ ID NO: 541927 - RNA, 19 nt, Artificial Sequence
  Synthetic
uuuacagagagaggugggc

SEQ ID NO: 541928 - RNA, 20 nt, Artificial Sequence
  Synthetic
auuuacagagagaggugggc

SEQ ID NO: 541929 - RNA, 21 nt, Artificial Sequence
  Synthetic
cauuuacagagagaggugggc

SEQ ID NO: 541930 - RNA, 22 nt, Artificial Sequence
  Synthetic
ccauuuacagagagaggugggc

SEQ ID NO: 541931 - RNA, 23 nt, Artificial Sequence
  Synthetic
cccauuuacagagagaggugggc

SEQ ID NO: 541932 - RNA, 24 nt, Artificial Sequence
  Synthetic
ucccauuuacagagagaggugggc

SEQ ID NO: 541933 - RNA, 18 nt, Artificial Sequence
  Synthetic
uuugguccugccuugggc

SEQ ID NO: 541934 - RNA, 19 nt, Artificial Sequence
  Synthetic
uuuugguccugccuugggc

SEQ ID NO: 541935 - RNA, 20 nt, Artificial Sequence
  Synthetic
uuuuugguccugccuugggc

SEQ ID NO: 541936 - RNA, 21 nt, Artificial Sequence
  Synthetic
auuuuugguccugccuugggc

SEQ ID NO: 541937 - RNA, 22 nt, Artificial Sequence
  Synthetic
cauuuuugguccugccuugggc

SEQ ID NO: 541938 - RNA, 23 nt, Artificial Sequence
  Synthetic
gcauuuuugguccugccuugggc

SEQ ID NO: 541939 - RNA, 24 nt, Artificial Sequence
  Synthetic
agcauuuuugguccugccuugggc

SEQ ID NO: 541940 - RNA, 18 nt, Artificial Sequence
  Synthetic
ucacccauuaucuugggc

SEQ ID NO: 541941 - RNA, 19 nt, Artificial Sequence
  Synthetic
cucacccauuaucuugggc

SEQ ID NO: 541942 - RNA, 20 nt, Artificial Sequence
  Synthetic
gcucacccauuaucuugggc

SEQ ID NO: 541943 - RNA, 21 nt, Artificial Sequence
  Synthetic
agcucacccauuaucuugggc

SEQ ID NO: 541944 - RNA, 22 nt, Artificial Sequence
  Synthetic
gagcucacccauuaucuugggc

SEQ ID NO: 541945 - RNA, 23 nt, Artificial Sequence
  Synthetic
ggagcucacccauuaucuugggc

SEQ ID NO: 541946 - RNA, 24 nt, Artificial Sequence
  Synthetic
uggagcucacccauuaucuugggc

SEQ ID NO: 541947 - RNA, 18 nt, Artificial Sequence
  Synthetic
aaaaggauuuguuugggc

SEQ ID NO: 541948 - RNA, 19 nt, Artificial Sequence
  Synthetic
aaaaaggauuuguuugggc

SEQ ID NO: 541949 - RNA, 20 nt, Artificial Sequence
  Synthetic
aaaaaaggauuuguuugggc

SEQ ID NO: 541950 - RNA, 21 nt, Artificial Sequence
  Synthetic
caaaaaaggauuuguuugggc

SEQ ID NO: 541951 - RNA, 22 nt, Artificial Sequence
  Synthetic
gcaaaaaaggauuuguuugggc

SEQ ID NO: 541952 - RNA, 23 nt, Artificial Sequence
  Synthetic
ugcaaaaaaggauuuguuugggc

SEQ ID NO: 541953 - RNA, 24 nt, Artificial Sequence
  Synthetic
uugcaaaaaaggauuuguuugggc

SEQ ID NO: 541954 - RNA, 18 nt, Artificial Sequence
  Synthetic
aauuguuuaaaaaauggc

SEQ ID NO: 541955 - RNA, 19 nt, Artificial Sequence
  Synthetic
caauuguuuaaaaaauggc

SEQ ID NO: 541956 - RNA, 20 nt, Artificial Sequence
  Synthetic
ccaauuguuuaaaaaauggc

SEQ ID NO: 541957 - RNA, 21 nt, Artificial Sequence
  Synthetic
accaauuguuuaaaaaauggc

SEQ ID NO: 541958 - RNA, 22 nt, Artificial Sequence
  Synthetic
aaccaauuguuuaaaaaauggc

SEQ ID NO: 541959 - RNA, 23 nt, Artificial Sequence
  Synthetic
aaaccaauuguuuaaaaaauggc

SEQ ID NO: 541960 - RNA, 24 nt, Artificial Sequence
  Synthetic
uaaaccaauuguuuaaaaaauggc

SEQ ID NO: 541961 - RNA, 18 nt, Artificial Sequence
  Synthetic
aacuacgugcaaaauggc

SEQ ID NO: 541962 - RNA, 19 nt, Artificial Sequence
  Synthetic
aaacuacgugcaaaauggc

SEQ ID NO: 541963 - RNA, 20 nt, Artificial Sequence
  Synthetic
aaaacuacgugcaaaauggc

SEQ ID NO: 541964 - RNA, 21 nt, Artificial Sequence
  Synthetic
gaaaacuacgugcaaaauggc

SEQ ID NO: 541965 - RNA, 22 nt, Artificial Sequence
  Synthetic
ggaaaacuacgugcaaaauggc

SEQ ID NO: 541966 - RNA, 23 nt, Artificial Sequence
  Synthetic
aggaaaacuacgugcaaaauggc

SEQ ID NO: 541967 - RNA, 24 nt, Artificial Sequence
  Synthetic
aaggaaaacuacgugcaaaauggc

SEQ ID NO: 541968 - RNA, 18 nt, Artificial Sequence
  Synthetic
uuugcagaagaaaauggc

SEQ ID NO: 541969 - RNA, 19 nt, Artificial Sequence
  Synthetic
uuuugcagaagaaaauggc

SEQ ID NO: 541970 - RNA, 20 nt, Artificial Sequence
  Synthetic
cuuuugcagaagaaaauggc

SEQ ID NO: 541971 - RNA, 21 nt, Artificial Sequence
  Synthetic
ccuuuugcagaagaaaauggc

SEQ ID NO: 541972 - RNA, 22 nt, Artificial Sequence
  Synthetic
cccuuuugcagaagaaaauggc

SEQ ID NO: 541973 - RNA, 23 nt, Artificial Sequence
  Synthetic
gcccuuuugcagaagaaaauggc

SEQ ID NO: 541974 - RNA, 24 nt, Artificial Sequence
  Synthetic
agcccuuuugcagaagaaaauggc

SEQ ID NO: 541975 - RNA, 18 nt, Artificial Sequence
  Synthetic
auagaaguuucaaauggc

SEQ ID NO: 541976 - RNA, 19 nt, Artificial Sequence
  Synthetic
uauagaaguuucaaauggc

SEQ ID NO: 541977 - RNA, 20 nt, Artificial Sequence
  Synthetic
auauagaaguuucaaauggc

SEQ ID NO: 541978 - RNA, 21 nt, Artificial Sequence
  Synthetic
aauauagaaguuucaaauggc

SEQ ID NO: 541979 - RNA, 22 nt, Artificial Sequence
  Synthetic
uaauauagaaguuucaaauggc

SEQ ID NO: 541980 - RNA, 23 nt, Artificial Sequence
  Synthetic
auaauauagaaguuucaaauggc

SEQ ID NO: 541981 - RNA, 24 nt, Artificial Sequence
  Synthetic
aauaauauagaaguuucaaauggc

SEQ ID NO: 541982 - RNA, 18 nt, Artificial Sequence
  Synthetic
agcagggaacuaaauggc

SEQ ID NO: 541983 - RNA, 19 nt, Artificial Sequence
  Synthetic
uagcagggaacuaaauggc

SEQ ID NO: 541984 - RNA, 20 nt, Artificial Sequence
  Synthetic
auagcagggaacuaaauggc

SEQ ID NO: 541985 - RNA, 21 nt, Artificial Sequence
  Synthetic
aauagcagggaacuaaauggc

SEQ ID NO: 541986 - RNA, 22 nt, Artificial Sequence
  Synthetic
caauagcagggaacuaaauggc

SEQ ID NO: 541987 - RNA, 23 nt, Artificial Sequence
  Synthetic
gcaauagcagggaacuaaauggc

SEQ ID NO: 541988 - RNA, 24 nt, Artificial Sequence
  Synthetic
ggcaauagcagggaacuaaauggc

SEQ ID NO: 541989 - RNA, 18 nt, Artificial Sequence
  Synthetic
aaaaccaacuuaaauggc

SEQ ID NO: 541990 - RNA, 19 nt, Artificial Sequence
  Synthetic
aaaaaccaacuuaaauggc

SEQ ID NO: 541991 - RNA, 20 nt, Artificial Sequence
  Synthetic
caaaaaccaacuuaaauggc

SEQ ID NO: 541992 - RNA, 21 nt, Artificial Sequence
  Synthetic
acaaaaaccaacuuaaauggc

SEQ ID NO: 541993 - RNA, 22 nt, Artificial Sequence
  Synthetic
uacaaaaaccaacuuaaauggc

SEQ ID NO: 541994 - RNA, 23 nt, Artificial Sequence
  Synthetic
guacaaaaaccaacuuaaauggc

SEQ ID NO: 541995 - RNA, 24 nt, Artificial Sequence
  Synthetic
aguacaaaaaccaacuuaaauggc

SEQ ID NO: 541996 - RNA, 18 nt, Artificial Sequence
  Synthetic
acaagaaguaacaauggc

SEQ ID NO: 541997 - RNA, 19 nt, Artificial Sequence
  Synthetic
gacaagaaguaacaauggc

SEQ ID NO: 541998 - RNA, 20 nt, Artificial Sequence
  Synthetic
agacaagaaguaacaauggc

SEQ ID NO: 541999 - RNA, 21 nt, Artificial Sequence
  Synthetic
gagacaagaaguaacaauggc

SEQ ID NO: 542000 - RNA, 22 nt, Artificial Sequence
  Synthetic
agagacaagaaguaacaauggc

SEQ ID NO: 542001 - RNA, 23 nt, Artificial Sequence
  Synthetic
cagagacaagaaguaacaauggc

SEQ ID NO: 542002 - RNA, 24 nt, Artificial Sequence
  Synthetic
gcagagacaagaaguaacaauggc

SEQ ID NO: 542003 - RNA, 18 nt, Artificial Sequence
  Synthetic
gucaaaucacacaauggc

SEQ ID NO: 542004 - RNA, 19 nt, Artificial Sequence
  Synthetic
ggucaaaucacacaauggc

SEQ ID NO: 542005 - RNA, 20 nt, Artificial Sequence
  Synthetic
uggucaaaucacacaauggc

SEQ ID NO: 542006 - RNA, 21 nt, Artificial Sequence
  Synthetic
auggucaaaucacacaauggc

SEQ ID NO: 542007 - RNA, 22 nt, Artificial Sequence
  Synthetic
aauggucaaaucacacaauggc

SEQ ID NO: 542008 - RNA, 23 nt, Artificial Sequence
  Synthetic
aaauggucaaaucacacaauggc

SEQ ID NO: 542009 - RNA, 24 nt, Artificial Sequence
  Synthetic
aaaauggucaaaucacacaauggc

SEQ ID NO: 542010 - RNA, 18 nt, Artificial Sequence
  Synthetic
uacuuaauucacaauggc

SEQ ID NO: 542011 - RNA, 19 nt, Artificial Sequence
  Synthetic
uuacuuaauucacaauggc

SEQ ID NO: 542012 - RNA, 20 nt, Artificial Sequence
  Synthetic
uuuacuuaauucacaauggc

SEQ ID NO: 542013 - RNA, 21 nt, Artificial Sequence
  Synthetic
guuuacuuaauucacaauggc

SEQ ID NO: 542014 - RNA, 22 nt, Artificial Sequence
  Synthetic
uguuuacuuaauucacaauggc

SEQ ID NO: 542015 - RNA, 23 nt, Artificial Sequence
  Synthetic
uuguuuacuuaauucacaauggc

SEQ ID NO: 542016 - RNA, 24 nt, Artificial Sequence
  Synthetic
auuguuuacuuaauucacaauggc

SEQ ID NO: 542017 - RNA, 18 nt, Artificial Sequence
  Synthetic
caggagaaggagaauggc

SEQ ID NO: 542018 - RNA, 19 nt, Artificial Sequence
  Synthetic
gcaggagaaggagaauggc

SEQ ID NO: 542019 - RNA, 20 nt, Artificial Sequence
  Synthetic
ggcaggagaaggagaauggc

SEQ ID NO: 542020 - RNA, 21 nt, Artificial Sequence
  Synthetic
aggcaggagaaggagaauggc

SEQ ID NO: 542021 - RNA, 22 nt, Artificial Sequence
  Synthetic
gaggcaggagaaggagaauggc

SEQ ID NO: 542022 - RNA, 23 nt, Artificial Sequence
  Synthetic
ugaggcaggagaaggagaauggc

SEQ ID NO: 542023 - RNA, 24 nt, Artificial Sequence
  Synthetic
cugaggcaggagaaggagaauggc

SEQ ID NO: 542024 - RNA, 18 nt, Artificial Sequence
  Synthetic
augacgcaggagaauggc

SEQ ID NO: 542025 - RNA, 19 nt, Artificial Sequence
  Synthetic
gaugacgcaggagaauggc

SEQ ID NO: 542026 - RNA, 20 nt, Artificial Sequence
  Synthetic
ggaugacgcaggagaauggc

SEQ ID NO: 542027 - RNA, 21 nt, Artificial Sequence
  Synthetic
aggaugacgcaggagaauggc

SEQ ID NO: 542028 - RNA, 22 nt, Artificial Sequence
  Synthetic
gaggaugacgcaggagaauggc

SEQ ID NO: 542029 - RNA, 23 nt, Artificial Sequence
  Synthetic
ggaggaugacgcaggagaauggc

SEQ ID NO: 542030 - RNA, 24 nt, Artificial Sequence
  Synthetic
gggaggaugacgcaggagaauggc

SEQ ID NO: 542031 - RNA, 21 nt, Artificial Sequence
  Synthetic
aggcugaggcaggagaauggc

SEQ ID NO: 542032 - RNA, 22 nt, Artificial Sequence
  Synthetic
gaggcugaggcaggagaauggc

SEQ ID NO: 542033 - RNA, 23 nt, Artificial Sequence
  Synthetic
ggaggcugaggcaggagaauggc

SEQ ID NO: 542034 - RNA, 24 nt, Artificial Sequence
  Synthetic
gggaggcugaggcaggagaauggc

SEQ ID NO: 542035 - RNA, 18 nt, Artificial Sequence
  Synthetic
ucaagccccaguaauggc

SEQ ID NO: 542036 - RNA, 19 nt, Artificial Sequence
  Synthetic
gucaagccccaguaauggc

SEQ ID NO: 542037 - RNA, 20 nt, Artificial Sequence
  Synthetic
agucaagccccaguaauggc

SEQ ID NO: 542038 - RNA, 21 nt, Artificial Sequence
  Synthetic
aagucaagccccaguaauggc

SEQ ID NO: 542039 - RNA, 22 nt, Artificial Sequence
  Synthetic
gaagucaagccccaguaauggc

SEQ ID NO: 542040 - RNA, 23 nt, Artificial Sequence
  Synthetic
agaagucaagccccaguaauggc

SEQ ID NO: 542041 - RNA, 24 nt, Artificial Sequence
  Synthetic
aagaagucaagccccaguaauggc

SEQ ID NO: 542042 - RNA, 18 nt, Artificial Sequence
  Synthetic
caaugcuauauuaauggc

SEQ ID NO: 542043 - RNA, 19 nt, Artificial Sequence
  Synthetic
acaaugcuauauuaauggc

SEQ ID NO: 542044 - RNA, 20 nt, Artificial Sequence
  Synthetic
aacaaugcuauauuaauggc

SEQ ID NO: 542045 - RNA, 21 nt, Artificial Sequence
  Synthetic
aaacaaugcuauauuaauggc

SEQ ID NO: 542046 - RNA, 22 nt, Artificial Sequence
  Synthetic
uaaacaaugcuauauuaauggc

SEQ ID NO: 542047 - RNA, 23 nt, Artificial Sequence
  Synthetic
uuaaacaaugcuauauuaauggc

SEQ ID NO: 542048 - RNA, 24 nt, Artificial Sequence
  Synthetic
cuuaaacaaugcuauauuaauggc

SEQ ID NO: 542049 - RNA, 18 nt, Artificial Sequence
  Synthetic
uuggacuagucacauggc

SEQ ID NO: 542050 - RNA, 19 nt, Artificial Sequence
  Synthetic
uuuggacuagucacauggc

SEQ ID NO: 542051 - RNA, 20 nt, Artificial Sequence
  Synthetic
auuuggacuagucacauggc

SEQ ID NO: 542052 - RNA, 21 nt, Artificial Sequence
  Synthetic
uauuuggacuagucacauggc

SEQ ID NO: 542053 - RNA, 22 nt, Artificial Sequence
  Synthetic
cuauuuggacuagucacauggc

SEQ ID NO: 542054 - RNA, 23 nt, Artificial Sequence
  Synthetic
ucuauuuggacuagucacauggc

SEQ ID NO: 542055 - RNA, 24 nt, Artificial Sequence
  Synthetic
aucuauuuggacuagucacauggc

SEQ ID NO: 542056 - RNA, 18 nt, Artificial Sequence
  Synthetic
acugauuugggacauggc

SEQ ID NO: 542057 - RNA, 19 nt, Artificial Sequence
  Synthetic
aacugauuugggacauggc

SEQ ID NO: 542058 - RNA, 20 nt, Artificial Sequence
  Synthetic
caacugauuugggacauggc

SEQ ID NO: 542059 - RNA, 21 nt, Artificial Sequence
  Synthetic
ucaacugauuugggacauggc

SEQ ID NO: 542060 - RNA, 22 nt, Artificial Sequence
  Synthetic
uucaacugauuugggacauggc

SEQ ID NO: 542061 - RNA, 23 nt, Artificial Sequence
  Synthetic
auucaacugauuugggacauggc

SEQ ID NO: 542062 - RNA, 24 nt, Artificial Sequence
  Synthetic
gauucaacugauuugggacauggc

SEQ ID NO: 542063 - RNA, 18 nt, Artificial Sequence
  Synthetic
cucaccauucuacauggc

SEQ ID NO: 542064 - RNA, 19 nt, Artificial Sequence
  Synthetic
acucaccauucuacauggc

SEQ ID NO: 542065 - RNA, 20 nt, Artificial Sequence
  Synthetic
gacucaccauucuacauggc

SEQ ID NO: 542066 - RNA, 21 nt, Artificial Sequence
  Synthetic
ggacucaccauucuacauggc

SEQ ID NO: 542067 - RNA, 22 nt, Artificial Sequence
  Synthetic
uggacucaccauucuacauggc

SEQ ID NO: 542068 - RNA, 23 nt, Artificial Sequence
  Synthetic
auggacucaccauucuacauggc

SEQ ID NO: 542069 - RNA, 24 nt, Artificial Sequence
  Synthetic
aauggacucaccauucuacauggc

SEQ ID NO: 542070 - RNA, 18 nt, Artificial Sequence
  Synthetic
gaggggaagacccauggc

SEQ ID NO: 542071 - RNA, 19 nt, Artificial Sequence
  Synthetic
agaggggaagacccauggc

SEQ ID NO: 542072 - RNA, 20 nt, Artificial Sequence
  Synthetic
aagaggggaagacccauggc

SEQ ID NO: 542073 - RNA, 21 nt, Artificial Sequence
  Synthetic
gaagaggggaagacccauggc

SEQ ID NO: 542074 - RNA, 22 nt, Artificial Sequence
  Synthetic
ggaagaggggaagacccauggc

SEQ ID NO: 542075 - RNA, 23 nt, Artificial Sequence
  Synthetic
gggaagaggggaagacccauggc

SEQ ID NO: 542076 - RNA, 24 nt, Artificial Sequence
  Synthetic
agggaagaggggaagacccauggc

SEQ ID NO: 542077 - RNA, 18 nt, Artificial Sequence
  Synthetic
uacaugcucagccauggc

SEQ ID NO: 542078 - RNA, 19 nt, Artificial Sequence
  Synthetic
cuacaugcucagccauggc

SEQ ID NO: 542079 - RNA, 20 nt, Artificial Sequence
  Synthetic
ccuacaugcucagccauggc

SEQ ID NO: 542080 - RNA, 21 nt, Artificial Sequence
  Synthetic
cccuacaugcucagccauggc

SEQ ID NO: 542081 - RNA, 22 nt, Artificial Sequence
  Synthetic
ucccuacaugcucagccauggc

SEQ ID NO: 542082 - RNA, 23 nt, Artificial Sequence
  Synthetic
aucccuacaugcucagccauggc

SEQ ID NO: 542083 - RNA, 24 nt, Artificial Sequence
  Synthetic
aaucccuacaugcucagccauggc

SEQ ID NO: 542084 - RNA, 18 nt, Artificial Sequence
  Synthetic
cacacaguucagcauggc

SEQ ID NO: 542085 - RNA, 19 nt, Artificial Sequence
  Synthetic
acacacaguucagcauggc

SEQ ID NO: 542086 - RNA, 20 nt, Artificial Sequence
  Synthetic
gacacacaguucagcauggc

SEQ ID NO: 542087 - RNA, 21 nt, Artificial Sequence
  Synthetic
ugacacacaguucagcauggc

SEQ ID NO: 542088 - RNA, 22 nt, Artificial Sequence
  Synthetic
uugacacacaguucagcauggc

SEQ ID NO: 542089 - RNA, 23 nt, Artificial Sequence
  Synthetic
auugacacacaguucagcauggc

SEQ ID NO: 542090 - RNA, 24 nt, Artificial Sequence
  Synthetic
aauugacacacaguucagcauggc

SEQ ID NO: 542091 - RNA, 18 nt, Artificial Sequence
  Synthetic
cucauaguucagcauggc

SEQ ID NO: 542092 - RNA, 19 nt, Artificial Sequence
  Synthetic
acucauaguucagcauggc

SEQ ID NO: 542093 - RNA, 20 nt, Artificial Sequence
  Synthetic
gacucauaguucagcauggc

SEQ ID NO: 542094 - RNA, 21 nt, Artificial Sequence
  Synthetic
ugacucauaguucagcauggc

SEQ ID NO: 542095 - RNA, 22 nt, Artificial Sequence
  Synthetic
uugacucauaguucagcauggc

SEQ ID NO: 542096 - RNA, 23 nt, Artificial Sequence
  Synthetic
auugacucauaguucagcauggc

SEQ ID NO: 542097 - RNA, 24 nt, Artificial Sequence
  Synthetic
aauugacucauaguucagcauggc

SEQ ID NO: 542098 - RNA, 18 nt, Artificial Sequence
  Synthetic
uucaccauucugcauggc

SEQ ID NO: 542099 - RNA, 19 nt, Artificial Sequence
  Synthetic
auucaccauucugcauggc

SEQ ID NO: 542100 - RNA, 20 nt, Artificial Sequence
  Synthetic
gauucaccauucugcauggc

SEQ ID NO: 542101 - RNA, 21 nt, Artificial Sequence
  Synthetic
ugauucaccauucugcauggc

SEQ ID NO: 542102 - RNA, 22 nt, Artificial Sequence
  Synthetic
uugauucaccauucugcauggc

SEQ ID NO: 542103 - RNA, 23 nt, Artificial Sequence
  Synthetic
auugauucaccauucugcauggc

SEQ ID NO: 542104 - RNA, 24 nt, Artificial Sequence
  Synthetic
aauugauucaccauucugcauggc

SEQ ID NO: 542105 - RNA, 18 nt, Artificial Sequence
  Synthetic
aguuuuaauuugcauggc

SEQ ID NO: 542106 - RNA, 19 nt, Artificial Sequence
  Synthetic
uaguuuuaauuugcauggc

SEQ ID NO: 542107 - RNA, 20 nt, Artificial Sequence
  Synthetic
uuaguuuuaauuugcauggc

SEQ ID NO: 542108 - RNA, 21 nt, Artificial Sequence
  Synthetic
uuuaguuuuaauuugcauggc

SEQ ID NO: 542109 - RNA, 22 nt, Artificial Sequence
  Synthetic
uuuuaguuuuaauuugcauggc

SEQ ID NO: 542110 - RNA, 23 nt, Artificial Sequence
  Synthetic
auuuuaguuuuaauuugcauggc

SEQ ID NO: 542111 - RNA, 24 nt, Artificial Sequence
  Synthetic
cauuuuaguuuuaauuugcauggc

SEQ ID NO: 542112 - RNA, 18 nt, Artificial Sequence
  Synthetic
ucaggccaaucggauggc

SEQ ID NO: 542113 - RNA, 19 nt, Artificial Sequence
  Synthetic
uucaggccaaucggauggc

SEQ ID NO: 542114 - RNA, 20 nt, Artificial Sequence
  Synthetic
auucaggccaaucggauggc

SEQ ID NO: 542115 - RNA, 21 nt, Artificial Sequence
  Synthetic
gauucaggccaaucggauggc

SEQ ID NO: 542116 - RNA, 22 nt, Artificial Sequence
  Synthetic
ugauucaggccaaucggauggc

SEQ ID NO: 542117 - RNA, 23 nt, Artificial Sequence
  Synthetic
augauucaggccaaucggauggc

SEQ ID NO: 542118 - RNA, 24 nt, Artificial Sequence
  Synthetic
gaugauucaggccaaucggauggc

SEQ ID NO: 542119 - RNA, 18 nt, Artificial Sequence
  Synthetic
gagagugaugaugauggc

SEQ ID NO: 542120 - RNA, 19 nt, Artificial Sequence
  Synthetic
agagagugaugaugauggc

SEQ ID NO: 542121 - RNA, 20 nt, Artificial Sequence
  Synthetic
aagagagugaugaugauggc

SEQ ID NO: 542122 - RNA, 21 nt, Artificial Sequence
  Synthetic
gaagagagugaugaugauggc

SEQ ID NO: 542123 - RNA, 22 nt, Artificial Sequence
  Synthetic
ggaagagagugaugaugauggc

SEQ ID NO: 542124 - RNA, 23 nt, Artificial Sequence
  Synthetic
aggaagagagugaugaugauggc

SEQ ID NO: 542125 - RNA, 24 nt, Artificial Sequence
  Synthetic
gaggaagagagugaugaugauggc

SEQ ID NO: 542126 - RNA, 18 nt, Artificial Sequence
  Synthetic
cacgaagaucaauauggc

SEQ ID NO: 542127 - RNA, 19 nt, Artificial Sequence
  Synthetic
acacgaagaucaauauggc

SEQ ID NO: 542128 - RNA, 20 nt, Artificial Sequence
  Synthetic
aacacgaagaucaauauggc

SEQ ID NO: 542129 - RNA, 21 nt, Artificial Sequence
  Synthetic
aaacacgaagaucaauauggc

SEQ ID NO: 542130 - RNA, 22 nt, Artificial Sequence
  Synthetic
aaaacacgaagaucaauauggc

SEQ ID NO: 542131 - RNA, 23 nt, Artificial Sequence
  Synthetic
gaaaacacgaagaucaauauggc

SEQ ID NO: 542132 - RNA, 24 nt, Artificial Sequence
  Synthetic
agaaaacacgaagaucaauauggc

SEQ ID NO: 542133 - RNA, 18 nt, Artificial Sequence
  Synthetic
ugauuugaaagauauggc

SEQ ID NO: 542134 - RNA, 19 nt, Artificial Sequence
  Synthetic
gugauuugaaagauauggc

SEQ ID NO: 542135 - RNA, 20 nt, Artificial Sequence
  Synthetic
agugauuugaaagauauggc

SEQ ID NO: 542136 - RNA, 21 nt, Artificial Sequence
  Synthetic
gagugauuugaaagauauggc

SEQ ID NO: 542137 - RNA, 22 nt, Artificial Sequence
  Synthetic
ggagugauuugaaagauauggc

SEQ ID NO: 542138 - RNA, 23 nt, Artificial Sequence
  Synthetic
gggagugauuugaaagauauggc

SEQ ID NO: 542139 - RNA, 24 nt, Artificial Sequence
  Synthetic
agggagugauuugaaagauauggc

SEQ ID NO: 542140 - RNA, 18 nt, Artificial Sequence
  Synthetic
acacccuacagauauggc

SEQ ID NO: 542141 - RNA, 19 nt, Artificial Sequence
  Synthetic
cacacccuacagauauggc

SEQ ID NO: 542142 - RNA, 20 nt, Artificial Sequence
  Synthetic
acacacccuacagauauggc

SEQ ID NO: 542143 - RNA, 21 nt, Artificial Sequence
  Synthetic
cacacacccuacagauauggc

SEQ ID NO: 542144 - RNA, 22 nt, Artificial Sequence
  Synthetic
ccacacacccuacagauauggc

SEQ ID NO: 542145 - RNA, 23 nt, Artificial Sequence
  Synthetic
cccacacacccuacagauauggc

SEQ ID NO: 542146 - RNA, 24 nt, Artificial Sequence
  Synthetic
acccacacacccuacagauauggc

SEQ ID NO: 542147 - RNA, 18 nt, Artificial Sequence
  Synthetic
ucuuugaauauauauggc

SEQ ID NO: 542148 - RNA, 19 nt, Artificial Sequence
  Synthetic
aucuuugaauauauauggc

SEQ ID NO: 542149 - RNA, 20 nt, Artificial Sequence
  Synthetic
uaucuuugaauauauauggc

SEQ ID NO: 542150 - RNA, 21 nt, Artificial Sequence
  Synthetic
cuaucuuugaauauauauggc

SEQ ID NO: 542151 - RNA, 22 nt, Artificial Sequence
  Synthetic
ucuaucuuugaauauauauggc

SEQ ID NO: 542152 - RNA, 23 nt, Artificial Sequence
  Synthetic
gucuaucuuugaauauauauggc

SEQ ID NO: 542153 - RNA, 24 nt, Artificial Sequence
  Synthetic
ugucuaucuuugaauauauauggc

SEQ ID NO: 542154 - RNA, 18 nt, Artificial Sequence
  Synthetic
aucuuuuggcuauauggc

SEQ ID NO: 542155 - RNA, 19 nt, Artificial Sequence
  Synthetic
caucuuuuggcuauauggc

SEQ ID NO: 542156 - RNA, 20 nt, Artificial Sequence
  Synthetic
ccaucuuuuggcuauauggc

SEQ ID NO: 542157 - RNA, 21 nt, Artificial Sequence
  Synthetic
uccaucuuuuggcuauauggc

SEQ ID NO: 542158 - RNA, 22 nt, Artificial Sequence
  Synthetic
auccaucuuuuggcuauauggc

SEQ ID NO: 542159 - RNA, 23 nt, Artificial Sequence
  Synthetic
cauccaucuuuuggcuauauggc

SEQ ID NO: 542160 - RNA, 24 nt, Artificial Sequence
  Synthetic
acauccaucuuuuggcuauauggc

SEQ ID NO: 542161 - RNA, 18 nt, Artificial Sequence
  Synthetic
aaucagaagcucuauggc

SEQ ID NO: 542162 - RNA, 19 nt, Artificial Sequence
  Synthetic
gaaucagaagcucuauggc

SEQ ID NO: 542163 - RNA, 20 nt, Artificial Sequence
  Synthetic
ugaaucagaagcucuauggc

SEQ ID NO: 542164 - RNA, 21 nt, Artificial Sequence
  Synthetic
cugaaucagaagcucuauggc

SEQ ID NO: 542165 - RNA, 22 nt, Artificial Sequence
  Synthetic
acugaaucagaagcucuauggc

SEQ ID NO: 542166 - RNA, 23 nt, Artificial Sequence
  Synthetic
uacugaaucagaagcucuauggc

SEQ ID NO: 542167 - RNA, 24 nt, Artificial Sequence
  Synthetic
cuacugaaucagaagcucuauggc

SEQ ID NO: 542168 - RNA, 18 nt, Artificial Sequence
  Synthetic
agaaaccuaccuuauggc

SEQ ID NO: 542169 - RNA, 19 nt, Artificial Sequence
  Synthetic
cagaaaccuaccuuauggc

SEQ ID NO: 542170 - RNA, 20 nt, Artificial Sequence
  Synthetic
gcagaaaccuaccuuauggc

SEQ ID NO: 542171 - RNA, 21 nt, Artificial Sequence
  Synthetic
agcagaaaccuaccuuauggc

SEQ ID NO: 542172 - RNA, 22 nt, Artificial Sequence
  Synthetic
aagcagaaaccuaccuuauggc

SEQ ID NO: 542173 - RNA, 23 nt, Artificial Sequence
  Synthetic
caagcagaaaccuaccuuauggc

SEQ ID NO: 542174 - RNA, 24 nt, Artificial Sequence
  Synthetic
gcaagcagaaaccuaccuuauggc

SEQ ID NO: 542175 - RNA, 18 nt, Artificial Sequence
  Synthetic
cauaccuacauuuauggc

SEQ ID NO: 542176 - RNA, 19 nt, Artificial Sequence
  Synthetic
acauaccuacauuuauggc

SEQ ID NO: 542177 - RNA, 20 nt, Artificial Sequence
  Synthetic
uacauaccuacauuuauggc

SEQ ID NO: 542178 - RNA, 21 nt, Artificial Sequence
  Synthetic
auacauaccuacauuuauggc

SEQ ID NO: 542179 - RNA, 22 nt, Artificial Sequence
  Synthetic
aauacauaccuacauuuauggc

SEQ ID NO: 542180 - RNA, 23 nt, Artificial Sequence
  Synthetic
aaauacauaccuacauuuauggc

SEQ ID NO: 542181 - RNA, 24 nt, Artificial Sequence
  Synthetic
aaaauacauaccuacauuuauggc

SEQ ID NO: 542182 - RNA, 18 nt, Artificial Sequence
  Synthetic
auguaacgaggaacuggc

SEQ ID NO: 542183 - RNA, 19 nt, Artificial Sequence
  Synthetic
uauguaacgaggaacuggc

SEQ ID NO: 542184 - RNA, 20 nt, Artificial Sequence
  Synthetic
auauguaacgaggaacuggc

SEQ ID NO: 542185 - RNA, 21 nt, Artificial Sequence
  Synthetic
cauauguaacgaggaacuggc

SEQ ID NO: 542186 - RNA, 22 nt, Artificial Sequence
  Synthetic
acauauguaacgaggaacuggc

SEQ ID NO: 542187 - RNA, 23 nt, Artificial Sequence
  Synthetic
gacauauguaacgaggaacuggc

SEQ ID NO: 542188 - RNA, 24 nt, Artificial Sequence
  Synthetic
ugacauauguaacgaggaacuggc

SEQ ID NO: 542189 - RNA, 18 nt, Artificial Sequence
  Synthetic
aucgccauucuaacuggc

SEQ ID NO: 542190 - RNA, 19 nt, Artificial Sequence
  Synthetic
gaucgccauucuaacuggc

SEQ ID NO: 542191 - RNA, 20 nt, Artificial Sequence
  Synthetic
ugaucgccauucuaacuggc

SEQ ID NO: 542192 - RNA, 21 nt, Artificial Sequence
  Synthetic
augaucgccauucuaacuggc

SEQ ID NO: 542193 - RNA, 22 nt, Artificial Sequence
  Synthetic
aaugaucgccauucuaacuggc

SEQ ID NO: 542194 - RNA, 23 nt, Artificial Sequence
  Synthetic
uaaugaucgccauucuaacuggc

SEQ ID NO: 542195 - RNA, 24 nt, Artificial Sequence
  Synthetic
uuaaugaucgccauucuaacuggc

SEQ ID NO: 542196 - RNA, 18 nt, Artificial Sequence
  Synthetic
caguagcaacacacuggc

SEQ ID NO: 542197 - RNA, 19 nt, Artificial Sequence
  Synthetic
gcaguagcaacacacuggc

SEQ ID NO: 542198 - RNA, 20 nt, Artificial Sequence
  Synthetic
ugcaguagcaacacacuggc

SEQ ID NO: 542199 - RNA, 21 nt, Artificial Sequence
  Synthetic
gugcaguagcaacacacuggc

SEQ ID NO: 542200 - RNA, 22 nt, Artificial Sequence
  Synthetic
ugugcaguagcaacacacuggc

SEQ ID NO: 542201 - RNA, 23 nt, Artificial Sequence
  Synthetic
augugcaguagcaacacacuggc

SEQ ID NO: 542202 - RNA, 24 nt, Artificial Sequence
  Synthetic
caugugcaguagcaacacacuggc

SEQ ID NO: 542203 - RNA, 18 nt, Artificial Sequence
  Synthetic
cuuaagugggacacuggc

SEQ ID NO: 542204 - RNA, 19 nt, Artificial Sequence
  Synthetic
gcuuaagugggacacuggc

SEQ ID NO: 542205 - RNA, 20 nt, Artificial Sequence
  Synthetic
ugcuuaagugggacacuggc

SEQ ID NO: 542206 - RNA, 21 nt, Artificial Sequence
  Synthetic
augcuuaagugggacacuggc

SEQ ID NO: 542207 - RNA, 22 nt, Artificial Sequence
  Synthetic
caugcuuaagugggacacuggc

SEQ ID NO: 542208 - RNA, 23 nt, Artificial Sequence
  Synthetic
gcaugcuuaagugggacacuggc

SEQ ID NO: 542209 - RNA, 24 nt, Artificial Sequence
  Synthetic
agcaugcuuaagugggacacuggc

SEQ ID NO: 542210 - RNA, 18 nt, Artificial Sequence
  Synthetic
gauagauuuuggacuggc

SEQ ID NO: 542211 - RNA, 19 nt, Artificial Sequence
  Synthetic
ugauagauuuuggacuggc

SEQ ID NO: 542212 - RNA, 20 nt, Artificial Sequence
  Synthetic
cugauagauuuuggacuggc

SEQ ID NO: 542213 - RNA, 21 nt, Artificial Sequence
  Synthetic
ccugauagauuuuggacuggc

SEQ ID NO: 542214 - RNA, 22 nt, Artificial Sequence
  Synthetic
cccugauagauuuuggacuggc

SEQ ID NO: 542215 - RNA, 23 nt, Artificial Sequence
  Synthetic
gcccugauagauuuuggacuggc

SEQ ID NO: 542216 - RNA, 24 nt, Artificial Sequence
  Synthetic
ugcccugauagauuuuggacuggc

SEQ ID NO: 542217 - RNA, 18 nt, Artificial Sequence
  Synthetic
uuauaacaaaauacuggc

SEQ ID NO: 542218 - RNA, 19 nt, Artificial Sequence
  Synthetic
uuuauaacaaaauacuggc

SEQ ID NO: 542219 - RNA, 20 nt, Artificial Sequence
  Synthetic
auuuauaacaaaauacuggc

SEQ ID NO: 542220 - RNA, 21 nt, Artificial Sequence
  Synthetic
uauuuauaacaaaauacuggc

SEQ ID NO: 542221 - RNA, 22 nt, Artificial Sequence
  Synthetic
guauuuauaacaaaauacuggc

SEQ ID NO: 542222 - RNA, 23 nt, Artificial Sequence
  Synthetic
aguauuuauaacaaaauacuggc

SEQ ID NO: 542223 - RNA, 24 nt, Artificial Sequence
  Synthetic
caguauuuauaacaaaauacuggc

SEQ ID NO: 542224 - RNA, 18 nt, Artificial Sequence
  Synthetic
auuguugaaggaccuggc

SEQ ID NO: 542225 - RNA, 19 nt, Artificial Sequence
  Synthetic
cauuguugaaggaccuggc

SEQ ID NO: 542226 - RNA, 20 nt, Artificial Sequence
  Synthetic
gcauuguugaaggaccuggc

SEQ ID NO: 542227 - RNA, 21 nt, Artificial Sequence
  Synthetic
agcauuguugaaggaccuggc

SEQ ID NO: 542228 - RNA, 22 nt, Artificial Sequence
  Synthetic
gagcauuguugaaggaccuggc

SEQ ID NO: 542229 - RNA, 23 nt, Artificial Sequence
  Synthetic
ugagcauuguugaaggaccuggc

SEQ ID NO: 542230 - RNA, 24 nt, Artificial Sequence
  Synthetic
gugagcauuguugaaggaccuggc

SEQ ID NO: 542231 - RNA, 18 nt, Artificial Sequence
  Synthetic
uugccuaauuucccuggc

SEQ ID NO: 542232 - RNA, 19 nt, Artificial Sequence
  Synthetic
cuugccuaauuucccuggc

SEQ ID NO: 542233 - RNA, 20 nt, Artificial Sequence
  Synthetic
ucuugccuaauuucccuggc

SEQ ID NO: 542234 - RNA, 21 nt, Artificial Sequence
  Synthetic
uucuugccuaauuucccuggc

SEQ ID NO: 542235 - RNA, 22 nt, Artificial Sequence
  Synthetic
uuucuugccuaauuucccuggc

SEQ ID NO: 542236 - RNA, 23 nt, Artificial Sequence
  Synthetic
uuuucuugccuaauuucccuggc

SEQ ID NO: 542237 - RNA, 24 nt, Artificial Sequence
  Synthetic
uuuuucuugccuaauuucccuggc

SEQ ID NO: 542238 - RNA, 18 nt, Artificial Sequence
  Synthetic
uuggugguggggccuggc

SEQ ID NO: 542239 - RNA, 19 nt, Artificial Sequence
  Synthetic
guuggugguggggccuggc

SEQ ID NO: 542240 - RNA, 20 nt, Artificial Sequence
  Synthetic
uguuggugguggggccuggc

SEQ ID NO: 542241 - RNA, 21 nt, Artificial Sequence
  Synthetic
auguuggugguggggccuggc

SEQ ID NO: 542242 - RNA, 22 nt, Artificial Sequence
  Synthetic
aauguuggugguggggccuggc

SEQ ID NO: 542243 - RNA, 23 nt, Artificial Sequence
  Synthetic
caauguuggugguggggccuggc

SEQ ID NO: 542244 - RNA, 24 nt, Artificial Sequence
  Synthetic
ccaauguuggugguggggccuggc

SEQ ID NO: 542245 - RNA, 18 nt, Artificial Sequence
  Synthetic
aauggcaaagugccuggc

SEQ ID NO: 542246 - RNA, 19 nt, Artificial Sequence
  Synthetic
aaauggcaaagugccuggc

SEQ ID NO: 542247 - RNA, 20 nt, Artificial Sequence
  Synthetic
caaauggcaaagugccuggc

SEQ ID NO: 542248 - RNA, 21 nt, Artificial Sequence
  Synthetic
ccaaauggcaaagugccuggc

SEQ ID NO: 542249 - RNA, 22 nt, Artificial Sequence
  Synthetic
accaaauggcaaagugccuggc

SEQ ID NO: 542250 - RNA, 23 nt, Artificial Sequence
  Synthetic
uaccaaauggcaaagugccuggc

SEQ ID NO: 542251 - RNA, 24 nt, Artificial Sequence
  Synthetic
uuaccaaauggcaaagugccuggc

SEQ ID NO: 542252 - RNA, 18 nt, Artificial Sequence
  Synthetic
aguauuggaaguccuggc

SEQ ID NO: 542253 - RNA, 19 nt, Artificial Sequence
  Synthetic
uaguauuggaaguccuggc

SEQ ID NO: 542254 - RNA, 20 nt, Artificial Sequence
  Synthetic
auaguauuggaaguccuggc

SEQ ID NO: 542255 - RNA, 21 nt, Artificial Sequence
  Synthetic
cauaguauuggaaguccuggc

SEQ ID NO: 542256 - RNA, 22 nt, Artificial Sequence
  Synthetic
acauaguauuggaaguccuggc

SEQ ID NO: 542257 - RNA, 23 nt, Artificial Sequence
  Synthetic
aacauaguauuggaaguccuggc

SEQ ID NO: 542258 - RNA, 24 nt, Artificial Sequence
  Synthetic
caacauaguauuggaaguccuggc

SEQ ID NO: 542259 - RNA, 18 nt, Artificial Sequence
  Synthetic
gaaaugguagguccuggc

SEQ ID NO: 542260 - RNA, 19 nt, Artificial Sequence
  Synthetic
agaaaugguagguccuggc

SEQ ID NO: 542261 - RNA, 20 nt, Artificial Sequence
  Synthetic
aagaaaugguagguccuggc

SEQ ID NO: 542262 - RNA, 21 nt, Artificial Sequence
  Synthetic
gaagaaaugguagguccuggc

SEQ ID NO: 542263 - RNA, 22 nt, Artificial Sequence
  Synthetic
ugaagaaaugguagguccuggc

SEQ ID NO: 542264 - RNA, 23 nt, Artificial Sequence
  Synthetic
augaagaaaugguagguccuggc

SEQ ID NO: 542265 - RNA, 24 nt, Artificial Sequence
  Synthetic
caugaagaaaugguagguccuggc

SEQ ID NO: 542266 - RNA, 18 nt, Artificial Sequence
  Synthetic
uuucuccagcuuccuggc

SEQ ID NO: 542267 - RNA, 19 nt, Artificial Sequence
  Synthetic
cuuucuccagcuuccuggc

SEQ ID NO: 542268 - RNA, 20 nt, Artificial Sequence
  Synthetic
ucuuucuccagcuuccuggc

SEQ ID NO: 542269 - RNA, 21 nt, Artificial Sequence
  Synthetic
uucuuucuccagcuuccuggc

SEQ ID NO: 542270 - RNA, 22 nt, Artificial Sequence
  Synthetic
guucuuucuccagcuuccuggc

SEQ ID NO: 542271 - RNA, 23 nt, Artificial Sequence
  Synthetic
aguucuuucuccagcuuccuggc

SEQ ID NO: 542272 - RNA, 24 nt, Artificial Sequence
  Synthetic
aaguucuuucuccagcuuccuggc

SEQ ID NO: 542273 - RNA, 18 nt, Artificial Sequence
  Synthetic
agcaaaaugcaagcuggc

SEQ ID NO: 542274 - RNA, 19 nt, Artificial Sequence
  Synthetic
aagcaaaaugcaagcuggc

SEQ ID NO: 542275 - RNA, 20 nt, Artificial Sequence
  Synthetic
aaagcaaaaugcaagcuggc

SEQ ID NO: 542276 - RNA, 21 nt, Artificial Sequence
  Synthetic
caaagcaaaaugcaagcuggc

SEQ ID NO: 542277 - RNA, 22 nt, Artificial Sequence
  Synthetic
ccaaagcaaaaugcaagcuggc

SEQ ID NO: 542278 - RNA, 23 nt, Artificial Sequence
  Synthetic
cccaaagcaaaaugcaagcuggc

SEQ ID NO: 542279 - RNA, 24 nt, Artificial Sequence
  Synthetic
ucccaaagcaaaaugcaagcuggc

SEQ ID NO: 542280 - RNA, 18 nt, Artificial Sequence
  Synthetic
ggaugaguagcagcuggc

SEQ ID NO: 542281 - RNA, 19 nt, Artificial Sequence
  Synthetic
gggaugaguagcagcuggc

SEQ ID NO: 542282 - RNA, 20 nt, Artificial Sequence
  Synthetic
agggaugaguagcagcuggc

SEQ ID NO: 542283 - RNA, 21 nt, Artificial Sequence
  Synthetic
gagggaugaguagcagcuggc

SEQ ID NO: 542284 - RNA, 22 nt, Artificial Sequence
  Synthetic
ugagggaugaguagcagcuggc

SEQ ID NO: 542285 - RNA, 23 nt, Artificial Sequence
  Synthetic
uugagggaugaguagcagcuggc

SEQ ID NO: 542286 - RNA, 24 nt, Artificial Sequence
  Synthetic
cuugagggaugaguagcagcuggc

SEQ ID NO: 542287 - RNA, 18 nt, Artificial Sequence
  Synthetic
cccaacccucccgcuggc

SEQ ID NO: 542288 - RNA, 19 nt, Artificial Sequence
  Synthetic
acccaacccucccgcuggc

SEQ ID NO: 542289 - RNA, 20 nt, Artificial Sequence
  Synthetic
cacccaacccucccgcuggc

SEQ ID NO: 542290 - RNA, 21 nt, Artificial Sequence
  Synthetic
acacccaacccucccgcuggc

SEQ ID NO: 542291 - RNA, 22 nt, Artificial Sequence
  Synthetic
aacacccaacccucccgcuggc

SEQ ID NO: 542292 - RNA, 23 nt, Artificial Sequence
  Synthetic
caacacccaacccucccgcuggc

SEQ ID NO: 542293 - RNA, 24 nt, Artificial Sequence
  Synthetic
gcaacacccaacccucccgcuggc

SEQ ID NO: 542294 - RNA, 18 nt, Artificial Sequence
  Synthetic
cuugcuaggugcgcuggc

SEQ ID NO: 542295 - RNA, 19 nt, Artificial Sequence
  Synthetic
gcuugcuaggugcgcuggc

SEQ ID NO: 542296 - RNA, 20 nt, Artificial Sequence
  Synthetic
agcuugcuaggugcgcuggc

SEQ ID NO: 542297 - RNA, 21 nt, Artificial Sequence
  Synthetic
cagcuugcuaggugcgcuggc

SEQ ID NO: 542298 - RNA, 22 nt, Artificial Sequence
  Synthetic
ucagcuugcuaggugcgcuggc

SEQ ID NO: 542299 - RNA, 23 nt, Artificial Sequence
  Synthetic
cucagcuugcuaggugcgcuggc

SEQ ID NO: 542300 - RNA, 24 nt, Artificial Sequence
  Synthetic
ccucagcuugcuaggugcgcuggc

SEQ ID NO: 542301 - RNA, 18 nt, Artificial Sequence
  Synthetic
uuucaaugaauggcuggc

SEQ ID NO: 542302 - RNA, 19 nt, Artificial Sequence
  Synthetic
guuucaaugaauggcuggc

SEQ ID NO: 542303 - RNA, 20 nt, Artificial Sequence
  Synthetic
uguuucaaugaauggcuggc

SEQ ID NO: 542304 - RNA, 21 nt, Artificial Sequence
  Synthetic
uuguuucaaugaauggcuggc

SEQ ID NO: 542305 - RNA, 22 nt, Artificial Sequence
  Synthetic
uuuguuucaaugaauggcuggc

SEQ ID NO: 542306 - RNA, 23 nt, Artificial Sequence
  Synthetic
uuuuguuucaaugaauggcuggc

SEQ ID NO: 542307 - RNA, 24 nt, Artificial Sequence
  Synthetic
auuuuguuucaaugaauggcuggc

SEQ ID NO: 542308 - RNA, 18 nt, Artificial Sequence
  Synthetic
uggucucuuccugcuggc

SEQ ID NO: 542309 - RNA, 19 nt, Artificial Sequence
  Synthetic
uuggucucuuccugcuggc

SEQ ID NO: 542310 - RNA, 20 nt, Artificial Sequence
  Synthetic
guuggucucuuccugcuggc

SEQ ID NO: 542311 - RNA, 21 nt, Artificial Sequence
  Synthetic
gguuggucucuuccugcuggc

SEQ ID NO: 542312 - RNA, 22 nt, Artificial Sequence
  Synthetic
ggguuggucucuuccugcuggc

SEQ ID NO: 542313 - RNA, 23 nt, Artificial Sequence
  Synthetic
uggguuggucucuuccugcuggc

SEQ ID NO: 542314 - RNA, 24 nt, Artificial Sequence
  Synthetic
auggguuggucucuuccugcuggc

SEQ ID NO: 542315 - RNA, 18 nt, Artificial Sequence
  Synthetic
aaaaaacagcaaucuggc

SEQ ID NO: 542316 - RNA, 19 nt, Artificial Sequence
  Synthetic
uaaaaaacagcaaucuggc

SEQ ID NO: 542317 - RNA, 20 nt, Artificial Sequence
  Synthetic
uuaaaaaacagcaaucuggc

SEQ ID NO: 542318 - RNA, 21 nt, Artificial Sequence
  Synthetic
auuaaaaaacagcaaucuggc

SEQ ID NO: 542319 - RNA, 22 nt, Artificial Sequence
  Synthetic
cauuaaaaaacagcaaucuggc

SEQ ID NO: 542320 - RNA, 23 nt, Artificial Sequence
  Synthetic
acauuaaaaaacagcaaucuggc

SEQ ID NO: 542321 - RNA, 24 nt, Artificial Sequence
  Synthetic
aacauuaaaaaacagcaaucuggc

SEQ ID NO: 542322 - RNA, 18 nt, Artificial Sequence
  Synthetic
aaugugaccuaaucuggc

SEQ ID NO: 542323 - RNA, 19 nt, Artificial Sequence
  Synthetic
gaaugugaccuaaucuggc

SEQ ID NO: 542324 - RNA, 20 nt, Artificial Sequence
  Synthetic
agaaugugaccuaaucuggc

SEQ ID NO: 542325 - RNA, 21 nt, Artificial Sequence
  Synthetic
gagaaugugaccuaaucuggc

SEQ ID NO: 542326 - RNA, 22 nt, Artificial Sequence
  Synthetic
agagaaugugaccuaaucuggc

SEQ ID NO: 542327 - RNA, 23 nt, Artificial Sequence
  Synthetic
aagagaaugugaccuaaucuggc

SEQ ID NO: 542328 - RNA, 24 nt, Artificial Sequence
  Synthetic
uaagagaaugugaccuaaucuggc

SEQ ID NO: 542329 - RNA, 18 nt, Artificial Sequence
  Synthetic
ugagccaccgcaucuggc

SEQ ID NO: 542330 - RNA, 19 nt, Artificial Sequence
  Synthetic
augagccaccgcaucuggc

SEQ ID NO: 542331 - RNA, 20 nt, Artificial Sequence
  Synthetic
caugagccaccgcaucuggc

SEQ ID NO: 542332 - RNA, 21 nt, Artificial Sequence
  Synthetic
gcaugagccaccgcaucuggc

SEQ ID NO: 542333 - RNA, 22 nt, Artificial Sequence
  Synthetic
ggcaugagccaccgcaucuggc

SEQ ID NO: 542334 - RNA, 23 nt, Artificial Sequence
  Synthetic
aggcaugagccaccgcaucuggc

SEQ ID NO: 542335 - RNA, 24 nt, Artificial Sequence
  Synthetic
caggcaugagccaccgcaucuggc

SEQ ID NO: 542336 - RNA, 18 nt, Artificial Sequence
  Synthetic
auagggguuauaucuggc

SEQ ID NO: 542337 - RNA, 19 nt, Artificial Sequence
  Synthetic
gauagggguuauaucuggc

SEQ ID NO: 542338 - RNA, 20 nt, Artificial Sequence
  Synthetic
agauagggguuauaucuggc

SEQ ID NO: 542339 - RNA, 21 nt, Artificial Sequence
  Synthetic
gagauagggguuauaucuggc

SEQ ID NO: 542340 - RNA, 22 nt, Artificial Sequence
  Synthetic
ggagauagggguuauaucuggc

SEQ ID NO: 542341 - RNA, 23 nt, Artificial Sequence
  Synthetic
aggagauagggguuauaucuggc

SEQ ID NO: 542342 - RNA, 24 nt, Artificial Sequence
  Synthetic
aaggagauagggguuauaucuggc

SEQ ID NO: 542343 - RNA, 18 nt, Artificial Sequence
  Synthetic
gagucuuagguaucuggc

SEQ ID NO: 542344 - RNA, 19 nt, Artificial Sequence
  Synthetic
ugagucuuagguaucuggc

SEQ ID NO: 542345 - RNA, 20 nt, Artificial Sequence
  Synthetic
augagucuuagguaucuggc

SEQ ID NO: 542346 - RNA, 21 nt, Artificial Sequence
  Synthetic
aaugagucuuagguaucuggc

SEQ ID NO: 542347 - RNA, 22 nt, Artificial Sequence
  Synthetic
gaaugagucuuagguaucuggc

SEQ ID NO: 542348 - RNA, 23 nt, Artificial Sequence
  Synthetic
ugaaugagucuuagguaucuggc

SEQ ID NO: 542349 - RNA, 24 nt, Artificial Sequence
  Synthetic
uugaaugagucuuagguaucuggc

SEQ ID NO: 542350 - RNA, 18 nt, Artificial Sequence
  Synthetic
cuugucaguaucucuggc

SEQ ID NO: 542351 - RNA, 19 nt, Artificial Sequence
  Synthetic
gcuugucaguaucucuggc

SEQ ID NO: 542352 - RNA, 20 nt, Artificial Sequence
  Synthetic
ugcuugucaguaucucuggc

SEQ ID NO: 542353 - RNA, 21 nt, Artificial Sequence
  Synthetic
uugcuugucaguaucucuggc

SEQ ID NO: 542354 - RNA, 22 nt, Artificial Sequence
  Synthetic
auugcuugucaguaucucuggc

SEQ ID NO: 542355 - RNA, 23 nt, Artificial Sequence
  Synthetic
aauugcuugucaguaucucuggc

SEQ ID NO: 542356 - RNA, 24 nt, Artificial Sequence
  Synthetic
gaauugcuugucaguaucucuggc

SEQ ID NO: 542357 - RNA, 18 nt, Artificial Sequence
  Synthetic
aucaugacacucucuggc

SEQ ID NO: 542358 - RNA, 19 nt, Artificial Sequence
  Synthetic
gaucaugacacucucuggc

SEQ ID NO: 542359 - RNA, 20 nt, Artificial Sequence
  Synthetic
ggaucaugacacucucuggc

SEQ ID NO: 542360 - RNA, 21 nt, Artificial Sequence
  Synthetic
uggaucaugacacucucuggc

SEQ ID NO: 542361 - RNA, 22 nt, Artificial Sequence
  Synthetic
auggaucaugacacucucuggc

SEQ ID NO: 542362 - RNA, 23 nt, Artificial Sequence
  Synthetic
uauggaucaugacacucucuggc

SEQ ID NO: 542363 - RNA, 24 nt, Artificial Sequence
  Synthetic
auauggaucaugacacucucuggc

SEQ ID NO: 542364 - RNA, 18 nt, Artificial Sequence
  Synthetic
aaacauuuugucucuggc

SEQ ID NO: 542365 - RNA, 19 nt, Artificial Sequence
  Synthetic
caaacauuuugucucuggc

SEQ ID NO: 542366 - RNA, 20 nt, Artificial Sequence
  Synthetic
acaaacauuuugucucuggc

SEQ ID NO: 542367 - RNA, 21 nt, Artificial Sequence
  Synthetic
cacaaacauuuugucucuggc

SEQ ID NO: 542368 - RNA, 22 nt, Artificial Sequence
  Synthetic
ccacaaacauuuugucucuggc

SEQ ID NO: 542369 - RNA, 23 nt, Artificial Sequence
  Synthetic
uccacaaacauuuugucucuggc

SEQ ID NO: 542370 - RNA, 24 nt, Artificial Sequence
  Synthetic
uuccacaaacauuuugucucuggc

SEQ ID NO: 542371 - RNA, 18 nt, Artificial Sequence
  Synthetic
ucuggaaaacagucuggc

SEQ ID NO: 542372 - RNA, 19 nt, Artificial Sequence
  Synthetic
aucuggaaaacagucuggc

SEQ ID NO: 542373 - RNA, 20 nt, Artificial Sequence
  Synthetic
caucuggaaaacagucuggc

SEQ ID NO: 542374 - RNA, 21 nt, Artificial Sequence
  Synthetic
ucaucuggaaaacagucuggc

SEQ ID NO: 542375 - RNA, 22 nt, Artificial Sequence
  Synthetic
aucaucuggaaaacagucuggc

SEQ ID NO: 542376 - RNA, 23 nt, Artificial Sequence
  Synthetic
uaucaucuggaaaacagucuggc

SEQ ID NO: 542377 - RNA, 24 nt, Artificial Sequence
  Synthetic
guaucaucuggaaaacagucuggc

SEQ ID NO: 542378 - RNA, 18 nt, Artificial Sequence
  Synthetic
uugcucugucauucuggc

SEQ ID NO: 542379 - RNA, 19 nt, Artificial Sequence
  Synthetic
cuugcucugucauucuggc

SEQ ID NO: 542380 - RNA, 20 nt, Artificial Sequence
  Synthetic
ucuugcucugucauucuggc

SEQ ID NO: 542381 - RNA, 21 nt, Artificial Sequence
  Synthetic
gucuugcucugucauucuggc

SEQ ID NO: 542382 - RNA, 22 nt, Artificial Sequence
  Synthetic
ggucuugcucugucauucuggc

SEQ ID NO: 542383 - RNA, 23 nt, Artificial Sequence
  Synthetic
gggucuugcucugucauucuggc

SEQ ID NO: 542384 - RNA, 24 nt, Artificial Sequence
  Synthetic
agggucuugcucugucauucuggc

SEQ ID NO: 542385 - RNA, 18 nt, Artificial Sequence
  Synthetic
caguuaauuuauucuggc

SEQ ID NO: 542386 - RNA, 19 nt, Artificial Sequence
  Synthetic
ccaguuaauuuauucuggc

SEQ ID NO: 542387 - RNA, 20 nt, Artificial Sequence
  Synthetic
cccaguuaauuuauucuggc

SEQ ID NO: 542388 - RNA, 21 nt, Artificial Sequence
  Synthetic
ccccaguuaauuuauucuggc

SEQ ID NO: 542389 - RNA, 22 nt, Artificial Sequence
  Synthetic
uccccaguuaauuuauucuggc

SEQ ID NO: 542390 - RNA, 23 nt, Artificial Sequence
  Synthetic
uuccccaguuaauuuauucuggc

SEQ ID NO: 542391 - RNA, 24 nt, Artificial Sequence
  Synthetic
uuuccccaguuaauuuauucuggc

SEQ ID NO: 542392 - RNA, 18 nt, Artificial Sequence
  Synthetic
ggcaggagaacuucuggc

SEQ ID NO: 542393 - RNA, 19 nt, Artificial Sequence
  Synthetic
aggcaggagaacuucuggc

SEQ ID NO: 542394 - RNA, 20 nt, Artificial Sequence
  Synthetic
gaggcaggagaacuucuggc

SEQ ID NO: 542395 - RNA, 21 nt, Artificial Sequence
  Synthetic
agaggcaggagaacuucuggc

SEQ ID NO: 542396 - RNA, 22 nt, Artificial Sequence
  Synthetic
aagaggcaggagaacuucuggc

SEQ ID NO: 542397 - RNA, 23 nt, Artificial Sequence
  Synthetic
gaagaggcaggagaacuucuggc

SEQ ID NO: 542398 - RNA, 24 nt, Artificial Sequence
  Synthetic
ggaagaggcaggagaacuucuggc

SEQ ID NO: 542399 - RNA, 18 nt, Artificial Sequence
  Synthetic
uguaaauaugcuucuggc

SEQ ID NO: 542400 - RNA, 19 nt, Artificial Sequence
  Synthetic
auguaaauaugcuucuggc

SEQ ID NO: 542401 - RNA, 20 nt, Artificial Sequence
  Synthetic
aauguaaauaugcuucuggc

SEQ ID NO: 542402 - RNA, 21 nt, Artificial Sequence
  Synthetic
aaauguaaauaugcuucuggc

SEQ ID NO: 542403 - RNA, 22 nt, Artificial Sequence
  Synthetic
gaaauguaaauaugcuucuggc

SEQ ID NO: 542404 - RNA, 23 nt, Artificial Sequence
  Synthetic
agaaauguaaauaugcuucuggc

SEQ ID NO: 542405 - RNA, 24 nt, Artificial Sequence
  Synthetic
aagaaauguaaauaugcuucuggc

SEQ ID NO: 542406 - RNA, 21 nt, Artificial Sequence
  Synthetic
cauaguguuggaaguucuggc

SEQ ID NO: 542407 - RNA, 22 nt, Artificial Sequence
  Synthetic
acauaguguuggaaguucuggc

SEQ ID NO: 542408 - RNA, 23 nt, Artificial Sequence
  Synthetic
aacauaguguuggaaguucuggc

SEQ ID NO: 542409 - RNA, 24 nt, Artificial Sequence
  Synthetic
caacauaguguuggaaguucuggc

SEQ ID NO: 542410 - RNA, 18 nt, Artificial Sequence
  Synthetic
ugaaucuaaaacaguggc

SEQ ID NO: 542411 - RNA, 19 nt, Artificial Sequence
  Synthetic
augaaucuaaaacaguggc

SEQ ID NO: 542412 - RNA, 20 nt, Artificial Sequence
  Synthetic
uaugaaucuaaaacaguggc

SEQ ID NO: 542413 - RNA, 21 nt, Artificial Sequence
  Synthetic
auaugaaucuaaaacaguggc

SEQ ID NO: 542414 - RNA, 22 nt, Artificial Sequence
  Synthetic
uauaugaaucuaaaacaguggc

SEQ ID NO: 542415 - RNA, 23 nt, Artificial Sequence
  Synthetic
uuauaugaaucuaaaacaguggc

SEQ ID NO: 542416 - RNA, 24 nt, Artificial Sequence
  Synthetic
auuauaugaaucuaaaacaguggc

SEQ ID NO: 542417 - RNA, 18 nt, Artificial Sequence
  Synthetic
uauuuuucaaccaguggc

SEQ ID NO: 542418 - RNA, 19 nt, Artificial Sequence
  Synthetic
auauuuuucaaccaguggc

SEQ ID NO: 542419 - RNA, 20 nt, Artificial Sequence
  Synthetic
cauauuuuucaaccaguggc

SEQ ID NO: 542420 - RNA, 21 nt, Artificial Sequence
  Synthetic
gcauauuuuucaaccaguggc

SEQ ID NO: 542421 - RNA, 22 nt, Artificial Sequence
  Synthetic
agcauauuuuucaaccaguggc

SEQ ID NO: 542422 - RNA, 23 nt, Artificial Sequence
  Synthetic
gagcauauuuuucaaccaguggc

SEQ ID NO: 542423 - RNA, 24 nt, Artificial Sequence
  Synthetic
ggagcauauuuuucaaccaguggc

SEQ ID NO: 542424 - RNA, 18 nt, Artificial Sequence
  Synthetic
aggcuggagugcaguggc

SEQ ID NO: 542425 - RNA, 19 nt, Artificial Sequence
  Synthetic
caggcuggagugcaguggc

SEQ ID NO: 542426 - RNA, 20 nt, Artificial Sequence
  Synthetic
ccaggcuggagugcaguggc

SEQ ID NO: 542427 - RNA, 21 nt, Artificial Sequence
  Synthetic
cccaggcuggagugcaguggc

SEQ ID NO: 542428 - RNA, 22 nt, Artificial Sequence
  Synthetic
acccaggcuggagugcaguggc

SEQ ID NO: 542429 - RNA, 23 nt, Artificial Sequence
  Synthetic
cacccaggcuggagugcaguggc

SEQ ID NO: 542430 - RNA, 24 nt, Artificial Sequence
  Synthetic
ucacccaggcuggagugcaguggc

SEQ ID NO: 542431 - RNA, 18 nt, Artificial Sequence
  Synthetic
aaaaacugagagaguggc

SEQ ID NO: 542432 - RNA, 19 nt, Artificial Sequence
  Synthetic
aaaaaacugagagaguggc

SEQ ID NO: 542433 - RNA, 20 nt, Artificial Sequence
  Synthetic
uaaaaaacugagagaguggc

SEQ ID NO: 542434 - RNA, 21 nt, Artificial Sequence
  Synthetic
uuaaaaaacugagagaguggc

SEQ ID NO: 542435 - RNA, 22 nt, Artificial Sequence
  Synthetic
uuuaaaaaacugagagaguggc

SEQ ID NO: 542436 - RNA, 23 nt, Artificial Sequence
  Synthetic
uuuuaaaaaacugagagaguggc

SEQ ID NO: 542437 - RNA, 24 nt, Artificial Sequence
  Synthetic
uuuuuaaaaaacugagagaguggc

SEQ ID NO: 542438 - RNA, 18 nt, Artificial Sequence
  Synthetic
aauauagacaggaguggc

SEQ ID NO: 542439 - RNA, 19 nt, Artificial Sequence
  Synthetic
gaauauagacaggaguggc

SEQ ID NO: 542440 - RNA, 20 nt, Artificial Sequence
  Synthetic
ugaauauagacaggaguggc

SEQ ID NO: 542441 - RNA, 21 nt, Artificial Sequence
  Synthetic
augaauauagacaggaguggc

SEQ ID NO: 542442 - RNA, 22 nt, Artificial Sequence
  Synthetic
aaugaauauagacaggaguggc

SEQ ID NO: 542443 - RNA, 23 nt, Artificial Sequence
  Synthetic
aaaugaauauagacaggaguggc

SEQ ID NO: 542444 - RNA, 24 nt, Artificial Sequence
  Synthetic
uaaaugaauauagacaggaguggc

SEQ ID NO: 542445 - RNA, 18 nt, Artificial Sequence
  Synthetic
cucagagacuuuaguggc

SEQ ID NO: 542446 - RNA, 19 nt, Artificial Sequence
  Synthetic
ccucagagacuuuaguggc

SEQ ID NO: 542447 - RNA, 20 nt, Artificial Sequence
  Synthetic
gccucagagacuuuaguggc

SEQ ID NO: 542448 - RNA, 21 nt, Artificial Sequence
  Synthetic
ugccucagagacuuuaguggc

SEQ ID NO: 542449 - RNA, 22 nt, Artificial Sequence
  Synthetic
uugccucagagacuuuaguggc

SEQ ID NO: 542450 - RNA, 23 nt, Artificial Sequence
  Synthetic
guugccucagagacuuuaguggc

SEQ ID NO: 542451 - RNA, 24 nt, Artificial Sequence
  Synthetic
uguugccucagagacuuuaguggc

SEQ ID NO: 542452 - RNA, 18 nt, Artificial Sequence
  Synthetic
uguucuccacuccguggc

SEQ ID NO: 542453 - RNA, 19 nt, Artificial Sequence
  Synthetic
cuguucuccacuccguggc

SEQ ID NO: 542454 - RNA, 20 nt, Artificial Sequence
  Synthetic
ucuguucuccacuccguggc

SEQ ID NO: 542455 - RNA, 21 nt, Artificial Sequence
  Synthetic
cucuguucuccacuccguggc

SEQ ID NO: 542456 - RNA, 22 nt, Artificial Sequence
  Synthetic
ucucuguucuccacuccguggc

SEQ ID NO: 542457 - RNA, 23 nt, Artificial Sequence
  Synthetic
cucucuguucuccacuccguggc

SEQ ID NO: 542458 - RNA, 24 nt, Artificial Sequence
  Synthetic
acucucuguucuccacuccguggc

SEQ ID NO: 542459 - RNA, 18 nt, Artificial Sequence
  Synthetic
ccuccuuuacaagguggc

SEQ ID NO: 542460 - RNA, 19 nt, Artificial Sequence
  Synthetic
accuccuuuacaagguggc

SEQ ID NO: 542461 - RNA, 20 nt, Artificial Sequence
  Synthetic
caccuccuuuacaagguggc

SEQ ID NO: 542462 - RNA, 21 nt, Artificial Sequence
  Synthetic
gcaccuccuuuacaagguggc

SEQ ID NO: 542463 - RNA, 22 nt, Artificial Sequence
  Synthetic
ggcaccuccuuuacaagguggc

SEQ ID NO: 542464 - RNA, 23 nt, Artificial Sequence
  Synthetic
aggcaccuccuuuacaagguggc

SEQ ID NO: 542465 - RNA, 24 nt, Artificial Sequence
  Synthetic
aaggcaccuccuuuacaagguggc

SEQ ID NO: 542466 - RNA, 18 nt, Artificial Sequence
  Synthetic
accuucuucacagguggc

SEQ ID NO: 542467 - RNA, 19 nt, Artificial Sequence
  Synthetic
caccuucuucacagguggc

SEQ ID NO: 542468 - RNA, 20 nt, Artificial Sequence
  Synthetic
ccaccuucuucacagguggc

SEQ ID NO: 542469 - RNA, 21 nt, Artificial Sequence
  Synthetic
gccaccuucuucacagguggc

SEQ ID NO: 542470 - RNA, 22 nt, Artificial Sequence
  Synthetic
agccaccuucuucacagguggc

SEQ ID NO: 542471 - RNA, 23 nt, Artificial Sequence
  Synthetic
aagccaccuucuucacagguggc

SEQ ID NO: 542472 - RNA, 24 nt, Artificial Sequence
  Synthetic
caagccaccuucuucacagguggc

SEQ ID NO: 542473 - RNA, 18 nt, Artificial Sequence
  Synthetic
gucugaaaaauagguggc

SEQ ID NO: 542474 - RNA, 19 nt, Artificial Sequence
  Synthetic
agucugaaaaauagguggc

SEQ ID NO: 542475 - RNA, 20 nt, Artificial Sequence
  Synthetic
gagucugaaaaauagguggc

SEQ ID NO: 542476 - RNA, 21 nt, Artificial Sequence
  Synthetic
agagucugaaaaauagguggc

SEQ ID NO: 542477 - RNA, 22 nt, Artificial Sequence
  Synthetic
cagagucugaaaaauagguggc

SEQ ID NO: 542478 - RNA, 23 nt, Artificial Sequence
  Synthetic
ccagagucugaaaaauagguggc

SEQ ID NO: 542479 - RNA, 24 nt, Artificial Sequence
  Synthetic
uccagagucugaaaaauagguggc

SEQ ID NO: 542480 - RNA, 18 nt, Artificial Sequence
  Synthetic
ugacaauuaaaggguggc

SEQ ID NO: 542481 - RNA, 19 nt, Artificial Sequence
  Synthetic
gugacaauuaaaggguggc

SEQ ID NO: 542482 - RNA, 20 nt, Artificial Sequence
  Synthetic
ugugacaauuaaaggguggc

SEQ ID NO: 542483 - RNA, 21 nt, Artificial Sequence
  Synthetic
gugugacaauuaaaggguggc

SEQ ID NO: 542484 - RNA, 22 nt, Artificial Sequence
  Synthetic
ggugugacaauuaaaggguggc

SEQ ID NO: 542485 - RNA, 23 nt, Artificial Sequence
  Synthetic
gggugugacaauuaaaggguggc

SEQ ID NO: 542486 - RNA, 24 nt, Artificial Sequence
  Synthetic
ugggugugacaauuaaaggguggc

SEQ ID NO: 542487 - RNA, 18 nt, Artificial Sequence
  Synthetic
accucuucacaggguggc

SEQ ID NO: 542488 - RNA, 19 nt, Artificial Sequence
  Synthetic
caccucuucacaggguggc

SEQ ID NO: 542489 - RNA, 20 nt, Artificial Sequence
  Synthetic
gcaccucuucacaggguggc

SEQ ID NO: 542490 - RNA, 21 nt, Artificial Sequence
  Synthetic
ggcaccucuucacaggguggc

SEQ ID NO: 542491 - RNA, 22 nt, Artificial Sequence
  Synthetic
aggcaccucuucacaggguggc

SEQ ID NO: 542492 - RNA, 23 nt, Artificial Sequence
  Synthetic
aaggcaccucuucacaggguggc

SEQ ID NO: 542493 - RNA, 24 nt, Artificial Sequence
  Synthetic
gaaggcaccucuucacaggguggc

SEQ ID NO: 542494 - RNA, 18 nt, Artificial Sequence
  Synthetic
ucagacuauuaggguggc

SEQ ID NO: 542495 - RNA, 19 nt, Artificial Sequence
  Synthetic
aucagacuauuaggguggc

SEQ ID NO: 542496 - RNA, 20 nt, Artificial Sequence
  Synthetic
uaucagacuauuaggguggc

SEQ ID NO: 542497 - RNA, 21 nt, Artificial Sequence
  Synthetic
cuaucagacuauuaggguggc

SEQ ID NO: 542498 - RNA, 22 nt, Artificial Sequence
  Synthetic
acuaucagacuauuaggguggc

SEQ ID NO: 542499 - RNA, 23 nt, Artificial Sequence
  Synthetic
aacuaucagacuauuaggguggc

SEQ ID NO: 542500 - RNA, 24 nt, Artificial Sequence
  Synthetic
aaacuaucagacuauuaggguggc

SEQ ID NO: 542501 - RNA, 18 nt, Artificial Sequence
  Synthetic
caguauuugagggguggc

SEQ ID NO: 542502 - RNA, 19 nt, Artificial Sequence
  Synthetic
acaguauuugagggguggc

SEQ ID NO: 542503 - RNA, 20 nt, Artificial Sequence
  Synthetic
aacaguauuugagggguggc

SEQ ID NO: 542504 - RNA, 21 nt, Artificial Sequence
  Synthetic
caacaguauuugagggguggc

SEQ ID NO: 542505 - RNA, 22 nt, Artificial Sequence
  Synthetic
acaacaguauuugagggguggc

SEQ ID NO: 542506 - RNA, 23 nt, Artificial Sequence
  Synthetic
cacaacaguauuugagggguggc

SEQ ID NO: 542507 - RNA, 24 nt, Artificial Sequence
  Synthetic
gcacaacaguauuugagggguggc

SEQ ID NO: 542508 - RNA, 18 nt, Artificial Sequence
  Synthetic
uugggagagggugguggc

SEQ ID NO: 542509 - RNA, 19 nt, Artificial Sequence
  Synthetic
uuugggagagggugguggc

SEQ ID NO: 542510 - RNA, 20 nt, Artificial Sequence
  Synthetic
cuuugggagagggugguggc

SEQ ID NO: 542511 - RNA, 21 nt, Artificial Sequence
  Synthetic
ucuuugggagagggugguggc

SEQ ID NO: 542512 - RNA, 22 nt, Artificial Sequence
  Synthetic
aucuuugggagagggugguggc

SEQ ID NO: 542513 - RNA, 23 nt, Artificial Sequence
  Synthetic
uaucuuugggagagggugguggc

SEQ ID NO: 542514 - RNA, 24 nt, Artificial Sequence
  Synthetic
uuaucuuugggagagggugguggc

SEQ ID NO: 542515 - RNA, 18 nt, Artificial Sequence
  Synthetic
aaauucugccaauguggc

SEQ ID NO: 542516 - RNA, 19 nt, Artificial Sequence
  Synthetic
caaauucugccaauguggc

SEQ ID NO: 542517 - RNA, 20 nt, Artificial Sequence
  Synthetic
ucaaauucugccaauguggc

SEQ ID NO: 542518 - RNA, 21 nt, Artificial Sequence
  Synthetic
cucaaauucugccaauguggc

SEQ ID NO: 542519 - RNA, 22 nt, Artificial Sequence
  Synthetic
acucaaauucugccaauguggc

SEQ ID NO: 542520 - RNA, 23 nt, Artificial Sequence
  Synthetic
aacucaaauucugccaauguggc

SEQ ID NO: 542521 - RNA, 24 nt, Artificial Sequence
  Synthetic
aaacucaaauucugccaauguggc

SEQ ID NO: 542522 - RNA, 18 nt, Artificial Sequence
  Synthetic
uacuuacauccauguggc

SEQ ID NO: 542523 - RNA, 19 nt, Artificial Sequence
  Synthetic
uuacuuacauccauguggc

SEQ ID NO: 542524 - RNA, 20 nt, Artificial Sequence
  Synthetic
uuuacuuacauccauguggc

SEQ ID NO: 542525 - RNA, 21 nt, Artificial Sequence
  Synthetic
cuuuacuuacauccauguggc

SEQ ID NO: 542526 - RNA, 22 nt, Artificial Sequence
  Synthetic
ucuuuacuuacauccauguggc

SEQ ID NO: 542527 - RNA, 23 nt, Artificial Sequence
  Synthetic
aucuuuacuuacauccauguggc

SEQ ID NO: 542528 - RNA, 24 nt, Artificial Sequence
  Synthetic
caucuuuacuuacauccauguggc

SEQ ID NO: 542529 - RNA, 18 nt, Artificial Sequence
  Synthetic
ucacagaagagauguggc

SEQ ID NO: 542530 - RNA, 19 nt, Artificial Sequence
  Synthetic
aucacagaagagauguggc

SEQ ID NO: 542531 - RNA, 20 nt, Artificial Sequence
  Synthetic
gaucacagaagagauguggc

SEQ ID NO: 542532 - RNA, 21 nt, Artificial Sequence
  Synthetic
agaucacagaagagauguggc

SEQ ID NO: 542533 - RNA, 22 nt, Artificial Sequence
  Synthetic
gagaucacagaagagauguggc

SEQ ID NO: 542534 - RNA, 23 nt, Artificial Sequence
  Synthetic
ugagaucacagaagagauguggc

SEQ ID NO: 542535 - RNA, 24 nt, Artificial Sequence
  Synthetic
augagaucacagaagagauguggc

SEQ ID NO: 542536 - RNA, 18 nt, Artificial Sequence
  Synthetic
cucaguaucuuauguggc

SEQ ID NO: 542537 - RNA, 19 nt, Artificial Sequence
  Synthetic
gcucaguaucuuauguggc

SEQ ID NO: 542538 - RNA, 20 nt, Artificial Sequence
  Synthetic
agcucaguaucuuauguggc

SEQ ID NO: 542539 - RNA, 21 nt, Artificial Sequence
  Synthetic
gagcucaguaucuuauguggc

SEQ ID NO: 542540 - RNA, 22 nt, Artificial Sequence
  Synthetic
agagcucaguaucuuauguggc

SEQ ID NO: 542541 - RNA, 23 nt, Artificial Sequence
  Synthetic
aagagcucaguaucuuauguggc

SEQ ID NO: 542542 - RNA, 24 nt, Artificial Sequence
  Synthetic
uaagagcucaguaucuuauguggc

SEQ ID NO: 542543 - RNA, 18 nt, Artificial Sequence
  Synthetic
aaaggauucuuauguggc

SEQ ID NO: 542544 - RNA, 19 nt, Artificial Sequence
  Synthetic
gaaaggauucuuauguggc

SEQ ID NO: 542545 - RNA, 20 nt, Artificial Sequence
  Synthetic
agaaaggauucuuauguggc

SEQ ID NO: 542546 - RNA, 21 nt, Artificial Sequence
  Synthetic
gagaaaggauucuuauguggc

SEQ ID NO: 542547 - RNA, 22 nt, Artificial Sequence
  Synthetic
agagaaaggauucuuauguggc

SEQ ID NO: 542548 - RNA, 23 nt, Artificial Sequence
  Synthetic
aagagaaaggauucuuauguggc

SEQ ID NO: 542549 - RNA, 24 nt, Artificial Sequence
  Synthetic
aaagagaaaggauucuuauguggc

SEQ ID NO: 542550 - RNA, 18 nt, Artificial Sequence
  Synthetic
uacuugggaggcuguggc

SEQ ID NO: 542551 - RNA, 19 nt, Artificial Sequence
  Synthetic
cuacuugggaggcuguggc

SEQ ID NO: 542552 - RNA, 20 nt, Artificial Sequence
  Synthetic
gcuacuugggaggcuguggc

SEQ ID NO: 542553 - RNA, 21 nt, Artificial Sequence
  Synthetic
agcuacuugggaggcuguggc

SEQ ID NO: 542554 - RNA, 22 nt, Artificial Sequence
  Synthetic
cagcuacuugggaggcuguggc

SEQ ID NO: 542555 - RNA, 23 nt, Artificial Sequence
  Synthetic
ccagcuacuugggaggcuguggc

SEQ ID NO: 542556 - RNA, 24 nt, Artificial Sequence
  Synthetic
cccagcuacuugggaggcuguggc

SEQ ID NO: 542557 - RNA, 18 nt, Artificial Sequence
  Synthetic
ccauauggcaucuguggc

SEQ ID NO: 542558 - RNA, 19 nt, Artificial Sequence
  Synthetic
cccauauggcaucuguggc

SEQ ID NO: 542559 - RNA, 20 nt, Artificial Sequence
  Synthetic
gcccauauggcaucuguggc

SEQ ID NO: 542560 - RNA, 21 nt, Artificial Sequence
  Synthetic
agcccauauggcaucuguggc

SEQ ID NO: 542561 - RNA, 22 nt, Artificial Sequence
  Synthetic
gagcccauauggcaucuguggc

SEQ ID NO: 542562 - RNA, 23 nt, Artificial Sequence
  Synthetic
agagcccauauggcaucuguggc

SEQ ID NO: 542563 - RNA, 24 nt, Artificial Sequence
  Synthetic
cagagcccauauggcaucuguggc

SEQ ID NO: 542564 - RNA, 18 nt, Artificial Sequence
  Synthetic
cauuuuucacucuguggc

SEQ ID NO: 542565 - RNA, 19 nt, Artificial Sequence
  Synthetic
ccauuuuucacucuguggc

SEQ ID NO: 542566 - RNA, 20 nt, Artificial Sequence
  Synthetic
cccauuuuucacucuguggc

SEQ ID NO: 542567 - RNA, 21 nt, Artificial Sequence
  Synthetic
acccauuuuucacucuguggc

SEQ ID NO: 542568 - RNA, 22 nt, Artificial Sequence
  Synthetic
uacccauuuuucacucuguggc

SEQ ID NO: 542569 - RNA, 23 nt, Artificial Sequence
  Synthetic
uuacccauuuuucacucuguggc

SEQ ID NO: 542570 - RNA, 24 nt, Artificial Sequence
  Synthetic
guuacccauuuuucacucuguggc

SEQ ID NO: 542571 - RNA, 18 nt, Artificial Sequence
  Synthetic
ugcagaacucuguguggc

SEQ ID NO: 542572 - RNA, 19 nt, Artificial Sequence
  Synthetic
gugcagaacucuguguggc

SEQ ID NO: 542573 - RNA, 20 nt, Artificial Sequence
  Synthetic
ugugcagaacucuguguggc

SEQ ID NO: 542574 - RNA, 21 nt, Artificial Sequence
  Synthetic
uugugcagaacucuguguggc

SEQ ID NO: 542575 - RNA, 22 nt, Artificial Sequence
  Synthetic
uuugugcagaacucuguguggc

SEQ ID NO: 542576 - RNA, 23 nt, Artificial Sequence
  Synthetic
auuugugcagaacucuguguggc

SEQ ID NO: 542577 - RNA, 24 nt, Artificial Sequence
  Synthetic
gauuugugcagaacucuguguggc

SEQ ID NO: 542578 - RNA, 18 nt, Artificial Sequence
  Synthetic
auuguuauuacuuguggc

SEQ ID NO: 542579 - RNA, 19 nt, Artificial Sequence
  Synthetic
aauuguuauuacuuguggc

SEQ ID NO: 542580 - RNA, 20 nt, Artificial Sequence
  Synthetic
aaauuguuauuacuuguggc

SEQ ID NO: 542581 - RNA, 21 nt, Artificial Sequence
  Synthetic
aaaauuguuauuacuuguggc

SEQ ID NO: 542582 - RNA, 22 nt, Artificial Sequence
  Synthetic
uaaaauuguuauuacuuguggc

SEQ ID NO: 542583 - RNA, 23 nt, Artificial Sequence
  Synthetic
auaaaauuguuauuacuuguggc

SEQ ID NO: 542584 - RNA, 24 nt, Artificial Sequence
  Synthetic
uauaaaauuguuauuacuuguggc

SEQ ID NO: 542585 - RNA, 18 nt, Artificial Sequence
  Synthetic
ucccaccaacuuuguggc

SEQ ID NO: 542586 - RNA, 19 nt, Artificial Sequence
  Synthetic
uucccaccaacuuuguggc

SEQ ID NO: 542587 - RNA, 20 nt, Artificial Sequence
  Synthetic
uuucccaccaacuuuguggc

SEQ ID NO: 542588 - RNA, 21 nt, Artificial Sequence
  Synthetic
auuucccaccaacuuuguggc

SEQ ID NO: 542589 - RNA, 22 nt, Artificial Sequence
  Synthetic
uauuucccaccaacuuuguggc

SEQ ID NO: 542590 - RNA, 23 nt, Artificial Sequence
  Synthetic
auauuucccaccaacuuuguggc

SEQ ID NO: 542591 - RNA, 24 nt, Artificial Sequence
  Synthetic
cauauuucccaccaacuuuguggc

SEQ ID NO: 542592 - RNA, 18 nt, Artificial Sequence
  Synthetic
aacuggagaaaaauuggc

SEQ ID NO: 542593 - RNA, 19 nt, Artificial Sequence
  Synthetic
uaacuggagaaaaauuggc

SEQ ID NO: 542594 - RNA, 20 nt, Artificial Sequence
  Synthetic
cuaacuggagaaaaauuggc

SEQ ID NO: 542595 - RNA, 21 nt, Artificial Sequence
  Synthetic
acuaacuggagaaaaauuggc

SEQ ID NO: 542596 - RNA, 22 nt, Artificial Sequence
  Synthetic
gacuaacuggagaaaaauuggc

SEQ ID NO: 542597 - RNA, 23 nt, Artificial Sequence
  Synthetic
agacuaacuggagaaaaauuggc

SEQ ID NO: 542598 - RNA, 24 nt, Artificial Sequence
  Synthetic
cagacuaacuggagaaaaauuggc

SEQ ID NO: 542599 - RNA, 18 nt, Artificial Sequence
  Synthetic
acagcauaaaacauuggc

SEQ ID NO: 542600 - RNA, 19 nt, Artificial Sequence
  Synthetic
cacagcauaaaacauuggc

SEQ ID NO: 542601 - RNA, 20 nt, Artificial Sequence
  Synthetic
ccacagcauaaaacauuggc

SEQ ID NO: 542602 - RNA, 21 nt, Artificial Sequence
  Synthetic
accacagcauaaaacauuggc

SEQ ID NO: 542603 - RNA, 22 nt, Artificial Sequence
  Synthetic
gaccacagcauaaaacauuggc

SEQ ID NO: 542604 - RNA, 23 nt, Artificial Sequence
  Synthetic
ugaccacagcauaaaacauuggc

SEQ ID NO: 542605 - RNA, 24 nt, Artificial Sequence
  Synthetic
augaccacagcauaaaacauuggc

SEQ ID NO: 542606 - RNA, 18 nt, Artificial Sequence
  Synthetic
aguuaucuuagcauuggc

SEQ ID NO: 542607 - RNA, 19 nt, Artificial Sequence
  Synthetic
aaguuaucuuagcauuggc

SEQ ID NO: 542608 - RNA, 20 nt, Artificial Sequence
  Synthetic
aaaguuaucuuagcauuggc

SEQ ID NO: 542609 - RNA, 21 nt, Artificial Sequence
  Synthetic
uaaaguuaucuuagcauuggc

SEQ ID NO: 542610 - RNA, 22 nt, Artificial Sequence
  Synthetic
cuaaaguuaucuuagcauuggc

SEQ ID NO: 542611 - RNA, 23 nt, Artificial Sequence
  Synthetic
gcuaaaguuaucuuagcauuggc

SEQ ID NO: 542612 - RNA, 24 nt, Artificial Sequence
  Synthetic
ggcuaaaguuaucuuagcauuggc

SEQ ID NO: 542613 - RNA, 18 nt, Artificial Sequence
  Synthetic
aagucugauaucauuggc

SEQ ID NO: 542614 - RNA, 19 nt, Artificial Sequence
  Synthetic
aaagucugauaucauuggc

SEQ ID NO: 542615 - RNA, 20 nt, Artificial Sequence
  Synthetic
aaaagucugauaucauuggc

SEQ ID NO: 542616 - RNA, 21 nt, Artificial Sequence
  Synthetic
caaaagucugauaucauuggc

SEQ ID NO: 542617 - RNA, 22 nt, Artificial Sequence
  Synthetic
acaaaagucugauaucauuggc

SEQ ID NO: 542618 - RNA, 23 nt, Artificial Sequence
  Synthetic
cacaaaagucugauaucauuggc

SEQ ID NO: 542619 - RNA, 24 nt, Artificial Sequence
  Synthetic
ccacaaaagucugauaucauuggc

SEQ ID NO: 542620 - RNA, 18 nt, Artificial Sequence
  Synthetic
gacuacaugcugauuggc

SEQ ID NO: 542621 - RNA, 19 nt, Artificial Sequence
  Synthetic
ugacuacaugcugauuggc

SEQ ID NO: 542622 - RNA, 20 nt, Artificial Sequence
  Synthetic
cugacuacaugcugauuggc

SEQ ID NO: 542623 - RNA, 21 nt, Artificial Sequence
  Synthetic
acugacuacaugcugauuggc

SEQ ID NO: 542624 - RNA, 22 nt, Artificial Sequence
  Synthetic
cacugacuacaugcugauuggc

SEQ ID NO: 542625 - RNA, 23 nt, Artificial Sequence
  Synthetic
acacugacuacaugcugauuggc

SEQ ID NO: 542626 - RNA, 24 nt, Artificial Sequence
  Synthetic
cacacugacuacaugcugauuggc

SEQ ID NO: 542627 - RNA, 18 nt, Artificial Sequence
  Synthetic
cuggaauaaaauauuggc

SEQ ID NO: 542628 - RNA, 19 nt, Artificial Sequence
  Synthetic
acuggaauaaaauauuggc

SEQ ID NO: 542629 - RNA, 20 nt, Artificial Sequence
  Synthetic
aacuggaauaaaauauuggc

SEQ ID NO: 542630 - RNA, 21 nt, Artificial Sequence
  Synthetic
gaacuggaauaaaauauuggc

SEQ ID NO: 542631 - RNA, 22 nt, Artificial Sequence
  Synthetic
agaacuggaauaaaauauuggc

SEQ ID NO: 542632 - RNA, 23 nt, Artificial Sequence
  Synthetic
aagaacuggaauaaaauauuggc

SEQ ID NO: 542633 - RNA, 24 nt, Artificial Sequence
  Synthetic
gaagaacuggaauaaaauauuggc

SEQ ID NO: 542634 - RNA, 18 nt, Artificial Sequence
  Synthetic
uucaucagggauauuggc

SEQ ID NO: 542635 - RNA, 19 nt, Artificial Sequence
  Synthetic
guucaucagggauauuggc

SEQ ID NO: 542636 - RNA, 20 nt, Artificial Sequence
  Synthetic
uguucaucagggauauuggc

SEQ ID NO: 542637 - RNA, 21 nt, Artificial Sequence
  Synthetic
auguucaucagggauauuggc

SEQ ID NO: 542638 - RNA, 22 nt, Artificial Sequence
  Synthetic
gauguucaucagggauauuggc

SEQ ID NO: 542639 - RNA, 23 nt, Artificial Sequence
  Synthetic
ugauguucaucagggauauuggc

SEQ ID NO: 542640 - RNA, 24 nt, Artificial Sequence
  Synthetic
uugauguucaucagggauauuggc

SEQ ID NO: 542641 - RNA, 18 nt, Artificial Sequence
  Synthetic
uauucugguguuauuggc

SEQ ID NO: 542642 - RNA, 19 nt, Artificial Sequence
  Synthetic
uuauucugguguuauuggc

SEQ ID NO: 542643 - RNA, 20 nt, Artificial Sequence
  Synthetic
cuuauucugguguuauuggc

SEQ ID NO: 542644 - RNA, 21 nt, Artificial Sequence
  Synthetic
acuuauucugguguuauuggc

SEQ ID NO: 542645 - RNA, 22 nt, Artificial Sequence
  Synthetic
aacuuauucugguguuauuggc

SEQ ID NO: 542646 - RNA, 23 nt, Artificial Sequence
  Synthetic
caacuuauucugguguuauuggc

SEQ ID NO: 542647 - RNA, 24 nt, Artificial Sequence
  Synthetic
ccaacuuauucugguguuauuggc

SEQ ID NO: 542648 - RNA, 18 nt, Artificial Sequence
  Synthetic
gaaguuacaggacuuggc

SEQ ID NO: 542649 - RNA, 19 nt, Artificial Sequence
  Synthetic
ugaaguuacaggacuuggc

SEQ ID NO: 542650 - RNA, 20 nt, Artificial Sequence
  Synthetic
augaaguuacaggacuuggc

SEQ ID NO: 542651 - RNA, 21 nt, Artificial Sequence
  Synthetic
caugaaguuacaggacuuggc

SEQ ID NO: 542652 - RNA, 22 nt, Artificial Sequence
  Synthetic
ucaugaaguuacaggacuuggc

SEQ ID NO: 542653 - RNA, 23 nt, Artificial Sequence
  Synthetic
uucaugaaguuacaggacuuggc

SEQ ID NO: 542654 - RNA, 24 nt, Artificial Sequence
  Synthetic
uuucaugaaguuacaggacuuggc

SEQ ID NO: 542655 - RNA, 18 nt, Artificial Sequence
  Synthetic
uucugauaauuacuuggc

SEQ ID NO: 542656 - RNA, 19 nt, Artificial Sequence
  Synthetic
cuucugauaauuacuuggc

SEQ ID NO: 542657 - RNA, 20 nt, Artificial Sequence
  Synthetic
ccuucugauaauuacuuggc

SEQ ID NO: 542658 - RNA, 21 nt, Artificial Sequence
  Synthetic
gccuucugauaauuacuuggc

SEQ ID NO: 542659 - RNA, 22 nt, Artificial Sequence
  Synthetic
agccuucugauaauuacuuggc

SEQ ID NO: 542660 - RNA, 23 nt, Artificial Sequence
  Synthetic
cagccuucugauaauuacuuggc

SEQ ID NO: 542661 - RNA, 24 nt, Artificial Sequence
  Synthetic
acagccuucugauaauuacuuggc

SEQ ID NO: 542662 - RNA, 18 nt, Artificial Sequence
  Synthetic
ugaaccaccaugcuuggc

SEQ ID NO: 542663 - RNA, 19 nt, Artificial Sequence
  Synthetic
uugaaccaccaugcuuggc

SEQ ID NO: 542664 - RNA, 20 nt, Artificial Sequence
  Synthetic
cuugaaccaccaugcuuggc

SEQ ID NO: 542665 - RNA, 21 nt, Artificial Sequence
  Synthetic
gcuugaaccaccaugcuuggc

SEQ ID NO: 542666 - RNA, 22 nt, Artificial Sequence
  Synthetic
ggcuugaaccaccaugcuuggc

SEQ ID NO: 542667 - RNA, 23 nt, Artificial Sequence
  Synthetic
aggcuugaaccaccaugcuuggc

SEQ ID NO: 542668 - RNA, 24 nt, Artificial Sequence
  Synthetic
caggcuugaaccaccaugcuuggc

SEQ ID NO: 542669 - RNA, 18 nt, Artificial Sequence
  Synthetic
guugcuuguaaucuuggc

SEQ ID NO: 542670 - RNA, 19 nt, Artificial Sequence
  Synthetic
uguugcuuguaaucuuggc

SEQ ID NO: 542671 - RNA, 20 nt, Artificial Sequence
  Synthetic
auguugcuuguaaucuuggc

SEQ ID NO: 542672 - RNA, 21 nt, Artificial Sequence
  Synthetic
uauguugcuuguaaucuuggc

SEQ ID NO: 542673 - RNA, 22 nt, Artificial Sequence
  Synthetic
auauguugcuuguaaucuuggc

SEQ ID NO: 542674 - RNA, 23 nt, Artificial Sequence
  Synthetic
gauauguugcuuguaaucuuggc

SEQ ID NO: 542675 - RNA, 24 nt, Artificial Sequence
  Synthetic
agauauguugcuuguaaucuuggc

SEQ ID NO: 542676 - RNA, 18 nt, Artificial Sequence
  Synthetic
gucucugagccucuuggc

SEQ ID NO: 542677 - RNA, 19 nt, Artificial Sequence
  Synthetic
agucucugagccucuuggc

SEQ ID NO: 542678 - RNA, 20 nt, Artificial Sequence
  Synthetic
uagucucugagccucuuggc

SEQ ID NO: 542679 - RNA, 21 nt, Artificial Sequence
  Synthetic
auagucucugagccucuuggc

SEQ ID NO: 542680 - RNA, 22 nt, Artificial Sequence
  Synthetic
aauagucucugagccucuuggc

SEQ ID NO: 542681 - RNA, 23 nt, Artificial Sequence
  Synthetic
uaauagucucugagccucuuggc

SEQ ID NO: 542682 - RNA, 24 nt, Artificial Sequence
  Synthetic
uuaauagucucugagccucuuggc

SEQ ID NO: 542683 - RNA, 18 nt, Artificial Sequence
  Synthetic
cucacggcuucuguuggc

SEQ ID NO: 542684 - RNA, 19 nt, Artificial Sequence
  Synthetic
ccucacggcuucuguuggc

SEQ ID NO: 542685 - RNA, 20 nt, Artificial Sequence
  Synthetic
cccucacggcuucuguuggc

SEQ ID NO: 542686 - RNA, 21 nt, Artificial Sequence
  Synthetic
ucccucacggcuucuguuggc

SEQ ID NO: 542687 - RNA, 22 nt, Artificial Sequence
  Synthetic
gucccucacggcuucuguuggc

SEQ ID NO: 542688 - RNA, 23 nt, Artificial Sequence
  Synthetic
agucccucacggcuucuguuggc

SEQ ID NO: 542689 - RNA, 24 nt, Artificial Sequence
  Synthetic
cagucccucacggcuucuguuggc

SEQ ID NO: 542690 - RNA, 18 nt, Artificial Sequence
  Synthetic
ggguuucaccuuguuggc

SEQ ID NO: 542691 - RNA, 19 nt, Artificial Sequence
  Synthetic
gggguuucaccuuguuggc

SEQ ID NO: 542692 - RNA, 20 nt, Artificial Sequence
  Synthetic
cgggguuucaccuuguuggc

SEQ ID NO: 542693 - RNA, 21 nt, Artificial Sequence
  Synthetic
acgggguuucaccuuguuggc

SEQ ID NO: 542694 - RNA, 22 nt, Artificial Sequence
  Synthetic
gacgggguuucaccuuguuggc

SEQ ID NO: 542695 - RNA, 23 nt, Artificial Sequence
  Synthetic
agacgggguuucaccuuguuggc

SEQ ID NO: 542696 - RNA, 24 nt, Artificial Sequence
  Synthetic
gagacgggguuucaccuuguuggc

SEQ ID NO: 542697 - RNA, 18 nt, Artificial Sequence
  Synthetic
uagcuuucauuuguuggc

SEQ ID NO: 542698 - RNA, 19 nt, Artificial Sequence
  Synthetic
uuagcuuucauuuguuggc

SEQ ID NO: 542699 - RNA, 20 nt, Artificial Sequence
  Synthetic
cuuagcuuucauuuguuggc

SEQ ID NO: 542700 - RNA, 21 nt, Artificial Sequence
  Synthetic
ucuuagcuuucauuuguuggc

SEQ ID NO: 542701 - RNA, 22 nt, Artificial Sequence
  Synthetic
gucuuagcuuucauuuguuggc

SEQ ID NO: 542702 - RNA, 23 nt, Artificial Sequence
  Synthetic
agucuuagcuuucauuuguuggc

SEQ ID NO: 542703 - RNA, 24 nt, Artificial Sequence
  Synthetic
aagucuuagcuuucauuuguuggc

SEQ ID NO: 542704 - RNA, 18 nt, Artificial Sequence
  Synthetic
uuaagacacaaauuuggc

SEQ ID NO: 542705 - RNA, 19 nt, Artificial Sequence
  Synthetic
uuuaagacacaaauuuggc

SEQ ID NO: 542706 - RNA, 20 nt, Artificial Sequence
  Synthetic
cuuuaagacacaaauuuggc

SEQ ID NO: 542707 - RNA, 21 nt, Artificial Sequence
  Synthetic
ucuuuaagacacaaauuuggc

SEQ ID NO: 542708 - RNA, 22 nt, Artificial Sequence
  Synthetic
gucuuuaagacacaaauuuggc

SEQ ID NO: 542709 - RNA, 23 nt, Artificial Sequence
  Synthetic
ugucuuuaagacacaaauuuggc

SEQ ID NO: 542710 - RNA, 24 nt, Artificial Sequence
  Synthetic
gugucuuuaagacacaaauuuggc

SEQ ID NO: 542711 - RNA, 18 nt, Artificial Sequence
  Synthetic
ugagucaggcaauuuggc

SEQ ID NO: 542712 - RNA, 19 nt, Artificial Sequence
  Synthetic
cugagucaggcaauuuggc

SEQ ID NO: 542713 - RNA, 20 nt, Artificial Sequence
  Synthetic
gcugagucaggcaauuuggc

SEQ ID NO: 542714 - RNA, 21 nt, Artificial Sequence
  Synthetic
agcugagucaggcaauuuggc

SEQ ID NO: 542715 - RNA, 22 nt, Artificial Sequence
  Synthetic
aagcugagucaggcaauuuggc

SEQ ID NO: 542716 - RNA, 23 nt, Artificial Sequence
  Synthetic
gaagcugagucaggcaauuuggc

SEQ ID NO: 542717 - RNA, 24 nt, Artificial Sequence
  Synthetic
agaagcugagucaggcaauuuggc

SEQ ID NO: 542718 - RNA, 18 nt, Artificial Sequence
  Synthetic
aacuuuggcagauuuggc

SEQ ID NO: 542719 - RNA, 19 nt, Artificial Sequence
  Synthetic
gaacuuuggcagauuuggc

SEQ ID NO: 542720 - RNA, 20 nt, Artificial Sequence
  Synthetic
ugaacuuuggcagauuuggc

SEQ ID NO: 542721 - RNA, 21 nt, Artificial Sequence
  Synthetic
cugaacuuuggcagauuuggc

SEQ ID NO: 542722 - RNA, 22 nt, Artificial Sequence
  Synthetic
gcugaacuuuggcagauuuggc

SEQ ID NO: 542723 - RNA, 23 nt, Artificial Sequence
  Synthetic
agcugaacuuuggcagauuuggc

SEQ ID NO: 542724 - RNA, 24 nt, Artificial Sequence
  Synthetic
cagcugaacuuuggcagauuuggc

SEQ ID NO: 542725 - RNA, 18 nt, Artificial Sequence
  Synthetic
aguuauuucagauuuggc

SEQ ID NO: 542726 - RNA, 19 nt, Artificial Sequence
  Synthetic
uaguuauuucagauuuggc

SEQ ID NO: 542727 - RNA, 20 nt, Artificial Sequence
  Synthetic
auaguuauuucagauuuggc

SEQ ID NO: 542728 - RNA, 21 nt, Artificial Sequence
  Synthetic
gauaguuauuucagauuuggc

SEQ ID NO: 542729 - RNA, 22 nt, Artificial Sequence
  Synthetic
agauaguuauuucagauuuggc

SEQ ID NO: 542730 - RNA, 23 nt, Artificial Sequence
  Synthetic
cagauaguuauuucagauuuggc

SEQ ID NO: 542731 - RNA, 24 nt, Artificial Sequence
  Synthetic
ccagauaguuauuucagauuuggc

SEQ ID NO: 542732 - RNA, 18 nt, Artificial Sequence
  Synthetic
uaauucuuuaacuuuggc

SEQ ID NO: 542733 - RNA, 19 nt, Artificial Sequence
  Synthetic
auaauucuuuaacuuuggc

SEQ ID NO: 542734 - RNA, 20 nt, Artificial Sequence
  Synthetic
uauaauucuuuaacuuuggc

SEQ ID NO: 542735 - RNA, 21 nt, Artificial Sequence
  Synthetic
cuauaauucuuuaacuuuggc

SEQ ID NO: 542736 - RNA, 22 nt, Artificial Sequence
  Synthetic
gcuauaauucuuuaacuuuggc

SEQ ID NO: 542737 - RNA, 23 nt, Artificial Sequence
  Synthetic
ggcuauaauucuuuaacuuuggc

SEQ ID NO: 542738 - RNA, 24 nt, Artificial Sequence
  Synthetic
aggcuauaauucuuuaacuuuggc

SEQ ID NO: 542739 - RNA, 18 nt, Artificial Sequence
  Synthetic
gauauggacaucuuuggc

SEQ ID NO: 542740 - RNA, 19 nt, Artificial Sequence
  Synthetic
ggauauggacaucuuuggc

SEQ ID NO: 542741 - RNA, 20 nt, Artificial Sequence
  Synthetic
aggauauggacaucuuuggc

SEQ ID NO: 542742 - RNA, 21 nt, Artificial Sequence
  Synthetic
uaggauauggacaucuuuggc

SEQ ID NO: 542743 - RNA, 22 nt, Artificial Sequence
  Synthetic
uuaggauauggacaucuuuggc

SEQ ID NO: 542744 - RNA, 23 nt, Artificial Sequence
  Synthetic
auuaggauauggacaucuuuggc

SEQ ID NO: 542745 - RNA, 24 nt, Artificial Sequence
  Synthetic
gauuaggauauggacaucuuuggc

SEQ ID NO: 542746 - RNA, 18 nt, Artificial Sequence
  Synthetic
ugaggacugcuguuuggc

SEQ ID NO: 542747 - RNA, 19 nt, Artificial Sequence
  Synthetic
uugaggacugcuguuuggc

SEQ ID NO: 542748 - RNA, 20 nt, Artificial Sequence
  Synthetic
uuugaggacugcuguuuggc

SEQ ID NO: 542749 - RNA, 21 nt, Artificial Sequence
  Synthetic
auuugaggacugcuguuuggc

SEQ ID NO: 542750 - RNA, 22 nt, Artificial Sequence
  Synthetic
aauuugaggacugcuguuuggc

SEQ ID NO: 542751 - RNA, 23 nt, Artificial Sequence
  Synthetic
uaauuugaggacugcuguuuggc

SEQ ID NO: 542752 - RNA, 24 nt, Artificial Sequence
  Synthetic
uuaauuugaggacugcuguuuggc

SEQ ID NO: 542753 - RNA, 18 nt, Artificial Sequence
  Synthetic
aaugcugagacuuuuggc

SEQ ID NO: 542754 - RNA, 19 nt, Artificial Sequence
  Synthetic
gaaugcugagacuuuuggc

SEQ ID NO: 542755 - RNA, 20 nt, Artificial Sequence
  Synthetic
agaaugcugagacuuuuggc

SEQ ID NO: 542756 - RNA, 21 nt, Artificial Sequence
  Synthetic
cagaaugcugagacuuuuggc

SEQ ID NO: 542757 - RNA, 22 nt, Artificial Sequence
  Synthetic
gcagaaugcugagacuuuuggc

SEQ ID NO: 542758 - RNA, 23 nt, Artificial Sequence
  Synthetic
ugcagaaugcugagacuuuuggc

SEQ ID NO: 542759 - RNA, 24 nt, Artificial Sequence
  Synthetic
augcagaaugcugagacuuuuggc

SEQ ID NO: 542760 - RNA, 18 nt, Artificial Sequence
  Synthetic
gguuucaggcuuuuuggc

SEQ ID NO: 542761 - RNA, 19 nt, Artificial Sequence
  Synthetic
cgguuucaggcuuuuuggc

SEQ ID NO: 542762 - RNA, 20 nt, Artificial Sequence
  Synthetic
gcgguuucaggcuuuuuggc

SEQ ID NO: 542763 - RNA, 21 nt, Artificial Sequence
  Synthetic
ugcgguuucaggcuuuuuggc

SEQ ID NO: 542764 - RNA, 22 nt, Artificial Sequence
  Synthetic
cugcgguuucaggcuuuuuggc

SEQ ID NO: 542765 - RNA, 23 nt, Artificial Sequence
  Synthetic
gcugcgguuucaggcuuuuuggc

SEQ ID NO: 542766 - RNA, 24 nt, Artificial Sequence
  Synthetic
agcugcgguuucaggcuuuuuggc

SEQ ID NO: 542767 - RNA, 18 nt, Artificial Sequence
  Synthetic
aauaugaaaaaaaaaugc

SEQ ID NO: 542768 - RNA, 19 nt, Artificial Sequence
  Synthetic
caauaugaaaaaaaaaugc

SEQ ID NO: 542769 - RNA, 20 nt, Artificial Sequence
  Synthetic
gcaauaugaaaaaaaaaugc

SEQ ID NO: 542770 - RNA, 21 nt, Artificial Sequence
  Synthetic
ugcaauaugaaaaaaaaaugc

SEQ ID NO: 542771 - RNA, 22 nt, Artificial Sequence
  Synthetic
augcaauaugaaaaaaaaaugc

SEQ ID NO: 542772 - RNA, 23 nt, Artificial Sequence
  Synthetic
aaugcaauaugaaaaaaaaaugc

SEQ ID NO: 542773 - RNA, 24 nt, Artificial Sequence
  Synthetic
caaugcaauaugaaaaaaaaaugc

SEQ ID NO: 542774 - RNA, 18 nt, Artificial Sequence
  Synthetic
cauacuuuuaaaaaaugc

SEQ ID NO: 542775 - RNA, 19 nt, Artificial Sequence
  Synthetic
ucauacuuuuaaaaaaugc

SEQ ID NO: 542776 - RNA, 20 nt, Artificial Sequence
  Synthetic
uucauacuuuuaaaaaaugc

SEQ ID NO: 542777 - RNA, 21 nt, Artificial Sequence
  Synthetic
cuucauacuuuuaaaaaaugc

SEQ ID NO: 542778 - RNA, 22 nt, Artificial Sequence
  Synthetic
acuucauacuuuuaaaaaaugc

SEQ ID NO: 542779 - RNA, 23 nt, Artificial Sequence
  Synthetic
uacuucauacuuuuaaaaaaugc

SEQ ID NO: 542780 - RNA, 24 nt, Artificial Sequence
  Synthetic
uuacuucauacuuuuaaaaaaugc

SEQ ID NO: 542781 - RNA, 18 nt, Artificial Sequence
  Synthetic
gcuguuauaacaaaaugc

SEQ ID NO: 542782 - RNA, 19 nt, Artificial Sequence
  Synthetic
ugcuguuauaacaaaaugc

SEQ ID NO: 542783 - RNA, 20 nt, Artificial Sequence
  Synthetic
gugcuguuauaacaaaaugc

SEQ ID NO: 542784 - RNA, 21 nt, Artificial Sequence
  Synthetic
ugugcuguuauaacaaaaugc

SEQ ID NO: 542785 - RNA, 22 nt, Artificial Sequence
  Synthetic
uugugcuguuauaacaaaaugc

SEQ ID NO: 542786 - RNA, 23 nt, Artificial Sequence
  Synthetic
uuugugcuguuauaacaaaaugc

SEQ ID NO: 542787 - RNA, 24 nt, Artificial Sequence
  Synthetic
guuugugcuguuauaacaaaaugc

SEQ ID NO: 542788 - RNA, 18 nt, Artificial Sequence
  Synthetic
aucccauauccaaaaugc

SEQ ID NO: 542789 - RNA, 19 nt, Artificial Sequence
  Synthetic
uaucccauauccaaaaugc

SEQ ID NO: 542790 - RNA, 20 nt, Artificial Sequence
  Synthetic
guaucccauauccaaaaugc

SEQ ID NO: 542791 - RNA, 21 nt, Artificial Sequence
  Synthetic
aguaucccauauccaaaaugc

SEQ ID NO: 542792 - RNA, 22 nt, Artificial Sequence
  Synthetic
gaguaucccauauccaaaaugc

SEQ ID NO: 542793 - RNA, 23 nt, Artificial Sequence
  Synthetic
ugaguaucccauauccaaaaugc

SEQ ID NO: 542794 - RNA, 24 nt, Artificial Sequence
  Synthetic
uugaguaucccauauccaaaaugc

SEQ ID NO: 542795 - RNA, 18 nt, Artificial Sequence
  Synthetic
auaaaggcuucaaaaugc

SEQ ID NO: 542796 - RNA, 19 nt, Artificial Sequence
  Synthetic
gauaaaggcuucaaaaugc

SEQ ID NO: 542797 - RNA, 20 nt, Artificial Sequence
  Synthetic
ggauaaaggcuucaaaaugc

SEQ ID NO: 542798 - RNA, 21 nt, Artificial Sequence
  Synthetic
aggauaaaggcuucaaaaugc

SEQ ID NO: 542799 - RNA, 22 nt, Artificial Sequence
  Synthetic
aaggauaaaggcuucaaaaugc

SEQ ID NO: 542800 - RNA, 23 nt, Artificial Sequence
  Synthetic
aaaggauaaaggcuucaaaaugc

SEQ ID NO: 542801 - RNA, 24 nt, Artificial Sequence
  Synthetic
uaaaggauaaaggcuucaaaaugc

SEQ ID NO: 542802 - RNA, 18 nt, Artificial Sequence
  Synthetic
uaugcucccauaaaaugc

SEQ ID NO: 542803 - RNA, 19 nt, Artificial Sequence
  Synthetic
uuaugcucccauaaaaugc

SEQ ID NO: 542804 - RNA, 20 nt, Artificial Sequence
  Synthetic
uuuaugcucccauaaaaugc

SEQ ID NO: 542805 - RNA, 21 nt, Artificial Sequence
  Synthetic
uuuuaugcucccauaaaaugc

SEQ ID NO: 542806 - RNA, 22 nt, Artificial Sequence
  Synthetic
uuuuuaugcucccauaaaaugc

SEQ ID NO: 542807 - RNA, 23 nt, Artificial Sequence
  Synthetic
cuuuuuaugcucccauaaaaugc

SEQ ID NO: 542808 - RNA, 24 nt, Artificial Sequence
  Synthetic
gcuuuuuaugcucccauaaaaugc

SEQ ID NO: 542809 - RNA, 18 nt, Artificial Sequence
  Synthetic
gucucagagauaaaaugc

SEQ ID NO: 542810 - RNA, 19 nt, Artificial Sequence
  Synthetic
ggucucagagauaaaaugc

SEQ ID NO: 542811 - RNA, 20 nt, Artificial Sequence
  Synthetic
uggucucagagauaaaaugc

SEQ ID NO: 542812 - RNA, 21 nt, Artificial Sequence
  Synthetic
cuggucucagagauaaaaugc

SEQ ID NO: 542813 - RNA, 22 nt, Artificial Sequence
  Synthetic
ccuggucucagagauaaaaugc

SEQ ID NO: 542814 - RNA, 23 nt, Artificial Sequence
  Synthetic
uccuggucucagagauaaaaugc

SEQ ID NO: 542815 - RNA, 24 nt, Artificial Sequence
  Synthetic
auccuggucucagagauaaaaugc

SEQ ID NO: 542816 - RNA, 18 nt, Artificial Sequence
  Synthetic
gccuacuguuuaaaaugc

SEQ ID NO: 542817 - RNA, 19 nt, Artificial Sequence
  Synthetic
ggccuacuguuuaaaaugc

SEQ ID NO: 542818 - RNA, 20 nt, Artificial Sequence
  Synthetic
uggccuacuguuuaaaaugc

SEQ ID NO: 542819 - RNA, 21 nt, Artificial Sequence
  Synthetic
cuggccuacuguuuaaaaugc

SEQ ID NO: 542820 - RNA, 22 nt, Artificial Sequence
  Synthetic
ucuggccuacuguuuaaaaugc

SEQ ID NO: 542821 - RNA, 23 nt, Artificial Sequence
  Synthetic
aucuggccuacuguuuaaaaugc

SEQ ID NO: 542822 - RNA, 24 nt, Artificial Sequence
  Synthetic
caucuggccuacuguuuaaaaugc

SEQ ID NO: 542823 - RNA, 18 nt, Artificial Sequence
  Synthetic
aauacaaagcacaaaugc

SEQ ID NO: 542824 - RNA, 19 nt, Artificial Sequence
  Synthetic
uaauacaaagcacaaaugc

SEQ ID NO: 542825 - RNA, 20 nt, Artificial Sequence
  Synthetic
guaauacaaagcacaaaugc

SEQ ID NO: 542826 - RNA, 21 nt, Artificial Sequence
  Synthetic
uguaauacaaagcacaaaugc

SEQ ID NO: 542827 - RNA, 22 nt, Artificial Sequence
  Synthetic
uuguaauacaaagcacaaaugc

SEQ ID NO: 542828 - RNA, 23 nt, Artificial Sequence
  Synthetic
uuuguaauacaaagcacaaaugc

SEQ ID NO: 542829 - RNA, 24 nt, Artificial Sequence
  Synthetic
guuuguaauacaaagcacaaaugc

SEQ ID NO: 542830 - RNA, 18 nt, Artificial Sequence
  Synthetic
acaggcaauuacaaaugc

SEQ ID NO: 542831 - RNA, 19 nt, Artificial Sequence
  Synthetic
gacaggcaauuacaaaugc

SEQ ID NO: 542832 - RNA, 20 nt, Artificial Sequence
  Synthetic
agacaggcaauuacaaaugc

SEQ ID NO: 542833 - RNA, 21 nt, Artificial Sequence
  Synthetic
aagacaggcaauuacaaaugc

SEQ ID NO: 542834 - RNA, 22 nt, Artificial Sequence
  Synthetic
aaagacaggcaauuacaaaugc

SEQ ID NO: 542835 - RNA, 23 nt, Artificial Sequence
  Synthetic
aaaagacaggcaauuacaaaugc

SEQ ID NO: 542836 - RNA, 24 nt, Artificial Sequence
  Synthetic
caaaagacaggcaauuacaaaugc

SEQ ID NO: 542837 - RNA, 18 nt, Artificial Sequence
  Synthetic
uuuuguguuugcaaaugc

SEQ ID NO: 542838 - RNA, 19 nt, Artificial Sequence
  Synthetic
auuuuguguuugcaaaugc

SEQ ID NO: 542839 - RNA, 20 nt, Artificial Sequence
  Synthetic
aauuuuguguuugcaaaugc

SEQ ID NO: 542840 - RNA, 21 nt, Artificial Sequence
  Synthetic
uaauuuuguguuugcaaaugc

SEQ ID NO: 542841 - RNA, 22 nt, Artificial Sequence
  Synthetic
auaauuuuguguuugcaaaugc

SEQ ID NO: 542842 - RNA, 23 nt, Artificial Sequence
  Synthetic
uauaauuuuguguuugcaaaugc

SEQ ID NO: 542843 - RNA, 24 nt, Artificial Sequence
  Synthetic
guauaauuuuguguuugcaaaugc

SEQ ID NO: 542844 - RNA, 18 nt, Artificial Sequence
  Synthetic
aagaggcagaucaaaugc

SEQ ID NO: 542845 - RNA, 19 nt, Artificial Sequence
  Synthetic
gaagaggcagaucaaaugc

SEQ ID NO: 542846 - RNA, 20 nt, Artificial Sequence
  Synthetic
ugaagaggcagaucaaaugc

SEQ ID NO: 542847 - RNA, 21 nt, Artificial Sequence
  Synthetic
cugaagaggcagaucaaaugc

SEQ ID NO: 542848 - RNA, 22 nt, Artificial Sequence
  Synthetic
ucugaagaggcagaucaaaugc

SEQ ID NO: 542849 - RNA, 23 nt, Artificial Sequence
  Synthetic
gucugaagaggcagaucaaaugc

SEQ ID NO: 542850 - RNA, 24 nt, Artificial Sequence
  Synthetic
ggucugaagaggcagaucaaaugc

SEQ ID NO: 542851 - RNA, 18 nt, Artificial Sequence
  Synthetic
cuuagcgguuucaaaugc

SEQ ID NO: 542852 - RNA, 19 nt, Artificial Sequence
  Synthetic
ccuuagcgguuucaaaugc

SEQ ID NO: 542853 - RNA, 20 nt, Artificial Sequence
  Synthetic
cccuuagcgguuucaaaugc

SEQ ID NO: 542854 - RNA, 21 nt, Artificial Sequence
  Synthetic
ccccuuagcgguuucaaaugc

SEQ ID NO: 542855 - RNA, 22 nt, Artificial Sequence
  Synthetic
accccuuagcgguuucaaaugc

SEQ ID NO: 542856 - RNA, 23 nt, Artificial Sequence
  Synthetic
aaccccuuagcgguuucaaaugc

SEQ ID NO: 542857 - RNA, 24 nt, Artificial Sequence
  Synthetic
caaccccuuagcgguuucaaaugc

SEQ ID NO: 542858 - RNA, 18 nt, Artificial Sequence
  Synthetic
gugguaugccagaaaugc

SEQ ID NO: 542859 - RNA, 19 nt, Artificial Sequence
  Synthetic
ggugguaugccagaaaugc

SEQ ID NO: 542860 - RNA, 20 nt, Artificial Sequence
  Synthetic
aggugguaugccagaaaugc

SEQ ID NO: 542861 - RNA, 21 nt, Artificial Sequence
  Synthetic
aaggugguaugccagaaaugc

SEQ ID NO: 542862 - RNA, 22 nt, Artificial Sequence
  Synthetic
caaggugguaugccagaaaugc

SEQ ID NO: 542863 - RNA, 23 nt, Artificial Sequence
  Synthetic
ccaaggugguaugccagaaaugc

SEQ ID NO: 542864 - RNA, 24 nt, Artificial Sequence
  Synthetic
gccaaggugguaugccagaaaugc

SEQ ID NO: 542865 - RNA, 18 nt, Artificial Sequence
  Synthetic
auugucuccaggaaaugc

SEQ ID NO: 542866 - RNA, 19 nt, Artificial Sequence
  Synthetic
aauugucuccaggaaaugc

SEQ ID NO: 542867 - RNA, 20 nt, Artificial Sequence
  Synthetic
aaauugucuccaggaaaugc

SEQ ID NO: 542868 - RNA, 21 nt, Artificial Sequence
  Synthetic
aaaauugucuccaggaaaugc

SEQ ID NO: 542869 - RNA, 22 nt, Artificial Sequence
  Synthetic
gaaaauugucuccaggaaaugc

SEQ ID NO: 542870 - RNA, 23 nt, Artificial Sequence
  Synthetic
ggaaaauugucuccaggaaaugc

SEQ ID NO: 542871 - RNA, 24 nt, Artificial Sequence
  Synthetic
gggaaaauugucuccaggaaaugc

SEQ ID NO: 542872 - RNA, 18 nt, Artificial Sequence
  Synthetic
ugucucaaugugaaaugc

SEQ ID NO: 542873 - RNA, 19 nt, Artificial Sequence
  Synthetic
augucucaaugugaaaugc

SEQ ID NO: 542874 - RNA, 20 nt, Artificial Sequence
  Synthetic
aaugucucaaugugaaaugc

SEQ ID NO: 542875 - RNA, 21 nt, Artificial Sequence
  Synthetic
uaaugucucaaugugaaaugc

SEQ ID NO: 542876 - RNA, 22 nt, Artificial Sequence
  Synthetic
auaaugucucaaugugaaaugc

SEQ ID NO: 542877 - RNA, 23 nt, Artificial Sequence
  Synthetic
cauaaugucucaaugugaaaugc

SEQ ID NO: 542878 - RNA, 24 nt, Artificial Sequence
  Synthetic
ucauaaugucucaaugugaaaugc

SEQ ID NO: 542879 - RNA, 18 nt, Artificial Sequence
  Synthetic
aacauaaagaauaaaugc

SEQ ID NO: 542880 - RNA, 19 nt, Artificial Sequence
  Synthetic
gaacauaaagaauaaaugc

SEQ ID NO: 542881 - RNA, 20 nt, Artificial Sequence
  Synthetic
ggaacauaaagaauaaaugc

SEQ ID NO: 542882 - RNA, 21 nt, Artificial Sequence
  Synthetic
uggaacauaaagaauaaaugc

SEQ ID NO: 542883 - RNA, 22 nt, Artificial Sequence
  Synthetic
uuggaacauaaagaauaaaugc

SEQ ID NO: 542884 - RNA, 23 nt, Artificial Sequence
  Synthetic
uuuggaacauaaagaauaaaugc

SEQ ID NO: 542885 - RNA, 24 nt, Artificial Sequence
  Synthetic
guuuggaacauaaagaauaaaugc

SEQ ID NO: 542886 - RNA, 18 nt, Artificial Sequence
  Synthetic
gcaaagcaaacuaaaugc

SEQ ID NO: 542887 - RNA, 19 nt, Artificial Sequence
  Synthetic
ugcaaagcaaacuaaaugc

SEQ ID NO: 542888 - RNA, 20 nt, Artificial Sequence
  Synthetic
uugcaaagcaaacuaaaugc

SEQ ID NO: 542889 - RNA, 21 nt, Artificial Sequence
  Synthetic
auugcaaagcaaacuaaaugc

SEQ ID NO: 542890 - RNA, 22 nt, Artificial Sequence
  Synthetic
gauugcaaagcaaacuaaaugc

SEQ ID NO: 542891 - RNA, 23 nt, Artificial Sequence
  Synthetic
agauugcaaagcaaacuaaaugc

SEQ ID NO: 542892 - RNA, 24 nt, Artificial Sequence
  Synthetic
aagauugcaaagcaaacuaaaugc

SEQ ID NO: 542893 - RNA, 18 nt, Artificial Sequence
  Synthetic
aaagcacauuuuaaaugc

SEQ ID NO: 542894 - RNA, 19 nt, Artificial Sequence
  Synthetic
aaaagcacauuuuaaaugc

SEQ ID NO: 542895 - RNA, 20 nt, Artificial Sequence
  Synthetic
uaaaagcacauuuuaaaugc

SEQ ID NO: 542896 - RNA, 21 nt, Artificial Sequence
  Synthetic
auaaaagcacauuuuaaaugc

SEQ ID NO: 542897 - RNA, 22 nt, Artificial Sequence
  Synthetic
uauaaaagcacauuuuaaaugc

SEQ ID NO: 542898 - RNA, 23 nt, Artificial Sequence
  Synthetic
cuauaaaagcacauuuuaaaugc

SEQ ID NO: 542899 - RNA, 24 nt, Artificial Sequence
  Synthetic
gcuauaaaagcacauuuuaaaugc

SEQ ID NO: 542900 - RNA, 18 nt, Artificial Sequence
  Synthetic
cgauuccagaaacaaugc

SEQ ID NO: 542901 - RNA, 19 nt, Artificial Sequence
  Synthetic
acgauuccagaaacaaugc

SEQ ID NO: 542902 - RNA, 20 nt, Artificial Sequence
  Synthetic
aacgauuccagaaacaaugc

SEQ ID NO: 542903 - RNA, 21 nt, Artificial Sequence
  Synthetic
aaacgauuccagaaacaaugc

SEQ ID NO: 542904 - RNA, 22 nt, Artificial Sequence
  Synthetic
gaaacgauuccagaaacaaugc

SEQ ID NO: 542905 - RNA, 23 nt, Artificial Sequence
  Synthetic
ggaaacgauuccagaaacaaugc

SEQ ID NO: 542906 - RNA, 24 nt, Artificial Sequence
  Synthetic
uggaaacgauuccagaaacaaugc

SEQ ID NO: 542907 - RNA, 18 nt, Artificial Sequence
  Synthetic
aauuuuaaucaacaaugc

SEQ ID NO: 542908 - RNA, 19 nt, Artificial Sequence
  Synthetic
aaauuuuaaucaacaaugc

SEQ ID NO: 542909 - RNA, 20 nt, Artificial Sequence
  Synthetic
caaauuuuaaucaacaaugc

SEQ ID NO: 542910 - RNA, 21 nt, Artificial Sequence
  Synthetic
ucaaauuuuaaucaacaaugc

SEQ ID NO: 542911 - RNA, 22 nt, Artificial Sequence
  Synthetic
gucaaauuuuaaucaacaaugc

SEQ ID NO: 542912 - RNA, 23 nt, Artificial Sequence
  Synthetic
agucaaauuuuaaucaacaaugc

SEQ ID NO: 542913 - RNA, 24 nt, Artificial Sequence
  Synthetic
aagucaaauuuuaaucaacaaugc

SEQ ID NO: 542914 - RNA, 18 nt, Artificial Sequence
  Synthetic
auacacguaugacaaugc

SEQ ID NO: 542915 - RNA, 19 nt, Artificial Sequence
  Synthetic
aauacacguaugacaaugc

SEQ ID NO: 542916 - RNA, 20 nt, Artificial Sequence
  Synthetic
caauacacguaugacaaugc

SEQ ID NO: 542917 - RNA, 21 nt, Artificial Sequence
  Synthetic
gcaauacacguaugacaaugc

SEQ ID NO: 542918 - RNA, 22 nt, Artificial Sequence
  Synthetic
agcaauacacguaugacaaugc

SEQ ID NO: 542919 - RNA, 23 nt, Artificial Sequence
  Synthetic
aagcaauacacguaugacaaugc

SEQ ID NO: 542920 - RNA, 24 nt, Artificial Sequence
  Synthetic
caagcaauacacguaugacaaugc

SEQ ID NO: 542921 - RNA, 18 nt, Artificial Sequence
  Synthetic
ccacagaagaagcaaugc

SEQ ID NO: 542922 - RNA, 19 nt, Artificial Sequence
  Synthetic
cccacagaagaagcaaugc

SEQ ID NO: 542923 - RNA, 20 nt, Artificial Sequence
  Synthetic
ucccacagaagaagcaaugc

SEQ ID NO: 542924 - RNA, 21 nt, Artificial Sequence
  Synthetic
uucccacagaagaagcaaugc

SEQ ID NO: 542925 - RNA, 22 nt, Artificial Sequence
  Synthetic
guucccacagaagaagcaaugc

SEQ ID NO: 542926 - RNA, 23 nt, Artificial Sequence
  Synthetic
uguucccacagaagaagcaaugc

SEQ ID NO: 542927 - RNA, 24 nt, Artificial Sequence
  Synthetic
guguucccacagaagaagcaaugc

SEQ ID NO: 542928 - RNA, 18 nt, Artificial Sequence
  Synthetic
aaucaaguuaagcaaugc

SEQ ID NO: 542929 - RNA, 19 nt, Artificial Sequence
  Synthetic
caaucaaguuaagcaaugc

SEQ ID NO: 542930 - RNA, 20 nt, Artificial Sequence
  Synthetic
ucaaucaaguuaagcaaugc

SEQ ID NO: 542931 - RNA, 21 nt, Artificial Sequence
  Synthetic
gucaaucaaguuaagcaaugc

SEQ ID NO: 542932 - RNA, 22 nt, Artificial Sequence
  Synthetic
ugucaaucaaguuaagcaaugc

SEQ ID NO: 542933 - RNA, 23 nt, Artificial Sequence
  Synthetic
uugucaaucaaguuaagcaaugc

SEQ ID NO: 542934 - RNA, 24 nt, Artificial Sequence
  Synthetic
auugucaaucaaguuaagcaaugc

SEQ ID NO: 542935 - RNA, 21 nt, Artificial Sequence
  Synthetic
gguauuucuuuauagcaaugc

SEQ ID NO: 542936 - RNA, 22 nt, Artificial Sequence
  Synthetic
agguauuucuuuauagcaaugc

SEQ ID NO: 542937 - RNA, 23 nt, Artificial Sequence
  Synthetic
cagguauuucuuuauagcaaugc

SEQ ID NO: 542938 - RNA, 24 nt, Artificial Sequence
  Synthetic
ucagguauuucuuuauagcaaugc

SEQ ID NO: 542939 - RNA, 18 nt, Artificial Sequence
  Synthetic
caggcaaacuaucaaugc

SEQ ID NO: 542940 - RNA, 19 nt, Artificial Sequence
  Synthetic
ucaggcaaacuaucaaugc

SEQ ID NO: 542941 - RNA, 20 nt, Artificial Sequence
  Synthetic
uucaggcaaacuaucaaugc

SEQ ID NO: 542942 - RNA, 21 nt, Artificial Sequence
  Synthetic
uuucaggcaaacuaucaaugc

SEQ ID NO: 542943 - RNA, 22 nt, Artificial Sequence
  Synthetic
uuuucaggcaaacuaucaaugc

SEQ ID NO: 542944 - RNA, 23 nt, Artificial Sequence
  Synthetic
guuuucaggcaaacuaucaaugc

SEQ ID NO: 542945 - RNA, 24 nt, Artificial Sequence
  Synthetic
aguuuucaggcaaacuaucaaugc

SEQ ID NO: 542946 - RNA, 18 nt, Artificial Sequence
  Synthetic
ugauaguauacucaaugc

SEQ ID NO: 542947 - RNA, 19 nt, Artificial Sequence
  Synthetic
cugauaguauacucaaugc

SEQ ID NO: 542948 - RNA, 20 nt, Artificial Sequence
  Synthetic
ccugauaguauacucaaugc

SEQ ID NO: 542949 - RNA, 21 nt, Artificial Sequence
  Synthetic
gccugauaguauacucaaugc

SEQ ID NO: 542950 - RNA, 22 nt, Artificial Sequence
  Synthetic
ugccugauaguauacucaaugc

SEQ ID NO: 542951 - RNA, 23 nt, Artificial Sequence
  Synthetic
augccugauaguauacucaaugc

SEQ ID NO: 542952 - RNA, 24 nt, Artificial Sequence
  Synthetic
caugccugauaguauacucaaugc

SEQ ID NO: 542953 - RNA, 18 nt, Artificial Sequence
  Synthetic
uucugccguauucaaugc

SEQ ID NO: 542954 - RNA, 19 nt, Artificial Sequence
  Synthetic
auucugccguauucaaugc

SEQ ID NO: 542955 - RNA, 20 nt, Artificial Sequence
  Synthetic
aauucugccguauucaaugc

SEQ ID NO: 542956 - RNA, 21 nt, Artificial Sequence
  Synthetic
aaauucugccguauucaaugc

SEQ ID NO: 542957 - RNA, 22 nt, Artificial Sequence
  Synthetic
gaaauucugccguauucaaugc

SEQ ID NO: 542958 - RNA, 23 nt, Artificial Sequence
  Synthetic
agaaauucugccguauucaaugc

SEQ ID NO: 542959 - RNA, 24 nt, Artificial Sequence
  Synthetic
cagaaauucugccguauucaaugc

SEQ ID NO: 542960 - RNA, 18 nt, Artificial Sequence
  Synthetic
agagaggaauaagaaugc

SEQ ID NO: 542961 - RNA, 19 nt, Artificial Sequence
  Synthetic
aagagaggaauaagaaugc

SEQ ID NO: 542962 - RNA, 20 nt, Artificial Sequence
  Synthetic
caagagaggaauaagaaugc

SEQ ID NO: 542963 - RNA, 21 nt, Artificial Sequence
  Synthetic
ccaagagaggaauaagaaugc

SEQ ID NO: 542964 - RNA, 22 nt, Artificial Sequence
  Synthetic
cccaagagaggaauaagaaugc

SEQ ID NO: 542965 - RNA, 23 nt, Artificial Sequence
  Synthetic
acccaagagaggaauaagaaugc

SEQ ID NO: 542966 - RNA, 24 nt, Artificial Sequence
  Synthetic
gacccaagagaggaauaagaaugc

SEQ ID NO: 542967 - RNA, 18 nt, Artificial Sequence
  Synthetic
guggguggccuagaaugc

SEQ ID NO: 542968 - RNA, 19 nt, Artificial Sequence
  Synthetic
uguggguggccuagaaugc

SEQ ID NO: 542969 - RNA, 20 nt, Artificial Sequence
  Synthetic
guguggguggccuagaaugc

SEQ ID NO: 542970 - RNA, 21 nt, Artificial Sequence
  Synthetic
gguguggguggccuagaaugc

SEQ ID NO: 542971 - RNA, 22 nt, Artificial Sequence
  Synthetic
ugguguggguggccuagaaugc

SEQ ID NO: 542972 - RNA, 23 nt, Artificial Sequence
  Synthetic
augguguggguggccuagaaugc

SEQ ID NO: 542973 - RNA, 24 nt, Artificial Sequence
  Synthetic
gaugguguggguggccuagaaugc

SEQ ID NO: 542974 - RNA, 18 nt, Artificial Sequence
  Synthetic
aaacauucccgugaaugc

SEQ ID NO: 542975 - RNA, 19 nt, Artificial Sequence
  Synthetic
gaaacauucccgugaaugc

SEQ ID NO: 542976 - RNA, 20 nt, Artificial Sequence
  Synthetic
agaaacauucccgugaaugc

SEQ ID NO: 542977 - RNA, 21 nt, Artificial Sequence
  Synthetic
uagaaacauucccgugaaugc

SEQ ID NO: 542978 - RNA, 22 nt, Artificial Sequence
  Synthetic
auagaaacauucccgugaaugc

SEQ ID NO: 542979 - RNA, 23 nt, Artificial Sequence
  Synthetic
cauagaaacauucccgugaaugc

SEQ ID NO: 542980 - RNA, 24 nt, Artificial Sequence
  Synthetic
acauagaaacauucccgugaaugc

SEQ ID NO: 542981 - RNA, 18 nt, Artificial Sequence
  Synthetic
uuuaucaucaaauaaugc

SEQ ID NO: 542982 - RNA, 19 nt, Artificial Sequence
  Synthetic
guuuaucaucaaauaaugc

SEQ ID NO: 542983 - RNA, 20 nt, Artificial Sequence
  Synthetic
aguuuaucaucaaauaaugc

SEQ ID NO: 542984 - RNA, 21 nt, Artificial Sequence
  Synthetic
uaguuuaucaucaaauaaugc

SEQ ID NO: 542985 - RNA, 22 nt, Artificial Sequence
  Synthetic
uuaguuuaucaucaaauaaugc

SEQ ID NO: 542986 - RNA, 23 nt, Artificial Sequence
  Synthetic
cuuaguuuaucaucaaauaaugc

SEQ ID NO: 542987 - RNA, 24 nt, Artificial Sequence
  Synthetic
ucuuaguuuaucaucaaauaaugc

SEQ ID NO: 542988 - RNA, 18 nt, Artificial Sequence
  Synthetic
cacuguacaagauaaugc

SEQ ID NO: 542989 - RNA, 19 nt, Artificial Sequence
  Synthetic
gcacuguacaagauaaugc

SEQ ID NO: 542990 - RNA, 20 nt, Artificial Sequence
  Synthetic
ugcacuguacaagauaaugc

SEQ ID NO: 542991 - RNA, 21 nt, Artificial Sequence
  Synthetic
gugcacuguacaagauaaugc

SEQ ID NO: 542992 - RNA, 22 nt, Artificial Sequence
  Synthetic
ugugcacuguacaagauaaugc

SEQ ID NO: 542993 - RNA, 23 nt, Artificial Sequence
  Synthetic
augugcacuguacaagauaaugc

SEQ ID NO: 542994 - RNA, 24 nt, Artificial Sequence
  Synthetic
caugugcacuguacaagauaaugc

SEQ ID NO: 542995 - RNA, 18 nt, Artificial Sequence
  Synthetic
uccuuagcaaacuaaugc

SEQ ID NO: 542996 - RNA, 19 nt, Artificial Sequence
  Synthetic
guccuuagcaaacuaaugc

SEQ ID NO: 542997 - RNA, 20 nt, Artificial Sequence
  Synthetic
uguccuuagcaaacuaaugc

SEQ ID NO: 542998 - RNA, 21 nt, Artificial Sequence
  Synthetic
uuguccuuagcaaacuaaugc

SEQ ID NO: 542999 - RNA, 22 nt, Artificial Sequence
  Synthetic
auuguccuuagcaaacuaaugc

SEQ ID NO: 543000 - RNA, 23 nt, Artificial Sequence
  Synthetic
cauuguccuuagcaaacuaaugc

SEQ ID NO: 543001 - RNA, 24 nt, Artificial Sequence
  Synthetic
ccauuguccuuagcaaacuaaugc

SEQ ID NO: 543002 - RNA, 18 nt, Artificial Sequence
  Synthetic
ccugauauggacuaaugc

SEQ ID NO: 543003 - RNA, 19 nt, Artificial Sequence
  Synthetic
cccugauauggacuaaugc

SEQ ID NO: 543004 - RNA, 20 nt, Artificial Sequence
  Synthetic
ucccugauauggacuaaugc

SEQ ID NO: 543005 - RNA, 21 nt, Artificial Sequence
  Synthetic
cucccugauauggacuaaugc

SEQ ID NO: 543006 - RNA, 22 nt, Artificial Sequence
  Synthetic
acucccugauauggacuaaugc

SEQ ID NO: 543007 - RNA, 23 nt, Artificial Sequence
  Synthetic
uacucccugauauggacuaaugc

SEQ ID NO: 543008 - RNA, 24 nt, Artificial Sequence
  Synthetic
uuacucccugauauggacuaaugc

SEQ ID NO: 543009 - RNA, 18 nt, Artificial Sequence
  Synthetic
caccuuuuguucuaaugc

SEQ ID NO: 543010 - RNA, 19 nt, Artificial Sequence
  Synthetic
ucaccuuuuguucuaaugc

SEQ ID NO: 543011 - RNA, 20 nt, Artificial Sequence
  Synthetic
gucaccuuuuguucuaaugc

SEQ ID NO: 543012 - RNA, 21 nt, Artificial Sequence
  Synthetic
ugucaccuuuuguucuaaugc

SEQ ID NO: 543013 - RNA, 22 nt, Artificial Sequence
  Synthetic
uugucaccuuuuguucuaaugc

SEQ ID NO: 543014 - RNA, 23 nt, Artificial Sequence
  Synthetic
uuugucaccuuuuguucuaaugc

SEQ ID NO: 543015 - RNA, 24 nt, Artificial Sequence
  Synthetic
auuugucaccuuuuguucuaaugc

SEQ ID NO: 543016 - RNA, 18 nt, Artificial Sequence
  Synthetic
gaagaagcuggguaaugc

SEQ ID NO: 543017 - RNA, 19 nt, Artificial Sequence
  Synthetic
ggaagaagcuggguaaugc

SEQ ID NO: 543018 - RNA, 20 nt, Artificial Sequence
  Synthetic
uggaagaagcuggguaaugc

SEQ ID NO: 543019 - RNA, 21 nt, Artificial Sequence
  Synthetic
uuggaagaagcuggguaaugc

SEQ ID NO: 543020 - RNA, 22 nt, Artificial Sequence
  Synthetic
auuggaagaagcuggguaaugc

SEQ ID NO: 543021 - RNA, 23 nt, Artificial Sequence
  Synthetic
aauuggaagaagcuggguaaugc

SEQ ID NO: 543022 - RNA, 24 nt, Artificial Sequence
  Synthetic
gaauuggaagaagcuggguaaugc

SEQ ID NO: 543023 - RNA, 18 nt, Artificial Sequence
  Synthetic
aauaaccaaauguaaugc

SEQ ID NO: 543024 - RNA, 19 nt, Artificial Sequence
  Synthetic
uaauaaccaaauguaaugc

SEQ ID NO: 543025 - RNA, 20 nt, Artificial Sequence
  Synthetic
auaauaaccaaauguaaugc

SEQ ID NO: 543026 - RNA, 21 nt, Artificial Sequence
  Synthetic
aauaauaaccaaauguaaugc

SEQ ID NO: 543027 - RNA, 22 nt, Artificial Sequence
  Synthetic
uaauaauaaccaaauguaaugc

SEQ ID NO: 543028 - RNA, 23 nt, Artificial Sequence
  Synthetic
auaauaauaaccaaauguaaugc

SEQ ID NO: 543029 - RNA, 24 nt, Artificial Sequence
  Synthetic
aauaauaauaaccaaauguaaugc

SEQ ID NO: 543030 - RNA, 18 nt, Artificial Sequence
  Synthetic
aacacaaaagauuaaugc

SEQ ID NO: 543031 - RNA, 19 nt, Artificial Sequence
  Synthetic
uaacacaaaagauuaaugc

SEQ ID NO: 543032 - RNA, 20 nt, Artificial Sequence
  Synthetic
guaacacaaaagauuaaugc

SEQ ID NO: 543033 - RNA, 21 nt, Artificial Sequence
  Synthetic
uguaacacaaaagauuaaugc

SEQ ID NO: 543034 - RNA, 22 nt, Artificial Sequence
  Synthetic
uuguaacacaaaagauuaaugc

SEQ ID NO: 543035 - RNA, 23 nt, Artificial Sequence
  Synthetic
uuuguaacacaaaagauuaaugc

SEQ ID NO: 543036 - RNA, 24 nt, Artificial Sequence
  Synthetic
guuuguaacacaaaagauuaaugc

SEQ ID NO: 543037 - RNA, 18 nt, Artificial Sequence
  Synthetic
gacaacugagauuaaugc

SEQ ID NO: 543038 - RNA, 19 nt, Artificial Sequence
  Synthetic
agacaacugagauuaaugc

SEQ ID NO: 543039 - RNA, 20 nt, Artificial Sequence
  Synthetic
gagacaacugagauuaaugc

SEQ ID NO: 543040 - RNA, 21 nt, Artificial Sequence
  Synthetic
ugagacaacugagauuaaugc

SEQ ID NO: 543041 - RNA, 22 nt, Artificial Sequence
  Synthetic
uugagacaacugagauuaaugc

SEQ ID NO: 543042 - RNA, 23 nt, Artificial Sequence
  Synthetic
cuugagacaacugagauuaaugc

SEQ ID NO: 543043 - RNA, 24 nt, Artificial Sequence
  Synthetic
acuugagacaacugagauuaaugc

SEQ ID NO: 543044 - RNA, 18 nt, Artificial Sequence
  Synthetic
uuugauguacuuuaaugc

SEQ ID NO: 543045 - RNA, 19 nt, Artificial Sequence
  Synthetic
uuuugauguacuuuaaugc

SEQ ID NO: 543046 - RNA, 20 nt, Artificial Sequence
  Synthetic
uuuuugauguacuuuaaugc

SEQ ID NO: 543047 - RNA, 21 nt, Artificial Sequence
  Synthetic
cuuuuugauguacuuuaaugc

SEQ ID NO: 543048 - RNA, 22 nt, Artificial Sequence
  Synthetic
acuuuuugauguacuuuaaugc

SEQ ID NO: 543049 - RNA, 23 nt, Artificial Sequence
  Synthetic
aacuuuuugauguacuuuaaugc

SEQ ID NO: 543050 - RNA, 24 nt, Artificial Sequence
  Synthetic
gaacuuuuugauguacuuuaaugc

SEQ ID NO: 543051 - RNA, 18 nt, Artificial Sequence
  Synthetic
aaugucgauguuuaaugc

SEQ ID NO: 543052 - RNA, 19 nt, Artificial Sequence
  Synthetic
caaugucgauguuuaaugc

SEQ ID NO: 543053 - RNA, 20 nt, Artificial Sequence
  Synthetic
acaaugucgauguuuaaugc

SEQ ID NO: 543054 - RNA, 21 nt, Artificial Sequence
  Synthetic
aacaaugucgauguuuaaugc

SEQ ID NO: 543055 - RNA, 22 nt, Artificial Sequence
  Synthetic
aaacaaugucgauguuuaaugc

SEQ ID NO: 543056 - RNA, 23 nt, Artificial Sequence
  Synthetic
gaaacaaugucgauguuuaaugc

SEQ ID NO: 543057 - RNA, 24 nt, Artificial Sequence
  Synthetic
agaaacaaugucgauguuuaaugc

SEQ ID NO: 543058 - RNA, 18 nt, Artificial Sequence
  Synthetic
gaggggaacaacacaugc

SEQ ID NO: 543059 - RNA, 19 nt, Artificial Sequence
  Synthetic
agaggggaacaacacaugc

SEQ ID NO: 543060 - RNA, 20 nt, Artificial Sequence
  Synthetic
uagaggggaacaacacaugc

SEQ ID NO: 543061 - RNA, 21 nt, Artificial Sequence
  Synthetic
guagaggggaacaacacaugc

SEQ ID NO: 543062 - RNA, 22 nt, Artificial Sequence
  Synthetic
cguagaggggaacaacacaugc

SEQ ID NO: 543063 - RNA, 23 nt, Artificial Sequence
  Synthetic
acguagaggggaacaacacaugc

SEQ ID NO: 543064 - RNA, 24 nt, Artificial Sequence
  Synthetic
cacguagaggggaacaacacaugc

SEQ ID NO: 543065 - RNA, 18 nt, Artificial Sequence
  Synthetic
ucauuggauuugacaugc

SEQ ID NO: 543066 - RNA, 19 nt, Artificial Sequence
  Synthetic
cucauuggauuugacaugc

SEQ ID NO: 543067 - RNA, 20 nt, Artificial Sequence
  Synthetic
ccucauuggauuugacaugc

SEQ ID NO: 543068 - RNA, 21 nt, Artificial Sequence
  Synthetic
gccucauuggauuugacaugc

SEQ ID NO: 543069 - RNA, 22 nt, Artificial Sequence
  Synthetic
ugccucauuggauuugacaugc

SEQ ID NO: 543070 - RNA, 23 nt, Artificial Sequence
  Synthetic
cugccucauuggauuugacaugc

SEQ ID NO: 543071 - RNA, 24 nt, Artificial Sequence
  Synthetic
acugccucauuggauuugacaugc

SEQ ID NO: 543072 - RNA, 18 nt, Artificial Sequence
  Synthetic
aacugcaaucauccaugc

SEQ ID NO: 543073 - RNA, 19 nt, Artificial Sequence
  Synthetic
caacugcaaucauccaugc

SEQ ID NO: 543074 - RNA, 20 nt, Artificial Sequence
  Synthetic
acaacugcaaucauccaugc

SEQ ID NO: 543075 - RNA, 21 nt, Artificial Sequence
  Synthetic
gacaacugcaaucauccaugc

SEQ ID NO: 543076 - RNA, 22 nt, Artificial Sequence
  Synthetic
agacaacugcaaucauccaugc

SEQ ID NO: 543077 - RNA, 23 nt, Artificial Sequence
  Synthetic
uagacaacugcaaucauccaugc

SEQ ID NO: 543078 - RNA, 24 nt, Artificial Sequence
  Synthetic
auagacaacugcaaucauccaugc

SEQ ID NO: 543079 - RNA, 18 nt, Artificial Sequence
  Synthetic
caaauuguaccagcaugc

SEQ ID NO: 543080 - RNA, 19 nt, Artificial Sequence
  Synthetic
acaaauuguaccagcaugc

SEQ ID NO: 543081 - RNA, 20 nt, Artificial Sequence
  Synthetic
uacaaauuguaccagcaugc

SEQ ID NO: 543082 - RNA, 21 nt, Artificial Sequence
  Synthetic
auacaaauuguaccagcaugc

SEQ ID NO: 543083 - RNA, 22 nt, Artificial Sequence
  Synthetic
gauacaaauuguaccagcaugc

SEQ ID NO: 543084 - RNA, 23 nt, Artificial Sequence
  Synthetic
ggauacaaauuguaccagcaugc

SEQ ID NO: 543085 - RNA, 24 nt, Artificial Sequence
  Synthetic
uggauacaaauuguaccagcaugc

SEQ ID NO: 543086 - RNA, 18 nt, Artificial Sequence
  Synthetic
cccgcucugcaugcaugc

SEQ ID NO: 543087 - RNA, 19 nt, Artificial Sequence
  Synthetic
ccccgcucugcaugcaugc

SEQ ID NO: 543088 - RNA, 20 nt, Artificial Sequence
  Synthetic
accccgcucugcaugcaugc

SEQ ID NO: 543089 - RNA, 21 nt, Artificial Sequence
  Synthetic
aaccccgcucugcaugcaugc

SEQ ID NO: 543090 - RNA, 22 nt, Artificial Sequence
  Synthetic
uaaccccgcucugcaugcaugc

SEQ ID NO: 543091 - RNA, 23 nt, Artificial Sequence
  Synthetic
uuaaccccgcucugcaugcaugc

SEQ ID NO: 543092 - RNA, 24 nt, Artificial Sequence
  Synthetic
cuuaaccccgcucugcaugcaugc

SEQ ID NO: 543093 - RNA, 18 nt, Artificial Sequence
  Synthetic
uacacuagugcugcaugc

SEQ ID NO: 543094 - RNA, 19 nt, Artificial Sequence
  Synthetic
uuacacuagugcugcaugc

SEQ ID NO: 543095 - RNA, 20 nt, Artificial Sequence
  Synthetic
auuacacuagugcugcaugc

SEQ ID NO: 543096 - RNA, 21 nt, Artificial Sequence
  Synthetic
gauuacacuagugcugcaugc

SEQ ID NO: 543097 - RNA, 22 nt, Artificial Sequence
  Synthetic
ggauuacacuagugcugcaugc

SEQ ID NO: 543098 - RNA, 23 nt, Artificial Sequence
  Synthetic
gggauuacacuagugcugcaugc

SEQ ID NO: 543099 - RNA, 24 nt, Artificial Sequence
  Synthetic
agggauuacacuagugcugcaugc

SEQ ID NO: 543100 - RNA, 18 nt, Artificial Sequence
  Synthetic
cucaauucucaaucaugc

SEQ ID NO: 543101 - RNA, 19 nt, Artificial Sequence
  Synthetic
ucucaauucucaaucaugc

SEQ ID NO: 543102 - RNA, 20 nt, Artificial Sequence
  Synthetic
uucucaauucucaaucaugc

SEQ ID NO: 543103 - RNA, 21 nt, Artificial Sequence
  Synthetic
uuucucaauucucaaucaugc

SEQ ID NO: 543104 - RNA, 22 nt, Artificial Sequence
  Synthetic
cuuucucaauucucaaucaugc

SEQ ID NO: 543105 - RNA, 23 nt, Artificial Sequence
  Synthetic
acuuucucaauucucaaucaugc

SEQ ID NO: 543106 - RNA, 24 nt, Artificial Sequence
  Synthetic
cacuuucucaauucucaaucaugc

SEQ ID NO: 543107 - RNA, 18 nt, Artificial Sequence
  Synthetic
uggauucuuauaucaugc

SEQ ID NO: 543108 - RNA, 19 nt, Artificial Sequence
  Synthetic
cuggauucuuauaucaugc

SEQ ID NO: 543109 - RNA, 20 nt, Artificial Sequence
  Synthetic
ucuggauucuuauaucaugc

SEQ ID NO: 543110 - RNA, 21 nt, Artificial Sequence
  Synthetic
aucuggauucuuauaucaugc

SEQ ID NO: 543111 - RNA, 22 nt, Artificial Sequence
  Synthetic
uaucuggauucuuauaucaugc

SEQ ID NO: 543112 - RNA, 23 nt, Artificial Sequence
  Synthetic
uuaucuggauucuuauaucaugc

SEQ ID NO: 543113 - RNA, 24 nt, Artificial Sequence
  Synthetic
uuuaucuggauucuuauaucaugc

SEQ ID NO: 543114 - RNA, 18 nt, Artificial Sequence
  Synthetic
ucuuuuuauguaucaugc

SEQ ID NO: 543115 - RNA, 19 nt, Artificial Sequence
  Synthetic
aucuuuuuauguaucaugc

SEQ ID NO: 543116 - RNA, 20 nt, Artificial Sequence
  Synthetic
uaucuuuuuauguaucaugc

SEQ ID NO: 543117 - RNA, 21 nt, Artificial Sequence
  Synthetic
uuaucuuuuuauguaucaugc

SEQ ID NO: 543118 - RNA, 22 nt, Artificial Sequence
  Synthetic
uuuaucuuuuuauguaucaugc

SEQ ID NO: 543119 - RNA, 23 nt, Artificial Sequence
  Synthetic
auuuaucuuuuuauguaucaugc

SEQ ID NO: 543120 - RNA, 24 nt, Artificial Sequence
  Synthetic
cauuuaucuuuuuauguaucaugc

SEQ ID NO: 543121 - RNA, 18 nt, Artificial Sequence
  Synthetic
uuuugcucauucucaugc

SEQ ID NO: 543122 - RNA, 19 nt, Artificial Sequence
  Synthetic
auuuugcucauucucaugc

SEQ ID NO: 543123 - RNA, 20 nt, Artificial Sequence
  Synthetic
gauuuugcucauucucaugc

SEQ ID NO: 543124 - RNA, 21 nt, Artificial Sequence
  Synthetic
cgauuuugcucauucucaugc

SEQ ID NO: 543125 - RNA, 22 nt, Artificial Sequence
  Synthetic
acgauuuugcucauucucaugc

SEQ ID NO: 543126 - RNA, 23 nt, Artificial Sequence
  Synthetic
aacgauuuugcucauucucaugc

SEQ ID NO: 543127 - RNA, 24 nt, Artificial Sequence
  Synthetic
aaacgauuuugcucauucucaugc

SEQ ID NO: 543128 - RNA, 18 nt, Artificial Sequence
  Synthetic
ccccaagucuguucaugc

SEQ ID NO: 543129 - RNA, 19 nt, Artificial Sequence
  Synthetic
accccaagucuguucaugc

SEQ ID NO: 543130 - RNA, 20 nt, Artificial Sequence
  Synthetic
aaccccaagucuguucaugc

SEQ ID NO: 543131 - RNA, 21 nt, Artificial Sequence
  Synthetic
uaaccccaagucuguucaugc

SEQ ID NO: 543132 - RNA, 22 nt, Artificial Sequence
  Synthetic
uuaaccccaagucuguucaugc

SEQ ID NO: 543133 - RNA, 23 nt, Artificial Sequence
  Synthetic
cuuaaccccaagucuguucaugc

SEQ ID NO: 543134 - RNA, 24 nt, Artificial Sequence
  Synthetic
ucuuaaccccaagucuguucaugc

SEQ ID NO: 543135 - RNA, 18 nt, Artificial Sequence
  Synthetic
uauagacaacuuucaugc

SEQ ID NO: 543136 - RNA, 19 nt, Artificial Sequence
  Synthetic
guauagacaacuuucaugc

SEQ ID NO: 543137 - RNA, 20 nt, Artificial Sequence
  Synthetic
uguauagacaacuuucaugc

SEQ ID NO: 543138 - RNA, 21 nt, Artificial Sequence
  Synthetic
auguauagacaacuuucaugc

SEQ ID NO: 543139 - RNA, 22 nt, Artificial Sequence
  Synthetic
uauguauagacaacuuucaugc

SEQ ID NO: 543140 - RNA, 23 nt, Artificial Sequence
  Synthetic
uuauguauagacaacuuucaugc

SEQ ID NO: 543141 - RNA, 24 nt, Artificial Sequence
  Synthetic
auuauguauagacaacuuucaugc

SEQ ID NO: 543142 - RNA, 18 nt, Artificial Sequence
  Synthetic
caucuaaguaaaagaugc

SEQ ID NO: 543143 - RNA, 19 nt, Artificial Sequence
  Synthetic
ucaucuaaguaaaagaugc

SEQ ID NO: 543144 - RNA, 20 nt, Artificial Sequence
  Synthetic
aucaucuaaguaaaagaugc

SEQ ID NO: 543145 - RNA, 21 nt, Artificial Sequence
  Synthetic
uaucaucuaaguaaaagaugc

SEQ ID NO: 543146 - RNA, 22 nt, Artificial Sequence
  Synthetic
uuaucaucuaaguaaaagaugc

SEQ ID NO: 543147 - RNA, 23 nt, Artificial Sequence
  Synthetic
guuaucaucuaaguaaaagaugc

SEQ ID NO: 543148 - RNA, 24 nt, Artificial Sequence
  Synthetic
uguuaucaucuaaguaaaagaugc

SEQ ID NO: 543149 - RNA, 18 nt, Artificial Sequence
  Synthetic
guucaguucagaagaugc

SEQ ID NO: 543150 - RNA, 19 nt, Artificial Sequence
  Synthetic
aguucaguucagaagaugc

SEQ ID NO: 543151 - RNA, 20 nt, Artificial Sequence
  Synthetic
caguucaguucagaagaugc

SEQ ID NO: 543152 - RNA, 21 nt, Artificial Sequence
  Synthetic
ucaguucaguucagaagaugc

SEQ ID NO: 543153 - RNA, 22 nt, Artificial Sequence
  Synthetic
uucaguucaguucagaagaugc

SEQ ID NO: 543154 - RNA, 23 nt, Artificial Sequence
  Synthetic
auucaguucaguucagaagaugc

SEQ ID NO: 543155 - RNA, 24 nt, Artificial Sequence
  Synthetic
cauucaguucaguucagaagaugc

SEQ ID NO: 543156 - RNA, 18 nt, Artificial Sequence
  Synthetic
uuaguguaaauaagaugc

SEQ ID NO: 543157 - RNA, 19 nt, Artificial Sequence
  Synthetic
uuuaguguaaauaagaugc

SEQ ID NO: 543158 - RNA, 20 nt, Artificial Sequence
  Synthetic
uuuuaguguaaauaagaugc

SEQ ID NO: 543159 - RNA, 21 nt, Artificial Sequence
  Synthetic
uuuuuaguguaaauaagaugc

SEQ ID NO: 543160 - RNA, 22 nt, Artificial Sequence
  Synthetic
auuuuuaguguaaauaagaugc

SEQ ID NO: 543161 - RNA, 23 nt, Artificial Sequence
  Synthetic
gauuuuuaguguaaauaagaugc

SEQ ID NO: 543162 - RNA, 24 nt, Artificial Sequence
  Synthetic
ugauuuuuaguguaaauaagaugc

SEQ ID NO: 543163 - RNA, 21 nt, Artificial Sequence
  Synthetic
aagucaggaaacaacagaugc

SEQ ID NO: 543164 - RNA, 22 nt, Artificial Sequence
  Synthetic
aaagucaggaaacaacagaugc

SEQ ID NO: 543165 - RNA, 23 nt, Artificial Sequence
  Synthetic
aaaagucaggaaacaacagaugc

SEQ ID NO: 543166 - RNA, 24 nt, Artificial Sequence
  Synthetic
aaaaagucaggaaacaacagaugc

SEQ ID NO: 543167 - RNA, 18 nt, Artificial Sequence
  Synthetic
ucaggcaacaacagaugc

SEQ ID NO: 543168 - RNA, 19 nt, Artificial Sequence
  Synthetic
gucaggcaacaacagaugc

SEQ ID NO: 543169 - RNA, 20 nt, Artificial Sequence
  Synthetic
agucaggcaacaacagaugc

SEQ ID NO: 543170 - RNA, 21 nt, Artificial Sequence
  Synthetic
aagucaggcaacaacagaugc

SEQ ID NO: 543171 - RNA, 22 nt, Artificial Sequence
  Synthetic
aaagucaggcaacaacagaugc

SEQ ID NO: 543172 - RNA, 23 nt, Artificial Sequence
  Synthetic
aaaagucaggcaacaacagaugc

SEQ ID NO: 543173 - RNA, 24 nt, Artificial Sequence
  Synthetic
caaaagucaggcaacaacagaugc

SEQ ID NO: 543174 - RNA, 18 nt, Artificial Sequence
  Synthetic
uucuuuuaaaagagaugc

SEQ ID NO: 543175 - RNA, 19 nt, Artificial Sequence
  Synthetic
uuucuuuuaaaagagaugc

SEQ ID NO: 543176 - RNA, 20 nt, Artificial Sequence
  Synthetic
uuuucuuuuaaaagagaugc

SEQ ID NO: 543177 - RNA, 21 nt, Artificial Sequence
  Synthetic
auuuucuuuuaaaagagaugc

SEQ ID NO: 543178 - RNA, 22 nt, Artificial Sequence
  Synthetic
uauuuucuuuuaaaagagaugc

SEQ ID NO: 543179 - RNA, 23 nt, Artificial Sequence
  Synthetic
uuauuuucuuuuaaaagagaugc

SEQ ID NO: 543180 - RNA, 24 nt, Artificial Sequence
  Synthetic
auuauuuucuuuuaaaagagaugc

SEQ ID NO: 543181 - RNA, 18 nt, Artificial Sequence
  Synthetic
uauuaaagggagagaugc

SEQ ID NO: 543182 - RNA, 19 nt, Artificial Sequence
  Synthetic
auauuaaagggagagaugc

SEQ ID NO: 543183 - RNA, 20 nt, Artificial Sequence
  Synthetic
aauauuaaagggagagaugc

SEQ ID NO: 543184 - RNA, 21 nt, Artificial Sequence
  Synthetic
gaauauuaaagggagagaugc

SEQ ID NO: 543185 - RNA, 22 nt, Artificial Sequence
  Synthetic
ggaauauuaaagggagagaugc

SEQ ID NO: 543186 - RNA, 23 nt, Artificial Sequence
  Synthetic
aggaauauuaaagggagagaugc

SEQ ID NO: 543187 - RNA, 24 nt, Artificial Sequence
  Synthetic
gaggaauauuaaagggagagaugc

SEQ ID NO: 543188 - RNA, 18 nt, Artificial Sequence
  Synthetic
uggugacugaauagaugc

SEQ ID NO: 543189 - RNA, 19 nt, Artificial Sequence
  Synthetic
uuggugacugaauagaugc

SEQ ID NO: 543190 - RNA, 20 nt, Artificial Sequence
  Synthetic
uuuggugacugaauagaugc

SEQ ID NO: 543191 - RNA, 21 nt, Artificial Sequence
  Synthetic
auuuggugacugaauagaugc

SEQ ID NO: 543192 - RNA, 22 nt, Artificial Sequence
  Synthetic
aauuuggugacugaauagaugc

SEQ ID NO: 543193 - RNA, 23 nt, Artificial Sequence
  Synthetic
aaauuuggugacugaauagaugc

SEQ ID NO: 543194 - RNA, 24 nt, Artificial Sequence
  Synthetic
aaaauuuggugacugaauagaugc

SEQ ID NO: 543195 - RNA, 18 nt, Artificial Sequence
  Synthetic
gauugggauuauagaugc

SEQ ID NO: 543196 - RNA, 19 nt, Artificial Sequence
  Synthetic
ggauugggauuauagaugc

SEQ ID NO: 543197 - RNA, 20 nt, Artificial Sequence
  Synthetic
gggauugggauuauagaugc

SEQ ID NO: 543198 - RNA, 21 nt, Artificial Sequence
  Synthetic
agggauugggauuauagaugc

SEQ ID NO: 543199 - RNA, 22 nt, Artificial Sequence
  Synthetic
cagggauugggauuauagaugc

SEQ ID NO: 543200 - RNA, 23 nt, Artificial Sequence
  Synthetic
gcagggauugggauuauagaugc

SEQ ID NO: 543201 - RNA, 24 nt, Artificial Sequence
  Synthetic
ugcagggauugggauuauagaugc

SEQ ID NO: 543202 - RNA, 18 nt, Artificial Sequence
  Synthetic
aauucuaguucuagaugc

SEQ ID NO: 543203 - RNA, 19 nt, Artificial Sequence
  Synthetic
uaauucuaguucuagaugc

SEQ ID NO: 543204 - RNA, 20 nt, Artificial Sequence
  Synthetic
guaauucuaguucuagaugc

SEQ ID NO: 543205 - RNA, 21 nt, Artificial Sequence
  Synthetic
gguaauucuaguucuagaugc

SEQ ID NO: 543206 - RNA, 22 nt, Artificial Sequence
  Synthetic
ugguaauucuaguucuagaugc

SEQ ID NO: 543207 - RNA, 23 nt, Artificial Sequence
  Synthetic
augguaauucuaguucuagaugc

SEQ ID NO: 543208 - RNA, 24 nt, Artificial Sequence
  Synthetic
aaugguaauucuaguucuagaugc

SEQ ID NO: 543209 - RNA, 18 nt, Artificial Sequence
  Synthetic
gaacauguauaaggaugc

SEQ ID NO: 543210 - RNA, 19 nt, Artificial Sequence
  Synthetic
agaacauguauaaggaugc

SEQ ID NO: 543211 - RNA, 20 nt, Artificial Sequence
  Synthetic
aagaacauguauaaggaugc

SEQ ID NO: 543212 - RNA, 21 nt, Artificial Sequence
  Synthetic
aaagaacauguauaaggaugc

SEQ ID NO: 543213 - RNA, 22 nt, Artificial Sequence
  Synthetic
caaagaacauguauaaggaugc

SEQ ID NO: 543214 - RNA, 23 nt, Artificial Sequence
  Synthetic
acaaagaacauguauaaggaugc

SEQ ID NO: 543215 - RNA, 24 nt, Artificial Sequence
  Synthetic
aacaaagaacauguauaaggaugc

SEQ ID NO: 543216 - RNA, 18 nt, Artificial Sequence
  Synthetic
guaagaaccucaggaugc

SEQ ID NO: 543217 - RNA, 19 nt, Artificial Sequence
  Synthetic
gguaagaaccucaggaugc

SEQ ID NO: 543218 - RNA, 20 nt, Artificial Sequence
  Synthetic
agguaagaaccucaggaugc

SEQ ID NO: 543219 - RNA, 21 nt, Artificial Sequence
  Synthetic
uagguaagaaccucaggaugc

SEQ ID NO: 543220 - RNA, 22 nt, Artificial Sequence
  Synthetic
uuagguaagaaccucaggaugc

SEQ ID NO: 543221 - RNA, 23 nt, Artificial Sequence
  Synthetic
auuagguaagaaccucaggaugc

SEQ ID NO: 543222 - RNA, 24 nt, Artificial Sequence
  Synthetic
uauuagguaagaaccucaggaugc

SEQ ID NO: 543223 - RNA, 18 nt, Artificial Sequence
  Synthetic
ggaugaugggugggaugc

SEQ ID NO: 543224 - RNA, 19 nt, Artificial Sequence
  Synthetic
uggaugaugggugggaugc

SEQ ID NO: 543225 - RNA, 20 nt, Artificial Sequence
  Synthetic
guggaugaugggugggaugc

SEQ ID NO: 543226 - RNA, 21 nt, Artificial Sequence
  Synthetic
uguggaugaugggugggaugc

SEQ ID NO: 543227 - RNA, 22 nt, Artificial Sequence
  Synthetic
auguggaugaugggugggaugc

SEQ ID NO: 543228 - RNA, 23 nt, Artificial Sequence
  Synthetic
uauguggaugaugggugggaugc

SEQ ID NO: 543229 - RNA, 24 nt, Artificial Sequence
  Synthetic
uuauguggaugaugggugggaugc

SEQ ID NO: 543230 - RNA, 18 nt, Artificial Sequence
  Synthetic
uccauauuuuauggaugc

SEQ ID NO: 543231 - RNA, 19 nt, Artificial Sequence
  Synthetic
uuccauauuuuauggaugc

SEQ ID NO: 543232 - RNA, 20 nt, Artificial Sequence
  Synthetic
uuuccauauuuuauggaugc

SEQ ID NO: 543233 - RNA, 21 nt, Artificial Sequence
  Synthetic
auuuccauauuuuauggaugc

SEQ ID NO: 543234 - RNA, 22 nt, Artificial Sequence
  Synthetic
aauuuccauauuuuauggaugc

SEQ ID NO: 543235 - RNA, 23 nt, Artificial Sequence
  Synthetic
aaauuuccauauuuuauggaugc

SEQ ID NO: 543236 - RNA, 24 nt, Artificial Sequence
  Synthetic
aaaauuuccauauuuuauggaugc

SEQ ID NO: 543237 - RNA, 18 nt, Artificial Sequence
  Synthetic
gcacacaucccuggaugc

SEQ ID NO: 543238 - RNA, 19 nt, Artificial Sequence
  Synthetic
ugcacacaucccuggaugc

SEQ ID NO: 543239 - RNA, 20 nt, Artificial Sequence
  Synthetic
augcacacaucccuggaugc

SEQ ID NO: 543240 - RNA, 21 nt, Artificial Sequence
  Synthetic
aaugcacacaucccuggaugc

SEQ ID NO: 543241 - RNA, 22 nt, Artificial Sequence
  Synthetic
caaugcacacaucccuggaugc

SEQ ID NO: 543242 - RNA, 23 nt, Artificial Sequence
  Synthetic
acaaugcacacaucccuggaugc

SEQ ID NO: 543243 - RNA, 24 nt, Artificial Sequence
  Synthetic
aacaaugcacacaucccuggaugc

SEQ ID NO: 543244 - RNA, 18 nt, Artificial Sequence
  Synthetic
uaucugaggaaaugaugc

SEQ ID NO: 543245 - RNA, 19 nt, Artificial Sequence
  Synthetic
auaucugaggaaaugaugc

SEQ ID NO: 543246 - RNA, 20 nt, Artificial Sequence
  Synthetic
cauaucugaggaaaugaugc

SEQ ID NO: 543247 - RNA, 21 nt, Artificial Sequence
  Synthetic
ucauaucugaggaaaugaugc

SEQ ID NO: 543248 - RNA, 22 nt, Artificial Sequence
  Synthetic
uucauaucugaggaaaugaugc

SEQ ID NO: 543249 - RNA, 23 nt, Artificial Sequence
  Synthetic
guucauaucugaggaaaugaugc

SEQ ID NO: 543250 - RNA, 24 nt, Artificial Sequence
  Synthetic
aguucauaucugaggaaaugaugc

SEQ ID NO: 543251 - RNA, 18 nt, Artificial Sequence
  Synthetic
ucaggaaacaacugaugc

SEQ ID NO: 543252 - RNA, 19 nt, Artificial Sequence
  Synthetic
gucaggaaacaacugaugc

SEQ ID NO: 543253 - RNA, 20 nt, Artificial Sequence
  Synthetic
agucaggaaacaacugaugc

SEQ ID NO: 543254 - RNA, 21 nt, Artificial Sequence
  Synthetic
aagucaggaaacaacugaugc

SEQ ID NO: 543255 - RNA, 22 nt, Artificial Sequence
  Synthetic
aaagucaggaaacaacugaugc

SEQ ID NO: 543256 - RNA, 23 nt, Artificial Sequence
  Synthetic
aaaagucaggaaacaacugaugc

SEQ ID NO: 543257 - RNA, 24 nt, Artificial Sequence
  Synthetic
aaaaagucaggaaacaacugaugc

SEQ ID NO: 543258 - RNA, 18 nt, Artificial Sequence
  Synthetic
uuggugguuaccugaugc

SEQ ID NO: 543259 - RNA, 19 nt, Artificial Sequence
  Synthetic
auuggugguuaccugaugc

SEQ ID NO: 543260 - RNA, 20 nt, Artificial Sequence
  Synthetic
gauuggugguuaccugaugc

SEQ ID NO: 543261 - RNA, 21 nt, Artificial Sequence
  Synthetic
ugauuggugguuaccugaugc

SEQ ID NO: 543262 - RNA, 22 nt, Artificial Sequence
  Synthetic
gugauuggugguuaccugaugc

SEQ ID NO: 543263 - RNA, 23 nt, Artificial Sequence
  Synthetic
ugugauuggugguuaccugaugc

SEQ ID NO: 543264 - RNA, 24 nt, Artificial Sequence
  Synthetic
cugugauuggugguuaccugaugc

SEQ ID NO: 543265 - RNA, 18 nt, Artificial Sequence
  Synthetic
uccaggucaugcugaugc

SEQ ID NO: 543266 - RNA, 19 nt, Artificial Sequence
  Synthetic
auccaggucaugcugaugc

SEQ ID NO: 543267 - RNA, 20 nt, Artificial Sequence
  Synthetic
cauccaggucaugcugaugc

SEQ ID NO: 543268 - RNA, 21 nt, Artificial Sequence
  Synthetic
acauccaggucaugcugaugc

SEQ ID NO: 543269 - RNA, 22 nt, Artificial Sequence
  Synthetic
cacauccaggucaugcugaugc

SEQ ID NO: 543270 - RNA, 23 nt, Artificial Sequence
  Synthetic
ucacauccaggucaugcugaugc

SEQ ID NO: 543271 - RNA, 24 nt, Artificial Sequence
  Synthetic
cucacauccaggucaugcugaugc

SEQ ID NO: 543272 - RNA, 18 nt, Artificial Sequence
  Synthetic
uguuuaacccucugaugc

SEQ ID NO: 543273 - RNA, 19 nt, Artificial Sequence
  Synthetic
auguuuaacccucugaugc

SEQ ID NO: 543274 - RNA, 20 nt, Artificial Sequence
  Synthetic
cauguuuaacccucugaugc

SEQ ID NO: 543275 - RNA, 21 nt, Artificial Sequence
  Synthetic
gcauguuuaacccucugaugc

SEQ ID NO: 543276 - RNA, 22 nt, Artificial Sequence
  Synthetic
ggcauguuuaacccucugaugc

SEQ ID NO: 543277 - RNA, 23 nt, Artificial Sequence
  Synthetic
aggcauguuuaacccucugaugc

SEQ ID NO: 543278 - RNA, 24 nt, Artificial Sequence
  Synthetic
uaggcauguuuaacccucugaugc

SEQ ID NO: 543279 - RNA, 18 nt, Artificial Sequence
  Synthetic
uaguacaaugucugaugc

SEQ ID NO: 543280 - RNA, 19 nt, Artificial Sequence
  Synthetic
uuaguacaaugucugaugc

SEQ ID NO: 543281 - RNA, 20 nt, Artificial Sequence
  Synthetic
uuuaguacaaugucugaugc

SEQ ID NO: 543282 - RNA, 21 nt, Artificial Sequence
  Synthetic
guuuaguacaaugucugaugc

SEQ ID NO: 543283 - RNA, 22 nt, Artificial Sequence
  Synthetic
uguuuaguacaaugucugaugc

SEQ ID NO: 543284 - RNA, 23 nt, Artificial Sequence
  Synthetic
uuguuuaguacaaugucugaugc

SEQ ID NO: 543285 - RNA, 24 nt, Artificial Sequence
  Synthetic
auuguuuaguacaaugucugaugc

SEQ ID NO: 543286 - RNA, 18 nt, Artificial Sequence
  Synthetic
cacuagcucccuugaugc

SEQ ID NO: 543287 - RNA, 19 nt, Artificial Sequence
  Synthetic
acacuagcucccuugaugc

SEQ ID NO: 543288 - RNA, 20 nt, Artificial Sequence
  Synthetic
uacacuagcucccuugaugc

SEQ ID NO: 543289 - RNA, 21 nt, Artificial Sequence
  Synthetic
uuacacuagcucccuugaugc

SEQ ID NO: 543290 - RNA, 22 nt, Artificial Sequence
  Synthetic
guuacacuagcucccuugaugc

SEQ ID NO: 543291 - RNA, 23 nt, Artificial Sequence
  Synthetic
uguuacacuagcucccuugaugc

SEQ ID NO: 543292 - RNA, 24 nt, Artificial Sequence
  Synthetic
uuguuacacuagcucccuugaugc

SEQ ID NO: 543293 - RNA, 18 nt, Artificial Sequence
  Synthetic
aaaacuacaucuugaugc

SEQ ID NO: 543294 - RNA, 19 nt, Artificial Sequence
  Synthetic
uaaaacuacaucuugaugc

SEQ ID NO: 543295 - RNA, 20 nt, Artificial Sequence
  Synthetic
guaaaacuacaucuugaugc

SEQ ID NO: 543296 - RNA, 21 nt, Artificial Sequence
  Synthetic
aguaaaacuacaucuugaugc

SEQ ID NO: 543297 - RNA, 22 nt, Artificial Sequence
  Synthetic
aaguaaaacuacaucuugaugc

SEQ ID NO: 543298 - RNA, 23 nt, Artificial Sequence
  Synthetic
uaaguaaaacuacaucuugaugc

SEQ ID NO: 543299 - RNA, 24 nt, Artificial Sequence
  Synthetic
auaaguaaaacuacaucuugaugc

SEQ ID NO: 543300 - RNA, 18 nt, Artificial Sequence
  Synthetic
uuaguacugaaaauaugc

SEQ ID NO: 543301 - RNA, 19 nt, Artificial Sequence
  Synthetic
uuuaguacugaaaauaugc

SEQ ID NO: 543302 - RNA, 20 nt, Artificial Sequence
  Synthetic
auuuaguacugaaaauaugc

SEQ ID NO: 543303 - RNA, 21 nt, Artificial Sequence
  Synthetic
uauuuaguacugaaaauaugc

SEQ ID NO: 543304 - RNA, 22 nt, Artificial Sequence
  Synthetic
guauuuaguacugaaaauaugc

SEQ ID NO: 543305 - RNA, 23 nt, Artificial Sequence
  Synthetic
gguauuuaguacugaaaauaugc

SEQ ID NO: 543306 - RNA, 24 nt, Artificial Sequence
  Synthetic
ggguauuuaguacugaaaauaugc

SEQ ID NO: 543307 - RNA, 18 nt, Artificial Sequence
  Synthetic
aggcacugccaaauaugc

SEQ ID NO: 543308 - RNA, 19 nt, Artificial Sequence
  Synthetic
aaggcacugccaaauaugc

SEQ ID NO: 543309 - RNA, 20 nt, Artificial Sequence
  Synthetic
caaggcacugccaaauaugc

SEQ ID NO: 543310 - RNA, 21 nt, Artificial Sequence
  Synthetic
ucaaggcacugccaaauaugc

SEQ ID NO: 543311 - RNA, 22 nt, Artificial Sequence
  Synthetic
uucaaggcacugccaaauaugc

SEQ ID NO: 543312 - RNA, 23 nt, Artificial Sequence
  Synthetic
uuucaaggcacugccaaauaugc

SEQ ID NO: 543313 - RNA, 24 nt, Artificial Sequence
  Synthetic
guuucaaggcacugccaaauaugc

SEQ ID NO: 543314 - RNA, 18 nt, Artificial Sequence
  Synthetic
uaaaucaauuaaauaugc

SEQ ID NO: 543315 - RNA, 19 nt, Artificial Sequence
  Synthetic
uuaaaucaauuaaauaugc

SEQ ID NO: 543316 - RNA, 20 nt, Artificial Sequence
  Synthetic
guuaaaucaauuaaauaugc

SEQ ID NO: 543317 - RNA, 21 nt, Artificial Sequence
  Synthetic
uguuaaaucaauuaaauaugc

SEQ ID NO: 543318 - RNA, 22 nt, Artificial Sequence
  Synthetic
uuguuaaaucaauuaaauaugc

SEQ ID NO: 543319 - RNA, 23 nt, Artificial Sequence
  Synthetic
uuuguuaaaucaauuaaauaugc

SEQ ID NO: 543320 - RNA, 24 nt, Artificial Sequence
  Synthetic
auuuguuaaaucaauuaaauaugc

SEQ ID NO: 543321 - RNA, 18 nt, Artificial Sequence
  Synthetic
uuuuccaauacaauaugc

SEQ ID NO: 543322 - RNA, 19 nt, Artificial Sequence
  Synthetic
cuuuuccaauacaauaugc

SEQ ID NO: 543323 - RNA, 20 nt, Artificial Sequence
  Synthetic
ucuuuuccaauacaauaugc

SEQ ID NO: 543324 - RNA, 21 nt, Artificial Sequence
  Synthetic
uucuuuuccaauacaauaugc

SEQ ID NO: 543325 - RNA, 22 nt, Artificial Sequence
  Synthetic
uuucuuuuccaauacaauaugc

SEQ ID NO: 543326 - RNA, 23 nt, Artificial Sequence
  Synthetic
uuuucuuuuccaauacaauaugc

SEQ ID NO: 543327 - RNA, 24 nt, Artificial Sequence
  Synthetic
auuuucuuuuccaauacaauaugc

SEQ ID NO: 543328 - RNA, 18 nt, Artificial Sequence
  Synthetic
cuauucaaaauaauaugc

SEQ ID NO: 543329 - RNA, 19 nt, Artificial Sequence
  Synthetic
acuauucaaaauaauaugc

SEQ ID NO: 543330 - RNA, 20 nt, Artificial Sequence
  Synthetic
cacuauucaaaauaauaugc

SEQ ID NO: 543331 - RNA, 21 nt, Artificial Sequence
  Synthetic
gcacuauucaaaauaauaugc

SEQ ID NO: 543332 - RNA, 22 nt, Artificial Sequence
  Synthetic
agcacuauucaaaauaauaugc

SEQ ID NO: 543333 - RNA, 23 nt, Artificial Sequence
  Synthetic
aagcacuauucaaaauaauaugc

SEQ ID NO: 543334 - RNA, 24 nt, Artificial Sequence
  Synthetic
gaagcacuauucaaaauaauaugc

SEQ ID NO: 543335 - RNA, 18 nt, Artificial Sequence
  Synthetic
ggcuuugugauaauaugc

SEQ ID NO: 543336 - RNA, 19 nt, Artificial Sequence
  Synthetic
aggcuuugugauaauaugc

SEQ ID NO: 543337 - RNA, 20 nt, Artificial Sequence
  Synthetic
uaggcuuugugauaauaugc

SEQ ID NO: 543338 - RNA, 21 nt, Artificial Sequence
  Synthetic
guaggcuuugugauaauaugc

SEQ ID NO: 543339 - RNA, 22 nt, Artificial Sequence
  Synthetic
aguaggcuuugugauaauaugc

SEQ ID NO: 543340 - RNA, 23 nt, Artificial Sequence
  Synthetic
caguaggcuuugugauaauaugc

SEQ ID NO: 543341 - RNA, 24 nt, Artificial Sequence
  Synthetic
ucaguaggcuuugugauaauaugc

SEQ ID NO: 543342 - RNA, 18 nt, Artificial Sequence
  Synthetic
cucugccacaacauaugc

SEQ ID NO: 543343 - RNA, 19 nt, Artificial Sequence
  Synthetic
ucucugccacaacauaugc

SEQ ID NO: 543344 - RNA, 20 nt, Artificial Sequence
  Synthetic
gucucugccacaacauaugc

SEQ ID NO: 543345 - RNA, 21 nt, Artificial Sequence
  Synthetic
ugucucugccacaacauaugc

SEQ ID NO: 543346 - RNA, 22 nt, Artificial Sequence
  Synthetic
uugucucugccacaacauaugc

SEQ ID NO: 543347 - RNA, 23 nt, Artificial Sequence
  Synthetic
cuugucucugccacaacauaugc

SEQ ID NO: 543348 - RNA, 24 nt, Artificial Sequence
  Synthetic
acuugucucugccacaacauaugc

SEQ ID NO: 543349 - RNA, 18 nt, Artificial Sequence
  Synthetic
cagcaucucuggauaugc

SEQ ID NO: 543350 - RNA, 19 nt, Artificial Sequence
  Synthetic
acagcaucucuggauaugc

SEQ ID NO: 543351 - RNA, 20 nt, Artificial Sequence
  Synthetic
gacagcaucucuggauaugc

SEQ ID NO: 543352 - RNA, 21 nt, Artificial Sequence
  Synthetic
agacagcaucucuggauaugc

SEQ ID NO: 543353 - RNA, 22 nt, Artificial Sequence
  Synthetic
cagacagcaucucuggauaugc

SEQ ID NO: 543354 - RNA, 23 nt, Artificial Sequence
  Synthetic
ucagacagcaucucuggauaugc

SEQ ID NO: 543355 - RNA, 24 nt, Artificial Sequence
  Synthetic
cucagacagcaucucuggauaugc

SEQ ID NO: 543356 - RNA, 18 nt, Artificial Sequence
  Synthetic
aacaaggauuugauaugc

SEQ ID NO: 543357 - RNA, 19 nt, Artificial Sequence
  Synthetic
aaacaaggauuugauaugc

SEQ ID NO: 543358 - RNA, 20 nt, Artificial Sequence
  Synthetic
aaaacaaggauuugauaugc

SEQ ID NO: 543359 - RNA, 21 nt, Artificial Sequence
  Synthetic
gaaaacaaggauuugauaugc

SEQ ID NO: 543360 - RNA, 22 nt, Artificial Sequence
  Synthetic
agaaaacaaggauuugauaugc

SEQ ID NO: 543361 - RNA, 23 nt, Artificial Sequence
  Synthetic
cagaaaacaaggauuugauaugc

SEQ ID NO: 543362 - RNA, 24 nt, Artificial Sequence
  Synthetic
gcagaaaacaaggauuugauaugc

SEQ ID NO: 543363 - RNA, 18 nt, Artificial Sequence
  Synthetic
ggauaguaaauuauaugc

SEQ ID NO: 543364 - RNA, 19 nt, Artificial Sequence
  Synthetic
cggauaguaaauuauaugc

SEQ ID NO: 543365 - RNA, 20 nt, Artificial Sequence
  Synthetic
acggauaguaaauuauaugc

SEQ ID NO: 543366 - RNA, 21 nt, Artificial Sequence
  Synthetic
cacggauaguaaauuauaugc

SEQ ID NO: 543367 - RNA, 22 nt, Artificial Sequence
  Synthetic
ucacggauaguaaauuauaugc

SEQ ID NO: 543368 - RNA, 23 nt, Artificial Sequence
  Synthetic
uucacggauaguaaauuauaugc

SEQ ID NO: 543369 - RNA, 24 nt, Artificial Sequence
  Synthetic
guucacggauaguaaauuauaugc

SEQ ID NO: 543370 - RNA, 18 nt, Artificial Sequence
  Synthetic
agugcugggauuauaugc

SEQ ID NO: 543371 - RNA, 19 nt, Artificial Sequence
  Synthetic
aagugcugggauuauaugc

SEQ ID NO: 543372 - RNA, 20 nt, Artificial Sequence
  Synthetic
aaagugcugggauuauaugc

SEQ ID NO: 543373 - RNA, 21 nt, Artificial Sequence
  Synthetic
caaagugcugggauuauaugc

SEQ ID NO: 543374 - RNA, 22 nt, Artificial Sequence
  Synthetic
ccaaagugcugggauuauaugc

SEQ ID NO: 543375 - RNA, 23 nt, Artificial Sequence
  Synthetic
cccaaagugcugggauuauaugc

SEQ ID NO: 543376 - RNA, 24 nt, Artificial Sequence
  Synthetic
ucccaaagugcugggauuauaugc

SEQ ID NO: 543377 - RNA, 18 nt, Artificial Sequence
  Synthetic
uggguaccuauuauaugc

SEQ ID NO: 543378 - RNA, 19 nt, Artificial Sequence
  Synthetic
uuggguaccuauuauaugc

SEQ ID NO: 543379 - RNA, 20 nt, Artificial Sequence
  Synthetic
auuggguaccuauuauaugc

SEQ ID NO: 543380 - RNA, 21 nt, Artificial Sequence
  Synthetic
uauuggguaccuauuauaugc

SEQ ID NO: 543381 - RNA, 22 nt, Artificial Sequence
  Synthetic
uuauuggguaccuauuauaugc

SEQ ID NO: 543382 - RNA, 23 nt, Artificial Sequence
  Synthetic
auuauuggguaccuauuauaugc

SEQ ID NO: 543383 - RNA, 24 nt, Artificial Sequence
  Synthetic
uauuauuggguaccuauuauaugc

SEQ ID NO: 543384 - RNA, 18 nt, Artificial Sequence
  Synthetic
uuuuaaaaaauacuaugc

SEQ ID NO: 543385 - RNA, 19 nt, Artificial Sequence
  Synthetic
uuuuuaaaaaauacuaugc

SEQ ID NO: 543386 - RNA, 20 nt, Artificial Sequence
  Synthetic
guuuuuaaaaaauacuaugc

SEQ ID NO: 543387 - RNA, 21 nt, Artificial Sequence
  Synthetic
gguuuuuaaaaaauacuaugc

SEQ ID NO: 543388 - RNA, 22 nt, Artificial Sequence
  Synthetic
cgguuuuuaaaaaauacuaugc

SEQ ID NO: 543389 - RNA, 23 nt, Artificial Sequence
  Synthetic
acgguuuuuaaaaaauacuaugc

SEQ ID NO: 543390 - RNA, 24 nt, Artificial Sequence
  Synthetic
uacgguuuuuaaaaaauacuaugc

SEQ ID NO: 543391 - RNA, 18 nt, Artificial Sequence
  Synthetic
uauggguaauuacuaugc

SEQ ID NO: 543392 - RNA, 19 nt, Artificial Sequence
  Synthetic
cuauggguaauuacuaugc

SEQ ID NO: 543393 - RNA, 20 nt, Artificial Sequence
  Synthetic
ucuauggguaauuacuaugc

SEQ ID NO: 543394 - RNA, 21 nt, Artificial Sequence
  Synthetic
uucuauggguaauuacuaugc

SEQ ID NO: 543395 - RNA, 22 nt, Artificial Sequence
  Synthetic
cuucuauggguaauuacuaugc

SEQ ID NO: 543396 - RNA, 23 nt, Artificial Sequence
  Synthetic
acuucuauggguaauuacuaugc

SEQ ID NO: 543397 - RNA, 24 nt, Artificial Sequence
  Synthetic
aacuucuauggguaauuacuaugc

SEQ ID NO: 543398 - RNA, 18 nt, Artificial Sequence
  Synthetic
aaacggcguuuacuaugc

SEQ ID NO: 543399 - RNA, 19 nt, Artificial Sequence
  Synthetic
gaaacggcguuuacuaugc

SEQ ID NO: 543400 - RNA, 20 nt, Artificial Sequence
  Synthetic
agaaacggcguuuacuaugc

SEQ ID NO: 543401 - RNA, 21 nt, Artificial Sequence
  Synthetic
aagaaacggcguuuacuaugc

SEQ ID NO: 543402 - RNA, 22 nt, Artificial Sequence
  Synthetic
gaagaaacggcguuuacuaugc

SEQ ID NO: 543403 - RNA, 23 nt, Artificial Sequence
  Synthetic
ugaagaaacggcguuuacuaugc

SEQ ID NO: 543404 - RNA, 24 nt, Artificial Sequence
  Synthetic
augaagaaacggcguuuacuaugc

SEQ ID NO: 543405 - RNA, 18 nt, Artificial Sequence
  Synthetic
gaaccucagguccuaugc

SEQ ID NO: 543406 - RNA, 19 nt, Artificial Sequence
  Synthetic
agaaccucagguccuaugc

SEQ ID NO: 543407 - RNA, 20 nt, Artificial Sequence
  Synthetic
cagaaccucagguccuaugc

SEQ ID NO: 543408 - RNA, 21 nt, Artificial Sequence
  Synthetic
gcagaaccucagguccuaugc

SEQ ID NO: 543409 - RNA, 22 nt, Artificial Sequence
  Synthetic
ugcagaaccucagguccuaugc

SEQ ID NO: 543410 - RNA, 23 nt, Artificial Sequence
  Synthetic
augcagaaccucagguccuaugc

SEQ ID NO: 543411 - RNA, 24 nt, Artificial Sequence
  Synthetic
aaugcagaaccucagguccuaugc

SEQ ID NO: 543412 - RNA, 18 nt, Artificial Sequence
  Synthetic
ccaucacuguuccuaugc

SEQ ID NO: 543413 - RNA, 19 nt, Artificial Sequence
  Synthetic
uccaucacuguuccuaugc

SEQ ID NO: 543414 - RNA, 20 nt, Artificial Sequence
  Synthetic
auccaucacuguuccuaugc

SEQ ID NO: 543415 - RNA, 21 nt, Artificial Sequence
  Synthetic
uauccaucacuguuccuaugc

SEQ ID NO: 543416 - RNA, 22 nt, Artificial Sequence
  Synthetic
uuauccaucacuguuccuaugc

SEQ ID NO: 543417 - RNA, 23 nt, Artificial Sequence
  Synthetic
auuauccaucacuguuccuaugc

SEQ ID NO: 543418 - RNA, 24 nt, Artificial Sequence
  Synthetic
uauuauccaucacuguuccuaugc

SEQ ID NO: 543419 - RNA, 18 nt, Artificial Sequence
  Synthetic
uuggguguugggcuaugc

SEQ ID NO: 543420 - RNA, 19 nt, Artificial Sequence
  Synthetic
cuuggguguugggcuaugc

SEQ ID NO: 543421 - RNA, 20 nt, Artificial Sequence
  Synthetic
gcuuggguguugggcuaugc

SEQ ID NO: 543422 - RNA, 21 nt, Artificial Sequence
  Synthetic
ugcuuggguguugggcuaugc

SEQ ID NO: 543423 - RNA, 22 nt, Artificial Sequence
  Synthetic
augcuuggguguugggcuaugc

SEQ ID NO: 543424 - RNA, 23 nt, Artificial Sequence
  Synthetic
aaugcuuggguguugggcuaugc

SEQ ID NO: 543425 - RNA, 24 nt, Artificial Sequence
  Synthetic
caaugcuuggguguugggcuaugc

SEQ ID NO: 543426 - RNA, 18 nt, Artificial Sequence
  Synthetic
gcuugaaauuggcuaugc

SEQ ID NO: 543427 - RNA, 19 nt, Artificial Sequence
  Synthetic
agcuugaaauuggcuaugc

SEQ ID NO: 543428 - RNA, 20 nt, Artificial Sequence
  Synthetic
uagcuugaaauuggcuaugc

SEQ ID NO: 543429 - RNA, 21 nt, Artificial Sequence
  Synthetic
guagcuugaaauuggcuaugc

SEQ ID NO: 543430 - RNA, 22 nt, Artificial Sequence
  Synthetic
gguagcuugaaauuggcuaugc

SEQ ID NO: 543431 - RNA, 23 nt, Artificial Sequence
  Synthetic
ugguagcuugaaauuggcuaugc

SEQ ID NO: 543432 - RNA, 24 nt, Artificial Sequence
  Synthetic
cugguagcuugaaauuggcuaugc

SEQ ID NO: 543433 - RNA, 18 nt, Artificial Sequence
  Synthetic
guuaauucuuaucuaugc

SEQ ID NO: 543434 - RNA, 19 nt, Artificial Sequence
  Synthetic
uguuaauucuuaucuaugc

SEQ ID NO: 543435 - RNA, 20 nt, Artificial Sequence
  Synthetic
cuguuaauucuuaucuaugc

SEQ ID NO: 543436 - RNA, 21 nt, Artificial Sequence
  Synthetic
gcuguuaauucuuaucuaugc

SEQ ID NO: 543437 - RNA, 22 nt, Artificial Sequence
  Synthetic
ggcuguuaauucuuaucuaugc

SEQ ID NO: 543438 - RNA, 23 nt, Artificial Sequence
  Synthetic
uggcuguuaauucuuaucuaugc

SEQ ID NO: 543439 - RNA, 24 nt, Artificial Sequence
  Synthetic
cuggcuguuaauucuuaucuaugc

SEQ ID NO: 543440 - RNA, 18 nt, Artificial Sequence
  Synthetic
auucaaggaagaguaugc

SEQ ID NO: 543441 - RNA, 19 nt, Artificial Sequence
  Synthetic
uauucaaggaagaguaugc

SEQ ID NO: 543442 - RNA, 20 nt, Artificial Sequence
  Synthetic
uuauucaaggaagaguaugc

SEQ ID NO: 543443 - RNA, 21 nt, Artificial Sequence
  Synthetic
cuuauucaaggaagaguaugc

SEQ ID NO: 543444 - RNA, 22 nt, Artificial Sequence
  Synthetic
acuuauucaaggaagaguaugc

SEQ ID NO: 543445 - RNA, 23 nt, Artificial Sequence
  Synthetic
gacuuauucaaggaagaguaugc

SEQ ID NO: 543446 - RNA, 24 nt, Artificial Sequence
  Synthetic
ugacuuauucaaggaagaguaugc

SEQ ID NO: 543447 - RNA, 18 nt, Artificial Sequence
  Synthetic
cuugccaaggugguaugc

SEQ ID NO: 543448 - RNA, 19 nt, Artificial Sequence
  Synthetic
ucuugccaaggugguaugc

SEQ ID NO: 543449 - RNA, 20 nt, Artificial Sequence
  Synthetic
uucuugccaaggugguaugc

SEQ ID NO: 543450 - RNA, 21 nt, Artificial Sequence
  Synthetic
uuucuugccaaggugguaugc

SEQ ID NO: 543451 - RNA, 22 nt, Artificial Sequence
  Synthetic
uuuucuugccaaggugguaugc

SEQ ID NO: 543452 - RNA, 23 nt, Artificial Sequence
  Synthetic
uuuuucuugccaaggugguaugc

SEQ ID NO: 543453 - RNA, 24 nt, Artificial Sequence
  Synthetic
auuuuucuugccaaggugguaugc

SEQ ID NO: 543454 - RNA, 18 nt, Artificial Sequence
  Synthetic
ugaucaguucauguaugc

SEQ ID NO: 543455 - RNA, 19 nt, Artificial Sequence
  Synthetic
uugaucaguucauguaugc

SEQ ID NO: 543456 - RNA, 20 nt, Artificial Sequence
  Synthetic
cuugaucaguucauguaugc

SEQ ID NO: 543457 - RNA, 21 nt, Artificial Sequence
  Synthetic
ucuugaucaguucauguaugc

SEQ ID NO: 543458 - RNA, 22 nt, Artificial Sequence
  Synthetic
gucuugaucaguucauguaugc

SEQ ID NO: 543459 - RNA, 23 nt, Artificial Sequence
  Synthetic
agucuugaucaguucauguaugc

SEQ ID NO: 543460 - RNA, 24 nt, Artificial Sequence
  Synthetic
gagucuugaucaguucauguaugc

SEQ ID NO: 543461 - RNA, 18 nt, Artificial Sequence
  Synthetic
ugcauauuuauuguaugc

SEQ ID NO: 543462 - RNA, 19 nt, Artificial Sequence
  Synthetic
cugcauauuuauuguaugc

SEQ ID NO: 543463 - RNA, 20 nt, Artificial Sequence
  Synthetic
ccugcauauuuauuguaugc

SEQ ID NO: 543464 - RNA, 21 nt, Artificial Sequence
  Synthetic
uccugcauauuuauuguaugc

SEQ ID NO: 543465 - RNA, 22 nt, Artificial Sequence
  Synthetic
cuccugcauauuuauuguaugc

SEQ ID NO: 543466 - RNA, 23 nt, Artificial Sequence
  Synthetic
ucuccugcauauuuauuguaugc

SEQ ID NO: 543467 - RNA, 24 nt, Artificial Sequence
  Synthetic
uucuccugcauauuuauuguaugc

SEQ ID NO: 543468 - RNA, 18 nt, Artificial Sequence
  Synthetic
ugcucaaucaccuuaugc

SEQ ID NO: 543469 - RNA, 19 nt, Artificial Sequence
  Synthetic
uugcucaaucaccuuaugc

SEQ ID NO: 543470 - RNA, 20 nt, Artificial Sequence
  Synthetic
uuugcucaaucaccuuaugc

SEQ ID NO: 543471 - RNA, 21 nt, Artificial Sequence
  Synthetic
uuuugcucaaucaccuuaugc

SEQ ID NO: 543472 - RNA, 22 nt, Artificial Sequence
  Synthetic
uuuuugcucaaucaccuuaugc

SEQ ID NO: 543473 - RNA, 23 nt, Artificial Sequence
  Synthetic
uuuuuugcucaaucaccuuaugc

SEQ ID NO: 543474 - RNA, 24 nt, Artificial Sequence
  Synthetic
guuuuuugcucaaucaccuuaugc

SEQ ID NO: 543475 - RNA, 18 nt, Artificial Sequence
  Synthetic
uauggacccuucuuaugc

SEQ ID NO: 543476 - RNA, 19 nt, Artificial Sequence
  Synthetic
auauggacccuucuuaugc

SEQ ID NO: 543477 - RNA, 20 nt, Artificial Sequence
  Synthetic
cauauggacccuucuuaugc

SEQ ID NO: 543478 - RNA, 21 nt, Artificial Sequence
  Synthetic
acauauggacccuucuuaugc

SEQ ID NO: 543479 - RNA, 22 nt, Artificial Sequence
  Synthetic
uacauauggacccuucuuaugc

SEQ ID NO: 543480 - RNA, 23 nt, Artificial Sequence
  Synthetic
guacauauggacccuucuuaugc

SEQ ID NO: 543481 - RNA, 24 nt, Artificial Sequence
  Synthetic
aguacauauggacccuucuuaugc

SEQ ID NO: 543482 - RNA, 18 nt, Artificial Sequence
  Synthetic
auguauggaauguuaugc

SEQ ID NO: 543483 - RNA, 19 nt, Artificial Sequence
  Synthetic
gauguauggaauguuaugc

SEQ ID NO: 543484 - RNA, 20 nt, Artificial Sequence
  Synthetic
ggauguauggaauguuaugc

SEQ ID NO: 543485 - RNA, 21 nt, Artificial Sequence
  Synthetic
aggauguauggaauguuaugc

SEQ ID NO: 543486 - RNA, 22 nt, Artificial Sequence
  Synthetic
aaggauguauggaauguuaugc

SEQ ID NO: 543487 - RNA, 23 nt, Artificial Sequence
  Synthetic
uaaggauguauggaauguuaugc

SEQ ID NO: 543488 - RNA, 24 nt, Artificial Sequence
  Synthetic
uuaaggauguauggaauguuaugc

SEQ ID NO: 543489 - RNA, 18 nt, Artificial Sequence
  Synthetic
uaagauauauguuuaugc

SEQ ID NO: 543490 - RNA, 19 nt, Artificial Sequence
  Synthetic
cuaagauauauguuuaugc

SEQ ID NO: 543491 - RNA, 20 nt, Artificial Sequence
  Synthetic
acuaagauauauguuuaugc

SEQ ID NO: 543492 - RNA, 21 nt, Artificial Sequence
  Synthetic
aacuaagauauauguuuaugc

SEQ ID NO: 543493 - RNA, 22 nt, Artificial Sequence
  Synthetic
aaacuaagauauauguuuaugc

SEQ ID NO: 543494 - RNA, 23 nt, Artificial Sequence
  Synthetic
aaaacuaagauauauguuuaugc

SEQ ID NO: 543495 - RNA, 24 nt, Artificial Sequence
  Synthetic
uaaaacuaagauauauguuuaugc

SEQ ID NO: 543496 - RNA, 18 nt, Artificial Sequence
  Synthetic
aaaacuuuccaaaacugc

SEQ ID NO: 543497 - RNA, 19 nt, Artificial Sequence
  Synthetic
uaaaacuuuccaaaacugc

SEQ ID NO: 543498 - RNA, 20 nt, Artificial Sequence
  Synthetic
guaaaacuuuccaaaacugc

SEQ ID NO: 543499 - RNA, 21 nt, Artificial Sequence
  Synthetic
uguaaaacuuuccaaaacugc

SEQ ID NO: 543500 - RNA, 22 nt, Artificial Sequence
  Synthetic
uuguaaaacuuuccaaaacugc

SEQ ID NO: 543501 - RNA, 23 nt, Artificial Sequence
  Synthetic
uuuguaaaacuuuccaaaacugc

SEQ ID NO: 543502 - RNA, 24 nt, Artificial Sequence
  Synthetic
auuuguaaaacuuuccaaaacugc

SEQ ID NO: 543503 - RNA, 18 nt, Artificial Sequence
  Synthetic
uauaguguagaaaacugc

SEQ ID NO: 543504 - RNA, 19 nt, Artificial Sequence
  Synthetic
cuauaguguagaaaacugc

SEQ ID NO: 543505 - RNA, 20 nt, Artificial Sequence
  Synthetic
acuauaguguagaaaacugc

SEQ ID NO: 543506 - RNA, 21 nt, Artificial Sequence
  Synthetic
aacuauaguguagaaaacugc

SEQ ID NO: 543507 - RNA, 22 nt, Artificial Sequence
  Synthetic
uaacuauaguguagaaaacugc

SEQ ID NO: 543508 - RNA, 23 nt, Artificial Sequence
  Synthetic
uuaacuauaguguagaaaacugc

SEQ ID NO: 543509 - RNA, 24 nt, Artificial Sequence
  Synthetic
auuaacuauaguguagaaaacugc

SEQ ID NO: 543510 - RNA, 18 nt, Artificial Sequence
  Synthetic
gucauuauuccaaacugc

SEQ ID NO: 543511 - RNA, 19 nt, Artificial Sequence
  Synthetic
ggucauuauuccaaacugc

SEQ ID NO: 543512 - RNA, 20 nt, Artificial Sequence
  Synthetic
uggucauuauuccaaacugc

SEQ ID NO: 543513 - RNA, 21 nt, Artificial Sequence
  Synthetic
guggucauuauuccaaacugc

SEQ ID NO: 543514 - RNA, 22 nt, Artificial Sequence
  Synthetic
aguggucauuauuccaaacugc

SEQ ID NO: 543515 - RNA, 23 nt, Artificial Sequence
  Synthetic
caguggucauuauuccaaacugc

SEQ ID NO: 543516 - RNA, 24 nt, Artificial Sequence
  Synthetic
ucaguggucauuauuccaaacugc

SEQ ID NO: 543517 - RNA, 18 nt, Artificial Sequence
  Synthetic
gcuuucacuucaaacugc

SEQ ID NO: 543518 - RNA, 19 nt, Artificial Sequence
  Synthetic
ggcuuucacuucaaacugc

SEQ ID NO: 543519 - RNA, 20 nt, Artificial Sequence
  Synthetic
uggcuuucacuucaaacugc

SEQ ID NO: 543520 - RNA, 21 nt, Artificial Sequence
  Synthetic
auggcuuucacuucaaacugc

SEQ ID NO: 543521 - RNA, 22 nt, Artificial Sequence
  Synthetic
uauggcuuucacuucaaacugc

SEQ ID NO: 543522 - RNA, 23 nt, Artificial Sequence
  Synthetic
guauggcuuucacuucaaacugc

SEQ ID NO: 543523 - RNA, 24 nt, Artificial Sequence
  Synthetic
aguauggcuuucacuucaaacugc

SEQ ID NO: 543524 - RNA, 18 nt, Artificial Sequence
  Synthetic
ugugcaauaaagaacugc

SEQ ID NO: 543525 - RNA, 19 nt, Artificial Sequence
  Synthetic
augugcaauaaagaacugc

SEQ ID NO: 543526 - RNA, 20 nt, Artificial Sequence
  Synthetic
uaugugcaauaaagaacugc

SEQ ID NO: 543527 - RNA, 21 nt, Artificial Sequence
  Synthetic
auaugugcaauaaagaacugc

SEQ ID NO: 543528 - RNA, 22 nt, Artificial Sequence
  Synthetic
uauaugugcaauaaagaacugc

SEQ ID NO: 543529 - RNA, 23 nt, Artificial Sequence
  Synthetic
auauaugugcaauaaagaacugc

SEQ ID NO: 543530 - RNA, 24 nt, Artificial Sequence
  Synthetic
cauauaugugcaauaaagaacugc

SEQ ID NO: 543531 - RNA, 24 nt, Artificial Sequence
  Synthetic
uuucauacugcuauaaagaacugc

SEQ ID NO: 543532 - RNA, 18 nt, Artificial Sequence
  Synthetic
gcugaggcggagaacugc

SEQ ID NO: 543533 - RNA, 19 nt, Artificial Sequence
  Synthetic
ggcugaggcggagaacugc

SEQ ID NO: 543534 - RNA, 20 nt, Artificial Sequence
  Synthetic
aggcugaggcggagaacugc

SEQ ID NO: 543535 - RNA, 21 nt, Artificial Sequence
  Synthetic
gaggcugaggcggagaacugc

SEQ ID NO: 543536 - RNA, 22 nt, Artificial Sequence
  Synthetic
ggaggcugaggcggagaacugc

SEQ ID NO: 543537 - RNA, 23 nt, Artificial Sequence
  Synthetic
gggaggcugaggcggagaacugc

SEQ ID NO: 543538 - RNA, 24 nt, Artificial Sequence
  Synthetic
ugggaggcugaggcggagaacugc

SEQ ID NO: 543539 - RNA, 18 nt, Artificial Sequence
  Synthetic
uucaacuuccggaacugc

SEQ ID NO: 543540 - RNA, 19 nt, Artificial Sequence
  Synthetic
guucaacuuccggaacugc

SEQ ID NO: 543541 - RNA, 20 nt, Artificial Sequence
  Synthetic
cguucaacuuccggaacugc

SEQ ID NO: 543542 - RNA, 21 nt, Artificial Sequence
  Synthetic
acguucaacuuccggaacugc

SEQ ID NO: 543543 - RNA, 22 nt, Artificial Sequence
  Synthetic
gacguucaacuuccggaacugc

SEQ ID NO: 543544 - RNA, 23 nt, Artificial Sequence
  Synthetic
agacguucaacuuccggaacugc

SEQ ID NO: 543545 - RNA, 24 nt, Artificial Sequence
  Synthetic
uagacguucaacuuccggaacugc

SEQ ID NO: 543546 - RNA, 18 nt, Artificial Sequence
  Synthetic
guucugcuucugaacugc

SEQ ID NO: 543547 - RNA, 19 nt, Artificial Sequence
  Synthetic
cguucugcuucugaacugc

SEQ ID NO: 543548 - RNA, 20 nt, Artificial Sequence
  Synthetic
ucguucugcuucugaacugc

SEQ ID NO: 543549 - RNA, 21 nt, Artificial Sequence
  Synthetic
aucguucugcuucugaacugc

SEQ ID NO: 543550 - RNA, 22 nt, Artificial Sequence
  Synthetic
caucguucugcuucugaacugc

SEQ ID NO: 543551 - RNA, 23 nt, Artificial Sequence
  Synthetic
acaucguucugcuucugaacugc

SEQ ID NO: 543552 - RNA, 24 nt, Artificial Sequence
  Synthetic
uacaucguucugcuucugaacugc

SEQ ID NO: 543553 - RNA, 18 nt, Artificial Sequence
  Synthetic
cagaaaaugaaacacugc

SEQ ID NO: 543554 - RNA, 19 nt, Artificial Sequence
  Synthetic
acagaaaaugaaacacugc

SEQ ID NO: 543555 - RNA, 20 nt, Artificial Sequence
  Synthetic
aacagaaaaugaaacacugc

SEQ ID NO: 543556 - RNA, 21 nt, Artificial Sequence
  Synthetic
gaacagaaaaugaaacacugc

SEQ ID NO: 543557 - RNA, 22 nt, Artificial Sequence
  Synthetic
ggaacagaaaaugaaacacugc

SEQ ID NO: 543558 - RNA, 23 nt, Artificial Sequence
  Synthetic
aggaacagaaaaugaaacacugc

SEQ ID NO: 543559 - RNA, 24 nt, Artificial Sequence
  Synthetic
caggaacagaaaaugaaacacugc

SEQ ID NO: 543560 - RNA, 18 nt, Artificial Sequence
  Synthetic
caucuaucuguacacugc

SEQ ID NO: 543561 - RNA, 19 nt, Artificial Sequence
  Synthetic
acaucuaucuguacacugc

SEQ ID NO: 543562 - RNA, 20 nt, Artificial Sequence
  Synthetic
aacaucuaucuguacacugc

SEQ ID NO: 543563 - RNA, 21 nt, Artificial Sequence
  Synthetic
gaacaucuaucuguacacugc

SEQ ID NO: 543564 - RNA, 22 nt, Artificial Sequence
  Synthetic
agaacaucuaucuguacacugc

SEQ ID NO: 543565 - RNA, 23 nt, Artificial Sequence
  Synthetic
aagaacaucuaucuguacacugc

SEQ ID NO: 543566 - RNA, 24 nt, Artificial Sequence
  Synthetic
gaagaacaucuaucuguacacugc

SEQ ID NO: 543567 - RNA, 18 nt, Artificial Sequence
  Synthetic
ugguacucauuacacugc

SEQ ID NO: 543568 - RNA, 19 nt, Artificial Sequence
  Synthetic
augguacucauuacacugc

SEQ ID NO: 543569 - RNA, 20 nt, Artificial Sequence
  Synthetic
caugguacucauuacacugc

SEQ ID NO: 543570 - RNA, 21 nt, Artificial Sequence
  Synthetic
ucaugguacucauuacacugc

SEQ ID NO: 543571 - RNA, 22 nt, Artificial Sequence
  Synthetic
gucaugguacucauuacacugc

SEQ ID NO: 543572 - RNA, 23 nt, Artificial Sequence
  Synthetic
cgucaugguacucauuacacugc

SEQ ID NO: 543573 - RNA, 24 nt, Artificial Sequence
  Synthetic
ccgucaugguacucauuacacugc

SEQ ID NO: 543574 - RNA, 18 nt, Artificial Sequence
  Synthetic
uggaggaagacccacugc

SEQ ID NO: 543575 - RNA, 19 nt, Artificial Sequence
  Synthetic
auggaggaagacccacugc

SEQ ID NO: 543576 - RNA, 20 nt, Artificial Sequence
  Synthetic
aauggaggaagacccacugc

SEQ ID NO: 543577 - RNA, 21 nt, Artificial Sequence
  Synthetic
uaauggaggaagacccacugc

SEQ ID NO: 543578 - RNA, 22 nt, Artificial Sequence
  Synthetic
auaauggaggaagacccacugc

SEQ ID NO: 543579 - RNA, 23 nt, Artificial Sequence
  Synthetic
gauaauggaggaagacccacugc

SEQ ID NO: 543580 - RNA, 24 nt, Artificial Sequence
  Synthetic
agauaauggaggaagacccacugc

SEQ ID NO: 543581 - RNA, 18 nt, Artificial Sequence
  Synthetic
aacacuagucuccacugc

SEQ ID NO: 543582 - RNA, 19 nt, Artificial Sequence
  Synthetic
caacacuagucuccacugc

SEQ ID NO: 543583 - RNA, 20 nt, Artificial Sequence
  Synthetic
gcaacacuagucuccacugc

SEQ ID NO: 543584 - RNA, 21 nt, Artificial Sequence
  Synthetic
agcaacacuagucuccacugc

SEQ ID NO: 543585 - RNA, 22 nt, Artificial Sequence
  Synthetic
uagcaacacuagucuccacugc

SEQ ID NO: 543586 - RNA, 23 nt, Artificial Sequence
  Synthetic
auagcaacacuagucuccacugc

SEQ ID NO: 543587 - RNA, 24 nt, Artificial Sequence
  Synthetic
gauagcaacacuagucuccacugc

SEQ ID NO: 543588 - RNA, 18 nt, Artificial Sequence
  Synthetic
cuggauauaaggcacugc

SEQ ID NO: 543589 - RNA, 19 nt, Artificial Sequence
  Synthetic
ucuggauauaaggcacugc

SEQ ID NO: 543590 - RNA, 20 nt, Artificial Sequence
  Synthetic
uucuggauauaaggcacugc

SEQ ID NO: 543591 - RNA, 21 nt, Artificial Sequence
  Synthetic
uuucuggauauaaggcacugc

SEQ ID NO: 543592 - RNA, 22 nt, Artificial Sequence
  Synthetic
auuucuggauauaaggcacugc

SEQ ID NO: 543593 - RNA, 23 nt, Artificial Sequence
  Synthetic
uauuucuggauauaaggcacugc

SEQ ID NO: 543594 - RNA, 24 nt, Artificial Sequence
  Synthetic
uuauuucuggauauaaggcacugc

SEQ ID NO: 543595 - RNA, 18 nt, Artificial Sequence
  Synthetic
cugggaauaguucacugc

SEQ ID NO: 543596 - RNA, 19 nt, Artificial Sequence
  Synthetic
acugggaauaguucacugc

SEQ ID NO: 543597 - RNA, 20 nt, Artificial Sequence
  Synthetic
cacugggaauaguucacugc

SEQ ID NO: 543598 - RNA, 21 nt, Artificial Sequence
  Synthetic
ccacugggaauaguucacugc

SEQ ID NO: 543599 - RNA, 22 nt, Artificial Sequence
  Synthetic
accacugggaauaguucacugc

SEQ ID NO: 543600 - RNA, 23 nt, Artificial Sequence
  Synthetic
aaccacugggaauaguucacugc

SEQ ID NO: 543601 - RNA, 24 nt, Artificial Sequence
  Synthetic
uaaccacugggaauaguucacugc

SEQ ID NO: 543602 - RNA, 18 nt, Artificial Sequence
  Synthetic
ccgaguagggcagacugc

SEQ ID NO: 543603 - RNA, 19 nt, Artificial Sequence
  Synthetic
gccgaguagggcagacugc

SEQ ID NO: 543604 - RNA, 20 nt, Artificial Sequence
  Synthetic
ggccgaguagggcagacugc

SEQ ID NO: 543605 - RNA, 21 nt, Artificial Sequence
  Synthetic
aggccgaguagggcagacugc

SEQ ID NO: 543606 - RNA, 22 nt, Artificial Sequence
  Synthetic
gaggccgaguagggcagacugc

SEQ ID NO: 543607 - RNA, 23 nt, Artificial Sequence
  Synthetic
ggaggccgaguagggcagacugc

SEQ ID NO: 543608 - RNA, 24 nt, Artificial Sequence
  Synthetic
gggaggccgaguagggcagacugc

SEQ ID NO: 543609 - RNA, 18 nt, Artificial Sequence
  Synthetic
ccgaggaaggaggacugc

SEQ ID NO: 543610 - RNA, 19 nt, Artificial Sequence
  Synthetic
gccgaggaaggaggacugc

SEQ ID NO: 543611 - RNA, 20 nt, Artificial Sequence
  Synthetic
ggccgaggaaggaggacugc

SEQ ID NO: 543612 - RNA, 21 nt, Artificial Sequence
  Synthetic
aggccgaggaaggaggacugc

SEQ ID NO: 543613 - RNA, 22 nt, Artificial Sequence
  Synthetic
gaggccgaggaaggaggacugc

SEQ ID NO: 543614 - RNA, 23 nt, Artificial Sequence
  Synthetic
ggaggccgaggaaggaggacugc

SEQ ID NO: 543615 - RNA, 24 nt, Artificial Sequence
  Synthetic
gggaggccgaggaaggaggacugc

SEQ ID NO: 543616 - RNA, 18 nt, Artificial Sequence
  Synthetic
cugaggcaggaggacugc

SEQ ID NO: 543617 - RNA, 19 nt, Artificial Sequence
  Synthetic
gcugaggcaggaggacugc

SEQ ID NO: 543618 - RNA, 20 nt, Artificial Sequence
  Synthetic
ggcugaggcaggaggacugc

SEQ ID NO: 543619 - RNA, 21 nt, Artificial Sequence
  Synthetic
aggcugaggcaggaggacugc

SEQ ID NO: 543620 - RNA, 22 nt, Artificial Sequence
  Synthetic
gaggcugaggcaggaggacugc

SEQ ID NO: 543621 - RNA, 23 nt, Artificial Sequence
  Synthetic
ggaggcugaggcaggaggacugc

SEQ ID NO: 543622 - RNA, 24 nt, Artificial Sequence
  Synthetic
gggaggcugaggcaggaggacugc

SEQ ID NO: 543623 - RNA, 18 nt, Artificial Sequence
  Synthetic
ccaaggcgggcggacugc

SEQ ID NO: 543624 - RNA, 19 nt, Artificial Sequence
  Synthetic
gccaaggcgggcggacugc

SEQ ID NO: 543625 - RNA, 20 nt, Artificial Sequence
  Synthetic
ggccaaggcgggcggacugc

SEQ ID NO: 543626 - RNA, 21 nt, Artificial Sequence
  Synthetic
aggccaaggcgggcggacugc

SEQ ID NO: 543627 - RNA, 22 nt, Artificial Sequence
  Synthetic
gaggccaaggcgggcggacugc

SEQ ID NO: 543628 - RNA, 23 nt, Artificial Sequence
  Synthetic
ggaggccaaggcgggcggacugc

SEQ ID NO: 543629 - RNA, 24 nt, Artificial Sequence
  Synthetic
gggaggccaaggcgggcggacugc

SEQ ID NO: 543630 - RNA, 18 nt, Artificial Sequence
  Synthetic
agucccuucagggacugc

SEQ ID NO: 543631 - RNA, 19 nt, Artificial Sequence
  Synthetic
cagucccuucagggacugc

SEQ ID NO: 543632 - RNA, 20 nt, Artificial Sequence
  Synthetic
ucagucccuucagggacugc

SEQ ID NO: 543633 - RNA, 21 nt, Artificial Sequence
  Synthetic
gucagucccuucagggacugc

SEQ ID NO: 543634 - RNA, 22 nt, Artificial Sequence
  Synthetic
ugucagucccuucagggacugc

SEQ ID NO: 543635 - RNA, 23 nt, Artificial Sequence
  Synthetic
cugucagucccuucagggacugc

SEQ ID NO: 543636 - RNA, 24 nt, Artificial Sequence
  Synthetic
acugucagucccuucagggacugc

SEQ ID NO: 543637 - RNA, 18 nt, Artificial Sequence
  Synthetic
uagauguggguggacugc

SEQ ID NO: 543638 - RNA, 19 nt, Artificial Sequence
  Synthetic
guagauguggguggacugc

SEQ ID NO: 543639 - RNA, 20 nt, Artificial Sequence
  Synthetic
gguagauguggguggacugc

SEQ ID NO: 543640 - RNA, 21 nt, Artificial Sequence
  Synthetic
agguagauguggguggacugc

SEQ ID NO: 543641 - RNA, 22 nt, Artificial Sequence
  Synthetic
gagguagauguggguggacugc

SEQ ID NO: 543642 - RNA, 23 nt, Artificial Sequence
  Synthetic
ggagguagauguggguggacugc

SEQ ID NO: 543643 - RNA, 24 nt, Artificial Sequence
  Synthetic
aggagguagauguggguggacugc

SEQ ID NO: 543644 - RNA, 18 nt, Artificial Sequence
  Synthetic
gauugauuuaaauacugc

SEQ ID NO: 543645 - RNA, 19 nt, Artificial Sequence
  Synthetic
ggauugauuuaaauacugc

SEQ ID NO: 543646 - RNA, 20 nt, Artificial Sequence
  Synthetic
gggauugauuuaaauacugc

SEQ ID NO: 543647 - RNA, 21 nt, Artificial Sequence
  Synthetic
agggauugauuuaaauacugc

SEQ ID NO: 543648 - RNA, 22 nt, Artificial Sequence
  Synthetic
uagggauugauuuaaauacugc

SEQ ID NO: 543649 - RNA, 23 nt, Artificial Sequence
  Synthetic
uuagggauugauuuaaauacugc

SEQ ID NO: 543650 - RNA, 24 nt, Artificial Sequence
  Synthetic
auuagggauugauuuaaauacugc

SEQ ID NO: 543651 - RNA, 18 nt, Artificial Sequence
  Synthetic
uuuagauuggaauacugc

SEQ ID NO: 543652 - RNA, 19 nt, Artificial Sequence
  Synthetic
uuuuagauuggaauacugc

SEQ ID NO: 543653 - RNA, 20 nt, Artificial Sequence
  Synthetic
auuuuagauuggaauacugc

SEQ ID NO: 543654 - RNA, 21 nt, Artificial Sequence
  Synthetic
aauuuuagauuggaauacugc

SEQ ID NO: 543655 - RNA, 22 nt, Artificial Sequence
  Synthetic
aaauuuuagauuggaauacugc

SEQ ID NO: 543656 - RNA, 23 nt, Artificial Sequence
  Synthetic
aaaauuuuagauuggaauacugc

SEQ ID NO: 543657 - RNA, 24 nt, Artificial Sequence
  Synthetic
uaaaauuuuagauuggaauacugc

SEQ ID NO: 543658 - RNA, 18 nt, Artificial Sequence
  Synthetic
cauucugcuagauacugc

SEQ ID NO: 543659 - RNA, 19 nt, Artificial Sequence
  Synthetic
gcauucugcuagauacugc

SEQ ID NO: 543660 - RNA, 20 nt, Artificial Sequence
  Synthetic
ggcauucugcuagauacugc

SEQ ID NO: 543661 - RNA, 21 nt, Artificial Sequence
  Synthetic
aggcauucugcuagauacugc

SEQ ID NO: 543662 - RNA, 22 nt, Artificial Sequence
  Synthetic
aaggcauucugcuagauacugc

SEQ ID NO: 543663 - RNA, 23 nt, Artificial Sequence
  Synthetic
aaaggcauucugcuagauacugc

SEQ ID NO: 543664 - RNA, 24 nt, Artificial Sequence
  Synthetic
uaaaggcauucugcuagauacugc

SEQ ID NO: 543665 - RNA, 18 nt, Artificial Sequence
  Synthetic
gcgaugaaaauauacugc

SEQ ID NO: 543666 - RNA, 19 nt, Artificial Sequence
  Synthetic
agcgaugaaaauauacugc

SEQ ID NO: 543667 - RNA, 20 nt, Artificial Sequence
  Synthetic
aagcgaugaaaauauacugc

SEQ ID NO: 543668 - RNA, 21 nt, Artificial Sequence
  Synthetic
gaagcgaugaaaauauacugc

SEQ ID NO: 543669 - RNA, 22 nt, Artificial Sequence
  Synthetic
ggaagcgaugaaaauauacugc

SEQ ID NO: 543670 - RNA, 23 nt, Artificial Sequence
  Synthetic
uggaagcgaugaaaauauacugc

SEQ ID NO: 543671 - RNA, 24 nt, Artificial Sequence
  Synthetic
guggaagcgaugaaaauauacugc

SEQ ID NO: 543672 - RNA, 18 nt, Artificial Sequence
  Synthetic
uuaugcuccuuauacugc

SEQ ID NO: 543673 - RNA, 19 nt, Artificial Sequence
  Synthetic
auuaugcuccuuauacugc

SEQ ID NO: 543674 - RNA, 20 nt, Artificial Sequence
  Synthetic
aauuaugcuccuuauacugc

SEQ ID NO: 543675 - RNA, 21 nt, Artificial Sequence
  Synthetic
caauuaugcuccuuauacugc

SEQ ID NO: 543676 - RNA, 22 nt, Artificial Sequence
  Synthetic
gcaauuaugcuccuuauacugc

SEQ ID NO: 543677 - RNA, 23 nt, Artificial Sequence
  Synthetic
ggcaauuaugcuccuuauacugc

SEQ ID NO: 543678 - RNA, 24 nt, Artificial Sequence
  Synthetic
gggcaauuaugcuccuuauacugc

SEQ ID NO: 543679 - RNA, 18 nt, Artificial Sequence
  Synthetic
aaaacgaauaccuacugc

SEQ ID NO: 543680 - RNA, 19 nt, Artificial Sequence
  Synthetic
gaaaacgaauaccuacugc

SEQ ID NO: 543681 - RNA, 20 nt, Artificial Sequence
  Synthetic
agaaaacgaauaccuacugc

SEQ ID NO: 543682 - RNA, 21 nt, Artificial Sequence
  Synthetic
aagaaaacgaauaccuacugc

SEQ ID NO: 543683 - RNA, 22 nt, Artificial Sequence
  Synthetic
aaagaaaacgaauaccuacugc

SEQ ID NO: 543684 - RNA, 23 nt, Artificial Sequence
  Synthetic
aaaagaaaacgaauaccuacugc

SEQ ID NO: 543685 - RNA, 24 nt, Artificial Sequence
  Synthetic
caaaagaaaacgaauaccuacugc

SEQ ID NO: 543686 - RNA, 18 nt, Artificial Sequence
  Synthetic
auauuaauucccuacugc

SEQ ID NO: 543687 - RNA, 19 nt, Artificial Sequence
  Synthetic
aauauuaauucccuacugc

SEQ ID NO: 543688 - RNA, 20 nt, Artificial Sequence
  Synthetic
gaauauuaauucccuacugc

SEQ ID NO: 543689 - RNA, 21 nt, Artificial Sequence
  Synthetic
ggaauauuaauucccuacugc

SEQ ID NO: 543690 - RNA, 22 nt, Artificial Sequence
  Synthetic
uggaauauuaauucccuacugc

SEQ ID NO: 543691 - RNA, 23 nt, Artificial Sequence
  Synthetic
cuggaauauuaauucccuacugc

SEQ ID NO: 543692 - RNA, 24 nt, Artificial Sequence
  Synthetic
ucuggaauauuaauucccuacugc

SEQ ID NO: 543693 - RNA, 18 nt, Artificial Sequence
  Synthetic
acauucacguauuacugc

SEQ ID NO: 543694 - RNA, 19 nt, Artificial Sequence
  Synthetic
cacauucacguauuacugc

SEQ ID NO: 543695 - RNA, 20 nt, Artificial Sequence
  Synthetic
gcacauucacguauuacugc

SEQ ID NO: 543696 - RNA, 21 nt, Artificial Sequence
  Synthetic
agcacauucacguauuacugc

SEQ ID NO: 543697 - RNA, 22 nt, Artificial Sequence
  Synthetic
uagcacauucacguauuacugc

SEQ ID NO: 543698 - RNA, 23 nt, Artificial Sequence
  Synthetic
cuagcacauucacguauuacugc

SEQ ID NO: 543699 - RNA, 24 nt, Artificial Sequence
  Synthetic
acuagcacauucacguauuacugc

SEQ ID NO: 543700 - RNA, 18 nt, Artificial Sequence
  Synthetic
augaaauuuuauuacugc

SEQ ID NO: 543701 - RNA, 19 nt, Artificial Sequence
  Synthetic
uaugaaauuuuauuacugc

SEQ ID NO: 543702 - RNA, 20 nt, Artificial Sequence
  Synthetic
uuaugaaauuuuauuacugc

SEQ ID NO: 543703 - RNA, 21 nt, Artificial Sequence
  Synthetic
cuuaugaaauuuuauuacugc

SEQ ID NO: 543704 - RNA, 22 nt, Artificial Sequence
  Synthetic
ucuuaugaaauuuuauuacugc

SEQ ID NO: 543705 - RNA, 23 nt, Artificial Sequence
  Synthetic
aucuuaugaaauuuuauuacugc

SEQ ID NO: 543706 - RNA, 24 nt, Artificial Sequence
  Synthetic
aaucuuaugaaauuuuauuacugc

SEQ ID NO: 543707 - RNA, 18 nt, Artificial Sequence
  Synthetic
gguaaucgagaaaccugc

SEQ ID NO: 543708 - RNA, 19 nt, Artificial Sequence
  Synthetic
agguaaucgagaaaccugc

SEQ ID NO: 543709 - RNA, 20 nt, Artificial Sequence
  Synthetic
cagguaaucgagaaaccugc

SEQ ID NO: 543710 - RNA, 21 nt, Artificial Sequence
  Synthetic
ucagguaaucgagaaaccugc

SEQ ID NO: 543711 - RNA, 22 nt, Artificial Sequence
  Synthetic
gucagguaaucgagaaaccugc

SEQ ID NO: 543712 - RNA, 23 nt, Artificial Sequence
  Synthetic
agucagguaaucgagaaaccugc

SEQ ID NO: 543713 - RNA, 24 nt, Artificial Sequence
  Synthetic
uagucagguaaucgagaaaccugc

SEQ ID NO: 543714 - RNA, 18 nt, Artificial Sequence
  Synthetic
ggaagcccauucaccugc

SEQ ID NO: 543715 - RNA, 19 nt, Artificial Sequence
  Synthetic
aggaagcccauucaccugc

SEQ ID NO: 543716 - RNA, 20 nt, Artificial Sequence
  Synthetic
uaggaagcccauucaccugc

SEQ ID NO: 543717 - RNA, 21 nt, Artificial Sequence
  Synthetic
guaggaagcccauucaccugc

SEQ ID NO: 543718 - RNA, 22 nt, Artificial Sequence
  Synthetic
gguaggaagcccauucaccugc

SEQ ID NO: 543719 - RNA, 23 nt, Artificial Sequence
  Synthetic
agguaggaagcccauucaccugc

SEQ ID NO: 543720 - RNA, 24 nt, Artificial Sequence
  Synthetic
aagguaggaagcccauucaccugc

SEQ ID NO: 543721 - RNA, 18 nt, Artificial Sequence
  Synthetic
agagacuacaugaccugc

SEQ ID NO: 543722 - RNA, 19 nt, Artificial Sequence
  Synthetic
cagagacuacaugaccugc

SEQ ID NO: 543723 - RNA, 20 nt, Artificial Sequence
  Synthetic
acagagacuacaugaccugc

SEQ ID NO: 543724 - RNA, 21 nt, Artificial Sequence
  Synthetic
gacagagacuacaugaccugc

SEQ ID NO: 543725 - RNA, 22 nt, Artificial Sequence
  Synthetic
ugacagagacuacaugaccugc

SEQ ID NO: 543726 - RNA, 23 nt, Artificial Sequence
  Synthetic
gugacagagacuacaugaccugc

SEQ ID NO: 543727 - RNA, 24 nt, Artificial Sequence
  Synthetic
ugugacagagacuacaugaccugc

SEQ ID NO: 543728 - RNA, 18 nt, Artificial Sequence
  Synthetic
auuuuugauuauaccugc

SEQ ID NO: 543729 - RNA, 19 nt, Artificial Sequence
  Synthetic
uauuuuugauuauaccugc

SEQ ID NO: 543730 - RNA, 20 nt, Artificial Sequence
  Synthetic
uuauuuuugauuauaccugc

SEQ ID NO: 543731 - RNA, 21 nt, Artificial Sequence
  Synthetic
uuuauuuuugauuauaccugc

SEQ ID NO: 543732 - RNA, 22 nt, Artificial Sequence
  Synthetic
uuuuauuuuugauuauaccugc

SEQ ID NO: 543733 - RNA, 23 nt, Artificial Sequence
  Synthetic
uuuuuauuuuugauuauaccugc

SEQ ID NO: 543734 - RNA, 24 nt, Artificial Sequence
  Synthetic
cuuuuuauuuuugauuauaccugc

SEQ ID NO: 543735 - RNA, 18 nt, Artificial Sequence
  Synthetic
uuucaaauaacuaccugc

SEQ ID NO: 543736 - RNA, 19 nt, Artificial Sequence
  Synthetic
uuuucaaauaacuaccugc

SEQ ID NO: 543737 - RNA, 20 nt, Artificial Sequence
  Synthetic
uuuuucaaauaacuaccugc

SEQ ID NO: 543738 - RNA, 21 nt, Artificial Sequence
  Synthetic
uuuuuucaaauaacuaccugc

SEQ ID NO: 543739 - RNA, 22 nt, Artificial Sequence
  Synthetic
uuuuuuucaaauaacuaccugc

SEQ ID NO: 543740 - RNA, 23 nt, Artificial Sequence
  Synthetic
uuuuuuuucaaauaacuaccugc

SEQ ID NO: 543741 - RNA, 24 nt, Artificial Sequence
  Synthetic
uuuuuuuuucaaauaacuaccugc

SEQ ID NO: 543742 - RNA, 18 nt, Artificial Sequence
  Synthetic
gugucugucaaccccugc

SEQ ID NO: 543743 - RNA, 19 nt, Artificial Sequence
  Synthetic
ggugucugucaaccccugc

SEQ ID NO: 543744 - RNA, 20 nt, Artificial Sequence
  Synthetic
gggugucugucaaccccugc

SEQ ID NO: 543745 - RNA, 21 nt, Artificial Sequence
  Synthetic
agggugucugucaaccccugc

SEQ ID NO: 543746 - RNA, 22 nt, Artificial Sequence
  Synthetic
gagggugucugucaaccccugc

SEQ ID NO: 543747 - RNA, 23 nt, Artificial Sequence
  Synthetic
ugagggugucugucaaccccugc

SEQ ID NO: 543748 - RNA, 24 nt, Artificial Sequence
  Synthetic
augagggugucugucaaccccugc

SEQ ID NO: 543749 - RNA, 18 nt, Artificial Sequence
  Synthetic
ugacuccagagccccugc

SEQ ID NO: 543750 - RNA, 19 nt, Artificial Sequence
  Synthetic
uugacuccagagccccugc

SEQ ID NO: 543751 - RNA, 20 nt, Artificial Sequence
  Synthetic
uuugacuccagagccccugc

SEQ ID NO: 543752 - RNA, 21 nt, Artificial Sequence
  Synthetic
cuuugacuccagagccccugc

SEQ ID NO: 543753 - RNA, 22 nt, Artificial Sequence
  Synthetic
ucuuugacuccagagccccugc

SEQ ID NO: 543754 - RNA, 23 nt, Artificial Sequence
  Synthetic
cucuuugacuccagagccccugc

SEQ ID NO: 543755 - RNA, 24 nt, Artificial Sequence
  Synthetic
gcucuuugacuccagagccccugc

SEQ ID NO: 543756 - RNA, 18 nt, Artificial Sequence
  Synthetic
ugguacaaacaucccugc

SEQ ID NO: 543757 - RNA, 19 nt, Artificial Sequence
  Synthetic
gugguacaaacaucccugc

SEQ ID NO: 543758 - RNA, 20 nt, Artificial Sequence
  Synthetic
agugguacaaacaucccugc

SEQ ID NO: 543759 - RNA, 21 nt, Artificial Sequence
  Synthetic
cagugguacaaacaucccugc

SEQ ID NO: 543760 - RNA, 22 nt, Artificial Sequence
  Synthetic
ccagugguacaaacaucccugc

SEQ ID NO: 543761 - RNA, 23 nt, Artificial Sequence
  Synthetic
cccagugguacaaacaucccugc

SEQ ID NO: 543762 - RNA, 24 nt, Artificial Sequence
  Synthetic
ucccagugguacaaacaucccugc

SEQ ID NO: 543763 - RNA, 18 nt, Artificial Sequence
  Synthetic
cuuuagccccaucccugc

SEQ ID NO: 543764 - RNA, 19 nt, Artificial Sequence
  Synthetic
gcuuuagccccaucccugc

SEQ ID NO: 543765 - RNA, 20 nt, Artificial Sequence
  Synthetic
ugcuuuagccccaucccugc

SEQ ID NO: 543766 - RNA, 21 nt, Artificial Sequence
  Synthetic
uugcuuuagccccaucccugc

SEQ ID NO: 543767 - RNA, 22 nt, Artificial Sequence
  Synthetic
cuugcuuuagccccaucccugc

SEQ ID NO: 543768 - RNA, 23 nt, Artificial Sequence
  Synthetic
ccuugcuuuagccccaucccugc

SEQ ID NO: 543769 - RNA, 24 nt, Artificial Sequence
  Synthetic
cccuugcuuuagccccaucccugc

SEQ ID NO: 543770 - RNA, 18 nt, Artificial Sequence
  Synthetic
agucuuuucucucccugc

SEQ ID NO: 543771 - RNA, 19 nt, Artificial Sequence
  Synthetic
cagucuuuucucucccugc

SEQ ID NO: 543772 - RNA, 20 nt, Artificial Sequence
  Synthetic
ucagucuuuucucucccugc

SEQ ID NO: 543773 - RNA, 21 nt, Artificial Sequence
  Synthetic
cucagucuuuucucucccugc

SEQ ID NO: 543774 - RNA, 22 nt, Artificial Sequence
  Synthetic
gcucagucuuuucucucccugc

SEQ ID NO: 543775 - RNA, 23 nt, Artificial Sequence
  Synthetic
ugcucagucuuuucucucccugc

SEQ ID NO: 543776 - RNA, 24 nt, Artificial Sequence
  Synthetic
uugcucagucuuuucucucccugc

SEQ ID NO: 543777 - RNA, 18 nt, Artificial Sequence
  Synthetic
acaaucaucugagccugc

SEQ ID NO: 543778 - RNA, 19 nt, Artificial Sequence
  Synthetic
aacaaucaucugagccugc

SEQ ID NO: 543779 - RNA, 20 nt, Artificial Sequence
  Synthetic
uaacaaucaucugagccugc

SEQ ID NO: 543780 - RNA, 21 nt, Artificial Sequence
  Synthetic
guaacaaucaucugagccugc

SEQ ID NO: 543781 - RNA, 22 nt, Artificial Sequence
  Synthetic
gguaacaaucaucugagccugc

SEQ ID NO: 543782 - RNA, 23 nt, Artificial Sequence
  Synthetic
ugguaacaaucaucugagccugc

SEQ ID NO: 543783 - RNA, 24 nt, Artificial Sequence
  Synthetic
augguaacaaucaucugagccugc

SEQ ID NO: 543784 - RNA, 18 nt, Artificial Sequence
  Synthetic
ucgggcugguuagccugc

SEQ ID NO: 543785 - RNA, 19 nt, Artificial Sequence
  Synthetic
cucgggcugguuagccugc

SEQ ID NO: 543786 - RNA, 20 nt, Artificial Sequence
  Synthetic
gcucgggcugguuagccugc

SEQ ID NO: 543787 - RNA, 21 nt, Artificial Sequence
  Synthetic
ugcucgggcugguuagccugc

SEQ ID NO: 543788 - RNA, 22 nt, Artificial Sequence
  Synthetic
uugcucgggcugguuagccugc

SEQ ID NO: 543789 - RNA, 23 nt, Artificial Sequence
  Synthetic
cuugcucgggcugguuagccugc

SEQ ID NO: 543790 - RNA, 24 nt, Artificial Sequence
  Synthetic
acuugcucgggcugguuagccugc

SEQ ID NO: 543791 - RNA, 18 nt, Artificial Sequence
  Synthetic
ccaccgugccgggccugc

SEQ ID NO: 543792 - RNA, 19 nt, Artificial Sequence
  Synthetic
gccaccgugccgggccugc

SEQ ID NO: 543793 - RNA, 20 nt, Artificial Sequence
  Synthetic
agccaccgugccgggccugc

SEQ ID NO: 543794 - RNA, 21 nt, Artificial Sequence
  Synthetic
gagccaccgugccgggccugc

SEQ ID NO: 543795 - RNA, 22 nt, Artificial Sequence
  Synthetic
ugagccaccgugccgggccugc

SEQ ID NO: 543796 - RNA, 23 nt, Artificial Sequence
  Synthetic
cugagccaccgugccgggccugc

SEQ ID NO: 543797 - RNA, 24 nt, Artificial Sequence
  Synthetic
ccugagccaccgugccgggccugc

SEQ ID NO: 543798 - RNA, 18 nt, Artificial Sequence
  Synthetic
gaagaagccacugccugc

SEQ ID NO: 543799 - RNA, 19 nt, Artificial Sequence
  Synthetic
ggaagaagccacugccugc

SEQ ID NO: 543800 - RNA, 20 nt, Artificial Sequence
  Synthetic
aggaagaagccacugccugc

SEQ ID NO: 543801 - RNA, 21 nt, Artificial Sequence
  Synthetic
caggaagaagccacugccugc

SEQ ID NO: 543802 - RNA, 22 nt, Artificial Sequence
  Synthetic
ccaggaagaagccacugccugc

SEQ ID NO: 543803 - RNA, 23 nt, Artificial Sequence
  Synthetic
cccaggaagaagccacugccugc

SEQ ID NO: 543804 - RNA, 24 nt, Artificial Sequence
  Synthetic
gcccaggaagaagccacugccugc

SEQ ID NO: 543805 - RNA, 18 nt, Artificial Sequence
  Synthetic
aguuuagaaagugccugc

SEQ ID NO: 543806 - RNA, 19 nt, Artificial Sequence
  Synthetic
gaguuuagaaagugccugc

SEQ ID NO: 543807 - RNA, 20 nt, Artificial Sequence
  Synthetic
agaguuuagaaagugccugc

SEQ ID NO: 543808 - RNA, 21 nt, Artificial Sequence
  Synthetic
gagaguuuagaaagugccugc

SEQ ID NO: 543809 - RNA, 22 nt, Artificial Sequence
  Synthetic
ggagaguuuagaaagugccugc

SEQ ID NO: 543810 - RNA, 23 nt, Artificial Sequence
  Synthetic
uggagaguuuagaaagugccugc

SEQ ID NO: 543811 - RNA, 24 nt, Artificial Sequence
  Synthetic
guggagaguuuagaaagugccugc

SEQ ID NO: 543812 - RNA, 18 nt, Artificial Sequence
  Synthetic
cuucccuuaagugccugc

SEQ ID NO: 543813 - RNA, 19 nt, Artificial Sequence
  Synthetic
ccuucccuuaagugccugc

SEQ ID NO: 543814 - RNA, 20 nt, Artificial Sequence
  Synthetic
gccuucccuuaagugccugc

SEQ ID NO: 543815 - RNA, 21 nt, Artificial Sequence
  Synthetic
agccuucccuuaagugccugc

SEQ ID NO: 543816 - RNA, 22 nt, Artificial Sequence
  Synthetic
uagccuucccuuaagugccugc

SEQ ID NO: 543817 - RNA, 23 nt, Artificial Sequence
  Synthetic
cuagccuucccuuaagugccugc

SEQ ID NO: 543818 - RNA, 24 nt, Artificial Sequence
  Synthetic
ccuagccuucccuuaagugccugc

SEQ ID NO: 543819 - RNA, 18 nt, Artificial Sequence
  Synthetic
uucuguuagauauccugc

SEQ ID NO: 543820 - RNA, 19 nt, Artificial Sequence
  Synthetic
uuucuguuagauauccugc

SEQ ID NO: 543821 - RNA, 20 nt, Artificial Sequence
  Synthetic
uuuucuguuagauauccugc

SEQ ID NO: 543822 - RNA, 21 nt, Artificial Sequence
  Synthetic
guuuucuguuagauauccugc

SEQ ID NO: 543823 - RNA, 22 nt, Artificial Sequence
  Synthetic
uguuuucuguuagauauccugc

SEQ ID NO: 543824 - RNA, 23 nt, Artificial Sequence
  Synthetic
uuguuuucuguuagauauccugc

SEQ ID NO: 543825 - RNA, 24 nt, Artificial Sequence
  Synthetic
guuguuuucuguuagauauccugc

SEQ ID NO: 543826 - RNA, 18 nt, Artificial Sequence
  Synthetic
gcgccacugcacuccugc

SEQ ID NO: 543827 - RNA, 19 nt, Artificial Sequence
  Synthetic
cgcgccacugcacuccugc

SEQ ID NO: 543828 - RNA, 20 nt, Artificial Sequence
  Synthetic
ucgcgccacugcacuccugc

SEQ ID NO: 543829 - RNA, 21 nt, Artificial Sequence
  Synthetic
aucgcgccacugcacuccugc

SEQ ID NO: 543830 - RNA, 22 nt, Artificial Sequence
  Synthetic
gaucgcgccacugcacuccugc

SEQ ID NO: 543831 - RNA, 23 nt, Artificial Sequence
  Synthetic
agaucgcgccacugcacuccugc

SEQ ID NO: 543832 - RNA, 24 nt, Artificial Sequence
  Synthetic
gagaucgcgccacugcacuccugc

SEQ ID NO: 543833 - RNA, 18 nt, Artificial Sequence
  Synthetic
cugaacuuaaucuccugc

SEQ ID NO: 543834 - RNA, 19 nt, Artificial Sequence
  Synthetic
gcugaacuuaaucuccugc

SEQ ID NO: 543835 - RNA, 20 nt, Artificial Sequence
  Synthetic
ggcugaacuuaaucuccugc

SEQ ID NO: 543836 - RNA, 21 nt, Artificial Sequence
  Synthetic
aggcugaacuuaaucuccugc

SEQ ID NO: 543837 - RNA, 22 nt, Artificial Sequence
  Synthetic
gaggcugaacuuaaucuccugc

SEQ ID NO: 543838 - RNA, 23 nt, Artificial Sequence
  Synthetic
ggaggcugaacuuaaucuccugc

SEQ ID NO: 543839 - RNA, 24 nt, Artificial Sequence
  Synthetic
aggaggcugaacuuaaucuccugc

SEQ ID NO: 543840 - RNA, 18 nt, Artificial Sequence
  Synthetic
uucagucuuucuuccugc

SEQ ID NO: 543841 - RNA, 19 nt, Artificial Sequence
  Synthetic
auucagucuuucuuccugc

SEQ ID NO: 543842 - RNA, 20 nt, Artificial Sequence
  Synthetic
cauucagucuuucuuccugc

SEQ ID NO: 543843 - RNA, 21 nt, Artificial Sequence
  Synthetic
gcauucagucuuucuuccugc

SEQ ID NO: 543844 - RNA, 22 nt, Artificial Sequence
  Synthetic
ugcauucagucuuucuuccugc

SEQ ID NO: 543845 - RNA, 23 nt, Artificial Sequence
  Synthetic
cugcauucagucuuucuuccugc

SEQ ID NO: 543846 - RNA, 24 nt, Artificial Sequence
  Synthetic
ucugcauucagucuuucuuccugc

SEQ ID NO: 543847 - RNA, 18 nt, Artificial Sequence
  Synthetic
ugggugagcauuuccugc

SEQ ID NO: 543848 - RNA, 19 nt, Artificial Sequence
  Synthetic
uugggugagcauuuccugc

SEQ ID NO: 543849 - RNA, 20 nt, Artificial Sequence
  Synthetic
auugggugagcauuuccugc

SEQ ID NO: 543850 - RNA, 21 nt, Artificial Sequence
  Synthetic
aauugggugagcauuuccugc

SEQ ID NO: 543851 - RNA, 22 nt, Artificial Sequence
  Synthetic
uaauugggugagcauuuccugc

SEQ ID NO: 543852 - RNA, 23 nt, Artificial Sequence
  Synthetic
auaauugggugagcauuuccugc

SEQ ID NO: 543853 - RNA, 24 nt, Artificial Sequence
  Synthetic
cauaauugggugagcauuuccugc

SEQ ID NO: 543854 - RNA, 18 nt, Artificial Sequence
  Synthetic
gcuuaacugaaaagcugc

SEQ ID NO: 543855 - RNA, 19 nt, Artificial Sequence
  Synthetic
ugcuuaacugaaaagcugc

SEQ ID NO: 543856 - RNA, 20 nt, Artificial Sequence
  Synthetic
augcuuaacugaaaagcugc

SEQ ID NO: 543857 - RNA, 21 nt, Artificial Sequence
  Synthetic
gaugcuuaacugaaaagcugc

SEQ ID NO: 543858 - RNA, 22 nt, Artificial Sequence
  Synthetic
agaugcuuaacugaaaagcugc

SEQ ID NO: 543859 - RNA, 23 nt, Artificial Sequence
  Synthetic
gagaugcuuaacugaaaagcugc

SEQ ID NO: 543860 - RNA, 24 nt, Artificial Sequence
  Synthetic
agagaugcuuaacugaaaagcugc

SEQ ID NO: 543861 - RNA, 18 nt, Artificial Sequence
  Synthetic
ugauuuaaaacaagcugc

SEQ ID NO: 543862 - RNA, 19 nt, Artificial Sequence
  Synthetic
gugauuuaaaacaagcugc

SEQ ID NO: 543863 - RNA, 20 nt, Artificial Sequence
  Synthetic
agugauuuaaaacaagcugc

SEQ ID NO: 543864 - RNA, 21 nt, Artificial Sequence
  Synthetic
cagugauuuaaaacaagcugc

SEQ ID NO: 543865 - RNA, 22 nt, Artificial Sequence
  Synthetic
ucagugauuuaaaacaagcugc

SEQ ID NO: 543866 - RNA, 23 nt, Artificial Sequence
  Synthetic
cucagugauuuaaaacaagcugc

SEQ ID NO: 543867 - RNA, 24 nt, Artificial Sequence
  Synthetic
ccucagugauuuaaaacaagcugc

SEQ ID NO: 543868 - RNA, 18 nt, Artificial Sequence
  Synthetic
cacuucuauucaagcugc

SEQ ID NO: 543869 - RNA, 19 nt, Artificial Sequence
  Synthetic
ucacuucuauucaagcugc

SEQ ID NO: 543870 - RNA, 20 nt, Artificial Sequence
  Synthetic
uucacuucuauucaagcugc

SEQ ID NO: 543871 - RNA, 21 nt, Artificial Sequence
  Synthetic
cuucacuucuauucaagcugc

SEQ ID NO: 543872 - RNA, 22 nt, Artificial Sequence
  Synthetic
acuucacuucuauucaagcugc

SEQ ID NO: 543873 - RNA, 23 nt, Artificial Sequence
  Synthetic
gacuucacuucuauucaagcugc

SEQ ID NO: 543874 - RNA, 24 nt, Artificial Sequence
  Synthetic
agacuucacuucuauucaagcugc

SEQ ID NO: 543875 - RNA, 18 nt, Artificial Sequence
  Synthetic
acauagugaagaagcugc

SEQ ID NO: 543876 - RNA, 19 nt, Artificial Sequence
  Synthetic
uacauagugaagaagcugc

SEQ ID NO: 543877 - RNA, 20 nt, Artificial Sequence
  Synthetic
auacauagugaagaagcugc

SEQ ID NO: 543878 - RNA, 21 nt, Artificial Sequence
  Synthetic
uauacauagugaagaagcugc

SEQ ID NO: 543879 - RNA, 22 nt, Artificial Sequence
  Synthetic
auauacauagugaagaagcugc

SEQ ID NO: 543880 - RNA, 23 nt, Artificial Sequence
  Synthetic
cauauacauagugaagaagcugc

SEQ ID NO: 543881 - RNA, 24 nt, Artificial Sequence
  Synthetic
ucauauacauagugaagaagcugc

SEQ ID NO: 543882 - RNA, 18 nt, Artificial Sequence
  Synthetic
ugcaguauacuaagcugc

SEQ ID NO: 543883 - RNA, 19 nt, Artificial Sequence
  Synthetic
uugcaguauacuaagcugc

SEQ ID NO: 543884 - RNA, 20 nt, Artificial Sequence
  Synthetic
auugcaguauacuaagcugc

SEQ ID NO: 543885 - RNA, 21 nt, Artificial Sequence
  Synthetic
cauugcaguauacuaagcugc

SEQ ID NO: 543886 - RNA, 22 nt, Artificial Sequence
  Synthetic
ucauugcaguauacuaagcugc

SEQ ID NO: 543887 - RNA, 23 nt, Artificial Sequence
  Synthetic
gucauugcaguauacuaagcugc

SEQ ID NO: 543888 - RNA, 24 nt, Artificial Sequence
  Synthetic
ggucauugcaguauacuaagcugc

SEQ ID NO: 543889 - RNA, 18 nt, Artificial Sequence
  Synthetic
gccugugguaccagcugc

SEQ ID NO: 543890 - RNA, 19 nt, Artificial Sequence
  Synthetic
cgccugugguaccagcugc

SEQ ID NO: 543891 - RNA, 20 nt, Artificial Sequence
  Synthetic
gcgccugugguaccagcugc

SEQ ID NO: 543892 - RNA, 21 nt, Artificial Sequence
  Synthetic
ggcgccugugguaccagcugc

SEQ ID NO: 543893 - RNA, 22 nt, Artificial Sequence
  Synthetic
aggcgccugugguaccagcugc

SEQ ID NO: 543894 - RNA, 23 nt, Artificial Sequence
  Synthetic
caggcgccugugguaccagcugc

SEQ ID NO: 543895 - RNA, 24 nt, Artificial Sequence
  Synthetic
gcaggcgccugugguaccagcugc

SEQ ID NO: 543896 - RNA, 18 nt, Artificial Sequence
  Synthetic
acuuaguuccccagcugc

SEQ ID NO: 543897 - RNA, 19 nt, Artificial Sequence
  Synthetic
gacuuaguuccccagcugc

SEQ ID NO: 543898 - RNA, 20 nt, Artificial Sequence
  Synthetic
ggacuuaguuccccagcugc

SEQ ID NO: 543899 - RNA, 21 nt, Artificial Sequence
  Synthetic
aggacuuaguuccccagcugc

SEQ ID NO: 543900 - RNA, 22 nt, Artificial Sequence
  Synthetic
aaggacuuaguuccccagcugc

SEQ ID NO: 543901 - RNA, 23 nt, Artificial Sequence
  Synthetic
gaaggacuuaguuccccagcugc

SEQ ID NO: 543902 - RNA, 24 nt, Artificial Sequence
  Synthetic
ugaaggacuuaguuccccagcugc

SEQ ID NO: 543903 - RNA, 18 nt, Artificial Sequence
  Synthetic
gccucuaaucccagcugc

SEQ ID NO: 543904 - RNA, 19 nt, Artificial Sequence
  Synthetic
cgccucuaaucccagcugc

SEQ ID NO: 543905 - RNA, 20 nt, Artificial Sequence
  Synthetic
gcgccucuaaucccagcugc

SEQ ID NO: 543906 - RNA, 21 nt, Artificial Sequence
  Synthetic
ggcgccucuaaucccagcugc

SEQ ID NO: 543907 - RNA, 22 nt, Artificial Sequence
  Synthetic
gggcgccucuaaucccagcugc

SEQ ID NO: 543908 - RNA, 23 nt, Artificial Sequence
  Synthetic
ugggcgccucuaaucccagcugc

SEQ ID NO: 543909 - RNA, 24 nt, Artificial Sequence
  Synthetic
gugggcgccucuaaucccagcugc

SEQ ID NO: 543910 - RNA, 18 nt, Artificial Sequence
  Synthetic
gccuguagucccagcugc

SEQ ID NO: 543911 - RNA, 19 nt, Artificial Sequence
  Synthetic
cgccuguagucccagcugc

SEQ ID NO: 543912 - RNA, 20 nt, Artificial Sequence
  Synthetic
gcgccuguagucccagcugc

SEQ ID NO: 543913 - RNA, 21 nt, Artificial Sequence
  Synthetic
ggcgccuguagucccagcugc

SEQ ID NO: 543914 - RNA, 22 nt, Artificial Sequence
  Synthetic
gggcgccuguagucccagcugc

SEQ ID NO: 543915 - RNA, 23 nt, Artificial Sequence
  Synthetic
cgggcgccuguagucccagcugc

SEQ ID NO: 543916 - RNA, 24 nt, Artificial Sequence
  Synthetic
gcgggcgccuguagucccagcugc

SEQ ID NO: 543917 - RNA, 18 nt, Artificial Sequence
  Synthetic
uuaauguaguucagcugc

SEQ ID NO: 543918 - RNA, 19 nt, Artificial Sequence
  Synthetic
auuaauguaguucagcugc

SEQ ID NO: 543919 - RNA, 20 nt, Artificial Sequence
  Synthetic
aauuaauguaguucagcugc

SEQ ID NO: 543920 - RNA, 21 nt, Artificial Sequence
  Synthetic
aaauuaauguaguucagcugc

SEQ ID NO: 543921 - RNA, 22 nt, Artificial Sequence
  Synthetic
aaaauuaauguaguucagcugc

SEQ ID NO: 543922 - RNA, 23 nt, Artificial Sequence
  Synthetic
gaaaauuaauguaguucagcugc

SEQ ID NO: 543923 - RNA, 24 nt, Artificial Sequence
  Synthetic
ugaaaauuaauguaguucagcugc

SEQ ID NO: 543924 - RNA, 18 nt, Artificial Sequence
  Synthetic
ucaugguugaggagcugc

SEQ ID NO: 543925 - RNA, 19 nt, Artificial Sequence
  Synthetic
cucaugguugaggagcugc

SEQ ID NO: 543926 - RNA, 20 nt, Artificial Sequence
  Synthetic
gcucaugguugaggagcugc

SEQ ID NO: 543927 - RNA, 21 nt, Artificial Sequence
  Synthetic
agcucaugguugaggagcugc

SEQ ID NO: 543928 - RNA, 22 nt, Artificial Sequence
  Synthetic
cagcucaugguugaggagcugc

SEQ ID NO: 543929 - RNA, 23 nt, Artificial Sequence
  Synthetic
acagcucaugguugaggagcugc

SEQ ID NO: 543930 - RNA, 24 nt, Artificial Sequence
  Synthetic
aacagcucaugguugaggagcugc

SEQ ID NO: 543931 - RNA, 18 nt, Artificial Sequence
  Synthetic
auuaccgggaauagcugc

SEQ ID NO: 543932 - RNA, 19 nt, Artificial Sequence
  Synthetic
gauuaccgggaauagcugc

SEQ ID NO: 543933 - RNA, 20 nt, Artificial Sequence
  Synthetic
agauuaccgggaauagcugc

SEQ ID NO: 543934 - RNA, 21 nt, Artificial Sequence
  Synthetic
uagauuaccgggaauagcugc

SEQ ID NO: 543935 - RNA, 22 nt, Artificial Sequence
  Synthetic
uuagauuaccgggaauagcugc

SEQ ID NO: 543936 - RNA, 23 nt, Artificial Sequence
  Synthetic
auuagauuaccgggaauagcugc

SEQ ID NO: 543937 - RNA, 24 nt, Artificial Sequence
  Synthetic
gauuagauuaccgggaauagcugc

SEQ ID NO: 543938 - RNA, 18 nt, Artificial Sequence
  Synthetic
caaaugcugaauagcugc

SEQ ID NO: 543939 - RNA, 19 nt, Artificial Sequence
  Synthetic
ccaaaugcugaauagcugc

SEQ ID NO: 543940 - RNA, 20 nt, Artificial Sequence
  Synthetic
accaaaugcugaauagcugc

SEQ ID NO: 543941 - RNA, 21 nt, Artificial Sequence
  Synthetic
caccaaaugcugaauagcugc

SEQ ID NO: 543942 - RNA, 22 nt, Artificial Sequence
  Synthetic
acaccaaaugcugaauagcugc

SEQ ID NO: 543943 - RNA, 23 nt, Artificial Sequence
  Synthetic
uacaccaaaugcugaauagcugc

SEQ ID NO: 543944 - RNA, 24 nt, Artificial Sequence
  Synthetic
auacaccaaaugcugaauagcugc

SEQ ID NO: 543945 - RNA, 18 nt, Artificial Sequence
  Synthetic
aaggagaaacauagcugc

SEQ ID NO: 543946 - RNA, 19 nt, Artificial Sequence
  Synthetic
aaaggagaaacauagcugc

SEQ ID NO: 543947 - RNA, 20 nt, Artificial Sequence
  Synthetic
gaaaggagaaacauagcugc

SEQ ID NO: 543948 - RNA, 21 nt, Artificial Sequence
  Synthetic
agaaaggagaaacauagcugc

SEQ ID NO: 543949 - RNA, 22 nt, Artificial Sequence
  Synthetic
aagaaaggagaaacauagcugc

SEQ ID NO: 543950 - RNA, 23 nt, Artificial Sequence
  Synthetic
gaagaaaggagaaacauagcugc

SEQ ID NO: 543951 - RNA, 24 nt, Artificial Sequence
  Synthetic
ugaagaaaggagaaacauagcugc

SEQ ID NO: 543952 - RNA, 18 nt, Artificial Sequence
  Synthetic
uaaagaugauguagcugc

SEQ ID NO: 543953 - RNA, 19 nt, Artificial Sequence
  Synthetic
auaaagaugauguagcugc

SEQ ID NO: 543954 - RNA, 20 nt, Artificial Sequence
  Synthetic
uauaaagaugauguagcugc

SEQ ID NO: 543955 - RNA, 21 nt, Artificial Sequence
  Synthetic
guauaaagaugauguagcugc

SEQ ID NO: 543956 - RNA, 22 nt, Artificial Sequence
  Synthetic
aguauaaagaugauguagcugc

SEQ ID NO: 543957 - RNA, 23 nt, Artificial Sequence
  Synthetic
gaguauaaagaugauguagcugc

SEQ ID NO: 543958 - RNA, 24 nt, Artificial Sequence
  Synthetic
ggaguauaaagaugauguagcugc

SEQ ID NO: 543959 - RNA, 18 nt, Artificial Sequence
  Synthetic
caauuccuuuguagcugc

SEQ ID NO: 543960 - RNA, 19 nt, Artificial Sequence
  Synthetic
ucaauuccuuuguagcugc

SEQ ID NO: 543961 - RNA, 20 nt, Artificial Sequence
  Synthetic
cucaauuccuuuguagcugc

SEQ ID NO: 543962 - RNA, 21 nt, Artificial Sequence
  Synthetic
acucaauuccuuuguagcugc

SEQ ID NO: 543963 - RNA, 22 nt, Artificial Sequence
  Synthetic
aacucaauuccuuuguagcugc

SEQ ID NO: 543964 - RNA, 23 nt, Artificial Sequence
  Synthetic
uaacucaauuccuuuguagcugc

SEQ ID NO: 543965 - RNA, 24 nt, Artificial Sequence
  Synthetic
cuaacucaauuccuuuguagcugc

SEQ ID NO: 543966 - RNA, 18 nt, Artificial Sequence
  Synthetic
aaauacaauauuagcugc

SEQ ID NO: 543967 - RNA, 19 nt, Artificial Sequence
  Synthetic
aaaauacaauauuagcugc

SEQ ID NO: 543968 - RNA, 20 nt, Artificial Sequence
  Synthetic
gaaaauacaauauuagcugc

SEQ ID NO: 543969 - RNA, 21 nt, Artificial Sequence
  Synthetic
agaaaauacaauauuagcugc

SEQ ID NO: 543970 - RNA, 22 nt, Artificial Sequence
  Synthetic
uagaaaauacaauauuagcugc

SEQ ID NO: 543971 - RNA, 23 nt, Artificial Sequence
  Synthetic
auagaaaauacaauauuagcugc

SEQ ID NO: 543972 - RNA, 24 nt, Artificial Sequence
  Synthetic
uauagaaaauacaauauuagcugc

SEQ ID NO: 543973 - RNA, 18 nt, Artificial Sequence
  Synthetic
gggaccacuguuagcugc

SEQ ID NO: 543974 - RNA, 19 nt, Artificial Sequence
  Synthetic
ugggaccacuguuagcugc

SEQ ID NO: 543975 - RNA, 20 nt, Artificial Sequence
  Synthetic
gugggaccacuguuagcugc

SEQ ID NO: 543976 - RNA, 21 nt, Artificial Sequence
  Synthetic
ggugggaccacuguuagcugc

SEQ ID NO: 543977 - RNA, 22 nt, Artificial Sequence
  Synthetic
gggugggaccacuguuagcugc

SEQ ID NO: 543978 - RNA, 23 nt, Artificial Sequence
  Synthetic
agggugggaccacuguuagcugc

SEQ ID NO: 543979 - RNA, 24 nt, Artificial Sequence
  Synthetic
gagggugggaccacuguuagcugc

SEQ ID NO: 543980 - RNA, 18 nt, Artificial Sequence
  Synthetic
uuggggagugaaggcugc

SEQ ID NO: 543981 - RNA, 19 nt, Artificial Sequence
  Synthetic
uuuggggagugaaggcugc

SEQ ID NO: 543982 - RNA, 20 nt, Artificial Sequence
  Synthetic
uuuuggggagugaaggcugc

SEQ ID NO: 543983 - RNA, 21 nt, Artificial Sequence
  Synthetic
cuuuuggggagugaaggcugc

SEQ ID NO: 543984 - RNA, 22 nt, Artificial Sequence
  Synthetic
ucuuuuggggagugaaggcugc

SEQ ID NO: 543985 - RNA, 23 nt, Artificial Sequence
  Synthetic
aucuuuuggggagugaaggcugc

SEQ ID NO: 543986 - RNA, 24 nt, Artificial Sequence
  Synthetic
uaucuuuuggggagugaaggcugc

SEQ ID NO: 543987 - RNA, 18 nt, Artificial Sequence
  Synthetic
gaaugcagggcaggcugc

SEQ ID NO: 543988 - RNA, 19 nt, Artificial Sequence
  Synthetic
ggaaugcagggcaggcugc

SEQ ID NO: 543989 - RNA, 20 nt, Artificial Sequence
  Synthetic
gggaaugcagggcaggcugc

SEQ ID NO: 543990 - RNA, 21 nt, Artificial Sequence
  Synthetic
ugggaaugcagggcaggcugc

SEQ ID NO: 543991 - RNA, 22 nt, Artificial Sequence
  Synthetic
uugggaaugcagggcaggcugc

SEQ ID NO: 543992 - RNA, 23 nt, Artificial Sequence
  Synthetic
auugggaaugcagggcaggcugc

SEQ ID NO: 543993 - RNA, 24 nt, Artificial Sequence
  Synthetic
gauugggaaugcagggcaggcugc

SEQ ID NO: 543994 - RNA, 18 nt, Artificial Sequence
  Synthetic
ucuucuguguggggcugc

SEQ ID NO: 543995 - RNA, 19 nt, Artificial Sequence
  Synthetic
cucuucuguguggggcugc

SEQ ID NO: 543996 - RNA, 20 nt, Artificial Sequence
  Synthetic
acucuucuguguggggcugc

SEQ ID NO: 543997 - RNA, 21 nt, Artificial Sequence
  Synthetic
aacucuucuguguggggcugc

SEQ ID NO: 543998 - RNA, 22 nt, Artificial Sequence
  Synthetic
aaacucuucuguguggggcugc

SEQ ID NO: 543999 - RNA, 23 nt, Artificial Sequence
  Synthetic
gaaacucuucuguguggggcugc

SEQ ID NO: 544000 - RNA, 24 nt, Artificial Sequence
  Synthetic
agaaacucuucuguguggggcugc

SEQ ID NO: 544001 - RNA, 18 nt, Artificial Sequence
  Synthetic
gaugcuaagcugggcugc

SEQ ID NO: 544002 - RNA, 19 nt, Artificial Sequence
  Synthetic
agaugcuaagcugggcugc

SEQ ID NO: 544003 - RNA, 20 nt, Artificial Sequence
  Synthetic
uagaugcuaagcugggcugc

SEQ ID NO: 544004 - RNA, 21 nt, Artificial Sequence
  Synthetic
guagaugcuaagcugggcugc

SEQ ID NO: 544005 - RNA, 22 nt, Artificial Sequence
  Synthetic
aguagaugcuaagcugggcugc

SEQ ID NO: 544006 - RNA, 23 nt, Artificial Sequence
  Synthetic
uaguagaugcuaagcugggcugc

SEQ ID NO: 544007 - RNA, 24 nt, Artificial Sequence
  Synthetic
auaguagaugcuaagcugggcugc

SEQ ID NO: 544008 - RNA, 18 nt, Artificial Sequence
  Synthetic
uagagaaggaauggcugc

SEQ ID NO: 544009 - RNA, 19 nt, Artificial Sequence
  Synthetic
cuagagaaggaauggcugc

SEQ ID NO: 544010 - RNA, 20 nt, Artificial Sequence
  Synthetic
ucuagagaaggaauggcugc

SEQ ID NO: 544011 - RNA, 21 nt, Artificial Sequence
  Synthetic
cucuagagaaggaauggcugc

SEQ ID NO: 544012 - RNA, 22 nt, Artificial Sequence
  Synthetic
gcucuagagaaggaauggcugc

SEQ ID NO: 544013 - RNA, 23 nt, Artificial Sequence
  Synthetic
ugcucuagagaaggaauggcugc

SEQ ID NO: 544014 - RNA, 24 nt, Artificial Sequence
  Synthetic
uugcucuagagaaggaauggcugc

SEQ ID NO: 544015 - RNA, 18 nt, Artificial Sequence
  Synthetic
aaucugagaaguggcugc

SEQ ID NO: 544016 - RNA, 19 nt, Artificial Sequence
  Synthetic
gaaucugagaaguggcugc

SEQ ID NO: 544017 - RNA, 20 nt, Artificial Sequence
  Synthetic
agaaucugagaaguggcugc

SEQ ID NO: 544018 - RNA, 21 nt, Artificial Sequence
  Synthetic
uagaaucugagaaguggcugc

SEQ ID NO: 544019 - RNA, 22 nt, Artificial Sequence
  Synthetic
guagaaucugagaaguggcugc

SEQ ID NO: 544020 - RNA, 23 nt, Artificial Sequence
  Synthetic
aguagaaucugagaaguggcugc

SEQ ID NO: 544021 - RNA, 24 nt, Artificial Sequence
  Synthetic
uaguagaaucugagaaguggcugc

SEQ ID NO: 544022 - RNA, 18 nt, Artificial Sequence
  Synthetic
aagucucaaaaaugcugc

SEQ ID NO: 544023 - RNA, 19 nt, Artificial Sequence
  Synthetic
uaagucucaaaaaugcugc

SEQ ID NO: 544024 - RNA, 20 nt, Artificial Sequence
  Synthetic
uuaagucucaaaaaugcugc

SEQ ID NO: 544025 - RNA, 21 nt, Artificial Sequence
  Synthetic
auuaagucucaaaaaugcugc

SEQ ID NO: 544026 - RNA, 22 nt, Artificial Sequence
  Synthetic
aauuaagucucaaaaaugcugc

SEQ ID NO: 544027 - RNA, 23 nt, Artificial Sequence
  Synthetic
uaauuaagucucaaaaaugcugc

SEQ ID NO: 544028 - RNA, 24 nt, Artificial Sequence
  Synthetic
uuaauuaagucucaaaaaugcugc

SEQ ID NO: 544029 - RNA, 18 nt, Artificial Sequence
  Synthetic
aagcugacugaaugcugc

SEQ ID NO: 544030 - RNA, 19 nt, Artificial Sequence
  Synthetic
caagcugacugaaugcugc

SEQ ID NO: 544031 - RNA, 20 nt, Artificial Sequence
  Synthetic
gcaagcugacugaaugcugc

SEQ ID NO: 544032 - RNA, 21 nt, Artificial Sequence
  Synthetic
agcaagcugacugaaugcugc

SEQ ID NO: 544033 - RNA, 22 nt, Artificial Sequence
  Synthetic
gagcaagcugacugaaugcugc

SEQ ID NO: 544034 - RNA, 23 nt, Artificial Sequence
  Synthetic
agagcaagcugacugaaugcugc

SEQ ID NO: 544035 - RNA, 24 nt, Artificial Sequence
  Synthetic
gagagcaagcugacugaaugcugc

SEQ ID NO: 544036 - RNA, 18 nt, Artificial Sequence
  Synthetic
caccaucgaacaugcugc

SEQ ID NO: 544037 - RNA, 19 nt, Artificial Sequence
  Synthetic
ccaccaucgaacaugcugc

SEQ ID NO: 544038 - RNA, 20 nt, Artificial Sequence
  Synthetic
gccaccaucgaacaugcugc

SEQ ID NO: 544039 - RNA, 21 nt, Artificial Sequence
  Synthetic
agccaccaucgaacaugcugc

SEQ ID NO: 544040 - RNA, 22 nt, Artificial Sequence
  Synthetic
aagccaccaucgaacaugcugc

SEQ ID NO: 544041 - RNA, 23 nt, Artificial Sequence
  Synthetic
uaagccaccaucgaacaugcugc

SEQ ID NO: 544042 - RNA, 24 nt, Artificial Sequence
  Synthetic
uuaagccaccaucgaacaugcugc

SEQ ID NO: 544043 - RNA, 18 nt, Artificial Sequence
  Synthetic
cuugaauccagaugcugc

SEQ ID NO: 544044 - RNA, 19 nt, Artificial Sequence
  Synthetic
ucuugaauccagaugcugc

SEQ ID NO: 544045 - RNA, 20 nt, Artificial Sequence
  Synthetic
cucuugaauccagaugcugc

SEQ ID NO: 544046 - RNA, 21 nt, Artificial Sequence
  Synthetic
ucucuugaauccagaugcugc

SEQ ID NO: 544047 - RNA, 22 nt, Artificial Sequence
  Synthetic
uucucuugaauccagaugcugc

SEQ ID NO: 544048 - RNA, 23 nt, Artificial Sequence
  Synthetic
guucucuugaauccagaugcugc

SEQ ID NO: 544049 - RNA, 24 nt, Artificial Sequence
  Synthetic
aguucucuugaauccagaugcugc

SEQ ID NO: 544050 - RNA, 18 nt, Artificial Sequence
  Synthetic
caugguuugaacugcugc

SEQ ID NO: 544051 - RNA, 19 nt, Artificial Sequence
  Synthetic
ccaugguuugaacugcugc

SEQ ID NO: 544052 - RNA, 20 nt, Artificial Sequence
  Synthetic
uccaugguuugaacugcugc

SEQ ID NO: 544053 - RNA, 21 nt, Artificial Sequence
  Synthetic
uuccaugguuugaacugcugc

SEQ ID NO: 544054 - RNA, 22 nt, Artificial Sequence
  Synthetic
guuccaugguuugaacugcugc

SEQ ID NO: 544055 - RNA, 23 nt, Artificial Sequence
  Synthetic
aguuccaugguuugaacugcugc

SEQ ID NO: 544056 - RNA, 24 nt, Artificial Sequence
  Synthetic
aaguuccaugguuugaacugcugc

SEQ ID NO: 544057 - RNA, 18 nt, Artificial Sequence
  Synthetic
gcauagauucacugcugc

SEQ ID NO: 544058 - RNA, 19 nt, Artificial Sequence
  Synthetic
agcauagauucacugcugc

SEQ ID NO: 544059 - RNA, 20 nt, Artificial Sequence
  Synthetic
gagcauagauucacugcugc

SEQ ID NO: 544060 - RNA, 21 nt, Artificial Sequence
  Synthetic
ggagcauagauucacugcugc

SEQ ID NO: 544061 - RNA, 22 nt, Artificial Sequence
  Synthetic
gggagcauagauucacugcugc

SEQ ID NO: 544062 - RNA, 23 nt, Artificial Sequence
  Synthetic
ugggagcauagauucacugcugc

SEQ ID NO: 544063 - RNA, 24 nt, Artificial Sequence
  Synthetic
uugggagcauagauucacugcugc

SEQ ID NO: 544064 - RNA, 18 nt, Artificial Sequence
  Synthetic
uuaugaaaacagugcugc

SEQ ID NO: 544065 - RNA, 19 nt, Artificial Sequence
  Synthetic
auuaugaaaacagugcugc

SEQ ID NO: 544066 - RNA, 20 nt, Artificial Sequence
  Synthetic
gauuaugaaaacagugcugc

SEQ ID NO: 544067 - RNA, 21 nt, Artificial Sequence
  Synthetic
ggauuaugaaaacagugcugc

SEQ ID NO: 544068 - RNA, 22 nt, Artificial Sequence
  Synthetic
gggauuaugaaaacagugcugc

SEQ ID NO: 544069 - RNA, 23 nt, Artificial Sequence
  Synthetic
ggggauuaugaaaacagugcugc

SEQ ID NO: 544070 - RNA, 24 nt, Artificial Sequence
  Synthetic
uggggauuaugaaaacagugcugc

SEQ ID NO: 544071 - RNA, 18 nt, Artificial Sequence
  Synthetic
gagaaagcucagugcugc

SEQ ID NO: 544072 - RNA, 19 nt, Artificial Sequence
  Synthetic
ugagaaagcucagugcugc

SEQ ID NO: 544073 - RNA, 20 nt, Artificial Sequence
  Synthetic
uugagaaagcucagugcugc

SEQ ID NO: 544074 - RNA, 21 nt, Artificial Sequence
  Synthetic
cuugagaaagcucagugcugc

SEQ ID NO: 544075 - RNA, 22 nt, Artificial Sequence
  Synthetic
gcuugagaaagcucagugcugc

SEQ ID NO: 544076 - RNA, 23 nt, Artificial Sequence
  Synthetic
ugcuugagaaagcucagugcugc

SEQ ID NO: 544077 - RNA, 24 nt, Artificial Sequence
  Synthetic
cugcuugagaaagcucagugcugc

SEQ ID NO: 544078 - RNA, 18 nt, Artificial Sequence
  Synthetic
agcuguccauggugcugc

SEQ ID NO: 544079 - RNA, 19 nt, Artificial Sequence
  Synthetic
gagcuguccauggugcugc

SEQ ID NO: 544080 - RNA, 20 nt, Artificial Sequence
  Synthetic
ggagcuguccauggugcugc

SEQ ID NO: 544081 - RNA, 21 nt, Artificial Sequence
  Synthetic
cggagcuguccauggugcugc

SEQ ID NO: 544082 - RNA, 22 nt, Artificial Sequence
  Synthetic
ucggagcuguccauggugcugc

SEQ ID NO: 544083 - RNA, 23 nt, Artificial Sequence
  Synthetic
cucggagcuguccauggugcugc

SEQ ID NO: 544084 - RNA, 24 nt, Artificial Sequence
  Synthetic
ccucggagcuguccauggugcugc

SEQ ID NO: 544085 - RNA, 18 nt, Artificial Sequence
  Synthetic
auguugaacuugugcugc

SEQ ID NO: 544086 - RNA, 19 nt, Artificial Sequence
  Synthetic
gauguugaacuugugcugc

SEQ ID NO: 544087 - RNA, 20 nt, Artificial Sequence
  Synthetic
agauguugaacuugugcugc

SEQ ID NO: 544088 - RNA, 21 nt, Artificial Sequence
  Synthetic
cagauguugaacuugugcugc

SEQ ID NO: 544089 - RNA, 22 nt, Artificial Sequence
  Synthetic
gcagauguugaacuugugcugc

SEQ ID NO: 544090 - RNA, 23 nt, Artificial Sequence
  Synthetic
agcagauguugaacuugugcugc

SEQ ID NO: 544091 - RNA, 24 nt, Artificial Sequence
  Synthetic
gagcagauguugaacuugugcugc

SEQ ID NO: 544092 - RNA, 18 nt, Artificial Sequence
  Synthetic
cccaugagccuuugcugc

SEQ ID NO: 544093 - RNA, 19 nt, Artificial Sequence
  Synthetic
ucccaugagccuuugcugc

SEQ ID NO: 544094 - RNA, 20 nt, Artificial Sequence
  Synthetic
cucccaugagccuuugcugc

SEQ ID NO: 544095 - RNA, 21 nt, Artificial Sequence
  Synthetic
ccucccaugagccuuugcugc

SEQ ID NO: 544096 - RNA, 22 nt, Artificial Sequence
  Synthetic
accucccaugagccuuugcugc

SEQ ID NO: 544097 - RNA, 23 nt, Artificial Sequence
  Synthetic
uaccucccaugagccuuugcugc

SEQ ID NO: 544098 - RNA, 24 nt, Artificial Sequence
  Synthetic
guaccucccaugagccuuugcugc

SEQ ID NO: 544099 - RNA, 18 nt, Artificial Sequence
  Synthetic
aaccacuagguuugcugc

SEQ ID NO: 544100 - RNA, 19 nt, Artificial Sequence
  Synthetic
caaccacuagguuugcugc

SEQ ID NO: 544101 - RNA, 20 nt, Artificial Sequence
  Synthetic
acaaccacuagguuugcugc

SEQ ID NO: 544102 - RNA, 21 nt, Artificial Sequence
  Synthetic
aacaaccacuagguuugcugc

SEQ ID NO: 544103 - RNA, 22 nt, Artificial Sequence
  Synthetic
uaacaaccacuagguuugcugc

SEQ ID NO: 544104 - RNA, 23 nt, Artificial Sequence
  Synthetic
auaacaaccacuagguuugcugc

SEQ ID NO: 544105 - RNA, 24 nt, Artificial Sequence
  Synthetic
gauaacaaccacuagguuugcugc

SEQ ID NO: 544106 - RNA, 18 nt, Artificial Sequence
  Synthetic
ugauccuucuuuugcugc

SEQ ID NO: 544107 - RNA, 19 nt, Artificial Sequence
  Synthetic
gugauccuucuuuugcugc

SEQ ID NO: 544108 - RNA, 20 nt, Artificial Sequence
  Synthetic
agugauccuucuuuugcugc

SEQ ID NO: 544109 - RNA, 21 nt, Artificial Sequence
  Synthetic
aagugauccuucuuuugcugc

SEQ ID NO: 544110 - RNA, 22 nt, Artificial Sequence
  Synthetic
uaagugauccuucuuuugcugc

SEQ ID NO: 544111 - RNA, 23 nt, Artificial Sequence
  Synthetic
cuaagugauccuucuuuugcugc

SEQ ID NO: 544112 - RNA, 24 nt, Artificial Sequence
  Synthetic
ccuaagugauccuucuuuugcugc

SEQ ID NO: 544113 - RNA, 18 nt, Artificial Sequence
  Synthetic
auaauuauuuuaaucugc

SEQ ID NO: 544114 - RNA, 19 nt, Artificial Sequence
  Synthetic
uauaauuauuuuaaucugc

SEQ ID NO: 544115 - RNA, 20 nt, Artificial Sequence
  Synthetic
cuauaauuauuuuaaucugc

SEQ ID NO: 544116 - RNA, 21 nt, Artificial Sequence
  Synthetic
gcuauaauuauuuuaaucugc

SEQ ID NO: 544117 - RNA, 22 nt, Artificial Sequence
  Synthetic
agcuauaauuauuuuaaucugc

SEQ ID NO: 544118 - RNA, 23 nt, Artificial Sequence
  Synthetic
uagcuauaauuauuuuaaucugc

SEQ ID NO: 544119 - RNA, 24 nt, Artificial Sequence
  Synthetic
guagcuauaauuauuuuaaucugc

SEQ ID NO: 544120 - RNA, 18 nt, Artificial Sequence
  Synthetic
cacuaagaaaccaucugc

SEQ ID NO: 544121 - RNA, 19 nt, Artificial Sequence
  Synthetic
ucacuaagaaaccaucugc

SEQ ID NO: 544122 - RNA, 20 nt, Artificial Sequence
  Synthetic
cucacuaagaaaccaucugc

SEQ ID NO: 544123 - RNA, 21 nt, Artificial Sequence
  Synthetic
acucacuaagaaaccaucugc

SEQ ID NO: 544124 - RNA, 22 nt, Artificial Sequence
  Synthetic
cacucacuaagaaaccaucugc

SEQ ID NO: 544125 - RNA, 23 nt, Artificial Sequence
  Synthetic
gcacucacuaagaaaccaucugc

SEQ ID NO: 544126 - RNA, 24 nt, Artificial Sequence
  Synthetic
agcacucacuaagaaaccaucugc

SEQ ID NO: 544127 - RNA, 18 nt, Artificial Sequence
  Synthetic
gcauaguauuccaucugc

SEQ ID NO: 544128 - RNA, 19 nt, Artificial Sequence
  Synthetic
ugcauaguauuccaucugc

SEQ ID NO: 544129 - RNA, 20 nt, Artificial Sequence
  Synthetic
augcauaguauuccaucugc

SEQ ID NO: 544130 - RNA, 21 nt, Artificial Sequence
  Synthetic
uaugcauaguauuccaucugc

SEQ ID NO: 544131 - RNA, 22 nt, Artificial Sequence
  Synthetic
uuaugcauaguauuccaucugc

SEQ ID NO: 544132 - RNA, 23 nt, Artificial Sequence
  Synthetic
uuuaugcauaguauuccaucugc

SEQ ID NO: 544133 - RNA, 24 nt, Artificial Sequence
  Synthetic
cuuuaugcauaguauuccaucugc

SEQ ID NO: 544134 - RNA, 18 nt, Artificial Sequence
  Synthetic
caaacauucacgaucugc

SEQ ID NO: 544135 - RNA, 19 nt, Artificial Sequence
  Synthetic
acaaacauucacgaucugc

SEQ ID NO: 544136 - RNA, 20 nt, Artificial Sequence
  Synthetic
aacaaacauucacgaucugc

SEQ ID NO: 544137 - RNA, 21 nt, Artificial Sequence
  Synthetic
caacaaacauucacgaucugc

SEQ ID NO: 544138 - RNA, 22 nt, Artificial Sequence
  Synthetic
ucaacaaacauucacgaucugc

SEQ ID NO: 544139 - RNA, 23 nt, Artificial Sequence
  Synthetic
aucaacaaacauucacgaucugc

SEQ ID NO: 544140 - RNA, 24 nt, Artificial Sequence
  Synthetic
uaucaacaaacauucacgaucugc

SEQ ID NO: 544141 - RNA, 18 nt, Artificial Sequence
  Synthetic
auacaauguucccucugc

SEQ ID NO: 544142 - RNA, 19 nt, Artificial Sequence
  Synthetic
cauacaauguucccucugc

SEQ ID NO: 544143 - RNA, 20 nt, Artificial Sequence
  Synthetic
ucauacaauguucccucugc

SEQ ID NO: 544144 - RNA, 21 nt, Artificial Sequence
  Synthetic
aucauacaauguucccucugc

SEQ ID NO: 544145 - RNA, 22 nt, Artificial Sequence
  Synthetic
caucauacaauguucccucugc

SEQ ID NO: 544146 - RNA, 23 nt, Artificial Sequence
  Synthetic
ucaucauacaauguucccucugc

SEQ ID NO: 544147 - RNA, 24 nt, Artificial Sequence
  Synthetic
uucaucauacaauguucccucugc

SEQ ID NO: 544148 - RNA, 18 nt, Artificial Sequence
  Synthetic
auacacuguucccucugc

SEQ ID NO: 544149 - RNA, 19 nt, Artificial Sequence
  Synthetic
gauacacuguucccucugc

SEQ ID NO: 544150 - RNA, 20 nt, Artificial Sequence
  Synthetic
agauacacuguucccucugc

SEQ ID NO: 544151 - RNA, 21 nt, Artificial Sequence
  Synthetic
cagauacacuguucccucugc

SEQ ID NO: 544152 - RNA, 22 nt, Artificial Sequence
  Synthetic
ucagauacacuguucccucugc

SEQ ID NO: 544153 - RNA, 23 nt, Artificial Sequence
  Synthetic
uucagauacacuguucccucugc

SEQ ID NO: 544154 - RNA, 24 nt, Artificial Sequence
  Synthetic
cuucagauacacuguucccucugc

SEQ ID NO: 544155 - RNA, 18 nt, Artificial Sequence
  Synthetic
ugcccuuguuuccucugc

SEQ ID NO: 544156 - RNA, 19 nt, Artificial Sequence
  Synthetic
uugcccuuguuuccucugc

SEQ ID NO: 544157 - RNA, 20 nt, Artificial Sequence
  Synthetic
cuugcccuuguuuccucugc

SEQ ID NO: 544158 - RNA, 21 nt, Artificial Sequence
  Synthetic
ccuugcccuuguuuccucugc

SEQ ID NO: 544159 - RNA, 22 nt, Artificial Sequence
  Synthetic
cccuugcccuuguuuccucugc

SEQ ID NO: 544160 - RNA, 23 nt, Artificial Sequence
  Synthetic
gcccuugcccuuguuuccucugc

SEQ ID NO: 544161 - RNA, 24 nt, Artificial Sequence
  Synthetic
ugcccuugcccuuguuuccucugc

SEQ ID NO: 544162 - RNA, 18 nt, Artificial Sequence
  Synthetic
uccucacaaaagcucugc

SEQ ID NO: 544163 - RNA, 19 nt, Artificial Sequence
  Synthetic
auccucacaaaagcucugc

SEQ ID NO: 544164 - RNA, 20 nt, Artificial Sequence
  Synthetic
gauccucacaaaagcucugc

SEQ ID NO: 544165 - RNA, 21 nt, Artificial Sequence
  Synthetic
agauccucacaaaagcucugc

SEQ ID NO: 544166 - RNA, 22 nt, Artificial Sequence
  Synthetic
aagauccucacaaaagcucugc

SEQ ID NO: 544167 - RNA, 23 nt, Artificial Sequence
  Synthetic
uaagauccucacaaaagcucugc

SEQ ID NO: 544168 - RNA, 24 nt, Artificial Sequence
  Synthetic
auaagauccucacaaaagcucugc

SEQ ID NO: 544169 - RNA, 18 nt, Artificial Sequence
  Synthetic
gauucaaauaggcucugc

SEQ ID NO: 544170 - RNA, 19 nt, Artificial Sequence
  Synthetic
ugauucaaauaggcucugc

SEQ ID NO: 544171 - RNA, 20 nt, Artificial Sequence
  Synthetic
augauucaaauaggcucugc

SEQ ID NO: 544172 - RNA, 21 nt, Artificial Sequence
  Synthetic
uaugauucaaauaggcucugc

SEQ ID NO: 544173 - RNA, 22 nt, Artificial Sequence
  Synthetic
auaugauucaaauaggcucugc

SEQ ID NO: 544174 - RNA, 23 nt, Artificial Sequence
  Synthetic
aauaugauucaaauaggcucugc

SEQ ID NO: 544175 - RNA, 24 nt, Artificial Sequence
  Synthetic
caauaugauucaaauaggcucugc

SEQ ID NO: 544176 - RNA, 18 nt, Artificial Sequence
  Synthetic
aaaugacaacaucucugc

SEQ ID NO: 544177 - RNA, 19 nt, Artificial Sequence
  Synthetic
aaaaugacaacaucucugc

SEQ ID NO: 544178 - RNA, 20 nt, Artificial Sequence
  Synthetic
aaaaaugacaacaucucugc

SEQ ID NO: 544179 - RNA, 21 nt, Artificial Sequence
  Synthetic
caaaaaugacaacaucucugc

SEQ ID NO: 544180 - RNA, 22 nt, Artificial Sequence
  Synthetic
acaaaaaugacaacaucucugc

SEQ ID NO: 544181 - RNA, 23 nt, Artificial Sequence
  Synthetic
gacaaaaaugacaacaucucugc

SEQ ID NO: 544182 - RNA, 24 nt, Artificial Sequence
  Synthetic
ugacaaaaaugacaacaucucugc

SEQ ID NO: 544183 - RNA, 18 nt, Artificial Sequence
  Synthetic
aacuucuugccucucugc

SEQ ID NO: 544184 - RNA, 19 nt, Artificial Sequence
  Synthetic
caacuucuugccucucugc

SEQ ID NO: 544185 - RNA, 20 nt, Artificial Sequence
  Synthetic
ccaacuucuugccucucugc

SEQ ID NO: 544186 - RNA, 21 nt, Artificial Sequence
  Synthetic
uccaacuucuugccucucugc

SEQ ID NO: 544187 - RNA, 22 nt, Artificial Sequence
  Synthetic
uuccaacuucuugccucucugc

SEQ ID NO: 544188 - RNA, 23 nt, Artificial Sequence
  Synthetic
guuccaacuucuugccucucugc

SEQ ID NO: 544189 - RNA, 24 nt, Artificial Sequence
  Synthetic
uguuccaacuucuugccucucugc

SEQ ID NO: 544190 - RNA, 18 nt, Artificial Sequence
  Synthetic
cuagucaucauucucugc

SEQ ID NO: 544191 - RNA, 19 nt, Artificial Sequence
  Synthetic
gcuagucaucauucucugc

SEQ ID NO: 544192 - RNA, 20 nt, Artificial Sequence
  Synthetic
ugcuagucaucauucucugc

SEQ ID NO: 544193 - RNA, 21 nt, Artificial Sequence
  Synthetic
gugcuagucaucauucucugc

SEQ ID NO: 544194 - RNA, 22 nt, Artificial Sequence
  Synthetic
ggugcuagucaucauucucugc

SEQ ID NO: 544195 - RNA, 23 nt, Artificial Sequence
  Synthetic
aggugcuagucaucauucucugc

SEQ ID NO: 544196 - RNA, 24 nt, Artificial Sequence
  Synthetic
aaggugcuagucaucauucucugc

SEQ ID NO: 544197 - RNA, 18 nt, Artificial Sequence
  Synthetic
auaaacacagaagucugc

SEQ ID NO: 544198 - RNA, 19 nt, Artificial Sequence
  Synthetic
aauaaacacagaagucugc

SEQ ID NO: 544199 - RNA, 20 nt, Artificial Sequence
  Synthetic
caauaaacacagaagucugc

SEQ ID NO: 544200 - RNA, 21 nt, Artificial Sequence
  Synthetic
acaauaaacacagaagucugc

SEQ ID NO: 544201 - RNA, 22 nt, Artificial Sequence
  Synthetic
aacaauaaacacagaagucugc

SEQ ID NO: 544202 - RNA, 23 nt, Artificial Sequence
  Synthetic
gaacaauaaacacagaagucugc

SEQ ID NO: 544203 - RNA, 24 nt, Artificial Sequence
  Synthetic
agaacaauaaacacagaagucugc

SEQ ID NO: 544204 - RNA, 18 nt, Artificial Sequence
  Synthetic
caucauacaaaggucugc

SEQ ID NO: 544205 - RNA, 19 nt, Artificial Sequence
  Synthetic
ucaucauacaaaggucugc

SEQ ID NO: 544206 - RNA, 20 nt, Artificial Sequence
  Synthetic
aucaucauacaaaggucugc

SEQ ID NO: 544207 - RNA, 21 nt, Artificial Sequence
  Synthetic
caucaucauacaaaggucugc

SEQ ID NO: 544208 - RNA, 22 nt, Artificial Sequence
  Synthetic
ucaucaucauacaaaggucugc

SEQ ID NO: 544209 - RNA, 23 nt, Artificial Sequence
  Synthetic
gucaucaucauacaaaggucugc

SEQ ID NO: 544210 - RNA, 24 nt, Artificial Sequence
  Synthetic
cgucaucaucauacaaaggucugc

SEQ ID NO: 544211 - RNA, 18 nt, Artificial Sequence
  Synthetic
agaaguugaccugucugc

SEQ ID NO: 544212 - RNA, 19 nt, Artificial Sequence
  Synthetic
aagaaguugaccugucugc

SEQ ID NO: 544213 - RNA, 20 nt, Artificial Sequence
  Synthetic
gaagaaguugaccugucugc

SEQ ID NO: 544214 - RNA, 21 nt, Artificial Sequence
  Synthetic
ugaagaaguugaccugucugc

SEQ ID NO: 544215 - RNA, 22 nt, Artificial Sequence
  Synthetic
uugaagaaguugaccugucugc

SEQ ID NO: 544216 - RNA, 23 nt, Artificial Sequence
  Synthetic
uuugaagaaguugaccugucugc

SEQ ID NO: 544217 - RNA, 24 nt, Artificial Sequence
  Synthetic
guuugaagaaguugaccugucugc

SEQ ID NO: 544218 - RNA, 18 nt, Artificial Sequence
  Synthetic
cacuggagauuugucugc

SEQ ID NO: 544219 - RNA, 19 nt, Artificial Sequence
  Synthetic
ccacuggagauuugucugc

SEQ ID NO: 544220 - RNA, 20 nt, Artificial Sequence
  Synthetic
uccacuggagauuugucugc

SEQ ID NO: 544221 - RNA, 21 nt, Artificial Sequence
  Synthetic
auccacuggagauuugucugc

SEQ ID NO: 544222 - RNA, 22 nt, Artificial Sequence
  Synthetic
uauccacuggagauuugucugc

SEQ ID NO: 544223 - RNA, 23 nt, Artificial Sequence
  Synthetic
uuauccacuggagauuugucugc

SEQ ID NO: 544224 - RNA, 24 nt, Artificial Sequence
  Synthetic
uuuauccacuggagauuugucugc

SEQ ID NO: 544225 - RNA, 18 nt, Artificial Sequence
  Synthetic
aaauugagggaauucugc

SEQ ID NO: 544226 - RNA, 19 nt, Artificial Sequence
  Synthetic
uaaauugagggaauucugc

SEQ ID NO: 544227 - RNA, 20 nt, Artificial Sequence
  Synthetic
guaaauugagggaauucugc

SEQ ID NO: 544228 - RNA, 21 nt, Artificial Sequence
  Synthetic
aguaaauugagggaauucugc

SEQ ID NO: 544229 - RNA, 22 nt, Artificial Sequence
  Synthetic
gaguaaauugagggaauucugc

SEQ ID NO: 544230 - RNA, 23 nt, Artificial Sequence
  Synthetic
agaguaaauugagggaauucugc

SEQ ID NO: 544231 - RNA, 24 nt, Artificial Sequence
  Synthetic
aagaguaaauugagggaauucugc

SEQ ID NO: 544232 - RNA, 18 nt, Artificial Sequence
  Synthetic
auuaaaauuugauucugc

SEQ ID NO: 544233 - RNA, 19 nt, Artificial Sequence
  Synthetic
cauuaaaauuugauucugc

SEQ ID NO: 544234 - RNA, 20 nt, Artificial Sequence
  Synthetic
gcauuaaaauuugauucugc

SEQ ID NO: 544235 - RNA, 21 nt, Artificial Sequence
  Synthetic
ggcauuaaaauuugauucugc

SEQ ID NO: 544236 - RNA, 22 nt, Artificial Sequence
  Synthetic
gggcauuaaaauuugauucugc

SEQ ID NO: 544237 - RNA, 23 nt, Artificial Sequence
  Synthetic
ugggcauuaaaauuugauucugc

SEQ ID NO: 544238 - RNA, 24 nt, Artificial Sequence
  Synthetic
cugggcauuaaaauuugauucugc

SEQ ID NO: 544239 - RNA, 18 nt, Artificial Sequence
  Synthetic
agacaugaccuauucugc

SEQ ID NO: 544240 - RNA, 19 nt, Artificial Sequence
  Synthetic
gagacaugaccuauucugc

SEQ ID NO: 544241 - RNA, 20 nt, Artificial Sequence
  Synthetic
ggagacaugaccuauucugc

SEQ ID NO: 544242 - RNA, 21 nt, Artificial Sequence
  Synthetic
aggagacaugaccuauucugc

SEQ ID NO: 544243 - RNA, 22 nt, Artificial Sequence
  Synthetic
caggagacaugaccuauucugc

SEQ ID NO: 544244 - RNA, 23 nt, Artificial Sequence
  Synthetic
ucaggagacaugaccuauucugc

SEQ ID NO: 544245 - RNA, 24 nt, Artificial Sequence
  Synthetic
uucaggagacaugaccuauucugc

SEQ ID NO: 544246 - RNA, 18 nt, Artificial Sequence
  Synthetic
ccugcagcaaacuucugc

SEQ ID NO: 544247 - RNA, 19 nt, Artificial Sequence
  Synthetic
cccugcagcaaacuucugc

SEQ ID NO: 544248 - RNA, 20 nt, Artificial Sequence
  Synthetic
ccccugcagcaaacuucugc

SEQ ID NO: 544249 - RNA, 21 nt, Artificial Sequence
  Synthetic
gccccugcagcaaacuucugc

SEQ ID NO: 544250 - RNA, 22 nt, Artificial Sequence
  Synthetic
ugccccugcagcaaacuucugc

SEQ ID NO: 544251 - RNA, 23 nt, Artificial Sequence
  Synthetic
cugccccugcagcaaacuucugc

SEQ ID NO: 544252 - RNA, 24 nt, Artificial Sequence
  Synthetic
ccugccccugcagcaaacuucugc

SEQ ID NO: 544253 - RNA, 18 nt, Artificial Sequence
  Synthetic
uuaucugguaacuucugc

SEQ ID NO: 544254 - RNA, 19 nt, Artificial Sequence
  Synthetic
auuaucugguaacuucugc

SEQ ID NO: 544255 - RNA, 20 nt, Artificial Sequence
  Synthetic
uauuaucugguaacuucugc

SEQ ID NO: 544256 - RNA, 21 nt, Artificial Sequence
  Synthetic
cuauuaucugguaacuucugc

SEQ ID NO: 544257 - RNA, 22 nt, Artificial Sequence
  Synthetic
ucuauuaucugguaacuucugc

SEQ ID NO: 544258 - RNA, 23 nt, Artificial Sequence
  Synthetic
aucuauuaucugguaacuucugc

SEQ ID NO: 544259 - RNA, 24 nt, Artificial Sequence
  Synthetic
aaucuauuaucugguaacuucugc

SEQ ID NO: 544260 - RNA, 18 nt, Artificial Sequence
  Synthetic
acuaucagaugcuucugc

SEQ ID NO: 544261 - RNA, 19 nt, Artificial Sequence
  Synthetic
gacuaucagaugcuucugc

SEQ ID NO: 544262 - RNA, 20 nt, Artificial Sequence
  Synthetic
ugacuaucagaugcuucugc

SEQ ID NO: 544263 - RNA, 21 nt, Artificial Sequence
  Synthetic
cugacuaucagaugcuucugc

SEQ ID NO: 544264 - RNA, 22 nt, Artificial Sequence
  Synthetic
ucugacuaucagaugcuucugc

SEQ ID NO: 544265 - RNA, 23 nt, Artificial Sequence
  Synthetic
cucugacuaucagaugcuucugc

SEQ ID NO: 544266 - RNA, 24 nt, Artificial Sequence
  Synthetic
ccucugacuaucagaugcuucugc

SEQ ID NO: 544267 - RNA, 18 nt, Artificial Sequence
  Synthetic
gcaccguaagucuucugc

SEQ ID NO: 544268 - RNA, 19 nt, Artificial Sequence
  Synthetic
agcaccguaagucuucugc

SEQ ID NO: 544269 - RNA, 20 nt, Artificial Sequence
  Synthetic
cagcaccguaagucuucugc

SEQ ID NO: 544270 - RNA, 21 nt, Artificial Sequence
  Synthetic
ccagcaccguaagucuucugc

SEQ ID NO: 544271 - RNA, 22 nt, Artificial Sequence
  Synthetic
uccagcaccguaagucuucugc

SEQ ID NO: 544272 - RNA, 23 nt, Artificial Sequence
  Synthetic
uuccagcaccguaagucuucugc

SEQ ID NO: 544273 - RNA, 24 nt, Artificial Sequence
  Synthetic
auuccagcaccguaagucuucugc

SEQ ID NO: 544274 - RNA, 18 nt, Artificial Sequence
  Synthetic
gaaccucagaaguucugc

SEQ ID NO: 544275 - RNA, 19 nt, Artificial Sequence
  Synthetic
ggaaccucagaaguucugc

SEQ ID NO: 544276 - RNA, 20 nt, Artificial Sequence
  Synthetic
cggaaccucagaaguucugc

SEQ ID NO: 544277 - RNA, 21 nt, Artificial Sequence
  Synthetic
acggaaccucagaaguucugc

SEQ ID NO: 544278 - RNA, 22 nt, Artificial Sequence
  Synthetic
aacggaaccucagaaguucugc

SEQ ID NO: 544279 - RNA, 23 nt, Artificial Sequence
  Synthetic
aaacggaaccucagaaguucugc

SEQ ID NO: 544280 - RNA, 24 nt, Artificial Sequence
  Synthetic
uaaacggaaccucagaaguucugc

SEQ ID NO: 544281 - RNA, 18 nt, Artificial Sequence
  Synthetic
ucugcgacaacguucugc

SEQ ID NO: 544282 - RNA, 19 nt, Artificial Sequence
  Synthetic
gucugcgacaacguucugc

SEQ ID NO: 544283 - RNA, 20 nt, Artificial Sequence
  Synthetic
ugucugcgacaacguucugc

SEQ ID NO: 544284 - RNA, 21 nt, Artificial Sequence
  Synthetic
augucugcgacaacguucugc

SEQ ID NO: 544285 - RNA, 22 nt, Artificial Sequence
  Synthetic
uaugucugcgacaacguucugc

SEQ ID NO: 544286 - RNA, 23 nt, Artificial Sequence
  Synthetic
guaugucugcgacaacguucugc

SEQ ID NO: 544287 - RNA, 24 nt, Artificial Sequence
  Synthetic
uguaugucugcgacaacguucugc

SEQ ID NO: 544288 - RNA, 18 nt, Artificial Sequence
  Synthetic
cauucuguuagguucugc

SEQ ID NO: 544289 - RNA, 19 nt, Artificial Sequence
  Synthetic
ucauucuguuagguucugc

SEQ ID NO: 544290 - RNA, 20 nt, Artificial Sequence
  Synthetic
cucauucuguuagguucugc

SEQ ID NO: 544291 - RNA, 21 nt, Artificial Sequence
  Synthetic
gcucauucuguuagguucugc

SEQ ID NO: 544292 - RNA, 22 nt, Artificial Sequence
  Synthetic
ugcucauucuguuagguucugc

SEQ ID NO: 544293 - RNA, 23 nt, Artificial Sequence
  Synthetic
cugcucauucuguuagguucugc

SEQ ID NO: 544294 - RNA, 24 nt, Artificial Sequence
  Synthetic
acugcucauucuguuagguucugc

SEQ ID NO: 544295 - RNA, 18 nt, Artificial Sequence
  Synthetic
uauugccucaauuucugc

SEQ ID NO: 544296 - RNA, 19 nt, Artificial Sequence
  Synthetic
uuauugccucaauuucugc

SEQ ID NO: 544297 - RNA, 20 nt, Artificial Sequence
  Synthetic
cuuauugccucaauuucugc

SEQ ID NO: 544298 - RNA, 21 nt, Artificial Sequence
  Synthetic
ucuuauugccucaauuucugc

SEQ ID NO: 544299 - RNA, 22 nt, Artificial Sequence
  Synthetic
aucuuauugccucaauuucugc

SEQ ID NO: 544300 - RNA, 23 nt, Artificial Sequence
  Synthetic
caucuuauugccucaauuucugc

SEQ ID NO: 544301 - RNA, 24 nt, Artificial Sequence
  Synthetic
acaucuuauugccucaauuucugc

SEQ ID NO: 544302 - RNA, 18 nt, Artificial Sequence
  Synthetic
acgacguucucuuucugc

SEQ ID NO: 544303 - RNA, 19 nt, Artificial Sequence
  Synthetic
cacgacguucucuuucugc

SEQ ID NO: 544304 - RNA, 20 nt, Artificial Sequence
  Synthetic
acacgacguucucuuucugc

SEQ ID NO: 544305 - RNA, 21 nt, Artificial Sequence
  Synthetic
gacacgacguucucuuucugc

SEQ ID NO: 544306 - RNA, 22 nt, Artificial Sequence
  Synthetic
ugacacgacguucucuuucugc

SEQ ID NO: 544307 - RNA, 23 nt, Artificial Sequence
  Synthetic
gugacacgacguucucuuucugc

SEQ ID NO: 544308 - RNA, 24 nt, Artificial Sequence
  Synthetic
ugugacacgacguucucuuucugc

SEQ ID NO: 544309 - RNA, 18 nt, Artificial Sequence
  Synthetic
ccacagcgagguuucugc

SEQ ID NO: 544310 - RNA, 19 nt, Artificial Sequence
  Synthetic
uccacagcgagguuucugc

SEQ ID NO: 544311 - RNA, 20 nt, Artificial Sequence
  Synthetic
cuccacagcgagguuucugc

SEQ ID NO: 544312 - RNA, 21 nt, Artificial Sequence
  Synthetic
acuccacagcgagguuucugc

SEQ ID NO: 544313 - RNA, 22 nt, Artificial Sequence
  Synthetic
aacuccacagcgagguuucugc

SEQ ID NO: 544314 - RNA, 23 nt, Artificial Sequence
  Synthetic
caacuccacagcgagguuucugc

SEQ ID NO: 544315 - RNA, 24 nt, Artificial Sequence
  Synthetic
acaacuccacagcgagguuucugc

SEQ ID NO: 544316 - RNA, 18 nt, Artificial Sequence
  Synthetic
agccaaggaguuuucugc

SEQ ID NO: 544317 - RNA, 19 nt, Artificial Sequence
  Synthetic
aagccaaggaguuuucugc

SEQ ID NO: 544318 - RNA, 20 nt, Artificial Sequence
  Synthetic
gaagccaaggaguuuucugc

SEQ ID NO: 544319 - RNA, 21 nt, Artificial Sequence
  Synthetic
ugaagccaaggaguuuucugc

SEQ ID NO: 544320 - RNA, 22 nt, Artificial Sequence
  Synthetic
cugaagccaaggaguuuucugc

SEQ ID NO: 544321 - RNA, 23 nt, Artificial Sequence
  Synthetic
acugaagccaaggaguuuucugc

SEQ ID NO: 544322 - RNA, 24 nt, Artificial Sequence
  Synthetic
gacugaagccaaggaguuuucugc

SEQ ID NO: 544323 - RNA, 18 nt, Artificial Sequence
  Synthetic
uggguuuuuuuuuucugc

SEQ ID NO: 544324 - RNA, 19 nt, Artificial Sequence
  Synthetic
uuggguuuuuuuuuucugc

SEQ ID NO: 544325 - RNA, 20 nt, Artificial Sequence
  Synthetic
uuuggguuuuuuuuuucugc

SEQ ID NO: 544326 - RNA, 21 nt, Artificial Sequence
  Synthetic
uuuuggguuuuuuuuuucugc

SEQ ID NO: 544327 - RNA, 22 nt, Artificial Sequence
  Synthetic
auuuuggguuuuuuuuuucugc

SEQ ID NO: 544328 - RNA, 23 nt, Artificial Sequence
  Synthetic
aauuuuggguuuuuuuuuucugc

SEQ ID NO: 544329 - RNA, 24 nt, Artificial Sequence
  Synthetic
gaauuuuggguuuuuuuuuucugc

SEQ ID NO: 544330 - RNA, 18 nt, Artificial Sequence
  Synthetic
auaagaaauaaaaagugc

SEQ ID NO: 544331 - RNA, 19 nt, Artificial Sequence
  Synthetic
uauaagaaauaaaaagugc

SEQ ID NO: 544332 - RNA, 20 nt, Artificial Sequence
  Synthetic
guauaagaaauaaaaagugc

SEQ ID NO: 544333 - RNA, 21 nt, Artificial Sequence
  Synthetic
uguauaagaaauaaaaagugc

SEQ ID NO: 544334 - RNA, 22 nt, Artificial Sequence
  Synthetic
auguauaagaaauaaaaagugc

SEQ ID NO: 544335 - RNA, 23 nt, Artificial Sequence
  Synthetic
gauguauaagaaauaaaaagugc

SEQ ID NO: 544336 - RNA, 24 nt, Artificial Sequence
  Synthetic
agauguauaagaaauaaaaagugc

SEQ ID NO: 544337 - RNA, 18 nt, Artificial Sequence
  Synthetic
aacaaaguggaaaagugc

SEQ ID NO: 544338 - RNA, 19 nt, Artificial Sequence
  Synthetic
uaacaaaguggaaaagugc

SEQ ID NO: 544339 - RNA, 20 nt, Artificial Sequence
  Synthetic
auaacaaaguggaaaagugc

SEQ ID NO: 544340 - RNA, 21 nt, Artificial Sequence
  Synthetic
aauaacaaaguggaaaagugc

SEQ ID NO: 544341 - RNA, 22 nt, Artificial Sequence
  Synthetic
aaauaacaaaguggaaaagugc

SEQ ID NO: 544342 - RNA, 23 nt, Artificial Sequence
  Synthetic
gaaauaacaaaguggaaaagugc

SEQ ID NO: 544343 - RNA, 24 nt, Artificial Sequence
  Synthetic
ugaaauaacaaaguggaaaagugc

SEQ ID NO: 544344 - RNA, 21 nt, Artificial Sequence
  Synthetic
ugccucagccucccaaagugc

SEQ ID NO: 544345 - RNA, 22 nt, Artificial Sequence
  Synthetic
cugccucagccucccaaagugc

SEQ ID NO: 544346 - RNA, 23 nt, Artificial Sequence
  Synthetic
ccugccucagccucccaaagugc

SEQ ID NO: 544347 - RNA, 24 nt, Artificial Sequence
  Synthetic
accugccucagccucccaaagugc

SEQ ID NO: 544348 - RNA, 18 nt, Artificial Sequence
  Synthetic
aaggaauaaagaaagugc

SEQ ID NO: 544349 - RNA, 19 nt, Artificial Sequence
  Synthetic
uaaggaauaaagaaagugc

SEQ ID NO: 544350 - RNA, 20 nt, Artificial Sequence
  Synthetic
uuaaggaauaaagaaagugc

SEQ ID NO: 544351 - RNA, 21 nt, Artificial Sequence
  Synthetic
auuaaggaauaaagaaagugc

SEQ ID NO: 544352 - RNA, 22 nt, Artificial Sequence
  Synthetic
uauuaaggaauaaagaaagugc

SEQ ID NO: 544353 - RNA, 23 nt, Artificial Sequence
  Synthetic
auauuaaggaauaaagaaagugc

SEQ ID NO: 544354 - RNA, 24 nt, Artificial Sequence
  Synthetic
aauauuaaggaauaaagaaagugc

SEQ ID NO: 544355 - RNA, 18 nt, Artificial Sequence
  Synthetic
aauauucaauuaaagugc

SEQ ID NO: 544356 - RNA, 19 nt, Artificial Sequence
  Synthetic
aaauauucaauuaaagugc

SEQ ID NO: 544357 - RNA, 20 nt, Artificial Sequence
  Synthetic
aaaauauucaauuaaagugc

SEQ ID NO: 544358 - RNA, 21 nt, Artificial Sequence
  Synthetic
caaaauauucaauuaaagugc

SEQ ID NO: 544359 - RNA, 22 nt, Artificial Sequence
  Synthetic
gcaaaauauucaauuaaagugc

SEQ ID NO: 544360 - RNA, 23 nt, Artificial Sequence
  Synthetic
ggcaaaauauucaauuaaagugc

SEQ ID NO: 544361 - RNA, 24 nt, Artificial Sequence
  Synthetic
uggcaaaauauucaauuaaagugc

SEQ ID NO: 544362 - RNA, 18 nt, Artificial Sequence
  Synthetic
uaaaucgaucccaagugc

SEQ ID NO: 544363 - RNA, 19 nt, Artificial Sequence
  Synthetic
auaaaucgaucccaagugc

SEQ ID NO: 544364 - RNA, 20 nt, Artificial Sequence
  Synthetic
aauaaaucgaucccaagugc

SEQ ID NO: 544365 - RNA, 21 nt, Artificial Sequence
  Synthetic
caauaaaucgaucccaagugc

SEQ ID NO: 544366 - RNA, 22 nt, Artificial Sequence
  Synthetic
ucaauaaaucgaucccaagugc

SEQ ID NO: 544367 - RNA, 23 nt, Artificial Sequence
  Synthetic
cucaauaaaucgaucccaagugc

SEQ ID NO: 544368 - RNA, 24 nt, Artificial Sequence
  Synthetic
ccucaauaaaucgaucccaagugc

SEQ ID NO: 544369 - RNA, 18 nt, Artificial Sequence
  Synthetic
ugcgcuggccagaagugc

SEQ ID NO: 544370 - RNA, 19 nt, Artificial Sequence
  Synthetic
gugcgcuggccagaagugc

SEQ ID NO: 544371 - RNA, 20 nt, Artificial Sequence
  Synthetic
ggugcgcuggccagaagugc

SEQ ID NO: 544372 - RNA, 21 nt, Artificial Sequence
  Synthetic
aggugcgcuggccagaagugc

SEQ ID NO: 544373 - RNA, 22 nt, Artificial Sequence
  Synthetic
uaggugcgcuggccagaagugc

SEQ ID NO: 544374 - RNA, 23 nt, Artificial Sequence
  Synthetic
cuaggugcgcuggccagaagugc

SEQ ID NO: 544375 - RNA, 24 nt, Artificial Sequence
  Synthetic
gcuaggugcgcuggccagaagugc

SEQ ID NO: 544376 - RNA, 18 nt, Artificial Sequence
  Synthetic
agaaauggagagaagugc

SEQ ID NO: 544377 - RNA, 19 nt, Artificial Sequence
  Synthetic
cagaaauggagagaagugc

SEQ ID NO: 544378 - RNA, 20 nt, Artificial Sequence
  Synthetic
gcagaaauggagagaagugc

SEQ ID NO: 544379 - RNA, 21 nt, Artificial Sequence
  Synthetic
ggcagaaauggagagaagugc

SEQ ID NO: 544380 - RNA, 22 nt, Artificial Sequence
  Synthetic
uggcagaaauggagagaagugc

SEQ ID NO: 544381 - RNA, 23 nt, Artificial Sequence
  Synthetic
guggcagaaauggagagaagugc

SEQ ID NO: 544382 - RNA, 24 nt, Artificial Sequence
  Synthetic
aguggcagaaauggagagaagugc

SEQ ID NO: 544383 - RNA, 18 nt, Artificial Sequence
  Synthetic
gaugagugugagaagugc

SEQ ID NO: 544384 - RNA, 19 nt, Artificial Sequence
  Synthetic
ugaugagugugagaagugc

SEQ ID NO: 544385 - RNA, 20 nt, Artificial Sequence
  Synthetic
cugaugagugugagaagugc

SEQ ID NO: 544386 - RNA, 21 nt, Artificial Sequence
  Synthetic
ucugaugagugugagaagugc

SEQ ID NO: 544387 - RNA, 22 nt, Artificial Sequence
  Synthetic
uucugaugagugugagaagugc

SEQ ID NO: 544388 - RNA, 23 nt, Artificial Sequence
  Synthetic
cuucugaugagugugagaagugc

SEQ ID NO: 544389 - RNA, 24 nt, Artificial Sequence
  Synthetic
ccuucugaugagugugagaagugc

SEQ ID NO: 544390 - RNA, 18 nt, Artificial Sequence
  Synthetic
aucagguaucauaagugc

SEQ ID NO: 544391 - RNA, 19 nt, Artificial Sequence
  Synthetic
gaucagguaucauaagugc

SEQ ID NO: 544392 - RNA, 20 nt, Artificial Sequence
  Synthetic
ugaucagguaucauaagugc

SEQ ID NO: 544393 - RNA, 21 nt, Artificial Sequence
  Synthetic
augaucagguaucauaagugc

SEQ ID NO: 544394 - RNA, 22 nt, Artificial Sequence
  Synthetic
uaugaucagguaucauaagugc

SEQ ID NO: 544395 - RNA, 23 nt, Artificial Sequence
  Synthetic
cuaugaucagguaucauaagugc

SEQ ID NO: 544396 - RNA, 24 nt, Artificial Sequence
  Synthetic
ccuaugaucagguaucauaagugc

SEQ ID NO: 544397 - RNA, 18 nt, Artificial Sequence
  Synthetic
uaaauaaccuauaagugc

SEQ ID NO: 544398 - RNA, 19 nt, Artificial Sequence
  Synthetic
auaaauaaccuauaagugc

SEQ ID NO: 544399 - RNA, 20 nt, Artificial Sequence
  Synthetic
uauaaauaaccuauaagugc

SEQ ID NO: 544400 - RNA, 21 nt, Artificial Sequence
  Synthetic
uuauaaauaaccuauaagugc

SEQ ID NO: 544401 - RNA, 22 nt, Artificial Sequence
  Synthetic
cuuauaaauaaccuauaagugc

SEQ ID NO: 544402 - RNA, 23 nt, Artificial Sequence
  Synthetic
acuuauaaauaaccuauaagugc

SEQ ID NO: 544403 - RNA, 24 nt, Artificial Sequence
  Synthetic
aacuuauaaauaaccuauaagugc

SEQ ID NO: 544404 - RNA, 18 nt, Artificial Sequence
  Synthetic
agaccaaagcaacagugc

SEQ ID NO: 544405 - RNA, 19 nt, Artificial Sequence
  Synthetic
aagaccaaagcaacagugc

SEQ ID NO: 544406 - RNA, 20 nt, Artificial Sequence
  Synthetic
caagaccaaagcaacagugc

SEQ ID NO: 544407 - RNA, 21 nt, Artificial Sequence
  Synthetic
acaagaccaaagcaacagugc

SEQ ID NO: 544408 - RNA, 22 nt, Artificial Sequence
  Synthetic
cacaagaccaaagcaacagugc

SEQ ID NO: 544409 - RNA, 23 nt, Artificial Sequence
  Synthetic
ucacaagaccaaagcaacagugc

SEQ ID NO: 544410 - RNA, 24 nt, Artificial Sequence
  Synthetic
cucacaagaccaaagcaacagugc

SEQ ID NO: 544411 - RNA, 18 nt, Artificial Sequence
  Synthetic
uguuacaauggacagugc

SEQ ID NO: 544412 - RNA, 19 nt, Artificial Sequence
  Synthetic
auguuacaauggacagugc

SEQ ID NO: 544413 - RNA, 20 nt, Artificial Sequence
  Synthetic
aauguuacaauggacagugc

SEQ ID NO: 544414 - RNA, 21 nt, Artificial Sequence
  Synthetic
uaauguuacaauggacagugc

SEQ ID NO: 544415 - RNA, 22 nt, Artificial Sequence
  Synthetic
uuaauguuacaauggacagugc

SEQ ID NO: 544416 - RNA, 23 nt, Artificial Sequence
  Synthetic
uuuaauguuacaauggacagugc

SEQ ID NO: 544417 - RNA, 24 nt, Artificial Sequence
  Synthetic
uuuuaauguuacaauggacagugc

SEQ ID NO: 544418 - RNA, 18 nt, Artificial Sequence
  Synthetic
agggggcagagccagugc

SEQ ID NO: 544419 - RNA, 19 nt, Artificial Sequence
  Synthetic
aagggggcagagccagugc

SEQ ID NO: 544420 - RNA, 20 nt, Artificial Sequence
  Synthetic
uaagggggcagagccagugc

SEQ ID NO: 544421 - RNA, 21 nt, Artificial Sequence
  Synthetic
cuaagggggcagagccagugc

SEQ ID NO: 544422 - RNA, 22 nt, Artificial Sequence
  Synthetic
acuaagggggcagagccagugc

SEQ ID NO: 544423 - RNA, 23 nt, Artificial Sequence
  Synthetic
cacuaagggggcagagccagugc

SEQ ID NO: 544424 - RNA, 24 nt, Artificial Sequence
  Synthetic
ucacuaagggggcagagccagugc

SEQ ID NO: 544425 - RNA, 18 nt, Artificial Sequence
  Synthetic
ccacagcaaaagcagugc

SEQ ID NO: 544426 - RNA, 19 nt, Artificial Sequence
  Synthetic
accacagcaaaagcagugc

SEQ ID NO: 544427 - RNA, 20 nt, Artificial Sequence
  Synthetic
gaccacagcaaaagcagugc

SEQ ID NO: 544428 - RNA, 21 nt, Artificial Sequence
  Synthetic
ugaccacagcaaaagcagugc

SEQ ID NO: 544429 - RNA, 22 nt, Artificial Sequence
  Synthetic
uugaccacagcaaaagcagugc

SEQ ID NO: 544430 - RNA, 23 nt, Artificial Sequence
  Synthetic
guugaccacagcaaaagcagugc

SEQ ID NO: 544431 - RNA, 24 nt, Artificial Sequence
  Synthetic
aguugaccacagcaaaagcagugc

SEQ ID NO: 544432 - RNA, 18 nt, Artificial Sequence
  Synthetic
uuauuucuggggcagugc

SEQ ID NO: 544433 - RNA, 19 nt, Artificial Sequence
  Synthetic
guuauuucuggggcagugc

SEQ ID NO: 544434 - RNA, 20 nt, Artificial Sequence
  Synthetic
aguuauuucuggggcagugc

SEQ ID NO: 544435 - RNA, 21 nt, Artificial Sequence
  Synthetic
aaguuauuucuggggcagugc

SEQ ID NO: 544436 - RNA, 22 nt, Artificial Sequence
  Synthetic
gaaguuauuucuggggcagugc

SEQ ID NO: 544437 - RNA, 23 nt, Artificial Sequence
  Synthetic
agaaguuauuucuggggcagugc

SEQ ID NO: 544438 - RNA, 24 nt, Artificial Sequence
  Synthetic
gagaaguuauuucuggggcagugc

SEQ ID NO: 544439 - RNA, 18 nt, Artificial Sequence
  Synthetic
cagcugcaacugcagugc

SEQ ID NO: 544440 - RNA, 19 nt, Artificial Sequence
  Synthetic
gcagcugcaacugcagugc

SEQ ID NO: 544441 - RNA, 20 nt, Artificial Sequence
  Synthetic
ugcagcugcaacugcagugc

SEQ ID NO: 544442 - RNA, 21 nt, Artificial Sequence
  Synthetic
cugcagcugcaacugcagugc

SEQ ID NO: 544443 - RNA, 22 nt, Artificial Sequence
  Synthetic
acugcagcugcaacugcagugc

SEQ ID NO: 544444 - RNA, 23 nt, Artificial Sequence
  Synthetic
cacugcagcugcaacugcagugc

SEQ ID NO: 544445 - RNA, 24 nt, Artificial Sequence
  Synthetic
ccacugcagcugcaacugcagugc

SEQ ID NO: 544446 - RNA, 18 nt, Artificial Sequence
  Synthetic
ugcucuuaacaucagugc

SEQ ID NO: 544447 - RNA, 19 nt, Artificial Sequence
  Synthetic
uugcucuuaacaucagugc

SEQ ID NO: 544448 - RNA, 20 nt, Artificial Sequence
  Synthetic
cuugcucuuaacaucagugc

SEQ ID NO: 544449 - RNA, 21 nt, Artificial Sequence
  Synthetic
acuugcucuuaacaucagugc

SEQ ID NO: 544450 - RNA, 22 nt, Artificial Sequence
  Synthetic
aacuugcucuuaacaucagugc

SEQ ID NO: 544451 - RNA, 23 nt, Artificial Sequence
  Synthetic
caacuugcucuuaacaucagugc

SEQ ID NO: 544452 - RNA, 24 nt, Artificial Sequence
  Synthetic
gcaacuugcucuuaacaucagugc

SEQ ID NO: 544453 - RNA, 18 nt, Artificial Sequence
  Synthetic
aggugggaacuggagugc

SEQ ID NO: 544454 - RNA, 19 nt, Artificial Sequence
  Synthetic
gaggugggaacuggagugc

SEQ ID NO: 544455 - RNA, 20 nt, Artificial Sequence
  Synthetic
cgaggugggaacuggagugc

SEQ ID NO: 544456 - RNA, 21 nt, Artificial Sequence
  Synthetic
acgaggugggaacuggagugc

SEQ ID NO: 544457 - RNA, 22 nt, Artificial Sequence
  Synthetic
aacgaggugggaacuggagugc

SEQ ID NO: 544458 - RNA, 23 nt, Artificial Sequence
  Synthetic
aaacgaggugggaacuggagugc

SEQ ID NO: 544459 - RNA, 24 nt, Artificial Sequence
  Synthetic
caaacgaggugggaacuggagugc

SEQ ID NO: 544460 - RNA, 18 nt, Artificial Sequence
  Synthetic
ggcaaacaugcugagugc

SEQ ID NO: 544461 - RNA, 19 nt, Artificial Sequence
  Synthetic
uggcaaacaugcugagugc

SEQ ID NO: 544462 - RNA, 20 nt, Artificial Sequence
  Synthetic
cuggcaaacaugcugagugc

SEQ ID NO: 544463 - RNA, 21 nt, Artificial Sequence
  Synthetic
gcuggcaaacaugcugagugc

SEQ ID NO: 544464 - RNA, 22 nt, Artificial Sequence
  Synthetic
ugcuggcaaacaugcugagugc

SEQ ID NO: 544465 - RNA, 23 nt, Artificial Sequence
  Synthetic
augcuggcaaacaugcugagugc

SEQ ID NO: 544466 - RNA, 24 nt, Artificial Sequence
  Synthetic
gaugcuggcaaacaugcugagugc

SEQ ID NO: 544467 - RNA, 18 nt, Artificial Sequence
  Synthetic
acuggcuuucuugagugc

SEQ ID NO: 544468 - RNA, 19 nt, Artificial Sequence
  Synthetic
gacuggcuuucuugagugc

SEQ ID NO: 544469 - RNA, 20 nt, Artificial Sequence
  Synthetic
agacuggcuuucuugagugc

SEQ ID NO: 544470 - RNA, 21 nt, Artificial Sequence
  Synthetic
uagacuggcuuucuugagugc

SEQ ID NO: 544471 - RNA, 22 nt, Artificial Sequence
  Synthetic
cuagacuggcuuucuugagugc

SEQ ID NO: 544472 - RNA, 23 nt, Artificial Sequence
  Synthetic
acuagacuggcuuucuugagugc

SEQ ID NO: 544473 - RNA, 24 nt, Artificial Sequence
  Synthetic
cacuagacuggcuuucuugagugc

SEQ ID NO: 544474 - RNA, 18 nt, Artificial Sequence
  Synthetic
uucuauuuuaaauagugc

SEQ ID NO: 544475 - RNA, 19 nt, Artificial Sequence
  Synthetic
uuucuauuuuaaauagugc

SEQ ID NO: 544476 - RNA, 20 nt, Artificial Sequence
  Synthetic
auuucuauuuuaaauagugc

SEQ ID NO: 544477 - RNA, 21 nt, Artificial Sequence
  Synthetic
uauuucuauuuuaaauagugc

SEQ ID NO: 544478 - RNA, 22 nt, Artificial Sequence
  Synthetic
guauuucuauuuuaaauagugc

SEQ ID NO: 544479 - RNA, 23 nt, Artificial Sequence
  Synthetic
gguauuucuauuuuaaauagugc

SEQ ID NO: 544480 - RNA, 24 nt, Artificial Sequence
  Synthetic
ugguauuucuauuuuaaauagugc

SEQ ID NO: 544481 - RNA, 18 nt, Artificial Sequence
  Synthetic
aaaguacagacauagugc

SEQ ID NO: 544482 - RNA, 19 nt, Artificial Sequence
  Synthetic
uaaaguacagacauagugc

SEQ ID NO: 544483 - RNA, 20 nt, Artificial Sequence
  Synthetic
uuaaaguacagacauagugc

SEQ ID NO: 544484 - RNA, 21 nt, Artificial Sequence
  Synthetic
uuuaaaguacagacauagugc

SEQ ID NO: 544485 - RNA, 22 nt, Artificial Sequence
  Synthetic
uuuuaaaguacagacauagugc

SEQ ID NO: 544486 - RNA, 23 nt, Artificial Sequence
  Synthetic
auuuuaaaguacagacauagugc

SEQ ID NO: 544487 - RNA, 24 nt, Artificial Sequence
  Synthetic
cauuuuaaaguacagacauagugc

SEQ ID NO: 544488 - RNA, 18 nt, Artificial Sequence
  Synthetic
uuccccgaacccuagugc

SEQ ID NO: 544489 - RNA, 19 nt, Artificial Sequence
  Synthetic
uuuccccgaacccuagugc

SEQ ID NO: 544490 - RNA, 20 nt, Artificial Sequence
  Synthetic
auuuccccgaacccuagugc

SEQ ID NO: 544491 - RNA, 21 nt, Artificial Sequence
  Synthetic
aauuuccccgaacccuagugc

SEQ ID NO: 544492 - RNA, 22 nt, Artificial Sequence
  Synthetic
aaauuuccccgaacccuagugc

SEQ ID NO: 544493 - RNA, 23 nt, Artificial Sequence
  Synthetic
uaaauuuccccgaacccuagugc

SEQ ID NO: 544494 - RNA, 24 nt, Artificial Sequence
  Synthetic
uuaaauuuccccgaacccuagugc

SEQ ID NO: 544495 - RNA, 18 nt, Artificial Sequence
  Synthetic
cuagggaccuccuagugc

SEQ ID NO: 544496 - RNA, 19 nt, Artificial Sequence
  Synthetic
acuagggaccuccuagugc

SEQ ID NO: 544497 - RNA, 20 nt, Artificial Sequence
  Synthetic
cacuagggaccuccuagugc

SEQ ID NO: 544498 - RNA, 21 nt, Artificial Sequence
  Synthetic
acacuagggaccuccuagugc

SEQ ID NO: 544499 - RNA, 22 nt, Artificial Sequence
  Synthetic
cacacuagggaccuccuagugc

SEQ ID NO: 544500 - RNA, 23 nt, Artificial Sequence
  Synthetic
ccacacuagggaccuccuagugc

SEQ ID NO: 544501 - RNA, 24 nt, Artificial Sequence
  Synthetic
cccacacuagggaccuccuagugc

SEQ ID NO: 544502 - RNA, 18 nt, Artificial Sequence
  Synthetic
augucuuuuaauuagugc

SEQ ID NO: 544503 - RNA, 19 nt, Artificial Sequence
  Synthetic
aaugucuuuuaauuagugc

SEQ ID NO: 544504 - RNA, 20 nt, Artificial Sequence
  Synthetic
aaaugucuuuuaauuagugc

SEQ ID NO: 544505 - RNA, 21 nt, Artificial Sequence
  Synthetic
caaaugucuuuuaauuagugc

SEQ ID NO: 544506 - RNA, 22 nt, Artificial Sequence
  Synthetic
acaaaugucuuuuaauuagugc

SEQ ID NO: 544507 - RNA, 23 nt, Artificial Sequence
  Synthetic
aacaaaugucuuuuaauuagugc

SEQ ID NO: 544508 - RNA, 24 nt, Artificial Sequence
  Synthetic
caacaaaugucuuuuaauuagugc

SEQ ID NO: 544509 - RNA, 18 nt, Artificial Sequence
  Synthetic
aggcaauauuaaacgugc

SEQ ID NO: 544510 - RNA, 19 nt, Artificial Sequence
  Synthetic
aaggcaauauuaaacgugc

SEQ ID NO: 544511 - RNA, 20 nt, Artificial Sequence
  Synthetic
aaaggcaauauuaaacgugc

SEQ ID NO: 544512 - RNA, 21 nt, Artificial Sequence
  Synthetic
gaaaggcaauauuaaacgugc

SEQ ID NO: 544513 - RNA, 22 nt, Artificial Sequence
  Synthetic
agaaaggcaauauuaaacgugc

SEQ ID NO: 544514 - RNA, 23 nt, Artificial Sequence
  Synthetic
gagaaaggcaauauuaaacgugc

SEQ ID NO: 544515 - RNA, 24 nt, Artificial Sequence
  Synthetic
ugagaaaggcaauauuaaacgugc

SEQ ID NO: 544516 - RNA, 18 nt, Artificial Sequence
  Synthetic
acagcuugcaccacgugc

SEQ ID NO: 544517 - RNA, 19 nt, Artificial Sequence
  Synthetic
aacagcuugcaccacgugc

SEQ ID NO: 544518 - RNA, 20 nt, Artificial Sequence
  Synthetic
caacagcuugcaccacgugc

SEQ ID NO: 544519 - RNA, 21 nt, Artificial Sequence
  Synthetic
ucaacagcuugcaccacgugc

SEQ ID NO: 544520 - RNA, 22 nt, Artificial Sequence
  Synthetic
aucaacagcuugcaccacgugc

SEQ ID NO: 544521 - RNA, 23 nt, Artificial Sequence
  Synthetic
gaucaacagcuugcaccacgugc

SEQ ID NO: 544522 - RNA, 24 nt, Artificial Sequence
  Synthetic
cgaucaacagcuugcaccacgugc

SEQ ID NO: 544523 - RNA, 18 nt, Artificial Sequence
  Synthetic
caaaggugccuggcgugc

SEQ ID NO: 544524 - RNA, 19 nt, Artificial Sequence
  Synthetic
acaaaggugccuggcgugc

SEQ ID NO: 544525 - RNA, 20 nt, Artificial Sequence
  Synthetic
uacaaaggugccuggcgugc

SEQ ID NO: 544526 - RNA, 21 nt, Artificial Sequence
  Synthetic
uuacaaaggugccuggcgugc

SEQ ID NO: 544527 - RNA, 22 nt, Artificial Sequence
  Synthetic
uuuacaaaggugccuggcgugc

SEQ ID NO: 544528 - RNA, 23 nt, Artificial Sequence
  Synthetic
auuuacaaaggugccuggcgugc

SEQ ID NO: 544529 - RNA, 24 nt, Artificial Sequence
  Synthetic
cauuuacaaaggugccuggcgugc

SEQ ID NO: 544530 - RNA, 18 nt, Artificial Sequence
  Synthetic
guagcacauugaaggugc

SEQ ID NO: 544531 - RNA, 19 nt, Artificial Sequence
  Synthetic
aguagcacauugaaggugc

SEQ ID NO: 544532 - RNA, 20 nt, Artificial Sequence
  Synthetic
aaguagcacauugaaggugc

SEQ ID NO: 544533 - RNA, 21 nt, Artificial Sequence
  Synthetic
gaaguagcacauugaaggugc

SEQ ID NO: 544534 - RNA, 22 nt, Artificial Sequence
  Synthetic
ugaaguagcacauugaaggugc

SEQ ID NO: 544535 - RNA, 23 nt, Artificial Sequence
  Synthetic
cugaaguagcacauugaaggugc

SEQ ID NO: 544536 - RNA, 24 nt, Artificial Sequence
  Synthetic
acugaaguagcacauugaaggugc

SEQ ID NO: 544537 - RNA, 18 nt, Artificial Sequence
  Synthetic
agaaucuuaaacaggugc

SEQ ID NO: 544538 - RNA, 19 nt, Artificial Sequence
  Synthetic
aagaaucuuaaacaggugc

SEQ ID NO: 544539 - RNA, 20 nt, Artificial Sequence
  Synthetic
aaagaaucuuaaacaggugc

SEQ ID NO: 544540 - RNA, 21 nt, Artificial Sequence
  Synthetic
gaaagaaucuuaaacaggugc

SEQ ID NO: 544541 - RNA, 22 nt, Artificial Sequence
  Synthetic
ggaaagaaucuuaaacaggugc

SEQ ID NO: 544542 - RNA, 23 nt, Artificial Sequence
  Synthetic
aggaaagaaucuuaaacaggugc

SEQ ID NO: 544543 - RNA, 24 nt, Artificial Sequence
  Synthetic
uaggaaagaaucuuaaacaggugc

SEQ ID NO: 544544 - RNA, 24 nt, Artificial Sequence
  Synthetic
aaaaagucaggaaacaacaggugc

SEQ ID NO: 544545 - RNA, 18 nt, Artificial Sequence
  Synthetic
uuauuaaaacacaggugc

SEQ ID NO: 544546 - RNA, 19 nt, Artificial Sequence
  Synthetic
cuuauuaaaacacaggugc

SEQ ID NO: 544547 - RNA, 20 nt, Artificial Sequence
  Synthetic
ucuuauuaaaacacaggugc

SEQ ID NO: 544548 - RNA, 21 nt, Artificial Sequence
  Synthetic
aucuuauuaaaacacaggugc

SEQ ID NO: 544549 - RNA, 22 nt, Artificial Sequence
  Synthetic
uaucuuauuaaaacacaggugc

SEQ ID NO: 544550 - RNA, 23 nt, Artificial Sequence
  Synthetic
cuaucuuauuaaaacacaggugc

SEQ ID NO: 544551 - RNA, 24 nt, Artificial Sequence
  Synthetic
ucuaucuuauuaaaacacaggugc

SEQ ID NO: 544552 - RNA, 18 nt, Artificial Sequence
  Synthetic
gcugcugcaaagaggugc

SEQ ID NO: 544553 - RNA, 19 nt, Artificial Sequence
  Synthetic
ugcugcugcaaagaggugc

SEQ ID NO: 544554 - RNA, 20 nt, Artificial Sequence
  Synthetic
gugcugcugcaaagaggugc

SEQ ID NO: 544555 - RNA, 21 nt, Artificial Sequence
  Synthetic
agugcugcugcaaagaggugc

SEQ ID NO: 544556 - RNA, 22 nt, Artificial Sequence
  Synthetic
aagugcugcugcaaagaggugc

SEQ ID NO: 544557 - RNA, 23 nt, Artificial Sequence
  Synthetic
caagugcugcugcaaagaggugc

SEQ ID NO: 544558 - RNA, 24 nt, Artificial Sequence
  Synthetic
ucaagugcugcugcaaagaggugc

SEQ ID NO: 544559 - RNA, 18 nt, Artificial Sequence
  Synthetic
gguuguggggagaggugc

SEQ ID NO: 544560 - RNA, 19 nt, Artificial Sequence
  Synthetic
ggguuguggggagaggugc

SEQ ID NO: 544561 - RNA, 20 nt, Artificial Sequence
  Synthetic
gggguuguggggagaggugc

SEQ ID NO: 544562 - RNA, 21 nt, Artificial Sequence
  Synthetic
ugggguuguggggagaggugc

SEQ ID NO: 544563 - RNA, 22 nt, Artificial Sequence
  Synthetic
gugggguuguggggagaggugc

SEQ ID NO: 544564 - RNA, 23 nt, Artificial Sequence
  Synthetic
ggugggguuguggggagaggugc

SEQ ID NO: 544565 - RNA, 24 nt, Artificial Sequence
  Synthetic
gggugggguuguggggagaggugc

SEQ ID NO: 544566 - RNA, 18 nt, Artificial Sequence
  Synthetic
ccuaaaaagaggaggugc

SEQ ID NO: 544567 - RNA, 19 nt, Artificial Sequence
  Synthetic
gccuaaaaagaggaggugc

SEQ ID NO: 544568 - RNA, 20 nt, Artificial Sequence
  Synthetic
agccuaaaaagaggaggugc

SEQ ID NO: 544569 - RNA, 21 nt, Artificial Sequence
  Synthetic
cagccuaaaaagaggaggugc

SEQ ID NO: 544570 - RNA, 22 nt, Artificial Sequence
  Synthetic
acagccuaaaaagaggaggugc

SEQ ID NO: 544571 - RNA, 23 nt, Artificial Sequence
  Synthetic
aacagccuaaaaagaggaggugc

SEQ ID NO: 544572 - RNA, 24 nt, Artificial Sequence
  Synthetic
aaacagccuaaaaagaggaggugc

SEQ ID NO: 544573 - RNA, 18 nt, Artificial Sequence
  Synthetic
acucauugagcuaggugc

SEQ ID NO: 544574 - RNA, 19 nt, Artificial Sequence
  Synthetic
cacucauugagcuaggugc

SEQ ID NO: 544575 - RNA, 20 nt, Artificial Sequence
  Synthetic
ucacucauugagcuaggugc

SEQ ID NO: 544576 - RNA, 21 nt, Artificial Sequence
  Synthetic
gucacucauugagcuaggugc

SEQ ID NO: 544577 - RNA, 22 nt, Artificial Sequence
  Synthetic
ugucacucauugagcuaggugc

SEQ ID NO: 544578 - RNA, 23 nt, Artificial Sequence
  Synthetic
gugucacucauugagcuaggugc

SEQ ID NO: 544579 - RNA, 24 nt, Artificial Sequence
  Synthetic
ugugucacucauugagcuaggugc

SEQ ID NO: 544580 - RNA, 18 nt, Artificial Sequence
  Synthetic
agaauuauuuuuaggugc

SEQ ID NO: 544581 - RNA, 19 nt, Artificial Sequence
  Synthetic
gagaauuauuuuuaggugc

SEQ ID NO: 544582 - RNA, 20 nt, Artificial Sequence
  Synthetic
agagaauuauuuuuaggugc

SEQ ID NO: 544583 - RNA, 21 nt, Artificial Sequence
  Synthetic
aagagaauuauuuuuaggugc

SEQ ID NO: 544584 - RNA, 22 nt, Artificial Sequence
  Synthetic
aaagagaauuauuuuuaggugc

SEQ ID NO: 544585 - RNA, 23 nt, Artificial Sequence
  Synthetic
uaaagagaauuauuuuuaggugc

SEQ ID NO: 544586 - RNA, 24 nt, Artificial Sequence
  Synthetic
guaaagagaauuauuuuuaggugc

SEQ ID NO: 544587 - RNA, 18 nt, Artificial Sequence
  Synthetic
cuauuuaauaaacggugc

SEQ ID NO: 544588 - RNA, 19 nt, Artificial Sequence
  Synthetic
ccuauuuaauaaacggugc

SEQ ID NO: 544589 - RNA, 20 nt, Artificial Sequence
  Synthetic
cccuauuuaauaaacggugc

SEQ ID NO: 544590 - RNA, 21 nt, Artificial Sequence
  Synthetic
ucccuauuuaauaaacggugc

SEQ ID NO: 544591 - RNA, 22 nt, Artificial Sequence
  Synthetic
uucccuauuuaauaaacggugc

SEQ ID NO: 544592 - RNA, 23 nt, Artificial Sequence
  Synthetic
auucccuauuuaauaaacggugc

SEQ ID NO: 544593 - RNA, 24 nt, Artificial Sequence
  Synthetic
gauucccuauuuaauaaacggugc

SEQ ID NO: 544594 - RNA, 18 nt, Artificial Sequence
  Synthetic
ugccugggaguugggugc

SEQ ID NO: 544595 - RNA, 19 nt, Artificial Sequence
  Synthetic
uugccugggaguugggugc

SEQ ID NO: 544596 - RNA, 20 nt, Artificial Sequence
  Synthetic
uuugccugggaguugggugc

SEQ ID NO: 544597 - RNA, 21 nt, Artificial Sequence
  Synthetic
auuugccugggaguugggugc

SEQ ID NO: 544598 - RNA, 22 nt, Artificial Sequence
  Synthetic
cauuugccugggaguugggugc

SEQ ID NO: 544599 - RNA, 23 nt, Artificial Sequence
  Synthetic
gcauuugccugggaguugggugc

SEQ ID NO: 544600 - RNA, 24 nt, Artificial Sequence
  Synthetic
ggcauuugccugggaguugggugc

SEQ ID NO: 544601 - RNA, 24 nt, Artificial Sequence
  Synthetic
gauucccuauuuaauaaauggugc

SEQ ID NO: 544602 - RNA, 18 nt, Artificial Sequence
  Synthetic
cucuucaaccaauggugc

SEQ ID NO: 544603 - RNA, 19 nt, Artificial Sequence
  Synthetic
ccucuucaaccaauggugc

SEQ ID NO: 544604 - RNA, 20 nt, Artificial Sequence
  Synthetic
uccucuucaaccaauggugc

SEQ ID NO: 544605 - RNA, 21 nt, Artificial Sequence
  Synthetic
auccucuucaaccaauggugc

SEQ ID NO: 544606 - RNA, 22 nt, Artificial Sequence
  Synthetic
uauccucuucaaccaauggugc

SEQ ID NO: 544607 - RNA, 23 nt, Artificial Sequence
  Synthetic
auauccucuucaaccaauggugc

SEQ ID NO: 544608 - RNA, 24 nt, Artificial Sequence
  Synthetic
gauauccucuucaaccaauggugc

SEQ ID NO: 544609 - RNA, 18 nt, Artificial Sequence
  Synthetic
aauguuagaggauggugc

SEQ ID NO: 544610 - RNA, 19 nt, Artificial Sequence
  Synthetic
uaauguuagaggauggugc

SEQ ID NO: 544611 - RNA, 20 nt, Artificial Sequence
  Synthetic
auaauguuagaggauggugc

SEQ ID NO: 544612 - RNA, 21 nt, Artificial Sequence
  Synthetic
aauaauguuagaggauggugc

SEQ ID NO: 544613 - RNA, 22 nt, Artificial Sequence
  Synthetic
gaauaauguuagaggauggugc

SEQ ID NO: 544614 - RNA, 23 nt, Artificial Sequence
  Synthetic
agaauaauguuagaggauggugc

SEQ ID NO: 544615 - RNA, 24 nt, Artificial Sequence
  Synthetic
uagaauaauguuagaggauggugc

SEQ ID NO: 544616 - RNA, 18 nt, Artificial Sequence
  Synthetic
ugaaaaacugccuggugc

SEQ ID NO: 544617 - RNA, 19 nt, Artificial Sequence
  Synthetic
cugaaaaacugccuggugc

SEQ ID NO: 544618 - RNA, 20 nt, Artificial Sequence
  Synthetic
ccugaaaaacugccuggugc

SEQ ID NO: 544619 - RNA, 21 nt, Artificial Sequence
  Synthetic
uccugaaaaacugccuggugc

SEQ ID NO: 544620 - RNA, 22 nt, Artificial Sequence
  Synthetic
cuccugaaaaacugccuggugc

SEQ ID NO: 544621 - RNA, 23 nt, Artificial Sequence
  Synthetic
gcuccugaaaaacugccuggugc

SEQ ID NO: 544622 - RNA, 24 nt, Artificial Sequence
  Synthetic
ugcuccugaaaaacugccuggugc

SEQ ID NO: 544623 - RNA, 18 nt, Artificial Sequence
  Synthetic
aauuuaaguagcuggugc

SEQ ID NO: 544624 - RNA, 19 nt, Artificial Sequence
  Synthetic
uaauuuaaguagcuggugc

SEQ ID NO: 544625 - RNA, 20 nt, Artificial Sequence
  Synthetic
auaauuuaaguagcuggugc

SEQ ID NO: 544626 - RNA, 21 nt, Artificial Sequence
  Synthetic
gauaauuuaaguagcuggugc

SEQ ID NO: 544627 - RNA, 22 nt, Artificial Sequence
  Synthetic
agauaauuuaaguagcuggugc

SEQ ID NO: 544628 - RNA, 23 nt, Artificial Sequence
  Synthetic
cagauaauuuaaguagcuggugc

SEQ ID NO: 544629 - RNA, 24 nt, Artificial Sequence
  Synthetic
ucagauaauuuaaguagcuggugc

SEQ ID NO: 544630 - RNA, 18 nt, Artificial Sequence
  Synthetic
aaaaacacacaguggugc

SEQ ID NO: 544631 - RNA, 19 nt, Artificial Sequence
  Synthetic
caaaaacacacaguggugc

SEQ ID NO: 544632 - RNA, 20 nt, Artificial Sequence
  Synthetic
acaaaaacacacaguggugc

SEQ ID NO: 544633 - RNA, 21 nt, Artificial Sequence
  Synthetic
cacaaaaacacacaguggugc

SEQ ID NO: 544634 - RNA, 22 nt, Artificial Sequence
  Synthetic
ccacaaaaacacacaguggugc

SEQ ID NO: 544635 - RNA, 23 nt, Artificial Sequence
  Synthetic
gccacaaaaacacacaguggugc

SEQ ID NO: 544636 - RNA, 24 nt, Artificial Sequence
  Synthetic
ugccacaaaaacacacaguggugc

SEQ ID NO: 544637 - RNA, 18 nt, Artificial Sequence
  Synthetic
agagacagauaguggugc

SEQ ID NO: 544638 - RNA, 19 nt, Artificial Sequence
  Synthetic
aagagacagauaguggugc

SEQ ID NO: 544639 - RNA, 20 nt, Artificial Sequence
  Synthetic
aaagagacagauaguggugc

SEQ ID NO: 544640 - RNA, 21 nt, Artificial Sequence
  Synthetic
aaaagagacagauaguggugc

SEQ ID NO: 544641 - RNA, 22 nt, Artificial Sequence
  Synthetic
caaaagagacagauaguggugc

SEQ ID NO: 544642 - RNA, 23 nt, Artificial Sequence
  Synthetic
gcaaaagagacagauaguggugc

SEQ ID NO: 544643 - RNA, 24 nt, Artificial Sequence
  Synthetic
ugcaaaagagacagauaguggugc

SEQ ID NO: 544644 - RNA, 18 nt, Artificial Sequence
  Synthetic
uuggaccugcgguggugc

SEQ ID NO: 544645 - RNA, 19 nt, Artificial Sequence
  Synthetic
auuggaccugcgguggugc

SEQ ID NO: 544646 - RNA, 20 nt, Artificial Sequence
  Synthetic
cauuggaccugcgguggugc

SEQ ID NO: 544647 - RNA, 21 nt, Artificial Sequence
  Synthetic
ucauuggaccugcgguggugc

SEQ ID NO: 544648 - RNA, 22 nt, Artificial Sequence
  Synthetic
uucauuggaccugcgguggugc

SEQ ID NO: 544649 - RNA, 23 nt, Artificial Sequence
  Synthetic
auucauuggaccugcgguggugc

SEQ ID NO: 544650 - RNA, 24 nt, Artificial Sequence
  Synthetic
aauucauuggaccugcgguggugc

SEQ ID NO: 544651 - RNA, 18 nt, Artificial Sequence
  Synthetic
uucauaaagugguggugc

SEQ ID NO: 544652 - RNA, 19 nt, Artificial Sequence
  Synthetic
uuucauaaagugguggugc

SEQ ID NO: 544653 - RNA, 20 nt, Artificial Sequence
  Synthetic
uuuucauaaagugguggugc

SEQ ID NO: 544654 - RNA, 21 nt, Artificial Sequence
  Synthetic
guuuucauaaagugguggugc

SEQ ID NO: 544655 - RNA, 22 nt, Artificial Sequence
  Synthetic
uguuuucauaaagugguggugc

SEQ ID NO: 544656 - RNA, 23 nt, Artificial Sequence
  Synthetic
uuguuuucauaaagugguggugc

SEQ ID NO: 544657 - RNA, 24 nt, Artificial Sequence
  Synthetic
cuuguuuucauaaagugguggugc

SEQ ID NO: 544658 - RNA, 18 nt, Artificial Sequence
  Synthetic
ucacucuaaaaaaugugc

SEQ ID NO: 544659 - RNA, 19 nt, Artificial Sequence
  Synthetic
gucacucuaaaaaaugugc

SEQ ID NO: 544660 - RNA, 20 nt, Artificial Sequence
  Synthetic
ugucacucuaaaaaaugugc

SEQ ID NO: 544661 - RNA, 21 nt, Artificial Sequence
  Synthetic
augucacucuaaaaaaugugc

SEQ ID NO: 544662 - RNA, 22 nt, Artificial Sequence
  Synthetic
aaugucacucuaaaaaaugugc

SEQ ID NO: 544663 - RNA, 23 nt, Artificial Sequence
  Synthetic
aaaugucacucuaaaaaaugugc

SEQ ID NO: 544664 - RNA, 24 nt, Artificial Sequence
  Synthetic
gaaaugucacucuaaaaaaugugc

SEQ ID NO: 544665 - RNA, 18 nt, Artificial Sequence
  Synthetic
ccugacacuggaaugugc

SEQ ID NO: 544666 - RNA, 19 nt, Artificial Sequence
  Synthetic
cccugacacuggaaugugc

SEQ ID NO: 544667 - RNA, 20 nt, Artificial Sequence
  Synthetic
gcccugacacuggaaugugc

SEQ ID NO: 544668 - RNA, 21 nt, Artificial Sequence
  Synthetic
ggcccugacacuggaaugugc

SEQ ID NO: 544669 - RNA, 22 nt, Artificial Sequence
  Synthetic
gggcccugacacuggaaugugc

SEQ ID NO: 544670 - RNA, 23 nt, Artificial Sequence
  Synthetic
agggcccugacacuggaaugugc

SEQ ID NO: 544671 - RNA, 24 nt, Artificial Sequence
  Synthetic
aagggcccugacacuggaaugugc

SEQ ID NO: 544672 - RNA, 18 nt, Artificial Sequence
  Synthetic
uaugaguuaugcaugugc

SEQ ID NO: 544673 - RNA, 19 nt, Artificial Sequence
  Synthetic
uuaugaguuaugcaugugc

SEQ ID NO: 544674 - RNA, 20 nt, Artificial Sequence
  Synthetic
cuuaugaguuaugcaugugc

SEQ ID NO: 544675 - RNA, 21 nt, Artificial Sequence
  Synthetic
ucuuaugaguuaugcaugugc

SEQ ID NO: 544676 - RNA, 22 nt, Artificial Sequence
  Synthetic
gucuuaugaguuaugcaugugc

SEQ ID NO: 544677 - RNA, 23 nt, Artificial Sequence
  Synthetic
cgucuuaugaguuaugcaugugc

SEQ ID NO: 544678 - RNA, 24 nt, Artificial Sequence
  Synthetic
ucgucuuaugaguuaugcaugugc

SEQ ID NO: 544679 - RNA, 18 nt, Artificial Sequence
  Synthetic
ugauuaauaaagaugugc

SEQ ID NO: 544680 - RNA, 19 nt, Artificial Sequence
  Synthetic
uugauuaauaaagaugugc

SEQ ID NO: 544681 - RNA, 20 nt, Artificial Sequence
  Synthetic
uuugauuaauaaagaugugc

SEQ ID NO: 544682 - RNA, 21 nt, Artificial Sequence
  Synthetic
cuuugauuaauaaagaugugc

SEQ ID NO: 544683 - RNA, 22 nt, Artificial Sequence
  Synthetic
acuuugauuaauaaagaugugc

SEQ ID NO: 544684 - RNA, 23 nt, Artificial Sequence
  Synthetic
uacuuugauuaauaaagaugugc

SEQ ID NO: 544685 - RNA, 24 nt, Artificial Sequence
  Synthetic
cuacuuugauuaauaaagaugugc

SEQ ID NO: 544686 - RNA, 18 nt, Artificial Sequence
  Synthetic
ggcauuuagaagaugugc

SEQ ID NO: 544687 - RNA, 19 nt, Artificial Sequence
  Synthetic
uggcauuuagaagaugugc

SEQ ID NO: 544688 - RNA, 20 nt, Artificial Sequence
  Synthetic
cuggcauuuagaagaugugc

SEQ ID NO: 544689 - RNA, 21 nt, Artificial Sequence
  Synthetic
gcuggcauuuagaagaugugc

SEQ ID NO: 544690 - RNA, 22 nt, Artificial Sequence
  Synthetic
ugcuggcauuuagaagaugugc

SEQ ID NO: 544691 - RNA, 23 nt, Artificial Sequence
  Synthetic
augcuggcauuuagaagaugugc

SEQ ID NO: 544692 - RNA, 24 nt, Artificial Sequence
  Synthetic
aaugcuggcauuuagaagaugugc

SEQ ID NO: 544693 - RNA, 18 nt, Artificial Sequence
  Synthetic
aggguuauucagaugugc

SEQ ID NO: 544694 - RNA, 19 nt, Artificial Sequence
  Synthetic
uaggguuauucagaugugc

SEQ ID NO: 544695 - RNA, 20 nt, Artificial Sequence
  Synthetic
auaggguuauucagaugugc

SEQ ID NO: 544696 - RNA, 21 nt, Artificial Sequence
  Synthetic
cauaggguuauucagaugugc

SEQ ID NO: 544697 - RNA, 22 nt, Artificial Sequence
  Synthetic
gcauaggguuauucagaugugc

SEQ ID NO: 544698 - RNA, 23 nt, Artificial Sequence
  Synthetic
ugcauaggguuauucagaugugc

SEQ ID NO: 544699 - RNA, 24 nt, Artificial Sequence
  Synthetic
uugcauaggguuauucagaugugc

SEQ ID NO: 544700 - RNA, 18 nt, Artificial Sequence
  Synthetic
acuuauauucugaugugc

SEQ ID NO: 544701 - RNA, 19 nt, Artificial Sequence
  Synthetic
uacuuauauucugaugugc

SEQ ID NO: 544702 - RNA, 20 nt, Artificial Sequence
  Synthetic
auacuuauauucugaugugc

SEQ ID NO: 544703 - RNA, 21 nt, Artificial Sequence
  Synthetic
uauacuuauauucugaugugc

SEQ ID NO: 544704 - RNA, 22 nt, Artificial Sequence
  Synthetic
auauacuuauauucugaugugc

SEQ ID NO: 544705 - RNA, 23 nt, Artificial Sequence
  Synthetic
aauauacuuauauucugaugugc

SEQ ID NO: 544706 - RNA, 24 nt, Artificial Sequence
  Synthetic
uaauauacuuauauucugaugugc

SEQ ID NO: 544707 - RNA, 18 nt, Artificial Sequence
  Synthetic
ccucagauuauuaugugc

SEQ ID NO: 544708 - RNA, 19 nt, Artificial Sequence
  Synthetic
uccucagauuauuaugugc

SEQ ID NO: 544709 - RNA, 20 nt, Artificial Sequence
  Synthetic
cuccucagauuauuaugugc

SEQ ID NO: 544710 - RNA, 21 nt, Artificial Sequence
  Synthetic
ucuccucagauuauuaugugc

SEQ ID NO: 544711 - RNA, 22 nt, Artificial Sequence
  Synthetic
cucuccucagauuauuaugugc

SEQ ID NO: 544712 - RNA, 23 nt, Artificial Sequence
  Synthetic
gcucuccucagauuauuaugugc

SEQ ID NO: 544713 - RNA, 24 nt, Artificial Sequence
  Synthetic
ugcucuccucagauuauuaugugc

SEQ ID NO: 544714 - RNA, 18 nt, Artificial Sequence
  Synthetic
cucagucagugccugugc

SEQ ID NO: 544715 - RNA, 19 nt, Artificial Sequence
  Synthetic
ccucagucagugccugugc

SEQ ID NO: 544716 - RNA, 20 nt, Artificial Sequence
  Synthetic
gccucagucagugccugugc

SEQ ID NO: 544717 - RNA, 21 nt, Artificial Sequence
  Synthetic
ggccucagucagugccugugc

SEQ ID NO: 544718 - RNA, 22 nt, Artificial Sequence
  Synthetic
uggccucagucagugccugugc

SEQ ID NO: 544719 - RNA, 23 nt, Artificial Sequence
  Synthetic
cuggccucagucagugccugugc

SEQ ID NO: 544720 - RNA, 24 nt, Artificial Sequence
  Synthetic
gcuggccucagucagugccugugc

SEQ ID NO: 544721 - RNA, 18 nt, Artificial Sequence
  Synthetic
cacugaagguuccugugc

SEQ ID NO: 544722 - RNA, 19 nt, Artificial Sequence
  Synthetic
acacugaagguuccugugc

SEQ ID NO: 544723 - RNA, 20 nt, Artificial Sequence
  Synthetic
aacacugaagguuccugugc

SEQ ID NO: 544724 - RNA, 21 nt, Artificial Sequence
  Synthetic
aaacacugaagguuccugugc

SEQ ID NO: 544725 - RNA, 22 nt, Artificial Sequence
  Synthetic
gaaacacugaagguuccugugc

SEQ ID NO: 544726 - RNA, 23 nt, Artificial Sequence
  Synthetic
agaaacacugaagguuccugugc

SEQ ID NO: 544727 - RNA, 24 nt, Artificial Sequence
  Synthetic
gagaaacacugaagguuccugugc

SEQ ID NO: 544728 - RNA, 18 nt, Artificial Sequence
  Synthetic
agagcucgagugcugugc

SEQ ID NO: 544729 - RNA, 19 nt, Artificial Sequence
  Synthetic
cagagcucgagugcugugc

SEQ ID NO: 544730 - RNA, 20 nt, Artificial Sequence
  Synthetic
gcagagcucgagugcugugc

SEQ ID NO: 544731 - RNA, 21 nt, Artificial Sequence
  Synthetic
agcagagcucgagugcugugc

SEQ ID NO: 544732 - RNA, 22 nt, Artificial Sequence
  Synthetic
uagcagagcucgagugcugugc

SEQ ID NO: 544733 - RNA, 23 nt, Artificial Sequence
  Synthetic
uuagcagagcucgagugcugugc

SEQ ID NO: 544734 - RNA, 24 nt, Artificial Sequence
  Synthetic
cuuagcagagcucgagugcugugc

SEQ ID NO: 544735 - RNA, 18 nt, Artificial Sequence
  Synthetic
cuguucuugacucugugc

SEQ ID NO: 544736 - RNA, 19 nt, Artificial Sequence
  Synthetic
gcuguucuugacucugugc

SEQ ID NO: 544737 - RNA, 20 nt, Artificial Sequence
  Synthetic
agcuguucuugacucugugc

SEQ ID NO: 544738 - RNA, 21 nt, Artificial Sequence
  Synthetic
aagcuguucuugacucugugc

SEQ ID NO: 544739 - RNA, 22 nt, Artificial Sequence
  Synthetic
gaagcuguucuugacucugugc

SEQ ID NO: 544740 - RNA, 23 nt, Artificial Sequence
  Synthetic
ugaagcuguucuugacucugugc

SEQ ID NO: 544741 - RNA, 24 nt, Artificial Sequence
  Synthetic
gugaagcuguucuugacucugugc

SEQ ID NO: 544742 - RNA, 18 nt, Artificial Sequence
  Synthetic
gggggggguguucugugc

SEQ ID NO: 544743 - RNA, 19 nt, Artificial Sequence
  Synthetic
ugggggggguguucugugc

SEQ ID NO: 544744 - RNA, 20 nt, Artificial Sequence
  Synthetic
gugggggggguguucugugc

SEQ ID NO: 544745 - RNA, 21 nt, Artificial Sequence
  Synthetic
ugugggggggguguucugugc

SEQ ID NO: 544746 - RNA, 22 nt, Artificial Sequence
  Synthetic
gugugggggggguguucugugc

SEQ ID NO: 544747 - RNA, 23 nt, Artificial Sequence
  Synthetic
ugugugggggggguguucugugc

SEQ ID NO: 544748 - RNA, 24 nt, Artificial Sequence
  Synthetic
gugugugggggggguguucugugc

SEQ ID NO: 544749 - RNA, 18 nt, Artificial Sequence
  Synthetic
guauuugucuuucugugc

SEQ ID NO: 544750 - RNA, 19 nt, Artificial Sequence
  Synthetic
gguauuugucuuucugugc

SEQ ID NO: 544751 - RNA, 20 nt, Artificial Sequence
  Synthetic
ugguauuugucuuucugugc

SEQ ID NO: 544752 - RNA, 21 nt, Artificial Sequence
  Synthetic
gugguauuugucuuucugugc

SEQ ID NO: 544753 - RNA, 22 nt, Artificial Sequence
  Synthetic
ugugguauuugucuuucugugc

SEQ ID NO: 544754 - RNA, 23 nt, Artificial Sequence
  Synthetic
augugguauuugucuuucugugc

SEQ ID NO: 544755 - RNA, 24 nt, Artificial Sequence
  Synthetic
caugugguauuugucuuucugugc

SEQ ID NO: 544756 - RNA, 18 nt, Artificial Sequence
  Synthetic
uauaagcugacagugugc

SEQ ID NO: 544757 - RNA, 19 nt, Artificial Sequence
  Synthetic
auauaagcugacagugugc

SEQ ID NO: 544758 - RNA, 20 nt, Artificial Sequence
  Synthetic
uauauaagcugacagugugc

SEQ ID NO: 544759 - RNA, 21 nt, Artificial Sequence
  Synthetic
guauauaagcugacagugugc

SEQ ID NO: 544760 - RNA, 22 nt, Artificial Sequence
  Synthetic
uguauauaagcugacagugugc

SEQ ID NO: 544761 - RNA, 23 nt, Artificial Sequence
  Synthetic
auguauauaagcugacagugugc

SEQ ID NO: 544762 - RNA, 24 nt, Artificial Sequence
  Synthetic
cauguauauaagcugacagugugc

SEQ ID NO: 544763 - RNA, 18 nt, Artificial Sequence
  Synthetic
cgagagugagcagugugc

SEQ ID NO: 544764 - RNA, 19 nt, Artificial Sequence
  Synthetic
ucgagagugagcagugugc

SEQ ID NO: 544765 - RNA, 20 nt, Artificial Sequence
  Synthetic
uucgagagugagcagugugc

SEQ ID NO: 544766 - RNA, 21 nt, Artificial Sequence
  Synthetic
uuucgagagugagcagugugc

SEQ ID NO: 544767 - RNA, 22 nt, Artificial Sequence
  Synthetic
uuuucgagagugagcagugugc

SEQ ID NO: 544768 - RNA, 23 nt, Artificial Sequence
  Synthetic
guuuucgagagugagcagugugc

SEQ ID NO: 544769 - RNA, 24 nt, Artificial Sequence
  Synthetic
cguuuucgagagugagcagugugc

SEQ ID NO: 544770 - RNA, 18 nt, Artificial Sequence
  Synthetic
gcuugauccaccgugugc

SEQ ID NO: 544771 - RNA, 19 nt, Artificial Sequence
  Synthetic
ggcuugauccaccgugugc

SEQ ID NO: 544772 - RNA, 20 nt, Artificial Sequence
  Synthetic
gggcuugauccaccgugugc

SEQ ID NO: 544773 - RNA, 21 nt, Artificial Sequence
  Synthetic
agggcuugauccaccgugugc

SEQ ID NO: 544774 - RNA, 22 nt, Artificial Sequence
  Synthetic
gagggcuugauccaccgugugc

SEQ ID NO: 544775 - RNA, 23 nt, Artificial Sequence
  Synthetic
agagggcuugauccaccgugugc

SEQ ID NO: 544776 - RNA, 24 nt, Artificial Sequence
  Synthetic
aagagggcuugauccaccgugugc

SEQ ID NO: 544777 - RNA, 18 nt, Artificial Sequence
  Synthetic
ugggugcuuaccgugugc

SEQ ID NO: 544778 - RNA, 19 nt, Artificial Sequence
  Synthetic
uugggugcuuaccgugugc

SEQ ID NO: 544779 - RNA, 20 nt, Artificial Sequence
  Synthetic
auugggugcuuaccgugugc

SEQ ID NO: 544780 - RNA, 21 nt, Artificial Sequence
  Synthetic
uauugggugcuuaccgugugc

SEQ ID NO: 544781 - RNA, 22 nt, Artificial Sequence
  Synthetic
uuauugggugcuuaccgugugc

SEQ ID NO: 544782 - RNA, 23 nt, Artificial Sequence
  Synthetic
uuuauugggugcuuaccgugugc

SEQ ID NO: 544783 - RNA, 24 nt, Artificial Sequence
  Synthetic
guuuauugggugcuuaccgugugc

SEQ ID NO: 544784 - RNA, 18 nt, Artificial Sequence
  Synthetic
cuguguguaucugugugc

SEQ ID NO: 544785 - RNA, 19 nt, Artificial Sequence
  Synthetic
ucuguguguaucugugugc

SEQ ID NO: 544786 - RNA, 20 nt, Artificial Sequence
  Synthetic
cucuguguguaucugugugc

SEQ ID NO: 544787 - RNA, 21 nt, Artificial Sequence
  Synthetic
ucucuguguguaucugugugc

SEQ ID NO: 544788 - RNA, 22 nt, Artificial Sequence
  Synthetic
cucucuguguguaucugugugc

SEQ ID NO: 544789 - RNA, 23 nt, Artificial Sequence
  Synthetic
ucucucuguguguaucugugugc

SEQ ID NO: 544790 - RNA, 24 nt, Artificial Sequence
  Synthetic
uucucucuguguguaucugugugc

SEQ ID NO: 544791 - RNA, 18 nt, Artificial Sequence
  Synthetic
uucugcauguuugugugc

SEQ ID NO: 544792 - RNA, 19 nt, Artificial Sequence
  Synthetic
guucugcauguuugugugc

SEQ ID NO: 544793 - RNA, 20 nt, Artificial Sequence
  Synthetic
uguucugcauguuugugugc

SEQ ID NO: 544794 - RNA, 21 nt, Artificial Sequence
  Synthetic
auguucugcauguuugugugc

SEQ ID NO: 544795 - RNA, 22 nt, Artificial Sequence
  Synthetic
aauguucugcauguuugugugc

SEQ ID NO: 544796 - RNA, 23 nt, Artificial Sequence
  Synthetic
aaauguucugcauguuugugugc

SEQ ID NO: 544797 - RNA, 24 nt, Artificial Sequence
  Synthetic
gaaauguucugcauguuugugugc

SEQ ID NO: 544798 - RNA, 18 nt, Artificial Sequence
  Synthetic
auaagcugucccuugugc

SEQ ID NO: 544799 - RNA, 19 nt, Artificial Sequence
  Synthetic
cauaagcugucccuugugc

SEQ ID NO: 544800 - RNA, 20 nt, Artificial Sequence
  Synthetic
gcauaagcugucccuugugc

SEQ ID NO: 544801 - RNA, 21 nt, Artificial Sequence
  Synthetic
ugcauaagcugucccuugugc

SEQ ID NO: 544802 - RNA, 22 nt, Artificial Sequence
  Synthetic
uugcauaagcugucccuugugc

SEQ ID NO: 544803 - RNA, 23 nt, Artificial Sequence
  Synthetic
uuugcauaagcugucccuugugc

SEQ ID NO: 544804 - RNA, 24 nt, Artificial Sequence
  Synthetic
cuuugcauaagcugucccuugugc

SEQ ID NO: 544805 - RNA, 18 nt, Artificial Sequence
  Synthetic
uacaaaaaaaaguugugc

SEQ ID NO: 544806 - RNA, 19 nt, Artificial Sequence
  Synthetic
uuacaaaaaaaaguugugc

SEQ ID NO: 544807 - RNA, 20 nt, Artificial Sequence
  Synthetic
uuuacaaaaaaaaguugugc

SEQ ID NO: 544808 - RNA, 21 nt, Artificial Sequence
  Synthetic
cuuuacaaaaaaaaguugugc

SEQ ID NO: 544809 - RNA, 22 nt, Artificial Sequence
  Synthetic
ccuuuacaaaaaaaaguugugc

SEQ ID NO: 544810 - RNA, 23 nt, Artificial Sequence
  Synthetic
uccuuuacaaaaaaaaguugugc

SEQ ID NO: 544811 - RNA, 24 nt, Artificial Sequence
  Synthetic
cuccuuuacaaaaaaaaguugugc

SEQ ID NO: 544812 - RNA, 18 nt, Artificial Sequence
  Synthetic
cguccuccaagguugugc

SEQ ID NO: 544813 - RNA, 19 nt, Artificial Sequence
  Synthetic
ccguccuccaagguugugc

SEQ ID NO: 544814 - RNA, 20 nt, Artificial Sequence
  Synthetic
accguccuccaagguugugc

SEQ ID NO: 544815 - RNA, 21 nt, Artificial Sequence
  Synthetic
caccguccuccaagguugugc

SEQ ID NO: 544816 - RNA, 22 nt, Artificial Sequence
  Synthetic
ccaccguccuccaagguugugc

SEQ ID NO: 544817 - RNA, 23 nt, Artificial Sequence
  Synthetic
gccaccguccuccaagguugugc

SEQ ID NO: 544818 - RNA, 24 nt, Artificial Sequence
  Synthetic
agccaccguccuccaagguugugc

SEQ ID NO: 544819 - RNA, 18 nt, Artificial Sequence
  Synthetic
gcugcuuagaauuugugc

SEQ ID NO: 544820 - RNA, 19 nt, Artificial Sequence
  Synthetic
agcugcuuagaauuugugc

SEQ ID NO: 544821 - RNA, 20 nt, Artificial Sequence
  Synthetic
uagcugcuuagaauuugugc

SEQ ID NO: 544822 - RNA, 21 nt, Artificial Sequence
  Synthetic
auagcugcuuagaauuugugc

SEQ ID NO: 544823 - RNA, 22 nt, Artificial Sequence
  Synthetic
aauagcugcuuagaauuugugc

SEQ ID NO: 544824 - RNA, 23 nt, Artificial Sequence
  Synthetic
aaauagcugcuuagaauuugugc

SEQ ID NO: 544825 - RNA, 24 nt, Artificial Sequence
  Synthetic
caaauagcugcuuagaauuugugc

SEQ ID NO: 544826 - RNA, 18 nt, Artificial Sequence
  Synthetic
ucuuuugcaucuuugugc

SEQ ID NO: 544827 - RNA, 19 nt, Artificial Sequence
  Synthetic
uucuuuugcaucuuugugc

SEQ ID NO: 544828 - RNA, 20 nt, Artificial Sequence
  Synthetic
uuucuuuugcaucuuugugc

SEQ ID NO: 544829 - RNA, 21 nt, Artificial Sequence
  Synthetic
auuucuuuugcaucuuugugc

SEQ ID NO: 544830 - RNA, 22 nt, Artificial Sequence
  Synthetic
cauuucuuuugcaucuuugugc

SEQ ID NO: 544831 - RNA, 23 nt, Artificial Sequence
  Synthetic
acauuucuuuugcaucuuugugc

SEQ ID NO: 544832 - RNA, 24 nt, Artificial Sequence
  Synthetic
cacauuucuuuugcaucuuugugc

SEQ ID NO: 544833 - RNA, 18 nt, Artificial Sequence
  Synthetic
uuacugcugucuuugugc

SEQ ID NO: 544834 - RNA, 19 nt, Artificial Sequence
  Synthetic
cuuacugcugucuuugugc

SEQ ID NO: 544835 - RNA, 20 nt, Artificial Sequence
  Synthetic
acuuacugcugucuuugugc

SEQ ID NO: 544836 - RNA, 21 nt, Artificial Sequence
  Synthetic
cacuuacugcugucuuugugc

SEQ ID NO: 544837 - RNA, 22 nt, Artificial Sequence
  Synthetic
gcacuuacugcugucuuugugc

SEQ ID NO: 544838 - RNA, 23 nt, Artificial Sequence
  Synthetic
agcacuuacugcugucuuugugc

SEQ ID NO: 544839 - RNA, 24 nt, Artificial Sequence
  Synthetic
cagcacuuacugcugucuuugugc

SEQ ID NO: 544840 - RNA, 18 nt, Artificial Sequence
  Synthetic
guggaagauaguuugugc

SEQ ID NO: 544841 - RNA, 19 nt, Artificial Sequence
  Synthetic
uguggaagauaguuugugc

SEQ ID NO: 544842 - RNA, 20 nt, Artificial Sequence
  Synthetic
uuguggaagauaguuugugc

SEQ ID NO: 544843 - RNA, 21 nt, Artificial Sequence
  Synthetic
auuguggaagauaguuugugc

SEQ ID NO: 544844 - RNA, 22 nt, Artificial Sequence
  Synthetic
uauuguggaagauaguuugugc

SEQ ID NO: 544845 - RNA, 23 nt, Artificial Sequence
  Synthetic
auauuguggaagauaguuugugc

SEQ ID NO: 544846 - RNA, 24 nt, Artificial Sequence
  Synthetic
uauauuguggaagauaguuugugc

SEQ ID NO: 544847 - RNA, 18 nt, Artificial Sequence
  Synthetic
agcugcccaauuuugugc

SEQ ID NO: 544848 - RNA, 19 nt, Artificial Sequence
  Synthetic
cagcugcccaauuuugugc

SEQ ID NO: 544849 - RNA, 20 nt, Artificial Sequence
  Synthetic
acagcugcccaauuuugugc

SEQ ID NO: 544850 - RNA, 21 nt, Artificial Sequence
  Synthetic
aacagcugcccaauuuugugc

SEQ ID NO: 544851 - RNA, 22 nt, Artificial Sequence
  Synthetic
aaacagcugcccaauuuugugc

SEQ ID NO: 544852 - RNA, 23 nt, Artificial Sequence
  Synthetic
caaacagcugcccaauuuugugc

SEQ ID NO: 544853 - RNA, 24 nt, Artificial Sequence
  Synthetic
ccaaacagcugcccaauuuugugc

SEQ ID NO: 544854 - RNA, 18 nt, Artificial Sequence
  Synthetic
gcagguacuuuuuugugc

SEQ ID NO: 544855 - RNA, 19 nt, Artificial Sequence
  Synthetic
agcagguacuuuuuugugc

SEQ ID NO: 544856 - RNA, 20 nt, Artificial Sequence
  Synthetic
gagcagguacuuuuuugugc

SEQ ID NO: 544857 - RNA, 21 nt, Artificial Sequence
  Synthetic
agagcagguacuuuuuugugc

SEQ ID NO: 544858 - RNA, 22 nt, Artificial Sequence
  Synthetic
aagagcagguacuuuuuugugc

SEQ ID NO: 544859 - RNA, 23 nt, Artificial Sequence
  Synthetic
gaagagcagguacuuuuuugugc

SEQ ID NO: 544860 - RNA, 24 nt, Artificial Sequence
  Synthetic
agaagagcagguacuuuuuugugc

SEQ ID NO: 544861 - RNA, 18 nt, Artificial Sequence
  Synthetic
ggauguggagaaaauugc

SEQ ID NO: 544862 - RNA, 19 nt, Artificial Sequence
  Synthetic
uggauguggagaaaauugc

SEQ ID NO: 544863 - RNA, 20 nt, Artificial Sequence
  Synthetic
cuggauguggagaaaauugc

SEQ ID NO: 544864 - RNA, 21 nt, Artificial Sequence
  Synthetic
acuggauguggagaaaauugc

SEQ ID NO: 544865 - RNA, 22 nt, Artificial Sequence
  Synthetic
cacuggauguggagaaaauugc

SEQ ID NO: 544866 - RNA, 23 nt, Artificial Sequence
  Synthetic
ucacuggauguggagaaaauugc

SEQ ID NO: 544867 - RNA, 24 nt, Artificial Sequence
  Synthetic
gucacuggauguggagaaaauugc

SEQ ID NO: 544868 - RNA, 18 nt, Artificial Sequence
  Synthetic
gaaauguguggaaauugc

SEQ ID NO: 544869 - RNA, 19 nt, Artificial Sequence
  Synthetic
agaaauguguggaaauugc

SEQ ID NO: 544870 - RNA, 20 nt, Artificial Sequence
  Synthetic
cagaaauguguggaaauugc

SEQ ID NO: 544871 - RNA, 21 nt, Artificial Sequence
  Synthetic
ucagaaauguguggaaauugc

SEQ ID NO: 544872 - RNA, 22 nt, Artificial Sequence
  Synthetic
aucagaaauguguggaaauugc

SEQ ID NO: 544873 - RNA, 23 nt, Artificial Sequence
  Synthetic
aaucagaaauguguggaaauugc

SEQ ID NO: 544874 - RNA, 24 nt, Artificial Sequence
  Synthetic
gaaucagaaauguguggaaauugc

SEQ ID NO: 544875 - RNA, 18 nt, Artificial Sequence
  Synthetic
gaggagauuggaaauugc

SEQ ID NO: 544876 - RNA, 19 nt, Artificial Sequence
  Synthetic
agaggagauuggaaauugc

SEQ ID NO: 544877 - RNA, 20 nt, Artificial Sequence
  Synthetic
cagaggagauuggaaauugc

SEQ ID NO: 544878 - RNA, 21 nt, Artificial Sequence
  Synthetic
acagaggagauuggaaauugc

SEQ ID NO: 544879 - RNA, 22 nt, Artificial Sequence
  Synthetic
uacagaggagauuggaaauugc

SEQ ID NO: 544880 - RNA, 23 nt, Artificial Sequence
  Synthetic
guacagaggagauuggaaauugc

SEQ ID NO: 544881 - RNA, 24 nt, Artificial Sequence
  Synthetic
aguacagaggagauuggaaauugc

SEQ ID NO: 544882 - RNA, 18 nt, Artificial Sequence
  Synthetic
cuguaaaaccuaaauugc

SEQ ID NO: 544883 - RNA, 19 nt, Artificial Sequence
  Synthetic
ccuguaaaaccuaaauugc

SEQ ID NO: 544884 - RNA, 20 nt, Artificial Sequence
  Synthetic
gccuguaaaaccuaaauugc

SEQ ID NO: 544885 - RNA, 21 nt, Artificial Sequence
  Synthetic
ugccuguaaaaccuaaauugc

SEQ ID NO: 544886 - RNA, 22 nt, Artificial Sequence
  Synthetic
uugccuguaaaaccuaaauugc

SEQ ID NO: 544887 - RNA, 23 nt, Artificial Sequence
  Synthetic
guugccuguaaaaccuaaauugc

SEQ ID NO: 544888 - RNA, 24 nt, Artificial Sequence
  Synthetic
aguugccuguaaaaccuaaauugc

SEQ ID NO: 544889 - RNA, 18 nt, Artificial Sequence
  Synthetic
guguuaggaaacaauugc

SEQ ID NO: 544890 - RNA, 19 nt, Artificial Sequence
  Synthetic
uguguuaggaaacaauugc

SEQ ID NO: 544891 - RNA, 20 nt, Artificial Sequence
  Synthetic
cuguguuaggaaacaauugc

SEQ ID NO: 544892 - RNA, 21 nt, Artificial Sequence
  Synthetic
ucuguguuaggaaacaauugc

SEQ ID NO: 544893 - RNA, 22 nt, Artificial Sequence
  Synthetic
aucuguguuaggaaacaauugc

SEQ ID NO: 544894 - RNA, 23 nt, Artificial Sequence
  Synthetic
caucuguguuaggaaacaauugc

SEQ ID NO: 544895 - RNA, 24 nt, Artificial Sequence
  Synthetic
acaucuguguuaggaaacaauugc

SEQ ID NO: 544896 - RNA, 18 nt, Artificial Sequence
  Synthetic
ccaucguguuccaauugc

SEQ ID NO: 544897 - RNA, 19 nt, Artificial Sequence
  Synthetic
gccaucguguuccaauugc

SEQ ID NO: 544898 - RNA, 20 nt, Artificial Sequence
  Synthetic
ugccaucguguuccaauugc

SEQ ID NO: 544899 - RNA, 21 nt, Artificial Sequence
  Synthetic
uugccaucguguuccaauugc

SEQ ID NO: 544900 - RNA, 22 nt, Artificial Sequence
  Synthetic
cuugccaucguguuccaauugc

SEQ ID NO: 544901 - RNA, 23 nt, Artificial Sequence
  Synthetic
acuugccaucguguuccaauugc

SEQ ID NO: 544902 - RNA, 24 nt, Artificial Sequence
  Synthetic
uacuugccaucguguuccaauugc

SEQ ID NO: 544903 - RNA, 18 nt, Artificial Sequence
  Synthetic
ucaaaaucaagcaauugc

SEQ ID NO: 544904 - RNA, 19 nt, Artificial Sequence
  Synthetic
gucaaaaucaagcaauugc

SEQ ID NO: 544905 - RNA, 20 nt, Artificial Sequence
  Synthetic
ugucaaaaucaagcaauugc

SEQ ID NO: 544906 - RNA, 21 nt, Artificial Sequence
  Synthetic
gugucaaaaucaagcaauugc

SEQ ID NO: 544907 - RNA, 22 nt, Artificial Sequence
  Synthetic
agugucaaaaucaagcaauugc

SEQ ID NO: 544908 - RNA, 23 nt, Artificial Sequence
  Synthetic
aagugucaaaaucaagcaauugc

SEQ ID NO: 544909 - RNA, 24 nt, Artificial Sequence
  Synthetic
gaagugucaaaaucaagcaauugc

SEQ ID NO: 544910 - RNA, 18 nt, Artificial Sequence
  Synthetic
auucuaguaggcaauugc

SEQ ID NO: 544911 - RNA, 19 nt, Artificial Sequence
  Synthetic
cauucuaguaggcaauugc

SEQ ID NO: 544912 - RNA, 20 nt, Artificial Sequence
  Synthetic
acauucuaguaggcaauugc

SEQ ID NO: 544913 - RNA, 21 nt, Artificial Sequence
  Synthetic
uacauucuaguaggcaauugc

SEQ ID NO: 544914 - RNA, 22 nt, Artificial Sequence
  Synthetic
uuacauucuaguaggcaauugc

SEQ ID NO: 544915 - RNA, 23 nt, Artificial Sequence
  Synthetic
cuuacauucuaguaggcaauugc

SEQ ID NO: 544916 - RNA, 24 nt, Artificial Sequence
  Synthetic
acuuacauucuaguaggcaauugc

SEQ ID NO: 544917 - RNA, 18 nt, Artificial Sequence
  Synthetic
gcugagacagagaauugc

SEQ ID NO: 544918 - RNA, 19 nt, Artificial Sequence
  Synthetic
ggcugagacagagaauugc

SEQ ID NO: 544919 - RNA, 20 nt, Artificial Sequence
  Synthetic
aggcugagacagagaauugc

SEQ ID NO: 544920 - RNA, 21 nt, Artificial Sequence
  Synthetic
gaggcugagacagagaauugc

SEQ ID NO: 544921 - RNA, 22 nt, Artificial Sequence
  Synthetic
ggaggcugagacagagaauugc

SEQ ID NO: 544922 - RNA, 23 nt, Artificial Sequence
  Synthetic
gggaggcugagacagagaauugc

SEQ ID NO: 544923 - RNA, 24 nt, Artificial Sequence
  Synthetic
cgggaggcugagacagagaauugc

SEQ ID NO: 544924 - RNA, 18 nt, Artificial Sequence
  Synthetic
gcugaggcagagaauugc

SEQ ID NO: 544925 - RNA, 19 nt, Artificial Sequence
  Synthetic
ggcugaggcagagaauugc

SEQ ID NO: 544926 - RNA, 20 nt, Artificial Sequence
  Synthetic
aggcugaggcagagaauugc

SEQ ID NO: 544927 - RNA, 21 nt, Artificial Sequence
  Synthetic
gaggcugaggcagagaauugc

SEQ ID NO: 544928 - RNA, 22 nt, Artificial Sequence
  Synthetic
ggaggcugaggcagagaauugc

SEQ ID NO: 544929 - RNA, 23 nt, Artificial Sequence
  Synthetic
aggaggcugaggcagagaauugc

SEQ ID NO: 544930 - RNA, 24 nt, Artificial Sequence
  Synthetic
caggaggcugaggcagagaauugc

SEQ ID NO: 544931 - RNA, 23 nt, Artificial Sequence
  Synthetic
gggaggcugaggcagagaauugc

SEQ ID NO: 544932 - RNA, 24 nt, Artificial Sequence
  Synthetic
cgggaggcugaggcagagaauugc

SEQ ID NO: 544933 - RNA, 18 nt, Artificial Sequence
  Synthetic
ccaaggaaggagaauugc

SEQ ID NO: 544934 - RNA, 19 nt, Artificial Sequence
  Synthetic
gccaaggaaggagaauugc

SEQ ID NO: 544935 - RNA, 20 nt, Artificial Sequence
  Synthetic
ggccaaggaaggagaauugc

SEQ ID NO: 544936 - RNA, 21 nt, Artificial Sequence
  Synthetic
aggccaaggaaggagaauugc

SEQ ID NO: 544937 - RNA, 22 nt, Artificial Sequence
  Synthetic
gaggccaaggaaggagaauugc

SEQ ID NO: 544938 - RNA, 23 nt, Artificial Sequence
  Synthetic
ggaggccaaggaaggagaauugc

SEQ ID NO: 544939 - RNA, 24 nt, Artificial Sequence
  Synthetic
gggaggccaaggaaggagaauugc

SEQ ID NO: 544940 - RNA, 18 nt, Artificial Sequence
  Synthetic
cuaaggcaggagaauugc

SEQ ID NO: 544941 - RNA, 19 nt, Artificial Sequence
  Synthetic
gcuaaggcaggagaauugc

SEQ ID NO: 544942 - RNA, 20 nt, Artificial Sequence
  Synthetic
ggcuaaggcaggagaauugc

SEQ ID NO: 544943 - RNA, 21 nt, Artificial Sequence
  Synthetic
aggcuaaggcaggagaauugc

SEQ ID NO: 544944 - RNA, 22 nt, Artificial Sequence
  Synthetic
gaggcuaaggcaggagaauugc

SEQ ID NO: 544945 - RNA, 23 nt, Artificial Sequence
  Synthetic
ggaggcuaaggcaggagaauugc

SEQ ID NO: 544946 - RNA, 24 nt, Artificial Sequence
  Synthetic
gggaggcuaaggcaggagaauugc

SEQ ID NO: 544947 - RNA, 24 nt, Artificial Sequence
  Synthetic
uggaggcugaggcaggagaauugc

SEQ ID NO: 544948 - RNA, 18 nt, Artificial Sequence
  Synthetic
cugaggcgggagaauugc

SEQ ID NO: 544949 - RNA, 19 nt, Artificial Sequence
  Synthetic
gcugaggcgggagaauugc

SEQ ID NO: 544950 - RNA, 20 nt, Artificial Sequence
  Synthetic
ggcugaggcgggagaauugc

SEQ ID NO: 544951 - RNA, 21 nt, Artificial Sequence
  Synthetic
aggcugaggcgggagaauugc

SEQ ID NO: 544952 - RNA, 22 nt, Artificial Sequence
  Synthetic
gaggcugaggcgggagaauugc

SEQ ID NO: 544953 - RNA, 23 nt, Artificial Sequence
  Synthetic
ggaggcugaggcgggagaauugc

SEQ ID NO: 544954 - RNA, 24 nt, Artificial Sequence
  Synthetic
gggaggcugaggcgggagaauugc

SEQ ID NO: 544955 - RNA, 18 nt, Artificial Sequence
  Synthetic
ucaauaugagggaauugc

SEQ ID NO: 544956 - RNA, 19 nt, Artificial Sequence
  Synthetic
uucaauaugagggaauugc

SEQ ID NO: 544957 - RNA, 20 nt, Artificial Sequence
  Synthetic
auucaauaugagggaauugc

SEQ ID NO: 544958 - RNA, 21 nt, Artificial Sequence
  Synthetic
uauucaauaugagggaauugc

SEQ ID NO: 544959 - RNA, 22 nt, Artificial Sequence
  Synthetic
auauucaauaugagggaauugc

SEQ ID NO: 544960 - RNA, 23 nt, Artificial Sequence
  Synthetic
aauauucaauaugagggaauugc

SEQ ID NO: 544961 - RNA, 24 nt, Artificial Sequence
  Synthetic
aaauauucaauaugagggaauugc

SEQ ID NO: 544962 - RNA, 18 nt, Artificial Sequence
  Synthetic
aaaacaaagaauaauugc

SEQ ID NO: 544963 - RNA, 19 nt, Artificial Sequence
  Synthetic
uaaaacaaagaauaauugc

SEQ ID NO: 544964 - RNA, 20 nt, Artificial Sequence
  Synthetic
guaaaacaaagaauaauugc

SEQ ID NO: 544965 - RNA, 21 nt, Artificial Sequence
  Synthetic
uguaaaacaaagaauaauugc

SEQ ID NO: 544966 - RNA, 22 nt, Artificial Sequence
  Synthetic
uuguaaaacaaagaauaauugc

SEQ ID NO: 544967 - RNA, 23 nt, Artificial Sequence
  Synthetic
uuuguaaaacaaagaauaauugc

SEQ ID NO: 544968 - RNA, 24 nt, Artificial Sequence
  Synthetic
guuuguaaaacaaagaauaauugc

SEQ ID NO: 544969 - RNA, 18 nt, Artificial Sequence
  Synthetic
aacagaaaagauaauugc

SEQ ID NO: 544970 - RNA, 19 nt, Artificial Sequence
  Synthetic
uaacagaaaagauaauugc

SEQ ID NO: 544971 - RNA, 20 nt, Artificial Sequence
  Synthetic
guaacagaaaagauaauugc

SEQ ID NO: 544972 - RNA, 21 nt, Artificial Sequence
  Synthetic
uguaacagaaaagauaauugc

SEQ ID NO: 544973 - RNA, 22 nt, Artificial Sequence
  Synthetic
uuguaacagaaaagauaauugc

SEQ ID NO: 544974 - RNA, 23 nt, Artificial Sequence
  Synthetic
uuuguaacagaaaagauaauugc

SEQ ID NO: 544975 - RNA, 24 nt, Artificial Sequence
  Synthetic
guuuguaacagaaaagauaauugc

SEQ ID NO: 544976 - RNA, 18 nt, Artificial Sequence
  Synthetic
gcuauaaaauuuaauugc

SEQ ID NO: 544977 - RNA, 19 nt, Artificial Sequence
  Synthetic
agcuauaaaauuuaauugc

SEQ ID NO: 544978 - RNA, 20 nt, Artificial Sequence
  Synthetic
uagcuauaaaauuuaauugc

SEQ ID NO: 544979 - RNA, 21 nt, Artificial Sequence
  Synthetic
guagcuauaaaauuuaauugc

SEQ ID NO: 544980 - RNA, 22 nt, Artificial Sequence
  Synthetic
uguagcuauaaaauuuaauugc

SEQ ID NO: 544981 - RNA, 23 nt, Artificial Sequence
  Synthetic
auguagcuauaaaauuuaauugc

SEQ ID NO: 544982 - RNA, 24 nt, Artificial Sequence
  Synthetic
uauguagcuauaaaauuuaauugc

SEQ ID NO: 544983 - RNA, 18 nt, Artificial Sequence
  Synthetic
acauguguucaacauugc

SEQ ID NO: 544984 - RNA, 19 nt, Artificial Sequence
  Synthetic
aacauguguucaacauugc

SEQ ID NO: 544985 - RNA, 20 nt, Artificial Sequence
  Synthetic
uaacauguguucaacauugc

SEQ ID NO: 544986 - RNA, 21 nt, Artificial Sequence
  Synthetic
uuaacauguguucaacauugc

SEQ ID NO: 544987 - RNA, 22 nt, Artificial Sequence
  Synthetic
guuaacauguguucaacauugc

SEQ ID NO: 544988 - RNA, 23 nt, Artificial Sequence
  Synthetic
uguuaacauguguucaacauugc

SEQ ID NO: 544989 - RNA, 24 nt, Artificial Sequence
  Synthetic
auguuaacauguguucaacauugc

SEQ ID NO: 544990 - RNA, 18 nt, Artificial Sequence
  Synthetic
aguugcccaugacauugc

SEQ ID NO: 544991 - RNA, 19 nt, Artificial Sequence
  Synthetic
uaguugcccaugacauugc

SEQ ID NO: 544992 - RNA, 20 nt, Artificial Sequence
  Synthetic
uuaguugcccaugacauugc

SEQ ID NO: 544993 - RNA, 21 nt, Artificial Sequence
  Synthetic
cuuaguugcccaugacauugc

SEQ ID NO: 544994 - RNA, 22 nt, Artificial Sequence
  Synthetic
ccuuaguugcccaugacauugc

SEQ ID NO: 544995 - RNA, 23 nt, Artificial Sequence
  Synthetic
cccuuaguugcccaugacauugc

SEQ ID NO: 544996 - RNA, 24 nt, Artificial Sequence
  Synthetic
ucccuuaguugcccaugacauugc

SEQ ID NO: 544997 - RNA, 18 nt, Artificial Sequence
  Synthetic
uugucagcaauccauugc

SEQ ID NO: 544998 - RNA, 19 nt, Artificial Sequence
  Synthetic
guugucagcaauccauugc

SEQ ID NO: 544999 - RNA, 20 nt, Artificial Sequence
  Synthetic
uguugucagcaauccauugc

SEQ ID NO: 545000 - RNA, 21 nt, Artificial Sequence
  Synthetic
auguugucagcaauccauugc

SEQ ID NO: 545001 - RNA, 22 nt, Artificial Sequence
  Synthetic
uauguugucagcaauccauugc

SEQ ID NO: 545002 - RNA, 23 nt, Artificial Sequence
  Synthetic
uuauguugucagcaauccauugc

SEQ ID NO: 545003 - RNA, 24 nt, Artificial Sequence
  Synthetic
auuauguugucagcaauccauugc

SEQ ID NO: 545004 - RNA, 18 nt, Artificial Sequence
  Synthetic
uuguuugauuaucauugc

SEQ ID NO: 545005 - RNA, 19 nt, Artificial Sequence
  Synthetic
cuuguuugauuaucauugc

SEQ ID NO: 545006 - RNA, 20 nt, Artificial Sequence
  Synthetic
ucuuguuugauuaucauugc

SEQ ID NO: 545007 - RNA, 21 nt, Artificial Sequence
  Synthetic
uucuuguuugauuaucauugc

SEQ ID NO: 545008 - RNA, 22 nt, Artificial Sequence
  Synthetic
uuucuuguuugauuaucauugc

SEQ ID NO: 545009 - RNA, 23 nt, Artificial Sequence
  Synthetic
uuuucuuguuugauuaucauugc

SEQ ID NO: 545010 - RNA, 24 nt, Artificial Sequence
  Synthetic
guuuucuuguuugauuaucauugc

SEQ ID NO: 545011 - RNA, 18 nt, Artificial Sequence
  Synthetic
uucaugagccuucauugc

SEQ ID NO: 545012 - RNA, 19 nt, Artificial Sequence
  Synthetic
uuucaugagccuucauugc

SEQ ID NO: 545013 - RNA, 20 nt, Artificial Sequence
  Synthetic
auuucaugagccuucauugc

SEQ ID NO: 545014 - RNA, 21 nt, Artificial Sequence
  Synthetic
cauuucaugagccuucauugc

SEQ ID NO: 545015 - RNA, 22 nt, Artificial Sequence
  Synthetic
ucauuucaugagccuucauugc

SEQ ID NO: 545016 - RNA, 23 nt, Artificial Sequence
  Synthetic
aucauuucaugagccuucauugc

SEQ ID NO: 545017 - RNA, 24 nt, Artificial Sequence
  Synthetic
uaucauuucaugagccuucauugc

SEQ ID NO: 545018 - RNA, 18 nt, Artificial Sequence
  Synthetic
gugccagcauuucauugc

SEQ ID NO: 545019 - RNA, 19 nt, Artificial Sequence
  Synthetic
agugccagcauuucauugc

SEQ ID NO: 545020 - RNA, 20 nt, Artificial Sequence
  Synthetic
cagugccagcauuucauugc

SEQ ID NO: 545021 - RNA, 21 nt, Artificial Sequence
  Synthetic
ccagugccagcauuucauugc

SEQ ID NO: 545022 - RNA, 22 nt, Artificial Sequence
  Synthetic
cccagugccagcauuucauugc

SEQ ID NO: 545023 - RNA, 23 nt, Artificial Sequence
  Synthetic
ucccagugccagcauuucauugc

SEQ ID NO: 545024 - RNA, 24 nt, Artificial Sequence
  Synthetic
uucccagugccagcauuucauugc

SEQ ID NO: 545025 - RNA, 18 nt, Artificial Sequence
  Synthetic
ccaaggugggcagauugc

SEQ ID NO: 545026 - RNA, 19 nt, Artificial Sequence
  Synthetic
gccaaggugggcagauugc

SEQ ID NO: 545027 - RNA, 20 nt, Artificial Sequence
  Synthetic
ggccaaggugggcagauugc

SEQ ID NO: 545028 - RNA, 21 nt, Artificial Sequence
  Synthetic
aggccaaggugggcagauugc

SEQ ID NO: 545029 - RNA, 22 nt, Artificial Sequence
  Synthetic
gaggccaaggugggcagauugc

SEQ ID NO: 545030 - RNA, 23 nt, Artificial Sequence
  Synthetic
ggaggccaaggugggcagauugc

SEQ ID NO: 545031 - RNA, 24 nt, Artificial Sequence
  Synthetic
gggaggccaaggugggcagauugc

SEQ ID NO: 545032 - RNA, 18 nt, Artificial Sequence
  Synthetic
auaaaauuguacgauugc

SEQ ID NO: 545033 - RNA, 19 nt, Artificial Sequence
  Synthetic
aauaaaauuguacgauugc

SEQ ID NO: 545034 - RNA, 20 nt, Artificial Sequence
  Synthetic
gaauaaaauuguacgauugc

SEQ ID NO: 545035 - RNA, 21 nt, Artificial Sequence
  Synthetic
agaauaaaauuguacgauugc

SEQ ID NO: 545036 - RNA, 22 nt, Artificial Sequence
  Synthetic
aagaauaaaauuguacgauugc

SEQ ID NO: 545037 - RNA, 23 nt, Artificial Sequence
  Synthetic
aaagaauaaaauuguacgauugc

SEQ ID NO: 545038 - RNA, 24 nt, Artificial Sequence
  Synthetic
aaaagaauaaaauuguacgauugc

SEQ ID NO: 545039 - RNA, 18 nt, Artificial Sequence
  Synthetic
cugaggcaggaggauugc

SEQ ID NO: 545040 - RNA, 19 nt, Artificial Sequence
  Synthetic
gcugaggcaggaggauugc

SEQ ID NO: 545041 - RNA, 20 nt, Artificial Sequence
  Synthetic
ggcugaggcaggaggauugc

SEQ ID NO: 545042 - RNA, 21 nt, Artificial Sequence
  Synthetic
aggcugaggcaggaggauugc

SEQ ID NO: 545043 - RNA, 22 nt, Artificial Sequence
  Synthetic
gaggcugaggcaggaggauugc

SEQ ID NO: 545044 - RNA, 23 nt, Artificial Sequence
  Synthetic
ggaggcugaggcaggaggauugc

SEQ ID NO: 545045 - RNA, 24 nt, Artificial Sequence
  Synthetic
gggaggcugaggcaggaggauugc

SEQ ID NO: 545046 - RNA, 18 nt, Artificial Sequence
  Synthetic
cugaaggaggaggauugc

SEQ ID NO: 545047 - RNA, 19 nt, Artificial Sequence
  Synthetic
gcugaaggaggaggauugc

SEQ ID NO: 545048 - RNA, 20 nt, Artificial Sequence
  Synthetic
ggcugaaggaggaggauugc

SEQ ID NO: 545049 - RNA, 21 nt, Artificial Sequence
  Synthetic
aggcugaaggaggaggauugc

SEQ ID NO: 545050 - RNA, 22 nt, Artificial Sequence
  Synthetic
uaggcugaaggaggaggauugc

SEQ ID NO: 545051 - RNA, 23 nt, Artificial Sequence
  Synthetic
guaggcugaaggaggaggauugc

SEQ ID NO: 545052 - RNA, 24 nt, Artificial Sequence
  Synthetic
aguaggcugaaggaggaggauugc

SEQ ID NO: 545053 - RNA, 18 nt, Artificial Sequence
  Synthetic
augaggcgggaggauugc

SEQ ID NO: 545054 - RNA, 19 nt, Artificial Sequence
  Synthetic
gaugaggcgggaggauugc

SEQ ID NO: 545055 - RNA, 20 nt, Artificial Sequence
  Synthetic
ggaugaggcgggaggauugc

SEQ ID NO: 545056 - RNA, 21 nt, Artificial Sequence
  Synthetic
aggaugaggcgggaggauugc

SEQ ID NO: 545057 - RNA, 22 nt, Artificial Sequence
  Synthetic
gaggaugaggcgggaggauugc

SEQ ID NO: 545058 - RNA, 23 nt, Artificial Sequence
  Synthetic
agaggaugaggcgggaggauugc

SEQ ID NO: 545059 - RNA, 24 nt, Artificial Sequence
  Synthetic
aagaggaugaggcgggaggauugc

SEQ ID NO: 545060 - RNA, 18 nt, Artificial Sequence
  Synthetic
gugauaugggaggauugc

SEQ ID NO: 545061 - RNA, 19 nt, Artificial Sequence
  Synthetic
ggugauaugggaggauugc

SEQ ID NO: 545062 - RNA, 20 nt, Artificial Sequence
  Synthetic
gggugauaugggaggauugc

SEQ ID NO: 545063 - RNA, 21 nt, Artificial Sequence
  Synthetic
agggugauaugggaggauugc

SEQ ID NO: 545064 - RNA, 22 nt, Artificial Sequence
  Synthetic
gagggugauaugggaggauugc

SEQ ID NO: 545065 - RNA, 23 nt, Artificial Sequence
  Synthetic
ggagggugauaugggaggauugc

SEQ ID NO: 545066 - RNA, 24 nt, Artificial Sequence
  Synthetic
aggagggugauaugggaggauugc

SEQ ID NO: 545067 - RNA, 18 nt, Artificial Sequence
  Synthetic
aaacaaacacuggauugc

SEQ ID NO: 545068 - RNA, 19 nt, Artificial Sequence
  Synthetic
aaaacaaacacuggauugc

SEQ ID NO: 545069 - RNA, 20 nt, Artificial Sequence
  Synthetic
caaaacaaacacuggauugc

SEQ ID NO: 545070 - RNA, 21 nt, Artificial Sequence
  Synthetic
ccaaaacaaacacuggauugc

SEQ ID NO: 545071 - RNA, 22 nt, Artificial Sequence
  Synthetic
uccaaaacaaacacuggauugc

SEQ ID NO: 545072 - RNA, 23 nt, Artificial Sequence
  Synthetic
auccaaaacaaacacuggauugc

SEQ ID NO: 545073 - RNA, 24 nt, Artificial Sequence
  Synthetic
uauccaaaacaaacacuggauugc

SEQ ID NO: 545074 - RNA, 18 nt, Artificial Sequence
  Synthetic
gguuuuaagugugauugc

SEQ ID NO: 545075 - RNA, 19 nt, Artificial Sequence
  Synthetic
ugguuuuaagugugauugc

SEQ ID NO: 545076 - RNA, 20 nt, Artificial Sequence
  Synthetic
augguuuuaagugugauugc

SEQ ID NO: 545077 - RNA, 21 nt, Artificial Sequence
  Synthetic
caugguuuuaagugugauugc

SEQ ID NO: 545078 - RNA, 22 nt, Artificial Sequence
  Synthetic
ucaugguuuuaagugugauugc

SEQ ID NO: 545079 - RNA, 23 nt, Artificial Sequence
  Synthetic
cucaugguuuuaagugugauugc

SEQ ID NO: 545080 - RNA, 24 nt, Artificial Sequence
  Synthetic
ucucaugguuuuaagugugauugc

SEQ ID NO: 545081 - RNA, 18 nt, Artificial Sequence
  Synthetic
aggccaugcaaauauugc

SEQ ID NO: 545082 - RNA, 19 nt, Artificial Sequence
  Synthetic
gaggccaugcaaauauugc

SEQ ID NO: 545083 - RNA, 20 nt, Artificial Sequence
  Synthetic
ggaggccaugcaaauauugc

SEQ ID NO: 545084 - RNA, 21 nt, Artificial Sequence
  Synthetic
aggaggccaugcaaauauugc

SEQ ID NO: 545085 - RNA, 22 nt, Artificial Sequence
  Synthetic
gaggaggccaugcaaauauugc

SEQ ID NO: 545086 - RNA, 23 nt, Artificial Sequence
  Synthetic
ggaggaggccaugcaaauauugc

SEQ ID NO: 545087 - RNA, 24 nt, Artificial Sequence
  Synthetic
gggaggaggccaugcaaauauugc

SEQ ID NO: 545088 - RNA, 18 nt, Artificial Sequence
  Synthetic
uucagcaacggauauugc

SEQ ID NO: 545089 - RNA, 19 nt, Artificial Sequence
  Synthetic
uuucagcaacggauauugc

SEQ ID NO: 545090 - RNA, 20 nt, Artificial Sequence
  Synthetic
uuuucagcaacggauauugc

SEQ ID NO: 545091 - RNA, 21 nt, Artificial Sequence
  Synthetic
auuuucagcaacggauauugc

SEQ ID NO: 545092 - RNA, 22 nt, Artificial Sequence
  Synthetic
aauuuucagcaacggauauugc

SEQ ID NO: 545093 - RNA, 23 nt, Artificial Sequence
  Synthetic
uaauuuucagcaacggauauugc

SEQ ID NO: 545094 - RNA, 24 nt, Artificial Sequence
  Synthetic
uuaauuuucagcaacggauauugc

SEQ ID NO: 545095 - RNA, 18 nt, Artificial Sequence
  Synthetic
ugagguaauggauauugc

SEQ ID NO: 545096 - RNA, 19 nt, Artificial Sequence
  Synthetic
augagguaauggauauugc

SEQ ID NO: 545097 - RNA, 20 nt, Artificial Sequence
  Synthetic
uaugagguaauggauauugc

SEQ ID NO: 545098 - RNA, 21 nt, Artificial Sequence
  Synthetic
uuaugagguaauggauauugc

SEQ ID NO: 545099 - RNA, 22 nt, Artificial Sequence
  Synthetic
auuaugagguaauggauauugc

SEQ ID NO: 545100 - RNA, 23 nt, Artificial Sequence
  Synthetic
cauuaugagguaauggauauugc

SEQ ID NO: 545101 - RNA, 24 nt, Artificial Sequence
  Synthetic
ccauuaugagguaauggauauugc

SEQ ID NO: 545102 - RNA, 18 nt, Artificial Sequence
  Synthetic
ugaccaagaugauauugc

SEQ ID NO: 545103 - RNA, 19 nt, Artificial Sequence
  Synthetic
uugaccaagaugauauugc

SEQ ID NO: 545104 - RNA, 20 nt, Artificial Sequence
  Synthetic
uuugaccaagaugauauugc

SEQ ID NO: 545105 - RNA, 21 nt, Artificial Sequence
  Synthetic
cuuugaccaagaugauauugc

SEQ ID NO: 545106 - RNA, 22 nt, Artificial Sequence
  Synthetic
ucuuugaccaagaugauauugc

SEQ ID NO: 545107 - RNA, 23 nt, Artificial Sequence
  Synthetic
uucuuugaccaagaugauauugc

SEQ ID NO: 545108 - RNA, 24 nt, Artificial Sequence
  Synthetic
cuucuuugaccaagaugauauugc

SEQ ID NO: 545109 - RNA, 18 nt, Artificial Sequence
  Synthetic
uucaguaacauauauugc

SEQ ID NO: 545110 - RNA, 19 nt, Artificial Sequence
  Synthetic
guucaguaacauauauugc

SEQ ID NO: 545111 - RNA, 20 nt, Artificial Sequence
  Synthetic
uguucaguaacauauauugc

SEQ ID NO: 545112 - RNA, 21 nt, Artificial Sequence
  Synthetic
guguucaguaacauauauugc

SEQ ID NO: 545113 - RNA, 22 nt, Artificial Sequence
  Synthetic
uguguucaguaacauauauugc

SEQ ID NO: 545114 - RNA, 23 nt, Artificial Sequence
  Synthetic
auguguucaguaacauauauugc

SEQ ID NO: 545115 - RNA, 24 nt, Artificial Sequence
  Synthetic
uauguguucaguaacauauauugc

SEQ ID NO: 545116 - RNA, 18 nt, Artificial Sequence
  Synthetic
agggcaagauacuauugc

SEQ ID NO: 545117 - RNA, 19 nt, Artificial Sequence
  Synthetic
aagggcaagauacuauugc

SEQ ID NO: 545118 - RNA, 20 nt, Artificial Sequence
  Synthetic
uaagggcaagauacuauugc

SEQ ID NO: 545119 - RNA, 21 nt, Artificial Sequence
  Synthetic
uuaagggcaagauacuauugc

SEQ ID NO: 545120 - RNA, 22 nt, Artificial Sequence
  Synthetic
auuaagggcaagauacuauugc

SEQ ID NO: 545121 - RNA, 23 nt, Artificial Sequence
  Synthetic
uauuaagggcaagauacuauugc

SEQ ID NO: 545122 - RNA, 24 nt, Artificial Sequence
  Synthetic
uuauuaagggcaagauacuauugc

SEQ ID NO: 545123 - RNA, 18 nt, Artificial Sequence
  Synthetic
gagcaauggggcuauugc

SEQ ID NO: 545124 - RNA, 19 nt, Artificial Sequence
  Synthetic
ugagcaauggggcuauugc

SEQ ID NO: 545125 - RNA, 20 nt, Artificial Sequence
  Synthetic
cugagcaauggggcuauugc

SEQ ID NO: 545126 - RNA, 21 nt, Artificial Sequence
  Synthetic
acugagcaauggggcuauugc

SEQ ID NO: 545127 - RNA, 22 nt, Artificial Sequence
  Synthetic
cacugagcaauggggcuauugc

SEQ ID NO: 545128 - RNA, 23 nt, Artificial Sequence
  Synthetic
ucacugagcaauggggcuauugc

SEQ ID NO: 545129 - RNA, 24 nt, Artificial Sequence
  Synthetic
uucacugagcaauggggcuauugc

SEQ ID NO: 545130 - RNA, 18 nt, Artificial Sequence
  Synthetic
ucuuuuagcugcuauugc

SEQ ID NO: 545131 - RNA, 19 nt, Artificial Sequence
  Synthetic
aucuuuuagcugcuauugc

SEQ ID NO: 545132 - RNA, 20 nt, Artificial Sequence
  Synthetic
aaucuuuuagcugcuauugc

SEQ ID NO: 545133 - RNA, 21 nt, Artificial Sequence
  Synthetic
caaucuuuuagcugcuauugc

SEQ ID NO: 545134 - RNA, 22 nt, Artificial Sequence
  Synthetic
ucaaucuuuuagcugcuauugc

SEQ ID NO: 545135 - RNA, 23 nt, Artificial Sequence
  Synthetic
gucaaucuuuuagcugcuauugc

SEQ ID NO: 545136 - RNA, 24 nt, Artificial Sequence
  Synthetic
agucaaucuuuuagcugcuauugc

SEQ ID NO: 545137 - RNA, 18 nt, Artificial Sequence
  Synthetic
uuuuuuccuuucuauugc

SEQ ID NO: 545138 - RNA, 19 nt, Artificial Sequence
  Synthetic
uuuuuuuccuuucuauugc

SEQ ID NO: 545139 - RNA, 20 nt, Artificial Sequence
  Synthetic
uuuuuuuuccuuucuauugc

SEQ ID NO: 545140 - RNA, 21 nt, Artificial Sequence
  Synthetic
auuuuuuuuccuuucuauugc

SEQ ID NO: 545141 - RNA, 22 nt, Artificial Sequence
  Synthetic
cauuuuuuuuccuuucuauugc

SEQ ID NO: 545142 - RNA, 23 nt, Artificial Sequence
  Synthetic
acauuuuuuuuccuuucuauugc

SEQ ID NO: 545143 - RNA, 24 nt, Artificial Sequence
  Synthetic
cacauuuuuuuuccuuucuauugc

SEQ ID NO: 545144 - RNA, 18 nt, Artificial Sequence
  Synthetic
ccgagguaggaguauugc

SEQ ID NO: 545145 - RNA, 19 nt, Artificial Sequence
  Synthetic
gccgagguaggaguauugc

SEQ ID NO: 545146 - RNA, 20 nt, Artificial Sequence
  Synthetic
ggccgagguaggaguauugc

SEQ ID NO: 545147 - RNA, 21 nt, Artificial Sequence
  Synthetic
aggccgagguaggaguauugc

SEQ ID NO: 545148 - RNA, 22 nt, Artificial Sequence
  Synthetic
gaggccgagguaggaguauugc

SEQ ID NO: 545149 - RNA, 23 nt, Artificial Sequence
  Synthetic
ggaggccgagguaggaguauugc

SEQ ID NO: 545150 - RNA, 24 nt, Artificial Sequence
  Synthetic
gggaggccgagguaggaguauugc

SEQ ID NO: 545151 - RNA, 18 nt, Artificial Sequence
  Synthetic
aaaucucuagcuuauugc

SEQ ID NO: 545152 - RNA, 19 nt, Artificial Sequence
  Synthetic
aaaaucucuagcuuauugc

SEQ ID NO: 545153 - RNA, 20 nt, Artificial Sequence
  Synthetic
caaaaucucuagcuuauugc

SEQ ID NO: 545154 - RNA, 21 nt, Artificial Sequence
  Synthetic
acaaaaucucuagcuuauugc

SEQ ID NO: 545155 - RNA, 22 nt, Artificial Sequence
  Synthetic
uacaaaaucucuagcuuauugc

SEQ ID NO: 545156 - RNA, 23 nt, Artificial Sequence
  Synthetic
uuacaaaaucucuagcuuauugc

SEQ ID NO: 545157 - RNA, 24 nt, Artificial Sequence
  Synthetic
guuacaaaaucucuagcuuauugc

SEQ ID NO: 545158 - RNA, 18 nt, Artificial Sequence
  Synthetic
aagauuuucuguuauugc

SEQ ID NO: 545159 - RNA, 19 nt, Artificial Sequence
  Synthetic
gaagauuuucuguuauugc

SEQ ID NO: 545160 - RNA, 20 nt, Artificial Sequence
  Synthetic
ugaagauuuucuguuauugc

SEQ ID NO: 545161 - RNA, 21 nt, Artificial Sequence
  Synthetic
augaagauuuucuguuauugc

SEQ ID NO: 545162 - RNA, 22 nt, Artificial Sequence
  Synthetic
aaugaagauuuucuguuauugc

SEQ ID NO: 545163 - RNA, 23 nt, Artificial Sequence
  Synthetic
caaugaagauuuucuguuauugc

SEQ ID NO: 545164 - RNA, 24 nt, Artificial Sequence
  Synthetic
ucaaugaagauuuucuguuauugc

SEQ ID NO: 545165 - RNA, 18 nt, Artificial Sequence
  Synthetic
ccuaggaauacaacuugc

SEQ ID NO: 545166 - RNA, 19 nt, Artificial Sequence
  Synthetic
accuaggaauacaacuugc

SEQ ID NO: 545167 - RNA, 20 nt, Artificial Sequence
  Synthetic
uaccuaggaauacaacuugc

SEQ ID NO: 545168 - RNA, 21 nt, Artificial Sequence
  Synthetic
auaccuaggaauacaacuugc

SEQ ID NO: 545169 - RNA, 22 nt, Artificial Sequence
  Synthetic
aauaccuaggaauacaacuugc

SEQ ID NO: 545170 - RNA, 23 nt, Artificial Sequence
  Synthetic
aaauaccuaggaauacaacuugc

SEQ ID NO: 545171 - RNA, 24 nt, Artificial Sequence
  Synthetic
aaaauaccuaggaauacaacuugc

SEQ ID NO: 545172 - RNA, 18 nt, Artificial Sequence
  Synthetic
caucaccugguaacuugc

SEQ ID NO: 545173 - RNA, 19 nt, Artificial Sequence
  Synthetic
gcaucaccugguaacuugc

SEQ ID NO: 545174 - RNA, 20 nt, Artificial Sequence
  Synthetic
agcaucaccugguaacuugc

SEQ ID NO: 545175 - RNA, 21 nt, Artificial Sequence
  Synthetic
cagcaucaccugguaacuugc

SEQ ID NO: 545176 - RNA, 22 nt, Artificial Sequence
  Synthetic
ucagcaucaccugguaacuugc

SEQ ID NO: 545177 - RNA, 23 nt, Artificial Sequence
  Synthetic
aucagcaucaccugguaacuugc

SEQ ID NO: 545178 - RNA, 24 nt, Artificial Sequence
  Synthetic
caucagcaucaccugguaacuugc

SEQ ID NO: 545179 - RNA, 18 nt, Artificial Sequence
  Synthetic
uaucaccugguaacuugc

SEQ ID NO: 545180 - RNA, 19 nt, Artificial Sequence
  Synthetic
guaucaccugguaacuugc

SEQ ID NO: 545181 - RNA, 20 nt, Artificial Sequence
  Synthetic
aguaucaccugguaacuugc

SEQ ID NO: 545182 - RNA, 21 nt, Artificial Sequence
  Synthetic
caguaucaccugguaacuugc

SEQ ID NO: 545183 - RNA, 22 nt, Artificial Sequence
  Synthetic
ucaguaucaccugguaacuugc

SEQ ID NO: 545184 - RNA, 23 nt, Artificial Sequence
  Synthetic
aucaguaucaccugguaacuugc

SEQ ID NO: 545185 - RNA, 24 nt, Artificial Sequence
  Synthetic
caucaguaucaccugguaacuugc

SEQ ID NO: 545186 - RNA, 18 nt, Artificial Sequence
  Synthetic
cuccaccaacccacuugc

SEQ ID NO: 545187 - RNA, 19 nt, Artificial Sequence
  Synthetic
ccuccaccaacccacuugc

SEQ ID NO: 545188 - RNA, 20 nt, Artificial Sequence
  Synthetic
gccuccaccaacccacuugc

SEQ ID NO: 545189 - RNA, 21 nt, Artificial Sequence
  Synthetic
ugccuccaccaacccacuugc

SEQ ID NO: 545190 - RNA, 22 nt, Artificial Sequence
  Synthetic
cugccuccaccaacccacuugc

SEQ ID NO: 545191 - RNA, 23 nt, Artificial Sequence
  Synthetic
gcugccuccaccaacccacuugc

SEQ ID NO: 545192 - RNA, 24 nt, Artificial Sequence
  Synthetic
ggcugccuccaccaacccacuugc

SEQ ID NO: 545193 - RNA, 18 nt, Artificial Sequence
  Synthetic
auaacccugagcacuugc

SEQ ID NO: 545194 - RNA, 19 nt, Artificial Sequence
  Synthetic
uauaacccugagcacuugc

SEQ ID NO: 545195 - RNA, 20 nt, Artificial Sequence
  Synthetic
cuauaacccugagcacuugc

SEQ ID NO: 545196 - RNA, 21 nt, Artificial Sequence
  Synthetic
gcuauaacccugagcacuugc

SEQ ID NO: 545197 - RNA, 22 nt, Artificial Sequence
  Synthetic
ugcuauaacccugagcacuugc

SEQ ID NO: 545198 - RNA, 23 nt, Artificial Sequence
  Synthetic
uugcuauaacccugagcacuugc

SEQ ID NO: 545199 - RNA, 24 nt, Artificial Sequence
  Synthetic
auugcuauaacccugagcacuugc

SEQ ID NO: 545200 - RNA, 18 nt, Artificial Sequence
  Synthetic
uccauauuuuucacuugc

SEQ ID NO: 545201 - RNA, 19 nt, Artificial Sequence
  Synthetic
guccauauuuuucacuugc

SEQ ID NO: 545202 - RNA, 20 nt, Artificial Sequence
  Synthetic
uguccauauuuuucacuugc

SEQ ID NO: 545203 - RNA, 21 nt, Artificial Sequence
  Synthetic
auguccauauuuuucacuugc

SEQ ID NO: 545204 - RNA, 22 nt, Artificial Sequence
  Synthetic
aauguccauauuuuucacuugc

SEQ ID NO: 545205 - RNA, 23 nt, Artificial Sequence
  Synthetic
aaauguccauauuuuucacuugc

SEQ ID NO: 545206 - RNA, 24 nt, Artificial Sequence
  Synthetic
gaaauguccauauuuuucacuugc

SEQ ID NO: 545207 - RNA, 18 nt, Artificial Sequence
  Synthetic
uucacaaaaaggacuugc

SEQ ID NO: 545208 - RNA, 19 nt, Artificial Sequence
  Synthetic
cuucacaaaaaggacuugc

SEQ ID NO: 545209 - RNA, 20 nt, Artificial Sequence
  Synthetic
ccuucacaaaaaggacuugc

SEQ ID NO: 545210 - RNA, 21 nt, Artificial Sequence
  Synthetic
gccuucacaaaaaggacuugc

SEQ ID NO: 545211 - RNA, 22 nt, Artificial Sequence
  Synthetic
agccuucacaaaaaggacuugc

SEQ ID NO: 545212 - RNA, 23 nt, Artificial Sequence
  Synthetic
cagccuucacaaaaaggacuugc

SEQ ID NO: 545213 - RNA, 24 nt, Artificial Sequence
  Synthetic
ucagccuucacaaaaaggacuugc

SEQ ID NO: 545214 - RNA, 18 nt, Artificial Sequence
  Synthetic
uggcagcagaauacuugc

SEQ ID NO: 545215 - RNA, 19 nt, Artificial Sequence
  Synthetic
auggcagcagaauacuugc

SEQ ID NO: 545216 - RNA, 20 nt, Artificial Sequence
  Synthetic
aauggcagcagaauacuugc

SEQ ID NO: 545217 - RNA, 21 nt, Artificial Sequence
  Synthetic
aaauggcagcagaauacuugc

SEQ ID NO: 545218 - RNA, 22 nt, Artificial Sequence
  Synthetic
caaauggcagcagaauacuugc

SEQ ID NO: 545219 - RNA, 23 nt, Artificial Sequence
  Synthetic
acaaauggcagcagaauacuugc

SEQ ID NO: 545220 - RNA, 24 nt, Artificial Sequence
  Synthetic
uacaaauggcagcagaauacuugc

SEQ ID NO: 545221 - RNA, 18 nt, Artificial Sequence
  Synthetic
gacugaaaacauacuugc

SEQ ID NO: 545222 - RNA, 19 nt, Artificial Sequence
  Synthetic
ugacugaaaacauacuugc

SEQ ID NO: 545223 - RNA, 20 nt, Artificial Sequence
  Synthetic
augacugaaaacauacuugc

SEQ ID NO: 545224 - RNA, 21 nt, Artificial Sequence
  Synthetic
uaugacugaaaacauacuugc

SEQ ID NO: 545225 - RNA, 22 nt, Artificial Sequence
  Synthetic
guaugacugaaaacauacuugc

SEQ ID NO: 545226 - RNA, 23 nt, Artificial Sequence
  Synthetic
uguaugacugaaaacauacuugc

SEQ ID NO: 545227 - RNA, 24 nt, Artificial Sequence
  Synthetic
auguaugacugaaaacauacuugc

SEQ ID NO: 545228 - RNA, 18 nt, Artificial Sequence
  Synthetic
uccaaaugccauacuugc

SEQ ID NO: 545229 - RNA, 19 nt, Artificial Sequence
  Synthetic
uuccaaaugccauacuugc

SEQ ID NO: 545230 - RNA, 20 nt, Artificial Sequence
  Synthetic
guuccaaaugccauacuugc

SEQ ID NO: 545231 - RNA, 21 nt, Artificial Sequence
  Synthetic
uguuccaaaugccauacuugc

SEQ ID NO: 545232 - RNA, 22 nt, Artificial Sequence
  Synthetic
cuguuccaaaugccauacuugc

SEQ ID NO: 545233 - RNA, 23 nt, Artificial Sequence
  Synthetic
ccuguuccaaaugccauacuugc

SEQ ID NO: 545234 - RNA, 24 nt, Artificial Sequence
  Synthetic
uccuguuccaaaugccauacuugc

SEQ ID NO: 545235 - RNA, 18 nt, Artificial Sequence
  Synthetic
aacgaagauacuacuugc

SEQ ID NO: 545236 - RNA, 19 nt, Artificial Sequence
  Synthetic
gaacgaagauacuacuugc

SEQ ID NO: 545237 - RNA, 20 nt, Artificial Sequence
  Synthetic
ugaacgaagauacuacuugc

SEQ ID NO: 545238 - RNA, 21 nt, Artificial Sequence
  Synthetic
cugaacgaagauacuacuugc

SEQ ID NO: 545239 - RNA, 22 nt, Artificial Sequence
  Synthetic
ccugaacgaagauacuacuugc

SEQ ID NO: 545240 - RNA, 23 nt, Artificial Sequence
  Synthetic
accugaacgaagauacuacuugc

SEQ ID NO: 545241 - RNA, 24 nt, Artificial Sequence
  Synthetic
aaccugaacgaagauacuacuugc

SEQ ID NO: 545242 - RNA, 18 nt, Artificial Sequence
  Synthetic
aggcacaaggcuacuugc

SEQ ID NO: 545243 - RNA, 19 nt, Artificial Sequence
  Synthetic
aaggcacaaggcuacuugc

SEQ ID NO: 545244 - RNA, 20 nt, Artificial Sequence
  Synthetic
uaaggcacaaggcuacuugc

SEQ ID NO: 545245 - RNA, 21 nt, Artificial Sequence
  Synthetic
cuaaggcacaaggcuacuugc

SEQ ID NO: 545246 - RNA, 22 nt, Artificial Sequence
  Synthetic
ccuaaggcacaaggcuacuugc

SEQ ID NO: 545247 - RNA, 23 nt, Artificial Sequence
  Synthetic
uccuaaggcacaaggcuacuugc

SEQ ID NO: 545248 - RNA, 24 nt, Artificial Sequence
  Synthetic
uuccuaaggcacaaggcuacuugc

SEQ ID NO: 545249 - RNA, 18 nt, Artificial Sequence
  Synthetic
uccaguuccacaccuugc

SEQ ID NO: 545250 - RNA, 19 nt, Artificial Sequence
  Synthetic
cuccaguuccacaccuugc

SEQ ID NO: 545251 - RNA, 20 nt, Artificial Sequence
  Synthetic
ucuccaguuccacaccuugc

SEQ ID NO: 545252 - RNA, 21 nt, Artificial Sequence
  Synthetic
gucuccaguuccacaccuugc

SEQ ID NO: 545253 - RNA, 22 nt, Artificial Sequence
  Synthetic
ugucuccaguuccacaccuugc

SEQ ID NO: 545254 - RNA, 23 nt, Artificial Sequence
  Synthetic
uugucuccaguuccacaccuugc

SEQ ID NO: 545255 - RNA, 24 nt, Artificial Sequence
  Synthetic
uuugucuccaguuccacaccuugc

SEQ ID NO: 545256 - RNA, 18 nt, Artificial Sequence
  Synthetic
aaaguuuucagaccuugc

SEQ ID NO: 545257 - RNA, 19 nt, Artificial Sequence
  Synthetic
aaaaguuuucagaccuugc

SEQ ID NO: 545258 - RNA, 20 nt, Artificial Sequence
  Synthetic
caaaaguuuucagaccuugc

SEQ ID NO: 545259 - RNA, 21 nt, Artificial Sequence
  Synthetic
acaaaaguuuucagaccuugc

SEQ ID NO: 545260 - RNA, 22 nt, Artificial Sequence
  Synthetic
aacaaaaguuuucagaccuugc

SEQ ID NO: 545261 - RNA, 23 nt, Artificial Sequence
  Synthetic
aaacaaaaguuuucagaccuugc

SEQ ID NO: 545262 - RNA, 24 nt, Artificial Sequence
  Synthetic
aaaacaaaaguuuucagaccuugc

SEQ ID NO: 545263 - RNA, 18 nt, Artificial Sequence
  Synthetic
guguaauuuguaccuugc

SEQ ID NO: 545264 - RNA, 19 nt, Artificial Sequence
  Synthetic
gguguaauuuguaccuugc

SEQ ID NO: 545265 - RNA, 20 nt, Artificial Sequence
  Synthetic
ggguguaauuuguaccuugc

SEQ ID NO: 545266 - RNA, 21 nt, Artificial Sequence
  Synthetic
uggguguaauuuguaccuugc

SEQ ID NO: 545267 - RNA, 22 nt, Artificial Sequence
  Synthetic
auggguguaauuuguaccuugc

SEQ ID NO: 545268 - RNA, 23 nt, Artificial Sequence
  Synthetic
gauggguguaauuuguaccuugc

SEQ ID NO: 545269 - RNA, 24 nt, Artificial Sequence
  Synthetic
ugauggguguaauuuguaccuugc

SEQ ID NO: 545270 - RNA, 18 nt, Artificial Sequence
  Synthetic
aaaaaugugagcccuugc

SEQ ID NO: 545271 - RNA, 19 nt, Artificial Sequence
  Synthetic
caaaaaugugagcccuugc

SEQ ID NO: 545272 - RNA, 20 nt, Artificial Sequence
  Synthetic
ccaaaaaugugagcccuugc

SEQ ID NO: 545273 - RNA, 21 nt, Artificial Sequence
  Synthetic
accaaaaaugugagcccuugc

SEQ ID NO: 545274 - RNA, 22 nt, Artificial Sequence
  Synthetic
uaccaaaaaugugagcccuugc

SEQ ID NO: 545275 - RNA, 23 nt, Artificial Sequence
  Synthetic
cuaccaaaaaugugagcccuugc

SEQ ID NO: 545276 - RNA, 24 nt, Artificial Sequence
  Synthetic
gcuaccaaaaaugugagcccuugc

SEQ ID NO: 545277 - RNA, 18 nt, Artificial Sequence
  Synthetic
ccaguuuuguucccuugc

SEQ ID NO: 545278 - RNA, 19 nt, Artificial Sequence
  Synthetic
uccaguuuuguucccuugc

SEQ ID NO: 545279 - RNA, 20 nt, Artificial Sequence
  Synthetic
auccaguuuuguucccuugc

SEQ ID NO: 545280 - RNA, 21 nt, Artificial Sequence
  Synthetic
cauccaguuuuguucccuugc

SEQ ID NO: 545281 - RNA, 22 nt, Artificial Sequence
  Synthetic
ccauccaguuuuguucccuugc

SEQ ID NO: 545282 - RNA, 23 nt, Artificial Sequence
  Synthetic
uccauccaguuuuguucccuugc

SEQ ID NO: 545283 - RNA, 24 nt, Artificial Sequence
  Synthetic
cuccauccaguuuuguucccuugc

SEQ ID NO: 545284 - RNA, 18 nt, Artificial Sequence
  Synthetic
cauaccccagggccuugc

SEQ ID NO: 545285 - RNA, 19 nt, Artificial Sequence
  Synthetic
ucauaccccagggccuugc

SEQ ID NO: 545286 - RNA, 20 nt, Artificial Sequence
  Synthetic
uucauaccccagggccuugc

SEQ ID NO: 545287 - RNA, 21 nt, Artificial Sequence
  Synthetic
auucauaccccagggccuugc

SEQ ID NO: 545288 - RNA, 22 nt, Artificial Sequence
  Synthetic
gauucauaccccagggccuugc

SEQ ID NO: 545289 - RNA, 23 nt, Artificial Sequence
  Synthetic
ugauucauaccccagggccuugc

SEQ ID NO: 545290 - RNA, 24 nt, Artificial Sequence
  Synthetic
gugauucauaccccagggccuugc

SEQ ID NO: 545291 - RNA, 18 nt, Artificial Sequence
  Synthetic
aaggacagugauccuugc

SEQ ID NO: 545292 - RNA, 19 nt, Artificial Sequence
  Synthetic
gaaggacagugauccuugc

SEQ ID NO: 545293 - RNA, 20 nt, Artificial Sequence
  Synthetic
ugaaggacagugauccuugc

SEQ ID NO: 545294 - RNA, 21 nt, Artificial Sequence
  Synthetic
uugaaggacagugauccuugc

SEQ ID NO: 545295 - RNA, 22 nt, Artificial Sequence
  Synthetic
auugaaggacagugauccuugc

SEQ ID NO: 545296 - RNA, 23 nt, Artificial Sequence
  Synthetic
cauugaaggacagugauccuugc

SEQ ID NO: 545297 - RNA, 24 nt, Artificial Sequence
  Synthetic
acauugaaggacagugauccuugc

SEQ ID NO: 545298 - RNA, 18 nt, Artificial Sequence
  Synthetic
agaaaaaaauguccuugc

SEQ ID NO: 545299 - RNA, 19 nt, Artificial Sequence
  Synthetic
cagaaaaaaauguccuugc

SEQ ID NO: 545300 - RNA, 20 nt, Artificial Sequence
  Synthetic
ucagaaaaaaauguccuugc

SEQ ID NO: 545301 - RNA, 21 nt, Artificial Sequence
  Synthetic
cucagaaaaaaauguccuugc

SEQ ID NO: 545302 - RNA, 22 nt, Artificial Sequence
  Synthetic
gcucagaaaaaaauguccuugc

SEQ ID NO: 545303 - RNA, 23 nt, Artificial Sequence
  Synthetic
ggcucagaaaaaaauguccuugc

SEQ ID NO: 545304 - RNA, 24 nt, Artificial Sequence
  Synthetic
uggcucagaaaaaaauguccuugc

SEQ ID NO: 545305 - RNA, 18 nt, Artificial Sequence
  Synthetic
uuuuuccaaauuccuugc

SEQ ID NO: 545306 - RNA, 19 nt, Artificial Sequence
  Synthetic
uuuuuuccaaauuccuugc

SEQ ID NO: 545307 - RNA, 20 nt, Artificial Sequence
  Synthetic
guuuuuuccaaauuccuugc

SEQ ID NO: 545308 - RNA, 21 nt, Artificial Sequence
  Synthetic
aguuuuuuccaaauuccuugc

SEQ ID NO: 545309 - RNA, 22 nt, Artificial Sequence
  Synthetic
gaguuuuuuccaaauuccuugc

SEQ ID NO: 545310 - RNA, 23 nt, Artificial Sequence
  Synthetic
ugaguuuuuuccaaauuccuugc

SEQ ID NO: 545311 - RNA, 24 nt, Artificial Sequence
  Synthetic
uugaguuuuuuccaaauuccuugc

SEQ ID NO: 545312 - RNA, 18 nt, Artificial Sequence
  Synthetic
aagcuuaggggagcuugc

SEQ ID NO: 545313 - RNA, 19 nt, Artificial Sequence
  Synthetic
caagcuuaggggagcuugc

SEQ ID NO: 545314 - RNA, 20 nt, Artificial Sequence
  Synthetic
ucaagcuuaggggagcuugc

SEQ ID NO: 545315 - RNA, 21 nt, Artificial Sequence
  Synthetic
uucaagcuuaggggagcuugc

SEQ ID NO: 545316 - RNA, 22 nt, Artificial Sequence
  Synthetic
cuucaagcuuaggggagcuugc

SEQ ID NO: 545317 - RNA, 23 nt, Artificial Sequence
  Synthetic
ucuucaagcuuaggggagcuugc

SEQ ID NO: 545318 - RNA, 24 nt, Artificial Sequence
  Synthetic
cucuucaagcuuaggggagcuugc

SEQ ID NO: 545319 - RNA, 18 nt, Artificial Sequence
  Synthetic
gaugcaaaacaggcuugc

SEQ ID NO: 545320 - RNA, 19 nt, Artificial Sequence
  Synthetic
agaugcaaaacaggcuugc

SEQ ID NO: 545321 - RNA, 20 nt, Artificial Sequence
  Synthetic
uagaugcaaaacaggcuugc

SEQ ID NO: 545322 - RNA, 21 nt, Artificial Sequence
  Synthetic
uuagaugcaaaacaggcuugc

SEQ ID NO: 545323 - RNA, 22 nt, Artificial Sequence
  Synthetic
uuuagaugcaaaacaggcuugc

SEQ ID NO: 545324 - RNA, 23 nt, Artificial Sequence
  Synthetic
auuuagaugcaaaacaggcuugc

SEQ ID NO: 545325 - RNA, 24 nt, Artificial Sequence
  Synthetic
gauuuagaugcaaaacaggcuugc

SEQ ID NO: 545326 - RNA, 18 nt, Artificial Sequence
  Synthetic
caaaaaaggagggcuugc

SEQ ID NO: 545327 - RNA, 19 nt, Artificial Sequence
  Synthetic
ccaaaaaaggagggcuugc

SEQ ID NO: 545328 - RNA, 20 nt, Artificial Sequence
  Synthetic
uccaaaaaaggagggcuugc

SEQ ID NO: 545329 - RNA, 21 nt, Artificial Sequence
  Synthetic
guccaaaaaaggagggcuugc

SEQ ID NO: 545330 - RNA, 22 nt, Artificial Sequence
  Synthetic
gguccaaaaaaggagggcuugc

SEQ ID NO: 545331 - RNA, 23 nt, Artificial Sequence
  Synthetic
agguccaaaaaaggagggcuugc

SEQ ID NO: 545332 - RNA, 24 nt, Artificial Sequence
  Synthetic
aagguccaaaaaaggagggcuugc

SEQ ID NO: 545333 - RNA, 18 nt, Artificial Sequence
  Synthetic
uccuuugggacugcuugc

SEQ ID NO: 545334 - RNA, 19 nt, Artificial Sequence
  Synthetic
cuccuuugggacugcuugc

SEQ ID NO: 545335 - RNA, 20 nt, Artificial Sequence
  Synthetic
ucuccuuugggacugcuugc

SEQ ID NO: 545336 - RNA, 21 nt, Artificial Sequence
  Synthetic
aucuccuuugggacugcuugc

SEQ ID NO: 545337 - RNA, 22 nt, Artificial Sequence
  Synthetic
uaucuccuuugggacugcuugc

SEQ ID NO: 545338 - RNA, 23 nt, Artificial Sequence
  Synthetic
uuaucuccuuugggacugcuugc

SEQ ID NO: 545339 - RNA, 24 nt, Artificial Sequence
  Synthetic
auuaucuccuuugggacugcuugc

SEQ ID NO: 545340 - RNA, 18 nt, Artificial Sequence
  Synthetic
ugcauacagucugcuugc

SEQ ID NO: 545341 - RNA, 19 nt, Artificial Sequence
  Synthetic
uugcauacagucugcuugc

SEQ ID NO: 545342 - RNA, 20 nt, Artificial Sequence
  Synthetic
guugcauacagucugcuugc

SEQ ID NO: 545343 - RNA, 21 nt, Artificial Sequence
  Synthetic
cguugcauacagucugcuugc

SEQ ID NO: 545344 - RNA, 22 nt, Artificial Sequence
  Synthetic
ccguugcauacagucugcuugc

SEQ ID NO: 545345 - RNA, 23 nt, Artificial Sequence
  Synthetic
gccguugcauacagucugcuugc

SEQ ID NO: 545346 - RNA, 24 nt, Artificial Sequence
  Synthetic
ugccguugcauacagucugcuugc

SEQ ID NO: 545347 - RNA, 18 nt, Artificial Sequence
  Synthetic
gagucugcaaaaucuugc

SEQ ID NO: 545348 - RNA, 19 nt, Artificial Sequence
  Synthetic
ggagucugcaaaaucuugc

SEQ ID NO: 545349 - RNA, 20 nt, Artificial Sequence
  Synthetic
aggagucugcaaaaucuugc

SEQ ID NO: 545350 - RNA, 21 nt, Artificial Sequence
  Synthetic
aaggagucugcaaaaucuugc

SEQ ID NO: 545351 - RNA, 22 nt, Artificial Sequence
  Synthetic
caaggagucugcaaaaucuugc

SEQ ID NO: 545352 - RNA, 23 nt, Artificial Sequence
  Synthetic
ccaaggagucugcaaaaucuugc

SEQ ID NO: 545353 - RNA, 24 nt, Artificial Sequence
  Synthetic
gccaaggagucugcaaaaucuugc

SEQ ID NO: 545354 - RNA, 18 nt, Artificial Sequence
  Synthetic
ugaagcuuuuaaucuugc

SEQ ID NO: 545355 - RNA, 19 nt, Artificial Sequence
  Synthetic
augaagcuuuuaaucuugc

SEQ ID NO: 545356 - RNA, 20 nt, Artificial Sequence
  Synthetic
caugaagcuuuuaaucuugc

SEQ ID NO: 545357 - RNA, 21 nt, Artificial Sequence
  Synthetic
ucaugaagcuuuuaaucuugc

SEQ ID NO: 545358 - RNA, 22 nt, Artificial Sequence
  Synthetic
cucaugaagcuuuuaaucuugc

SEQ ID NO: 545359 - RNA, 23 nt, Artificial Sequence
  Synthetic
ccucaugaagcuuuuaaucuugc

SEQ ID NO: 545360 - RNA, 24 nt, Artificial Sequence
  Synthetic
cccucaugaagcuuuuaaucuugc

SEQ ID NO: 545361 - RNA, 18 nt, Artificial Sequence
  Synthetic
gagucuuuuuaaucuugc

SEQ ID NO: 545362 - RNA, 19 nt, Artificial Sequence
  Synthetic
ugagucuuuuuaaucuugc

SEQ ID NO: 545363 - RNA, 20 nt, Artificial Sequence
  Synthetic
cugagucuuuuuaaucuugc

SEQ ID NO: 545364 - RNA, 21 nt, Artificial Sequence
  Synthetic
ccugagucuuuuuaaucuugc

SEQ ID NO: 545365 - RNA, 22 nt, Artificial Sequence
  Synthetic
accugagucuuuuuaaucuugc

SEQ ID NO: 545366 - RNA, 23 nt, Artificial Sequence
  Synthetic
uaccugagucuuuuuaaucuugc

SEQ ID NO: 545367 - RNA, 24 nt, Artificial Sequence
  Synthetic
cuaccugagucuuuuuaaucuugc

SEQ ID NO: 545368 - RNA, 18 nt, Artificial Sequence
  Synthetic
cuuuucuaccuaucuugc

SEQ ID NO: 545369 - RNA, 19 nt, Artificial Sequence
  Synthetic
ccuuuucuaccuaucuugc

SEQ ID NO: 545370 - RNA, 20 nt, Artificial Sequence
  Synthetic
accuuuucuaccuaucuugc

SEQ ID NO: 545371 - RNA, 21 nt, Artificial Sequence
  Synthetic
uaccuuuucuaccuaucuugc

SEQ ID NO: 545372 - RNA, 22 nt, Artificial Sequence
  Synthetic
auaccuuuucuaccuaucuugc

SEQ ID NO: 545373 - RNA, 23 nt, Artificial Sequence
  Synthetic
aauaccuuuucuaccuaucuugc

SEQ ID NO: 545374 - RNA, 24 nt, Artificial Sequence
  Synthetic
gaauaccuuuucuaccuaucuugc

SEQ ID NO: 545375 - RNA, 18 nt, Artificial Sequence
  Synthetic
ugggggaaaaccucuugc

SEQ ID NO: 545376 - RNA, 19 nt, Artificial Sequence
  Synthetic
uugggggaaaaccucuugc

SEQ ID NO: 545377 - RNA, 20 nt, Artificial Sequence
  Synthetic
guugggggaaaaccucuugc

SEQ ID NO: 545378 - RNA, 21 nt, Artificial Sequence
  Synthetic
gguugggggaaaaccucuugc

SEQ ID NO: 545379 - RNA, 22 nt, Artificial Sequence
  Synthetic
ugguugggggaaaaccucuugc

SEQ ID NO: 545380 - RNA, 23 nt, Artificial Sequence
  Synthetic
gugguugggggaaaaccucuugc

SEQ ID NO: 545381 - RNA, 24 nt, Artificial Sequence
  Synthetic
ggugguugggggaaaaccucuugc

SEQ ID NO: 545382 - RNA, 18 nt, Artificial Sequence
  Synthetic
cauacuuuucucucuugc

SEQ ID NO: 545383 - RNA, 19 nt, Artificial Sequence
  Synthetic
ccauacuuuucucucuugc

SEQ ID NO: 545384 - RNA, 20 nt, Artificial Sequence
  Synthetic
gccauacuuuucucucuugc

SEQ ID NO: 545385 - RNA, 21 nt, Artificial Sequence
  Synthetic
ugccauacuuuucucucuugc

SEQ ID NO: 545386 - RNA, 22 nt, Artificial Sequence
  Synthetic
cugccauacuuuucucucuugc

SEQ ID NO: 545387 - RNA, 23 nt, Artificial Sequence
  Synthetic
ccugccauacuuuucucucuugc

SEQ ID NO: 545388 - RNA, 24 nt, Artificial Sequence
  Synthetic
cccugccauacuuuucucucuugc

SEQ ID NO: 545389 - RNA, 18 nt, Artificial Sequence
  Synthetic
guuacuuguuucucuugc

SEQ ID NO: 545390 - RNA, 19 nt, Artificial Sequence
  Synthetic
uguuacuuguuucucuugc

SEQ ID NO: 545391 - RNA, 20 nt, Artificial Sequence
  Synthetic
cuguuacuuguuucucuugc

SEQ ID NO: 545392 - RNA, 21 nt, Artificial Sequence
  Synthetic
acuguuacuuguuucucuugc

SEQ ID NO: 545393 - RNA, 22 nt, Artificial Sequence
  Synthetic
aacuguuacuuguuucucuugc

SEQ ID NO: 545394 - RNA, 23 nt, Artificial Sequence
  Synthetic
caacuguuacuuguuucucuugc

SEQ ID NO: 545395 - RNA, 24 nt, Artificial Sequence
  Synthetic
ccaacuguuacuuguuucucuugc

SEQ ID NO: 545396 - RNA, 18 nt, Artificial Sequence
  Synthetic
ugaugcaucacuucuugc

SEQ ID NO: 545397 - RNA, 19 nt, Artificial Sequence
  Synthetic
gugaugcaucacuucuugc

SEQ ID NO: 545398 - RNA, 20 nt, Artificial Sequence
  Synthetic
agugaugcaucacuucuugc

SEQ ID NO: 545399 - RNA, 21 nt, Artificial Sequence
  Synthetic
aagugaugcaucacuucuugc

SEQ ID NO: 545400 - RNA, 22 nt, Artificial Sequence
  Synthetic
gaagugaugcaucacuucuugc

SEQ ID NO: 545401 - RNA, 23 nt, Artificial Sequence
  Synthetic
ggaagugaugcaucacuucuugc

SEQ ID NO: 545402 - RNA, 24 nt, Artificial Sequence
  Synthetic
aggaagugaugcaucacuucuugc

SEQ ID NO: 545403 - RNA, 18 nt, Artificial Sequence
  Synthetic
uagaauccuguuucuugc

SEQ ID NO: 545404 - RNA, 19 nt, Artificial Sequence
  Synthetic
uuagaauccuguuucuugc

SEQ ID NO: 545405 - RNA, 20 nt, Artificial Sequence
  Synthetic
auuagaauccuguuucuugc

SEQ ID NO: 545406 - RNA, 21 nt, Artificial Sequence
  Synthetic
uauuagaauccuguuucuugc

SEQ ID NO: 545407 - RNA, 22 nt, Artificial Sequence
  Synthetic
cuauuagaauccuguuucuugc

SEQ ID NO: 545408 - RNA, 23 nt, Artificial Sequence
  Synthetic
ucuauuagaauccuguuucuugc

SEQ ID NO: 545409 - RNA, 24 nt, Artificial Sequence
  Synthetic
cucuauuagaauccuguuucuugc

SEQ ID NO: 545410 - RNA, 18 nt, Artificial Sequence
  Synthetic
uaaauuugcugaaguugc

SEQ ID NO: 545411 - RNA, 19 nt, Artificial Sequence
  Synthetic
cuaaauuugcugaaguugc

SEQ ID NO: 545412 - RNA, 20 nt, Artificial Sequence
  Synthetic
ucuaaauuugcugaaguugc

SEQ ID NO: 545413 - RNA, 21 nt, Artificial Sequence
  Synthetic
cucuaaauuugcugaaguugc

SEQ ID NO: 545414 - RNA, 22 nt, Artificial Sequence
  Synthetic
ucucuaaauuugcugaaguugc

SEQ ID NO: 545415 - RNA, 23 nt, Artificial Sequence
  Synthetic
uucucuaaauuugcugaaguugc

SEQ ID NO: 545416 - RNA, 24 nt, Artificial Sequence
  Synthetic
auucucuaaauuugcugaaguugc

SEQ ID NO: 545417 - RNA, 18 nt, Artificial Sequence
  Synthetic
cuugagaaucacaguugc

SEQ ID NO: 545418 - RNA, 19 nt, Artificial Sequence
  Synthetic
gcuugagaaucacaguugc

SEQ ID NO: 545419 - RNA, 20 nt, Artificial Sequence
  Synthetic
agcuugagaaucacaguugc

SEQ ID NO: 545420 - RNA, 21 nt, Artificial Sequence
  Synthetic
aagcuugagaaucacaguugc

SEQ ID NO: 545421 - RNA, 22 nt, Artificial Sequence
  Synthetic
aaagcuugagaaucacaguugc

SEQ ID NO: 545422 - RNA, 23 nt, Artificial Sequence
  Synthetic
uaaagcuugagaaucacaguugc

SEQ ID NO: 545423 - RNA, 24 nt, Artificial Sequence
  Synthetic
cuaaagcuugagaaucacaguugc

SEQ ID NO: 545424 - RNA, 18 nt, Artificial Sequence
  Synthetic
agaaaaauggagaguugc

SEQ ID NO: 545425 - RNA, 19 nt, Artificial Sequence
  Synthetic
gagaaaaauggagaguugc

SEQ ID NO: 545426 - RNA, 20 nt, Artificial Sequence
  Synthetic
agagaaaaauggagaguugc

SEQ ID NO: 545427 - RNA, 21 nt, Artificial Sequence
  Synthetic
gagagaaaaauggagaguugc

SEQ ID NO: 545428 - RNA, 22 nt, Artificial Sequence
  Synthetic
agagagaaaaauggagaguugc

SEQ ID NO: 545429 - RNA, 23 nt, Artificial Sequence
  Synthetic
uagagagaaaaauggagaguugc

SEQ ID NO: 545430 - RNA, 24 nt, Artificial Sequence
  Synthetic
uuagagagaaaaauggagaguugc

SEQ ID NO: 545431 - RNA, 18 nt, Artificial Sequence
  Synthetic
gaaaaaaaauagaguugc

SEQ ID NO: 545432 - RNA, 19 nt, Artificial Sequence
  Synthetic
ggaaaaaaaauagaguugc

SEQ ID NO: 545433 - RNA, 20 nt, Artificial Sequence
  Synthetic
aggaaaaaaaauagaguugc

SEQ ID NO: 545434 - RNA, 21 nt, Artificial Sequence
  Synthetic
gaggaaaaaaaauagaguugc

SEQ ID NO: 545435 - RNA, 22 nt, Artificial Sequence
  Synthetic
agaggaaaaaaaauagaguugc

SEQ ID NO: 545436 - RNA, 23 nt, Artificial Sequence
  Synthetic
cagaggaaaaaaaauagaguugc

SEQ ID NO: 545437 - RNA, 24 nt, Artificial Sequence
  Synthetic
acagaggaaaaaaaauagaguugc

SEQ ID NO: 545438 - RNA, 18 nt, Artificial Sequence
  Synthetic
auaagggaagauaguugc

SEQ ID NO: 545439 - RNA, 19 nt, Artificial Sequence
  Synthetic
aauaagggaagauaguugc

SEQ ID NO: 545440 - RNA, 20 nt, Artificial Sequence
  Synthetic
caauaagggaagauaguugc

SEQ ID NO: 545441 - RNA, 21 nt, Artificial Sequence
  Synthetic
gcaauaagggaagauaguugc

SEQ ID NO: 545442 - RNA, 22 nt, Artificial Sequence
  Synthetic
agcaauaagggaagauaguugc

SEQ ID NO: 545443 - RNA, 23 nt, Artificial Sequence
  Synthetic
aagcaauaagggaagauaguugc

SEQ ID NO: 545444 - RNA, 24 nt, Artificial Sequence
  Synthetic
aaagcaauaagggaagauaguugc

SEQ ID NO: 545445 - RNA, 18 nt, Artificial Sequence
  Synthetic
cagguuggaaguaguugc

SEQ ID NO: 545446 - RNA, 19 nt, Artificial Sequence
  Synthetic
acagguuggaaguaguugc

SEQ ID NO: 545447 - RNA, 20 nt, Artificial Sequence
  Synthetic
aacagguuggaaguaguugc

SEQ ID NO: 545448 - RNA, 21 nt, Artificial Sequence
  Synthetic
aaacagguuggaaguaguugc

SEQ ID NO: 545449 - RNA, 22 nt, Artificial Sequence
  Synthetic
aaaacagguuggaaguaguugc

SEQ ID NO: 545450 - RNA, 23 nt, Artificial Sequence
  Synthetic
aaaaacagguuggaaguaguugc

SEQ ID NO: 545451 - RNA, 24 nt, Artificial Sequence
  Synthetic
caaaaacagguuggaaguaguugc

SEQ ID NO: 545452 - RNA, 18 nt, Artificial Sequence
  Synthetic
gaguagaaagguaguugc

SEQ ID NO: 545453 - RNA, 19 nt, Artificial Sequence
  Synthetic
agaguagaaagguaguugc

SEQ ID NO: 545454 - RNA, 20 nt, Artificial Sequence
  Synthetic
gagaguagaaagguaguugc

SEQ ID NO: 545455 - RNA, 21 nt, Artificial Sequence
  Synthetic
agagaguagaaagguaguugc

SEQ ID NO: 545456 - RNA, 22 nt, Artificial Sequence
  Synthetic
uagagaguagaaagguaguugc

SEQ ID NO: 545457 - RNA, 23 nt, Artificial Sequence
  Synthetic
auagagaguagaaagguaguugc

SEQ ID NO: 545458 - RNA, 24 nt, Artificial Sequence
  Synthetic
cauagagaguagaaagguaguugc

SEQ ID NO: 545459 - RNA, 18 nt, Artificial Sequence
  Synthetic
gguuuacuuauuaguugc

SEQ ID NO: 545460 - RNA, 19 nt, Artificial Sequence
  Synthetic
agguuuacuuauuaguugc

SEQ ID NO: 545461 - RNA, 20 nt, Artificial Sequence
  Synthetic
uagguuuacuuauuaguugc

SEQ ID NO: 545462 - RNA, 21 nt, Artificial Sequence
  Synthetic
cuagguuuacuuauuaguugc

SEQ ID NO: 545463 - RNA, 22 nt, Artificial Sequence
  Synthetic
acuagguuuacuuauuaguugc

SEQ ID NO: 545464 - RNA, 23 nt, Artificial Sequence
  Synthetic
uacuagguuuacuuauuaguugc

SEQ ID NO: 545465 - RNA, 24 nt, Artificial Sequence
  Synthetic
uuacuagguuuacuuauuaguugc

SEQ ID NO: 545466 - RNA, 18 nt, Artificial Sequence
  Synthetic
aagacacacauacguugc

SEQ ID NO: 545467 - RNA, 19 nt, Artificial Sequence
  Synthetic
aaagacacacauacguugc

SEQ ID NO: 545468 - RNA, 20 nt, Artificial Sequence
  Synthetic
aaaagacacacauacguugc

SEQ ID NO: 545469 - RNA, 21 nt, Artificial Sequence
  Synthetic
aaaaagacacacauacguugc

SEQ ID NO: 545470 - RNA, 22 nt, Artificial Sequence
  Synthetic
caaaaagacacacauacguugc

SEQ ID NO: 545471 - RNA, 23 nt, Artificial Sequence
  Synthetic
acaaaaagacacacauacguugc

SEQ ID NO: 545472 - RNA, 24 nt, Artificial Sequence
  Synthetic
aacaaaaagacacacauacguugc

SEQ ID NO: 545473 - RNA, 18 nt, Artificial Sequence
  Synthetic
aguagaauuuuacguugc

SEQ ID NO: 545474 - RNA, 19 nt, Artificial Sequence
  Synthetic
gaguagaauuuuacguugc

SEQ ID NO: 545475 - RNA, 20 nt, Artificial Sequence
  Synthetic
ugaguagaauuuuacguugc

SEQ ID NO: 545476 - RNA, 21 nt, Artificial Sequence
  Synthetic
uugaguagaauuuuacguugc

SEQ ID NO: 545477 - RNA, 22 nt, Artificial Sequence
  Synthetic
auugaguagaauuuuacguugc

SEQ ID NO: 545478 - RNA, 23 nt, Artificial Sequence
  Synthetic
gauugaguagaauuuuacguugc

SEQ ID NO: 545479 - RNA, 24 nt, Artificial Sequence
  Synthetic
ugauugaguagaauuuuacguugc

SEQ ID NO: 545480 - RNA, 18 nt, Artificial Sequence
  Synthetic
gacuggacuggugguugc

SEQ ID NO: 545481 - RNA, 19 nt, Artificial Sequence
  Synthetic
agacuggacuggugguugc

SEQ ID NO: 545482 - RNA, 20 nt, Artificial Sequence
  Synthetic
aagacuggacuggugguugc

SEQ ID NO: 545483 - RNA, 21 nt, Artificial Sequence
  Synthetic
aaagacuggacuggugguugc

SEQ ID NO: 545484 - RNA, 22 nt, Artificial Sequence
  Synthetic
caaagacuggacuggugguugc

SEQ ID NO: 545485 - RNA, 23 nt, Artificial Sequence
  Synthetic
ucaaagacuggacuggugguugc

SEQ ID NO: 545486 - RNA, 24 nt, Artificial Sequence
  Synthetic
aucaaagacuggacuggugguugc

SEQ ID NO: 545487 - RNA, 18 nt, Artificial Sequence
  Synthetic
augaauuauauauguugc

SEQ ID NO: 545488 - RNA, 19 nt, Artificial Sequence
  Synthetic
gaugaauuauauauguugc

SEQ ID NO: 545489 - RNA, 20 nt, Artificial Sequence
  Synthetic
ggaugaauuauauauguugc

SEQ ID NO: 545490 - RNA, 21 nt, Artificial Sequence
  Synthetic
uggaugaauuauauauguugc

SEQ ID NO: 545491 - RNA, 22 nt, Artificial Sequence
  Synthetic
guggaugaauuauauauguugc

SEQ ID NO: 545492 - RNA, 23 nt, Artificial Sequence
  Synthetic
aguggaugaauuauauauguugc

SEQ ID NO: 545493 - RNA, 24 nt, Artificial Sequence
  Synthetic
aaguggaugaauuauauauguugc

SEQ ID NO: 545494 - RNA, 18 nt, Artificial Sequence
  Synthetic
acucugauacacuguugc

SEQ ID NO: 545495 - RNA, 19 nt, Artificial Sequence
  Synthetic
aacucugauacacuguugc

SEQ ID NO: 545496 - RNA, 20 nt, Artificial Sequence
  Synthetic
gaacucugauacacuguugc

SEQ ID NO: 545497 - RNA, 21 nt, Artificial Sequence
  Synthetic
ggaacucugauacacuguugc

SEQ ID NO: 545498 - RNA, 22 nt, Artificial Sequence
  Synthetic
gggaacucugauacacuguugc

SEQ ID NO: 545499 - RNA, 23 nt, Artificial Sequence
  Synthetic
agggaacucugauacacuguugc

SEQ ID NO: 545500 - RNA, 24 nt, Artificial Sequence
  Synthetic
gagggaacucugauacacuguugc

SEQ ID NO: 545501 - RNA, 18 nt, Artificial Sequence
  Synthetic
ugcaaauuucccuguugc

SEQ ID NO: 545502 - RNA, 19 nt, Artificial Sequence
  Synthetic
cugcaaauuucccuguugc

SEQ ID NO: 545503 - RNA, 20 nt, Artificial Sequence
  Synthetic
ucugcaaauuucccuguugc

SEQ ID NO: 545504 - RNA, 21 nt, Artificial Sequence
  Synthetic
uucugcaaauuucccuguugc

SEQ ID NO: 545505 - RNA, 22 nt, Artificial Sequence
  Synthetic
uuucugcaaauuucccuguugc

SEQ ID NO: 545506 - RNA, 23 nt, Artificial Sequence
  Synthetic
cuuucugcaaauuucccuguugc

SEQ ID NO: 545507 - RNA, 24 nt, Artificial Sequence
  Synthetic
ccuuucugcaaauuucccuguugc

SEQ ID NO: 545508 - RNA, 18 nt, Artificial Sequence
  Synthetic
aaaucacaaagcuguugc

SEQ ID NO: 545509 - RNA, 19 nt, Artificial Sequence
  Synthetic
uaaaucacaaagcuguugc

SEQ ID NO: 545510 - RNA, 20 nt, Artificial Sequence
  Synthetic
auaaaucacaaagcuguugc

SEQ ID NO: 545511 - RNA, 21 nt, Artificial Sequence
  Synthetic
aauaaaucacaaagcuguugc

SEQ ID NO: 545512 - RNA, 22 nt, Artificial Sequence
  Synthetic
uaauaaaucacaaagcuguugc

SEQ ID NO: 545513 - RNA, 23 nt, Artificial Sequence
  Synthetic
cuaauaaaucacaaagcuguugc

SEQ ID NO: 545514 - RNA, 24 nt, Artificial Sequence
  Synthetic
gcuaauaaaucacaaagcuguugc

SEQ ID NO: 545515 - RNA, 18 nt, Artificial Sequence
  Synthetic
agagucuggcucuguugc

SEQ ID NO: 545516 - RNA, 19 nt, Artificial Sequence
  Synthetic
cagagucuggcucuguugc

SEQ ID NO: 545517 - RNA, 20 nt, Artificial Sequence
  Synthetic
gcagagucuggcucuguugc

SEQ ID NO: 545518 - RNA, 21 nt, Artificial Sequence
  Synthetic
ggcagagucuggcucuguugc

SEQ ID NO: 545519 - RNA, 22 nt, Artificial Sequence
  Synthetic
aggcagagucuggcucuguugc

SEQ ID NO: 545520 - RNA, 23 nt, Artificial Sequence
  Synthetic
gaggcagagucuggcucuguugc

SEQ ID NO: 545521 - RNA, 24 nt, Artificial Sequence
  Synthetic
ugaggcagagucuggcucuguugc

SEQ ID NO: 545522 - RNA, 18 nt, Artificial Sequence
  Synthetic
aaauacgacaaguguugc

SEQ ID NO: 545523 - RNA, 19 nt, Artificial Sequence
  Synthetic
caaauacgacaaguguugc

SEQ ID NO: 545524 - RNA, 20 nt, Artificial Sequence
  Synthetic
acaaauacgacaaguguugc

SEQ ID NO: 545525 - RNA, 21 nt, Artificial Sequence
  Synthetic
uacaaauacgacaaguguugc

SEQ ID NO: 545526 - RNA, 22 nt, Artificial Sequence
  Synthetic
uuacaaauacgacaaguguugc

SEQ ID NO: 545527 - RNA, 23 nt, Artificial Sequence
  Synthetic
guuacaaauacgacaaguguugc

SEQ ID NO: 545528 - RNA, 24 nt, Artificial Sequence
  Synthetic
gguuacaaauacgacaaguguugc

SEQ ID NO: 545529 - RNA, 18 nt, Artificial Sequence
  Synthetic
cuugcagugaaguguugc

SEQ ID NO: 545530 - RNA, 19 nt, Artificial Sequence
  Synthetic
acuugcagugaaguguugc

SEQ ID NO: 545531 - RNA, 20 nt, Artificial Sequence
  Synthetic
uacuugcagugaaguguugc

SEQ ID NO: 545532 - RNA, 21 nt, Artificial Sequence
  Synthetic
auacuugcagugaaguguugc

SEQ ID NO: 545533 - RNA, 22 nt, Artificial Sequence
  Synthetic
uauacuugcagugaaguguugc

SEQ ID NO: 545534 - RNA, 23 nt, Artificial Sequence
  Synthetic
auauacuugcagugaaguguugc

SEQ ID NO: 545535 - RNA, 24 nt, Artificial Sequence
  Synthetic
aauauacuugcagugaaguguugc

SEQ ID NO: 545536 - RNA, 18 nt, Artificial Sequence
  Synthetic
uuauuuucacauuguugc

SEQ ID NO: 545537 - RNA, 19 nt, Artificial Sequence
  Synthetic
auuauuuucacauuguugc

SEQ ID NO: 545538 - RNA, 20 nt, Artificial Sequence
  Synthetic
cauuauuuucacauuguugc

SEQ ID NO: 545539 - RNA, 21 nt, Artificial Sequence
  Synthetic
ccauuauuuucacauuguugc

SEQ ID NO: 545540 - RNA, 22 nt, Artificial Sequence
  Synthetic
accauuauuuucacauuguugc

SEQ ID NO: 545541 - RNA, 23 nt, Artificial Sequence
  Synthetic
caccauuauuuucacauuguugc

SEQ ID NO: 545542 - RNA, 24 nt, Artificial Sequence
  Synthetic
gcaccauuauuuucacauuguugc

SEQ ID NO: 545543 - RNA, 18 nt, Artificial Sequence
  Synthetic
aaaaauccuaaaauuugc

SEQ ID NO: 545544 - RNA, 19 nt, Artificial Sequence
  Synthetic
aaaaaauccuaaaauuugc

SEQ ID NO: 545545 - RNA, 20 nt, Artificial Sequence
  Synthetic
uaaaaaauccuaaaauuugc

SEQ ID NO: 545546 - RNA, 21 nt, Artificial Sequence
  Synthetic
uuaaaaaauccuaaaauuugc

SEQ ID NO: 545547 - RNA, 22 nt, Artificial Sequence
  Synthetic
uuuaaaaaauccuaaaauuugc

SEQ ID NO: 545548 - RNA, 23 nt, Artificial Sequence
  Synthetic
uuuuaaaaaauccuaaaauuugc

SEQ ID NO: 545549 - RNA, 24 nt, Artificial Sequence
  Synthetic
uuuuuaaaaaauccuaaaauuugc

SEQ ID NO: 545550 - RNA, 18 nt, Artificial Sequence
  Synthetic
ucacuguuagaaauuugc

SEQ ID NO: 545551 - RNA, 19 nt, Artificial Sequence
  Synthetic
aucacuguuagaaauuugc

SEQ ID NO: 545552 - RNA, 20 nt, Artificial Sequence
  Synthetic
gaucacuguuagaaauuugc

SEQ ID NO: 545553 - RNA, 21 nt, Artificial Sequence
  Synthetic
agaucacuguuagaaauuugc

SEQ ID NO: 545554 - RNA, 22 nt, Artificial Sequence
  Synthetic
gagaucacuguuagaaauuugc

SEQ ID NO: 545555 - RNA, 23 nt, Artificial Sequence
  Synthetic
agagaucacuguuagaaauuugc

SEQ ID NO: 545556 - RNA, 24 nt, Artificial Sequence
  Synthetic
aagagaucacuguuagaaauuugc

SEQ ID NO: 545557 - RNA, 18 nt, Artificial Sequence
  Synthetic
aggucugcuggaauuugc

SEQ ID NO: 545558 - RNA, 19 nt, Artificial Sequence
  Synthetic
caggucugcuggaauuugc

SEQ ID NO: 545559 - RNA, 20 nt, Artificial Sequence
  Synthetic
gcaggucugcuggaauuugc

SEQ ID NO: 545560 - RNA, 21 nt, Artificial Sequence
  Synthetic
ugcaggucugcuggaauuugc

SEQ ID NO: 545561 - RNA, 22 nt, Artificial Sequence
  Synthetic
cugcaggucugcuggaauuugc

SEQ ID NO: 545562 - RNA, 23 nt, Artificial Sequence
  Synthetic
gcugcaggucugcuggaauuugc

SEQ ID NO: 545563 - RNA, 24 nt, Artificial Sequence
  Synthetic
ugcugcaggucugcuggaauuugc

SEQ ID NO: 545564 - RNA, 18 nt, Artificial Sequence
  Synthetic
caggcuguuggaauuugc

SEQ ID NO: 545565 - RNA, 19 nt, Artificial Sequence
  Synthetic
ucaggcuguuggaauuugc

SEQ ID NO: 545566 - RNA, 20 nt, Artificial Sequence
  Synthetic
aucaggcuguuggaauuugc

SEQ ID NO: 545567 - RNA, 21 nt, Artificial Sequence
  Synthetic
caucaggcuguuggaauuugc

SEQ ID NO: 545568 - RNA, 22 nt, Artificial Sequence
  Synthetic
gcaucaggcuguuggaauuugc

SEQ ID NO: 545569 - RNA, 23 nt, Artificial Sequence
  Synthetic
agcaucaggcuguuggaauuugc

SEQ ID NO: 545570 - RNA, 24 nt, Artificial Sequence
  Synthetic
uagcaucaggcuguuggaauuugc

SEQ ID NO: 545571 - RNA, 18 nt, Artificial Sequence
  Synthetic
aauguuuaaugaauuugc

SEQ ID NO: 545572 - RNA, 19 nt, Artificial Sequence
  Synthetic
aaauguuuaaugaauuugc

SEQ ID NO: 545573 - RNA, 20 nt, Artificial Sequence
  Synthetic
aaaauguuuaaugaauuugc

SEQ ID NO: 545574 - RNA, 21 nt, Artificial Sequence
  Synthetic
aaaaauguuuaaugaauuugc

SEQ ID NO: 545575 - RNA, 22 nt, Artificial Sequence
  Synthetic
aaaaaauguuuaaugaauuugc

SEQ ID NO: 545576 - RNA, 23 nt, Artificial Sequence
  Synthetic
gaaaaaauguuuaaugaauuugc

SEQ ID NO: 545577 - RNA, 24 nt, Artificial Sequence
  Synthetic
ggaaaaaauguuuaaugaauuugc

SEQ ID NO: 545578 - RNA, 18 nt, Artificial Sequence
  Synthetic
cuuuuauuaguaauuugc

SEQ ID NO: 545579 - RNA, 19 nt, Artificial Sequence
  Synthetic
ucuuuuauuaguaauuugc

SEQ ID NO: 545580 - RNA, 20 nt, Artificial Sequence
  Synthetic
aucuuuuauuaguaauuugc

SEQ ID NO: 545581 - RNA, 21 nt, Artificial Sequence
  Synthetic
gaucuuuuauuaguaauuugc

SEQ ID NO: 545582 - RNA, 22 nt, Artificial Sequence
  Synthetic
agaucuuuuauuaguaauuugc

SEQ ID NO: 545583 - RNA, 23 nt, Artificial Sequence
  Synthetic
cagaucuuuuauuaguaauuugc

SEQ ID NO: 545584 - RNA, 24 nt, Artificial Sequence
  Synthetic
ccagaucuuuuauuaguaauuugc

SEQ ID NO: 545585 - RNA, 18 nt, Artificial Sequence
  Synthetic
uuuuugcuuuccauuugc

SEQ ID NO: 545586 - RNA, 19 nt, Artificial Sequence
  Synthetic
uuuuuugcuuuccauuugc

SEQ ID NO: 545587 - RNA, 20 nt, Artificial Sequence
  Synthetic
uuuuuuugcuuuccauuugc

SEQ ID NO: 545588 - RNA, 21 nt, Artificial Sequence
  Synthetic
auuuuuuugcuuuccauuugc

SEQ ID NO: 545589 - RNA, 22 nt, Artificial Sequence
  Synthetic
uauuuuuuugcuuuccauuugc

SEQ ID NO: 545590 - RNA, 23 nt, Artificial Sequence
  Synthetic
uuauuuuuuugcuuuccauuugc

SEQ ID NO: 545591 - RNA, 24 nt, Artificial Sequence
  Synthetic
uuuauuuuuuugcuuuccauuugc

SEQ ID NO: 545592 - RNA, 18 nt, Artificial Sequence
  Synthetic
cuuuugguuuccauuugc

SEQ ID NO: 545593 - RNA, 19 nt, Artificial Sequence
  Synthetic
ucuuuugguuuccauuugc

SEQ ID NO: 545594 - RNA, 20 nt, Artificial Sequence
  Synthetic
cucuuuugguuuccauuugc

SEQ ID NO: 545595 - RNA, 21 nt, Artificial Sequence
  Synthetic
ucucuuuugguuuccauuugc

SEQ ID NO: 545596 - RNA, 22 nt, Artificial Sequence
  Synthetic
uucucuuuugguuuccauuugc

SEQ ID NO: 545597 - RNA, 23 nt, Artificial Sequence
  Synthetic
auucucuuuugguuuccauuugc

SEQ ID NO: 545598 - RNA, 24 nt, Artificial Sequence
  Synthetic
cauucucuuuugguuuccauuugc

SEQ ID NO: 545599 - RNA, 18 nt, Artificial Sequence
  Synthetic
acagaugguggcauuugc

SEQ ID NO: 545600 - RNA, 19 nt, Artificial Sequence
  Synthetic
cacagaugguggcauuugc

SEQ ID NO: 545601 - RNA, 20 nt, Artificial Sequence
  Synthetic
acacagaugguggcauuugc

SEQ ID NO: 545602 - RNA, 21 nt, Artificial Sequence
  Synthetic
cacacagaugguggcauuugc

SEQ ID NO: 545603 - RNA, 22 nt, Artificial Sequence
  Synthetic
ucacacagaugguggcauuugc

SEQ ID NO: 545604 - RNA, 23 nt, Artificial Sequence
  Synthetic
aucacacagaugguggcauuugc

SEQ ID NO: 545605 - RNA, 24 nt, Artificial Sequence
  Synthetic
aaucacacagaugguggcauuugc

SEQ ID NO: 545606 - RNA, 18 nt, Artificial Sequence
  Synthetic
aaaaagaauaucauuugc

SEQ ID NO: 545607 - RNA, 19 nt, Artificial Sequence
  Synthetic
aaaaaagaauaucauuugc

SEQ ID NO: 545608 - RNA, 20 nt, Artificial Sequence
  Synthetic
uaaaaaagaauaucauuugc

SEQ ID NO: 545609 - RNA, 21 nt, Artificial Sequence
  Synthetic
auaaaaaagaauaucauuugc

SEQ ID NO: 545610 - RNA, 22 nt, Artificial Sequence
  Synthetic
aauaaaaaagaauaucauuugc

SEQ ID NO: 545611 - RNA, 23 nt, Artificial Sequence
  Synthetic
aaauaaaaaagaauaucauuugc

SEQ ID NO: 545612 - RNA, 24 nt, Artificial Sequence
  Synthetic
aaaauaaaaaagaauaucauuugc

SEQ ID NO: 545613 - RNA, 18 nt, Artificial Sequence
  Synthetic
aauauuuggcauauuugc

SEQ ID NO: 545614 - RNA, 19 nt, Artificial Sequence
  Synthetic
uaauauuuggcauauuugc

SEQ ID NO: 545615 - RNA, 20 nt, Artificial Sequence
  Synthetic
guaauauuuggcauauuugc

SEQ ID NO: 545616 - RNA, 21 nt, Artificial Sequence
  Synthetic
gguaauauuuggcauauuugc

SEQ ID NO: 545617 - RNA, 22 nt, Artificial Sequence
  Synthetic
agguaauauuuggcauauuugc

SEQ ID NO: 545618 - RNA, 23 nt, Artificial Sequence
  Synthetic
uagguaauauuuggcauauuugc

SEQ ID NO: 545619 - RNA, 24 nt, Artificial Sequence
  Synthetic
guagguaauauuuggcauauuugc

SEQ ID NO: 545620 - RNA, 18 nt, Artificial Sequence
  Synthetic
aucuuugaucuuauuugc

SEQ ID NO: 545621 - RNA, 19 nt, Artificial Sequence
  Synthetic
aaucuuugaucuuauuugc

SEQ ID NO: 545622 - RNA, 20 nt, Artificial Sequence
  Synthetic
aaaucuuugaucuuauuugc

SEQ ID NO: 545623 - RNA, 21 nt, Artificial Sequence
  Synthetic
gaaaucuuugaucuuauuugc

SEQ ID NO: 545624 - RNA, 22 nt, Artificial Sequence
  Synthetic
agaaaucuuugaucuuauuugc

SEQ ID NO: 545625 - RNA, 23 nt, Artificial Sequence
  Synthetic
cagaaaucuuugaucuuauuugc

SEQ ID NO: 545626 - RNA, 24 nt, Artificial Sequence
  Synthetic
ucagaaaucuuugaucuuauuugc

SEQ ID NO: 545627 - RNA, 18 nt, Artificial Sequence
  Synthetic
ccauuguauauacuuugc

SEQ ID NO: 545628 - RNA, 19 nt, Artificial Sequence
  Synthetic
uccauuguauauacuuugc

SEQ ID NO: 545629 - RNA, 20 nt, Artificial Sequence
  Synthetic
cuccauuguauauacuuugc

SEQ ID NO: 545630 - RNA, 21 nt, Artificial Sequence
  Synthetic
ucuccauuguauauacuuugc

SEQ ID NO: 545631 - RNA, 22 nt, Artificial Sequence
  Synthetic
uucuccauuguauauacuuugc

SEQ ID NO: 545632 - RNA, 23 nt, Artificial Sequence
  Synthetic
auucuccauuguauauacuuugc

SEQ ID NO: 545633 - RNA, 24 nt, Artificial Sequence
  Synthetic
uauucuccauuguauauacuuugc

SEQ ID NO: 545634 - RNA, 18 nt, Artificial Sequence
  Synthetic
ugagaucauguccuuugc

SEQ ID NO: 545635 - RNA, 19 nt, Artificial Sequence
  Synthetic
augagaucauguccuuugc

SEQ ID NO: 545636 - RNA, 21 nt, Artificial Sequence
  Synthetic
gaaugagaucauguccuuugc

SEQ ID NO: 545637 - RNA, 22 nt, Artificial Sequence
  Synthetic
agaaugagaucauguccuuugc

SEQ ID NO: 545638 - RNA, 23 nt, Artificial Sequence
  Synthetic
aagaaugagaucauguccuuugc

SEQ ID NO: 545639 - RNA, 24 nt, Artificial Sequence
  Synthetic
aaagaaugagaucauguccuuugc

SEQ ID NO: 545640 - RNA, 22 nt, Artificial Sequence
  Synthetic
ggaaugagaucauguccuuugc

SEQ ID NO: 545641 - RNA, 23 nt, Artificial Sequence
  Synthetic
aggaaugagaucauguccuuugc

SEQ ID NO: 545642 - RNA, 24 nt, Artificial Sequence
  Synthetic
aaggaaugagaucauguccuuugc

SEQ ID NO: 545643 - RNA, 20 nt, Artificial Sequence
  Synthetic
gaugagaucauguccuuugc

SEQ ID NO: 545644 - RNA, 21 nt, Artificial Sequence
  Synthetic
ggaugagaucauguccuuugc

SEQ ID NO: 545645 - RNA, 22 nt, Artificial Sequence
  Synthetic
aggaugagaucauguccuuugc

SEQ ID NO: 545646 - RNA, 23 nt, Artificial Sequence
  Synthetic
aaggaugagaucauguccuuugc

SEQ ID NO: 545647 - RNA, 24 nt, Artificial Sequence
  Synthetic
aaaggaugagaucauguccuuugc

SEQ ID NO: 545648 - RNA, 18 nt, Artificial Sequence
  Synthetic
ugacuucauguccuuugc

SEQ ID NO: 545649 - RNA, 19 nt, Artificial Sequence
  Synthetic
augacuucauguccuuugc

SEQ ID NO: 545650 - RNA, 20 nt, Artificial Sequence
  Synthetic
gaugacuucauguccuuugc

SEQ ID NO: 545651 - RNA, 21 nt, Artificial Sequence
  Synthetic
ggaugacuucauguccuuugc

SEQ ID NO: 545652 - RNA, 22 nt, Artificial Sequence
  Synthetic
aggaugacuucauguccuuugc

SEQ ID NO: 545653 - RNA, 23 nt, Artificial Sequence
  Synthetic
caggaugacuucauguccuuugc

SEQ ID NO: 545654 - RNA, 24 nt, Artificial Sequence
  Synthetic
acaggaugacuucauguccuuugc

SEQ ID NO: 545655 - RNA, 18 nt, Artificial Sequence
  Synthetic
ugaguucauguccuuugc

SEQ ID NO: 545656 - RNA, 19 nt, Artificial Sequence
  Synthetic
augaguucauguccuuugc

SEQ ID NO: 545657 - RNA, 20 nt, Artificial Sequence
  Synthetic
aaugaguucauguccuuugc

SEQ ID NO: 545658 - RNA, 21 nt, Artificial Sequence
  Synthetic
gaaugaguucauguccuuugc

SEQ ID NO: 545659 - RNA, 22 nt, Artificial Sequence
  Synthetic
agaaugaguucauguccuuugc

SEQ ID NO: 545660 - RNA, 23 nt, Artificial Sequence
  Synthetic
aagaaugaguucauguccuuugc

SEQ ID NO: 545661 - RNA, 24 nt, Artificial Sequence
  Synthetic
aaagaaugaguucauguccuuugc

SEQ ID NO: 545662 - RNA, 18 nt, Artificial Sequence
  Synthetic
ugaguucguguccuuugc

SEQ ID NO: 545663 - RNA, 19 nt, Artificial Sequence
  Synthetic
augaguucguguccuuugc

SEQ ID NO: 545664 - RNA, 20 nt, Artificial Sequence
  Synthetic
aaugaguucguguccuuugc

SEQ ID NO: 545665 - RNA, 21 nt, Artificial Sequence
  Synthetic
gaaugaguucguguccuuugc

SEQ ID NO: 545666 - RNA, 22 nt, Artificial Sequence
  Synthetic
agaaugaguucguguccuuugc

SEQ ID NO: 545667 - RNA, 23 nt, Artificial Sequence
  Synthetic
aagaaugaguucguguccuuugc

SEQ ID NO: 545668 - RNA, 24 nt, Artificial Sequence
  Synthetic
aaagaaugaguucguguccuuugc

SEQ ID NO: 545669 - RNA, 18 nt, Artificial Sequence
  Synthetic
uaagggguaaaucuuugc

SEQ ID NO: 545670 - RNA, 19 nt, Artificial Sequence
  Synthetic
cuaagggguaaaucuuugc

SEQ ID NO: 545671 - RNA, 20 nt, Artificial Sequence
  Synthetic
gcuaagggguaaaucuuugc

SEQ ID NO: 545672 - RNA, 21 nt, Artificial Sequence
  Synthetic
ggcuaagggguaaaucuuugc

SEQ ID NO: 545673 - RNA, 22 nt, Artificial Sequence
  Synthetic
uggcuaagggguaaaucuuugc

SEQ ID NO: 545674 - RNA, 23 nt, Artificial Sequence
  Synthetic
auggcuaagggguaaaucuuugc

SEQ ID NO: 545675 - RNA, 24 nt, Artificial Sequence
  Synthetic
uauggcuaagggguaaaucuuugc

SEQ ID NO: 545676 - RNA, 18 nt, Artificial Sequence
  Synthetic
uuguuguauacucuuugc

SEQ ID NO: 545677 - RNA, 19 nt, Artificial Sequence
  Synthetic
uuuguuguauacucuuugc

SEQ ID NO: 545678 - RNA, 20 nt, Artificial Sequence
  Synthetic
auuuguuguauacucuuugc

SEQ ID NO: 545679 - RNA, 21 nt, Artificial Sequence
  Synthetic
uauuuguuguauacucuuugc

SEQ ID NO: 545680 - RNA, 22 nt, Artificial Sequence
  Synthetic
auauuuguuguauacucuuugc

SEQ ID NO: 545681 - RNA, 23 nt, Artificial Sequence
  Synthetic
cauauuuguuguauacucuuugc

SEQ ID NO: 545682 - RNA, 24 nt, Artificial Sequence
  Synthetic
gcauauuuguuguauacucuuugc

SEQ ID NO: 545683 - RNA, 18 nt, Artificial Sequence
  Synthetic
auucuuguggcucuuugc

SEQ ID NO: 545684 - RNA, 19 nt, Artificial Sequence
  Synthetic
cauucuuguggcucuuugc

SEQ ID NO: 545685 - RNA, 20 nt, Artificial Sequence
  Synthetic
ucauucuuguggcucuuugc

SEQ ID NO: 545686 - RNA, 21 nt, Artificial Sequence
  Synthetic
cucauucuuguggcucuuugc

SEQ ID NO: 545687 - RNA, 22 nt, Artificial Sequence
  Synthetic
gcucauucuuguggcucuuugc

SEQ ID NO: 545688 - RNA, 23 nt, Artificial Sequence
  Synthetic
agcucauucuuguggcucuuugc

SEQ ID NO: 545689 - RNA, 24 nt, Artificial Sequence
  Synthetic
aagcucauucuuguggcucuuugc

SEQ ID NO: 545690 - RNA, 18 nt, Artificial Sequence
  Synthetic
augacuguaugucuuugc

SEQ ID NO: 545691 - RNA, 19 nt, Artificial Sequence
  Synthetic
aaugacuguaugucuuugc

SEQ ID NO: 545692 - RNA, 20 nt, Artificial Sequence
  Synthetic
gaaugacuguaugucuuugc

SEQ ID NO: 545693 - RNA, 21 nt, Artificial Sequence
  Synthetic
ggaaugacuguaugucuuugc

SEQ ID NO: 545694 - RNA, 22 nt, Artificial Sequence
  Synthetic
cggaaugacuguaugucuuugc

SEQ ID NO: 545695 - RNA, 23 nt, Artificial Sequence
  Synthetic
ccggaaugacuguaugucuuugc

SEQ ID NO: 545696 - RNA, 24 nt, Artificial Sequence
  Synthetic
cccggaaugacuguaugucuuugc

SEQ ID NO: 545697 - RNA, 18 nt, Artificial Sequence
  Synthetic
gugcuccagcuucuuugc

SEQ ID NO: 545698 - RNA, 19 nt, Artificial Sequence
  Synthetic
ugugcuccagcuucuuugc

SEQ ID NO: 545699 - RNA, 20 nt, Artificial Sequence
  Synthetic
cugugcuccagcuucuuugc

SEQ ID NO: 545700 - RNA, 21 nt, Artificial Sequence
  Synthetic
ucugugcuccagcuucuuugc

SEQ ID NO: 545701 - RNA, 22 nt, Artificial Sequence
  Synthetic
cucugugcuccagcuucuuugc

SEQ ID NO: 545702 - RNA, 23 nt, Artificial Sequence
  Synthetic
ucucugugcuccagcuucuuugc

SEQ ID NO: 545703 - RNA, 24 nt, Artificial Sequence
  Synthetic
cucucugugcuccagcuucuuugc

SEQ ID NO: 545704 - RNA, 18 nt, Artificial Sequence
  Synthetic
uaaaauaaucuucuuugc

SEQ ID NO: 545705 - RNA, 19 nt, Artificial Sequence
  Synthetic
auaaaauaaucuucuuugc

SEQ ID NO: 545706 - RNA, 20 nt, Artificial Sequence
  Synthetic
aauaaaauaaucuucuuugc

SEQ ID NO: 545707 - RNA, 21 nt, Artificial Sequence
  Synthetic
gaauaaaauaaucuucuuugc

SEQ ID NO: 545708 - RNA, 22 nt, Artificial Sequence
  Synthetic
agaauaaaauaaucuucuuugc

SEQ ID NO: 545709 - RNA, 23 nt, Artificial Sequence
  Synthetic
cagaauaaaauaaucuucuuugc

SEQ ID NO: 545710 - RNA, 24 nt, Artificial Sequence
  Synthetic
ucagaauaaaauaaucuucuuugc

SEQ ID NO: 545711 - RNA, 18 nt, Artificial Sequence
  Synthetic
accacccguguucuuugc

SEQ ID NO: 545712 - RNA, 19 nt, Artificial Sequence
  Synthetic
uaccacccguguucuuugc

SEQ ID NO: 545713 - RNA, 20 nt, Artificial Sequence
  Synthetic
auaccacccguguucuuugc

SEQ ID NO: 545714 - RNA, 21 nt, Artificial Sequence
  Synthetic
uauaccacccguguucuuugc

SEQ ID NO: 545715 - RNA, 22 nt, Artificial Sequence
  Synthetic
auauaccacccguguucuuugc

SEQ ID NO: 545716 - RNA, 23 nt, Artificial Sequence
  Synthetic
aauauaccacccguguucuuugc

SEQ ID NO: 545717 - RNA, 24 nt, Artificial Sequence
  Synthetic
caauauaccacccguguucuuugc

SEQ ID NO: 545718 - RNA, 18 nt, Artificial Sequence
  Synthetic
gaaaguugaaaaguuugc

SEQ ID NO: 545719 - RNA, 19 nt, Artificial Sequence
  Synthetic
ggaaaguugaaaaguuugc

SEQ ID NO: 545720 - RNA, 20 nt, Artificial Sequence
  Synthetic
gggaaaguugaaaaguuugc

SEQ ID NO: 545721 - RNA, 21 nt, Artificial Sequence
  Synthetic
agggaaaguugaaaaguuugc

SEQ ID NO: 545722 - RNA, 22 nt, Artificial Sequence
  Synthetic
gagggaaaguugaaaaguuugc

SEQ ID NO: 545723 - RNA, 23 nt, Artificial Sequence
  Synthetic
agagggaaaguugaaaaguuugc

SEQ ID NO: 545724 - RNA, 24 nt, Artificial Sequence
  Synthetic
aagagggaaaguugaaaaguuugc

SEQ ID NO: 545725 - RNA, 18 nt, Artificial Sequence
  Synthetic
ucugugcguaaaguuugc

SEQ ID NO: 545726 - RNA, 19 nt, Artificial Sequence
  Synthetic
cucugugcguaaaguuugc

SEQ ID NO: 545727 - RNA, 20 nt, Artificial Sequence
  Synthetic
ucucugugcguaaaguuugc

SEQ ID NO: 545728 - RNA, 21 nt, Artificial Sequence
  Synthetic
uucucugugcguaaaguuugc

SEQ ID NO: 545729 - RNA, 22 nt, Artificial Sequence
  Synthetic
uuucucugugcguaaaguuugc

SEQ ID NO: 545730 - RNA, 23 nt, Artificial Sequence
  Synthetic
auuucucugugcguaaaguuugc

SEQ ID NO: 545731 - RNA, 24 nt, Artificial Sequence
  Synthetic
aauuucucugugcguaaaguuugc

SEQ ID NO: 545732 - RNA, 18 nt, Artificial Sequence
  Synthetic
aauuuuuguaaaguuugc

SEQ ID NO: 545733 - RNA, 19 nt, Artificial Sequence
  Synthetic
aaauuuuuguaaaguuugc

SEQ ID NO: 545734 - RNA, 20 nt, Artificial Sequence
  Synthetic
aaaauuuuuguaaaguuugc

SEQ ID NO: 545735 - RNA, 21 nt, Artificial Sequence
  Synthetic
gaaaauuuuuguaaaguuugc

SEQ ID NO: 545736 - RNA, 22 nt, Artificial Sequence
  Synthetic
agaaaauuuuuguaaaguuugc

SEQ ID NO: 545737 - RNA, 23 nt, Artificial Sequence
  Synthetic
cagaaaauuuuuguaaaguuugc

SEQ ID NO: 545738 - RNA, 24 nt, Artificial Sequence
  Synthetic
ccagaaaauuuuuguaaaguuugc

SEQ ID NO: 545739 - RNA, 18 nt, Artificial Sequence
  Synthetic
auucagagggcaguuugc

SEQ ID NO: 545740 - RNA, 19 nt, Artificial Sequence
  Synthetic
aauucagagggcaguuugc

SEQ ID NO: 545741 - RNA, 20 nt, Artificial Sequence
  Synthetic
aaauucagagggcaguuugc

SEQ ID NO: 545742 - RNA, 21 nt, Artificial Sequence
  Synthetic
aaaauucagagggcaguuugc

SEQ ID NO: 545743 - RNA, 22 nt, Artificial Sequence
  Synthetic
gaaaauucagagggcaguuugc

SEQ ID NO: 545744 - RNA, 23 nt, Artificial Sequence
  Synthetic
ugaaaauucagagggcaguuugc

SEQ ID NO: 545745 - RNA, 24 nt, Artificial Sequence
  Synthetic
uugaaaauucagagggcaguuugc

SEQ ID NO: 545746 - RNA, 18 nt, Artificial Sequence
  Synthetic
uuauugguugagguuugc

SEQ ID NO: 545747 - RNA, 19 nt, Artificial Sequence
  Synthetic
guuauugguugagguuugc

SEQ ID NO: 545748 - RNA, 20 nt, Artificial Sequence
  Synthetic
uguuauugguugagguuugc

SEQ ID NO: 545749 - RNA, 21 nt, Artificial Sequence
  Synthetic
uuguuauugguugagguuugc

SEQ ID NO: 545750 - RNA, 22 nt, Artificial Sequence
  Synthetic
uuuguuauugguugagguuugc

SEQ ID NO: 545751 - RNA, 23 nt, Artificial Sequence
  Synthetic
auuuguuauugguugagguuugc

SEQ ID NO: 545752 - RNA, 24 nt, Artificial Sequence
  Synthetic
uauuuguuauugguugagguuugc

SEQ ID NO: 545753 - RNA, 18 nt, Artificial Sequence
  Synthetic
auguuaaaagugguuugc

SEQ ID NO: 545754 - RNA, 19 nt, Artificial Sequence
  Synthetic
aauguuaaaagugguuugc

SEQ ID NO: 545755 - RNA, 20 nt, Artificial Sequence
  Synthetic
aaauguuaaaagugguuugc

SEQ ID NO: 545756 - RNA, 21 nt, Artificial Sequence
  Synthetic
aaaauguuaaaagugguuugc

SEQ ID NO: 545757 - RNA, 22 nt, Artificial Sequence
  Synthetic
caaaauguuaaaagugguuugc

SEQ ID NO: 545758 - RNA, 23 nt, Artificial Sequence
  Synthetic
ucaaaauguuaaaagugguuugc

SEQ ID NO: 545759 - RNA, 24 nt, Artificial Sequence
  Synthetic
aucaaaauguuaaaagugguuugc

SEQ ID NO: 545760 - RNA, 18 nt, Artificial Sequence
  Synthetic
caugguaauguuguuugc

SEQ ID NO: 545761 - RNA, 19 nt, Artificial Sequence
  Synthetic
ucaugguaauguuguuugc

SEQ ID NO: 545762 - RNA, 20 nt, Artificial Sequence
  Synthetic
gucaugguaauguuguuugc

SEQ ID NO: 545763 - RNA, 21 nt, Artificial Sequence
  Synthetic
agucaugguaauguuguuugc

SEQ ID NO: 545764 - RNA, 22 nt, Artificial Sequence
  Synthetic
aagucaugguaauguuguuugc

SEQ ID NO: 545765 - RNA, 23 nt, Artificial Sequence
  Synthetic
uaagucaugguaauguuguuugc

SEQ ID NO: 545766 - RNA, 24 nt, Artificial Sequence
  Synthetic
cuaagucaugguaauguuguuugc

SEQ ID NO: 545767 - RNA, 18 nt, Artificial Sequence
  Synthetic
uaccuugacaaauuuugc

SEQ ID NO: 545768 - RNA, 19 nt, Artificial Sequence
  Synthetic
cuaccuugacaaauuuugc

SEQ ID NO: 545769 - RNA, 20 nt, Artificial Sequence
  Synthetic
acuaccuugacaaauuuugc

SEQ ID NO: 545770 - RNA, 21 nt, Artificial Sequence
  Synthetic
aacuaccuugacaaauuuugc

SEQ ID NO: 545771 - RNA, 22 nt, Artificial Sequence
  Synthetic
aaacuaccuugacaaauuuugc

SEQ ID NO: 545772 - RNA, 23 nt, Artificial Sequence
  Synthetic
caaacuaccuugacaaauuuugc

SEQ ID NO: 545773 - RNA, 24 nt, Artificial Sequence
  Synthetic
acaaacuaccuugacaaauuuugc

SEQ ID NO: 545774 - RNA, 18 nt, Artificial Sequence
  Synthetic
aaguuuuaaucauuuugc

SEQ ID NO: 545775 - RNA, 19 nt, Artificial Sequence
  Synthetic
caaguuuuaaucauuuugc

SEQ ID NO: 545776 - RNA, 20 nt, Artificial Sequence
  Synthetic
ccaaguuuuaaucauuuugc

SEQ ID NO: 545777 - RNA, 21 nt, Artificial Sequence
  Synthetic
uccaaguuuuaaucauuuugc

SEQ ID NO: 545778 - RNA, 22 nt, Artificial Sequence
  Synthetic
auccaaguuuuaaucauuuugc

SEQ ID NO: 545779 - RNA, 23 nt, Artificial Sequence
  Synthetic
gauccaaguuuuaaucauuuugc

SEQ ID NO: 545780 - RNA, 24 nt, Artificial Sequence
  Synthetic
ugauccaaguuuuaaucauuuugc

SEQ ID NO: 545781 - RNA, 18 nt, Artificial Sequence
  Synthetic
uacaauauuagauuuugc

SEQ ID NO: 545782 - RNA, 19 nt, Artificial Sequence
  Synthetic
auacaauauuagauuuugc

SEQ ID NO: 545783 - RNA, 20 nt, Artificial Sequence
  Synthetic
uauacaauauuagauuuugc

SEQ ID NO: 545784 - RNA, 21 nt, Artificial Sequence
  Synthetic
cuauacaauauuagauuuugc

SEQ ID NO: 545785 - RNA, 22 nt, Artificial Sequence
  Synthetic
acuauacaauauuagauuuugc

SEQ ID NO: 545786 - RNA, 23 nt, Artificial Sequence
  Synthetic
uacuauacaauauuagauuuugc

SEQ ID NO: 545787 - RNA, 24 nt, Artificial Sequence
  Synthetic
auacuauacaauauuagauuuugc

SEQ ID NO: 545788 - RNA, 18 nt, Artificial Sequence
  Synthetic
guauguguuuauuuuugc

SEQ ID NO: 545789 - RNA, 19 nt, Artificial Sequence
  Synthetic
uguauguguuuauuuuugc

SEQ ID NO: 545790 - RNA, 20 nt, Artificial Sequence
  Synthetic
auguauguguuuauuuuugc

SEQ ID NO: 545791 - RNA, 21 nt, Artificial Sequence
  Synthetic
uauguauguguuuauuuuugc

SEQ ID NO: 545792 - RNA, 22 nt, Artificial Sequence
  Synthetic
uuauguauguguuuauuuuugc

SEQ ID NO: 545793 - RNA, 23 nt, Artificial Sequence
  Synthetic
uuuauguauguguuuauuuuugc

SEQ ID NO: 545794 - RNA, 24 nt, Artificial Sequence
  Synthetic
auuuauguauguguuuauuuuugc

SEQ ID NO: 545795 - RNA, 18 nt, Artificial Sequence
  Synthetic
uaaguacucccuuuuugc

SEQ ID NO: 545796 - RNA, 19 nt, Artificial Sequence
  Synthetic
auaaguacucccuuuuugc

SEQ ID NO: 545797 - RNA, 20 nt, Artificial Sequence
  Synthetic
cauaaguacucccuuuuugc

SEQ ID NO: 545798 - RNA, 21 nt, Artificial Sequence
  Synthetic
ccauaaguacucccuuuuugc

SEQ ID NO: 545799 - RNA, 22 nt, Artificial Sequence
  Synthetic
gccauaaguacucccuuuuugc

SEQ ID NO: 545800 - RNA, 23 nt, Artificial Sequence
  Synthetic
agccauaaguacucccuuuuugc

SEQ ID NO: 545801 - RNA, 24 nt, Artificial Sequence
  Synthetic
uagccauaaguacucccuuuuugc

SEQ ID NO: 545802 - RNA, 18 nt, Artificial Sequence
  Synthetic
ucuuaaauaauuuuuugc

SEQ ID NO: 545803 - RNA, 19 nt, Artificial Sequence
  Synthetic
aucuuaaauaauuuuuugc

SEQ ID NO: 545804 - RNA, 20 nt, Artificial Sequence
  Synthetic
uaucuuaaauaauuuuuugc

SEQ ID NO: 545805 - RNA, 21 nt, Artificial Sequence
  Synthetic
guaucuuaaauaauuuuuugc

SEQ ID NO: 545806 - RNA, 22 nt, Artificial Sequence
  Synthetic
aguaucuuaaauaauuuuuugc

SEQ ID NO: 545807 - RNA, 23 nt, Artificial Sequence
  Synthetic
aaguaucuuaaauaauuuuuugc

SEQ ID NO: 545808 - RNA, 24 nt, Artificial Sequence
  Synthetic
aaaguaucuuaaauaauuuuuugc

SEQ ID NO: 545809 - RNA, 18 nt, Artificial Sequence
  Synthetic
cacuuuauuuuuuuuugc

SEQ ID NO: 545810 - RNA, 19 nt, Artificial Sequence
  Synthetic
ucacuuuauuuuuuuuugc

SEQ ID NO: 545811 - RNA, 20 nt, Artificial Sequence
  Synthetic
cucacuuuauuuuuuuuugc

SEQ ID NO: 545812 - RNA, 21 nt, Artificial Sequence
  Synthetic
ucucacuuuauuuuuuuuugc

SEQ ID NO: 545813 - RNA, 22 nt, Artificial Sequence
  Synthetic
aucucacuuuauuuuuuuuugc

SEQ ID NO: 545814 - RNA, 23 nt, Artificial Sequence
  Synthetic
caucucacuuuauuuuuuuuugc

SEQ ID NO: 545815 - RNA, 24 nt, Artificial Sequence
  Synthetic
acaucucacuuuauuuuuuuuugc

SEQ ID NO: 545816 - RNA, 18 nt, Artificial Sequence
  Synthetic
aaaaaaaaaaaaaaaauc

SEQ ID NO: 545817 - RNA, 19 nt, Artificial Sequence
  Synthetic
aaaaaaaaaaaaaaaaauc

SEQ ID NO: 545818 - RNA, 20 nt, Artificial Sequence
  Synthetic
caaaaaaaaaaaaaaaaauc

SEQ ID NO: 545819 - RNA, 21 nt, Artificial Sequence
  Synthetic
gcaaaaaaaaaaaaaaaaauc

SEQ ID NO: 545820 - RNA, 22 nt, Artificial Sequence
  Synthetic
agcaaaaaaaaaaaaaaaaauc

SEQ ID NO: 545821 - RNA, 23 nt, Artificial Sequence
  Synthetic
aagcaaaaaaaaaaaaaaaaauc

SEQ ID NO: 545822 - RNA, 24 nt, Artificial Sequence
  Synthetic
aaagcaaaaaaaaaaaaaaaaauc

SEQ ID NO: 545823 - RNA, 18 nt, Artificial Sequence
  Synthetic
agagcacagaaaaaaauc

SEQ ID NO: 545824 - RNA, 19 nt, Artificial Sequence
  Synthetic
aagagcacagaaaaaaauc

SEQ ID NO: 545825 - RNA, 20 nt, Artificial Sequence
  Synthetic
gaagagcacagaaaaaaauc

SEQ ID NO: 545826 - RNA, 21 nt, Artificial Sequence
  Synthetic
ggaagagcacagaaaaaaauc

SEQ ID NO: 545827 - RNA, 22 nt, Artificial Sequence
  Synthetic
aggaagagcacagaaaaaaauc

SEQ ID NO: 545828 - RNA, 23 nt, Artificial Sequence
  Synthetic
aaggaagagcacagaaaaaaauc

SEQ ID NO: 545829 - RNA, 24 nt, Artificial Sequence
  Synthetic
aaaggaagagcacagaaaaaaauc

SEQ ID NO: 545830 - RNA, 18 nt, Artificial Sequence
  Synthetic
cauuauggcuaaaaaauc

SEQ ID NO: 545831 - RNA, 19 nt, Artificial Sequence
  Synthetic
acauuauggcuaaaaaauc

SEQ ID NO: 545832 - RNA, 20 nt, Artificial Sequence
  Synthetic
aacauuauggcuaaaaaauc

SEQ ID NO: 545833 - RNA, 21 nt, Artificial Sequence
  Synthetic
aaacauuauggcuaaaaaauc

SEQ ID NO: 545834 - RNA, 22 nt, Artificial Sequence
  Synthetic
uaaacauuauggcuaaaaaauc

SEQ ID NO: 545835 - RNA, 23 nt, Artificial Sequence
  Synthetic
auaaacauuauggcuaaaaaauc

SEQ ID NO: 545836 - RNA, 24 nt, Artificial Sequence
  Synthetic
uauaaacauuauggcuaaaaaauc

SEQ ID NO: 545837 - RNA, 18 nt, Artificial Sequence
  Synthetic
uaaauaguuccaaaaauc

SEQ ID NO: 545838 - RNA, 19 nt, Artificial Sequence
  Synthetic
auaaauaguuccaaaaauc

SEQ ID NO: 545839 - RNA, 20 nt, Artificial Sequence
  Synthetic
cauaaauaguuccaaaaauc

SEQ ID NO: 545840 - RNA, 21 nt, Artificial Sequence
  Synthetic
ccauaaauaguuccaaaaauc

SEQ ID NO: 545841 - RNA, 22 nt, Artificial Sequence
  Synthetic
cccauaaauaguuccaaaaauc

SEQ ID NO: 545842 - RNA, 23 nt, Artificial Sequence
  Synthetic
acccauaaauaguuccaaaaauc

SEQ ID NO: 545843 - RNA, 24 nt, Artificial Sequence
  Synthetic
cacccauaaauaguuccaaaaauc

SEQ ID NO: 545844 - RNA, 18 nt, Artificial Sequence
  Synthetic
accauugaaagaaaaauc

SEQ ID NO: 545845 - RNA, 19 nt, Artificial Sequence
  Synthetic
aaccauugaaagaaaaauc

SEQ ID NO: 545846 - RNA, 20 nt, Artificial Sequence
  Synthetic
uaaccauugaaagaaaaauc

SEQ ID NO: 545847 - RNA, 21 nt, Artificial Sequence
  Synthetic
uuaaccauugaaagaaaaauc

SEQ ID NO: 545848 - RNA, 22 nt, Artificial Sequence
  Synthetic
auuaaccauugaaagaaaaauc

SEQ ID NO: 545849 - RNA, 23 nt, Artificial Sequence
  Synthetic
aauuaaccauugaaagaaaaauc

SEQ ID NO: 545850 - RNA, 24 nt, Artificial Sequence
  Synthetic
aaauuaaccauugaaagaaaaauc

SEQ ID NO: 545851 - RNA, 18 nt, Artificial Sequence
  Synthetic
ccaacaaauugaaaaauc

SEQ ID NO: 545852 - RNA, 19 nt, Artificial Sequence
  Synthetic
gccaacaaauugaaaaauc

SEQ ID NO: 545853 - RNA, 20 nt, Artificial Sequence
  Synthetic
ugccaacaaauugaaaaauc

SEQ ID NO: 545854 - RNA, 21 nt, Artificial Sequence
  Synthetic
augccaacaaauugaaaaauc

SEQ ID NO: 545855 - RNA, 22 nt, Artificial Sequence
  Synthetic
uaugccaacaaauugaaaaauc

SEQ ID NO: 545856 - RNA, 23 nt, Artificial Sequence
  Synthetic
auaugccaacaaauugaaaaauc

SEQ ID NO: 545857 - RNA, 24 nt, Artificial Sequence
  Synthetic
uauaugccaacaaauugaaaaauc

SEQ ID NO: 545858 - RNA, 18 nt, Artificial Sequence
  Synthetic
uuaagugauauaaaaauc

SEQ ID NO: 545859 - RNA, 19 nt, Artificial Sequence
  Synthetic
uuuaagugauauaaaaauc

SEQ ID NO: 545860 - RNA, 20 nt, Artificial Sequence
  Synthetic
auuuaagugauauaaaaauc

SEQ ID NO: 545861 - RNA, 21 nt, Artificial Sequence
  Synthetic
aauuuaagugauauaaaaauc

SEQ ID NO: 545862 - RNA, 22 nt, Artificial Sequence
  Synthetic
aaauuuaagugauauaaaaauc

SEQ ID NO: 545863 - RNA, 23 nt, Artificial Sequence
  Synthetic
aaaauuuaagugauauaaaaauc

SEQ ID NO: 545864 - RNA, 24 nt, Artificial Sequence
  Synthetic
uaaaauuuaagugauauaaaaauc

SEQ ID NO: 545865 - RNA, 18 nt, Artificial Sequence
  Synthetic
uagguuugccuaaaaauc

SEQ ID NO: 545866 - RNA, 19 nt, Artificial Sequence
  Synthetic
guagguuugccuaaaaauc

SEQ ID NO: 545867 - RNA, 20 nt, Artificial Sequence
  Synthetic
gguagguuugccuaaaaauc

SEQ ID NO: 545868 - RNA, 21 nt, Artificial Sequence
  Synthetic
agguagguuugccuaaaaauc

SEQ ID NO: 545869 - RNA, 22 nt, Artificial Sequence
  Synthetic
uagguagguuugccuaaaaauc

SEQ ID NO: 545870 - RNA, 23 nt, Artificial Sequence
  Synthetic
guagguagguuugccuaaaaauc

SEQ ID NO: 545871 - RNA, 24 nt, Artificial Sequence
  Synthetic
gguagguagguuugccuaaaaauc

SEQ ID NO: 545872 - RNA, 18 nt, Artificial Sequence
  Synthetic
aaaucugcucuaaaaauc

SEQ ID NO: 545873 - RNA, 19 nt, Artificial Sequence
  Synthetic
aaaaucugcucuaaaaauc

SEQ ID NO: 545874 - RNA, 20 nt, Artificial Sequence
  Synthetic
uaaaaucugcucuaaaaauc

SEQ ID NO: 545875 - RNA, 21 nt, Artificial Sequence
  Synthetic
uuaaaaucugcucuaaaaauc

SEQ ID NO: 545876 - RNA, 22 nt, Artificial Sequence
  Synthetic
uuuaaaaucugcucuaaaaauc

SEQ ID NO: 545877 - RNA, 23 nt, Artificial Sequence
  Synthetic
uuuuaaaaucugcucuaaaaauc

SEQ ID NO: 545878 - RNA, 24 nt, Artificial Sequence
  Synthetic
uuuuuaaaaucugcucuaaaaauc

SEQ ID NO: 545879 - RNA, 18 nt, Artificial Sequence
  Synthetic
aucugcaauuuaaaaauc

SEQ ID NO: 545880 - RNA, 19 nt, Artificial Sequence
  Synthetic
aaucugcaauuuaaaaauc

SEQ ID NO: 545881 - RNA, 20 nt, Artificial Sequence
  Synthetic
aaaucugcaauuuaaaaauc

SEQ ID NO: 545882 - RNA, 21 nt, Artificial Sequence
  Synthetic
uaaaucugcaauuuaaaaauc

SEQ ID NO: 545883 - RNA, 22 nt, Artificial Sequence
  Synthetic
auaaaucugcaauuuaaaaauc

SEQ ID NO: 545884 - RNA, 23 nt, Artificial Sequence
  Synthetic
gauaaaucugcaauuuaaaaauc

SEQ ID NO: 545885 - RNA, 24 nt, Artificial Sequence
  Synthetic
ggauaaaucugcaauuuaaaaauc

SEQ ID NO: 545886 - RNA, 18 nt, Artificial Sequence
  Synthetic
aagugauacaacaaaauc

SEQ ID NO: 545887 - RNA, 19 nt, Artificial Sequence
  Synthetic
aaagugauacaacaaaauc

SEQ ID NO: 545888 - RNA, 20 nt, Artificial Sequence
  Synthetic
uaaagugauacaacaaaauc

SEQ ID NO: 545889 - RNA, 21 nt, Artificial Sequence
  Synthetic
guaaagugauacaacaaaauc

SEQ ID NO: 545890 - RNA, 22 nt, Artificial Sequence
  Synthetic
aguaaagugauacaacaaaauc

SEQ ID NO: 545891 - RNA, 23 nt, Artificial Sequence
  Synthetic
aaguaaagugauacaacaaaauc

SEQ ID NO: 545892 - RNA, 24 nt, Artificial Sequence
  Synthetic
gaaguaaagugauacaacaaaauc

SEQ ID NO: 545893 - RNA, 18 nt, Artificial Sequence
  Synthetic
ccugcuacauacaaaauc

SEQ ID NO: 545894 - RNA, 19 nt, Artificial Sequence
  Synthetic
uccugcuacauacaaaauc

SEQ ID NO: 545895 - RNA, 20 nt, Artificial Sequence
  Synthetic
uuccugcuacauacaaaauc

SEQ ID NO: 545896 - RNA, 21 nt, Artificial Sequence
  Synthetic
uuuccugcuacauacaaaauc

SEQ ID NO: 545897 - RNA, 22 nt, Artificial Sequence
  Synthetic
auuuccugcuacauacaaaauc

SEQ ID NO: 545898 - RNA, 23 nt, Artificial Sequence
  Synthetic
uauuuccugcuacauacaaaauc

SEQ ID NO: 545899 - RNA, 24 nt, Artificial Sequence
  Synthetic
cuauuuccugcuacauacaaaauc

SEQ ID NO: 545900 - RNA, 18 nt, Artificial Sequence
  Synthetic
uacauuuauagcaaaauc

SEQ ID NO: 545901 - RNA, 19 nt, Artificial Sequence
  Synthetic
uuacauuuauagcaaaauc

SEQ ID NO: 545902 - RNA, 20 nt, Artificial Sequence
  Synthetic
uuuacauuuauagcaaaauc

SEQ ID NO: 545903 - RNA, 21 nt, Artificial Sequence
  Synthetic
uuuuacauuuauagcaaaauc

SEQ ID NO: 545904 - RNA, 22 nt, Artificial Sequence
  Synthetic
auuuuacauuuauagcaaaauc

SEQ ID NO: 545905 - RNA, 23 nt, Artificial Sequence
  Synthetic
aauuuuacauuuauagcaaaauc

SEQ ID NO: 545906 - RNA, 24 nt, Artificial Sequence
  Synthetic
caauuuuacauuuauagcaaaauc

SEQ ID NO: 545907 - RNA, 18 nt, Artificial Sequence
  Synthetic
accagcggcaucaaaauc

SEQ ID NO: 545908 - RNA, 19 nt, Artificial Sequence
  Synthetic
caccagcggcaucaaaauc

SEQ ID NO: 545909 - RNA, 20 nt, Artificial Sequence
  Synthetic
ucaccagcggcaucaaaauc

SEQ ID NO: 545910 - RNA, 21 nt, Artificial Sequence
  Synthetic
cucaccagcggcaucaaaauc

SEQ ID NO: 545911 - RNA, 22 nt, Artificial Sequence
  Synthetic
ccucaccagcggcaucaaaauc

SEQ ID NO: 545912 - RNA, 23 nt, Artificial Sequence
  Synthetic
cccucaccagcggcaucaaaauc

SEQ ID NO: 545913 - RNA, 24 nt, Artificial Sequence
  Synthetic
ucccucaccagcggcaucaaaauc

SEQ ID NO: 545914 - RNA, 18 nt, Artificial Sequence
  Synthetic
acaaaagagaucaaaauc

SEQ ID NO: 545915 - RNA, 19 nt, Artificial Sequence
  Synthetic
uacaaaagagaucaaaauc

SEQ ID NO: 545916 - RNA, 20 nt, Artificial Sequence
  Synthetic
auacaaaagagaucaaaauc

SEQ ID NO: 545917 - RNA, 21 nt, Artificial Sequence
  Synthetic
cauacaaaagagaucaaaauc

SEQ ID NO: 545918 - RNA, 22 nt, Artificial Sequence
  Synthetic
ccauacaaaagagaucaaaauc

SEQ ID NO: 545919 - RNA, 23 nt, Artificial Sequence
  Synthetic
accauacaaaagagaucaaaauc

SEQ ID NO: 545920 - RNA, 24 nt, Artificial Sequence
  Synthetic
aaccauacaaaagagaucaaaauc

SEQ ID NO: 545921 - RNA, 18 nt, Artificial Sequence
  Synthetic
cuuuugagucucaaaauc

SEQ ID NO: 545922 - RNA, 19 nt, Artificial Sequence
  Synthetic
acuuuugagucucaaaauc

SEQ ID NO: 545923 - RNA, 20 nt, Artificial Sequence
  Synthetic
uacuuuugagucucaaaauc

SEQ ID NO: 545924 - RNA, 21 nt, Artificial Sequence
  Synthetic
guacuuuugagucucaaaauc

SEQ ID NO: 545925 - RNA, 22 nt, Artificial Sequence
  Synthetic
gguacuuuugagucucaaaauc

SEQ ID NO: 545926 - RNA, 23 nt, Artificial Sequence
  Synthetic
ugguacuuuugagucucaaaauc

SEQ ID NO: 545927 - RNA, 24 nt, Artificial Sequence
  Synthetic
augguacuuuugagucucaaaauc

SEQ ID NO: 545928 - RNA, 18 nt, Artificial Sequence
  Synthetic
uagggacaaaagaaaauc

SEQ ID NO: 545929 - RNA, 19 nt, Artificial Sequence
  Synthetic
auagggacaaaagaaaauc

SEQ ID NO: 545930 - RNA, 20 nt, Artificial Sequence
  Synthetic
aauagggacaaaagaaaauc

SEQ ID NO: 545931 - RNA, 21 nt, Artificial Sequence
  Synthetic
uaauagggacaaaagaaaauc

SEQ ID NO: 545932 - RNA, 22 nt, Artificial Sequence
  Synthetic
guaauagggacaaaagaaaauc

SEQ ID NO: 545933 - RNA, 23 nt, Artificial Sequence
  Synthetic
gguaauagggacaaaagaaaauc

SEQ ID NO: 545934 - RNA, 24 nt, Artificial Sequence
  Synthetic
ugguaauagggacaaaagaaaauc

SEQ ID NO: 545935 - RNA, 18 nt, Artificial Sequence
  Synthetic
aauauggggaagaaaauc

SEQ ID NO: 545936 - RNA, 19 nt, Artificial Sequence
  Synthetic
caauauggggaagaaaauc

SEQ ID NO: 545937 - RNA, 20 nt, Artificial Sequence
  Synthetic
gcaauauggggaagaaaauc

SEQ ID NO: 545938 - RNA, 21 nt, Artificial Sequence
  Synthetic
cgcaauauggggaagaaaauc

SEQ ID NO: 545939 - RNA, 22 nt, Artificial Sequence
  Synthetic
gcgcaauauggggaagaaaauc

SEQ ID NO: 545940 - RNA, 23 nt, Artificial Sequence
  Synthetic
ugcgcaauauggggaagaaaauc

SEQ ID NO: 545941 - RNA, 24 nt, Artificial Sequence
  Synthetic
uugcgcaauauggggaagaaaauc

SEQ ID NO: 545942 - RNA, 18 nt, Artificial Sequence
  Synthetic
aaucuuaaccagaaaauc

SEQ ID NO: 545943 - RNA, 19 nt, Artificial Sequence
  Synthetic
aaaucuuaaccagaaaauc

SEQ ID NO: 545944 - RNA, 20 nt, Artificial Sequence
  Synthetic
uaaaucuuaaccagaaaauc

SEQ ID NO: 545945 - RNA, 21 nt, Artificial Sequence
  Synthetic
cuaaaucuuaaccagaaaauc

SEQ ID NO: 545946 - RNA, 22 nt, Artificial Sequence
  Synthetic
ucuaaaucuuaaccagaaaauc

SEQ ID NO: 545947 - RNA, 23 nt, Artificial Sequence
  Synthetic
aucuaaaucuuaaccagaaaauc

SEQ ID NO: 545948 - RNA, 24 nt, Artificial Sequence
  Synthetic
caucuaaaucuuaaccagaaaauc

SEQ ID NO: 545949 - RNA, 18 nt, Artificial Sequence
  Synthetic
acuucaagggagaaaauc

SEQ ID NO: 545950 - RNA, 19 nt, Artificial Sequence
  Synthetic
cacuucaagggagaaaauc

SEQ ID NO: 545951 - RNA, 20 nt, Artificial Sequence
  Synthetic
acacuucaagggagaaaauc

SEQ ID NO: 545952 - RNA, 21 nt, Artificial Sequence
  Synthetic
uacacuucaagggagaaaauc

SEQ ID NO: 545953 - RNA, 22 nt, Artificial Sequence
  Synthetic
auacacuucaagggagaaaauc

SEQ ID NO: 545954 - RNA, 23 nt, Artificial Sequence
  Synthetic
aauacacuucaagggagaaaauc

SEQ ID NO: 545955 - RNA, 24 nt, Artificial Sequence
  Synthetic
aaauacacuucaagggagaaaauc

SEQ ID NO: 545956 - RNA, 18 nt, Artificial Sequence
  Synthetic
cacacaaacuagaaaauc

SEQ ID NO: 545957 - RNA, 19 nt, Artificial Sequence
  Synthetic
gcacacaaacuagaaaauc

SEQ ID NO: 545958 - RNA, 20 nt, Artificial Sequence
  Synthetic
ugcacacaaacuagaaaauc

SEQ ID NO: 545959 - RNA, 21 nt, Artificial Sequence
  Synthetic
augcacacaaacuagaaaauc

SEQ ID NO: 545960 - RNA, 22 nt, Artificial Sequence
  Synthetic
uaugcacacaaacuagaaaauc

SEQ ID NO: 545961 - RNA, 23 nt, Artificial Sequence
  Synthetic
uuaugcacacaaacuagaaaauc

SEQ ID NO: 545962 - RNA, 24 nt, Artificial Sequence
  Synthetic
uuuaugcacacaaacuagaaaauc

SEQ ID NO: 545963 - RNA, 18 nt, Artificial Sequence
  Synthetic
caaauaaacuagaaaauc

SEQ ID NO: 545964 - RNA, 19 nt, Artificial Sequence
  Synthetic
gcaaauaaacuagaaaauc

SEQ ID NO: 545965 - RNA, 21 nt, Artificial Sequence
  Synthetic
acgcaaauaaacuagaaaauc

SEQ ID NO: 545966 - RNA, 22 nt, Artificial Sequence
  Synthetic
uacgcaaauaaacuagaaaauc

SEQ ID NO: 545967 - RNA, 23 nt, Artificial Sequence
  Synthetic
cuacgcaaauaaacuagaaaauc

SEQ ID NO: 545968 - RNA, 24 nt, Artificial Sequence
  Synthetic
ucuacgcaaauaaacuagaaaauc

SEQ ID NO: 545969 - RNA, 20 nt, Artificial Sequence
  Synthetic
ugcaaauaaacuagaaaauc

SEQ ID NO: 545970 - RNA, 21 nt, Artificial Sequence
  Synthetic
augcaaauaaacuagaaaauc

SEQ ID NO: 545971 - RNA, 22 nt, Artificial Sequence
  Synthetic
uaugcaaauaaacuagaaaauc

SEQ ID NO: 545972 - RNA, 23 nt, Artificial Sequence
  Synthetic
cuaugcaaauaaacuagaaaauc

SEQ ID NO: 545973 - RNA, 24 nt, Artificial Sequence
  Synthetic
ucuaugcaaauaaacuagaaaauc

SEQ ID NO: 545974 - RNA, 18 nt, Artificial Sequence
  Synthetic
cguuugcucuggaaaauc

SEQ ID NO: 545975 - RNA, 19 nt, Artificial Sequence
  Synthetic
acguuugcucuggaaaauc

SEQ ID NO: 545976 - RNA, 20 nt, Artificial Sequence
  Synthetic
aacguuugcucuggaaaauc

SEQ ID NO: 545977 - RNA, 21 nt, Artificial Sequence
  Synthetic
gaacguuugcucuggaaaauc

SEQ ID NO: 545978 - RNA, 22 nt, Artificial Sequence
  Synthetic
ggaacguuugcucuggaaaauc

SEQ ID NO: 545979 - RNA, 23 nt, Artificial Sequence
  Synthetic
gggaacguuugcucuggaaaauc

SEQ ID NO: 545980 - RNA, 24 nt, Artificial Sequence
  Synthetic
ugggaacguuugcucuggaaaauc

SEQ ID NO: 545981 - RNA, 18 nt, Artificial Sequence
  Synthetic
uaacuuuuaaauaaaauc

SEQ ID NO: 545982 - RNA, 19 nt, Artificial Sequence
  Synthetic
uuaacuuuuaaauaaaauc

SEQ ID NO: 545983 - RNA, 20 nt, Artificial Sequence
  Synthetic
cuuaacuuuuaaauaaaauc

SEQ ID NO: 545984 - RNA, 21 nt, Artificial Sequence
  Synthetic
gcuuaacuuuuaaauaaaauc

SEQ ID NO: 545985 - RNA, 22 nt, Artificial Sequence
  Synthetic
agcuuaacuuuuaaauaaaauc

SEQ ID NO: 545986 - RNA, 23 nt, Artificial Sequence
  Synthetic
uagcuuaacuuuuaaauaaaauc

SEQ ID NO: 545987 - RNA, 24 nt, Artificial Sequence
  Synthetic
uuagcuuaacuuuuaaauaaaauc

SEQ ID NO: 545988 - RNA, 18 nt, Artificial Sequence
  Synthetic
auauuaaagaauaaaauc

SEQ ID NO: 545989 - RNA, 19 nt, Artificial Sequence
  Synthetic
aauauuaaagaauaaaauc

SEQ ID NO: 545990 - RNA, 20 nt, Artificial Sequence
  Synthetic
aaauauuaaagaauaaaauc

SEQ ID NO: 545991 - RNA, 21 nt, Artificial Sequence
  Synthetic
aaaauauuaaagaauaaaauc

SEQ ID NO: 545992 - RNA, 22 nt, Artificial Sequence
  Synthetic
caaaauauuaaagaauaaaauc

SEQ ID NO: 545993 - RNA, 23 nt, Artificial Sequence
  Synthetic
acaaaauauuaaagaauaaaauc

SEQ ID NO: 545994 - RNA, 24 nt, Artificial Sequence
  Synthetic
aacaaaauauuaaagaauaaaauc

SEQ ID NO: 545995 - RNA, 18 nt, Artificial Sequence
  Synthetic
uaguauacgucuaaaauc

SEQ ID NO: 545996 - RNA, 19 nt, Artificial Sequence
  Synthetic
auaguauacgucuaaaauc

SEQ ID NO: 545997 - RNA, 20 nt, Artificial Sequence
  Synthetic
uauaguauacgucuaaaauc

SEQ ID NO: 545998 - RNA, 21 nt, Artificial Sequence
  Synthetic
uuauaguauacgucuaaaauc

SEQ ID NO: 545999 - RNA, 22 nt, Artificial Sequence
  Synthetic
auuauaguauacgucuaaaauc

SEQ ID NO: 546000 - RNA, 23 nt, Artificial Sequence
  Synthetic
gauuauaguauacgucuaaaauc

SEQ ID NO: 546001 - RNA, 24 nt, Artificial Sequence
  Synthetic
agauuauaguauacgucuaaaauc

SEQ ID NO: 546002 - RNA, 18 nt, Artificial Sequence
  Synthetic
cauccuuugcguaaaauc

SEQ ID NO: 546003 - RNA, 19 nt, Artificial Sequence
  Synthetic
acauccuuugcguaaaauc

SEQ ID NO: 546004 - RNA, 20 nt, Artificial Sequence
  Synthetic
gacauccuuugcguaaaauc

SEQ ID NO: 546005 - RNA, 21 nt, Artificial Sequence
  Synthetic
cgacauccuuugcguaaaauc

SEQ ID NO: 546006 - RNA, 22 nt, Artificial Sequence
  Synthetic
ucgacauccuuugcguaaaauc

SEQ ID NO: 546007 - RNA, 23 nt, Artificial Sequence
  Synthetic
aucgacauccuuugcguaaaauc

SEQ ID NO: 546008 - RNA, 24 nt, Artificial Sequence
  Synthetic
aaucgacauccuuugcguaaaauc

SEQ ID NO: 546009 - RNA, 18 nt, Artificial Sequence
  Synthetic
uauugaaauuguaaaauc

SEQ ID NO: 546010 - RNA, 19 nt, Artificial Sequence
  Synthetic
auauugaaauuguaaaauc

SEQ ID NO: 546011 - RNA, 20 nt, Artificial Sequence
  Synthetic
aauauugaaauuguaaaauc

SEQ ID NO: 546012 - RNA, 21 nt, Artificial Sequence
  Synthetic
gaauauugaaauuguaaaauc

SEQ ID NO: 546013 - RNA, 22 nt, Artificial Sequence
  Synthetic
ugaauauugaaauuguaaaauc

SEQ ID NO: 546014 - RNA, 23 nt, Artificial Sequence
  Synthetic
augaauauugaaauuguaaaauc

SEQ ID NO: 546015 - RNA, 24 nt, Artificial Sequence
  Synthetic
caugaauauugaaauuguaaaauc

SEQ ID NO: 546016 - RNA, 18 nt, Artificial Sequence
  Synthetic
aaaaguuccauuaaaauc

SEQ ID NO: 546017 - RNA, 19 nt, Artificial Sequence
  Synthetic
uaaaaguuccauuaaaauc

SEQ ID NO: 546018 - RNA, 20 nt, Artificial Sequence
  Synthetic
cuaaaaguuccauuaaaauc

SEQ ID NO: 546019 - RNA, 21 nt, Artificial Sequence
  Synthetic
ucuaaaaguuccauuaaaauc

SEQ ID NO: 546020 - RNA, 22 nt, Artificial Sequence
  Synthetic
cucuaaaaguuccauuaaaauc

SEQ ID NO: 546021 - RNA, 23 nt, Artificial Sequence
  Synthetic
acucuaaaaguuccauuaaaauc

SEQ ID NO: 546022 - RNA, 24 nt, Artificial Sequence
  Synthetic
cacucuaaaaguuccauuaaaauc

SEQ ID NO: 546023 - RNA, 18 nt, Artificial Sequence
  Synthetic
ucauugaguuuuaaaauc

SEQ ID NO: 546024 - RNA, 19 nt, Artificial Sequence
  Synthetic
gucauugaguuuuaaaauc

SEQ ID NO: 546025 - RNA, 20 nt, Artificial Sequence
  Synthetic
agucauugaguuuuaaaauc

SEQ ID NO: 546026 - RNA, 21 nt, Artificial Sequence
  Synthetic
uagucauugaguuuuaaaauc

SEQ ID NO: 546027 - RNA, 22 nt, Artificial Sequence
  Synthetic
cuagucauugaguuuuaaaauc

SEQ ID NO: 546028 - RNA, 23 nt, Artificial Sequence
  Synthetic
gcuagucauugaguuuuaaaauc

SEQ ID NO: 546029 - RNA, 24 nt, Artificial Sequence
  Synthetic
ugcuagucauugaguuuuaaaauc

SEQ ID NO: 546030 - RNA, 18 nt, Artificial Sequence
  Synthetic
aaaaaaauaaaacaaauc

SEQ ID NO: 546031 - RNA, 19 nt, Artificial Sequence
  Synthetic
aaaaaaaauaaaacaaauc

SEQ ID NO: 546032 - RNA, 20 nt, Artificial Sequence
  Synthetic
gaaaaaaaauaaaacaaauc

SEQ ID NO: 546033 - RNA, 21 nt, Artificial Sequence
  Synthetic
ggaaaaaaaauaaaacaaauc

SEQ ID NO: 546034 - RNA, 22 nt, Artificial Sequence
  Synthetic
gggaaaaaaaauaaaacaaauc

SEQ ID NO: 546035 - RNA, 23 nt, Artificial Sequence
  Synthetic
ggggaaaaaaaauaaaacaaauc

SEQ ID NO: 546036 - RNA, 24 nt, Artificial Sequence
  Synthetic
aggggaaaaaaaauaaaacaaauc

SEQ ID NO: 546037 - RNA, 18 nt, Artificial Sequence
  Synthetic
caaaauaaaugacaaauc

SEQ ID NO: 546038 - RNA, 19 nt, Artificial Sequence
  Synthetic
ccaaaauaaaugacaaauc

SEQ ID NO: 546039 - RNA, 20 nt, Artificial Sequence
  Synthetic
gccaaaauaaaugacaaauc

SEQ ID NO: 546040 - RNA, 21 nt, Artificial Sequence
  Synthetic
ugccaaaauaaaugacaaauc

SEQ ID NO: 546041 - RNA, 22 nt, Artificial Sequence
  Synthetic
uugccaaaauaaaugacaaauc

SEQ ID NO: 546042 - RNA, 23 nt, Artificial Sequence
  Synthetic
guugccaaaauaaaugacaaauc

SEQ ID NO: 546043 - RNA, 24 nt, Artificial Sequence
  Synthetic
aguugccaaaauaaaugacaaauc

SEQ ID NO: 546044 - RNA, 18 nt, Artificial Sequence
  Synthetic
aaacaaaauugacaaauc

SEQ ID NO: 546045 - RNA, 19 nt, Artificial Sequence
  Synthetic
uaaacaaaauugacaaauc

SEQ ID NO: 546046 - RNA, 20 nt, Artificial Sequence
  Synthetic
guaaacaaaauugacaaauc

SEQ ID NO: 546047 - RNA, 21 nt, Artificial Sequence
  Synthetic
gguaaacaaaauugacaaauc

SEQ ID NO: 546048 - RNA, 22 nt, Artificial Sequence
  Synthetic
agguaaacaaaauugacaaauc

SEQ ID NO: 546049 - RNA, 23 nt, Artificial Sequence
  Synthetic
aagguaaacaaaauugacaaauc

SEQ ID NO: 546050 - RNA, 24 nt, Artificial Sequence
  Synthetic
aaagguaaacaaaauugacaaauc

SEQ ID NO: 546051 - RNA, 18 nt, Artificial Sequence
  Synthetic
auaugcauuuuacaaauc

SEQ ID NO: 546052 - RNA, 19 nt, Artificial Sequence
  Synthetic
aauaugcauuuuacaaauc

SEQ ID NO: 546053 - RNA, 20 nt, Artificial Sequence
  Synthetic
caauaugcauuuuacaaauc

SEQ ID NO: 546054 - RNA, 21 nt, Artificial Sequence
  Synthetic
gcaauaugcauuuuacaaauc

SEQ ID NO: 546055 - RNA, 22 nt, Artificial Sequence
  Synthetic
agcaauaugcauuuuacaaauc

SEQ ID NO: 546056 - RNA, 23 nt, Artificial Sequence
  Synthetic
aagcaauaugcauuuuacaaauc

SEQ ID NO: 546057 - RNA, 24 nt, Artificial Sequence
  Synthetic
gaagcaauaugcauuuuacaaauc

SEQ ID NO: 546058 - RNA, 18 nt, Artificial Sequence
  Synthetic
ugcucucuagggcaaauc

SEQ ID NO: 546059 - RNA, 19 nt, Artificial Sequence
  Synthetic
uugcucucuagggcaaauc

SEQ ID NO: 546060 - RNA, 20 nt, Artificial Sequence
  Synthetic
auugcucucuagggcaaauc

SEQ ID NO: 546061 - RNA, 21 nt, Artificial Sequence
  Synthetic
cauugcucucuagggcaaauc

SEQ ID NO: 546062 - RNA, 22 nt, Artificial Sequence
  Synthetic
ucauugcucucuagggcaaauc

SEQ ID NO: 546063 - RNA, 23 nt, Artificial Sequence
  Synthetic
gucauugcucucuagggcaaauc

SEQ ID NO: 546064 - RNA, 24 nt, Artificial Sequence
  Synthetic
agucauugcucucuagggcaaauc

SEQ ID NO: 546065 - RNA, 18 nt, Artificial Sequence
  Synthetic
ccuuuacuugaucaaauc

SEQ ID NO: 546066 - RNA, 19 nt, Artificial Sequence
  Synthetic
accuuuacuugaucaaauc

SEQ ID NO: 546067 - RNA, 20 nt, Artificial Sequence
  Synthetic
gaccuuuacuugaucaaauc

SEQ ID NO: 546068 - RNA, 21 nt, Artificial Sequence
  Synthetic
agaccuuuacuugaucaaauc

SEQ ID NO: 546069 - RNA, 22 nt, Artificial Sequence
  Synthetic
aagaccuuuacuugaucaaauc

SEQ ID NO: 546070 - RNA, 23 nt, Artificial Sequence
  Synthetic
uaagaccuuuacuugaucaaauc

SEQ ID NO: 546071 - RNA, 24 nt, Artificial Sequence
  Synthetic
uuaagaccuuuacuugaucaaauc

SEQ ID NO: 546072 - RNA, 18 nt, Artificial Sequence
  Synthetic
aaucaaucgagucaaauc

SEQ ID NO: 546073 - RNA, 19 nt, Artificial Sequence
  Synthetic
caaucaaucgagucaaauc

SEQ ID NO: 546074 - RNA, 20 nt, Artificial Sequence
  Synthetic
ucaaucaaucgagucaaauc

SEQ ID NO: 546075 - RNA, 21 nt, Artificial Sequence
  Synthetic
aucaaucaaucgagucaaauc

SEQ ID NO: 546076 - RNA, 22 nt, Artificial Sequence
  Synthetic
aaucaaucaaucgagucaaauc

SEQ ID NO: 546077 - RNA, 23 nt, Artificial Sequence
  Synthetic
caaucaaucaaucgagucaaauc

SEQ ID NO: 546078 - RNA, 24 nt, Artificial Sequence
  Synthetic
ucaaucaaucaaucgagucaaauc

SEQ ID NO: 546079 - RNA, 18 nt, Artificial Sequence
  Synthetic
caaaaacagauucaaauc

SEQ ID NO: 546080 - RNA, 19 nt, Artificial Sequence
  Synthetic
acaaaaacagauucaaauc

SEQ ID NO: 546081 - RNA, 20 nt, Artificial Sequence
  Synthetic
aacaaaaacagauucaaauc

SEQ ID NO: 546082 - RNA, 21 nt, Artificial Sequence
  Synthetic
aaacaaaaacagauucaaauc

SEQ ID NO: 546083 - RNA, 22 nt, Artificial Sequence
  Synthetic
caaacaaaaacagauucaaauc

SEQ ID NO: 546084 - RNA, 23 nt, Artificial Sequence
  Synthetic
acaaacaaaaacagauucaaauc

SEQ ID NO: 546085 - RNA, 24 nt, Artificial Sequence
  Synthetic
aacaaacaaaaacagauucaaauc

SEQ ID NO: 546086 - RNA, 18 nt, Artificial Sequence
  Synthetic
uguaaggcauuucaaauc

SEQ ID NO: 546087 - RNA, 19 nt, Artificial Sequence
  Synthetic
uuguaaggcauuucaaauc

SEQ ID NO: 546088 - RNA, 20 nt, Artificial Sequence
  Synthetic
auuguaaggcauuucaaauc

SEQ ID NO: 546089 - RNA, 21 nt, Artificial Sequence
  Synthetic
uauuguaaggcauuucaaauc

SEQ ID NO: 546090 - RNA, 22 nt, Artificial Sequence
  Synthetic
uuauuguaaggcauuucaaauc

SEQ ID NO: 546091 - RNA, 23 nt, Artificial Sequence
  Synthetic
cuuauuguaaggcauuucaaauc

SEQ ID NO: 546092 - RNA, 24 nt, Artificial Sequence
  Synthetic
gcuuauuguaaggcauuucaaauc

SEQ ID NO: 546093 - RNA, 18 nt, Artificial Sequence
  Synthetic
aaaggcucuaaagaaauc

SEQ ID NO: 546094 - RNA, 19 nt, Artificial Sequence
  Synthetic
caaaggcucuaaagaaauc

SEQ ID NO: 546095 - RNA, 20 nt, Artificial Sequence
  Synthetic
gcaaaggcucuaaagaaauc

SEQ ID NO: 546096 - RNA, 21 nt, Artificial Sequence
  Synthetic
agcaaaggcucuaaagaaauc

SEQ ID NO: 546097 - RNA, 22 nt, Artificial Sequence
  Synthetic
uagcaaaggcucuaaagaaauc

SEQ ID NO: 546098 - RNA, 23 nt, Artificial Sequence
  Synthetic
guagcaaaggcucuaaagaaauc

SEQ ID NO: 546099 - RNA, 24 nt, Artificial Sequence
  Synthetic
uguagcaaaggcucuaaagaaauc

SEQ ID NO: 546100 - RNA, 18 nt, Artificial Sequence
  Synthetic
aguccaggagaagaaauc

SEQ ID NO: 546101 - RNA, 19 nt, Artificial Sequence
  Synthetic
caguccaggagaagaaauc

SEQ ID NO: 546102 - RNA, 20 nt, Artificial Sequence
  Synthetic
acaguccaggagaagaaauc

SEQ ID NO: 546103 - RNA, 21 nt, Artificial Sequence
  Synthetic
cacaguccaggagaagaaauc

SEQ ID NO: 546104 - RNA, 22 nt, Artificial Sequence
  Synthetic
ucacaguccaggagaagaaauc

SEQ ID NO: 546105 - RNA, 23 nt, Artificial Sequence
  Synthetic
gucacaguccaggagaagaaauc

SEQ ID NO: 546106 - RNA, 24 nt, Artificial Sequence
  Synthetic
ugucacaguccaggagaagaaauc

SEQ ID NO: 546107 - RNA, 18 nt, Artificial Sequence
  Synthetic
auggauuucuaagaaauc

SEQ ID NO: 546108 - RNA, 19 nt, Artificial Sequence
  Synthetic
gauggauuucuaagaaauc

SEQ ID NO: 546109 - RNA, 20 nt, Artificial Sequence
  Synthetic
agauggauuucuaagaaauc

SEQ ID NO: 546110 - RNA, 21 nt, Artificial Sequence
  Synthetic
uagauggauuucuaagaaauc

SEQ ID NO: 546111 - RNA, 22 nt, Artificial Sequence
  Synthetic
guagauggauuucuaagaaauc

SEQ ID NO: 546112 - RNA, 23 nt, Artificial Sequence
  Synthetic
aguagauggauuucuaagaaauc

SEQ ID NO: 546113 - RNA, 24 nt, Artificial Sequence
  Synthetic
caguagauggauuucuaagaaauc

SEQ ID NO: 546114 - RNA, 18 nt, Artificial Sequence
  Synthetic
auuuccaagcuagaaauc

SEQ ID NO: 546115 - RNA, 19 nt, Artificial Sequence
  Synthetic
gauuuccaagcuagaaauc

SEQ ID NO: 546116 - RNA, 20 nt, Artificial Sequence
  Synthetic
ugauuuccaagcuagaaauc

SEQ ID NO: 546117 - RNA, 21 nt, Artificial Sequence
  Synthetic
augauuuccaagcuagaaauc

SEQ ID NO: 546118 - RNA, 22 nt, Artificial Sequence
  Synthetic
aaugauuuccaagcuagaaauc

SEQ ID NO: 546119 - RNA, 23 nt, Artificial Sequence
  Synthetic
caaugauuuccaagcuagaaauc

SEQ ID NO: 546120 - RNA, 24 nt, Artificial Sequence
  Synthetic
ucaaugauuuccaagcuagaaauc

SEQ ID NO: 546121 - RNA, 18 nt, Artificial Sequence
  Synthetic
caaaguauaguagaaauc

SEQ ID NO: 546122 - RNA, 19 nt, Artificial Sequence
  Synthetic
ucaaaguauaguagaaauc

SEQ ID NO: 546123 - RNA, 20 nt, Artificial Sequence
  Synthetic
uucaaaguauaguagaaauc

SEQ ID NO: 546124 - RNA, 21 nt, Artificial Sequence
  Synthetic
cuucaaaguauaguagaaauc

SEQ ID NO: 546125 - RNA, 22 nt, Artificial Sequence
  Synthetic
acuucaaaguauaguagaaauc

SEQ ID NO: 546126 - RNA, 23 nt, Artificial Sequence
  Synthetic
uacuucaaaguauaguagaaauc

SEQ ID NO: 546127 - RNA, 24 nt, Artificial Sequence
  Synthetic
uuacuucaaaguauaguagaaauc

SEQ ID NO: 546128 - RNA, 18 nt, Artificial Sequence
  Synthetic
aagagaagagaggaaauc

SEQ ID NO: 546129 - RNA, 19 nt, Artificial Sequence
  Synthetic
aaagagaagagaggaaauc

SEQ ID NO: 546130 - RNA, 20 nt, Artificial Sequence
  Synthetic
gaaagagaagagaggaaauc

SEQ ID NO: 546131 - RNA, 21 nt, Artificial Sequence
  Synthetic
agaaagagaagagaggaaauc

SEQ ID NO: 546132 - RNA, 22 nt, Artificial Sequence
  Synthetic
gagaaagagaagagaggaaauc

SEQ ID NO: 546133 - RNA, 23 nt, Artificial Sequence
  Synthetic
ggagaaagagaagagaggaaauc

SEQ ID NO: 546134 - RNA, 24 nt, Artificial Sequence
  Synthetic
gggagaaagagaagagaggaaauc

SEQ ID NO: 546135 - RNA, 18 nt, Artificial Sequence
  Synthetic
caauguucuauggaaauc

SEQ ID NO: 546136 - RNA, 19 nt, Artificial Sequence
  Synthetic
acaauguucuauggaaauc

SEQ ID NO: 546137 - RNA, 20 nt, Artificial Sequence
  Synthetic
cacaauguucuauggaaauc

SEQ ID NO: 546138 - RNA, 21 nt, Artificial Sequence
  Synthetic
ucacaauguucuauggaaauc

SEQ ID NO: 546139 - RNA, 22 nt, Artificial Sequence
  Synthetic
gucacaauguucuauggaaauc

SEQ ID NO: 546140 - RNA, 23 nt, Artificial Sequence
  Synthetic
ggucacaauguucuauggaaauc

SEQ ID NO: 546141 - RNA, 24 nt, Artificial Sequence
  Synthetic
aggucacaauguucuauggaaauc

SEQ ID NO: 546142 - RNA, 18 nt, Artificial Sequence
  Synthetic
aaugguuggguggaaauc

SEQ ID NO: 546143 - RNA, 19 nt, Artificial Sequence
  Synthetic
uaaugguuggguggaaauc

SEQ ID NO: 546144 - RNA, 20 nt, Artificial Sequence
  Synthetic
uuaaugguuggguggaaauc

SEQ ID NO: 546145 - RNA, 21 nt, Artificial Sequence
  Synthetic
cuuaaugguuggguggaaauc

SEQ ID NO: 546146 - RNA, 22 nt, Artificial Sequence
  Synthetic
acuuaaugguuggguggaaauc

SEQ ID NO: 546147 - RNA, 23 nt, Artificial Sequence
  Synthetic
cacuuaaugguuggguggaaauc

SEQ ID NO: 546148 - RNA, 24 nt, Artificial Sequence
  Synthetic
ucacuuaaugguuggguggaaauc

SEQ ID NO: 546149 - RNA, 18 nt, Artificial Sequence
  Synthetic
cagauuacuacugaaauc

SEQ ID NO: 546150 - RNA, 19 nt, Artificial Sequence
  Synthetic
acagauuacuacugaaauc

SEQ ID NO: 546151 - RNA, 20 nt, Artificial Sequence
  Synthetic
uacagauuacuacugaaauc

SEQ ID NO: 546152 - RNA, 21 nt, Artificial Sequence
  Synthetic
auacagauuacuacugaaauc

SEQ ID NO: 546153 - RNA, 22 nt, Artificial Sequence
  Synthetic
aauacagauuacuacugaaauc

SEQ ID NO: 546154 - RNA, 23 nt, Artificial Sequence
  Synthetic
aaauacagauuacuacugaaauc

SEQ ID NO: 546155 - RNA, 24 nt, Artificial Sequence
  Synthetic
aaaauacagauuacuacugaaauc

SEQ ID NO: 546156 - RNA, 18 nt, Artificial Sequence
  Synthetic
auauggguuucugaaauc

SEQ ID NO: 546157 - RNA, 19 nt, Artificial Sequence
  Synthetic
uauauggguuucugaaauc

SEQ ID NO: 546158 - RNA, 20 nt, Artificial Sequence
  Synthetic
auauauggguuucugaaauc

SEQ ID NO: 546159 - RNA, 21 nt, Artificial Sequence
  Synthetic
aauauauggguuucugaaauc

SEQ ID NO: 546160 - RNA, 22 nt, Artificial Sequence
  Synthetic
aaauauauggguuucugaaauc

SEQ ID NO: 546161 - RNA, 23 nt, Artificial Sequence
  Synthetic
caaauauauggguuucugaaauc

SEQ ID NO: 546162 - RNA, 24 nt, Artificial Sequence
  Synthetic
gcaaauauauggguuucugaaauc

SEQ ID NO: 546163 - RNA, 18 nt, Artificial Sequence
  Synthetic
cuugugcugcuugaaauc

SEQ ID NO: 546164 - RNA, 19 nt, Artificial Sequence
  Synthetic
acuugugcugcuugaaauc

SEQ ID NO: 546165 - RNA, 20 nt, Artificial Sequence
  Synthetic
aacuugugcugcuugaaauc

SEQ ID NO: 546166 - RNA, 21 nt, Artificial Sequence
  Synthetic
gaacuugugcugcuugaaauc

SEQ ID NO: 546167 - RNA, 22 nt, Artificial Sequence
  Synthetic
ugaacuugugcugcuugaaauc

SEQ ID NO: 546168 - RNA, 23 nt, Artificial Sequence
  Synthetic
uugaacuugugcugcuugaaauc

SEQ ID NO: 546169 - RNA, 24 nt, Artificial Sequence
  Synthetic
guugaacuugugcugcuugaaauc

SEQ ID NO: 546170 - RNA, 18 nt, Artificial Sequence
  Synthetic
ugugaagaaguugaaauc

SEQ ID NO: 546171 - RNA, 19 nt, Artificial Sequence
  Synthetic
cugugaagaaguugaaauc

SEQ ID NO: 546172 - RNA, 20 nt, Artificial Sequence
  Synthetic
gcugugaagaaguugaaauc

SEQ ID NO: 546173 - RNA, 21 nt, Artificial Sequence
  Synthetic
agcugugaagaaguugaaauc

SEQ ID NO: 546174 - RNA, 22 nt, Artificial Sequence
  Synthetic
gagcugugaagaaguugaaauc

SEQ ID NO: 546175 - RNA, 23 nt, Artificial Sequence
  Synthetic
agagcugugaagaaguugaaauc

SEQ ID NO: 546176 - RNA, 24 nt, Artificial Sequence
  Synthetic
cagagcugugaagaaguugaaauc

SEQ ID NO: 546177 - RNA, 18 nt, Artificial Sequence
  Synthetic
ggucauauuaaauaaauc

SEQ ID NO: 546178 - RNA, 19 nt, Artificial Sequence
  Synthetic
uggucauauuaaauaaauc

SEQ ID NO: 546179 - RNA, 20 nt, Artificial Sequence
  Synthetic
guggucauauuaaauaaauc

SEQ ID NO: 546180 - RNA, 21 nt, Artificial Sequence
  Synthetic
gguggucauauuaaauaaauc

SEQ ID NO: 546181 - RNA, 22 nt, Artificial Sequence
  Synthetic
ugguggucauauuaaauaaauc

SEQ ID NO: 546182 - RNA, 23 nt, Artificial Sequence
  Synthetic
augguggucauauuaaauaaauc

SEQ ID NO: 546183 - RNA, 24 nt, Artificial Sequence
  Synthetic
gaugguggucauauuaaauaaauc

SEQ ID NO: 546184 - RNA, 18 nt, Artificial Sequence
  Synthetic
cuacuaguuuaauaaauc

SEQ ID NO: 546185 - RNA, 19 nt, Artificial Sequence
  Synthetic
acuacuaguuuaauaaauc

SEQ ID NO: 546186 - RNA, 20 nt, Artificial Sequence
  Synthetic
aacuacuaguuuaauaaauc

SEQ ID NO: 546187 - RNA, 21 nt, Artificial Sequence
  Synthetic
aaacuacuaguuuaauaaauc

SEQ ID NO: 546188 - RNA, 22 nt, Artificial Sequence
  Synthetic
gaaacuacuaguuuaauaaauc

SEQ ID NO: 546189 - RNA, 23 nt, Artificial Sequence
  Synthetic
ggaaacuacuaguuuaauaaauc

SEQ ID NO: 546190 - RNA, 24 nt, Artificial Sequence
  Synthetic
gggaaacuacuaguuuaauaaauc

SEQ ID NO: 546191 - RNA, 18 nt, Artificial Sequence
  Synthetic
aaucugauuccauaaauc

SEQ ID NO: 546192 - RNA, 19 nt, Artificial Sequence
  Synthetic
aaaucugauuccauaaauc

SEQ ID NO: 546193 - RNA, 20 nt, Artificial Sequence
  Synthetic
aaaaucugauuccauaaauc

SEQ ID NO: 546194 - RNA, 21 nt, Artificial Sequence
  Synthetic
aaaaaucugauuccauaaauc

SEQ ID NO: 546195 - RNA, 22 nt, Artificial Sequence
  Synthetic
aaaaaaucugauuccauaaauc

SEQ ID NO: 546196 - RNA, 23 nt, Artificial Sequence
  Synthetic
aaaaaaaucugauuccauaaauc

SEQ ID NO: 546197 - RNA, 24 nt, Artificial Sequence
  Synthetic
uaaaaaaaucugauuccauaaauc

SEQ ID NO: 546198 - RNA, 18 nt, Artificial Sequence
  Synthetic
cuauaccguggauaaauc

SEQ ID NO: 546199 - RNA, 19 nt, Artificial Sequence
  Synthetic
gcuauaccguggauaaauc

SEQ ID NO: 546200 - RNA, 20 nt, Artificial Sequence
  Synthetic
ugcuauaccguggauaaauc

SEQ ID NO: 546201 - RNA, 21 nt, Artificial Sequence
  Synthetic
cugcuauaccguggauaaauc

SEQ ID NO: 546202 - RNA, 22 nt, Artificial Sequence
  Synthetic
ccugcuauaccguggauaaauc

SEQ ID NO: 546203 - RNA, 23 nt, Artificial Sequence
  Synthetic
accugcuauaccguggauaaauc

SEQ ID NO: 546204 - RNA, 24 nt, Artificial Sequence
  Synthetic
gaccugcuauaccguggauaaauc

SEQ ID NO: 546205 - RNA, 18 nt, Artificial Sequence
  Synthetic
ucaaauugaauauaaauc

SEQ ID NO: 546206 - RNA, 19 nt, Artificial Sequence
  Synthetic
cucaaauugaauauaaauc

SEQ ID NO: 546207 - RNA, 20 nt, Artificial Sequence
  Synthetic
ucucaaauugaauauaaauc

SEQ ID NO: 546208 - RNA, 21 nt, Artificial Sequence
  Synthetic
aucucaaauugaauauaaauc

SEQ ID NO: 546209 - RNA, 22 nt, Artificial Sequence
  Synthetic
uaucucaaauugaauauaaauc

SEQ ID NO: 546210 - RNA, 23 nt, Artificial Sequence
  Synthetic
guaucucaaauugaauauaaauc

SEQ ID NO: 546211 - RNA, 24 nt, Artificial Sequence
  Synthetic
uguaucucaaauugaauauaaauc

SEQ ID NO: 546212 - RNA, 18 nt, Artificial Sequence
  Synthetic
auuaggcuuuuauaaauc

SEQ ID NO: 546213 - RNA, 19 nt, Artificial Sequence
  Synthetic
uauuaggcuuuuauaaauc

SEQ ID NO: 546214 - RNA, 20 nt, Artificial Sequence
  Synthetic
uuauuaggcuuuuauaaauc

SEQ ID NO: 546215 - RNA, 21 nt, Artificial Sequence
  Synthetic
cuuauuaggcuuuuauaaauc

SEQ ID NO: 546216 - RNA, 22 nt, Artificial Sequence
  Synthetic
ccuuauuaggcuuuuauaaauc

SEQ ID NO: 546217 - RNA, 23 nt, Artificial Sequence
  Synthetic
gccuuauuaggcuuuuauaaauc

SEQ ID NO: 546218 - RNA, 24 nt, Artificial Sequence
  Synthetic
agccuuauuaggcuuuuauaaauc

SEQ ID NO: 546219 - RNA, 18 nt, Artificial Sequence
  Synthetic
aaauauuguagcuaaauc

SEQ ID NO: 546220 - RNA, 19 nt, Artificial Sequence
  Synthetic
uaaauauuguagcuaaauc

SEQ ID NO: 546221 - RNA, 20 nt, Artificial Sequence
  Synthetic
guaaauauuguagcuaaauc

SEQ ID NO: 546222 - RNA, 21 nt, Artificial Sequence
  Synthetic
aguaaauauuguagcuaaauc

SEQ ID NO: 546223 - RNA, 22 nt, Artificial Sequence
  Synthetic
gaguaaauauuguagcuaaauc

SEQ ID NO: 546224 - RNA, 23 nt, Artificial Sequence
  Synthetic
ugaguaaauauuguagcuaaauc

SEQ ID NO: 546225 - RNA, 24 nt, Artificial Sequence
  Synthetic
uugaguaaauauuguagcuaaauc

SEQ ID NO: 546226 - RNA, 18 nt, Artificial Sequence
  Synthetic
ggauuuauggaguaaauc

SEQ ID NO: 546227 - RNA, 19 nt, Artificial Sequence
  Synthetic
aggauuuauggaguaaauc

SEQ ID NO: 546228 - RNA, 20 nt, Artificial Sequence
  Synthetic
aaggauuuauggaguaaauc

SEQ ID NO: 546229 - RNA, 21 nt, Artificial Sequence
  Synthetic
aaaggauuuauggaguaaauc

SEQ ID NO: 546230 - RNA, 22 nt, Artificial Sequence
  Synthetic
aaaaggauuuauggaguaaauc

SEQ ID NO: 546231 - RNA, 23 nt, Artificial Sequence
  Synthetic
aaaaaggauuuauggaguaaauc

SEQ ID NO: 546232 - RNA, 24 nt, Artificial Sequence
  Synthetic
uaaaaaggauuuauggaguaaauc

SEQ ID NO: 546233 - RNA, 18 nt, Artificial Sequence
  Synthetic
ucuuauauaucguaaauc

SEQ ID NO: 546234 - RNA, 19 nt, Artificial Sequence
  Synthetic
uucuuauauaucguaaauc

SEQ ID NO: 546235 - RNA, 20 nt, Artificial Sequence
  Synthetic
uuucuuauauaucguaaauc

SEQ ID NO: 546236 - RNA, 21 nt, Artificial Sequence
  Synthetic
auuucuuauauaucguaaauc

SEQ ID NO: 546237 - RNA, 22 nt, Artificial Sequence
  Synthetic
uauuucuuauauaucguaaauc

SEQ ID NO: 546238 - RNA, 23 nt, Artificial Sequence
  Synthetic
auauuucuuauauaucguaaauc

SEQ ID NO: 546239 - RNA, 24 nt, Artificial Sequence
  Synthetic
gauauuucuuauauaucguaaauc

SEQ ID NO: 546240 - RNA, 18 nt, Artificial Sequence
  Synthetic
acaaacaacaauuaaauc

SEQ ID NO: 546241 - RNA, 19 nt, Artificial Sequence
  Synthetic
uacaaacaacaauuaaauc

SEQ ID NO: 546242 - RNA, 20 nt, Artificial Sequence
  Synthetic
auacaaacaacaauuaaauc

SEQ ID NO: 546243 - RNA, 21 nt, Artificial Sequence
  Synthetic
uauacaaacaacaauuaaauc

SEQ ID NO: 546244 - RNA, 22 nt, Artificial Sequence
  Synthetic
cuauacaaacaacaauuaaauc

SEQ ID NO: 546245 - RNA, 23 nt, Artificial Sequence
  Synthetic
ucuauacaaacaacaauuaaauc

SEQ ID NO: 546246 - RNA, 24 nt, Artificial Sequence
  Synthetic
uucuauacaaacaacaauuaaauc

SEQ ID NO: 546247 - RNA, 18 nt, Artificial Sequence
  Synthetic
ccuaaacaaacuuaaauc

SEQ ID NO: 546248 - RNA, 19 nt, Artificial Sequence
  Synthetic
uccuaaacaaacuuaaauc

SEQ ID NO: 546249 - RNA, 20 nt, Artificial Sequence
  Synthetic
auccuaaacaaacuuaaauc

SEQ ID NO: 546250 - RNA, 21 nt, Artificial Sequence
  Synthetic
uauccuaaacaaacuuaaauc

SEQ ID NO: 546251 - RNA, 22 nt, Artificial Sequence
  Synthetic
guauccuaaacaaacuuaaauc

SEQ ID NO: 546252 - RNA, 23 nt, Artificial Sequence
  Synthetic
aguauccuaaacaaacuuaaauc

SEQ ID NO: 546253 - RNA, 24 nt, Artificial Sequence
  Synthetic
aaguauccuaaacaaacuuaaauc

SEQ ID NO: 546254 - RNA, 18 nt, Artificial Sequence
  Synthetic
cauuaguuagguuaaauc

SEQ ID NO: 546255 - RNA, 19 nt, Artificial Sequence
  Synthetic
acauuaguuagguuaaauc

SEQ ID NO: 546256 - RNA, 20 nt, Artificial Sequence
  Synthetic
aacauuaguuagguuaaauc

SEQ ID NO: 546257 - RNA, 21 nt, Artificial Sequence
  Synthetic
aaacauuaguuagguuaaauc

SEQ ID NO: 546258 - RNA, 22 nt, Artificial Sequence
  Synthetic
gaaacauuaguuagguuaaauc

SEQ ID NO: 546259 - RNA, 23 nt, Artificial Sequence
  Synthetic
agaaacauuaguuagguuaaauc

SEQ ID NO: 546260 - RNA, 24 nt, Artificial Sequence
  Synthetic
cagaaacauuaguuagguuaaauc

SEQ ID NO: 546261 - RNA, 18 nt, Artificial Sequence
  Synthetic
acccuccuaguuuaaauc

SEQ ID NO: 546262 - RNA, 19 nt, Artificial Sequence
  Synthetic
aacccuccuaguuuaaauc

SEQ ID NO: 546263 - RNA, 20 nt, Artificial Sequence
  Synthetic
caacccuccuaguuuaaauc

SEQ ID NO: 546264 - RNA, 21 nt, Artificial Sequence
  Synthetic
acaacccuccuaguuuaaauc

SEQ ID NO: 546265 - RNA, 22 nt, Artificial Sequence
  Synthetic
cacaacccuccuaguuuaaauc

SEQ ID NO: 546266 - RNA, 23 nt, Artificial Sequence
  Synthetic
acacaacccuccuaguuuaaauc

SEQ ID NO: 546267 - RNA, 24 nt, Artificial Sequence
  Synthetic
cacacaacccuccuaguuuaaauc

SEQ ID NO: 546268 - RNA, 18 nt, Artificial Sequence
  Synthetic
auuuguuuuaaaacaauc

SEQ ID NO: 546269 - RNA, 19 nt, Artificial Sequence
  Synthetic
uauuuguuuuaaaacaauc

SEQ ID NO: 546270 - RNA, 20 nt, Artificial Sequence
  Synthetic
auauuuguuuuaaaacaauc

SEQ ID NO: 546271 - RNA, 21 nt, Artificial Sequence
  Synthetic
gauauuuguuuuaaaacaauc

SEQ ID NO: 546272 - RNA, 22 nt, Artificial Sequence
  Synthetic
ugauauuuguuuuaaaacaauc

SEQ ID NO: 546273 - RNA, 23 nt, Artificial Sequence
  Synthetic
cugauauuuguuuuaaaacaauc

SEQ ID NO: 546274 - RNA, 24 nt, Artificial Sequence
  Synthetic
ccugauauuuguuuuaaaacaauc

SEQ ID NO: 546275 - RNA, 18 nt, Artificial Sequence
  Synthetic
ucaccccuugaaacaauc

SEQ ID NO: 546276 - RNA, 19 nt, Artificial Sequence
  Synthetic
cucaccccuugaaacaauc

SEQ ID NO: 546277 - RNA, 20 nt, Artificial Sequence
  Synthetic
ccucaccccuugaaacaauc

SEQ ID NO: 546278 - RNA, 21 nt, Artificial Sequence
  Synthetic
uccucaccccuugaaacaauc

SEQ ID NO: 546279 - RNA, 22 nt, Artificial Sequence
  Synthetic
cuccucaccccuugaaacaauc

SEQ ID NO: 546280 - RNA, 23 nt, Artificial Sequence
  Synthetic
acuccucaccccuugaaacaauc

SEQ ID NO: 546281 - RNA, 24 nt, Artificial Sequence
  Synthetic
uacuccucaccccuugaaacaauc

SEQ ID NO: 546282 - RNA, 18 nt, Artificial Sequence
  Synthetic
cuaugaucaucaacaauc

SEQ ID NO: 546283 - RNA, 19 nt, Artificial Sequence
  Synthetic
acuaugaucaucaacaauc

SEQ ID NO: 546284 - RNA, 20 nt, Artificial Sequence
  Synthetic
cacuaugaucaucaacaauc

SEQ ID NO: 546285 - RNA, 21 nt, Artificial Sequence
  Synthetic
ccacuaugaucaucaacaauc

SEQ ID NO: 546286 - RNA, 22 nt, Artificial Sequence
  Synthetic
accacuaugaucaucaacaauc

SEQ ID NO: 546287 - RNA, 23 nt, Artificial Sequence
  Synthetic
aaccacuaugaucaucaacaauc

SEQ ID NO: 546288 - RNA, 24 nt, Artificial Sequence
  Synthetic
uaaccacuaugaucaucaacaauc

SEQ ID NO: 546289 - RNA, 18 nt, Artificial Sequence
  Synthetic
uugcuauggauaacaauc

SEQ ID NO: 546290 - RNA, 19 nt, Artificial Sequence
  Synthetic
guugcuauggauaacaauc

SEQ ID NO: 546291 - RNA, 20 nt, Artificial Sequence
  Synthetic
uguugcuauggauaacaauc

SEQ ID NO: 546292 - RNA, 21 nt, Artificial Sequence
  Synthetic
uuguugcuauggauaacaauc

SEQ ID NO: 546293 - RNA, 22 nt, Artificial Sequence
  Synthetic
uuuguugcuauggauaacaauc

SEQ ID NO: 546294 - RNA, 23 nt, Artificial Sequence
  Synthetic
auuuguugcuauggauaacaauc

SEQ ID NO: 546295 - RNA, 24 nt, Artificial Sequence
  Synthetic
cauuuguugcuauggauaacaauc

SEQ ID NO: 546296 - RNA, 18 nt, Artificial Sequence
  Synthetic
uuacaguaucucacaauc

SEQ ID NO: 546297 - RNA, 19 nt, Artificial Sequence
  Synthetic
guuacaguaucucacaauc

SEQ ID NO: 546298 - RNA, 20 nt, Artificial Sequence
  Synthetic
aguuacaguaucucacaauc

SEQ ID NO: 546299 - RNA, 21 nt, Artificial Sequence
  Synthetic
gaguuacaguaucucacaauc

SEQ ID NO: 546300 - RNA, 22 nt, Artificial Sequence
  Synthetic
agaguuacaguaucucacaauc

SEQ ID NO: 546301 - RNA, 23 nt, Artificial Sequence
  Synthetic
aagaguuacaguaucucacaauc

SEQ ID NO: 546302 - RNA, 24 nt, Artificial Sequence
  Synthetic
caagaguuacaguaucucacaauc

SEQ ID NO: 546303 - RNA, 18 nt, Artificial Sequence
  Synthetic
cacauugccaagacaauc

SEQ ID NO: 546304 - RNA, 19 nt, Artificial Sequence
  Synthetic
ccacauugccaagacaauc

SEQ ID NO: 546305 - RNA, 20 nt, Artificial Sequence
  Synthetic
cccacauugccaagacaauc

SEQ ID NO: 546306 - RNA, 21 nt, Artificial Sequence
  Synthetic
gcccacauugccaagacaauc

SEQ ID NO: 546307 - RNA, 22 nt, Artificial Sequence
  Synthetic
agcccacauugccaagacaauc

SEQ ID NO: 546308 - RNA, 23 nt, Artificial Sequence
  Synthetic
gagcccacauugccaagacaauc

SEQ ID NO: 546309 - RNA, 24 nt, Artificial Sequence
  Synthetic
agagcccacauugccaagacaauc

SEQ ID NO: 546310 - RNA, 18 nt, Artificial Sequence
  Synthetic
uuuccuaaauagacaauc

SEQ ID NO: 546311 - RNA, 19 nt, Artificial Sequence
  Synthetic
uuuuccuaaauagacaauc

SEQ ID NO: 546312 - RNA, 20 nt, Artificial Sequence
  Synthetic
uuuuuccuaaauagacaauc

SEQ ID NO: 546313 - RNA, 21 nt, Artificial Sequence
  Synthetic
cuuuuuccuaaauagacaauc

SEQ ID NO: 546314 - RNA, 22 nt, Artificial Sequence
  Synthetic
acuuuuuccuaaauagacaauc

SEQ ID NO: 546315 - RNA, 23 nt, Artificial Sequence
  Synthetic
uacuuuuuccuaaauagacaauc

SEQ ID NO: 546316 - RNA, 24 nt, Artificial Sequence
  Synthetic
uuacuuuuuccuaaauagacaauc

SEQ ID NO: 546317 - RNA, 18 nt, Artificial Sequence
  Synthetic
aucaacacaaauacaauc

SEQ ID NO: 546318 - RNA, 19 nt, Artificial Sequence
  Synthetic
uaucaacacaaauacaauc

SEQ ID NO: 546319 - RNA, 20 nt, Artificial Sequence
  Synthetic
auaucaacacaaauacaauc

SEQ ID NO: 546320 - RNA, 21 nt, Artificial Sequence
  Synthetic
gauaucaacacaaauacaauc

SEQ ID NO: 546321 - RNA, 22 nt, Artificial Sequence
  Synthetic
agauaucaacacaaauacaauc

SEQ ID NO: 546322 - RNA, 23 nt, Artificial Sequence
  Synthetic
gagauaucaacacaaauacaauc

SEQ ID NO: 546323 - RNA, 24 nt, Artificial Sequence
  Synthetic
ugagauaucaacacaaauacaauc

SEQ ID NO: 546324 - RNA, 18 nt, Artificial Sequence
  Synthetic
cuccggaaacuuacaauc

SEQ ID NO: 546325 - RNA, 19 nt, Artificial Sequence
  Synthetic
ccuccggaaacuuacaauc

SEQ ID NO: 546326 - RNA, 20 nt, Artificial Sequence
  Synthetic
gccuccggaaacuuacaauc

SEQ ID NO: 546327 - RNA, 21 nt, Artificial Sequence
  Synthetic
ggccuccggaaacuuacaauc

SEQ ID NO: 546328 - RNA, 22 nt, Artificial Sequence
  Synthetic
aggccuccggaaacuuacaauc

SEQ ID NO: 546329 - RNA, 23 nt, Artificial Sequence
  Synthetic
gaggccuccggaaacuuacaauc

SEQ ID NO: 546330 - RNA, 24 nt, Artificial Sequence
  Synthetic
agaggccuccggaaacuuacaauc

SEQ ID NO: 546331 - RNA, 18 nt, Artificial Sequence
  Synthetic
uuguaaaacgcaccaauc

SEQ ID NO: 546332 - RNA, 19 nt, Artificial Sequence
  Synthetic
auuguaaaacgcaccaauc

SEQ ID NO: 546333 - RNA, 20 nt, Artificial Sequence
  Synthetic
gauuguaaaacgcaccaauc

SEQ ID NO: 546334 - RNA, 21 nt, Artificial Sequence
  Synthetic
ggauuguaaaacgcaccaauc

SEQ ID NO: 546335 - RNA, 22 nt, Artificial Sequence
  Synthetic
aggauuguaaaacgcaccaauc

SEQ ID NO: 546336 - RNA, 23 nt, Artificial Sequence
  Synthetic
gaggauuguaaaacgcaccaauc

SEQ ID NO: 546337 - RNA, 24 nt, Artificial Sequence
  Synthetic
agaggauuguaaaacgcaccaauc

SEQ ID NO: 546338 - RNA, 18 nt, Artificial Sequence
  Synthetic
aagcuccaaguaccaauc

SEQ ID NO: 546339 - RNA, 19 nt, Artificial Sequence
  Synthetic
uaagcuccaaguaccaauc

SEQ ID NO: 546340 - RNA, 20 nt, Artificial Sequence
  Synthetic
uuaagcuccaaguaccaauc

SEQ ID NO: 546341 - RNA, 21 nt, Artificial Sequence
  Synthetic
uuuaagcuccaaguaccaauc

SEQ ID NO: 546342 - RNA, 22 nt, Artificial Sequence
  Synthetic
cuuuaagcuccaaguaccaauc

SEQ ID NO: 546343 - RNA, 23 nt, Artificial Sequence
  Synthetic
ccuuuaagcuccaaguaccaauc

SEQ ID NO: 546344 - RNA, 24 nt, Artificial Sequence
  Synthetic
uccuuuaagcuccaaguaccaauc

SEQ ID NO: 546345 - RNA, 18 nt, Artificial Sequence
  Synthetic
uuuauaaauuacccaauc

SEQ ID NO: 546346 - RNA, 19 nt, Artificial Sequence
  Synthetic
cuuuauaaauuacccaauc

SEQ ID NO: 546347 - RNA, 20 nt, Artificial Sequence
  Synthetic
ccuuuauaaauuacccaauc

SEQ ID NO: 546348 - RNA, 21 nt, Artificial Sequence
  Synthetic
uccuuuauaaauuacccaauc

SEQ ID NO: 546349 - RNA, 22 nt, Artificial Sequence
  Synthetic
uuccuuuauaaauuacccaauc

SEQ ID NO: 546350 - RNA, 23 nt, Artificial Sequence
  Synthetic
uuuccuuuauaaauuacccaauc

SEQ ID NO: 546351 - RNA, 24 nt, Artificial Sequence
  Synthetic
cuuuccuuuauaaauuacccaauc

SEQ ID NO: 546352 - RNA, 18 nt, Artificial Sequence
  Synthetic
guaaauacaaccccaauc

SEQ ID NO: 546353 - RNA, 19 nt, Artificial Sequence
  Synthetic
uguaaauacaaccccaauc

SEQ ID NO: 546354 - RNA, 20 nt, Artificial Sequence
  Synthetic
auguaaauacaaccccaauc

SEQ ID NO: 546355 - RNA, 21 nt, Artificial Sequence
  Synthetic
uauguaaauacaaccccaauc

SEQ ID NO: 546356 - RNA, 22 nt, Artificial Sequence
  Synthetic
uuauguaaauacaaccccaauc

SEQ ID NO: 546357 - RNA, 23 nt, Artificial Sequence
  Synthetic
uuuauguaaauacaaccccaauc

SEQ ID NO: 546358 - RNA, 24 nt, Artificial Sequence
  Synthetic
cuuuauguaaauacaaccccaauc

SEQ ID NO: 546359 - RNA, 18 nt, Artificial Sequence
  Synthetic
uuugucucaaccccaauc

SEQ ID NO: 546360 - RNA, 19 nt, Artificial Sequence
  Synthetic
auuugucucaaccccaauc

SEQ ID NO: 546361 - RNA, 20 nt, Artificial Sequence
  Synthetic
aauuugucucaaccccaauc

SEQ ID NO: 546362 - RNA, 21 nt, Artificial Sequence
  Synthetic
caauuugucucaaccccaauc

SEQ ID NO: 546363 - RNA, 22 nt, Artificial Sequence
  Synthetic
ccaauuugucucaaccccaauc

SEQ ID NO: 546364 - RNA, 23 nt, Artificial Sequence
  Synthetic
gccaauuugucucaaccccaauc

SEQ ID NO: 546365 - RNA, 24 nt, Artificial Sequence
  Synthetic
ggccaauuugucucaaccccaauc

SEQ ID NO: 546366 - RNA, 18 nt, Artificial Sequence
  Synthetic
uucuaaaaguagccaauc

SEQ ID NO: 546367 - RNA, 19 nt, Artificial Sequence
  Synthetic
auucuaaaaguagccaauc

SEQ ID NO: 546368 - RNA, 20 nt, Artificial Sequence
  Synthetic
gauucuaaaaguagccaauc

SEQ ID NO: 546369 - RNA, 21 nt, Artificial Sequence
  Synthetic
ggauucuaaaaguagccaauc

SEQ ID NO: 546370 - RNA, 22 nt, Artificial Sequence
  Synthetic
aggauucuaaaaguagccaauc

SEQ ID NO: 546371 - RNA, 23 nt, Artificial Sequence
  Synthetic
uaggauucuaaaaguagccaauc

SEQ ID NO: 546372 - RNA, 24 nt, Artificial Sequence
  Synthetic
guaggauucuaaaaguagccaauc

SEQ ID NO: 546373 - RNA, 18 nt, Artificial Sequence
  Synthetic
ggacaacacucuccaauc

SEQ ID NO: 546374 - RNA, 19 nt, Artificial Sequence
  Synthetic
uggacaacacucuccaauc

SEQ ID NO: 546375 - RNA, 20 nt, Artificial Sequence
  Synthetic
cuggacaacacucuccaauc

SEQ ID NO: 546376 - RNA, 21 nt, Artificial Sequence
  Synthetic
ccuggacaacacucuccaauc

SEQ ID NO: 546377 - RNA, 22 nt, Artificial Sequence
  Synthetic
uccuggacaacacucuccaauc

SEQ ID NO: 546378 - RNA, 23 nt, Artificial Sequence
  Synthetic
cuccuggacaacacucuccaauc

SEQ ID NO: 546379 - RNA, 24 nt, Artificial Sequence
  Synthetic
gcuccuggacaacacucuccaauc

SEQ ID NO: 546380 - RNA, 18 nt, Artificial Sequence
  Synthetic
aaaccgccuuaagcaauc

SEQ ID NO: 546381 - RNA, 19 nt, Artificial Sequence
  Synthetic
caaaccgccuuaagcaauc

SEQ ID NO: 546382 - RNA, 20 nt, Artificial Sequence
  Synthetic
ucaaaccgccuuaagcaauc

SEQ ID NO: 546383 - RNA, 21 nt, Artificial Sequence
  Synthetic
gucaaaccgccuuaagcaauc

SEQ ID NO: 546384 - RNA, 22 nt, Artificial Sequence
  Synthetic
ugucaaaccgccuuaagcaauc

SEQ ID NO: 546385 - RNA, 23 nt, Artificial Sequence
  Synthetic
cugucaaaccgccuuaagcaauc

SEQ ID NO: 546386 - RNA, 24 nt, Artificial Sequence
  Synthetic
acugucaaaccgccuuaagcaauc

SEQ ID NO: 546387 - RNA, 18 nt, Artificial Sequence
  Synthetic
acauuacguuaagcaauc

SEQ ID NO: 546388 - RNA, 19 nt, Artificial Sequence
  Synthetic
aacauuacguuaagcaauc

SEQ ID NO: 546389 - RNA, 20 nt, Artificial Sequence
  Synthetic
aaacauuacguuaagcaauc

SEQ ID NO: 546390 - RNA, 21 nt, Artificial Sequence
  Synthetic
aaaacauuacguuaagcaauc

SEQ ID NO: 546391 - RNA, 22 nt, Artificial Sequence
  Synthetic
aaaaacauuacguuaagcaauc

SEQ ID NO: 546392 - RNA, 23 nt, Artificial Sequence
  Synthetic
uaaaaacauuacguuaagcaauc

SEQ ID NO: 546393 - RNA, 24 nt, Artificial Sequence
  Synthetic
uuaaaaacauuacguuaagcaauc

SEQ ID NO: 546394 - RNA, 18 nt, Artificial Sequence
  Synthetic
agucuuuguuaagcaauc

SEQ ID NO: 546395 - RNA, 19 nt, Artificial Sequence
  Synthetic
gagucuuuguuaagcaauc

SEQ ID NO: 546396 - RNA, 20 nt, Artificial Sequence
  Synthetic
ugagucuuuguuaagcaauc

SEQ ID NO: 546397 - RNA, 21 nt, Artificial Sequence
  Synthetic
uugagucuuuguuaagcaauc

SEQ ID NO: 546398 - RNA, 22 nt, Artificial Sequence
  Synthetic
uuugagucuuuguuaagcaauc

SEQ ID NO: 546399 - RNA, 23 nt, Artificial Sequence
  Synthetic
uuuugagucuuuguuaagcaauc

SEQ ID NO: 546400 - RNA, 24 nt, Artificial Sequence
  Synthetic
cuuuugagucuuuguuaagcaauc

SEQ ID NO: 546401 - RNA, 18 nt, Artificial Sequence
  Synthetic
uccuguugcauagcaauc

SEQ ID NO: 546402 - RNA, 19 nt, Artificial Sequence
  Synthetic
auccuguugcauagcaauc

SEQ ID NO: 546403 - RNA, 20 nt, Artificial Sequence
  Synthetic
gauccuguugcauagcaauc

SEQ ID NO: 546404 - RNA, 21 nt, Artificial Sequence
  Synthetic
ugauccuguugcauagcaauc

SEQ ID NO: 546405 - RNA, 22 nt, Artificial Sequence
  Synthetic
cugauccuguugcauagcaauc

SEQ ID NO: 546406 - RNA, 23 nt, Artificial Sequence
  Synthetic
acugauccuguugcauagcaauc

SEQ ID NO: 546407 - RNA, 24 nt, Artificial Sequence
  Synthetic
cacugauccuguugcauagcaauc

SEQ ID NO: 546408 - RNA, 18 nt, Artificial Sequence
  Synthetic
cuauuuacauaugcaauc

SEQ ID NO: 546409 - RNA, 19 nt, Artificial Sequence
  Synthetic
ucuauuuacauaugcaauc

SEQ ID NO: 546410 - RNA, 20 nt, Artificial Sequence
  Synthetic
uucuauuuacauaugcaauc

SEQ ID NO: 546411 - RNA, 21 nt, Artificial Sequence
  Synthetic
auucuauuuacauaugcaauc

SEQ ID NO: 546412 - RNA, 22 nt, Artificial Sequence
  Synthetic
aauucuauuuacauaugcaauc

SEQ ID NO: 546413 - RNA, 23 nt, Artificial Sequence
  Synthetic
uaauucuauuuacauaugcaauc

SEQ ID NO: 546414 - RNA, 24 nt, Artificial Sequence
  Synthetic
uuaauucuauuuacauaugcaauc

SEQ ID NO: 546415 - RNA, 18 nt, Artificial Sequence
  Synthetic
cuugcuggcugugcaauc

SEQ ID NO: 546416 - RNA, 19 nt, Artificial Sequence
  Synthetic
acuugcuggcugugcaauc

SEQ ID NO: 546417 - RNA, 20 nt, Artificial Sequence
  Synthetic
uacuugcuggcugugcaauc

SEQ ID NO: 546418 - RNA, 21 nt, Artificial Sequence
  Synthetic
auacuugcuggcugugcaauc

SEQ ID NO: 546419 - RNA, 22 nt, Artificial Sequence
  Synthetic
aauacuugcuggcugugcaauc

SEQ ID NO: 546420 - RNA, 23 nt, Artificial Sequence
  Synthetic
aaauacuugcuggcugugcaauc

SEQ ID NO: 546421 - RNA, 24 nt, Artificial Sequence
  Synthetic
caaauacuugcuggcugugcaauc

SEQ ID NO: 546422 - RNA, 18 nt, Artificial Sequence
  Synthetic
auuauaacaacaucaauc

SEQ ID NO: 546423 - RNA, 19 nt, Artificial Sequence
  Synthetic
cauuauaacaacaucaauc

SEQ ID NO: 546424 - RNA, 20 nt, Artificial Sequence
  Synthetic
ucauuauaacaacaucaauc

SEQ ID NO: 546425 - RNA, 21 nt, Artificial Sequence
  Synthetic
uucauuauaacaacaucaauc

SEQ ID NO: 546426 - RNA, 22 nt, Artificial Sequence
  Synthetic
auucauuauaacaacaucaauc

SEQ ID NO: 546427 - RNA, 23 nt, Artificial Sequence
  Synthetic
uauucauuauaacaacaucaauc

SEQ ID NO: 546428 - RNA, 24 nt, Artificial Sequence
  Synthetic
guauucauuauaacaacaucaauc

SEQ ID NO: 546429 - RNA, 18 nt, Artificial Sequence
  Synthetic
uuuaaauacuacucaauc

SEQ ID NO: 546430 - RNA, 19 nt, Artificial Sequence
  Synthetic
cuuuaaauacuacucaauc

SEQ ID NO: 546431 - RNA, 20 nt, Artificial Sequence
  Synthetic
acuuuaaauacuacucaauc

SEQ ID NO: 546432 - RNA, 21 nt, Artificial Sequence
  Synthetic
uacuuuaaauacuacucaauc

SEQ ID NO: 546433 - RNA, 22 nt, Artificial Sequence
  Synthetic
auacuuuaaauacuacucaauc

SEQ ID NO: 546434 - RNA, 23 nt, Artificial Sequence
  Synthetic
aauacuuuaaauacuacucaauc

SEQ ID NO: 546435 - RNA, 24 nt, Artificial Sequence
  Synthetic
uaauacuuuaaauacuacucaauc

SEQ ID NO: 546436 - RNA, 18 nt, Artificial Sequence
  Synthetic
ugauaaugugccucaauc

SEQ ID NO: 546437 - RNA, 19 nt, Artificial Sequence
  Synthetic
augauaaugugccucaauc

SEQ ID NO: 546438 - RNA, 20 nt, Artificial Sequence
  Synthetic
caugauaaugugccucaauc

SEQ ID NO: 546439 - RNA, 21 nt, Artificial Sequence
  Synthetic
gcaugauaaugugccucaauc

SEQ ID NO: 546440 - RNA, 22 nt, Artificial Sequence
  Synthetic
ugcaugauaaugugccucaauc

SEQ ID NO: 546441 - RNA, 23 nt, Artificial Sequence
  Synthetic
gugcaugauaaugugccucaauc

SEQ ID NO: 546442 - RNA, 24 nt, Artificial Sequence
  Synthetic
ugugcaugauaaugugccucaauc

SEQ ID NO: 546443 - RNA, 18 nt, Artificial Sequence
  Synthetic
agagacccaggcucaauc

SEQ ID NO: 546444 - RNA, 19 nt, Artificial Sequence
  Synthetic
cagagacccaggcucaauc

SEQ ID NO: 546445 - RNA, 20 nt, Artificial Sequence
  Synthetic
gcagagacccaggcucaauc

SEQ ID NO: 546446 - RNA, 21 nt, Artificial Sequence
  Synthetic
agcagagacccaggcucaauc

SEQ ID NO: 546447 - RNA, 22 nt, Artificial Sequence
  Synthetic
uagcagagacccaggcucaauc

SEQ ID NO: 546448 - RNA, 23 nt, Artificial Sequence
  Synthetic
auagcagagacccaggcucaauc

SEQ ID NO: 546449 - RNA, 24 nt, Artificial Sequence
  Synthetic
gauagcagagacccaggcucaauc

SEQ ID NO: 546450 - RNA, 18 nt, Artificial Sequence
  Synthetic
cgcaucgccaagucaauc

SEQ ID NO: 546451 - RNA, 19 nt, Artificial Sequence
  Synthetic
ccgcaucgccaagucaauc

SEQ ID NO: 546452 - RNA, 20 nt, Artificial Sequence
  Synthetic
cccgcaucgccaagucaauc

SEQ ID NO: 546453 - RNA, 21 nt, Artificial Sequence
  Synthetic
gcccgcaucgccaagucaauc

SEQ ID NO: 546454 - RNA, 22 nt, Artificial Sequence
  Synthetic
agcccgcaucgccaagucaauc

SEQ ID NO: 546455 - RNA, 23 nt, Artificial Sequence
  Synthetic
gagcccgcaucgccaagucaauc

SEQ ID NO: 546456 - RNA, 24 nt, Artificial Sequence
  Synthetic
agagcccgcaucgccaagucaauc

SEQ ID NO: 546457 - RNA, 18 nt, Artificial Sequence
  Synthetic
ucuuccugaaauucaauc

SEQ ID NO: 546458 - RNA, 19 nt, Artificial Sequence
  Synthetic
cucuuccugaaauucaauc

SEQ ID NO: 546459 - RNA, 20 nt, Artificial Sequence
  Synthetic
acucuuccugaaauucaauc

SEQ ID NO: 546460 - RNA, 21 nt, Artificial Sequence
  Synthetic
aacucuuccugaaauucaauc

SEQ ID NO: 546461 - RNA, 22 nt, Artificial Sequence
  Synthetic
uaacucuuccugaaauucaauc

SEQ ID NO: 546462 - RNA, 23 nt, Artificial Sequence
  Synthetic
uuaacucuuccugaaauucaauc

SEQ ID NO: 546463 - RNA, 24 nt, Artificial Sequence
  Synthetic
auuaacucuuccugaaauucaauc

SEQ ID NO: 546464 - RNA, 18 nt, Artificial Sequence
  Synthetic
ugcaagugaaguucaauc

SEQ ID NO: 546465 - RNA, 19 nt, Artificial Sequence
  Synthetic
cugcaagugaaguucaauc

SEQ ID NO: 546466 - RNA, 20 nt, Artificial Sequence
  Synthetic
gcugcaagugaaguucaauc

SEQ ID NO: 546467 - RNA, 21 nt, Artificial Sequence
  Synthetic
ggcugcaagugaaguucaauc

SEQ ID NO: 546468 - RNA, 22 nt, Artificial Sequence
  Synthetic
gggcugcaagugaaguucaauc

SEQ ID NO: 546469 - RNA, 23 nt, Artificial Sequence
  Synthetic
ggggcugcaagugaaguucaauc

SEQ ID NO: 546470 - RNA, 24 nt, Artificial Sequence
  Synthetic
gggggcugcaagugaaguucaauc

SEQ ID NO: 546471 - RNA, 18 nt, Artificial Sequence
  Synthetic
aagagaagaauuucaauc

SEQ ID NO: 546472 - RNA, 19 nt, Artificial Sequence
  Synthetic
uaagagaagaauuucaauc

SEQ ID NO: 546473 - RNA, 20 nt, Artificial Sequence
  Synthetic
uuaagagaagaauuucaauc

SEQ ID NO: 546474 - RNA, 21 nt, Artificial Sequence
  Synthetic
auuaagagaagaauuucaauc

SEQ ID NO: 546475 - RNA, 22 nt, Artificial Sequence
  Synthetic
gauuaagagaagaauuucaauc

SEQ ID NO: 546476 - RNA, 23 nt, Artificial Sequence
  Synthetic
ugauuaagagaagaauuucaauc

SEQ ID NO: 546477 - RNA, 24 nt, Artificial Sequence
  Synthetic
augauuaagagaagaauuucaauc

SEQ ID NO: 546478 - RNA, 18 nt, Artificial Sequence
  Synthetic
uuccucagaguuucaauc

SEQ ID NO: 546479 - RNA, 19 nt, Artificial Sequence
  Synthetic
uuuccucagaguuucaauc

SEQ ID NO: 546480 - RNA, 20 nt, Artificial Sequence
  Synthetic
guuuccucagaguuucaauc

SEQ ID NO: 546481 - RNA, 21 nt, Artificial Sequence
  Synthetic
aguuuccucagaguuucaauc

SEQ ID NO: 546482 - RNA, 22 nt, Artificial Sequence
  Synthetic
caguuuccucagaguuucaauc

SEQ ID NO: 546483 - RNA, 23 nt, Artificial Sequence
  Synthetic
acaguuuccucagaguuucaauc

SEQ ID NO: 546484 - RNA, 24 nt, Artificial Sequence
  Synthetic
uacaguuuccucagaguuucaauc

SEQ ID NO: 546485 - RNA, 18 nt, Artificial Sequence
  Synthetic
auguaagagaaaagaauc

SEQ ID NO: 546486 - RNA, 19 nt, Artificial Sequence
  Synthetic
aauguaagagaaaagaauc

SEQ ID NO: 546487 - RNA, 20 nt, Artificial Sequence
  Synthetic
uaauguaagagaaaagaauc

SEQ ID NO: 546488 - RNA, 21 nt, Artificial Sequence
  Synthetic
guaauguaagagaaaagaauc

SEQ ID NO: 546489 - RNA, 22 nt, Artificial Sequence
  Synthetic
gguaauguaagagaaaagaauc

SEQ ID NO: 546490 - RNA, 23 nt, Artificial Sequence
  Synthetic
ugguaauguaagagaaaagaauc

SEQ ID NO: 546491 - RNA, 24 nt, Artificial Sequence
  Synthetic
augguaauguaagagaaaagaauc

SEQ ID NO: 546492 - RNA, 18 nt, Artificial Sequence
  Synthetic
ucauaauuucaaagaauc

SEQ ID NO: 546493 - RNA, 19 nt, Artificial Sequence
  Synthetic
uucauaauuucaaagaauc

SEQ ID NO: 546494 - RNA, 20 nt, Artificial Sequence
  Synthetic
guucauaauuucaaagaauc

SEQ ID NO: 546495 - RNA, 21 nt, Artificial Sequence
  Synthetic
uguucauaauuucaaagaauc

SEQ ID NO: 546496 - RNA, 22 nt, Artificial Sequence
  Synthetic
cuguucauaauuucaaagaauc

SEQ ID NO: 546497 - RNA, 23 nt, Artificial Sequence
  Synthetic
acuguucauaauuucaaagaauc

SEQ ID NO: 546498 - RNA, 24 nt, Artificial Sequence
  Synthetic
uacuguucauaauuucaaagaauc

SEQ ID NO: 546499 - RNA, 18 nt, Artificial Sequence
  Synthetic
aggaauuguacaagaauc

SEQ ID NO: 546500 - RNA, 19 nt, Artificial Sequence
  Synthetic
uaggaauuguacaagaauc

SEQ ID NO: 546501 - RNA, 20 nt, Artificial Sequence
  Synthetic
cuaggaauuguacaagaauc

SEQ ID NO: 546502 - RNA, 21 nt, Artificial Sequence
  Synthetic
ccuaggaauuguacaagaauc

SEQ ID NO: 546503 - RNA, 22 nt, Artificial Sequence
  Synthetic
uccuaggaauuguacaagaauc

SEQ ID NO: 546504 - RNA, 23 nt, Artificial Sequence
  Synthetic
cuccuaggaauuguacaagaauc

SEQ ID NO: 546505 - RNA, 24 nt, Artificial Sequence
  Synthetic
ucuccuaggaauuguacaagaauc

SEQ ID NO: 546506 - RNA, 18 nt, Artificial Sequence
  Synthetic
uugagacccccaagaauc

SEQ ID NO: 546507 - RNA, 19 nt, Artificial Sequence
  Synthetic
uuugagacccccaagaauc

SEQ ID NO: 546508 - RNA, 20 nt, Artificial Sequence
  Synthetic
auuugagacccccaagaauc

SEQ ID NO: 546509 - RNA, 21 nt, Artificial Sequence
  Synthetic
uauuugagacccccaagaauc

SEQ ID NO: 546510 - RNA, 22 nt, Artificial Sequence
  Synthetic
cuauuugagacccccaagaauc

SEQ ID NO: 546511 - RNA, 23 nt, Artificial Sequence
  Synthetic
acuauuugagacccccaagaauc

SEQ ID NO: 546512 - RNA, 24 nt, Artificial Sequence
  Synthetic
cacuauuugagacccccaagaauc

SEQ ID NO: 546513 - RNA, 18 nt, Artificial Sequence
  Synthetic
caagcagaaucaagaauc

SEQ ID NO: 546514 - RNA, 19 nt, Artificial Sequence
  Synthetic
ccaagcagaaucaagaauc

SEQ ID NO: 546515 - RNA, 20 nt, Artificial Sequence
  Synthetic
cccaagcagaaucaagaauc

SEQ ID NO: 546516 - RNA, 21 nt, Artificial Sequence
  Synthetic
ccccaagcagaaucaagaauc

SEQ ID NO: 546517 - RNA, 22 nt, Artificial Sequence
  Synthetic
gccccaagcagaaucaagaauc

SEQ ID NO: 546518 - RNA, 23 nt, Artificial Sequence
  Synthetic
agccccaagcagaaucaagaauc

SEQ ID NO: 546519 - RNA, 24 nt, Artificial Sequence
  Synthetic
aagccccaagcagaaucaagaauc

SEQ ID NO: 546520 - RNA, 18 nt, Artificial Sequence
  Synthetic
guggcuaggagaagaauc

SEQ ID NO: 546521 - RNA, 19 nt, Artificial Sequence
  Synthetic
gguggcuaggagaagaauc

SEQ ID NO: 546522 - RNA, 20 nt, Artificial Sequence
  Synthetic
ggguggcuaggagaagaauc

SEQ ID NO: 546523 - RNA, 21 nt, Artificial Sequence
  Synthetic
gggguggcuaggagaagaauc

SEQ ID NO: 546524 - RNA, 22 nt, Artificial Sequence
  Synthetic
agggguggcuaggagaagaauc

SEQ ID NO: 546525 - RNA, 23 nt, Artificial Sequence
  Synthetic
gagggguggcuaggagaagaauc

SEQ ID NO: 546526 - RNA, 24 nt, Artificial Sequence
  Synthetic
ugagggguggcuaggagaagaauc

SEQ ID NO: 546527 - RNA, 18 nt, Artificial Sequence
  Synthetic
ucauucccaugaagaauc

SEQ ID NO: 546528 - RNA, 19 nt, Artificial Sequence
  Synthetic
gucauucccaugaagaauc

SEQ ID NO: 546529 - RNA, 20 nt, Artificial Sequence
  Synthetic
agucauucccaugaagaauc

SEQ ID NO: 546530 - RNA, 21 nt, Artificial Sequence
  Synthetic
aagucauucccaugaagaauc

SEQ ID NO: 546531 - RNA, 22 nt, Artificial Sequence
  Synthetic
gaagucauucccaugaagaauc

SEQ ID NO: 546532 - RNA, 23 nt, Artificial Sequence
  Synthetic
ggaagucauucccaugaagaauc

SEQ ID NO: 546533 - RNA, 24 nt, Artificial Sequence
  Synthetic
uggaagucauucccaugaagaauc

SEQ ID NO: 546534 - RNA, 18 nt, Artificial Sequence
  Synthetic
uaacaggcauuaagaauc

SEQ ID NO: 546535 - RNA, 19 nt, Artificial Sequence
  Synthetic
uuaacaggcauuaagaauc

SEQ ID NO: 546536 - RNA, 20 nt, Artificial Sequence
  Synthetic
auuaacaggcauuaagaauc

SEQ ID NO: 546537 - RNA, 21 nt, Artificial Sequence
  Synthetic
uauuaacaggcauuaagaauc

SEQ ID NO: 546538 - RNA, 22 nt, Artificial Sequence
  Synthetic
auauuaacaggcauuaagaauc

SEQ ID NO: 546539 - RNA, 23 nt, Artificial Sequence
  Synthetic
aauauuaacaggcauuaagaauc

SEQ ID NO: 546540 - RNA, 24 nt, Artificial Sequence
  Synthetic
caauauuaacaggcauuaagaauc

SEQ ID NO: 546541 - RNA, 18 nt, Artificial Sequence
  Synthetic
auacagugauuaagaauc

SEQ ID NO: 546542 - RNA, 19 nt, Artificial Sequence
  Synthetic
aauacagugauuaagaauc

SEQ ID NO: 546543 - RNA, 20 nt, Artificial Sequence
  Synthetic
caauacagugauuaagaauc

SEQ ID NO: 546544 - RNA, 21 nt, Artificial Sequence
  Synthetic
acaauacagugauuaagaauc

SEQ ID NO: 546545 - RNA, 22 nt, Artificial Sequence
  Synthetic
uacaauacagugauuaagaauc

SEQ ID NO: 546546 - RNA, 23 nt, Artificial Sequence
  Synthetic
guacaauacagugauuaagaauc

SEQ ID NO: 546547 - RNA, 24 nt, Artificial Sequence
  Synthetic
aguacaauacagugauuaagaauc

SEQ ID NO: 546548 - RNA, 18 nt, Artificial Sequence
  Synthetic
uagcaaauaaacagaauc

SEQ ID NO: 546549 - RNA, 19 nt, Artificial Sequence
  Synthetic
guagcaaauaaacagaauc

SEQ ID NO: 546550 - RNA, 20 nt, Artificial Sequence
  Synthetic
uguagcaaauaaacagaauc

SEQ ID NO: 546551 - RNA, 21 nt, Artificial Sequence
  Synthetic
auguagcaaauaaacagaauc

SEQ ID NO: 546552 - RNA, 22 nt, Artificial Sequence
  Synthetic
aauguagcaaauaaacagaauc

SEQ ID NO: 546553 - RNA, 23 nt, Artificial Sequence
  Synthetic
aaauguagcaaauaaacagaauc

SEQ ID NO: 546554 - RNA, 24 nt, Artificial Sequence
  Synthetic
aaaauguagcaaauaaacagaauc

SEQ ID NO: 546555 - RNA, 18 nt, Artificial Sequence
  Synthetic
guuaugguacacagaauc

SEQ ID NO: 546556 - RNA, 19 nt, Artificial Sequence
  Synthetic
aguuaugguacacagaauc

SEQ ID NO: 546557 - RNA, 20 nt, Artificial Sequence
  Synthetic
aaguuaugguacacagaauc

SEQ ID NO: 546558 - RNA, 21 nt, Artificial Sequence
  Synthetic
aaaguuaugguacacagaauc

SEQ ID NO: 546559 - RNA, 22 nt, Artificial Sequence
  Synthetic
aaaaguuaugguacacagaauc

SEQ ID NO: 546560 - RNA, 23 nt, Artificial Sequence
  Synthetic
uaaaaguuaugguacacagaauc

SEQ ID NO: 546561 - RNA, 24 nt, Artificial Sequence
  Synthetic
guaaaaguuaugguacacagaauc

SEQ ID NO: 546562 - RNA, 18 nt, Artificial Sequence
  Synthetic
ggaagaggauacagaauc

SEQ ID NO: 546563 - RNA, 19 nt, Artificial Sequence
  Synthetic
uggaagaggauacagaauc

SEQ ID NO: 546564 - RNA, 20 nt, Artificial Sequence
  Synthetic
auggaagaggauacagaauc

SEQ ID NO: 546565 - RNA, 21 nt, Artificial Sequence
  Synthetic
aauggaagaggauacagaauc

SEQ ID NO: 546566 - RNA, 22 nt, Artificial Sequence
  Synthetic
aaauggaagaggauacagaauc

SEQ ID NO: 546567 - RNA, 23 nt, Artificial Sequence
  Synthetic
caaauggaagaggauacagaauc

SEQ ID NO: 546568 - RNA, 24 nt, Artificial Sequence
  Synthetic
ucaaauggaagaggauacagaauc

SEQ ID NO: 546569 - RNA, 18 nt, Artificial Sequence
  Synthetic
uaaugaggauucagaauc

SEQ ID NO: 546570 - RNA, 19 nt, Artificial Sequence
  Synthetic
cuaaugaggauucagaauc

SEQ ID NO: 546571 - RNA, 20 nt, Artificial Sequence
  Synthetic
gcuaaugaggauucagaauc

SEQ ID NO: 546572 - RNA, 21 nt, Artificial Sequence
  Synthetic
ggcuaaugaggauucagaauc

SEQ ID NO: 546573 - RNA, 22 nt, Artificial Sequence
  Synthetic
uggcuaaugaggauucagaauc

SEQ ID NO: 546574 - RNA, 23 nt, Artificial Sequence
  Synthetic
auggcuaaugaggauucagaauc

SEQ ID NO: 546575 - RNA, 24 nt, Artificial Sequence
  Synthetic
uauggcuaaugaggauucagaauc

SEQ ID NO: 546576 - RNA, 18 nt, Artificial Sequence
  Synthetic
accaugaaucuuagaauc

SEQ ID NO: 546577 - RNA, 19 nt, Artificial Sequence
  Synthetic
uaccaugaaucuuagaauc

SEQ ID NO: 546578 - RNA, 20 nt, Artificial Sequence
  Synthetic
guaccaugaaucuuagaauc

SEQ ID NO: 546579 - RNA, 21 nt, Artificial Sequence
  Synthetic
uguaccaugaaucuuagaauc

SEQ ID NO: 546580 - RNA, 22 nt, Artificial Sequence
  Synthetic
auguaccaugaaucuuagaauc

SEQ ID NO: 546581 - RNA, 23 nt, Artificial Sequence
  Synthetic
uauguaccaugaaucuuagaauc

SEQ ID NO: 546582 - RNA, 24 nt, Artificial Sequence
  Synthetic
cuauguaccaugaaucuuagaauc

SEQ ID NO: 546583 - RNA, 18 nt, Artificial Sequence
  Synthetic
auuggcucauuacgaauc

SEQ ID NO: 546584 - RNA, 19 nt, Artificial Sequence
  Synthetic
aauuggcucauuacgaauc

SEQ ID NO: 546585 - RNA, 20 nt, Artificial Sequence
  Synthetic
aaauuggcucauuacgaauc

SEQ ID NO: 546586 - RNA, 21 nt, Artificial Sequence
  Synthetic
uaaauuggcucauuacgaauc

SEQ ID NO: 546587 - RNA, 22 nt, Artificial Sequence
  Synthetic
auaaauuggcucauuacgaauc

SEQ ID NO: 546588 - RNA, 23 nt, Artificial Sequence
  Synthetic
aauaaauuggcucauuacgaauc

SEQ ID NO: 546589 - RNA, 24 nt, Artificial Sequence
  Synthetic
uaauaaauuggcucauuacgaauc

SEQ ID NO: 546590 - RNA, 18 nt, Artificial Sequence
  Synthetic
gcccagagagaaggaauc

SEQ ID NO: 546591 - RNA, 19 nt, Artificial Sequence
  Synthetic
ugcccagagagaaggaauc

SEQ ID NO: 546592 - RNA, 20 nt, Artificial Sequence
  Synthetic
cugcccagagagaaggaauc

SEQ ID NO: 546593 - RNA, 21 nt, Artificial Sequence
  Synthetic
ccugcccagagagaaggaauc

SEQ ID NO: 546594 - RNA, 22 nt, Artificial Sequence
  Synthetic
cccugcccagagagaaggaauc

SEQ ID NO: 546595 - RNA, 23 nt, Artificial Sequence
  Synthetic
gcccugcccagagagaaggaauc

SEQ ID NO: 546596 - RNA, 24 nt, Artificial Sequence
  Synthetic
ugcccugcccagagagaaggaauc

SEQ ID NO: 546597 - RNA, 18 nt, Artificial Sequence
  Synthetic
ugaaucucuacaggaauc

SEQ ID NO: 546598 - RNA, 19 nt, Artificial Sequence
  Synthetic
uugaaucucuacaggaauc

SEQ ID NO: 546599 - RNA, 20 nt, Artificial Sequence
  Synthetic
uuugaaucucuacaggaauc

SEQ ID NO: 546600 - RNA, 21 nt, Artificial Sequence
  Synthetic
cuuugaaucucuacaggaauc

SEQ ID NO: 546601 - RNA, 22 nt, Artificial Sequence
  Synthetic
ucuuugaaucucuacaggaauc

SEQ ID NO: 546602 - RNA, 23 nt, Artificial Sequence
  Synthetic
aucuuugaaucucuacaggaauc

SEQ ID NO: 546603 - RNA, 24 nt, Artificial Sequence
  Synthetic
uaucuuugaaucucuacaggaauc

SEQ ID NO: 546604 - RNA, 18 nt, Artificial Sequence
  Synthetic
agugguaaccugggaauc

SEQ ID NO: 546605 - RNA, 19 nt, Artificial Sequence
  Synthetic
cagugguaaccugggaauc

SEQ ID NO: 546606 - RNA, 20 nt, Artificial Sequence
  Synthetic
ucagugguaaccugggaauc

SEQ ID NO: 546607 - RNA, 21 nt, Artificial Sequence
  Synthetic
aucagugguaaccugggaauc

SEQ ID NO: 546608 - RNA, 22 nt, Artificial Sequence
  Synthetic
caucagugguaaccugggaauc

SEQ ID NO: 546609 - RNA, 23 nt, Artificial Sequence
  Synthetic
gcaucagugguaaccugggaauc

SEQ ID NO: 546610 - RNA, 24 nt, Artificial Sequence
  Synthetic
agcaucagugguaaccugggaauc

SEQ ID NO: 546611 - RNA, 18 nt, Artificial Sequence
  Synthetic
aaaucaauuuugggaauc

SEQ ID NO: 546612 - RNA, 19 nt, Artificial Sequence
  Synthetic
aaaaucaauuuugggaauc

SEQ ID NO: 546613 - RNA, 20 nt, Artificial Sequence
  Synthetic
aaaaaucaauuuugggaauc

SEQ ID NO: 546614 - RNA, 21 nt, Artificial Sequence
  Synthetic
aaaaaaucaauuuugggaauc

SEQ ID NO: 546615 - RNA, 22 nt, Artificial Sequence
  Synthetic
uaaaaaaucaauuuugggaauc

SEQ ID NO: 546616 - RNA, 23 nt, Artificial Sequence
  Synthetic
uuaaaaaaucaauuuugggaauc

SEQ ID NO: 546617 - RNA, 24 nt, Artificial Sequence
  Synthetic
cuuaaaaaaucaauuuugggaauc

SEQ ID NO: 546618 - RNA, 18 nt, Artificial Sequence
  Synthetic
agcaucaacuguggaauc

SEQ ID NO: 546619 - RNA, 19 nt, Artificial Sequence
  Synthetic
cagcaucaacuguggaauc

SEQ ID NO: 546620 - RNA, 20 nt, Artificial Sequence
  Synthetic
acagcaucaacuguggaauc

SEQ ID NO: 546621 - RNA, 21 nt, Artificial Sequence
  Synthetic
uacagcaucaacuguggaauc

SEQ ID NO: 546622 - RNA, 22 nt, Artificial Sequence
  Synthetic
uuacagcaucaacuguggaauc

SEQ ID NO: 546623 - RNA, 23 nt, Artificial Sequence
  Synthetic
guuacagcaucaacuguggaauc

SEQ ID NO: 546624 - RNA, 24 nt, Artificial Sequence
  Synthetic
uguuacagcaucaacuguggaauc

SEQ ID NO: 546625 - RNA, 18 nt, Artificial Sequence
  Synthetic
gaaaauguaguuggaauc

SEQ ID NO: 546626 - RNA, 19 nt, Artificial Sequence
  Synthetic
ggaaaauguaguuggaauc

SEQ ID NO: 546627 - RNA, 20 nt, Artificial Sequence
  Synthetic
gggaaaauguaguuggaauc

SEQ ID NO: 546628 - RNA, 21 nt, Artificial Sequence
  Synthetic
agggaaaauguaguuggaauc

SEQ ID NO: 546629 - RNA, 22 nt, Artificial Sequence
  Synthetic
gagggaaaauguaguuggaauc

SEQ ID NO: 546630 - RNA, 23 nt, Artificial Sequence
  Synthetic
ggagggaaaauguaguuggaauc

SEQ ID NO: 546631 - RNA, 24 nt, Artificial Sequence
  Synthetic
uggagggaaaauguaguuggaauc

SEQ ID NO: 546632 - RNA, 18 nt, Artificial Sequence
  Synthetic
acaagcagguuuggaauc

SEQ ID NO: 546633 - RNA, 19 nt, Artificial Sequence
  Synthetic
aacaagcagguuuggaauc

SEQ ID NO: 546634 - RNA, 20 nt, Artificial Sequence
  Synthetic
gaacaagcagguuuggaauc

SEQ ID NO: 546635 - RNA, 21 nt, Artificial Sequence
  Synthetic
ugaacaagcagguuuggaauc

SEQ ID NO: 546636 - RNA, 22 nt, Artificial Sequence
  Synthetic
gugaacaagcagguuuggaauc

SEQ ID NO: 546637 - RNA, 23 nt, Artificial Sequence
  Synthetic
ggugaacaagcagguuuggaauc

SEQ ID NO: 546638 - RNA, 24 nt, Artificial Sequence
  Synthetic
aggugaacaagcagguuuggaauc

SEQ ID NO: 546639 - RNA, 18 nt, Artificial Sequence
  Synthetic
gagauuugccaaugaauc

SEQ ID NO: 546640 - RNA, 19 nt, Artificial Sequence
  Synthetic
ugagauuugccaaugaauc

SEQ ID NO: 546641 - RNA, 20 nt, Artificial Sequence
  Synthetic
augagauuugccaaugaauc

SEQ ID NO: 546642 - RNA, 21 nt, Artificial Sequence
  Synthetic
aaugagauuugccaaugaauc

SEQ ID NO: 546643 - RNA, 22 nt, Artificial Sequence
  Synthetic
aaaugagauuugccaaugaauc

SEQ ID NO: 546644 - RNA, 23 nt, Artificial Sequence
  Synthetic
aaaaugagauuugccaaugaauc

SEQ ID NO: 546645 - RNA, 24 nt, Artificial Sequence
  Synthetic
aaaaaugagauuugccaaugaauc

SEQ ID NO: 546646 - RNA, 18 nt, Artificial Sequence
  Synthetic
caaaaaaaucaaugaauc

SEQ ID NO: 546647 - RNA, 19 nt, Artificial Sequence
  Synthetic
ucaaaaaaaucaaugaauc

SEQ ID NO: 546648 - RNA, 20 nt, Artificial Sequence
  Synthetic
uucaaaaaaaucaaugaauc

SEQ ID NO: 546649 - RNA, 21 nt, Artificial Sequence
  Synthetic
cuucaaaaaaaucaaugaauc

SEQ ID NO: 546650 - RNA, 22 nt, Artificial Sequence
  Synthetic
ccuucaaaaaaaucaaugaauc

SEQ ID NO: 546651 - RNA, 23 nt, Artificial Sequence
  Synthetic
cccuucaaaaaaaucaaugaauc

SEQ ID NO: 546652 - RNA, 24 nt, Artificial Sequence
  Synthetic
acccuucaaaaaaaucaaugaauc

SEQ ID NO: 546653 - RNA, 18 nt, Artificial Sequence
  Synthetic
ucaaaaaaucaaugaauc

SEQ ID NO: 546654 - RNA, 19 nt, Artificial Sequence
  Synthetic
uucaaaaaaucaaugaauc

SEQ ID NO: 546655 - RNA, 20 nt, Artificial Sequence
  Synthetic
cuucaaaaaaucaaugaauc

SEQ ID NO: 546656 - RNA, 21 nt, Artificial Sequence
  Synthetic
ccuucaaaaaaucaaugaauc

SEQ ID NO: 546657 - RNA, 22 nt, Artificial Sequence
  Synthetic
cccuucaaaaaaucaaugaauc

SEQ ID NO: 546658 - RNA, 23 nt, Artificial Sequence
  Synthetic
acccuucaaaaaaucaaugaauc

SEQ ID NO: 546659 - RNA, 24 nt, Artificial Sequence
  Synthetic
aacccuucaaaaaaucaaugaauc

SEQ ID NO: 546660 - RNA, 18 nt, Artificial Sequence
  Synthetic
gaugggaaaacaugaauc

SEQ ID NO: 546661 - RNA, 19 nt, Artificial Sequence
  Synthetic
agaugggaaaacaugaauc

SEQ ID NO: 546662 - RNA, 20 nt, Artificial Sequence
  Synthetic
cagaugggaaaacaugaauc

SEQ ID NO: 546663 - RNA, 21 nt, Artificial Sequence
  Synthetic
gcagaugggaaaacaugaauc

SEQ ID NO: 546664 - RNA, 22 nt, Artificial Sequence
  Synthetic
ugcagaugggaaaacaugaauc

SEQ ID NO: 546665 - RNA, 23 nt, Artificial Sequence
  Synthetic
augcagaugggaaaacaugaauc

SEQ ID NO: 546666 - RNA, 24 nt, Artificial Sequence
  Synthetic
uaugcagaugggaaaacaugaauc

SEQ ID NO: 546667 - RNA, 18 nt, Artificial Sequence
  Synthetic
aaguaacccagaugaauc

SEQ ID NO: 546668 - RNA, 19 nt, Artificial Sequence
  Synthetic
gaaguaacccagaugaauc

SEQ ID NO: 546669 - RNA, 20 nt, Artificial Sequence
  Synthetic
ugaaguaacccagaugaauc

SEQ ID NO: 546670 - RNA, 21 nt, Artificial Sequence
  Synthetic
augaaguaacccagaugaauc

SEQ ID NO: 546671 - RNA, 22 nt, Artificial Sequence
  Synthetic
gaugaaguaacccagaugaauc

SEQ ID NO: 546672 - RNA, 23 nt, Artificial Sequence
  Synthetic
ggaugaaguaacccagaugaauc

SEQ ID NO: 546673 - RNA, 24 nt, Artificial Sequence
  Synthetic
gggaugaaguaacccagaugaauc

SEQ ID NO: 546674 - RNA, 18 nt, Artificial Sequence
  Synthetic
aagcugauaaacugaauc

SEQ ID NO: 546675 - RNA, 19 nt, Artificial Sequence
  Synthetic
uaagcugauaaacugaauc

SEQ ID NO: 546676 - RNA, 20 nt, Artificial Sequence
  Synthetic
uuaagcugauaaacugaauc

SEQ ID NO: 546677 - RNA, 21 nt, Artificial Sequence
  Synthetic
auuaagcugauaaacugaauc

SEQ ID NO: 546678 - RNA, 22 nt, Artificial Sequence
  Synthetic
aauuaagcugauaaacugaauc

SEQ ID NO: 546679 - RNA, 23 nt, Artificial Sequence
  Synthetic
aaauuaagcugauaaacugaauc

SEQ ID NO: 546680 - RNA, 24 nt, Artificial Sequence
  Synthetic
caaauuaagcugauaaacugaauc

SEQ ID NO: 546681 - RNA, 18 nt, Artificial Sequence
  Synthetic
uuucccaagaacugaauc

SEQ ID NO: 546682 - RNA, 19 nt, Artificial Sequence
  Synthetic
auuucccaagaacugaauc

SEQ ID NO: 546683 - RNA, 20 nt, Artificial Sequence
  Synthetic
uauuucccaagaacugaauc

SEQ ID NO: 546684 - RNA, 21 nt, Artificial Sequence
  Synthetic
uuauuucccaagaacugaauc

SEQ ID NO: 546685 - RNA, 22 nt, Artificial Sequence
  Synthetic
auuauuucccaagaacugaauc

SEQ ID NO: 546686 - RNA, 23 nt, Artificial Sequence
  Synthetic
uauuauuucccaagaacugaauc

SEQ ID NO: 546687 - RNA, 24 nt, Artificial Sequence
  Synthetic
guauuauuucccaagaacugaauc

SEQ ID NO: 546688 - RNA, 18 nt, Artificial Sequence
  Synthetic
gugggagguaacugaauc

SEQ ID NO: 546689 - RNA, 19 nt, Artificial Sequence
  Synthetic
agugggagguaacugaauc

SEQ ID NO: 546690 - RNA, 20 nt, Artificial Sequence
  Synthetic
cagugggagguaacugaauc

SEQ ID NO: 546691 - RNA, 21 nt, Artificial Sequence
  Synthetic
ccagugggagguaacugaauc

SEQ ID NO: 546692 - RNA, 22 nt, Artificial Sequence
  Synthetic
uccagugggagguaacugaauc

SEQ ID NO: 546693 - RNA, 23 nt, Artificial Sequence
  Synthetic
auccagugggagguaacugaauc

SEQ ID NO: 546694 - RNA, 24 nt, Artificial Sequence
  Synthetic
gauccagugggagguaacugaauc

SEQ ID NO: 546695 - RNA, 19 nt, Artificial Sequence
  Synthetic
ugugggagguaacugaauc

SEQ ID NO: 546696 - RNA, 20 nt, Artificial Sequence
  Synthetic
augugggagguaacugaauc

SEQ ID NO: 546697 - RNA, 21 nt, Artificial Sequence
  Synthetic
caugugggagguaacugaauc

SEQ ID NO: 546698 - RNA, 22 nt, Artificial Sequence
  Synthetic
ccaugugggagguaacugaauc

SEQ ID NO: 546699 - RNA, 23 nt, Artificial Sequence
  Synthetic
accaugugggagguaacugaauc

SEQ ID NO: 546700 - RNA, 24 nt, Artificial Sequence
  Synthetic
gaccaugugggagguaacugaauc

SEQ ID NO: 546701 - RNA, 18 nt, Artificial Sequence
  Synthetic
uacuucacaugcugaauc

SEQ ID NO: 546702 - RNA, 19 nt, Artificial Sequence
  Synthetic
auacuucacaugcugaauc

SEQ ID NO: 546703 - RNA, 20 nt, Artificial Sequence
  Synthetic
cauacuucacaugcugaauc

SEQ ID NO: 546704 - RNA, 21 nt, Artificial Sequence
  Synthetic
gcauacuucacaugcugaauc

SEQ ID NO: 546705 - RNA, 22 nt, Artificial Sequence
  Synthetic
ugcauacuucacaugcugaauc

SEQ ID NO: 546706 - RNA, 23 nt, Artificial Sequence
  Synthetic
cugcauacuucacaugcugaauc

SEQ ID NO: 546707 - RNA, 24 nt, Artificial Sequence
  Synthetic
gcugcauacuucacaugcugaauc

SEQ ID NO: 546708 - RNA, 18 nt, Artificial Sequence
  Synthetic
guauaguacugcugaauc

SEQ ID NO: 546709 - RNA, 19 nt, Artificial Sequence
  Synthetic
gguauaguacugcugaauc

SEQ ID NO: 546710 - RNA, 20 nt, Artificial Sequence
  Synthetic
agguauaguacugcugaauc

SEQ ID NO: 546711 - RNA, 21 nt, Artificial Sequence
  Synthetic
gagguauaguacugcugaauc

SEQ ID NO: 546712 - RNA, 22 nt, Artificial Sequence
  Synthetic
ugagguauaguacugcugaauc

SEQ ID NO: 546713 - RNA, 23 nt, Artificial Sequence
  Synthetic
cugagguauaguacugcugaauc

SEQ ID NO: 546714 - RNA, 24 nt, Artificial Sequence
  Synthetic
ccugagguauaguacugcugaauc

SEQ ID NO: 546715 - RNA, 18 nt, Artificial Sequence
  Synthetic
ucugauaacaagugaauc

SEQ ID NO: 546716 - RNA, 19 nt, Artificial Sequence
  Synthetic
uucugauaacaagugaauc

SEQ ID NO: 546717 - RNA, 20 nt, Artificial Sequence
  Synthetic
uuucugauaacaagugaauc

SEQ ID NO: 546718 - RNA, 21 nt, Artificial Sequence
  Synthetic
uuuucugauaacaagugaauc

SEQ ID NO: 546719 - RNA, 22 nt, Artificial Sequence
  Synthetic
auuuucugauaacaagugaauc

SEQ ID NO: 546720 - RNA, 23 nt, Artificial Sequence
  Synthetic
aauuuucugauaacaagugaauc

SEQ ID NO: 546721 - RNA, 24 nt, Artificial Sequence
  Synthetic
caauuuucugauaacaagugaauc

SEQ ID NO: 546722 - RNA, 18 nt, Artificial Sequence
  Synthetic
guguuuauucugugaauc

SEQ ID NO: 546723 - RNA, 19 nt, Artificial Sequence
  Synthetic
uguguuuauucugugaauc

SEQ ID NO: 546724 - RNA, 20 nt, Artificial Sequence
  Synthetic
cuguguuuauucugugaauc

SEQ ID NO: 546725 - RNA, 21 nt, Artificial Sequence
  Synthetic
ccuguguuuauucugugaauc

SEQ ID NO: 546726 - RNA, 22 nt, Artificial Sequence
  Synthetic
uccuguguuuauucugugaauc

SEQ ID NO: 546727 - RNA, 23 nt, Artificial Sequence
  Synthetic
uuccuguguuuauucugugaauc

SEQ ID NO: 546728 - RNA, 24 nt, Artificial Sequence
  Synthetic
uuuccuguguuuauucugugaauc

SEQ ID NO: 546729 - RNA, 18 nt, Artificial Sequence
  Synthetic
gugggagguaauugaauc

SEQ ID NO: 546730 - RNA, 19 nt, Artificial Sequence
  Synthetic
cgugggagguaauugaauc

SEQ ID NO: 546731 - RNA, 20 nt, Artificial Sequence
  Synthetic
ucgugggagguaauugaauc

SEQ ID NO: 546732 - RNA, 21 nt, Artificial Sequence
  Synthetic
cucgugggagguaauugaauc

SEQ ID NO: 546733 - RNA, 22 nt, Artificial Sequence
  Synthetic
ccucgugggagguaauugaauc

SEQ ID NO: 546734 - RNA, 23 nt, Artificial Sequence
  Synthetic
accucgugggagguaauugaauc

SEQ ID NO: 546735 - RNA, 24 nt, Artificial Sequence
  Synthetic
gaccucgugggagguaauugaauc

SEQ ID NO: 546736 - RNA, 19 nt, Artificial Sequence
  Synthetic
ggugggagguaauugaauc

SEQ ID NO: 546737 - RNA, 20 nt, Artificial Sequence
  Synthetic
uggugggagguaauugaauc

SEQ ID NO: 546738 - RNA, 21 nt, Artificial Sequence
  Synthetic
cuggugggagguaauugaauc

SEQ ID NO: 546739 - RNA, 22 nt, Artificial Sequence
  Synthetic
ccuggugggagguaauugaauc

SEQ ID NO: 546740 - RNA, 23 nt, Artificial Sequence
  Synthetic
accuggugggagguaauugaauc

SEQ ID NO: 546741 - RNA, 24 nt, Artificial Sequence
  Synthetic
gaccuggugggagguaauugaauc

SEQ ID NO: 546742 - RNA, 18 nt, Artificial Sequence
  Synthetic
uguggagguaauugaauc

SEQ ID NO: 546743 - RNA, 19 nt, Artificial Sequence
  Synthetic
auguggagguaauugaauc

SEQ ID NO: 546744 - RNA, 20 nt, Artificial Sequence
  Synthetic
uauguggagguaauugaauc

SEQ ID NO: 546745 - RNA, 21 nt, Artificial Sequence
  Synthetic
cuauguggagguaauugaauc

SEQ ID NO: 546746 - RNA, 22 nt, Artificial Sequence
  Synthetic
gcuauguggagguaauugaauc

SEQ ID NO: 546747 - RNA, 23 nt, Artificial Sequence
  Synthetic
ggcuauguggagguaauugaauc

SEQ ID NO: 546748 - RNA, 24 nt, Artificial Sequence
  Synthetic
aggcuauguggagguaauugaauc

SEQ ID NO: 546749 - RNA, 18 nt, Artificial Sequence
  Synthetic
ugcaauugugauugaauc

SEQ ID NO: 546750 - RNA, 19 nt, Artificial Sequence
  Synthetic
gugcaauugugauugaauc

SEQ ID NO: 546751 - RNA, 20 nt, Artificial Sequence
  Synthetic
agugcaauugugauugaauc

SEQ ID NO: 546752 - RNA, 21 nt, Artificial Sequence
  Synthetic
gagugcaauugugauugaauc

SEQ ID NO: 546753 - RNA, 22 nt, Artificial Sequence
  Synthetic
ugagugcaauugugauugaauc

SEQ ID NO: 546754 - RNA, 23 nt, Artificial Sequence
  Synthetic
gugagugcaauugugauugaauc

SEQ ID NO: 546755 - RNA, 24 nt, Artificial Sequence
  Synthetic
cgugagugcaauugugauugaauc

SEQ ID NO: 546756 - RNA, 18 nt, Artificial Sequence
  Synthetic
aucuaccaauauugaauc

SEQ ID NO: 546757 - RNA, 19 nt, Artificial Sequence
  Synthetic
aaucuaccaauauugaauc

SEQ ID NO: 546758 - RNA, 20 nt, Artificial Sequence
  Synthetic
caaucuaccaauauugaauc

SEQ ID NO: 546759 - RNA, 21 nt, Artificial Sequence
  Synthetic
gcaaucuaccaauauugaauc

SEQ ID NO: 546760 - RNA, 22 nt, Artificial Sequence
  Synthetic
ugcaaucuaccaauauugaauc

SEQ ID NO: 546761 - RNA, 23 nt, Artificial Sequence
  Synthetic
augcaaucuaccaauauugaauc

SEQ ID NO: 546762 - RNA, 24 nt, Artificial Sequence
  Synthetic
caugcaaucuaccaauauugaauc

SEQ ID NO: 546763 - RNA, 18 nt, Artificial Sequence
  Synthetic
aagagaauagcuugaauc

SEQ ID NO: 546764 - RNA, 19 nt, Artificial Sequence
  Synthetic
caagagaauagcuugaauc

SEQ ID NO: 546765 - RNA, 20 nt, Artificial Sequence
  Synthetic
gcaagagaauagcuugaauc

SEQ ID NO: 546766 - RNA, 21 nt, Artificial Sequence
  Synthetic
ggcaagagaauagcuugaauc

SEQ ID NO: 546767 - RNA, 22 nt, Artificial Sequence
  Synthetic
aggcaagagaauagcuugaauc

SEQ ID NO: 546768 - RNA, 23 nt, Artificial Sequence
  Synthetic
gaggcaagagaauagcuugaauc

SEQ ID NO: 546769 - RNA, 24 nt, Artificial Sequence
  Synthetic
ugaggcaagagaauagcuugaauc

SEQ ID NO: 546770 - RNA, 18 nt, Artificial Sequence
  Synthetic
aggagaaucgcuugaauc

SEQ ID NO: 546771 - RNA, 19 nt, Artificial Sequence
  Synthetic
caggagaaucgcuugaauc

SEQ ID NO: 546772 - RNA, 20 nt, Artificial Sequence
  Synthetic
gcaggagaaucgcuugaauc

SEQ ID NO: 546773 - RNA, 21 nt, Artificial Sequence
  Synthetic
ggcaggagaaucgcuugaauc

SEQ ID NO: 546774 - RNA, 22 nt, Artificial Sequence
  Synthetic
aggcaggagaaucgcuugaauc

SEQ ID NO: 546775 - RNA, 23 nt, Artificial Sequence
  Synthetic
gaggcaggagaaucgcuugaauc

SEQ ID NO: 546776 - RNA, 24 nt, Artificial Sequence
  Synthetic
ugaggcaggagaaucgcuugaauc

SEQ ID NO: 546777 - RNA, 18 nt, Artificial Sequence
  Synthetic
ugucugugcauuugaauc

SEQ ID NO: 546778 - RNA, 19 nt, Artificial Sequence
  Synthetic
uugucugugcauuugaauc

SEQ ID NO: 546779 - RNA, 20 nt, Artificial Sequence
  Synthetic
cuugucugugcauuugaauc

SEQ ID NO: 546780 - RNA, 21 nt, Artificial Sequence
  Synthetic
ccuugucugugcauuugaauc

SEQ ID NO: 546781 - RNA, 22 nt, Artificial Sequence
  Synthetic
accuugucugugcauuugaauc

SEQ ID NO: 546782 - RNA, 23 nt, Artificial Sequence
  Synthetic
aaccuugucugugcauuugaauc

SEQ ID NO: 546783 - RNA, 24 nt, Artificial Sequence
  Synthetic
caaccuugucugugcauuugaauc

SEQ ID NO: 546784 - RNA, 18 nt, Artificial Sequence
  Synthetic
ccccagacauuuugaauc

SEQ ID NO: 546785 - RNA, 19 nt, Artificial Sequence
  Synthetic
gccccagacauuuugaauc

SEQ ID NO: 546786 - RNA, 20 nt, Artificial Sequence
  Synthetic
ugccccagacauuuugaauc

SEQ ID NO: 546787 - RNA, 21 nt, Artificial Sequence
  Synthetic
uugccccagacauuuugaauc

SEQ ID NO: 546788 - RNA, 22 nt, Artificial Sequence
  Synthetic
cuugccccagacauuuugaauc

SEQ ID NO: 546789 - RNA, 23 nt, Artificial Sequence
  Synthetic
ccuugccccagacauuuugaauc

SEQ ID NO: 546790 - RNA, 24 nt, Artificial Sequence
  Synthetic
gccuugccccagacauuuugaauc

SEQ ID NO: 546791 - RNA, 18 nt, Artificial Sequence
  Synthetic
uggguacuauaaauaauc

SEQ ID NO: 546792 - RNA, 19 nt, Artificial Sequence
  Synthetic
uuggguacuauaaauaauc

SEQ ID NO: 546793 - RNA, 20 nt, Artificial Sequence
  Synthetic
auuggguacuauaaauaauc

SEQ ID NO: 546794 - RNA, 21 nt, Artificial Sequence
  Synthetic
uauuggguacuauaaauaauc

SEQ ID NO: 546795 - RNA, 22 nt, Artificial Sequence
  Synthetic
guauuggguacuauaaauaauc

SEQ ID NO: 546796 - RNA, 23 nt, Artificial Sequence
  Synthetic
uguauuggguacuauaaauaauc

SEQ ID NO: 546797 - RNA, 24 nt, Artificial Sequence
  Synthetic
uuguauuggguacuauaaauaauc

SEQ ID NO: 546798 - RNA, 18 nt, Artificial Sequence
  Synthetic
gagugccccauaauaauc

SEQ ID NO: 546799 - RNA, 19 nt, Artificial Sequence
  Synthetic
ggagugccccauaauaauc

SEQ ID NO: 546800 - RNA, 20 nt, Artificial Sequence
  Synthetic
aggagugccccauaauaauc

SEQ ID NO: 546801 - RNA, 21 nt, Artificial Sequence
  Synthetic
caggagugccccauaauaauc

SEQ ID NO: 546802 - RNA, 22 nt, Artificial Sequence
  Synthetic
gcaggagugccccauaauaauc

SEQ ID NO: 546803 - RNA, 23 nt, Artificial Sequence
  Synthetic
ggcaggagugccccauaauaauc

SEQ ID NO: 546804 - RNA, 24 nt, Artificial Sequence
  Synthetic
aggcaggagugccccauaauaauc

SEQ ID NO: 546805 - RNA, 18 nt, Artificial Sequence
  Synthetic
aaucaaaauauaauaauc

SEQ ID NO: 546806 - RNA, 19 nt, Artificial Sequence
  Synthetic
uaaucaaaauauaauaauc

SEQ ID NO: 546807 - RNA, 20 nt, Artificial Sequence
  Synthetic
cuaaucaaaauauaauaauc

SEQ ID NO: 546808 - RNA, 21 nt, Artificial Sequence
  Synthetic
ucuaaucaaaauauaauaauc

SEQ ID NO: 546809 - RNA, 22 nt, Artificial Sequence
  Synthetic
uucuaaucaaaauauaauaauc

SEQ ID NO: 546810 - RNA, 23 nt, Artificial Sequence
  Synthetic
uuucuaaucaaaauauaauaauc

SEQ ID NO: 546811 - RNA, 24 nt, Artificial Sequence
  Synthetic
uuuucuaaucaaaauauaauaauc

SEQ ID NO: 546812 - RNA, 18 nt, Artificial Sequence
  Synthetic
acaagaaaauuaauaauc

SEQ ID NO: 546813 - RNA, 19 nt, Artificial Sequence
  Synthetic
aacaagaaaauuaauaauc

SEQ ID NO: 546814 - RNA, 20 nt, Artificial Sequence
  Synthetic
uaacaagaaaauuaauaauc

SEQ ID NO: 546815 - RNA, 21 nt, Artificial Sequence
  Synthetic
auaacaagaaaauuaauaauc

SEQ ID NO: 546816 - RNA, 22 nt, Artificial Sequence
  Synthetic
aauaacaagaaaauuaauaauc

SEQ ID NO: 546817 - RNA, 23 nt, Artificial Sequence
  Synthetic
uaauaacaagaaaauuaauaauc

SEQ ID NO: 546818 - RNA, 24 nt, Artificial Sequence
  Synthetic
auaauaacaagaaaauuaauaauc

SEQ ID NO: 546819 - RNA, 18 nt, Artificial Sequence
  Synthetic
cucuaagaauacauaauc

SEQ ID NO: 546820 - RNA, 19 nt, Artificial Sequence
  Synthetic
ucucuaagaauacauaauc

SEQ ID NO: 546821 - RNA, 20 nt, Artificial Sequence
  Synthetic
aucucuaagaauacauaauc

SEQ ID NO: 546822 - RNA, 21 nt, Artificial Sequence
  Synthetic
uaucucuaagaauacauaauc

SEQ ID NO: 546823 - RNA, 22 nt, Artificial Sequence
  Synthetic
uuaucucuaagaauacauaauc

SEQ ID NO: 546824 - RNA, 23 nt, Artificial Sequence
  Synthetic
uuuaucucuaagaauacauaauc

SEQ ID NO: 546825 - RNA, 24 nt, Artificial Sequence
  Synthetic
guuuaucucuaagaauacauaauc

SEQ ID NO: 546826 - RNA, 18 nt, Artificial Sequence
  Synthetic
gugccugaauccauaauc

SEQ ID NO: 546827 - RNA, 19 nt, Artificial Sequence
  Synthetic
agugccugaauccauaauc

SEQ ID NO: 546828 - RNA, 20 nt, Artificial Sequence
  Synthetic
gagugccugaauccauaauc

SEQ ID NO: 546829 - RNA, 21 nt, Artificial Sequence
  Synthetic
agagugccugaauccauaauc

SEQ ID NO: 546830 - RNA, 22 nt, Artificial Sequence
  Synthetic
aagagugccugaauccauaauc

SEQ ID NO: 546831 - RNA, 23 nt, Artificial Sequence
  Synthetic
uaagagugccugaauccauaauc

SEQ ID NO: 546832 - RNA, 24 nt, Artificial Sequence
  Synthetic
cuaagagugccugaauccauaauc

SEQ ID NO: 546833 - RNA, 18 nt, Artificial Sequence
  Synthetic
cuauaaugaugcauaauc

SEQ ID NO: 546834 - RNA, 19 nt, Artificial Sequence
  Synthetic
ucuauaaugaugcauaauc

SEQ ID NO: 546835 - RNA, 20 nt, Artificial Sequence
  Synthetic
gucuauaaugaugcauaauc

SEQ ID NO: 546836 - RNA, 21 nt, Artificial Sequence
  Synthetic
agucuauaaugaugcauaauc

SEQ ID NO: 546837 - RNA, 22 nt, Artificial Sequence
  Synthetic
gagucuauaaugaugcauaauc

SEQ ID NO: 546838 - RNA, 23 nt, Artificial Sequence
  Synthetic
ugagucuauaaugaugcauaauc

SEQ ID NO: 546839 - RNA, 24 nt, Artificial Sequence
  Synthetic
uugagucuauaaugaugcauaauc

SEQ ID NO: 546840 - RNA, 18 nt, Artificial Sequence
  Synthetic
cuuguuuagcauauaauc

SEQ ID NO: 546841 - RNA, 19 nt, Artificial Sequence
  Synthetic
ccuuguuuagcauauaauc

SEQ ID NO: 546842 - RNA, 20 nt, Artificial Sequence
  Synthetic
cccuuguuuagcauauaauc

SEQ ID NO: 546843 - RNA, 21 nt, Artificial Sequence
  Synthetic
ccccuuguuuagcauauaauc

SEQ ID NO: 546844 - RNA, 22 nt, Artificial Sequence
  Synthetic
accccuuguuuagcauauaauc

SEQ ID NO: 546845 - RNA, 23 nt, Artificial Sequence
  Synthetic
caccccuuguuuagcauauaauc

SEQ ID NO: 546846 - RNA, 24 nt, Artificial Sequence
  Synthetic
ccaccccuuguuuagcauauaauc

SEQ ID NO: 546847 - RNA, 18 nt, Artificial Sequence
  Synthetic
uauuaggugcauauaauc

SEQ ID NO: 546848 - RNA, 19 nt, Artificial Sequence
  Synthetic
auauuaggugcauauaauc

SEQ ID NO: 546849 - RNA, 20 nt, Artificial Sequence
  Synthetic
uauauuaggugcauauaauc

SEQ ID NO: 546850 - RNA, 21 nt, Artificial Sequence
  Synthetic
auauauuaggugcauauaauc

SEQ ID NO: 546851 - RNA, 22 nt, Artificial Sequence
  Synthetic
uauauauuaggugcauauaauc

SEQ ID NO: 546852 - RNA, 23 nt, Artificial Sequence
  Synthetic
uuauauauuaggugcauauaauc

SEQ ID NO: 546853 - RNA, 24 nt, Artificial Sequence
  Synthetic
cuuauauauuaggugcauauaauc

SEQ ID NO: 546854 - RNA, 18 nt, Artificial Sequence
  Synthetic
uuuuaucuaucuauaauc

SEQ ID NO: 546855 - RNA, 19 nt, Artificial Sequence
  Synthetic
auuuuaucuaucuauaauc

SEQ ID NO: 546856 - RNA, 20 nt, Artificial Sequence
  Synthetic
uauuuuaucuaucuauaauc

SEQ ID NO: 546857 - RNA, 21 nt, Artificial Sequence
  Synthetic
uuauuuuaucuaucuauaauc

SEQ ID NO: 546858 - RNA, 22 nt, Artificial Sequence
  Synthetic
uuuauuuuaucuaucuauaauc

SEQ ID NO: 546859 - RNA, 23 nt, Artificial Sequence
  Synthetic
cuuuauuuuaucuaucuauaauc

SEQ ID NO: 546860 - RNA, 24 nt, Artificial Sequence
  Synthetic
ucuuuauuuuaucuaucuauaauc

SEQ ID NO: 546861 - RNA, 18 nt, Artificial Sequence
  Synthetic
uacacauuuaguauaauc

SEQ ID NO: 546862 - RNA, 19 nt, Artificial Sequence
  Synthetic
auacacauuuaguauaauc

SEQ ID NO: 546863 - RNA, 20 nt, Artificial Sequence
  Synthetic
gauacacauuuaguauaauc

SEQ ID NO: 546864 - RNA, 21 nt, Artificial Sequence
  Synthetic
cgauacacauuuaguauaauc

SEQ ID NO: 546865 - RNA, 22 nt, Artificial Sequence
  Synthetic
gcgauacacauuuaguauaauc

SEQ ID NO: 546866 - RNA, 23 nt, Artificial Sequence
  Synthetic
agcgauacacauuuaguauaauc

SEQ ID NO: 546867 - RNA, 24 nt, Artificial Sequence
  Synthetic
aagcgauacacauuuaguauaauc

SEQ ID NO: 546868 - RNA, 18 nt, Artificial Sequence
  Synthetic
aaaagacuacuuauaauc

SEQ ID NO: 546869 - RNA, 19 nt, Artificial Sequence
  Synthetic
aaaaagacuacuuauaauc

SEQ ID NO: 546870 - RNA, 20 nt, Artificial Sequence
  Synthetic
aaaaaagacuacuuauaauc

SEQ ID NO: 546871 - RNA, 21 nt, Artificial Sequence
  Synthetic
aaaaaaagacuacuuauaauc

SEQ ID NO: 546872 - RNA, 22 nt, Artificial Sequence
  Synthetic
aaaaaaaagacuacuuauaauc

SEQ ID NO: 546873 - RNA, 23 nt, Artificial Sequence
  Synthetic
aaaaaaaaagacuacuuauaauc

SEQ ID NO: 546874 - RNA, 24 nt, Artificial Sequence
  Synthetic
aaaaaaaaaagacuacuuauaauc

SEQ ID NO: 546875 - RNA, 18 nt, Artificial Sequence
  Synthetic
ggcaucacucaacuaauc

SEQ ID NO: 546876 - RNA, 19 nt, Artificial Sequence
  Synthetic
aggcaucacucaacuaauc

SEQ ID NO: 546877 - RNA, 20 nt, Artificial Sequence
  Synthetic
aaggcaucacucaacuaauc

SEQ ID NO: 546878 - RNA, 21 nt, Artificial Sequence
  Synthetic
uaaggcaucacucaacuaauc

SEQ ID NO: 546879 - RNA, 22 nt, Artificial Sequence
  Synthetic
uuaaggcaucacucaacuaauc

SEQ ID NO: 546880 - RNA, 23 nt, Artificial Sequence
  Synthetic
uuuaaggcaucacucaacuaauc

SEQ ID NO: 546881 - RNA, 24 nt, Artificial Sequence
  Synthetic
cuuuaaggcaucacucaacuaauc

SEQ ID NO: 546882 - RNA, 18 nt, Artificial Sequence
  Synthetic
ucccauuuugaacuaauc

SEQ ID NO: 546883 - RNA, 19 nt, Artificial Sequence
  Synthetic
uucccauuuugaacuaauc

SEQ ID NO: 546884 - RNA, 20 nt, Artificial Sequence
  Synthetic
cuucccauuuugaacuaauc

SEQ ID NO: 546885 - RNA, 21 nt, Artificial Sequence
  Synthetic
ucuucccauuuugaacuaauc

SEQ ID NO: 546886 - RNA, 22 nt, Artificial Sequence
  Synthetic
cucuucccauuuugaacuaauc

SEQ ID NO: 546887 - RNA, 23 nt, Artificial Sequence
  Synthetic
ucucuucccauuuugaacuaauc

SEQ ID NO: 546888 - RNA, 24 nt, Artificial Sequence
  Synthetic
cucucuucccauuuugaacuaauc

SEQ ID NO: 546889 - RNA, 18 nt, Artificial Sequence
  Synthetic
uugaguagauuacuaauc

SEQ ID NO: 546890 - RNA, 19 nt, Artificial Sequence
  Synthetic
auugaguagauuacuaauc

SEQ ID NO: 546891 - RNA, 20 nt, Artificial Sequence
  Synthetic
uauugaguagauuacuaauc

SEQ ID NO: 546892 - RNA, 21 nt, Artificial Sequence
  Synthetic
uuauugaguagauuacuaauc

SEQ ID NO: 546893 - RNA, 22 nt, Artificial Sequence
  Synthetic
uuuauugaguagauuacuaauc

SEQ ID NO: 546894 - RNA, 23 nt, Artificial Sequence
  Synthetic
auuuauugaguagauuacuaauc

SEQ ID NO: 546895 - RNA, 24 nt, Artificial Sequence
  Synthetic
uauuuauugaguagauuacuaauc

SEQ ID NO: 546896 - RNA, 18 nt, Artificial Sequence
  Synthetic
cuaagccaaagccuaauc

SEQ ID NO: 546897 - RNA, 19 nt, Artificial Sequence
  Synthetic
ccuaagccaaagccuaauc

SEQ ID NO: 546898 - RNA, 20 nt, Artificial Sequence
  Synthetic
uccuaagccaaagccuaauc

SEQ ID NO: 546899 - RNA, 21 nt, Artificial Sequence
  Synthetic
cuccuaagccaaagccuaauc

SEQ ID NO: 546900 - RNA, 22 nt, Artificial Sequence
  Synthetic
ucuccuaagccaaagccuaauc

SEQ ID NO: 546901 - RNA, 23 nt, Artificial Sequence
  Synthetic
uucuccuaagccaaagccuaauc

SEQ ID NO: 546902 - RNA, 24 nt, Artificial Sequence
  Synthetic
auucuccuaagccaaagccuaauc

SEQ ID NO: 546903 - RNA, 18 nt, Artificial Sequence
  Synthetic
uauaggacagugcuaauc

SEQ ID NO: 546904 - RNA, 19 nt, Artificial Sequence
  Synthetic
cuauaggacagugcuaauc

SEQ ID NO: 546905 - RNA, 20 nt, Artificial Sequence
  Synthetic
ucuauaggacagugcuaauc

SEQ ID NO: 546906 - RNA, 21 nt, Artificial Sequence
  Synthetic
uucuauaggacagugcuaauc

SEQ ID NO: 546907 - RNA, 22 nt, Artificial Sequence
  Synthetic
guucuauaggacagugcuaauc

SEQ ID NO: 546908 - RNA, 23 nt, Artificial Sequence
  Synthetic
aguucuauaggacagugcuaauc

SEQ ID NO: 546909 - RNA, 24 nt, Artificial Sequence
  Synthetic
aaguucuauaggacagugcuaauc

SEQ ID NO: 546910 - RNA, 18 nt, Artificial Sequence
  Synthetic
ucuugaaagcaucuaauc

SEQ ID NO: 546911 - RNA, 19 nt, Artificial Sequence
  Synthetic
uucuugaaagcaucuaauc

SEQ ID NO: 546912 - RNA, 20 nt, Artificial Sequence
  Synthetic
uuucuugaaagcaucuaauc

SEQ ID NO: 546913 - RNA, 21 nt, Artificial Sequence
  Synthetic
guuucuugaaagcaucuaauc

SEQ ID NO: 546914 - RNA, 22 nt, Artificial Sequence
  Synthetic
uguuucuugaaagcaucuaauc

SEQ ID NO: 546915 - RNA, 23 nt, Artificial Sequence
  Synthetic
cuguuucuugaaagcaucuaauc

SEQ ID NO: 546916 - RNA, 24 nt, Artificial Sequence
  Synthetic
ucuguuucuugaaagcaucuaauc

SEQ ID NO: 546917 - RNA, 18 nt, Artificial Sequence
  Synthetic
uauagcuuuccucuaauc

SEQ ID NO: 546918 - RNA, 19 nt, Artificial Sequence
  Synthetic
guauagcuuuccucuaauc

SEQ ID NO: 546919 - RNA, 20 nt, Artificial Sequence
  Synthetic
aguauagcuuuccucuaauc

SEQ ID NO: 546920 - RNA, 21 nt, Artificial Sequence
  Synthetic
uaguauagcuuuccucuaauc

SEQ ID NO: 546921 - RNA, 22 nt, Artificial Sequence
  Synthetic
auaguauagcuuuccucuaauc

SEQ ID NO: 546922 - RNA, 23 nt, Artificial Sequence
  Synthetic
gauaguauagcuuuccucuaauc

SEQ ID NO: 546923 - RNA, 24 nt, Artificial Sequence
  Synthetic
agauaguauagcuuuccucuaauc

SEQ ID NO: 546924 - RNA, 18 nt, Artificial Sequence
  Synthetic
guuuaagacuuucuaauc

SEQ ID NO: 546925 - RNA, 19 nt, Artificial Sequence
  Synthetic
uguuuaagacuuucuaauc

SEQ ID NO: 546926 - RNA, 20 nt, Artificial Sequence
  Synthetic
auguuuaagacuuucuaauc

SEQ ID NO: 546927 - RNA, 21 nt, Artificial Sequence
  Synthetic
aauguuuaagacuuucuaauc

SEQ ID NO: 546928 - RNA, 22 nt, Artificial Sequence
  Synthetic
aaauguuuaagacuuucuaauc

SEQ ID NO: 546929 - RNA, 23 nt, Artificial Sequence
  Synthetic
aaaauguuuaagacuuucuaauc

SEQ ID NO: 546930 - RNA, 24 nt, Artificial Sequence
  Synthetic
uaaaauguuuaagacuuucuaauc

SEQ ID NO: 546931 - RNA, 18 nt, Artificial Sequence
  Synthetic
ucagugccaacaguaauc

SEQ ID NO: 546932 - RNA, 19 nt, Artificial Sequence
  Synthetic
aucagugccaacaguaauc

SEQ ID NO: 546933 - RNA, 20 nt, Artificial Sequence
  Synthetic
gaucagugccaacaguaauc

SEQ ID NO: 546934 - RNA, 21 nt, Artificial Sequence
  Synthetic
agaucagugccaacaguaauc

SEQ ID NO: 546935 - RNA, 22 nt, Artificial Sequence
  Synthetic
cagaucagugccaacaguaauc

SEQ ID NO: 546936 - RNA, 23 nt, Artificial Sequence
  Synthetic
ucagaucagugccaacaguaauc

SEQ ID NO: 546937 - RNA, 24 nt, Artificial Sequence
  Synthetic
uucagaucagugccaacaguaauc

SEQ ID NO: 546938 - RNA, 18 nt, Artificial Sequence
  Synthetic
guugccuugaagguaauc

SEQ ID NO: 546939 - RNA, 19 nt, Artificial Sequence
  Synthetic
uguugccuugaagguaauc

SEQ ID NO: 546940 - RNA, 20 nt, Artificial Sequence
  Synthetic
guguugccuugaagguaauc

SEQ ID NO: 546941 - RNA, 21 nt, Artificial Sequence
  Synthetic
gguguugccuugaagguaauc

SEQ ID NO: 546942 - RNA, 22 nt, Artificial Sequence
  Synthetic
agguguugccuugaagguaauc

SEQ ID NO: 546943 - RNA, 23 nt, Artificial Sequence
  Synthetic
uagguguugccuugaagguaauc

SEQ ID NO: 546944 - RNA, 24 nt, Artificial Sequence
  Synthetic
uuagguguugccuugaagguaauc

SEQ ID NO: 546945 - RNA, 18 nt, Artificial Sequence
  Synthetic
uaguuuagucagguaauc

SEQ ID NO: 546946 - RNA, 19 nt, Artificial Sequence
  Synthetic
uuaguuuagucagguaauc

SEQ ID NO: 546947 - RNA, 20 nt, Artificial Sequence
  Synthetic
auuaguuuagucagguaauc

SEQ ID NO: 546948 - RNA, 21 nt, Artificial Sequence
  Synthetic
cauuaguuuagucagguaauc

SEQ ID NO: 546949 - RNA, 22 nt, Artificial Sequence
  Synthetic
ucauuaguuuagucagguaauc

SEQ ID NO: 546950 - RNA, 23 nt, Artificial Sequence
  Synthetic
uucauuaguuuagucagguaauc

SEQ ID NO: 546951 - RNA, 24 nt, Artificial Sequence
  Synthetic
uuucauuaguuuagucagguaauc

SEQ ID NO: 546952 - RNA, 18 nt, Artificial Sequence
  Synthetic
gggauaggcaggguaauc

SEQ ID NO: 546953 - RNA, 19 nt, Artificial Sequence
  Synthetic
agggauaggcaggguaauc

SEQ ID NO: 546954 - RNA, 20 nt, Artificial Sequence
  Synthetic
gagggauaggcaggguaauc

SEQ ID NO: 546955 - RNA, 21 nt, Artificial Sequence
  Synthetic
ggagggauaggcaggguaauc

SEQ ID NO: 546956 - RNA, 22 nt, Artificial Sequence
  Synthetic
aggagggauaggcaggguaauc

SEQ ID NO: 546957 - RNA, 23 nt, Artificial Sequence
  Synthetic
uaggagggauaggcaggguaauc

SEQ ID NO: 546958 - RNA, 24 nt, Artificial Sequence
  Synthetic
guaggagggauaggcaggguaauc

SEQ ID NO: 546959 - RNA, 18 nt, Artificial Sequence
  Synthetic
ucaucuagaacuguaauc

SEQ ID NO: 546960 - RNA, 19 nt, Artificial Sequence
  Synthetic
cucaucuagaacuguaauc

SEQ ID NO: 546961 - RNA, 20 nt, Artificial Sequence
  Synthetic
ucucaucuagaacuguaauc

SEQ ID NO: 546962 - RNA, 21 nt, Artificial Sequence
  Synthetic
aucucaucuagaacuguaauc

SEQ ID NO: 546963 - RNA, 22 nt, Artificial Sequence
  Synthetic
aaucucaucuagaacuguaauc

SEQ ID NO: 546964 - RNA, 23 nt, Artificial Sequence
  Synthetic
aaaucucaucuagaacuguaauc

SEQ ID NO: 546965 - RNA, 24 nt, Artificial Sequence
  Synthetic
caaaucucaucuagaacuguaauc

SEQ ID NO: 546966 - RNA, 18 nt, Artificial Sequence
  Synthetic
aacaugauggguguaauc

SEQ ID NO: 546967 - RNA, 19 nt, Artificial Sequence
  Synthetic
gaacaugauggguguaauc

SEQ ID NO: 546968 - RNA, 20 nt, Artificial Sequence
  Synthetic
agaacaugauggguguaauc

SEQ ID NO: 546969 - RNA, 21 nt, Artificial Sequence
  Synthetic
uagaacaugauggguguaauc

SEQ ID NO: 546970 - RNA, 22 nt, Artificial Sequence
  Synthetic
cuagaacaugauggguguaauc

SEQ ID NO: 546971 - RNA, 23 nt, Artificial Sequence
  Synthetic
ucuagaacaugauggguguaauc

SEQ ID NO: 546972 - RNA, 24 nt, Artificial Sequence
  Synthetic
cucuagaacaugauggguguaauc

SEQ ID NO: 546973 - RNA, 18 nt, Artificial Sequence
  Synthetic
uauauuuauauuguaauc

SEQ ID NO: 546974 - RNA, 19 nt, Artificial Sequence
  Synthetic
auauauuuauauuguaauc

SEQ ID NO: 546975 - RNA, 20 nt, Artificial Sequence
  Synthetic
aauauauuuauauuguaauc

SEQ ID NO: 546976 - RNA, 21 nt, Artificial Sequence
  Synthetic
gaauauauuuauauuguaauc

SEQ ID NO: 546977 - RNA, 22 nt, Artificial Sequence
  Synthetic
ugaauauauuuauauuguaauc

SEQ ID NO: 546978 - RNA, 23 nt, Artificial Sequence
  Synthetic
cugaauauauuuauauuguaauc

SEQ ID NO: 546979 - RNA, 24 nt, Artificial Sequence
  Synthetic
ucugaauauauuuauauuguaauc

SEQ ID NO: 546980 - RNA, 18 nt, Artificial Sequence
  Synthetic
ugugguuaaaaauuaauc

SEQ ID NO: 546981 - RNA, 19 nt, Artificial Sequence
  Synthetic
gugugguuaaaaauuaauc

SEQ ID NO: 546982 - RNA, 20 nt, Artificial Sequence
  Synthetic
ugugugguuaaaaauuaauc

SEQ ID NO: 546983 - RNA, 21 nt, Artificial Sequence
  Synthetic
augugugguuaaaaauuaauc

SEQ ID NO: 546984 - RNA, 22 nt, Artificial Sequence
  Synthetic
aaugugugguuaaaaauuaauc

SEQ ID NO: 546985 - RNA, 23 nt, Artificial Sequence
  Synthetic
caaugugugguuaaaaauuaauc

SEQ ID NO: 546986 - RNA, 24 nt, Artificial Sequence
  Synthetic
gcaaugugugguuaaaaauuaauc

SEQ ID NO: 546987 - RNA, 18 nt, Artificial Sequence
  Synthetic
aggucgcccaccuuaauc

SEQ ID NO: 546988 - RNA, 19 nt, Artificial Sequence
  Synthetic
aaggucgcccaccuuaauc

SEQ ID NO: 546989 - RNA, 20 nt, Artificial Sequence
  Synthetic
caaggucgcccaccuuaauc

SEQ ID NO: 546990 - RNA, 21 nt, Artificial Sequence
  Synthetic
ccaaggucgcccaccuuaauc

SEQ ID NO: 546991 - RNA, 22 nt, Artificial Sequence
  Synthetic
cccaaggucgcccaccuuaauc

SEQ ID NO: 546992 - RNA, 23 nt, Artificial Sequence
  Synthetic
ucccaaggucgcccaccuuaauc

SEQ ID NO: 546993 - RNA, 24 nt, Artificial Sequence
  Synthetic
uucccaaggucgcccaccuuaauc

SEQ ID NO: 546994 - RNA, 18 nt, Artificial Sequence
  Synthetic
ugcgauggggucuuaauc

SEQ ID NO: 546995 - RNA, 19 nt, Artificial Sequence
  Synthetic
gugcgauggggucuuaauc

SEQ ID NO: 546996 - RNA, 20 nt, Artificial Sequence
  Synthetic
ugugcgauggggucuuaauc

SEQ ID NO: 546997 - RNA, 21 nt, Artificial Sequence
  Synthetic
gugugcgauggggucuuaauc

SEQ ID NO: 546998 - RNA, 22 nt, Artificial Sequence
  Synthetic
ugugugcgauggggucuuaauc

SEQ ID NO: 546999 - RNA, 23 nt, Artificial Sequence
  Synthetic
cugugugcgauggggucuuaauc

SEQ ID NO: 547000 - RNA, 24 nt, Artificial Sequence
  Synthetic
acugugugcgauggggucuuaauc

SEQ ID NO: 547001 - RNA, 18 nt, Artificial Sequence
  Synthetic
gcugcaggaaaguuaauc

SEQ ID NO: 547002 - RNA, 19 nt, Artificial Sequence
  Synthetic
ugcugcaggaaaguuaauc

SEQ ID NO: 547003 - RNA, 20 nt, Artificial Sequence
  Synthetic
augcugcaggaaaguuaauc

SEQ ID NO: 547004 - RNA, 21 nt, Artificial Sequence
  Synthetic
caugcugcaggaaaguuaauc

SEQ ID NO: 547005 - RNA, 22 nt, Artificial Sequence
  Synthetic
acaugcugcaggaaaguuaauc

SEQ ID NO: 547006 - RNA, 23 nt, Artificial Sequence
  Synthetic
aacaugcugcaggaaaguuaauc

SEQ ID NO: 547007 - RNA, 24 nt, Artificial Sequence
  Synthetic
gaacaugcugcaggaaaguuaauc

SEQ ID NO: 547008 - RNA, 18 nt, Artificial Sequence
  Synthetic
aaacuauacaaguuaauc

SEQ ID NO: 547009 - RNA, 19 nt, Artificial Sequence
  Synthetic
uaaacuauacaaguuaauc

SEQ ID NO: 547010 - RNA, 20 nt, Artificial Sequence
  Synthetic
uuaaacuauacaaguuaauc

SEQ ID NO: 547011 - RNA, 21 nt, Artificial Sequence
  Synthetic
auuaaacuauacaaguuaauc

SEQ ID NO: 547012 - RNA, 22 nt, Artificial Sequence
  Synthetic
aauuaaacuauacaaguuaauc

SEQ ID NO: 547013 - RNA, 23 nt, Artificial Sequence
  Synthetic
gaauuaaacuauacaaguuaauc

SEQ ID NO: 547014 - RNA, 24 nt, Artificial Sequence
  Synthetic
ugaauuaaacuauacaaguuaauc

SEQ ID NO: 547015 - RNA, 18 nt, Artificial Sequence
  Synthetic
cgcucacagguguuaauc

SEQ ID NO: 547016 - RNA, 19 nt, Artificial Sequence
  Synthetic
ccgcucacagguguuaauc

SEQ ID NO: 547017 - RNA, 20 nt, Artificial Sequence
  Synthetic
uccgcucacagguguuaauc

SEQ ID NO: 547018 - RNA, 21 nt, Artificial Sequence
  Synthetic
cuccgcucacagguguuaauc

SEQ ID NO: 547019 - RNA, 22 nt, Artificial Sequence
  Synthetic
ccuccgcucacagguguuaauc

SEQ ID NO: 547020 - RNA, 23 nt, Artificial Sequence
  Synthetic
uccuccgcucacagguguuaauc

SEQ ID NO: 547021 - RNA, 24 nt, Artificial Sequence
  Synthetic
uuccuccgcucacagguguuaauc

SEQ ID NO: 547022 - RNA, 18 nt, Artificial Sequence
  Synthetic
gugggagguaauuuaauc

SEQ ID NO: 547023 - RNA, 19 nt, Artificial Sequence
  Synthetic
agugggagguaauuuaauc

SEQ ID NO: 547024 - RNA, 20 nt, Artificial Sequence
  Synthetic
cagugggagguaauuuaauc

SEQ ID NO: 547025 - RNA, 21 nt, Artificial Sequence
  Synthetic
ccagugggagguaauuuaauc

SEQ ID NO: 547026 - RNA, 22 nt, Artificial Sequence
  Synthetic
cccagugggagguaauuuaauc

SEQ ID NO: 547027 - RNA, 23 nt, Artificial Sequence
  Synthetic
acccagugggagguaauuuaauc

SEQ ID NO: 547028 - RNA, 24 nt, Artificial Sequence
  Synthetic
gacccagugggagguaauuuaauc

SEQ ID NO: 547029 - RNA, 18 nt, Artificial Sequence
  Synthetic
uaccauuuuaauuuaauc

SEQ ID NO: 547030 - RNA, 19 nt, Artificial Sequence
  Synthetic
uuaccauuuuaauuuaauc

SEQ ID NO: 547031 - RNA, 20 nt, Artificial Sequence
  Synthetic
auuaccauuuuaauuuaauc

SEQ ID NO: 547032 - RNA, 21 nt, Artificial Sequence
  Synthetic
aauuaccauuuuaauuuaauc

SEQ ID NO: 547033 - RNA, 22 nt, Artificial Sequence
  Synthetic
uaauuaccauuuuaauuuaauc

SEQ ID NO: 547034 - RNA, 23 nt, Artificial Sequence
  Synthetic
auaauuaccauuuuaauuuaauc

SEQ ID NO: 547035 - RNA, 24 nt, Artificial Sequence
  Synthetic
cauaauuaccauuuuaauuuaauc

SEQ ID NO: 547036 - RNA, 18 nt, Artificial Sequence
  Synthetic
uuguuuuguuguuuaauc

SEQ ID NO: 547037 - RNA, 19 nt, Artificial Sequence
  Synthetic
uuuguuuuguuguuuaauc

SEQ ID NO: 547038 - RNA, 20 nt, Artificial Sequence
  Synthetic
auuuguuuuguuguuuaauc

SEQ ID NO: 547039 - RNA, 21 nt, Artificial Sequence
  Synthetic
aauuuguuuuguuguuuaauc

SEQ ID NO: 547040 - RNA, 22 nt, Artificial Sequence
  Synthetic
uaauuuguuuuguuguuuaauc

SEQ ID NO: 547041 - RNA, 23 nt, Artificial Sequence
  Synthetic
uuaauuuguuuuguuguuuaauc

SEQ ID NO: 547042 - RNA, 24 nt, Artificial Sequence
  Synthetic
auuaauuuguuuuguuguuuaauc

SEQ ID NO: 547043 - RNA, 18 nt, Artificial Sequence
  Synthetic
uucuuuugaauuuuaauc

SEQ ID NO: 547044 - RNA, 19 nt, Artificial Sequence
  Synthetic
cuucuuuugaauuuuaauc

SEQ ID NO: 547045 - RNA, 20 nt, Artificial Sequence
  Synthetic
acuucuuuugaauuuuaauc

SEQ ID NO: 547046 - RNA, 21 nt, Artificial Sequence
  Synthetic
aacuucuuuugaauuuuaauc

SEQ ID NO: 547047 - RNA, 22 nt, Artificial Sequence
  Synthetic
uaacuucuuuugaauuuuaauc

SEQ ID NO: 547048 - RNA, 23 nt, Artificial Sequence
  Synthetic
uuaacuucuuuugaauuuuaauc

SEQ ID NO: 547049 - RNA, 24 nt, Artificial Sequence
  Synthetic
uuuaacuucuuuugaauuuuaauc

SEQ ID NO: 547050 - RNA, 18 nt, Artificial Sequence
  Synthetic
aggaagauaauuuuaauc

SEQ ID NO: 547051 - RNA, 19 nt, Artificial Sequence
  Synthetic
uaggaagauaauuuuaauc

SEQ ID NO: 547052 - RNA, 20 nt, Artificial Sequence
  Synthetic
guaggaagauaauuuuaauc

SEQ ID NO: 547053 - RNA, 21 nt, Artificial Sequence
  Synthetic
uguaggaagauaauuuuaauc

SEQ ID NO: 547054 - RNA, 22 nt, Artificial Sequence
  Synthetic
auguaggaagauaauuuuaauc

SEQ ID NO: 547055 - RNA, 23 nt, Artificial Sequence
  Synthetic
uauguaggaagauaauuuuaauc

SEQ ID NO: 547056 - RNA, 24 nt, Artificial Sequence
  Synthetic
uuauguaggaagauaauuuuaauc

SEQ ID NO: 547057 - RNA, 18 nt, Artificial Sequence
  Synthetic
guguauaacauuuuaauc

SEQ ID NO: 547058 - RNA, 19 nt, Artificial Sequence
  Synthetic
gguguauaacauuuuaauc

SEQ ID NO: 547059 - RNA, 20 nt, Artificial Sequence
  Synthetic
ugguguauaacauuuuaauc

SEQ ID NO: 547060 - RNA, 21 nt, Artificial Sequence
  Synthetic
gugguguauaacauuuuaauc

SEQ ID NO: 547061 - RNA, 22 nt, Artificial Sequence
  Synthetic
ugugguguauaacauuuuaauc

SEQ ID NO: 547062 - RNA, 23 nt, Artificial Sequence
  Synthetic
augugguguauaacauuuuaauc

SEQ ID NO: 547063 - RNA, 24 nt, Artificial Sequence
  Synthetic
gaugugguguauaacauuuuaauc

SEQ ID NO: 547064 - RNA, 18 nt, Artificial Sequence
  Synthetic
gguuuugaacacaacauc

SEQ ID NO: 547065 - RNA, 19 nt, Artificial Sequence
  Synthetic
agguuuugaacacaacauc

SEQ ID NO: 547066 - RNA, 20 nt, Artificial Sequence
  Synthetic
aagguuuugaacacaacauc

SEQ ID NO: 547067 - RNA, 21 nt, Artificial Sequence
  Synthetic
aaagguuuugaacacaacauc

SEQ ID NO: 547068 - RNA, 22 nt, Artificial Sequence
  Synthetic
gaaagguuuugaacacaacauc

SEQ ID NO: 547069 - RNA, 23 nt, Artificial Sequence
  Synthetic
agaaagguuuugaacacaacauc

SEQ ID NO: 547070 - RNA, 24 nt, Artificial Sequence
  Synthetic
uagaaagguuuugaacacaacauc

SEQ ID NO: 547071 - RNA, 18 nt, Artificial Sequence
  Synthetic
accagccuggccaacauc

SEQ ID NO: 547072 - RNA, 19 nt, Artificial Sequence
  Synthetic
gaccagccuggccaacauc

SEQ ID NO: 547073 - RNA, 20 nt, Artificial Sequence
  Synthetic
agaccagccuggccaacauc

SEQ ID NO: 547074 - RNA, 21 nt, Artificial Sequence
  Synthetic
gagaccagccuggccaacauc

SEQ ID NO: 547075 - RNA, 22 nt, Artificial Sequence
  Synthetic
cgagaccagccuggccaacauc

SEQ ID NO: 547076 - RNA, 23 nt, Artificial Sequence
  Synthetic
ucgagaccagccuggccaacauc

SEQ ID NO: 547077 - RNA, 24 nt, Artificial Sequence
  Synthetic
uucgagaccagccuggccaacauc

SEQ ID NO: 547078 - RNA, 18 nt, Artificial Sequence
  Synthetic
uaauguaauggcaacauc

SEQ ID NO: 547079 - RNA, 19 nt, Artificial Sequence
  Synthetic
uuaauguaauggcaacauc

SEQ ID NO: 547080 - RNA, 20 nt, Artificial Sequence
  Synthetic
uuuaauguaauggcaacauc

SEQ ID NO: 547081 - RNA, 21 nt, Artificial Sequence
  Synthetic
guuuaauguaauggcaacauc

SEQ ID NO: 547082 - RNA, 22 nt, Artificial Sequence
  Synthetic
uguuuaauguaauggcaacauc

SEQ ID NO: 547083 - RNA, 23 nt, Artificial Sequence
  Synthetic
uuguuuaauguaauggcaacauc

SEQ ID NO: 547084 - RNA, 24 nt, Artificial Sequence
  Synthetic
auuguuuaauguaauggcaacauc

SEQ ID NO: 547085 - RNA, 18 nt, Artificial Sequence
  Synthetic
uauggaugcuugaacauc

SEQ ID NO: 547086 - RNA, 19 nt, Artificial Sequence
  Synthetic
uuauggaugcuugaacauc

SEQ ID NO: 547087 - RNA, 20 nt, Artificial Sequence
  Synthetic
uuuauggaugcuugaacauc

SEQ ID NO: 547088 - RNA, 21 nt, Artificial Sequence
  Synthetic
uuuuauggaugcuugaacauc

SEQ ID NO: 547089 - RNA, 22 nt, Artificial Sequence
  Synthetic
auuuuauggaugcuugaacauc

SEQ ID NO: 547090 - RNA, 23 nt, Artificial Sequence
  Synthetic
uauuuuauggaugcuugaacauc

SEQ ID NO: 547091 - RNA, 24 nt, Artificial Sequence
  Synthetic
auauuuuauggaugcuugaacauc

SEQ ID NO: 547092 - RNA, 18 nt, Artificial Sequence
  Synthetic
gugcaauuuaauaacauc

SEQ ID NO: 547093 - RNA, 19 nt, Artificial Sequence
  Synthetic
agugcaauuuaauaacauc

SEQ ID NO: 547094 - RNA, 20 nt, Artificial Sequence
  Synthetic
uagugcaauuuaauaacauc

SEQ ID NO: 547095 - RNA, 21 nt, Artificial Sequence
  Synthetic
auagugcaauuuaauaacauc

SEQ ID NO: 547096 - RNA, 22 nt, Artificial Sequence
  Synthetic
aauagugcaauuuaauaacauc

SEQ ID NO: 547097 - RNA, 23 nt, Artificial Sequence
  Synthetic
uaauagugcaauuuaauaacauc

SEQ ID NO: 547098 - RNA, 24 nt, Artificial Sequence
  Synthetic
auaauagugcaauuuaauaacauc

SEQ ID NO: 547099 - RNA, 18 nt, Artificial Sequence
  Synthetic
guaccagguucuaacauc

SEQ ID NO: 547100 - RNA, 19 nt, Artificial Sequence
  Synthetic
aguaccagguucuaacauc

SEQ ID NO: 547101 - RNA, 20 nt, Artificial Sequence
  Synthetic
aaguaccagguucuaacauc

SEQ ID NO: 547102 - RNA, 21 nt, Artificial Sequence
  Synthetic
aaaguaccagguucuaacauc

SEQ ID NO: 547103 - RNA, 22 nt, Artificial Sequence
  Synthetic
aaaaguaccagguucuaacauc

SEQ ID NO: 547104 - RNA, 23 nt, Artificial Sequence
  Synthetic
caaaaguaccagguucuaacauc

SEQ ID NO: 547105 - RNA, 24 nt, Artificial Sequence
  Synthetic
ccaaaaguaccagguucuaacauc

SEQ ID NO: 547106 - RNA, 18 nt, Artificial Sequence
  Synthetic
ugaccaucaaguaacauc

SEQ ID NO: 547107 - RNA, 19 nt, Artificial Sequence
  Synthetic
gugaccaucaaguaacauc

SEQ ID NO: 547108 - RNA, 20 nt, Artificial Sequence
  Synthetic
ugugaccaucaaguaacauc

SEQ ID NO: 547109 - RNA, 21 nt, Artificial Sequence
  Synthetic
gugugaccaucaaguaacauc

SEQ ID NO: 547110 - RNA, 22 nt, Artificial Sequence
  Synthetic
ggugugaccaucaaguaacauc

SEQ ID NO: 547111 - RNA, 23 nt, Artificial Sequence
  Synthetic
aggugugaccaucaaguaacauc

SEQ ID NO: 547112 - RNA, 24 nt, Artificial Sequence
  Synthetic
uaggugugaccaucaaguaacauc

SEQ ID NO: 547113 - RNA, 18 nt, Artificial Sequence
  Synthetic
ucuucaggaaaacacauc

SEQ ID NO: 547114 - RNA, 19 nt, Artificial Sequence
  Synthetic
uucuucaggaaaacacauc

SEQ ID NO: 547115 - RNA, 20 nt, Artificial Sequence
  Synthetic
uuucuucaggaaaacacauc

SEQ ID NO: 547116 - RNA, 21 nt, Artificial Sequence
  Synthetic
auuucuucaggaaaacacauc

SEQ ID NO: 547117 - RNA, 22 nt, Artificial Sequence
  Synthetic
cauuucuucaggaaaacacauc

SEQ ID NO: 547118 - RNA, 23 nt, Artificial Sequence
  Synthetic
ucauuucuucaggaaaacacauc

SEQ ID NO: 547119 - RNA, 24 nt, Artificial Sequence
  Synthetic
aucauuucuucaggaaaacacauc

SEQ ID NO: 547120 - RNA, 18 nt, Artificial Sequence
  Synthetic
aaaggggauuaacacauc

SEQ ID NO: 547121 - RNA, 19 nt, Artificial Sequence
  Synthetic
caaaggggauuaacacauc

SEQ ID NO: 547122 - RNA, 20 nt, Artificial Sequence
  Synthetic
gcaaaggggauuaacacauc

SEQ ID NO: 547123 - RNA, 21 nt, Artificial Sequence
  Synthetic
agcaaaggggauuaacacauc

SEQ ID NO: 547124 - RNA, 22 nt, Artificial Sequence
  Synthetic
gagcaaaggggauuaacacauc

SEQ ID NO: 547125 - RNA, 23 nt, Artificial Sequence
  Synthetic
agagcaaaggggauuaacacauc

SEQ ID NO: 547126 - RNA, 24 nt, Artificial Sequence
  Synthetic
aagagcaaaggggauuaacacauc

SEQ ID NO: 547127 - RNA, 18 nt, Artificial Sequence
  Synthetic
gaugccacaacacacauc

SEQ ID NO: 547128 - RNA, 19 nt, Artificial Sequence
  Synthetic
ugaugccacaacacacauc

SEQ ID NO: 547129 - RNA, 20 nt, Artificial Sequence
  Synthetic
augaugccacaacacacauc

SEQ ID NO: 547130 - RNA, 21 nt, Artificial Sequence
  Synthetic
uaugaugccacaacacacauc

SEQ ID NO: 547131 - RNA, 22 nt, Artificial Sequence
  Synthetic
auaugaugccacaacacacauc

SEQ ID NO: 547132 - RNA, 23 nt, Artificial Sequence
  Synthetic
aauaugaugccacaacacacauc

SEQ ID NO: 547133 - RNA, 24 nt, Artificial Sequence
  Synthetic
caauaugaugccacaacacacauc

SEQ ID NO: 547134 - RNA, 18 nt, Artificial Sequence
  Synthetic
ucuacagauuuacacauc

SEQ ID NO: 547135 - RNA, 19 nt, Artificial Sequence
  Synthetic
aucuacagauuuacacauc

SEQ ID NO: 547136 - RNA, 20 nt, Artificial Sequence
  Synthetic
gaucuacagauuuacacauc

SEQ ID NO: 547137 - RNA, 21 nt, Artificial Sequence
  Synthetic
ugaucuacagauuuacacauc

SEQ ID NO: 547138 - RNA, 22 nt, Artificial Sequence
  Synthetic
uugaucuacagauuuacacauc

SEQ ID NO: 547139 - RNA, 23 nt, Artificial Sequence
  Synthetic
uuugaucuacagauuuacacauc

SEQ ID NO: 547140 - RNA, 24 nt, Artificial Sequence
  Synthetic
auuugaucuacagauuuacacauc

SEQ ID NO: 547141 - RNA, 18 nt, Artificial Sequence
  Synthetic
gcucuacuaacccacauc

SEQ ID NO: 547142 - RNA, 19 nt, Artificial Sequence
  Synthetic
agcucuacuaacccacauc

SEQ ID NO: 547143 - RNA, 20 nt, Artificial Sequence
  Synthetic
uagcucuacuaacccacauc

SEQ ID NO: 547144 - RNA, 21 nt, Artificial Sequence
  Synthetic
cuagcucuacuaacccacauc

SEQ ID NO: 547145 - RNA, 22 nt, Artificial Sequence
  Synthetic
ccuagcucuacuaacccacauc

SEQ ID NO: 547146 - RNA, 23 nt, Artificial Sequence
  Synthetic
accuagcucuacuaacccacauc

SEQ ID NO: 547147 - RNA, 24 nt, Artificial Sequence
  Synthetic
aaccuagcucuacuaacccacauc

SEQ ID NO: 547148 - RNA, 18 nt, Artificial Sequence
  Synthetic
auuaaaacuucccacauc

SEQ ID NO: 547149 - RNA, 19 nt, Artificial Sequence
  Synthetic
uauuaaaacuucccacauc

SEQ ID NO: 547150 - RNA, 20 nt, Artificial Sequence
  Synthetic
guauuaaaacuucccacauc

SEQ ID NO: 547151 - RNA, 21 nt, Artificial Sequence
  Synthetic
uguauuaaaacuucccacauc

SEQ ID NO: 547152 - RNA, 22 nt, Artificial Sequence
  Synthetic
uuguauuaaaacuucccacauc

SEQ ID NO: 547153 - RNA, 23 nt, Artificial Sequence
  Synthetic
auuguauuaaaacuucccacauc

SEQ ID NO: 547154 - RNA, 24 nt, Artificial Sequence
  Synthetic
aauuguauuaaaacuucccacauc

SEQ ID NO: 547155 - RNA, 18 nt, Artificial Sequence
  Synthetic
gauuugugaggccacauc

SEQ ID NO: 547156 - RNA, 19 nt, Artificial Sequence
  Synthetic
ugauuugugaggccacauc

SEQ ID NO: 547157 - RNA, 20 nt, Artificial Sequence
  Synthetic
augauuugugaggccacauc

SEQ ID NO: 547158 - RNA, 21 nt, Artificial Sequence
  Synthetic
aaugauuugugaggccacauc

SEQ ID NO: 547159 - RNA, 22 nt, Artificial Sequence
  Synthetic
aaaugauuugugaggccacauc

SEQ ID NO: 547160 - RNA, 23 nt, Artificial Sequence
  Synthetic
gaaaugauuugugaggccacauc

SEQ ID NO: 547161 - RNA, 24 nt, Artificial Sequence
  Synthetic
ugaaaugauuugugaggccacauc

SEQ ID NO: 547162 - RNA, 18 nt, Artificial Sequence
  Synthetic
uagaauauuugccacauc

SEQ ID NO: 547163 - RNA, 19 nt, Artificial Sequence
  Synthetic
uuagaauauuugccacauc

SEQ ID NO: 547164 - RNA, 20 nt, Artificial Sequence
  Synthetic
uuuagaauauuugccacauc

SEQ ID NO: 547165 - RNA, 21 nt, Artificial Sequence
  Synthetic
cuuuagaauauuugccacauc

SEQ ID NO: 547166 - RNA, 22 nt, Artificial Sequence
  Synthetic
gcuuuagaauauuugccacauc

SEQ ID NO: 547167 - RNA, 23 nt, Artificial Sequence
  Synthetic
agcuuuagaauauuugccacauc

SEQ ID NO: 547168 - RNA, 24 nt, Artificial Sequence
  Synthetic
uagcuuuagaauauuugccacauc

SEQ ID NO: 547169 - RNA, 18 nt, Artificial Sequence
  Synthetic
gcaagcagcauccacauc

SEQ ID NO: 547170 - RNA, 19 nt, Artificial Sequence
  Synthetic
ugcaagcagcauccacauc

SEQ ID NO: 547171 - RNA, 20 nt, Artificial Sequence
  Synthetic
augcaagcagcauccacauc

SEQ ID NO: 547172 - RNA, 21 nt, Artificial Sequence
  Synthetic
aaugcaagcagcauccacauc

SEQ ID NO: 547173 - RNA, 22 nt, Artificial Sequence
  Synthetic
caaugcaagcagcauccacauc

SEQ ID NO: 547174 - RNA, 23 nt, Artificial Sequence
  Synthetic
ucaaugcaagcagcauccacauc

SEQ ID NO: 547175 - RNA, 24 nt, Artificial Sequence
  Synthetic
aucaaugcaagcagcauccacauc

SEQ ID NO: 547176 - RNA, 18 nt, Artificial Sequence
  Synthetic
aggaugggacagcacauc

SEQ ID NO: 547177 - RNA, 19 nt, Artificial Sequence
  Synthetic
caggaugggacagcacauc

SEQ ID NO: 547178 - RNA, 20 nt, Artificial Sequence
  Synthetic
acaggaugggacagcacauc

SEQ ID NO: 547179 - RNA, 21 nt, Artificial Sequence
  Synthetic
cacaggaugggacagcacauc

SEQ ID NO: 547180 - RNA, 22 nt, Artificial Sequence
  Synthetic
acacaggaugggacagcacauc

SEQ ID NO: 547181 - RNA, 23 nt, Artificial Sequence
  Synthetic
gacacaggaugggacagcacauc

SEQ ID NO: 547182 - RNA, 24 nt, Artificial Sequence
  Synthetic
ugacacaggaugggacagcacauc

SEQ ID NO: 547183 - RNA, 18 nt, Artificial Sequence
  Synthetic
auuauuuacaaucacauc

SEQ ID NO: 547184 - RNA, 19 nt, Artificial Sequence
  Synthetic
aauuauuuacaaucacauc

SEQ ID NO: 547185 - RNA, 20 nt, Artificial Sequence
  Synthetic
uaauuauuuacaaucacauc

SEQ ID NO: 547186 - RNA, 21 nt, Artificial Sequence
  Synthetic
uuaauuauuuacaaucacauc

SEQ ID NO: 547187 - RNA, 22 nt, Artificial Sequence
  Synthetic
auuaauuauuuacaaucacauc

SEQ ID NO: 547188 - RNA, 23 nt, Artificial Sequence
  Synthetic
aauuaauuauuuacaaucacauc

SEQ ID NO: 547189 - RNA, 24 nt, Artificial Sequence
  Synthetic
uaauuaauuauuuacaaucacauc

SEQ ID NO: 547190 - RNA, 18 nt, Artificial Sequence
  Synthetic
auggguaauaaucacauc

SEQ ID NO: 547191 - RNA, 19 nt, Artificial Sequence
  Synthetic
aauggguaauaaucacauc

SEQ ID NO: 547192 - RNA, 20 nt, Artificial Sequence
  Synthetic
caauggguaauaaucacauc

SEQ ID NO: 547193 - RNA, 21 nt, Artificial Sequence
  Synthetic
gcaauggguaauaaucacauc

SEQ ID NO: 547194 - RNA, 22 nt, Artificial Sequence
  Synthetic
ggcaauggguaauaaucacauc

SEQ ID NO: 547195 - RNA, 23 nt, Artificial Sequence
  Synthetic
aggcaauggguaauaaucacauc

SEQ ID NO: 547196 - RNA, 24 nt, Artificial Sequence
  Synthetic
caggcaauggguaauaaucacauc

SEQ ID NO: 547197 - RNA, 18 nt, Artificial Sequence
  Synthetic
gagaggauuagucacauc

SEQ ID NO: 547198 - RNA, 19 nt, Artificial Sequence
  Synthetic
ugagaggauuagucacauc

SEQ ID NO: 547199 - RNA, 20 nt, Artificial Sequence
  Synthetic
gugagaggauuagucacauc

SEQ ID NO: 547200 - RNA, 21 nt, Artificial Sequence
  Synthetic
ugugagaggauuagucacauc

SEQ ID NO: 547201 - RNA, 22 nt, Artificial Sequence
  Synthetic
cugugagaggauuagucacauc

SEQ ID NO: 547202 - RNA, 23 nt, Artificial Sequence
  Synthetic
gcugugagaggauuagucacauc

SEQ ID NO: 547203 - RNA, 24 nt, Artificial Sequence
  Synthetic
agcugugagaggauuagucacauc

SEQ ID NO: 547204 - RNA, 18 nt, Artificial Sequence
  Synthetic
aagaaaauauuucacauc

SEQ ID NO: 547205 - RNA, 19 nt, Artificial Sequence
  Synthetic
caagaaaauauuucacauc

SEQ ID NO: 547206 - RNA, 20 nt, Artificial Sequence
  Synthetic
gcaagaaaauauuucacauc

SEQ ID NO: 547207 - RNA, 21 nt, Artificial Sequence
  Synthetic
ugcaagaaaauauuucacauc

SEQ ID NO: 547208 - RNA, 22 nt, Artificial Sequence
  Synthetic
augcaagaaaauauuucacauc

SEQ ID NO: 547209 - RNA, 23 nt, Artificial Sequence
  Synthetic
uaugcaagaaaauauuucacauc

SEQ ID NO: 547210 - RNA, 24 nt, Artificial Sequence
  Synthetic
auaugcaagaaaauauuucacauc

SEQ ID NO: 547211 - RNA, 18 nt, Artificial Sequence
  Synthetic
cucaaaaagagagacauc

SEQ ID NO: 547212 - RNA, 19 nt, Artificial Sequence
  Synthetic
acucaaaaagagagacauc

SEQ ID NO: 547213 - RNA, 20 nt, Artificial Sequence
  Synthetic
cacucaaaaagagagacauc

SEQ ID NO: 547214 - RNA, 21 nt, Artificial Sequence
  Synthetic
acacucaaaaagagagacauc

SEQ ID NO: 547215 - RNA, 22 nt, Artificial Sequence
  Synthetic
gacacucaaaaagagagacauc

SEQ ID NO: 547216 - RNA, 23 nt, Artificial Sequence
  Synthetic
ugacacucaaaaagagagacauc

SEQ ID NO: 547217 - RNA, 24 nt, Artificial Sequence
  Synthetic
augacacucaaaaagagagacauc

SEQ ID NO: 547218 - RNA, 18 nt, Artificial Sequence
  Synthetic
ucuaggaacaaugacauc

SEQ ID NO: 547219 - RNA, 19 nt, Artificial Sequence
  Synthetic
cucuaggaacaaugacauc

SEQ ID NO: 547220 - RNA, 20 nt, Artificial Sequence
  Synthetic
ccucuaggaacaaugacauc

SEQ ID NO: 547221 - RNA, 21 nt, Artificial Sequence
  Synthetic
uccucuaggaacaaugacauc

SEQ ID NO: 547222 - RNA, 22 nt, Artificial Sequence
  Synthetic
uuccucuaggaacaaugacauc

SEQ ID NO: 547223 - RNA, 23 nt, Artificial Sequence
  Synthetic
auuccucuaggaacaaugacauc

SEQ ID NO: 547224 - RNA, 24 nt, Artificial Sequence
  Synthetic
cauuccucuaggaacaaugacauc

SEQ ID NO: 547225 - RNA, 18 nt, Artificial Sequence
  Synthetic
aaguaauaacaugacauc

SEQ ID NO: 547226 - RNA, 19 nt, Artificial Sequence
  Synthetic
uaaguaauaacaugacauc

SEQ ID NO: 547227 - RNA, 20 nt, Artificial Sequence
  Synthetic
uuaaguaauaacaugacauc

SEQ ID NO: 547228 - RNA, 21 nt, Artificial Sequence
  Synthetic
uuuaaguaauaacaugacauc

SEQ ID NO: 547229 - RNA, 22 nt, Artificial Sequence
  Synthetic
auuuaaguaauaacaugacauc

SEQ ID NO: 547230 - RNA, 23 nt, Artificial Sequence
  Synthetic
aauuuaaguaauaacaugacauc

SEQ ID NO: 547231 - RNA, 24 nt, Artificial Sequence
  Synthetic
uaauuuaaguaauaacaugacauc

SEQ ID NO: 547232 - RNA, 18 nt, Artificial Sequence
  Synthetic
uguauugcacaugacauc

SEQ ID NO: 547233 - RNA, 19 nt, Artificial Sequence
  Synthetic
guguauugcacaugacauc

SEQ ID NO: 547234 - RNA, 20 nt, Artificial Sequence
  Synthetic
uguguauugcacaugacauc

SEQ ID NO: 547235 - RNA, 21 nt, Artificial Sequence
  Synthetic
uuguguauugcacaugacauc

SEQ ID NO: 547236 - RNA, 22 nt, Artificial Sequence
  Synthetic
uuuguguauugcacaugacauc

SEQ ID NO: 547237 - RNA, 23 nt, Artificial Sequence
  Synthetic
auuuguguauugcacaugacauc

SEQ ID NO: 547238 - RNA, 24 nt, Artificial Sequence
  Synthetic
cauuuguguauugcacaugacauc

SEQ ID NO: 547239 - RNA, 18 nt, Artificial Sequence
  Synthetic
agaucuugcauauacauc

SEQ ID NO: 547240 - RNA, 19 nt, Artificial Sequence
  Synthetic
uagaucuugcauauacauc

SEQ ID NO: 547241 - RNA, 20 nt, Artificial Sequence
  Synthetic
cuagaucuugcauauacauc

SEQ ID NO: 547242 - RNA, 21 nt, Artificial Sequence
  Synthetic
acuagaucuugcauauacauc

SEQ ID NO: 547243 - RNA, 22 nt, Artificial Sequence
  Synthetic
uacuagaucuugcauauacauc

SEQ ID NO: 547244 - RNA, 23 nt, Artificial Sequence
  Synthetic
auacuagaucuugcauauacauc

SEQ ID NO: 547245 - RNA, 24 nt, Artificial Sequence
  Synthetic
aauacuagaucuugcauauacauc

SEQ ID NO: 547246 - RNA, 18 nt, Artificial Sequence
  Synthetic
aaaucauaacuauacauc

SEQ ID NO: 547247 - RNA, 19 nt, Artificial Sequence
  Synthetic
aaaaucauaacuauacauc

SEQ ID NO: 547248 - RNA, 20 nt, Artificial Sequence
  Synthetic
gaaaaucauaacuauacauc

SEQ ID NO: 547249 - RNA, 21 nt, Artificial Sequence
  Synthetic
ggaaaaucauaacuauacauc

SEQ ID NO: 547250 - RNA, 22 nt, Artificial Sequence
  Synthetic
uggaaaaucauaacuauacauc

SEQ ID NO: 547251 - RNA, 23 nt, Artificial Sequence
  Synthetic
cuggaaaaucauaacuauacauc

SEQ ID NO: 547252 - RNA, 24 nt, Artificial Sequence
  Synthetic
ccuggaaaaucauaacuauacauc

SEQ ID NO: 547253 - RNA, 18 nt, Artificial Sequence
  Synthetic
ggaaaggaauuauacauc

SEQ ID NO: 547254 - RNA, 19 nt, Artificial Sequence
  Synthetic
aggaaaggaauuauacauc

SEQ ID NO: 547255 - RNA, 20 nt, Artificial Sequence
  Synthetic
aaggaaaggaauuauacauc

SEQ ID NO: 547256 - RNA, 21 nt, Artificial Sequence
  Synthetic
aaaggaaaggaauuauacauc

SEQ ID NO: 547257 - RNA, 22 nt, Artificial Sequence
  Synthetic
gaaaggaaaggaauuauacauc

SEQ ID NO: 547258 - RNA, 23 nt, Artificial Sequence
  Synthetic
agaaaggaaaggaauuauacauc

SEQ ID NO: 547259 - RNA, 24 nt, Artificial Sequence
  Synthetic
cagaaaggaaaggaauuauacauc

SEQ ID NO: 547260 - RNA, 18 nt, Artificial Sequence
  Synthetic
auuuuaaaauuuuacauc

SEQ ID NO: 547261 - RNA, 19 nt, Artificial Sequence
  Synthetic
gauuuuaaaauuuuacauc

SEQ ID NO: 547262 - RNA, 20 nt, Artificial Sequence
  Synthetic
ugauuuuaaaauuuuacauc

SEQ ID NO: 547263 - RNA, 21 nt, Artificial Sequence
  Synthetic
cugauuuuaaaauuuuacauc

SEQ ID NO: 547264 - RNA, 22 nt, Artificial Sequence
  Synthetic
ucugauuuuaaaauuuuacauc

SEQ ID NO: 547265 - RNA, 23 nt, Artificial Sequence
  Synthetic
uucugauuuuaaaauuuuacauc

SEQ ID NO: 547266 - RNA, 24 nt, Artificial Sequence
  Synthetic
auucugauuuuaaaauuuuacauc

SEQ ID NO: 547267 - RNA, 18 nt, Artificial Sequence
  Synthetic
acauuuuauguuaccauc

SEQ ID NO: 547268 - RNA, 19 nt, Artificial Sequence
  Synthetic
uacauuuuauguuaccauc

SEQ ID NO: 547269 - RNA, 20 nt, Artificial Sequence
  Synthetic
guacauuuuauguuaccauc

SEQ ID NO: 547270 - RNA, 21 nt, Artificial Sequence
  Synthetic
uguacauuuuauguuaccauc

SEQ ID NO: 547271 - RNA, 22 nt, Artificial Sequence
  Synthetic
auguacauuuuauguuaccauc

SEQ ID NO: 547272 - RNA, 23 nt, Artificial Sequence
  Synthetic
aauguacauuuuauguuaccauc

SEQ ID NO: 547273 - RNA, 24 nt, Artificial Sequence
  Synthetic
aaauguacauuuuauguuaccauc

SEQ ID NO: 547274 - RNA, 18 nt, Artificial Sequence
  Synthetic
aaguuaaaucaucccauc

SEQ ID NO: 547275 - RNA, 19 nt, Artificial Sequence
  Synthetic
caaguuaaaucaucccauc

SEQ ID NO: 547276 - RNA, 20 nt, Artificial Sequence
  Synthetic
acaaguuaaaucaucccauc

SEQ ID NO: 547277 - RNA, 21 nt, Artificial Sequence
  Synthetic
aacaaguuaaaucaucccauc

SEQ ID NO: 547278 - RNA, 22 nt, Artificial Sequence
  Synthetic
gaacaaguuaaaucaucccauc

SEQ ID NO: 547279 - RNA, 23 nt, Artificial Sequence
  Synthetic
agaacaaguuaaaucaucccauc

SEQ ID NO: 547280 - RNA, 24 nt, Artificial Sequence
  Synthetic
cagaacaaguuaaaucaucccauc

SEQ ID NO: 547281 - RNA, 18 nt, Artificial Sequence
  Synthetic
cagcuagauggucccauc

SEQ ID NO: 547282 - RNA, 19 nt, Artificial Sequence
  Synthetic
gcagcuagauggucccauc

SEQ ID NO: 547283 - RNA, 20 nt, Artificial Sequence
  Synthetic
ugcagcuagauggucccauc

SEQ ID NO: 547284 - RNA, 21 nt, Artificial Sequence
  Synthetic
cugcagcuagauggucccauc

SEQ ID NO: 547285 - RNA, 22 nt, Artificial Sequence
  Synthetic
ccugcagcuagauggucccauc

SEQ ID NO: 547286 - RNA, 23 nt, Artificial Sequence
  Synthetic
uccugcagcuagauggucccauc

SEQ ID NO: 547287 - RNA, 24 nt, Artificial Sequence
  Synthetic
uuccugcagcuagauggucccauc

SEQ ID NO: 547288 - RNA, 18 nt, Artificial Sequence
  Synthetic
gccacauucaaagccauc

SEQ ID NO: 547289 - RNA, 19 nt, Artificial Sequence
  Synthetic
ggccacauucaaagccauc

SEQ ID NO: 547290 - RNA, 20 nt, Artificial Sequence
  Synthetic
gggccacauucaaagccauc

SEQ ID NO: 547291 - RNA, 21 nt, Artificial Sequence
  Synthetic
ugggccacauucaaagccauc

SEQ ID NO: 547292 - RNA, 22 nt, Artificial Sequence
  Synthetic
uugggccacauucaaagccauc

SEQ ID NO: 547293 - RNA, 23 nt, Artificial Sequence
  Synthetic
guugggccacauucaaagccauc

SEQ ID NO: 547294 - RNA, 24 nt, Artificial Sequence
  Synthetic
uguugggccacauucaaagccauc

SEQ ID NO: 547295 - RNA, 18 nt, Artificial Sequence
  Synthetic
cauguuagcugagccauc

SEQ ID NO: 547296 - RNA, 19 nt, Artificial Sequence
  Synthetic
gcauguuagcugagccauc

SEQ ID NO: 547297 - RNA, 20 nt, Artificial Sequence
  Synthetic
agcauguuagcugagccauc

SEQ ID NO: 547298 - RNA, 21 nt, Artificial Sequence
  Synthetic
cagcauguuagcugagccauc

SEQ ID NO: 547299 - RNA, 22 nt, Artificial Sequence
  Synthetic
gcagcauguuagcugagccauc

SEQ ID NO: 547300 - RNA, 23 nt, Artificial Sequence
  Synthetic
ugcagcauguuagcugagccauc

SEQ ID NO: 547301 - RNA, 24 nt, Artificial Sequence
  Synthetic
cugcagcauguuagcugagccauc

SEQ ID NO: 547302 - RNA, 18 nt, Artificial Sequence
  Synthetic
agaguggcuugggccauc

SEQ ID NO: 547303 - RNA, 19 nt, Artificial Sequence
  Synthetic
gagaguggcuugggccauc

SEQ ID NO: 547304 - RNA, 20 nt, Artificial Sequence
  Synthetic
agagaguggcuugggccauc

SEQ ID NO: 547305 - RNA, 21 nt, Artificial Sequence
  Synthetic
gagagaguggcuugggccauc

SEQ ID NO: 547306 - RNA, 22 nt, Artificial Sequence
  Synthetic
ugagagaguggcuugggccauc

SEQ ID NO: 547307 - RNA, 23 nt, Artificial Sequence
  Synthetic
cugagagaguggcuugggccauc

SEQ ID NO: 547308 - RNA, 24 nt, Artificial Sequence
  Synthetic
acugagagaguggcuugggccauc

SEQ ID NO: 547309 - RNA, 18 nt, Artificial Sequence
  Synthetic
ccgcugcccaaugccauc

SEQ ID NO: 547310 - RNA, 19 nt, Artificial Sequence
  Synthetic
gccgcugcccaaugccauc

SEQ ID NO: 547311 - RNA, 20 nt, Artificial Sequence
  Synthetic
ugccgcugcccaaugccauc

SEQ ID NO: 547312 - RNA, 21 nt, Artificial Sequence
  Synthetic
uugccgcugcccaaugccauc

SEQ ID NO: 547313 - RNA, 22 nt, Artificial Sequence
  Synthetic
uuugccgcugcccaaugccauc

SEQ ID NO: 547314 - RNA, 23 nt, Artificial Sequence
  Synthetic
guuugccgcugcccaaugccauc

SEQ ID NO: 547315 - RNA, 24 nt, Artificial Sequence
  Synthetic
aguuugccgcugcccaaugccauc

SEQ ID NO: 547316 - RNA, 18 nt, Artificial Sequence
  Synthetic
uuggaaaaagaugccauc

SEQ ID NO: 547317 - RNA, 19 nt, Artificial Sequence
  Synthetic
auuggaaaaagaugccauc

SEQ ID NO: 547318 - RNA, 20 nt, Artificial Sequence
  Synthetic
uauuggaaaaagaugccauc

SEQ ID NO: 547319 - RNA, 21 nt, Artificial Sequence
  Synthetic
cuauuggaaaaagaugccauc

SEQ ID NO: 547320 - RNA, 22 nt, Artificial Sequence
  Synthetic
ucuauuggaaaaagaugccauc

SEQ ID NO: 547321 - RNA, 23 nt, Artificial Sequence
  Synthetic
uucuauuggaaaaagaugccauc

SEQ ID NO: 547322 - RNA, 24 nt, Artificial Sequence
  Synthetic
cuucuauuggaaaaagaugccauc

SEQ ID NO: 547323 - RNA, 18 nt, Artificial Sequence
  Synthetic
aaaaugcaugaugccauc

SEQ ID NO: 547324 - RNA, 19 nt, Artificial Sequence
  Synthetic
uaaaaugcaugaugccauc

SEQ ID NO: 547325 - RNA, 20 nt, Artificial Sequence
  Synthetic
cuaaaaugcaugaugccauc

SEQ ID NO: 547326 - RNA, 21 nt, Artificial Sequence
  Synthetic
ucuaaaaugcaugaugccauc

SEQ ID NO: 547327 - RNA, 22 nt, Artificial Sequence
  Synthetic
aucuaaaaugcaugaugccauc

SEQ ID NO: 547328 - RNA, 23 nt, Artificial Sequence
  Synthetic
uaucuaaaaugcaugaugccauc

SEQ ID NO: 547329 - RNA, 24 nt, Artificial Sequence
  Synthetic
uuaucuaaaaugcaugaugccauc

SEQ ID NO: 547330 - RNA, 18 nt, Artificial Sequence
  Synthetic
ugcucuacuguugccauc

SEQ ID NO: 547331 - RNA, 19 nt, Artificial Sequence
  Synthetic
augcucuacuguugccauc

SEQ ID NO: 547332 - RNA, 20 nt, Artificial Sequence
  Synthetic
caugcucuacuguugccauc

SEQ ID NO: 547333 - RNA, 21 nt, Artificial Sequence
  Synthetic
ucaugcucuacuguugccauc

SEQ ID NO: 547334 - RNA, 22 nt, Artificial Sequence
  Synthetic
uucaugcucuacuguugccauc

SEQ ID NO: 547335 - RNA, 23 nt, Artificial Sequence
  Synthetic
uuucaugcucuacuguugccauc

SEQ ID NO: 547336 - RNA, 24 nt, Artificial Sequence
  Synthetic
guuucaugcucuacuguugccauc

SEQ ID NO: 547337 - RNA, 18 nt, Artificial Sequence
  Synthetic
caucauuuuaaauccauc

SEQ ID NO: 547338 - RNA, 19 nt, Artificial Sequence
  Synthetic
ucaucauuuuaaauccauc

SEQ ID NO: 547339 - RNA, 20 nt, Artificial Sequence
  Synthetic
uucaucauuuuaaauccauc

SEQ ID NO: 547340 - RNA, 21 nt, Artificial Sequence
  Synthetic
cuucaucauuuuaaauccauc

SEQ ID NO: 547341 - RNA, 22 nt, Artificial Sequence
  Synthetic
ucuucaucauuuuaaauccauc

SEQ ID NO: 547342 - RNA, 23 nt, Artificial Sequence
  Synthetic
cucuucaucauuuuaaauccauc

SEQ ID NO: 547343 - RNA, 24 nt, Artificial Sequence
  Synthetic
acucuucaucauuuuaaauccauc

SEQ ID NO: 547344 - RNA, 18 nt, Artificial Sequence
  Synthetic
uuagcugggccauccauc

SEQ ID NO: 547345 - RNA, 19 nt, Artificial Sequence
  Synthetic
uuuagcugggccauccauc

SEQ ID NO: 547346 - RNA, 20 nt, Artificial Sequence
  Synthetic
auuuagcugggccauccauc

SEQ ID NO: 547347 - RNA, 21 nt, Artificial Sequence
  Synthetic
gauuuagcugggccauccauc

SEQ ID NO: 547348 - RNA, 22 nt, Artificial Sequence
  Synthetic
ugauuuagcugggccauccauc

SEQ ID NO: 547349 - RNA, 23 nt, Artificial Sequence
  Synthetic
cugauuuagcugggccauccauc

SEQ ID NO: 547350 - RNA, 24 nt, Artificial Sequence
  Synthetic
ucugauuuagcugggccauccauc

SEQ ID NO: 547351 - RNA, 18 nt, Artificial Sequence
  Synthetic
acagagugagacuccauc

SEQ ID NO: 547352 - RNA, 19 nt, Artificial Sequence
  Synthetic
gacagagugagacuccauc

SEQ ID NO: 547353 - RNA, 20 nt, Artificial Sequence
  Synthetic
cgacagagugagacuccauc

SEQ ID NO: 547354 - RNA, 21 nt, Artificial Sequence
  Synthetic
gcgacagagugagacuccauc

SEQ ID NO: 547355 - RNA, 22 nt, Artificial Sequence
  Synthetic
ggcgacagagugagacuccauc

SEQ ID NO: 547356 - RNA, 23 nt, Artificial Sequence
  Synthetic
gggcgacagagugagacuccauc

SEQ ID NO: 547357 - RNA, 24 nt, Artificial Sequence
  Synthetic
ugggcgacagagugagacuccauc

SEQ ID NO: 547358 - RNA, 18 nt, Artificial Sequence
  Synthetic
gcagagugagacuccauc

SEQ ID NO: 547359 - RNA, 19 nt, Artificial Sequence
  Synthetic
ugcagagugagacuccauc

SEQ ID NO: 547360 - RNA, 20 nt, Artificial Sequence
  Synthetic
gugcagagugagacuccauc

SEQ ID NO: 547361 - RNA, 21 nt, Artificial Sequence
  Synthetic
ggugcagagugagacuccauc

SEQ ID NO: 547362 - RNA, 22 nt, Artificial Sequence
  Synthetic
gggugcagagugagacuccauc

SEQ ID NO: 547363 - RNA, 23 nt, Artificial Sequence
  Synthetic
agggugcagagugagacuccauc

SEQ ID NO: 547364 - RNA, 24 nt, Artificial Sequence
  Synthetic
cagggugcagagugagacuccauc

SEQ ID NO: 547365 - RNA, 18 nt, Artificial Sequence
  Synthetic
augcuaucacccuccauc

SEQ ID NO: 547366 - RNA, 19 nt, Artificial Sequence
  Synthetic
caugcuaucacccuccauc

SEQ ID NO: 547367 - RNA, 20 nt, Artificial Sequence
  Synthetic
ccaugcuaucacccuccauc

SEQ ID NO: 547368 - RNA, 21 nt, Artificial Sequence
  Synthetic
cccaugcuaucacccuccauc

SEQ ID NO: 547369 - RNA, 22 nt, Artificial Sequence
  Synthetic
gcccaugcuaucacccuccauc

SEQ ID NO: 547370 - RNA, 23 nt, Artificial Sequence
  Synthetic
ggcccaugcuaucacccuccauc

SEQ ID NO: 547371 - RNA, 24 nt, Artificial Sequence
  Synthetic
uggcccaugcuaucacccuccauc

SEQ ID NO: 547372 - RNA, 18 nt, Artificial Sequence
  Synthetic
acccucaguuucuccauc

SEQ ID NO: 547373 - RNA, 19 nt, Artificial Sequence
  Synthetic
aacccucaguuucuccauc

SEQ ID NO: 547374 - RNA, 20 nt, Artificial Sequence
  Synthetic
caacccucaguuucuccauc

SEQ ID NO: 547375 - RNA, 21 nt, Artificial Sequence
  Synthetic
ccaacccucaguuucuccauc

SEQ ID NO: 547376 - RNA, 22 nt, Artificial Sequence
  Synthetic
uccaacccucaguuucuccauc

SEQ ID NO: 547377 - RNA, 23 nt, Artificial Sequence
  Synthetic
cuccaacccucaguuucuccauc

SEQ ID NO: 547378 - RNA, 24 nt, Artificial Sequence
  Synthetic
ucuccaacccucaguuucuccauc

SEQ ID NO: 547379 - RNA, 18 nt, Artificial Sequence
  Synthetic
gugaaacaaaaguccauc

SEQ ID NO: 547380 - RNA, 19 nt, Artificial Sequence
  Synthetic
ggugaaacaaaaguccauc

SEQ ID NO: 547381 - RNA, 20 nt, Artificial Sequence
  Synthetic
aggugaaacaaaaguccauc

SEQ ID NO: 547382 - RNA, 21 nt, Artificial Sequence
  Synthetic
aaggugaaacaaaaguccauc

SEQ ID NO: 547383 - RNA, 22 nt, Artificial Sequence
  Synthetic
uaaggugaaacaaaaguccauc

SEQ ID NO: 547384 - RNA, 23 nt, Artificial Sequence
  Synthetic
guaaggugaaacaaaaguccauc

SEQ ID NO: 547385 - RNA, 24 nt, Artificial Sequence
  Synthetic
uguaaggugaaacaaaaguccauc

SEQ ID NO: 547386 - RNA, 18 nt, Artificial Sequence
  Synthetic
aaaggacuuaaguccauc

SEQ ID NO: 547387 - RNA, 19 nt, Artificial Sequence
  Synthetic
gaaaggacuuaaguccauc

SEQ ID NO: 547388 - RNA, 20 nt, Artificial Sequence
  Synthetic
ugaaaggacuuaaguccauc

SEQ ID NO: 547389 - RNA, 21 nt, Artificial Sequence
  Synthetic
cugaaaggacuuaaguccauc

SEQ ID NO: 547390 - RNA, 22 nt, Artificial Sequence
  Synthetic
ucugaaaggacuuaaguccauc

SEQ ID NO: 547391 - RNA, 23 nt, Artificial Sequence
  Synthetic
aucugaaaggacuuaaguccauc

SEQ ID NO: 547392 - RNA, 24 nt, Artificial Sequence
  Synthetic
aaucugaaaggacuuaaguccauc

SEQ ID NO: 547393 - RNA, 18 nt, Artificial Sequence
  Synthetic
gcaaccugagcguccauc

SEQ ID NO: 547394 - RNA, 19 nt, Artificial Sequence
  Synthetic
agcaaccugagcguccauc

SEQ ID NO: 547395 - RNA, 20 nt, Artificial Sequence
  Synthetic
aagcaaccugagcguccauc

SEQ ID NO: 547396 - RNA, 21 nt, Artificial Sequence
  Synthetic
gaagcaaccugagcguccauc

SEQ ID NO: 547397 - RNA, 22 nt, Artificial Sequence
  Synthetic
ggaagcaaccugagcguccauc

SEQ ID NO: 547398 - RNA, 23 nt, Artificial Sequence
  Synthetic
uggaagcaaccugagcguccauc

SEQ ID NO: 547399 - RNA, 24 nt, Artificial Sequence
  Synthetic
uuggaagcaaccugagcguccauc

SEQ ID NO: 547400 - RNA, 18 nt, Artificial Sequence
  Synthetic
ugaugcuuacuguccauc

SEQ ID NO: 547401 - RNA, 19 nt, Artificial Sequence
  Synthetic
uugaugcuuacuguccauc

SEQ ID NO: 547402 - RNA, 20 nt, Artificial Sequence
  Synthetic
uuugaugcuuacuguccauc

SEQ ID NO: 547403 - RNA, 21 nt, Artificial Sequence
  Synthetic
guuugaugcuuacuguccauc

SEQ ID NO: 547404 - RNA, 22 nt, Artificial Sequence
  Synthetic
cguuugaugcuuacuguccauc

SEQ ID NO: 547405 - RNA, 23 nt, Artificial Sequence
  Synthetic
ccguuugaugcuuacuguccauc

SEQ ID NO: 547406 - RNA, 24 nt, Artificial Sequence
  Synthetic
accguuugaugcuuacuguccauc

SEQ ID NO: 547407 - RNA, 18 nt, Artificial Sequence
  Synthetic
aaauuuguuaauuccauc

SEQ ID NO: 547408 - RNA, 19 nt, Artificial Sequence
  Synthetic
caaauuuguuaauuccauc

SEQ ID NO: 547409 - RNA, 20 nt, Artificial Sequence
  Synthetic
ucaaauuuguuaauuccauc

SEQ ID NO: 547410 - RNA, 21 nt, Artificial Sequence
  Synthetic
aucaaauuuguuaauuccauc

SEQ ID NO: 547411 - RNA, 22 nt, Artificial Sequence
  Synthetic
aaucaaauuuguuaauuccauc

SEQ ID NO: 547412 - RNA, 23 nt, Artificial Sequence
  Synthetic
uaaucaaauuuguuaauuccauc

SEQ ID NO: 547413 - RNA, 24 nt, Artificial Sequence
  Synthetic
guaaucaaauuuguuaauuccauc

SEQ ID NO: 547414 - RNA, 18 nt, Artificial Sequence
  Synthetic
ggucuuccaccuuccauc

SEQ ID NO: 547415 - RNA, 19 nt, Artificial Sequence
  Synthetic
uggucuuccaccuuccauc

SEQ ID NO: 547416 - RNA, 20 nt, Artificial Sequence
  Synthetic
uuggucuuccaccuuccauc

SEQ ID NO: 547417 - RNA, 21 nt, Artificial Sequence
  Synthetic
uuuggucuuccaccuuccauc

SEQ ID NO: 547418 - RNA, 22 nt, Artificial Sequence
  Synthetic
uuuuggucuuccaccuuccauc

SEQ ID NO: 547419 - RNA, 23 nt, Artificial Sequence
  Synthetic
cuuuuggucuuccaccuuccauc

SEQ ID NO: 547420 - RNA, 24 nt, Artificial Sequence
  Synthetic
ucuuuuggucuuccaccuuccauc

SEQ ID NO: 547421 - RNA, 18 nt, Artificial Sequence
  Synthetic
uuguucuuaucuuccauc

SEQ ID NO: 547422 - RNA, 19 nt, Artificial Sequence
  Synthetic
cuuguucuuaucuuccauc

SEQ ID NO: 547423 - RNA, 20 nt, Artificial Sequence
  Synthetic
ccuuguucuuaucuuccauc

SEQ ID NO: 547424 - RNA, 21 nt, Artificial Sequence
  Synthetic
cccuuguucuuaucuuccauc

SEQ ID NO: 547425 - RNA, 22 nt, Artificial Sequence
  Synthetic
ccccuuguucuuaucuuccauc

SEQ ID NO: 547426 - RNA, 23 nt, Artificial Sequence
  Synthetic
uccccuuguucuuaucuuccauc

SEQ ID NO: 547427 - RNA, 24 nt, Artificial Sequence
  Synthetic
uuccccuuguucuuaucuuccauc

SEQ ID NO: 547428 - RNA, 18 nt, Artificial Sequence
  Synthetic
uauggugugaguuccauc

SEQ ID NO: 547429 - RNA, 19 nt, Artificial Sequence
  Synthetic
uuauggugugaguuccauc

SEQ ID NO: 547430 - RNA, 20 nt, Artificial Sequence
  Synthetic
uuuauggugugaguuccauc

SEQ ID NO: 547431 - RNA, 21 nt, Artificial Sequence
  Synthetic
uuuuauggugugaguuccauc

SEQ ID NO: 547432 - RNA, 22 nt, Artificial Sequence
  Synthetic
uuuuuauggugugaguuccauc

SEQ ID NO: 547433 - RNA, 23 nt, Artificial Sequence
  Synthetic
auuuuuauggugugaguuccauc

SEQ ID NO: 547434 - RNA, 24 nt, Artificial Sequence
  Synthetic
uauuuuuauggugugaguuccauc

SEQ ID NO: 547435 - RNA, 18 nt, Artificial Sequence
  Synthetic
auugcaauguaaagcauc

SEQ ID NO: 547436 - RNA, 19 nt, Artificial Sequence
  Synthetic
uauugcaauguaaagcauc

SEQ ID NO: 547437 - RNA, 20 nt, Artificial Sequence
  Synthetic
auauugcaauguaaagcauc

SEQ ID NO: 547438 - RNA, 21 nt, Artificial Sequence
  Synthetic
cauauugcaauguaaagcauc

SEQ ID NO: 547439 - RNA, 22 nt, Artificial Sequence
  Synthetic
gcauauugcaauguaaagcauc

SEQ ID NO: 547440 - RNA, 23 nt, Artificial Sequence
  Synthetic
agcauauugcaauguaaagcauc

SEQ ID NO: 547441 - RNA, 24 nt, Artificial Sequence
  Synthetic
cagcauauugcaauguaaagcauc

SEQ ID NO: 547442 - RNA, 18 nt, Artificial Sequence
  Synthetic
uacugcgcacacagcauc

SEQ ID NO: 547443 - RNA, 19 nt, Artificial Sequence
  Synthetic
uuacugcgcacacagcauc

SEQ ID NO: 547444 - RNA, 20 nt, Artificial Sequence
  Synthetic
uuuacugcgcacacagcauc

SEQ ID NO: 547445 - RNA, 21 nt, Artificial Sequence
  Synthetic
guuuacugcgcacacagcauc

SEQ ID NO: 547446 - RNA, 22 nt, Artificial Sequence
  Synthetic
aguuuacugcgcacacagcauc

SEQ ID NO: 547447 - RNA, 23 nt, Artificial Sequence
  Synthetic
uaguuuacugcgcacacagcauc

SEQ ID NO: 547448 - RNA, 24 nt, Artificial Sequence
  Synthetic
auaguuuacugcgcacacagcauc

SEQ ID NO: 547449 - RNA, 18 nt, Artificial Sequence
  Synthetic
gaccagggaaccagcauc

SEQ ID NO: 547450 - RNA, 19 nt, Artificial Sequence
  Synthetic
ggaccagggaaccagcauc

SEQ ID NO: 547451 - RNA, 20 nt, Artificial Sequence
  Synthetic
gggaccagggaaccagcauc

SEQ ID NO: 547452 - RNA, 21 nt, Artificial Sequence
  Synthetic
ggggaccagggaaccagcauc

SEQ ID NO: 547453 - RNA, 22 nt, Artificial Sequence
  Synthetic
aggggaccagggaaccagcauc

SEQ ID NO: 547454 - RNA, 23 nt, Artificial Sequence
  Synthetic
aaggggaccagggaaccagcauc

SEQ ID NO: 547455 - RNA, 24 nt, Artificial Sequence
  Synthetic
caaggggaccagggaaccagcauc

SEQ ID NO: 547456 - RNA, 18 nt, Artificial Sequence
  Synthetic
aauugcagccccagcauc

SEQ ID NO: 547457 - RNA, 19 nt, Artificial Sequence
  Synthetic
aaauugcagccccagcauc

SEQ ID NO: 547458 - RNA, 20 nt, Artificial Sequence
  Synthetic
gaaauugcagccccagcauc

SEQ ID NO: 547459 - RNA, 21 nt, Artificial Sequence
  Synthetic
cgaaauugcagccccagcauc

SEQ ID NO: 547460 - RNA, 22 nt, Artificial Sequence
  Synthetic
ucgaaauugcagccccagcauc

SEQ ID NO: 547461 - RNA, 23 nt, Artificial Sequence
  Synthetic
uucgaaauugcagccccagcauc

SEQ ID NO: 547462 - RNA, 24 nt, Artificial Sequence
  Synthetic
uuucgaaauugcagccccagcauc

SEQ ID NO: 547463 - RNA, 18 nt, Artificial Sequence
  Synthetic
gagcucuuguccagcauc

SEQ ID NO: 547464 - RNA, 19 nt, Artificial Sequence
  Synthetic
ugagcucuuguccagcauc

SEQ ID NO: 547465 - RNA, 20 nt, Artificial Sequence
  Synthetic
cugagcucuuguccagcauc

SEQ ID NO: 547466 - RNA, 21 nt, Artificial Sequence
  Synthetic
ccugagcucuuguccagcauc

SEQ ID NO: 547467 - RNA, 22 nt, Artificial Sequence
  Synthetic
uccugagcucuuguccagcauc

SEQ ID NO: 547468 - RNA, 23 nt, Artificial Sequence
  Synthetic
cuccugagcucuuguccagcauc

SEQ ID NO: 547469 - RNA, 24 nt, Artificial Sequence
  Synthetic
gcuccugagcucuuguccagcauc

SEQ ID NO: 547470 - RNA, 18 nt, Artificial Sequence
  Synthetic
cucugaaccagcagcauc

SEQ ID NO: 547471 - RNA, 19 nt, Artificial Sequence
  Synthetic
ucucugaaccagcagcauc

SEQ ID NO: 547472 - RNA, 20 nt, Artificial Sequence
  Synthetic
aucucugaaccagcagcauc

SEQ ID NO: 547473 - RNA, 21 nt, Artificial Sequence
  Synthetic
uaucucugaaccagcagcauc

SEQ ID NO: 547474 - RNA, 22 nt, Artificial Sequence
  Synthetic
guaucucugaaccagcagcauc

SEQ ID NO: 547475 - RNA, 23 nt, Artificial Sequence
  Synthetic
uguaucucugaaccagcagcauc

SEQ ID NO: 547476 - RNA, 24 nt, Artificial Sequence
  Synthetic
auguaucucugaaccagcagcauc

SEQ ID NO: 547477 - RNA, 18 nt, Artificial Sequence
  Synthetic
cuuuucaaaugcagcauc

SEQ ID NO: 547478 - RNA, 19 nt, Artificial Sequence
  Synthetic
acuuuucaaaugcagcauc

SEQ ID NO: 547479 - RNA, 20 nt, Artificial Sequence
  Synthetic
aacuuuucaaaugcagcauc

SEQ ID NO: 547480 - RNA, 21 nt, Artificial Sequence
  Synthetic
aaacuuuucaaaugcagcauc

SEQ ID NO: 547481 - RNA, 22 nt, Artificial Sequence
  Synthetic
caaacuuuucaaaugcagcauc

SEQ ID NO: 547482 - RNA, 23 nt, Artificial Sequence
  Synthetic
acaaacuuuucaaaugcagcauc

SEQ ID NO: 547483 - RNA, 24 nt, Artificial Sequence
  Synthetic
gacaaacuuuucaaaugcagcauc

SEQ ID NO: 547484 - RNA, 18 nt, Artificial Sequence
  Synthetic
cagcaagggaagagcauc

SEQ ID NO: 547485 - RNA, 19 nt, Artificial Sequence
  Synthetic
acagcaagggaagagcauc

SEQ ID NO: 547486 - RNA, 20 nt, Artificial Sequence
  Synthetic
aacagcaagggaagagcauc

SEQ ID NO: 547487 - RNA, 21 nt, Artificial Sequence
  Synthetic
aaacagcaagggaagagcauc

SEQ ID NO: 547488 - RNA, 22 nt, Artificial Sequence
  Synthetic
caaacagcaagggaagagcauc

SEQ ID NO: 547489 - RNA, 23 nt, Artificial Sequence
  Synthetic
ccaaacagcaagggaagagcauc

SEQ ID NO: 547490 - RNA, 24 nt, Artificial Sequence
  Synthetic
uccaaacagcaagggaagagcauc

SEQ ID NO: 547491 - RNA, 18 nt, Artificial Sequence
  Synthetic
cucagccucccgagcauc

SEQ ID NO: 547492 - RNA, 19 nt, Artificial Sequence
  Synthetic
acucagccucccgagcauc

SEQ ID NO: 547493 - RNA, 20 nt, Artificial Sequence
  Synthetic
aacucagccucccgagcauc

SEQ ID NO: 547494 - RNA, 21 nt, Artificial Sequence
  Synthetic
caacucagccucccgagcauc

SEQ ID NO: 547495 - RNA, 22 nt, Artificial Sequence
  Synthetic
ccaacucagccucccgagcauc

SEQ ID NO: 547496 - RNA, 23 nt, Artificial Sequence
  Synthetic
cccaacucagccucccgagcauc

SEQ ID NO: 547497 - RNA, 24 nt, Artificial Sequence
  Synthetic
ucccaacucagccucccgagcauc

SEQ ID NO: 547498 - RNA, 18 nt, Artificial Sequence
  Synthetic
aaacacuguuuacgcauc

SEQ ID NO: 547499 - RNA, 19 nt, Artificial Sequence
  Synthetic
gaaacacuguuuacgcauc

SEQ ID NO: 547500 - RNA, 20 nt, Artificial Sequence
  Synthetic
ggaaacacuguuuacgcauc

SEQ ID NO: 547501 - RNA, 21 nt, Artificial Sequence
  Synthetic
aggaaacacuguuuacgcauc

SEQ ID NO: 547502 - RNA, 22 nt, Artificial Sequence
  Synthetic
gaggaaacacuguuuacgcauc

SEQ ID NO: 547503 - RNA, 23 nt, Artificial Sequence
  Synthetic
ugaggaaacacuguuuacgcauc

SEQ ID NO: 547504 - RNA, 24 nt, Artificial Sequence
  Synthetic
augaggaaacacuguuuacgcauc

SEQ ID NO: 547505 - RNA, 18 nt, Artificial Sequence
  Synthetic
auaacacuucaccgcauc

SEQ ID NO: 547506 - RNA, 19 nt, Artificial Sequence
  Synthetic
uauaacacuucaccgcauc

SEQ ID NO: 547507 - RNA, 20 nt, Artificial Sequence
  Synthetic
uuauaacacuucaccgcauc

SEQ ID NO: 547508 - RNA, 21 nt, Artificial Sequence
  Synthetic
uuuauaacacuucaccgcauc

SEQ ID NO: 547509 - RNA, 22 nt, Artificial Sequence
  Synthetic
auuuauaacacuucaccgcauc

SEQ ID NO: 547510 - RNA, 23 nt, Artificial Sequence
  Synthetic
uauuuauaacacuucaccgcauc

SEQ ID NO: 547511 - RNA, 24 nt, Artificial Sequence
  Synthetic
uuauuuauaacacuucaccgcauc

SEQ ID NO: 547512 - RNA, 18 nt, Artificial Sequence
  Synthetic
acugacauuggaggcauc

SEQ ID NO: 547513 - RNA, 19 nt, Artificial Sequence
  Synthetic
cacugacauuggaggcauc

SEQ ID NO: 547514 - RNA, 20 nt, Artificial Sequence
  Synthetic
ucacugacauuggaggcauc

SEQ ID NO: 547515 - RNA, 21 nt, Artificial Sequence
  Synthetic
uucacugacauuggaggcauc

SEQ ID NO: 547516 - RNA, 22 nt, Artificial Sequence
  Synthetic
guucacugacauuggaggcauc

SEQ ID NO: 547517 - RNA, 23 nt, Artificial Sequence
  Synthetic
uguucacugacauuggaggcauc

SEQ ID NO: 547518 - RNA, 24 nt, Artificial Sequence
  Synthetic
auguucacugacauuggaggcauc

SEQ ID NO: 547519 - RNA, 18 nt, Artificial Sequence
  Synthetic
guuuuccauaugggcauc

SEQ ID NO: 547520 - RNA, 19 nt, Artificial Sequence
  Synthetic
aguuuuccauaugggcauc

SEQ ID NO: 547521 - RNA, 20 nt, Artificial Sequence
  Synthetic
caguuuuccauaugggcauc

SEQ ID NO: 547522 - RNA, 21 nt, Artificial Sequence
  Synthetic
ucaguuuuccauaugggcauc

SEQ ID NO: 547523 - RNA, 22 nt, Artificial Sequence
  Synthetic
uucaguuuuccauaugggcauc

SEQ ID NO: 547524 - RNA, 23 nt, Artificial Sequence
  Synthetic
cuucaguuuuccauaugggcauc

SEQ ID NO: 547525 - RNA, 24 nt, Artificial Sequence
  Synthetic
acuucaguuuuccauaugggcauc

SEQ ID NO: 547526 - RNA, 18 nt, Artificial Sequence
  Synthetic
cauuuagcauugggcauc

SEQ ID NO: 547527 - RNA, 19 nt, Artificial Sequence
  Synthetic
ucauuuagcauugggcauc

SEQ ID NO: 547528 - RNA, 20 nt, Artificial Sequence
  Synthetic
cucauuuagcauugggcauc

SEQ ID NO: 547529 - RNA, 21 nt, Artificial Sequence
  Synthetic
ucucauuuagcauugggcauc

SEQ ID NO: 547530 - RNA, 22 nt, Artificial Sequence
  Synthetic
uucucauuuagcauugggcauc

SEQ ID NO: 547531 - RNA, 23 nt, Artificial Sequence
  Synthetic
cuucucauuuagcauugggcauc

SEQ ID NO: 547532 - RNA, 24 nt, Artificial Sequence
  Synthetic
acuucucauuuagcauugggcauc

SEQ ID NO: 547533 - RNA, 18 nt, Artificial Sequence
  Synthetic
cuuaauccaacaugcauc

SEQ ID NO: 547534 - RNA, 19 nt, Artificial Sequence
  Synthetic
ccuuaauccaacaugcauc

SEQ ID NO: 547535 - RNA, 20 nt, Artificial Sequence
  Synthetic
accuuaauccaacaugcauc

SEQ ID NO: 547536 - RNA, 21 nt, Artificial Sequence
  Synthetic
gaccuuaauccaacaugcauc

SEQ ID NO: 547537 - RNA, 22 nt, Artificial Sequence
  Synthetic
agaccuuaauccaacaugcauc

SEQ ID NO: 547538 - RNA, 23 nt, Artificial Sequence
  Synthetic
cagaccuuaauccaacaugcauc

SEQ ID NO: 547539 - RNA, 24 nt, Artificial Sequence
  Synthetic
gcagaccuuaauccaacaugcauc

SEQ ID NO: 547540 - RNA, 18 nt, Artificial Sequence
  Synthetic
gcugaaagaggaugcauc

SEQ ID NO: 547541 - RNA, 19 nt, Artificial Sequence
  Synthetic
ugcugaaagaggaugcauc

SEQ ID NO: 547542 - RNA, 20 nt, Artificial Sequence
  Synthetic
gugcugaaagaggaugcauc

SEQ ID NO: 547543 - RNA, 21 nt, Artificial Sequence
  Synthetic
ggugcugaaagaggaugcauc

SEQ ID NO: 547544 - RNA, 22 nt, Artificial Sequence
  Synthetic
aggugcugaaagaggaugcauc

SEQ ID NO: 547545 - RNA, 23 nt, Artificial Sequence
  Synthetic
gaggugcugaaagaggaugcauc

SEQ ID NO: 547546 - RNA, 24 nt, Artificial Sequence
  Synthetic
agaggugcugaaagaggaugcauc

SEQ ID NO: 547547 - RNA, 18 nt, Artificial Sequence
  Synthetic
aaugguguggucugcauc

SEQ ID NO: 547548 - RNA, 19 nt, Artificial Sequence
  Synthetic
uaaugguguggucugcauc

SEQ ID NO: 547549 - RNA, 20 nt, Artificial Sequence
  Synthetic
cuaaugguguggucugcauc

SEQ ID NO: 547550 - RNA, 21 nt, Artificial Sequence
  Synthetic
acuaaugguguggucugcauc

SEQ ID NO: 547551 - RNA, 22 nt, Artificial Sequence
  Synthetic
gacuaaugguguggucugcauc

SEQ ID NO: 547552 - RNA, 23 nt, Artificial Sequence
  Synthetic
ugacuaaugguguggucugcauc

SEQ ID NO: 547553 - RNA, 24 nt, Artificial Sequence
  Synthetic
uugacuaaugguguggucugcauc

SEQ ID NO: 547554 - RNA, 18 nt, Artificial Sequence
  Synthetic
uuggaaaguuucugcauc

SEQ ID NO: 547555 - RNA, 19 nt, Artificial Sequence
  Synthetic
auuggaaaguuucugcauc

SEQ ID NO: 547556 - RNA, 20 nt, Artificial Sequence
  Synthetic
uauuggaaaguuucugcauc

SEQ ID NO: 547557 - RNA, 21 nt, Artificial Sequence
  Synthetic
auauuggaaaguuucugcauc

SEQ ID NO: 547558 - RNA, 22 nt, Artificial Sequence
  Synthetic
aauauuggaaaguuucugcauc

SEQ ID NO: 547559 - RNA, 23 nt, Artificial Sequence
  Synthetic
aaauauuggaaaguuucugcauc

SEQ ID NO: 547560 - RNA, 24 nt, Artificial Sequence
  Synthetic
caaauauuggaaaguuucugcauc

SEQ ID NO: 547561 - RNA, 18 nt, Artificial Sequence
  Synthetic
gaaaacauuuucugcauc

SEQ ID NO: 547562 - RNA, 19 nt, Artificial Sequence
  Synthetic
ugaaaacauuuucugcauc

SEQ ID NO: 547563 - RNA, 20 nt, Artificial Sequence
  Synthetic
uugaaaacauuuucugcauc

SEQ ID NO: 547564 - RNA, 21 nt, Artificial Sequence
  Synthetic
uuugaaaacauuuucugcauc

SEQ ID NO: 547565 - RNA, 22 nt, Artificial Sequence
  Synthetic
cuuugaaaacauuuucugcauc

SEQ ID NO: 547566 - RNA, 23 nt, Artificial Sequence
  Synthetic
acuuugaaaacauuuucugcauc

SEQ ID NO: 547567 - RNA, 24 nt, Artificial Sequence
  Synthetic
aacuuugaaaacauuuucugcauc

SEQ ID NO: 547568 - RNA, 18 nt, Artificial Sequence
  Synthetic
uuaagaggugauugcauc

SEQ ID NO: 547569 - RNA, 19 nt, Artificial Sequence
  Synthetic
uuuaagaggugauugcauc

SEQ ID NO: 547570 - RNA, 20 nt, Artificial Sequence
  Synthetic
cuuuaagaggugauugcauc

SEQ ID NO: 547571 - RNA, 21 nt, Artificial Sequence
  Synthetic
ccuuuaagaggugauugcauc

SEQ ID NO: 547572 - RNA, 22 nt, Artificial Sequence
  Synthetic
gccuuuaagaggugauugcauc

SEQ ID NO: 547573 - RNA, 23 nt, Artificial Sequence
  Synthetic
ugccuuuaagaggugauugcauc

SEQ ID NO: 547574 - RNA, 24 nt, Artificial Sequence
  Synthetic
gugccuuuaagaggugauugcauc

SEQ ID NO: 547575 - RNA, 18 nt, Artificial Sequence
  Synthetic
uaucucaaauauugcauc

SEQ ID NO: 547576 - RNA, 19 nt, Artificial Sequence
  Synthetic
uuaucucaaauauugcauc

SEQ ID NO: 547577 - RNA, 20 nt, Artificial Sequence
  Synthetic
uuuaucucaaauauugcauc

SEQ ID NO: 547578 - RNA, 21 nt, Artificial Sequence
  Synthetic
auuuaucucaaauauugcauc

SEQ ID NO: 547579 - RNA, 22 nt, Artificial Sequence
  Synthetic
cauuuaucucaaauauugcauc

SEQ ID NO: 547580 - RNA, 23 nt, Artificial Sequence
  Synthetic
acauuuaucucaaauauugcauc

SEQ ID NO: 547581 - RNA, 24 nt, Artificial Sequence
  Synthetic
gacauuuaucucaaauauugcauc

SEQ ID NO: 547582 - RNA, 18 nt, Artificial Sequence
  Synthetic
auuucuguugcuugcauc

SEQ ID NO: 547583 - RNA, 19 nt, Artificial Sequence
  Synthetic
gauuucuguugcuugcauc

SEQ ID NO: 547584 - RNA, 20 nt, Artificial Sequence
  Synthetic
ugauuucuguugcuugcauc

SEQ ID NO: 547585 - RNA, 21 nt, Artificial Sequence
  Synthetic
augauuucuguugcuugcauc

SEQ ID NO: 547586 - RNA, 22 nt, Artificial Sequence
  Synthetic
aaugauuucuguugcuugcauc

SEQ ID NO: 547587 - RNA, 23 nt, Artificial Sequence
  Synthetic
gaaugauuucuguugcuugcauc

SEQ ID NO: 547588 - RNA, 24 nt, Artificial Sequence
  Synthetic
agaaugauuucuguugcuugcauc

SEQ ID NO: 547589 - RNA, 18 nt, Artificial Sequence
  Synthetic
uacaaugugaaaaucauc

SEQ ID NO: 547590 - RNA, 19 nt, Artificial Sequence
  Synthetic
uuacaaugugaaaaucauc

SEQ ID NO: 547591 - RNA, 20 nt, Artificial Sequence
  Synthetic
auuacaaugugaaaaucauc

SEQ ID NO: 547592 - RNA, 21 nt, Artificial Sequence
  Synthetic
aauuacaaugugaaaaucauc

SEQ ID NO: 547593 - RNA, 22 nt, Artificial Sequence
  Synthetic
aaauuacaaugugaaaaucauc

SEQ ID NO: 547594 - RNA, 23 nt, Artificial Sequence
  Synthetic
aaaauuacaaugugaaaaucauc

SEQ ID NO: 547595 - RNA, 24 nt, Artificial Sequence
  Synthetic
caaaauuacaaugugaaaaucauc

SEQ ID NO: 547596 - RNA, 18 nt, Artificial Sequence
  Synthetic
agucagcuagaaaucauc

SEQ ID NO: 547597 - RNA, 19 nt, Artificial Sequence
  Synthetic
cagucagcuagaaaucauc

SEQ ID NO: 547598 - RNA, 20 nt, Artificial Sequence
  Synthetic
ucagucagcuagaaaucauc

SEQ ID NO: 547599 - RNA, 21 nt, Artificial Sequence
  Synthetic
uucagucagcuagaaaucauc

SEQ ID NO: 547600 - RNA, 22 nt, Artificial Sequence
  Synthetic
cuucagucagcuagaaaucauc

SEQ ID NO: 547601 - RNA, 23 nt, Artificial Sequence
  Synthetic
acuucagucagcuagaaaucauc

SEQ ID NO: 547602 - RNA, 24 nt, Artificial Sequence
  Synthetic
gacuucagucagcuagaaaucauc

SEQ ID NO: 547603 - RNA, 18 nt, Artificial Sequence
  Synthetic
gacaaagugacaaucauc

SEQ ID NO: 547604 - RNA, 19 nt, Artificial Sequence
  Synthetic
ugacaaagugacaaucauc

SEQ ID NO: 547605 - RNA, 20 nt, Artificial Sequence
  Synthetic
gugacaaagugacaaucauc

SEQ ID NO: 547606 - RNA, 21 nt, Artificial Sequence
  Synthetic
agugacaaagugacaaucauc

SEQ ID NO: 547607 - RNA, 22 nt, Artificial Sequence
  Synthetic
cagugacaaagugacaaucauc

SEQ ID NO: 547608 - RNA, 23 nt, Artificial Sequence
  Synthetic
ucagugacaaagugacaaucauc

SEQ ID NO: 547609 - RNA, 24 nt, Artificial Sequence
  Synthetic
uucagugacaaagugacaaucauc

SEQ ID NO: 547610 - RNA, 18 nt, Artificial Sequence
  Synthetic
ucaacaucgucaaucauc

SEQ ID NO: 547611 - RNA, 19 nt, Artificial Sequence
  Synthetic
cucaacaucgucaaucauc

SEQ ID NO: 547612 - RNA, 20 nt, Artificial Sequence
  Synthetic
acucaacaucgucaaucauc

SEQ ID NO: 547613 - RNA, 21 nt, Artificial Sequence
  Synthetic
uacucaacaucgucaaucauc

SEQ ID NO: 547614 - RNA, 22 nt, Artificial Sequence
  Synthetic
auacucaacaucgucaaucauc

SEQ ID NO: 547615 - RNA, 23 nt, Artificial Sequence
  Synthetic
cauacucaacaucgucaaucauc

SEQ ID NO: 547616 - RNA, 24 nt, Artificial Sequence
  Synthetic
acauacucaacaucgucaaucauc

SEQ ID NO: 547617 - RNA, 18 nt, Artificial Sequence
  Synthetic
gaacuuccuagaaucauc

SEQ ID NO: 547618 - RNA, 19 nt, Artificial Sequence
  Synthetic
agaacuuccuagaaucauc

SEQ ID NO: 547619 - RNA, 20 nt, Artificial Sequence
  Synthetic
cagaacuuccuagaaucauc

SEQ ID NO: 547620 - RNA, 21 nt, Artificial Sequence
  Synthetic
gcagaacuuccuagaaucauc

SEQ ID NO: 547621 - RNA, 22 nt, Artificial Sequence
  Synthetic
agcagaacuuccuagaaucauc

SEQ ID NO: 547622 - RNA, 23 nt, Artificial Sequence
  Synthetic
aagcagaacuuccuagaaucauc

SEQ ID NO: 547623 - RNA, 24 nt, Artificial Sequence
  Synthetic
uaagcagaacuuccuagaaucauc

SEQ ID NO: 547624 - RNA, 18 nt, Artificial Sequence
  Synthetic
ggcugaggaugaaucauc

SEQ ID NO: 547625 - RNA, 19 nt, Artificial Sequence
  Synthetic
aggcugaggaugaaucauc

SEQ ID NO: 547626 - RNA, 20 nt, Artificial Sequence
  Synthetic
gaggcugaggaugaaucauc

SEQ ID NO: 547627 - RNA, 21 nt, Artificial Sequence
  Synthetic
agaggcugaggaugaaucauc

SEQ ID NO: 547628 - RNA, 22 nt, Artificial Sequence
  Synthetic
aagaggcugaggaugaaucauc

SEQ ID NO: 547629 - RNA, 23 nt, Artificial Sequence
  Synthetic
gaagaggcugaggaugaaucauc

SEQ ID NO: 547630 - RNA, 24 nt, Artificial Sequence
  Synthetic
ggaagaggcugaggaugaaucauc

SEQ ID NO: 547631 - RNA, 18 nt, Artificial Sequence
  Synthetic
uuuucaaaugacaucauc

SEQ ID NO: 547632 - RNA, 19 nt, Artificial Sequence
  Synthetic
cuuuucaaaugacaucauc

SEQ ID NO: 547633 - RNA, 20 nt, Artificial Sequence
  Synthetic
ucuuuucaaaugacaucauc

SEQ ID NO: 547634 - RNA, 21 nt, Artificial Sequence
  Synthetic
uucuuuucaaaugacaucauc

SEQ ID NO: 547635 - RNA, 22 nt, Artificial Sequence
  Synthetic
auucuuuucaaaugacaucauc

SEQ ID NO: 547636 - RNA, 23 nt, Artificial Sequence
  Synthetic
cauucuuuucaaaugacaucauc

SEQ ID NO: 547637 - RNA, 24 nt, Artificial Sequence
  Synthetic
ccauucuuuucaaaugacaucauc

SEQ ID NO: 547638 - RNA, 18 nt, Artificial Sequence
  Synthetic
auucuuugaggcaucauc

SEQ ID NO: 547639 - RNA, 19 nt, Artificial Sequence
  Synthetic
aauucuuugaggcaucauc

SEQ ID NO: 547640 - RNA, 20 nt, Artificial Sequence
  Synthetic
aaauucuuugaggcaucauc

SEQ ID NO: 547641 - RNA, 21 nt, Artificial Sequence
  Synthetic
uaaauucuuugaggcaucauc

SEQ ID NO: 547642 - RNA, 22 nt, Artificial Sequence
  Synthetic
guaaauucuuugaggcaucauc

SEQ ID NO: 547643 - RNA, 23 nt, Artificial Sequence
  Synthetic
uguaaauucuuugaggcaucauc

SEQ ID NO: 547644 - RNA, 24 nt, Artificial Sequence
  Synthetic
cuguaaauucuuugaggcaucauc

SEQ ID NO: 547645 - RNA, 18 nt, Artificial Sequence
  Synthetic
uucuuugauugcaucauc

SEQ ID NO: 547646 - RNA, 19 nt, Artificial Sequence
  Synthetic
auucuuugauugcaucauc

SEQ ID NO: 547647 - RNA, 20 nt, Artificial Sequence
  Synthetic
aauucuuugauugcaucauc

SEQ ID NO: 547648 - RNA, 21 nt, Artificial Sequence
  Synthetic
aaauucuuugauugcaucauc

SEQ ID NO: 547649 - RNA, 22 nt, Artificial Sequence
  Synthetic
uaaauucuuugauugcaucauc

SEQ ID NO: 547650 - RNA, 23 nt, Artificial Sequence
  Synthetic
guaaauucuuugauugcaucauc

SEQ ID NO: 547651 - RNA, 24 nt, Artificial Sequence
  Synthetic
uguaaauucuuugauugcaucauc

SEQ ID NO: 547652 - RNA, 18 nt, Artificial Sequence
  Synthetic
auaaaauaaaucaucauc

SEQ ID NO: 547653 - RNA, 19 nt, Artificial Sequence
  Synthetic
aauaaaauaaaucaucauc

SEQ ID NO: 547654 - RNA, 20 nt, Artificial Sequence
  Synthetic
uaauaaaauaaaucaucauc

SEQ ID NO: 547655 - RNA, 21 nt, Artificial Sequence
  Synthetic
uuaauaaaauaaaucaucauc

SEQ ID NO: 547656 - RNA, 22 nt, Artificial Sequence
  Synthetic
auuaauaaaauaaaucaucauc

SEQ ID NO: 547657 - RNA, 23 nt, Artificial Sequence
  Synthetic
aauuaauaaaauaaaucaucauc

SEQ ID NO: 547658 - RNA, 24 nt, Artificial Sequence
  Synthetic
aaauuaauaaaauaaaucaucauc

SEQ ID NO: 547659 - RNA, 18 nt, Artificial Sequence
  Synthetic
cagaauauuuucaucauc

SEQ ID NO: 547660 - RNA, 19 nt, Artificial Sequence
  Synthetic
gcagaauauuuucaucauc

SEQ ID NO: 547661 - RNA, 20 nt, Artificial Sequence
  Synthetic
ugcagaauauuuucaucauc

SEQ ID NO: 547662 - RNA, 21 nt, Artificial Sequence
  Synthetic
augcagaauauuuucaucauc

SEQ ID NO: 547663 - RNA, 22 nt, Artificial Sequence
  Synthetic
gaugcagaauauuuucaucauc

SEQ ID NO: 547664 - RNA, 23 nt, Artificial Sequence
  Synthetic
ugaugcagaauauuuucaucauc

SEQ ID NO: 547665 - RNA, 24 nt, Artificial Sequence
  Synthetic
augaugcagaauauuuucaucauc

SEQ ID NO: 547666 - RNA, 18 nt, Artificial Sequence
  Synthetic
aaauuuuuugagaucauc

SEQ ID NO: 547667 - RNA, 19 nt, Artificial Sequence
  Synthetic
gaaauuuuuugagaucauc

SEQ ID NO: 547668 - RNA, 20 nt, Artificial Sequence
  Synthetic
ugaaauuuuuugagaucauc

SEQ ID NO: 547669 - RNA, 21 nt, Artificial Sequence
  Synthetic
gugaaauuuuuugagaucauc

SEQ ID NO: 547670 - RNA, 22 nt, Artificial Sequence
  Synthetic
ugugaaauuuuuugagaucauc

SEQ ID NO: 547671 - RNA, 23 nt, Artificial Sequence
  Synthetic
cugugaaauuuuuugagaucauc

SEQ ID NO: 547672 - RNA, 24 nt, Artificial Sequence
  Synthetic
ucugugaaauuuuuugagaucauc

SEQ ID NO: 547673 - RNA, 18 nt, Artificial Sequence
  Synthetic
uggauuccaaauaucauc

SEQ ID NO: 547674 - RNA, 19 nt, Artificial Sequence
  Synthetic
uuggauuccaaauaucauc

SEQ ID NO: 547675 - RNA, 20 nt, Artificial Sequence
  Synthetic
uuuggauuccaaauaucauc

SEQ ID NO: 547676 - RNA, 21 nt, Artificial Sequence
  Synthetic
uuuuggauuccaaauaucauc

SEQ ID NO: 547677 - RNA, 22 nt, Artificial Sequence
  Synthetic
uuuuuggauuccaaauaucauc

SEQ ID NO: 547678 - RNA, 23 nt, Artificial Sequence
  Synthetic
auuuuuggauuccaaauaucauc

SEQ ID NO: 547679 - RNA, 24 nt, Artificial Sequence
  Synthetic
aauuuuuggauuccaaauaucauc

SEQ ID NO: 547680 - RNA, 18 nt, Artificial Sequence
  Synthetic
auaacccuacguaucauc

SEQ ID NO: 547681 - RNA, 19 nt, Artificial Sequence
  Synthetic
aauaacccuacguaucauc

SEQ ID NO: 547682 - RNA, 20 nt, Artificial Sequence
  Synthetic
uaauaacccuacguaucauc

SEQ ID NO: 547683 - RNA, 21 nt, Artificial Sequence
  Synthetic
cuaauaacccuacguaucauc

SEQ ID NO: 547684 - RNA, 22 nt, Artificial Sequence
  Synthetic
acuaauaacccuacguaucauc

SEQ ID NO: 547685 - RNA, 23 nt, Artificial Sequence
  Synthetic
aacuaauaacccuacguaucauc

SEQ ID NO: 547686 - RNA, 24 nt, Artificial Sequence
  Synthetic
aaacuaauaacccuacguaucauc

SEQ ID NO: 547687 - RNA, 18 nt, Artificial Sequence
  Synthetic
auccaccuuggacucauc

SEQ ID NO: 547688 - RNA, 19 nt, Artificial Sequence
  Synthetic
uauccaccuuggacucauc

SEQ ID NO: 547689 - RNA, 20 nt, Artificial Sequence
  Synthetic
uuauccaccuuggacucauc

SEQ ID NO: 547690 - RNA, 21 nt, Artificial Sequence
  Synthetic
cuuauccaccuuggacucauc

SEQ ID NO: 547691 - RNA, 22 nt, Artificial Sequence
  Synthetic
ccuuauccaccuuggacucauc

SEQ ID NO: 547692 - RNA, 23 nt, Artificial Sequence
  Synthetic
accuuauccaccuuggacucauc

SEQ ID NO: 547693 - RNA, 24 nt, Artificial Sequence
  Synthetic
caccuuauccaccuuggacucauc

SEQ ID NO: 547694 - RNA, 18 nt, Artificial Sequence
  Synthetic
uaaaucacagaccucauc

SEQ ID NO: 547695 - RNA, 19 nt, Artificial Sequence
  Synthetic
guaaaucacagaccucauc

SEQ ID NO: 547696 - RNA, 20 nt, Artificial Sequence
  Synthetic
gguaaaucacagaccucauc

SEQ ID NO: 547697 - RNA, 21 nt, Artificial Sequence
  Synthetic
agguaaaucacagaccucauc

SEQ ID NO: 547698 - RNA, 22 nt, Artificial Sequence
  Synthetic
uagguaaaucacagaccucauc

SEQ ID NO: 547699 - RNA, 23 nt, Artificial Sequence
  Synthetic
auagguaaaucacagaccucauc

SEQ ID NO: 547700 - RNA, 24 nt, Artificial Sequence
  Synthetic
aauagguaaaucacagaccucauc

SEQ ID NO: 547701 - RNA, 18 nt, Artificial Sequence
  Synthetic
guuuaaugaguccucauc

SEQ ID NO: 547702 - RNA, 19 nt, Artificial Sequence
  Synthetic
uguuuaaugaguccucauc

SEQ ID NO: 547703 - RNA, 20 nt, Artificial Sequence
  Synthetic
auguuuaaugaguccucauc

SEQ ID NO: 547704 - RNA, 21 nt, Artificial Sequence
  Synthetic
uauguuuaaugaguccucauc

SEQ ID NO: 547705 - RNA, 22 nt, Artificial Sequence
  Synthetic
uuauguuuaaugaguccucauc

SEQ ID NO: 547706 - RNA, 23 nt, Artificial Sequence
  Synthetic
auuauguuuaaugaguccucauc

SEQ ID NO: 547707 - RNA, 24 nt, Artificial Sequence
  Synthetic
cauuauguuuaaugaguccucauc

SEQ ID NO: 547708 - RNA, 18 nt, Artificial Sequence
  Synthetic
ccucacccaaaucucauc

SEQ ID NO: 547709 - RNA, 19 nt, Artificial Sequence
  Synthetic
uccucacccaaaucucauc

SEQ ID NO: 547710 - RNA, 20 nt, Artificial Sequence
  Synthetic
guccucacccaaaucucauc

SEQ ID NO: 547711 - RNA, 21 nt, Artificial Sequence
  Synthetic
uguccucacccaaaucucauc

SEQ ID NO: 547712 - RNA, 22 nt, Artificial Sequence
  Synthetic
guguccucacccaaaucucauc

SEQ ID NO: 547713 - RNA, 23 nt, Artificial Sequence
  Synthetic
uguguccucacccaaaucucauc

SEQ ID NO: 547714 - RNA, 24 nt, Artificial Sequence
  Synthetic
uuguguccucacccaaaucucauc

SEQ ID NO: 547715 - RNA, 18 nt, Artificial Sequence
  Synthetic
ccccgcccaaaucucauc

SEQ ID NO: 547716 - RNA, 19 nt, Artificial Sequence
  Synthetic
uccccgcccaaaucucauc

SEQ ID NO: 547717 - RNA, 20 nt, Artificial Sequence
  Synthetic
guccccgcccaaaucucauc

SEQ ID NO: 547718 - RNA, 21 nt, Artificial Sequence
  Synthetic
uguccccgcccaaaucucauc

SEQ ID NO: 547719 - RNA, 22 nt, Artificial Sequence
  Synthetic
guguccccgcccaaaucucauc

SEQ ID NO: 547720 - RNA, 23 nt, Artificial Sequence
  Synthetic
uguguccccgcccaaaucucauc

SEQ ID NO: 547721 - RNA, 24 nt, Artificial Sequence
  Synthetic
auguguccccgcccaaaucucauc

SEQ ID NO: 547722 - RNA, 18 nt, Artificial Sequence
  Synthetic
augauguauucucucauc

SEQ ID NO: 547723 - RNA, 19 nt, Artificial Sequence
  Synthetic
aaugauguauucucucauc

SEQ ID NO: 547724 - RNA, 20 nt, Artificial Sequence
  Synthetic
uaaugauguauucucucauc

SEQ ID NO: 547725 - RNA, 21 nt, Artificial Sequence
  Synthetic
uuaaugauguauucucucauc

SEQ ID NO: 547726 - RNA, 22 nt, Artificial Sequence
  Synthetic
auuaaugauguauucucucauc

SEQ ID NO: 547727 - RNA, 23 nt, Artificial Sequence
  Synthetic
aauuaaugauguauucucucauc

SEQ ID NO: 547728 - RNA, 24 nt, Artificial Sequence
  Synthetic
uaauuaaugauguauucucucauc

SEQ ID NO: 547729 - RNA, 18 nt, Artificial Sequence
  Synthetic
cuucucagaggucucauc

SEQ ID NO: 547730 - RNA, 19 nt, Artificial Sequence
  Synthetic
ucuucucagaggucucauc

SEQ ID NO: 547731 - RNA, 20 nt, Artificial Sequence
  Synthetic
uucuucucagaggucucauc

SEQ ID NO: 547732 - RNA, 21 nt, Artificial Sequence
  Synthetic
uuucuucucagaggucucauc

SEQ ID NO: 547733 - RNA, 22 nt, Artificial Sequence
  Synthetic
uuuucuucucagaggucucauc

SEQ ID NO: 547734 - RNA, 23 nt, Artificial Sequence
  Synthetic
cuuuucuucucagaggucucauc

SEQ ID NO: 547735 - RNA, 24 nt, Artificial Sequence
  Synthetic
gcuuuucuucucagaggucucauc

SEQ ID NO: 547736 - RNA, 18 nt, Artificial Sequence
  Synthetic
cuuuuauugggucucauc

SEQ ID NO: 547737 - RNA, 19 nt, Artificial Sequence
  Synthetic
acuuuuauugggucucauc

SEQ ID NO: 547738 - RNA, 20 nt, Artificial Sequence
  Synthetic
aacuuuuauugggucucauc

SEQ ID NO: 547739 - RNA, 21 nt, Artificial Sequence
  Synthetic
aaacuuuuauugggucucauc

SEQ ID NO: 547740 - RNA, 22 nt, Artificial Sequence
  Synthetic
caaacuuuuauugggucucauc

SEQ ID NO: 547741 - RNA, 23 nt, Artificial Sequence
  Synthetic
gcaaacuuuuauugggucucauc

SEQ ID NO: 547742 - RNA, 24 nt, Artificial Sequence
  Synthetic
agcaaacuuuuauugggucucauc

SEQ ID NO: 547743 - RNA, 18 nt, Artificial Sequence
  Synthetic
uuguugcuggcagucauc

SEQ ID NO: 547744 - RNA, 19 nt, Artificial Sequence
  Synthetic
uuuguugcuggcagucauc

SEQ ID NO: 547745 - RNA, 20 nt, Artificial Sequence
  Synthetic
auuuguugcuggcagucauc

SEQ ID NO: 547746 - RNA, 21 nt, Artificial Sequence
  Synthetic
cauuuguugcuggcagucauc

SEQ ID NO: 547747 - RNA, 22 nt, Artificial Sequence
  Synthetic
ccauuuguugcuggcagucauc

SEQ ID NO: 547748 - RNA, 23 nt, Artificial Sequence
  Synthetic
cccauuuguugcuggcagucauc

SEQ ID NO: 547749 - RNA, 24 nt, Artificial Sequence
  Synthetic
acccauuuguugcuggcagucauc

SEQ ID NO: 547750 - RNA, 18 nt, Artificial Sequence
  Synthetic
ucucugggcgaggucauc

SEQ ID NO: 547751 - RNA, 19 nt, Artificial Sequence
  Synthetic
aucucugggcgaggucauc

SEQ ID NO: 547752 - RNA, 20 nt, Artificial Sequence
  Synthetic
uaucucugggcgaggucauc

SEQ ID NO: 547753 - RNA, 21 nt, Artificial Sequence
  Synthetic
guaucucugggcgaggucauc

SEQ ID NO: 547754 - RNA, 22 nt, Artificial Sequence
  Synthetic
aguaucucugggcgaggucauc

SEQ ID NO: 547755 - RNA, 23 nt, Artificial Sequence
  Synthetic
gaguaucucugggcgaggucauc

SEQ ID NO: 547756 - RNA, 24 nt, Artificial Sequence
  Synthetic
agaguaucucugggcgaggucauc

SEQ ID NO: 547757 - RNA, 18 nt, Artificial Sequence
  Synthetic
ggcugaaggcuggucauc

SEQ ID NO: 547758 - RNA, 19 nt, Artificial Sequence
  Synthetic
aggcugaaggcuggucauc

SEQ ID NO: 547759 - RNA, 20 nt, Artificial Sequence
  Synthetic
aaggcugaaggcuggucauc

SEQ ID NO: 547760 - RNA, 21 nt, Artificial Sequence
  Synthetic
gaaggcugaaggcuggucauc

SEQ ID NO: 547761 - RNA, 22 nt, Artificial Sequence
  Synthetic
ggaaggcugaaggcuggucauc

SEQ ID NO: 547762 - RNA, 23 nt, Artificial Sequence
  Synthetic
uggaaggcugaaggcuggucauc

SEQ ID NO: 547763 - RNA, 24 nt, Artificial Sequence
  Synthetic
guggaaggcugaaggcuggucauc

SEQ ID NO: 547764 - RNA, 18 nt, Artificial Sequence
  Synthetic
ccccuuauccaauucauc

SEQ ID NO: 547765 - RNA, 19 nt, Artificial Sequence
  Synthetic
gccccuuauccaauucauc

SEQ ID NO: 547766 - RNA, 20 nt, Artificial Sequence
  Synthetic
ugccccuuauccaauucauc

SEQ ID NO: 547767 - RNA, 21 nt, Artificial Sequence
  Synthetic
augccccuuauccaauucauc

SEQ ID NO: 547768 - RNA, 22 nt, Artificial Sequence
  Synthetic
caugccccuuauccaauucauc

SEQ ID NO: 547769 - RNA, 23 nt, Artificial Sequence
  Synthetic
ccaugccccuuauccaauucauc

SEQ ID NO: 547770 - RNA, 24 nt, Artificial Sequence
  Synthetic
cccaugccccuuauccaauucauc

SEQ ID NO: 547771 - RNA, 18 nt, Artificial Sequence
  Synthetic
uguuugguagaauucauc

SEQ ID NO: 547772 - RNA, 19 nt, Artificial Sequence
  Synthetic
auguuugguagaauucauc

SEQ ID NO: 547773 - RNA, 20 nt, Artificial Sequence
  Synthetic
uauguuugguagaauucauc

SEQ ID NO: 547774 - RNA, 21 nt, Artificial Sequence
  Synthetic
auauguuugguagaauucauc

SEQ ID NO: 547775 - RNA, 22 nt, Artificial Sequence
  Synthetic
uauauguuugguagaauucauc

SEQ ID NO: 547776 - RNA, 23 nt, Artificial Sequence
  Synthetic
uuauauguuugguagaauucauc

SEQ ID NO: 547777 - RNA, 24 nt, Artificial Sequence
  Synthetic
uuuauauguuugguagaauucauc

SEQ ID NO: 547778 - RNA, 18 nt, Artificial Sequence
  Synthetic
aaaaaauaaaacuucauc

SEQ ID NO: 547779 - RNA, 19 nt, Artificial Sequence
  Synthetic
uaaaaaauaaaacuucauc

SEQ ID NO: 547780 - RNA, 20 nt, Artificial Sequence
  Synthetic
guaaaaaauaaaacuucauc

SEQ ID NO: 547781 - RNA, 21 nt, Artificial Sequence
  Synthetic
aguaaaaaauaaaacuucauc

SEQ ID NO: 547782 - RNA, 22 nt, Artificial Sequence
  Synthetic
gaguaaaaaauaaaacuucauc

SEQ ID NO: 547783 - RNA, 23 nt, Artificial Sequence
  Synthetic
ggaguaaaaaauaaaacuucauc

SEQ ID NO: 547784 - RNA, 24 nt, Artificial Sequence
  Synthetic
aggaguaaaaaauaaaacuucauc

SEQ ID NO: 547785 - RNA, 18 nt, Artificial Sequence
  Synthetic
cucugcuuguacuucauc

SEQ ID NO: 547786 - RNA, 19 nt, Artificial Sequence
  Synthetic
gcucugcuuguacuucauc

SEQ ID NO: 547787 - RNA, 20 nt, Artificial Sequence
  Synthetic
agcucugcuuguacuucauc

SEQ ID NO: 547788 - RNA, 21 nt, Artificial Sequence
  Synthetic
gagcucugcuuguacuucauc

SEQ ID NO: 547789 - RNA, 22 nt, Artificial Sequence
  Synthetic
agagcucugcuuguacuucauc

SEQ ID NO: 547790 - RNA, 23 nt, Artificial Sequence
  Synthetic
cagagcucugcuuguacuucauc

SEQ ID NO: 547791 - RNA, 24 nt, Artificial Sequence
  Synthetic
acagagcucugcuuguacuucauc

SEQ ID NO: 547792 - RNA, 18 nt, Artificial Sequence
  Synthetic
ugggaggauuacuucauc

SEQ ID NO: 547793 - RNA, 19 nt, Artificial Sequence
  Synthetic
gugggaggauuacuucauc

SEQ ID NO: 547794 - RNA, 20 nt, Artificial Sequence
  Synthetic
ggugggaggauuacuucauc

SEQ ID NO: 547795 - RNA, 21 nt, Artificial Sequence
  Synthetic
aggugggaggauuacuucauc

SEQ ID NO: 547796 - RNA, 22 nt, Artificial Sequence
  Synthetic
gaggugggaggauuacuucauc

SEQ ID NO: 547797 - RNA, 23 nt, Artificial Sequence
  Synthetic
ugaggugggaggauuacuucauc

SEQ ID NO: 547798 - RNA, 24 nt, Artificial Sequence
  Synthetic
cugaggugggaggauuacuucauc

SEQ ID NO: 547799 - RNA, 18 nt, Artificial Sequence
  Synthetic
auaagucauuaguucauc

SEQ ID NO: 547800 - RNA, 19 nt, Artificial Sequence
  Synthetic
gauaagucauuaguucauc

SEQ ID NO: 547801 - RNA, 20 nt, Artificial Sequence
  Synthetic
cgauaagucauuaguucauc

SEQ ID NO: 547802 - RNA, 21 nt, Artificial Sequence
  Synthetic
ccgauaagucauuaguucauc

SEQ ID NO: 547803 - RNA, 22 nt, Artificial Sequence
  Synthetic
accgauaagucauuaguucauc

SEQ ID NO: 547804 - RNA, 23 nt, Artificial Sequence
  Synthetic
uaccgauaagucauuaguucauc

SEQ ID NO: 547805 - RNA, 24 nt, Artificial Sequence
  Synthetic
auaccgauaagucauuaguucauc

SEQ ID NO: 547806 - RNA, 18 nt, Artificial Sequence
  Synthetic
gauaaagguuauuucauc

SEQ ID NO: 547807 - RNA, 19 nt, Artificial Sequence
  Synthetic
ugauaaagguuauuucauc

SEQ ID NO: 547808 - RNA, 20 nt, Artificial Sequence
  Synthetic
uugauaaagguuauuucauc

SEQ ID NO: 547809 - RNA, 21 nt, Artificial Sequence
  Synthetic
auugauaaagguuauuucauc

SEQ ID NO: 547810 - RNA, 22 nt, Artificial Sequence
  Synthetic
uauugauaaagguuauuucauc

SEQ ID NO: 547811 - RNA, 23 nt, Artificial Sequence
  Synthetic
auauugauaaagguuauuucauc

SEQ ID NO: 547812 - RNA, 24 nt, Artificial Sequence
  Synthetic
uauauugauaaagguuauuucauc

SEQ ID NO: 547813 - RNA, 18 nt, Artificial Sequence
  Synthetic
acauuuucaacuuucauc

SEQ ID NO: 547814 - RNA, 19 nt, Artificial Sequence
  Synthetic
aacauuuucaacuuucauc

SEQ ID NO: 547815 - RNA, 20 nt, Artificial Sequence
  Synthetic
aaacauuuucaacuuucauc

SEQ ID NO: 547816 - RNA, 21 nt, Artificial Sequence
  Synthetic
uaaacauuuucaacuuucauc

SEQ ID NO: 547817 - RNA, 22 nt, Artificial Sequence
  Synthetic
uuaaacauuuucaacuuucauc

SEQ ID NO: 547818 - RNA, 23 nt, Artificial Sequence
  Synthetic
uuuaaacauuuucaacuuucauc

SEQ ID NO: 547819 - RNA, 24 nt, Artificial Sequence
  Synthetic
uuuuaaacauuuucaacuuucauc

SEQ ID NO: 547820 - RNA, 18 nt, Artificial Sequence
  Synthetic
cuugccuugucuuucauc

SEQ ID NO: 547821 - RNA, 19 nt, Artificial Sequence
  Synthetic
ucuugccuugucuuucauc

SEQ ID NO: 547822 - RNA, 20 nt, Artificial Sequence
  Synthetic
aucuugccuugucuuucauc

SEQ ID NO: 547823 - RNA, 21 nt, Artificial Sequence
  Synthetic
aaucuugccuugucuuucauc

SEQ ID NO: 547824 - RNA, 22 nt, Artificial Sequence
  Synthetic
caaucuugccuugucuuucauc

SEQ ID NO: 547825 - RNA, 23 nt, Artificial Sequence
  Synthetic
acaaucuugccuugucuuucauc

SEQ ID NO: 547826 - RNA, 24 nt, Artificial Sequence
  Synthetic
cacaaucuugccuugucuuucauc

SEQ ID NO: 547827 - RNA, 18 nt, Artificial Sequence
  Synthetic
cacauuaaauguuucauc

SEQ ID NO: 547828 - RNA, 19 nt, Artificial Sequence
  Synthetic
acacauuaaauguuucauc

SEQ ID NO: 547829 - RNA, 20 nt, Artificial Sequence
  Synthetic
aacacauuaaauguuucauc

SEQ ID NO: 547830 - RNA, 21 nt, Artificial Sequence
  Synthetic
gaacacauuaaauguuucauc

SEQ ID NO: 547831 - RNA, 22 nt, Artificial Sequence
  Synthetic
ugaacacauuaaauguuucauc

SEQ ID NO: 547832 - RNA, 23 nt, Artificial Sequence
  Synthetic
cugaacacauuaaauguuucauc

SEQ ID NO: 547833 - RNA, 24 nt, Artificial Sequence
  Synthetic
ucugaacacauuaaauguuucauc

SEQ ID NO: 547834 - RNA, 18 nt, Artificial Sequence
  Synthetic
uguucaauauuuuucauc

SEQ ID NO: 547835 - RNA, 19 nt, Artificial Sequence
  Synthetic
auguucaauauuuuucauc

SEQ ID NO: 547836 - RNA, 20 nt, Artificial Sequence
  Synthetic
uauguucaauauuuuucauc

SEQ ID NO: 547837 - RNA, 21 nt, Artificial Sequence
  Synthetic
auauguucaauauuuuucauc

SEQ ID NO: 547838 - RNA, 22 nt, Artificial Sequence
  Synthetic
uauauguucaauauuuuucauc

SEQ ID NO: 547839 - RNA, 23 nt, Artificial Sequence
  Synthetic
guauauguucaauauuuuucauc

SEQ ID NO: 547840 - RNA, 24 nt, Artificial Sequence
  Synthetic
uguauauguucaauauuuuucauc

SEQ ID NO: 547841 - RNA, 18 nt, Artificial Sequence
  Synthetic
guguuuuuuuuuuucauc

SEQ ID NO: 547842 - RNA, 19 nt, Artificial Sequence
  Synthetic
uguguuuuuuuuuuucauc

SEQ ID NO: 547843 - RNA, 20 nt, Artificial Sequence
  Synthetic
cuguguuuuuuuuuuucauc

SEQ ID NO: 547844 - RNA, 21 nt, Artificial Sequence
  Synthetic
acuguguuuuuuuuuuucauc

SEQ ID NO: 547845 - RNA, 22 nt, Artificial Sequence
  Synthetic
aacuguguuuuuuuuuuucauc

SEQ ID NO: 547846 - RNA, 23 nt, Artificial Sequence
  Synthetic
gaacuguguuuuuuuuuuucauc

SEQ ID NO: 547847 - RNA, 24 nt, Artificial Sequence
  Synthetic
ugaacuguguuuuuuuuuuucauc

SEQ ID NO: 547848 - RNA, 18 nt, Artificial Sequence
  Synthetic
aaagucaaaaaaaagauc

SEQ ID NO: 547849 - RNA, 19 nt, Artificial Sequence
  Synthetic
uaaagucaaaaaaaagauc

SEQ ID NO: 547850 - RNA, 20 nt, Artificial Sequence
  Synthetic
uuaaagucaaaaaaaagauc

SEQ ID NO: 547851 - RNA, 21 nt, Artificial Sequence
  Synthetic
guuaaagucaaaaaaaagauc

SEQ ID NO: 547852 - RNA, 22 nt, Artificial Sequence
  Synthetic
gguuaaagucaaaaaaaagauc

SEQ ID NO: 547853 - RNA, 23 nt, Artificial Sequence
  Synthetic
agguuaaagucaaaaaaaagauc

SEQ ID NO: 547854 - RNA, 24 nt, Artificial Sequence
  Synthetic
aagguuaaagucaaaaaaaagauc

SEQ ID NO: 547855 - RNA, 18 nt, Artificial Sequence
  Synthetic
cauggaagcaaaaagauc

SEQ ID NO: 547856 - RNA, 19 nt, Artificial Sequence
  Synthetic
ucauggaagcaaaaagauc

SEQ ID NO: 547857 - RNA, 20 nt, Artificial Sequence
  Synthetic
aucauggaagcaaaaagauc

SEQ ID NO: 547858 - RNA, 21 nt, Artificial Sequence
  Synthetic
aaucauggaagcaaaaagauc

SEQ ID NO: 547859 - RNA, 22 nt, Artificial Sequence
  Synthetic
aaaucauggaagcaaaaagauc

SEQ ID NO: 547860 - RNA, 23 nt, Artificial Sequence
  Synthetic
gaaaucauggaagcaaaaagauc

SEQ ID NO: 547861 - RNA, 24 nt, Artificial Sequence
  Synthetic
agaaaucauggaagcaaaaagauc

SEQ ID NO: 547862 - RNA, 18 nt, Artificial Sequence
  Synthetic
ucauagcaguaaaagauc

SEQ ID NO: 547863 - RNA, 19 nt, Artificial Sequence
  Synthetic
uucauagcaguaaaagauc

SEQ ID NO: 547864 - RNA, 20 nt, Artificial Sequence
  Synthetic
uuucauagcaguaaaagauc

SEQ ID NO: 547865 - RNA, 21 nt, Artificial Sequence
  Synthetic
auuucauagcaguaaaagauc

SEQ ID NO: 547866 - RNA, 22 nt, Artificial Sequence
  Synthetic
cauuucauagcaguaaaagauc

SEQ ID NO: 547867 - RNA, 23 nt, Artificial Sequence
  Synthetic
gcauuucauagcaguaaaagauc

SEQ ID NO: 547868 - RNA, 24 nt, Artificial Sequence
  Synthetic
ugcauuucauagcaguaaaagauc

SEQ ID NO: 547869 - RNA, 18 nt, Artificial Sequence
  Synthetic
uccagcuccucaaagauc

SEQ ID NO: 547870 - RNA, 19 nt, Artificial Sequence
  Synthetic
uuccagcuccucaaagauc

SEQ ID NO: 547871 - RNA, 20 nt, Artificial Sequence
  Synthetic
cuuccagcuccucaaagauc

SEQ ID NO: 547872 - RNA, 21 nt, Artificial Sequence
  Synthetic
gcuuccagcuccucaaagauc

SEQ ID NO: 547873 - RNA, 22 nt, Artificial Sequence
  Synthetic
ggcuuccagcuccucaaagauc

SEQ ID NO: 547874 - RNA, 23 nt, Artificial Sequence
  Synthetic
uggcuuccagcuccucaaagauc

SEQ ID NO: 547875 - RNA, 24 nt, Artificial Sequence
  Synthetic
auggcuuccagcuccucaaagauc

SEQ ID NO: 547876 - RNA, 18 nt, Artificial Sequence
  Synthetic
aagucagccauaaagauc

SEQ ID NO: 547877 - RNA, 19 nt, Artificial Sequence
  Synthetic
aaagucagccauaaagauc

SEQ ID NO: 547878 - RNA, 20 nt, Artificial Sequence
  Synthetic
caaagucagccauaaagauc

SEQ ID NO: 547879 - RNA, 21 nt, Artificial Sequence
  Synthetic
ucaaagucagccauaaagauc

SEQ ID NO: 547880 - RNA, 22 nt, Artificial Sequence
  Synthetic
uucaaagucagccauaaagauc

SEQ ID NO: 547881 - RNA, 23 nt, Artificial Sequence
  Synthetic
auucaaagucagccauaaagauc

SEQ ID NO: 547882 - RNA, 24 nt, Artificial Sequence
  Synthetic
gauucaaagucagccauaaagauc

SEQ ID NO: 547883 - RNA, 18 nt, Artificial Sequence
  Synthetic
acuuuauagauaaagauc

SEQ ID NO: 547884 - RNA, 19 nt, Artificial Sequence
  Synthetic
aacuuuauagauaaagauc

SEQ ID NO: 547885 - RNA, 20 nt, Artificial Sequence
  Synthetic
aaacuuuauagauaaagauc

SEQ ID NO: 547886 - RNA, 21 nt, Artificial Sequence
  Synthetic
caaacuuuauagauaaagauc

SEQ ID NO: 547887 - RNA, 22 nt, Artificial Sequence
  Synthetic
gcaaacuuuauagauaaagauc

SEQ ID NO: 547888 - RNA, 23 nt, Artificial Sequence
  Synthetic
ggcaaacuuuauagauaaagauc

SEQ ID NO: 547889 - RNA, 24 nt, Artificial Sequence
  Synthetic
uggcaaacuuuauagauaaagauc

SEQ ID NO: 547890 - RNA, 18 nt, Artificial Sequence
  Synthetic
ugauuuucaaagaagauc

SEQ ID NO: 547891 - RNA, 19 nt, Artificial Sequence
  Synthetic
augauuuucaaagaagauc

SEQ ID NO: 547892 - RNA, 20 nt, Artificial Sequence
  Synthetic
caugauuuucaaagaagauc

SEQ ID NO: 547893 - RNA, 21 nt, Artificial Sequence
  Synthetic
ucaugauuuucaaagaagauc

SEQ ID NO: 547894 - RNA, 22 nt, Artificial Sequence
  Synthetic
aucaugauuuucaaagaagauc

SEQ ID NO: 547895 - RNA, 23 nt, Artificial Sequence
  Synthetic
aaucaugauuuucaaagaagauc

SEQ ID NO: 547896 - RNA, 24 nt, Artificial Sequence
  Synthetic
aaaucaugauuuucaaagaagauc

SEQ ID NO: 547897 - RNA, 18 nt, Artificial Sequence
  Synthetic
ucuugauucuagaagauc

SEQ ID NO: 547898 - RNA, 19 nt, Artificial Sequence
  Synthetic
cucuugauucuagaagauc

SEQ ID NO: 547899 - RNA, 20 nt, Artificial Sequence
  Synthetic
ucucuugauucuagaagauc

SEQ ID NO: 547900 - RNA, 21 nt, Artificial Sequence
  Synthetic
uucucuugauucuagaagauc

SEQ ID NO: 547901 - RNA, 22 nt, Artificial Sequence
  Synthetic
auucucuugauucuagaagauc

SEQ ID NO: 547902 - RNA, 23 nt, Artificial Sequence
  Synthetic
aauucucuugauucuagaagauc

SEQ ID NO: 547903 - RNA, 24 nt, Artificial Sequence
  Synthetic
caauucucuugauucuagaagauc

SEQ ID NO: 547904 - RNA, 18 nt, Artificial Sequence
  Synthetic
aaaauaaaguagaagauc

SEQ ID NO: 547905 - RNA, 19 nt, Artificial Sequence
  Synthetic
caaaauaaaguagaagauc

SEQ ID NO: 547906 - RNA, 20 nt, Artificial Sequence
  Synthetic
acaaaauaaaguagaagauc

SEQ ID NO: 547907 - RNA, 21 nt, Artificial Sequence
  Synthetic
uacaaaauaaaguagaagauc

SEQ ID NO: 547908 - RNA, 22 nt, Artificial Sequence
  Synthetic
guacaaaauaaaguagaagauc

SEQ ID NO: 547909 - RNA, 23 nt, Artificial Sequence
  Synthetic
aguacaaaauaaaguagaagauc

SEQ ID NO: 547910 - RNA, 24 nt, Artificial Sequence
  Synthetic
gaguacaaaauaaaguagaagauc

SEQ ID NO: 547911 - RNA, 18 nt, Artificial Sequence
  Synthetic
gaauaggaaacgaagauc

SEQ ID NO: 547912 - RNA, 19 nt, Artificial Sequence
  Synthetic
agaauaggaaacgaagauc

SEQ ID NO: 547913 - RNA, 20 nt, Artificial Sequence
  Synthetic
cagaauaggaaacgaagauc

SEQ ID NO: 547914 - RNA, 21 nt, Artificial Sequence
  Synthetic
ucagaauaggaaacgaagauc

SEQ ID NO: 547915 - RNA, 22 nt, Artificial Sequence
  Synthetic
cucagaauaggaaacgaagauc

SEQ ID NO: 547916 - RNA, 23 nt, Artificial Sequence
  Synthetic
acucagaauaggaaacgaagauc

SEQ ID NO: 547917 - RNA, 24 nt, Artificial Sequence
  Synthetic
uacucagaauaggaaacgaagauc

SEQ ID NO: 547918 - RNA, 18 nt, Artificial Sequence
  Synthetic
caaguaccucugaagauc

SEQ ID NO: 547919 - RNA, 19 nt, Artificial Sequence
  Synthetic
acaaguaccucugaagauc

SEQ ID NO: 547920 - RNA, 20 nt, Artificial Sequence
  Synthetic
gacaaguaccucugaagauc

SEQ ID NO: 547921 - RNA, 21 nt, Artificial Sequence
  Synthetic
agacaaguaccucugaagauc

SEQ ID NO: 547922 - RNA, 22 nt, Artificial Sequence
  Synthetic
aagacaaguaccucugaagauc

SEQ ID NO: 547923 - RNA, 23 nt, Artificial Sequence
  Synthetic
gaagacaaguaccucugaagauc

SEQ ID NO: 547924 - RNA, 24 nt, Artificial Sequence
  Synthetic
agaagacaaguaccucugaagauc

SEQ ID NO: 547925 - RNA, 18 nt, Artificial Sequence
  Synthetic
aaacuuuaccauaagauc

SEQ ID NO: 547926 - RNA, 19 nt, Artificial Sequence
  Synthetic
uaaacuuuaccauaagauc

SEQ ID NO: 547927 - RNA, 20 nt, Artificial Sequence
  Synthetic
uuaaacuuuaccauaagauc

SEQ ID NO: 547928 - RNA, 21 nt, Artificial Sequence
  Synthetic
uuuaaacuuuaccauaagauc

SEQ ID NO: 547929 - RNA, 22 nt, Artificial Sequence
  Synthetic
cuuuaaacuuuaccauaagauc

SEQ ID NO: 547930 - RNA, 23 nt, Artificial Sequence
  Synthetic
ucuuuaaacuuuaccauaagauc

SEQ ID NO: 547931 - RNA, 24 nt, Artificial Sequence
  Synthetic
uucuuuaaacuuuaccauaagauc

SEQ ID NO: 547932 - RNA, 18 nt, Artificial Sequence
  Synthetic
aggcuuuucucuaagauc

SEQ ID NO: 547933 - RNA, 19 nt, Artificial Sequence
  Synthetic
aaggcuuuucucuaagauc

SEQ ID NO: 547934 - RNA, 20 nt, Artificial Sequence
  Synthetic
gaaggcuuuucucuaagauc

SEQ ID NO: 547935 - RNA, 21 nt, Artificial Sequence
  Synthetic
agaaggcuuuucucuaagauc

SEQ ID NO: 547936 - RNA, 22 nt, Artificial Sequence
  Synthetic
uagaaggcuuuucucuaagauc

SEQ ID NO: 547937 - RNA, 23 nt, Artificial Sequence
  Synthetic
guagaaggcuuuucucuaagauc

SEQ ID NO: 547938 - RNA, 24 nt, Artificial Sequence
  Synthetic
cguagaaggcuuuucucuaagauc

SEQ ID NO: 547939 - RNA, 18 nt, Artificial Sequence
  Synthetic
uuuucaacuuuuaagauc

SEQ ID NO: 547940 - RNA, 19 nt, Artificial Sequence
  Synthetic
uuuuucaacuuuuaagauc

SEQ ID NO: 547941 - RNA, 20 nt, Artificial Sequence
  Synthetic
uuuuuucaacuuuuaagauc

SEQ ID NO: 547942 - RNA, 21 nt, Artificial Sequence
  Synthetic
uuuuuuucaacuuuuaagauc

SEQ ID NO: 547943 - RNA, 22 nt, Artificial Sequence
  Synthetic
uuuuuuuucaacuuuuaagauc

SEQ ID NO: 547944 - RNA, 23 nt, Artificial Sequence
  Synthetic
uuuuuuuuucaacuuuuaagauc

SEQ ID NO: 547945 - RNA, 24 nt, Artificial Sequence
  Synthetic
cuuuuuuuuucaacuuuuaagauc

SEQ ID NO: 547946 - RNA, 18 nt, Artificial Sequence
  Synthetic
cuuguauacacacagauc

SEQ ID NO: 547947 - RNA, 19 nt, Artificial Sequence
  Synthetic
acuuguauacacacagauc

SEQ ID NO: 547948 - RNA, 20 nt, Artificial Sequence
  Synthetic
cacuuguauacacacagauc

SEQ ID NO: 547949 - RNA, 21 nt, Artificial Sequence
  Synthetic
ucacuuguauacacacagauc

SEQ ID NO: 547950 - RNA, 22 nt, Artificial Sequence
  Synthetic
uucacuuguauacacacagauc

SEQ ID NO: 547951 - RNA, 23 nt, Artificial Sequence
  Synthetic
cuucacuuguauacacacagauc

SEQ ID NO: 547952 - RNA, 24 nt, Artificial Sequence
  Synthetic
acuucacuuguauacacacagauc

SEQ ID NO: 547953 - RNA, 18 nt, Artificial Sequence
  Synthetic
aagcggacgggacagauc

SEQ ID NO: 547954 - RNA, 19 nt, Artificial Sequence
  Synthetic
caagcggacgggacagauc

SEQ ID NO: 547955 - RNA, 20 nt, Artificial Sequence
  Synthetic
gcaagcggacgggacagauc

SEQ ID NO: 547956 - RNA, 21 nt, Artificial Sequence
  Synthetic
agcaagcggacgggacagauc

SEQ ID NO: 547957 - RNA, 22 nt, Artificial Sequence
  Synthetic
gagcaagcggacgggacagauc

SEQ ID NO: 547958 - RNA, 23 nt, Artificial Sequence
  Synthetic
agagcaagcggacgggacagauc

SEQ ID NO: 547959 - RNA, 24 nt, Artificial Sequence
  Synthetic
cagagcaagcggacgggacagauc

SEQ ID NO: 547960 - RNA, 18 nt, Artificial Sequence
  Synthetic
ucugaaagccuccagauc

SEQ ID NO: 547961 - RNA, 19 nt, Artificial Sequence
  Synthetic
gucugaaagccuccagauc

SEQ ID NO: 547962 - RNA, 20 nt, Artificial Sequence
  Synthetic
ggucugaaagccuccagauc

SEQ ID NO: 547963 - RNA, 21 nt, Artificial Sequence
  Synthetic
uggucugaaagccuccagauc

SEQ ID NO: 547964 - RNA, 22 nt, Artificial Sequence
  Synthetic
auggucugaaagccuccagauc

SEQ ID NO: 547965 - RNA, 23 nt, Artificial Sequence
  Synthetic
cauggucugaaagccuccagauc

SEQ ID NO: 547966 - RNA, 24 nt, Artificial Sequence
  Synthetic
gcauggucugaaagccuccagauc

SEQ ID NO: 547967 - RNA, 18 nt, Artificial Sequence
  Synthetic
gccagucuguuccagauc

SEQ ID NO: 547968 - RNA, 19 nt, Artificial Sequence
  Synthetic
cgccagucuguuccagauc

SEQ ID NO: 547969 - RNA, 20 nt, Artificial Sequence
  Synthetic
ccgccagucuguuccagauc

SEQ ID NO: 547970 - RNA, 21 nt, Artificial Sequence
  Synthetic
uccgccagucuguuccagauc

SEQ ID NO: 547971 - RNA, 22 nt, Artificial Sequence
  Synthetic
auccgccagucuguuccagauc

SEQ ID NO: 547972 - RNA, 23 nt, Artificial Sequence
  Synthetic
uauccgccagucuguuccagauc

SEQ ID NO: 547973 - RNA, 24 nt, Artificial Sequence
  Synthetic
uuauccgccagucuguuccagauc

SEQ ID NO: 547974 - RNA, 18 nt, Artificial Sequence
  Synthetic
ggcugaggugagcagauc

SEQ ID NO: 547975 - RNA, 19 nt, Artificial Sequence
  Synthetic
aggcugaggugagcagauc

SEQ ID NO: 547976 - RNA, 20 nt, Artificial Sequence
  Synthetic
gaggcugaggugagcagauc

SEQ ID NO: 547977 - RNA, 21 nt, Artificial Sequence
  Synthetic
ggaggcugaggugagcagauc

SEQ ID NO: 547978 - RNA, 22 nt, Artificial Sequence
  Synthetic
cggaggcugaggugagcagauc

SEQ ID NO: 547979 - RNA, 23 nt, Artificial Sequence
  Synthetic
ucggaggcugaggugagcagauc

SEQ ID NO: 547980 - RNA, 24 nt, Artificial Sequence
  Synthetic
uucggaggcugaggugagcagauc

SEQ ID NO: 547981 - RNA, 18 nt, Artificial Sequence
  Synthetic
ggccaagacaggcagauc

SEQ ID NO: 547982 - RNA, 19 nt, Artificial Sequence
  Synthetic
aggccaagacaggcagauc

SEQ ID NO: 547983 - RNA, 20 nt, Artificial Sequence
  Synthetic
gaggccaagacaggcagauc

SEQ ID NO: 547984 - RNA, 21 nt, Artificial Sequence
  Synthetic
ggaggccaagacaggcagauc

SEQ ID NO: 547985 - RNA, 22 nt, Artificial Sequence
  Synthetic
gggaggccaagacaggcagauc

SEQ ID NO: 547986 - RNA, 23 nt, Artificial Sequence
  Synthetic
ugggaggccaagacaggcagauc

SEQ ID NO: 547987 - RNA, 24 nt, Artificial Sequence
  Synthetic
uugggaggccaagacaggcagauc

SEQ ID NO: 547988 - RNA, 18 nt, Artificial Sequence
  Synthetic
ggcugaggcaggcagauc

SEQ ID NO: 547989 - RNA, 19 nt, Artificial Sequence
  Synthetic
aggcugaggcaggcagauc

SEQ ID NO: 547990 - RNA, 20 nt, Artificial Sequence
  Synthetic
gaggcugaggcaggcagauc

SEQ ID NO: 547991 - RNA, 21 nt, Artificial Sequence
  Synthetic
ggaggcugaggcaggcagauc

SEQ ID NO: 547992 - RNA, 22 nt, Artificial Sequence
  Synthetic
gggaggcugaggcaggcagauc

SEQ ID NO: 547993 - RNA, 23 nt, Artificial Sequence
  Synthetic
ugggaggcugaggcaggcagauc

SEQ ID NO: 547994 - RNA, 24 nt, Artificial Sequence
  Synthetic
uugggaggcugaggcaggcagauc

SEQ ID NO: 547995 - RNA, 21 nt, Artificial Sequence
  Synthetic
ggaggccgaggcgggcagauc

SEQ ID NO: 547996 - RNA, 22 nt, Artificial Sequence
  Synthetic
gggaggccgaggcgggcagauc

SEQ ID NO: 547997 - RNA, 23 nt, Artificial Sequence
  Synthetic
ugggaggccgaggcgggcagauc

SEQ ID NO: 547998 - RNA, 24 nt, Artificial Sequence
  Synthetic
cugggaggccgaggcgggcagauc

SEQ ID NO: 547999 - RNA, 21 nt, Artificial Sequence
  Synthetic
ggaggccaaggugggcagauc

SEQ ID NO: 548000 - RNA, 22 nt, Artificial Sequence
  Synthetic
gggaggccaaggugggcagauc

SEQ ID NO: 548001 - RNA, 23 nt, Artificial Sequence
  Synthetic
ugggaggccaaggugggcagauc

SEQ ID NO: 548002 - RNA, 24 nt, Artificial Sequence
  Synthetic
uugggaggccaaggugggcagauc

SEQ ID NO: 548003 - RNA, 18 nt, Artificial Sequence
  Synthetic
uuaauaaaucaagagauc

SEQ ID NO: 548004 - RNA, 19 nt, Artificial Sequence
  Synthetic
uuuaauaaaucaagagauc

SEQ ID NO: 548005 - RNA, 20 nt, Artificial Sequence
  Synthetic
guuuaauaaaucaagagauc

SEQ ID NO: 548006 - RNA, 21 nt, Artificial Sequence
  Synthetic
aguuuaauaaaucaagagauc

SEQ ID NO: 548007 - RNA, 22 nt, Artificial Sequence
  Synthetic
uaguuuaauaaaucaagagauc

SEQ ID NO: 548008 - RNA, 23 nt, Artificial Sequence
  Synthetic
cuaguuuaauaaaucaagagauc

SEQ ID NO: 548009 - RNA, 24 nt, Artificial Sequence
  Synthetic
acuaguuuaauaaaucaagagauc

SEQ ID NO: 548010 - RNA, 18 nt, Artificial Sequence
  Synthetic
gggggauauuaagagauc

SEQ ID NO: 548011 - RNA, 19 nt, Artificial Sequence
  Synthetic
ugggggauauuaagagauc

SEQ ID NO: 548012 - RNA, 20 nt, Artificial Sequence
  Synthetic
uugggggauauuaagagauc

SEQ ID NO: 548013 - RNA, 21 nt, Artificial Sequence
  Synthetic
uuugggggauauuaagagauc

SEQ ID NO: 548014 - RNA, 22 nt, Artificial Sequence
  Synthetic
cuuugggggauauuaagagauc

SEQ ID NO: 548015 - RNA, 23 nt, Artificial Sequence
  Synthetic
ccuuugggggauauuaagagauc

SEQ ID NO: 548016 - RNA, 24 nt, Artificial Sequence
  Synthetic
cccuuugggggauauuaagagauc

SEQ ID NO: 548017 - RNA, 18 nt, Artificial Sequence
  Synthetic
gauugggaaagagagauc

SEQ ID NO: 548018 - RNA, 19 nt, Artificial Sequence
  Synthetic
agauugggaaagagagauc

SEQ ID NO: 548019 - RNA, 20 nt, Artificial Sequence
  Synthetic
uagauugggaaagagagauc

SEQ ID NO: 548020 - RNA, 21 nt, Artificial Sequence
  Synthetic
guagauugggaaagagagauc

SEQ ID NO: 548021 - RNA, 22 nt, Artificial Sequence
  Synthetic
aguagauugggaaagagagauc

SEQ ID NO: 548022 - RNA, 23 nt, Artificial Sequence
  Synthetic
caguagauugggaaagagagauc

SEQ ID NO: 548023 - RNA, 24 nt, Artificial Sequence
  Synthetic
ucaguagauugggaaagagagauc

SEQ ID NO: 548024 - RNA, 18 nt, Artificial Sequence
  Synthetic
guauacuugugagagauc

SEQ ID NO: 548025 - RNA, 19 nt, Artificial Sequence
  Synthetic
uguauacuugugagagauc

SEQ ID NO: 548026 - RNA, 20 nt, Artificial Sequence
  Synthetic
guguauacuugugagagauc

SEQ ID NO: 548027 - RNA, 21 nt, Artificial Sequence
  Synthetic
uguguauacuugugagagauc

SEQ ID NO: 548028 - RNA, 22 nt, Artificial Sequence
  Synthetic
auguguauacuugugagagauc

SEQ ID NO: 548029 - RNA, 23 nt, Artificial Sequence
  Synthetic
aauguguauacuugugagagauc

SEQ ID NO: 548030 - RNA, 24 nt, Artificial Sequence
  Synthetic
aaauguguauacuugugagagauc

SEQ ID NO: 548031 - RNA, 18 nt, Artificial Sequence
  Synthetic
aaaaaagcacuagagauc

SEQ ID NO: 548032 - RNA, 19 nt, Artificial Sequence
  Synthetic
gaaaaaagcacuagagauc

SEQ ID NO: 548033 - RNA, 20 nt, Artificial Sequence
  Synthetic
ugaaaaaagcacuagagauc

SEQ ID NO: 548034 - RNA, 21 nt, Artificial Sequence
  Synthetic
gugaaaaaagcacuagagauc

SEQ ID NO: 548035 - RNA, 22 nt, Artificial Sequence
  Synthetic
agugaaaaaagcacuagagauc

SEQ ID NO: 548036 - RNA, 23 nt, Artificial Sequence
  Synthetic
uagugaaaaaagcacuagagauc

SEQ ID NO: 548037 - RNA, 24 nt, Artificial Sequence
  Synthetic
cuagugaaaaaagcacuagagauc

SEQ ID NO: 548038 - RNA, 18 nt, Artificial Sequence
  Synthetic
ugggcggaucacgagauc

SEQ ID NO: 548039 - RNA, 19 nt, Artificial Sequence
  Synthetic
gugggcggaucacgagauc

SEQ ID NO: 548040 - RNA, 20 nt, Artificial Sequence
  Synthetic
ggugggcggaucacgagauc

SEQ ID NO: 548041 - RNA, 21 nt, Artificial Sequence
  Synthetic
aggugggcggaucacgagauc

SEQ ID NO: 548042 - RNA, 22 nt, Artificial Sequence
  Synthetic
aaggugggcggaucacgagauc

SEQ ID NO: 548043 - RNA, 23 nt, Artificial Sequence
  Synthetic
caaggugggcggaucacgagauc

SEQ ID NO: 548044 - RNA, 24 nt, Artificial Sequence
  Synthetic
ccaaggugggcggaucacgagauc

SEQ ID NO: 548045 - RNA, 18 nt, Artificial Sequence
  Synthetic
ucaugaggucaggagauc

SEQ ID NO: 548046 - RNA, 19 nt, Artificial Sequence
  Synthetic
aucaugaggucaggagauc

SEQ ID NO: 548047 - RNA, 20 nt, Artificial Sequence
  Synthetic
gaucaugaggucaggagauc

SEQ ID NO: 548048 - RNA, 21 nt, Artificial Sequence
  Synthetic
ggaucaugaggucaggagauc

SEQ ID NO: 548049 - RNA, 22 nt, Artificial Sequence
  Synthetic
uggaucaugaggucaggagauc

SEQ ID NO: 548050 - RNA, 23 nt, Artificial Sequence
  Synthetic
guggaucaugaggucaggagauc

SEQ ID NO: 548051 - RNA, 24 nt, Artificial Sequence
  Synthetic
gguggaucaugaggucaggagauc

SEQ ID NO: 548052 - RNA, 18 nt, Artificial Sequence
  Synthetic
gcuuagcugagggagauc

SEQ ID NO: 548053 - RNA, 19 nt, Artificial Sequence
  Synthetic
agcuuagcugagggagauc

SEQ ID NO: 548054 - RNA, 20 nt, Artificial Sequence
  Synthetic
uagcuuagcugagggagauc

SEQ ID NO: 548055 - RNA, 21 nt, Artificial Sequence
  Synthetic
auagcuuagcugagggagauc

SEQ ID NO: 548056 - RNA, 22 nt, Artificial Sequence
  Synthetic
uauagcuuagcugagggagauc

SEQ ID NO: 548057 - RNA, 23 nt, Artificial Sequence
  Synthetic
guauagcuuagcugagggagauc

SEQ ID NO: 548058 - RNA, 24 nt, Artificial Sequence
  Synthetic
uguauagcuuagcugagggagauc

SEQ ID NO: 548059 - RNA, 18 nt, Artificial Sequence
  Synthetic
uccauuguaauggagauc

SEQ ID NO: 548060 - RNA, 19 nt, Artificial Sequence
  Synthetic
guccauuguaauggagauc

SEQ ID NO: 548061 - RNA, 20 nt, Artificial Sequence
  Synthetic
uguccauuguaauggagauc

SEQ ID NO: 548062 - RNA, 21 nt, Artificial Sequence
  Synthetic
cuguccauuguaauggagauc

SEQ ID NO: 548063 - RNA, 22 nt, Artificial Sequence
  Synthetic
ccuguccauuguaauggagauc

SEQ ID NO: 548064 - RNA, 23 nt, Artificial Sequence
  Synthetic
accuguccauuguaauggagauc

SEQ ID NO: 548065 - RNA, 24 nt, Artificial Sequence
  Synthetic
caccuguccauuguaauggagauc

SEQ ID NO: 548066 - RNA, 18 nt, Artificial Sequence
  Synthetic
aguacaguucuggagauc

SEQ ID NO: 548067 - RNA, 19 nt, Artificial Sequence
  Synthetic
aaguacaguucuggagauc

SEQ ID NO: 548068 - RNA, 20 nt, Artificial Sequence
  Synthetic
aaaguacaguucuggagauc

SEQ ID NO: 548069 - RNA, 21 nt, Artificial Sequence
  Synthetic
gaaaguacaguucuggagauc

SEQ ID NO: 548070 - RNA, 22 nt, Artificial Sequence
  Synthetic
agaaaguacaguucuggagauc

SEQ ID NO: 548071 - RNA, 23 nt, Artificial Sequence
  Synthetic
cagaaaguacaguucuggagauc

SEQ ID NO: 548072 - RNA, 24 nt, Artificial Sequence
  Synthetic
gcagaaaguacaguucuggagauc

SEQ ID NO: 548073 - RNA, 18 nt, Artificial Sequence
  Synthetic
ugaacggaucaugagauc

SEQ ID NO: 548074 - RNA, 19 nt, Artificial Sequence
  Synthetic
gugaacggaucaugagauc

SEQ ID NO: 548075 - RNA, 20 nt, Artificial Sequence
  Synthetic
ggugaacggaucaugagauc

SEQ ID NO: 548076 - RNA, 21 nt, Artificial Sequence
  Synthetic
aggugaacggaucaugagauc

SEQ ID NO: 548077 - RNA, 22 nt, Artificial Sequence
  Synthetic
gaggugaacggaucaugagauc

SEQ ID NO: 548078 - RNA, 23 nt, Artificial Sequence
  Synthetic
cgaggugaacggaucaugagauc

SEQ ID NO: 548079 - RNA, 24 nt, Artificial Sequence
  Synthetic
ccgaggugaacggaucaugagauc

SEQ ID NO: 548080 - RNA, 18 nt, Artificial Sequence
  Synthetic
acuuucacagcugagauc

SEQ ID NO: 548081 - RNA, 19 nt, Artificial Sequence
  Synthetic
uacuuucacagcugagauc

SEQ ID NO: 548082 - RNA, 20 nt, Artificial Sequence
  Synthetic
cuacuuucacagcugagauc

SEQ ID NO: 548083 - RNA, 21 nt, Artificial Sequence
  Synthetic
ccuacuuucacagcugagauc

SEQ ID NO: 548084 - RNA, 22 nt, Artificial Sequence
  Synthetic
cccuacuuucacagcugagauc

SEQ ID NO: 548085 - RNA, 23 nt, Artificial Sequence
  Synthetic
ucccuacuuucacagcugagauc

SEQ ID NO: 548086 - RNA, 24 nt, Artificial Sequence
  Synthetic
gucccuacuuucacagcugagauc

SEQ ID NO: 548087 - RNA, 18 nt, Artificial Sequence
  Synthetic
auuguauucucugagauc

SEQ ID NO: 548088 - RNA, 19 nt, Artificial Sequence
  Synthetic
gauuguauucucugagauc

SEQ ID NO: 548089 - RNA, 20 nt, Artificial Sequence
  Synthetic
agauuguauucucugagauc

SEQ ID NO: 548090 - RNA, 21 nt, Artificial Sequence
  Synthetic
aagauuguauucucugagauc

SEQ ID NO: 548091 - RNA, 22 nt, Artificial Sequence
  Synthetic
aaagauuguauucucugagauc

SEQ ID NO: 548092 - RNA, 23 nt, Artificial Sequence
  Synthetic
caaagauuguauucucugagauc

SEQ ID NO: 548093 - RNA, 24 nt, Artificial Sequence
  Synthetic
acaaagauuguauucucugagauc

SEQ ID NO: 548094 - RNA, 18 nt, Artificial Sequence
  Synthetic
ucccuucauuuugagauc

SEQ ID NO: 548095 - RNA, 19 nt, Artificial Sequence
  Synthetic
aucccuucauuuugagauc

SEQ ID NO: 548096 - RNA, 20 nt, Artificial Sequence
  Synthetic
uaucccuucauuuugagauc

SEQ ID NO: 548097 - RNA, 21 nt, Artificial Sequence
  Synthetic
guaucccuucauuuugagauc

SEQ ID NO: 548098 - RNA, 22 nt, Artificial Sequence
  Synthetic
uguaucccuucauuuugagauc

SEQ ID NO: 548099 - RNA, 23 nt, Artificial Sequence
  Synthetic
auguaucccuucauuuugagauc

SEQ ID NO: 548100 - RNA, 24 nt, Artificial Sequence
  Synthetic
aauguaucccuucauuuugagauc

SEQ ID NO: 548101 - RNA, 18 nt, Artificial Sequence
  Synthetic
uacugaugucuauagauc

SEQ ID NO: 548102 - RNA, 19 nt, Artificial Sequence
  Synthetic
cuacugaugucuauagauc

SEQ ID NO: 548103 - RNA, 20 nt, Artificial Sequence
  Synthetic
ucuacugaugucuauagauc

SEQ ID NO: 548104 - RNA, 21 nt, Artificial Sequence
  Synthetic
uucuacugaugucuauagauc

SEQ ID NO: 548105 - RNA, 22 nt, Artificial Sequence
  Synthetic
uuucuacugaugucuauagauc

SEQ ID NO: 548106 - RNA, 23 nt, Artificial Sequence
  Synthetic
guuucuacugaugucuauagauc

SEQ ID NO: 548107 - RNA, 24 nt, Artificial Sequence
  Synthetic
uguuucuacugaugucuauagauc

SEQ ID NO: 548108 - RNA, 18 nt, Artificial Sequence
  Synthetic
uuauaggucuacuagauc

SEQ ID NO: 548109 - RNA, 19 nt, Artificial Sequence
  Synthetic
uuuauaggucuacuagauc

SEQ ID NO: 548110 - RNA, 20 nt, Artificial Sequence
  Synthetic
uuuuauaggucuacuagauc

SEQ ID NO: 548111 - RNA, 21 nt, Artificial Sequence
  Synthetic
cuuuuauaggucuacuagauc

SEQ ID NO: 548112 - RNA, 22 nt, Artificial Sequence
  Synthetic
acuuuuauaggucuacuagauc

SEQ ID NO: 548113 - RNA, 23 nt, Artificial Sequence
  Synthetic
aacuuuuauaggucuacuagauc

SEQ ID NO: 548114 - RNA, 24 nt, Artificial Sequence
  Synthetic
caacuuuuauaggucuacuagauc

SEQ ID NO: 548115 - RNA, 18 nt, Artificial Sequence
  Synthetic
aauggugguuauuagauc

SEQ ID NO: 548116 - RNA, 19 nt, Artificial Sequence
  Synthetic
aaauggugguuauuagauc

SEQ ID NO: 548117 - RNA, 20 nt, Artificial Sequence
  Synthetic
aaaauggugguuauuagauc

SEQ ID NO: 548118 - RNA, 21 nt, Artificial Sequence
  Synthetic
aaaaauggugguuauuagauc

SEQ ID NO: 548119 - RNA, 22 nt, Artificial Sequence
  Synthetic
gaaaaauggugguuauuagauc

SEQ ID NO: 548120 - RNA, 23 nt, Artificial Sequence
  Synthetic
agaaaaauggugguuauuagauc

SEQ ID NO: 548121 - RNA, 24 nt, Artificial Sequence
  Synthetic
gagaaaaauggugguuauuagauc

SEQ ID NO: 548122 - RNA, 18 nt, Artificial Sequence
  Synthetic
agaaaguuuaaaacgauc

SEQ ID NO: 548123 - RNA, 19 nt, Artificial Sequence
  Synthetic
aagaaaguuuaaaacgauc

SEQ ID NO: 548124 - RNA, 20 nt, Artificial Sequence
  Synthetic
aaagaaaguuuaaaacgauc

SEQ ID NO: 548125 - RNA, 21 nt, Artificial Sequence
  Synthetic
aaaagaaaguuuaaaacgauc

SEQ ID NO: 548126 - RNA, 22 nt, Artificial Sequence
  Synthetic
gaaaagaaaguuuaaaacgauc

SEQ ID NO: 548127 - RNA, 23 nt, Artificial Sequence
  Synthetic
ggaaaagaaaguuuaaaacgauc

SEQ ID NO: 548128 - RNA, 24 nt, Artificial Sequence
  Synthetic
uggaaaagaaaguuuaaaacgauc

SEQ ID NO: 548129 - RNA, 18 nt, Artificial Sequence
  Synthetic
aguguaaaauguacgauc

SEQ ID NO: 548130 - RNA, 19 nt, Artificial Sequence
  Synthetic
gaguguaaaauguacgauc

SEQ ID NO: 548131 - RNA, 20 nt, Artificial Sequence
  Synthetic
ugaguguaaaauguacgauc

SEQ ID NO: 548132 - RNA, 21 nt, Artificial Sequence
  Synthetic
uugaguguaaaauguacgauc

SEQ ID NO: 548133 - RNA, 22 nt, Artificial Sequence
  Synthetic
uuugaguguaaaauguacgauc

SEQ ID NO: 548134 - RNA, 23 nt, Artificial Sequence
  Synthetic
uuuugaguguaaaauguacgauc

SEQ ID NO: 548135 - RNA, 24 nt, Artificial Sequence
  Synthetic
auuuugaguguaaaauguacgauc

SEQ ID NO: 548136 - RNA, 18 nt, Artificial Sequence
  Synthetic
ucgagugcuaaaaggauc

SEQ ID NO: 548137 - RNA, 19 nt, Artificial Sequence
  Synthetic
aucgagugcuaaaaggauc

SEQ ID NO: 548138 - RNA, 20 nt, Artificial Sequence
  Synthetic
aaucgagugcuaaaaggauc

SEQ ID NO: 548139 - RNA, 21 nt, Artificial Sequence
  Synthetic
uaaucgagugcuaaaaggauc

SEQ ID NO: 548140 - RNA, 22 nt, Artificial Sequence
  Synthetic
auaaucgagugcuaaaaggauc

SEQ ID NO: 548141 - RNA, 23 nt, Artificial Sequence
  Synthetic
cauaaucgagugcuaaaaggauc

SEQ ID NO: 548142 - RNA, 24 nt, Artificial Sequence
  Synthetic
acauaaucgagugcuaaaaggauc

SEQ ID NO: 548143 - RNA, 18 nt, Artificial Sequence
  Synthetic
agaacaaucccaaggauc

SEQ ID NO: 548144 - RNA, 19 nt, Artificial Sequence
  Synthetic
gagaacaaucccaaggauc

SEQ ID NO: 548145 - RNA, 20 nt, Artificial Sequence
  Synthetic
ggagaacaaucccaaggauc

SEQ ID NO: 548146 - RNA, 21 nt, Artificial Sequence
  Synthetic
uggagaacaaucccaaggauc

SEQ ID NO: 548147 - RNA, 22 nt, Artificial Sequence
  Synthetic
auggagaacaaucccaaggauc

SEQ ID NO: 548148 - RNA, 23 nt, Artificial Sequence
  Synthetic
aauggagaacaaucccaaggauc

SEQ ID NO: 548149 - RNA, 24 nt, Artificial Sequence
  Synthetic
uaauggagaacaaucccaaggauc

SEQ ID NO: 548150 - RNA, 18 nt, Artificial Sequence
  Synthetic
gcagauuccucaaggauc

SEQ ID NO: 548151 - RNA, 19 nt, Artificial Sequence
  Synthetic
ugcagauuccucaaggauc

SEQ ID NO: 548152 - RNA, 20 nt, Artificial Sequence
  Synthetic
gugcagauuccucaaggauc

SEQ ID NO: 548153 - RNA, 21 nt, Artificial Sequence
  Synthetic
ugugcagauuccucaaggauc

SEQ ID NO: 548154 - RNA, 22 nt, Artificial Sequence
  Synthetic
gugugcagauuccucaaggauc

SEQ ID NO: 548155 - RNA, 23 nt, Artificial Sequence
  Synthetic
agugugcagauuccucaaggauc

SEQ ID NO: 548156 - RNA, 24 nt, Artificial Sequence
  Synthetic
cagugugcagauuccucaaggauc

SEQ ID NO: 548157 - RNA, 18 nt, Artificial Sequence
  Synthetic
ggcgauuccucaaggauc

SEQ ID NO: 548158 - RNA, 19 nt, Artificial Sequence
  Synthetic
uggcgauuccucaaggauc

SEQ ID NO: 548159 - RNA, 20 nt, Artificial Sequence
  Synthetic
guggcgauuccucaaggauc

SEQ ID NO: 548160 - RNA, 21 nt, Artificial Sequence
  Synthetic
uguggcgauuccucaaggauc

SEQ ID NO: 548161 - RNA, 22 nt, Artificial Sequence
  Synthetic
guguggcgauuccucaaggauc

SEQ ID NO: 548162 - RNA, 23 nt, Artificial Sequence
  Synthetic
aguguggcgauuccucaaggauc

SEQ ID NO: 548163 - RNA, 24 nt, Artificial Sequence
  Synthetic
caguguggcgauuccucaaggauc

SEQ ID NO: 548164 - RNA, 18 nt, Artificial Sequence
  Synthetic
aaaacaguauacaggauc

SEQ ID NO: 548165 - RNA, 19 nt, Artificial Sequence
  Synthetic
caaaacaguauacaggauc

SEQ ID NO: 548166 - RNA, 20 nt, Artificial Sequence
  Synthetic
acaaaacaguauacaggauc

SEQ ID NO: 548167 - RNA, 21 nt, Artificial Sequence
  Synthetic
cacaaaacaguauacaggauc

SEQ ID NO: 548168 - RNA, 22 nt, Artificial Sequence
  Synthetic
ccacaaaacaguauacaggauc

SEQ ID NO: 548169 - RNA, 23 nt, Artificial Sequence
  Synthetic
cccacaaaacaguauacaggauc

SEQ ID NO: 548170 - RNA, 24 nt, Artificial Sequence
  Synthetic
gcccacaaaacaguauacaggauc

SEQ ID NO: 548171 - RNA, 18 nt, Artificial Sequence
  Synthetic
ugauggugaaucaggauc

SEQ ID NO: 548172 - RNA, 19 nt, Artificial Sequence
  Synthetic
cugauggugaaucaggauc

SEQ ID NO: 548173 - RNA, 20 nt, Artificial Sequence
  Synthetic
gcugauggugaaucaggauc

SEQ ID NO: 548174 - RNA, 21 nt, Artificial Sequence
  Synthetic
agcugauggugaaucaggauc

SEQ ID NO: 548175 - RNA, 22 nt, Artificial Sequence
  Synthetic
aagcugauggugaaucaggauc

SEQ ID NO: 548176 - RNA, 23 nt, Artificial Sequence
  Synthetic
aaagcugauggugaaucaggauc

SEQ ID NO: 548177 - RNA, 24 nt, Artificial Sequence
  Synthetic
aaaagcugauggugaaucaggauc

SEQ ID NO: 548178 - RNA, 18 nt, Artificial Sequence
  Synthetic
gggaggagcgagaggauc

SEQ ID NO: 548179 - RNA, 19 nt, Artificial Sequence
  Synthetic
ugggaggagcgagaggauc

SEQ ID NO: 548180 - RNA, 20 nt, Artificial Sequence
  Synthetic
gugggaggagcgagaggauc

SEQ ID NO: 548181 - RNA, 21 nt, Artificial Sequence
  Synthetic
ggugggaggagcgagaggauc

SEQ ID NO: 548182 - RNA, 22 nt, Artificial Sequence
  Synthetic
gggugggaggagcgagaggauc

SEQ ID NO: 548183 - RNA, 23 nt, Artificial Sequence
  Synthetic
agggugggaggagcgagaggauc

SEQ ID NO: 548184 - RNA, 24 nt, Artificial Sequence
  Synthetic
gagggugggaggagcgagaggauc

SEQ ID NO: 548185 - RNA, 18 nt, Artificial Sequence
  Synthetic
gggaggagggagaggauc

SEQ ID NO: 548186 - RNA, 19 nt, Artificial Sequence
  Synthetic
ugggaggagggagaggauc

SEQ ID NO: 548187 - RNA, 20 nt, Artificial Sequence
  Synthetic
gugggaggagggagaggauc

SEQ ID NO: 548188 - RNA, 21 nt, Artificial Sequence
  Synthetic
ggugggaggagggagaggauc

SEQ ID NO: 548189 - RNA, 22 nt, Artificial Sequence
  Synthetic
gggugggaggagggagaggauc

SEQ ID NO: 548190 - RNA, 23 nt, Artificial Sequence
  Synthetic
agggugggaggagggagaggauc

SEQ ID NO: 548191 - RNA, 24 nt, Artificial Sequence
  Synthetic
gagggugggaggagggagaggauc

SEQ ID NO: 548192 - RNA, 18 nt, Artificial Sequence
  Synthetic
auagcugcugggaggauc

SEQ ID NO: 548193 - RNA, 19 nt, Artificial Sequence
  Synthetic
cauagcugcugggaggauc

SEQ ID NO: 548194 - RNA, 20 nt, Artificial Sequence
  Synthetic
acauagcugcugggaggauc

SEQ ID NO: 548195 - RNA, 21 nt, Artificial Sequence
  Synthetic
aacauagcugcugggaggauc

SEQ ID NO: 548196 - RNA, 22 nt, Artificial Sequence
  Synthetic
aaacauagcugcugggaggauc

SEQ ID NO: 548197 - RNA, 23 nt, Artificial Sequence
  Synthetic
gaaacauagcugcugggaggauc

SEQ ID NO: 548198 - RNA, 24 nt, Artificial Sequence
  Synthetic
agaaacauagcugcugggaggauc

SEQ ID NO: 548199 - RNA, 18 nt, Artificial Sequence
  Synthetic
agugcugaggguaggauc

SEQ ID NO: 548200 - RNA, 19 nt, Artificial Sequence
  Synthetic
aagugcugaggguaggauc

SEQ ID NO: 548201 - RNA, 20 nt, Artificial Sequence
  Synthetic
gaagugcugaggguaggauc

SEQ ID NO: 548202 - RNA, 21 nt, Artificial Sequence
  Synthetic
agaagugcugaggguaggauc

SEQ ID NO: 548203 - RNA, 22 nt, Artificial Sequence
  Synthetic
aagaagugcugaggguaggauc

SEQ ID NO: 548204 - RNA, 23 nt, Artificial Sequence
  Synthetic
gaagaagugcugaggguaggauc

SEQ ID NO: 548205 - RNA, 24 nt, Artificial Sequence
  Synthetic
ugaagaagugcugaggguaggauc

SEQ ID NO: 548206 - RNA, 18 nt, Artificial Sequence
  Synthetic
cgaauucaauuuaggauc

SEQ ID NO: 548207 - RNA, 19 nt, Artificial Sequence
  Synthetic
acgaauucaauuuaggauc

SEQ ID NO: 548208 - RNA, 20 nt, Artificial Sequence
  Synthetic
aacgaauucaauuuaggauc

SEQ ID NO: 548209 - RNA, 21 nt, Artificial Sequence
  Synthetic
aaacgaauucaauuuaggauc

SEQ ID NO: 548210 - RNA, 22 nt, Artificial Sequence
  Synthetic
uaaacgaauucaauuuaggauc

SEQ ID NO: 548211 - RNA, 23 nt, Artificial Sequence
  Synthetic
cuaaacgaauucaauuuaggauc

SEQ ID NO: 548212 - RNA, 24 nt, Artificial Sequence
  Synthetic
ucuaaacgaauucaauuuaggauc

SEQ ID NO: 548213 - RNA, 18 nt, Artificial Sequence
  Synthetic
ggccgaggugaacggauc

SEQ ID NO: 548214 - RNA, 19 nt, Artificial Sequence
  Synthetic
aggccgaggugaacggauc

SEQ ID NO: 548215 - RNA, 20 nt, Artificial Sequence
  Synthetic
gaggccgaggugaacggauc

SEQ ID NO: 548216 - RNA, 21 nt, Artificial Sequence
  Synthetic
ggaggccgaggugaacggauc

SEQ ID NO: 548217 - RNA, 22 nt, Artificial Sequence
  Synthetic
gggaggccgaggugaacggauc

SEQ ID NO: 548218 - RNA, 23 nt, Artificial Sequence
  Synthetic
ugggaggccgaggugaacggauc

SEQ ID NO: 548219 - RNA, 24 nt, Artificial Sequence
  Synthetic
uugggaggccgaggugaacggauc

SEQ ID NO: 548220 - RNA, 18 nt, Artificial Sequence
  Synthetic
ggccgagacgggcggauc

SEQ ID NO: 548221 - RNA, 19 nt, Artificial Sequence
  Synthetic
aggccgagacgggcggauc

SEQ ID NO: 548222 - RNA, 20 nt, Artificial Sequence
  Synthetic
gaggccgagacgggcggauc

SEQ ID NO: 548223 - RNA, 21 nt, Artificial Sequence
  Synthetic
ggaggccgagacgggcggauc

SEQ ID NO: 548224 - RNA, 22 nt, Artificial Sequence
  Synthetic
gggaggccgagacgggcggauc

SEQ ID NO: 548225 - RNA, 23 nt, Artificial Sequence
  Synthetic
ugggaggccgagacgggcggauc

SEQ ID NO: 548226 - RNA, 24 nt, Artificial Sequence
  Synthetic
uugggaggccgagacgggcggauc

SEQ ID NO: 548227 - RNA, 18 nt, Artificial Sequence
  Synthetic
ggccgaggcgggcggauc

SEQ ID NO: 548228 - RNA, 19 nt, Artificial Sequence
  Synthetic
aggccgaggcgggcggauc

SEQ ID NO: 548229 - RNA, 20 nt, Artificial Sequence
  Synthetic
aaggccgaggcgggcggauc

SEQ ID NO: 548230 - RNA, 21 nt, Artificial Sequence
  Synthetic
gaaggccgaggcgggcggauc

SEQ ID NO: 548231 - RNA, 22 nt, Artificial Sequence
  Synthetic
ggaaggccgaggcgggcggauc

SEQ ID NO: 548232 - RNA, 23 nt, Artificial Sequence
  Synthetic
uggaaggccgaggcgggcggauc

SEQ ID NO: 548233 - RNA, 24 nt, Artificial Sequence
  Synthetic
uuggaaggccgaggcgggcggauc

SEQ ID NO: 548234 - RNA, 24 nt, Artificial Sequence
  Synthetic
uugggaggccaaggugggcggauc

SEQ ID NO: 548235 - RNA, 18 nt, Artificial Sequence
  Synthetic
ugguguaaauugcggauc

SEQ ID NO: 548236 - RNA, 19 nt, Artificial Sequence
  Synthetic
gugguguaaauugcggauc

SEQ ID NO: 548237 - RNA, 20 nt, Artificial Sequence
  Synthetic
ugugguguaaauugcggauc

SEQ ID NO: 548238 - RNA, 21 nt, Artificial Sequence
  Synthetic
augugguguaaauugcggauc

SEQ ID NO: 548239 - RNA, 22 nt, Artificial Sequence
  Synthetic
aaugugguguaaauugcggauc

SEQ ID NO: 548240 - RNA, 23 nt, Artificial Sequence
  Synthetic
uaaugugguguaaauugcggauc

SEQ ID NO: 548241 - RNA, 24 nt, Artificial Sequence
  Synthetic
auaaugugguguaaauugcggauc

SEQ ID NO: 548242 - RNA, 18 nt, Artificial Sequence
  Synthetic
uuugugcaugaagggauc

SEQ ID NO: 548243 - RNA, 19 nt, Artificial Sequence
  Synthetic
cuuugugcaugaagggauc

SEQ ID NO: 548244 - RNA, 20 nt, Artificial Sequence
  Synthetic
ucuuugugcaugaagggauc

SEQ ID NO: 548245 - RNA, 21 nt, Artificial Sequence
  Synthetic
aucuuugugcaugaagggauc

SEQ ID NO: 548246 - RNA, 22 nt, Artificial Sequence
  Synthetic
caucuuugugcaugaagggauc

SEQ ID NO: 548247 - RNA, 23 nt, Artificial Sequence
  Synthetic
gcaucuuugugcaugaagggauc

SEQ ID NO: 548248 - RNA, 24 nt, Artificial Sequence
  Synthetic
ugcaucuuugugcaugaagggauc

SEQ ID NO: 548249 - RNA, 18 nt, Artificial Sequence
  Synthetic
uccuuuauccaggggauc

SEQ ID NO: 548250 - RNA, 19 nt, Artificial Sequence
  Synthetic
uuccuuuauccaggggauc

SEQ ID NO: 548251 - RNA, 20 nt, Artificial Sequence
  Synthetic
cuuccuuuauccaggggauc

SEQ ID NO: 548252 - RNA, 21 nt, Artificial Sequence
  Synthetic
ucuuccuuuauccaggggauc

SEQ ID NO: 548253 - RNA, 22 nt, Artificial Sequence
  Synthetic
aucuuccuuuauccaggggauc

SEQ ID NO: 548254 - RNA, 23 nt, Artificial Sequence
  Synthetic
aaucuuccuuuauccaggggauc

SEQ ID NO: 548255 - RNA, 24 nt, Artificial Sequence
  Synthetic
uaaucuuccuuuauccaggggauc

SEQ ID NO: 548256 - RNA, 18 nt, Artificial Sequence
  Synthetic
aagacaugaagggggauc

SEQ ID NO: 548257 - RNA, 19 nt, Artificial Sequence
  Synthetic
gaagacaugaagggggauc

SEQ ID NO: 548258 - RNA, 20 nt, Artificial Sequence
  Synthetic
agaagacaugaagggggauc

SEQ ID NO: 548259 - RNA, 21 nt, Artificial Sequence
  Synthetic
gagaagacaugaagggggauc

SEQ ID NO: 548260 - RNA, 22 nt, Artificial Sequence
  Synthetic
ggagaagacaugaagggggauc

SEQ ID NO: 548261 - RNA, 23 nt, Artificial Sequence
  Synthetic
uggagaagacaugaagggggauc

SEQ ID NO: 548262 - RNA, 24 nt, Artificial Sequence
  Synthetic
cuggagaagacaugaagggggauc

SEQ ID NO: 548263 - RNA, 18 nt, Artificial Sequence
  Synthetic
acaaguuuuucugggauc

SEQ ID NO: 548264 - RNA, 19 nt, Artificial Sequence
  Synthetic
cacaaguuuuucugggauc

SEQ ID NO: 548265 - RNA, 20 nt, Artificial Sequence
  Synthetic
ccacaaguuuuucugggauc

SEQ ID NO: 548266 - RNA, 21 nt, Artificial Sequence
  Synthetic
uccacaaguuuuucugggauc

SEQ ID NO: 548267 - RNA, 22 nt, Artificial Sequence
  Synthetic
auccacaaguuuuucugggauc

SEQ ID NO: 548268 - RNA, 23 nt, Artificial Sequence
  Synthetic
aauccacaaguuuuucugggauc

SEQ ID NO: 548269 - RNA, 24 nt, Artificial Sequence
  Synthetic
caauccacaaguuuuucugggauc

SEQ ID NO: 548270 - RNA, 18 nt, Artificial Sequence
  Synthetic
aaacuauuuguugggauc

SEQ ID NO: 548271 - RNA, 19 nt, Artificial Sequence
  Synthetic
uaaacuauuuguugggauc

SEQ ID NO: 548272 - RNA, 20 nt, Artificial Sequence
  Synthetic
cuaaacuauuuguugggauc

SEQ ID NO: 548273 - RNA, 21 nt, Artificial Sequence
  Synthetic
ucuaaacuauuuguugggauc

SEQ ID NO: 548274 - RNA, 22 nt, Artificial Sequence
  Synthetic
uucuaaacuauuuguugggauc

SEQ ID NO: 548275 - RNA, 23 nt, Artificial Sequence
  Synthetic
uuucuaaacuauuuguugggauc

SEQ ID NO: 548276 - RNA, 24 nt, Artificial Sequence
  Synthetic
auuucuaaacuauuuguugggauc

SEQ ID NO: 548277 - RNA, 18 nt, Artificial Sequence
  Synthetic
acaauuuuuccauggauc

SEQ ID NO: 548278 - RNA, 19 nt, Artificial Sequence
  Synthetic
gacaauuuuuccauggauc

SEQ ID NO: 548279 - RNA, 20 nt, Artificial Sequence
  Synthetic
agacaauuuuuccauggauc

SEQ ID NO: 548280 - RNA, 21 nt, Artificial Sequence
  Synthetic
aagacaauuuuuccauggauc

SEQ ID NO: 548281 - RNA, 22 nt, Artificial Sequence
  Synthetic
gaagacaauuuuuccauggauc

SEQ ID NO: 548282 - RNA, 23 nt, Artificial Sequence
  Synthetic
ggaagacaauuuuuccauggauc

SEQ ID NO: 548283 - RNA, 24 nt, Artificial Sequence
  Synthetic
aggaagacaauuuuuccauggauc

SEQ ID NO: 548284 - RNA, 18 nt, Artificial Sequence
  Synthetic
cagggacauagauggauc

SEQ ID NO: 548285 - RNA, 19 nt, Artificial Sequence
  Synthetic
gcagggacauagauggauc

SEQ ID NO: 548286 - RNA, 20 nt, Artificial Sequence
  Synthetic
ugcagggacauagauggauc

SEQ ID NO: 548287 - RNA, 21 nt, Artificial Sequence
  Synthetic
uugcagggacauagauggauc

SEQ ID NO: 548288 - RNA, 22 nt, Artificial Sequence
  Synthetic
uuugcagggacauagauggauc

SEQ ID NO: 548289 - RNA, 23 nt, Artificial Sequence
  Synthetic
cuuugcagggacauagauggauc

SEQ ID NO: 548290 - RNA, 24 nt, Artificial Sequence
  Synthetic
ccuuugcagggacauagauggauc

SEQ ID NO: 548291 - RNA, 18 nt, Artificial Sequence
  Synthetic
gguaaaagcauauggauc

SEQ ID NO: 548292 - RNA, 19 nt, Artificial Sequence
  Synthetic
agguaaaagcauauggauc

SEQ ID NO: 548293 - RNA, 20 nt, Artificial Sequence
  Synthetic
cagguaaaagcauauggauc

SEQ ID NO: 548294 - RNA, 21 nt, Artificial Sequence
  Synthetic
gcagguaaaagcauauggauc

SEQ ID NO: 548295 - RNA, 22 nt, Artificial Sequence
  Synthetic
ugcagguaaaagcauauggauc

SEQ ID NO: 548296 - RNA, 23 nt, Artificial Sequence
  Synthetic
cugcagguaaaagcauauggauc

SEQ ID NO: 548297 - RNA, 24 nt, Artificial Sequence
  Synthetic
ccugcagguaaaagcauauggauc

SEQ ID NO: 548298 - RNA, 18 nt, Artificial Sequence
  Synthetic
ggccaaggcagguggauc

SEQ ID NO: 548299 - RNA, 19 nt, Artificial Sequence
  Synthetic
aggccaaggcagguggauc

SEQ ID NO: 548300 - RNA, 20 nt, Artificial Sequence
  Synthetic
gaggccaaggcagguggauc

SEQ ID NO: 548301 - RNA, 21 nt, Artificial Sequence
  Synthetic
ggaggccaaggcagguggauc

SEQ ID NO: 548302 - RNA, 22 nt, Artificial Sequence
  Synthetic
gggaggccaaggcagguggauc

SEQ ID NO: 548303 - RNA, 23 nt, Artificial Sequence
  Synthetic
ugggaggccaaggcagguggauc

SEQ ID NO: 548304 - RNA, 24 nt, Artificial Sequence
  Synthetic
uugggaggccaaggcagguggauc

SEQ ID NO: 548305 - RNA, 18 nt, Artificial Sequence
  Synthetic
ggccaaagcggguggauc

SEQ ID NO: 548306 - RNA, 19 nt, Artificial Sequence
  Synthetic
aggccaaagcggguggauc

SEQ ID NO: 548307 - RNA, 20 nt, Artificial Sequence
  Synthetic
gaggccaaagcggguggauc

SEQ ID NO: 548308 - RNA, 21 nt, Artificial Sequence
  Synthetic
ggaggccaaagcggguggauc

SEQ ID NO: 548309 - RNA, 22 nt, Artificial Sequence
  Synthetic
gggaggccaaagcggguggauc

SEQ ID NO: 548310 - RNA, 23 nt, Artificial Sequence
  Synthetic
ugggaggccaaagcggguggauc

SEQ ID NO: 548311 - RNA, 24 nt, Artificial Sequence
  Synthetic
cugggaggccaaagcggguggauc

SEQ ID NO: 548312 - RNA, 18 nt, Artificial Sequence
  Synthetic
ggccaaggcggguggauc

SEQ ID NO: 548313 - RNA, 19 nt, Artificial Sequence
  Synthetic
aggccaaggcggguggauc

SEQ ID NO: 548314 - RNA, 20 nt, Artificial Sequence
  Synthetic
gaggccaaggcggguggauc

SEQ ID NO: 548315 - RNA, 21 nt, Artificial Sequence
  Synthetic
ggaggccaaggcggguggauc

SEQ ID NO: 548316 - RNA, 22 nt, Artificial Sequence
  Synthetic
gggaggccaaggcggguggauc

SEQ ID NO: 548317 - RNA, 23 nt, Artificial Sequence
  Synthetic
agggaggccaaggcggguggauc

SEQ ID NO: 548318 - RNA, 24 nt, Artificial Sequence
  Synthetic
uagggaggccaaggcggguggauc

SEQ ID NO: 548319 - RNA, 18 nt, Artificial Sequence
  Synthetic
ggccgagguggguggauc

SEQ ID NO: 548320 - RNA, 19 nt, Artificial Sequence
  Synthetic
aggccgagguggguggauc

SEQ ID NO: 548321 - RNA, 20 nt, Artificial Sequence
  Synthetic
gaggccgagguggguggauc

SEQ ID NO: 548322 - RNA, 21 nt, Artificial Sequence
  Synthetic
ggaggccgagguggguggauc

SEQ ID NO: 548323 - RNA, 22 nt, Artificial Sequence
  Synthetic
gggaggccgagguggguggauc

SEQ ID NO: 548324 - RNA, 23 nt, Artificial Sequence
  Synthetic
ugggaggccgagguggguggauc

SEQ ID NO: 548325 - RNA, 24 nt, Artificial Sequence
  Synthetic
uugggaggccgagguggguggauc

SEQ ID NO: 548326 - RNA, 18 nt, Artificial Sequence
  Synthetic
gugggaggugauuggauc

SEQ ID NO: 548327 - RNA, 19 nt, Artificial Sequence
  Synthetic
ggugggaggugauuggauc

SEQ ID NO: 548328 - RNA, 20 nt, Artificial Sequence
  Synthetic
uggugggaggugauuggauc

SEQ ID NO: 548329 - RNA, 21 nt, Artificial Sequence
  Synthetic
cuggugggaggugauuggauc

SEQ ID NO: 548330 - RNA, 22 nt, Artificial Sequence
  Synthetic
ccuggugggaggugauuggauc

SEQ ID NO: 548331 - RNA, 23 nt, Artificial Sequence
  Synthetic
accuggugggaggugauuggauc

SEQ ID NO: 548332 - RNA, 24 nt, Artificial Sequence
  Synthetic
aaccuggugggaggugauuggauc

SEQ ID NO: 548333 - RNA, 18 nt, Artificial Sequence
  Synthetic
auaguauauacaaugauc

SEQ ID NO: 548334 - RNA, 19 nt, Artificial Sequence
  Synthetic
aauaguauauacaaugauc

SEQ ID NO: 548335 - RNA, 20 nt, Artificial Sequence
  Synthetic
uaauaguauauacaaugauc

SEQ ID NO: 548336 - RNA, 21 nt, Artificial Sequence
  Synthetic
uuaauaguauauacaaugauc

SEQ ID NO: 548337 - RNA, 22 nt, Artificial Sequence
  Synthetic
guuaauaguauauacaaugauc

SEQ ID NO: 548338 - RNA, 23 nt, Artificial Sequence
  Synthetic
aguuaauaguauauacaaugauc

SEQ ID NO: 548339 - RNA, 24 nt, Artificial Sequence
  Synthetic
uaguuaauaguauauacaaugauc

SEQ ID NO: 548340 - RNA, 18 nt, Artificial Sequence
  Synthetic
aaaagcaagagaaugauc

SEQ ID NO: 548341 - RNA, 19 nt, Artificial Sequence
  Synthetic
caaaagcaagagaaugauc

SEQ ID NO: 548342 - RNA, 20 nt, Artificial Sequence
  Synthetic
ucaaaagcaagagaaugauc

SEQ ID NO: 548343 - RNA, 21 nt, Artificial Sequence
  Synthetic
uucaaaagcaagagaaugauc

SEQ ID NO: 548344 - RNA, 22 nt, Artificial Sequence
  Synthetic
uuucaaaagcaagagaaugauc

SEQ ID NO: 548345 - RNA, 23 nt, Artificial Sequence
  Synthetic
auuucaaaagcaagagaaugauc

SEQ ID NO: 548346 - RNA, 24 nt, Artificial Sequence
  Synthetic
uauuucaaaagcaagagaaugauc

SEQ ID NO: 548347 - RNA, 18 nt, Artificial Sequence
  Synthetic
aauacagcuugaaugauc

SEQ ID NO: 548348 - RNA, 19 nt, Artificial Sequence
  Synthetic
aaauacagcuugaaugauc

SEQ ID NO: 548349 - RNA, 20 nt, Artificial Sequence
  Synthetic
aaaauacagcuugaaugauc

SEQ ID NO: 548350 - RNA, 21 nt, Artificial Sequence
  Synthetic
aaaaauacagcuugaaugauc

SEQ ID NO: 548351 - RNA, 22 nt, Artificial Sequence
  Synthetic
caaaaauacagcuugaaugauc

SEQ ID NO: 548352 - RNA, 23 nt, Artificial Sequence
  Synthetic
ucaaaaauacagcuugaaugauc

SEQ ID NO: 548353 - RNA, 24 nt, Artificial Sequence
  Synthetic
cucaaaaauacagcuugaaugauc

SEQ ID NO: 548354 - RNA, 18 nt, Artificial Sequence
  Synthetic
aaugccaaauacaugauc

SEQ ID NO: 548355 - RNA, 19 nt, Artificial Sequence
  Synthetic
caaugccaaauacaugauc

SEQ ID NO: 548356 - RNA, 20 nt, Artificial Sequence
  Synthetic
acaaugccaaauacaugauc

SEQ ID NO: 548357 - RNA, 21 nt, Artificial Sequence
  Synthetic
uacaaugccaaauacaugauc

SEQ ID NO: 548358 - RNA, 22 nt, Artificial Sequence
  Synthetic
uuacaaugccaaauacaugauc

SEQ ID NO: 548359 - RNA, 23 nt, Artificial Sequence
  Synthetic
auuacaaugccaaauacaugauc

SEQ ID NO: 548360 - RNA, 24 nt, Artificial Sequence
  Synthetic
cauuacaaugccaaauacaugauc

SEQ ID NO: 548361 - RNA, 18 nt, Artificial Sequence
  Synthetic
acauagacaaagaugauc

SEQ ID NO: 548362 - RNA, 19 nt, Artificial Sequence
  Synthetic
aacauagacaaagaugauc

SEQ ID NO: 548363 - RNA, 20 nt, Artificial Sequence
  Synthetic
gaacauagacaaagaugauc

SEQ ID NO: 548364 - RNA, 21 nt, Artificial Sequence
  Synthetic
ugaacauagacaaagaugauc

SEQ ID NO: 548365 - RNA, 22 nt, Artificial Sequence
  Synthetic
gugaacauagacaaagaugauc

SEQ ID NO: 548366 - RNA, 23 nt, Artificial Sequence
  Synthetic
agugaacauagacaaagaugauc

SEQ ID NO: 548367 - RNA, 24 nt, Artificial Sequence
  Synthetic
aagugaacauagacaaagaugauc

SEQ ID NO: 548368 - RNA, 18 nt, Artificial Sequence
  Synthetic
uuccuugccucuaugauc

SEQ ID NO: 548369 - RNA, 19 nt, Artificial Sequence
  Synthetic
guuccuugccucuaugauc

SEQ ID NO: 548370 - RNA, 20 nt, Artificial Sequence
  Synthetic
uguuccuugccucuaugauc

SEQ ID NO: 548371 - RNA, 21 nt, Artificial Sequence
  Synthetic
auguuccuugccucuaugauc

SEQ ID NO: 548372 - RNA, 22 nt, Artificial Sequence
  Synthetic
cauguuccuugccucuaugauc

SEQ ID NO: 548373 - RNA, 23 nt, Artificial Sequence
  Synthetic
ccauguuccuugccucuaugauc

SEQ ID NO: 548374 - RNA, 24 nt, Artificial Sequence
  Synthetic
accauguuccuugccucuaugauc

SEQ ID NO: 548375 - RNA, 18 nt, Artificial Sequence
  Synthetic
caugcuuugcuuaugauc

SEQ ID NO: 548376 - RNA, 19 nt, Artificial Sequence
  Synthetic
ccaugcuuugcuuaugauc

SEQ ID NO: 548377 - RNA, 20 nt, Artificial Sequence
  Synthetic
gccaugcuuugcuuaugauc

SEQ ID NO: 548378 - RNA, 21 nt, Artificial Sequence
  Synthetic
ugccaugcuuugcuuaugauc

SEQ ID NO: 548379 - RNA, 22 nt, Artificial Sequence
  Synthetic
cugccaugcuuugcuuaugauc

SEQ ID NO: 548380 - RNA, 23 nt, Artificial Sequence
  Synthetic
gcugccaugcuuugcuuaugauc

SEQ ID NO: 548381 - RNA, 24 nt, Artificial Sequence
  Synthetic
ugcugccaugcuuugcuuaugauc

SEQ ID NO: 548382 - RNA, 18 nt, Artificial Sequence
  Synthetic
aucauuauuaaacugauc

SEQ ID NO: 548383 - RNA, 19 nt, Artificial Sequence
  Synthetic
caucauuauuaaacugauc

SEQ ID NO: 548384 - RNA, 20 nt, Artificial Sequence
  Synthetic
acaucauuauuaaacugauc

SEQ ID NO: 548385 - RNA, 21 nt, Artificial Sequence
  Synthetic
aacaucauuauuaaacugauc

SEQ ID NO: 548386 - RNA, 22 nt, Artificial Sequence
  Synthetic
aaacaucauuauuaaacugauc

SEQ ID NO: 548387 - RNA, 23 nt, Artificial Sequence
  Synthetic
caaacaucauuauuaaacugauc

SEQ ID NO: 548388 - RNA, 24 nt, Artificial Sequence
  Synthetic
ccaaacaucauuauuaaacugauc

SEQ ID NO: 548389 - RNA, 18 nt, Artificial Sequence
  Synthetic
cauuuuacucaacugauc

SEQ ID NO: 548390 - RNA, 19 nt, Artificial Sequence
  Synthetic
ucauuuuacucaacugauc

SEQ ID NO: 548391 - RNA, 20 nt, Artificial Sequence
  Synthetic
aucauuuuacucaacugauc

SEQ ID NO: 548392 - RNA, 21 nt, Artificial Sequence
  Synthetic
caucauuuuacucaacugauc

SEQ ID NO: 548393 - RNA, 22 nt, Artificial Sequence
  Synthetic
gcaucauuuuacucaacugauc

SEQ ID NO: 548394 - RNA, 23 nt, Artificial Sequence
  Synthetic
agcaucauuuuacucaacugauc

SEQ ID NO: 548395 - RNA, 24 nt, Artificial Sequence
  Synthetic
aagcaucauuuuacucaacugauc

SEQ ID NO: 548396 - RNA, 18 nt, Artificial Sequence
  Synthetic
aaccccuagccacugauc

SEQ ID NO: 548397 - RNA, 19 nt, Artificial Sequence
  Synthetic
caaccccuagccacugauc

SEQ ID NO: 548398 - RNA, 20 nt, Artificial Sequence
  Synthetic
gcaaccccuagccacugauc

SEQ ID NO: 548399 - RNA, 21 nt, Artificial Sequence
  Synthetic
ugcaaccccuagccacugauc

SEQ ID NO: 548400 - RNA, 22 nt, Artificial Sequence
  Synthetic
cugcaaccccuagccacugauc

SEQ ID NO: 548401 - RNA, 23 nt, Artificial Sequence
  Synthetic
acugcaaccccuagccacugauc

SEQ ID NO: 548402 - RNA, 24 nt, Artificial Sequence
  Synthetic
cacugcaaccccuagccacugauc

SEQ ID NO: 548403 - RNA, 18 nt, Artificial Sequence
  Synthetic
cucuuaaagauacugauc

SEQ ID NO: 548404 - RNA, 19 nt, Artificial Sequence
  Synthetic
ucucuuaaagauacugauc

SEQ ID NO: 548405 - RNA, 20 nt, Artificial Sequence
  Synthetic
uucucuuaaagauacugauc

SEQ ID NO: 548406 - RNA, 21 nt, Artificial Sequence
  Synthetic
cuucucuuaaagauacugauc

SEQ ID NO: 548407 - RNA, 22 nt, Artificial Sequence
  Synthetic
ccuucucuuaaagauacugauc

SEQ ID NO: 548408 - RNA, 23 nt, Artificial Sequence
  Synthetic
accuucucuuaaagauacugauc

SEQ ID NO: 548409 - RNA, 24 nt, Artificial Sequence
  Synthetic
uaccuucucuuaaagauacugauc

SEQ ID NO: 548410 - RNA, 18 nt, Artificial Sequence
  Synthetic
ccauuucugcuacugauc

SEQ ID NO: 548411 - RNA, 19 nt, Artificial Sequence
  Synthetic
uccauuucugcuacugauc

SEQ ID NO: 548412 - RNA, 20 nt, Artificial Sequence
  Synthetic
auccauuucugcuacugauc

SEQ ID NO: 548413 - RNA, 21 nt, Artificial Sequence
  Synthetic
aauccauuucugcuacugauc

SEQ ID NO: 548414 - RNA, 22 nt, Artificial Sequence
  Synthetic
caauccauuucugcuacugauc

SEQ ID NO: 548415 - RNA, 23 nt, Artificial Sequence
  Synthetic
acaauccauuucugcuacugauc

SEQ ID NO: 548416 - RNA, 24 nt, Artificial Sequence
  Synthetic
uacaauccauuucugcuacugauc

SEQ ID NO: 548417 - RNA, 18 nt, Artificial Sequence
  Synthetic
ccucaccaggcccugauc

SEQ ID NO: 548418 - RNA, 19 nt, Artificial Sequence
  Synthetic
cccucaccaggcccugauc

SEQ ID NO: 548419 - RNA, 20 nt, Artificial Sequence
  Synthetic
gcccucaccaggcccugauc

SEQ ID NO: 548420 - RNA, 21 nt, Artificial Sequence
  Synthetic
ggcccucaccaggcccugauc

SEQ ID NO: 548421 - RNA, 22 nt, Artificial Sequence
  Synthetic
gggcccucaccaggcccugauc

SEQ ID NO: 548422 - RNA, 23 nt, Artificial Sequence
  Synthetic
ggggcccucaccaggcccugauc

SEQ ID NO: 548423 - RNA, 24 nt, Artificial Sequence
  Synthetic
aggggcccucaccaggcccugauc

SEQ ID NO: 548424 - RNA, 18 nt, Artificial Sequence
  Synthetic
guaauauuugcccugauc

SEQ ID NO: 548425 - RNA, 19 nt, Artificial Sequence
  Synthetic
aguaauauuugcccugauc

SEQ ID NO: 548426 - RNA, 20 nt, Artificial Sequence
  Synthetic
caguaauauuugcccugauc

SEQ ID NO: 548427 - RNA, 21 nt, Artificial Sequence
  Synthetic
acaguaauauuugcccugauc

SEQ ID NO: 548428 - RNA, 22 nt, Artificial Sequence
  Synthetic
aacaguaauauuugcccugauc

SEQ ID NO: 548429 - RNA, 23 nt, Artificial Sequence
  Synthetic
uaacaguaauauuugcccugauc

SEQ ID NO: 548430 - RNA, 24 nt, Artificial Sequence
  Synthetic
auaacaguaauauuugcccugauc

SEQ ID NO: 548431 - RNA, 18 nt, Artificial Sequence
  Synthetic
uuggagcuaaggcugauc

SEQ ID NO: 548432 - RNA, 19 nt, Artificial Sequence
  Synthetic
guuggagcuaaggcugauc

SEQ ID NO: 548433 - RNA, 20 nt, Artificial Sequence
  Synthetic
aguuggagcuaaggcugauc

SEQ ID NO: 548434 - RNA, 21 nt, Artificial Sequence
  Synthetic
aaguuggagcuaaggcugauc

SEQ ID NO: 548435 - RNA, 22 nt, Artificial Sequence
  Synthetic
caaguuggagcuaaggcugauc

SEQ ID NO: 548436 - RNA, 23 nt, Artificial Sequence
  Synthetic
gcaaguuggagcuaaggcugauc

SEQ ID NO: 548437 - RNA, 24 nt, Artificial Sequence
  Synthetic
ggcaaguuggagcuaaggcugauc

SEQ ID NO: 548438 - RNA, 18 nt, Artificial Sequence
  Synthetic
auguuagccaggcugauc

SEQ ID NO: 548439 - RNA, 19 nt, Artificial Sequence
  Synthetic
uauguuagccaggcugauc

SEQ ID NO: 548440 - RNA, 20 nt, Artificial Sequence
  Synthetic
auauguuagccaggcugauc

SEQ ID NO: 548441 - RNA, 21 nt, Artificial Sequence
  Synthetic
uauauguuagccaggcugauc

SEQ ID NO: 548442 - RNA, 22 nt, Artificial Sequence
  Synthetic
auauauguuagccaggcugauc

SEQ ID NO: 548443 - RNA, 23 nt, Artificial Sequence
  Synthetic
uauauauguuagccaggcugauc

SEQ ID NO: 548444 - RNA, 24 nt, Artificial Sequence
  Synthetic
uuauauauguuagccaggcugauc

SEQ ID NO: 548445 - RNA, 18 nt, Artificial Sequence
  Synthetic
auccccgugaugcugauc

SEQ ID NO: 548446 - RNA, 19 nt, Artificial Sequence
  Synthetic
cauccccgugaugcugauc

SEQ ID NO: 548447 - RNA, 20 nt, Artificial Sequence
  Synthetic
ccauccccgugaugcugauc

SEQ ID NO: 548448 - RNA, 21 nt, Artificial Sequence
  Synthetic
accauccccgugaugcugauc

SEQ ID NO: 548449 - RNA, 22 nt, Artificial Sequence
  Synthetic
aaccauccccgugaugcugauc

SEQ ID NO: 548450 - RNA, 23 nt, Artificial Sequence
  Synthetic
uaaccauccccgugaugcugauc

SEQ ID NO: 548451 - RNA, 24 nt, Artificial Sequence
  Synthetic
cuaaccauccccgugaugcugauc

SEQ ID NO: 548452 - RNA, 18 nt, Artificial Sequence
  Synthetic
augcuaacgcugcugauc

SEQ ID NO: 548453 - RNA, 19 nt, Artificial Sequence
  Synthetic
gaugcuaacgcugcugauc

SEQ ID NO: 548454 - RNA, 20 nt, Artificial Sequence
  Synthetic
ugaugcuaacgcugcugauc

SEQ ID NO: 548455 - RNA, 21 nt, Artificial Sequence
  Synthetic
gugaugcuaacgcugcugauc

SEQ ID NO: 548456 - RNA, 22 nt, Artificial Sequence
  Synthetic
agugaugcuaacgcugcugauc

SEQ ID NO: 548457 - RNA, 23 nt, Artificial Sequence
  Synthetic
aagugaugcuaacgcugcugauc

SEQ ID NO: 548458 - RNA, 24 nt, Artificial Sequence
  Synthetic
caagugaugcuaacgcugcugauc

SEQ ID NO: 548459 - RNA, 18 nt, Artificial Sequence
  Synthetic
cgaauauaacaucugauc

SEQ ID NO: 548460 - RNA, 19 nt, Artificial Sequence
  Synthetic
ccgaauauaacaucugauc

SEQ ID NO: 548461 - RNA, 20 nt, Artificial Sequence
  Synthetic
cccgaauauaacaucugauc

SEQ ID NO: 548462 - RNA, 21 nt, Artificial Sequence
  Synthetic
ucccgaauauaacaucugauc

SEQ ID NO: 548463 - RNA, 22 nt, Artificial Sequence
  Synthetic
aucccgaauauaacaucugauc

SEQ ID NO: 548464 - RNA, 23 nt, Artificial Sequence
  Synthetic
uaucccgaauauaacaucugauc

SEQ ID NO: 548465 - RNA, 24 nt, Artificial Sequence
  Synthetic
cuaucccgaauauaacaucugauc

SEQ ID NO: 548466 - RNA, 18 nt, Artificial Sequence
  Synthetic
gcccacucuuaucugauc

SEQ ID NO: 548467 - RNA, 19 nt, Artificial Sequence
  Synthetic
cgcccacucuuaucugauc

SEQ ID NO: 548468 - RNA, 20 nt, Artificial Sequence
  Synthetic
gcgcccacucuuaucugauc

SEQ ID NO: 548469 - RNA, 21 nt, Artificial Sequence
  Synthetic
cgcgcccacucuuaucugauc

SEQ ID NO: 548470 - RNA, 22 nt, Artificial Sequence
  Synthetic
acgcgcccacucuuaucugauc

SEQ ID NO: 548471 - RNA, 23 nt, Artificial Sequence
  Synthetic
aacgcgcccacucuuaucugauc

SEQ ID NO: 548472 - RNA, 24 nt, Artificial Sequence
  Synthetic
aaacgcgcccacucuuaucugauc

SEQ ID NO: 548473 - RNA, 18 nt, Artificial Sequence
  Synthetic
acuccuuuuuaucugauc

SEQ ID NO: 548474 - RNA, 19 nt, Artificial Sequence
  Synthetic
aacuccuuuuuaucugauc

SEQ ID NO: 548475 - RNA, 20 nt, Artificial Sequence
  Synthetic
gaacuccuuuuuaucugauc

SEQ ID NO: 548476 - RNA, 21 nt, Artificial Sequence
  Synthetic
ugaacuccuuuuuaucugauc

SEQ ID NO: 548477 - RNA, 22 nt, Artificial Sequence
  Synthetic
augaacuccuuuuuaucugauc

SEQ ID NO: 548478 - RNA, 23 nt, Artificial Sequence
  Synthetic
gaugaacuccuuuuuaucugauc

SEQ ID NO: 548479 - RNA, 24 nt, Artificial Sequence
  Synthetic
cgaugaacuccuuuuuaucugauc

SEQ ID NO: 548480 - RNA, 18 nt, Artificial Sequence
  Synthetic
uggcaaagaauucugauc

SEQ ID NO: 548481 - RNA, 19 nt, Artificial Sequence
  Synthetic
guggcaaagaauucugauc

SEQ ID NO: 548482 - RNA, 20 nt, Artificial Sequence
  Synthetic
uguggcaaagaauucugauc

SEQ ID NO: 548483 - RNA, 21 nt, Artificial Sequence
  Synthetic
auguggcaaagaauucugauc

SEQ ID NO: 548484 - RNA, 22 nt, Artificial Sequence
  Synthetic
cauguggcaaagaauucugauc

SEQ ID NO: 548485 - RNA, 23 nt, Artificial Sequence
  Synthetic
ucauguggcaaagaauucugauc

SEQ ID NO: 548486 - RNA, 24 nt, Artificial Sequence
  Synthetic
uucauguggcaaagaauucugauc

SEQ ID NO: 548487 - RNA, 18 nt, Artificial Sequence
  Synthetic
auauuuccuauucugauc

SEQ ID NO: 548488 - RNA, 19 nt, Artificial Sequence
  Synthetic
aauauuuccuauucugauc

SEQ ID NO: 548489 - RNA, 20 nt, Artificial Sequence
  Synthetic
aaauauuuccuauucugauc

SEQ ID NO: 548490 - RNA, 21 nt, Artificial Sequence
  Synthetic
aaaauauuuccuauucugauc

SEQ ID NO: 548491 - RNA, 22 nt, Artificial Sequence
  Synthetic
aaaaauauuuccuauucugauc

SEQ ID NO: 548492 - RNA, 23 nt, Artificial Sequence
  Synthetic
uaaaaauauuuccuauucugauc

SEQ ID NO: 548493 - RNA, 24 nt, Artificial Sequence
  Synthetic
auaaaaauauuuccuauucugauc

SEQ ID NO: 548494 - RNA, 18 nt, Artificial Sequence
  Synthetic
gcuccauugcuucugauc

SEQ ID NO: 548495 - RNA, 19 nt, Artificial Sequence
  Synthetic
ugcuccauugcuucugauc

SEQ ID NO: 548496 - RNA, 20 nt, Artificial Sequence
  Synthetic
uugcuccauugcuucugauc

SEQ ID NO: 548497 - RNA, 21 nt, Artificial Sequence
  Synthetic
cuugcuccauugcuucugauc

SEQ ID NO: 548498 - RNA, 22 nt, Artificial Sequence
  Synthetic
ccuugcuccauugcuucugauc

SEQ ID NO: 548499 - RNA, 23 nt, Artificial Sequence
  Synthetic
uccuugcuccauugcuucugauc

SEQ ID NO: 548500 - RNA, 24 nt, Artificial Sequence
  Synthetic
uuccuugcuccauugcuucugauc

SEQ ID NO: 548501 - RNA, 18 nt, Artificial Sequence
  Synthetic
acucacguguuucugauc

SEQ ID NO: 548502 - RNA, 19 nt, Artificial Sequence
  Synthetic
cacucacguguuucugauc

SEQ ID NO: 548503 - RNA, 20 nt, Artificial Sequence
  Synthetic
acacucacguguuucugauc

SEQ ID NO: 548504 - RNA, 21 nt, Artificial Sequence
  Synthetic
uacacucacguguuucugauc

SEQ ID NO: 548505 - RNA, 22 nt, Artificial Sequence
  Synthetic
uuacacucacguguuucugauc

SEQ ID NO: 548506 - RNA, 23 nt, Artificial Sequence
  Synthetic
guuacacucacguguuucugauc

SEQ ID NO: 548507 - RNA, 24 nt, Artificial Sequence
  Synthetic
aguuacacucacguguuucugauc

SEQ ID NO: 548508 - RNA, 18 nt, Artificial Sequence
  Synthetic
aauaaccaaacagugauc

SEQ ID NO: 548509 - RNA, 19 nt, Artificial Sequence
  Synthetic
caauaaccaaacagugauc

SEQ ID NO: 548510 - RNA, 20 nt, Artificial Sequence
  Synthetic
acaauaaccaaacagugauc

SEQ ID NO: 548511 - RNA, 21 nt, Artificial Sequence
  Synthetic
aacaauaaccaaacagugauc

SEQ ID NO: 548512 - RNA, 22 nt, Artificial Sequence
  Synthetic
caacaauaaccaaacagugauc

SEQ ID NO: 548513 - RNA, 23 nt, Artificial Sequence
  Synthetic
acaacaauaaccaaacagugauc

SEQ ID NO: 548514 - RNA, 24 nt, Artificial Sequence
  Synthetic
aacaacaauaaccaaacagugauc

SEQ ID NO: 548515 - RNA, 18 nt, Artificial Sequence
  Synthetic
aaccuggcugcagugauc

SEQ ID NO: 548516 - RNA, 19 nt, Artificial Sequence
  Synthetic
gaaccuggcugcagugauc

SEQ ID NO: 548517 - RNA, 20 nt, Artificial Sequence
  Synthetic
agaaccuggcugcagugauc

SEQ ID NO: 548518 - RNA, 21 nt, Artificial Sequence
  Synthetic
cagaaccuggcugcagugauc

SEQ ID NO: 548519 - RNA, 22 nt, Artificial Sequence
  Synthetic
ccagaaccuggcugcagugauc

SEQ ID NO: 548520 - RNA, 23 nt, Artificial Sequence
  Synthetic
gccagaaccuggcugcagugauc

SEQ ID NO: 548521 - RNA, 24 nt, Artificial Sequence
  Synthetic
ggccagaaccuggcugcagugauc

SEQ ID NO: 548522 - RNA, 18 nt, Artificial Sequence
  Synthetic
cuuguuuaaagagugauc

SEQ ID NO: 548523 - RNA, 19 nt, Artificial Sequence
  Synthetic
ucuuguuuaaagagugauc

SEQ ID NO: 548524 - RNA, 20 nt, Artificial Sequence
  Synthetic
uucuuguuuaaagagugauc

SEQ ID NO: 548525 - RNA, 21 nt, Artificial Sequence
  Synthetic
uuucuuguuuaaagagugauc

SEQ ID NO: 548526 - RNA, 22 nt, Artificial Sequence
  Synthetic
auuucuuguuuaaagagugauc

SEQ ID NO: 548527 - RNA, 23 nt, Artificial Sequence
  Synthetic
uauuucuuguuuaaagagugauc

SEQ ID NO: 548528 - RNA, 24 nt, Artificial Sequence
  Synthetic
uuauuucuuguuuaaagagugauc

SEQ ID NO: 548529 - RNA, 18 nt, Artificial Sequence
  Synthetic
gcaacaucaugagugauc

SEQ ID NO: 548530 - RNA, 19 nt, Artificial Sequence
  Synthetic
ugcaacaucaugagugauc

SEQ ID NO: 548531 - RNA, 20 nt, Artificial Sequence
  Synthetic
gugcaacaucaugagugauc

SEQ ID NO: 548532 - RNA, 21 nt, Artificial Sequence
  Synthetic
agugcaacaucaugagugauc

SEQ ID NO: 548533 - RNA, 22 nt, Artificial Sequence
  Synthetic
gagugcaacaucaugagugauc

SEQ ID NO: 548534 - RNA, 23 nt, Artificial Sequence
  Synthetic
ugagugcaacaucaugagugauc

SEQ ID NO: 548535 - RNA, 24 nt, Artificial Sequence
  Synthetic
cugagugcaacaucaugagugauc

SEQ ID NO: 548536 - RNA, 18 nt, Artificial Sequence
  Synthetic
ggguauauacuagugauc

SEQ ID NO: 548537 - RNA, 19 nt, Artificial Sequence
  Synthetic
uggguauauacuagugauc

SEQ ID NO: 548538 - RNA, 20 nt, Artificial Sequence
  Synthetic
uuggguauauacuagugauc

SEQ ID NO: 548539 - RNA, 21 nt, Artificial Sequence
  Synthetic
cuuggguauauacuagugauc

SEQ ID NO: 548540 - RNA, 22 nt, Artificial Sequence
  Synthetic
ucuuggguauauacuagugauc

SEQ ID NO: 548541 - RNA, 23 nt, Artificial Sequence
  Synthetic
aucuuggguauauacuagugauc

SEQ ID NO: 548542 - RNA, 24 nt, Artificial Sequence
  Synthetic
uaucuuggguauauacuagugauc

SEQ ID NO: 548543 - RNA, 18 nt, Artificial Sequence
  Synthetic
gacuuucucgaggugauc

SEQ ID NO: 548544 - RNA, 19 nt, Artificial Sequence
  Synthetic
ugacuuucucgaggugauc

SEQ ID NO: 548545 - RNA, 20 nt, Artificial Sequence
  Synthetic
uugacuuucucgaggugauc

SEQ ID NO: 548546 - RNA, 21 nt, Artificial Sequence
  Synthetic
cuugacuuucucgaggugauc

SEQ ID NO: 548547 - RNA, 22 nt, Artificial Sequence
  Synthetic
ccuugacuuucucgaggugauc

SEQ ID NO: 548548 - RNA, 23 nt, Artificial Sequence
  Synthetic
accuugacuuucucgaggugauc

SEQ ID NO: 548549 - RNA, 24 nt, Artificial Sequence
  Synthetic
uaccuugacuuucucgaggugauc

SEQ ID NO: 548550 - RNA, 18 nt, Artificial Sequence
  Synthetic
cgagguauauuggugauc

SEQ ID NO: 548551 - RNA, 19 nt, Artificial Sequence
  Synthetic
ccgagguauauuggugauc

SEQ ID NO: 548552 - RNA, 20 nt, Artificial Sequence
  Synthetic
accgagguauauuggugauc

SEQ ID NO: 548553 - RNA, 21 nt, Artificial Sequence
  Synthetic
uaccgagguauauuggugauc

SEQ ID NO: 548554 - RNA, 22 nt, Artificial Sequence
  Synthetic
guaccgagguauauuggugauc

SEQ ID NO: 548555 - RNA, 23 nt, Artificial Sequence
  Synthetic
cguaccgagguauauuggugauc

SEQ ID NO: 548556 - RNA, 24 nt, Artificial Sequence
  Synthetic
acguaccgagguauauuggugauc

SEQ ID NO: 548557 - RNA, 18 nt, Artificial Sequence
  Synthetic
cccauuuguuuggugauc

SEQ ID NO: 548558 - RNA, 19 nt, Artificial Sequence
  Synthetic
ucccauuuguuuggugauc

SEQ ID NO: 548559 - RNA, 20 nt, Artificial Sequence
  Synthetic
cucccauuuguuuggugauc

SEQ ID NO: 548560 - RNA, 21 nt, Artificial Sequence
  Synthetic
ucucccauuuguuuggugauc

SEQ ID NO: 548561 - RNA, 22 nt, Artificial Sequence
  Synthetic
gucucccauuuguuuggugauc

SEQ ID NO: 548562 - RNA, 23 nt, Artificial Sequence
  Synthetic
ggucucccauuuguuuggugauc

SEQ ID NO: 548563 - RNA, 24 nt, Artificial Sequence
  Synthetic
uggucucccauuuguuuggugauc

SEQ ID NO: 548564 - RNA, 18 nt, Artificial Sequence
  Synthetic
acaauggaauaauugauc

SEQ ID NO: 548565 - RNA, 19 nt, Artificial Sequence
  Synthetic
gacaauggaauaauugauc

SEQ ID NO: 548566 - RNA, 20 nt, Artificial Sequence
  Synthetic
agacaauggaauaauugauc

SEQ ID NO: 548567 - RNA, 21 nt, Artificial Sequence
  Synthetic
cagacaauggaauaauugauc

SEQ ID NO: 548568 - RNA, 22 nt, Artificial Sequence
  Synthetic
ccagacaauggaauaauugauc

SEQ ID NO: 548569 - RNA, 23 nt, Artificial Sequence
  Synthetic
uccagacaauggaauaauugauc

SEQ ID NO: 548570 - RNA, 24 nt, Artificial Sequence
  Synthetic
auccagacaauggaauaauugauc

SEQ ID NO: 548571 - RNA, 18 nt, Artificial Sequence
  Synthetic
agguguuagacauugauc

SEQ ID NO: 548572 - RNA, 19 nt, Artificial Sequence
  Synthetic
gagguguuagacauugauc

SEQ ID NO: 548573 - RNA, 20 nt, Artificial Sequence
  Synthetic
ggagguguuagacauugauc

SEQ ID NO: 548574 - RNA, 21 nt, Artificial Sequence
  Synthetic
aggagguguuagacauugauc

SEQ ID NO: 548575 - RNA, 22 nt, Artificial Sequence
  Synthetic
uaggagguguuagacauugauc

SEQ ID NO: 548576 - RNA, 23 nt, Artificial Sequence
  Synthetic
guaggagguguuagacauugauc

SEQ ID NO: 548577 - RNA, 24 nt, Artificial Sequence
  Synthetic
gguaggagguguuagacauugauc

SEQ ID NO: 548578 - RNA, 18 nt, Artificial Sequence
  Synthetic
ugaaauaaaaacuugauc

SEQ ID NO: 548579 - RNA, 19 nt, Artificial Sequence
  Synthetic
uugaaauaaaaacuugauc

SEQ ID NO: 548580 - RNA, 20 nt, Artificial Sequence
  Synthetic
auugaaauaaaaacuugauc

SEQ ID NO: 548581 - RNA, 21 nt, Artificial Sequence
  Synthetic
uauugaaauaaaaacuugauc

SEQ ID NO: 548582 - RNA, 22 nt, Artificial Sequence
  Synthetic
auauugaaauaaaaacuugauc

SEQ ID NO: 548583 - RNA, 23 nt, Artificial Sequence
  Synthetic
aauauugaaauaaaaacuugauc

SEQ ID NO: 548584 - RNA, 24 nt, Artificial Sequence
  Synthetic
aaauauugaaauaaaaacuugauc

SEQ ID NO: 548585 - RNA, 18 nt, Artificial Sequence
  Synthetic
gauuccagccccuugauc

SEQ ID NO: 548586 - RNA, 19 nt, Artificial Sequence
  Synthetic
agauuccagccccuugauc

SEQ ID NO: 548587 - RNA, 20 nt, Artificial Sequence
  Synthetic
cagauuccagccccuugauc

SEQ ID NO: 548588 - RNA, 21 nt, Artificial Sequence
  Synthetic
ccagauuccagccccuugauc

SEQ ID NO: 548589 - RNA, 22 nt, Artificial Sequence
  Synthetic
accagauuccagccccuugauc

SEQ ID NO: 548590 - RNA, 23 nt, Artificial Sequence
  Synthetic
uaccagauuccagccccuugauc

SEQ ID NO: 548591 - RNA, 24 nt, Artificial Sequence
  Synthetic
uuaccagauuccagccccuugauc

SEQ ID NO: 548592 - RNA, 18 nt, Artificial Sequence
  Synthetic
ccugccagugccuugauc

SEQ ID NO: 548593 - RNA, 19 nt, Artificial Sequence
  Synthetic
accugccagugccuugauc

SEQ ID NO: 548594 - RNA, 20 nt, Artificial Sequence
  Synthetic
aaccugccagugccuugauc

SEQ ID NO: 548595 - RNA, 21 nt, Artificial Sequence
  Synthetic
aaaccugccagugccuugauc

SEQ ID NO: 548596 - RNA, 22 nt, Artificial Sequence
  Synthetic
caaaccugccagugccuugauc

SEQ ID NO: 548597 - RNA, 23 nt, Artificial Sequence
  Synthetic
ccaaaccugccagugccuugauc

SEQ ID NO: 548598 - RNA, 24 nt, Artificial Sequence
  Synthetic
accaaaccugccagugccuugauc

SEQ ID NO: 548599 - RNA, 18 nt, Artificial Sequence
  Synthetic
gugucucagggcuugauc

SEQ ID NO: 548600 - RNA, 19 nt, Artificial Sequence
  Synthetic
agugucucagggcuugauc

SEQ ID NO: 548601 - RNA, 20 nt, Artificial Sequence
  Synthetic
gagugucucagggcuugauc

SEQ ID NO: 548602 - RNA, 21 nt, Artificial Sequence
  Synthetic
ugagugucucagggcuugauc

SEQ ID NO: 548603 - RNA, 22 nt, Artificial Sequence
  Synthetic
cugagugucucagggcuugauc

SEQ ID NO: 548604 - RNA, 23 nt, Artificial Sequence
  Synthetic
ucugagugucucagggcuugauc

SEQ ID NO: 548605 - RNA, 24 nt, Artificial Sequence
  Synthetic
aucugagugucucagggcuugauc

SEQ ID NO: 548606 - RNA, 18 nt, Artificial Sequence
  Synthetic
cacccccauuucuugauc

SEQ ID NO: 548607 - RNA, 19 nt, Artificial Sequence
  Synthetic
ucacccccauuucuugauc

SEQ ID NO: 548608 - RNA, 20 nt, Artificial Sequence
  Synthetic
cucacccccauuucuugauc

SEQ ID NO: 548609 - RNA, 21 nt, Artificial Sequence
  Synthetic
acucacccccauuucuugauc

SEQ ID NO: 548610 - RNA, 22 nt, Artificial Sequence
  Synthetic
cacucacccccauuucuugauc

SEQ ID NO: 548611 - RNA, 23 nt, Artificial Sequence
  Synthetic
ccacucacccccauuucuugauc

SEQ ID NO: 548612 - RNA, 24 nt, Artificial Sequence
  Synthetic
cccacucacccccauuucuugauc

SEQ ID NO: 548613 - RNA, 18 nt, Artificial Sequence
  Synthetic
ugcauaauaguguugauc

SEQ ID NO: 548614 - RNA, 19 nt, Artificial Sequence
  Synthetic
uugcauaauaguguugauc

SEQ ID NO: 548615 - RNA, 20 nt, Artificial Sequence
  Synthetic
cuugcauaauaguguugauc

SEQ ID NO: 548616 - RNA, 21 nt, Artificial Sequence
  Synthetic
ccuugcauaauaguguugauc

SEQ ID NO: 548617 - RNA, 22 nt, Artificial Sequence
  Synthetic
gccuugcauaauaguguugauc

SEQ ID NO: 548618 - RNA, 23 nt, Artificial Sequence
  Synthetic
ggccuugcauaauaguguugauc

SEQ ID NO: 548619 - RNA, 24 nt, Artificial Sequence
  Synthetic
uggccuugcauaauaguguugauc

SEQ ID NO: 548620 - RNA, 18 nt, Artificial Sequence
  Synthetic
ucugcugguauuuugauc

SEQ ID NO: 548621 - RNA, 19 nt, Artificial Sequence
  Synthetic
aucugcugguauuuugauc

SEQ ID NO: 548622 - RNA, 20 nt, Artificial Sequence
  Synthetic
aaucugcugguauuuugauc

SEQ ID NO: 548623 - RNA, 21 nt, Artificial Sequence
  Synthetic
aaaucugcugguauuuugauc

SEQ ID NO: 548624 - RNA, 22 nt, Artificial Sequence
  Synthetic
caaaucugcugguauuuugauc

SEQ ID NO: 548625 - RNA, 23 nt, Artificial Sequence
  Synthetic
ccaaaucugcugguauuuugauc

SEQ ID NO: 548626 - RNA, 24 nt, Artificial Sequence
  Synthetic
accaaaucugcugguauuuugauc

SEQ ID NO: 548627 - RNA, 18 nt, Artificial Sequence
  Synthetic
gagacauguucaaauauc

SEQ ID NO: 548628 - RNA, 19 nt, Artificial Sequence
  Synthetic
ugagacauguucaaauauc

SEQ ID NO: 548629 - RNA, 20 nt, Artificial Sequence
  Synthetic
uugagacauguucaaauauc

SEQ ID NO: 548630 - RNA, 21 nt, Artificial Sequence
  Synthetic
uuugagacauguucaaauauc

SEQ ID NO: 548631 - RNA, 22 nt, Artificial Sequence
  Synthetic
cuuugagacauguucaaauauc

SEQ ID NO: 548632 - RNA, 23 nt, Artificial Sequence
  Synthetic
ucuuugagacauguucaaauauc

SEQ ID NO: 548633 - RNA, 24 nt, Artificial Sequence
  Synthetic
aucuuugagacauguucaaauauc

SEQ ID NO: 548634 - RNA, 18 nt, Artificial Sequence
  Synthetic
gaccagcaaggaaauauc

SEQ ID NO: 548635 - RNA, 19 nt, Artificial Sequence
  Synthetic
agaccagcaaggaaauauc

SEQ ID NO: 548636 - RNA, 20 nt, Artificial Sequence
  Synthetic
gagaccagcaaggaaauauc

SEQ ID NO: 548637 - RNA, 21 nt, Artificial Sequence
  Synthetic
ggagaccagcaaggaaauauc

SEQ ID NO: 548638 - RNA, 22 nt, Artificial Sequence
  Synthetic
gggagaccagcaaggaaauauc

SEQ ID NO: 548639 - RNA, 23 nt, Artificial Sequence
  Synthetic
cgggagaccagcaaggaaauauc

SEQ ID NO: 548640 - RNA, 24 nt, Artificial Sequence
  Synthetic
acgggagaccagcaaggaaauauc

SEQ ID NO: 548641 - RNA, 18 nt, Artificial Sequence
  Synthetic
augugcuucauaaauauc

SEQ ID NO: 548642 - RNA, 19 nt, Artificial Sequence
  Synthetic
aaugugcuucauaaauauc

SEQ ID NO: 548643 - RNA, 20 nt, Artificial Sequence
  Synthetic
gaaugugcuucauaaauauc

SEQ ID NO: 548644 - RNA, 21 nt, Artificial Sequence
  Synthetic
ugaaugugcuucauaaauauc

SEQ ID NO: 548645 - RNA, 22 nt, Artificial Sequence
  Synthetic
augaaugugcuucauaaauauc

SEQ ID NO: 548646 - RNA, 23 nt, Artificial Sequence
  Synthetic
gaugaaugugcuucauaaauauc

SEQ ID NO: 548647 - RNA, 24 nt, Artificial Sequence
  Synthetic
ggaugaaugugcuucauaaauauc

SEQ ID NO: 548648 - RNA, 18 nt, Artificial Sequence
  Synthetic
ggaaaggagcuaaauauc

SEQ ID NO: 548649 - RNA, 19 nt, Artificial Sequence
  Synthetic
aggaaaggagcuaaauauc

SEQ ID NO: 548650 - RNA, 20 nt, Artificial Sequence
  Synthetic
caggaaaggagcuaaauauc

SEQ ID NO: 548651 - RNA, 21 nt, Artificial Sequence
  Synthetic
ccaggaaaggagcuaaauauc

SEQ ID NO: 548652 - RNA, 22 nt, Artificial Sequence
  Synthetic
uccaggaaaggagcuaaauauc

SEQ ID NO: 548653 - RNA, 23 nt, Artificial Sequence
  Synthetic
uuccaggaaaggagcuaaauauc

SEQ ID NO: 548654 - RNA, 24 nt, Artificial Sequence
  Synthetic
auuccaggaaaggagcuaaauauc

SEQ ID NO: 548655 - RNA, 18 nt, Artificial Sequence
  Synthetic
auuuucaccuuaaauauc

SEQ ID NO: 548656 - RNA, 19 nt, Artificial Sequence
  Synthetic
cauuuucaccuuaaauauc

SEQ ID NO: 548657 - RNA, 20 nt, Artificial Sequence
  Synthetic
gcauuuucaccuuaaauauc

SEQ ID NO: 548658 - RNA, 21 nt, Artificial Sequence
  Synthetic
ugcauuuucaccuuaaauauc

SEQ ID NO: 548659 - RNA, 22 nt, Artificial Sequence
  Synthetic
augcauuuucaccuuaaauauc

SEQ ID NO: 548660 - RNA, 23 nt, Artificial Sequence
  Synthetic
caugcauuuucaccuuaaauauc

SEQ ID NO: 548661 - RNA, 24 nt, Artificial Sequence
  Synthetic
acaugcauuuucaccuuaaauauc

SEQ ID NO: 548662 - RNA, 18 nt, Artificial Sequence
  Synthetic
auauaauuuuuaaauauc

SEQ ID NO: 548663 - RNA, 19 nt, Artificial Sequence
  Synthetic
uauauaauuuuuaaauauc

SEQ ID NO: 548664 - RNA, 20 nt, Artificial Sequence
  Synthetic
guauauaauuuuuaaauauc

SEQ ID NO: 548665 - RNA, 21 nt, Artificial Sequence
  Synthetic
uguauauaauuuuuaaauauc

SEQ ID NO: 548666 - RNA, 22 nt, Artificial Sequence
  Synthetic
guguauauaauuuuuaaauauc

SEQ ID NO: 548667 - RNA, 23 nt, Artificial Sequence
  Synthetic
uguguauauaauuuuuaaauauc

SEQ ID NO: 548668 - RNA, 24 nt, Artificial Sequence
  Synthetic
auguguauauaauuuuuaaauauc

SEQ ID NO: 548669 - RNA, 18 nt, Artificial Sequence
  Synthetic
ugccugguuuacaauauc

SEQ ID NO: 548670 - RNA, 19 nt, Artificial Sequence
  Synthetic
gugccugguuuacaauauc

SEQ ID NO: 548671 - RNA, 20 nt, Artificial Sequence
  Synthetic
agugccugguuuacaauauc

SEQ ID NO: 548672 - RNA, 21 nt, Artificial Sequence
  Synthetic
cagugccugguuuacaauauc

SEQ ID NO: 548673 - RNA, 22 nt, Artificial Sequence
  Synthetic
acagugccugguuuacaauauc

SEQ ID NO: 548674 - RNA, 23 nt, Artificial Sequence
  Synthetic
aacagugccugguuuacaauauc

SEQ ID NO: 548675 - RNA, 24 nt, Artificial Sequence
  Synthetic
uaacagugccugguuuacaauauc

SEQ ID NO: 548676 - RNA, 18 nt, Artificial Sequence
  Synthetic
uugcaucauaccaauauc

SEQ ID NO: 548677 - RNA, 19 nt, Artificial Sequence
  Synthetic
uuugcaucauaccaauauc

SEQ ID NO: 548678 - RNA, 20 nt, Artificial Sequence
  Synthetic
auuugcaucauaccaauauc

SEQ ID NO: 548679 - RNA, 21 nt, Artificial Sequence
  Synthetic
aauuugcaucauaccaauauc

SEQ ID NO: 548680 - RNA, 22 nt, Artificial Sequence
  Synthetic
aaauuugcaucauaccaauauc

SEQ ID NO: 548681 - RNA, 23 nt, Artificial Sequence
  Synthetic
uaaauuugcaucauaccaauauc

SEQ ID NO: 548682 - RNA, 24 nt, Artificial Sequence
  Synthetic
guaaauuugcaucauaccaauauc

SEQ ID NO: 548683 - RNA, 18 nt, Artificial Sequence
  Synthetic
aaaauuucaaucaauauc

SEQ ID NO: 548684 - RNA, 19 nt, Artificial Sequence
  Synthetic
caaaauuucaaucaauauc

SEQ ID NO: 548685 - RNA, 20 nt, Artificial Sequence
  Synthetic
acaaaauuucaaucaauauc

SEQ ID NO: 548686 - RNA, 21 nt, Artificial Sequence
  Synthetic
cacaaaauuucaaucaauauc

SEQ ID NO: 548687 - RNA, 22 nt, Artificial Sequence
  Synthetic
ucacaaaauuucaaucaauauc

SEQ ID NO: 548688 - RNA, 23 nt, Artificial Sequence
  Synthetic
uucacaaaauuucaaucaauauc

SEQ ID NO: 548689 - RNA, 24 nt, Artificial Sequence
  Synthetic
auucacaaaauuucaaucaauauc

SEQ ID NO: 548690 - RNA, 18 nt, Artificial Sequence
  Synthetic
uuagacuguaucaauauc

SEQ ID NO: 548691 - RNA, 19 nt, Artificial Sequence
  Synthetic
uuuagacuguaucaauauc

SEQ ID NO: 548692 - RNA, 20 nt, Artificial Sequence
  Synthetic
auuuagacuguaucaauauc

SEQ ID NO: 548693 - RNA, 21 nt, Artificial Sequence
  Synthetic
gauuuagacuguaucaauauc

SEQ ID NO: 548694 - RNA, 22 nt, Artificial Sequence
  Synthetic
agauuuagacuguaucaauauc

SEQ ID NO: 548695 - RNA, 23 nt, Artificial Sequence
  Synthetic
gagauuuagacuguaucaauauc

SEQ ID NO: 548696 - RNA, 24 nt, Artificial Sequence
  Synthetic
agagauuuagacuguaucaauauc

SEQ ID NO: 548697 - RNA, 18 nt, Artificial Sequence
  Synthetic
uguaucaauuucaauauc

SEQ ID NO: 548698 - RNA, 19 nt, Artificial Sequence
  Synthetic
uuguaucaauuucaauauc

SEQ ID NO: 548699 - RNA, 20 nt, Artificial Sequence
  Synthetic
auuguaucaauuucaauauc

SEQ ID NO: 548700 - RNA, 21 nt, Artificial Sequence
  Synthetic
gauuguaucaauuucaauauc

SEQ ID NO: 548701 - RNA, 22 nt, Artificial Sequence
  Synthetic
ggauuguaucaauuucaauauc

SEQ ID NO: 548702 - RNA, 23 nt, Artificial Sequence
  Synthetic
aggauuguaucaauuucaauauc

SEQ ID NO: 548703 - RNA, 24 nt, Artificial Sequence
  Synthetic
uaggauuguaucaauuucaauauc

SEQ ID NO: 548704 - RNA, 18 nt, Artificial Sequence
  Synthetic
guaccaugucagaauauc

SEQ ID NO: 548705 - RNA, 19 nt, Artificial Sequence
  Synthetic
cguaccaugucagaauauc

SEQ ID NO: 548706 - RNA, 20 nt, Artificial Sequence
  Synthetic
gcguaccaugucagaauauc

SEQ ID NO: 548707 - RNA, 21 nt, Artificial Sequence
  Synthetic
agcguaccaugucagaauauc

SEQ ID NO: 548708 - RNA, 22 nt, Artificial Sequence
  Synthetic
cagcguaccaugucagaauauc

SEQ ID NO: 548709 - RNA, 23 nt, Artificial Sequence
  Synthetic
gcagcguaccaugucagaauauc

SEQ ID NO: 548710 - RNA, 24 nt, Artificial Sequence
  Synthetic
agcagcguaccaugucagaauauc

SEQ ID NO: 548711 - RNA, 18 nt, Artificial Sequence
  Synthetic
agaaggaggaggaauauc

SEQ ID NO: 548712 - RNA, 19 nt, Artificial Sequence
  Synthetic
gagaaggaggaggaauauc

SEQ ID NO: 548713 - RNA, 20 nt, Artificial Sequence
  Synthetic
agagaaggaggaggaauauc

SEQ ID NO: 548714 - RNA, 21 nt, Artificial Sequence
  Synthetic
uagagaaggaggaggaauauc

SEQ ID NO: 548715 - RNA, 22 nt, Artificial Sequence
  Synthetic
cuagagaaggaggaggaauauc

SEQ ID NO: 548716 - RNA, 23 nt, Artificial Sequence
  Synthetic
acuagagaaggaggaggaauauc

SEQ ID NO: 548717 - RNA, 24 nt, Artificial Sequence
  Synthetic
gacuagagaaggaggaggaauauc

SEQ ID NO: 548718 - RNA, 18 nt, Artificial Sequence
  Synthetic
aaacaggcauugaauauc

SEQ ID NO: 548719 - RNA, 19 nt, Artificial Sequence
  Synthetic
aaaacaggcauugaauauc

SEQ ID NO: 548720 - RNA, 20 nt, Artificial Sequence
  Synthetic
uaaaacaggcauugaauauc

SEQ ID NO: 548721 - RNA, 21 nt, Artificial Sequence
  Synthetic
uuaaaacaggcauugaauauc

SEQ ID NO: 548722 - RNA, 22 nt, Artificial Sequence
  Synthetic
auuaaaacaggcauugaauauc

SEQ ID NO: 548723 - RNA, 23 nt, Artificial Sequence
  Synthetic
uauuaaaacaggcauugaauauc

SEQ ID NO: 548724 - RNA, 24 nt, Artificial Sequence
  Synthetic
auauuaaaacaggcauugaauauc

SEQ ID NO: 548725 - RNA, 18 nt, Artificial Sequence
  Synthetic
uugcauauaccuaauauc

SEQ ID NO: 548726 - RNA, 19 nt, Artificial Sequence
  Synthetic
uuugcauauaccuaauauc

SEQ ID NO: 548727 - RNA, 20 nt, Artificial Sequence
  Synthetic
auuugcauauaccuaauauc

SEQ ID NO: 548728 - RNA, 21 nt, Artificial Sequence
  Synthetic
uauuugcauauaccuaauauc

SEQ ID NO: 548729 - RNA, 22 nt, Artificial Sequence
  Synthetic
auauuugcauauaccuaauauc

SEQ ID NO: 548730 - RNA, 23 nt, Artificial Sequence
  Synthetic
aauauuugcauauaccuaauauc

SEQ ID NO: 548731 - RNA, 24 nt, Artificial Sequence
  Synthetic
uaauauuugcauauaccuaauauc

SEQ ID NO: 548732 - RNA, 18 nt, Artificial Sequence
  Synthetic
auaaaauauguuaauauc

SEQ ID NO: 548733 - RNA, 19 nt, Artificial Sequence
  Synthetic
uauaaaauauguuaauauc

SEQ ID NO: 548734 - RNA, 20 nt, Artificial Sequence
  Synthetic
uuauaaaauauguuaauauc

SEQ ID NO: 548735 - RNA, 21 nt, Artificial Sequence
  Synthetic
guuauaaaauauguuaauauc

SEQ ID NO: 548736 - RNA, 22 nt, Artificial Sequence
  Synthetic
aguuauaaaauauguuaauauc

SEQ ID NO: 548737 - RNA, 23 nt, Artificial Sequence
  Synthetic
caguuauaaaauauguuaauauc

SEQ ID NO: 548738 - RNA, 24 nt, Artificial Sequence
  Synthetic
gcaguuauaaaauauguuaauauc

SEQ ID NO: 548739 - RNA, 18 nt, Artificial Sequence
  Synthetic
uucagaauuggacauauc

SEQ ID NO: 548740 - RNA, 19 nt, Artificial Sequence
  Synthetic
uuucagaauuggacauauc

SEQ ID NO: 548741 - RNA, 20 nt, Artificial Sequence
  Synthetic
guuucagaauuggacauauc

SEQ ID NO: 548742 - RNA, 21 nt, Artificial Sequence
  Synthetic
uguuucagaauuggacauauc

SEQ ID NO: 548743 - RNA, 22 nt, Artificial Sequence
  Synthetic
uuguuucagaauuggacauauc

SEQ ID NO: 548744 - RNA, 23 nt, Artificial Sequence
  Synthetic
guuguuucagaauuggacauauc

SEQ ID NO: 548745 - RNA, 24 nt, Artificial Sequence
  Synthetic
aguuguuucagaauuggacauauc

SEQ ID NO: 548746 - RNA, 18 nt, Artificial Sequence
  Synthetic
uagaaaucacuacauauc

SEQ ID NO: 548747 - RNA, 19 nt, Artificial Sequence
  Synthetic
uuagaaaucacuacauauc

SEQ ID NO: 548748 - RNA, 20 nt, Artificial Sequence
  Synthetic
auuagaaaucacuacauauc

SEQ ID NO: 548749 - RNA, 21 nt, Artificial Sequence
  Synthetic
cauuagaaaucacuacauauc

SEQ ID NO: 548750 - RNA, 22 nt, Artificial Sequence
  Synthetic
acauuagaaaucacuacauauc

SEQ ID NO: 548751 - RNA, 23 nt, Artificial Sequence
  Synthetic
cacauuagaaaucacuacauauc

SEQ ID NO: 548752 - RNA, 24 nt, Artificial Sequence
  Synthetic
acacauuagaaaucacuacauauc

SEQ ID NO: 548753 - RNA, 18 nt, Artificial Sequence
  Synthetic
aauacaacucuacauauc

SEQ ID NO: 548754 - RNA, 19 nt, Artificial Sequence
  Synthetic
uaauacaacucuacauauc

SEQ ID NO: 548755 - RNA, 20 nt, Artificial Sequence
  Synthetic
uuaauacaacucuacauauc

SEQ ID NO: 548756 - RNA, 21 nt, Artificial Sequence
  Synthetic
uuuaauacaacucuacauauc

SEQ ID NO: 548757 - RNA, 22 nt, Artificial Sequence
  Synthetic
uuuuaauacaacucuacauauc

SEQ ID NO: 548758 - RNA, 23 nt, Artificial Sequence
  Synthetic
uuuuuaauacaacucuacauauc

SEQ ID NO: 548759 - RNA, 24 nt, Artificial Sequence
  Synthetic
auuuuuaauacaacucuacauauc

SEQ ID NO: 548760 - RNA, 18 nt, Artificial Sequence
  Synthetic
ccccaaauaguggauauc

SEQ ID NO: 548761 - RNA, 19 nt, Artificial Sequence
  Synthetic
accccaaauaguggauauc

SEQ ID NO: 548762 - RNA, 20 nt, Artificial Sequence
  Synthetic
uaccccaaauaguggauauc

SEQ ID NO: 548763 - RNA, 21 nt, Artificial Sequence
  Synthetic
auaccccaaauaguggauauc

SEQ ID NO: 548764 - RNA, 22 nt, Artificial Sequence
  Synthetic
cauaccccaaauaguggauauc

SEQ ID NO: 548765 - RNA, 23 nt, Artificial Sequence
  Synthetic
acauaccccaaauaguggauauc

SEQ ID NO: 548766 - RNA, 24 nt, Artificial Sequence
  Synthetic
aacauaccccaaauaguggauauc

SEQ ID NO: 548767 - RNA, 18 nt, Artificial Sequence
  Synthetic
ugcccaugcacugauauc

SEQ ID NO: 548768 - RNA, 19 nt, Artificial Sequence
  Synthetic
gugcccaugcacugauauc

SEQ ID NO: 548769 - RNA, 20 nt, Artificial Sequence
  Synthetic
agugcccaugcacugauauc

SEQ ID NO: 548770 - RNA, 21 nt, Artificial Sequence
  Synthetic
aagugcccaugcacugauauc

SEQ ID NO: 548771 - RNA, 22 nt, Artificial Sequence
  Synthetic
gaagugcccaugcacugauauc

SEQ ID NO: 548772 - RNA, 23 nt, Artificial Sequence
  Synthetic
agaagugcccaugcacugauauc

SEQ ID NO: 548773 - RNA, 24 nt, Artificial Sequence
  Synthetic
gagaagugcccaugcacugauauc

SEQ ID NO: 548774 - RNA, 18 nt, Artificial Sequence
  Synthetic
ugaagaaaggaauauauc

SEQ ID NO: 548775 - RNA, 19 nt, Artificial Sequence
  Synthetic
cugaagaaaggaauauauc

SEQ ID NO: 548776 - RNA, 20 nt, Artificial Sequence
  Synthetic
ccugaagaaaggaauauauc

SEQ ID NO: 548777 - RNA, 21 nt, Artificial Sequence
  Synthetic
accugaagaaaggaauauauc

SEQ ID NO: 548778 - RNA, 22 nt, Artificial Sequence
  Synthetic
aaccugaagaaaggaauauauc

SEQ ID NO: 548779 - RNA, 23 nt, Artificial Sequence
  Synthetic
aaaccugaagaaaggaauauauc

SEQ ID NO: 548780 - RNA, 24 nt, Artificial Sequence
  Synthetic
aaaaccugaagaaaggaauauauc

SEQ ID NO: 548781 - RNA, 18 nt, Artificial Sequence
  Synthetic
gguuuugagaacuauauc

SEQ ID NO: 548782 - RNA, 19 nt, Artificial Sequence
  Synthetic
ggguuuugagaacuauauc

SEQ ID NO: 548783 - RNA, 20 nt, Artificial Sequence
  Synthetic
uggguuuugagaacuauauc

SEQ ID NO: 548784 - RNA, 21 nt, Artificial Sequence
  Synthetic
uuggguuuugagaacuauauc

SEQ ID NO: 548785 - RNA, 22 nt, Artificial Sequence
  Synthetic
uuuggguuuugagaacuauauc

SEQ ID NO: 548786 - RNA, 23 nt, Artificial Sequence
  Synthetic
uuuuggguuuugagaacuauauc

SEQ ID NO: 548787 - RNA, 24 nt, Artificial Sequence
  Synthetic
auuuuggguuuugagaacuauauc

SEQ ID NO: 548788 - RNA, 18 nt, Artificial Sequence
  Synthetic
aucaucaugcacuauauc

SEQ ID NO: 548789 - RNA, 19 nt, Artificial Sequence
  Synthetic
caucaucaugcacuauauc

SEQ ID NO: 548790 - RNA, 20 nt, Artificial Sequence
  Synthetic
ucaucaucaugcacuauauc

SEQ ID NO: 548791 - RNA, 21 nt, Artificial Sequence
  Synthetic
cucaucaucaugcacuauauc

SEQ ID NO: 548792 - RNA, 22 nt, Artificial Sequence
  Synthetic
ccucaucaucaugcacuauauc

SEQ ID NO: 548793 - RNA, 23 nt, Artificial Sequence
  Synthetic
accucaucaucaugcacuauauc

SEQ ID NO: 548794 - RNA, 24 nt, Artificial Sequence
  Synthetic
aaccucaucaucaugcacuauauc

SEQ ID NO: 548795 - RNA, 18 nt, Artificial Sequence
  Synthetic
aaauguauuaucuauauc

SEQ ID NO: 548796 - RNA, 19 nt, Artificial Sequence
  Synthetic
aaaauguauuaucuauauc

SEQ ID NO: 548797 - RNA, 20 nt, Artificial Sequence
  Synthetic
gaaaauguauuaucuauauc

SEQ ID NO: 548798 - RNA, 21 nt, Artificial Sequence
  Synthetic
ggaaaauguauuaucuauauc

SEQ ID NO: 548799 - RNA, 22 nt, Artificial Sequence
  Synthetic
gggaaaauguauuaucuauauc

SEQ ID NO: 548800 - RNA, 23 nt, Artificial Sequence
  Synthetic
ugggaaaauguauuaucuauauc

SEQ ID NO: 548801 - RNA, 24 nt, Artificial Sequence
  Synthetic
uugggaaaauguauuaucuauauc

SEQ ID NO: 548802 - RNA, 18 nt, Artificial Sequence
  Synthetic
ucccgacaauucuauauc

SEQ ID NO: 548803 - RNA, 19 nt, Artificial Sequence
  Synthetic
uucccgacaauucuauauc

SEQ ID NO: 548804 - RNA, 20 nt, Artificial Sequence
  Synthetic
uuucccgacaauucuauauc

SEQ ID NO: 548805 - RNA, 21 nt, Artificial Sequence
  Synthetic
uuuucccgacaauucuauauc

SEQ ID NO: 548806 - RNA, 22 nt, Artificial Sequence
  Synthetic
guuuucccgacaauucuauauc

SEQ ID NO: 548807 - RNA, 23 nt, Artificial Sequence
  Synthetic
aguuuucccgacaauucuauauc

SEQ ID NO: 548808 - RNA, 24 nt, Artificial Sequence
  Synthetic
aaguuuucccgacaauucuauauc

SEQ ID NO: 548809 - RNA, 18 nt, Artificial Sequence
  Synthetic
gaaacucauaaguauauc

SEQ ID NO: 548810 - RNA, 19 nt, Artificial Sequence
  Synthetic
ugaaacucauaaguauauc

SEQ ID NO: 548811 - RNA, 20 nt, Artificial Sequence
  Synthetic
gugaaacucauaaguauauc

SEQ ID NO: 548812 - RNA, 21 nt, Artificial Sequence
  Synthetic
ugugaaacucauaaguauauc

SEQ ID NO: 548813 - RNA, 22 nt, Artificial Sequence
  Synthetic
augugaaacucauaaguauauc

SEQ ID NO: 548814 - RNA, 23 nt, Artificial Sequence
  Synthetic
gaugugaaacucauaaguauauc

SEQ ID NO: 548815 - RNA, 24 nt, Artificial Sequence
  Synthetic
ggaugugaaacucauaaguauauc

SEQ ID NO: 548816 - RNA, 21 nt, Artificial Sequence
  Synthetic
cagacgacaugauuguauauc

SEQ ID NO: 548817 - RNA, 22 nt, Artificial Sequence
  Synthetic
gcagacgacaugauuguauauc

SEQ ID NO: 548818 - RNA, 23 nt, Artificial Sequence
  Synthetic
ugcagacgacaugauuguauauc

SEQ ID NO: 548819 - RNA, 24 nt, Artificial Sequence
  Synthetic
uugcagacgacaugauuguauauc

SEQ ID NO: 548820 - RNA, 18 nt, Artificial Sequence
  Synthetic
uagcaaccaaauuauauc

SEQ ID NO: 548821 - RNA, 19 nt, Artificial Sequence
  Synthetic
uuagcaaccaaauuauauc

SEQ ID NO: 548822 - RNA, 20 nt, Artificial Sequence
  Synthetic
uuuagcaaccaaauuauauc

SEQ ID NO: 548823 - RNA, 21 nt, Artificial Sequence
  Synthetic
auuuagcaaccaaauuauauc

SEQ ID NO: 548824 - RNA, 22 nt, Artificial Sequence
  Synthetic
aauuuagcaaccaaauuauauc

SEQ ID NO: 548825 - RNA, 23 nt, Artificial Sequence
  Synthetic
uaauuuagcaaccaaauuauauc

SEQ ID NO: 548826 - RNA, 24 nt, Artificial Sequence
  Synthetic
guaauuuagcaaccaaauuauauc

SEQ ID NO: 548827 - RNA, 18 nt, Artificial Sequence
  Synthetic
cagaguugagauuauauc

SEQ ID NO: 548828 - RNA, 19 nt, Artificial Sequence
  Synthetic
gcagaguugagauuauauc

SEQ ID NO: 548829 - RNA, 20 nt, Artificial Sequence
  Synthetic
ggcagaguugagauuauauc

SEQ ID NO: 548830 - RNA, 21 nt, Artificial Sequence
  Synthetic
uggcagaguugagauuauauc

SEQ ID NO: 548831 - RNA, 22 nt, Artificial Sequence
  Synthetic
auggcagaguugagauuauauc

SEQ ID NO: 548832 - RNA, 23 nt, Artificial Sequence
  Synthetic
aauggcagaguugagauuauauc

SEQ ID NO: 548833 - RNA, 24 nt, Artificial Sequence
  Synthetic
aaauggcagaguugagauuauauc

SEQ ID NO: 548834 - RNA, 18 nt, Artificial Sequence
  Synthetic
uuuuuuuuaccuuauauc

SEQ ID NO: 548835 - RNA, 19 nt, Artificial Sequence
  Synthetic
uuuuuuuuuaccuuauauc

SEQ ID NO: 548836 - RNA, 20 nt, Artificial Sequence
  Synthetic
uuuuuuuuuuaccuuauauc

SEQ ID NO: 548837 - RNA, 21 nt, Artificial Sequence
  Synthetic
uuuuuuuuuuuaccuuauauc

SEQ ID NO: 548838 - RNA, 22 nt, Artificial Sequence
  Synthetic
cuuuuuuuuuuuaccuuauauc

SEQ ID NO: 548839 - RNA, 23 nt, Artificial Sequence
  Synthetic
gcuuuuuuuuuuuaccuuauauc

SEQ ID NO: 548840 - RNA, 24 nt, Artificial Sequence
  Synthetic
ugcuuuuuuuuuuuaccuuauauc

SEQ ID NO: 548841 - RNA, 18 nt, Artificial Sequence
  Synthetic
uaacugcuucuuuauauc

SEQ ID NO: 548842 - RNA, 19 nt, Artificial Sequence
  Synthetic
auaacugcuucuuuauauc

SEQ ID NO: 548843 - RNA, 20 nt, Artificial Sequence
  Synthetic
aauaacugcuucuuuauauc

SEQ ID NO: 548844 - RNA, 21 nt, Artificial Sequence
  Synthetic
uaauaacugcuucuuuauauc

SEQ ID NO: 548845 - RNA, 22 nt, Artificial Sequence
  Synthetic
cuaauaacugcuucuuuauauc

SEQ ID NO: 548846 - RNA, 23 nt, Artificial Sequence
  Synthetic
ucuaauaacugcuucuuuauauc

SEQ ID NO: 548847 - RNA, 24 nt, Artificial Sequence
  Synthetic
aucuaauaacugcuucuuuauauc

SEQ ID NO: 548848 - RNA, 18 nt, Artificial Sequence
  Synthetic
aagccuacaguuuauauc

SEQ ID NO: 548849 - RNA, 19 nt, Artificial Sequence
  Synthetic
uaagccuacaguuuauauc

SEQ ID NO: 548850 - RNA, 20 nt, Artificial Sequence
  Synthetic
uuaagccuacaguuuauauc

SEQ ID NO: 548851 - RNA, 21 nt, Artificial Sequence
  Synthetic
uuuaagccuacaguuuauauc

SEQ ID NO: 548852 - RNA, 22 nt, Artificial Sequence
  Synthetic
cuuuaagccuacaguuuauauc

SEQ ID NO: 548853 - RNA, 23 nt, Artificial Sequence
  Synthetic
acuuuaagccuacaguuuauauc

SEQ ID NO: 548854 - RNA, 24 nt, Artificial Sequence
  Synthetic
aacuuuaagccuacaguuuauauc

SEQ ID NO: 548855 - RNA, 18 nt, Artificial Sequence
  Synthetic
caggccauuaaaacuauc

SEQ ID NO: 548856 - RNA, 19 nt, Artificial Sequence
  Synthetic
gcaggccauuaaaacuauc

SEQ ID NO: 548857 - RNA, 20 nt, Artificial Sequence
  Synthetic
agcaggccauuaaaacuauc

SEQ ID NO: 548858 - RNA, 21 nt, Artificial Sequence
  Synthetic
gagcaggccauuaaaacuauc

SEQ ID NO: 548859 - RNA, 22 nt, Artificial Sequence
  Synthetic
ugagcaggccauuaaaacuauc

SEQ ID NO: 548860 - RNA, 23 nt, Artificial Sequence
  Synthetic
augagcaggccauuaaaacuauc

SEQ ID NO: 548861 - RNA, 24 nt, Artificial Sequence
  Synthetic
caugagcaggccauuaaaacuauc

SEQ ID NO: 548862 - RNA, 18 nt, Artificial Sequence
  Synthetic
acugcaaaagaaacuauc

SEQ ID NO: 548863 - RNA, 19 nt, Artificial Sequence
  Synthetic
cacugcaaaagaaacuauc

SEQ ID NO: 548864 - RNA, 20 nt, Artificial Sequence
  Synthetic
acacugcaaaagaaacuauc

SEQ ID NO: 548865 - RNA, 21 nt, Artificial Sequence
  Synthetic
uacacugcaaaagaaacuauc

SEQ ID NO: 548866 - RNA, 22 nt, Artificial Sequence
  Synthetic
cuacacugcaaaagaaacuauc

SEQ ID NO: 548867 - RNA, 23 nt, Artificial Sequence
  Synthetic
ucuacacugcaaaagaaacuauc

SEQ ID NO: 548868 - RNA, 24 nt, Artificial Sequence
  Synthetic
uucuacacugcaaaagaaacuauc

SEQ ID NO: 548869 - RNA, 18 nt, Artificial Sequence
  Synthetic
ugcuuguauacaacuauc

SEQ ID NO: 548870 - RNA, 19 nt, Artificial Sequence
  Synthetic
augcuuguauacaacuauc

SEQ ID NO: 548871 - RNA, 20 nt, Artificial Sequence
  Synthetic
aaugcuuguauacaacuauc

SEQ ID NO: 548872 - RNA, 21 nt, Artificial Sequence
  Synthetic
aaaugcuuguauacaacuauc

SEQ ID NO: 548873 - RNA, 22 nt, Artificial Sequence
  Synthetic
aaaaugcuuguauacaacuauc

SEQ ID NO: 548874 - RNA, 23 nt, Artificial Sequence
  Synthetic
gaaaaugcuuguauacaacuauc

SEQ ID NO: 548875 - RNA, 24 nt, Artificial Sequence
  Synthetic
ugaaaaugcuuguauacaacuauc

SEQ ID NO: 548876 - RNA, 18 nt, Artificial Sequence
  Synthetic
ugucuaccaugaacuauc

SEQ ID NO: 548877 - RNA, 19 nt, Artificial Sequence
  Synthetic
augucuaccaugaacuauc

SEQ ID NO: 548878 - RNA, 20 nt, Artificial Sequence
  Synthetic
caugucuaccaugaacuauc

SEQ ID NO: 548879 - RNA, 21 nt, Artificial Sequence
  Synthetic
ucaugucuaccaugaacuauc

SEQ ID NO: 548880 - RNA, 22 nt, Artificial Sequence
  Synthetic
uucaugucuaccaugaacuauc

SEQ ID NO: 548881 - RNA, 23 nt, Artificial Sequence
  Synthetic
auucaugucuaccaugaacuauc

SEQ ID NO: 548882 - RNA, 24 nt, Artificial Sequence
  Synthetic
aauucaugucuaccaugaacuauc

SEQ ID NO: 548883 - RNA, 18 nt, Artificial Sequence
  Synthetic
gugaaaucacccacuauc

SEQ ID NO: 548884 - RNA, 19 nt, Artificial Sequence
  Synthetic
ugugaaaucacccacuauc

SEQ ID NO: 548885 - RNA, 20 nt, Artificial Sequence
  Synthetic
augugaaaucacccacuauc

SEQ ID NO: 548886 - RNA, 21 nt, Artificial Sequence
  Synthetic
caugugaaaucacccacuauc

SEQ ID NO: 548887 - RNA, 22 nt, Artificial Sequence
  Synthetic
ucaugugaaaucacccacuauc

SEQ ID NO: 548888 - RNA, 23 nt, Artificial Sequence
  Synthetic
cucaugugaaaucacccacuauc

SEQ ID NO: 548889 - RNA, 24 nt, Artificial Sequence
  Synthetic
ucucaugugaaaucacccacuauc

SEQ ID NO: 548890 - RNA, 18 nt, Artificial Sequence
  Synthetic
auguucaacaucacuauc

SEQ ID NO: 548891 - RNA, 19 nt, Artificial Sequence
  Synthetic
aauguucaacaucacuauc

SEQ ID NO: 548892 - RNA, 20 nt, Artificial Sequence
  Synthetic
aaauguucaacaucacuauc

SEQ ID NO: 548893 - RNA, 21 nt, Artificial Sequence
  Synthetic
aaaauguucaacaucacuauc

SEQ ID NO: 548894 - RNA, 22 nt, Artificial Sequence
  Synthetic
aaaaauguucaacaucacuauc

SEQ ID NO: 548895 - RNA, 23 nt, Artificial Sequence
  Synthetic
aaaaaauguucaacaucacuauc

SEQ ID NO: 548896 - RNA, 24 nt, Artificial Sequence
  Synthetic
gaaaaaauguucaacaucacuauc

SEQ ID NO: 548897 - RNA, 18 nt, Artificial Sequence
  Synthetic
gagaacucacucacuauc

SEQ ID NO: 548898 - RNA, 19 nt, Artificial Sequence
  Synthetic
ugagaacucacucacuauc

SEQ ID NO: 548899 - RNA, 20 nt, Artificial Sequence
  Synthetic
gugagaacucacucacuauc

SEQ ID NO: 548900 - RNA, 21 nt, Artificial Sequence
  Synthetic
ugugagaacucacucacuauc

SEQ ID NO: 548901 - RNA, 22 nt, Artificial Sequence
  Synthetic
uugugagaacucacucacuauc

SEQ ID NO: 548902 - RNA, 23 nt, Artificial Sequence
  Synthetic
cuugugagaacucacucacuauc

SEQ ID NO: 548903 - RNA, 24 nt, Artificial Sequence
  Synthetic
ucuugugagaacucacucacuauc

SEQ ID NO: 548904 - RNA, 18 nt, Artificial Sequence
  Synthetic
uguugcuuucucacuauc

SEQ ID NO: 548905 - RNA, 19 nt, Artificial Sequence
  Synthetic
uuguugcuuucucacuauc

SEQ ID NO: 548906 - RNA, 20 nt, Artificial Sequence
  Synthetic
uuuguugcuuucucacuauc

SEQ ID NO: 548907 - RNA, 21 nt, Artificial Sequence
  Synthetic
auuuguugcuuucucacuauc

SEQ ID NO: 548908 - RNA, 22 nt, Artificial Sequence
  Synthetic
aauuuguugcuuucucacuauc

SEQ ID NO: 548909 - RNA, 23 nt, Artificial Sequence
  Synthetic
uaauuuguugcuuucucacuauc

SEQ ID NO: 548910 - RNA, 24 nt, Artificial Sequence
  Synthetic
guaauuuguugcuuucucacuauc

SEQ ID NO: 548911 - RNA, 18 nt, Artificial Sequence
  Synthetic
aucucaugauucacuauc

SEQ ID NO: 548912 - RNA, 19 nt, Artificial Sequence
  Synthetic
gaucucaugauucacuauc

SEQ ID NO: 548913 - RNA, 20 nt, Artificial Sequence
  Synthetic
ugaucucaugauucacuauc

SEQ ID NO: 548914 - RNA, 21 nt, Artificial Sequence
  Synthetic
cugaucucaugauucacuauc

SEQ ID NO: 548915 - RNA, 22 nt, Artificial Sequence
  Synthetic
ucugaucucaugauucacuauc

SEQ ID NO: 548916 - RNA, 23 nt, Artificial Sequence
  Synthetic
aucugaucucaugauucacuauc

SEQ ID NO: 548917 - RNA, 24 nt, Artificial Sequence
  Synthetic
caucugaucucaugauucacuauc

SEQ ID NO: 548918 - RNA, 18 nt, Artificial Sequence
  Synthetic
uguugagucuucacuauc

SEQ ID NO: 548919 - RNA, 19 nt, Artificial Sequence
  Synthetic
uuguugagucuucacuauc

SEQ ID NO: 548920 - RNA, 20 nt, Artificial Sequence
  Synthetic
cuuguugagucuucacuauc

SEQ ID NO: 548921 - RNA, 21 nt, Artificial Sequence
  Synthetic
ucuuguugagucuucacuauc

SEQ ID NO: 548922 - RNA, 22 nt, Artificial Sequence
  Synthetic
gucuuguugagucuucacuauc

SEQ ID NO: 548923 - RNA, 23 nt, Artificial Sequence
  Synthetic
ggucuuguugagucuucacuauc

SEQ ID NO: 548924 - RNA, 24 nt, Artificial Sequence
  Synthetic
gggucuuguugagucuucacuauc

SEQ ID NO: 548925 - RNA, 18 nt, Artificial Sequence
  Synthetic
uuuacuauuguuacuauc

SEQ ID NO: 548926 - RNA, 19 nt, Artificial Sequence
  Synthetic
uuuuacuauuguuacuauc

SEQ ID NO: 548927 - RNA, 20 nt, Artificial Sequence
  Synthetic
auuuuacuauuguuacuauc

SEQ ID NO: 548928 - RNA, 21 nt, Artificial Sequence
  Synthetic
cauuuuacuauuguuacuauc

SEQ ID NO: 548929 - RNA, 22 nt, Artificial Sequence
  Synthetic
ccauuuuacuauuguuacuauc

SEQ ID NO: 548930 - RNA, 23 nt, Artificial Sequence
  Synthetic
uccauuuuacuauuguuacuauc

SEQ ID NO: 548931 - RNA, 24 nt, Artificial Sequence
  Synthetic
uuccauuuuacuauuguuacuauc

SEQ ID NO: 548932 - RNA, 18 nt, Artificial Sequence
  Synthetic
ucagguagaaaaccuauc

SEQ ID NO: 548933 - RNA, 19 nt, Artificial Sequence
  Synthetic
aucagguagaaaaccuauc

SEQ ID NO: 548934 - RNA, 20 nt, Artificial Sequence
  Synthetic
gaucagguagaaaaccuauc

SEQ ID NO: 548935 - RNA, 21 nt, Artificial Sequence
  Synthetic
ugaucagguagaaaaccuauc

SEQ ID NO: 548936 - RNA, 22 nt, Artificial Sequence
  Synthetic
uugaucagguagaaaaccuauc

SEQ ID NO: 548937 - RNA, 23 nt, Artificial Sequence
  Synthetic
uuugaucagguagaaaaccuauc

SEQ ID NO: 548938 - RNA, 24 nt, Artificial Sequence
  Synthetic
uuuugaucagguagaaaaccuauc

SEQ ID NO: 548939 - RNA, 18 nt, Artificial Sequence
  Synthetic
gauuuuacuguaccuauc

SEQ ID NO: 548940 - RNA, 19 nt, Artificial Sequence
  Synthetic
agauuuuacuguaccuauc

SEQ ID NO: 548941 - RNA, 20 nt, Artificial Sequence
  Synthetic
cagauuuuacuguaccuauc

SEQ ID NO: 548942 - RNA, 21 nt, Artificial Sequence
  Synthetic
acagauuuuacuguaccuauc

SEQ ID NO: 548943 - RNA, 22 nt, Artificial Sequence
  Synthetic
cacagauuuuacuguaccuauc

SEQ ID NO: 548944 - RNA, 23 nt, Artificial Sequence
  Synthetic
ucacagauuuuacuguaccuauc

SEQ ID NO: 548945 - RNA, 24 nt, Artificial Sequence
  Synthetic
uucacagauuuuacuguaccuauc

SEQ ID NO: 548946 - RNA, 18 nt, Artificial Sequence
  Synthetic
acagcaaaagacccuauc

SEQ ID NO: 548947 - RNA, 19 nt, Artificial Sequence
  Synthetic
cacagcaaaagacccuauc

SEQ ID NO: 548948 - RNA, 20 nt, Artificial Sequence
  Synthetic
gcacagcaaaagacccuauc

SEQ ID NO: 548949 - RNA, 21 nt, Artificial Sequence
  Synthetic
agcacagcaaaagacccuauc

SEQ ID NO: 548950 - RNA, 22 nt, Artificial Sequence
  Synthetic
gagcacagcaaaagacccuauc

SEQ ID NO: 548951 - RNA, 23 nt, Artificial Sequence
  Synthetic
agagcacagcaaaagacccuauc

SEQ ID NO: 548952 - RNA, 24 nt, Artificial Sequence
  Synthetic
aagagcacagcaaaagacccuauc

SEQ ID NO: 548953 - RNA, 18 nt, Artificial Sequence
  Synthetic
ccuucuuuauccccuauc

SEQ ID NO: 548954 - RNA, 19 nt, Artificial Sequence
  Synthetic
gccuucuuuauccccuauc

SEQ ID NO: 548955 - RNA, 20 nt, Artificial Sequence
  Synthetic
ggccuucuuuauccccuauc

SEQ ID NO: 548956 - RNA, 21 nt, Artificial Sequence
  Synthetic
aggccuucuuuauccccuauc

SEQ ID NO: 548957 - RNA, 22 nt, Artificial Sequence
  Synthetic
uaggccuucuuuauccccuauc

SEQ ID NO: 548958 - RNA, 23 nt, Artificial Sequence
  Synthetic
auaggccuucuuuauccccuauc

SEQ ID NO: 548959 - RNA, 24 nt, Artificial Sequence
  Synthetic
aauaggccuucuuuauccccuauc

SEQ ID NO: 548960 - RNA, 18 nt, Artificial Sequence
  Synthetic
auauaauaagugccuauc

SEQ ID NO: 548961 - RNA, 19 nt, Artificial Sequence
  Synthetic
uauauaauaagugccuauc

SEQ ID NO: 548962 - RNA, 20 nt, Artificial Sequence
  Synthetic
auauauaauaagugccuauc

SEQ ID NO: 548963 - RNA, 21 nt, Artificial Sequence
  Synthetic
aauauauaauaagugccuauc

SEQ ID NO: 548964 - RNA, 22 nt, Artificial Sequence
  Synthetic
aaauauauaauaagugccuauc

SEQ ID NO: 548965 - RNA, 23 nt, Artificial Sequence
  Synthetic
aaaauauauaauaagugccuauc

SEQ ID NO: 548966 - RNA, 24 nt, Artificial Sequence
  Synthetic
aaaaauauauaauaagugccuauc

SEQ ID NO: 548967 - RNA, 18 nt, Artificial Sequence
  Synthetic
guuuauauuucagcuauc

SEQ ID NO: 548968 - RNA, 19 nt, Artificial Sequence
  Synthetic
uguuuauauuucagcuauc

SEQ ID NO: 548969 - RNA, 20 nt, Artificial Sequence
  Synthetic
auguuuauauuucagcuauc

SEQ ID NO: 548970 - RNA, 21 nt, Artificial Sequence
  Synthetic
gauguuuauauuucagcuauc

SEQ ID NO: 548971 - RNA, 22 nt, Artificial Sequence
  Synthetic
agauguuuauauuucagcuauc

SEQ ID NO: 548972 - RNA, 23 nt, Artificial Sequence
  Synthetic
uagauguuuauauuucagcuauc

SEQ ID NO: 548973 - RNA, 24 nt, Artificial Sequence
  Synthetic
auagauguuuauauuucagcuauc

SEQ ID NO: 548974 - RNA, 18 nt, Artificial Sequence
  Synthetic
aaagacacuauugcuauc

SEQ ID NO: 548975 - RNA, 19 nt, Artificial Sequence
  Synthetic
aaaagacacuauugcuauc

SEQ ID NO: 548976 - RNA, 20 nt, Artificial Sequence
  Synthetic
aaaaagacacuauugcuauc

SEQ ID NO: 548977 - RNA, 21 nt, Artificial Sequence
  Synthetic
gaaaaagacacuauugcuauc

SEQ ID NO: 548978 - RNA, 22 nt, Artificial Sequence
  Synthetic
ugaaaaagacacuauugcuauc

SEQ ID NO: 548979 - RNA, 23 nt, Artificial Sequence
  Synthetic
augaaaaagacacuauugcuauc

SEQ ID NO: 548980 - RNA, 24 nt, Artificial Sequence
  Synthetic
gaugaaaaagacacuauugcuauc

SEQ ID NO: 548981 - RNA, 18 nt, Artificial Sequence
  Synthetic
uagcacuuuuuugcuauc

SEQ ID NO: 548982 - RNA, 19 nt, Artificial Sequence
  Synthetic
uuagcacuuuuuugcuauc

SEQ ID NO: 548983 - RNA, 20 nt, Artificial Sequence
  Synthetic
uuuagcacuuuuuugcuauc

SEQ ID NO: 548984 - RNA, 21 nt, Artificial Sequence
  Synthetic
guuuagcacuuuuuugcuauc

SEQ ID NO: 548985 - RNA, 22 nt, Artificial Sequence
  Synthetic
gguuuagcacuuuuuugcuauc

SEQ ID NO: 548986 - RNA, 23 nt, Artificial Sequence
  Synthetic
agguuuagcacuuuuuugcuauc

SEQ ID NO: 548987 - RNA, 24 nt, Artificial Sequence
  Synthetic
gagguuuagcacuuuuuugcuauc

SEQ ID NO: 548988 - RNA, 18 nt, Artificial Sequence
  Synthetic
ucaauuuuaaucucuauc

SEQ ID NO: 548989 - RNA, 19 nt, Artificial Sequence
  Synthetic
uucaauuuuaaucucuauc

SEQ ID NO: 548990 - RNA, 20 nt, Artificial Sequence
  Synthetic
auucaauuuuaaucucuauc

SEQ ID NO: 548991 - RNA, 21 nt, Artificial Sequence
  Synthetic
cauucaauuuuaaucucuauc

SEQ ID NO: 548992 - RNA, 22 nt, Artificial Sequence
  Synthetic
ucauucaauuuuaaucucuauc

SEQ ID NO: 548993 - RNA, 23 nt, Artificial Sequence
  Synthetic
gucauucaauuuuaaucucuauc

SEQ ID NO: 548994 - RNA, 24 nt, Artificial Sequence
  Synthetic
ggucauucaauuuuaaucucuauc

SEQ ID NO: 548995 - RNA, 18 nt, Artificial Sequence
  Synthetic
acuguuuuugauucuauc

SEQ ID NO: 548996 - RNA, 19 nt, Artificial Sequence
  Synthetic
cacuguuuuugauucuauc

SEQ ID NO: 548997 - RNA, 20 nt, Artificial Sequence
  Synthetic
acacuguuuuugauucuauc

SEQ ID NO: 548998 - RNA, 21 nt, Artificial Sequence
  Synthetic
gacacuguuuuugauucuauc

SEQ ID NO: 548999 - RNA, 22 nt, Artificial Sequence
  Synthetic
ugacacuguuuuugauucuauc

SEQ ID NO: 549000 - RNA, 23 nt, Artificial Sequence
  Synthetic
uugacacuguuuuugauucuauc

SEQ ID NO: 549001 - RNA, 24 nt, Artificial Sequence
  Synthetic
uuugacacuguuuuugauucuauc

SEQ ID NO: 549002 - RNA, 18 nt, Artificial Sequence
  Synthetic
cccacuuuagcuucuauc

SEQ ID NO: 549003 - RNA, 19 nt, Artificial Sequence
  Synthetic
ccccacuuuagcuucuauc

SEQ ID NO: 549004 - RNA, 20 nt, Artificial Sequence
  Synthetic
cccccacuuuagcuucuauc

SEQ ID NO: 549005 - RNA, 21 nt, Artificial Sequence
  Synthetic
ccccccacuuuagcuucuauc

SEQ ID NO: 549006 - RNA, 22 nt, Artificial Sequence
  Synthetic
accccccacuuuagcuucuauc

SEQ ID NO: 549007 - RNA, 23 nt, Artificial Sequence
  Synthetic
caccccccacuuuagcuucuauc

SEQ ID NO: 549008 - RNA, 24 nt, Artificial Sequence
  Synthetic
ucaccccccacuuuagcuucuauc

SEQ ID NO: 549009 - RNA, 18 nt, Artificial Sequence
  Synthetic
acugaugaaaaaaguauc

SEQ ID NO: 549010 - RNA, 19 nt, Artificial Sequence
  Synthetic
uacugaugaaaaaaguauc

SEQ ID NO: 549011 - RNA, 20 nt, Artificial Sequence
  Synthetic
guacugaugaaaaaaguauc

SEQ ID NO: 549012 - RNA, 21 nt, Artificial Sequence
  Synthetic
uguacugaugaaaaaaguauc

SEQ ID NO: 549013 - RNA, 22 nt, Artificial Sequence
  Synthetic
uuguacugaugaaaaaaguauc

SEQ ID NO: 549014 - RNA, 23 nt, Artificial Sequence
  Synthetic
auuguacugaugaaaaaaguauc

SEQ ID NO: 549015 - RNA, 24 nt, Artificial Sequence
  Synthetic
aauuguacugaugaaaaaaguauc

SEQ ID NO: 549016 - RNA, 18 nt, Artificial Sequence
  Synthetic
aucauuucugcaaguauc

SEQ ID NO: 549017 - RNA, 19 nt, Artificial Sequence
  Synthetic
aaucauuucugcaaguauc

SEQ ID NO: 549018 - RNA, 20 nt, Artificial Sequence
  Synthetic
aaaucauuucugcaaguauc

SEQ ID NO: 549019 - RNA, 21 nt, Artificial Sequence
  Synthetic
caaaucauuucugcaaguauc

SEQ ID NO: 549020 - RNA, 22 nt, Artificial Sequence
  Synthetic
acaaaucauuucugcaaguauc

SEQ ID NO: 549021 - RNA, 23 nt, Artificial Sequence
  Synthetic
aacaaaucauuucugcaaguauc

SEQ ID NO: 549022 - RNA, 24 nt, Artificial Sequence
  Synthetic
aaacaaaucauuucugcaaguauc

SEQ ID NO: 549023 - RNA, 18 nt, Artificial Sequence
  Synthetic
ccaaggccuugcaguauc

SEQ ID NO: 549024 - RNA, 19 nt, Artificial Sequence
  Synthetic
uccaaggccuugcaguauc

SEQ ID NO: 549025 - RNA, 20 nt, Artificial Sequence
  Synthetic
cuccaaggccuugcaguauc

SEQ ID NO: 549026 - RNA, 21 nt, Artificial Sequence
  Synthetic
gcuccaaggccuugcaguauc

SEQ ID NO: 549027 - RNA, 22 nt, Artificial Sequence
  Synthetic
ugcuccaaggccuugcaguauc

SEQ ID NO: 549028 - RNA, 23 nt, Artificial Sequence
  Synthetic
cugcuccaaggccuugcaguauc

SEQ ID NO: 549029 - RNA, 24 nt, Artificial Sequence
  Synthetic
gcugcuccaaggccuugcaguauc

SEQ ID NO: 549030 - RNA, 18 nt, Artificial Sequence
  Synthetic
ucuuggacacagaguauc

SEQ ID NO: 549031 - RNA, 19 nt, Artificial Sequence
  Synthetic
uucuuggacacagaguauc

SEQ ID NO: 549032 - RNA, 20 nt, Artificial Sequence
  Synthetic
guucuuggacacagaguauc

SEQ ID NO: 549033 - RNA, 21 nt, Artificial Sequence
  Synthetic
uguucuuggacacagaguauc

SEQ ID NO: 549034 - RNA, 22 nt, Artificial Sequence
  Synthetic
guguucuuggacacagaguauc

SEQ ID NO: 549035 - RNA, 23 nt, Artificial Sequence
  Synthetic
aguguucuuggacacagaguauc

SEQ ID NO: 549036 - RNA, 24 nt, Artificial Sequence
  Synthetic
caguguucuuggacacagaguauc

SEQ ID NO: 549037 - RNA, 18 nt, Artificial Sequence
  Synthetic
auaugucuguggaguauc

SEQ ID NO: 549038 - RNA, 19 nt, Artificial Sequence
  Synthetic
aauaugucuguggaguauc

SEQ ID NO: 549039 - RNA, 20 nt, Artificial Sequence
  Synthetic
aaauaugucuguggaguauc

SEQ ID NO: 549040 - RNA, 21 nt, Artificial Sequence
  Synthetic
caaauaugucuguggaguauc

SEQ ID NO: 549041 - RNA, 22 nt, Artificial Sequence
  Synthetic
ccaaauaugucuguggaguauc

SEQ ID NO: 549042 - RNA, 23 nt, Artificial Sequence
  Synthetic
cccaaauaugucuguggaguauc

SEQ ID NO: 549043 - RNA, 24 nt, Artificial Sequence
  Synthetic
ccccaaauaugucuguggaguauc

SEQ ID NO: 549044 - RNA, 18 nt, Artificial Sequence
  Synthetic
cucagccuccugaguauc

SEQ ID NO: 549045 - RNA, 19 nt, Artificial Sequence
  Synthetic
ccucagccuccugaguauc

SEQ ID NO: 549046 - RNA, 20 nt, Artificial Sequence
  Synthetic
gccucagccuccugaguauc

SEQ ID NO: 549047 - RNA, 21 nt, Artificial Sequence
  Synthetic
ugccucagccuccugaguauc

SEQ ID NO: 549048 - RNA, 22 nt, Artificial Sequence
  Synthetic
cugccucagccuccugaguauc

SEQ ID NO: 549049 - RNA, 23 nt, Artificial Sequence
  Synthetic
ccugccucagccuccugaguauc

SEQ ID NO: 549050 - RNA, 24 nt, Artificial Sequence
  Synthetic
cccugccucagccuccugaguauc

SEQ ID NO: 549051 - RNA, 18 nt, Artificial Sequence
  Synthetic
cucggccuccugaguauc

SEQ ID NO: 549052 - RNA, 19 nt, Artificial Sequence
  Synthetic
ccucggccuccugaguauc

SEQ ID NO: 549053 - RNA, 20 nt, Artificial Sequence
  Synthetic
gccucggccuccugaguauc

SEQ ID NO: 549054 - RNA, 21 nt, Artificial Sequence
  Synthetic
agccucggccuccugaguauc

SEQ ID NO: 549055 - RNA, 22 nt, Artificial Sequence
  Synthetic
cagccucggccuccugaguauc

SEQ ID NO: 549056 - RNA, 23 nt, Artificial Sequence
  Synthetic
ucagccucggccuccugaguauc

SEQ ID NO: 549057 - RNA, 24 nt, Artificial Sequence
  Synthetic
uucagccucggccuccugaguauc

SEQ ID NO: 549058 - RNA, 18 nt, Artificial Sequence
  Synthetic
uaauuggcccuuaguauc

SEQ ID NO: 549059 - RNA, 19 nt, Artificial Sequence
  Synthetic
guaauuggcccuuaguauc

SEQ ID NO: 549060 - RNA, 20 nt, Artificial Sequence
  Synthetic
uguaauuggcccuuaguauc

SEQ ID NO: 549061 - RNA, 21 nt, Artificial Sequence
  Synthetic
auguaauuggcccuuaguauc

SEQ ID NO: 549062 - RNA, 22 nt, Artificial Sequence
  Synthetic
cauguaauuggcccuuaguauc

SEQ ID NO: 549063 - RNA, 23 nt, Artificial Sequence
  Synthetic
acauguaauuggcccuuaguauc

SEQ ID NO: 549064 - RNA, 24 nt, Artificial Sequence
  Synthetic
aacauguaauuggcccuuaguauc

SEQ ID NO: 549065 - RNA, 18 nt, Artificial Sequence
  Synthetic
gguaacauuuuuaguauc

SEQ ID NO: 549066 - RNA, 19 nt, Artificial Sequence
  Synthetic
ugguaacauuuuuaguauc

SEQ ID NO: 549067 - RNA, 20 nt, Artificial Sequence
  Synthetic
cugguaacauuuuuaguauc

SEQ ID NO: 549068 - RNA, 21 nt, Artificial Sequence
  Synthetic
ucugguaacauuuuuaguauc

SEQ ID NO: 549069 - RNA, 22 nt, Artificial Sequence
  Synthetic
uucugguaacauuuuuaguauc

SEQ ID NO: 549070 - RNA, 23 nt, Artificial Sequence
  Synthetic
uuucugguaacauuuuuaguauc

SEQ ID NO: 549071 - RNA, 24 nt, Artificial Sequence
  Synthetic
auuucugguaacauuuuuaguauc

SEQ ID NO: 549072 - RNA, 18 nt, Artificial Sequence
  Synthetic
gagggauuuuuuaguauc

SEQ ID NO: 549073 - RNA, 19 nt, Artificial Sequence
  Synthetic
agagggauuuuuuaguauc

SEQ ID NO: 549074 - RNA, 20 nt, Artificial Sequence
  Synthetic
uagagggauuuuuuaguauc

SEQ ID NO: 549075 - RNA, 21 nt, Artificial Sequence
  Synthetic
cuagagggauuuuuuaguauc

SEQ ID NO: 549076 - RNA, 22 nt, Artificial Sequence
  Synthetic
ccuagagggauuuuuuaguauc

SEQ ID NO: 549077 - RNA, 23 nt, Artificial Sequence
  Synthetic
accuagagggauuuuuuaguauc

SEQ ID NO: 549078 - RNA, 24 nt, Artificial Sequence
  Synthetic
aaccuagagggauuuuuuaguauc

SEQ ID NO: 549079 - RNA, 18 nt, Artificial Sequence
  Synthetic
aaagaucauagagguauc

SEQ ID NO: 549080 - RNA, 19 nt, Artificial Sequence
  Synthetic
caaagaucauagagguauc

SEQ ID NO: 549081 - RNA, 20 nt, Artificial Sequence
  Synthetic
ucaaagaucauagagguauc

SEQ ID NO: 549082 - RNA, 21 nt, Artificial Sequence
  Synthetic
aucaaagaucauagagguauc

SEQ ID NO: 549083 - RNA, 22 nt, Artificial Sequence
  Synthetic
aaucaaagaucauagagguauc

SEQ ID NO: 549084 - RNA, 23 nt, Artificial Sequence
  Synthetic
aaaucaaagaucauagagguauc

SEQ ID NO: 549085 - RNA, 24 nt, Artificial Sequence
  Synthetic
caaaucaaagaucauagagguauc

SEQ ID NO: 549086 - RNA, 18 nt, Artificial Sequence
  Synthetic
ccugcccccaaauguauc

SEQ ID NO: 549087 - RNA, 19 nt, Artificial Sequence
  Synthetic
accugcccccaaauguauc

SEQ ID NO: 549088 - RNA, 20 nt, Artificial Sequence
  Synthetic
aaccugcccccaaauguauc

SEQ ID NO: 549089 - RNA, 21 nt, Artificial Sequence
  Synthetic
aaaccugcccccaaauguauc

SEQ ID NO: 549090 - RNA, 22 nt, Artificial Sequence
  Synthetic
uaaaccugcccccaaauguauc

SEQ ID NO: 549091 - RNA, 23 nt, Artificial Sequence
  Synthetic
uuaaaccugcccccaaauguauc

SEQ ID NO: 549092 - RNA, 24 nt, Artificial Sequence
  Synthetic
cuuaaaccugcccccaaauguauc

SEQ ID NO: 549093 - RNA, 18 nt, Artificial Sequence
  Synthetic
uagauagaaauauguauc

SEQ ID NO: 549094 - RNA, 19 nt, Artificial Sequence
  Synthetic
cuagauagaaauauguauc

SEQ ID NO: 549095 - RNA, 20 nt, Artificial Sequence
  Synthetic
acuagauagaaauauguauc

SEQ ID NO: 549096 - RNA, 21 nt, Artificial Sequence
  Synthetic
aacuagauagaaauauguauc

SEQ ID NO: 549097 - RNA, 22 nt, Artificial Sequence
  Synthetic
uaacuagauagaaauauguauc

SEQ ID NO: 549098 - RNA, 23 nt, Artificial Sequence
  Synthetic
uuaacuagauagaaauauguauc

SEQ ID NO: 549099 - RNA, 24 nt, Artificial Sequence
  Synthetic
uuuaacuagauagaaauauguauc

SEQ ID NO: 549100 - RNA, 18 nt, Artificial Sequence
  Synthetic
gacauuucuaacuguauc

SEQ ID NO: 549101 - RNA, 19 nt, Artificial Sequence
  Synthetic
agacauuucuaacuguauc

SEQ ID NO: 549102 - RNA, 20 nt, Artificial Sequence
  Synthetic
uagacauuucuaacuguauc

SEQ ID NO: 549103 - RNA, 21 nt, Artificial Sequence
  Synthetic
cuagacauuucuaacuguauc

SEQ ID NO: 549104 - RNA, 22 nt, Artificial Sequence
  Synthetic
ccuagacauuucuaacuguauc

SEQ ID NO: 549105 - RNA, 23 nt, Artificial Sequence
  Synthetic
uccuagacauuucuaacuguauc

SEQ ID NO: 549106 - RNA, 24 nt, Artificial Sequence
  Synthetic
uuccuagacauuucuaacuguauc

SEQ ID NO: 549107 - RNA, 18 nt, Artificial Sequence
  Synthetic
gccaucuuuaucuguauc

SEQ ID NO: 549108 - RNA, 19 nt, Artificial Sequence
  Synthetic
ggccaucuuuaucuguauc

SEQ ID NO: 549109 - RNA, 20 nt, Artificial Sequence
  Synthetic
uggccaucuuuaucuguauc

SEQ ID NO: 549110 - RNA, 21 nt, Artificial Sequence
  Synthetic
uuggccaucuuuaucuguauc

SEQ ID NO: 549111 - RNA, 22 nt, Artificial Sequence
  Synthetic
uuuggccaucuuuaucuguauc

SEQ ID NO: 549112 - RNA, 23 nt, Artificial Sequence
  Synthetic
cuuuggccaucuuuaucuguauc

SEQ ID NO: 549113 - RNA, 24 nt, Artificial Sequence
  Synthetic
gcuuuggccaucuuuaucuguauc

SEQ ID NO: 549114 - RNA, 18 nt, Artificial Sequence
  Synthetic
uguaaagaacucuguauc

SEQ ID NO: 549115 - RNA, 19 nt, Artificial Sequence
  Synthetic
uuguaaagaacucuguauc

SEQ ID NO: 549116 - RNA, 20 nt, Artificial Sequence
  Synthetic
uuuguaaagaacucuguauc

SEQ ID NO: 549117 - RNA, 21 nt, Artificial Sequence
  Synthetic
uuuuguaaagaacucuguauc

SEQ ID NO: 549118 - RNA, 22 nt, Artificial Sequence
  Synthetic
uuuuuguaaagaacucuguauc

SEQ ID NO: 549119 - RNA, 23 nt, Artificial Sequence
  Synthetic
auuuuuguaaagaacucuguauc

SEQ ID NO: 549120 - RNA, 24 nt, Artificial Sequence
  Synthetic
gauuuuuguaaagaacucuguauc

SEQ ID NO: 549121 - RNA, 18 nt, Artificial Sequence
  Synthetic
uuuuucgauagguguauc

SEQ ID NO: 549122 - RNA, 19 nt, Artificial Sequence
  Synthetic
auuuuucgauagguguauc

SEQ ID NO: 549123 - RNA, 20 nt, Artificial Sequence
  Synthetic
aauuuuucgauagguguauc

SEQ ID NO: 549124 - RNA, 21 nt, Artificial Sequence
  Synthetic
gaauuuuucgauagguguauc

SEQ ID NO: 549125 - RNA, 22 nt, Artificial Sequence
  Synthetic
agaauuuuucgauagguguauc

SEQ ID NO: 549126 - RNA, 23 nt, Artificial Sequence
  Synthetic
aagaauuuuucgauagguguauc

SEQ ID NO: 549127 - RNA, 24 nt, Artificial Sequence
  Synthetic
uaagaauuuuucgauagguguauc

SEQ ID NO: 549128 - RNA, 18 nt, Artificial Sequence
  Synthetic
aauuuccaauuguguauc

SEQ ID NO: 549129 - RNA, 19 nt, Artificial Sequence
  Synthetic
gaauuuccaauuguguauc

SEQ ID NO: 549130 - RNA, 20 nt, Artificial Sequence
  Synthetic
ggaauuuccaauuguguauc

SEQ ID NO: 549131 - RNA, 21 nt, Artificial Sequence
  Synthetic
uggaauuuccaauuguguauc

SEQ ID NO: 549132 - RNA, 22 nt, Artificial Sequence
  Synthetic
auggaauuuccaauuguguauc

SEQ ID NO: 549133 - RNA, 23 nt, Artificial Sequence
  Synthetic
aauggaauuuccaauuguguauc

SEQ ID NO: 549134 - RNA, 24 nt, Artificial Sequence
  Synthetic
aaauggaauuuccaauuguguauc

SEQ ID NO: 549135 - RNA, 18 nt, Artificial Sequence
  Synthetic
aacucccaacuuuguauc

SEQ ID NO: 549136 - RNA, 19 nt, Artificial Sequence
  Synthetic
caacucccaacuuuguauc

SEQ ID NO: 549137 - RNA, 20 nt, Artificial Sequence
  Synthetic
acaacucccaacuuuguauc

SEQ ID NO: 549138 - RNA, 21 nt, Artificial Sequence
  Synthetic
uacaacucccaacuuuguauc

SEQ ID NO: 549139 - RNA, 22 nt, Artificial Sequence
  Synthetic
uuacaacucccaacuuuguauc

SEQ ID NO: 549140 - RNA, 23 nt, Artificial Sequence
  Synthetic
guuacaacucccaacuuuguauc

SEQ ID NO: 549141 - RNA, 24 nt, Artificial Sequence
  Synthetic
uguuacaacucccaacuuuguauc

SEQ ID NO: 549142 - RNA, 18 nt, Artificial Sequence
  Synthetic
ccacauugauuuuguauc

SEQ ID NO: 549143 - RNA, 19 nt, Artificial Sequence
  Synthetic
uccacauugauuuuguauc

SEQ ID NO: 549144 - RNA, 20 nt, Artificial Sequence
  Synthetic
uuccacauugauuuuguauc

SEQ ID NO: 549145 - RNA, 21 nt, Artificial Sequence
  Synthetic
uuuccacauugauuuuguauc

SEQ ID NO: 549146 - RNA, 22 nt, Artificial Sequence
  Synthetic
uuuuccacauugauuuuguauc

SEQ ID NO: 549147 - RNA, 23 nt, Artificial Sequence
  Synthetic
uuuuuccacauugauuuuguauc

SEQ ID NO: 549148 - RNA, 24 nt, Artificial Sequence
  Synthetic
auuuuuccacauugauuuuguauc

SEQ ID NO: 549149 - RNA, 19 nt, Artificial Sequence
  Synthetic
uguacauugauuuuguauc

SEQ ID NO: 549150 - RNA, 20 nt, Artificial Sequence
  Synthetic
cuguacauugauuuuguauc

SEQ ID NO: 549151 - RNA, 21 nt, Artificial Sequence
  Synthetic
ucuguacauugauuuuguauc

SEQ ID NO: 549152 - RNA, 22 nt, Artificial Sequence
  Synthetic
uucuguacauugauuuuguauc

SEQ ID NO: 549153 - RNA, 23 nt, Artificial Sequence
  Synthetic
uuucuguacauugauuuuguauc

SEQ ID NO: 549154 - RNA, 24 nt, Artificial Sequence
  Synthetic
auuucuguacauugauuuuguauc

SEQ ID NO: 549155 - RNA, 21 nt, Artificial Sequence
  Synthetic
uuuguacauugauuuuguauc

SEQ ID NO: 549156 - RNA, 22 nt, Artificial Sequence
  Synthetic
uuuuguacauugauuuuguauc

SEQ ID NO: 549157 - RNA, 23 nt, Artificial Sequence
  Synthetic
uuuuuguacauugauuuuguauc

SEQ ID NO: 549158 - RNA, 24 nt, Artificial Sequence
  Synthetic
auuuuuguacauugauuuuguauc

SEQ ID NO: 549159 - RNA, 18 nt, Artificial Sequence
  Synthetic
gagcaugaaaaaauuauc

SEQ ID NO: 549160 - RNA, 19 nt, Artificial Sequence
  Synthetic
cgagcaugaaaaaauuauc

SEQ ID NO: 549161 - RNA, 20 nt, Artificial Sequence
  Synthetic
ucgagcaugaaaaaauuauc

SEQ ID NO: 549162 - RNA, 21 nt, Artificial Sequence
  Synthetic
uucgagcaugaaaaaauuauc

SEQ ID NO: 549163 - RNA, 22 nt, Artificial Sequence
  Synthetic
uuucgagcaugaaaaaauuauc

SEQ ID NO: 549164 - RNA, 23 nt, Artificial Sequence
  Synthetic
uuuucgagcaugaaaaaauuauc

SEQ ID NO: 549165 - RNA, 24 nt, Artificial Sequence
  Synthetic
auuuucgagcaugaaaaaauuauc

SEQ ID NO: 549166 - RNA, 18 nt, Artificial Sequence
  Synthetic
acgaucaugaaaauuauc

SEQ ID NO: 549167 - RNA, 19 nt, Artificial Sequence
  Synthetic
uacgaucaugaaaauuauc

SEQ ID NO: 549168 - RNA, 20 nt, Artificial Sequence
  Synthetic
guacgaucaugaaaauuauc

SEQ ID NO: 549169 - RNA, 21 nt, Artificial Sequence
  Synthetic
uguacgaucaugaaaauuauc

SEQ ID NO: 549170 - RNA, 22 nt, Artificial Sequence
  Synthetic
auguacgaucaugaaaauuauc

SEQ ID NO: 549171 - RNA, 23 nt, Artificial Sequence
  Synthetic
aauguacgaucaugaaaauuauc

SEQ ID NO: 549172 - RNA, 24 nt, Artificial Sequence
  Synthetic
aaauguacgaucaugaaaauuauc

SEQ ID NO: 549173 - RNA, 18 nt, Artificial Sequence
  Synthetic
auuuuguggugaauuauc

SEQ ID NO: 549174 - RNA, 19 nt, Artificial Sequence
  Synthetic
gauuuuguggugaauuauc

SEQ ID NO: 549175 - RNA, 20 nt, Artificial Sequence
  Synthetic
agauuuuguggugaauuauc

SEQ ID NO: 549176 - RNA, 21 nt, Artificial Sequence
  Synthetic
gagauuuuguggugaauuauc

SEQ ID NO: 549177 - RNA, 22 nt, Artificial Sequence
  Synthetic
ugagauuuuguggugaauuauc

SEQ ID NO: 549178 - RNA, 23 nt, Artificial Sequence
  Synthetic
uugagauuuuguggugaauuauc

SEQ ID NO: 549179 - RNA, 24 nt, Artificial Sequence
  Synthetic
guugagauuuuguggugaauuauc

SEQ ID NO: 549180 - RNA, 18 nt, Artificial Sequence
  Synthetic
aggcagguuguaauuauc

SEQ ID NO: 549181 - RNA, 19 nt, Artificial Sequence
  Synthetic
gaggcagguuguaauuauc

SEQ ID NO: 549182 - RNA, 20 nt, Artificial Sequence
  Synthetic
ugaggcagguuguaauuauc

SEQ ID NO: 549183 - RNA, 21 nt, Artificial Sequence
  Synthetic
augaggcagguuguaauuauc

SEQ ID NO: 549184 - RNA, 22 nt, Artificial Sequence
  Synthetic
aaugaggcagguuguaauuauc

SEQ ID NO: 549185 - RNA, 23 nt, Artificial Sequence
  Synthetic
uaaugaggcagguuguaauuauc

SEQ ID NO: 549186 - RNA, 24 nt, Artificial Sequence
  Synthetic
cuaaugaggcagguuguaauuauc

SEQ ID NO: 549187 - RNA, 18 nt, Artificial Sequence
  Synthetic
caugaaaauuuaauuauc

SEQ ID NO: 549188 - RNA, 19 nt, Artificial Sequence
  Synthetic
acaugaaaauuuaauuauc

SEQ ID NO: 549189 - RNA, 20 nt, Artificial Sequence
  Synthetic
aacaugaaaauuuaauuauc

SEQ ID NO: 549190 - RNA, 21 nt, Artificial Sequence
  Synthetic
aaacaugaaaauuuaauuauc

SEQ ID NO: 549191 - RNA, 22 nt, Artificial Sequence
  Synthetic
caaacaugaaaauuuaauuauc

SEQ ID NO: 549192 - RNA, 23 nt, Artificial Sequence
  Synthetic
ccaaacaugaaaauuuaauuauc

SEQ ID NO: 549193 - RNA, 24 nt, Artificial Sequence
  Synthetic
gccaaacaugaaaauuuaauuauc

SEQ ID NO: 549194 - RNA, 18 nt, Artificial Sequence
  Synthetic
aagaaucuaaacauuauc

SEQ ID NO: 549195 - RNA, 19 nt, Artificial Sequence
  Synthetic
uaagaaucuaaacauuauc

SEQ ID NO: 549196 - RNA, 20 nt, Artificial Sequence
  Synthetic
uuaagaaucuaaacauuauc

SEQ ID NO: 549197 - RNA, 21 nt, Artificial Sequence
  Synthetic
guuaagaaucuaaacauuauc

SEQ ID NO: 549198 - RNA, 22 nt, Artificial Sequence
  Synthetic
uguuaagaaucuaaacauuauc

SEQ ID NO: 549199 - RNA, 23 nt, Artificial Sequence
  Synthetic
auguuaagaaucuaaacauuauc

SEQ ID NO: 549200 - RNA, 24 nt, Artificial Sequence
  Synthetic
aauguuaagaaucuaaacauuauc

SEQ ID NO: 549201 - RNA, 18 nt, Artificial Sequence
  Synthetic
caagggccuuacauuauc

SEQ ID NO: 549202 - RNA, 19 nt, Artificial Sequence
  Synthetic
acaagggccuuacauuauc

SEQ ID NO: 549203 - RNA, 20 nt, Artificial Sequence
  Synthetic
cacaagggccuuacauuauc

SEQ ID NO: 549204 - RNA, 21 nt, Artificial Sequence
  Synthetic
acacaagggccuuacauuauc

SEQ ID NO: 549205 - RNA, 22 nt, Artificial Sequence
  Synthetic
uacacaagggccuuacauuauc

SEQ ID NO: 549206 - RNA, 23 nt, Artificial Sequence
  Synthetic
cuacacaagggccuuacauuauc

SEQ ID NO: 549207 - RNA, 24 nt, Artificial Sequence
  Synthetic
acuacacaagggccuuacauuauc

SEQ ID NO: 549208 - RNA, 18 nt, Artificial Sequence
  Synthetic
uggagcucacccauuauc

SEQ ID NO: 549209 - RNA, 19 nt, Artificial Sequence
  Synthetic
guggagcucacccauuauc

SEQ ID NO: 549210 - RNA, 20 nt, Artificial Sequence
  Synthetic
gguggagcucacccauuauc

SEQ ID NO: 549211 - RNA, 21 nt, Artificial Sequence
  Synthetic
agguggagcucacccauuauc

SEQ ID NO: 549212 - RNA, 22 nt, Artificial Sequence
  Synthetic
cagguggagcucacccauuauc

SEQ ID NO: 549213 - RNA, 23 nt, Artificial Sequence
  Synthetic
ccagguggagcucacccauuauc

SEQ ID NO: 549214 - RNA, 24 nt, Artificial Sequence
  Synthetic
uccagguggagcucacccauuauc

SEQ ID NO: 549215 - RNA, 18 nt, Artificial Sequence
  Synthetic
gagucaaaggagauuauc

SEQ ID NO: 549216 - RNA, 19 nt, Artificial Sequence
  Synthetic
agagucaaaggagauuauc

SEQ ID NO: 549217 - RNA, 20 nt, Artificial Sequence
  Synthetic
cagagucaaaggagauuauc

SEQ ID NO: 549218 - RNA, 21 nt, Artificial Sequence
  Synthetic
acagagucaaaggagauuauc

SEQ ID NO: 549219 - RNA, 22 nt, Artificial Sequence
  Synthetic
cacagagucaaaggagauuauc

SEQ ID NO: 549220 - RNA, 23 nt, Artificial Sequence
  Synthetic
acacagagucaaaggagauuauc

SEQ ID NO: 549221 - RNA, 24 nt, Artificial Sequence
  Synthetic
gacacagagucaaaggagauuauc

SEQ ID NO: 549222 - RNA, 18 nt, Artificial Sequence
  Synthetic
ugaaacuuacugauuauc

SEQ ID NO: 549223 - RNA, 19 nt, Artificial Sequence
  Synthetic
gugaaacuuacugauuauc

SEQ ID NO: 549224 - RNA, 20 nt, Artificial Sequence
  Synthetic
ugugaaacuuacugauuauc

SEQ ID NO: 549225 - RNA, 21 nt, Artificial Sequence
  Synthetic
uugugaaacuuacugauuauc

SEQ ID NO: 549226 - RNA, 22 nt, Artificial Sequence
  Synthetic
cuugugaaacuuacugauuauc

SEQ ID NO: 549227 - RNA, 23 nt, Artificial Sequence
  Synthetic
ucuugugaaacuuacugauuauc

SEQ ID NO: 549228 - RNA, 24 nt, Artificial Sequence
  Synthetic
aucuugugaaacuuacugauuauc

SEQ ID NO: 549229 - RNA, 18 nt, Artificial Sequence
  Synthetic
aagaaaugagugauuauc

SEQ ID NO: 549230 - RNA, 19 nt, Artificial Sequence
  Synthetic
gaagaaaugagugauuauc

SEQ ID NO: 549231 - RNA, 20 nt, Artificial Sequence
  Synthetic
ugaagaaaugagugauuauc

SEQ ID NO: 549232 - RNA, 21 nt, Artificial Sequence
  Synthetic
gugaagaaaugagugauuauc

SEQ ID NO: 549233 - RNA, 22 nt, Artificial Sequence
  Synthetic
agugaagaaaugagugauuauc

SEQ ID NO: 549234 - RNA, 23 nt, Artificial Sequence
  Synthetic
aagugaagaaaugagugauuauc

SEQ ID NO: 549235 - RNA, 24 nt, Artificial Sequence
  Synthetic
gaagugaagaaaugagugauuauc

SEQ ID NO: 549236 - RNA, 18 nt, Artificial Sequence
  Synthetic
acucugcaggauauuauc

SEQ ID NO: 549237 - RNA, 19 nt, Artificial Sequence
  Synthetic
cacucugcaggauauuauc

SEQ ID NO: 549238 - RNA, 20 nt, Artificial Sequence
  Synthetic
acacucugcaggauauuauc

SEQ ID NO: 549239 - RNA, 21 nt, Artificial Sequence
  Synthetic
aacacucugcaggauauuauc

SEQ ID NO: 549240 - RNA, 22 nt, Artificial Sequence
  Synthetic
aaacacucugcaggauauuauc

SEQ ID NO: 549241 - RNA, 23 nt, Artificial Sequence
  Synthetic
aaaacacucugcaggauauuauc

SEQ ID NO: 549242 - RNA, 24 nt, Artificial Sequence
  Synthetic
gaaaacacucugcaggauauuauc

SEQ ID NO: 549243 - RNA, 18 nt, Artificial Sequence
  Synthetic
gauuaccaaacuauuauc

SEQ ID NO: 549244 - RNA, 19 nt, Artificial Sequence
  Synthetic
agauuaccaaacuauuauc

SEQ ID NO: 549245 - RNA, 20 nt, Artificial Sequence
  Synthetic
cagauuaccaaacuauuauc

SEQ ID NO: 549246 - RNA, 21 nt, Artificial Sequence
  Synthetic
ccagauuaccaaacuauuauc

SEQ ID NO: 549247 - RNA, 22 nt, Artificial Sequence
  Synthetic
cccagauuaccaaacuauuauc

SEQ ID NO: 549248 - RNA, 23 nt, Artificial Sequence
  Synthetic
acccagauuaccaaacuauuauc

SEQ ID NO: 549249 - RNA, 24 nt, Artificial Sequence
  Synthetic
gacccagauuaccaaacuauuauc

SEQ ID NO: 549250 - RNA, 18 nt, Artificial Sequence
  Synthetic
ggagaagcagcuauuauc

SEQ ID NO: 549251 - RNA, 19 nt, Artificial Sequence
  Synthetic
aggagaagcagcuauuauc

SEQ ID NO: 549252 - RNA, 20 nt, Artificial Sequence
  Synthetic
uaggagaagcagcuauuauc

SEQ ID NO: 549253 - RNA, 21 nt, Artificial Sequence
  Synthetic
auaggagaagcagcuauuauc

SEQ ID NO: 549254 - RNA, 22 nt, Artificial Sequence
  Synthetic
uauaggagaagcagcuauuauc

SEQ ID NO: 549255 - RNA, 23 nt, Artificial Sequence
  Synthetic
cuauaggagaagcagcuauuauc

SEQ ID NO: 549256 - RNA, 24 nt, Artificial Sequence
  Synthetic
ucuauaggagaagcagcuauuauc

SEQ ID NO: 549257 - RNA, 18 nt, Artificial Sequence
  Synthetic
uuuccauauucuauuauc

SEQ ID NO: 549258 - RNA, 19 nt, Artificial Sequence
  Synthetic
uuuuccauauucuauuauc

SEQ ID NO: 549259 - RNA, 20 nt, Artificial Sequence
  Synthetic
cuuuuccauauucuauuauc

SEQ ID NO: 549260 - RNA, 21 nt, Artificial Sequence
  Synthetic
acuuuuccauauucuauuauc

SEQ ID NO: 549261 - RNA, 22 nt, Artificial Sequence
  Synthetic
uacuuuuccauauucuauuauc

SEQ ID NO: 549262 - RNA, 23 nt, Artificial Sequence
  Synthetic
cuacuuuuccauauucuauuauc

SEQ ID NO: 549263 - RNA, 24 nt, Artificial Sequence
  Synthetic
ccuacuuuuccauauucuauuauc

SEQ ID NO: 549264 - RNA, 18 nt, Artificial Sequence
  Synthetic
ucugagaauuuacuuauc

SEQ ID NO: 549265 - RNA, 19 nt, Artificial Sequence
  Synthetic
aucugagaauuuacuuauc

SEQ ID NO: 549266 - RNA, 20 nt, Artificial Sequence
  Synthetic
aaucugagaauuuacuuauc

SEQ ID NO: 549267 - RNA, 21 nt, Artificial Sequence
  Synthetic
caaucugagaauuuacuuauc

SEQ ID NO: 549268 - RNA, 22 nt, Artificial Sequence
  Synthetic
acaaucugagaauuuacuuauc

SEQ ID NO: 549269 - RNA, 23 nt, Artificial Sequence
  Synthetic
aacaaucugagaauuuacuuauc

SEQ ID NO: 549270 - RNA, 24 nt, Artificial Sequence
  Synthetic
aaacaaucugagaauuuacuuauc

SEQ ID NO: 549271 - RNA, 18 nt, Artificial Sequence
  Synthetic
aagaaacacccccuuauc

SEQ ID NO: 549272 - RNA, 19 nt, Artificial Sequence
  Synthetic
uaagaaacacccccuuauc

SEQ ID NO: 549273 - RNA, 20 nt, Artificial Sequence
  Synthetic
auaagaaacacccccuuauc

SEQ ID NO: 549274 - RNA, 21 nt, Artificial Sequence
  Synthetic
uauaagaaacacccccuuauc

SEQ ID NO: 549275 - RNA, 22 nt, Artificial Sequence
  Synthetic
uuauaagaaacacccccuuauc

SEQ ID NO: 549276 - RNA, 23 nt, Artificial Sequence
  Synthetic
uuuauaagaaacacccccuuauc

SEQ ID NO: 549277 - RNA, 24 nt, Artificial Sequence
  Synthetic
auuuauaagaaacacccccuuauc

SEQ ID NO: 549278 - RNA, 18 nt, Artificial Sequence
  Synthetic
cauagcccaauccuuauc

SEQ ID NO: 549279 - RNA, 19 nt, Artificial Sequence
  Synthetic
ucauagcccaauccuuauc

SEQ ID NO: 549280 - RNA, 20 nt, Artificial Sequence
  Synthetic
gucauagcccaauccuuauc

SEQ ID NO: 549281 - RNA, 21 nt, Artificial Sequence
  Synthetic
agucauagcccaauccuuauc

SEQ ID NO: 549282 - RNA, 22 nt, Artificial Sequence
  Synthetic
gagucauagcccaauccuuauc

SEQ ID NO: 549283 - RNA, 23 nt, Artificial Sequence
  Synthetic
agagucauagcccaauccuuauc

SEQ ID NO: 549284 - RNA, 24 nt, Artificial Sequence
  Synthetic
cagagucauagcccaauccuuauc

SEQ ID NO: 549285 - RNA, 18 nt, Artificial Sequence
  Synthetic
augaaaugauagcuuauc

SEQ ID NO: 549286 - RNA, 19 nt, Artificial Sequence
  Synthetic
aaugaaaugauagcuuauc

SEQ ID NO: 549287 - RNA, 20 nt, Artificial Sequence
  Synthetic
uaaugaaaugauagcuuauc

SEQ ID NO: 549288 - RNA, 21 nt, Artificial Sequence
  Synthetic
auaaugaaaugauagcuuauc

SEQ ID NO: 549289 - RNA, 22 nt, Artificial Sequence
  Synthetic
aauaaugaaaugauagcuuauc

SEQ ID NO: 549290 - RNA, 23 nt, Artificial Sequence
  Synthetic
gaauaaugaaaugauagcuuauc

SEQ ID NO: 549291 - RNA, 24 nt, Artificial Sequence
  Synthetic
ggaauaaugaaaugauagcuuauc

SEQ ID NO: 549292 - RNA, 18 nt, Artificial Sequence
  Synthetic
gucauuggugaucuuauc

SEQ ID NO: 549293 - RNA, 19 nt, Artificial Sequence
  Synthetic
ggucauuggugaucuuauc

SEQ ID NO: 549294 - RNA, 20 nt, Artificial Sequence
  Synthetic
aggucauuggugaucuuauc

SEQ ID NO: 549295 - RNA, 21 nt, Artificial Sequence
  Synthetic
gaggucauuggugaucuuauc

SEQ ID NO: 549296 - RNA, 22 nt, Artificial Sequence
  Synthetic
ggaggucauuggugaucuuauc

SEQ ID NO: 549297 - RNA, 23 nt, Artificial Sequence
  Synthetic
aggaggucauuggugaucuuauc

SEQ ID NO: 549298 - RNA, 24 nt, Artificial Sequence
  Synthetic
uaggaggucauuggugaucuuauc

SEQ ID NO: 549299 - RNA, 18 nt, Artificial Sequence
  Synthetic
cauuauaaaaaaguuauc

SEQ ID NO: 549300 - RNA, 19 nt, Artificial Sequence
  Synthetic
ucauuauaaaaaaguuauc

SEQ ID NO: 549301 - RNA, 20 nt, Artificial Sequence
  Synthetic
cucauuauaaaaaaguuauc

SEQ ID NO: 549302 - RNA, 21 nt, Artificial Sequence
  Synthetic
acucauuauaaaaaaguuauc

SEQ ID NO: 549303 - RNA, 22 nt, Artificial Sequence
  Synthetic
uacucauuauaaaaaaguuauc

SEQ ID NO: 549304 - RNA, 23 nt, Artificial Sequence
  Synthetic
auacucauuauaaaaaaguuauc

SEQ ID NO: 549305 - RNA, 24 nt, Artificial Sequence
  Synthetic
cauacucauuauaaaaaaguuauc

SEQ ID NO: 549306 - RNA, 18 nt, Artificial Sequence
  Synthetic
auagguuaauggguuauc

SEQ ID NO: 549307 - RNA, 19 nt, Artificial Sequence
  Synthetic
aauagguuaauggguuauc

SEQ ID NO: 549308 - RNA, 20 nt, Artificial Sequence
  Synthetic
uaauagguuaauggguuauc

SEQ ID NO: 549309 - RNA, 21 nt, Artificial Sequence
  Synthetic
uuaauagguuaauggguuauc

SEQ ID NO: 549310 - RNA, 22 nt, Artificial Sequence
  Synthetic
auuaauagguuaauggguuauc

SEQ ID NO: 549311 - RNA, 23 nt, Artificial Sequence
  Synthetic
aauuaauagguuaauggguuauc

SEQ ID NO: 549312 - RNA, 24 nt, Artificial Sequence
  Synthetic
aaauuaauagguuaauggguuauc

SEQ ID NO: 549313 - RNA, 18 nt, Artificial Sequence
  Synthetic
auaauuauuaauguuauc

SEQ ID NO: 549314 - RNA, 19 nt, Artificial Sequence
  Synthetic
gauaauuauuaauguuauc

SEQ ID NO: 549315 - RNA, 20 nt, Artificial Sequence
  Synthetic
ggauaauuauuaauguuauc

SEQ ID NO: 549316 - RNA, 21 nt, Artificial Sequence
  Synthetic
uggauaauuauuaauguuauc

SEQ ID NO: 549317 - RNA, 22 nt, Artificial Sequence
  Synthetic
guggauaauuauuaauguuauc

SEQ ID NO: 549318 - RNA, 23 nt, Artificial Sequence
  Synthetic
cguggauaauuauuaauguuauc

SEQ ID NO: 549319 - RNA, 24 nt, Artificial Sequence
  Synthetic
acguggauaauuauuaauguuauc

SEQ ID NO: 549320 - RNA, 18 nt, Artificial Sequence
  Synthetic
cuggcuuuauauguuauc

SEQ ID NO: 549321 - RNA, 19 nt, Artificial Sequence
  Synthetic
ucuggcuuuauauguuauc

SEQ ID NO: 549322 - RNA, 20 nt, Artificial Sequence
  Synthetic
uucuggcuuuauauguuauc

SEQ ID NO: 549323 - RNA, 21 nt, Artificial Sequence
  Synthetic
uuucuggcuuuauauguuauc

SEQ ID NO: 549324 - RNA, 22 nt, Artificial Sequence
  Synthetic
auuucuggcuuuauauguuauc

SEQ ID NO: 549325 - RNA, 23 nt, Artificial Sequence
  Synthetic
cauuucuggcuuuauauguuauc

SEQ ID NO: 549326 - RNA, 24 nt, Artificial Sequence
  Synthetic
acauuucuggcuuuauauguuauc

SEQ ID NO: 549327 - RNA, 18 nt, Artificial Sequence
  Synthetic
acaaagguuuuuguuauc

SEQ ID NO: 549328 - RNA, 19 nt, Artificial Sequence
  Synthetic
aacaaagguuuuuguuauc

SEQ ID NO: 549329 - RNA, 20 nt, Artificial Sequence
  Synthetic
aaacaaagguuuuuguuauc

SEQ ID NO: 549330 - RNA, 21 nt, Artificial Sequence
  Synthetic
aaaacaaagguuuuuguuauc

SEQ ID NO: 549331 - RNA, 22 nt, Artificial Sequence
  Synthetic
gaaaacaaagguuuuuguuauc

SEQ ID NO: 549332 - RNA, 23 nt, Artificial Sequence
  Synthetic
ggaaaacaaagguuuuuguuauc

SEQ ID NO: 549333 - RNA, 24 nt, Artificial Sequence
  Synthetic
uggaaaacaaagguuuuuguuauc

SEQ ID NO: 549334 - RNA, 18 nt, Artificial Sequence
  Synthetic
gaauacagaaaauuuauc

SEQ ID NO: 549335 - RNA, 19 nt, Artificial Sequence
  Synthetic
agaauacagaaaauuuauc

SEQ ID NO: 549336 - RNA, 20 nt, Artificial Sequence
  Synthetic
gagaauacagaaaauuuauc

SEQ ID NO: 549337 - RNA, 21 nt, Artificial Sequence
  Synthetic
agagaauacagaaaauuuauc

SEQ ID NO: 549338 - RNA, 22 nt, Artificial Sequence
  Synthetic
cagagaauacagaaaauuuauc

SEQ ID NO: 549339 - RNA, 23 nt, Artificial Sequence
  Synthetic
ccagagaauacagaaaauuuauc

SEQ ID NO: 549340 - RNA, 24 nt, Artificial Sequence
  Synthetic
gccagagaauacagaaaauuuauc

SEQ ID NO: 549341 - RNA, 18 nt, Artificial Sequence
  Synthetic
cuaaaggagaaauuuauc

SEQ ID NO: 549342 - RNA, 19 nt, Artificial Sequence
  Synthetic
gcuaaaggagaaauuuauc

SEQ ID NO: 549343 - RNA, 20 nt, Artificial Sequence
  Synthetic
ggcuaaaggagaaauuuauc

SEQ ID NO: 549344 - RNA, 21 nt, Artificial Sequence
  Synthetic
gggcuaaaggagaaauuuauc

SEQ ID NO: 549345 - RNA, 22 nt, Artificial Sequence
  Synthetic
agggcuaaaggagaaauuuauc

SEQ ID NO: 549346 - RNA, 23 nt, Artificial Sequence
  Synthetic
cagggcuaaaggagaaauuuauc

SEQ ID NO: 549347 - RNA, 24 nt, Artificial Sequence
  Synthetic
ccagggcuaaaggagaaauuuauc

SEQ ID NO: 549348 - RNA, 18 nt, Artificial Sequence
  Synthetic
aaggauugguaauuuauc

SEQ ID NO: 549349 - RNA, 19 nt, Artificial Sequence
  Synthetic
aaaggauugguaauuuauc

SEQ ID NO: 549350 - RNA, 20 nt, Artificial Sequence
  Synthetic
gaaaggauugguaauuuauc

SEQ ID NO: 549351 - RNA, 21 nt, Artificial Sequence
  Synthetic
cgaaaggauugguaauuuauc

SEQ ID NO: 549352 - RNA, 22 nt, Artificial Sequence
  Synthetic
ucgaaaggauugguaauuuauc

SEQ ID NO: 549353 - RNA, 23 nt, Artificial Sequence
  Synthetic
aucgaaaggauugguaauuuauc

SEQ ID NO: 549354 - RNA, 24 nt, Artificial Sequence
  Synthetic
gaucgaaaggauugguaauuuauc

SEQ ID NO: 549355 - RNA, 18 nt, Artificial Sequence
  Synthetic
aaucaaacuccauuuauc

SEQ ID NO: 549356 - RNA, 19 nt, Artificial Sequence
  Synthetic
aaaucaaacuccauuuauc

SEQ ID NO: 549357 - RNA, 20 nt, Artificial Sequence
  Synthetic
uaaaucaaacuccauuuauc

SEQ ID NO: 549358 - RNA, 21 nt, Artificial Sequence
  Synthetic
auaaaucaaacuccauuuauc

SEQ ID NO: 549359 - RNA, 22 nt, Artificial Sequence
  Synthetic
gauaaaucaaacuccauuuauc

SEQ ID NO: 549360 - RNA, 23 nt, Artificial Sequence
  Synthetic
ugauaaaucaaacuccauuuauc

SEQ ID NO: 549361 - RNA, 24 nt, Artificial Sequence
  Synthetic
cugauaaaucaaacuccauuuauc

SEQ ID NO: 549362 - RNA, 18 nt, Artificial Sequence
  Synthetic
guugggaagggauuuauc

SEQ ID NO: 549363 - RNA, 19 nt, Artificial Sequence
  Synthetic
aguugggaagggauuuauc

SEQ ID NO: 549364 - RNA, 20 nt, Artificial Sequence
  Synthetic
aaguugggaagggauuuauc

SEQ ID NO: 549365 - RNA, 21 nt, Artificial Sequence
  Synthetic
uaaguugggaagggauuuauc

SEQ ID NO: 549366 - RNA, 22 nt, Artificial Sequence
  Synthetic
uuaaguugggaagggauuuauc

SEQ ID NO: 549367 - RNA, 23 nt, Artificial Sequence
  Synthetic
auuaaguugggaagggauuuauc

SEQ ID NO: 549368 - RNA, 24 nt, Artificial Sequence
  Synthetic
uauuaaguugggaagggauuuauc

SEQ ID NO: 549369 - RNA, 18 nt, Artificial Sequence
  Synthetic
ugcagcaugauauuuauc

SEQ ID NO: 549370 - RNA, 19 nt, Artificial Sequence
  Synthetic
uugcagcaugauauuuauc

SEQ ID NO: 549371 - RNA, 20 nt, Artificial Sequence
  Synthetic
guugcagcaugauauuuauc

SEQ ID NO: 549372 - RNA, 21 nt, Artificial Sequence
  Synthetic
gguugcagcaugauauuuauc

SEQ ID NO: 549373 - RNA, 22 nt, Artificial Sequence
  Synthetic
ggguugcagcaugauauuuauc

SEQ ID NO: 549374 - RNA, 23 nt, Artificial Sequence
  Synthetic
uggguugcagcaugauauuuauc

SEQ ID NO: 549375 - RNA, 24 nt, Artificial Sequence
  Synthetic
uuggguugcagcaugauauuuauc

SEQ ID NO: 549376 - RNA, 18 nt, Artificial Sequence
  Synthetic
uuucaaaaguuauuuauc

SEQ ID NO: 549377 - RNA, 19 nt, Artificial Sequence
  Synthetic
uuuucaaaaguuauuuauc

SEQ ID NO: 549378 - RNA, 20 nt, Artificial Sequence
  Synthetic
auuuucaaaaguuauuuauc

SEQ ID NO: 549379 - RNA, 21 nt, Artificial Sequence
  Synthetic
uauuuucaaaaguuauuuauc

SEQ ID NO: 549380 - RNA, 22 nt, Artificial Sequence
  Synthetic
auauuuucaaaaguuauuuauc

SEQ ID NO: 549381 - RNA, 23 nt, Artificial Sequence
  Synthetic
uauauuuucaaaaguuauuuauc

SEQ ID NO: 549382 - RNA, 24 nt, Artificial Sequence
  Synthetic
auauauuuucaaaaguuauuuauc

SEQ ID NO: 549383 - RNA, 18 nt, Artificial Sequence
  Synthetic
uucagcagcaacuuuauc

SEQ ID NO: 549384 - RNA, 19 nt, Artificial Sequence
  Synthetic
uuucagcagcaacuuuauc

SEQ ID NO: 549385 - RNA, 20 nt, Artificial Sequence
  Synthetic
auuucagcagcaacuuuauc

SEQ ID NO: 549386 - RNA, 21 nt, Artificial Sequence
  Synthetic
uauuucagcagcaacuuuauc

SEQ ID NO: 549387 - RNA, 22 nt, Artificial Sequence
  Synthetic
uuauuucagcagcaacuuuauc

SEQ ID NO: 549388 - RNA, 23 nt, Artificial Sequence
  Synthetic
uuuauuucagcagcaacuuuauc

SEQ ID NO: 549389 - RNA, 24 nt, Artificial Sequence
  Synthetic
auuuauuucagcagcaacuuuauc

SEQ ID NO: 549390 - RNA, 18 nt, Artificial Sequence
  Synthetic
cuguaaucuuccuuuauc

SEQ ID NO: 549391 - RNA, 19 nt, Artificial Sequence
  Synthetic
ucuguaaucuuccuuuauc

SEQ ID NO: 549392 - RNA, 20 nt, Artificial Sequence
  Synthetic
aucuguaaucuuccuuuauc

SEQ ID NO: 549393 - RNA, 21 nt, Artificial Sequence
  Synthetic
aaucuguaaucuuccuuuauc

SEQ ID NO: 549394 - RNA, 22 nt, Artificial Sequence
  Synthetic
uaaucuguaaucuuccuuuauc

SEQ ID NO: 549395 - RNA, 23 nt, Artificial Sequence
  Synthetic
uuaaucuguaaucuuccuuuauc

SEQ ID NO: 549396 - RNA, 24 nt, Artificial Sequence
  Synthetic
uuuaaucuguaaucuuccuuuauc

SEQ ID NO: 549397 - RNA, 18 nt, Artificial Sequence
  Synthetic
guguauauauaguuuauc

SEQ ID NO: 549398 - RNA, 19 nt, Artificial Sequence
  Synthetic
aguguauauauaguuuauc

SEQ ID NO: 549399 - RNA, 20 nt, Artificial Sequence
  Synthetic
caguguauauauaguuuauc

SEQ ID NO: 549400 - RNA, 21 nt, Artificial Sequence
  Synthetic
ccaguguauauauaguuuauc

SEQ ID NO: 549401 - RNA, 22 nt, Artificial Sequence
  Synthetic
accaguguauauauaguuuauc

SEQ ID NO: 549402 - RNA, 23 nt, Artificial Sequence
  Synthetic
caccaguguauauauaguuuauc

SEQ ID NO: 549403 - RNA, 24 nt, Artificial Sequence
  Synthetic
ucaccaguguauauauaguuuauc

SEQ ID NO: 549404 - RNA, 18 nt, Artificial Sequence
  Synthetic
ccaaagaaaguguuuauc

SEQ ID NO: 549405 - RNA, 19 nt, Artificial Sequence
  Synthetic
gccaaagaaaguguuuauc

SEQ ID NO: 549406 - RNA, 20 nt, Artificial Sequence
  Synthetic
ugccaaagaaaguguuuauc

SEQ ID NO: 549407 - RNA, 21 nt, Artificial Sequence
  Synthetic
gugccaaagaaaguguuuauc

SEQ ID NO: 549408 - RNA, 22 nt, Artificial Sequence
  Synthetic
cgugccaaagaaaguguuuauc

SEQ ID NO: 549409 - RNA, 23 nt, Artificial Sequence
  Synthetic
acgugccaaagaaaguguuuauc

SEQ ID NO: 549410 - RNA, 24 nt, Artificial Sequence
  Synthetic
uacgugccaaagaaaguguuuauc

SEQ ID NO: 549411 - RNA, 18 nt, Artificial Sequence
  Synthetic
acauugccauuguuuauc

SEQ ID NO: 549412 - RNA, 19 nt, Artificial Sequence
  Synthetic
aacauugccauuguuuauc

SEQ ID NO: 549413 - RNA, 20 nt, Artificial Sequence
  Synthetic
caacauugccauuguuuauc

SEQ ID NO: 549414 - RNA, 21 nt, Artificial Sequence
  Synthetic
ucaacauugccauuguuuauc

SEQ ID NO: 549415 - RNA, 22 nt, Artificial Sequence
  Synthetic
cucaacauugccauuguuuauc

SEQ ID NO: 549416 - RNA, 23 nt, Artificial Sequence
  Synthetic
ucucaacauugccauuguuuauc

SEQ ID NO: 549417 - RNA, 24 nt, Artificial Sequence
  Synthetic
cucucaacauugccauuguuuauc

SEQ ID NO: 549418 - RNA, 18 nt, Artificial Sequence
  Synthetic
auuuuggaaaauuuuauc

SEQ ID NO: 549419 - RNA, 19 nt, Artificial Sequence
  Synthetic
uauuuuggaaaauuuuauc

SEQ ID NO: 549420 - RNA, 20 nt, Artificial Sequence
  Synthetic
auauuuuggaaaauuuuauc

SEQ ID NO: 549421 - RNA, 21 nt, Artificial Sequence
  Synthetic
uauauuuuggaaaauuuuauc

SEQ ID NO: 549422 - RNA, 22 nt, Artificial Sequence
  Synthetic
uuauauuuuggaaaauuuuauc

SEQ ID NO: 549423 - RNA, 23 nt, Artificial Sequence
  Synthetic
auuauauuuuggaaaauuuuauc

SEQ ID NO: 549424 - RNA, 24 nt, Artificial Sequence
  Synthetic
aauuauauuuuggaaaauuuuauc

SEQ ID NO: 549425 - RNA, 18 nt, Artificial Sequence
  Synthetic
cugugcuuccauuuuauc

SEQ ID NO: 549426 - RNA, 19 nt, Artificial Sequence
  Synthetic
ccugugcuuccauuuuauc

SEQ ID NO: 549427 - RNA, 20 nt, Artificial Sequence
  Synthetic
gccugugcuuccauuuuauc

SEQ ID NO: 549428 - RNA, 21 nt, Artificial Sequence
  Synthetic
ugccugugcuuccauuuuauc

SEQ ID NO: 549429 - RNA, 22 nt, Artificial Sequence
  Synthetic
gugccugugcuuccauuuuauc

SEQ ID NO: 549430 - RNA, 23 nt, Artificial Sequence
  Synthetic
agugccugugcuuccauuuuauc

SEQ ID NO: 549431 - RNA, 24 nt, Artificial Sequence
  Synthetic
cagugccugugcuuccauuuuauc

SEQ ID NO: 549432 - RNA, 18 nt, Artificial Sequence
  Synthetic
uuuccuuuuucuuuuauc

SEQ ID NO: 549433 - RNA, 19 nt, Artificial Sequence
  Synthetic
uuuuccuuuuucuuuuauc

SEQ ID NO: 549434 - RNA, 20 nt, Artificial Sequence
  Synthetic
cuuuuccuuuuucuuuuauc

SEQ ID NO: 549435 - RNA, 21 nt, Artificial Sequence
  Synthetic
ccuuuuccuuuuucuuuuauc

SEQ ID NO: 549436 - RNA, 22 nt, Artificial Sequence
  Synthetic
uccuuuuccuuuuucuuuuauc

SEQ ID NO: 549437 - RNA, 23 nt, Artificial Sequence
  Synthetic
uuccuuuuccuuuuucuuuuauc

SEQ ID NO: 549438 - RNA, 24 nt, Artificial Sequence
  Synthetic
cuuccuuuuccuuuuucuuuuauc

SEQ ID NO: 549439 - RNA, 18 nt, Artificial Sequence
  Synthetic
uuaaugguagguuuuauc

SEQ ID NO: 549440 - RNA, 19 nt, Artificial Sequence
  Synthetic
auuaaugguagguuuuauc

SEQ ID NO: 549441 - RNA, 20 nt, Artificial Sequence
  Synthetic
aauuaaugguagguuuuauc

SEQ ID NO: 549442 - RNA, 21 nt, Artificial Sequence
  Synthetic
caauuaaugguagguuuuauc

SEQ ID NO: 549443 - RNA, 22 nt, Artificial Sequence
  Synthetic
ucaauuaaugguagguuuuauc

SEQ ID NO: 549444 - RNA, 23 nt, Artificial Sequence
  Synthetic
gucaauuaaugguagguuuuauc

SEQ ID NO: 549445 - RNA, 24 nt, Artificial Sequence
  Synthetic
agucaauuaaugguagguuuuauc

SEQ ID NO: 549446 - RNA, 18 nt, Artificial Sequence
  Synthetic
agugcauauuguuuuauc

SEQ ID NO: 549447 - RNA, 19 nt, Artificial Sequence
  Synthetic
cagugcauauuguuuuauc

SEQ ID NO: 549448 - RNA, 20 nt, Artificial Sequence
  Synthetic
acagugcauauuguuuuauc

SEQ ID NO: 549449 - RNA, 21 nt, Artificial Sequence
  Synthetic
uacagugcauauuguuuuauc

SEQ ID NO: 549450 - RNA, 22 nt, Artificial Sequence
  Synthetic
cuacagugcauauuguuuuauc

SEQ ID NO: 549451 - RNA, 23 nt, Artificial Sequence
  Synthetic
acuacagugcauauuguuuuauc

SEQ ID NO: 549452 - RNA, 24 nt, Artificial Sequence
  Synthetic
cacuacagugcauauuguuuuauc

SEQ ID NO: 549453 - RNA, 18 nt, Artificial Sequence
  Synthetic
agcuuaaaaaaaaaacuc

SEQ ID NO: 549454 - RNA, 19 nt, Artificial Sequence
  Synthetic
cagcuuaaaaaaaaaacuc

SEQ ID NO: 549455 - RNA, 20 nt, Artificial Sequence
  Synthetic
ucagcuuaaaaaaaaaacuc

SEQ ID NO: 549456 - RNA, 21 nt, Artificial Sequence
  Synthetic
cucagcuuaaaaaaaaaacuc

SEQ ID NO: 549457 - RNA, 22 nt, Artificial Sequence
  Synthetic
gcucagcuuaaaaaaaaaacuc

SEQ ID NO: 549458 - RNA, 23 nt, Artificial Sequence
  Synthetic
agcucagcuuaaaaaaaaaacuc

SEQ ID NO: 549459 - RNA, 24 nt, Artificial Sequence
  Synthetic
aagcucagcuuaaaaaaaaaacuc

SEQ ID NO: 549460 - RNA, 18 nt, Artificial Sequence
  Synthetic
aguauuaaaaaaaaacuc

SEQ ID NO: 549461 - RNA, 19 nt, Artificial Sequence
  Synthetic
caguauuaaaaaaaaacuc

SEQ ID NO: 549462 - RNA, 20 nt, Artificial Sequence
  Synthetic
acaguauuaaaaaaaaacuc

SEQ ID NO: 549463 - RNA, 21 nt, Artificial Sequence
  Synthetic
cacaguauuaaaaaaaaacuc

SEQ ID NO: 549464 - RNA, 22 nt, Artificial Sequence
  Synthetic
ucacaguauuaaaaaaaaacuc

SEQ ID NO: 549465 - RNA, 23 nt, Artificial Sequence
  Synthetic
gucacaguauuaaaaaaaaacuc

SEQ ID NO: 549466 - RNA, 24 nt, Artificial Sequence
  Synthetic
agucacaguauuaaaaaaaaacuc

SEQ ID NO: 549467 - RNA, 18 nt, Artificial Sequence
  Synthetic
cugaaaccauaaaaacuc

SEQ ID NO: 549468 - RNA, 19 nt, Artificial Sequence
  Synthetic
ccugaaaccauaaaaacuc

SEQ ID NO: 549469 - RNA, 20 nt, Artificial Sequence
  Synthetic
accugaaaccauaaaaacuc

SEQ ID NO: 549470 - RNA, 21 nt, Artificial Sequence
  Synthetic
gaccugaaaccauaaaaacuc

SEQ ID NO: 549471 - RNA, 22 nt, Artificial Sequence
  Synthetic
agaccugaaaccauaaaaacuc

SEQ ID NO: 549472 - RNA, 23 nt, Artificial Sequence
  Synthetic
aagaccugaaaccauaaaaacuc

SEQ ID NO: 549473 - RNA, 24 nt, Artificial Sequence
  Synthetic
uaagaccugaaaccauaaaaacuc

SEQ ID NO: 549474 - RNA, 18 nt, Artificial Sequence
  Synthetic
aggacugaaaucaaacuc

SEQ ID NO: 549475 - RNA, 19 nt, Artificial Sequence
  Synthetic
gaggacugaaaucaaacuc

SEQ ID NO: 549476 - RNA, 20 nt, Artificial Sequence
  Synthetic
agaggacugaaaucaaacuc

SEQ ID NO: 549477 - RNA, 21 nt, Artificial Sequence
  Synthetic
aagaggacugaaaucaaacuc

SEQ ID NO: 549478 - RNA, 22 nt, Artificial Sequence
  Synthetic
gaagaggacugaaaucaaacuc

SEQ ID NO: 549479 - RNA, 23 nt, Artificial Sequence
  Synthetic
ugaagaggacugaaaucaaacuc

SEQ ID NO: 549480 - RNA, 24 nt, Artificial Sequence
  Synthetic
cugaagaggacugaaaucaaacuc

SEQ ID NO: 549481 - RNA, 21 nt, Artificial Sequence
  Synthetic
gcucacugcagccucaaacuc

SEQ ID NO: 549482 - RNA, 22 nt, Artificial Sequence
  Synthetic
agcucacugcagccucaaacuc

SEQ ID NO: 549483 - RNA, 23 nt, Artificial Sequence
  Synthetic
uagcucacugcagccucaaacuc

SEQ ID NO: 549484 - RNA, 24 nt, Artificial Sequence
  Synthetic
auagcucacugcagccucaaacuc

SEQ ID NO: 549485 - RNA, 18 nt, Artificial Sequence
  Synthetic
caggcugaucucaaacuc

SEQ ID NO: 549486 - RNA, 19 nt, Artificial Sequence
  Synthetic
ccaggcugaucucaaacuc

SEQ ID NO: 549487 - RNA, 20 nt, Artificial Sequence
  Synthetic
cccaggcugaucucaaacuc

SEQ ID NO: 549488 - RNA, 21 nt, Artificial Sequence
  Synthetic
gcccaggcugaucucaaacuc

SEQ ID NO: 549489 - RNA, 22 nt, Artificial Sequence
  Synthetic
ugcccaggcugaucucaaacuc

SEQ ID NO: 549490 - RNA, 23 nt, Artificial Sequence
  Synthetic
uugcccaggcugaucucaaacuc

SEQ ID NO: 549491 - RNA, 24 nt, Artificial Sequence
  Synthetic
guugcccaggcugaucucaaacuc

SEQ ID NO: 549492 - RNA, 18 nt, Artificial Sequence
  Synthetic
caggcuggucucaaacuc

SEQ ID NO: 549493 - RNA, 19 nt, Artificial Sequence
  Synthetic
ccaggcuggucucaaacuc

SEQ ID NO: 549494 - RNA, 20 nt, Artificial Sequence
  Synthetic
cccaggcuggucucaaacuc

SEQ ID NO: 549495 - RNA, 21 nt, Artificial Sequence
  Synthetic
gcccaggcuggucucaaacuc

SEQ ID NO: 549496 - RNA, 22 nt, Artificial Sequence
  Synthetic
ugcccaggcuggucucaaacuc

SEQ ID NO: 549497 - RNA, 23 nt, Artificial Sequence
  Synthetic
uugcccaggcuggucucaaacuc

SEQ ID NO: 549498 - RNA, 24 nt, Artificial Sequence
  Synthetic
guugcccaggcuggucucaaacuc

SEQ ID NO: 549499 - RNA, 20 nt, Artificial Sequence
  Synthetic
uccaggcuggucucaaacuc

SEQ ID NO: 549500 - RNA, 21 nt, Artificial Sequence
  Synthetic
uuccaggcuggucucaaacuc

SEQ ID NO: 549501 - RNA, 22 nt, Artificial Sequence
  Synthetic
uuuccaggcuggucucaaacuc

SEQ ID NO: 549502 - RNA, 23 nt, Artificial Sequence
  Synthetic
uuuuccaggcuggucucaaacuc

SEQ ID NO: 549503 - RNA, 24 nt, Artificial Sequence
  Synthetic
guuuuccaggcuggucucaaacuc

SEQ ID NO: 549504 - RNA, 18 nt, Artificial Sequence
  Synthetic
augaggucaaagaaacuc

SEQ ID NO: 549505 - RNA, 19 nt, Artificial Sequence
  Synthetic
uaugaggucaaagaaacuc

SEQ ID NO: 549506 - RNA, 20 nt, Artificial Sequence
  Synthetic
uuaugaggucaaagaaacuc

SEQ ID NO: 549507 - RNA, 21 nt, Artificial Sequence
  Synthetic
guuaugaggucaaagaaacuc

SEQ ID NO: 549508 - RNA, 22 nt, Artificial Sequence
  Synthetic
aguuaugaggucaaagaaacuc

SEQ ID NO: 549509 - RNA, 23 nt, Artificial Sequence
  Synthetic
gaguuaugaggucaaagaaacuc

SEQ ID NO: 549510 - RNA, 24 nt, Artificial Sequence
  Synthetic
ugaguuaugaggucaaagaaacuc

SEQ ID NO: 549511 - RNA, 18 nt, Artificial Sequence
  Synthetic
caacugacacagaaacuc

SEQ ID NO: 549512 - RNA, 19 nt, Artificial Sequence
  Synthetic
ccaacugacacagaaacuc

SEQ ID NO: 549513 - RNA, 20 nt, Artificial Sequence
  Synthetic
accaacugacacagaaacuc

SEQ ID NO: 549514 - RNA, 21 nt, Artificial Sequence
  Synthetic
gaccaacugacacagaaacuc

SEQ ID NO: 549515 - RNA, 22 nt, Artificial Sequence
  Synthetic
agaccaacugacacagaaacuc

SEQ ID NO: 549516 - RNA, 23 nt, Artificial Sequence
  Synthetic
cagaccaacugacacagaaacuc

SEQ ID NO: 549517 - RNA, 24 nt, Artificial Sequence
  Synthetic
ccagaccaacugacacagaaacuc

SEQ ID NO: 549518 - RNA, 18 nt, Artificial Sequence
  Synthetic
gcuuaagagcagaaacuc

SEQ ID NO: 549519 - RNA, 19 nt, Artificial Sequence
  Synthetic
ugcuuaagagcagaaacuc

SEQ ID NO: 549520 - RNA, 20 nt, Artificial Sequence
  Synthetic
gugcuuaagagcagaaacuc

SEQ ID NO: 549521 - RNA, 21 nt, Artificial Sequence
  Synthetic
agugcuuaagagcagaaacuc

SEQ ID NO: 549522 - RNA, 22 nt, Artificial Sequence
  Synthetic
uagugcuuaagagcagaaacuc

SEQ ID NO: 549523 - RNA, 23 nt, Artificial Sequence
  Synthetic
guagugcuuaagagcagaaacuc

SEQ ID NO: 549524 - RNA, 24 nt, Artificial Sequence
  Synthetic
cguagugcuuaagagcagaaacuc

SEQ ID NO: 549525 - RNA, 18 nt, Artificial Sequence
  Synthetic
ggaaaguaugggaaacuc

SEQ ID NO: 549526 - RNA, 19 nt, Artificial Sequence
  Synthetic
aggaaaguaugggaaacuc

SEQ ID NO: 549527 - RNA, 20 nt, Artificial Sequence
  Synthetic
caggaaaguaugggaaacuc

SEQ ID NO: 549528 - RNA, 21 nt, Artificial Sequence
  Synthetic
acaggaaaguaugggaaacuc

SEQ ID NO: 549529 - RNA, 22 nt, Artificial Sequence
  Synthetic
gacaggaaaguaugggaaacuc

SEQ ID NO: 549530 - RNA, 23 nt, Artificial Sequence
  Synthetic
agacaggaaaguaugggaaacuc

SEQ ID NO: 549531 - RNA, 24 nt, Artificial Sequence
  Synthetic
aagacaggaaaguaugggaaacuc

SEQ ID NO: 549532 - RNA, 18 nt, Artificial Sequence
  Synthetic
auguaaacauauaaacuc

SEQ ID NO: 549533 - RNA, 19 nt, Artificial Sequence
  Synthetic
aauguaaacauauaaacuc

SEQ ID NO: 549534 - RNA, 20 nt, Artificial Sequence
  Synthetic
gaauguaaacauauaaacuc

SEQ ID NO: 549535 - RNA, 21 nt, Artificial Sequence
  Synthetic
agaauguaaacauauaaacuc

SEQ ID NO: 549536 - RNA, 22 nt, Artificial Sequence
  Synthetic
aagaauguaaacauauaaacuc

SEQ ID NO: 549537 - RNA, 23 nt, Artificial Sequence
  Synthetic
aaagaauguaaacauauaaacuc

SEQ ID NO: 549538 - RNA, 24 nt, Artificial Sequence
  Synthetic
aaaagaauguaaacauauaaacuc

SEQ ID NO: 549539 - RNA, 18 nt, Artificial Sequence
  Synthetic
cccagcaauuauaaacuc

SEQ ID NO: 549540 - RNA, 19 nt, Artificial Sequence
  Synthetic
ucccagcaauuauaaacuc

SEQ ID NO: 549541 - RNA, 20 nt, Artificial Sequence
  Synthetic
aucccagcaauuauaaacuc

SEQ ID NO: 549542 - RNA, 21 nt, Artificial Sequence
  Synthetic
gaucccagcaauuauaaacuc

SEQ ID NO: 549543 - RNA, 22 nt, Artificial Sequence
  Synthetic
agaucccagcaauuauaaacuc

SEQ ID NO: 549544 - RNA, 23 nt, Artificial Sequence
  Synthetic
cagaucccagcaauuauaaacuc

SEQ ID NO: 549545 - RNA, 24 nt, Artificial Sequence
  Synthetic
gcagaucccagcaauuauaaacuc

SEQ ID NO: 549546 - RNA, 18 nt, Artificial Sequence
  Synthetic
cagaggcaaccuaaacuc

SEQ ID NO: 549547 - RNA, 19 nt, Artificial Sequence
  Synthetic
ccagaggcaaccuaaacuc

SEQ ID NO: 549548 - RNA, 20 nt, Artificial Sequence
  Synthetic
cccagaggcaaccuaaacuc

SEQ ID NO: 549549 - RNA, 21 nt, Artificial Sequence
  Synthetic
gcccagaggcaaccuaaacuc

SEQ ID NO: 549550 - RNA, 22 nt, Artificial Sequence
  Synthetic
ugcccagaggcaaccuaaacuc

SEQ ID NO: 549551 - RNA, 23 nt, Artificial Sequence
  Synthetic
uugcccagaggcaaccuaaacuc

SEQ ID NO: 549552 - RNA, 24 nt, Artificial Sequence
  Synthetic
cuugcccagaggcaaccuaaacuc

SEQ ID NO: 549553 - RNA, 18 nt, Artificial Sequence
  Synthetic
agcacugaaauuaaacuc

SEQ ID NO: 549554 - RNA, 19 nt, Artificial Sequence
  Synthetic
gagcacugaaauuaaacuc

SEQ ID NO: 549555 - RNA, 20 nt, Artificial Sequence
  Synthetic
agagcacugaaauuaaacuc

SEQ ID NO: 549556 - RNA, 21 nt, Artificial Sequence
  Synthetic
aagagcacugaaauuaaacuc

SEQ ID NO: 549557 - RNA, 22 nt, Artificial Sequence
  Synthetic
gaagagcacugaaauuaaacuc

SEQ ID NO: 549558 - RNA, 23 nt, Artificial Sequence
  Synthetic
ugaagagcacugaaauuaaacuc

SEQ ID NO: 549559 - RNA, 24 nt, Artificial Sequence
  Synthetic
cugaagagcacugaaauuaaacuc

SEQ ID NO: 549560 - RNA, 18 nt, Artificial Sequence
  Synthetic
caggcuggucuuaaacuc

SEQ ID NO: 549561 - RNA, 19 nt, Artificial Sequence
  Synthetic
ccaggcuggucuuaaacuc

SEQ ID NO: 549562 - RNA, 20 nt, Artificial Sequence
  Synthetic
uccaggcuggucuuaaacuc

SEQ ID NO: 549563 - RNA, 21 nt, Artificial Sequence
  Synthetic
guccaggcuggucuuaaacuc

SEQ ID NO: 549564 - RNA, 22 nt, Artificial Sequence
  Synthetic
uguccaggcuggucuuaaacuc

SEQ ID NO: 549565 - RNA, 23 nt, Artificial Sequence
  Synthetic
uuguccaggcuggucuuaaacuc

SEQ ID NO: 549566 - RNA, 24 nt, Artificial Sequence
  Synthetic
guuguccaggcuggucuuaaacuc

SEQ ID NO: 549567 - RNA, 18 nt, Artificial Sequence
  Synthetic
ccaugcaguguuaaacuc

SEQ ID NO: 549568 - RNA, 19 nt, Artificial Sequence
  Synthetic
gccaugcaguguuaaacuc

SEQ ID NO: 549569 - RNA, 20 nt, Artificial Sequence
  Synthetic
ggccaugcaguguuaaacuc

SEQ ID NO: 549570 - RNA, 21 nt, Artificial Sequence
  Synthetic
gggccaugcaguguuaaacuc

SEQ ID NO: 549571 - RNA, 22 nt, Artificial Sequence
  Synthetic
ugggccaugcaguguuaaacuc

SEQ ID NO: 549572 - RNA, 23 nt, Artificial Sequence
  Synthetic
augggccaugcaguguuaaacuc

SEQ ID NO: 549573 - RNA, 24 nt, Artificial Sequence
  Synthetic
caugggccaugcaguguuaaacuc

SEQ ID NO: 549574 - RNA, 18 nt, Artificial Sequence
  Synthetic
cacuguaaccuccaacuc

SEQ ID NO: 549575 - RNA, 19 nt, Artificial Sequence
  Synthetic
ucacuguaaccuccaacuc

SEQ ID NO: 549576 - RNA, 20 nt, Artificial Sequence
  Synthetic
cucacuguaaccuccaacuc

SEQ ID NO: 549577 - RNA, 21 nt, Artificial Sequence
  Synthetic
gcucacuguaaccuccaacuc

SEQ ID NO: 549578 - RNA, 22 nt, Artificial Sequence
  Synthetic
agcucacuguaaccuccaacuc

SEQ ID NO: 549579 - RNA, 23 nt, Artificial Sequence
  Synthetic
uagcucacuguaaccuccaacuc

SEQ ID NO: 549580 - RNA, 24 nt, Artificial Sequence
  Synthetic
auagcucacuguaaccuccaacuc

SEQ ID NO: 549581 - RNA, 18 nt, Artificial Sequence
  Synthetic
agcccuauaaagcaacuc

SEQ ID NO: 549582 - RNA, 19 nt, Artificial Sequence
  Synthetic
uagcccuauaaagcaacuc

SEQ ID NO: 549583 - RNA, 20 nt, Artificial Sequence
  Synthetic
auagcccuauaaagcaacuc

SEQ ID NO: 549584 - RNA, 21 nt, Artificial Sequence
  Synthetic
cauagcccuauaaagcaacuc

SEQ ID NO: 549585 - RNA, 22 nt, Artificial Sequence
  Synthetic
gcauagcccuauaaagcaacuc

SEQ ID NO: 549586 - RNA, 23 nt, Artificial Sequence
  Synthetic
agcauagcccuauaaagcaacuc

SEQ ID NO: 549587 - RNA, 24 nt, Artificial Sequence
  Synthetic
aagcauagcccuauaaagcaacuc

SEQ ID NO: 549588 - RNA, 18 nt, Artificial Sequence
  Synthetic
cuguaaucccagcaacuc

SEQ ID NO: 549589 - RNA, 19 nt, Artificial Sequence
  Synthetic
ccuguaaucccagcaacuc

SEQ ID NO: 549590 - RNA, 20 nt, Artificial Sequence
  Synthetic
gccuguaaucccagcaacuc

SEQ ID NO: 549591 - RNA, 21 nt, Artificial Sequence
  Synthetic
ugccuguaaucccagcaacuc

SEQ ID NO: 549592 - RNA, 22 nt, Artificial Sequence
  Synthetic
uugccuguaaucccagcaacuc

SEQ ID NO: 549593 - RNA, 23 nt, Artificial Sequence
  Synthetic
guugccuguaaucccagcaacuc

SEQ ID NO: 549594 - RNA, 24 nt, Artificial Sequence
  Synthetic
gguugccuguaaucccagcaacuc

SEQ ID NO: 549595 - RNA, 18 nt, Artificial Sequence
  Synthetic
aguuaaugagcucaacuc

SEQ ID NO: 549596 - RNA, 19 nt, Artificial Sequence
  Synthetic
uaguuaaugagcucaacuc

SEQ ID NO: 549597 - RNA, 20 nt, Artificial Sequence
  Synthetic
guaguuaaugagcucaacuc

SEQ ID NO: 549598 - RNA, 21 nt, Artificial Sequence
  Synthetic
aguaguuaaugagcucaacuc

SEQ ID NO: 549599 - RNA, 22 nt, Artificial Sequence
  Synthetic
uaguaguuaaugagcucaacuc

SEQ ID NO: 549600 - RNA, 23 nt, Artificial Sequence
  Synthetic
auaguaguuaaugagcucaacuc

SEQ ID NO: 549601 - RNA, 24 nt, Artificial Sequence
  Synthetic
cauaguaguuaaugagcucaacuc

SEQ ID NO: 549602 - RNA, 18 nt, Artificial Sequence
  Synthetic
gcuaaugggacagaacuc

SEQ ID NO: 549603 - RNA, 19 nt, Artificial Sequence
  Synthetic
ugcuaaugggacagaacuc

SEQ ID NO: 549604 - RNA, 20 nt, Artificial Sequence
  Synthetic
uugcuaaugggacagaacuc

SEQ ID NO: 549605 - RNA, 21 nt, Artificial Sequence
  Synthetic
cuugcuaaugggacagaacuc

SEQ ID NO: 549606 - RNA, 22 nt, Artificial Sequence
  Synthetic
acuugcuaaugggacagaacuc

SEQ ID NO: 549607 - RNA, 23 nt, Artificial Sequence
  Synthetic
uacuugcuaaugggacagaacuc

SEQ ID NO: 549608 - RNA, 24 nt, Artificial Sequence
  Synthetic
cuacuugcuaaugggacagaacuc

SEQ ID NO: 549609 - RNA, 18 nt, Artificial Sequence
  Synthetic
cauuuauuuagagaacuc

SEQ ID NO: 549610 - RNA, 19 nt, Artificial Sequence
  Synthetic
acauuuauuuagagaacuc

SEQ ID NO: 549611 - RNA, 20 nt, Artificial Sequence
  Synthetic
cacauuuauuuagagaacuc

SEQ ID NO: 549612 - RNA, 21 nt, Artificial Sequence
  Synthetic
acacauuuauuuagagaacuc

SEQ ID NO: 549613 - RNA, 22 nt, Artificial Sequence
  Synthetic
gacacauuuauuuagagaacuc

SEQ ID NO: 549614 - RNA, 23 nt, Artificial Sequence
  Synthetic
ggacacauuuauuuagagaacuc

SEQ ID NO: 549615 - RNA, 24 nt, Artificial Sequence
  Synthetic
aggacacauuuauuuagagaacuc

SEQ ID NO: 549616 - RNA, 18 nt, Artificial Sequence
  Synthetic
cacugcagccucgaacuc

SEQ ID NO: 549617 - RNA, 19 nt, Artificial Sequence
  Synthetic
ucacugcagccucgaacuc

SEQ ID NO: 549618 - RNA, 20 nt, Artificial Sequence
  Synthetic
cucacugcagccucgaacuc

SEQ ID NO: 549619 - RNA, 21 nt, Artificial Sequence
  Synthetic
gcucacugcagccucgaacuc

SEQ ID NO: 549620 - RNA, 22 nt, Artificial Sequence
  Synthetic
agcucacugcagccucgaacuc

SEQ ID NO: 549621 - RNA, 23 nt, Artificial Sequence
  Synthetic
uagcucacugcagccucgaacuc

SEQ ID NO: 549622 - RNA, 24 nt, Artificial Sequence
  Synthetic
auagcucacugcagccucgaacuc

SEQ ID NO: 549623 - RNA, 18 nt, Artificial Sequence
  Synthetic
cagacuggucucgaacuc

SEQ ID NO: 549624 - RNA, 19 nt, Artificial Sequence
  Synthetic
ccagacuggucucgaacuc

SEQ ID NO: 549625 - RNA, 20 nt, Artificial Sequence
  Synthetic
cccagacuggucucgaacuc

SEQ ID NO: 549626 - RNA, 21 nt, Artificial Sequence
  Synthetic
ucccagacuggucucgaacuc

SEQ ID NO: 549627 - RNA, 22 nt, Artificial Sequence
  Synthetic
uucccagacuggucucgaacuc

SEQ ID NO: 549628 - RNA, 23 nt, Artificial Sequence
  Synthetic
guucccagacuggucucgaacuc

SEQ ID NO: 549629 - RNA, 24 nt, Artificial Sequence
  Synthetic
gguucccagacuggucucgaacuc

SEQ ID NO: 549630 - RNA, 18 nt, Artificial Sequence
  Synthetic
auuuugaaucaggaacuc

SEQ ID NO: 549631 - RNA, 19 nt, Artificial Sequence
  Synthetic
cauuuugaaucaggaacuc

SEQ ID NO: 549632 - RNA, 20 nt, Artificial Sequence
  Synthetic
acauuuugaaucaggaacuc

SEQ ID NO: 549633 - RNA, 21 nt, Artificial Sequence
  Synthetic
gacauuuugaaucaggaacuc

SEQ ID NO: 549634 - RNA, 22 nt, Artificial Sequence
  Synthetic
agacauuuugaaucaggaacuc

SEQ ID NO: 549635 - RNA, 23 nt, Artificial Sequence
  Synthetic
cagacauuuugaaucaggaacuc

SEQ ID NO: 549636 - RNA, 24 nt, Artificial Sequence
  Synthetic
ccagacauuuugaaucaggaacuc

SEQ ID NO: 549637 - RNA, 18 nt, Artificial Sequence
  Synthetic
ucucugcccuaggaacuc

SEQ ID NO: 549638 - RNA, 19 nt, Artificial Sequence
  Synthetic
uucucugcccuaggaacuc

SEQ ID NO: 549639 - RNA, 20 nt, Artificial Sequence
  Synthetic
guucucugcccuaggaacuc

SEQ ID NO: 549640 - RNA, 21 nt, Artificial Sequence
  Synthetic
uguucucugcccuaggaacuc

SEQ ID NO: 549641 - RNA, 22 nt, Artificial Sequence
  Synthetic
cuguucucugcccuaggaacuc

SEQ ID NO: 549642 - RNA, 23 nt, Artificial Sequence
  Synthetic
ccuguucucugcccuaggaacuc

SEQ ID NO: 549643 - RNA, 24 nt, Artificial Sequence
  Synthetic
uccuguucucugcccuaggaacuc

SEQ ID NO: 549644 - RNA, 18 nt, Artificial Sequence
  Synthetic
aucaaaacaauggaacuc

SEQ ID NO: 549645 - RNA, 19 nt, Artificial Sequence
  Synthetic
aaucaaaacaauggaacuc

SEQ ID NO: 549646 - RNA, 20 nt, Artificial Sequence
  Synthetic
aaaucaaaacaauggaacuc

SEQ ID NO: 549647 - RNA, 21 nt, Artificial Sequence
  Synthetic
aaaaucaaaacaauggaacuc

SEQ ID NO: 549648 - RNA, 22 nt, Artificial Sequence
  Synthetic
aaaaaucaaaacaauggaacuc

SEQ ID NO: 549649 - RNA, 23 nt, Artificial Sequence
  Synthetic
uaaaaaucaaaacaauggaacuc

SEQ ID NO: 549650 - RNA, 24 nt, Artificial Sequence
  Synthetic
cuaaaaaucaaaacaauggaacuc

SEQ ID NO: 549651 - RNA, 18 nt, Artificial Sequence
  Synthetic
caaaacggguuggaacuc

SEQ ID NO: 549652 - RNA, 19 nt, Artificial Sequence
  Synthetic
ccaaaacggguuggaacuc

SEQ ID NO: 549653 - RNA, 20 nt, Artificial Sequence
  Synthetic
uccaaaacggguuggaacuc

SEQ ID NO: 549654 - RNA, 21 nt, Artificial Sequence
  Synthetic
uuccaaaacggguuggaacuc

SEQ ID NO: 549655 - RNA, 22 nt, Artificial Sequence
  Synthetic
auuccaaaacggguuggaacuc

SEQ ID NO: 549656 - RNA, 23 nt, Artificial Sequence
  Synthetic
aauuccaaaacggguuggaacuc

SEQ ID NO: 549657 - RNA, 24 nt, Artificial Sequence
  Synthetic
gaauuccaaaacggguuggaacuc

SEQ ID NO: 549658 - RNA, 18 nt, Artificial Sequence
  Synthetic
ugcaaaaaaccugaacuc

SEQ ID NO: 549659 - RNA, 19 nt, Artificial Sequence
  Synthetic
augcaaaaaaccugaacuc

SEQ ID NO: 549660 - RNA, 20 nt, Artificial Sequence
  Synthetic
aaugcaaaaaaccugaacuc

SEQ ID NO: 549661 - RNA, 21 nt, Artificial Sequence
  Synthetic
caaugcaaaaaaccugaacuc

SEQ ID NO: 549662 - RNA, 22 nt, Artificial Sequence
  Synthetic
gcaaugcaaaaaaccugaacuc

SEQ ID NO: 549663 - RNA, 23 nt, Artificial Sequence
  Synthetic
agcaaugcaaaaaaccugaacuc

SEQ ID NO: 549664 - RNA, 24 nt, Artificial Sequence
  Synthetic
gagcaaugcaaaaaaccugaacuc

SEQ ID NO: 549665 - RNA, 18 nt, Artificial Sequence
  Synthetic
ccacaaauuagugaacuc

SEQ ID NO: 549666 - RNA, 19 nt, Artificial Sequence
  Synthetic
cccacaaauuagugaacuc

SEQ ID NO: 549667 - RNA, 20 nt, Artificial Sequence
  Synthetic
gcccacaaauuagugaacuc

SEQ ID NO: 549668 - RNA, 21 nt, Artificial Sequence
  Synthetic
agcccacaaauuagugaacuc

SEQ ID NO: 549669 - RNA, 22 nt, Artificial Sequence
  Synthetic
cagcccacaaauuagugaacuc

SEQ ID NO: 549670 - RNA, 23 nt, Artificial Sequence
  Synthetic
ucagcccacaaauuagugaacuc

SEQ ID NO: 549671 - RNA, 24 nt, Artificial Sequence
  Synthetic
aucagcccacaaauuagugaacuc

SEQ ID NO: 549672 - RNA, 18 nt, Artificial Sequence
  Synthetic
uucaaaacaauugaacuc

SEQ ID NO: 549673 - RNA, 19 nt, Artificial Sequence
  Synthetic
auucaaaacaauugaacuc

SEQ ID NO: 549674 - RNA, 20 nt, Artificial Sequence
  Synthetic
aauucaaaacaauugaacuc

SEQ ID NO: 549675 - RNA, 21 nt, Artificial Sequence
  Synthetic
aaauucaaaacaauugaacuc

SEQ ID NO: 549676 - RNA, 22 nt, Artificial Sequence
  Synthetic
aaaauucaaaacaauugaacuc

SEQ ID NO: 549677 - RNA, 23 nt, Artificial Sequence
  Synthetic
uaaaauucaaaacaauugaacuc

SEQ ID NO: 549678 - RNA, 24 nt, Artificial Sequence
  Synthetic
uuaaaauucaaaacaauugaacuc

SEQ ID NO: 549679 - RNA, 18 nt, Artificial Sequence
  Synthetic
auuaaaacuauugaacuc

SEQ ID NO: 549680 - RNA, 19 nt, Artificial Sequence
  Synthetic
aauuaaaacuauugaacuc

SEQ ID NO: 549681 - RNA, 20 nt, Artificial Sequence
  Synthetic
aaauuaaaacuauugaacuc

SEQ ID NO: 549682 - RNA, 21 nt, Artificial Sequence
  Synthetic
aaaauuaaaacuauugaacuc

SEQ ID NO: 549683 - RNA, 22 nt, Artificial Sequence
  Synthetic
aaaaauuaaaacuauugaacuc

SEQ ID NO: 549684 - RNA, 23 nt, Artificial Sequence
  Synthetic
uaaaaauuaaaacuauugaacuc

SEQ ID NO: 549685 - RNA, 24 nt, Artificial Sequence
  Synthetic
cuaaaaauuaaaacuauugaacuc

SEQ ID NO: 549686 - RNA, 18 nt, Artificial Sequence
  Synthetic
ggagaaucacuugaacuc

SEQ ID NO: 549687 - RNA, 19 nt, Artificial Sequence
  Synthetic
aggagaaucacuugaacuc

SEQ ID NO: 549688 - RNA, 20 nt, Artificial Sequence
  Synthetic
caggagaaucacuugaacuc

SEQ ID NO: 549689 - RNA, 21 nt, Artificial Sequence
  Synthetic
gcaggagaaucacuugaacuc

SEQ ID NO: 549690 - RNA, 22 nt, Artificial Sequence
  Synthetic
ggcaggagaaucacuugaacuc

SEQ ID NO: 549691 - RNA, 23 nt, Artificial Sequence
  Synthetic
aggcaggagaaucacuugaacuc

SEQ ID NO: 549692 - RNA, 24 nt, Artificial Sequence
  Synthetic
gaggcaggagaaucacuugaacuc

SEQ ID NO: 549693 - RNA, 21 nt, Artificial Sequence
  Synthetic
gcccaggcuggucuugaacuc

SEQ ID NO: 549694 - RNA, 22 nt, Artificial Sequence
  Synthetic
ugcccaggcuggucuugaacuc

SEQ ID NO: 549695 - RNA, 23 nt, Artificial Sequence
  Synthetic
uugcccaggcuggucuugaacuc

SEQ ID NO: 549696 - RNA, 24 nt, Artificial Sequence
  Synthetic
guugcccaggcuggucuugaacuc

SEQ ID NO: 549697 - RNA, 18 nt, Artificial Sequence
  Synthetic
ccuuaagacguugaacuc

SEQ ID NO: 549698 - RNA, 19 nt, Artificial Sequence
  Synthetic
gccuuaagacguugaacuc

SEQ ID NO: 549699 - RNA, 20 nt, Artificial Sequence
  Synthetic
ugccuuaagacguugaacuc

SEQ ID NO: 549700 - RNA, 21 nt, Artificial Sequence
  Synthetic
gugccuuaagacguugaacuc

SEQ ID NO: 549701 - RNA, 22 nt, Artificial Sequence
  Synthetic
ugugccuuaagacguugaacuc

SEQ ID NO: 549702 - RNA, 23 nt, Artificial Sequence
  Synthetic
uugugccuuaagacguugaacuc

SEQ ID NO: 549703 - RNA, 24 nt, Artificial Sequence
  Synthetic
guugugccuuaagacguugaacuc

SEQ ID NO: 549704 - RNA, 18 nt, Artificial Sequence
  Synthetic
uauuaauaauuugaacuc

SEQ ID NO: 549705 - RNA, 19 nt, Artificial Sequence
  Synthetic
auauuaauaauuugaacuc

SEQ ID NO: 549706 - RNA, 20 nt, Artificial Sequence
  Synthetic
uauauuaauaauuugaacuc

SEQ ID NO: 549707 - RNA, 21 nt, Artificial Sequence
  Synthetic
auauauuaauaauuugaacuc

SEQ ID NO: 549708 - RNA, 22 nt, Artificial Sequence
  Synthetic
aauauauuaauaauuugaacuc

SEQ ID NO: 549709 - RNA, 23 nt, Artificial Sequence
  Synthetic
uaauauauuaauaauuugaacuc

SEQ ID NO: 549710 - RNA, 24 nt, Artificial Sequence
  Synthetic
cuaauauauuaauaauuugaacuc

SEQ ID NO: 549711 - RNA, 18 nt, Artificial Sequence
  Synthetic
caggcugguuuugaacuc

SEQ ID NO: 549712 - RNA, 19 nt, Artificial Sequence
  Synthetic
ccaggcugguuuugaacuc

SEQ ID NO: 549713 - RNA, 20 nt, Artificial Sequence
  Synthetic
cccaggcugguuuugaacuc

SEQ ID NO: 549714 - RNA, 21 nt, Artificial Sequence
  Synthetic
gcccaggcugguuuugaacuc

SEQ ID NO: 549715 - RNA, 22 nt, Artificial Sequence
  Synthetic
ugcccaggcugguuuugaacuc

SEQ ID NO: 549716 - RNA, 23 nt, Artificial Sequence
  Synthetic
uugcccaggcugguuuugaacuc

SEQ ID NO: 549717 - RNA, 24 nt, Artificial Sequence
  Synthetic
guugcccaggcugguuuugaacuc

SEQ ID NO: 549718 - RNA, 18 nt, Artificial Sequence
  Synthetic
uuucuauuuuuugaacuc

SEQ ID NO: 549719 - RNA, 19 nt, Artificial Sequence
  Synthetic
cuuucuauuuuuugaacuc

SEQ ID NO: 549720 - RNA, 20 nt, Artificial Sequence
  Synthetic
ucuuucuauuuuuugaacuc

SEQ ID NO: 549721 - RNA, 21 nt, Artificial Sequence
  Synthetic
uucuuucuauuuuuugaacuc

SEQ ID NO: 549722 - RNA, 22 nt, Artificial Sequence
  Synthetic
uuucuuucuauuuuuugaacuc

SEQ ID NO: 549723 - RNA, 23 nt, Artificial Sequence
  Synthetic
uuuucuuucuauuuuuugaacuc

SEQ ID NO: 549724 - RNA, 24 nt, Artificial Sequence
  Synthetic
uuuuucuuucuauuuuuugaacuc

SEQ ID NO: 549725 - RNA, 18 nt, Artificial Sequence
  Synthetic
ucaucuaagcaauaacuc

SEQ ID NO: 549726 - RNA, 19 nt, Artificial Sequence
  Synthetic
gucaucuaagcaauaacuc

SEQ ID NO: 549727 - RNA, 20 nt, Artificial Sequence
  Synthetic
agucaucuaagcaauaacuc

SEQ ID NO: 549728 - RNA, 21 nt, Artificial Sequence
  Synthetic
gagucaucuaagcaauaacuc

SEQ ID NO: 549729 - RNA, 22 nt, Artificial Sequence
  Synthetic
ugagucaucuaagcaauaacuc

SEQ ID NO: 549730 - RNA, 23 nt, Artificial Sequence
  Synthetic
uugagucaucuaagcaauaacuc

SEQ ID NO: 549731 - RNA, 24 nt, Artificial Sequence
  Synthetic
uuugagucaucuaagcaauaacuc

SEQ ID NO: 549732 - RNA, 18 nt, Artificial Sequence
  Synthetic
uuaaguuaucuauaacuc

SEQ ID NO: 549733 - RNA, 19 nt, Artificial Sequence
  Synthetic
cuuaaguuaucuauaacuc

SEQ ID NO: 549734 - RNA, 20 nt, Artificial Sequence
  Synthetic
ucuuaaguuaucuauaacuc

SEQ ID NO: 549735 - RNA, 21 nt, Artificial Sequence
  Synthetic
cucuuaaguuaucuauaacuc

SEQ ID NO: 549736 - RNA, 22 nt, Artificial Sequence
  Synthetic
ucucuuaaguuaucuauaacuc

SEQ ID NO: 549737 - RNA, 23 nt, Artificial Sequence
  Synthetic
uucucuuaaguuaucuauaacuc

SEQ ID NO: 549738 - RNA, 24 nt, Artificial Sequence
  Synthetic
uuucucuuaaguuaucuauaacuc

SEQ ID NO: 549739 - RNA, 18 nt, Artificial Sequence
  Synthetic
uuccaaguaaaguaacuc

SEQ ID NO: 549740 - RNA, 19 nt, Artificial Sequence
  Synthetic
auuccaaguaaaguaacuc

SEQ ID NO: 549741 - RNA, 20 nt, Artificial Sequence
  Synthetic
uauuccaaguaaaguaacuc

SEQ ID NO: 549742 - RNA, 21 nt, Artificial Sequence
  Synthetic
cuauuccaaguaaaguaacuc

SEQ ID NO: 549743 - RNA, 22 nt, Artificial Sequence
  Synthetic
acuauuccaaguaaaguaacuc

SEQ ID NO: 549744 - RNA, 23 nt, Artificial Sequence
  Synthetic
cacuauuccaaguaaaguaacuc

SEQ ID NO: 549745 - RNA, 24 nt, Artificial Sequence
  Synthetic
ccacuauuccaaguaaaguaacuc

SEQ ID NO: 549746 - RNA, 18 nt, Artificial Sequence
  Synthetic
aucagagcuaaguaacuc

SEQ ID NO: 549747 - RNA, 19 nt, Artificial Sequence
  Synthetic
caucagagcuaaguaacuc

SEQ ID NO: 549748 - RNA, 20 nt, Artificial Sequence
  Synthetic
acaucagagcuaaguaacuc

SEQ ID NO: 549749 - RNA, 21 nt, Artificial Sequence
  Synthetic
cacaucagagcuaaguaacuc

SEQ ID NO: 549750 - RNA, 22 nt, Artificial Sequence
  Synthetic
acacaucagagcuaaguaacuc

SEQ ID NO: 549751 - RNA, 23 nt, Artificial Sequence
  Synthetic
uacacaucagagcuaaguaacuc

SEQ ID NO: 549752 - RNA, 24 nt, Artificial Sequence
  Synthetic
auacacaucagagcuaaguaacuc

SEQ ID NO: 549753 - RNA, 18 nt, Artificial Sequence
  Synthetic
cccauuacucaguaacuc

SEQ ID NO: 549754 - RNA, 19 nt, Artificial Sequence
  Synthetic
ucccauuacucaguaacuc

SEQ ID NO: 549755 - RNA, 20 nt, Artificial Sequence
  Synthetic
gucccauuacucaguaacuc

SEQ ID NO: 549756 - RNA, 21 nt, Artificial Sequence
  Synthetic
ggucccauuacucaguaacuc

SEQ ID NO: 549757 - RNA, 22 nt, Artificial Sequence
  Synthetic
aggucccauuacucaguaacuc

SEQ ID NO: 549758 - RNA, 23 nt, Artificial Sequence
  Synthetic
aaggucccauuacucaguaacuc

SEQ ID NO: 549759 - RNA, 24 nt, Artificial Sequence
  Synthetic
caaggucccauuacucaguaacuc

SEQ ID NO: 549760 - RNA, 18 nt, Artificial Sequence
  Synthetic
acaagaaaauaguaacuc

SEQ ID NO: 549761 - RNA, 19 nt, Artificial Sequence
  Synthetic
aacaagaaaauaguaacuc

SEQ ID NO: 549762 - RNA, 20 nt, Artificial Sequence
  Synthetic
aaacaagaaaauaguaacuc

SEQ ID NO: 549763 - RNA, 21 nt, Artificial Sequence
  Synthetic
gaaacaagaaaauaguaacuc

SEQ ID NO: 549764 - RNA, 22 nt, Artificial Sequence
  Synthetic
ggaaacaagaaaauaguaacuc

SEQ ID NO: 549765 - RNA, 23 nt, Artificial Sequence
  Synthetic
cggaaacaagaaaauaguaacuc

SEQ ID NO: 549766 - RNA, 24 nt, Artificial Sequence
  Synthetic
ccggaaacaagaaaauaguaacuc

SEQ ID NO: 549767 - RNA, 18 nt, Artificial Sequence
  Synthetic
guauucauucauuaacuc

SEQ ID NO: 549768 - RNA, 19 nt, Artificial Sequence
  Synthetic
uguauucauucauuaacuc

SEQ ID NO: 549769 - RNA, 20 nt, Artificial Sequence
  Synthetic
cuguauucauucauuaacuc

SEQ ID NO: 549770 - RNA, 21 nt, Artificial Sequence
  Synthetic
gcuguauucauucauuaacuc

SEQ ID NO: 549771 - RNA, 22 nt, Artificial Sequence
  Synthetic
cgcuguauucauucauuaacuc

SEQ ID NO: 549772 - RNA, 23 nt, Artificial Sequence
  Synthetic
ucgcuguauucauucauuaacuc

SEQ ID NO: 549773 - RNA, 24 nt, Artificial Sequence
  Synthetic
aucgcuguauucauucauuaacuc

SEQ ID NO: 549774 - RNA, 18 nt, Artificial Sequence
  Synthetic
ucaaccucugaaacacuc

SEQ ID NO: 549775 - RNA, 19 nt, Artificial Sequence
  Synthetic
uucaaccucugaaacacuc

SEQ ID NO: 549776 - RNA, 20 nt, Artificial Sequence
  Synthetic
uuucaaccucugaaacacuc

SEQ ID NO: 549777 - RNA, 21 nt, Artificial Sequence
  Synthetic
cuuucaaccucugaaacacuc

SEQ ID NO: 549778 - RNA, 22 nt, Artificial Sequence
  Synthetic
ucuuucaaccucugaaacacuc

SEQ ID NO: 549779 - RNA, 23 nt, Artificial Sequence
  Synthetic
aucuuucaaccucugaaacacuc

SEQ ID NO: 549780 - RNA, 24 nt, Artificial Sequence
  Synthetic
aaucuuucaaccucugaaacacuc

SEQ ID NO: 549781 - RNA, 18 nt, Artificial Sequence
  Synthetic
uucaaggaucgaacacuc

SEQ ID NO: 549782 - RNA, 19 nt, Artificial Sequence
  Synthetic
guucaaggaucgaacacuc

SEQ ID NO: 549783 - RNA, 20 nt, Artificial Sequence
  Synthetic
gguucaaggaucgaacacuc

SEQ ID NO: 549784 - RNA, 21 nt, Artificial Sequence
  Synthetic
ugguucaaggaucgaacacuc

SEQ ID NO: 549785 - RNA, 22 nt, Artificial Sequence
  Synthetic
uugguucaaggaucgaacacuc

SEQ ID NO: 549786 - RNA, 23 nt, Artificial Sequence
  Synthetic
cuugguucaaggaucgaacacuc

SEQ ID NO: 549787 - RNA, 24 nt, Artificial Sequence
  Synthetic
ccuugguucaaggaucgaacacuc

SEQ ID NO: 549788 - RNA, 18 nt, Artificial Sequence
  Synthetic
auuuaaaaauuaacacuc

SEQ ID NO: 549789 - RNA, 19 nt, Artificial Sequence
  Synthetic
aauuuaaaaauuaacacuc

SEQ ID NO: 549790 - RNA, 20 nt, Artificial Sequence
  Synthetic
uaauuuaaaaauuaacacuc

SEQ ID NO: 549791 - RNA, 21 nt, Artificial Sequence
  Synthetic
uuaauuuaaaaauuaacacuc

SEQ ID NO: 549792 - RNA, 22 nt, Artificial Sequence
  Synthetic
uuuaauuuaaaaauuaacacuc

SEQ ID NO: 549793 - RNA, 23 nt, Artificial Sequence
  Synthetic
uuuuaauuuaaaaauuaacacuc

SEQ ID NO: 549794 - RNA, 24 nt, Artificial Sequence
  Synthetic
auuuuaauuuaaaaauuaacacuc

SEQ ID NO: 549795 - RNA, 18 nt, Artificial Sequence
  Synthetic
uguuauacacccacacuc

SEQ ID NO: 549796 - RNA, 19 nt, Artificial Sequence
  Synthetic
guguuauacacccacacuc

SEQ ID NO: 549797 - RNA, 20 nt, Artificial Sequence
  Synthetic
aguguuauacacccacacuc

SEQ ID NO: 549798 - RNA, 21 nt, Artificial Sequence
  Synthetic
uaguguuauacacccacacuc

SEQ ID NO: 549799 - RNA, 22 nt, Artificial Sequence
  Synthetic
guaguguuauacacccacacuc

SEQ ID NO: 549800 - RNA, 23 nt, Artificial Sequence
  Synthetic
aguaguguuauacacccacacuc

SEQ ID NO: 549801 - RNA, 24 nt, Artificial Sequence
  Synthetic
uaguaguguuauacacccacacuc

SEQ ID NO: 549802 - RNA, 18 nt, Artificial Sequence
  Synthetic
aaugggaacaucacacuc

SEQ ID NO: 549803 - RNA, 19 nt, Artificial Sequence
  Synthetic
gaaugggaacaucacacuc

SEQ ID NO: 549804 - RNA, 20 nt, Artificial Sequence
  Synthetic
ggaaugggaacaucacacuc

SEQ ID NO: 549805 - RNA, 21 nt, Artificial Sequence
  Synthetic
aggaaugggaacaucacacuc

SEQ ID NO: 549806 - RNA, 22 nt, Artificial Sequence
  Synthetic
caggaaugggaacaucacacuc

SEQ ID NO: 549807 - RNA, 23 nt, Artificial Sequence
  Synthetic
acaggaaugggaacaucacacuc

SEQ ID NO: 549808 - RNA, 24 nt, Artificial Sequence
  Synthetic
cacaggaaugggaacaucacacuc

SEQ ID NO: 549809 - RNA, 18 nt, Artificial Sequence
  Synthetic
auuugacaacagacacuc

SEQ ID NO: 549810 - RNA, 19 nt, Artificial Sequence
  Synthetic
cauuugacaacagacacuc

SEQ ID NO: 549811 - RNA, 20 nt, Artificial Sequence
  Synthetic
ucauuugacaacagacacuc

SEQ ID NO: 549812 - RNA, 21 nt, Artificial Sequence
  Synthetic
aucauuugacaacagacacuc

SEQ ID NO: 549813 - RNA, 22 nt, Artificial Sequence
  Synthetic
aaucauuugacaacagacacuc

SEQ ID NO: 549814 - RNA, 23 nt, Artificial Sequence
  Synthetic
gaaucauuugacaacagacacuc

SEQ ID NO: 549815 - RNA, 24 nt, Artificial Sequence
  Synthetic
agaaucauuugacaacagacacuc

SEQ ID NO: 549816 - RNA, 18 nt, Artificial Sequence
  Synthetic
gggagcuaauagacacuc

SEQ ID NO: 549817 - RNA, 19 nt, Artificial Sequence
  Synthetic
ugggagcuaauagacacuc

SEQ ID NO: 549818 - RNA, 20 nt, Artificial Sequence
  Synthetic
augggagcuaauagacacuc

SEQ ID NO: 549819 - RNA, 21 nt, Artificial Sequence
  Synthetic
aaugggagcuaauagacacuc

SEQ ID NO: 549820 - RNA, 22 nt, Artificial Sequence
  Synthetic
uaaugggagcuaauagacacuc

SEQ ID NO: 549821 - RNA, 23 nt, Artificial Sequence
  Synthetic
guaaugggagcuaauagacacuc

SEQ ID NO: 549822 - RNA, 24 nt, Artificial Sequence
  Synthetic
uguaaugggagcuaauagacacuc

SEQ ID NO: 549823 - RNA, 18 nt, Artificial Sequence
  Synthetic
uggggguuguagacacuc

SEQ ID NO: 549824 - RNA, 19 nt, Artificial Sequence
  Synthetic
uuggggguuguagacacuc

SEQ ID NO: 549825 - RNA, 20 nt, Artificial Sequence
  Synthetic
guuggggguuguagacacuc

SEQ ID NO: 549826 - RNA, 21 nt, Artificial Sequence
  Synthetic
aguuggggguuguagacacuc

SEQ ID NO: 549827 - RNA, 22 nt, Artificial Sequence
  Synthetic
gaguuggggguuguagacacuc

SEQ ID NO: 549828 - RNA, 23 nt, Artificial Sequence
  Synthetic
ggaguuggggguuguagacacuc

SEQ ID NO: 549829 - RNA, 24 nt, Artificial Sequence
  Synthetic
gggaguuggggguuguagacacuc

SEQ ID NO: 549830 - RNA, 18 nt, Artificial Sequence
  Synthetic
uuuaacuaccugacacuc

SEQ ID NO: 549831 - RNA, 19 nt, Artificial Sequence
  Synthetic
cuuuaacuaccugacacuc

SEQ ID NO: 549832 - RNA, 20 nt, Artificial Sequence
  Synthetic
acuuuaacuaccugacacuc

SEQ ID NO: 549833 - RNA, 21 nt, Artificial Sequence
  Synthetic
aacuuuaacuaccugacacuc

SEQ ID NO: 549834 - RNA, 22 nt, Artificial Sequence
  Synthetic
gaacuuuaacuaccugacacuc

SEQ ID NO: 549835 - RNA, 23 nt, Artificial Sequence
  Synthetic
agaacuuuaacuaccugacacuc

SEQ ID NO: 549836 - RNA, 24 nt, Artificial Sequence
  Synthetic
cagaacuuuaacuaccugacacuc

SEQ ID NO: 549837 - RNA, 18 nt, Artificial Sequence
  Synthetic
uuggguaauaauacacuc

SEQ ID NO: 549838 - RNA, 19 nt, Artificial Sequence
  Synthetic
guuggguaauaauacacuc

SEQ ID NO: 549839 - RNA, 20 nt, Artificial Sequence
  Synthetic
gguuggguaauaauacacuc

SEQ ID NO: 549840 - RNA, 21 nt, Artificial Sequence
  Synthetic
ggguuggguaauaauacacuc

SEQ ID NO: 549841 - RNA, 22 nt, Artificial Sequence
  Synthetic
uggguuggguaauaauacacuc

SEQ ID NO: 549842 - RNA, 23 nt, Artificial Sequence
  Synthetic
guggguuggguaauaauacacuc

SEQ ID NO: 549843 - RNA, 24 nt, Artificial Sequence
  Synthetic
uguggguuggguaauaauacacuc

SEQ ID NO: 549844 - RNA, 18 nt, Artificial Sequence
  Synthetic
caugcugacuguacacuc

SEQ ID NO: 549845 - RNA, 19 nt, Artificial Sequence
  Synthetic
ucaugcugacuguacacuc

SEQ ID NO: 549846 - RNA, 20 nt, Artificial Sequence
  Synthetic
aucaugcugacuguacacuc

SEQ ID NO: 549847 - RNA, 21 nt, Artificial Sequence
  Synthetic
uaucaugcugacuguacacuc

SEQ ID NO: 549848 - RNA, 22 nt, Artificial Sequence
  Synthetic
uuaucaugcugacuguacacuc

SEQ ID NO: 549849 - RNA, 23 nt, Artificial Sequence
  Synthetic
guuaucaugcugacuguacacuc

SEQ ID NO: 549850 - RNA, 24 nt, Artificial Sequence
  Synthetic
gguuaucaugcugacuguacacuc

SEQ ID NO: 549851 - RNA, 18 nt, Artificial Sequence
  Synthetic
cuagaggcgauuacacuc

SEQ ID NO: 549852 - RNA, 19 nt, Artificial Sequence
  Synthetic
ucuagaggcgauuacacuc

SEQ ID NO: 549853 - RNA, 20 nt, Artificial Sequence
  Synthetic
aucuagaggcgauuacacuc

SEQ ID NO: 549854 - RNA, 21 nt, Artificial Sequence
  Synthetic
uaucuagaggcgauuacacuc

SEQ ID NO: 549855 - RNA, 22 nt, Artificial Sequence
  Synthetic
uuaucuagaggcgauuacacuc

SEQ ID NO: 549856 - RNA, 23 nt, Artificial Sequence
  Synthetic
auuaucuagaggcgauuacacuc

SEQ ID NO: 549857 - RNA, 24 nt, Artificial Sequence
  Synthetic
gauuaucuagaggcgauuacacuc

SEQ ID NO: 549858 - RNA, 18 nt, Artificial Sequence
  Synthetic
ucuuuuuuuuucccacuc

SEQ ID NO: 549859 - RNA, 19 nt, Artificial Sequence
  Synthetic
uucuuuuuuuuucccacuc

SEQ ID NO: 549860 - RNA, 20 nt, Artificial Sequence
  Synthetic
guucuuuuuuuuucccacuc

SEQ ID NO: 549861 - RNA, 21 nt, Artificial Sequence
  Synthetic
aguucuuuuuuuuucccacuc

SEQ ID NO: 549862 - RNA, 22 nt, Artificial Sequence
  Synthetic
aaguucuuuuuuuuucccacuc

SEQ ID NO: 549863 - RNA, 23 nt, Artificial Sequence
  Synthetic
gaaguucuuuuuuuuucccacuc

SEQ ID NO: 549864 - RNA, 24 nt, Artificial Sequence
  Synthetic
ugaaguucuuuuuuuuucccacuc

SEQ ID NO: 549865 - RNA, 18 nt, Artificial Sequence
  Synthetic
cuguaaucccagccacuc

SEQ ID NO: 549866 - RNA, 19 nt, Artificial Sequence
  Synthetic
ccuguaaucccagccacuc

SEQ ID NO: 549867 - RNA, 20 nt, Artificial Sequence
  Synthetic
accuguaaucccagccacuc

SEQ ID NO: 549868 - RNA, 21 nt, Artificial Sequence
  Synthetic
caccuguaaucccagccacuc

SEQ ID NO: 549869 - RNA, 22 nt, Artificial Sequence
  Synthetic
acaccuguaaucccagccacuc

SEQ ID NO: 549870 - RNA, 23 nt, Artificial Sequence
  Synthetic
cacaccuguaaucccagccacuc

SEQ ID NO: 549871 - RNA, 24 nt, Artificial Sequence
  Synthetic
gcacaccuguaaucccagccacuc

SEQ ID NO: 549872 - RNA, 20 nt, Artificial Sequence
  Synthetic
gccuguaaucccagccacuc

SEQ ID NO: 549873 - RNA, 21 nt, Artificial Sequence
  Synthetic
ugccuguaaucccagccacuc

SEQ ID NO: 549874 - RNA, 22 nt, Artificial Sequence
  Synthetic
gugccuguaaucccagccacuc

SEQ ID NO: 549875 - RNA, 23 nt, Artificial Sequence
  Synthetic
ggugccuguaaucccagccacuc

SEQ ID NO: 549876 - RNA, 24 nt, Artificial Sequence
  Synthetic
gggugccuguaaucccagccacuc

SEQ ID NO: 549877 - RNA, 18 nt, Artificial Sequence
  Synthetic
gguacgugucauccacuc

SEQ ID NO: 549878 - RNA, 19 nt, Artificial Sequence
  Synthetic
ggguacgugucauccacuc

SEQ ID NO: 549879 - RNA, 20 nt, Artificial Sequence
  Synthetic
gggguacgugucauccacuc

SEQ ID NO: 549880 - RNA, 21 nt, Artificial Sequence
  Synthetic
ggggguacgugucauccacuc

SEQ ID NO: 549881 - RNA, 22 nt, Artificial Sequence
  Synthetic
gggggguacgugucauccacuc

SEQ ID NO: 549882 - RNA, 23 nt, Artificial Sequence
  Synthetic
cgggggguacgugucauccacuc

SEQ ID NO: 549883 - RNA, 24 nt, Artificial Sequence
  Synthetic
ucgggggguacgugucauccacuc

SEQ ID NO: 549884 - RNA, 18 nt, Artificial Sequence
  Synthetic
gaaucucaggcuccacuc

SEQ ID NO: 549885 - RNA, 19 nt, Artificial Sequence
  Synthetic
agaaucucaggcuccacuc

SEQ ID NO: 549886 - RNA, 20 nt, Artificial Sequence
  Synthetic
cagaaucucaggcuccacuc

SEQ ID NO: 549887 - RNA, 21 nt, Artificial Sequence
  Synthetic
gcagaaucucaggcuccacuc

SEQ ID NO: 549888 - RNA, 22 nt, Artificial Sequence
  Synthetic
ugcagaaucucaggcuccacuc

SEQ ID NO: 549889 - RNA, 23 nt, Artificial Sequence
  Synthetic
augcagaaucucaggcuccacuc

SEQ ID NO: 549890 - RNA, 24 nt, Artificial Sequence
  Synthetic
aaugcagaaucucaggcuccacuc

SEQ ID NO: 549891 - RNA, 18 nt, Artificial Sequence
  Synthetic
aaauaacugguuccacuc

SEQ ID NO: 549892 - RNA, 19 nt, Artificial Sequence
  Synthetic
caaauaacugguuccacuc

SEQ ID NO: 549893 - RNA, 20 nt, Artificial Sequence
  Synthetic
gcaaauaacugguuccacuc

SEQ ID NO: 549894 - RNA, 21 nt, Artificial Sequence
  Synthetic
ggcaaauaacugguuccacuc

SEQ ID NO: 549895 - RNA, 22 nt, Artificial Sequence
  Synthetic
gggcaaauaacugguuccacuc

SEQ ID NO: 549896 - RNA, 23 nt, Artificial Sequence
  Synthetic
agggcaaauaacugguuccacuc

SEQ ID NO: 549897 - RNA, 24 nt, Artificial Sequence
  Synthetic
uagggcaaauaacugguuccacuc

SEQ ID NO: 549898 - RNA, 18 nt, Artificial Sequence
  Synthetic
uaacauuacacagcacuc

SEQ ID NO: 549899 - RNA, 19 nt, Artificial Sequence
  Synthetic
guaacauuacacagcacuc

SEQ ID NO: 549900 - RNA, 20 nt, Artificial Sequence
  Synthetic
uguaacauuacacagcacuc

SEQ ID NO: 549901 - RNA, 21 nt, Artificial Sequence
  Synthetic
auguaacauuacacagcacuc

SEQ ID NO: 549902 - RNA, 22 nt, Artificial Sequence
  Synthetic
uauguaacauuacacagcacuc

SEQ ID NO: 549903 - RNA, 23 nt, Artificial Sequence
  Synthetic
cuauguaacauuacacagcacuc

SEQ ID NO: 549904 - RNA, 24 nt, Artificial Sequence
  Synthetic
ccuauguaacauuacacagcacuc

SEQ ID NO: 549905 - RNA, 18 nt, Artificial Sequence
  Synthetic
agcaugaaaccagcacuc

SEQ ID NO: 549906 - RNA, 19 nt, Artificial Sequence
  Synthetic
aagcaugaaaccagcacuc

SEQ ID NO: 549907 - RNA, 20 nt, Artificial Sequence
  Synthetic
caagcaugaaaccagcacuc

SEQ ID NO: 549908 - RNA, 21 nt, Artificial Sequence
  Synthetic
ucaagcaugaaaccagcacuc

SEQ ID NO: 549909 - RNA, 22 nt, Artificial Sequence
  Synthetic
uucaagcaugaaaccagcacuc

SEQ ID NO: 549910 - RNA, 23 nt, Artificial Sequence
  Synthetic
auucaagcaugaaaccagcacuc

SEQ ID NO: 549911 - RNA, 24 nt, Artificial Sequence
  Synthetic
gauucaagcaugaaaccagcacuc

SEQ ID NO: 549912 - RNA, 21 nt, Artificial Sequence
  Synthetic
acgccuguaaucccagcacuc

SEQ ID NO: 549913 - RNA, 22 nt, Artificial Sequence
  Synthetic
cacgccuguaaucccagcacuc

SEQ ID NO: 549914 - RNA, 23 nt, Artificial Sequence
  Synthetic
ucacgccuguaaucccagcacuc

SEQ ID NO: 549915 - RNA, 24 nt, Artificial Sequence
  Synthetic
cucacgccuguaaucccagcacuc

SEQ ID NO: 549916 - RNA, 18 nt, Artificial Sequence
  Synthetic
guucucucaucagcacuc

SEQ ID NO: 549917 - RNA, 19 nt, Artificial Sequence
  Synthetic
uguucucucaucagcacuc

SEQ ID NO: 549918 - RNA, 20 nt, Artificial Sequence
  Synthetic
cuguucucucaucagcacuc

SEQ ID NO: 549919 - RNA, 21 nt, Artificial Sequence
  Synthetic
acuguucucucaucagcacuc

SEQ ID NO: 549920 - RNA, 22 nt, Artificial Sequence
  Synthetic
aacuguucucucaucagcacuc

SEQ ID NO: 549921 - RNA, 23 nt, Artificial Sequence
  Synthetic
aaacuguucucucaucagcacuc

SEQ ID NO: 549922 - RNA, 24 nt, Artificial Sequence
  Synthetic
uaaacuguucucucaucagcacuc

SEQ ID NO: 549923 - RNA, 18 nt, Artificial Sequence
  Synthetic
uauaaaauguaggcacuc

SEQ ID NO: 549924 - RNA, 19 nt, Artificial Sequence
  Synthetic
uuauaaaauguaggcacuc

SEQ ID NO: 549925 - RNA, 20 nt, Artificial Sequence
  Synthetic
guuauaaaauguaggcacuc

SEQ ID NO: 549926 - RNA, 21 nt, Artificial Sequence
  Synthetic
aguuauaaaauguaggcacuc

SEQ ID NO: 549927 - RNA, 22 nt, Artificial Sequence
  Synthetic
aaguuauaaaauguaggcacuc

SEQ ID NO: 549928 - RNA, 23 nt, Artificial Sequence
  Synthetic
uaaguuauaaaauguaggcacuc

SEQ ID NO: 549929 - RNA, 24 nt, Artificial Sequence
  Synthetic
guaaguuauaaaauguaggcacuc

SEQ ID NO: 549930 - RNA, 18 nt, Artificial Sequence
  Synthetic
uuuuugaagucugcacuc

SEQ ID NO: 549931 - RNA, 19 nt, Artificial Sequence
  Synthetic
auuuuugaagucugcacuc

SEQ ID NO: 549932 - RNA, 20 nt, Artificial Sequence
  Synthetic
uauuuuugaagucugcacuc

SEQ ID NO: 549933 - RNA, 21 nt, Artificial Sequence
  Synthetic
guauuuuugaagucugcacuc

SEQ ID NO: 549934 - RNA, 22 nt, Artificial Sequence
  Synthetic
aguauuuuugaagucugcacuc

SEQ ID NO: 549935 - RNA, 23 nt, Artificial Sequence
  Synthetic
gaguauuuuugaagucugcacuc

SEQ ID NO: 549936 - RNA, 24 nt, Artificial Sequence
  Synthetic
agaguauuuuugaagucugcacuc

SEQ ID NO: 549937 - RNA, 18 nt, Artificial Sequence
  Synthetic
cuagaggguggugcacuc

SEQ ID NO: 549938 - RNA, 19 nt, Artificial Sequence
  Synthetic
ccuagaggguggugcacuc

SEQ ID NO: 549939 - RNA, 20 nt, Artificial Sequence
  Synthetic
uccuagaggguggugcacuc

SEQ ID NO: 549940 - RNA, 21 nt, Artificial Sequence
  Synthetic
uuccuagaggguggugcacuc

SEQ ID NO: 549941 - RNA, 22 nt, Artificial Sequence
  Synthetic
auuccuagaggguggugcacuc

SEQ ID NO: 549942 - RNA, 23 nt, Artificial Sequence
  Synthetic
gauuccuagaggguggugcacuc

SEQ ID NO: 549943 - RNA, 24 nt, Artificial Sequence
  Synthetic
ggauuccuagaggguggugcacuc

SEQ ID NO: 549944 - RNA, 18 nt, Artificial Sequence
  Synthetic
gagaaaaugguugcacuc

SEQ ID NO: 549945 - RNA, 19 nt, Artificial Sequence
  Synthetic
cgagaaaaugguugcacuc

SEQ ID NO: 549946 - RNA, 20 nt, Artificial Sequence
  Synthetic
ccgagaaaaugguugcacuc

SEQ ID NO: 549947 - RNA, 21 nt, Artificial Sequence
  Synthetic
cccgagaaaaugguugcacuc

SEQ ID NO: 549948 - RNA, 22 nt, Artificial Sequence
  Synthetic
gcccgagaaaaugguugcacuc

SEQ ID NO: 549949 - RNA, 23 nt, Artificial Sequence
  Synthetic
ggcccgagaaaaugguugcacuc

SEQ ID NO: 549950 - RNA, 24 nt, Artificial Sequence
  Synthetic
uggcccgagaaaaugguugcacuc

SEQ ID NO: 549951 - RNA, 18 nt, Artificial Sequence
  Synthetic
aaaauuacagaaucacuc

SEQ ID NO: 549952 - RNA, 19 nt, Artificial Sequence
  Synthetic
aaaaauuacagaaucacuc

SEQ ID NO: 549953 - RNA, 20 nt, Artificial Sequence
  Synthetic
uaaaaauuacagaaucacuc

SEQ ID NO: 549954 - RNA, 21 nt, Artificial Sequence
  Synthetic
uuaaaaauuacagaaucacuc

SEQ ID NO: 549955 - RNA, 22 nt, Artificial Sequence
  Synthetic
uuuaaaaauuacagaaucacuc

SEQ ID NO: 549956 - RNA, 23 nt, Artificial Sequence
  Synthetic
uuuuaaaaauuacagaaucacuc

SEQ ID NO: 549957 - RNA, 24 nt, Artificial Sequence
  Synthetic
auuuuaaaaauuacagaaucacuc

SEQ ID NO: 549958 - RNA, 18 nt, Artificial Sequence
  Synthetic
ccuuggaagucaucacuc

SEQ ID NO: 549959 - RNA, 19 nt, Artificial Sequence
  Synthetic
cccuuggaagucaucacuc

SEQ ID NO: 549960 - RNA, 20 nt, Artificial Sequence
  Synthetic
acccuuggaagucaucacuc

SEQ ID NO: 549961 - RNA, 21 nt, Artificial Sequence
  Synthetic
cacccuuggaagucaucacuc

SEQ ID NO: 549962 - RNA, 22 nt, Artificial Sequence
  Synthetic
ccacccuuggaagucaucacuc

SEQ ID NO: 549963 - RNA, 23 nt, Artificial Sequence
  Synthetic
accacccuuggaagucaucacuc

SEQ ID NO: 549964 - RNA, 24 nt, Artificial Sequence
  Synthetic
aaccacccuuggaagucaucacuc

SEQ ID NO: 549965 - RNA, 18 nt, Artificial Sequence
  Synthetic
cugccacauauaucacuc

SEQ ID NO: 549966 - RNA, 19 nt, Artificial Sequence
  Synthetic
ucugccacauauaucacuc

SEQ ID NO: 549967 - RNA, 20 nt, Artificial Sequence
  Synthetic
uucugccacauauaucacuc

SEQ ID NO: 549968 - RNA, 21 nt, Artificial Sequence
  Synthetic
uuucugccacauauaucacuc

SEQ ID NO: 549969 - RNA, 22 nt, Artificial Sequence
  Synthetic
uuuucugccacauauaucacuc

SEQ ID NO: 549970 - RNA, 23 nt, Artificial Sequence
  Synthetic
auuuucugccacauauaucacuc

SEQ ID NO: 549971 - RNA, 24 nt, Artificial Sequence
  Synthetic
aauuuucugccacauauaucacuc

SEQ ID NO: 549972 - RNA, 18 nt, Artificial Sequence
  Synthetic
ugcugcuacuccucacuc

SEQ ID NO: 549973 - RNA, 19 nt, Artificial Sequence
  Synthetic
gugcugcuacuccucacuc

SEQ ID NO: 549974 - RNA, 20 nt, Artificial Sequence
  Synthetic
cgugcugcuacuccucacuc

SEQ ID NO: 549975 - RNA, 21 nt, Artificial Sequence
  Synthetic
ccgugcugcuacuccucacuc

SEQ ID NO: 549976 - RNA, 22 nt, Artificial Sequence
  Synthetic
accgugcugcuacuccucacuc

SEQ ID NO: 549977 - RNA, 23 nt, Artificial Sequence
  Synthetic
uaccgugcugcuacuccucacuc

SEQ ID NO: 549978 - RNA, 24 nt, Artificial Sequence
  Synthetic
cuaccgugcugcuacuccucacuc

SEQ ID NO: 549979 - RNA, 18 nt, Artificial Sequence
  Synthetic
uucagcagaagcucacuc

SEQ ID NO: 549980 - RNA, 19 nt, Artificial Sequence
  Synthetic
auucagcagaagcucacuc

SEQ ID NO: 549981 - RNA, 20 nt, Artificial Sequence
  Synthetic
aauucagcagaagcucacuc

SEQ ID NO: 549982 - RNA, 21 nt, Artificial Sequence
  Synthetic
caauucagcagaagcucacuc

SEQ ID NO: 549983 - RNA, 22 nt, Artificial Sequence
  Synthetic
gcaauucagcagaagcucacuc

SEQ ID NO: 549984 - RNA, 23 nt, Artificial Sequence
  Synthetic
ggcaauucagcagaagcucacuc

SEQ ID NO: 549985 - RNA, 24 nt, Artificial Sequence
  Synthetic
aggcaauucagcagaagcucacuc

SEQ ID NO: 549986 - RNA, 18 nt, Artificial Sequence
  Synthetic
cagaagugucucucacuc

SEQ ID NO: 549987 - RNA, 19 nt, Artificial Sequence
  Synthetic
ucagaagugucucucacuc

SEQ ID NO: 549988 - RNA, 20 nt, Artificial Sequence
  Synthetic
aucagaagugucucucacuc

SEQ ID NO: 549989 - RNA, 21 nt, Artificial Sequence
  Synthetic
aaucagaagugucucucacuc

SEQ ID NO: 549990 - RNA, 22 nt, Artificial Sequence
  Synthetic
aaaucagaagugucucucacuc

SEQ ID NO: 549991 - RNA, 23 nt, Artificial Sequence
  Synthetic
gaaaucagaagugucucucacuc

SEQ ID NO: 549992 - RNA, 24 nt, Artificial Sequence
  Synthetic
ggaaaucagaagugucucucacuc

SEQ ID NO: 549993 - RNA, 18 nt, Artificial Sequence
  Synthetic
agugcuaaggauucacuc

SEQ ID NO: 549994 - RNA, 19 nt, Artificial Sequence
  Synthetic
cagugcuaaggauucacuc

SEQ ID NO: 549995 - RNA, 20 nt, Artificial Sequence
  Synthetic
ccagugcuaaggauucacuc

SEQ ID NO: 549996 - RNA, 21 nt, Artificial Sequence
  Synthetic
cccagugcuaaggauucacuc

SEQ ID NO: 549997 - RNA, 22 nt, Artificial Sequence
  Synthetic
gcccagugcuaaggauucacuc

SEQ ID NO: 549998 - RNA, 23 nt, Artificial Sequence
  Synthetic
agcccagugcuaaggauucacuc

SEQ ID NO: 549999 - RNA, 24 nt, Artificial Sequence
  Synthetic
gagcccagugcuaaggauucacuc

SEQ ID NO: 550000 - RNA, 18 nt, Artificial Sequence
  Synthetic
uauccccuaaaaagacuc

SEQ ID NO: 550001 - RNA, 19 nt, Artificial Sequence
  Synthetic
guauccccuaaaaagacuc

SEQ ID NO: 550002 - RNA, 20 nt, Artificial Sequence
  Synthetic
uguauccccuaaaaagacuc

SEQ ID NO: 550003 - RNA, 21 nt, Artificial Sequence
  Synthetic
cuguauccccuaaaaagacuc

SEQ ID NO: 550004 - RNA, 22 nt, Artificial Sequence
  Synthetic
ucuguauccccuaaaaagacuc

SEQ ID NO: 550005 - RNA, 23 nt, Artificial Sequence
  Synthetic
uucuguauccccuaaaaagacuc

SEQ ID NO: 550006 - RNA, 24 nt, Artificial Sequence
  Synthetic
cuucuguauccccuaaaaagacuc

SEQ ID NO: 550007 - RNA, 18 nt, Artificial Sequence
  Synthetic
uuugugguccaaagacuc

SEQ ID NO: 550008 - RNA, 19 nt, Artificial Sequence
  Synthetic
auuugugguccaaagacuc

SEQ ID NO: 550009 - RNA, 20 nt, Artificial Sequence
  Synthetic
cauuugugguccaaagacuc

SEQ ID NO: 550010 - RNA, 21 nt, Artificial Sequence
  Synthetic
acauuugugguccaaagacuc

SEQ ID NO: 550011 - RNA, 22 nt, Artificial Sequence
  Synthetic
cacauuugugguccaaagacuc

SEQ ID NO: 550012 - RNA, 23 nt, Artificial Sequence
  Synthetic
gcacauuugugguccaaagacuc

SEQ ID NO: 550013 - RNA, 24 nt, Artificial Sequence
  Synthetic
ggcacauuugugguccaaagacuc

SEQ ID NO: 550014 - RNA, 18 nt, Artificial Sequence
  Synthetic
guuuguuaaccaagacuc

SEQ ID NO: 550015 - RNA, 19 nt, Artificial Sequence
  Synthetic
uguuuguuaaccaagacuc

SEQ ID NO: 550016 - RNA, 20 nt, Artificial Sequence
  Synthetic
auguuuguuaaccaagacuc

SEQ ID NO: 550017 - RNA, 21 nt, Artificial Sequence
  Synthetic
aauguuuguuaaccaagacuc

SEQ ID NO: 550018 - RNA, 22 nt, Artificial Sequence
  Synthetic
aaauguuuguuaaccaagacuc

SEQ ID NO: 550019 - RNA, 23 nt, Artificial Sequence
  Synthetic
caaauguuuguuaaccaagacuc

SEQ ID NO: 550020 - RNA, 24 nt, Artificial Sequence
  Synthetic
acaaauguuuguuaaccaagacuc

SEQ ID NO: 550021 - RNA, 18 nt, Artificial Sequence
  Synthetic
acuggaggcuuaagacuc

SEQ ID NO: 550022 - RNA, 19 nt, Artificial Sequence
  Synthetic
aacuggaggcuuaagacuc

SEQ ID NO: 550023 - RNA, 20 nt, Artificial Sequence
  Synthetic
gaacuggaggcuuaagacuc

SEQ ID NO: 550024 - RNA, 21 nt, Artificial Sequence
  Synthetic
agaacuggaggcuuaagacuc

SEQ ID NO: 550025 - RNA, 22 nt, Artificial Sequence
  Synthetic
cagaacuggaggcuuaagacuc

SEQ ID NO: 550026 - RNA, 23 nt, Artificial Sequence
  Synthetic
ccagaacuggaggcuuaagacuc

SEQ ID NO: 550027 - RNA, 24 nt, Artificial Sequence
  Synthetic
cccagaacuggaggcuuaagacuc

SEQ ID NO: 550028 - RNA, 18 nt, Artificial Sequence
  Synthetic
uuuauagacaacagacuc

SEQ ID NO: 550029 - RNA, 19 nt, Artificial Sequence
  Synthetic
guuuauagacaacagacuc

SEQ ID NO: 550030 - RNA, 20 nt, Artificial Sequence
  Synthetic
aguuuauagacaacagacuc

SEQ ID NO: 550031 - RNA, 21 nt, Artificial Sequence
  Synthetic
aaguuuauagacaacagacuc

SEQ ID NO: 550032 - RNA, 22 nt, Artificial Sequence
  Synthetic
caaguuuauagacaacagacuc

SEQ ID NO: 550033 - RNA, 23 nt, Artificial Sequence
  Synthetic
ucaaguuuauagacaacagacuc

SEQ ID NO: 550034 - RNA, 24 nt, Artificial Sequence
  Synthetic
aucaaguuuauagacaacagacuc

SEQ ID NO: 550035 - RNA, 18 nt, Artificial Sequence
  Synthetic
aaggacaaccacagacuc

SEQ ID NO: 550036 - RNA, 19 nt, Artificial Sequence
  Synthetic
caaggacaaccacagacuc

SEQ ID NO: 550037 - RNA, 20 nt, Artificial Sequence
  Synthetic
ucaaggacaaccacagacuc

SEQ ID NO: 550038 - RNA, 21 nt, Artificial Sequence
  Synthetic
cucaaggacaaccacagacuc

SEQ ID NO: 550039 - RNA, 22 nt, Artificial Sequence
  Synthetic
ucucaaggacaaccacagacuc

SEQ ID NO: 550040 - RNA, 23 nt, Artificial Sequence
  Synthetic
cucucaaggacaaccacagacuc

SEQ ID NO: 550041 - RNA, 24 nt, Artificial Sequence
  Synthetic
ccucucaaggacaaccacagacuc

SEQ ID NO: 550042 - RNA, 18 nt, Artificial Sequence
  Synthetic
agauuggaaacgagacuc

SEQ ID NO: 550043 - RNA, 19 nt, Artificial Sequence
  Synthetic
aagauuggaaacgagacuc

SEQ ID NO: 550044 - RNA, 20 nt, Artificial Sequence
  Synthetic
uaagauuggaaacgagacuc

SEQ ID NO: 550045 - RNA, 21 nt, Artificial Sequence
  Synthetic
auaagauuggaaacgagacuc

SEQ ID NO: 550046 - RNA, 22 nt, Artificial Sequence
  Synthetic
aauaagauuggaaacgagacuc

SEQ ID NO: 550047 - RNA, 23 nt, Artificial Sequence
  Synthetic
aaauaagauuggaaacgagacuc

SEQ ID NO: 550048 - RNA, 24 nt, Artificial Sequence
  Synthetic
gaaauaagauuggaaacgagacuc

SEQ ID NO: 550049 - RNA, 18 nt, Artificial Sequence
  Synthetic
uuuuauuacccgagacuc

SEQ ID NO: 550050 - RNA, 19 nt, Artificial Sequence
  Synthetic
cuuuuauuacccgagacuc

SEQ ID NO: 550051 - RNA, 20 nt, Artificial Sequence
  Synthetic
ucuuuuauuacccgagacuc

SEQ ID NO: 550052 - RNA, 21 nt, Artificial Sequence
  Synthetic
aucuuuuauuacccgagacuc

SEQ ID NO: 550053 - RNA, 22 nt, Artificial Sequence
  Synthetic
aaucuuuuauuacccgagacuc

SEQ ID NO: 550054 - RNA, 23 nt, Artificial Sequence
  Synthetic
uaaucuuuuauuacccgagacuc

SEQ ID NO: 550055 - RNA, 24 nt, Artificial Sequence
  Synthetic
auaaucuuuuauuacccgagacuc

SEQ ID NO: 550056 - RNA, 18 nt, Artificial Sequence
  Synthetic
aaugguaaacauagacuc

SEQ ID NO: 550057 - RNA, 19 nt, Artificial Sequence
  Synthetic
gaaugguaaacauagacuc

SEQ ID NO: 550058 - RNA, 20 nt, Artificial Sequence
  Synthetic
ugaaugguaaacauagacuc

SEQ ID NO: 550059 - RNA, 21 nt, Artificial Sequence
  Synthetic
cugaaugguaaacauagacuc

SEQ ID NO: 550060 - RNA, 22 nt, Artificial Sequence
  Synthetic
gcugaaugguaaacauagacuc

SEQ ID NO: 550061 - RNA, 23 nt, Artificial Sequence
  Synthetic
ggcugaaugguaaacauagacuc

SEQ ID NO: 550062 - RNA, 24 nt, Artificial Sequence
  Synthetic
aggcugaaugguaaacauagacuc

SEQ ID NO: 550063 - RNA, 18 nt, Artificial Sequence
  Synthetic
cugccugcugaccgacuc

SEQ ID NO: 550064 - RNA, 19 nt, Artificial Sequence
  Synthetic
ucugccugcugaccgacuc

SEQ ID NO: 550065 - RNA, 20 nt, Artificial Sequence
  Synthetic
uucugccugcugaccgacuc

SEQ ID NO: 550066 - RNA, 21 nt, Artificial Sequence
  Synthetic
uuucugccugcugaccgacuc

SEQ ID NO: 550067 - RNA, 22 nt, Artificial Sequence
  Synthetic
uuuucugccugcugaccgacuc

SEQ ID NO: 550068 - RNA, 23 nt, Artificial Sequence
  Synthetic
cuuuucugccugcugaccgacuc

SEQ ID NO: 550069 - RNA, 24 nt, Artificial Sequence
  Synthetic
ccuuuucugccugcugaccgacuc

SEQ ID NO: 550070 - RNA, 18 nt, Artificial Sequence
  Synthetic
caggcagagaaaggacuc

SEQ ID NO: 550071 - RNA, 19 nt, Artificial Sequence
  Synthetic
acaggcagagaaaggacuc

SEQ ID NO: 550072 - RNA, 20 nt, Artificial Sequence
  Synthetic
uacaggcagagaaaggacuc

SEQ ID NO: 550073 - RNA, 21 nt, Artificial Sequence
  Synthetic
cuacaggcagagaaaggacuc

SEQ ID NO: 550074 - RNA, 22 nt, Artificial Sequence
  Synthetic
ccuacaggcagagaaaggacuc

SEQ ID NO: 550075 - RNA, 23 nt, Artificial Sequence
  Synthetic
uccuacaggcagagaaaggacuc

SEQ ID NO: 550076 - RNA, 24 nt, Artificial Sequence
  Synthetic
cuccuacaggcagagaaaggacuc

SEQ ID NO: 550077 - RNA, 18 nt, Artificial Sequence
  Synthetic
gaucuagaguaaggacuc

SEQ ID NO: 550078 - RNA, 19 nt, Artificial Sequence
  Synthetic
ugaucuagaguaaggacuc

SEQ ID NO: 550079 - RNA, 20 nt, Artificial Sequence
  Synthetic
cugaucuagaguaaggacuc

SEQ ID NO: 550080 - RNA, 21 nt, Artificial Sequence
  Synthetic
ucugaucuagaguaaggacuc

SEQ ID NO: 550081 - RNA, 22 nt, Artificial Sequence
  Synthetic
aucugaucuagaguaaggacuc

SEQ ID NO: 550082 - RNA, 23 nt, Artificial Sequence
  Synthetic
aaucugaucuagaguaaggacuc

SEQ ID NO: 550083 - RNA, 24 nt, Artificial Sequence
  Synthetic
aaaucugaucuagaguaaggacuc

SEQ ID NO: 550084 - RNA, 18 nt, Artificial Sequence
  Synthetic
guuuaagggagaggacuc

SEQ ID NO: 550085 - RNA, 19 nt, Artificial Sequence
  Synthetic
gguuuaagggagaggacuc

SEQ ID NO: 550086 - RNA, 20 nt, Artificial Sequence
  Synthetic
agguuuaagggagaggacuc

SEQ ID NO: 550087 - RNA, 21 nt, Artificial Sequence
  Synthetic
gagguuuaagggagaggacuc

SEQ ID NO: 550088 - RNA, 22 nt, Artificial Sequence
  Synthetic
ugagguuuaagggagaggacuc

SEQ ID NO: 550089 - RNA, 23 nt, Artificial Sequence
  Synthetic
augagguuuaagggagaggacuc

SEQ ID NO: 550090 - RNA, 24 nt, Artificial Sequence
  Synthetic
uaugagguuuaagggagaggacuc

SEQ ID NO: 550091 - RNA, 18 nt, Artificial Sequence
  Synthetic
cgggcugggaauggacuc

SEQ ID NO: 550092 - RNA, 19 nt, Artificial Sequence
  Synthetic
ccgggcugggaauggacuc

SEQ ID NO: 550093 - RNA, 20 nt, Artificial Sequence
  Synthetic
accgggcugggaauggacuc

SEQ ID NO: 550094 - RNA, 21 nt, Artificial Sequence
  Synthetic
caccgggcugggaauggacuc

SEQ ID NO: 550095 - RNA, 22 nt, Artificial Sequence
  Synthetic
acaccgggcugggaauggacuc

SEQ ID NO: 550096 - RNA, 23 nt, Artificial Sequence
  Synthetic
aacaccgggcugggaauggacuc

SEQ ID NO: 550097 - RNA, 24 nt, Artificial Sequence
  Synthetic
caacaccgggcugggaauggacuc

SEQ ID NO: 550098 - RNA, 18 nt, Artificial Sequence
  Synthetic
caggcuggucuuggacuc

SEQ ID NO: 550099 - RNA, 19 nt, Artificial Sequence
  Synthetic
ccaggcuggucuuggacuc

SEQ ID NO: 550100 - RNA, 20 nt, Artificial Sequence
  Synthetic
cccaggcuggucuuggacuc

SEQ ID NO: 550101 - RNA, 21 nt, Artificial Sequence
  Synthetic
acccaggcuggucuuggacuc

SEQ ID NO: 550102 - RNA, 22 nt, Artificial Sequence
  Synthetic
uacccaggcuggucuuggacuc

SEQ ID NO: 550103 - RNA, 23 nt, Artificial Sequence
  Synthetic
uuacccaggcuggucuuggacuc

SEQ ID NO: 550104 - RNA, 24 nt, Artificial Sequence
  Synthetic
guuacccaggcuggucuuggacuc

SEQ ID NO: 550105 - RNA, 18 nt, Artificial Sequence
  Synthetic
gacuaucacaaaugacuc

SEQ ID NO: 550106 - RNA, 19 nt, Artificial Sequence
  Synthetic
ugacuaucacaaaugacuc

SEQ ID NO: 550107 - RNA, 20 nt, Artificial Sequence
  Synthetic
gugacuaucacaaaugacuc

SEQ ID NO: 550108 - RNA, 21 nt, Artificial Sequence
  Synthetic
ugugacuaucacaaaugacuc

SEQ ID NO: 550109 - RNA, 22 nt, Artificial Sequence
  Synthetic
cugugacuaucacaaaugacuc

SEQ ID NO: 550110 - RNA, 23 nt, Artificial Sequence
  Synthetic
acugugacuaucacaaaugacuc

SEQ ID NO: 550111 - RNA, 24 nt, Artificial Sequence
  Synthetic
uacugugacuaucacaaaugacuc

SEQ ID NO: 550112 - RNA, 18 nt, Artificial Sequence
  Synthetic
agaaucaauauuugacuc

SEQ ID NO: 550113 - RNA, 19 nt, Artificial Sequence
  Synthetic
gagaaucaauauuugacuc

SEQ ID NO: 550114 - RNA, 20 nt, Artificial Sequence
  Synthetic
ugagaaucaauauuugacuc

SEQ ID NO: 550115 - RNA, 21 nt, Artificial Sequence
  Synthetic
cugagaaucaauauuugacuc

SEQ ID NO: 550116 - RNA, 22 nt, Artificial Sequence
  Synthetic
ucugagaaucaauauuugacuc

SEQ ID NO: 550117 - RNA, 23 nt, Artificial Sequence
  Synthetic
uucugagaaucaauauuugacuc

SEQ ID NO: 550118 - RNA, 24 nt, Artificial Sequence
  Synthetic
auucugagaaucaauauuugacuc

SEQ ID NO: 550119 - RNA, 18 nt, Artificial Sequence
  Synthetic
acccaggcucuuugacuc

SEQ ID NO: 550120 - RNA, 19 nt, Artificial Sequence
  Synthetic
aacccaggcucuuugacuc

SEQ ID NO: 550121 - RNA, 20 nt, Artificial Sequence
  Synthetic
gaacccaggcucuuugacuc

SEQ ID NO: 550122 - RNA, 21 nt, Artificial Sequence
  Synthetic
ugaacccaggcucuuugacuc

SEQ ID NO: 550123 - RNA, 22 nt, Artificial Sequence
  Synthetic
uugaacccaggcucuuugacuc

SEQ ID NO: 550124 - RNA, 23 nt, Artificial Sequence
  Synthetic
uuugaacccaggcucuuugacuc

SEQ ID NO: 550125 - RNA, 24 nt, Artificial Sequence
  Synthetic
guuugaacccaggcucuuugacuc

SEQ ID NO: 550126 - RNA, 18 nt, Artificial Sequence
  Synthetic
ugucugaaguuuugacuc

SEQ ID NO: 550127 - RNA, 19 nt, Artificial Sequence
  Synthetic
gugucugaaguuuugacuc

SEQ ID NO: 550128 - RNA, 20 nt, Artificial Sequence
  Synthetic
agugucugaaguuuugacuc

SEQ ID NO: 550129 - RNA, 21 nt, Artificial Sequence
  Synthetic
aagugucugaaguuuugacuc

SEQ ID NO: 550130 - RNA, 22 nt, Artificial Sequence
  Synthetic
uaagugucugaaguuuugacuc

SEQ ID NO: 550131 - RNA, 23 nt, Artificial Sequence
  Synthetic
uuaagugucugaaguuuugacuc

SEQ ID NO: 550132 - RNA, 24 nt, Artificial Sequence
  Synthetic
guuaagugucugaaguuuugacuc

SEQ ID NO: 550133 - RNA, 18 nt, Artificial Sequence
  Synthetic
aaaccaggccaaauacuc

SEQ ID NO: 550134 - RNA, 19 nt, Artificial Sequence
  Synthetic
aaaaccaggccaaauacuc

SEQ ID NO: 550135 - RNA, 20 nt, Artificial Sequence
  Synthetic
aaaaaccaggccaaauacuc

SEQ ID NO: 550136 - RNA, 21 nt, Artificial Sequence
  Synthetic
uaaaaaccaggccaaauacuc

SEQ ID NO: 550137 - RNA, 22 nt, Artificial Sequence
  Synthetic
auaaaaaccaggccaaauacuc

SEQ ID NO: 550138 - RNA, 23 nt, Artificial Sequence
  Synthetic
uauaaaaaccaggccaaauacuc

SEQ ID NO: 550139 - RNA, 24 nt, Artificial Sequence
  Synthetic
cuauaaaaaccaggccaaauacuc

SEQ ID NO: 550140 - RNA, 18 nt, Artificial Sequence
  Synthetic
guagggaaauaaauacuc

SEQ ID NO: 550141 - RNA, 19 nt, Artificial Sequence
  Synthetic
gguagggaaauaaauacuc

SEQ ID NO: 550142 - RNA, 20 nt, Artificial Sequence
  Synthetic
agguagggaaauaaauacuc

SEQ ID NO: 550143 - RNA, 21 nt, Artificial Sequence
  Synthetic
uagguagggaaauaaauacuc

SEQ ID NO: 550144 - RNA, 22 nt, Artificial Sequence
  Synthetic
cuagguagggaaauaaauacuc

SEQ ID NO: 550145 - RNA, 23 nt, Artificial Sequence
  Synthetic
ucuagguagggaaauaaauacuc

SEQ ID NO: 550146 - RNA, 24 nt, Artificial Sequence
  Synthetic
uucuagguagggaaauaaauacuc

SEQ ID NO: 550147 - RNA, 18 nt, Artificial Sequence
  Synthetic
ucuucuccuagaauacuc

SEQ ID NO: 550148 - RNA, 19 nt, Artificial Sequence
  Synthetic
gucuucuccuagaauacuc

SEQ ID NO: 550149 - RNA, 20 nt, Artificial Sequence
  Synthetic
ugucuucuccuagaauacuc

SEQ ID NO: 550150 - RNA, 21 nt, Artificial Sequence
  Synthetic
augucuucuccuagaauacuc

SEQ ID NO: 550151 - RNA, 22 nt, Artificial Sequence
  Synthetic
uaugucuucuccuagaauacuc

SEQ ID NO: 550152 - RNA, 23 nt, Artificial Sequence
  Synthetic
guaugucuucuccuagaauacuc

SEQ ID NO: 550153 - RNA, 24 nt, Artificial Sequence
  Synthetic
gguaugucuucuccuagaauacuc

SEQ ID NO: 550154 - RNA, 18 nt, Artificial Sequence
  Synthetic
acuuauuuuaauauacuc

SEQ ID NO: 550155 - RNA, 19 nt, Artificial Sequence
  Synthetic
gacuuauuuuaauauacuc

SEQ ID NO: 550156 - RNA, 20 nt, Artificial Sequence
  Synthetic
agacuuauuuuaauauacuc

SEQ ID NO: 550157 - RNA, 21 nt, Artificial Sequence
  Synthetic
cagacuuauuuuaauauacuc

SEQ ID NO: 550158 - RNA, 22 nt, Artificial Sequence
  Synthetic
acagacuuauuuuaauauacuc

SEQ ID NO: 550159 - RNA, 23 nt, Artificial Sequence
  Synthetic
aacagacuuauuuuaauauacuc

SEQ ID NO: 550160 - RNA, 24 nt, Artificial Sequence
  Synthetic
aaacagacuuauuuuaauauacuc

SEQ ID NO: 550161 - RNA, 18 nt, Artificial Sequence
  Synthetic
acacauacauauauacuc

SEQ ID NO: 550162 - RNA, 19 nt, Artificial Sequence
  Synthetic
uacacauacauauauacuc

SEQ ID NO: 550163 - RNA, 20 nt, Artificial Sequence
  Synthetic
guacacauacauauauacuc

SEQ ID NO: 550164 - RNA, 21 nt, Artificial Sequence
  Synthetic
uguacacauacauauauacuc

SEQ ID NO: 550165 - RNA, 22 nt, Artificial Sequence
  Synthetic
cuguacacauacauauauacuc

SEQ ID NO: 550166 - RNA, 23 nt, Artificial Sequence
  Synthetic
gcuguacacauacauauauacuc

SEQ ID NO: 550167 - RNA, 24 nt, Artificial Sequence
  Synthetic
agcuguacacauacauauauacuc

SEQ ID NO: 550168 - RNA, 18 nt, Artificial Sequence
  Synthetic
ugagauuuacgacuacuc

SEQ ID NO: 550169 - RNA, 19 nt, Artificial Sequence
  Synthetic
augagauuuacgacuacuc

SEQ ID NO: 550170 - RNA, 20 nt, Artificial Sequence
  Synthetic
caugagauuuacgacuacuc

SEQ ID NO: 550171 - RNA, 21 nt, Artificial Sequence
  Synthetic
acaugagauuuacgacuacuc

SEQ ID NO: 550172 - RNA, 22 nt, Artificial Sequence
  Synthetic
cacaugagauuuacgacuacuc

SEQ ID NO: 550173 - RNA, 23 nt, Artificial Sequence
  Synthetic
acacaugagauuuacgacuacuc

SEQ ID NO: 550174 - RNA, 24 nt, Artificial Sequence
  Synthetic
aacacaugagauuuacgacuacuc

SEQ ID NO: 550175 - RNA, 21 nt, Artificial Sequence
  Synthetic
cgccuguaguaccagcuacuc

SEQ ID NO: 550176 - RNA, 22 nt, Artificial Sequence
  Synthetic
gcgccuguaguaccagcuacuc

SEQ ID NO: 550177 - RNA, 23 nt, Artificial Sequence
  Synthetic
agcgccuguaguaccagcuacuc

SEQ ID NO: 550178 - RNA, 24 nt, Artificial Sequence
  Synthetic
cagcgccuguaguaccagcuacuc

SEQ ID NO: 550179 - RNA, 21 nt, Artificial Sequence
  Synthetic
ugccuguaguaccagcuacuc

SEQ ID NO: 550180 - RNA, 22 nt, Artificial Sequence
  Synthetic
augccuguaguaccagcuacuc

SEQ ID NO: 550181 - RNA, 23 nt, Artificial Sequence
  Synthetic
caugccuguaguaccagcuacuc

SEQ ID NO: 550182 - RNA, 24 nt, Artificial Sequence
  Synthetic
acaugccuguaguaccagcuacuc

SEQ ID NO: 550183 - RNA, 18 nt, Artificial Sequence
  Synthetic
ccguaaucccagcuacuc

SEQ ID NO: 550184 - RNA, 19 nt, Artificial Sequence
  Synthetic
cccguaaucccagcuacuc

SEQ ID NO: 550185 - RNA, 20 nt, Artificial Sequence
  Synthetic
ucccguaaucccagcuacuc

SEQ ID NO: 550186 - RNA, 21 nt, Artificial Sequence
  Synthetic
uucccguaaucccagcuacuc

SEQ ID NO: 550187 - RNA, 22 nt, Artificial Sequence
  Synthetic
guucccguaaucccagcuacuc

SEQ ID NO: 550188 - RNA, 23 nt, Artificial Sequence
  Synthetic
cguucccguaaucccagcuacuc

SEQ ID NO: 550189 - RNA, 24 nt, Artificial Sequence
  Synthetic
gcguucccguaaucccagcuacuc

SEQ ID NO: 550190 - RNA, 18 nt, Artificial Sequence
  Synthetic
cuguaaucccagcuacuc

SEQ ID NO: 550191 - RNA, 19 nt, Artificial Sequence
  Synthetic
ccuguaaucccagcuacuc

SEQ ID NO: 550192 - RNA, 21 nt, Artificial Sequence
  Synthetic
caccuguaaucccagcuacuc

SEQ ID NO: 550193 - RNA, 22 nt, Artificial Sequence
  Synthetic
gcaccuguaaucccagcuacuc

SEQ ID NO: 550194 - RNA, 23 nt, Artificial Sequence
  Synthetic
ggcaccuguaaucccagcuacuc

SEQ ID NO: 550195 - RNA, 24 nt, Artificial Sequence
  Synthetic
aggcaccuguaaucccagcuacuc

SEQ ID NO: 550196 - RNA, 22 nt, Artificial Sequence
  Synthetic
acgccuguaaucccagcuacuc

SEQ ID NO: 550197 - RNA, 23 nt, Artificial Sequence
  Synthetic
cacgccuguaaucccagcuacuc

SEQ ID NO: 550198 - RNA, 24 nt, Artificial Sequence
  Synthetic
acacgccuguaaucccagcuacuc

SEQ ID NO: 550199 - RNA, 23 nt, Artificial Sequence
  Synthetic
agugccuguaaucccagcuacuc

SEQ ID NO: 550200 - RNA, 24 nt, Artificial Sequence
  Synthetic
gagugccuguaaucccagcuacuc

SEQ ID NO: 550201 - RNA, 20 nt, Artificial Sequence
  Synthetic
uccuguaaucccagcuacuc

SEQ ID NO: 550202 - RNA, 21 nt, Artificial Sequence
  Synthetic
cuccuguaaucccagcuacuc

SEQ ID NO: 550203 - RNA, 22 nt, Artificial Sequence
  Synthetic
gcuccuguaaucccagcuacuc

SEQ ID NO: 550204 - RNA, 23 nt, Artificial Sequence
  Synthetic
ggcuccuguaaucccagcuacuc

SEQ ID NO: 550205 - RNA, 24 nt, Artificial Sequence
  Synthetic
aggcuccuguaaucccagcuacuc

SEQ ID NO: 550206 - RNA, 19 nt, Artificial Sequence
  Synthetic
ucuguaaucccagcuacuc

SEQ ID NO: 550207 - RNA, 20 nt, Artificial Sequence
  Synthetic
gucuguaaucccagcuacuc

SEQ ID NO: 550208 - RNA, 21 nt, Artificial Sequence
  Synthetic
ugucuguaaucccagcuacuc

SEQ ID NO: 550209 - RNA, 22 nt, Artificial Sequence
  Synthetic
augucuguaaucccagcuacuc

SEQ ID NO: 550210 - RNA, 23 nt, Artificial Sequence
  Synthetic
caugucuguaaucccagcuacuc

SEQ ID NO: 550211 - RNA, 24 nt, Artificial Sequence
  Synthetic
acaugucuguaaucccagcuacuc

SEQ ID NO: 550212 - RNA, 24 nt, Artificial Sequence
  Synthetic
gggcaccuguagucccagcuacuc

SEQ ID NO: 550213 - RNA, 22 nt, Artificial Sequence
  Synthetic
augccuguagucccagcuacuc

SEQ ID NO: 550214 - RNA, 23 nt, Artificial Sequence
  Synthetic
caugccuguagucccagcuacuc

SEQ ID NO: 550215 - RNA, 24 nt, Artificial Sequence
  Synthetic
gcaugccuguagucccagcuacuc

SEQ ID NO: 550216 - RNA, 23 nt, Artificial Sequence
  Synthetic
cgugccuguagucccagcuacuc

SEQ ID NO: 550217 - RNA, 24 nt, Artificial Sequence
  Synthetic
gcgugccuguagucccagcuacuc

SEQ ID NO: 550218 - RNA, 18 nt, Artificial Sequence
  Synthetic
cuguggucccagcuacuc

SEQ ID NO: 550219 - RNA, 19 nt, Artificial Sequence
  Synthetic
ucuguggucccagcuacuc

SEQ ID NO: 550220 - RNA, 20 nt, Artificial Sequence
  Synthetic
gucuguggucccagcuacuc

SEQ ID NO: 550221 - RNA, 21 nt, Artificial Sequence
  Synthetic
ugucuguggucccagcuacuc

SEQ ID NO: 550222 - RNA, 22 nt, Artificial Sequence
  Synthetic
gugucuguggucccagcuacuc

SEQ ID NO: 550223 - RNA, 23 nt, Artificial Sequence
  Synthetic
cgugucuguggucccagcuacuc

SEQ ID NO: 550224 - RNA, 24 nt, Artificial Sequence
  Synthetic
ccgugucuguggucccagcuacuc

SEQ ID NO: 550225 - RNA, 21 nt, Artificial Sequence
  Synthetic
caccuguaaucucagcuacuc

SEQ ID NO: 550226 - RNA, 22 nt, Artificial Sequence
  Synthetic
acaccuguaaucucagcuacuc

SEQ ID NO: 550227 - RNA, 23 nt, Artificial Sequence
  Synthetic
cacaccuguaaucucagcuacuc

SEQ ID NO: 550228 - RNA, 24 nt, Artificial Sequence
  Synthetic
gcacaccuguaaucucagcuacuc

SEQ ID NO: 550229 - RNA, 18 nt, Artificial Sequence
  Synthetic
cuguagucucagcuacuc

SEQ ID NO: 550230 - RNA, 19 nt, Artificial Sequence
  Synthetic
ucuguagucucagcuacuc

SEQ ID NO: 550231 - RNA, 20 nt, Artificial Sequence
  Synthetic
gucuguagucucagcuacuc

SEQ ID NO: 550232 - RNA, 21 nt, Artificial Sequence
  Synthetic
ugucuguagucucagcuacuc

SEQ ID NO: 550233 - RNA, 22 nt, Artificial Sequence
  Synthetic
augucuguagucucagcuacuc

SEQ ID NO: 550234 - RNA, 23 nt, Artificial Sequence
  Synthetic
caugucuguagucucagcuacuc

SEQ ID NO: 550235 - RNA, 24 nt, Artificial Sequence
  Synthetic
acaugucuguagucucagcuacuc

SEQ ID NO: 550236 - RNA, 18 nt, Artificial Sequence
  Synthetic
cuauaauccuagcuacuc

SEQ ID NO: 550237 - RNA, 19 nt, Artificial Sequence
  Synthetic
ccuauaauccuagcuacuc

SEQ ID NO: 550238 - RNA, 20 nt, Artificial Sequence
  Synthetic
gccuauaauccuagcuacuc

SEQ ID NO: 550239 - RNA, 21 nt, Artificial Sequence
  Synthetic
ugccuauaauccuagcuacuc

SEQ ID NO: 550240 - RNA, 22 nt, Artificial Sequence
  Synthetic
gugccuauaauccuagcuacuc

SEQ ID NO: 550241 - RNA, 23 nt, Artificial Sequence
  Synthetic
ggugccuauaauccuagcuacuc

SEQ ID NO: 550242 - RNA, 24 nt, Artificial Sequence
  Synthetic
gggugccuauaauccuagcuacuc

SEQ ID NO: 550243 - RNA, 18 nt, Artificial Sequence
  Synthetic
ggaaaccuccugcuacuc

SEQ ID NO: 550244 - RNA, 19 nt, Artificial Sequence
  Synthetic
gggaaaccuccugcuacuc

SEQ ID NO: 550245 - RNA, 20 nt, Artificial Sequence
  Synthetic
ggggaaaccuccugcuacuc

SEQ ID NO: 550246 - RNA, 21 nt, Artificial Sequence
  Synthetic
aggggaaaccuccugcuacuc

SEQ ID NO: 550247 - RNA, 22 nt, Artificial Sequence
  Synthetic
aaggggaaaccuccugcuacuc

SEQ ID NO: 550248 - RNA, 23 nt, Artificial Sequence
  Synthetic
gaaggggaaaccuccugcuacuc

SEQ ID NO: 550249 - RNA, 24 nt, Artificial Sequence
  Synthetic
ggaaggggaaaccuccugcuacuc

SEQ ID NO: 550250 - RNA, 18 nt, Artificial Sequence
  Synthetic
cauauagaauugcuacuc

SEQ ID NO: 550251 - RNA, 19 nt, Artificial Sequence
  Synthetic
ucauauagaauugcuacuc

SEQ ID NO: 550252 - RNA, 20 nt, Artificial Sequence
  Synthetic
aucauauagaauugcuacuc

SEQ ID NO: 550253 - RNA, 21 nt, Artificial Sequence
  Synthetic
uaucauauagaauugcuacuc

SEQ ID NO: 550254 - RNA, 22 nt, Artificial Sequence
  Synthetic
auaucauauagaauugcuacuc

SEQ ID NO: 550255 - RNA, 23 nt, Artificial Sequence
  Synthetic
aauaucauauagaauugcuacuc

SEQ ID NO: 550256 - RNA, 24 nt, Artificial Sequence
  Synthetic
uaauaucauauagaauugcuacuc

SEQ ID NO: 550257 - RNA, 18 nt, Artificial Sequence
  Synthetic
agaggaggaugucuacuc

SEQ ID NO: 550258 - RNA, 19 nt, Artificial Sequence
  Synthetic
cagaggaggaugucuacuc

SEQ ID NO: 550259 - RNA, 20 nt, Artificial Sequence
  Synthetic
gcagaggaggaugucuacuc

SEQ ID NO: 550260 - RNA, 21 nt, Artificial Sequence
  Synthetic
ugcagaggaggaugucuacuc

SEQ ID NO: 550261 - RNA, 22 nt, Artificial Sequence
  Synthetic
uugcagaggaggaugucuacuc

SEQ ID NO: 550262 - RNA, 23 nt, Artificial Sequence
  Synthetic
auugcagaggaggaugucuacuc

SEQ ID NO: 550263 - RNA, 24 nt, Artificial Sequence
  Synthetic
gauugcagaggaggaugucuacuc

SEQ ID NO: 550264 - RNA, 18 nt, Artificial Sequence
  Synthetic
augcgaauaauucuacuc

SEQ ID NO: 550265 - RNA, 19 nt, Artificial Sequence
  Synthetic
aaugcgaauaauucuacuc

SEQ ID NO: 550266 - RNA, 20 nt, Artificial Sequence
  Synthetic
aaaugcgaauaauucuacuc

SEQ ID NO: 550267 - RNA, 21 nt, Artificial Sequence
  Synthetic
gaaaugcgaauaauucuacuc

SEQ ID NO: 550268 - RNA, 22 nt, Artificial Sequence
  Synthetic
ugaaaugcgaauaauucuacuc

SEQ ID NO: 550269 - RNA, 23 nt, Artificial Sequence
  Synthetic
cugaaaugcgaauaauucuacuc

SEQ ID NO: 550270 - RNA, 24 nt, Artificial Sequence
  Synthetic
gcugaaaugcgaauaauucuacuc

SEQ ID NO: 550271 - RNA, 18 nt, Artificial Sequence
  Synthetic
guacaguauauaguacuc

SEQ ID NO: 550272 - RNA, 19 nt, Artificial Sequence
  Synthetic
gguacaguauauaguacuc

SEQ ID NO: 550273 - RNA, 20 nt, Artificial Sequence
  Synthetic
ggguacaguauauaguacuc

SEQ ID NO: 550274 - RNA, 21 nt, Artificial Sequence
  Synthetic
uggguacaguauauaguacuc

SEQ ID NO: 550275 - RNA, 22 nt, Artificial Sequence
  Synthetic
uuggguacaguauauaguacuc

SEQ ID NO: 550276 - RNA, 23 nt, Artificial Sequence
  Synthetic
auuggguacaguauauaguacuc

SEQ ID NO: 550277 - RNA, 24 nt, Artificial Sequence
  Synthetic
uauuggguacaguauauaguacuc

SEQ ID NO: 550278 - RNA, 18 nt, Artificial Sequence
  Synthetic
guacuacgacagguacuc

SEQ ID NO: 550279 - RNA, 19 nt, Artificial Sequence
  Synthetic
aguacuacgacagguacuc

SEQ ID NO: 550280 - RNA, 20 nt, Artificial Sequence
  Synthetic
aaguacuacgacagguacuc

SEQ ID NO: 550281 - RNA, 21 nt, Artificial Sequence
  Synthetic
gaaguacuacgacagguacuc

SEQ ID NO: 550282 - RNA, 22 nt, Artificial Sequence
  Synthetic
ggaaguacuacgacagguacuc

SEQ ID NO: 550283 - RNA, 23 nt, Artificial Sequence
  Synthetic
aggaaguacuacgacagguacuc

SEQ ID NO: 550284 - RNA, 24 nt, Artificial Sequence
  Synthetic
uaggaaguacuacgacagguacuc

SEQ ID NO: 550285 - RNA, 18 nt, Artificial Sequence
  Synthetic
gggaguaauucgguacuc

SEQ ID NO: 550286 - RNA, 19 nt, Artificial Sequence
  Synthetic
agggaguaauucgguacuc

SEQ ID NO: 550287 - RNA, 20 nt, Artificial Sequence
  Synthetic
uagggaguaauucgguacuc

SEQ ID NO: 550288 - RNA, 21 nt, Artificial Sequence
  Synthetic
uuagggaguaauucgguacuc

SEQ ID NO: 550289 - RNA, 22 nt, Artificial Sequence
  Synthetic
uuuagggaguaauucgguacuc

SEQ ID NO: 550290 - RNA, 23 nt, Artificial Sequence
  Synthetic
auuuagggaguaauucgguacuc

SEQ ID NO: 550291 - RNA, 24 nt, Artificial Sequence
  Synthetic
cauuuagggaguaauucgguacuc

SEQ ID NO: 550292 - RNA, 18 nt, Artificial Sequence
  Synthetic
uagauacaacugguacuc

SEQ ID NO: 550293 - RNA, 19 nt, Artificial Sequence
  Synthetic
guagauacaacugguacuc

SEQ ID NO: 550294 - RNA, 20 nt, Artificial Sequence
  Synthetic
gguagauacaacugguacuc

SEQ ID NO: 550295 - RNA, 21 nt, Artificial Sequence
  Synthetic
ugguagauacaacugguacuc

SEQ ID NO: 550296 - RNA, 22 nt, Artificial Sequence
  Synthetic
uugguagauacaacugguacuc

SEQ ID NO: 550297 - RNA, 23 nt, Artificial Sequence
  Synthetic
auugguagauacaacugguacuc

SEQ ID NO: 550298 - RNA, 24 nt, Artificial Sequence
  Synthetic
uauugguagauacaacugguacuc

SEQ ID NO: 550299 - RNA, 18 nt, Artificial Sequence
  Synthetic
aaugguuaauguguacuc

SEQ ID NO: 550300 - RNA, 19 nt, Artificial Sequence
  Synthetic
uaaugguuaauguguacuc

SEQ ID NO: 550301 - RNA, 20 nt, Artificial Sequence
  Synthetic
uuaaugguuaauguguacuc

SEQ ID NO: 550302 - RNA, 21 nt, Artificial Sequence
  Synthetic
cuuaaugguuaauguguacuc

SEQ ID NO: 550303 - RNA, 22 nt, Artificial Sequence
  Synthetic
gcuuaaugguuaauguguacuc

SEQ ID NO: 550304 - RNA, 23 nt, Artificial Sequence
  Synthetic
ugcuuaaugguuaauguguacuc

SEQ ID NO: 550305 - RNA, 24 nt, Artificial Sequence
  Synthetic
gugcuuaaugguuaauguguacuc

SEQ ID NO: 550306 - RNA, 18 nt, Artificial Sequence
  Synthetic
uuaacauauguuguacuc

SEQ ID NO: 550307 - RNA, 19 nt, Artificial Sequence
  Synthetic
cuuaacauauguuguacuc

SEQ ID NO: 550308 - RNA, 20 nt, Artificial Sequence
  Synthetic
acuuaacauauguuguacuc

SEQ ID NO: 550309 - RNA, 21 nt, Artificial Sequence
  Synthetic
uacuuaacauauguuguacuc

SEQ ID NO: 550310 - RNA, 22 nt, Artificial Sequence
  Synthetic
auacuuaacauauguuguacuc

SEQ ID NO: 550311 - RNA, 23 nt, Artificial Sequence
  Synthetic
aauacuuaacauauguuguacuc

SEQ ID NO: 550312 - RNA, 24 nt, Artificial Sequence
  Synthetic
aaauacuuaacauauguuguacuc

SEQ ID NO: 550313 - RNA, 18 nt, Artificial Sequence
  Synthetic
uagagagugaaauuacuc

SEQ ID NO: 550314 - RNA, 19 nt, Artificial Sequence
  Synthetic
auagagagugaaauuacuc

SEQ ID NO: 550315 - RNA, 20 nt, Artificial Sequence
  Synthetic
aauagagagugaaauuacuc

SEQ ID NO: 550316 - RNA, 21 nt, Artificial Sequence
  Synthetic
gaauagagagugaaauuacuc

SEQ ID NO: 550317 - RNA, 22 nt, Artificial Sequence
  Synthetic
ggaauagagagugaaauuacuc

SEQ ID NO: 550318 - RNA, 23 nt, Artificial Sequence
  Synthetic
aggaauagagagugaaauuacuc

SEQ ID NO: 550319 - RNA, 24 nt, Artificial Sequence
  Synthetic
gaggaauagagagugaaauuacuc

SEQ ID NO: 550320 - RNA, 18 nt, Artificial Sequence
  Synthetic
ucagaucggugauuacuc

SEQ ID NO: 550321 - RNA, 19 nt, Artificial Sequence
  Synthetic
aucagaucggugauuacuc

SEQ ID NO: 550322 - RNA, 20 nt, Artificial Sequence
  Synthetic
gaucagaucggugauuacuc

SEQ ID NO: 550323 - RNA, 21 nt, Artificial Sequence
  Synthetic
agaucagaucggugauuacuc

SEQ ID NO: 550324 - RNA, 22 nt, Artificial Sequence
  Synthetic
cagaucagaucggugauuacuc

SEQ ID NO: 550325 - RNA, 23 nt, Artificial Sequence
  Synthetic
acagaucagaucggugauuacuc

SEQ ID NO: 550326 - RNA, 24 nt, Artificial Sequence
  Synthetic
cacagaucagaucggugauuacuc

SEQ ID NO: 550327 - RNA, 18 nt, Artificial Sequence
  Synthetic
cuguaaucccaguuacuc

SEQ ID NO: 550328 - RNA, 19 nt, Artificial Sequence
  Synthetic
ccuguaaucccaguuacuc

SEQ ID NO: 550329 - RNA, 20 nt, Artificial Sequence
  Synthetic
gccuguaaucccaguuacuc

SEQ ID NO: 550330 - RNA, 21 nt, Artificial Sequence
  Synthetic
ugccuguaaucccaguuacuc

SEQ ID NO: 550331 - RNA, 22 nt, Artificial Sequence
  Synthetic
gugccuguaaucccaguuacuc

SEQ ID NO: 550332 - RNA, 23 nt, Artificial Sequence
  Synthetic
ugugccuguaaucccaguuacuc

SEQ ID NO: 550333 - RNA, 24 nt, Artificial Sequence
  Synthetic
augugccuguaaucccaguuacuc

SEQ ID NO: 550334 - RNA, 18 nt, Artificial Sequence
  Synthetic
aaaccauugugguuacuc

SEQ ID NO: 550335 - RNA, 19 nt, Artificial Sequence
  Synthetic
caaaccauugugguuacuc

SEQ ID NO: 550336 - RNA, 20 nt, Artificial Sequence
  Synthetic
gcaaaccauugugguuacuc

SEQ ID NO: 550337 - RNA, 21 nt, Artificial Sequence
  Synthetic
ggcaaaccauugugguuacuc

SEQ ID NO: 550338 - RNA, 22 nt, Artificial Sequence
  Synthetic
uggcaaaccauugugguuacuc

SEQ ID NO: 550339 - RNA, 23 nt, Artificial Sequence
  Synthetic
auggcaaaccauugugguuacuc

SEQ ID NO: 550340 - RNA, 24 nt, Artificial Sequence
  Synthetic
aauggcaaaccauugugguuacuc

SEQ ID NO: 550341 - RNA, 18 nt, Artificial Sequence
  Synthetic
ucccaaaauauguuacuc

SEQ ID NO: 550342 - RNA, 19 nt, Artificial Sequence
  Synthetic
cucccaaaauauguuacuc

SEQ ID NO: 550343 - RNA, 20 nt, Artificial Sequence
  Synthetic
ccucccaaaauauguuacuc

SEQ ID NO: 550344 - RNA, 21 nt, Artificial Sequence
  Synthetic
uccucccaaaauauguuacuc

SEQ ID NO: 550345 - RNA, 22 nt, Artificial Sequence
  Synthetic
uuccucccaaaauauguuacuc

SEQ ID NO: 550346 - RNA, 23 nt, Artificial Sequence
  Synthetic
cuuccucccaaaauauguuacuc

SEQ ID NO: 550347 - RNA, 24 nt, Artificial Sequence
  Synthetic
ucuuccucccaaaauauguuacuc

SEQ ID NO: 550348 - RNA, 18 nt, Artificial Sequence
  Synthetic
uucuuagagcauuuacuc

SEQ ID NO: 550349 - RNA, 19 nt, Artificial Sequence
  Synthetic
uuucuuagagcauuuacuc

SEQ ID NO: 550350 - RNA, 20 nt, Artificial Sequence
  Synthetic
uuuucuuagagcauuuacuc

SEQ ID NO: 550351 - RNA, 21 nt, Artificial Sequence
  Synthetic
cuuuucuuagagcauuuacuc

SEQ ID NO: 550352 - RNA, 22 nt, Artificial Sequence
  Synthetic
ccuuuucuuagagcauuuacuc

SEQ ID NO: 550353 - RNA, 23 nt, Artificial Sequence
  Synthetic
uccuuuucuuagagcauuuacuc

SEQ ID NO: 550354 - RNA, 24 nt, Artificial Sequence
  Synthetic
uuccuuuucuuagagcauuuacuc

SEQ ID NO: 550355 - RNA, 18 nt, Artificial Sequence
  Synthetic
uagcuugcccacaaccuc

SEQ ID NO: 550356 - RNA, 19 nt, Artificial Sequence
  Synthetic
auagcuugcccacaaccuc

SEQ ID NO: 550357 - RNA, 20 nt, Artificial Sequence
  Synthetic
aauagcuugcccacaaccuc

SEQ ID NO: 550358 - RNA, 21 nt, Artificial Sequence
  Synthetic
gaauagcuugcccacaaccuc

SEQ ID NO: 550359 - RNA, 22 nt, Artificial Sequence
  Synthetic
ugaauagcuugcccacaaccuc

SEQ ID NO: 550360 - RNA, 23 nt, Artificial Sequence
  Synthetic
gugaauagcuugcccacaaccuc

SEQ ID NO: 550361 - RNA, 24 nt, Artificial Sequence
  Synthetic
ugugaauagcuugcccacaaccuc

SEQ ID NO: 550362 - RNA, 18 nt, Artificial Sequence
  Synthetic
auagaauuggacaaccuc

SEQ ID NO: 550363 - RNA, 19 nt, Artificial Sequence
  Synthetic
gauagaauuggacaaccuc

SEQ ID NO: 550364 - RNA, 20 nt, Artificial Sequence
  Synthetic
ugauagaauuggacaaccuc

SEQ ID NO: 550365 - RNA, 21 nt, Artificial Sequence
  Synthetic
uugauagaauuggacaaccuc

SEQ ID NO: 550366 - RNA, 22 nt, Artificial Sequence
  Synthetic
auugauagaauuggacaaccuc

SEQ ID NO: 550367 - RNA, 23 nt, Artificial Sequence
  Synthetic
aauugauagaauuggacaaccuc

SEQ ID NO: 550368 - RNA, 24 nt, Artificial Sequence
  Synthetic
uaauugauagaauuggacaaccuc

SEQ ID NO: 550369 - RNA, 18 nt, Artificial Sequence
  Synthetic
ugacugucacccaaccuc

SEQ ID NO: 550370 - RNA, 19 nt, Artificial Sequence
  Synthetic
augacugucacccaaccuc

SEQ ID NO: 550371 - RNA, 20 nt, Artificial Sequence
  Synthetic
gaugacugucacccaaccuc

SEQ ID NO: 550372 - RNA, 21 nt, Artificial Sequence
  Synthetic
agaugacugucacccaaccuc

SEQ ID NO: 550373 - RNA, 22 nt, Artificial Sequence
  Synthetic
aagaugacugucacccaaccuc

SEQ ID NO: 550374 - RNA, 23 nt, Artificial Sequence
  Synthetic
uaagaugacugucacccaaccuc

SEQ ID NO: 550375 - RNA, 24 nt, Artificial Sequence
  Synthetic
cuaagaugacugucacccaaccuc

SEQ ID NO: 550376 - RNA, 18 nt, Artificial Sequence
  Synthetic
aaacaauaaagcaaccuc

SEQ ID NO: 550377 - RNA, 19 nt, Artificial Sequence
  Synthetic
aaaacaauaaagcaaccuc

SEQ ID NO: 550378 - RNA, 20 nt, Artificial Sequence
  Synthetic
uaaaacaauaaagcaaccuc

SEQ ID NO: 550379 - RNA, 21 nt, Artificial Sequence
  Synthetic
auaaaacaauaaagcaaccuc

SEQ ID NO: 550380 - RNA, 22 nt, Artificial Sequence
  Synthetic
aauaaaacaauaaagcaaccuc

SEQ ID NO: 550381 - RNA, 23 nt, Artificial Sequence
  Synthetic
aaauaaaacaauaaagcaaccuc

SEQ ID NO: 550382 - RNA, 24 nt, Artificial Sequence
  Synthetic
aaaauaaaacaauaaagcaaccuc

SEQ ID NO: 550383 - RNA, 18 nt, Artificial Sequence
  Synthetic
aucugucauaucaaccuc

SEQ ID NO: 550384 - RNA, 19 nt, Artificial Sequence
  Synthetic
uaucugucauaucaaccuc

SEQ ID NO: 550385 - RNA, 20 nt, Artificial Sequence
  Synthetic
auaucugucauaucaaccuc

SEQ ID NO: 550386 - RNA, 21 nt, Artificial Sequence
  Synthetic
cauaucugucauaucaaccuc

SEQ ID NO: 550387 - RNA, 22 nt, Artificial Sequence
  Synthetic
gcauaucugucauaucaaccuc

SEQ ID NO: 550388 - RNA, 23 nt, Artificial Sequence
  Synthetic
agcauaucugucauaucaaccuc

SEQ ID NO: 550389 - RNA, 24 nt, Artificial Sequence
  Synthetic
aagcauaucugucauaucaaccuc

SEQ ID NO: 550390 - RNA, 18 nt, Artificial Sequence
  Synthetic
cuuggacuucucaaccuc

SEQ ID NO: 550391 - RNA, 19 nt, Artificial Sequence
  Synthetic
ucuuggacuucucaaccuc

SEQ ID NO: 550392 - RNA, 20 nt, Artificial Sequence
  Synthetic
aucuuggacuucucaaccuc

SEQ ID NO: 550393 - RNA, 21 nt, Artificial Sequence
  Synthetic
gaucuuggacuucucaaccuc

SEQ ID NO: 550394 - RNA, 22 nt, Artificial Sequence
  Synthetic
ugaucuuggacuucucaaccuc

SEQ ID NO: 550395 - RNA, 23 nt, Artificial Sequence
  Synthetic
uugaucuuggacuucucaaccuc

SEQ ID NO: 550396 - RNA, 24 nt, Artificial Sequence
  Synthetic
uuugaucuuggacuucucaaccuc

SEQ ID NO: 550397 - RNA, 18 nt, Artificial Sequence
  Synthetic
cuuguacuucucaaccuc

SEQ ID NO: 550398 - RNA, 19 nt, Artificial Sequence
  Synthetic
ucuuguacuucucaaccuc

SEQ ID NO: 550399 - RNA, 20 nt, Artificial Sequence
  Synthetic
aucuuguacuucucaaccuc

SEQ ID NO: 550400 - RNA, 21 nt, Artificial Sequence
  Synthetic
gaucuuguacuucucaaccuc

SEQ ID NO: 550401 - RNA, 22 nt, Artificial Sequence
  Synthetic
ugaucuuguacuucucaaccuc

SEQ ID NO: 550402 - RNA, 23 nt, Artificial Sequence
  Synthetic
augaucuuguacuucucaaccuc

SEQ ID NO: 550403 - RNA, 24 nt, Artificial Sequence
  Synthetic
caugaucuuguacuucucaaccuc

SEQ ID NO: 550404 - RNA, 18 nt, Artificial Sequence
  Synthetic
uccugauuuacgaaccuc

SEQ ID NO: 550405 - RNA, 19 nt, Artificial Sequence
  Synthetic
guccugauuuacgaaccuc

SEQ ID NO: 550406 - RNA, 20 nt, Artificial Sequence
  Synthetic
uguccugauuuacgaaccuc

SEQ ID NO: 550407 - RNA, 21 nt, Artificial Sequence
  Synthetic
guguccugauuuacgaaccuc

SEQ ID NO: 550408 - RNA, 22 nt, Artificial Sequence
  Synthetic
uguguccugauuuacgaaccuc

SEQ ID NO: 550409 - RNA, 23 nt, Artificial Sequence
  Synthetic
auguguccugauuuacgaaccuc

SEQ ID NO: 550410 - RNA, 24 nt, Artificial Sequence
  Synthetic
cauguguccugauuuacgaaccuc

SEQ ID NO: 550411 - RNA, 18 nt, Artificial Sequence
  Synthetic
uuagccugaaauaaccuc

SEQ ID NO: 550412 - RNA, 19 nt, Artificial Sequence
  Synthetic
auuagccugaaauaaccuc

SEQ ID NO: 550413 - RNA, 20 nt, Artificial Sequence
  Synthetic
uauuagccugaaauaaccuc

SEQ ID NO: 550414 - RNA, 21 nt, Artificial Sequence
  Synthetic
auauuagccugaaauaaccuc

SEQ ID NO: 550415 - RNA, 22 nt, Artificial Sequence
  Synthetic
uauauuagccugaaauaaccuc

SEQ ID NO: 550416 - RNA, 23 nt, Artificial Sequence
  Synthetic
guauauuagccugaaauaaccuc

SEQ ID NO: 550417 - RNA, 24 nt, Artificial Sequence
  Synthetic
uguauauuagccugaaauaaccuc

SEQ ID NO: 550418 - RNA, 18 nt, Artificial Sequence
  Synthetic
auuucaacaagacaccuc

SEQ ID NO: 550419 - RNA, 19 nt, Artificial Sequence
  Synthetic
gauuucaacaagacaccuc

SEQ ID NO: 550420 - RNA, 20 nt, Artificial Sequence
  Synthetic
ugauuucaacaagacaccuc

SEQ ID NO: 550421 - RNA, 21 nt, Artificial Sequence
  Synthetic
augauuucaacaagacaccuc

SEQ ID NO: 550422 - RNA, 22 nt, Artificial Sequence
  Synthetic
aaugauuucaacaagacaccuc

SEQ ID NO: 550423 - RNA, 23 nt, Artificial Sequence
  Synthetic
uaaugauuucaacaagacaccuc

SEQ ID NO: 550424 - RNA, 24 nt, Artificial Sequence
  Synthetic
auaaugauuucaacaagacaccuc

SEQ ID NO: 550425 - RNA, 18 nt, Artificial Sequence
  Synthetic
aagugguccacccaccuc

SEQ ID NO: 550426 - RNA, 19 nt, Artificial Sequence
  Synthetic
caagugguccacccaccuc

SEQ ID NO: 550427 - RNA, 20 nt, Artificial Sequence
  Synthetic
ucaagugguccacccaccuc

SEQ ID NO: 550428 - RNA, 21 nt, Artificial Sequence
  Synthetic
aucaagugguccacccaccuc

SEQ ID NO: 550429 - RNA, 22 nt, Artificial Sequence
  Synthetic
caucaagugguccacccaccuc

SEQ ID NO: 550430 - RNA, 23 nt, Artificial Sequence
  Synthetic
acaucaagugguccacccaccuc

SEQ ID NO: 550431 - RNA, 24 nt, Artificial Sequence
  Synthetic
gacaucaagugguccacccaccuc

SEQ ID NO: 550432 - RNA, 18 nt, Artificial Sequence
  Synthetic
cggagcaguuugcaccuc

SEQ ID NO: 550433 - RNA, 19 nt, Artificial Sequence
  Synthetic
acggagcaguuugcaccuc

SEQ ID NO: 550434 - RNA, 20 nt, Artificial Sequence
  Synthetic
gacggagcaguuugcaccuc

SEQ ID NO: 550435 - RNA, 21 nt, Artificial Sequence
  Synthetic
ggacggagcaguuugcaccuc

SEQ ID NO: 550436 - RNA, 22 nt, Artificial Sequence
  Synthetic
aggacggagcaguuugcaccuc

SEQ ID NO: 550437 - RNA, 23 nt, Artificial Sequence
  Synthetic
aaggacggagcaguuugcaccuc

SEQ ID NO: 550438 - RNA, 24 nt, Artificial Sequence
  Synthetic
gaaggacggagcaguuugcaccuc

SEQ ID NO: 550439 - RNA, 18 nt, Artificial Sequence
  Synthetic
aaaaucccaguucaccuc

SEQ ID NO: 550440 - RNA, 19 nt, Artificial Sequence
  Synthetic
caaaaucccaguucaccuc

SEQ ID NO: 550441 - RNA, 20 nt, Artificial Sequence
  Synthetic
ccaaaaucccaguucaccuc

SEQ ID NO: 550442 - RNA, 21 nt, Artificial Sequence
  Synthetic
cccaaaaucccaguucaccuc

SEQ ID NO: 550443 - RNA, 22 nt, Artificial Sequence
  Synthetic
ucccaaaaucccaguucaccuc

SEQ ID NO: 550444 - RNA, 23 nt, Artificial Sequence
  Synthetic
cucccaaaaucccaguucaccuc

SEQ ID NO: 550445 - RNA, 24 nt, Artificial Sequence
  Synthetic
ucucccaaaaucccaguucaccuc

SEQ ID NO: 550446 - RNA, 18 nt, Artificial Sequence
  Synthetic
ugcaggaaugaagaccuc

SEQ ID NO: 550447 - RNA, 19 nt, Artificial Sequence
  Synthetic
cugcaggaaugaagaccuc

SEQ ID NO: 550448 - RNA, 20 nt, Artificial Sequence
  Synthetic
gcugcaggaaugaagaccuc

SEQ ID NO: 550449 - RNA, 21 nt, Artificial Sequence
  Synthetic
ugcugcaggaaugaagaccuc

SEQ ID NO: 550450 - RNA, 22 nt, Artificial Sequence
  Synthetic
cugcugcaggaaugaagaccuc

SEQ ID NO: 550451 - RNA, 23 nt, Artificial Sequence
  Synthetic
ucugcugcaggaaugaagaccuc

SEQ ID NO: 550452 - RNA, 24 nt, Artificial Sequence
  Synthetic
gucugcugcaggaaugaagaccuc

SEQ ID NO: 550453 - RNA, 18 nt, Artificial Sequence
  Synthetic
uguuaugcagcagaccuc

SEQ ID NO: 550454 - RNA, 19 nt, Artificial Sequence
  Synthetic
auguuaugcagcagaccuc

SEQ ID NO: 550455 - RNA, 20 nt, Artificial Sequence
  Synthetic
aauguuaugcagcagaccuc

SEQ ID NO: 550456 - RNA, 21 nt, Artificial Sequence
  Synthetic
caauguuaugcagcagaccuc

SEQ ID NO: 550457 - RNA, 22 nt, Artificial Sequence
  Synthetic
acaauguuaugcagcagaccuc

SEQ ID NO: 550458 - RNA, 23 nt, Artificial Sequence
  Synthetic
cacaauguuaugcagcagaccuc

SEQ ID NO: 550459 - RNA, 24 nt, Artificial Sequence
  Synthetic
gcacaauguuaugcagcagaccuc

SEQ ID NO: 550460 - RNA, 18 nt, Artificial Sequence
  Synthetic
cauggcuggggagaccuc

SEQ ID NO: 550461 - RNA, 19 nt, Artificial Sequence
  Synthetic
gcauggcuggggagaccuc

SEQ ID NO: 550462 - RNA, 20 nt, Artificial Sequence
  Synthetic
agcauggcuggggagaccuc

SEQ ID NO: 550463 - RNA, 21 nt, Artificial Sequence
  Synthetic
cagcauggcuggggagaccuc

SEQ ID NO: 550464 - RNA, 22 nt, Artificial Sequence
  Synthetic
ucagcauggcuggggagaccuc

SEQ ID NO: 550465 - RNA, 23 nt, Artificial Sequence
  Synthetic
uucagcauggcuggggagaccuc

SEQ ID NO: 550466 - RNA, 24 nt, Artificial Sequence
  Synthetic
guucagcauggcuggggagaccuc

SEQ ID NO: 550467 - RNA, 18 nt, Artificial Sequence
  Synthetic
uguugugggaaggaccuc

SEQ ID NO: 550468 - RNA, 19 nt, Artificial Sequence
  Synthetic
auguugugggaaggaccuc

SEQ ID NO: 550469 - RNA, 20 nt, Artificial Sequence
  Synthetic
cauguugugggaaggaccuc

SEQ ID NO: 550470 - RNA, 21 nt, Artificial Sequence
  Synthetic
acauguugugggaaggaccuc

SEQ ID NO: 550471 - RNA, 22 nt, Artificial Sequence
  Synthetic
uacauguugugggaaggaccuc

SEQ ID NO: 550472 - RNA, 23 nt, Artificial Sequence
  Synthetic
cuacauguugugggaaggaccuc

SEQ ID NO: 550473 - RNA, 24 nt, Artificial Sequence
  Synthetic
ccuacauguugugggaaggaccuc

SEQ ID NO: 550474 - RNA, 18 nt, Artificial Sequence
  Synthetic
gcacuggccccugaccuc

SEQ ID NO: 550475 - RNA, 19 nt, Artificial Sequence
  Synthetic
ggcacuggccccugaccuc

SEQ ID NO: 550476 - RNA, 20 nt, Artificial Sequence
  Synthetic
uggcacuggccccugaccuc

SEQ ID NO: 550477 - RNA, 21 nt, Artificial Sequence
  Synthetic
guggcacuggccccugaccuc

SEQ ID NO: 550478 - RNA, 22 nt, Artificial Sequence
  Synthetic
gguggcacuggccccugaccuc

SEQ ID NO: 550479 - RNA, 23 nt, Artificial Sequence
  Synthetic
ugguggcacuggccccugaccuc

SEQ ID NO: 550480 - RNA, 24 nt, Artificial Sequence
  Synthetic
gugguggcacuggccccugaccuc

SEQ ID NO: 550481 - RNA, 18 nt, Artificial Sequence
  Synthetic
caugcugugagugaccuc

SEQ ID NO: 550482 - RNA, 19 nt, Artificial Sequence
  Synthetic
acaugcugugagugaccuc

SEQ ID NO: 550483 - RNA, 20 nt, Artificial Sequence
  Synthetic
cacaugcugugagugaccuc

SEQ ID NO: 550484 - RNA, 21 nt, Artificial Sequence
  Synthetic
acacaugcugugagugaccuc

SEQ ID NO: 550485 - RNA, 22 nt, Artificial Sequence
  Synthetic
aacacaugcugugagugaccuc

SEQ ID NO: 550486 - RNA, 23 nt, Artificial Sequence
  Synthetic
caacacaugcugugagugaccuc

SEQ ID NO: 550487 - RNA, 24 nt, Artificial Sequence
  Synthetic
gcaacacaugcugugagugaccuc

SEQ ID NO: 550488 - RNA, 18 nt, Artificial Sequence
  Synthetic
caccauagacuugaccuc

SEQ ID NO: 550489 - RNA, 19 nt, Artificial Sequence
  Synthetic
ucaccauagacuugaccuc

SEQ ID NO: 550490 - RNA, 20 nt, Artificial Sequence
  Synthetic
cucaccauagacuugaccuc

SEQ ID NO: 550491 - RNA, 21 nt, Artificial Sequence
  Synthetic
gcucaccauagacuugaccuc

SEQ ID NO: 550492 - RNA, 22 nt, Artificial Sequence
  Synthetic
agcucaccauagacuugaccuc

SEQ ID NO: 550493 - RNA, 23 nt, Artificial Sequence
  Synthetic
cagcucaccauagacuugaccuc

SEQ ID NO: 550494 - RNA, 24 nt, Artificial Sequence
  Synthetic
acagcucaccauagacuugaccuc

SEQ ID NO: 550495 - RNA, 18 nt, Artificial Sequence
  Synthetic
uacugccgccuugaccuc

SEQ ID NO: 550496 - RNA, 19 nt, Artificial Sequence
  Synthetic
uuacugccgccuugaccuc

SEQ ID NO: 550497 - RNA, 20 nt, Artificial Sequence
  Synthetic
cuuacugccgccuugaccuc

SEQ ID NO: 550498 - RNA, 21 nt, Artificial Sequence
  Synthetic
gcuuacugccgccuugaccuc

SEQ ID NO: 550499 - RNA, 22 nt, Artificial Sequence
  Synthetic
ggcuuacugccgccuugaccuc

SEQ ID NO: 550500 - RNA, 23 nt, Artificial Sequence
  Synthetic
uggcuuacugccgccuugaccuc

SEQ ID NO: 550501 - RNA, 24 nt, Artificial Sequence
  Synthetic
auggcuuacugccgccuugaccuc

SEQ ID NO: 550502 - RNA, 18 nt, Artificial Sequence
  Synthetic
caauuuuguguugaccuc

SEQ ID NO: 550503 - RNA, 19 nt, Artificial Sequence
  Synthetic
ccaauuuuguguugaccuc

SEQ ID NO: 550504 - RNA, 20 nt, Artificial Sequence
  Synthetic
cccaauuuuguguugaccuc

SEQ ID NO: 550505 - RNA, 21 nt, Artificial Sequence
  Synthetic
acccaauuuuguguugaccuc

SEQ ID NO: 550506 - RNA, 22 nt, Artificial Sequence
  Synthetic
gacccaauuuuguguugaccuc

SEQ ID NO: 550507 - RNA, 23 nt, Artificial Sequence
  Synthetic
agacccaauuuuguguugaccuc

SEQ ID NO: 550508 - RNA, 24 nt, Artificial Sequence
  Synthetic
aagacccaauuuuguguugaccuc

SEQ ID NO: 550509 - RNA, 18 nt, Artificial Sequence
  Synthetic
acaaauuucagauaccuc

SEQ ID NO: 550510 - RNA, 19 nt, Artificial Sequence
  Synthetic
aacaaauuucagauaccuc

SEQ ID NO: 550511 - RNA, 20 nt, Artificial Sequence
  Synthetic
aaacaaauuucagauaccuc

SEQ ID NO: 550512 - RNA, 21 nt, Artificial Sequence
  Synthetic
caaacaaauuucagauaccuc

SEQ ID NO: 550513 - RNA, 22 nt, Artificial Sequence
  Synthetic
gcaaacaaauuucagauaccuc

SEQ ID NO: 550514 - RNA, 23 nt, Artificial Sequence
  Synthetic
ugcaaacaaauuucagauaccuc

SEQ ID NO: 550515 - RNA, 24 nt, Artificial Sequence
  Synthetic
cugcaaacaaauuucagauaccuc

SEQ ID NO: 550516 - RNA, 18 nt, Artificial Sequence
  Synthetic
accaaugcuugauaccuc

SEQ ID NO: 550517 - RNA, 19 nt, Artificial Sequence
  Synthetic
uaccaaugcuugauaccuc

SEQ ID NO: 550518 - RNA, 20 nt, Artificial Sequence
  Synthetic
uuaccaaugcuugauaccuc

SEQ ID NO: 550519 - RNA, 21 nt, Artificial Sequence
  Synthetic
guuaccaaugcuugauaccuc

SEQ ID NO: 550520 - RNA, 22 nt, Artificial Sequence
  Synthetic
aguuaccaaugcuugauaccuc

SEQ ID NO: 550521 - RNA, 23 nt, Artificial Sequence
  Synthetic
uaguuaccaaugcuugauaccuc

SEQ ID NO: 550522 - RNA, 24 nt, Artificial Sequence
  Synthetic
auaguuaccaaugcuugauaccuc

SEQ ID NO: 550523 - RNA, 18 nt, Artificial Sequence
  Synthetic
uaccuaacauuauaccuc

SEQ ID NO: 550524 - RNA, 19 nt, Artificial Sequence
  Synthetic
auaccuaacauuauaccuc

SEQ ID NO: 550525 - RNA, 20 nt, Artificial Sequence
  Synthetic
aauaccuaacauuauaccuc

SEQ ID NO: 550526 - RNA, 21 nt, Artificial Sequence
  Synthetic
aaauaccuaacauuauaccuc

SEQ ID NO: 550527 - RNA, 22 nt, Artificial Sequence
  Synthetic
gaaauaccuaacauuauaccuc

SEQ ID NO: 550528 - RNA, 23 nt, Artificial Sequence
  Synthetic
ugaaauaccuaacauuauaccuc

SEQ ID NO: 550529 - RNA, 24 nt, Artificial Sequence
  Synthetic
augaaauaccuaacauuauaccuc

SEQ ID NO: 550530 - RNA, 18 nt, Artificial Sequence
  Synthetic
cgagagacuguguaccuc

SEQ ID NO: 550531 - RNA, 19 nt, Artificial Sequence
  Synthetic
ucgagagacuguguaccuc

SEQ ID NO: 550532 - RNA, 20 nt, Artificial Sequence
  Synthetic
aucgagagacuguguaccuc

SEQ ID NO: 550533 - RNA, 21 nt, Artificial Sequence
  Synthetic
uaucgagagacuguguaccuc

SEQ ID NO: 550534 - RNA, 22 nt, Artificial Sequence
  Synthetic
cuaucgagagacuguguaccuc

SEQ ID NO: 550535 - RNA, 23 nt, Artificial Sequence
  Synthetic
ucuaucgagagacuguguaccuc

SEQ ID NO: 550536 - RNA, 24 nt, Artificial Sequence
  Synthetic
uucuaucgagagacuguguaccuc

SEQ ID NO: 550537 - RNA, 18 nt, Artificial Sequence
  Synthetic
ccauauuuagauuaccuc

SEQ ID NO: 550538 - RNA, 19 nt, Artificial Sequence
  Synthetic
gccauauuuagauuaccuc

SEQ ID NO: 550539 - RNA, 20 nt, Artificial Sequence
  Synthetic
ggccauauuuagauuaccuc

SEQ ID NO: 550540 - RNA, 21 nt, Artificial Sequence
  Synthetic
aggccauauuuagauuaccuc

SEQ ID NO: 550541 - RNA, 22 nt, Artificial Sequence
  Synthetic
gaggccauauuuagauuaccuc

SEQ ID NO: 550542 - RNA, 23 nt, Artificial Sequence
  Synthetic
ggaggccauauuuagauuaccuc

SEQ ID NO: 550543 - RNA, 24 nt, Artificial Sequence
  Synthetic
aggaggccauauuuagauuaccuc

SEQ ID NO: 550544 - RNA, 18 nt, Artificial Sequence
  Synthetic
uuccuuguuccuuaccuc

SEQ ID NO: 550545 - RNA, 19 nt, Artificial Sequence
  Synthetic
cuuccuuguuccuuaccuc

SEQ ID NO: 550546 - RNA, 20 nt, Artificial Sequence
  Synthetic
ucuuccuuguuccuuaccuc

SEQ ID NO: 550547 - RNA, 21 nt, Artificial Sequence
  Synthetic
cucuuccuuguuccuuaccuc

SEQ ID NO: 550548 - RNA, 22 nt, Artificial Sequence
  Synthetic
ucucuuccuuguuccuuaccuc

SEQ ID NO: 550549 - RNA, 23 nt, Artificial Sequence
  Synthetic
gucucuuccuuguuccuuaccuc

SEQ ID NO: 550550 - RNA, 24 nt, Artificial Sequence
  Synthetic
ggucucuuccuuguuccuuaccuc

SEQ ID NO: 550551 - RNA, 18 nt, Artificial Sequence
  Synthetic
acuguuuucauuuaccuc

SEQ ID NO: 550552 - RNA, 19 nt, Artificial Sequence
  Synthetic
cacuguuuucauuuaccuc

SEQ ID NO: 550553 - RNA, 20 nt, Artificial Sequence
  Synthetic
ccacuguuuucauuuaccuc

SEQ ID NO: 550554 - RNA, 21 nt, Artificial Sequence
  Synthetic
cccacuguuuucauuuaccuc

SEQ ID NO: 550555 - RNA, 22 nt, Artificial Sequence
  Synthetic
ucccacuguuuucauuuaccuc

SEQ ID NO: 550556 - RNA, 23 nt, Artificial Sequence
  Synthetic
cucccacuguuuucauuuaccuc

SEQ ID NO: 550557 - RNA, 24 nt, Artificial Sequence
  Synthetic
gcucccacuguuuucauuuaccuc

SEQ ID NO: 550558 - RNA, 18 nt, Artificial Sequence
  Synthetic
ucauugccucccacccuc

SEQ ID NO: 550559 - RNA, 19 nt, Artificial Sequence
  Synthetic
aucauugccucccacccuc

SEQ ID NO: 550560 - RNA, 20 nt, Artificial Sequence
  Synthetic
gaucauugccucccacccuc

SEQ ID NO: 550561 - RNA, 21 nt, Artificial Sequence
  Synthetic
agaucauugccucccacccuc

SEQ ID NO: 550562 - RNA, 22 nt, Artificial Sequence
  Synthetic
gagaucauugccucccacccuc

SEQ ID NO: 550563 - RNA, 23 nt, Artificial Sequence
  Synthetic
ugagaucauugccucccacccuc

SEQ ID NO: 550564 - RNA, 24 nt, Artificial Sequence
  Synthetic
gugagaucauugccucccacccuc

SEQ ID NO: 550565 - RNA, 18 nt, Artificial Sequence
  Synthetic
ccagcacaguucacccuc

SEQ ID NO: 550566 - RNA, 19 nt, Artificial Sequence
  Synthetic
uccagcacaguucacccuc

SEQ ID NO: 550567 - RNA, 20 nt, Artificial Sequence
  Synthetic
cuccagcacaguucacccuc

SEQ ID NO: 550568 - RNA, 21 nt, Artificial Sequence
  Synthetic
ucuccagcacaguucacccuc

SEQ ID NO: 550569 - RNA, 22 nt, Artificial Sequence
  Synthetic
uucuccagcacaguucacccuc

SEQ ID NO: 550570 - RNA, 23 nt, Artificial Sequence
  Synthetic
uuucuccagcacaguucacccuc

SEQ ID NO: 550571 - RNA, 24 nt, Artificial Sequence
  Synthetic
auuucuccagcacaguucacccuc

SEQ ID NO: 550572 - RNA, 18 nt, Artificial Sequence
  Synthetic
gagaccuuagagacccuc

SEQ ID NO: 550573 - RNA, 19 nt, Artificial Sequence
  Synthetic
ugagaccuuagagacccuc

SEQ ID NO: 550574 - RNA, 20 nt, Artificial Sequence
  Synthetic
gugagaccuuagagacccuc

SEQ ID NO: 550575 - RNA, 21 nt, Artificial Sequence
  Synthetic
ugugagaccuuagagacccuc

SEQ ID NO: 550576 - RNA, 22 nt, Artificial Sequence
  Synthetic
cugugagaccuuagagacccuc

SEQ ID NO: 550577 - RNA, 23 nt, Artificial Sequence
  Synthetic
acugugagaccuuagagacccuc

SEQ ID NO: 550578 - RNA, 24 nt, Artificial Sequence
  Synthetic
aacugugagaccuuagagacccuc

SEQ ID NO: 550579 - RNA, 18 nt, Artificial Sequence
  Synthetic
agaagaggguagacccuc

SEQ ID NO: 550580 - RNA, 19 nt, Artificial Sequence
  Synthetic
uagaagaggguagacccuc

SEQ ID NO: 550581 - RNA, 20 nt, Artificial Sequence
  Synthetic
guagaagaggguagacccuc

SEQ ID NO: 550582 - RNA, 21 nt, Artificial Sequence
  Synthetic
aguagaagaggguagacccuc

SEQ ID NO: 550583 - RNA, 22 nt, Artificial Sequence
  Synthetic
gaguagaagaggguagacccuc

SEQ ID NO: 550584 - RNA, 23 nt, Artificial Sequence
  Synthetic
agaguagaagaggguagacccuc

SEQ ID NO: 550585 - RNA, 24 nt, Artificial Sequence
  Synthetic
cagaguagaagaggguagacccuc

SEQ ID NO: 550586 - RNA, 18 nt, Artificial Sequence
  Synthetic
ugcaaagucaugacccuc

SEQ ID NO: 550587 - RNA, 19 nt, Artificial Sequence
  Synthetic
augcaaagucaugacccuc

SEQ ID NO: 550588 - RNA, 20 nt, Artificial Sequence
  Synthetic
aaugcaaagucaugacccuc

SEQ ID NO: 550589 - RNA, 21 nt, Artificial Sequence
  Synthetic
gaaugcaaagucaugacccuc

SEQ ID NO: 550590 - RNA, 22 nt, Artificial Sequence
  Synthetic
ggaaugcaaagucaugacccuc

SEQ ID NO: 550591 - RNA, 23 nt, Artificial Sequence
  Synthetic
aggaaugcaaagucaugacccuc

SEQ ID NO: 550592 - RNA, 24 nt, Artificial Sequence
  Synthetic
aaggaaugcaaagucaugacccuc

SEQ ID NO: 550593 - RNA, 18 nt, Artificial Sequence
  Synthetic
uuacagaaacugacccuc

SEQ ID NO: 550594 - RNA, 19 nt, Artificial Sequence
  Synthetic
auuacagaaacugacccuc

SEQ ID NO: 550595 - RNA, 20 nt, Artificial Sequence
  Synthetic
gauuacagaaacugacccuc

SEQ ID NO: 550596 - RNA, 21 nt, Artificial Sequence
  Synthetic
agauuacagaaacugacccuc

SEQ ID NO: 550597 - RNA, 22 nt, Artificial Sequence
  Synthetic
gagauuacagaaacugacccuc

SEQ ID NO: 550598 - RNA, 23 nt, Artificial Sequence
  Synthetic
agagauuacagaaacugacccuc

SEQ ID NO: 550599 - RNA, 24 nt, Artificial Sequence
  Synthetic
aagagauuacagaaacugacccuc

SEQ ID NO: 550600 - RNA, 18 nt, Artificial Sequence
  Synthetic
aaagaaagaacaccccuc

SEQ ID NO: 550601 - RNA, 19 nt, Artificial Sequence
  Synthetic
gaaagaaagaacaccccuc

SEQ ID NO: 550602 - RNA, 20 nt, Artificial Sequence
  Synthetic
ugaaagaaagaacaccccuc

SEQ ID NO: 550603 - RNA, 21 nt, Artificial Sequence
  Synthetic
cugaaagaaagaacaccccuc

SEQ ID NO: 550604 - RNA, 22 nt, Artificial Sequence
  Synthetic
ccugaaagaaagaacaccccuc

SEQ ID NO: 550605 - RNA, 23 nt, Artificial Sequence
  Synthetic
accugaaagaaagaacaccccuc

SEQ ID NO: 550606 - RNA, 24 nt, Artificial Sequence
  Synthetic
aaccugaaagaaagaacaccccuc

SEQ ID NO: 550607 - RNA, 18 nt, Artificial Sequence
  Synthetic
uaaaaaggacgcccccuc

SEQ ID NO: 550608 - RNA, 19 nt, Artificial Sequence
  Synthetic
guaaaaaggacgcccccuc

SEQ ID NO: 550609 - RNA, 20 nt, Artificial Sequence
  Synthetic
gguaaaaaggacgcccccuc

SEQ ID NO: 550610 - RNA, 21 nt, Artificial Sequence
  Synthetic
ugguaaaaaggacgcccccuc

SEQ ID NO: 550611 - RNA, 22 nt, Artificial Sequence
  Synthetic
augguaaaaaggacgcccccuc

SEQ ID NO: 550612 - RNA, 23 nt, Artificial Sequence
  Synthetic
aaugguaaaaaggacgcccccuc

SEQ ID NO: 550613 - RNA, 24 nt, Artificial Sequence
  Synthetic
aaaugguaaaaaggacgcccccuc

SEQ ID NO: 550614 - RNA, 18 nt, Artificial Sequence
  Synthetic
gauaugaauugcccccuc

SEQ ID NO: 550615 - RNA, 19 nt, Artificial Sequence
  Synthetic
ggauaugaauugcccccuc

SEQ ID NO: 550616 - RNA, 20 nt, Artificial Sequence
  Synthetic
uggauaugaauugcccccuc

SEQ ID NO: 550617 - RNA, 21 nt, Artificial Sequence
  Synthetic
guggauaugaauugcccccuc

SEQ ID NO: 550618 - RNA, 22 nt, Artificial Sequence
  Synthetic
aguggauaugaauugcccccuc

SEQ ID NO: 550619 - RNA, 23 nt, Artificial Sequence
  Synthetic
aaguggauaugaauugcccccuc

SEQ ID NO: 550620 - RNA, 24 nt, Artificial Sequence
  Synthetic
gaaguggauaugaauugcccccuc

SEQ ID NO: 550621 - RNA, 18 nt, Artificial Sequence
  Synthetic
agaaugaauuucccccuc

SEQ ID NO: 550622 - RNA, 19 nt, Artificial Sequence
  Synthetic
cagaaugaauuucccccuc

SEQ ID NO: 550623 - RNA, 20 nt, Artificial Sequence
  Synthetic
acagaaugaauuucccccuc

SEQ ID NO: 550624 - RNA, 21 nt, Artificial Sequence
  Synthetic
cacagaaugaauuucccccuc

SEQ ID NO: 550625 - RNA, 22 nt, Artificial Sequence
  Synthetic
acacagaaugaauuucccccuc

SEQ ID NO: 550626 - RNA, 23 nt, Artificial Sequence
  Synthetic
aacacagaaugaauuucccccuc

SEQ ID NO: 550627 - RNA, 24 nt, Artificial Sequence
  Synthetic
caacacagaaugaauuucccccuc

SEQ ID NO: 550628 - RNA, 18 nt, Artificial Sequence
  Synthetic
aaggauugaaagccccuc

SEQ ID NO: 550629 - RNA, 19 nt, Artificial Sequence
  Synthetic
caaggauugaaagccccuc

SEQ ID NO: 550630 - RNA, 20 nt, Artificial Sequence
  Synthetic
gcaaggauugaaagccccuc

SEQ ID NO: 550631 - RNA, 21 nt, Artificial Sequence
  Synthetic
ggcaaggauugaaagccccuc

SEQ ID NO: 550632 - RNA, 22 nt, Artificial Sequence
  Synthetic
gggcaaggauugaaagccccuc

SEQ ID NO: 550633 - RNA, 23 nt, Artificial Sequence
  Synthetic
ugggcaaggauugaaagccccuc

SEQ ID NO: 550634 - RNA, 24 nt, Artificial Sequence
  Synthetic
augggcaaggauugaaagccccuc

SEQ ID NO: 550635 - RNA, 18 nt, Artificial Sequence
  Synthetic
cuuuauuuccagccccuc

SEQ ID NO: 550636 - RNA, 19 nt, Artificial Sequence
  Synthetic
ccuuuauuuccagccccuc

SEQ ID NO: 550637 - RNA, 20 nt, Artificial Sequence
  Synthetic
cccuuuauuuccagccccuc

SEQ ID NO: 550638 - RNA, 21 nt, Artificial Sequence
  Synthetic
ccccuuuauuuccagccccuc

SEQ ID NO: 550639 - RNA, 22 nt, Artificial Sequence
  Synthetic
accccuuuauuuccagccccuc

SEQ ID NO: 550640 - RNA, 23 nt, Artificial Sequence
  Synthetic
aaccccuuuauuuccagccccuc

SEQ ID NO: 550641 - RNA, 24 nt, Artificial Sequence
  Synthetic
caaccccuuuauuuccagccccuc

SEQ ID NO: 550642 - RNA, 18 nt, Artificial Sequence
  Synthetic
cucauuagugguccccuc

SEQ ID NO: 550643 - RNA, 19 nt, Artificial Sequence
  Synthetic
ucucauuagugguccccuc

SEQ ID NO: 550644 - RNA, 20 nt, Artificial Sequence
  Synthetic
cucucauuagugguccccuc

SEQ ID NO: 550645 - RNA, 21 nt, Artificial Sequence
  Synthetic
ucucucauuagugguccccuc

SEQ ID NO: 550646 - RNA, 22 nt, Artificial Sequence
  Synthetic
cucucucauuagugguccccuc

SEQ ID NO: 550647 - RNA, 23 nt, Artificial Sequence
  Synthetic
ccucucucauuagugguccccuc

SEQ ID NO: 550648 - RNA, 24 nt, Artificial Sequence
  Synthetic
uccucucucauuagugguccccuc

SEQ ID NO: 550649 - RNA, 18 nt, Artificial Sequence
  Synthetic
gcaugugagugagcccuc

SEQ ID NO: 550650 - RNA, 19 nt, Artificial Sequence
  Synthetic
ggcaugugagugagcccuc

SEQ ID NO: 550651 - RNA, 20 nt, Artificial Sequence
  Synthetic
aggcaugugagugagcccuc

SEQ ID NO: 550652 - RNA, 21 nt, Artificial Sequence
  Synthetic
caggcaugugagugagcccuc

SEQ ID NO: 550653 - RNA, 22 nt, Artificial Sequence
  Synthetic
ccaggcaugugagugagcccuc

SEQ ID NO: 550654 - RNA, 23 nt, Artificial Sequence
  Synthetic
uccaggcaugugagugagcccuc

SEQ ID NO: 550655 - RNA, 24 nt, Artificial Sequence
  Synthetic
uuccaggcaugugagugagcccuc

SEQ ID NO: 550656 - RNA, 18 nt, Artificial Sequence
  Synthetic
aagaagccugaggcccuc

SEQ ID NO: 550657 - RNA, 19 nt, Artificial Sequence
  Synthetic
gaagaagccugaggcccuc

SEQ ID NO: 550658 - RNA, 20 nt, Artificial Sequence
  Synthetic
ggaagaagccugaggcccuc

SEQ ID NO: 550659 - RNA, 21 nt, Artificial Sequence
  Synthetic
uggaagaagccugaggcccuc

SEQ ID NO: 550660 - RNA, 22 nt, Artificial Sequence
  Synthetic
auggaagaagccugaggcccuc

SEQ ID NO: 550661 - RNA, 23 nt, Artificial Sequence
  Synthetic
aauggaagaagccugaggcccuc

SEQ ID NO: 550662 - RNA, 24 nt, Artificial Sequence
  Synthetic
gaauggaagaagccugaggcccuc

SEQ ID NO: 550663 - RNA, 18 nt, Artificial Sequence
  Synthetic
agagaguccucugcccuc

SEQ ID NO: 550664 - RNA, 19 nt, Artificial Sequence
  Synthetic
aagagaguccucugcccuc

SEQ ID NO: 550665 - RNA, 20 nt, Artificial Sequence
  Synthetic
uaagagaguccucugcccuc

SEQ ID NO: 550666 - RNA, 21 nt, Artificial Sequence
  Synthetic
auaagagaguccucugcccuc

SEQ ID NO: 550667 - RNA, 22 nt, Artificial Sequence
  Synthetic
aauaagagaguccucugcccuc

SEQ ID NO: 550668 - RNA, 23 nt, Artificial Sequence
  Synthetic
caauaagagaguccucugcccuc

SEQ ID NO: 550669 - RNA, 24 nt, Artificial Sequence
  Synthetic
acaauaagagaguccucugcccuc

SEQ ID NO: 550670 - RNA, 18 nt, Artificial Sequence
  Synthetic
aagauugcuuaaucccuc

SEQ ID NO: 550671 - RNA, 19 nt, Artificial Sequence
  Synthetic
gaagauugcuuaaucccuc

SEQ ID NO: 550672 - RNA, 20 nt, Artificial Sequence
  Synthetic
agaagauugcuuaaucccuc

SEQ ID NO: 550673 - RNA, 21 nt, Artificial Sequence
  Synthetic
gagaagauugcuuaaucccuc

SEQ ID NO: 550674 - RNA, 22 nt, Artificial Sequence
  Synthetic
agagaagauugcuuaaucccuc

SEQ ID NO: 550675 - RNA, 23 nt, Artificial Sequence
  Synthetic
cagagaagauugcuuaaucccuc

SEQ ID NO: 550676 - RNA, 24 nt, Artificial Sequence
  Synthetic
ucagagaagauugcuuaaucccuc

SEQ ID NO: 550677 - RNA, 18 nt, Artificial Sequence
  Synthetic
aacuaauggauaucccuc

SEQ ID NO: 550678 - RNA, 19 nt, Artificial Sequence
  Synthetic
uaacuaauggauaucccuc

SEQ ID NO: 550679 - RNA, 20 nt, Artificial Sequence
  Synthetic
uuaacuaauggauaucccuc

SEQ ID NO: 550680 - RNA, 21 nt, Artificial Sequence
  Synthetic
cuuaacuaauggauaucccuc

SEQ ID NO: 550681 - RNA, 22 nt, Artificial Sequence
  Synthetic
ccuuaacuaauggauaucccuc

SEQ ID NO: 550682 - RNA, 23 nt, Artificial Sequence
  Synthetic
uccuuaacuaauggauaucccuc

SEQ ID NO: 550683 - RNA, 24 nt, Artificial Sequence
  Synthetic
auccuuaacuaauggauaucccuc

SEQ ID NO: 550684 - RNA, 18 nt, Artificial Sequence
  Synthetic
aaccuuuuugccucccuc

SEQ ID NO: 550685 - RNA, 19 nt, Artificial Sequence
  Synthetic
aaaccuuuuugccucccuc

SEQ ID NO: 550686 - RNA, 20 nt, Artificial Sequence
  Synthetic
caaaccuuuuugccucccuc

SEQ ID NO: 550687 - RNA, 21 nt, Artificial Sequence
  Synthetic
ccaaaccuuuuugccucccuc

SEQ ID NO: 550688 - RNA, 22 nt, Artificial Sequence
  Synthetic
accaaaccuuuuugccucccuc

SEQ ID NO: 550689 - RNA, 23 nt, Artificial Sequence
  Synthetic
caccaaaccuuuuugccucccuc

SEQ ID NO: 550690 - RNA, 24 nt, Artificial Sequence
  Synthetic
ucaccaaaccuuuuugccucccuc

SEQ ID NO: 550691 - RNA, 18 nt, Artificial Sequence
  Synthetic
uuaguuuucaauucccuc

SEQ ID NO: 550692 - RNA, 19 nt, Artificial Sequence
  Synthetic
uuuaguuuucaauucccuc

SEQ ID NO: 550693 - RNA, 20 nt, Artificial Sequence
  Synthetic
cuuuaguuuucaauucccuc

SEQ ID NO: 550694 - RNA, 21 nt, Artificial Sequence
  Synthetic
ucuuuaguuuucaauucccuc

SEQ ID NO: 550695 - RNA, 22 nt, Artificial Sequence
  Synthetic
uucuuuaguuuucaauucccuc

SEQ ID NO: 550696 - RNA, 23 nt, Artificial Sequence
  Synthetic
guucuuuaguuuucaauucccuc

SEQ ID NO: 550697 - RNA, 24 nt, Artificial Sequence
  Synthetic
gguucuuuaguuuucaauucccuc

SEQ ID NO: 550698 - RNA, 18 nt, Artificial Sequence
  Synthetic
auuuauuuucuuucccuc

SEQ ID NO: 550699 - RNA, 19 nt, Artificial Sequence
  Synthetic
cauuuauuuucuuucccuc

SEQ ID NO: 550700 - RNA, 20 nt, Artificial Sequence
  Synthetic
ucauuuauuuucuuucccuc

SEQ ID NO: 550701 - RNA, 21 nt, Artificial Sequence
  Synthetic
gucauuuauuuucuuucccuc

SEQ ID NO: 550702 - RNA, 22 nt, Artificial Sequence
  Synthetic
ggucauuuauuuucuuucccuc

SEQ ID NO: 550703 - RNA, 23 nt, Artificial Sequence
  Synthetic
aggucauuuauuuucuuucccuc

SEQ ID NO: 550704 - RNA, 24 nt, Artificial Sequence
  Synthetic
gaggucauuuauuuucuuucccuc

SEQ ID NO: 550705 - RNA, 18 nt, Artificial Sequence
  Synthetic
gaagaaugcagaagccuc

SEQ ID NO: 550706 - RNA, 19 nt, Artificial Sequence
  Synthetic
ugaagaaugcagaagccuc

SEQ ID NO: 550707 - RNA, 20 nt, Artificial Sequence
  Synthetic
gugaagaaugcagaagccuc

SEQ ID NO: 550708 - RNA, 21 nt, Artificial Sequence
  Synthetic
cgugaagaaugcagaagccuc

SEQ ID NO: 550709 - RNA, 22 nt, Artificial Sequence
  Synthetic
acgugaagaaugcagaagccuc

SEQ ID NO: 550710 - RNA, 23 nt, Artificial Sequence
  Synthetic
uacgugaagaaugcagaagccuc

SEQ ID NO: 550711 - RNA, 24 nt, Artificial Sequence
  Synthetic
cuacgugaagaaugcagaagccuc

SEQ ID NO: 550712 - RNA, 18 nt, Artificial Sequence
  Synthetic
agcguuauccacagccuc

SEQ ID NO: 550713 - RNA, 19 nt, Artificial Sequence
  Synthetic
cagcguuauccacagccuc

SEQ ID NO: 550714 - RNA, 20 nt, Artificial Sequence
  Synthetic
ucagcguuauccacagccuc

SEQ ID NO: 550715 - RNA, 21 nt, Artificial Sequence
  Synthetic
gucagcguuauccacagccuc

SEQ ID NO: 550716 - RNA, 22 nt, Artificial Sequence
  Synthetic
cgucagcguuauccacagccuc

SEQ ID NO: 550717 - RNA, 23 nt, Artificial Sequence
  Synthetic
ucgucagcguuauccacagccuc

SEQ ID NO: 550718 - RNA, 24 nt, Artificial Sequence
  Synthetic
uucgucagcguuauccacagccuc

SEQ ID NO: 550719 - RNA, 18 nt, Artificial Sequence
  Synthetic
uaauucagucacagccuc

SEQ ID NO: 550720 - RNA, 19 nt, Artificial Sequence
  Synthetic
auaauucagucacagccuc

SEQ ID NO: 550721 - RNA, 20 nt, Artificial Sequence
  Synthetic
uauaauucagucacagccuc

SEQ ID NO: 550722 - RNA, 21 nt, Artificial Sequence
  Synthetic
auauaauucagucacagccuc

SEQ ID NO: 550723 - RNA, 22 nt, Artificial Sequence
  Synthetic
aauauaauucagucacagccuc

SEQ ID NO: 550724 - RNA, 23 nt, Artificial Sequence
  Synthetic
aaauauaauucagucacagccuc

SEQ ID NO: 550725 - RNA, 24 nt, Artificial Sequence
  Synthetic
caaauauaauucagucacagccuc

SEQ ID NO: 550726 - RNA, 18 nt, Artificial Sequence
  Synthetic
ucuuggaaucccagccuc

SEQ ID NO: 550727 - RNA, 19 nt, Artificial Sequence
  Synthetic
aucuuggaaucccagccuc

SEQ ID NO: 550728 - RNA, 20 nt, Artificial Sequence
  Synthetic
gaucuuggaaucccagccuc

SEQ ID NO: 550729 - RNA, 21 nt, Artificial Sequence
  Synthetic
ugaucuuggaaucccagccuc

SEQ ID NO: 550730 - RNA, 22 nt, Artificial Sequence
  Synthetic
cugaucuuggaaucccagccuc

SEQ ID NO: 550731 - RNA, 23 nt, Artificial Sequence
  Synthetic
ccugaucuuggaaucccagccuc

SEQ ID NO: 550732 - RNA, 24 nt, Artificial Sequence
  Synthetic
cccugaucuuggaaucccagccuc

SEQ ID NO: 550733 - RNA, 18 nt, Artificial Sequence
  Synthetic
cuugaacuucccagccuc

SEQ ID NO: 550734 - RNA, 19 nt, Artificial Sequence
  Synthetic
ucuugaacuucccagccuc

SEQ ID NO: 550735 - RNA, 20 nt, Artificial Sequence
  Synthetic
aucuugaacuucccagccuc

SEQ ID NO: 550736 - RNA, 21 nt, Artificial Sequence
  Synthetic
gaucuugaacuucccagccuc

SEQ ID NO: 550737 - RNA, 22 nt, Artificial Sequence
  Synthetic
ugaucuugaacuucccagccuc

SEQ ID NO: 550738 - RNA, 23 nt, Artificial Sequence
  Synthetic
uugaucuugaacuucccagccuc

SEQ ID NO: 550739 - RNA, 24 nt, Artificial Sequence
  Synthetic
cuugaucuugaacuucccagccuc

SEQ ID NO: 550740 - RNA, 18 nt, Artificial Sequence
  Synthetic
cuuggacuucgcagccuc

SEQ ID NO: 550741 - RNA, 19 nt, Artificial Sequence
  Synthetic
ucuuggacuucgcagccuc

SEQ ID NO: 550742 - RNA, 20 nt, Artificial Sequence
  Synthetic
aucuuggacuucgcagccuc

SEQ ID NO: 550743 - RNA, 21 nt, Artificial Sequence
  Synthetic
gaucuuggacuucgcagccuc

SEQ ID NO: 550744 - RNA, 22 nt, Artificial Sequence
  Synthetic
ugaucuuggacuucgcagccuc

SEQ ID NO: 550745 - RNA, 23 nt, Artificial Sequence
  Synthetic
uugaucuuggacuucgcagccuc

SEQ ID NO: 550746 - RNA, 24 nt, Artificial Sequence
  Synthetic
cuugaucuuggacuucgcagccuc

SEQ ID NO: 550747 - RNA, 18 nt, Artificial Sequence
  Synthetic
gucuaugcuugcagccuc

SEQ ID NO: 550748 - RNA, 19 nt, Artificial Sequence
  Synthetic
ugucuaugcuugcagccuc

SEQ ID NO: 550749 - RNA, 20 nt, Artificial Sequence
  Synthetic
uugucuaugcuugcagccuc

SEQ ID NO: 550750 - RNA, 21 nt, Artificial Sequence
  Synthetic
guugucuaugcuugcagccuc

SEQ ID NO: 550751 - RNA, 22 nt, Artificial Sequence
  Synthetic
uguugucuaugcuugcagccuc

SEQ ID NO: 550752 - RNA, 23 nt, Artificial Sequence
  Synthetic
cuguugucuaugcuugcagccuc

SEQ ID NO: 550753 - RNA, 24 nt, Artificial Sequence
  Synthetic
gcuguugucuaugcuugcagccuc

SEQ ID NO: 550754 - RNA, 18 nt, Artificial Sequence
  Synthetic
uucucccaacucagccuc

SEQ ID NO: 550755 - RNA, 19 nt, Artificial Sequence
  Synthetic
auucucccaacucagccuc

SEQ ID NO: 550756 - RNA, 20 nt, Artificial Sequence
  Synthetic
aauucucccaacucagccuc

SEQ ID NO: 550757 - RNA, 21 nt, Artificial Sequence
  Synthetic
aaauucucccaacucagccuc

SEQ ID NO: 550758 - RNA, 22 nt, Artificial Sequence
  Synthetic
gaaauucucccaacucagccuc

SEQ ID NO: 550759 - RNA, 23 nt, Artificial Sequence
  Synthetic
agaaauucucccaacucagccuc

SEQ ID NO: 550760 - RNA, 24 nt, Artificial Sequence
  Synthetic
aagaaauucucccaacucagccuc

SEQ ID NO: 550761 - RNA, 18 nt, Artificial Sequence
  Synthetic
uucuucugccucagccuc

SEQ ID NO: 550762 - RNA, 19 nt, Artificial Sequence
  Synthetic
auucuucugccucagccuc

SEQ ID NO: 550763 - RNA, 20 nt, Artificial Sequence
  Synthetic
aauucuucugccucagccuc

SEQ ID NO: 550764 - RNA, 21 nt, Artificial Sequence
  Synthetic
caauucuucugccucagccuc

SEQ ID NO: 550765 - RNA, 22 nt, Artificial Sequence
  Synthetic
gcaauucuucugccucagccuc

SEQ ID NO: 550766 - RNA, 23 nt, Artificial Sequence
  Synthetic
agcaauucuucugccucagccuc

SEQ ID NO: 550767 - RNA, 24 nt, Artificial Sequence
  Synthetic
aagcaauucuucugccucagccuc

SEQ ID NO: 550768 - RNA, 18 nt, Artificial Sequence
  Synthetic
gagaagguccucagccuc

SEQ ID NO: 550769 - RNA, 19 nt, Artificial Sequence
  Synthetic
ugagaagguccucagccuc

SEQ ID NO: 550770 - RNA, 20 nt, Artificial Sequence
  Synthetic
cugagaagguccucagccuc

SEQ ID NO: 550771 - RNA, 21 nt, Artificial Sequence
  Synthetic
gcugagaagguccucagccuc

SEQ ID NO: 550772 - RNA, 22 nt, Artificial Sequence
  Synthetic
agcugagaagguccucagccuc

SEQ ID NO: 550773 - RNA, 23 nt, Artificial Sequence
  Synthetic
uagcugagaagguccucagccuc

SEQ ID NO: 550774 - RNA, 24 nt, Artificial Sequence
  Synthetic
auagcugagaagguccucagccuc

SEQ ID NO: 550775 - RNA, 18 nt, Artificial Sequence
  Synthetic
gacuguaaucucagccuc

SEQ ID NO: 550776 - RNA, 19 nt, Artificial Sequence
  Synthetic
ugacuguaaucucagccuc

SEQ ID NO: 550777 - RNA, 20 nt, Artificial Sequence
  Synthetic
gugacuguaaucucagccuc

SEQ ID NO: 550778 - RNA, 21 nt, Artificial Sequence
  Synthetic
ggugacuguaaucucagccuc

SEQ ID NO: 550779 - RNA, 22 nt, Artificial Sequence
  Synthetic
gggugacuguaaucucagccuc

SEQ ID NO: 550780 - RNA, 23 nt, Artificial Sequence
  Synthetic
ugggugacuguaaucucagccuc

SEQ ID NO: 550781 - RNA, 24 nt, Artificial Sequence
  Synthetic
gugggugacuguaaucucagccuc

SEQ ID NO: 550782 - RNA, 18 nt, Artificial Sequence
  Synthetic
cccugaacacagagccuc

SEQ ID NO: 550783 - RNA, 19 nt, Artificial Sequence
  Synthetic
ccccugaacacagagccuc

SEQ ID NO: 550784 - RNA, 20 nt, Artificial Sequence
  Synthetic
cccccugaacacagagccuc

SEQ ID NO: 550785 - RNA, 21 nt, Artificial Sequence
  Synthetic
ucccccugaacacagagccuc

SEQ ID NO: 550786 - RNA, 22 nt, Artificial Sequence
  Synthetic
cucccccugaacacagagccuc

SEQ ID NO: 550787 - RNA, 23 nt, Artificial Sequence
  Synthetic
ccucccccugaacacagagccuc

SEQ ID NO: 550788 - RNA, 24 nt, Artificial Sequence
  Synthetic
cccucccccugaacacagagccuc

SEQ ID NO: 550789 - RNA, 18 nt, Artificial Sequence
  Synthetic
acuucuggugagagccuc

SEQ ID NO: 550790 - RNA, 19 nt, Artificial Sequence
  Synthetic
uacuucuggugagagccuc

SEQ ID NO: 550791 - RNA, 20 nt, Artificial Sequence
  Synthetic
cuacuucuggugagagccuc

SEQ ID NO: 550792 - RNA, 21 nt, Artificial Sequence
  Synthetic
ucuacuucuggugagagccuc

SEQ ID NO: 550793 - RNA, 22 nt, Artificial Sequence
  Synthetic
aucuacuucuggugagagccuc

SEQ ID NO: 550794 - RNA, 23 nt, Artificial Sequence
  Synthetic
caucuacuucuggugagagccuc

SEQ ID NO: 550795 - RNA, 24 nt, Artificial Sequence
  Synthetic
gcaucuacuucuggugagagccuc

SEQ ID NO: 550796 - RNA, 18 nt, Artificial Sequence
  Synthetic
acagaaagcucuagccuc

SEQ ID NO: 550797 - RNA, 19 nt, Artificial Sequence
  Synthetic
uacagaaagcucuagccuc

SEQ ID NO: 550798 - RNA, 20 nt, Artificial Sequence
  Synthetic
cuacagaaagcucuagccuc

SEQ ID NO: 550799 - RNA, 21 nt, Artificial Sequence
  Synthetic
ccuacagaaagcucuagccuc

SEQ ID NO: 550800 - RNA, 22 nt, Artificial Sequence
  Synthetic
accuacagaaagcucuagccuc

SEQ ID NO: 550801 - RNA, 23 nt, Artificial Sequence
  Synthetic
caccuacagaaagcucuagccuc

SEQ ID NO: 550802 - RNA, 24 nt, Artificial Sequence
  Synthetic
ucaccuacagaaagcucuagccuc

SEQ ID NO: 550803 - RNA, 18 nt, Artificial Sequence
  Synthetic
uugaacagcuguagccuc

SEQ ID NO: 550804 - RNA, 19 nt, Artificial Sequence
  Synthetic
cuugaacagcuguagccuc

SEQ ID NO: 550805 - RNA, 20 nt, Artificial Sequence
  Synthetic
gcuugaacagcuguagccuc

SEQ ID NO: 550806 - RNA, 21 nt, Artificial Sequence
  Synthetic
agcuugaacagcuguagccuc

SEQ ID NO: 550807 - RNA, 22 nt, Artificial Sequence
  Synthetic
aagcuugaacagcuguagccuc

SEQ ID NO: 550808 - RNA, 23 nt, Artificial Sequence
  Synthetic
caagcuugaacagcuguagccuc

SEQ ID NO: 550809 - RNA, 24 nt, Artificial Sequence
  Synthetic
acaagcuugaacagcuguagccuc

SEQ ID NO: 550810 - RNA, 18 nt, Artificial Sequence
  Synthetic
gguuuaaccaaaggccuc

SEQ ID NO: 550811 - RNA, 19 nt, Artificial Sequence
  Synthetic
ugguuuaaccaaaggccuc

SEQ ID NO: 550812 - RNA, 20 nt, Artificial Sequence
  Synthetic
augguuuaaccaaaggccuc

SEQ ID NO: 550813 - RNA, 21 nt, Artificial Sequence
  Synthetic
caugguuuaaccaaaggccuc

SEQ ID NO: 550814 - RNA, 22 nt, Artificial Sequence
  Synthetic
acaugguuuaaccaaaggccuc

SEQ ID NO: 550815 - RNA, 23 nt, Artificial Sequence
  Synthetic
gacaugguuuaaccaaaggccuc

SEQ ID NO: 550816 - RNA, 24 nt, Artificial Sequence
  Synthetic
agacaugguuuaaccaaaggccuc

SEQ ID NO: 550817 - RNA, 18 nt, Artificial Sequence
  Synthetic
cauggcuucagaggccuc

SEQ ID NO: 550818 - RNA, 19 nt, Artificial Sequence
  Synthetic
gcauggcuucagaggccuc

SEQ ID NO: 550819 - RNA, 20 nt, Artificial Sequence
  Synthetic
cgcauggcuucagaggccuc

SEQ ID NO: 550820 - RNA, 21 nt, Artificial Sequence
  Synthetic
ccgcauggcuucagaggccuc

SEQ ID NO: 550821 - RNA, 22 nt, Artificial Sequence
  Synthetic
uccgcauggcuucagaggccuc

SEQ ID NO: 550822 - RNA, 23 nt, Artificial Sequence
  Synthetic
uuccgcauggcuucagaggccuc

SEQ ID NO: 550823 - RNA, 24 nt, Artificial Sequence
  Synthetic
guuccgcauggcuucagaggccuc

SEQ ID NO: 550824 - RNA, 21 nt, Artificial Sequence
  Synthetic
cugcauggcuggggaggccuc

SEQ ID NO: 550825 - RNA, 22 nt, Artificial Sequence
  Synthetic
ucugcauggcuggggaggccuc

SEQ ID NO: 550826 - RNA, 23 nt, Artificial Sequence
  Synthetic
uucugcauggcuggggaggccuc

SEQ ID NO: 550827 - RNA, 24 nt, Artificial Sequence
  Synthetic
auucugcauggcuggggaggccuc

SEQ ID NO: 550828 - RNA, 18 nt, Artificial Sequence
  Synthetic
uccgcccgccucggccuc

SEQ ID NO: 550829 - RNA, 19 nt, Artificial Sequence
  Synthetic
auccgcccgccucggccuc

SEQ ID NO: 550830 - RNA, 20 nt, Artificial Sequence
  Synthetic
gauccgcccgccucggccuc

SEQ ID NO: 550831 - RNA, 21 nt, Artificial Sequence
  Synthetic
ugauccgcccgccucggccuc

SEQ ID NO: 550832 - RNA, 22 nt, Artificial Sequence
  Synthetic
augauccgcccgccucggccuc

SEQ ID NO: 550833 - RNA, 23 nt, Artificial Sequence
  Synthetic
caugauccgcccgccucggccuc

SEQ ID NO: 550834 - RNA, 24 nt, Artificial Sequence
  Synthetic
ucaugauccgcccgccucggccuc

SEQ ID NO: 550835 - RNA, 18 nt, Artificial Sequence
  Synthetic
augccgggucugggccuc

SEQ ID NO: 550836 - RNA, 19 nt, Artificial Sequence
  Synthetic
gaugccgggucugggccuc

SEQ ID NO: 550837 - RNA, 20 nt, Artificial Sequence
  Synthetic
ggaugccgggucugggccuc

SEQ ID NO: 550838 - RNA, 21 nt, Artificial Sequence
  Synthetic
uggaugccgggucugggccuc

SEQ ID NO: 550839 - RNA, 22 nt, Artificial Sequence
  Synthetic
auggaugccgggucugggccuc

SEQ ID NO: 550840 - RNA, 23 nt, Artificial Sequence
  Synthetic
cauggaugccgggucugggccuc

SEQ ID NO: 550841 - RNA, 24 nt, Artificial Sequence
  Synthetic
acauggaugccgggucugggccuc

SEQ ID NO: 550842 - RNA, 18 nt, Artificial Sequence
  Synthetic
ggcacaggcaauggccuc

SEQ ID NO: 550843 - RNA, 19 nt, Artificial Sequence
  Synthetic
uggcacaggcaauggccuc

SEQ ID NO: 550844 - RNA, 20 nt, Artificial Sequence
  Synthetic
guggcacaggcaauggccuc

SEQ ID NO: 550845 - RNA, 21 nt, Artificial Sequence
  Synthetic
uguggcacaggcaauggccuc

SEQ ID NO: 550846 - RNA, 22 nt, Artificial Sequence
  Synthetic
auguggcacaggcaauggccuc

SEQ ID NO: 550847 - RNA, 23 nt, Artificial Sequence
  Synthetic
aauguggcacaggcaauggccuc

SEQ ID NO: 550848 - RNA, 24 nt, Artificial Sequence
  Synthetic
aaauguggcacaggcaauggccuc

SEQ ID NO: 550849 - RNA, 18 nt, Artificial Sequence
  Synthetic
gauacucucaauggccuc

SEQ ID NO: 550850 - RNA, 19 nt, Artificial Sequence
  Synthetic
agauacucucaauggccuc

SEQ ID NO: 550851 - RNA, 20 nt, Artificial Sequence
  Synthetic
uagauacucucaauggccuc

SEQ ID NO: 550852 - RNA, 21 nt, Artificial Sequence
  Synthetic
uuagauacucucaauggccuc

SEQ ID NO: 550853 - RNA, 22 nt, Artificial Sequence
  Synthetic
auuagauacucucaauggccuc

SEQ ID NO: 550854 - RNA, 23 nt, Artificial Sequence
  Synthetic
cauuagauacucucaauggccuc

SEQ ID NO: 550855 - RNA, 24 nt, Artificial Sequence
  Synthetic
ucauuagauacucucaauggccuc

SEQ ID NO: 550856 - RNA, 18 nt, Artificial Sequence
  Synthetic
ugggggaaaucuggccuc

SEQ ID NO: 550857 - RNA, 19 nt, Artificial Sequence
  Synthetic
uugggggaaaucuggccuc

SEQ ID NO: 550858 - RNA, 20 nt, Artificial Sequence
  Synthetic
uuugggggaaaucuggccuc

SEQ ID NO: 550859 - RNA, 21 nt, Artificial Sequence
  Synthetic
uuuugggggaaaucuggccuc

SEQ ID NO: 550860 - RNA, 22 nt, Artificial Sequence
  Synthetic
auuuugggggaaaucuggccuc

SEQ ID NO: 550861 - RNA, 23 nt, Artificial Sequence
  Synthetic
uauuuugggggaaaucuggccuc

SEQ ID NO: 550862 - RNA, 24 nt, Artificial Sequence
  Synthetic
guauuuugggggaaaucuggccuc

SEQ ID NO: 550863 - RNA, 18 nt, Artificial Sequence
  Synthetic
ucuugaacuucuggccuc

SEQ ID NO: 550864 - RNA, 19 nt, Artificial Sequence
  Synthetic
cucuugaacuucuggccuc

SEQ ID NO: 550865 - RNA, 20 nt, Artificial Sequence
  Synthetic
gcucuugaacuucuggccuc

SEQ ID NO: 550866 - RNA, 21 nt, Artificial Sequence
  Synthetic
ugcucuugaacuucuggccuc

SEQ ID NO: 550867 - RNA, 22 nt, Artificial Sequence
  Synthetic
uugcucuugaacuucuggccuc

SEQ ID NO: 550868 - RNA, 23 nt, Artificial Sequence
  Synthetic
guugcucuugaacuucuggccuc

SEQ ID NO: 550869 - RNA, 24 nt, Artificial Sequence
  Synthetic
gguugcucuugaacuucuggccuc

SEQ ID NO: 550870 - RNA, 18 nt, Artificial Sequence
  Synthetic
uccacccaccuuggccuc

SEQ ID NO: 550871 - RNA, 19 nt, Artificial Sequence
  Synthetic
auccacccaccuuggccuc

SEQ ID NO: 550872 - RNA, 20 nt, Artificial Sequence
  Synthetic
gauccacccaccuuggccuc

SEQ ID NO: 550873 - RNA, 21 nt, Artificial Sequence
  Synthetic
ugauccacccaccuuggccuc

SEQ ID NO: 550874 - RNA, 22 nt, Artificial Sequence
  Synthetic
gugauccacccaccuuggccuc

SEQ ID NO: 550875 - RNA, 23 nt, Artificial Sequence
  Synthetic
cgugauccacccaccuuggccuc

SEQ ID NO: 550876 - RNA, 24 nt, Artificial Sequence
  Synthetic
ucgugauccacccaccuuggccuc

SEQ ID NO: 550877 - RNA, 18 nt, Artificial Sequence
  Synthetic
agaaaaagauuuggccuc

SEQ ID NO: 550878 - RNA, 19 nt, Artificial Sequence
  Synthetic
aagaaaaagauuuggccuc

SEQ ID NO: 550879 - RNA, 20 nt, Artificial Sequence
  Synthetic
gaagaaaaagauuuggccuc

SEQ ID NO: 550880 - RNA, 21 nt, Artificial Sequence
  Synthetic
ggaagaaaaagauuuggccuc

SEQ ID NO: 550881 - RNA, 22 nt, Artificial Sequence
  Synthetic
aggaagaaaaagauuuggccuc

SEQ ID NO: 550882 - RNA, 23 nt, Artificial Sequence
  Synthetic
gaggaagaaaaagauuuggccuc

SEQ ID NO: 550883 - RNA, 24 nt, Artificial Sequence
  Synthetic
ugaggaagaaaaagauuuggccuc

SEQ ID NO: 550884 - RNA, 18 nt, Artificial Sequence
  Synthetic
ccugaaugguaaugccuc

SEQ ID NO: 550885 - RNA, 19 nt, Artificial Sequence
  Synthetic
uccugaaugguaaugccuc

SEQ ID NO: 550886 - RNA, 20 nt, Artificial Sequence
  Synthetic
guccugaaugguaaugccuc

SEQ ID NO: 550887 - RNA, 21 nt, Artificial Sequence
  Synthetic
uguccugaaugguaaugccuc

SEQ ID NO: 550888 - RNA, 22 nt, Artificial Sequence
  Synthetic
auguccugaaugguaaugccuc

SEQ ID NO: 550889 - RNA, 23 nt, Artificial Sequence
  Synthetic
uauguccugaaugguaaugccuc

SEQ ID NO: 550890 - RNA, 24 nt, Artificial Sequence
  Synthetic
cuauguccugaaugguaaugccuc

SEQ ID NO: 550891 - RNA, 18 nt, Artificial Sequence
  Synthetic
ggcagcaaucccugccuc

SEQ ID NO: 550892 - RNA, 19 nt, Artificial Sequence
  Synthetic
cggcagcaaucccugccuc

SEQ ID NO: 550893 - RNA, 20 nt, Artificial Sequence
  Synthetic
ucggcagcaaucccugccuc

SEQ ID NO: 550894 - RNA, 21 nt, Artificial Sequence
  Synthetic
aucggcagcaaucccugccuc

SEQ ID NO: 550895 - RNA, 22 nt, Artificial Sequence
  Synthetic
uaucggcagcaaucccugccuc

SEQ ID NO: 550896 - RNA, 23 nt, Artificial Sequence
  Synthetic
auaucggcagcaaucccugccuc

SEQ ID NO: 550897 - RNA, 24 nt, Artificial Sequence
  Synthetic
aauaucggcagcaaucccugccuc

SEQ ID NO: 550898 - RNA, 18 nt, Artificial Sequence
  Synthetic
cugcagaauuccugccuc

SEQ ID NO: 550899 - RNA, 19 nt, Artificial Sequence
  Synthetic
ucugcagaauuccugccuc

SEQ ID NO: 550900 - RNA, 20 nt, Artificial Sequence
  Synthetic
uucugcagaauuccugccuc

SEQ ID NO: 550901 - RNA, 21 nt, Artificial Sequence
  Synthetic
auucugcagaauuccugccuc

SEQ ID NO: 550902 - RNA, 22 nt, Artificial Sequence
  Synthetic
cauucugcagaauuccugccuc

SEQ ID NO: 550903 - RNA, 23 nt, Artificial Sequence
  Synthetic
ucauucugcagaauuccugccuc

SEQ ID NO: 550904 - RNA, 24 nt, Artificial Sequence
  Synthetic
uucauucugcagaauuccugccuc

SEQ ID NO: 550905 - RNA, 18 nt, Artificial Sequence
  Synthetic
uuccccuuuuucugccuc

SEQ ID NO: 550906 - RNA, 19 nt, Artificial Sequence
  Synthetic
guuccccuuuuucugccuc

SEQ ID NO: 550907 - RNA, 20 nt, Artificial Sequence
  Synthetic
aguuccccuuuuucugccuc

SEQ ID NO: 550908 - RNA, 21 nt, Artificial Sequence
  Synthetic
caguuccccuuuuucugccuc

SEQ ID NO: 550909 - RNA, 22 nt, Artificial Sequence
  Synthetic
acaguuccccuuuuucugccuc

SEQ ID NO: 550910 - RNA, 23 nt, Artificial Sequence
  Synthetic
cacaguuccccuuuuucugccuc

SEQ ID NO: 550911 - RNA, 24 nt, Artificial Sequence
  Synthetic
gcacaguuccccuuuuucugccuc

SEQ ID NO: 550912 - RNA, 18 nt, Artificial Sequence
  Synthetic
uuaucuggauggugccuc

SEQ ID NO: 550913 - RNA, 19 nt, Artificial Sequence
  Synthetic
auuaucuggauggugccuc

SEQ ID NO: 550914 - RNA, 20 nt, Artificial Sequence
  Synthetic
uauuaucuggauggugccuc

SEQ ID NO: 550915 - RNA, 21 nt, Artificial Sequence
  Synthetic
guauuaucuggauggugccuc

SEQ ID NO: 550916 - RNA, 22 nt, Artificial Sequence
  Synthetic
aguauuaucuggauggugccuc

SEQ ID NO: 550917 - RNA, 23 nt, Artificial Sequence
  Synthetic
uaguauuaucuggauggugccuc

SEQ ID NO: 550918 - RNA, 24 nt, Artificial Sequence
  Synthetic
guaguauuaucuggauggugccuc

SEQ ID NO: 550919 - RNA, 18 nt, Artificial Sequence
  Synthetic
accacagacuguugccuc

SEQ ID NO: 550920 - RNA, 19 nt, Artificial Sequence
  Synthetic
aaccacagacuguugccuc

SEQ ID NO: 550921 - RNA, 20 nt, Artificial Sequence
  Synthetic
gaaccacagacuguugccuc

SEQ ID NO: 550922 - RNA, 21 nt, Artificial Sequence
  Synthetic
ggaaccacagacuguugccuc

SEQ ID NO: 550923 - RNA, 22 nt, Artificial Sequence
  Synthetic
aggaaccacagacuguugccuc

SEQ ID NO: 550924 - RNA, 23 nt, Artificial Sequence
  Synthetic
caggaaccacagacuguugccuc

SEQ ID NO: 550925 - RNA, 24 nt, Artificial Sequence
  Synthetic
ucaggaaccacagacuguugccuc

SEQ ID NO: 550926 - RNA, 18 nt, Artificial Sequence
  Synthetic
uauucuaggcuuugccuc

SEQ ID NO: 550927 - RNA, 19 nt, Artificial Sequence
  Synthetic
auauucuaggcuuugccuc

SEQ ID NO: 550928 - RNA, 20 nt, Artificial Sequence
  Synthetic
gauauucuaggcuuugccuc

SEQ ID NO: 550929 - RNA, 21 nt, Artificial Sequence
  Synthetic
agauauucuaggcuuugccuc

SEQ ID NO: 550930 - RNA, 22 nt, Artificial Sequence
  Synthetic
aagauauucuaggcuuugccuc

SEQ ID NO: 550931 - RNA, 23 nt, Artificial Sequence
  Synthetic
gaagauauucuaggcuuugccuc

SEQ ID NO: 550932 - RNA, 24 nt, Artificial Sequence
  Synthetic
agaagauauucuaggcuuugccuc

SEQ ID NO: 550933 - RNA, 18 nt, Artificial Sequence
  Synthetic
ucacccgucuuuugccuc

SEQ ID NO: 550934 - RNA, 19 nt, Artificial Sequence
  Synthetic
cucacccgucuuuugccuc

SEQ ID NO: 550935 - RNA, 20 nt, Artificial Sequence
  Synthetic
ccucacccgucuuuugccuc

SEQ ID NO: 550936 - RNA, 21 nt, Artificial Sequence
  Synthetic
uccucacccgucuuuugccuc

SEQ ID NO: 550937 - RNA, 22 nt, Artificial Sequence
  Synthetic
uuccucacccgucuuuugccuc

SEQ ID NO: 550938 - RNA, 23 nt, Artificial Sequence
  Synthetic
cuuccucacccgucuuuugccuc

SEQ ID NO: 550939 - RNA, 24 nt, Artificial Sequence
  Synthetic
acuuccucacccgucuuuugccuc

SEQ ID NO: 550940 - RNA, 18 nt, Artificial Sequence
  Synthetic
ccccagcccccaauccuc

SEQ ID NO: 550941 - RNA, 19 nt, Artificial Sequence
  Synthetic
uccccagcccccaauccuc

SEQ ID NO: 550942 - RNA, 20 nt, Artificial Sequence
  Synthetic
uuccccagcccccaauccuc

SEQ ID NO: 550943 - RNA, 21 nt, Artificial Sequence
  Synthetic
uuuccccagcccccaauccuc

SEQ ID NO: 550944 - RNA, 22 nt, Artificial Sequence
  Synthetic
auuuccccagcccccaauccuc

SEQ ID NO: 550945 - RNA, 23 nt, Artificial Sequence
  Synthetic
cauuuccccagcccccaauccuc

SEQ ID NO: 550946 - RNA, 24 nt, Artificial Sequence
  Synthetic
gcauuuccccagcccccaauccuc

SEQ ID NO: 550947 - RNA, 18 nt, Artificial Sequence
  Synthetic
ccaaacuuuugcauccuc

SEQ ID NO: 550948 - RNA, 19 nt, Artificial Sequence
  Synthetic
uccaaacuuuugcauccuc

SEQ ID NO: 550949 - RNA, 20 nt, Artificial Sequence
  Synthetic
auccaaacuuuugcauccuc

SEQ ID NO: 550950 - RNA, 21 nt, Artificial Sequence
  Synthetic
aauccaaacuuuugcauccuc

SEQ ID NO: 550951 - RNA, 22 nt, Artificial Sequence
  Synthetic
uaauccaaacuuuugcauccuc

SEQ ID NO: 550952 - RNA, 23 nt, Artificial Sequence
  Synthetic
auaauccaaacuuuugcauccuc

SEQ ID NO: 550953 - RNA, 24 nt, Artificial Sequence
  Synthetic
uauaauccaaacuuuugcauccuc

SEQ ID NO: 550954 - RNA, 18 nt, Artificial Sequence
  Synthetic
agcagauauaucauccuc

SEQ ID NO: 550955 - RNA, 19 nt, Artificial Sequence
  Synthetic
cagcagauauaucauccuc

SEQ ID NO: 550956 - RNA, 20 nt, Artificial Sequence
  Synthetic
ucagcagauauaucauccuc

SEQ ID NO: 550957 - RNA, 21 nt, Artificial Sequence
  Synthetic
cucagcagauauaucauccuc

SEQ ID NO: 550958 - RNA, 22 nt, Artificial Sequence
  Synthetic
ucucagcagauauaucauccuc

SEQ ID NO: 550959 - RNA, 23 nt, Artificial Sequence
  Synthetic
uucucagcagauauaucauccuc

SEQ ID NO: 550960 - RNA, 24 nt, Artificial Sequence
  Synthetic
uuucucagcagauauaucauccuc

SEQ ID NO: 550961 - RNA, 18 nt, Artificial Sequence
  Synthetic
cagacuucagagauccuc

SEQ ID NO: 550962 - RNA, 19 nt, Artificial Sequence
  Synthetic
ucagacuucagagauccuc

SEQ ID NO: 550963 - RNA, 20 nt, Artificial Sequence
  Synthetic
uucagacuucagagauccuc

SEQ ID NO: 550964 - RNA, 21 nt, Artificial Sequence
  Synthetic
cuucagacuucagagauccuc

SEQ ID NO: 550965 - RNA, 22 nt, Artificial Sequence
  Synthetic
ccuucagacuucagagauccuc

SEQ ID NO: 550966 - RNA, 23 nt, Artificial Sequence
  Synthetic
accuucagacuucagagauccuc

SEQ ID NO: 550967 - RNA, 24 nt, Artificial Sequence
  Synthetic
uaccuucagacuucagagauccuc

SEQ ID NO: 550968 - RNA, 18 nt, Artificial Sequence
  Synthetic
aaaaauaaaaauauccuc

SEQ ID NO: 550969 - RNA, 19 nt, Artificial Sequence
  Synthetic
gaaaaauaaaaauauccuc

SEQ ID NO: 550970 - RNA, 20 nt, Artificial Sequence
  Synthetic
agaaaaauaaaaauauccuc

SEQ ID NO: 550971 - RNA, 21 nt, Artificial Sequence
  Synthetic
gagaaaaauaaaaauauccuc

SEQ ID NO: 550972 - RNA, 22 nt, Artificial Sequence
  Synthetic
ugagaaaaauaaaaauauccuc

SEQ ID NO: 550973 - RNA, 23 nt, Artificial Sequence
  Synthetic
uugagaaaaauaaaaauauccuc

SEQ ID NO: 550974 - RNA, 24 nt, Artificial Sequence
  Synthetic
guugagaaaaauaaaaauauccuc

SEQ ID NO: 550975 - RNA, 18 nt, Artificial Sequence
  Synthetic
cuauaauauacuauccuc

SEQ ID NO: 550976 - RNA, 19 nt, Artificial Sequence
  Synthetic
ccuauaauauacuauccuc

SEQ ID NO: 550977 - RNA, 20 nt, Artificial Sequence
  Synthetic
uccuauaauauacuauccuc

SEQ ID NO: 550978 - RNA, 21 nt, Artificial Sequence
  Synthetic
cuccuauaauauacuauccuc

SEQ ID NO: 550979 - RNA, 22 nt, Artificial Sequence
  Synthetic
ucuccuauaauauacuauccuc

SEQ ID NO: 550980 - RNA, 23 nt, Artificial Sequence
  Synthetic
uucuccuauaauauacuauccuc

SEQ ID NO: 550981 - RNA, 24 nt, Artificial Sequence
  Synthetic
cuucuccuauaauauacuauccuc

SEQ ID NO: 550982 - RNA, 18 nt, Artificial Sequence
  Synthetic
ucucagacuucuauccuc

SEQ ID NO: 550983 - RNA, 19 nt, Artificial Sequence
  Synthetic
aucucagacuucuauccuc

SEQ ID NO: 550984 - RNA, 20 nt, Artificial Sequence
  Synthetic
gaucucagacuucuauccuc

SEQ ID NO: 550985 - RNA, 21 nt, Artificial Sequence
  Synthetic
ugaucucagacuucuauccuc

SEQ ID NO: 550986 - RNA, 22 nt, Artificial Sequence
  Synthetic
uugaucucagacuucuauccuc

SEQ ID NO: 550987 - RNA, 23 nt, Artificial Sequence
  Synthetic
cuugaucucagacuucuauccuc

SEQ ID NO: 550988 - RNA, 24 nt, Artificial Sequence
  Synthetic
ccuugaucucagacuucuauccuc

SEQ ID NO: 550989 - RNA, 18 nt, Artificial Sequence
  Synthetic
gccacaaagauacuccuc

SEQ ID NO: 550990 - RNA, 19 nt, Artificial Sequence
  Synthetic
cgccacaaagauacuccuc

SEQ ID NO: 550991 - RNA, 20 nt, Artificial Sequence
  Synthetic
acgccacaaagauacuccuc

SEQ ID NO: 550992 - RNA, 21 nt, Artificial Sequence
  Synthetic
aacgccacaaagauacuccuc

SEQ ID NO: 550993 - RNA, 22 nt, Artificial Sequence
  Synthetic
gaacgccacaaagauacuccuc

SEQ ID NO: 550994 - RNA, 23 nt, Artificial Sequence
  Synthetic
agaacgccacaaagauacuccuc

SEQ ID NO: 550995 - RNA, 24 nt, Artificial Sequence
  Synthetic
gagaacgccacaaagauacuccuc

SEQ ID NO: 550996 - RNA, 18 nt, Artificial Sequence
  Synthetic
gucaaauucagccuccuc

SEQ ID NO: 550997 - RNA, 19 nt, Artificial Sequence
  Synthetic
ggucaaauucagccuccuc

SEQ ID NO: 550998 - RNA, 20 nt, Artificial Sequence
  Synthetic
aggucaaauucagccuccuc

SEQ ID NO: 550999 - RNA, 21 nt, Artificial Sequence
  Synthetic
caggucaaauucagccuccuc

SEQ ID NO: 551000 - RNA, 22 nt, Artificial Sequence
  Synthetic
ccaggucaaauucagccuccuc

SEQ ID NO: 551001 - RNA, 23 nt, Artificial Sequence
  Synthetic
accaggucaaauucagccuccuc

SEQ ID NO: 551002 - RNA, 24 nt, Artificial Sequence
  Synthetic
gaccaggucaaauucagccuccuc

SEQ ID NO: 551003 - RNA, 18 nt, Artificial Sequence
  Synthetic
uaauuauuucuccuccuc

SEQ ID NO: 551004 - RNA, 19 nt, Artificial Sequence
  Synthetic
uuaauuauuucuccuccuc

SEQ ID NO: 551005 - RNA, 20 nt, Artificial Sequence
  Synthetic
guuaauuauuucuccuccuc

SEQ ID NO: 551006 - RNA, 21 nt, Artificial Sequence
  Synthetic
uguuaauuauuucuccuccuc

SEQ ID NO: 551007 - RNA, 22 nt, Artificial Sequence
  Synthetic
auguuaauuauuucuccuccuc

SEQ ID NO: 551008 - RNA, 23 nt, Artificial Sequence
  Synthetic
uauguuaauuauuucuccuccuc

SEQ ID NO: 551009 - RNA, 24 nt, Artificial Sequence
  Synthetic
uuauguuaauuauuucuccuccuc

SEQ ID NO: 551010 - RNA, 18 nt, Artificial Sequence
  Synthetic
cauguggaauaucuccuc

SEQ ID NO: 551011 - RNA, 19 nt, Artificial Sequence
  Synthetic
gcauguggaauaucuccuc

SEQ ID NO: 551012 - RNA, 20 nt, Artificial Sequence
  Synthetic
ugcauguggaauaucuccuc

SEQ ID NO: 551013 - RNA, 21 nt, Artificial Sequence
  Synthetic
uugcauguggaauaucuccuc

SEQ ID NO: 551014 - RNA, 22 nt, Artificial Sequence
  Synthetic
uuugcauguggaauaucuccuc

SEQ ID NO: 551015 - RNA, 23 nt, Artificial Sequence
  Synthetic
guuugcauguggaauaucuccuc

SEQ ID NO: 551016 - RNA, 24 nt, Artificial Sequence
  Synthetic
uguuugcauguggaauaucuccuc

SEQ ID NO: 551017 - RNA, 18 nt, Artificial Sequence
  Synthetic
auucugggcucucuccuc

SEQ ID NO: 551018 - RNA, 19 nt, Artificial Sequence
  Synthetic
cauucugggcucucuccuc

SEQ ID NO: 551019 - RNA, 20 nt, Artificial Sequence
  Synthetic
acauucugggcucucuccuc

SEQ ID NO: 551020 - RNA, 21 nt, Artificial Sequence
  Synthetic
gacauucugggcucucuccuc

SEQ ID NO: 551021 - RNA, 22 nt, Artificial Sequence
  Synthetic
ugacauucugggcucucuccuc

SEQ ID NO: 551022 - RNA, 23 nt, Artificial Sequence
  Synthetic
gugacauucugggcucucuccuc

SEQ ID NO: 551023 - RNA, 24 nt, Artificial Sequence
  Synthetic
agugacauucugggcucucuccuc

SEQ ID NO: 551024 - RNA, 18 nt, Artificial Sequence
  Synthetic
gaggcagaguauguccuc

SEQ ID NO: 551025 - RNA, 19 nt, Artificial Sequence
  Synthetic
ggaggcagaguauguccuc

SEQ ID NO: 551026 - RNA, 20 nt, Artificial Sequence
  Synthetic
aggaggcagaguauguccuc

SEQ ID NO: 551027 - RNA, 21 nt, Artificial Sequence
  Synthetic
gaggaggcagaguauguccuc

SEQ ID NO: 551028 - RNA, 22 nt, Artificial Sequence
  Synthetic
ggaggaggcagaguauguccuc

SEQ ID NO: 551029 - RNA, 23 nt, Artificial Sequence
  Synthetic
aggaggaggcagaguauguccuc

SEQ ID NO: 551030 - RNA, 24 nt, Artificial Sequence
  Synthetic
aaggaggaggcagaguauguccuc

SEQ ID NO: 551031 - RNA, 18 nt, Artificial Sequence
  Synthetic
ccucuugguacuguccuc

SEQ ID NO: 551032 - RNA, 19 nt, Artificial Sequence
  Synthetic
uccucuugguacuguccuc

SEQ ID NO: 551033 - RNA, 20 nt, Artificial Sequence
  Synthetic
auccucuugguacuguccuc

SEQ ID NO: 551034 - RNA, 21 nt, Artificial Sequence
  Synthetic
cauccucuugguacuguccuc

SEQ ID NO: 551035 - RNA, 22 nt, Artificial Sequence
  Synthetic
ccauccucuugguacuguccuc

SEQ ID NO: 551036 - RNA, 23 nt, Artificial Sequence
  Synthetic
accauccucuugguacuguccuc

SEQ ID NO: 551037 - RNA, 24 nt, Artificial Sequence
  Synthetic
uaccauccucuugguacuguccuc

SEQ ID NO: 551038 - RNA, 18 nt, Artificial Sequence
  Synthetic
agacauugcccuguccuc

SEQ ID NO: 551039 - RNA, 19 nt, Artificial Sequence
  Synthetic
aagacauugcccuguccuc

SEQ ID NO: 551040 - RNA, 20 nt, Artificial Sequence
  Synthetic
aaagacauugcccuguccuc

SEQ ID NO: 551041 - RNA, 21 nt, Artificial Sequence
  Synthetic
caaagacauugcccuguccuc

SEQ ID NO: 551042 - RNA, 22 nt, Artificial Sequence
  Synthetic
acaaagacauugcccuguccuc

SEQ ID NO: 551043 - RNA, 23 nt, Artificial Sequence
  Synthetic
uacaaagacauugcccuguccuc

SEQ ID NO: 551044 - RNA, 24 nt, Artificial Sequence
  Synthetic
uuacaaagacauugcccuguccuc

SEQ ID NO: 551045 - RNA, 18 nt, Artificial Sequence
  Synthetic
aagcuauuuuuuguccuc

SEQ ID NO: 551046 - RNA, 19 nt, Artificial Sequence
  Synthetic
uaagcuauuuuuuguccuc

SEQ ID NO: 551047 - RNA, 20 nt, Artificial Sequence
  Synthetic
cuaagcuauuuuuuguccuc

SEQ ID NO: 551048 - RNA, 21 nt, Artificial Sequence
  Synthetic
acuaagcuauuuuuuguccuc

SEQ ID NO: 551049 - RNA, 22 nt, Artificial Sequence
  Synthetic
cacuaagcuauuuuuuguccuc

SEQ ID NO: 551050 - RNA, 23 nt, Artificial Sequence
  Synthetic
ucacuaagcuauuuuuuguccuc

SEQ ID NO: 551051 - RNA, 24 nt, Artificial Sequence
  Synthetic
gucacuaagcuauuuuuuguccuc

SEQ ID NO: 551052 - RNA, 18 nt, Artificial Sequence
  Synthetic
acuggaacaacauuccuc

SEQ ID NO: 551053 - RNA, 19 nt, Artificial Sequence
  Synthetic
uacuggaacaacauuccuc

SEQ ID NO: 551054 - RNA, 20 nt, Artificial Sequence
  Synthetic
guacuggaacaacauuccuc

SEQ ID NO: 551055 - RNA, 21 nt, Artificial Sequence
  Synthetic
gguacuggaacaacauuccuc

SEQ ID NO: 551056 - RNA, 22 nt, Artificial Sequence
  Synthetic
agguacuggaacaacauuccuc

SEQ ID NO: 551057 - RNA, 23 nt, Artificial Sequence
  Synthetic
uagguacuggaacaacauuccuc

SEQ ID NO: 551058 - RNA, 24 nt, Artificial Sequence
  Synthetic
auagguacuggaacaacauuccuc

SEQ ID NO: 551059 - RNA, 18 nt, Artificial Sequence
  Synthetic
aaaagacucccauuccuc

SEQ ID NO: 551060 - RNA, 19 nt, Artificial Sequence
  Synthetic
uaaaagacucccauuccuc

SEQ ID NO: 551061 - RNA, 20 nt, Artificial Sequence
  Synthetic
auaaaagacucccauuccuc

SEQ ID NO: 551062 - RNA, 21 nt, Artificial Sequence
  Synthetic
aauaaaagacucccauuccuc

SEQ ID NO: 551063 - RNA, 22 nt, Artificial Sequence
  Synthetic
gaauaaaagacucccauuccuc

SEQ ID NO: 551064 - RNA, 23 nt, Artificial Sequence
  Synthetic
ugaauaaaagacucccauuccuc

SEQ ID NO: 551065 - RNA, 24 nt, Artificial Sequence
  Synthetic
uugaauaaaagacucccauuccuc

SEQ ID NO: 551066 - RNA, 18 nt, Artificial Sequence
  Synthetic
gcaguguggcgauuccuc

SEQ ID NO: 551067 - RNA, 19 nt, Artificial Sequence
  Synthetic
ggcaguguggcgauuccuc

SEQ ID NO: 551068 - RNA, 20 nt, Artificial Sequence
  Synthetic
aggcaguguggcgauuccuc

SEQ ID NO: 551069 - RNA, 21 nt, Artificial Sequence
  Synthetic
aaggcaguguggcgauuccuc

SEQ ID NO: 551070 - RNA, 22 nt, Artificial Sequence
  Synthetic
gaaggcaguguggcgauuccuc

SEQ ID NO: 551071 - RNA, 23 nt, Artificial Sequence
  Synthetic
ggaaggcaguguggcgauuccuc

SEQ ID NO: 551072 - RNA, 24 nt, Artificial Sequence
  Synthetic
uggaaggcaguguggcgauuccuc

SEQ ID NO: 551073 - RNA, 18 nt, Artificial Sequence
  Synthetic
gauaauaccaccuuccuc

SEQ ID NO: 551074 - RNA, 19 nt, Artificial Sequence
  Synthetic
ugauaauaccaccuuccuc

SEQ ID NO: 551075 - RNA, 20 nt, Artificial Sequence
  Synthetic
augauaauaccaccuuccuc

SEQ ID NO: 551076 - RNA, 21 nt, Artificial Sequence
  Synthetic
gaugauaauaccaccuuccuc

SEQ ID NO: 551077 - RNA, 22 nt, Artificial Sequence
  Synthetic
agaugauaauaccaccuuccuc

SEQ ID NO: 551078 - RNA, 23 nt, Artificial Sequence
  Synthetic
gagaugauaauaccaccuuccuc

SEQ ID NO: 551079 - RNA, 24 nt, Artificial Sequence
  Synthetic
ggagaugauaauaccaccuuccuc

SEQ ID NO: 551080 - RNA, 18 nt, Artificial Sequence
  Synthetic
ugguauacgaccuuccuc

SEQ ID NO: 551081 - RNA, 19 nt, Artificial Sequence
  Synthetic
cugguauacgaccuuccuc

SEQ ID NO: 551082 - RNA, 20 nt, Artificial Sequence
  Synthetic
acugguauacgaccuuccuc

SEQ ID NO: 551083 - RNA, 21 nt, Artificial Sequence
  Synthetic
aacugguauacgaccuuccuc

SEQ ID NO: 551084 - RNA, 22 nt, Artificial Sequence
  Synthetic
uaacugguauacgaccuuccuc

SEQ ID NO: 551085 - RNA, 23 nt, Artificial Sequence
  Synthetic
guaacugguauacgaccuuccuc

SEQ ID NO: 551086 - RNA, 24 nt, Artificial Sequence
  Synthetic
uguaacugguauacgaccuuccuc

SEQ ID NO: 551087 - RNA, 18 nt, Artificial Sequence
  Synthetic
gcugucuguuccuuccuc

SEQ ID NO: 551088 - RNA, 19 nt, Artificial Sequence
  Synthetic
ugcugucuguuccuuccuc

SEQ ID NO: 551089 - RNA, 20 nt, Artificial Sequence
  Synthetic
uugcugucuguuccuuccuc

SEQ ID NO: 551090 - RNA, 21 nt, Artificial Sequence
  Synthetic
auugcugucuguuccuuccuc

SEQ ID NO: 551091 - RNA, 22 nt, Artificial Sequence
  Synthetic
gauugcugucuguuccuuccuc

SEQ ID NO: 551092 - RNA, 23 nt, Artificial Sequence
  Synthetic
agauugcugucuguuccuuccuc

SEQ ID NO: 551093 - RNA, 24 nt, Artificial Sequence
  Synthetic
aagauugcugucuguuccuuccuc

SEQ ID NO: 551094 - RNA, 18 nt, Artificial Sequence
  Synthetic
gcucuuaugcucuuccuc

SEQ ID NO: 551095 - RNA, 19 nt, Artificial Sequence
  Synthetic
ugcucuuaugcucuuccuc

SEQ ID NO: 551096 - RNA, 20 nt, Artificial Sequence
  Synthetic
augcucuuaugcucuuccuc

SEQ ID NO: 551097 - RNA, 21 nt, Artificial Sequence
  Synthetic
aaugcucuuaugcucuuccuc

SEQ ID NO: 551098 - RNA, 22 nt, Artificial Sequence
  Synthetic
uaaugcucuuaugcucuuccuc

SEQ ID NO: 551099 - RNA, 23 nt, Artificial Sequence
  Synthetic
auaaugcucuuaugcucuuccuc

SEQ ID NO: 551100 - RNA, 24 nt, Artificial Sequence
  Synthetic
uauaaugcucuuaugcucuuccuc

SEQ ID NO: 551101 - RNA, 18 nt, Artificial Sequence
  Synthetic
acuggguggaauuuccuc

SEQ ID NO: 551102 - RNA, 19 nt, Artificial Sequence
  Synthetic
uacuggguggaauuuccuc

SEQ ID NO: 551103 - RNA, 20 nt, Artificial Sequence
  Synthetic
uuacuggguggaauuuccuc

SEQ ID NO: 551104 - RNA, 21 nt, Artificial Sequence
  Synthetic
guuacuggguggaauuuccuc

SEQ ID NO: 551105 - RNA, 22 nt, Artificial Sequence
  Synthetic
aguuacuggguggaauuuccuc

SEQ ID NO: 551106 - RNA, 23 nt, Artificial Sequence
  Synthetic
gaguuacuggguggaauuuccuc

SEQ ID NO: 551107 - RNA, 24 nt, Artificial Sequence
  Synthetic
ugaguuacuggguggaauuuccuc

SEQ ID NO: 551108 - RNA, 18 nt, Artificial Sequence
  Synthetic
uucggugccucuuuccuc

SEQ ID NO: 551109 - RNA, 19 nt, Artificial Sequence
  Synthetic
cuucggugccucuuuccuc

SEQ ID NO: 551110 - RNA, 20 nt, Artificial Sequence
  Synthetic
ccuucggugccucuuuccuc

SEQ ID NO: 551111 - RNA, 21 nt, Artificial Sequence
  Synthetic
uccuucggugccucuuuccuc

SEQ ID NO: 551112 - RNA, 22 nt, Artificial Sequence
  Synthetic
uuccuucggugccucuuuccuc

SEQ ID NO: 551113 - RNA, 23 nt, Artificial Sequence
  Synthetic
guuccuucggugccucuuuccuc

SEQ ID NO: 551114 - RNA, 24 nt, Artificial Sequence
  Synthetic
uguuccuucggugccucuuuccuc

SEQ ID NO: 551115 - RNA, 18 nt, Artificial Sequence
  Synthetic
uucucaaaauguuuccuc

SEQ ID NO: 551116 - RNA, 19 nt, Artificial Sequence
  Synthetic
auucucaaaauguuuccuc

SEQ ID NO: 551117 - RNA, 20 nt, Artificial Sequence
  Synthetic
uauucucaaaauguuuccuc

SEQ ID NO: 551118 - RNA, 21 nt, Artificial Sequence
  Synthetic
uuauucucaaaauguuuccuc

SEQ ID NO: 551119 - RNA, 22 nt, Artificial Sequence
  Synthetic
guuauucucaaaauguuuccuc

SEQ ID NO: 551120 - RNA, 23 nt, Artificial Sequence
  Synthetic
uguuauucucaaaauguuuccuc

SEQ ID NO: 551121 - RNA, 24 nt, Artificial Sequence
  Synthetic
cuguuauucucaaaauguuuccuc

SEQ ID NO: 551122 - RNA, 18 nt, Artificial Sequence
  Synthetic
cacuaugaguaaaagcuc

SEQ ID NO: 551123 - RNA, 19 nt, Artificial Sequence
  Synthetic
ccacuaugaguaaaagcuc

SEQ ID NO: 551124 - RNA, 20 nt, Artificial Sequence
  Synthetic
uccacuaugaguaaaagcuc

SEQ ID NO: 551125 - RNA, 21 nt, Artificial Sequence
  Synthetic
uuccacuaugaguaaaagcuc

SEQ ID NO: 551126 - RNA, 22 nt, Artificial Sequence
  Synthetic
cuuccacuaugaguaaaagcuc

SEQ ID NO: 551127 - RNA, 23 nt, Artificial Sequence
  Synthetic
ucuuccacuaugaguaaaagcuc

SEQ ID NO: 551128 - RNA, 24 nt, Artificial Sequence
  Synthetic
aucuuccacuaugaguaaaagcuc

SEQ ID NO: 551129 - RNA, 18 nt, Artificial Sequence
  Synthetic
aaagccaacacaaagcuc

SEQ ID NO: 551130 - RNA, 19 nt, Artificial Sequence
  Synthetic
caaagccaacacaaagcuc

SEQ ID NO: 551131 - RNA, 20 nt, Artificial Sequence
  Synthetic
acaaagccaacacaaagcuc

SEQ ID NO: 551132 - RNA, 21 nt, Artificial Sequence
  Synthetic
aacaaagccaacacaaagcuc

SEQ ID NO: 551133 - RNA, 22 nt, Artificial Sequence
  Synthetic
caacaaagccaacacaaagcuc

SEQ ID NO: 551134 - RNA, 23 nt, Artificial Sequence
  Synthetic
acaacaaagccaacacaaagcuc

SEQ ID NO: 551135 - RNA, 24 nt, Artificial Sequence
  Synthetic
aacaacaaagccaacacaaagcuc

SEQ ID NO: 551136 - RNA, 18 nt, Artificial Sequence
  Synthetic
aagauugucccaaagcuc

SEQ ID NO: 551137 - RNA, 19 nt, Artificial Sequence
  Synthetic
gaagauugucccaaagcuc

SEQ ID NO: 551138 - RNA, 20 nt, Artificial Sequence
  Synthetic
ugaagauugucccaaagcuc

SEQ ID NO: 551139 - RNA, 21 nt, Artificial Sequence
  Synthetic
cugaagauugucccaaagcuc

SEQ ID NO: 551140 - RNA, 22 nt, Artificial Sequence
  Synthetic
gcugaagauugucccaaagcuc

SEQ ID NO: 551141 - RNA, 23 nt, Artificial Sequence
  Synthetic
agcugaagauugucccaaagcuc

SEQ ID NO: 551142 - RNA, 24 nt, Artificial Sequence
  Synthetic
uagcugaagauugucccaaagcuc

SEQ ID NO: 551143 - RNA, 18 nt, Artificial Sequence
  Synthetic
aguacuuaaagaaagcuc

SEQ ID NO: 551144 - RNA, 19 nt, Artificial Sequence
  Synthetic
aaguacuuaaagaaagcuc

SEQ ID NO: 551145 - RNA, 20 nt, Artificial Sequence
  Synthetic
caaguacuuaaagaaagcuc

SEQ ID NO: 551146 - RNA, 21 nt, Artificial Sequence
  Synthetic
acaaguacuuaaagaaagcuc

SEQ ID NO: 551147 - RNA, 22 nt, Artificial Sequence
  Synthetic
uacaaguacuuaaagaaagcuc

SEQ ID NO: 551148 - RNA, 23 nt, Artificial Sequence
  Synthetic
auacaaguacuuaaagaaagcuc

SEQ ID NO: 551149 - RNA, 24 nt, Artificial Sequence
  Synthetic
gauacaaguacuuaaagaaagcuc

SEQ ID NO: 551150 - RNA, 18 nt, Artificial Sequence
  Synthetic
cauagaauuagaaagcuc

SEQ ID NO: 551151 - RNA, 19 nt, Artificial Sequence
  Synthetic
gcauagaauuagaaagcuc

SEQ ID NO: 551152 - RNA, 20 nt, Artificial Sequence
  Synthetic
ugcauagaauuagaaagcuc

SEQ ID NO: 551153 - RNA, 21 nt, Artificial Sequence
  Synthetic
uugcauagaauuagaaagcuc

SEQ ID NO: 551154 - RNA, 22 nt, Artificial Sequence
  Synthetic
auugcauagaauuagaaagcuc

SEQ ID NO: 551155 - RNA, 23 nt, Artificial Sequence
  Synthetic
aauugcauagaauuagaaagcuc

SEQ ID NO: 551156 - RNA, 24 nt, Artificial Sequence
  Synthetic
aaauugcauagaauuagaaagcuc

SEQ ID NO: 551157 - RNA, 18 nt, Artificial Sequence
  Synthetic
guuucucagguaaagcuc

SEQ ID NO: 551158 - RNA, 19 nt, Artificial Sequence
  Synthetic
uguuucucagguaaagcuc

SEQ ID NO: 551159 - RNA, 20 nt, Artificial Sequence
  Synthetic
uuguuucucagguaaagcuc

SEQ ID NO: 551160 - RNA, 21 nt, Artificial Sequence
  Synthetic
cuuguuucucagguaaagcuc

SEQ ID NO: 551161 - RNA, 22 nt, Artificial Sequence
  Synthetic
ccuuguuucucagguaaagcuc

SEQ ID NO: 551162 - RNA, 23 nt, Artificial Sequence
  Synthetic
uccuuguuucucagguaaagcuc

SEQ ID NO: 551163 - RNA, 24 nt, Artificial Sequence
  Synthetic
cuccuuguuucucagguaaagcuc

SEQ ID NO: 551164 - RNA, 18 nt, Artificial Sequence
  Synthetic
cuuucaaggcagaagcuc

SEQ ID NO: 551165 - RNA, 19 nt, Artificial Sequence
  Synthetic
acuuucaaggcagaagcuc

SEQ ID NO: 551166 - RNA, 20 nt, Artificial Sequence
  Synthetic
uacuuucaaggcagaagcuc

SEQ ID NO: 551167 - RNA, 21 nt, Artificial Sequence
  Synthetic
uuacuuucaaggcagaagcuc

SEQ ID NO: 551168 - RNA, 22 nt, Artificial Sequence
  Synthetic
cuuacuuucaaggcagaagcuc

SEQ ID NO: 551169 - RNA, 23 nt, Artificial Sequence
  Synthetic
ucuuacuuucaaggcagaagcuc

SEQ ID NO: 551170 - RNA, 24 nt, Artificial Sequence
  Synthetic
uucuuacuuucaaggcagaagcuc

SEQ ID NO: 551171 - RNA, 18 nt, Artificial Sequence
  Synthetic
agauaagcaaggaagcuc

SEQ ID NO: 551172 - RNA, 19 nt, Artificial Sequence
  Synthetic
cagauaagcaaggaagcuc

SEQ ID NO: 551173 - RNA, 20 nt, Artificial Sequence
  Synthetic
acagauaagcaaggaagcuc

SEQ ID NO: 551174 - RNA, 21 nt, Artificial Sequence
  Synthetic
uacagauaagcaaggaagcuc

SEQ ID NO: 551175 - RNA, 22 nt, Artificial Sequence
  Synthetic
uuacagauaagcaaggaagcuc

SEQ ID NO: 551176 - RNA, 23 nt, Artificial Sequence
  Synthetic
auuacagauaagcaaggaagcuc

SEQ ID NO: 551177 - RNA, 24 nt, Artificial Sequence
  Synthetic
uauuacagauaagcaaggaagcuc

SEQ ID NO: 551178 - RNA, 18 nt, Artificial Sequence
  Synthetic
aaacaaaaugugaagcuc

SEQ ID NO: 551179 - RNA, 19 nt, Artificial Sequence
  Synthetic
gaaacaaaaugugaagcuc

SEQ ID NO: 551180 - RNA, 20 nt, Artificial Sequence
  Synthetic
ugaaacaaaaugugaagcuc

SEQ ID NO: 551181 - RNA, 21 nt, Artificial Sequence
  Synthetic
uugaaacaaaaugugaagcuc

SEQ ID NO: 551182 - RNA, 22 nt, Artificial Sequence
  Synthetic
auugaaacaaaaugugaagcuc

SEQ ID NO: 551183 - RNA, 23 nt, Artificial Sequence
  Synthetic
uauugaaacaaaaugugaagcuc

SEQ ID NO: 551184 - RNA, 24 nt, Artificial Sequence
  Synthetic
cuauugaaacaaaaugugaagcuc

SEQ ID NO: 551185 - RNA, 18 nt, Artificial Sequence
  Synthetic
aauuccacagguaagcuc

SEQ ID NO: 551186 - RNA, 19 nt, Artificial Sequence
  Synthetic
caauuccacagguaagcuc

SEQ ID NO: 551187 - RNA, 20 nt, Artificial Sequence
  Synthetic
acaauuccacagguaagcuc

SEQ ID NO: 551188 - RNA, 21 nt, Artificial Sequence
  Synthetic
cacaauuccacagguaagcuc

SEQ ID NO: 551189 - RNA, 22 nt, Artificial Sequence
  Synthetic
ucacaauuccacagguaagcuc

SEQ ID NO: 551190 - RNA, 23 nt, Artificial Sequence
  Synthetic
uucacaauuccacagguaagcuc

SEQ ID NO: 551191 - RNA, 24 nt, Artificial Sequence
  Synthetic
cuucacaauuccacagguaagcuc

SEQ ID NO: 551192 - RNA, 18 nt, Artificial Sequence
  Synthetic
agaacaacacaacagcuc

SEQ ID NO: 551193 - RNA, 19 nt, Artificial Sequence
  Synthetic
cagaacaacacaacagcuc

SEQ ID NO: 551194 - RNA, 20 nt, Artificial Sequence
  Synthetic
ccagaacaacacaacagcuc

SEQ ID NO: 551195 - RNA, 21 nt, Artificial Sequence
  Synthetic
gccagaacaacacaacagcuc

SEQ ID NO: 551196 - RNA, 22 nt, Artificial Sequence
  Synthetic
agccagaacaacacaacagcuc

SEQ ID NO: 551197 - RNA, 23 nt, Artificial Sequence
  Synthetic
gagccagaacaacacaacagcuc

SEQ ID NO: 551198 - RNA, 24 nt, Artificial Sequence
  Synthetic
ugagccagaacaacacaacagcuc

SEQ ID NO: 551199 - RNA, 18 nt, Artificial Sequence
  Synthetic
agguuugcugaacagcuc

SEQ ID NO: 551200 - RNA, 19 nt, Artificial Sequence
  Synthetic
aagguuugcugaacagcuc

SEQ ID NO: 551201 - RNA, 20 nt, Artificial Sequence
  Synthetic
caagguuugcugaacagcuc

SEQ ID NO: 551202 - RNA, 21 nt, Artificial Sequence
  Synthetic
gcaagguuugcugaacagcuc

SEQ ID NO: 551203 - RNA, 22 nt, Artificial Sequence
  Synthetic
ugcaagguuugcugaacagcuc

SEQ ID NO: 551204 - RNA, 23 nt, Artificial Sequence
  Synthetic
augcaagguuugcugaacagcuc

SEQ ID NO: 551205 - RNA, 24 nt, Artificial Sequence
  Synthetic
aaugcaagguuugcugaacagcuc

SEQ ID NO: 551206 - RNA, 18 nt, Artificial Sequence
  Synthetic
auucaacacaugcagcuc

SEQ ID NO: 551207 - RNA, 19 nt, Artificial Sequence
  Synthetic
cauucaacacaugcagcuc

SEQ ID NO: 551208 - RNA, 20 nt, Artificial Sequence
  Synthetic
ccauucaacacaugcagcuc

SEQ ID NO: 551209 - RNA, 21 nt, Artificial Sequence
  Synthetic
uccauucaacacaugcagcuc

SEQ ID NO: 551210 - RNA, 22 nt, Artificial Sequence
  Synthetic
uuccauucaacacaugcagcuc

SEQ ID NO: 551211 - RNA, 23 nt, Artificial Sequence
  Synthetic
guuccauucaacacaugcagcuc

SEQ ID NO: 551212 - RNA, 24 nt, Artificial Sequence
  Synthetic
aguuccauucaacacaugcagcuc

SEQ ID NO: 551213 - RNA, 18 nt, Artificial Sequence
  Synthetic
cauuucuaggcucagcuc

SEQ ID NO: 551214 - RNA, 19 nt, Artificial Sequence
  Synthetic
ccauuucuaggcucagcuc

SEQ ID NO: 551215 - RNA, 20 nt, Artificial Sequence
  Synthetic
cccauuucuaggcucagcuc

SEQ ID NO: 551216 - RNA, 21 nt, Artificial Sequence
  Synthetic
acccauuucuaggcucagcuc

SEQ ID NO: 551217 - RNA, 22 nt, Artificial Sequence
  Synthetic
gacccauuucuaggcucagcuc

SEQ ID NO: 551218 - RNA, 23 nt, Artificial Sequence
  Synthetic
ggacccauuucuaggcucagcuc

SEQ ID NO: 551219 - RNA, 24 nt, Artificial Sequence
  Synthetic
aggacccauuucuaggcucagcuc

SEQ ID NO: 551220 - RNA, 18 nt, Artificial Sequence
  Synthetic
ccugcccuaaaagagcuc

SEQ ID NO: 551221 - RNA, 19 nt, Artificial Sequence
  Synthetic
gccugcccuaaaagagcuc

SEQ ID NO: 551222 - RNA, 20 nt, Artificial Sequence
  Synthetic
ggccugcccuaaaagagcuc

SEQ ID NO: 551223 - RNA, 21 nt, Artificial Sequence
  Synthetic
aggccugcccuaaaagagcuc

SEQ ID NO: 551224 - RNA, 22 nt, Artificial Sequence
  Synthetic
caggccugcccuaaaagagcuc

SEQ ID NO: 551225 - RNA, 23 nt, Artificial Sequence
  Synthetic
ccaggccugcccuaaaagagcuc

SEQ ID NO: 551226 - RNA, 24 nt, Artificial Sequence
  Synthetic
accaggccugcccuaaaagagcuc

SEQ ID NO: 551227 - RNA, 18 nt, Artificial Sequence
  Synthetic
caaauauuauucgagcuc

SEQ ID NO: 551228 - RNA, 19 nt, Artificial Sequence
  Synthetic
gcaaauauuauucgagcuc

SEQ ID NO: 551229 - RNA, 20 nt, Artificial Sequence
  Synthetic
agcaaauauuauucgagcuc

SEQ ID NO: 551230 - RNA, 21 nt, Artificial Sequence
  Synthetic
aagcaaauauuauucgagcuc

SEQ ID NO: 551231 - RNA, 22 nt, Artificial Sequence
  Synthetic
aaagcaaauauuauucgagcuc

SEQ ID NO: 551232 - RNA, 23 nt, Artificial Sequence
  Synthetic
uaaagcaaauauuauucgagcuc

SEQ ID NO: 551233 - RNA, 24 nt, Artificial Sequence
  Synthetic
auaaagcaaauauuauucgagcuc

SEQ ID NO: 551234 - RNA, 18 nt, Artificial Sequence
  Synthetic
accugaggucaggagcuc

SEQ ID NO: 551235 - RNA, 19 nt, Artificial Sequence
  Synthetic
caccugaggucaggagcuc

SEQ ID NO: 551236 - RNA, 20 nt, Artificial Sequence
  Synthetic
ucaccugaggucaggagcuc

SEQ ID NO: 551237 - RNA, 21 nt, Artificial Sequence
  Synthetic
aucaccugaggucaggagcuc

SEQ ID NO: 551238 - RNA, 22 nt, Artificial Sequence
  Synthetic
gaucaccugaggucaggagcuc

SEQ ID NO: 551239 - RNA, 23 nt, Artificial Sequence
  Synthetic
agaucaccugaggucaggagcuc

SEQ ID NO: 551240 - RNA, 24 nt, Artificial Sequence
  Synthetic
cagaucaccugaggucaggagcuc

SEQ ID NO: 551241 - RNA, 18 nt, Artificial Sequence
  Synthetic
ucaagagaucuggagcuc

SEQ ID NO: 551242 - RNA, 19 nt, Artificial Sequence
  Synthetic
aucaagagaucuggagcuc

SEQ ID NO: 551243 - RNA, 20 nt, Artificial Sequence
  Synthetic
aaucaagagaucuggagcuc

SEQ ID NO: 551244 - RNA, 21 nt, Artificial Sequence
  Synthetic
aaaucaagagaucuggagcuc

SEQ ID NO: 551245 - RNA, 22 nt, Artificial Sequence
  Synthetic
uaaaucaagagaucuggagcuc

SEQ ID NO: 551246 - RNA, 23 nt, Artificial Sequence
  Synthetic
auaaaucaagagaucuggagcuc

SEQ ID NO: 551247 - RNA, 24 nt, Artificial Sequence
  Synthetic
aauaaaucaagagaucuggagcuc

SEQ ID NO: 551248 - RNA, 18 nt, Artificial Sequence
  Synthetic
cccccaguggcauagcuc

SEQ ID NO: 551249 - RNA, 19 nt, Artificial Sequence
  Synthetic
gcccccaguggcauagcuc

SEQ ID NO: 551250 - RNA, 20 nt, Artificial Sequence
  Synthetic
agcccccaguggcauagcuc

SEQ ID NO: 551251 - RNA, 21 nt, Artificial Sequence
  Synthetic
cagcccccaguggcauagcuc

SEQ ID NO: 551252 - RNA, 22 nt, Artificial Sequence
  Synthetic
ucagcccccaguggcauagcuc

SEQ ID NO: 551253 - RNA, 23 nt, Artificial Sequence
  Synthetic
uucagcccccaguggcauagcuc

SEQ ID NO: 551254 - RNA, 24 nt, Artificial Sequence
  Synthetic
auucagcccccaguggcauagcuc

SEQ ID NO: 551255 - RNA, 18 nt, Artificial Sequence
  Synthetic
auugugaacauguagcuc

SEQ ID NO: 551256 - RNA, 19 nt, Artificial Sequence
  Synthetic
aauugugaacauguagcuc

SEQ ID NO: 551257 - RNA, 20 nt, Artificial Sequence
  Synthetic
caauugugaacauguagcuc

SEQ ID NO: 551258 - RNA, 21 nt, Artificial Sequence
  Synthetic
acaauugugaacauguagcuc

SEQ ID NO: 551259 - RNA, 22 nt, Artificial Sequence
  Synthetic
uacaauugugaacauguagcuc

SEQ ID NO: 551260 - RNA, 23 nt, Artificial Sequence
  Synthetic
uuacaauugugaacauguagcuc

SEQ ID NO: 551261 - RNA, 24 nt, Artificial Sequence
  Synthetic
cuuacaauugugaacauguagcuc

SEQ ID NO: 551262 - RNA, 18 nt, Artificial Sequence
  Synthetic
aguaggaugaauuagcuc

SEQ ID NO: 551263 - RNA, 19 nt, Artificial Sequence
  Synthetic
aaguaggaugaauuagcuc

SEQ ID NO: 551264 - RNA, 20 nt, Artificial Sequence
  Synthetic
uaaguaggaugaauuagcuc

SEQ ID NO: 551265 - RNA, 21 nt, Artificial Sequence
  Synthetic
uuaaguaggaugaauuagcuc

SEQ ID NO: 551266 - RNA, 22 nt, Artificial Sequence
  Synthetic
guuaaguaggaugaauuagcuc

SEQ ID NO: 551267 - RNA, 23 nt, Artificial Sequence
  Synthetic
aguuaaguaggaugaauuagcuc

SEQ ID NO: 551268 - RNA, 24 nt, Artificial Sequence
  Synthetic
caguuaaguaggaugaauuagcuc

SEQ ID NO: 551269 - RNA, 18 nt, Artificial Sequence
  Synthetic
gcaauaccauuugcgcuc

SEQ ID NO: 551270 - RNA, 19 nt, Artificial Sequence
  Synthetic
agcaauaccauuugcgcuc

SEQ ID NO: 551271 - RNA, 20 nt, Artificial Sequence
  Synthetic
gagcaauaccauuugcgcuc

SEQ ID NO: 551272 - RNA, 21 nt, Artificial Sequence
  Synthetic
agagcaauaccauuugcgcuc

SEQ ID NO: 551273 - RNA, 22 nt, Artificial Sequence
  Synthetic
uagagcaauaccauuugcgcuc

SEQ ID NO: 551274 - RNA, 23 nt, Artificial Sequence
  Synthetic
cuagagcaauaccauuugcgcuc

SEQ ID NO: 551275 - RNA, 24 nt, Artificial Sequence
  Synthetic
ccuagagcaauaccauuugcgcuc

SEQ ID NO: 551276 - RNA, 18 nt, Artificial Sequence
  Synthetic
agcugaaaaccaaggcuc

SEQ ID NO: 551277 - RNA, 19 nt, Artificial Sequence
  Synthetic
gagcugaaaaccaaggcuc

SEQ ID NO: 551278 - RNA, 20 nt, Artificial Sequence
  Synthetic
ggagcugaaaaccaaggcuc

SEQ ID NO: 551279 - RNA, 21 nt, Artificial Sequence
  Synthetic
uggagcugaaaaccaaggcuc

SEQ ID NO: 551280 - RNA, 22 nt, Artificial Sequence
  Synthetic
auggagcugaaaaccaaggcuc

SEQ ID NO: 551281 - RNA, 23 nt, Artificial Sequence
  Synthetic
gauggagcugaaaaccaaggcuc

SEQ ID NO: 551282 - RNA, 24 nt, Artificial Sequence
  Synthetic
ugauggagcugaaaaccaaggcuc

SEQ ID NO: 551283 - RNA, 18 nt, Artificial Sequence
  Synthetic
cuuccaggcagaaggcuc

SEQ ID NO: 551284 - RNA, 19 nt, Artificial Sequence
  Synthetic
acuuccaggcagaaggcuc

SEQ ID NO: 551285 - RNA, 20 nt, Artificial Sequence
  Synthetic
cacuuccaggcagaaggcuc

SEQ ID NO: 551286 - RNA, 21 nt, Artificial Sequence
  Synthetic
ucacuuccaggcagaaggcuc

SEQ ID NO: 551287 - RNA, 22 nt, Artificial Sequence
  Synthetic
gucacuuccaggcagaaggcuc

SEQ ID NO: 551288 - RNA, 23 nt, Artificial Sequence
  Synthetic
ggucacuuccaggcagaaggcuc

SEQ ID NO: 551289 - RNA, 24 nt, Artificial Sequence
  Synthetic
uggucacuuccaggcagaaggcuc

SEQ ID NO: 551290 - RNA, 18 nt, Artificial Sequence
  Synthetic
gcuuauucauuaaggcuc

SEQ ID NO: 551291 - RNA, 19 nt, Artificial Sequence
  Synthetic
ggcuuauucauuaaggcuc

SEQ ID NO: 551292 - RNA, 20 nt, Artificial Sequence
  Synthetic
gggcuuauucauuaaggcuc

SEQ ID NO: 551293 - RNA, 21 nt, Artificial Sequence
  Synthetic
agggcuuauucauuaaggcuc

SEQ ID NO: 551294 - RNA, 22 nt, Artificial Sequence
  Synthetic
gagggcuuauucauuaaggcuc

SEQ ID NO: 551295 - RNA, 23 nt, Artificial Sequence
  Synthetic
agagggcuuauucauuaaggcuc

SEQ ID NO: 551296 - RNA, 24 nt, Artificial Sequence
  Synthetic
gagagggcuuauucauuaaggcuc

SEQ ID NO: 551297 - RNA, 18 nt, Artificial Sequence
  Synthetic
cugucguuucucaggcuc

SEQ ID NO: 551298 - RNA, 19 nt, Artificial Sequence
  Synthetic
gcugucguuucucaggcuc

SEQ ID NO: 551299 - RNA, 20 nt, Artificial Sequence
  Synthetic
agcugucguuucucaggcuc

SEQ ID NO: 551300 - RNA, 21 nt, Artificial Sequence
  Synthetic
aagcugucguuucucaggcuc

SEQ ID NO: 551301 - RNA, 22 nt, Artificial Sequence
  Synthetic
aaagcugucguuucucaggcuc

SEQ ID NO: 551302 - RNA, 23 nt, Artificial Sequence
  Synthetic
gaaagcugucguuucucaggcuc

SEQ ID NO: 551303 - RNA, 24 nt, Artificial Sequence
  Synthetic
ggaaagcugucguuucucaggcuc

SEQ ID NO: 551304 - RNA, 18 nt, Artificial Sequence
  Synthetic
auauuuggucauaggcuc

SEQ ID NO: 551305 - RNA, 19 nt, Artificial Sequence
  Synthetic
uauauuuggucauaggcuc

SEQ ID NO: 551306 - RNA, 20 nt, Artificial Sequence
  Synthetic
auauauuuggucauaggcuc

SEQ ID NO: 551307 - RNA, 21 nt, Artificial Sequence
  Synthetic
cauauauuuggucauaggcuc

SEQ ID NO: 551308 - RNA, 22 nt, Artificial Sequence
  Synthetic
ucauauauuuggucauaggcuc

SEQ ID NO: 551309 - RNA, 23 nt, Artificial Sequence
  Synthetic
aucauauauuuggucauaggcuc

SEQ ID NO: 551310 - RNA, 24 nt, Artificial Sequence
  Synthetic
uaucauauauuuggucauaggcuc

SEQ ID NO: 551311 - RNA, 18 nt, Artificial Sequence
  Synthetic
caacuacacucuaggcuc

SEQ ID NO: 551312 - RNA, 19 nt, Artificial Sequence
  Synthetic
ccaacuacacucuaggcuc

SEQ ID NO: 551313 - RNA, 20 nt, Artificial Sequence
  Synthetic
cccaacuacacucuaggcuc

SEQ ID NO: 551314 - RNA, 21 nt, Artificial Sequence
  Synthetic
ccccaacuacacucuaggcuc

SEQ ID NO: 551315 - RNA, 22 nt, Artificial Sequence
  Synthetic
uccccaacuacacucuaggcuc

SEQ ID NO: 551316 - RNA, 23 nt, Artificial Sequence
  Synthetic
cuccccaacuacacucuaggcuc

SEQ ID NO: 551317 - RNA, 24 nt, Artificial Sequence
  Synthetic
ucuccccaacuacacucuaggcuc

SEQ ID NO: 551318 - RNA, 18 nt, Artificial Sequence
  Synthetic
ggaacaugagaggggcuc

SEQ ID NO: 551319 - RNA, 19 nt, Artificial Sequence
  Synthetic
gggaacaugagaggggcuc

SEQ ID NO: 551320 - RNA, 20 nt, Artificial Sequence
  Synthetic
agggaacaugagaggggcuc

SEQ ID NO: 551321 - RNA, 21 nt, Artificial Sequence
  Synthetic
gagggaacaugagaggggcuc

SEQ ID NO: 551322 - RNA, 22 nt, Artificial Sequence
  Synthetic
ggagggaacaugagaggggcuc

SEQ ID NO: 551323 - RNA, 23 nt, Artificial Sequence
  Synthetic
gggagggaacaugagaggggcuc

SEQ ID NO: 551324 - RNA, 24 nt, Artificial Sequence
  Synthetic
ugggagggaacaugagaggggcuc

SEQ ID NO: 551325 - RNA, 18 nt, Artificial Sequence
  Synthetic
ugccacuacugggggcuc

SEQ ID NO: 551326 - RNA, 19 nt, Artificial Sequence
  Synthetic
cugccacuacugggggcuc

SEQ ID NO: 551327 - RNA, 20 nt, Artificial Sequence
  Synthetic
ccugccacuacugggggcuc

SEQ ID NO: 551328 - RNA, 21 nt, Artificial Sequence
  Synthetic
cccugccacuacugggggcuc

SEQ ID NO: 551329 - RNA, 22 nt, Artificial Sequence
  Synthetic
ucccugccacuacugggggcuc

SEQ ID NO: 551330 - RNA, 23 nt, Artificial Sequence
  Synthetic
cucccugccacuacugggggcuc

SEQ ID NO: 551331 - RNA, 24 nt, Artificial Sequence
  Synthetic
gcucccugccacuacugggggcuc

SEQ ID NO: 551332 - RNA, 18 nt, Artificial Sequence
  Synthetic
cuuccagcuugggggcuc

SEQ ID NO: 551333 - RNA, 19 nt, Artificial Sequence
  Synthetic
ucuuccagcuugggggcuc

SEQ ID NO: 551334 - RNA, 20 nt, Artificial Sequence
  Synthetic
gucuuccagcuugggggcuc

SEQ ID NO: 551335 - RNA, 21 nt, Artificial Sequence
  Synthetic
ugucuuccagcuugggggcuc

SEQ ID NO: 551336 - RNA, 22 nt, Artificial Sequence
  Synthetic
augucuuccagcuugggggcuc

SEQ ID NO: 551337 - RNA, 23 nt, Artificial Sequence
  Synthetic
gaugucuuccagcuugggggcuc

SEQ ID NO: 551338 - RNA, 24 nt, Artificial Sequence
  Synthetic
agaugucuuccagcuugggggcuc

SEQ ID NO: 551339 - RNA, 18 nt, Artificial Sequence
  Synthetic
ccuccaacuccugggcuc

SEQ ID NO: 551340 - RNA, 19 nt, Artificial Sequence
  Synthetic
accuccaacuccugggcuc

SEQ ID NO: 551341 - RNA, 20 nt, Artificial Sequence
  Synthetic
aaccuccaacuccugggcuc

SEQ ID NO: 551342 - RNA, 21 nt, Artificial Sequence
  Synthetic
uaaccuccaacuccugggcuc

SEQ ID NO: 551343 - RNA, 22 nt, Artificial Sequence
  Synthetic
guaaccuccaacuccugggcuc

SEQ ID NO: 551344 - RNA, 23 nt, Artificial Sequence
  Synthetic
uguaaccuccaacuccugggcuc

SEQ ID NO: 551345 - RNA, 24 nt, Artificial Sequence
  Synthetic
cuguaaccuccaacuccugggcuc

SEQ ID NO: 551346 - RNA, 18 nt, Artificial Sequence
  Synthetic
ucuuaauuuccugggcuc

SEQ ID NO: 551347 - RNA, 19 nt, Artificial Sequence
  Synthetic
gucuuaauuuccugggcuc

SEQ ID NO: 551348 - RNA, 20 nt, Artificial Sequence
  Synthetic
ggucuuaauuuccugggcuc

SEQ ID NO: 551349 - RNA, 21 nt, Artificial Sequence
  Synthetic
uggucuuaauuuccugggcuc

SEQ ID NO: 551350 - RNA, 22 nt, Artificial Sequence
  Synthetic
uuggucuuaauuuccugggcuc

SEQ ID NO: 551351 - RNA, 23 nt, Artificial Sequence
  Synthetic
guuggucuuaauuuccugggcuc

SEQ ID NO: 551352 - RNA, 24 nt, Artificial Sequence
  Synthetic
gguuggucuuaauuuccugggcuc

SEQ ID NO: 551353 - RNA, 18 nt, Artificial Sequence
  Synthetic
cacaaaaucugugggcuc

SEQ ID NO: 551354 - RNA, 19 nt, Artificial Sequence
  Synthetic
ucacaaaaucugugggcuc

SEQ ID NO: 551355 - RNA, 20 nt, Artificial Sequence
  Synthetic
cucacaaaaucugugggcuc

SEQ ID NO: 551356 - RNA, 21 nt, Artificial Sequence
  Synthetic
gcucacaaaaucugugggcuc

SEQ ID NO: 551357 - RNA, 22 nt, Artificial Sequence
  Synthetic
agcucacaaaaucugugggcuc

SEQ ID NO: 551358 - RNA, 23 nt, Artificial Sequence
  Synthetic
aagcucacaaaaucugugggcuc

SEQ ID NO: 551359 - RNA, 24 nt, Artificial Sequence
  Synthetic
aaagcucacaaaaucugugggcuc

SEQ ID NO: 551360 - RNA, 18 nt, Artificial Sequence
  Synthetic
uucaagagaaaauggcuc

SEQ ID NO: 551361 - RNA, 19 nt, Artificial Sequence
  Synthetic
uuucaagagaaaauggcuc

SEQ ID NO: 551362 - RNA, 20 nt, Artificial Sequence
  Synthetic
auuucaagagaaaauggcuc

SEQ ID NO: 551363 - RNA, 21 nt, Artificial Sequence
  Synthetic
aauuucaagagaaaauggcuc

SEQ ID NO: 551364 - RNA, 22 nt, Artificial Sequence
  Synthetic
gaauuucaagagaaaauggcuc

SEQ ID NO: 551365 - RNA, 23 nt, Artificial Sequence
  Synthetic
ugaauuucaagagaaaauggcuc

SEQ ID NO: 551366 - RNA, 24 nt, Artificial Sequence
  Synthetic
uugaauuucaagagaaaauggcuc

SEQ ID NO: 551367 - RNA, 18 nt, Artificial Sequence
  Synthetic
caagcccuuuaauggcuc

SEQ ID NO: 551368 - RNA, 19 nt, Artificial Sequence
  Synthetic
acaagcccuuuaauggcuc

SEQ ID NO: 551369 - RNA, 20 nt, Artificial Sequence
  Synthetic
aacaagcccuuuaauggcuc

SEQ ID NO: 551370 - RNA, 21 nt, Artificial Sequence
  Synthetic
uaacaagcccuuuaauggcuc

SEQ ID NO: 551371 - RNA, 22 nt, Artificial Sequence
  Synthetic
guaacaagcccuuuaauggcuc

SEQ ID NO: 551372 - RNA, 23 nt, Artificial Sequence
  Synthetic
gguaacaagcccuuuaauggcuc

SEQ ID NO: 551373 - RNA, 24 nt, Artificial Sequence
  Synthetic
agguaacaagcccuuuaauggcuc

SEQ ID NO: 551374 - RNA, 18 nt, Artificial Sequence
  Synthetic
guuuguaaacuauggcuc

SEQ ID NO: 551375 - RNA, 19 nt, Artificial Sequence
  Synthetic
uguuuguaaacuauggcuc

SEQ ID NO: 551376 - RNA, 20 nt, Artificial Sequence
  Synthetic
guguuuguaaacuauggcuc

SEQ ID NO: 551377 - RNA, 21 nt, Artificial Sequence
  Synthetic
aguguuuguaaacuauggcuc

SEQ ID NO: 551378 - RNA, 22 nt, Artificial Sequence
  Synthetic
aaguguuuguaaacuauggcuc

SEQ ID NO: 551379 - RNA, 23 nt, Artificial Sequence
  Synthetic
caaguguuuguaaacuauggcuc

SEQ ID NO: 551380 - RNA, 24 nt, Artificial Sequence
  Synthetic
gcaaguguuuguaaacuauggcuc

SEQ ID NO: 551381 - RNA, 18 nt, Artificial Sequence
  Synthetic
augucaaauaacuggcuc

SEQ ID NO: 551382 - RNA, 19 nt, Artificial Sequence
  Synthetic
aaugucaaauaacuggcuc

SEQ ID NO: 551383 - RNA, 20 nt, Artificial Sequence
  Synthetic
aaaugucaaauaacuggcuc

SEQ ID NO: 551384 - RNA, 21 nt, Artificial Sequence
  Synthetic
uaaaugucaaauaacuggcuc

SEQ ID NO: 551385 - RNA, 22 nt, Artificial Sequence
  Synthetic
guaaaugucaaauaacuggcuc

SEQ ID NO: 551386 - RNA, 23 nt, Artificial Sequence
  Synthetic
aguaaaugucaaauaacuggcuc

SEQ ID NO: 551387 - RNA, 24 nt, Artificial Sequence
  Synthetic
uaguaaaugucaaauaacuggcuc

SEQ ID NO: 551388 - RNA, 18 nt, Artificial Sequence
  Synthetic
gugaaauauuccuggcuc

SEQ ID NO: 551389 - RNA, 19 nt, Artificial Sequence
  Synthetic
agugaaauauuccuggcuc

SEQ ID NO: 551390 - RNA, 20 nt, Artificial Sequence
  Synthetic
cagugaaauauuccuggcuc

SEQ ID NO: 551391 - RNA, 21 nt, Artificial Sequence
  Synthetic
acagugaaauauuccuggcuc

SEQ ID NO: 551392 - RNA, 22 nt, Artificial Sequence
  Synthetic
aacagugaaauauuccuggcuc

SEQ ID NO: 551393 - RNA, 23 nt, Artificial Sequence
  Synthetic
gaacagugaaauauuccuggcuc

SEQ ID NO: 551394 - RNA, 24 nt, Artificial Sequence
  Synthetic
agaacagugaaauauuccuggcuc

SEQ ID NO: 551395 - RNA, 18 nt, Artificial Sequence
  Synthetic
aucagaaaauuguggcuc

SEQ ID NO: 551396 - RNA, 19 nt, Artificial Sequence
  Synthetic
aaucagaaaauuguggcuc

SEQ ID NO: 551397 - RNA, 20 nt, Artificial Sequence
  Synthetic
uaaucagaaaauuguggcuc

SEQ ID NO: 551398 - RNA, 21 nt, Artificial Sequence
  Synthetic
auaaucagaaaauuguggcuc

SEQ ID NO: 551399 - RNA, 22 nt, Artificial Sequence
  Synthetic
uauaaucagaaaauuguggcuc

SEQ ID NO: 551400 - RNA, 23 nt, Artificial Sequence
  Synthetic
auauaaucagaaaauuguggcuc

SEQ ID NO: 551401 - RNA, 24 nt, Artificial Sequence
  Synthetic
cauauaaucagaaaauuguggcuc

SEQ ID NO: 551402 - RNA, 18 nt, Artificial Sequence
  Synthetic
uauucacacuuguggcuc

SEQ ID NO: 551403 - RNA, 19 nt, Artificial Sequence
  Synthetic
guauucacacuuguggcuc

SEQ ID NO: 551404 - RNA, 20 nt, Artificial Sequence
  Synthetic
uguauucacacuuguggcuc

SEQ ID NO: 551405 - RNA, 21 nt, Artificial Sequence
  Synthetic
uuguauucacacuuguggcuc

SEQ ID NO: 551406 - RNA, 22 nt, Artificial Sequence
  Synthetic
uuuguauucacacuuguggcuc

SEQ ID NO: 551407 - RNA, 23 nt, Artificial Sequence
  Synthetic
uuuuguauucacacuuguggcuc

SEQ ID NO: 551408 - RNA, 24 nt, Artificial Sequence
  Synthetic
cuuuuguauucacacuuguggcuc

SEQ ID NO: 551409 - RNA, 18 nt, Artificial Sequence
  Synthetic
gauacacauaauuggcuc

SEQ ID NO: 551410 - RNA, 19 nt, Artificial Sequence
  Synthetic
agauacacauaauuggcuc

SEQ ID NO: 551411 - RNA, 20 nt, Artificial Sequence
  Synthetic
gagauacacauaauuggcuc

SEQ ID NO: 551412 - RNA, 21 nt, Artificial Sequence
  Synthetic
agagauacacauaauuggcuc

SEQ ID NO: 551413 - RNA, 22 nt, Artificial Sequence
  Synthetic
aagagauacacauaauuggcuc

SEQ ID NO: 551414 - RNA, 23 nt, Artificial Sequence
  Synthetic
aaagagauacacauaauuggcuc

SEQ ID NO: 551415 - RNA, 24 nt, Artificial Sequence
  Synthetic
gaaagagauacacauaauuggcuc

SEQ ID NO: 551416 - RNA, 18 nt, Artificial Sequence
  Synthetic
gugaaaugugguuggcuc

SEQ ID NO: 551417 - RNA, 19 nt, Artificial Sequence
  Synthetic
ggugaaaugugguuggcuc

SEQ ID NO: 551418 - RNA, 20 nt, Artificial Sequence
  Synthetic
aggugaaaugugguuggcuc

SEQ ID NO: 551419 - RNA, 21 nt, Artificial Sequence
  Synthetic
gaggugaaaugugguuggcuc

SEQ ID NO: 551420 - RNA, 22 nt, Artificial Sequence
  Synthetic
ugaggugaaaugugguuggcuc

SEQ ID NO: 551421 - RNA, 23 nt, Artificial Sequence
  Synthetic
uugaggugaaaugugguuggcuc

SEQ ID NO: 551422 - RNA, 24 nt, Artificial Sequence
  Synthetic
auugaggugaaaugugguuggcuc

SEQ ID NO: 551423 - RNA, 18 nt, Artificial Sequence
  Synthetic
aaugguuacuuuuggcuc

SEQ ID NO: 551424 - RNA, 19 nt, Artificial Sequence
  Synthetic
uaaugguuacuuuuggcuc

SEQ ID NO: 551425 - RNA, 20 nt, Artificial Sequence
  Synthetic
auaaugguuacuuuuggcuc

SEQ ID NO: 551426 - RNA, 21 nt, Artificial Sequence
  Synthetic
gauaaugguuacuuuuggcuc

SEQ ID NO: 551427 - RNA, 22 nt, Artificial Sequence
  Synthetic
agauaaugguuacuuuuggcuc

SEQ ID NO: 551428 - RNA, 23 nt, Artificial Sequence
  Synthetic
aagauaaugguuacuuuuggcuc

SEQ ID NO: 551429 - RNA, 24 nt, Artificial Sequence
  Synthetic
caagauaaugguuacuuuuggcuc

SEQ ID NO: 551430 - RNA, 18 nt, Artificial Sequence
  Synthetic
aucagagucuuuuggcuc

SEQ ID NO: 551431 - RNA, 19 nt, Artificial Sequence
  Synthetic
aaucagagucuuuuggcuc

SEQ ID NO: 551432 - RNA, 20 nt, Artificial Sequence
  Synthetic
gaaucagagucuuuuggcuc

SEQ ID NO: 551433 - RNA, 21 nt, Artificial Sequence
  Synthetic
ugaaucagagucuuuuggcuc

SEQ ID NO: 551434 - RNA, 22 nt, Artificial Sequence
  Synthetic
cugaaucagagucuuuuggcuc

SEQ ID NO: 551435 - RNA, 23 nt, Artificial Sequence
  Synthetic
acugaaucagagucuuuuggcuc

SEQ ID NO: 551436 - RNA, 24 nt, Artificial Sequence
  Synthetic
uacugaaucagagucuuuuggcuc

SEQ ID NO: 551437 - RNA, 18 nt, Artificial Sequence
  Synthetic
uagaagaaagaaaugcuc

SEQ ID NO: 551438 - RNA, 19 nt, Artificial Sequence
  Synthetic
auagaagaaagaaaugcuc

SEQ ID NO: 551439 - RNA, 20 nt, Artificial Sequence
  Synthetic
uauagaagaaagaaaugcuc

SEQ ID NO: 551440 - RNA, 21 nt, Artificial Sequence
  Synthetic
guauagaagaaagaaaugcuc

SEQ ID NO: 551441 - RNA, 22 nt, Artificial Sequence
  Synthetic
aguauagaagaaagaaaugcuc

SEQ ID NO: 551442 - RNA, 23 nt, Artificial Sequence
  Synthetic
gaguauagaagaaagaaaugcuc

SEQ ID NO: 551443 - RNA, 24 nt, Artificial Sequence
  Synthetic
ggaguauagaagaaagaaaugcuc

SEQ ID NO: 551444 - RNA, 18 nt, Artificial Sequence
  Synthetic
uaugguugcuaaaugcuc

SEQ ID NO: 551445 - RNA, 19 nt, Artificial Sequence
  Synthetic
auaugguugcuaaaugcuc

SEQ ID NO: 551446 - RNA, 20 nt, Artificial Sequence
  Synthetic
gauaugguugcuaaaugcuc

SEQ ID NO: 551447 - RNA, 21 nt, Artificial Sequence
  Synthetic
ggauaugguugcuaaaugcuc

SEQ ID NO: 551448 - RNA, 22 nt, Artificial Sequence
  Synthetic
uggauaugguugcuaaaugcuc

SEQ ID NO: 551449 - RNA, 23 nt, Artificial Sequence
  Synthetic
guggauaugguugcuaaaugcuc

SEQ ID NO: 551450 - RNA, 24 nt, Artificial Sequence
  Synthetic
gguggauaugguugcuaaaugcuc

SEQ ID NO: 551451 - RNA, 18 nt, Artificial Sequence
  Synthetic
ugauauagccuaaugcuc

SEQ ID NO: 551452 - RNA, 19 nt, Artificial Sequence
  Synthetic
augauauagccuaaugcuc

SEQ ID NO: 551453 - RNA, 20 nt, Artificial Sequence
  Synthetic
caugauauagccuaaugcuc

SEQ ID NO: 551454 - RNA, 21 nt, Artificial Sequence
  Synthetic
acaugauauagccuaaugcuc

SEQ ID NO: 551455 - RNA, 22 nt, Artificial Sequence
  Synthetic
uacaugauauagccuaaugcuc

SEQ ID NO: 551456 - RNA, 23 nt, Artificial Sequence
  Synthetic
cuacaugauauagccuaaugcuc

SEQ ID NO: 551457 - RNA, 24 nt, Artificial Sequence
  Synthetic
gcuacaugauauagccuaaugcuc

SEQ ID NO: 551458 - RNA, 18 nt, Artificial Sequence
  Synthetic
ggugcucagcacaugcuc

SEQ ID NO: 551459 - RNA, 19 nt, Artificial Sequence
  Synthetic
gggugcucagcacaugcuc

SEQ ID NO: 551460 - RNA, 20 nt, Artificial Sequence
  Synthetic
cgggugcucagcacaugcuc

SEQ ID NO: 551461 - RNA, 21 nt, Artificial Sequence
  Synthetic
acgggugcucagcacaugcuc

SEQ ID NO: 551462 - RNA, 22 nt, Artificial Sequence
  Synthetic
uacgggugcucagcacaugcuc

SEQ ID NO: 551463 - RNA, 23 nt, Artificial Sequence
  Synthetic
uuacgggugcucagcacaugcuc

SEQ ID NO: 551464 - RNA, 24 nt, Artificial Sequence
  Synthetic
uuuacgggugcucagcacaugcuc

SEQ ID NO: 551465 - RNA, 18 nt, Artificial Sequence
  Synthetic
caaagaaauuucaugcuc

SEQ ID NO: 551466 - RNA, 19 nt, Artificial Sequence
  Synthetic
ucaaagaaauuucaugcuc

SEQ ID NO: 551467 - RNA, 20 nt, Artificial Sequence
  Synthetic
aucaaagaaauuucaugcuc

SEQ ID NO: 551468 - RNA, 21 nt, Artificial Sequence
  Synthetic
caucaaagaaauuucaugcuc

SEQ ID NO: 551469 - RNA, 22 nt, Artificial Sequence
  Synthetic
acaucaaagaaauuucaugcuc

SEQ ID NO: 551470 - RNA, 23 nt, Artificial Sequence
  Synthetic
aacaucaaagaaauuucaugcuc

SEQ ID NO: 551471 - RNA, 24 nt, Artificial Sequence
  Synthetic
gaacaucaaagaaauuucaugcuc

SEQ ID NO: 551472 - RNA, 18 nt, Artificial Sequence
  Synthetic
uuugauucauauaugcuc

SEQ ID NO: 551473 - RNA, 19 nt, Artificial Sequence
  Synthetic
uuuugauucauauaugcuc

SEQ ID NO: 551474 - RNA, 20 nt, Artificial Sequence
  Synthetic
guuuugauucauauaugcuc

SEQ ID NO: 551475 - RNA, 21 nt, Artificial Sequence
  Synthetic
aguuuugauucauauaugcuc

SEQ ID NO: 551476 - RNA, 22 nt, Artificial Sequence
  Synthetic
aaguuuugauucauauaugcuc

SEQ ID NO: 551477 - RNA, 23 nt, Artificial Sequence
  Synthetic
uaaguuuugauucauauaugcuc

SEQ ID NO: 551478 - RNA, 24 nt, Artificial Sequence
  Synthetic
guaaguuuugauucauauaugcuc

SEQ ID NO: 551479 - RNA, 18 nt, Artificial Sequence
  Synthetic
guuuaagaaucacugcuc

SEQ ID NO: 551480 - RNA, 19 nt, Artificial Sequence
  Synthetic
aguuuaagaaucacugcuc

SEQ ID NO: 551481 - RNA, 20 nt, Artificial Sequence
  Synthetic
aaguuuaagaaucacugcuc

SEQ ID NO: 551482 - RNA, 21 nt, Artificial Sequence
  Synthetic
uaaguuuaagaaucacugcuc

SEQ ID NO: 551483 - RNA, 22 nt, Artificial Sequence
  Synthetic
auaaguuuaagaaucacugcuc

SEQ ID NO: 551484 - RNA, 23 nt, Artificial Sequence
  Synthetic
aauaaguuuaagaaucacugcuc

SEQ ID NO: 551485 - RNA, 24 nt, Artificial Sequence
  Synthetic
aaauaaguuuaagaaucacugcuc

SEQ ID NO: 551486 - RNA, 18 nt, Artificial Sequence
  Synthetic
uggguuaacauacugcuc

SEQ ID NO: 551487 - RNA, 19 nt, Artificial Sequence
  Synthetic
uuggguuaacauacugcuc

SEQ ID NO: 551488 - RNA, 20 nt, Artificial Sequence
  Synthetic
cuuggguuaacauacugcuc

SEQ ID NO: 551489 - RNA, 21 nt, Artificial Sequence
  Synthetic
ucuuggguuaacauacugcuc

SEQ ID NO: 551490 - RNA, 22 nt, Artificial Sequence
  Synthetic
gucuuggguuaacauacugcuc

SEQ ID NO: 551491 - RNA, 23 nt, Artificial Sequence
  Synthetic
ugucuuggguuaacauacugcuc

SEQ ID NO: 551492 - RNA, 24 nt, Artificial Sequence
  Synthetic
uugucuuggguuaacauacugcuc

SEQ ID NO: 551493 - RNA, 18 nt, Artificial Sequence
  Synthetic
acagugcauggccugcuc

SEQ ID NO: 551494 - RNA, 19 nt, Artificial Sequence
  Synthetic
uacagugcauggccugcuc

SEQ ID NO: 551495 - RNA, 20 nt, Artificial Sequence
  Synthetic
uuacagugcauggccugcuc

SEQ ID NO: 551496 - RNA, 21 nt, Artificial Sequence
  Synthetic
uuuacagugcauggccugcuc

SEQ ID NO: 551497 - RNA, 22 nt, Artificial Sequence
  Synthetic
auuuacagugcauggccugcuc

SEQ ID NO: 551498 - RNA, 23 nt, Artificial Sequence
  Synthetic
uauuuacagugcauggccugcuc

SEQ ID NO: 551499 - RNA, 24 nt, Artificial Sequence
  Synthetic
auauuuacagugcauggccugcuc

SEQ ID NO: 551500 - RNA, 18 nt, Artificial Sequence
  Synthetic
cugugguaccagcugcuc

SEQ ID NO: 551501 - RNA, 19 nt, Artificial Sequence
  Synthetic
ccugugguaccagcugcuc

SEQ ID NO: 551502 - RNA, 20 nt, Artificial Sequence
  Synthetic
gccugugguaccagcugcuc

SEQ ID NO: 551503 - RNA, 21 nt, Artificial Sequence
  Synthetic
cgccugugguaccagcugcuc

SEQ ID NO: 551504 - RNA, 22 nt, Artificial Sequence
  Synthetic
gcgccugugguaccagcugcuc

SEQ ID NO: 551505 - RNA, 23 nt, Artificial Sequence
  Synthetic
ggcgccugugguaccagcugcuc

SEQ ID NO: 551506 - RNA, 24 nt, Artificial Sequence
  Synthetic
aggcgccugugguaccagcugcuc

SEQ ID NO: 551507 - RNA, 18 nt, Artificial Sequence
  Synthetic
cuguagucccagcugcuc

SEQ ID NO: 551508 - RNA, 19 nt, Artificial Sequence
  Synthetic
ccuguagucccagcugcuc

SEQ ID NO: 551509 - RNA, 20 nt, Artificial Sequence
  Synthetic
gccuguagucccagcugcuc

SEQ ID NO: 551510 - RNA, 21 nt, Artificial Sequence
  Synthetic
cgccuguagucccagcugcuc

SEQ ID NO: 551511 - RNA, 22 nt, Artificial Sequence
  Synthetic
gcgccuguagucccagcugcuc

SEQ ID NO: 551512 - RNA, 23 nt, Artificial Sequence
  Synthetic
ggcgccuguagucccagcugcuc

SEQ ID NO: 551513 - RNA, 24 nt, Artificial Sequence
  Synthetic
gggcgccuguagucccagcugcuc

SEQ ID NO: 551514 - RNA, 18 nt, Artificial Sequence
  Synthetic
gauggugcugggcugcuc

SEQ ID NO: 551515 - RNA, 19 nt, Artificial Sequence
  Synthetic
ugauggugcugggcugcuc

SEQ ID NO: 551516 - RNA, 20 nt, Artificial Sequence
  Synthetic
gugauggugcugggcugcuc

SEQ ID NO: 551517 - RNA, 21 nt, Artificial Sequence
  Synthetic
agugauggugcugggcugcuc

SEQ ID NO: 551518 - RNA, 22 nt, Artificial Sequence
  Synthetic
gagugauggugcugggcugcuc

SEQ ID NO: 551519 - RNA, 23 nt, Artificial Sequence
  Synthetic
ggagugauggugcugggcugcuc

SEQ ID NO: 551520 - RNA, 24 nt, Artificial Sequence
  Synthetic
uggagugauggugcugggcugcuc

SEQ ID NO: 551521 - RNA, 18 nt, Artificial Sequence
  Synthetic
ccacagugccaucugcuc

SEQ ID NO: 551522 - RNA, 19 nt, Artificial Sequence
  Synthetic
uccacagugccaucugcuc

SEQ ID NO: 551523 - RNA, 20 nt, Artificial Sequence
  Synthetic
uuccacagugccaucugcuc

SEQ ID NO: 551524 - RNA, 21 nt, Artificial Sequence
  Synthetic
cuuccacagugccaucugcuc

SEQ ID NO: 551525 - RNA, 22 nt, Artificial Sequence
  Synthetic
acuuccacagugccaucugcuc

SEQ ID NO: 551526 - RNA, 23 nt, Artificial Sequence
  Synthetic
gacuuccacagugccaucugcuc

SEQ ID NO: 551527 - RNA, 24 nt, Artificial Sequence
  Synthetic
ugacuuccacagugccaucugcuc

SEQ ID NO: 551528 - RNA, 18 nt, Artificial Sequence
  Synthetic
cuggaaagcgaucugcuc

SEQ ID NO: 551529 - RNA, 19 nt, Artificial Sequence
  Synthetic
ucuggaaagcgaucugcuc

SEQ ID NO: 551530 - RNA, 20 nt, Artificial Sequence
  Synthetic
aucuggaaagcgaucugcuc

SEQ ID NO: 551531 - RNA, 21 nt, Artificial Sequence
  Synthetic
uaucuggaaagcgaucugcuc

SEQ ID NO: 551532 - RNA, 22 nt, Artificial Sequence
  Synthetic
auaucuggaaagcgaucugcuc

SEQ ID NO: 551533 - RNA, 23 nt, Artificial Sequence
  Synthetic
uauaucuggaaagcgaucugcuc

SEQ ID NO: 551534 - RNA, 24 nt, Artificial Sequence
  Synthetic
guauaucuggaaagcgaucugcuc

SEQ ID NO: 551535 - RNA, 18 nt, Artificial Sequence
  Synthetic
cugucuuacuaucugcuc

SEQ ID NO: 551536 - RNA, 19 nt, Artificial Sequence
  Synthetic
ucugucuuacuaucugcuc

SEQ ID NO: 551537 - RNA, 20 nt, Artificial Sequence
  Synthetic
uucugucuuacuaucugcuc

SEQ ID NO: 551538 - RNA, 21 nt, Artificial Sequence
  Synthetic
uuucugucuuacuaucugcuc

SEQ ID NO: 551539 - RNA, 22 nt, Artificial Sequence
  Synthetic
uuuucugucuuacuaucugcuc

SEQ ID NO: 551540 - RNA, 23 nt, Artificial Sequence
  Synthetic
uuuuucugucuuacuaucugcuc

SEQ ID NO: 551541 - RNA, 24 nt, Artificial Sequence
  Synthetic
uuuuuucugucuuacuaucugcuc

SEQ ID NO: 551542 - RNA, 18 nt, Artificial Sequence
  Synthetic
uucuccuucucucugcuc

SEQ ID NO: 551543 - RNA, 19 nt, Artificial Sequence
  Synthetic
uuucuccuucucucugcuc

SEQ ID NO: 551544 - RNA, 20 nt, Artificial Sequence
  Synthetic
auuucuccuucucucugcuc

SEQ ID NO: 551545 - RNA, 21 nt, Artificial Sequence
  Synthetic
uauuucuccuucucucugcuc

SEQ ID NO: 551546 - RNA, 22 nt, Artificial Sequence
  Synthetic
guauuucuccuucucucugcuc

SEQ ID NO: 551547 - RNA, 23 nt, Artificial Sequence
  Synthetic
gguauuucuccuucucucugcuc

SEQ ID NO: 551548 - RNA, 24 nt, Artificial Sequence
  Synthetic
ggguauuucuccuucucucugcuc

SEQ ID NO: 551549 - RNA, 18 nt, Artificial Sequence
  Synthetic
acagcgagguuucugcuc

SEQ ID NO: 551550 - RNA, 19 nt, Artificial Sequence
  Synthetic
cacagcgagguuucugcuc

SEQ ID NO: 551551 - RNA, 20 nt, Artificial Sequence
  Synthetic
ccacagcgagguuucugcuc

SEQ ID NO: 551552 - RNA, 21 nt, Artificial Sequence
  Synthetic
uccacagcgagguuucugcuc

SEQ ID NO: 551553 - RNA, 22 nt, Artificial Sequence
  Synthetic
cuccacagcgagguuucugcuc

SEQ ID NO: 551554 - RNA, 23 nt, Artificial Sequence
  Synthetic
acuccacagcgagguuucugcuc

SEQ ID NO: 551555 - RNA, 24 nt, Artificial Sequence
  Synthetic
aacuccacagcgagguuucugcuc

SEQ ID NO: 551556 - RNA, 18 nt, Artificial Sequence
  Synthetic
ugucggaaugaagugcuc

SEQ ID NO: 551557 - RNA, 19 nt, Artificial Sequence
  Synthetic
uugucggaaugaagugcuc

SEQ ID NO: 551558 - RNA, 20 nt, Artificial Sequence
  Synthetic
cuugucggaaugaagugcuc

SEQ ID NO: 551559 - RNA, 21 nt, Artificial Sequence
  Synthetic
ucuugucggaaugaagugcuc

SEQ ID NO: 551560 - RNA, 22 nt, Artificial Sequence
  Synthetic
gucuugucggaaugaagugcuc

SEQ ID NO: 551561 - RNA, 23 nt, Artificial Sequence
  Synthetic
ugucuugucggaaugaagugcuc

SEQ ID NO: 551562 - RNA, 24 nt, Artificial Sequence
  Synthetic
gugucuugucggaaugaagugcuc

SEQ ID NO: 551563 - RNA, 18 nt, Artificial Sequence
  Synthetic
uaacuaucaucagugcuc

SEQ ID NO: 551564 - RNA, 19 nt, Artificial Sequence
  Synthetic
uuaacuaucaucagugcuc

SEQ ID NO: 551565 - RNA, 20 nt, Artificial Sequence
  Synthetic
uuuaacuaucaucagugcuc

SEQ ID NO: 551566 - RNA, 21 nt, Artificial Sequence
  Synthetic
auuuaacuaucaucagugcuc

SEQ ID NO: 551567 - RNA, 22 nt, Artificial Sequence
  Synthetic
aauuuaacuaucaucagugcuc

SEQ ID NO: 551568 - RNA, 23 nt, Artificial Sequence
  Synthetic
uaauuuaacuaucaucagugcuc

SEQ ID NO: 551569 - RNA, 24 nt, Artificial Sequence
  Synthetic
cuaauuuaacuaucaucagugcuc

SEQ ID NO: 551570 - RNA, 18 nt, Artificial Sequence
  Synthetic
aaaccugcacacgugcuc

SEQ ID NO: 551571 - RNA, 19 nt, Artificial Sequence
  Synthetic
caaaccugcacacgugcuc

SEQ ID NO: 551572 - RNA, 20 nt, Artificial Sequence
  Synthetic
acaaaccugcacacgugcuc

SEQ ID NO: 551573 - RNA, 21 nt, Artificial Sequence
  Synthetic
aacaaaccugcacacgugcuc

SEQ ID NO: 551574 - RNA, 22 nt, Artificial Sequence
  Synthetic
uaacaaaccugcacacgugcuc

SEQ ID NO: 551575 - RNA, 23 nt, Artificial Sequence
  Synthetic
auaacaaaccugcacacgugcuc

SEQ ID NO: 551576 - RNA, 24 nt, Artificial Sequence
  Synthetic
uauaacaaaccugcacacgugcuc

SEQ ID NO: 551577 - RNA, 18 nt, Artificial Sequence
  Synthetic
aagauuuggugugugcuc

SEQ ID NO: 551578 - RNA, 19 nt, Artificial Sequence
  Synthetic
uaagauuuggugugugcuc

SEQ ID NO: 551579 - RNA, 20 nt, Artificial Sequence
  Synthetic
auaagauuuggugugugcuc

SEQ ID NO: 551580 - RNA, 21 nt, Artificial Sequence
  Synthetic
uauaagauuuggugugugcuc

SEQ ID NO: 551581 - RNA, 22 nt, Artificial Sequence
  Synthetic
auauaagauuuggugugugcuc

SEQ ID NO: 551582 - RNA, 23 nt, Artificial Sequence
  Synthetic
aauauaagauuuggugugugcuc

SEQ ID NO: 551583 - RNA, 24 nt, Artificial Sequence
  Synthetic
aaauauaagauuuggugugugcuc

SEQ ID NO: 551584 - RNA, 18 nt, Artificial Sequence
  Synthetic
cccuuaggauaauugcuc

SEQ ID NO: 551585 - RNA, 19 nt, Artificial Sequence
  Synthetic
ucccuuaggauaauugcuc

SEQ ID NO: 551586 - RNA, 20 nt, Artificial Sequence
  Synthetic
gucccuuaggauaauugcuc

SEQ ID NO: 551587 - RNA, 21 nt, Artificial Sequence
  Synthetic
ugucccuuaggauaauugcuc

SEQ ID NO: 551588 - RNA, 22 nt, Artificial Sequence
  Synthetic
uugucccuuaggauaauugcuc

SEQ ID NO: 551589 - RNA, 23 nt, Artificial Sequence
  Synthetic
cuugucccuuaggauaauugcuc

SEQ ID NO: 551590 - RNA, 24 nt, Artificial Sequence
  Synthetic
ucuugucccuuaggauaauugcuc

SEQ ID NO: 551591 - RNA, 18 nt, Artificial Sequence
  Synthetic
gaguuuagugcauugcuc

SEQ ID NO: 551592 - RNA, 19 nt, Artificial Sequence
  Synthetic
ggaguuuagugcauugcuc

SEQ ID NO: 551593 - RNA, 20 nt, Artificial Sequence
  Synthetic
uggaguuuagugcauugcuc

SEQ ID NO: 551594 - RNA, 21 nt, Artificial Sequence
  Synthetic
uuggaguuuagugcauugcuc

SEQ ID NO: 551595 - RNA, 22 nt, Artificial Sequence
  Synthetic
cuuggaguuuagugcauugcuc

SEQ ID NO: 551596 - RNA, 23 nt, Artificial Sequence
  Synthetic
ccuuggaguuuagugcauugcuc

SEQ ID NO: 551597 - RNA, 24 nt, Artificial Sequence
  Synthetic
accuuggaguuuagugcauugcuc

SEQ ID NO: 551598 - RNA, 18 nt, Artificial Sequence
  Synthetic
gggauggucagauugcuc

SEQ ID NO: 551599 - RNA, 19 nt, Artificial Sequence
  Synthetic
agggauggucagauugcuc

SEQ ID NO: 551600 - RNA, 20 nt, Artificial Sequence
  Synthetic
uagggauggucagauugcuc

SEQ ID NO: 551601 - RNA, 21 nt, Artificial Sequence
  Synthetic
cuagggauggucagauugcuc

SEQ ID NO: 551602 - RNA, 22 nt, Artificial Sequence
  Synthetic
acuagggauggucagauugcuc

SEQ ID NO: 551603 - RNA, 23 nt, Artificial Sequence
  Synthetic
gacuagggauggucagauugcuc

SEQ ID NO: 551604 - RNA, 24 nt, Artificial Sequence
  Synthetic
agacuagggauggucagauugcuc

SEQ ID NO: 551605 - RNA, 18 nt, Artificial Sequence
  Synthetic
gcaguugcuauauugcuc

SEQ ID NO: 551606 - RNA, 19 nt, Artificial Sequence
  Synthetic
agcaguugcuauauugcuc

SEQ ID NO: 551607 - RNA, 20 nt, Artificial Sequence
  Synthetic
aagcaguugcuauauugcuc

SEQ ID NO: 551608 - RNA, 21 nt, Artificial Sequence
  Synthetic
caagcaguugcuauauugcuc

SEQ ID NO: 551609 - RNA, 22 nt, Artificial Sequence
  Synthetic
gcaagcaguugcuauauugcuc

SEQ ID NO: 551610 - RNA, 23 nt, Artificial Sequence
  Synthetic
ggcaagcaguugcuauauugcuc

SEQ ID NO: 551611 - RNA, 24 nt, Artificial Sequence
  Synthetic
uggcaagcaguugcuauauugcuc

SEQ ID NO: 551612 - RNA, 18 nt, Artificial Sequence
  Synthetic
gauuuaagagacuugcuc

SEQ ID NO: 551613 - RNA, 19 nt, Artificial Sequence
  Synthetic
agauuuaagagacuugcuc

SEQ ID NO: 551614 - RNA, 20 nt, Artificial Sequence
  Synthetic
aagauuuaagagacuugcuc

SEQ ID NO: 551615 - RNA, 21 nt, Artificial Sequence
  Synthetic
gaagauuuaagagacuugcuc

SEQ ID NO: 551616 - RNA, 22 nt, Artificial Sequence
  Synthetic
agaagauuuaagagacuugcuc

SEQ ID NO: 551617 - RNA, 23 nt, Artificial Sequence
  Synthetic
cagaagauuuaagagacuugcuc

SEQ ID NO: 551618 - RNA, 24 nt, Artificial Sequence
  Synthetic
gcagaagauuuaagagacuugcuc

SEQ ID NO: 551619 - RNA, 18 nt, Artificial Sequence
  Synthetic
agggaagagagcuugcuc

SEQ ID NO: 551620 - RNA, 19 nt, Artificial Sequence
  Synthetic
cagggaagagagcuugcuc

SEQ ID NO: 551621 - RNA, 20 nt, Artificial Sequence
  Synthetic
gcagggaagagagcuugcuc

SEQ ID NO: 551622 - RNA, 21 nt, Artificial Sequence
  Synthetic
agcagggaagagagcuugcuc

SEQ ID NO: 551623 - RNA, 22 nt, Artificial Sequence
  Synthetic
cagcagggaagagagcuugcuc

SEQ ID NO: 551624 - RNA, 23 nt, Artificial Sequence
  Synthetic
gcagcagggaagagagcuugcuc

SEQ ID NO: 551625 - RNA, 24 nt, Artificial Sequence
  Synthetic
ggcagcagggaagagagcuugcuc

SEQ ID NO: 551626 - RNA, 18 nt, Artificial Sequence
  Synthetic
auggaugaaugcuugcuc

SEQ ID NO: 551627 - RNA, 19 nt, Artificial Sequence
  Synthetic
aauggaugaaugcuugcuc

SEQ ID NO: 551628 - RNA, 20 nt, Artificial Sequence
  Synthetic
gaauggaugaaugcuugcuc

SEQ ID NO: 551629 - RNA, 21 nt, Artificial Sequence
  Synthetic
ugaauggaugaaugcuugcuc

SEQ ID NO: 551630 - RNA, 22 nt, Artificial Sequence
  Synthetic
cugaauggaugaaugcuugcuc

SEQ ID NO: 551631 - RNA, 23 nt, Artificial Sequence
  Synthetic
ccugaauggaugaaugcuugcuc

SEQ ID NO: 551632 - RNA, 24 nt, Artificial Sequence
  Synthetic
cccugaauggaugaaugcuugcuc

SEQ ID NO: 551633 - RNA, 18 nt, Artificial Sequence
  Synthetic
ucccucagacaguugcuc

SEQ ID NO: 551634 - RNA, 19 nt, Artificial Sequence
  Synthetic
uucccucagacaguugcuc

SEQ ID NO: 551635 - RNA, 20 nt, Artificial Sequence
  Synthetic
uuucccucagacaguugcuc

SEQ ID NO: 551636 - RNA, 21 nt, Artificial Sequence
  Synthetic
cuuucccucagacaguugcuc

SEQ ID NO: 551637 - RNA, 22 nt, Artificial Sequence
  Synthetic
ucuuucccucagacaguugcuc

SEQ ID NO: 551638 - RNA, 23 nt, Artificial Sequence
  Synthetic
uucuuucccucagacaguugcuc

SEQ ID NO: 551639 - RNA, 24 nt, Artificial Sequence
  Synthetic
auucuuucccucagacaguugcuc

SEQ ID NO: 551640 - RNA, 18 nt, Artificial Sequence
  Synthetic
cuguugcccagguugcuc

SEQ ID NO: 551641 - RNA, 19 nt, Artificial Sequence
  Synthetic
ucuguugcccagguugcuc

SEQ ID NO: 551642 - RNA, 20 nt, Artificial Sequence
  Synthetic
cucuguugcccagguugcuc

SEQ ID NO: 551643 - RNA, 21 nt, Artificial Sequence
  Synthetic
acucuguugcccagguugcuc

SEQ ID NO: 551644 - RNA, 22 nt, Artificial Sequence
  Synthetic
cacucuguugcccagguugcuc

SEQ ID NO: 551645 - RNA, 23 nt, Artificial Sequence
  Synthetic
ucacucuguugcccagguugcuc

SEQ ID NO: 551646 - RNA, 24 nt, Artificial Sequence
  Synthetic
cucacucuguugcccagguugcuc

SEQ ID NO: 551647 - RNA, 18 nt, Artificial Sequence
  Synthetic
uugcucagcugguugcuc

SEQ ID NO: 551648 - RNA, 19 nt, Artificial Sequence
  Synthetic
uuugcucagcugguugcuc

SEQ ID NO: 551649 - RNA, 20 nt, Artificial Sequence
  Synthetic
cuuugcucagcugguugcuc

SEQ ID NO: 551650 - RNA, 21 nt, Artificial Sequence
  Synthetic
ucuuugcucagcugguugcuc

SEQ ID NO: 551651 - RNA, 22 nt, Artificial Sequence
  Synthetic
aucuuugcucagcugguugcuc

SEQ ID NO: 551652 - RNA, 23 nt, Artificial Sequence
  Synthetic
aaucuuugcucagcugguugcuc

SEQ ID NO: 551653 - RNA, 24 nt, Artificial Sequence
  Synthetic
aaaucuuugcucagcugguugcuc

SEQ ID NO: 551654 - RNA, 18 nt, Artificial Sequence
  Synthetic
uuaguaggcaauuugcuc

SEQ ID NO: 551655 - RNA, 19 nt, Artificial Sequence
  Synthetic
auuaguaggcaauuugcuc

SEQ ID NO: 551656 - RNA, 20 nt, Artificial Sequence
  Synthetic
aauuaguaggcaauuugcuc

SEQ ID NO: 551657 - RNA, 21 nt, Artificial Sequence
  Synthetic
uaauuaguaggcaauuugcuc

SEQ ID NO: 551658 - RNA, 22 nt, Artificial Sequence
  Synthetic
uuaauuaguaggcaauuugcuc

SEQ ID NO: 551659 - RNA, 23 nt, Artificial Sequence
  Synthetic
uuuaauuaguaggcaauuugcuc

SEQ ID NO: 551660 - RNA, 24 nt, Artificial Sequence
  Synthetic
auuuaauuaguaggcaauuugcuc

SEQ ID NO: 551661 - RNA, 18 nt, Artificial Sequence
  Synthetic
gaaugggaacguuugcuc

SEQ ID NO: 551662 - RNA, 19 nt, Artificial Sequence
  Synthetic
ugaaugggaacguuugcuc

SEQ ID NO: 551663 - RNA, 20 nt, Artificial Sequence
  Synthetic
augaaugggaacguuugcuc

SEQ ID NO: 551664 - RNA, 21 nt, Artificial Sequence
  Synthetic
aaugaaugggaacguuugcuc

SEQ ID NO: 551665 - RNA, 22 nt, Artificial Sequence
  Synthetic
aaaugaaugggaacguuugcuc

SEQ ID NO: 551666 - RNA, 23 nt, Artificial Sequence
  Synthetic
caaaugaaugggaacguuugcuc

SEQ ID NO: 551667 - RNA, 24 nt, Artificial Sequence
  Synthetic
acaaaugaaugggaacguuugcuc

SEQ ID NO: 551668 - RNA, 18 nt, Artificial Sequence
  Synthetic
aacgauucccuuuugcuc

SEQ ID NO: 551669 - RNA, 19 nt, Artificial Sequence
  Synthetic
gaacgauucccuuuugcuc

SEQ ID NO: 551670 - RNA, 20 nt, Artificial Sequence
  Synthetic
agaacgauucccuuuugcuc

SEQ ID NO: 551671 - RNA, 21 nt, Artificial Sequence
  Synthetic
cagaacgauucccuuuugcuc

SEQ ID NO: 551672 - RNA, 22 nt, Artificial Sequence
  Synthetic
gcagaacgauucccuuuugcuc

SEQ ID NO: 551673 - RNA, 23 nt, Artificial Sequence
  Synthetic
ggcagaacgauucccuuuugcuc

SEQ ID NO: 551674 - RNA, 24 nt, Artificial Sequence
  Synthetic
gggcagaacgauucccuuuugcuc

SEQ ID NO: 551675 - RNA, 18 nt, Artificial Sequence
  Synthetic
ucuuaaccagaaaaucuc

SEQ ID NO: 551676 - RNA, 19 nt, Artificial Sequence
  Synthetic
aucuuaaccagaaaaucuc

SEQ ID NO: 551677 - RNA, 20 nt, Artificial Sequence
  Synthetic
aaucuuaaccagaaaaucuc

SEQ ID NO: 551678 - RNA, 21 nt, Artificial Sequence
  Synthetic
aaaucuuaaccagaaaaucuc

SEQ ID NO: 551679 - RNA, 22 nt, Artificial Sequence
  Synthetic
uaaaucuuaaccagaaaaucuc

SEQ ID NO: 551680 - RNA, 23 nt, Artificial Sequence
  Synthetic
cuaaaucuuaaccagaaaaucuc

SEQ ID NO: 551681 - RNA, 24 nt, Artificial Sequence
  Synthetic
ucuaaaucuuaaccagaaaaucuc

SEQ ID NO: 551682 - RNA, 18 nt, Artificial Sequence
  Synthetic
ugucaguuuuaaaaucuc

SEQ ID NO: 551683 - RNA, 19 nt, Artificial Sequence
  Synthetic
gugucaguuuuaaaaucuc

SEQ ID NO: 551684 - RNA, 20 nt, Artificial Sequence
  Synthetic
ggugucaguuuuaaaaucuc

SEQ ID NO: 551685 - RNA, 21 nt, Artificial Sequence
  Synthetic
aggugucaguuuuaaaaucuc

SEQ ID NO: 551686 - RNA, 22 nt, Artificial Sequence
  Synthetic
gaggugucaguuuuaaaaucuc

SEQ ID NO: 551687 - RNA, 23 nt, Artificial Sequence
  Synthetic
ugaggugucaguuuuaaaaucuc

SEQ ID NO: 551688 - RNA, 24 nt, Artificial Sequence
  Synthetic
cugaggugucaguuuuaaaaucuc

SEQ ID NO: 551689 - RNA, 18 nt, Artificial Sequence
  Synthetic
aaugcgcauacaaaucuc

SEQ ID NO: 551690 - RNA, 19 nt, Artificial Sequence
  Synthetic
uaaugcgcauacaaaucuc

SEQ ID NO: 551691 - RNA, 20 nt, Artificial Sequence
  Synthetic
uuaaugcgcauacaaaucuc

SEQ ID NO: 551692 - RNA, 21 nt, Artificial Sequence
  Synthetic
uuuaaugcgcauacaaaucuc

SEQ ID NO: 551693 - RNA, 22 nt, Artificial Sequence
  Synthetic
cuuuaaugcgcauacaaaucuc

SEQ ID NO: 551694 - RNA, 23 nt, Artificial Sequence
  Synthetic
acuuuaaugcgcauacaaaucuc

SEQ ID NO: 551695 - RNA, 24 nt, Artificial Sequence
  Synthetic
gacuuuaaugcgcauacaaaucuc

SEQ ID NO: 551696 - RNA, 18 nt, Artificial Sequence
  Synthetic
agaaaaaagugaaaucuc

SEQ ID NO: 551697 - RNA, 19 nt, Artificial Sequence
  Synthetic
gagaaaaaagugaaaucuc

SEQ ID NO: 551698 - RNA, 20 nt, Artificial Sequence
  Synthetic
agagaaaaaagugaaaucuc

SEQ ID NO: 551699 - RNA, 21 nt, Artificial Sequence
  Synthetic
cagagaaaaaagugaaaucuc

SEQ ID NO: 551700 - RNA, 22 nt, Artificial Sequence
  Synthetic
gcagagaaaaaagugaaaucuc

SEQ ID NO: 551701 - RNA, 23 nt, Artificial Sequence
  Synthetic
ugcagagaaaaaagugaaaucuc

SEQ ID NO: 551702 - RNA, 24 nt, Artificial Sequence
  Synthetic
augcagagaaaaaagugaaaucuc

SEQ ID NO: 551703 - RNA, 18 nt, Artificial Sequence
  Synthetic
cucugguauauaaaucuc

SEQ ID NO: 551704 - RNA, 19 nt, Artificial Sequence
  Synthetic
acucugguauauaaaucuc

SEQ ID NO: 551705 - RNA, 20 nt, Artificial Sequence
  Synthetic
aacucugguauauaaaucuc

SEQ ID NO: 551706 - RNA, 21 nt, Artificial Sequence
  Synthetic
gaacucugguauauaaaucuc

SEQ ID NO: 551707 - RNA, 22 nt, Artificial Sequence
  Synthetic
agaacucugguauauaaaucuc

SEQ ID NO: 551708 - RNA, 23 nt, Artificial Sequence
  Synthetic
aagaacucugguauauaaaucuc

SEQ ID NO: 551709 - RNA, 24 nt, Artificial Sequence
  Synthetic
uaagaacucugguauauaaaucuc

SEQ ID NO: 551710 - RNA, 18 nt, Artificial Sequence
  Synthetic
acaaagccagccaaucuc

SEQ ID NO: 551711 - RNA, 19 nt, Artificial Sequence
  Synthetic
uacaaagccagccaaucuc

SEQ ID NO: 551712 - RNA, 20 nt, Artificial Sequence
  Synthetic
auacaaagccagccaaucuc

SEQ ID NO: 551713 - RNA, 21 nt, Artificial Sequence
  Synthetic
aauacaaagccagccaaucuc

SEQ ID NO: 551714 - RNA, 22 nt, Artificial Sequence
  Synthetic
caauacaaagccagccaaucuc

SEQ ID NO: 551715 - RNA, 23 nt, Artificial Sequence
  Synthetic
acaauacaaagccagccaaucuc

SEQ ID NO: 551716 - RNA, 24 nt, Artificial Sequence
  Synthetic
uacaauacaaagccagccaaucuc

SEQ ID NO: 551717 - RNA, 18 nt, Artificial Sequence
  Synthetic
cuaaggcacaagaaucuc

SEQ ID NO: 551718 - RNA, 19 nt, Artificial Sequence
  Synthetic
gcuaaggcacaagaaucuc

SEQ ID NO: 551719 - RNA, 20 nt, Artificial Sequence
  Synthetic
ggcuaaggcacaagaaucuc

SEQ ID NO: 551720 - RNA, 21 nt, Artificial Sequence
  Synthetic
gggcuaaggcacaagaaucuc

SEQ ID NO: 551721 - RNA, 22 nt, Artificial Sequence
  Synthetic
ggggcuaaggcacaagaaucuc

SEQ ID NO: 551722 - RNA, 23 nt, Artificial Sequence
  Synthetic
gggggcuaaggcacaagaaucuc

SEQ ID NO: 551723 - RNA, 24 nt, Artificial Sequence
  Synthetic
ggggggcuaaggcacaagaaucuc

SEQ ID NO: 551724 - RNA, 18 nt, Artificial Sequence
  Synthetic
accacauaccagaaucuc

SEQ ID NO: 551725 - RNA, 19 nt, Artificial Sequence
  Synthetic
caccacauaccagaaucuc

SEQ ID NO: 551726 - RNA, 20 nt, Artificial Sequence
  Synthetic
acaccacauaccagaaucuc

SEQ ID NO: 551727 - RNA, 21 nt, Artificial Sequence
  Synthetic
gacaccacauaccagaaucuc

SEQ ID NO: 551728 - RNA, 22 nt, Artificial Sequence
  Synthetic
agacaccacauaccagaaucuc

SEQ ID NO: 551729 - RNA, 23 nt, Artificial Sequence
  Synthetic
aagacaccacauaccagaaucuc

SEQ ID NO: 551730 - RNA, 24 nt, Artificial Sequence
  Synthetic
aaagacaccacauaccagaaucuc

SEQ ID NO: 551731 - RNA, 18 nt, Artificial Sequence
  Synthetic
ucucucucucagaaucuc

SEQ ID NO: 551732 - RNA, 19 nt, Artificial Sequence
  Synthetic
cucucucucucagaaucuc

SEQ ID NO: 551733 - RNA, 20 nt, Artificial Sequence
  Synthetic
ucucucucucucagaaucuc

SEQ ID NO: 551734 - RNA, 21 nt, Artificial Sequence
  Synthetic
cucucucucucucagaaucuc

SEQ ID NO: 551735 - RNA, 22 nt, Artificial Sequence
  Synthetic
ucucucucucucucagaaucuc

SEQ ID NO: 551736 - RNA, 23 nt, Artificial Sequence
  Synthetic
cucucucucucucucagaaucuc

SEQ ID NO: 551737 - RNA, 24 nt, Artificial Sequence
  Synthetic
ucucucucucucucucagaaucuc

SEQ ID NO: 551738 - RNA, 18 nt, Artificial Sequence
  Synthetic
gagccacuggggaaucuc

SEQ ID NO: 551739 - RNA, 19 nt, Artificial Sequence
  Synthetic
agagccacuggggaaucuc

SEQ ID NO: 551740 - RNA, 20 nt, Artificial Sequence
  Synthetic
cagagccacuggggaaucuc

SEQ ID NO: 551741 - RNA, 21 nt, Artificial Sequence
  Synthetic
acagagccacuggggaaucuc

SEQ ID NO: 551742 - RNA, 22 nt, Artificial Sequence
  Synthetic
uacagagccacuggggaaucuc

SEQ ID NO: 551743 - RNA, 23 nt, Artificial Sequence
  Synthetic
auacagagccacuggggaaucuc

SEQ ID NO: 551744 - RNA, 24 nt, Artificial Sequence
  Synthetic
gauacagagccacuggggaaucuc

SEQ ID NO: 551745 - RNA, 18 nt, Artificial Sequence
  Synthetic
guauaacauuuuaaucuc

SEQ ID NO: 551746 - RNA, 19 nt, Artificial Sequence
  Synthetic
uguauaacauuuuaaucuc

SEQ ID NO: 551747 - RNA, 20 nt, Artificial Sequence
  Synthetic
guguauaacauuuuaaucuc

SEQ ID NO: 551748 - RNA, 21 nt, Artificial Sequence
  Synthetic
gguguauaacauuuuaaucuc

SEQ ID NO: 551749 - RNA, 22 nt, Artificial Sequence
  Synthetic
ugguguauaacauuuuaaucuc

SEQ ID NO: 551750 - RNA, 23 nt, Artificial Sequence
  Synthetic
gugguguauaacauuuuaaucuc

SEQ ID NO: 551751 - RNA, 24 nt, Artificial Sequence
  Synthetic
ugugguguauaacauuuuaaucuc

SEQ ID NO: 551752 - RNA, 18 nt, Artificial Sequence
  Synthetic
agagugagacuccaucuc

SEQ ID NO: 551753 - RNA, 19 nt, Artificial Sequence
  Synthetic
cagagugagacuccaucuc

SEQ ID NO: 551754 - RNA, 20 nt, Artificial Sequence
  Synthetic
gcagagugagacuccaucuc

SEQ ID NO: 551755 - RNA, 21 nt, Artificial Sequence
  Synthetic
ugcagagugagacuccaucuc

SEQ ID NO: 551756 - RNA, 22 nt, Artificial Sequence
  Synthetic
gugcagagugagacuccaucuc

SEQ ID NO: 551757 - RNA, 23 nt, Artificial Sequence
  Synthetic
ggugcagagugagacuccaucuc

SEQ ID NO: 551758 - RNA, 24 nt, Artificial Sequence
  Synthetic
gggugcagagugagacuccaucuc

SEQ ID NO: 551759 - RNA, 18 nt, Artificial Sequence
  Synthetic
auguuugacaugcaucuc

SEQ ID NO: 551760 - RNA, 19 nt, Artificial Sequence
  Synthetic
cauguuugacaugcaucuc

SEQ ID NO: 551761 - RNA, 20 nt, Artificial Sequence
  Synthetic
acauguuugacaugcaucuc

SEQ ID NO: 551762 - RNA, 21 nt, Artificial Sequence
  Synthetic
aacauguuugacaugcaucuc

SEQ ID NO: 551763 - RNA, 22 nt, Artificial Sequence
  Synthetic
aaacauguuugacaugcaucuc

SEQ ID NO: 551764 - RNA, 23 nt, Artificial Sequence
  Synthetic
caaacauguuugacaugcaucuc

SEQ ID NO: 551765 - RNA, 24 nt, Artificial Sequence
  Synthetic
ccaaacauguuugacaugcaucuc

SEQ ID NO: 551766 - RNA, 18 nt, Artificial Sequence
  Synthetic
aagaguagagugcaucuc

SEQ ID NO: 551767 - RNA, 19 nt, Artificial Sequence
  Synthetic
caagaguagagugcaucuc

SEQ ID NO: 551768 - RNA, 20 nt, Artificial Sequence
  Synthetic
ccaagaguagagugcaucuc

SEQ ID NO: 551769 - RNA, 21 nt, Artificial Sequence
  Synthetic
accaagaguagagugcaucuc

SEQ ID NO: 551770 - RNA, 22 nt, Artificial Sequence
  Synthetic
caccaagaguagagugcaucuc

SEQ ID NO: 551771 - RNA, 23 nt, Artificial Sequence
  Synthetic
ucaccaagaguagagugcaucuc

SEQ ID NO: 551772 - RNA, 24 nt, Artificial Sequence
  Synthetic
aucaccaagaguagagugcaucuc

SEQ ID NO: 551773 - RNA, 18 nt, Artificial Sequence
  Synthetic
gacuagccuacucaucuc

SEQ ID NO: 551774 - RNA, 19 nt, Artificial Sequence
  Synthetic
ggacuagccuacucaucuc

SEQ ID NO: 551775 - RNA, 20 nt, Artificial Sequence
  Synthetic
uggacuagccuacucaucuc

SEQ ID NO: 551776 - RNA, 21 nt, Artificial Sequence
  Synthetic
cuggacuagccuacucaucuc

SEQ ID NO: 551777 - RNA, 22 nt, Artificial Sequence
  Synthetic
ucuggacuagccuacucaucuc

SEQ ID NO: 551778 - RNA, 23 nt, Artificial Sequence
  Synthetic
cucuggacuagccuacucaucuc

SEQ ID NO: 551779 - RNA, 24 nt, Artificial Sequence
  Synthetic
gcucuggacuagccuacucaucuc

SEQ ID NO: 551780 - RNA, 18 nt, Artificial Sequence
  Synthetic
gccuggucuuuucaucuc

SEQ ID NO: 551781 - RNA, 19 nt, Artificial Sequence
  Synthetic
agccuggucuuuucaucuc

SEQ ID NO: 551782 - RNA, 20 nt, Artificial Sequence
  Synthetic
gagccuggucuuuucaucuc

SEQ ID NO: 551783 - RNA, 21 nt, Artificial Sequence
  Synthetic
agagccuggucuuuucaucuc

SEQ ID NO: 551784 - RNA, 22 nt, Artificial Sequence
  Synthetic
cagagccuggucuuuucaucuc

SEQ ID NO: 551785 - RNA, 23 nt, Artificial Sequence
  Synthetic
ucagagccuggucuuuucaucuc

SEQ ID NO: 551786 - RNA, 24 nt, Artificial Sequence
  Synthetic
aucagagccuggucuuuucaucuc

SEQ ID NO: 551787 - RNA, 18 nt, Artificial Sequence
  Synthetic
ugucguacaaaagaucuc

SEQ ID NO: 551788 - RNA, 19 nt, Artificial Sequence
  Synthetic
augucguacaaaagaucuc

SEQ ID NO: 551789 - RNA, 20 nt, Artificial Sequence
  Synthetic
uaugucguacaaaagaucuc

SEQ ID NO: 551790 - RNA, 21 nt, Artificial Sequence
  Synthetic
cuaugucguacaaaagaucuc

SEQ ID NO: 551791 - RNA, 22 nt, Artificial Sequence
  Synthetic
acuaugucguacaaaagaucuc

SEQ ID NO: 551792 - RNA, 23 nt, Artificial Sequence
  Synthetic
cacuaugucguacaaaagaucuc

SEQ ID NO: 551793 - RNA, 24 nt, Artificial Sequence
  Synthetic
ucacuaugucguacaaaagaucuc

SEQ ID NO: 551794 - RNA, 18 nt, Artificial Sequence
  Synthetic
auaaaaccaacagaucuc

SEQ ID NO: 551795 - RNA, 19 nt, Artificial Sequence
  Synthetic
gauaaaaccaacagaucuc

SEQ ID NO: 551796 - RNA, 20 nt, Artificial Sequence
  Synthetic
ugauaaaaccaacagaucuc

SEQ ID NO: 551797 - RNA, 21 nt, Artificial Sequence
  Synthetic
cugauaaaaccaacagaucuc

SEQ ID NO: 551798 - RNA, 22 nt, Artificial Sequence
  Synthetic
ccugauaaaaccaacagaucuc

SEQ ID NO: 551799 - RNA, 23 nt, Artificial Sequence
  Synthetic
cccugauaaaaccaacagaucuc

SEQ ID NO: 551800 - RNA, 24 nt, Artificial Sequence
  Synthetic
ccccugauaaaaccaacagaucuc

SEQ ID NO: 551801 - RNA, 21 nt, Artificial Sequence
  Synthetic
cuuauaaaaccaucagaucuc

SEQ ID NO: 551802 - RNA, 22 nt, Artificial Sequence
  Synthetic
gcuuauaaaaccaucagaucuc

SEQ ID NO: 551803 - RNA, 23 nt, Artificial Sequence
  Synthetic
ugcuuauaaaaccaucagaucuc

SEQ ID NO: 551804 - RNA, 24 nt, Artificial Sequence
  Synthetic
augcuuauaaaaccaucagaucuc

SEQ ID NO: 551805 - RNA, 18 nt, Artificial Sequence
  Synthetic
acagaggaacaggaucuc

SEQ ID NO: 551806 - RNA, 19 nt, Artificial Sequence
  Synthetic
aacagaggaacaggaucuc

SEQ ID NO: 551807 - RNA, 20 nt, Artificial Sequence
  Synthetic
aaacagaggaacaggaucuc

SEQ ID NO: 551808 - RNA, 21 nt, Artificial Sequence
  Synthetic
caaacagaggaacaggaucuc

SEQ ID NO: 551809 - RNA, 22 nt, Artificial Sequence
  Synthetic
gcaaacagaggaacaggaucuc

SEQ ID NO: 551810 - RNA, 23 nt, Artificial Sequence
  Synthetic
ggcaaacagaggaacaggaucuc

SEQ ID NO: 551811 - RNA, 24 nt, Artificial Sequence
  Synthetic
gggcaaacagaggaacaggaucuc

SEQ ID NO: 551812 - RNA, 18 nt, Artificial Sequence
  Synthetic
ccaugauuacaggaucuc

SEQ ID NO: 551813 - RNA, 19 nt, Artificial Sequence
  Synthetic
gccaugauuacaggaucuc

SEQ ID NO: 551814 - RNA, 20 nt, Artificial Sequence
  Synthetic
agccaugauuacaggaucuc

SEQ ID NO: 551815 - RNA, 21 nt, Artificial Sequence
  Synthetic
cagccaugauuacaggaucuc

SEQ ID NO: 551816 - RNA, 22 nt, Artificial Sequence
  Synthetic
acagccaugauuacaggaucuc

SEQ ID NO: 551817 - RNA, 23 nt, Artificial Sequence
  Synthetic
aacagccaugauuacaggaucuc

SEQ ID NO: 551818 - RNA, 24 nt, Artificial Sequence
  Synthetic
aaacagccaugauuacaggaucuc

SEQ ID NO: 551819 - RNA, 18 nt, Artificial Sequence
  Synthetic
cugaggcaauaggaucuc

SEQ ID NO: 551820 - RNA, 19 nt, Artificial Sequence
  Synthetic
gcugaggcaauaggaucuc

SEQ ID NO: 551821 - RNA, 20 nt, Artificial Sequence
  Synthetic
ggcugaggcaauaggaucuc

SEQ ID NO: 551822 - RNA, 21 nt, Artificial Sequence
  Synthetic
aggcugaggcaauaggaucuc

SEQ ID NO: 551823 - RNA, 22 nt, Artificial Sequence
  Synthetic
gaggcugaggcaauaggaucuc

SEQ ID NO: 551824 - RNA, 23 nt, Artificial Sequence
  Synthetic
agaggcugaggcaauaggaucuc

SEQ ID NO: 551825 - RNA, 24 nt, Artificial Sequence
  Synthetic
aagaggcugaggcaauaggaucuc

SEQ ID NO: 551826 - RNA, 18 nt, Artificial Sequence
  Synthetic
gcuaaaaacauggaucuc

SEQ ID NO: 551827 - RNA, 19 nt, Artificial Sequence
  Synthetic
agcuaaaaacauggaucuc

SEQ ID NO: 551828 - RNA, 20 nt, Artificial Sequence
  Synthetic
gagcuaaaaacauggaucuc

SEQ ID NO: 551829 - RNA, 21 nt, Artificial Sequence
  Synthetic
ggagcuaaaaacauggaucuc

SEQ ID NO: 551830 - RNA, 22 nt, Artificial Sequence
  Synthetic
gggagcuaaaaacauggaucuc

SEQ ID NO: 551831 - RNA, 23 nt, Artificial Sequence
  Synthetic
ugggagcuaaaaacauggaucuc

SEQ ID NO: 551832 - RNA, 24 nt, Artificial Sequence
  Synthetic
gugggagcuaaaaacauggaucuc

SEQ ID NO: 551833 - RNA, 18 nt, Artificial Sequence
  Synthetic
gguauccuuaaugaucuc

SEQ ID NO: 551834 - RNA, 19 nt, Artificial Sequence
  Synthetic
agguauccuuaaugaucuc

SEQ ID NO: 551835 - RNA, 20 nt, Artificial Sequence
  Synthetic
aagguauccuuaaugaucuc

SEQ ID NO: 551836 - RNA, 21 nt, Artificial Sequence
  Synthetic
gaagguauccuuaaugaucuc

SEQ ID NO: 551837 - RNA, 22 nt, Artificial Sequence
  Synthetic
ugaagguauccuuaaugaucuc

SEQ ID NO: 551838 - RNA, 23 nt, Artificial Sequence
  Synthetic
uugaagguauccuuaaugaucuc

SEQ ID NO: 551839 - RNA, 24 nt, Artificial Sequence
  Synthetic
uuugaagguauccuuaaugaucuc

SEQ ID NO: 551840 - RNA, 18 nt, Artificial Sequence
  Synthetic
ucagcaugggaugaucuc

SEQ ID NO: 551841 - RNA, 19 nt, Artificial Sequence
  Synthetic
aucagcaugggaugaucuc

SEQ ID NO: 551842 - RNA, 20 nt, Artificial Sequence
  Synthetic
aaucagcaugggaugaucuc

SEQ ID NO: 551843 - RNA, 21 nt, Artificial Sequence
  Synthetic
aaaucagcaugggaugaucuc

SEQ ID NO: 551844 - RNA, 22 nt, Artificial Sequence
  Synthetic
aaaaucagcaugggaugaucuc

SEQ ID NO: 551845 - RNA, 23 nt, Artificial Sequence
  Synthetic
uaaaaucagcaugggaugaucuc

SEQ ID NO: 551846 - RNA, 24 nt, Artificial Sequence
  Synthetic
guaaaaucagcaugggaugaucuc

SEQ ID NO: 551847 - RNA, 18 nt, Artificial Sequence
  Synthetic
aauaaaaugaaauaucuc

SEQ ID NO: 551848 - RNA, 19 nt, Artificial Sequence
  Synthetic
aaauaaaaugaaauaucuc

SEQ ID NO: 551849 - RNA, 20 nt, Artificial Sequence
  Synthetic
caaauaaaaugaaauaucuc

SEQ ID NO: 551850 - RNA, 21 nt, Artificial Sequence
  Synthetic
gcaaauaaaaugaaauaucuc

SEQ ID NO: 551851 - RNA, 22 nt, Artificial Sequence
  Synthetic
agcaaauaaaaugaaauaucuc

SEQ ID NO: 551852 - RNA, 23 nt, Artificial Sequence
  Synthetic
aagcaaauaaaaugaaauaucuc

SEQ ID NO: 551853 - RNA, 24 nt, Artificial Sequence
  Synthetic
caagcaaauaaaaugaaauaucuc

SEQ ID NO: 551854 - RNA, 18 nt, Artificial Sequence
  Synthetic
gaaauucguacauaucuc

SEQ ID NO: 551855 - RNA, 19 nt, Artificial Sequence
  Synthetic
ugaaauucguacauaucuc

SEQ ID NO: 551856 - RNA, 20 nt, Artificial Sequence
  Synthetic
uugaaauucguacauaucuc

SEQ ID NO: 551857 - RNA, 21 nt, Artificial Sequence
  Synthetic
cuugaaauucguacauaucuc

SEQ ID NO: 551858 - RNA, 22 nt, Artificial Sequence
  Synthetic
gcuugaaauucguacauaucuc

SEQ ID NO: 551859 - RNA, 23 nt, Artificial Sequence
  Synthetic
cgcuugaaauucguacauaucuc

SEQ ID NO: 551860 - RNA, 24 nt, Artificial Sequence
  Synthetic
ucgcuugaaauucguacauaucuc

SEQ ID NO: 551861 - RNA, 18 nt, Artificial Sequence
  Synthetic
acuuuuauccacuaucuc

SEQ ID NO: 551862 - RNA, 19 nt, Artificial Sequence
  Synthetic
cacuuuuauccacuaucuc

SEQ ID NO: 551863 - RNA, 20 nt, Artificial Sequence
  Synthetic
acacuuuuauccacuaucuc

SEQ ID NO: 551864 - RNA, 21 nt, Artificial Sequence
  Synthetic
gacacuuuuauccacuaucuc

SEQ ID NO: 551865 - RNA, 22 nt, Artificial Sequence
  Synthetic
ugacacuuuuauccacuaucuc

SEQ ID NO: 551866 - RNA, 23 nt, Artificial Sequence
  Synthetic
uugacacuuuuauccacuaucuc

SEQ ID NO: 551867 - RNA, 24 nt, Artificial Sequence
  Synthetic
auugacacuuuuauccacuaucuc

SEQ ID NO: 551868 - RNA, 18 nt, Artificial Sequence
  Synthetic
gauaggaaagccuaucuc

SEQ ID NO: 551869 - RNA, 19 nt, Artificial Sequence
  Synthetic
agauaggaaagccuaucuc

SEQ ID NO: 551870 - RNA, 20 nt, Artificial Sequence
  Synthetic
aagauaggaaagccuaucuc

SEQ ID NO: 551871 - RNA, 21 nt, Artificial Sequence
  Synthetic
aaagauaggaaagccuaucuc

SEQ ID NO: 551872 - RNA, 22 nt, Artificial Sequence
  Synthetic
aaaagauaggaaagccuaucuc

SEQ ID NO: 551873 - RNA, 23 nt, Artificial Sequence
  Synthetic
caaaagauaggaaagccuaucuc

SEQ ID NO: 551874 - RNA, 24 nt, Artificial Sequence
  Synthetic
acaaaagauaggaaagccuaucuc

SEQ ID NO: 551875 - RNA, 18 nt, Artificial Sequence
  Synthetic
gggcaaaaauccuaucuc

SEQ ID NO: 551876 - RNA, 19 nt, Artificial Sequence
  Synthetic
agggcaaaaauccuaucuc

SEQ ID NO: 551877 - RNA, 20 nt, Artificial Sequence
  Synthetic
gagggcaaaaauccuaucuc

SEQ ID NO: 551878 - RNA, 21 nt, Artificial Sequence
  Synthetic
ugagggcaaaaauccuaucuc

SEQ ID NO: 551879 - RNA, 22 nt, Artificial Sequence
  Synthetic
uugagggcaaaaauccuaucuc

SEQ ID NO: 551880 - RNA, 23 nt, Artificial Sequence
  Synthetic
auugagggcaaaaauccuaucuc

SEQ ID NO: 551881 - RNA, 24 nt, Artificial Sequence
  Synthetic
gauugagggcaaaaauccuaucuc

SEQ ID NO: 551882 - RNA, 18 nt, Artificial Sequence
  Synthetic
gauucaaguagcuaucuc

SEQ ID NO: 551883 - RNA, 19 nt, Artificial Sequence
  Synthetic
cgauucaaguagcuaucuc

SEQ ID NO: 551884 - RNA, 20 nt, Artificial Sequence
  Synthetic
acgauucaaguagcuaucuc

SEQ ID NO: 551885 - RNA, 21 nt, Artificial Sequence
  Synthetic
aacgauucaaguagcuaucuc

SEQ ID NO: 551886 - RNA, 22 nt, Artificial Sequence
  Synthetic
gaacgauucaaguagcuaucuc

SEQ ID NO: 551887 - RNA, 23 nt, Artificial Sequence
  Synthetic
ggaacgauucaaguagcuaucuc

SEQ ID NO: 551888 - RNA, 24 nt, Artificial Sequence
  Synthetic
gggaacgauucaaguagcuaucuc

SEQ ID NO: 551889 - RNA, 18 nt, Artificial Sequence
  Synthetic
accuuacacauguaucuc

SEQ ID NO: 551890 - RNA, 19 nt, Artificial Sequence
  Synthetic
aaccuuacacauguaucuc

SEQ ID NO: 551891 - RNA, 20 nt, Artificial Sequence
  Synthetic
caaccuuacacauguaucuc

SEQ ID NO: 551892 - RNA, 21 nt, Artificial Sequence
  Synthetic
acaaccuuacacauguaucuc

SEQ ID NO: 551893 - RNA, 22 nt, Artificial Sequence
  Synthetic
uacaaccuuacacauguaucuc

SEQ ID NO: 551894 - RNA, 23 nt, Artificial Sequence
  Synthetic
uuacaaccuuacacauguaucuc

SEQ ID NO: 551895 - RNA, 24 nt, Artificial Sequence
  Synthetic
cuuacaaccuuacacauguaucuc

SEQ ID NO: 551896 - RNA, 18 nt, Artificial Sequence
  Synthetic
uccuuguggguguaucuc

SEQ ID NO: 551897 - RNA, 19 nt, Artificial Sequence
  Synthetic
uuccuuguggguguaucuc

SEQ ID NO: 551898 - RNA, 20 nt, Artificial Sequence
  Synthetic
cuuccuuguggguguaucuc

SEQ ID NO: 551899 - RNA, 21 nt, Artificial Sequence
  Synthetic
ucuuccuuguggguguaucuc

SEQ ID NO: 551900 - RNA, 22 nt, Artificial Sequence
  Synthetic
cucuuccuuguggguguaucuc

SEQ ID NO: 551901 - RNA, 23 nt, Artificial Sequence
  Synthetic
ucucuuccuuguggguguaucuc

SEQ ID NO: 551902 - RNA, 24 nt, Artificial Sequence
  Synthetic
uucucuuccuuguggguguaucuc

SEQ ID NO: 551903 - RNA, 18 nt, Artificial Sequence
  Synthetic
uuuguacaugauuaucuc

SEQ ID NO: 551904 - RNA, 19 nt, Artificial Sequence
  Synthetic
uuuuguacaugauuaucuc

SEQ ID NO: 551905 - RNA, 20 nt, Artificial Sequence
  Synthetic
auuuuguacaugauuaucuc

SEQ ID NO: 551906 - RNA, 21 nt, Artificial Sequence
  Synthetic
aauuuuguacaugauuaucuc

SEQ ID NO: 551907 - RNA, 22 nt, Artificial Sequence
  Synthetic
gaauuuuguacaugauuaucuc

SEQ ID NO: 551908 - RNA, 23 nt, Artificial Sequence
  Synthetic
ggaauuuuguacaugauuaucuc

SEQ ID NO: 551909 - RNA, 24 nt, Artificial Sequence
  Synthetic
aggaauuuuguacaugauuaucuc

SEQ ID NO: 551910 - RNA, 18 nt, Artificial Sequence
  Synthetic
uaauuuuaauauuaucuc

SEQ ID NO: 551911 - RNA, 19 nt, Artificial Sequence
  Synthetic
uuaauuuuaauauuaucuc

SEQ ID NO: 551912 - RNA, 20 nt, Artificial Sequence
  Synthetic
guuaauuuuaauauuaucuc

SEQ ID NO: 551913 - RNA, 21 nt, Artificial Sequence
  Synthetic
aguuaauuuuaauauuaucuc

SEQ ID NO: 551914 - RNA, 22 nt, Artificial Sequence
  Synthetic
aaguuaauuuuaauauuaucuc

SEQ ID NO: 551915 - RNA, 23 nt, Artificial Sequence
  Synthetic
gaaguuaauuuuaauauuaucuc

SEQ ID NO: 551916 - RNA, 24 nt, Artificial Sequence
  Synthetic
ugaaguuaauuuuaauauuaucuc

SEQ ID NO: 551917 - RNA, 18 nt, Artificial Sequence
  Synthetic
aaauggcaguguuaucuc

SEQ ID NO: 551918 - RNA, 19 nt, Artificial Sequence
  Synthetic
gaaauggcaguguuaucuc

SEQ ID NO: 551919 - RNA, 20 nt, Artificial Sequence
  Synthetic
agaaauggcaguguuaucuc

SEQ ID NO: 551920 - RNA, 21 nt, Artificial Sequence
  Synthetic
aagaaauggcaguguuaucuc

SEQ ID NO: 551921 - RNA, 22 nt, Artificial Sequence
  Synthetic
aaagaaauggcaguguuaucuc

SEQ ID NO: 551922 - RNA, 23 nt, Artificial Sequence
  Synthetic
aaaagaaauggcaguguuaucuc

SEQ ID NO: 551923 - RNA, 24 nt, Artificial Sequence
  Synthetic
caaaagaaauggcaguguuaucuc

SEQ ID NO: 551924 - RNA, 18 nt, Artificial Sequence
  Synthetic
caauaaaauaaaacucuc

SEQ ID NO: 551925 - RNA, 19 nt, Artificial Sequence
  Synthetic
ccaauaaaauaaaacucuc

SEQ ID NO: 551926 - RNA, 20 nt, Artificial Sequence
  Synthetic
accaauaaaauaaaacucuc

SEQ ID NO: 551927 - RNA, 21 nt, Artificial Sequence
  Synthetic
caccaauaaaauaaaacucuc

SEQ ID NO: 551928 - RNA, 22 nt, Artificial Sequence
  Synthetic
acaccaauaaaauaaaacucuc

SEQ ID NO: 551929 - RNA, 23 nt, Artificial Sequence
  Synthetic
aacaccaauaaaauaaaacucuc

SEQ ID NO: 551930 - RNA, 24 nt, Artificial Sequence
  Synthetic
gaacaccaauaaaauaaaacucuc

SEQ ID NO: 551931 - RNA, 18 nt, Artificial Sequence
  Synthetic
cuauuugagacaacucuc

SEQ ID NO: 551932 - RNA, 19 nt, Artificial Sequence
  Synthetic
ucuauuugagacaacucuc

SEQ ID NO: 551933 - RNA, 20 nt, Artificial Sequence
  Synthetic
aucuauuugagacaacucuc

SEQ ID NO: 551934 - RNA, 21 nt, Artificial Sequence
  Synthetic
uaucuauuugagacaacucuc

SEQ ID NO: 551935 - RNA, 22 nt, Artificial Sequence
  Synthetic
guaucuauuugagacaacucuc

SEQ ID NO: 551936 - RNA, 23 nt, Artificial Sequence
  Synthetic
uguaucuauuugagacaacucuc

SEQ ID NO: 551937 - RNA, 24 nt, Artificial Sequence
  Synthetic
auguaucuauuugagacaacucuc

SEQ ID NO: 551938 - RNA, 18 nt, Artificial Sequence
  Synthetic
uaacuuauuaggacucuc

SEQ ID NO: 551939 - RNA, 19 nt, Artificial Sequence
  Synthetic
uuaacuuauuaggacucuc

SEQ ID NO: 551940 - RNA, 20 nt, Artificial Sequence
  Synthetic
uuuaacuuauuaggacucuc

SEQ ID NO: 551941 - RNA, 21 nt, Artificial Sequence
  Synthetic
uuuuaacuuauuaggacucuc

SEQ ID NO: 551942 - RNA, 22 nt, Artificial Sequence
  Synthetic
auuuuaacuuauuaggacucuc

SEQ ID NO: 551943 - RNA, 23 nt, Artificial Sequence
  Synthetic
cauuuuaacuuauuaggacucuc

SEQ ID NO: 551944 - RNA, 24 nt, Artificial Sequence
  Synthetic
gcauuuuaacuuauuaggacucuc

SEQ ID NO: 551945 - RNA, 18 nt, Artificial Sequence
  Synthetic
aucuuuauuaauacucuc

SEQ ID NO: 551946 - RNA, 19 nt, Artificial Sequence
  Synthetic
aaucuuuauuaauacucuc

SEQ ID NO: 551947 - RNA, 20 nt, Artificial Sequence
  Synthetic
caaucuuuauuaauacucuc

SEQ ID NO: 551948 - RNA, 21 nt, Artificial Sequence
  Synthetic
acaaucuuuauuaauacucuc

SEQ ID NO: 551949 - RNA, 22 nt, Artificial Sequence
  Synthetic
cacaaucuuuauuaauacucuc

SEQ ID NO: 551950 - RNA, 23 nt, Artificial Sequence
  Synthetic
ucacaaucuuuauuaauacucuc

SEQ ID NO: 551951 - RNA, 24 nt, Artificial Sequence
  Synthetic
aucacaaucuuuauuaauacucuc

SEQ ID NO: 551952 - RNA, 18 nt, Artificial Sequence
  Synthetic
aucagggucacuacucuc

SEQ ID NO: 551953 - RNA, 19 nt, Artificial Sequence
  Synthetic
gaucagggucacuacucuc

SEQ ID NO: 551954 - RNA, 20 nt, Artificial Sequence
  Synthetic
agaucagggucacuacucuc

SEQ ID NO: 551955 - RNA, 21 nt, Artificial Sequence
  Synthetic
aagaucagggucacuacucuc

SEQ ID NO: 551956 - RNA, 22 nt, Artificial Sequence
  Synthetic
uaagaucagggucacuacucuc

SEQ ID NO: 551957 - RNA, 23 nt, Artificial Sequence
  Synthetic
auaagaucagggucacuacucuc

SEQ ID NO: 551958 - RNA, 24 nt, Artificial Sequence
  Synthetic
aauaagaucagggucacuacucuc

SEQ ID NO: 551959 - RNA, 18 nt, Artificial Sequence
  Synthetic
caugcuaacagaccucuc

SEQ ID NO: 551960 - RNA, 19 nt, Artificial Sequence
  Synthetic
acaugcuaacagaccucuc

SEQ ID NO: 551961 - RNA, 20 nt, Artificial Sequence
  Synthetic
aacaugcuaacagaccucuc

SEQ ID NO: 551962 - RNA, 21 nt, Artificial Sequence
  Synthetic
caacaugcuaacagaccucuc

SEQ ID NO: 551963 - RNA, 22 nt, Artificial Sequence
  Synthetic
ucaacaugcuaacagaccucuc

SEQ ID NO: 551964 - RNA, 23 nt, Artificial Sequence
  Synthetic
gucaacaugcuaacagaccucuc

SEQ ID NO: 551965 - RNA, 24 nt, Artificial Sequence
  Synthetic
agucaacaugcuaacagaccucuc

SEQ ID NO: 551966 - RNA, 18 nt, Artificial Sequence
  Synthetic
gggguagacagcccucuc

SEQ ID NO: 551967 - RNA, 19 nt, Artificial Sequence
  Synthetic
ggggguagacagcccucuc

SEQ ID NO: 551968 - RNA, 20 nt, Artificial Sequence
  Synthetic
gggggguagacagcccucuc

SEQ ID NO: 551969 - RNA, 21 nt, Artificial Sequence
  Synthetic
agggggguagacagcccucuc

SEQ ID NO: 551970 - RNA, 22 nt, Artificial Sequence
  Synthetic
aagggggguagacagcccucuc

SEQ ID NO: 551971 - RNA, 23 nt, Artificial Sequence
  Synthetic
caagggggguagacagcccucuc

SEQ ID NO: 551972 - RNA, 24 nt, Artificial Sequence
  Synthetic
gcaagggggguagacagcccucuc

SEQ ID NO: 551973 - RNA, 18 nt, Artificial Sequence
  Synthetic
gcuuccacccgcccucuc

SEQ ID NO: 551974 - RNA, 19 nt, Artificial Sequence
  Synthetic
agcuuccacccgcccucuc

SEQ ID NO: 551975 - RNA, 20 nt, Artificial Sequence
  Synthetic
uagcuuccacccgcccucuc

SEQ ID NO: 551976 - RNA, 21 nt, Artificial Sequence
  Synthetic
guagcuuccacccgcccucuc

SEQ ID NO: 551977 - RNA, 22 nt, Artificial Sequence
  Synthetic
uguagcuuccacccgcccucuc

SEQ ID NO: 551978 - RNA, 23 nt, Artificial Sequence
  Synthetic
uuguagcuuccacccgcccucuc

SEQ ID NO: 551979 - RNA, 24 nt, Artificial Sequence
  Synthetic
cuuguagcuuccacccgcccucuc

SEQ ID NO: 551980 - RNA, 18 nt, Artificial Sequence
  Synthetic
gcuaauacacucccucuc

SEQ ID NO: 551981 - RNA, 19 nt, Artificial Sequence
  Synthetic
ggcuaauacacucccucuc

SEQ ID NO: 551982 - RNA, 20 nt, Artificial Sequence
  Synthetic
gggcuaauacacucccucuc

SEQ ID NO: 551983 - RNA, 21 nt, Artificial Sequence
  Synthetic
cgggcuaauacacucccucuc

SEQ ID NO: 551984 - RNA, 22 nt, Artificial Sequence
  Synthetic
acgggcuaauacacucccucuc

SEQ ID NO: 551985 - RNA, 23 nt, Artificial Sequence
  Synthetic
aacgggcuaauacacucccucuc

SEQ ID NO: 551986 - RNA, 24 nt, Artificial Sequence
  Synthetic
aaacgggcuaauacacucccucuc

SEQ ID NO: 551987 - RNA, 18 nt, Artificial Sequence
  Synthetic
cacacaccggggccucuc

SEQ ID NO: 551988 - RNA, 19 nt, Artificial Sequence
  Synthetic
ucacacaccggggccucuc

SEQ ID NO: 551989 - RNA, 20 nt, Artificial Sequence
  Synthetic
aucacacaccggggccucuc

SEQ ID NO: 551990 - RNA, 21 nt, Artificial Sequence
  Synthetic
caucacacaccggggccucuc

SEQ ID NO: 551991 - RNA, 22 nt, Artificial Sequence
  Synthetic
acaucacacaccggggccucuc

SEQ ID NO: 551992 - RNA, 23 nt, Artificial Sequence
  Synthetic
aacaucacacaccggggccucuc

SEQ ID NO: 551993 - RNA, 24 nt, Artificial Sequence
  Synthetic
gaacaucacacaccggggccucuc

SEQ ID NO: 551994 - RNA, 18 nt, Artificial Sequence
  Synthetic
gcgcauaaauggccucuc

SEQ ID NO: 551995 - RNA, 19 nt, Artificial Sequence
  Synthetic
agcgcauaaauggccucuc

SEQ ID NO: 551996 - RNA, 20 nt, Artificial Sequence
  Synthetic
aagcgcauaaauggccucuc

SEQ ID NO: 551997 - RNA, 21 nt, Artificial Sequence
  Synthetic
aaagcgcauaaauggccucuc

SEQ ID NO: 551998 - RNA, 22 nt, Artificial Sequence
  Synthetic
aaaagcgcauaaauggccucuc

SEQ ID NO: 551999 - RNA, 23 nt, Artificial Sequence
  Synthetic
caaaagcgcauaaauggccucuc

SEQ ID NO: 552000 - RNA, 24 nt, Artificial Sequence
  Synthetic
acaaaagcgcauaaauggccucuc

SEQ ID NO: 552001 - RNA, 18 nt, Artificial Sequence
  Synthetic
auacggcagugagcucuc

SEQ ID NO: 552002 - RNA, 19 nt, Artificial Sequence
  Synthetic
gauacggcagugagcucuc

SEQ ID NO: 552003 - RNA, 20 nt, Artificial Sequence
  Synthetic
agauacggcagugagcucuc

SEQ ID NO: 552004 - RNA, 21 nt, Artificial Sequence
  Synthetic
aagauacggcagugagcucuc

SEQ ID NO: 552005 - RNA, 22 nt, Artificial Sequence
  Synthetic
aaagauacggcagugagcucuc

SEQ ID NO: 552006 - RNA, 23 nt, Artificial Sequence
  Synthetic
uaaagauacggcagugagcucuc

SEQ ID NO: 552007 - RNA, 24 nt, Artificial Sequence
  Synthetic
cuaaagauacggcagugagcucuc

SEQ ID NO: 552008 - RNA, 18 nt, Artificial Sequence
  Synthetic
uuaugauagugagcucuc

SEQ ID NO: 552009 - RNA, 19 nt, Artificial Sequence
  Synthetic
cuuaugauagugagcucuc

SEQ ID NO: 552010 - RNA, 20 nt, Artificial Sequence
  Synthetic
ucuuaugauagugagcucuc

SEQ ID NO: 552011 - RNA, 21 nt, Artificial Sequence
  Synthetic
uucuuaugauagugagcucuc

SEQ ID NO: 552012 - RNA, 22 nt, Artificial Sequence
  Synthetic
guucuuaugauagugagcucuc

SEQ ID NO: 552013 - RNA, 23 nt, Artificial Sequence
  Synthetic
uguucuuaugauagugagcucuc

SEQ ID NO: 552014 - RNA, 24 nt, Artificial Sequence
  Synthetic
cuguucuuaugauagugagcucuc

SEQ ID NO: 552015 - RNA, 18 nt, Artificial Sequence
  Synthetic
uauugcagguaggcucuc

SEQ ID NO: 552016 - RNA, 19 nt, Artificial Sequence
  Synthetic
guauugcagguaggcucuc

SEQ ID NO: 552017 - RNA, 20 nt, Artificial Sequence
  Synthetic
cguauugcagguaggcucuc

SEQ ID NO: 552018 - RNA, 21 nt, Artificial Sequence
  Synthetic
ucguauugcagguaggcucuc

SEQ ID NO: 552019 - RNA, 22 nt, Artificial Sequence
  Synthetic
uucguauugcagguaggcucuc

SEQ ID NO: 552020 - RNA, 23 nt, Artificial Sequence
  Synthetic
uuucguauugcagguaggcucuc

SEQ ID NO: 552021 - RNA, 24 nt, Artificial Sequence
  Synthetic
uuuucguauugcagguaggcucuc

SEQ ID NO: 552022 - RNA, 18 nt, Artificial Sequence
  Synthetic
uuacauucucaugcucuc

SEQ ID NO: 552023 - RNA, 19 nt, Artificial Sequence
  Synthetic
uuuacauucucaugcucuc

SEQ ID NO: 552024 - RNA, 20 nt, Artificial Sequence
  Synthetic
auuuacauucucaugcucuc

SEQ ID NO: 552025 - RNA, 21 nt, Artificial Sequence
  Synthetic
uauuuacauucucaugcucuc

SEQ ID NO: 552026 - RNA, 22 nt, Artificial Sequence
  Synthetic
auauuuacauucucaugcucuc

SEQ ID NO: 552027 - RNA, 23 nt, Artificial Sequence
  Synthetic
uauauuuacauucucaugcucuc

SEQ ID NO: 552028 - RNA, 24 nt, Artificial Sequence
  Synthetic
uuauauuuacauucucaugcucuc

SEQ ID NO: 552029 - RNA, 18 nt, Artificial Sequence
  Synthetic
uaaauagucauugcucuc

SEQ ID NO: 552030 - RNA, 19 nt, Artificial Sequence
  Synthetic
guaaauagucauugcucuc

SEQ ID NO: 552031 - RNA, 20 nt, Artificial Sequence
  Synthetic
uguaaauagucauugcucuc

SEQ ID NO: 552032 - RNA, 21 nt, Artificial Sequence
  Synthetic
cuguaaauagucauugcucuc

SEQ ID NO: 552033 - RNA, 22 nt, Artificial Sequence
  Synthetic
acuguaaauagucauugcucuc

SEQ ID NO: 552034 - RNA, 23 nt, Artificial Sequence
  Synthetic
aacuguaaauagucauugcucuc

SEQ ID NO: 552035 - RNA, 24 nt, Artificial Sequence
  Synthetic
aaacuguaaauagucauugcucuc

SEQ ID NO: 552036 - RNA, 18 nt, Artificial Sequence
  Synthetic
gaugaaaucuuugcucuc

SEQ ID NO: 552037 - RNA, 19 nt, Artificial Sequence
  Synthetic
agaugaaaucuuugcucuc

SEQ ID NO: 552038 - RNA, 20 nt, Artificial Sequence
  Synthetic
cagaugaaaucuuugcucuc

SEQ ID NO: 552039 - RNA, 21 nt, Artificial Sequence
  Synthetic
gcagaugaaaucuuugcucuc

SEQ ID NO: 552040 - RNA, 22 nt, Artificial Sequence
  Synthetic
agcagaugaaaucuuugcucuc

SEQ ID NO: 552041 - RNA, 23 nt, Artificial Sequence
  Synthetic
aagcagaugaaaucuuugcucuc

SEQ ID NO: 552042 - RNA, 24 nt, Artificial Sequence
  Synthetic
aaagcagaugaaaucuuugcucuc

SEQ ID NO: 552043 - RNA, 18 nt, Artificial Sequence
  Synthetic
gacauuaucuuugcucuc

SEQ ID NO: 552044 - RNA, 19 nt, Artificial Sequence
  Synthetic
ugacauuaucuuugcucuc

SEQ ID NO: 552045 - RNA, 20 nt, Artificial Sequence
  Synthetic
gugacauuaucuuugcucuc

SEQ ID NO: 552046 - RNA, 21 nt, Artificial Sequence
  Synthetic
ggugacauuaucuuugcucuc

SEQ ID NO: 552047 - RNA, 22 nt, Artificial Sequence
  Synthetic
uggugacauuaucuuugcucuc

SEQ ID NO: 552048 - RNA, 23 nt, Artificial Sequence
  Synthetic
cuggugacauuaucuuugcucuc

SEQ ID NO: 552049 - RNA, 24 nt, Artificial Sequence
  Synthetic
ucuggugacauuaucuuugcucuc

SEQ ID NO: 552050 - RNA, 18 nt, Artificial Sequence
  Synthetic
uucaaaugugaaucucuc

SEQ ID NO: 552051 - RNA, 19 nt, Artificial Sequence
  Synthetic
auucaaaugugaaucucuc

SEQ ID NO: 552052 - RNA, 20 nt, Artificial Sequence
  Synthetic
gauucaaaugugaaucucuc

SEQ ID NO: 552053 - RNA, 21 nt, Artificial Sequence
  Synthetic
ugauucaaaugugaaucucuc

SEQ ID NO: 552054 - RNA, 22 nt, Artificial Sequence
  Synthetic
cugauucaaaugugaaucucuc

SEQ ID NO: 552055 - RNA, 23 nt, Artificial Sequence
  Synthetic
acugauucaaaugugaaucucuc

SEQ ID NO: 552056 - RNA, 24 nt, Artificial Sequence
  Synthetic
uacugauucaaaugugaaucucuc

SEQ ID NO: 552057 - RNA, 18 nt, Artificial Sequence
  Synthetic
cccugcuuauaaucucuc

SEQ ID NO: 552058 - RNA, 19 nt, Artificial Sequence
  Synthetic
acccugcuuauaaucucuc

SEQ ID NO: 552059 - RNA, 20 nt, Artificial Sequence
  Synthetic
cacccugcuuauaaucucuc

SEQ ID NO: 552060 - RNA, 21 nt, Artificial Sequence
  Synthetic
ucacccugcuuauaaucucuc

SEQ ID NO: 552061 - RNA, 22 nt, Artificial Sequence
  Synthetic
uucacccugcuuauaaucucuc

SEQ ID NO: 552062 - RNA, 23 nt, Artificial Sequence
  Synthetic
uuucacccugcuuauaaucucuc

SEQ ID NO: 552063 - RNA, 24 nt, Artificial Sequence
  Synthetic
cuuucacccugcuuauaaucucuc

SEQ ID NO: 552064 - RNA, 18 nt, Artificial Sequence
  Synthetic
agaaaucauacaucucuc

SEQ ID NO: 552065 - RNA, 19 nt, Artificial Sequence
  Synthetic
aagaaaucauacaucucuc

SEQ ID NO: 552066 - RNA, 20 nt, Artificial Sequence
  Synthetic
gaagaaaucauacaucucuc

SEQ ID NO: 552067 - RNA, 21 nt, Artificial Sequence
  Synthetic
agaagaaaucauacaucucuc

SEQ ID NO: 552068 - RNA, 22 nt, Artificial Sequence
  Synthetic
gagaagaaaucauacaucucuc

SEQ ID NO: 552069 - RNA, 23 nt, Artificial Sequence
  Synthetic
ugagaagaaaucauacaucucuc

SEQ ID NO: 552070 - RNA, 24 nt, Artificial Sequence
  Synthetic
augagaagaaaucauacaucucuc

SEQ ID NO: 552071 - RNA, 18 nt, Artificial Sequence
  Synthetic
aagaaauugagaucucuc

SEQ ID NO: 552072 - RNA, 19 nt, Artificial Sequence
  Synthetic
gaagaaauugagaucucuc

SEQ ID NO: 552073 - RNA, 20 nt, Artificial Sequence
  Synthetic
agaagaaauugagaucucuc

SEQ ID NO: 552074 - RNA, 21 nt, Artificial Sequence
  Synthetic
gagaagaaauugagaucucuc

SEQ ID NO: 552075 - RNA, 22 nt, Artificial Sequence
  Synthetic
ugagaagaaauugagaucucuc

SEQ ID NO: 552076 - RNA, 23 nt, Artificial Sequence
  Synthetic
gugagaagaaauugagaucucuc

SEQ ID NO: 552077 - RNA, 24 nt, Artificial Sequence
  Synthetic
ugugagaagaaauugagaucucuc

SEQ ID NO: 552078 - RNA, 18 nt, Artificial Sequence
  Synthetic
caaauauuuaacucucuc

SEQ ID NO: 552079 - RNA, 19 nt, Artificial Sequence
  Synthetic
ucaaauauuuaacucucuc

SEQ ID NO: 552080 - RNA, 20 nt, Artificial Sequence
  Synthetic
uucaaauauuuaacucucuc

SEQ ID NO: 552081 - RNA, 21 nt, Artificial Sequence
  Synthetic
uuucaaauauuuaacucucuc

SEQ ID NO: 552082 - RNA, 22 nt, Artificial Sequence
  Synthetic
cuuucaaauauuuaacucucuc

SEQ ID NO: 552083 - RNA, 23 nt, Artificial Sequence
  Synthetic
gcuuucaaauauuuaacucucuc

SEQ ID NO: 552084 - RNA, 24 nt, Artificial Sequence
  Synthetic
agcuuucaaauauuuaacucucuc

SEQ ID NO: 552085 - RNA, 18 nt, Artificial Sequence
  Synthetic
uauacauaugacucucuc

SEQ ID NO: 552086 - RNA, 19 nt, Artificial Sequence
  Synthetic
cuauacauaugacucucuc

SEQ ID NO: 552087 - RNA, 20 nt, Artificial Sequence
  Synthetic
acuauacauaugacucucuc

SEQ ID NO: 552088 - RNA, 21 nt, Artificial Sequence
  Synthetic
aacuauacauaugacucucuc

SEQ ID NO: 552089 - RNA, 22 nt, Artificial Sequence
  Synthetic
uaacuauacauaugacucucuc

SEQ ID NO: 552090 - RNA, 23 nt, Artificial Sequence
  Synthetic
guaacuauacauaugacucucuc

SEQ ID NO: 552091 - RNA, 24 nt, Artificial Sequence
  Synthetic
uguaacuauacauaugacucucuc

SEQ ID NO: 552092 - RNA, 18 nt, Artificial Sequence
  Synthetic
guuuucauccccucucuc

SEQ ID NO: 552093 - RNA, 19 nt, Artificial Sequence
  Synthetic
gguuuucauccccucucuc

SEQ ID NO: 552094 - RNA, 20 nt, Artificial Sequence
  Synthetic
agguuuucauccccucucuc

SEQ ID NO: 552095 - RNA, 21 nt, Artificial Sequence
  Synthetic
gagguuuucauccccucucuc

SEQ ID NO: 552096 - RNA, 22 nt, Artificial Sequence
  Synthetic
cgagguuuucauccccucucuc

SEQ ID NO: 552097 - RNA, 23 nt, Artificial Sequence
  Synthetic
acgagguuuucauccccucucuc

SEQ ID NO: 552098 - RNA, 24 nt, Artificial Sequence
  Synthetic
aacgagguuuucauccccucucuc

SEQ ID NO: 552099 - RNA, 18 nt, Artificial Sequence
  Synthetic
ugcuauaagcccucucuc

SEQ ID NO: 552100 - RNA, 19 nt, Artificial Sequence
  Synthetic
cugcuauaagcccucucuc

SEQ ID NO: 552101 - RNA, 20 nt, Artificial Sequence
  Synthetic
acugcuauaagcccucucuc

SEQ ID NO: 552102 - RNA, 21 nt, Artificial Sequence
  Synthetic
aacugcuauaagcccucucuc

SEQ ID NO: 552103 - RNA, 22 nt, Artificial Sequence
  Synthetic
uaacugcuauaagcccucucuc

SEQ ID NO: 552104 - RNA, 23 nt, Artificial Sequence
  Synthetic
auaacugcuauaagcccucucuc

SEQ ID NO: 552105 - RNA, 24 nt, Artificial Sequence
  Synthetic
gauaacugcuauaagcccucucuc

SEQ ID NO: 552106 - RNA, 18 nt, Artificial Sequence
  Synthetic
ggauuaaucaucucucuc

SEQ ID NO: 552107 - RNA, 19 nt, Artificial Sequence
  Synthetic
uggauuaaucaucucucuc

SEQ ID NO: 552108 - RNA, 20 nt, Artificial Sequence
  Synthetic
cuggauuaaucaucucucuc

SEQ ID NO: 552109 - RNA, 21 nt, Artificial Sequence
  Synthetic
ccuggauuaaucaucucucuc

SEQ ID NO: 552110 - RNA, 22 nt, Artificial Sequence
  Synthetic
uccuggauuaaucaucucucuc

SEQ ID NO: 552111 - RNA, 23 nt, Artificial Sequence
  Synthetic
guccuggauuaaucaucucucuc

SEQ ID NO: 552112 - RNA, 24 nt, Artificial Sequence
  Synthetic
uguccuggauuaaucaucucucuc

SEQ ID NO: 552113 - RNA, 18 nt, Artificial Sequence
  Synthetic
ucucucucucucucucuc

SEQ ID NO: 552114 - RNA, 19 nt, Artificial Sequence
  Synthetic
gucucucucucucucucuc

SEQ ID NO: 552115 - RNA, 20 nt, Artificial Sequence
  Synthetic
ugucucucucucucucucuc

SEQ ID NO: 552116 - RNA, 21 nt, Artificial Sequence
  Synthetic
cugucucucucucucucucuc

SEQ ID NO: 552117 - RNA, 22 nt, Artificial Sequence
  Synthetic
ucugucucucucucucucucuc

SEQ ID NO: 552118 - RNA, 23 nt, Artificial Sequence
  Synthetic
cucugucucucucucucucucuc

SEQ ID NO: 552119 - RNA, 24 nt, Artificial Sequence
  Synthetic
ucucugucucucucucucucucuc

SEQ ID NO: 552120 - RNA, 18 nt, Artificial Sequence
  Synthetic
gacuuugacuggucucuc

SEQ ID NO: 552121 - RNA, 19 nt, Artificial Sequence
  Synthetic
agacuuugacuggucucuc

SEQ ID NO: 552122 - RNA, 20 nt, Artificial Sequence
  Synthetic
gagacuuugacuggucucuc

SEQ ID NO: 552123 - RNA, 21 nt, Artificial Sequence
  Synthetic
ugagacuuugacuggucucuc

SEQ ID NO: 552124 - RNA, 22 nt, Artificial Sequence
  Synthetic
augagacuuugacuggucucuc

SEQ ID NO: 552125 - RNA, 23 nt, Artificial Sequence
  Synthetic
aaugagacuuugacuggucucuc

SEQ ID NO: 552126 - RNA, 24 nt, Artificial Sequence
  Synthetic
gaaugagacuuugacuggucucuc

SEQ ID NO: 552127 - RNA, 18 nt, Artificial Sequence
  Synthetic
uuaugaaacuugucucuc

SEQ ID NO: 552128 - RNA, 19 nt, Artificial Sequence
  Synthetic
uuuaugaaacuugucucuc

SEQ ID NO: 552129 - RNA, 20 nt, Artificial Sequence
  Synthetic
cuuuaugaaacuugucucuc

SEQ ID NO: 552130 - RNA, 21 nt, Artificial Sequence
  Synthetic
acuuuaugaaacuugucucuc

SEQ ID NO: 552131 - RNA, 22 nt, Artificial Sequence
  Synthetic
aacuuuaugaaacuugucucuc

SEQ ID NO: 552132 - RNA, 23 nt, Artificial Sequence
  Synthetic
aaacuuuaugaaacuugucucuc

SEQ ID NO: 552133 - RNA, 24 nt, Artificial Sequence
  Synthetic
caaacuuuaugaaacuugucucuc

SEQ ID NO: 552134 - RNA, 18 nt, Artificial Sequence
  Synthetic
cagaaacacaauucucuc

SEQ ID NO: 552135 - RNA, 19 nt, Artificial Sequence
  Synthetic
acagaaacacaauucucuc

SEQ ID NO: 552136 - RNA, 20 nt, Artificial Sequence
  Synthetic
aacagaaacacaauucucuc

SEQ ID NO: 552137 - RNA, 21 nt, Artificial Sequence
  Synthetic
aaacagaaacacaauucucuc

SEQ ID NO: 552138 - RNA, 22 nt, Artificial Sequence
  Synthetic
aaaacagaaacacaauucucuc

SEQ ID NO: 552139 - RNA, 23 nt, Artificial Sequence
  Synthetic
aaaaacagaaacacaauucucuc

SEQ ID NO: 552140 - RNA, 24 nt, Artificial Sequence
  Synthetic
caaaaacagaaacacaauucucuc

SEQ ID NO: 552141 - RNA, 18 nt, Artificial Sequence
  Synthetic
ucuauugugcauucucuc

SEQ ID NO: 552142 - RNA, 19 nt, Artificial Sequence
  Synthetic
gucuauugugcauucucuc

SEQ ID NO: 552143 - RNA, 20 nt, Artificial Sequence
  Synthetic
ugucuauugugcauucucuc

SEQ ID NO: 552144 - RNA, 21 nt, Artificial Sequence
  Synthetic
augucuauugugcauucucuc

SEQ ID NO: 552145 - RNA, 22 nt, Artificial Sequence
  Synthetic
caugucuauugugcauucucuc

SEQ ID NO: 552146 - RNA, 23 nt, Artificial Sequence
  Synthetic
ccaugucuauugugcauucucuc

SEQ ID NO: 552147 - RNA, 24 nt, Artificial Sequence
  Synthetic
cccaugucuauugugcauucucuc

SEQ ID NO: 552148 - RNA, 18 nt, Artificial Sequence
  Synthetic
ggguuguaagauucucuc

SEQ ID NO: 552149 - RNA, 19 nt, Artificial Sequence
  Synthetic
uggguuguaagauucucuc

SEQ ID NO: 552150 - RNA, 20 nt, Artificial Sequence
  Synthetic
guggguuguaagauucucuc

SEQ ID NO: 552151 - RNA, 21 nt, Artificial Sequence
  Synthetic
aguggguuguaagauucucuc

SEQ ID NO: 552152 - RNA, 22 nt, Artificial Sequence
  Synthetic
caguggguuguaagauucucuc

SEQ ID NO: 552153 - RNA, 23 nt, Artificial Sequence
  Synthetic
ucaguggguuguaagauucucuc

SEQ ID NO: 552154 - RNA, 24 nt, Artificial Sequence
  Synthetic
aucaguggguuguaagauucucuc

SEQ ID NO: 552155 - RNA, 18 nt, Artificial Sequence
  Synthetic
uugcugaaauauucucuc

SEQ ID NO: 552156 - RNA, 19 nt, Artificial Sequence
  Synthetic
cuugcugaaauauucucuc

SEQ ID NO: 552157 - RNA, 20 nt, Artificial Sequence
  Synthetic
ucuugcugaaauauucucuc

SEQ ID NO: 552158 - RNA, 21 nt, Artificial Sequence
  Synthetic
cucuugcugaaauauucucuc

SEQ ID NO: 552159 - RNA, 22 nt, Artificial Sequence
  Synthetic
ucucuugcugaaauauucucuc

SEQ ID NO: 552160 - RNA, 23 nt, Artificial Sequence
  Synthetic
uucucuugcugaaauauucucuc

SEQ ID NO: 552161 - RNA, 24 nt, Artificial Sequence
  Synthetic
uuucucuugcugaaauauucucuc

SEQ ID NO: 552162 - RNA, 18 nt, Artificial Sequence
  Synthetic
cacuguuuuccuucucuc

SEQ ID NO: 552163 - RNA, 19 nt, Artificial Sequence
  Synthetic
ccacuguuuuccuucucuc

SEQ ID NO: 552164 - RNA, 20 nt, Artificial Sequence
  Synthetic
accacuguuuuccuucucuc

SEQ ID NO: 552165 - RNA, 21 nt, Artificial Sequence
  Synthetic
gaccacuguuuuccuucucuc

SEQ ID NO: 552166 - RNA, 22 nt, Artificial Sequence
  Synthetic
ggaccacuguuuuccuucucuc

SEQ ID NO: 552167 - RNA, 23 nt, Artificial Sequence
  Synthetic
aggaccacuguuuuccuucucuc

SEQ ID NO: 552168 - RNA, 24 nt, Artificial Sequence
  Synthetic
aaggaccacuguuuuccuucucuc

SEQ ID NO: 552169 - RNA, 18 nt, Artificial Sequence
  Synthetic
ucuaauuucucuucucuc

SEQ ID NO: 552170 - RNA, 19 nt, Artificial Sequence
  Synthetic
uucuaauuucucuucucuc

SEQ ID NO: 552171 - RNA, 20 nt, Artificial Sequence
  Synthetic
uuucuaauuucucuucucuc

SEQ ID NO: 552172 - RNA, 21 nt, Artificial Sequence
  Synthetic
auuucuaauuucucuucucuc

SEQ ID NO: 552173 - RNA, 22 nt, Artificial Sequence
  Synthetic
aauuucuaauuucucuucucuc

SEQ ID NO: 552174 - RNA, 23 nt, Artificial Sequence
  Synthetic
aaauuucuaauuucucuucucuc

SEQ ID NO: 552175 - RNA, 24 nt, Artificial Sequence
  Synthetic
aaaauuucuaauuucucuucucuc

SEQ ID NO: 552176 - RNA, 18 nt, Artificial Sequence
  Synthetic
uucuaauuuuuuucucuc

SEQ ID NO: 552177 - RNA, 19 nt, Artificial Sequence
  Synthetic
uuucuaauuuuuuucucuc

SEQ ID NO: 552178 - RNA, 20 nt, Artificial Sequence
  Synthetic
uuuucuaauuuuuuucucuc

SEQ ID NO: 552179 - RNA, 21 nt, Artificial Sequence
  Synthetic
cuuuucuaauuuuuuucucuc

SEQ ID NO: 552180 - RNA, 22 nt, Artificial Sequence
  Synthetic
ucuuuucuaauuuuuuucucuc

SEQ ID NO: 552181 - RNA, 23 nt, Artificial Sequence
  Synthetic
aucuuuucuaauuuuuuucucuc

SEQ ID NO: 552182 - RNA, 24 nt, Artificial Sequence
  Synthetic
aaucuuuucuaauuuuuuucucuc

SEQ ID NO: 552183 - RNA, 18 nt, Artificial Sequence
  Synthetic
aaugauugugaaagucuc

SEQ ID NO: 552184 - RNA, 19 nt, Artificial Sequence
  Synthetic
aaaugauugugaaagucuc

SEQ ID NO: 552185 - RNA, 20 nt, Artificial Sequence
  Synthetic
uaaaugauugugaaagucuc

SEQ ID NO: 552186 - RNA, 21 nt, Artificial Sequence
  Synthetic
cuaaaugauugugaaagucuc

SEQ ID NO: 552187 - RNA, 22 nt, Artificial Sequence
  Synthetic
ccuaaaugauugugaaagucuc

SEQ ID NO: 552188 - RNA, 23 nt, Artificial Sequence
  Synthetic
accuaaaugauugugaaagucuc

SEQ ID NO: 552189 - RNA, 24 nt, Artificial Sequence
  Synthetic
uaccuaaaugauugugaaagucuc

SEQ ID NO: 552190 - RNA, 21 nt, Artificial Sequence
  Synthetic
caaaaccauucaacaagucuc

SEQ ID NO: 552191 - RNA, 22 nt, Artificial Sequence
  Synthetic
ucaaaaccauucaacaagucuc

SEQ ID NO: 552192 - RNA, 23 nt, Artificial Sequence
  Synthetic
gucaaaaccauucaacaagucuc

SEQ ID NO: 552193 - RNA, 24 nt, Artificial Sequence
  Synthetic
ggucaaaaccauucaacaagucuc

SEQ ID NO: 552194 - RNA, 18 nt, Artificial Sequence
  Synthetic
uaucaugcaucaagucuc

SEQ ID NO: 552195 - RNA, 19 nt, Artificial Sequence
  Synthetic
auaucaugcaucaagucuc

SEQ ID NO: 552196 - RNA, 20 nt, Artificial Sequence
  Synthetic
aauaucaugcaucaagucuc

SEQ ID NO: 552197 - RNA, 21 nt, Artificial Sequence
  Synthetic
aaauaucaugcaucaagucuc

SEQ ID NO: 552198 - RNA, 22 nt, Artificial Sequence
  Synthetic
uaaauaucaugcaucaagucuc

SEQ ID NO: 552199 - RNA, 23 nt, Artificial Sequence
  Synthetic
guaaauaucaugcaucaagucuc

SEQ ID NO: 552200 - RNA, 24 nt, Artificial Sequence
  Synthetic
uguaaauaucaugcaucaagucuc

SEQ ID NO: 552201 - RNA, 18 nt, Artificial Sequence
  Synthetic
cuaccgcacagaagucuc

SEQ ID NO: 552202 - RNA, 19 nt, Artificial Sequence
  Synthetic
gcuaccgcacagaagucuc

SEQ ID NO: 552203 - RNA, 20 nt, Artificial Sequence
  Synthetic
agcuaccgcacagaagucuc

SEQ ID NO: 552204 - RNA, 21 nt, Artificial Sequence
  Synthetic
aagcuaccgcacagaagucuc

SEQ ID NO: 552205 - RNA, 22 nt, Artificial Sequence
  Synthetic
caagcuaccgcacagaagucuc

SEQ ID NO: 552206 - RNA, 23 nt, Artificial Sequence
  Synthetic
gcaagcuaccgcacagaagucuc

SEQ ID NO: 552207 - RNA, 24 nt, Artificial Sequence
  Synthetic
agcaagcuaccgcacagaagucuc

SEQ ID NO: 552208 - RNA, 18 nt, Artificial Sequence
  Synthetic
cuccuugugggaagucuc

SEQ ID NO: 552209 - RNA, 19 nt, Artificial Sequence
  Synthetic
ccuccuugugggaagucuc

SEQ ID NO: 552210 - RNA, 20 nt, Artificial Sequence
  Synthetic
uccuccuugugggaagucuc

SEQ ID NO: 552211 - RNA, 21 nt, Artificial Sequence
  Synthetic
auccuccuugugggaagucuc

SEQ ID NO: 552212 - RNA, 22 nt, Artificial Sequence
  Synthetic
cauccuccuugugggaagucuc

SEQ ID NO: 552213 - RNA, 23 nt, Artificial Sequence
  Synthetic
ccauccuccuugugggaagucuc

SEQ ID NO: 552214 - RNA, 24 nt, Artificial Sequence
  Synthetic
uccauccuccuugugggaagucuc

SEQ ID NO: 552215 - RNA, 18 nt, Artificial Sequence
  Synthetic
uagugcauuugaagucuc

SEQ ID NO: 552216 - RNA, 19 nt, Artificial Sequence
  Synthetic
uuagugcauuugaagucuc

SEQ ID NO: 552217 - RNA, 20 nt, Artificial Sequence
  Synthetic
uuuagugcauuugaagucuc

SEQ ID NO: 552218 - RNA, 21 nt, Artificial Sequence
  Synthetic
auuuagugcauuugaagucuc

SEQ ID NO: 552219 - RNA, 22 nt, Artificial Sequence
  Synthetic
aauuuagugcauuugaagucuc

SEQ ID NO: 552220 - RNA, 23 nt, Artificial Sequence
  Synthetic
aaauuuagugcauuugaagucuc

SEQ ID NO: 552221 - RNA, 24 nt, Artificial Sequence
  Synthetic
uaaauuuagugcauuugaagucuc

SEQ ID NO: 552222 - RNA, 18 nt, Artificial Sequence
  Synthetic
uggcagugaauaagucuc

SEQ ID NO: 552223 - RNA, 19 nt, Artificial Sequence
  Synthetic
auggcagugaauaagucuc

SEQ ID NO: 552224 - RNA, 20 nt, Artificial Sequence
  Synthetic
uauggcagugaauaagucuc

SEQ ID NO: 552225 - RNA, 21 nt, Artificial Sequence
  Synthetic
uuauggcagugaauaagucuc

SEQ ID NO: 552226 - RNA, 22 nt, Artificial Sequence
  Synthetic
cuuauggcagugaauaagucuc

SEQ ID NO: 552227 - RNA, 23 nt, Artificial Sequence
  Synthetic
ccuuauggcagugaauaagucuc

SEQ ID NO: 552228 - RNA, 24 nt, Artificial Sequence
  Synthetic
uccuuauggcagugaauaagucuc

SEQ ID NO: 552229 - RNA, 18 nt, Artificial Sequence
  Synthetic
ugauagugaauaagucuc

SEQ ID NO: 552230 - RNA, 19 nt, Artificial Sequence
  Synthetic
cugauagugaauaagucuc

SEQ ID NO: 552231 - RNA, 20 nt, Artificial Sequence
  Synthetic
ccugauagugaauaagucuc

SEQ ID NO: 552232 - RNA, 21 nt, Artificial Sequence
  Synthetic
uccugauagugaauaagucuc

SEQ ID NO: 552233 - RNA, 22 nt, Artificial Sequence
  Synthetic
cuccugauagugaauaagucuc

SEQ ID NO: 552234 - RNA, 23 nt, Artificial Sequence
  Synthetic
ucuccugauagugaauaagucuc

SEQ ID NO: 552235 - RNA, 24 nt, Artificial Sequence
  Synthetic
uucuccugauagugaauaagucuc

SEQ ID NO: 552236 - RNA, 18 nt, Artificial Sequence
  Synthetic
ugauugugaauaagucuc

SEQ ID NO: 552237 - RNA, 19 nt, Artificial Sequence
  Synthetic
gugauugugaauaagucuc

SEQ ID NO: 552238 - RNA, 20 nt, Artificial Sequence
  Synthetic
agugauugugaauaagucuc

SEQ ID NO: 552239 - RNA, 21 nt, Artificial Sequence
  Synthetic
uagugauugugaauaagucuc

SEQ ID NO: 552240 - RNA, 22 nt, Artificial Sequence
  Synthetic
cuagugauugugaauaagucuc

SEQ ID NO: 552241 - RNA, 23 nt, Artificial Sequence
  Synthetic
ucuagugauugugaauaagucuc

SEQ ID NO: 552242 - RNA, 24 nt, Artificial Sequence
  Synthetic
uucuagugauugugaauaagucuc

SEQ ID NO: 552243 - RNA, 18 nt, Artificial Sequence
  Synthetic
ggaaaauuggacagucuc

SEQ ID NO: 552244 - RNA, 19 nt, Artificial Sequence
  Synthetic
aggaaaauuggacagucuc

SEQ ID NO: 552245 - RNA, 20 nt, Artificial Sequence
  Synthetic
caggaaaauuggacagucuc

SEQ ID NO: 552246 - RNA, 21 nt, Artificial Sequence
  Synthetic
ucaggaaaauuggacagucuc

SEQ ID NO: 552247 - RNA, 22 nt, Artificial Sequence
  Synthetic
uucaggaaaauuggacagucuc

SEQ ID NO: 552248 - RNA, 23 nt, Artificial Sequence
  Synthetic
uuucaggaaaauuggacagucuc

SEQ ID NO: 552249 - RNA, 24 nt, Artificial Sequence
  Synthetic
guuucaggaaaauuggacagucuc

SEQ ID NO: 552250 - RNA, 18 nt, Artificial Sequence
  Synthetic
auaaauuaccccagucuc

SEQ ID NO: 552251 - RNA, 19 nt, Artificial Sequence
  Synthetic
aauaaauuaccccagucuc

SEQ ID NO: 552252 - RNA, 20 nt, Artificial Sequence
  Synthetic
aaauaaauuaccccagucuc

SEQ ID NO: 552253 - RNA, 21 nt, Artificial Sequence
  Synthetic
uaaauaaauuaccccagucuc

SEQ ID NO: 552254 - RNA, 22 nt, Artificial Sequence
  Synthetic
uuaaauaaauuaccccagucuc

SEQ ID NO: 552255 - RNA, 23 nt, Artificial Sequence
  Synthetic
uuuaaauaaauuaccccagucuc

SEQ ID NO: 552256 - RNA, 24 nt, Artificial Sequence
  Synthetic
cuuuaaauaaauuaccccagucuc

SEQ ID NO: 552257 - RNA, 18 nt, Artificial Sequence
  Synthetic
aucagaaaggccagucuc

SEQ ID NO: 552258 - RNA, 19 nt, Artificial Sequence
  Synthetic
aaucagaaaggccagucuc

SEQ ID NO: 552259 - RNA, 20 nt, Artificial Sequence
  Synthetic
uaaucagaaaggccagucuc

SEQ ID NO: 552260 - RNA, 21 nt, Artificial Sequence
  Synthetic
uuaaucagaaaggccagucuc

SEQ ID NO: 552261 - RNA, 22 nt, Artificial Sequence
  Synthetic
uuuaaucagaaaggccagucuc

SEQ ID NO: 552262 - RNA, 23 nt, Artificial Sequence
  Synthetic
auuuaaucagaaaggccagucuc

SEQ ID NO: 552263 - RNA, 24 nt, Artificial Sequence
  Synthetic
aauuuaaucagaaaggccagucuc

SEQ ID NO: 552264 - RNA, 18 nt, Artificial Sequence
  Synthetic
agacgauaagggagucuc

SEQ ID NO: 552265 - RNA, 19 nt, Artificial Sequence
  Synthetic
gagacgauaagggagucuc

SEQ ID NO: 552266 - RNA, 20 nt, Artificial Sequence
  Synthetic
ugagacgauaagggagucuc

SEQ ID NO: 552267 - RNA, 21 nt, Artificial Sequence
  Synthetic
gugagacgauaagggagucuc

SEQ ID NO: 552268 - RNA, 22 nt, Artificial Sequence
  Synthetic
ggugagacgauaagggagucuc

SEQ ID NO: 552269 - RNA, 23 nt, Artificial Sequence
  Synthetic
aggugagacgauaagggagucuc

SEQ ID NO: 552270 - RNA, 24 nt, Artificial Sequence
  Synthetic
gaggugagacgauaagggagucuc

SEQ ID NO: 552271 - RNA, 18 nt, Artificial Sequence
  Synthetic
gauuuuaaucugagucuc

SEQ ID NO: 552272 - RNA, 19 nt, Artificial Sequence
  Synthetic
ugauuuuaaucugagucuc

SEQ ID NO: 552273 - RNA, 20 nt, Artificial Sequence
  Synthetic
cugauuuuaaucugagucuc

SEQ ID NO: 552274 - RNA, 21 nt, Artificial Sequence
  Synthetic
ccugauuuuaaucugagucuc

SEQ ID NO: 552275 - RNA, 22 nt, Artificial Sequence
  Synthetic
uccugauuuuaaucugagucuc

SEQ ID NO: 552276 - RNA, 23 nt, Artificial Sequence
  Synthetic
uuccugauuuuaaucugagucuc

SEQ ID NO: 552277 - RNA, 24 nt, Artificial Sequence
  Synthetic
cuuccugauuuuaaucugagucuc

SEQ ID NO: 552278 - RNA, 18 nt, Artificial Sequence
  Synthetic
uguggaugguauagucuc

SEQ ID NO: 552279 - RNA, 19 nt, Artificial Sequence
  Synthetic
auguggaugguauagucuc

SEQ ID NO: 552280 - RNA, 20 nt, Artificial Sequence
  Synthetic
uauguggaugguauagucuc

SEQ ID NO: 552281 - RNA, 21 nt, Artificial Sequence
  Synthetic
auauguggaugguauagucuc

SEQ ID NO: 552282 - RNA, 22 nt, Artificial Sequence
  Synthetic
aauauguggaugguauagucuc

SEQ ID NO: 552283 - RNA, 23 nt, Artificial Sequence
  Synthetic
aaauauguggaugguauagucuc

SEQ ID NO: 552284 - RNA, 24 nt, Artificial Sequence
  Synthetic
uaaauauguggaugguauagucuc

SEQ ID NO: 552285 - RNA, 18 nt, Artificial Sequence
  Synthetic
gccauuuucacuagucuc

SEQ ID NO: 552286 - RNA, 19 nt, Artificial Sequence
  Synthetic
agccauuuucacuagucuc

SEQ ID NO: 552287 - RNA, 20 nt, Artificial Sequence
  Synthetic
uagccauuuucacuagucuc

SEQ ID NO: 552288 - RNA, 21 nt, Artificial Sequence
  Synthetic
guagccauuuucacuagucuc

SEQ ID NO: 552289 - RNA, 22 nt, Artificial Sequence
  Synthetic
aguagccauuuucacuagucuc

SEQ ID NO: 552290 - RNA, 23 nt, Artificial Sequence
  Synthetic
aaguagccauuuucacuagucuc

SEQ ID NO: 552291 - RNA, 24 nt, Artificial Sequence
  Synthetic
uaaguagccauuuucacuagucuc

SEQ ID NO: 552292 - RNA, 18 nt, Artificial Sequence
  Synthetic
guuagacuuccuagucuc

SEQ ID NO: 552293 - RNA, 19 nt, Artificial Sequence
  Synthetic
uguuagacuuccuagucuc

SEQ ID NO: 552294 - RNA, 20 nt, Artificial Sequence
  Synthetic
auguuagacuuccuagucuc

SEQ ID NO: 552295 - RNA, 21 nt, Artificial Sequence
  Synthetic
aauguuagacuuccuagucuc

SEQ ID NO: 552296 - RNA, 22 nt, Artificial Sequence
  Synthetic
uaauguuagacuuccuagucuc

SEQ ID NO: 552297 - RNA, 23 nt, Artificial Sequence
  Synthetic
uuaauguuagacuuccuagucuc

SEQ ID NO: 552298 - RNA, 24 nt, Artificial Sequence
  Synthetic
cuuaauguuagacuuccuagucuc

SEQ ID NO: 552299 - RNA, 18 nt, Artificial Sequence
  Synthetic
ugauaguaaauuagucuc

SEQ ID NO: 552300 - RNA, 19 nt, Artificial Sequence
  Synthetic
gugauaguaaauuagucuc

SEQ ID NO: 552301 - RNA, 20 nt, Artificial Sequence
  Synthetic
cgugauaguaaauuagucuc

SEQ ID NO: 552302 - RNA, 21 nt, Artificial Sequence
  Synthetic
ucgugauaguaaauuagucuc

SEQ ID NO: 552303 - RNA, 22 nt, Artificial Sequence
  Synthetic
cucgugauaguaaauuagucuc

SEQ ID NO: 552304 - RNA, 23 nt, Artificial Sequence
  Synthetic
ucucgugauaguaaauuagucuc

SEQ ID NO: 552305 - RNA, 24 nt, Artificial Sequence
  Synthetic
uucucgugauaguaaauuagucuc

SEQ ID NO: 552306 - RNA, 18 nt, Artificial Sequence
  Synthetic
ccuguaaucccaggucuc

SEQ ID NO: 552307 - RNA, 19 nt, Artificial Sequence
  Synthetic
gccuguaaucccaggucuc

SEQ ID NO: 552308 - RNA, 20 nt, Artificial Sequence
  Synthetic
cgccuguaaucccaggucuc

SEQ ID NO: 552309 - RNA, 21 nt, Artificial Sequence
  Synthetic
acgccuguaaucccaggucuc

SEQ ID NO: 552310 - RNA, 22 nt, Artificial Sequence
  Synthetic
cacgccuguaaucccaggucuc

SEQ ID NO: 552311 - RNA, 23 nt, Artificial Sequence
  Synthetic
ucacgccuguaaucccaggucuc

SEQ ID NO: 552312 - RNA, 24 nt, Artificial Sequence
  Synthetic
cucacgccuguaaucccaggucuc

SEQ ID NO: 552313 - RNA, 18 nt, Artificial Sequence
  Synthetic
ucaacacuuggaggucuc

SEQ ID NO: 552314 - RNA, 19 nt, Artificial Sequence
  Synthetic
cucaacacuuggaggucuc

SEQ ID NO: 552315 - RNA, 20 nt, Artificial Sequence
  Synthetic
ucucaacacuuggaggucuc

SEQ ID NO: 552316 - RNA, 21 nt, Artificial Sequence
  Synthetic
uucucaacacuuggaggucuc

SEQ ID NO: 552317 - RNA, 22 nt, Artificial Sequence
  Synthetic
uuucucaacacuuggaggucuc

SEQ ID NO: 552318 - RNA, 23 nt, Artificial Sequence
  Synthetic
auuucucaacacuuggaggucuc

SEQ ID NO: 552319 - RNA, 24 nt, Artificial Sequence
  Synthetic
aauuucucaacacuuggaggucuc

SEQ ID NO: 552320 - RNA, 18 nt, Artificial Sequence
  Synthetic
agucucuuuguaggucuc

SEQ ID NO: 552321 - RNA, 19 nt, Artificial Sequence
  Synthetic
aagucucuuuguaggucuc

SEQ ID NO: 552322 - RNA, 20 nt, Artificial Sequence
  Synthetic
uaagucucuuuguaggucuc

SEQ ID NO: 552323 - RNA, 21 nt, Artificial Sequence
  Synthetic
guaagucucuuuguaggucuc

SEQ ID NO: 552324 - RNA, 22 nt, Artificial Sequence
  Synthetic
uguaagucucuuuguaggucuc

SEQ ID NO: 552325 - RNA, 23 nt, Artificial Sequence
  Synthetic
guguaagucucuuuguaggucuc

SEQ ID NO: 552326 - RNA, 24 nt, Artificial Sequence
  Synthetic
aguguaagucucuuuguaggucuc

SEQ ID NO: 552327 - RNA, 18 nt, Artificial Sequence
  Synthetic
auuuugagacagggucuc

SEQ ID NO: 552328 - RNA, 19 nt, Artificial Sequence
  Synthetic
uauuuugagacagggucuc

SEQ ID NO: 552329 - RNA, 20 nt, Artificial Sequence
  Synthetic
uuauuuugagacagggucuc

SEQ ID NO: 552330 - RNA, 21 nt, Artificial Sequence
  Synthetic
uuuauuuugagacagggucuc

SEQ ID NO: 552331 - RNA, 22 nt, Artificial Sequence
  Synthetic
auuuauuuugagacagggucuc

SEQ ID NO: 552332 - RNA, 23 nt, Artificial Sequence
  Synthetic
uauuuauuuugagacagggucuc

SEQ ID NO: 552333 - RNA, 24 nt, Artificial Sequence
  Synthetic
uuauuuauuuugagacagggucuc

SEQ ID NO: 552334 - RNA, 18 nt, Artificial Sequence
  Synthetic
uuucagugguagggucuc

SEQ ID NO: 552335 - RNA, 19 nt, Artificial Sequence
  Synthetic
guuucagugguagggucuc

SEQ ID NO: 552336 - RNA, 20 nt, Artificial Sequence
  Synthetic
gguuucagugguagggucuc

SEQ ID NO: 552337 - RNA, 21 nt, Artificial Sequence
  Synthetic
ggguuucagugguagggucuc

SEQ ID NO: 552338 - RNA, 22 nt, Artificial Sequence
  Synthetic
aggguuucagugguagggucuc

SEQ ID NO: 552339 - RNA, 23 nt, Artificial Sequence
  Synthetic
gaggguuucagugguagggucuc

SEQ ID NO: 552340 - RNA, 24 nt, Artificial Sequence
  Synthetic
ugaggguuucagugguagggucuc

SEQ ID NO: 552341 - RNA, 18 nt, Artificial Sequence
  Synthetic
uugguugcguugggucuc

SEQ ID NO: 552342 - RNA, 19 nt, Artificial Sequence
  Synthetic
guugguugcguugggucuc

SEQ ID NO: 552343 - RNA, 20 nt, Artificial Sequence
  Synthetic
uguugguugcguugggucuc

SEQ ID NO: 552344 - RNA, 21 nt, Artificial Sequence
  Synthetic
auguugguugcguugggucuc

SEQ ID NO: 552345 - RNA, 22 nt, Artificial Sequence
  Synthetic
aauguugguugcguugggucuc

SEQ ID NO: 552346 - RNA, 23 nt, Artificial Sequence
  Synthetic
uaauguugguugcguugggucuc

SEQ ID NO: 552347 - RNA, 24 nt, Artificial Sequence
  Synthetic
auaauguugguugcguugggucuc

SEQ ID NO: 552348 - RNA, 18 nt, Artificial Sequence
  Synthetic
ucagaaacuuugggucuc

SEQ ID NO: 552349 - RNA, 19 nt, Artificial Sequence
  Synthetic
gucagaaacuuugggucuc

SEQ ID NO: 552350 - RNA, 20 nt, Artificial Sequence
  Synthetic
agucagaaacuuugggucuc

SEQ ID NO: 552351 - RNA, 21 nt, Artificial Sequence
  Synthetic
aagucagaaacuuugggucuc

SEQ ID NO: 552352 - RNA, 22 nt, Artificial Sequence
  Synthetic
aaagucagaaacuuugggucuc

SEQ ID NO: 552353 - RNA, 23 nt, Artificial Sequence
  Synthetic
uaaagucagaaacuuugggucuc

SEQ ID NO: 552354 - RNA, 24 nt, Artificial Sequence
  Synthetic
cuaaagucagaaacuuugggucuc

SEQ ID NO: 552355 - RNA, 18 nt, Artificial Sequence
  Synthetic
ccucuuuagcuuggucuc

SEQ ID NO: 552356 - RNA, 19 nt, Artificial Sequence
  Synthetic
uccucuuuagcuuggucuc

SEQ ID NO: 552357 - RNA, 20 nt, Artificial Sequence
  Synthetic
cuccucuuuagcuuggucuc

SEQ ID NO: 552358 - RNA, 21 nt, Artificial Sequence
  Synthetic
ucuccucuuuagcuuggucuc

SEQ ID NO: 552359 - RNA, 22 nt, Artificial Sequence
  Synthetic
aucuccucuuuagcuuggucuc

SEQ ID NO: 552360 - RNA, 23 nt, Artificial Sequence
  Synthetic
caucuccucuuuagcuuggucuc

SEQ ID NO: 552361 - RNA, 24 nt, Artificial Sequence
  Synthetic
ccaucuccucuuuagcuuggucuc

SEQ ID NO: 552362 - RNA, 18 nt, Artificial Sequence
  Synthetic
cacaaccaaaaaugucuc

SEQ ID NO: 552363 - RNA, 19 nt, Artificial Sequence
  Synthetic
ucacaaccaaaaaugucuc

SEQ ID NO: 552364 - RNA, 20 nt, Artificial Sequence
  Synthetic
gucacaaccaaaaaugucuc

SEQ ID NO: 552365 - RNA, 21 nt, Artificial Sequence
  Synthetic
ugucacaaccaaaaaugucuc

SEQ ID NO: 552366 - RNA, 22 nt, Artificial Sequence
  Synthetic
uugucacaaccaaaaaugucuc

SEQ ID NO: 552367 - RNA, 23 nt, Artificial Sequence
  Synthetic
auugucacaaccaaaaaugucuc

SEQ ID NO: 552368 - RNA, 24 nt, Artificial Sequence
  Synthetic
aauugucacaaccaaaaaugucuc

SEQ ID NO: 552369 - RNA, 18 nt, Artificial Sequence
  Synthetic
caauggggaaaaugucuc

SEQ ID NO: 552370 - RNA, 19 nt, Artificial Sequence
  Synthetic
acaauggggaaaaugucuc

SEQ ID NO: 552371 - RNA, 20 nt, Artificial Sequence
  Synthetic
gacaauggggaaaaugucuc

SEQ ID NO: 552372 - RNA, 21 nt, Artificial Sequence
  Synthetic
agacaauggggaaaaugucuc

SEQ ID NO: 552373 - RNA, 22 nt, Artificial Sequence
  Synthetic
aagacaauggggaaaaugucuc

SEQ ID NO: 552374 - RNA, 23 nt, Artificial Sequence
  Synthetic
caagacaauggggaaaaugucuc

SEQ ID NO: 552375 - RNA, 24 nt, Artificial Sequence
  Synthetic
gcaagacaauggggaaaaugucuc

SEQ ID NO: 552376 - RNA, 18 nt, Artificial Sequence
  Synthetic
gacauuaccaaaugucuc

SEQ ID NO: 552377 - RNA, 19 nt, Artificial Sequence
  Synthetic
ugacauuaccaaaugucuc

SEQ ID NO: 552378 - RNA, 20 nt, Artificial Sequence
  Synthetic
cugacauuaccaaaugucuc

SEQ ID NO: 552379 - RNA, 21 nt, Artificial Sequence
  Synthetic
ccugacauuaccaaaugucuc

SEQ ID NO: 552380 - RNA, 22 nt, Artificial Sequence
  Synthetic
uccugacauuaccaaaugucuc

SEQ ID NO: 552381 - RNA, 23 nt, Artificial Sequence
  Synthetic
cuccugacauuaccaaaugucuc

SEQ ID NO: 552382 - RNA, 24 nt, Artificial Sequence
  Synthetic
ucuccugacauuaccaaaugucuc

SEQ ID NO: 552383 - RNA, 18 nt, Artificial Sequence
  Synthetic
cauucccaaacaugucuc

SEQ ID NO: 552384 - RNA, 19 nt, Artificial Sequence
  Synthetic
acauucccaaacaugucuc

SEQ ID NO: 552385 - RNA, 20 nt, Artificial Sequence
  Synthetic
gacauucccaaacaugucuc

SEQ ID NO: 552386 - RNA, 21 nt, Artificial Sequence
  Synthetic
ugacauucccaaacaugucuc

SEQ ID NO: 552387 - RNA, 22 nt, Artificial Sequence
  Synthetic
augacauucccaaacaugucuc

SEQ ID NO: 552388 - RNA, 23 nt, Artificial Sequence
  Synthetic
uaugacauucccaaacaugucuc

SEQ ID NO: 552389 - RNA, 24 nt, Artificial Sequence
  Synthetic
cuaugacauucccaaacaugucuc

SEQ ID NO: 552390 - RNA, 18 nt, Artificial Sequence
  Synthetic
agagugagaugcugucuc

SEQ ID NO: 552391 - RNA, 19 nt, Artificial Sequence
  Synthetic
cagagugagaugcugucuc

SEQ ID NO: 552392 - RNA, 20 nt, Artificial Sequence
  Synthetic
acagagugagaugcugucuc

SEQ ID NO: 552393 - RNA, 21 nt, Artificial Sequence
  Synthetic
aacagagugagaugcugucuc

SEQ ID NO: 552394 - RNA, 22 nt, Artificial Sequence
  Synthetic
caacagagugagaugcugucuc

SEQ ID NO: 552395 - RNA, 23 nt, Artificial Sequence
  Synthetic
gcaacagagugagaugcugucuc

SEQ ID NO: 552396 - RNA, 24 nt, Artificial Sequence
  Synthetic
ggcaacagagugagaugcugucuc

SEQ ID NO: 552397 - RNA, 18 nt, Artificial Sequence
  Synthetic
cuggagggccucugucuc

SEQ ID NO: 552398 - RNA, 19 nt, Artificial Sequence
  Synthetic
ucuggagggccucugucuc

SEQ ID NO: 552399 - RNA, 20 nt, Artificial Sequence
  Synthetic
gucuggagggccucugucuc

SEQ ID NO: 552400 - RNA, 21 nt, Artificial Sequence
  Synthetic
agucuggagggccucugucuc

SEQ ID NO: 552401 - RNA, 22 nt, Artificial Sequence
  Synthetic
gagucuggagggccucugucuc

SEQ ID NO: 552402 - RNA, 23 nt, Artificial Sequence
  Synthetic
ggagucuggagggccucugucuc

SEQ ID NO: 552403 - RNA, 24 nt, Artificial Sequence
  Synthetic
uggagucuggagggccucugucuc

SEQ ID NO: 552404 - RNA, 18 nt, Artificial Sequence
  Synthetic
agugguaacaugugucuc

SEQ ID NO: 552405 - RNA, 19 nt, Artificial Sequence
  Synthetic
uagugguaacaugugucuc

SEQ ID NO: 552406 - RNA, 20 nt, Artificial Sequence
  Synthetic
uuagugguaacaugugucuc

SEQ ID NO: 552407 - RNA, 21 nt, Artificial Sequence
  Synthetic
auuagugguaacaugugucuc

SEQ ID NO: 552408 - RNA, 22 nt, Artificial Sequence
  Synthetic
cauuagugguaacaugugucuc

SEQ ID NO: 552409 - RNA, 23 nt, Artificial Sequence
  Synthetic
ccauuagugguaacaugugucuc

SEQ ID NO: 552410 - RNA, 24 nt, Artificial Sequence
  Synthetic
accauuagugguaacaugugucuc

SEQ ID NO: 552411 - RNA, 18 nt, Artificial Sequence
  Synthetic
uugacuuggcugugucuc

SEQ ID NO: 552412 - RNA, 19 nt, Artificial Sequence
  Synthetic
auugacuuggcugugucuc

SEQ ID NO: 552413 - RNA, 20 nt, Artificial Sequence
  Synthetic
aauugacuuggcugugucuc

SEQ ID NO: 552414 - RNA, 21 nt, Artificial Sequence
  Synthetic
gaauugacuuggcugugucuc

SEQ ID NO: 552415 - RNA, 22 nt, Artificial Sequence
  Synthetic
ugaauugacuuggcugugucuc

SEQ ID NO: 552416 - RNA, 23 nt, Artificial Sequence
  Synthetic
uugaauugacuuggcugugucuc

SEQ ID NO: 552417 - RNA, 24 nt, Artificial Sequence
  Synthetic
uuugaauugacuuggcugugucuc

SEQ ID NO: 552418 - RNA, 18 nt, Artificial Sequence
  Synthetic
ucaauauuguugugucuc

SEQ ID NO: 552419 - RNA, 19 nt, Artificial Sequence
  Synthetic
uucaauauuguugugucuc

SEQ ID NO: 552420 - RNA, 20 nt, Artificial Sequence
  Synthetic
uuucaauauuguugugucuc

SEQ ID NO: 552421 - RNA, 21 nt, Artificial Sequence
  Synthetic
auuucaauauuguugugucuc

SEQ ID NO: 552422 - RNA, 22 nt, Artificial Sequence
  Synthetic
aauuucaauauuguugugucuc

SEQ ID NO: 552423 - RNA, 23 nt, Artificial Sequence
  Synthetic
uaauuucaauauuguugugucuc

SEQ ID NO: 552424 - RNA, 24 nt, Artificial Sequence
  Synthetic
auaauuucaauauuguugugucuc

SEQ ID NO: 552425 - RNA, 18 nt, Artificial Sequence
  Synthetic
caaugggaaaauugucuc

SEQ ID NO: 552426 - RNA, 19 nt, Artificial Sequence
  Synthetic
gcaaugggaaaauugucuc

SEQ ID NO: 552427 - RNA, 20 nt, Artificial Sequence
  Synthetic
ggcaaugggaaaauugucuc

SEQ ID NO: 552428 - RNA, 21 nt, Artificial Sequence
  Synthetic
aggcaaugggaaaauugucuc

SEQ ID NO: 552429 - RNA, 22 nt, Artificial Sequence
  Synthetic
aaggcaaugggaaaauugucuc

SEQ ID NO: 552430 - RNA, 23 nt, Artificial Sequence
  Synthetic
caaggcaaugggaaaauugucuc

SEQ ID NO: 552431 - RNA, 24 nt, Artificial Sequence
  Synthetic
ccaaggcaaugggaaaauugucuc

SEQ ID NO: 552432 - RNA, 18 nt, Artificial Sequence
  Synthetic
uaagcuaagaauugucuc

SEQ ID NO: 552433 - RNA, 19 nt, Artificial Sequence
  Synthetic
uuaagcuaagaauugucuc

SEQ ID NO: 552434 - RNA, 20 nt, Artificial Sequence
  Synthetic
uuuaagcuaagaauugucuc

SEQ ID NO: 552435 - RNA, 21 nt, Artificial Sequence
  Synthetic
uuuuaagcuaagaauugucuc

SEQ ID NO: 552436 - RNA, 22 nt, Artificial Sequence
  Synthetic
guuuuaagcuaagaauugucuc

SEQ ID NO: 552437 - RNA, 23 nt, Artificial Sequence
  Synthetic
uguuuuaagcuaagaauugucuc

SEQ ID NO: 552438 - RNA, 24 nt, Artificial Sequence
  Synthetic
guguuuuaagcuaagaauugucuc

SEQ ID NO: 552439 - RNA, 18 nt, Artificial Sequence
  Synthetic
cucaguauuccuugucuc

SEQ ID NO: 552440 - RNA, 19 nt, Artificial Sequence
  Synthetic
ccucaguauuccuugucuc

SEQ ID NO: 552441 - RNA, 20 nt, Artificial Sequence
  Synthetic
accucaguauuccuugucuc

SEQ ID NO: 552442 - RNA, 21 nt, Artificial Sequence
  Synthetic
caccucaguauuccuugucuc

SEQ ID NO: 552443 - RNA, 22 nt, Artificial Sequence
  Synthetic
gcaccucaguauuccuugucuc

SEQ ID NO: 552444 - RNA, 23 nt, Artificial Sequence
  Synthetic
agcaccucaguauuccuugucuc

SEQ ID NO: 552445 - RNA, 24 nt, Artificial Sequence
  Synthetic
gagcaccucaguauuccuugucuc

SEQ ID NO: 552446 - RNA, 18 nt, Artificial Sequence
  Synthetic
aucuggauuuguugucuc

SEQ ID NO: 552447 - RNA, 19 nt, Artificial Sequence
  Synthetic
aaucuggauuuguugucuc

SEQ ID NO: 552448 - RNA, 20 nt, Artificial Sequence
  Synthetic
aaaucuggauuuguugucuc

SEQ ID NO: 552449 - RNA, 21 nt, Artificial Sequence
  Synthetic
caaaucuggauuuguugucuc

SEQ ID NO: 552450 - RNA, 22 nt, Artificial Sequence
  Synthetic
ucaaaucuggauuuguugucuc

SEQ ID NO: 552451 - RNA, 23 nt, Artificial Sequence
  Synthetic
uucaaaucuggauuuguugucuc

SEQ ID NO: 552452 - RNA, 24 nt, Artificial Sequence
  Synthetic
uuucaaaucuggauuuguugucuc

SEQ ID NO: 552453 - RNA, 18 nt, Artificial Sequence
  Synthetic
ccuagcuagcuuugucuc

SEQ ID NO: 552454 - RNA, 19 nt, Artificial Sequence
  Synthetic
cccuagcuagcuuugucuc

SEQ ID NO: 552455 - RNA, 20 nt, Artificial Sequence
  Synthetic
ccccuagcuagcuuugucuc

SEQ ID NO: 552456 - RNA, 21 nt, Artificial Sequence
  Synthetic
uccccuagcuagcuuugucuc

SEQ ID NO: 552457 - RNA, 22 nt, Artificial Sequence
  Synthetic
cuccccuagcuagcuuugucuc

SEQ ID NO: 552458 - RNA, 23 nt, Artificial Sequence
  Synthetic
gcuccccuagcuagcuuugucuc

SEQ ID NO: 552459 - RNA, 24 nt, Artificial Sequence
  Synthetic
agcuccccuagcuagcuuugucuc

SEQ ID NO: 552460 - RNA, 18 nt, Artificial Sequence
  Synthetic
uuuuaaagggaaauucuc

SEQ ID NO: 552461 - RNA, 19 nt, Artificial Sequence
  Synthetic
auuuuaaagggaaauucuc

SEQ ID NO: 552462 - RNA, 20 nt, Artificial Sequence
  Synthetic
aauuuuaaagggaaauucuc

SEQ ID NO: 552463 - RNA, 21 nt, Artificial Sequence
  Synthetic
uaauuuuaaagggaaauucuc

SEQ ID NO: 552464 - RNA, 22 nt, Artificial Sequence
  Synthetic
uuaauuuuaaagggaaauucuc

SEQ ID NO: 552465 - RNA, 23 nt, Artificial Sequence
  Synthetic
cuuaauuuuaaagggaaauucuc

SEQ ID NO: 552466 - RNA, 24 nt, Artificial Sequence
  Synthetic
ccuuaauuuuaaagggaaauucuc

SEQ ID NO: 552467 - RNA, 18 nt, Artificial Sequence
  Synthetic
aacuuaaauguaauucuc

SEQ ID NO: 552468 - RNA, 19 nt, Artificial Sequence
  Synthetic
caacuuaaauguaauucuc

SEQ ID NO: 552469 - RNA, 20 nt, Artificial Sequence
  Synthetic
acaacuuaaauguaauucuc

SEQ ID NO: 552470 - RNA, 21 nt, Artificial Sequence
  Synthetic
aacaacuuaaauguaauucuc

SEQ ID NO: 552471 - RNA, 22 nt, Artificial Sequence
  Synthetic
aaacaacuuaaauguaauucuc

SEQ ID NO: 552472 - RNA, 23 nt, Artificial Sequence
  Synthetic
gaaacaacuuaaauguaauucuc

SEQ ID NO: 552473 - RNA, 24 nt, Artificial Sequence
  Synthetic
ugaaacaacuuaaauguaauucuc

SEQ ID NO: 552474 - RNA, 18 nt, Artificial Sequence
  Synthetic
gcaguaaauuuaauucuc

SEQ ID NO: 552475 - RNA, 19 nt, Artificial Sequence
  Synthetic
ugcaguaaauuuaauucuc

SEQ ID NO: 552476 - RNA, 20 nt, Artificial Sequence
  Synthetic
augcaguaaauuuaauucuc

SEQ ID NO: 552477 - RNA, 21 nt, Artificial Sequence
  Synthetic
gaugcaguaaauuuaauucuc

SEQ ID NO: 552478 - RNA, 22 nt, Artificial Sequence
  Synthetic
cgaugcaguaaauuuaauucuc

SEQ ID NO: 552479 - RNA, 23 nt, Artificial Sequence
  Synthetic
ucgaugcaguaaauuuaauucuc

SEQ ID NO: 552480 - RNA, 24 nt, Artificial Sequence
  Synthetic
aucgaugcaguaaauuuaauucuc

SEQ ID NO: 552481 - RNA, 18 nt, Artificial Sequence
  Synthetic
auucauuuuuacauucuc

SEQ ID NO: 552482 - RNA, 19 nt, Artificial Sequence
  Synthetic
aauucauuuuuacauucuc

SEQ ID NO: 552483 - RNA, 20 nt, Artificial Sequence
  Synthetic
caauucauuuuuacauucuc

SEQ ID NO: 552484 - RNA, 21 nt, Artificial Sequence
  Synthetic
ucaauucauuuuuacauucuc

SEQ ID NO: 552485 - RNA, 22 nt, Artificial Sequence
  Synthetic
uucaauucauuuuuacauucuc

SEQ ID NO: 552486 - RNA, 23 nt, Artificial Sequence
  Synthetic
cuucaauucauuuuuacauucuc

SEQ ID NO: 552487 - RNA, 24 nt, Artificial Sequence
  Synthetic
ccuucaauucauuuuuacauucuc

SEQ ID NO: 552488 - RNA, 18 nt, Artificial Sequence
  Synthetic
uauggacaccucauucuc

SEQ ID NO: 552489 - RNA, 19 nt, Artificial Sequence
  Synthetic
cuauggacaccucauucuc

SEQ ID NO: 552490 - RNA, 20 nt, Artificial Sequence
  Synthetic
ccuauggacaccucauucuc

SEQ ID NO: 552491 - RNA, 21 nt, Artificial Sequence
  Synthetic
cccuauggacaccucauucuc

SEQ ID NO: 552492 - RNA, 22 nt, Artificial Sequence
  Synthetic
ccccuauggacaccucauucuc

SEQ ID NO: 552493 - RNA, 23 nt, Artificial Sequence
  Synthetic
uccccuauggacaccucauucuc

SEQ ID NO: 552494 - RNA, 24 nt, Artificial Sequence
  Synthetic
auccccuauggacaccucauucuc

SEQ ID NO: 552495 - RNA, 18 nt, Artificial Sequence
  Synthetic
uaacaucaauucauucuc

SEQ ID NO: 552496 - RNA, 19 nt, Artificial Sequence
  Synthetic
uuaacaucaauucauucuc

SEQ ID NO: 552497 - RNA, 20 nt, Artificial Sequence
  Synthetic
auuaacaucaauucauucuc

SEQ ID NO: 552498 - RNA, 21 nt, Artificial Sequence
  Synthetic
aauuaacaucaauucauucuc

SEQ ID NO: 552499 - RNA, 22 nt, Artificial Sequence
  Synthetic
aaauuaacaucaauucauucuc

SEQ ID NO: 552500 - RNA, 23 nt, Artificial Sequence
  Synthetic
aaaauuaacaucaauucauucuc

SEQ ID NO: 552501 - RNA, 24 nt, Artificial Sequence
  Synthetic
uaaaauuaacaucaauucauucuc

SEQ ID NO: 552502 - RNA, 18 nt, Artificial Sequence
  Synthetic
agucaggguuucauucuc

SEQ ID NO: 552503 - RNA, 19 nt, Artificial Sequence
  Synthetic
gagucaggguuucauucuc

SEQ ID NO: 552504 - RNA, 20 nt, Artificial Sequence
  Synthetic
ggagucaggguuucauucuc

SEQ ID NO: 552505 - RNA, 21 nt, Artificial Sequence
  Synthetic
aggagucaggguuucauucuc

SEQ ID NO: 552506 - RNA, 22 nt, Artificial Sequence
  Synthetic
aaggagucaggguuucauucuc

SEQ ID NO: 552507 - RNA, 23 nt, Artificial Sequence
  Synthetic
uaaggagucaggguuucauucuc

SEQ ID NO: 552508 - RNA, 24 nt, Artificial Sequence
  Synthetic
uuaaggagucaggguuucauucuc

SEQ ID NO: 552509 - RNA, 18 nt, Artificial Sequence
  Synthetic
uuacucucagugauucuc

SEQ ID NO: 552510 - RNA, 19 nt, Artificial Sequence
  Synthetic
cuuacucucagugauucuc

SEQ ID NO: 552511 - RNA, 20 nt, Artificial Sequence
  Synthetic
acuuacucucagugauucuc

SEQ ID NO: 552512 - RNA, 21 nt, Artificial Sequence
  Synthetic
uacuuacucucagugauucuc

SEQ ID NO: 552513 - RNA, 22 nt, Artificial Sequence
  Synthetic
auacuuacucucagugauucuc

SEQ ID NO: 552514 - RNA, 23 nt, Artificial Sequence
  Synthetic
cauacuuacucucagugauucuc

SEQ ID NO: 552515 - RNA, 24 nt, Artificial Sequence
  Synthetic
acauacuuacucucagugauucuc

SEQ ID NO: 552516 - RNA, 18 nt, Artificial Sequence
  Synthetic
uagauguuuaauauucuc

SEQ ID NO: 552517 - RNA, 19 nt, Artificial Sequence
  Synthetic
guagauguuuaauauucuc

SEQ ID NO: 552518 - RNA, 20 nt, Artificial Sequence
  Synthetic
aguagauguuuaauauucuc

SEQ ID NO: 552519 - RNA, 21 nt, Artificial Sequence
  Synthetic
uaguagauguuuaauauucuc

SEQ ID NO: 552520 - RNA, 22 nt, Artificial Sequence
  Synthetic
uuaguagauguuuaauauucuc

SEQ ID NO: 552521 - RNA, 23 nt, Artificial Sequence
  Synthetic
uuuaguagauguuuaauauucuc

SEQ ID NO: 552522 - RNA, 24 nt, Artificial Sequence
  Synthetic
auuuaguagauguuuaauauucuc

SEQ ID NO: 552523 - RNA, 18 nt, Artificial Sequence
  Synthetic
uuaccuucucuuauucuc

SEQ ID NO: 552524 - RNA, 19 nt, Artificial Sequence
  Synthetic
uuuaccuucucuuauucuc

SEQ ID NO: 552525 - RNA, 20 nt, Artificial Sequence
  Synthetic
cuuuaccuucucuuauucuc

SEQ ID NO: 552526 - RNA, 21 nt, Artificial Sequence
  Synthetic
acuuuaccuucucuuauucuc

SEQ ID NO: 552527 - RNA, 22 nt, Artificial Sequence
  Synthetic
uacuuuaccuucucuuauucuc

SEQ ID NO: 552528 - RNA, 23 nt, Artificial Sequence
  Synthetic
auacuuuaccuucucuuauucuc

SEQ ID NO: 552529 - RNA, 24 nt, Artificial Sequence
  Synthetic
cauacuuuaccuucucuuauucuc

SEQ ID NO: 552530 - RNA, 18 nt, Artificial Sequence
  Synthetic
guuggaauaguuauucuc

SEQ ID NO: 552531 - RNA, 19 nt, Artificial Sequence
  Synthetic
aguuggaauaguuauucuc

SEQ ID NO: 552532 - RNA, 20 nt, Artificial Sequence
  Synthetic
uaguuggaauaguuauucuc

SEQ ID NO: 552533 - RNA, 21 nt, Artificial Sequence
  Synthetic
auaguuggaauaguuauucuc

SEQ ID NO: 552534 - RNA, 22 nt, Artificial Sequence
  Synthetic
gauaguuggaauaguuauucuc

SEQ ID NO: 552535 - RNA, 23 nt, Artificial Sequence
  Synthetic
agauaguuggaauaguuauucuc

SEQ ID NO: 552536 - RNA, 24 nt, Artificial Sequence
  Synthetic
aagauaguuggaauaguuauucuc

SEQ ID NO: 552537 - RNA, 18 nt, Artificial Sequence
  Synthetic
ugguauuugcaacuucuc

SEQ ID NO: 552538 - RNA, 19 nt, Artificial Sequence
  Synthetic
augguauuugcaacuucuc

SEQ ID NO: 552539 - RNA, 20 nt, Artificial Sequence
  Synthetic
caugguauuugcaacuucuc

SEQ ID NO: 552540 - RNA, 21 nt, Artificial Sequence
  Synthetic
acaugguauuugcaacuucuc

SEQ ID NO: 552541 - RNA, 22 nt, Artificial Sequence
  Synthetic
aacaugguauuugcaacuucuc

SEQ ID NO: 552542 - RNA, 23 nt, Artificial Sequence
  Synthetic
uaacaugguauuugcaacuucuc

SEQ ID NO: 552543 - RNA, 24 nt, Artificial Sequence
  Synthetic
cuaacaugguauuugcaacuucuc

SEQ ID NO: 552544 - RNA, 18 nt, Artificial Sequence
  Synthetic
aaggggaaaugacuucuc

SEQ ID NO: 552545 - RNA, 19 nt, Artificial Sequence
  Synthetic
caaggggaaaugacuucuc

SEQ ID NO: 552546 - RNA, 20 nt, Artificial Sequence
  Synthetic
ccaaggggaaaugacuucuc

SEQ ID NO: 552547 - RNA, 21 nt, Artificial Sequence
  Synthetic
accaaggggaaaugacuucuc

SEQ ID NO: 552548 - RNA, 22 nt, Artificial Sequence
  Synthetic
aaccaaggggaaaugacuucuc

SEQ ID NO: 552549 - RNA, 23 nt, Artificial Sequence
  Synthetic
aaaccaaggggaaaugacuucuc

SEQ ID NO: 552550 - RNA, 24 nt, Artificial Sequence
  Synthetic
caaaccaaggggaaaugacuucuc

SEQ ID NO: 552551 - RNA, 18 nt, Artificial Sequence
  Synthetic
cucugcggggaccuucuc

SEQ ID NO: 552552 - RNA, 19 nt, Artificial Sequence
  Synthetic
ucucugcggggaccuucuc

SEQ ID NO: 552553 - RNA, 20 nt, Artificial Sequence
  Synthetic
cucucugcggggaccuucuc

SEQ ID NO: 552554 - RNA, 21 nt, Artificial Sequence
  Synthetic
ccucucugcggggaccuucuc

SEQ ID NO: 552555 - RNA, 22 nt, Artificial Sequence
  Synthetic
gccucucugcggggaccuucuc

SEQ ID NO: 552556 - RNA, 23 nt, Artificial Sequence
  Synthetic
ugccucucugcggggaccuucuc

SEQ ID NO: 552557 - RNA, 24 nt, Artificial Sequence
  Synthetic
uugccucucugcggggaccuucuc

SEQ ID NO: 552558 - RNA, 18 nt, Artificial Sequence
  Synthetic
uugucucucaagcuucuc

SEQ ID NO: 552559 - RNA, 19 nt, Artificial Sequence
  Synthetic
cuugucucucaagcuucuc

SEQ ID NO: 552560 - RNA, 20 nt, Artificial Sequence
  Synthetic
ucuugucucucaagcuucuc

SEQ ID NO: 552561 - RNA, 21 nt, Artificial Sequence
  Synthetic
uucuugucucucaagcuucuc

SEQ ID NO: 552562 - RNA, 22 nt, Artificial Sequence
  Synthetic
uuucuugucucucaagcuucuc

SEQ ID NO: 552563 - RNA, 23 nt, Artificial Sequence
  Synthetic
guuucuugucucucaagcuucuc

SEQ ID NO: 552564 - RNA, 24 nt, Artificial Sequence
  Synthetic
uguuucuugucucucaagcuucuc

SEQ ID NO: 552565 - RNA, 18 nt, Artificial Sequence
  Synthetic
cuccaauacaggcuucuc

SEQ ID NO: 552566 - RNA, 19 nt, Artificial Sequence
  Synthetic
acuccaauacaggcuucuc

SEQ ID NO: 552567 - RNA, 20 nt, Artificial Sequence
  Synthetic
aacuccaauacaggcuucuc

SEQ ID NO: 552568 - RNA, 21 nt, Artificial Sequence
  Synthetic
uaacuccaauacaggcuucuc

SEQ ID NO: 552569 - RNA, 22 nt, Artificial Sequence
  Synthetic
cuaacuccaauacaggcuucuc

SEQ ID NO: 552570 - RNA, 23 nt, Artificial Sequence
  Synthetic
ccuaacuccaauacaggcuucuc

SEQ ID NO: 552571 - RNA, 24 nt, Artificial Sequence
  Synthetic
cccuaacuccaauacaggcuucuc

SEQ ID NO: 552572 - RNA, 18 nt, Artificial Sequence
  Synthetic
uuucuucaaaugcuucuc

SEQ ID NO: 552573 - RNA, 19 nt, Artificial Sequence
  Synthetic
auuucuucaaaugcuucuc

SEQ ID NO: 552574 - RNA, 20 nt, Artificial Sequence
  Synthetic
gauuucuucaaaugcuucuc

SEQ ID NO: 552575 - RNA, 21 nt, Artificial Sequence
  Synthetic
ugauuucuucaaaugcuucuc

SEQ ID NO: 552576 - RNA, 22 nt, Artificial Sequence
  Synthetic
cugauuucuucaaaugcuucuc

SEQ ID NO: 552577 - RNA, 23 nt, Artificial Sequence
  Synthetic
acugauuucuucaaaugcuucuc

SEQ ID NO: 552578 - RNA, 24 nt, Artificial Sequence
  Synthetic
aacugauuucuucaaaugcuucuc

SEQ ID NO: 552579 - RNA, 18 nt, Artificial Sequence
  Synthetic
ggcagcuucaugcuucuc

SEQ ID NO: 552580 - RNA, 19 nt, Artificial Sequence
  Synthetic
cggcagcuucaugcuucuc

SEQ ID NO: 552581 - RNA, 20 nt, Artificial Sequence
  Synthetic
ucggcagcuucaugcuucuc

SEQ ID NO: 552582 - RNA, 21 nt, Artificial Sequence
  Synthetic
uucggcagcuucaugcuucuc

SEQ ID NO: 552583 - RNA, 22 nt, Artificial Sequence
  Synthetic
uuucggcagcuucaugcuucuc

SEQ ID NO: 552584 - RNA, 23 nt, Artificial Sequence
  Synthetic
auuucggcagcuucaugcuucuc

SEQ ID NO: 552585 - RNA, 24 nt, Artificial Sequence
  Synthetic
gauuucggcagcuucaugcuucuc

SEQ ID NO: 552586 - RNA, 18 nt, Artificial Sequence
  Synthetic
caauacauccaucuucuc

SEQ ID NO: 552587 - RNA, 19 nt, Artificial Sequence
  Synthetic
ucaauacauccaucuucuc

SEQ ID NO: 552588 - RNA, 20 nt, Artificial Sequence
  Synthetic
aucaauacauccaucuucuc

SEQ ID NO: 552589 - RNA, 21 nt, Artificial Sequence
  Synthetic
aaucaauacauccaucuucuc

SEQ ID NO: 552590 - RNA, 22 nt, Artificial Sequence
  Synthetic
gaaucaauacauccaucuucuc

SEQ ID NO: 552591 - RNA, 23 nt, Artificial Sequence
  Synthetic
agaaucaauacauccaucuucuc

SEQ ID NO: 552592 - RNA, 24 nt, Artificial Sequence
  Synthetic
cagaaucaauacauccaucuucuc

SEQ ID NO: 552593 - RNA, 18 nt, Artificial Sequence
  Synthetic
gcauuugauuaucuucuc

SEQ ID NO: 552594 - RNA, 19 nt, Artificial Sequence
  Synthetic
agcauuugauuaucuucuc

SEQ ID NO: 552595 - RNA, 20 nt, Artificial Sequence
  Synthetic
aagcauuugauuaucuucuc

SEQ ID NO: 552596 - RNA, 21 nt, Artificial Sequence
  Synthetic
gaagcauuugauuaucuucuc

SEQ ID NO: 552597 - RNA, 22 nt, Artificial Sequence
  Synthetic
ugaagcauuugauuaucuucuc

SEQ ID NO: 552598 - RNA, 23 nt, Artificial Sequence
  Synthetic
gugaagcauuugauuaucuucuc

SEQ ID NO: 552599 - RNA, 24 nt, Artificial Sequence
  Synthetic
agugaagcauuugauuaucuucuc

SEQ ID NO: 552600 - RNA, 18 nt, Artificial Sequence
  Synthetic
ucuuggguugcucuucuc

SEQ ID NO: 552601 - RNA, 19 nt, Artificial Sequence
  Synthetic
gucuuggguugcucuucuc

SEQ ID NO: 552602 - RNA, 20 nt, Artificial Sequence
  Synthetic
ugucuuggguugcucuucuc

SEQ ID NO: 552603 - RNA, 21 nt, Artificial Sequence
  Synthetic
gugucuuggguugcucuucuc

SEQ ID NO: 552604 - RNA, 22 nt, Artificial Sequence
  Synthetic
ugugucuuggguugcucuucuc

SEQ ID NO: 552605 - RNA, 23 nt, Artificial Sequence
  Synthetic
augugucuuggguugcucuucuc

SEQ ID NO: 552606 - RNA, 24 nt, Artificial Sequence
  Synthetic
uaugugucuuggguugcucuucuc

SEQ ID NO: 552607 - RNA, 18 nt, Artificial Sequence
  Synthetic
uuagaucacugucuucuc

SEQ ID NO: 552608 - RNA, 19 nt, Artificial Sequence
  Synthetic
auuagaucacugucuucuc

SEQ ID NO: 552609 - RNA, 20 nt, Artificial Sequence
  Synthetic
aauuagaucacugucuucuc

SEQ ID NO: 552610 - RNA, 21 nt, Artificial Sequence
  Synthetic
uaauuagaucacugucuucuc

SEQ ID NO: 552611 - RNA, 22 nt, Artificial Sequence
  Synthetic
auaauuagaucacugucuucuc

SEQ ID NO: 552612 - RNA, 23 nt, Artificial Sequence
  Synthetic
aauaauuagaucacugucuucuc

SEQ ID NO: 552613 - RNA, 24 nt, Artificial Sequence
  Synthetic
aaauaauuagaucacugucuucuc

SEQ ID NO: 552614 - RNA, 18 nt, Artificial Sequence
  Synthetic
aaugagggcuuucuucuc

SEQ ID NO: 552615 - RNA, 19 nt, Artificial Sequence
  Synthetic
gaaugagggcuuucuucuc

SEQ ID NO: 552616 - RNA, 20 nt, Artificial Sequence
  Synthetic
cgaaugagggcuuucuucuc

SEQ ID NO: 552617 - RNA, 21 nt, Artificial Sequence
  Synthetic
ccgaaugagggcuuucuucuc

SEQ ID NO: 552618 - RNA, 22 nt, Artificial Sequence
  Synthetic
accgaaugagggcuuucuucuc

SEQ ID NO: 552619 - RNA, 23 nt, Artificial Sequence
  Synthetic
gaccgaaugagggcuuucuucuc

SEQ ID NO: 552620 - RNA, 24 nt, Artificial Sequence
  Synthetic
ugaccgaaugagggcuuucuucuc

SEQ ID NO: 552621 - RNA, 18 nt, Artificial Sequence
  Synthetic
aguaucaguucaguucuc

SEQ ID NO: 552622 - RNA, 19 nt, Artificial Sequence
  Synthetic
aaguaucaguucaguucuc

SEQ ID NO: 552623 - RNA, 20 nt, Artificial Sequence
  Synthetic
caaguaucaguucaguucuc

SEQ ID NO: 552624 - RNA, 21 nt, Artificial Sequence
  Synthetic
ccaaguaucaguucaguucuc

SEQ ID NO: 552625 - RNA, 22 nt, Artificial Sequence
  Synthetic
cccaaguaucaguucaguucuc

SEQ ID NO: 552626 - RNA, 23 nt, Artificial Sequence
  Synthetic
acccaaguaucaguucaguucuc

SEQ ID NO: 552627 - RNA, 24 nt, Artificial Sequence
  Synthetic
aacccaaguaucaguucaguucuc

SEQ ID NO: 552628 - RNA, 18 nt, Artificial Sequence
  Synthetic
uugugacagugaguucuc

SEQ ID NO: 552629 - RNA, 19 nt, Artificial Sequence
  Synthetic
cuugugacagugaguucuc

SEQ ID NO: 552630 - RNA, 20 nt, Artificial Sequence
  Synthetic
ucuugugacagugaguucuc

SEQ ID NO: 552631 - RNA, 21 nt, Artificial Sequence
  Synthetic
uucuugugacagugaguucuc

SEQ ID NO: 552632 - RNA, 22 nt, Artificial Sequence
  Synthetic
guucuugugacagugaguucuc

SEQ ID NO: 552633 - RNA, 23 nt, Artificial Sequence
  Synthetic
uguucuugugacagugaguucuc

SEQ ID NO: 552634 - RNA, 24 nt, Artificial Sequence
  Synthetic
cuguucuugugacagugaguucuc

SEQ ID NO: 552635 - RNA, 18 nt, Artificial Sequence
  Synthetic
gauagugagugaguucuc

SEQ ID NO: 552636 - RNA, 19 nt, Artificial Sequence
  Synthetic
ugauagugagugaguucuc

SEQ ID NO: 552637 - RNA, 20 nt, Artificial Sequence
  Synthetic
gugauagugagugaguucuc

SEQ ID NO: 552638 - RNA, 21 nt, Artificial Sequence
  Synthetic
ugugauagugagugaguucuc

SEQ ID NO: 552639 - RNA, 22 nt, Artificial Sequence
  Synthetic
augugauagugagugaguucuc

SEQ ID NO: 552640 - RNA, 23 nt, Artificial Sequence
  Synthetic
caugugauagugagugaguucuc

SEQ ID NO: 552641 - RNA, 24 nt, Artificial Sequence
  Synthetic
ccaugugauagugagugaguucuc

SEQ ID NO: 552642 - RNA, 18 nt, Artificial Sequence
  Synthetic
uugugauagugaguucuc

SEQ ID NO: 552643 - RNA, 19 nt, Artificial Sequence
  Synthetic
cuugugauagugaguucuc

SEQ ID NO: 552644 - RNA, 20 nt, Artificial Sequence
  Synthetic
ucuugugauagugaguucuc

SEQ ID NO: 552645 - RNA, 21 nt, Artificial Sequence
  Synthetic
uucuugugauagugaguucuc

SEQ ID NO: 552646 - RNA, 22 nt, Artificial Sequence
  Synthetic
guucuugugauagugaguucuc

SEQ ID NO: 552647 - RNA, 23 nt, Artificial Sequence
  Synthetic
uguucuugugauagugaguucuc

SEQ ID NO: 552648 - RNA, 24 nt, Artificial Sequence
  Synthetic
cuguucuugugauagugaguucuc

SEQ ID NO: 552649 - RNA, 18 nt, Artificial Sequence
  Synthetic
agcuaagagguaguucuc

SEQ ID NO: 552650 - RNA, 19 nt, Artificial Sequence
  Synthetic
gagcuaagagguaguucuc

SEQ ID NO: 552651 - RNA, 20 nt, Artificial Sequence
  Synthetic
ggagcuaagagguaguucuc

SEQ ID NO: 552652 - RNA, 21 nt, Artificial Sequence
  Synthetic
aggagcuaagagguaguucuc

SEQ ID NO: 552653 - RNA, 22 nt, Artificial Sequence
  Synthetic
caggagcuaagagguaguucuc

SEQ ID NO: 552654 - RNA, 23 nt, Artificial Sequence
  Synthetic
gcaggagcuaagagguaguucuc

SEQ ID NO: 552655 - RNA, 24 nt, Artificial Sequence
  Synthetic
ggcaggagcuaagagguaguucuc

SEQ ID NO: 552656 - RNA, 18 nt, Artificial Sequence
  Synthetic
cuucucucuguaguucuc

SEQ ID NO: 552657 - RNA, 19 nt, Artificial Sequence
  Synthetic
ucuucucucuguaguucuc

SEQ ID NO: 552658 - RNA, 20 nt, Artificial Sequence
  Synthetic
uucuucucucuguaguucuc

SEQ ID NO: 552659 - RNA, 21 nt, Artificial Sequence
  Synthetic
auucuucucucuguaguucuc

SEQ ID NO: 552660 - RNA, 22 nt, Artificial Sequence
  Synthetic
aauucuucucucuguaguucuc

SEQ ID NO: 552661 - RNA, 23 nt, Artificial Sequence
  Synthetic
uaauucuucucucuguaguucuc

SEQ ID NO: 552662 - RNA, 24 nt, Artificial Sequence
  Synthetic
cuaauucuucucucuguaguucuc

SEQ ID NO: 552663 - RNA, 18 nt, Artificial Sequence
  Synthetic
ucuaaaauuaagguucuc

SEQ ID NO: 552664 - RNA, 19 nt, Artificial Sequence
  Synthetic
cucuaaaauuaagguucuc

SEQ ID NO: 552665 - RNA, 20 nt, Artificial Sequence
  Synthetic
ucucuaaaauuaagguucuc

SEQ ID NO: 552666 - RNA, 21 nt, Artificial Sequence
  Synthetic
gucucuaaaauuaagguucuc

SEQ ID NO: 552667 - RNA, 22 nt, Artificial Sequence
  Synthetic
cgucucuaaaauuaagguucuc

SEQ ID NO: 552668 - RNA, 23 nt, Artificial Sequence
  Synthetic
ucgucucuaaaauuaagguucuc

SEQ ID NO: 552669 - RNA, 24 nt, Artificial Sequence
  Synthetic
uucgucucuaaaauuaagguucuc

SEQ ID NO: 552670 - RNA, 18 nt, Artificial Sequence
  Synthetic
uggcugagggagguucuc

SEQ ID NO: 552671 - RNA, 19 nt, Artificial Sequence
  Synthetic
uuggcugagggagguucuc

SEQ ID NO: 552672 - RNA, 20 nt, Artificial Sequence
  Synthetic
uuuggcugagggagguucuc

SEQ ID NO: 552673 - RNA, 21 nt, Artificial Sequence
  Synthetic
uuuuggcugagggagguucuc

SEQ ID NO: 552674 - RNA, 22 nt, Artificial Sequence
  Synthetic
cuuuuggcugagggagguucuc

SEQ ID NO: 552675 - RNA, 23 nt, Artificial Sequence
  Synthetic
ccuuuuggcugagggagguucuc

SEQ ID NO: 552676 - RNA, 24 nt, Artificial Sequence
  Synthetic
uccuuuuggcugagggagguucuc

SEQ ID NO: 552677 - RNA, 18 nt, Artificial Sequence
  Synthetic
auacugucaaauguucuc

SEQ ID NO: 552678 - RNA, 19 nt, Artificial Sequence
  Synthetic
gauacugucaaauguucuc

SEQ ID NO: 552679 - RNA, 20 nt, Artificial Sequence
  Synthetic
agauacugucaaauguucuc

SEQ ID NO: 552680 - RNA, 21 nt, Artificial Sequence
  Synthetic
gagauacugucaaauguucuc

SEQ ID NO: 552681 - RNA, 22 nt, Artificial Sequence
  Synthetic
ugagauacugucaaauguucuc

SEQ ID NO: 552682 - RNA, 23 nt, Artificial Sequence
  Synthetic
uugagauacugucaaauguucuc

SEQ ID NO: 552683 - RNA, 24 nt, Artificial Sequence
  Synthetic
cuugagauacugucaaauguucuc

SEQ ID NO: 552684 - RNA, 18 nt, Artificial Sequence
  Synthetic
gagacuauuuauguucuc

SEQ ID NO: 552685 - RNA, 19 nt, Artificial Sequence
  Synthetic
ugagacuauuuauguucuc

SEQ ID NO: 552686 - RNA, 20 nt, Artificial Sequence
  Synthetic
uugagacuauuuauguucuc

SEQ ID NO: 552687 - RNA, 21 nt, Artificial Sequence
  Synthetic
cuugagacuauuuauguucuc

SEQ ID NO: 552688 - RNA, 22 nt, Artificial Sequence
  Synthetic
ucuugagacuauuuauguucuc

SEQ ID NO: 552689 - RNA, 23 nt, Artificial Sequence
  Synthetic
aucuugagacuauuuauguucuc

SEQ ID NO: 552690 - RNA, 24 nt, Artificial Sequence
  Synthetic
gaucuugagacuauuuauguucuc

SEQ ID NO: 552691 - RNA, 18 nt, Artificial Sequence
  Synthetic
uccugcacagcuguucuc

SEQ ID NO: 552692 - RNA, 19 nt, Artificial Sequence
  Synthetic
guccugcacagcuguucuc

SEQ ID NO: 552693 - RNA, 20 nt, Artificial Sequence
  Synthetic
uguccugcacagcuguucuc

SEQ ID NO: 552694 - RNA, 21 nt, Artificial Sequence
  Synthetic
cuguccugcacagcuguucuc

SEQ ID NO: 552695 - RNA, 22 nt, Artificial Sequence
  Synthetic
ucuguccugcacagcuguucuc

SEQ ID NO: 552696 - RNA, 23 nt, Artificial Sequence
  Synthetic
uucuguccugcacagcuguucuc

SEQ ID NO: 552697 - RNA, 24 nt, Artificial Sequence
  Synthetic
auucuguccugcacagcuguucuc

SEQ ID NO: 552698 - RNA, 18 nt, Artificial Sequence
  Synthetic
acuaaacaaauuguucuc

SEQ ID NO: 552699 - RNA, 19 nt, Artificial Sequence
  Synthetic
uacuaaacaaauuguucuc

SEQ ID NO: 552700 - RNA, 20 nt, Artificial Sequence
  Synthetic
guacuaaacaaauuguucuc

SEQ ID NO: 552701 - RNA, 21 nt, Artificial Sequence
  Synthetic
gguacuaaacaaauuguucuc

SEQ ID NO: 552702 - RNA, 22 nt, Artificial Sequence
  Synthetic
cgguacuaaacaaauuguucuc

SEQ ID NO: 552703 - RNA, 23 nt, Artificial Sequence
  Synthetic
ucgguacuaaacaaauuguucuc

SEQ ID NO: 552704 - RNA, 24 nt, Artificial Sequence
  Synthetic
aucgguacuaaacaaauuguucuc

SEQ ID NO: 552705 - RNA, 18 nt, Artificial Sequence
  Synthetic
acggcuucaacauuucuc

SEQ ID NO: 552706 - RNA, 19 nt, Artificial Sequence
  Synthetic
uacggcuucaacauuucuc

SEQ ID NO: 552707 - RNA, 20 nt, Artificial Sequence
  Synthetic
uuacggcuucaacauuucuc

SEQ ID NO: 552708 - RNA, 21 nt, Artificial Sequence
  Synthetic
uuuacggcuucaacauuucuc

SEQ ID NO: 552709 - RNA, 22 nt, Artificial Sequence
  Synthetic
uuuuacggcuucaacauuucuc

SEQ ID NO: 552710 - RNA, 23 nt, Artificial Sequence
  Synthetic
guuuuacggcuucaacauuucuc

SEQ ID NO: 552711 - RNA, 24 nt, Artificial Sequence
  Synthetic
gguuuuacggcuucaacauuucuc

SEQ ID NO: 552712 - RNA, 18 nt, Artificial Sequence
  Synthetic
aaaaauacuugauuucuc

SEQ ID NO: 552713 - RNA, 19 nt, Artificial Sequence
  Synthetic
gaaaaauacuugauuucuc

SEQ ID NO: 552714 - RNA, 20 nt, Artificial Sequence
  Synthetic
agaaaaauacuugauuucuc

SEQ ID NO: 552715 - RNA, 21 nt, Artificial Sequence
  Synthetic
aagaaaaauacuugauuucuc

SEQ ID NO: 552716 - RNA, 22 nt, Artificial Sequence
  Synthetic
aaagaaaaauacuugauuucuc

SEQ ID NO: 552717 - RNA, 23 nt, Artificial Sequence
  Synthetic
aaaagaaaaauacuugauuucuc

SEQ ID NO: 552718 - RNA, 24 nt, Artificial Sequence
  Synthetic
aaaaagaaaaauacuugauuucuc

SEQ ID NO: 552719 - RNA, 18 nt, Artificial Sequence
  Synthetic
gaaccugauauauuucuc

SEQ ID NO: 552720 - RNA, 19 nt, Artificial Sequence
  Synthetic
ugaaccugauauauuucuc

SEQ ID NO: 552721 - RNA, 20 nt, Artificial Sequence
  Synthetic
augaaccugauauauuucuc

SEQ ID NO: 552722 - RNA, 21 nt, Artificial Sequence
  Synthetic
aaugaaccugauauauuucuc

SEQ ID NO: 552723 - RNA, 22 nt, Artificial Sequence
  Synthetic
uaaugaaccugauauauuucuc

SEQ ID NO: 552724 - RNA, 23 nt, Artificial Sequence
  Synthetic
guaaugaaccugauauauuucuc

SEQ ID NO: 552725 - RNA, 24 nt, Artificial Sequence
  Synthetic
uguaaugaaccugauauauuucuc

SEQ ID NO: 552726 - RNA, 18 nt, Artificial Sequence
  Synthetic
uuuaaaguucuauuucuc

SEQ ID NO: 552727 - RNA, 19 nt, Artificial Sequence
  Synthetic
auuuaaaguucuauuucuc

SEQ ID NO: 552728 - RNA, 20 nt, Artificial Sequence
  Synthetic
uauuuaaaguucuauuucuc

SEQ ID NO: 552729 - RNA, 21 nt, Artificial Sequence
  Synthetic
uuauuuaaaguucuauuucuc

SEQ ID NO: 552730 - RNA, 22 nt, Artificial Sequence
  Synthetic
guuauuuaaaguucuauuucuc

SEQ ID NO: 552731 - RNA, 23 nt, Artificial Sequence
  Synthetic
uguuauuuaaaguucuauuucuc

SEQ ID NO: 552732 - RNA, 24 nt, Artificial Sequence
  Synthetic
auguuauuuaaaguucuauuucuc

SEQ ID NO: 552733 - RNA, 18 nt, Artificial Sequence
  Synthetic
auuuuuuauuuauuucuc

SEQ ID NO: 552734 - RNA, 19 nt, Artificial Sequence
  Synthetic
gauuuuuuauuuauuucuc

SEQ ID NO: 552735 - RNA, 20 nt, Artificial Sequence
  Synthetic
agauuuuuuauuuauuucuc

SEQ ID NO: 552736 - RNA, 21 nt, Artificial Sequence
  Synthetic
gagauuuuuuauuuauuucuc

SEQ ID NO: 552737 - RNA, 22 nt, Artificial Sequence
  Synthetic
agagauuuuuuauuuauuucuc

SEQ ID NO: 552738 - RNA, 23 nt, Artificial Sequence
  Synthetic
gagagauuuuuuauuuauuucuc

SEQ ID NO: 552739 - RNA, 24 nt, Artificial Sequence
  Synthetic
ugagagauuuuuuauuuauuucuc

SEQ ID NO: 552740 - RNA, 18 nt, Artificial Sequence
  Synthetic
ucaggaauaaacuuucuc

SEQ ID NO: 552741 - RNA, 19 nt, Artificial Sequence
  Synthetic
cucaggaauaaacuuucuc

SEQ ID NO: 552742 - RNA, 20 nt, Artificial Sequence
  Synthetic
ccucaggaauaaacuuucuc

SEQ ID NO: 552743 - RNA, 21 nt, Artificial Sequence
  Synthetic
accucaggaauaaacuuucuc

SEQ ID NO: 552744 - RNA, 22 nt, Artificial Sequence
  Synthetic
uaccucaggaauaaacuuucuc

SEQ ID NO: 552745 - RNA, 23 nt, Artificial Sequence
  Synthetic
auaccucaggaauaaacuuucuc

SEQ ID NO: 552746 - RNA, 24 nt, Artificial Sequence
  Synthetic
uauaccucaggaauaaacuuucuc

SEQ ID NO: 552747 - RNA, 18 nt, Artificial Sequence
  Synthetic
uagcaacuucacuuucuc

SEQ ID NO: 552748 - RNA, 19 nt, Artificial Sequence
  Synthetic
uuagcaacuucacuuucuc

SEQ ID NO: 552749 - RNA, 20 nt, Artificial Sequence
  Synthetic
cuuagcaacuucacuuucuc

SEQ ID NO: 552750 - RNA, 21 nt, Artificial Sequence
  Synthetic
ucuuagcaacuucacuuucuc

SEQ ID NO: 552751 - RNA, 22 nt, Artificial Sequence
  Synthetic
cucuuagcaacuucacuuucuc

SEQ ID NO: 552752 - RNA, 23 nt, Artificial Sequence
  Synthetic
gcucuuagcaacuucacuuucuc

SEQ ID NO: 552753 - RNA, 24 nt, Artificial Sequence
  Synthetic
ugcucuuagcaacuucacuuucuc

SEQ ID NO: 552754 - RNA, 18 nt, Artificial Sequence
  Synthetic
gccuucccagacuuucuc

SEQ ID NO: 552755 - RNA, 19 nt, Artificial Sequence
  Synthetic
ugccuucccagacuuucuc

SEQ ID NO: 552756 - RNA, 20 nt, Artificial Sequence
  Synthetic
augccuucccagacuuucuc

SEQ ID NO: 552757 - RNA, 21 nt, Artificial Sequence
  Synthetic
uaugccuucccagacuuucuc

SEQ ID NO: 552758 - RNA, 22 nt, Artificial Sequence
  Synthetic
uuaugccuucccagacuuucuc

SEQ ID NO: 552759 - RNA, 23 nt, Artificial Sequence
  Synthetic
uuuaugccuucccagacuuucuc

SEQ ID NO: 552760 - RNA, 24 nt, Artificial Sequence
  Synthetic
uuuuaugccuucccagacuuucuc

SEQ ID NO: 552761 - RNA, 18 nt, Artificial Sequence
  Synthetic
cucaguguauacuuucuc

SEQ ID NO: 552762 - RNA, 19 nt, Artificial Sequence
  Synthetic
gcucaguguauacuuucuc

SEQ ID NO: 552763 - RNA, 20 nt, Artificial Sequence
  Synthetic
ugcucaguguauacuuucuc

SEQ ID NO: 552764 - RNA, 21 nt, Artificial Sequence
  Synthetic
uugcucaguguauacuuucuc

SEQ ID NO: 552765 - RNA, 22 nt, Artificial Sequence
  Synthetic
auugcucaguguauacuuucuc

SEQ ID NO: 552766 - RNA, 23 nt, Artificial Sequence
  Synthetic
uauugcucaguguauacuuucuc

SEQ ID NO: 552767 - RNA, 24 nt, Artificial Sequence
  Synthetic
uuauugcucaguguauacuuucuc

SEQ ID NO: 552768 - RNA, 18 nt, Artificial Sequence
  Synthetic
ccuuugagaagcuuucuc

SEQ ID NO: 552769 - RNA, 19 nt, Artificial Sequence
  Synthetic
cccuuugagaagcuuucuc

SEQ ID NO: 552770 - RNA, 20 nt, Artificial Sequence
  Synthetic
ucccuuugagaagcuuucuc

SEQ ID NO: 552771 - RNA, 21 nt, Artificial Sequence
  Synthetic
uucccuuugagaagcuuucuc

SEQ ID NO: 552772 - RNA, 22 nt, Artificial Sequence
  Synthetic
auucccuuugagaagcuuucuc

SEQ ID NO: 552773 - RNA, 23 nt, Artificial Sequence
  Synthetic
gauucccuuugagaagcuuucuc

SEQ ID NO: 552774 - RNA, 24 nt, Artificial Sequence
  Synthetic
ugauucccuuugagaagcuuucuc

SEQ ID NO: 552775 - RNA, 18 nt, Artificial Sequence
  Synthetic
aagcuaucuugcuuucuc

SEQ ID NO: 552776 - RNA, 19 nt, Artificial Sequence
  Synthetic
aaagcuaucuugcuuucuc

SEQ ID NO: 552777 - RNA, 20 nt, Artificial Sequence
  Synthetic
aaaagcuaucuugcuuucuc

SEQ ID NO: 552778 - RNA, 21 nt, Artificial Sequence
  Synthetic
gaaaagcuaucuugcuuucuc

SEQ ID NO: 552779 - RNA, 22 nt, Artificial Sequence
  Synthetic
agaaaagcuaucuugcuuucuc

SEQ ID NO: 552780 - RNA, 23 nt, Artificial Sequence
  Synthetic
gagaaaagcuaucuugcuuucuc

SEQ ID NO: 552781 - RNA, 24 nt, Artificial Sequence
  Synthetic
ggagaaaagcuaucuugcuuucuc

SEQ ID NO: 552782 - RNA, 18 nt, Artificial Sequence
  Synthetic
auuuauucuugcuuucuc

SEQ ID NO: 552783 - RNA, 19 nt, Artificial Sequence
  Synthetic
aauuuauucuugcuuucuc

SEQ ID NO: 552784 - RNA, 20 nt, Artificial Sequence
  Synthetic
uaauuuauucuugcuuucuc

SEQ ID NO: 552785 - RNA, 21 nt, Artificial Sequence
  Synthetic
cuaauuuauucuugcuuucuc

SEQ ID NO: 552786 - RNA, 22 nt, Artificial Sequence
  Synthetic
acuaauuuauucuugcuuucuc

SEQ ID NO: 552787 - RNA, 23 nt, Artificial Sequence
  Synthetic
aacuaauuuauucuugcuuucuc

SEQ ID NO: 552788 - RNA, 24 nt, Artificial Sequence
  Synthetic
aaacuaauuuauucuugcuuucuc

SEQ ID NO: 552789 - RNA, 18 nt, Artificial Sequence
  Synthetic
cggauuccuaucuuucuc

SEQ ID NO: 552790 - RNA, 19 nt, Artificial Sequence
  Synthetic
ucggauuccuaucuuucuc

SEQ ID NO: 552791 - RNA, 20 nt, Artificial Sequence
  Synthetic
cucggauuccuaucuuucuc

SEQ ID NO: 552792 - RNA, 21 nt, Artificial Sequence
  Synthetic
ccucggauuccuaucuuucuc

SEQ ID NO: 552793 - RNA, 22 nt, Artificial Sequence
  Synthetic
gccucggauuccuaucuuucuc

SEQ ID NO: 552794 - RNA, 23 nt, Artificial Sequence
  Synthetic
ugccucggauuccuaucuuucuc

SEQ ID NO: 552795 - RNA, 24 nt, Artificial Sequence
  Synthetic
augccucggauuccuaucuuucuc

SEQ ID NO: 552796 - RNA, 18 nt, Artificial Sequence
  Synthetic
uuaaccaaagaguuucuc

SEQ ID NO: 552797 - RNA, 19 nt, Artificial Sequence
  Synthetic
guuaaccaaagaguuucuc

SEQ ID NO: 552798 - RNA, 20 nt, Artificial Sequence
  Synthetic
uguuaaccaaagaguuucuc

SEQ ID NO: 552799 - RNA, 21 nt, Artificial Sequence
  Synthetic
cuguuaaccaaagaguuucuc

SEQ ID NO: 552800 - RNA, 22 nt, Artificial Sequence
  Synthetic
ucuguuaaccaaagaguuucuc

SEQ ID NO: 552801 - RNA, 23 nt, Artificial Sequence
  Synthetic
uucuguuaaccaaagaguuucuc

SEQ ID NO: 552802 - RNA, 24 nt, Artificial Sequence
  Synthetic
auucuguuaaccaaagaguuucuc

SEQ ID NO: 552803 - RNA, 18 nt, Artificial Sequence
  Synthetic
uucuauaaugaguuucuc

SEQ ID NO: 552804 - RNA, 19 nt, Artificial Sequence
  Synthetic
auucuauaaugaguuucuc

SEQ ID NO: 552805 - RNA, 20 nt, Artificial Sequence
  Synthetic
aauucuauaaugaguuucuc

SEQ ID NO: 552806 - RNA, 21 nt, Artificial Sequence
  Synthetic
gaauucuauaaugaguuucuc

SEQ ID NO: 552807 - RNA, 22 nt, Artificial Sequence
  Synthetic
ugaauucuauaaugaguuucuc

SEQ ID NO: 552808 - RNA, 23 nt, Artificial Sequence
  Synthetic
augaauucuauaaugaguuucuc

SEQ ID NO: 552809 - RNA, 24 nt, Artificial Sequence
  Synthetic
caugaauucuauaaugaguuucuc

SEQ ID NO: 552810 - RNA, 18 nt, Artificial Sequence
  Synthetic
aacaauuuuuuguuucuc

SEQ ID NO: 552811 - RNA, 19 nt, Artificial Sequence
  Synthetic
uaacaauuuuuuguuucuc

SEQ ID NO: 552812 - RNA, 20 nt, Artificial Sequence
  Synthetic
cuaacaauuuuuuguuucuc

SEQ ID NO: 552813 - RNA, 21 nt, Artificial Sequence
  Synthetic
ccuaacaauuuuuuguuucuc

SEQ ID NO: 552814 - RNA, 22 nt, Artificial Sequence
  Synthetic
uccuaacaauuuuuuguuucuc

SEQ ID NO: 552815 - RNA, 23 nt, Artificial Sequence
  Synthetic
guccuaacaauuuuuuguuucuc

SEQ ID NO: 552816 - RNA, 24 nt, Artificial Sequence
  Synthetic
uguccuaacaauuuuuuguuucuc

SEQ ID NO: 552817 - RNA, 18 nt, Artificial Sequence
  Synthetic
ugccaguaaaauuuucuc

SEQ ID NO: 552818 - RNA, 19 nt, Artificial Sequence
  Synthetic
augccaguaaaauuuucuc

SEQ ID NO: 552819 - RNA, 20 nt, Artificial Sequence
  Synthetic
gaugccaguaaaauuuucuc

SEQ ID NO: 552820 - RNA, 21 nt, Artificial Sequence
  Synthetic
agaugccaguaaaauuuucuc

SEQ ID NO: 552821 - RNA, 22 nt, Artificial Sequence
  Synthetic
uagaugccaguaaaauuuucuc

SEQ ID NO: 552822 - RNA, 23 nt, Artificial Sequence
  Synthetic
cuagaugccaguaaaauuuucuc

SEQ ID NO: 552823 - RNA, 24 nt, Artificial Sequence
  Synthetic
acuagaugccaguaaaauuuucuc

SEQ ID NO: 552824 - RNA, 18 nt, Artificial Sequence
  Synthetic
uuauggugggcuuuucuc

SEQ ID NO: 552825 - RNA, 19 nt, Artificial Sequence
  Synthetic
cuuauggugggcuuuucuc

SEQ ID NO: 552826 - RNA, 20 nt, Artificial Sequence
  Synthetic
ucuuauggugggcuuuucuc

SEQ ID NO: 552827 - RNA, 21 nt, Artificial Sequence
  Synthetic
gucuuauggugggcuuuucuc

SEQ ID NO: 552828 - RNA, 22 nt, Artificial Sequence
  Synthetic
ugucuuauggugggcuuuucuc

SEQ ID NO: 552829 - RNA, 23 nt, Artificial Sequence
  Synthetic
augucuuauggugggcuuuucuc

SEQ ID NO: 552830 - RNA, 24 nt, Artificial Sequence
  Synthetic
caugucuuauggugggcuuuucuc

SEQ ID NO: 552831 - RNA, 18 nt, Artificial Sequence
  Synthetic
auauugauggcuuuucuc

SEQ ID NO: 552832 - RNA, 19 nt, Artificial Sequence
  Synthetic
gauauugauggcuuuucuc

SEQ ID NO: 552833 - RNA, 20 nt, Artificial Sequence
  Synthetic
ugauauugauggcuuuucuc

SEQ ID NO: 552834 - RNA, 21 nt, Artificial Sequence
  Synthetic
cugauauugauggcuuuucuc

SEQ ID NO: 552835 - RNA, 22 nt, Artificial Sequence
  Synthetic
acugauauugauggcuuuucuc

SEQ ID NO: 552836 - RNA, 23 nt, Artificial Sequence
  Synthetic
cacugauauugauggcuuuucuc

SEQ ID NO: 552837 - RNA, 24 nt, Artificial Sequence
  Synthetic
acacugauauugauggcuuuucuc

SEQ ID NO: 552838 - RNA, 18 nt, Artificial Sequence
  Synthetic
cuucagcucucuuuucuc

SEQ ID NO: 552839 - RNA, 19 nt, Artificial Sequence
  Synthetic
ccuucagcucucuuuucuc

SEQ ID NO: 552840 - RNA, 20 nt, Artificial Sequence
  Synthetic
uccuucagcucucuuuucuc

SEQ ID NO: 552841 - RNA, 21 nt, Artificial Sequence
  Synthetic
auccuucagcucucuuuucuc

SEQ ID NO: 552842 - RNA, 22 nt, Artificial Sequence
  Synthetic
uauccuucagcucucuuuucuc

SEQ ID NO: 552843 - RNA, 23 nt, Artificial Sequence
  Synthetic
auauccuucagcucucuuuucuc

SEQ ID NO: 552844 - RNA, 24 nt, Artificial Sequence
  Synthetic
cauauccuucagcucucuuuucuc

SEQ ID NO: 552845 - RNA, 18 nt, Artificial Sequence
  Synthetic
gcaaaguggcuuuuucuc

SEQ ID NO: 552846 - RNA, 19 nt, Artificial Sequence
  Synthetic
ggcaaaguggcuuuuucuc

SEQ ID NO: 552847 - RNA, 20 nt, Artificial Sequence
  Synthetic
cggcaaaguggcuuuuucuc

SEQ ID NO: 552848 - RNA, 21 nt, Artificial Sequence
  Synthetic
gcggcaaaguggcuuuuucuc

SEQ ID NO: 552849 - RNA, 22 nt, Artificial Sequence
  Synthetic
ugcggcaaaguggcuuuuucuc

SEQ ID NO: 552850 - RNA, 23 nt, Artificial Sequence
  Synthetic
cugcggcaaaguggcuuuuucuc

SEQ ID NO: 552851 - RNA, 24 nt, Artificial Sequence
  Synthetic
ucugcggcaaaguggcuuuuucuc

SEQ ID NO: 552852 - RNA, 18 nt, Artificial Sequence
  Synthetic
aauugccaaaaaaaaguc

SEQ ID NO: 552853 - RNA, 19 nt, Artificial Sequence
  Synthetic
aaauugccaaaaaaaaguc

SEQ ID NO: 552854 - RNA, 20 nt, Artificial Sequence
  Synthetic
aaaauugccaaaaaaaaguc

SEQ ID NO: 552855 - RNA, 21 nt, Artificial Sequence
  Synthetic
aaaaauugccaaaaaaaaguc

SEQ ID NO: 552856 - RNA, 22 nt, Artificial Sequence
  Synthetic
uaaaaauugccaaaaaaaaguc

SEQ ID NO: 552857 - RNA, 23 nt, Artificial Sequence
  Synthetic
uuaaaaauugccaaaaaaaaguc

SEQ ID NO: 552858 - RNA, 24 nt, Artificial Sequence
  Synthetic
uuuaaaaauugccaaaaaaaaguc

SEQ ID NO: 552859 - RNA, 18 nt, Artificial Sequence
  Synthetic
uacaaaccaaaaaaaguc

SEQ ID NO: 552860 - RNA, 19 nt, Artificial Sequence
  Synthetic
cuacaaaccaaaaaaaguc

SEQ ID NO: 552861 - RNA, 20 nt, Artificial Sequence
  Synthetic
ccuacaaaccaaaaaaaguc

SEQ ID NO: 552862 - RNA, 21 nt, Artificial Sequence
  Synthetic
gccuacaaaccaaaaaaaguc

SEQ ID NO: 552863 - RNA, 22 nt, Artificial Sequence
  Synthetic
agccuacaaaccaaaaaaaguc

SEQ ID NO: 552864 - RNA, 23 nt, Artificial Sequence
  Synthetic
uagccuacaaaccaaaaaaaguc

SEQ ID NO: 552865 - RNA, 24 nt, Artificial Sequence
  Synthetic
auagccuacaaaccaaaaaaaguc

SEQ ID NO: 552866 - RNA, 21 nt, Artificial Sequence
  Synthetic
aauggcgaucauuaaaaaguc

SEQ ID NO: 552867 - RNA, 22 nt, Artificial Sequence
  Synthetic
gaauggcgaucauuaaaaaguc

SEQ ID NO: 552868 - RNA, 23 nt, Artificial Sequence
  Synthetic
agaauggcgaucauuaaaaaguc

SEQ ID NO: 552869 - RNA, 24 nt, Artificial Sequence
  Synthetic
uagaauggcgaucauuaaaaaguc

SEQ ID NO: 552870 - RNA, 18 nt, Artificial Sequence
  Synthetic
ggugaucauuaaaaaguc

SEQ ID NO: 552871 - RNA, 19 nt, Artificial Sequence
  Synthetic
uggugaucauuaaaaaguc

SEQ ID NO: 552872 - RNA, 20 nt, Artificial Sequence
  Synthetic
auggugaucauuaaaaaguc

SEQ ID NO: 552873 - RNA, 21 nt, Artificial Sequence
  Synthetic
aauggugaucauuaaaaaguc

SEQ ID NO: 552874 - RNA, 22 nt, Artificial Sequence
  Synthetic
gaauggugaucauuaaaaaguc

SEQ ID NO: 552875 - RNA, 23 nt, Artificial Sequence
  Synthetic
agaauggugaucauuaaaaaguc

SEQ ID NO: 552876 - RNA, 24 nt, Artificial Sequence
  Synthetic
uagaauggugaucauuaaaaaguc

SEQ ID NO: 552877 - RNA, 18 nt, Artificial Sequence
  Synthetic
ccaucucacagaaaaguc

SEQ ID NO: 552878 - RNA, 19 nt, Artificial Sequence
  Synthetic
uccaucucacagaaaaguc

SEQ ID NO: 552879 - RNA, 20 nt, Artificial Sequence
  Synthetic
auccaucucacagaaaaguc

SEQ ID NO: 552880 - RNA, 21 nt, Artificial Sequence
  Synthetic
uauccaucucacagaaaaguc

SEQ ID NO: 552881 - RNA, 22 nt, Artificial Sequence
  Synthetic
cuauccaucucacagaaaaguc

SEQ ID NO: 552882 - RNA, 23 nt, Artificial Sequence
  Synthetic
acuauccaucucacagaaaaguc

SEQ ID NO: 552883 - RNA, 24 nt, Artificial Sequence
  Synthetic
cacuauccaucucacagaaaaguc

SEQ ID NO: 552884 - RNA, 18 nt, Artificial Sequence
  Synthetic
uaugcaaggagaaaaguc

SEQ ID NO: 552885 - RNA, 19 nt, Artificial Sequence
  Synthetic
auaugcaaggagaaaaguc

SEQ ID NO: 552886 - RNA, 20 nt, Artificial Sequence
  Synthetic
gauaugcaaggagaaaaguc

SEQ ID NO: 552887 - RNA, 21 nt, Artificial Sequence
  Synthetic
ugauaugcaaggagaaaaguc

SEQ ID NO: 552888 - RNA, 22 nt, Artificial Sequence
  Synthetic
uugauaugcaaggagaaaaguc

SEQ ID NO: 552889 - RNA, 23 nt, Artificial Sequence
  Synthetic
uuugauaugcaaggagaaaaguc

SEQ ID NO: 552890 - RNA, 24 nt, Artificial Sequence
  Synthetic
auuugauaugcaaggagaaaaguc

SEQ ID NO: 552891 - RNA, 18 nt, Artificial Sequence
  Synthetic
ucuguaauaugaaaaguc

SEQ ID NO: 552892 - RNA, 19 nt, Artificial Sequence
  Synthetic
gucuguaauaugaaaaguc

SEQ ID NO: 552893 - RNA, 20 nt, Artificial Sequence
  Synthetic
agucuguaauaugaaaaguc

SEQ ID NO: 552894 - RNA, 21 nt, Artificial Sequence
  Synthetic
aagucuguaauaugaaaaguc

SEQ ID NO: 552895 - RNA, 22 nt, Artificial Sequence
  Synthetic
aaagucuguaauaugaaaaguc

SEQ ID NO: 552896 - RNA, 23 nt, Artificial Sequence
  Synthetic
gaaagucuguaauaugaaaaguc

SEQ ID NO: 552897 - RNA, 24 nt, Artificial Sequence
  Synthetic
ggaaagucuguaauaugaaaaguc

SEQ ID NO: 552898 - RNA, 18 nt, Artificial Sequence
  Synthetic
cuuugguaaauaaaaguc

SEQ ID NO: 552899 - RNA, 19 nt, Artificial Sequence
  Synthetic
ccuuugguaaauaaaaguc

SEQ ID NO: 552900 - RNA, 20 nt, Artificial Sequence
  Synthetic
uccuuugguaaauaaaaguc

SEQ ID NO: 552901 - RNA, 21 nt, Artificial Sequence
  Synthetic
uuccuuugguaaauaaaaguc

SEQ ID NO: 552902 - RNA, 22 nt, Artificial Sequence
  Synthetic
uuuccuuugguaaauaaaaguc

SEQ ID NO: 552903 - RNA, 23 nt, Artificial Sequence
  Synthetic
guuuccuuugguaaauaaaaguc

SEQ ID NO: 552904 - RNA, 24 nt, Artificial Sequence
  Synthetic
uguuuccuuugguaaauaaaaguc

SEQ ID NO: 552905 - RNA, 18 nt, Artificial Sequence
  Synthetic
ggaaauuuuuuaaaaguc

SEQ ID NO: 552906 - RNA, 19 nt, Artificial Sequence
  Synthetic
aggaaauuuuuuaaaaguc

SEQ ID NO: 552907 - RNA, 20 nt, Artificial Sequence
  Synthetic
gaggaaauuuuuuaaaaguc

SEQ ID NO: 552908 - RNA, 21 nt, Artificial Sequence
  Synthetic
agaggaaauuuuuuaaaaguc

SEQ ID NO: 552909 - RNA, 22 nt, Artificial Sequence
  Synthetic
aagaggaaauuuuuuaaaaguc

SEQ ID NO: 552910 - RNA, 23 nt, Artificial Sequence
  Synthetic
caagaggaaauuuuuuaaaaguc

SEQ ID NO: 552911 - RNA, 24 nt, Artificial Sequence
  Synthetic
ucaagaggaaauuuuuuaaaaguc

SEQ ID NO: 552912 - RNA, 18 nt, Artificial Sequence
  Synthetic
acaauacacuacaaaguc

SEQ ID NO: 552913 - RNA, 19 nt, Artificial Sequence
  Synthetic
cacaauacacuacaaaguc

SEQ ID NO: 552914 - RNA, 20 nt, Artificial Sequence
  Synthetic
acacaauacacuacaaaguc

SEQ ID NO: 552915 - RNA, 21 nt, Artificial Sequence
  Synthetic
gacacaauacacuacaaaguc

SEQ ID NO: 552916 - RNA, 22 nt, Artificial Sequence
  Synthetic
agacacaauacacuacaaaguc

SEQ ID NO: 552917 - RNA, 23 nt, Artificial Sequence
  Synthetic
cagacacaauacacuacaaaguc

SEQ ID NO: 552918 - RNA, 24 nt, Artificial Sequence
  Synthetic
acagacacaauacacuacaaaguc

SEQ ID NO: 552919 - RNA, 18 nt, Artificial Sequence
  Synthetic
aaauacaauuucaaaguc

SEQ ID NO: 552920 - RNA, 19 nt, Artificial Sequence
  Synthetic
gaaauacaauuucaaaguc

SEQ ID NO: 552921 - RNA, 20 nt, Artificial Sequence
  Synthetic
ugaaauacaauuucaaaguc

SEQ ID NO: 552922 - RNA, 21 nt, Artificial Sequence
  Synthetic
uugaaauacaauuucaaaguc

SEQ ID NO: 552923 - RNA, 22 nt, Artificial Sequence
  Synthetic
cuugaaauacaauuucaaaguc

SEQ ID NO: 552924 - RNA, 23 nt, Artificial Sequence
  Synthetic
ucuugaaauacaauuucaaaguc

SEQ ID NO: 552925 - RNA, 24 nt, Artificial Sequence
  Synthetic
aucuugaaauacaauuucaaaguc

SEQ ID NO: 552926 - RNA, 18 nt, Artificial Sequence
  Synthetic
cagcucaguuucaaaguc

SEQ ID NO: 552927 - RNA, 19 nt, Artificial Sequence
  Synthetic
ucagcucaguuucaaaguc

SEQ ID NO: 552928 - RNA, 20 nt, Artificial Sequence
  Synthetic
cucagcucaguuucaaaguc

SEQ ID NO: 552929 - RNA, 21 nt, Artificial Sequence
  Synthetic
ccucagcucaguuucaaaguc

SEQ ID NO: 552930 - RNA, 22 nt, Artificial Sequence
  Synthetic
accucagcucaguuucaaaguc

SEQ ID NO: 552931 - RNA, 23 nt, Artificial Sequence
  Synthetic
aaccucagcucaguuucaaaguc

SEQ ID NO: 552932 - RNA, 24 nt, Artificial Sequence
  Synthetic
uaaccucagcucaguuucaaaguc

SEQ ID NO: 552933 - RNA, 18 nt, Artificial Sequence
  Synthetic
gaaggaaagaagaaaguc

SEQ ID NO: 552934 - RNA, 19 nt, Artificial Sequence
  Synthetic
agaaggaaagaagaaaguc

SEQ ID NO: 552935 - RNA, 20 nt, Artificial Sequence
  Synthetic
aagaaggaaagaagaaaguc

SEQ ID NO: 552936 - RNA, 21 nt, Artificial Sequence
  Synthetic
gaagaaggaaagaagaaaguc

SEQ ID NO: 552937 - RNA, 22 nt, Artificial Sequence
  Synthetic
ggaagaaggaaagaagaaaguc

SEQ ID NO: 552938 - RNA, 23 nt, Artificial Sequence
  Synthetic
aggaagaaggaaagaagaaaguc

SEQ ID NO: 552939 - RNA, 24 nt, Artificial Sequence
  Synthetic
aaggaagaaggaaagaagaaaguc

SEQ ID NO: 552940 - RNA, 18 nt, Artificial Sequence
  Synthetic
uaucuguaaaggaaaguc

SEQ ID NO: 552941 - RNA, 19 nt, Artificial Sequence
  Synthetic
uuaucuguaaaggaaaguc

SEQ ID NO: 552942 - RNA, 20 nt, Artificial Sequence
  Synthetic
guuaucuguaaaggaaaguc

SEQ ID NO: 552943 - RNA, 21 nt, Artificial Sequence
  Synthetic
gguuaucuguaaaggaaaguc

SEQ ID NO: 552944 - RNA, 22 nt, Artificial Sequence
  Synthetic
ggguuaucuguaaaggaaaguc

SEQ ID NO: 552945 - RNA, 23 nt, Artificial Sequence
  Synthetic
aggguuaucuguaaaggaaaguc

SEQ ID NO: 552946 - RNA, 24 nt, Artificial Sequence
  Synthetic
gaggguuaucuguaaaggaaaguc

SEQ ID NO: 552947 - RNA, 18 nt, Artificial Sequence
  Synthetic
auaaccccaucacaaguc

SEQ ID NO: 552948 - RNA, 19 nt, Artificial Sequence
  Synthetic
uauaaccccaucacaaguc

SEQ ID NO: 552949 - RNA, 20 nt, Artificial Sequence
  Synthetic
auauaaccccaucacaaguc

SEQ ID NO: 552950 - RNA, 21 nt, Artificial Sequence
  Synthetic
gauauaaccccaucacaaguc

SEQ ID NO: 552951 - RNA, 22 nt, Artificial Sequence
  Synthetic
ggauauaaccccaucacaaguc

SEQ ID NO: 552952 - RNA, 23 nt, Artificial Sequence
  Synthetic
uggauauaaccccaucacaaguc

SEQ ID NO: 552953 - RNA, 24 nt, Artificial Sequence
  Synthetic
cuggauauaaccccaucacaaguc

SEQ ID NO: 552954 - RNA, 18 nt, Artificial Sequence
  Synthetic
caguugcauauacaaguc

SEQ ID NO: 552955 - RNA, 19 nt, Artificial Sequence
  Synthetic
gcaguugcauauacaaguc

SEQ ID NO: 552956 - RNA, 20 nt, Artificial Sequence
  Synthetic
agcaguugcauauacaaguc

SEQ ID NO: 552957 - RNA, 21 nt, Artificial Sequence
  Synthetic
aagcaguugcauauacaaguc

SEQ ID NO: 552958 - RNA, 22 nt, Artificial Sequence
  Synthetic
gaagcaguugcauauacaaguc

SEQ ID NO: 552959 - RNA, 23 nt, Artificial Sequence
  Synthetic
ggaagcaguugcauauacaaguc

SEQ ID NO: 552960 - RNA, 24 nt, Artificial Sequence
  Synthetic
uggaagcaguugcauauacaaguc

SEQ ID NO: 552961 - RNA, 18 nt, Artificial Sequence
  Synthetic
cacgguagccaccaaguc

SEQ ID NO: 552962 - RNA, 19 nt, Artificial Sequence
  Synthetic
acacgguagccaccaaguc

SEQ ID NO: 552963 - RNA, 20 nt, Artificial Sequence
  Synthetic
uacacgguagccaccaaguc

SEQ ID NO: 552964 - RNA, 21 nt, Artificial Sequence
  Synthetic
cuacacgguagccaccaaguc

SEQ ID NO: 552965 - RNA, 22 nt, Artificial Sequence
  Synthetic
ucuacacgguagccaccaaguc

SEQ ID NO: 552966 - RNA, 23 nt, Artificial Sequence
  Synthetic
uucuacacgguagccaccaaguc

SEQ ID NO: 552967 - RNA, 24 nt, Artificial Sequence
  Synthetic
auucuacacgguagccaccaaguc

SEQ ID NO: 552968 - RNA, 18 nt, Artificial Sequence
  Synthetic
gguuuaaaagaccaaguc

SEQ ID NO: 552969 - RNA, 19 nt, Artificial Sequence
  Synthetic
agguuuaaaagaccaaguc

SEQ ID NO: 552970 - RNA, 20 nt, Artificial Sequence
  Synthetic
cagguuuaaaagaccaaguc

SEQ ID NO: 552971 - RNA, 21 nt, Artificial Sequence
  Synthetic
acagguuuaaaagaccaaguc

SEQ ID NO: 552972 - RNA, 22 nt, Artificial Sequence
  Synthetic
aacagguuuaaaagaccaaguc

SEQ ID NO: 552973 - RNA, 23 nt, Artificial Sequence
  Synthetic
uaacagguuuaaaagaccaaguc

SEQ ID NO: 552974 - RNA, 24 nt, Artificial Sequence
  Synthetic
cuaacagguuuaaaagaccaaguc

SEQ ID NO: 552975 - RNA, 18 nt, Artificial Sequence
  Synthetic
auuaacuuccugcaaguc

SEQ ID NO: 552976 - RNA, 19 nt, Artificial Sequence
  Synthetic
gauuaacuuccugcaaguc

SEQ ID NO: 552977 - RNA, 20 nt, Artificial Sequence
  Synthetic
ugauuaacuuccugcaaguc

SEQ ID NO: 552978 - RNA, 21 nt, Artificial Sequence
  Synthetic
cugauuaacuuccugcaaguc

SEQ ID NO: 552979 - RNA, 22 nt, Artificial Sequence
  Synthetic
ucugauuaacuuccugcaaguc

SEQ ID NO: 552980 - RNA, 23 nt, Artificial Sequence
  Synthetic
uucugauuaacuuccugcaaguc

SEQ ID NO: 552981 - RNA, 24 nt, Artificial Sequence
  Synthetic
uuucugauuaacuuccugcaaguc

SEQ ID NO: 552982 - RNA, 18 nt, Artificial Sequence
  Synthetic
uuuuguuuuaaucaaguc

SEQ ID NO: 552983 - RNA, 19 nt, Artificial Sequence
  Synthetic
auuuuguuuuaaucaaguc

SEQ ID NO: 552984 - RNA, 20 nt, Artificial Sequence
  Synthetic
aauuuuguuuuaaucaaguc

SEQ ID NO: 552985 - RNA, 21 nt, Artificial Sequence
  Synthetic
uaauuuuguuuuaaucaaguc

SEQ ID NO: 552986 - RNA, 22 nt, Artificial Sequence
  Synthetic
auaauuuuguuuuaaucaaguc

SEQ ID NO: 552987 - RNA, 23 nt, Artificial Sequence
  Synthetic
aauaauuuuguuuuaaucaaguc

SEQ ID NO: 552988 - RNA, 24 nt, Artificial Sequence
  Synthetic
gaauaauuuuguuuuaaucaaguc

SEQ ID NO: 552989 - RNA, 18 nt, Artificial Sequence
  Synthetic
uggagaaauacucaaguc

SEQ ID NO: 552990 - RNA, 19 nt, Artificial Sequence
  Synthetic
cuggagaaauacucaaguc

SEQ ID NO: 552991 - RNA, 20 nt, Artificial Sequence
  Synthetic
ucuggagaaauacucaaguc

SEQ ID NO: 552992 - RNA, 21 nt, Artificial Sequence
  Synthetic
aucuggagaaauacucaaguc

SEQ ID NO: 552993 - RNA, 22 nt, Artificial Sequence
  Synthetic
uaucuggagaaauacucaaguc

SEQ ID NO: 552994 - RNA, 23 nt, Artificial Sequence
  Synthetic
auaucuggagaaauacucaaguc

SEQ ID NO: 552995 - RNA, 24 nt, Artificial Sequence
  Synthetic
uauaucuggagaaauacucaaguc

SEQ ID NO: 552996 - RNA, 18 nt, Artificial Sequence
  Synthetic
uguggguacacagaaguc

SEQ ID NO: 552997 - RNA, 19 nt, Artificial Sequence
  Synthetic
cuguggguacacagaaguc

SEQ ID NO: 552998 - RNA, 20 nt, Artificial Sequence
  Synthetic
ccuguggguacacagaaguc

SEQ ID NO: 552999 - RNA, 21 nt, Artificial Sequence
  Synthetic
gccuguggguacacagaaguc

SEQ ID NO: 553000 - RNA, 22 nt, Artificial Sequence
  Synthetic
agccuguggguacacagaaguc

SEQ ID NO: 553001 - RNA, 23 nt, Artificial Sequence
  Synthetic
gagccuguggguacacagaaguc

SEQ ID NO: 553002 - RNA, 24 nt, Artificial Sequence
  Synthetic
ugagccuguggguacacagaaguc

SEQ ID NO: 553003 - RNA, 18 nt, Artificial Sequence
  Synthetic
ucaugaccuugagaaguc

SEQ ID NO: 553004 - RNA, 19 nt, Artificial Sequence
  Synthetic
uucaugaccuugagaaguc

SEQ ID NO: 553005 - RNA, 20 nt, Artificial Sequence
  Synthetic
cuucaugaccuugagaaguc

SEQ ID NO: 553006 - RNA, 21 nt, Artificial Sequence
  Synthetic
ccuucaugaccuugagaaguc

SEQ ID NO: 553007 - RNA, 22 nt, Artificial Sequence
  Synthetic
accuucaugaccuugagaaguc

SEQ ID NO: 553008 - RNA, 23 nt, Artificial Sequence
  Synthetic
caccuucaugaccuugagaaguc

SEQ ID NO: 553009 - RNA, 24 nt, Artificial Sequence
  Synthetic
gcaccuucaugaccuugagaaguc

SEQ ID NO: 553010 - RNA, 18 nt, Artificial Sequence
  Synthetic
aaaauaagcauagaaguc

SEQ ID NO: 553011 - RNA, 19 nt, Artificial Sequence
  Synthetic
gaaaauaagcauagaaguc

SEQ ID NO: 553012 - RNA, 20 nt, Artificial Sequence
  Synthetic
agaaaauaagcauagaaguc

SEQ ID NO: 553013 - RNA, 21 nt, Artificial Sequence
  Synthetic
aagaaaauaagcauagaaguc

SEQ ID NO: 553014 - RNA, 22 nt, Artificial Sequence
  Synthetic
gaagaaaauaagcauagaaguc

SEQ ID NO: 553015 - RNA, 23 nt, Artificial Sequence
  Synthetic
ugaagaaaauaagcauagaaguc

SEQ ID NO: 553016 - RNA, 24 nt, Artificial Sequence
  Synthetic
uugaagaaaauaagcauagaaguc

SEQ ID NO: 553017 - RNA, 18 nt, Artificial Sequence
  Synthetic
uaugcagggcacgaaguc

SEQ ID NO: 553018 - RNA, 19 nt, Artificial Sequence
  Synthetic
guaugcagggcacgaaguc

SEQ ID NO: 553019 - RNA, 20 nt, Artificial Sequence
  Synthetic
gguaugcagggcacgaaguc

SEQ ID NO: 553020 - RNA, 21 nt, Artificial Sequence
  Synthetic
ugguaugcagggcacgaaguc

SEQ ID NO: 553021 - RNA, 22 nt, Artificial Sequence
  Synthetic
cugguaugcagggcacgaaguc

SEQ ID NO: 553022 - RNA, 23 nt, Artificial Sequence
  Synthetic
gcugguaugcagggcacgaaguc

SEQ ID NO: 553023 - RNA, 24 nt, Artificial Sequence
  Synthetic
agcugguaugcagggcacgaaguc

SEQ ID NO: 553024 - RNA, 18 nt, Artificial Sequence
  Synthetic
ccagugguaugcgaaguc

SEQ ID NO: 553025 - RNA, 19 nt, Artificial Sequence
  Synthetic
accagugguaugcgaaguc

SEQ ID NO: 553026 - RNA, 20 nt, Artificial Sequence
  Synthetic
aaccagugguaugcgaaguc

SEQ ID NO: 553027 - RNA, 21 nt, Artificial Sequence
  Synthetic
aaaccagugguaugcgaaguc

SEQ ID NO: 553028 - RNA, 22 nt, Artificial Sequence
  Synthetic
uaaaccagugguaugcgaaguc

SEQ ID NO: 553029 - RNA, 23 nt, Artificial Sequence
  Synthetic
auaaaccagugguaugcgaaguc

SEQ ID NO: 553030 - RNA, 24 nt, Artificial Sequence
  Synthetic
uauaaaccagugguaugcgaaguc

SEQ ID NO: 553031 - RNA, 18 nt, Artificial Sequence
  Synthetic
aaagcaaccaaggaaguc

SEQ ID NO: 553032 - RNA, 19 nt, Artificial Sequence
  Synthetic
caaagcaaccaaggaaguc

SEQ ID NO: 553033 - RNA, 20 nt, Artificial Sequence
  Synthetic
ucaaagcaaccaaggaaguc

SEQ ID NO: 553034 - RNA, 21 nt, Artificial Sequence
  Synthetic
gucaaagcaaccaaggaaguc

SEQ ID NO: 553035 - RNA, 22 nt, Artificial Sequence
  Synthetic
ugucaaagcaaccaaggaaguc

SEQ ID NO: 553036 - RNA, 23 nt, Artificial Sequence
  Synthetic
augucaaagcaaccaaggaaguc

SEQ ID NO: 553037 - RNA, 24 nt, Artificial Sequence
  Synthetic
uaugucaaagcaaccaaggaaguc

SEQ ID NO: 553038 - RNA, 18 nt, Artificial Sequence
  Synthetic
gcaggaaggaaggaaguc

SEQ ID NO: 553039 - RNA, 19 nt, Artificial Sequence
  Synthetic
ggcaggaaggaaggaaguc

SEQ ID NO: 553040 - RNA, 20 nt, Artificial Sequence
  Synthetic
aggcaggaaggaaggaaguc

SEQ ID NO: 553041 - RNA, 21 nt, Artificial Sequence
  Synthetic
aaggcaggaaggaaggaaguc

SEQ ID NO: 553042 - RNA, 22 nt, Artificial Sequence
  Synthetic
gaaggcaggaaggaaggaaguc

SEQ ID NO: 553043 - RNA, 23 nt, Artificial Sequence
  Synthetic
ggaaggcaggaaggaaggaaguc

SEQ ID NO: 553044 - RNA, 24 nt, Artificial Sequence
  Synthetic
aggaaggcaggaaggaaggaaguc

SEQ ID NO: 553045 - RNA, 18 nt, Artificial Sequence
  Synthetic
gcaugcaugcaugaaguc

SEQ ID NO: 553046 - RNA, 19 nt, Artificial Sequence
  Synthetic
ugcaugcaugcaugaaguc

SEQ ID NO: 553047 - RNA, 20 nt, Artificial Sequence
  Synthetic
cugcaugcaugcaugaaguc

SEQ ID NO: 553048 - RNA, 21 nt, Artificial Sequence
  Synthetic
ucugcaugcaugcaugaaguc

SEQ ID NO: 553049 - RNA, 22 nt, Artificial Sequence
  Synthetic
cucugcaugcaugcaugaaguc

SEQ ID NO: 553050 - RNA, 23 nt, Artificial Sequence
  Synthetic
gcucugcaugcaugcaugaaguc

SEQ ID NO: 553051 - RNA, 24 nt, Artificial Sequence
  Synthetic
cgcucugcaugcaugcaugaaguc

SEQ ID NO: 553052 - RNA, 18 nt, Artificial Sequence
  Synthetic
acuucuucuacugaaguc

SEQ ID NO: 553053 - RNA, 19 nt, Artificial Sequence
  Synthetic
gacuucuucuacugaaguc

SEQ ID NO: 553054 - RNA, 20 nt, Artificial Sequence
  Synthetic
ugacuucuucuacugaaguc

SEQ ID NO: 553055 - RNA, 21 nt, Artificial Sequence
  Synthetic
gugacuucuucuacugaaguc

SEQ ID NO: 553056 - RNA, 22 nt, Artificial Sequence
  Synthetic
agugacuucuucuacugaaguc

SEQ ID NO: 553057 - RNA, 23 nt, Artificial Sequence
  Synthetic
cagugacuucuucuacugaaguc

SEQ ID NO: 553058 - RNA, 24 nt, Artificial Sequence
  Synthetic
gcagugacuucuucuacugaaguc

SEQ ID NO: 553059 - RNA, 18 nt, Artificial Sequence
  Synthetic
aauucaacugcugaaguc

SEQ ID NO: 553060 - RNA, 19 nt, Artificial Sequence
  Synthetic
aaauucaacugcugaaguc

SEQ ID NO: 553061 - RNA, 20 nt, Artificial Sequence
  Synthetic
caaauucaacugcugaaguc

SEQ ID NO: 553062 - RNA, 21 nt, Artificial Sequence
  Synthetic
acaaauucaacugcugaaguc

SEQ ID NO: 553063 - RNA, 22 nt, Artificial Sequence
  Synthetic
gacaaauucaacugcugaaguc

SEQ ID NO: 553064 - RNA, 23 nt, Artificial Sequence
  Synthetic
ugacaaauucaacugcugaaguc

SEQ ID NO: 553065 - RNA, 24 nt, Artificial Sequence
  Synthetic
uugacaaauucaacugcugaaguc

SEQ ID NO: 553066 - RNA, 18 nt, Artificial Sequence
  Synthetic
uguuggaccuuugaaguc

SEQ ID NO: 553067 - RNA, 19 nt, Artificial Sequence
  Synthetic
cuguuggaccuuugaaguc

SEQ ID NO: 553068 - RNA, 20 nt, Artificial Sequence
  Synthetic
gcuguuggaccuuugaaguc

SEQ ID NO: 553069 - RNA, 21 nt, Artificial Sequence
  Synthetic
ggcuguuggaccuuugaaguc

SEQ ID NO: 553070 - RNA, 22 nt, Artificial Sequence
  Synthetic
gggcuguuggaccuuugaaguc

SEQ ID NO: 553071 - RNA, 23 nt, Artificial Sequence
  Synthetic
ugggcuguuggaccuuugaaguc

SEQ ID NO: 553072 - RNA, 24 nt, Artificial Sequence
  Synthetic
cugggcuguuggaccuuugaaguc

SEQ ID NO: 553073 - RNA, 18 nt, Artificial Sequence
  Synthetic
gacagaaguuuugaaguc

SEQ ID NO: 553074 - RNA, 19 nt, Artificial Sequence
  Synthetic
ggacagaaguuuugaaguc

SEQ ID NO: 553075 - RNA, 20 nt, Artificial Sequence
  Synthetic
aggacagaaguuuugaaguc

SEQ ID NO: 553076 - RNA, 21 nt, Artificial Sequence
  Synthetic
aaggacagaaguuuugaaguc

SEQ ID NO: 553077 - RNA, 22 nt, Artificial Sequence
  Synthetic
aaaggacagaaguuuugaaguc

SEQ ID NO: 553078 - RNA, 23 nt, Artificial Sequence
  Synthetic
caaaggacagaaguuuugaaguc

SEQ ID NO: 553079 - RNA, 24 nt, Artificial Sequence
  Synthetic
ucaaaggacagaaguuuugaaguc

SEQ ID NO: 553080 - RNA, 18 nt, Artificial Sequence
  Synthetic
ccaaaaagaaaauaaguc

SEQ ID NO: 553081 - RNA, 19 nt, Artificial Sequence
  Synthetic
accaaaaagaaaauaaguc

SEQ ID NO: 553082 - RNA, 20 nt, Artificial Sequence
  Synthetic
aaccaaaaagaaaauaaguc

SEQ ID NO: 553083 - RNA, 21 nt, Artificial Sequence
  Synthetic
gaaccaaaaagaaaauaaguc

SEQ ID NO: 553084 - RNA, 22 nt, Artificial Sequence
  Synthetic
ggaaccaaaaagaaaauaaguc

SEQ ID NO: 553085 - RNA, 23 nt, Artificial Sequence
  Synthetic
aggaaccaaaaagaaaauaaguc

SEQ ID NO: 553086 - RNA, 24 nt, Artificial Sequence
  Synthetic
gaggaaccaaaaagaaaauaaguc

SEQ ID NO: 553087 - RNA, 18 nt, Artificial Sequence
  Synthetic
aguugcaggagcuaaguc

SEQ ID NO: 553088 - RNA, 19 nt, Artificial Sequence
  Synthetic
gaguugcaggagcuaaguc

SEQ ID NO: 553089 - RNA, 20 nt, Artificial Sequence
  Synthetic
agaguugcaggagcuaaguc

SEQ ID NO: 553090 - RNA, 21 nt, Artificial Sequence
  Synthetic
gagaguugcaggagcuaaguc

SEQ ID NO: 553091 - RNA, 22 nt, Artificial Sequence
  Synthetic
ggagaguugcaggagcuaaguc

SEQ ID NO: 553092 - RNA, 23 nt, Artificial Sequence
  Synthetic
uggagaguugcaggagcuaaguc

SEQ ID NO: 553093 - RNA, 24 nt, Artificial Sequence
  Synthetic
auggagaguugcaggagcuaaguc

SEQ ID NO: 553094 - RNA, 18 nt, Artificial Sequence
  Synthetic
uuaaccugaugcuaaguc

SEQ ID NO: 553095 - RNA, 19 nt, Artificial Sequence
  Synthetic
auuaaccugaugcuaaguc

SEQ ID NO: 553096 - RNA, 20 nt, Artificial Sequence
  Synthetic
aauuaaccugaugcuaaguc

SEQ ID NO: 553097 - RNA, 21 nt, Artificial Sequence
  Synthetic
aaauuaaccugaugcuaaguc

SEQ ID NO: 553098 - RNA, 22 nt, Artificial Sequence
  Synthetic
caaauuaaccugaugcuaaguc

SEQ ID NO: 553099 - RNA, 23 nt, Artificial Sequence
  Synthetic
ucaaauuaaccugaugcuaaguc

SEQ ID NO: 553100 - RNA, 24 nt, Artificial Sequence
  Synthetic
uucaaauuaaccugaugcuaaguc

SEQ ID NO: 553101 - RNA, 18 nt, Artificial Sequence
  Synthetic
auaaaggaugauuaaguc

SEQ ID NO: 553102 - RNA, 19 nt, Artificial Sequence
  Synthetic
uauaaaggaugauuaaguc

SEQ ID NO: 553103 - RNA, 20 nt, Artificial Sequence
  Synthetic
uuauaaaggaugauuaaguc

SEQ ID NO: 553104 - RNA, 21 nt, Artificial Sequence
  Synthetic
uuuauaaaggaugauuaaguc

SEQ ID NO: 553105 - RNA, 22 nt, Artificial Sequence
  Synthetic
auuuauaaaggaugauuaaguc

SEQ ID NO: 553106 - RNA, 23 nt, Artificial Sequence
  Synthetic
gauuuauaaaggaugauuaaguc

SEQ ID NO: 553107 - RNA, 24 nt, Artificial Sequence
  Synthetic
ggauuuauaaaggaugauuaaguc

SEQ ID NO: 553108 - RNA, 18 nt, Artificial Sequence
  Synthetic
uucuaacuagguuaaguc

SEQ ID NO: 553109 - RNA, 19 nt, Artificial Sequence
  Synthetic
cuucuaacuagguuaaguc

SEQ ID NO: 553110 - RNA, 20 nt, Artificial Sequence
  Synthetic
gcuucuaacuagguuaaguc

SEQ ID NO: 553111 - RNA, 21 nt, Artificial Sequence
  Synthetic
ggcuucuaacuagguuaaguc

SEQ ID NO: 553112 - RNA, 22 nt, Artificial Sequence
  Synthetic
uggcuucuaacuagguuaaguc

SEQ ID NO: 553113 - RNA, 23 nt, Artificial Sequence
  Synthetic
cuggcuucuaacuagguuaaguc

SEQ ID NO: 553114 - RNA, 24 nt, Artificial Sequence
  Synthetic
gcuggcuucuaacuagguuaaguc

SEQ ID NO: 553115 - RNA, 18 nt, Artificial Sequence
  Synthetic
caaauagccaaaacaguc

SEQ ID NO: 553116 - RNA, 19 nt, Artificial Sequence
  Synthetic
ccaaauagccaaaacaguc

SEQ ID NO: 553117 - RNA, 20 nt, Artificial Sequence
  Synthetic
uccaaauagccaaaacaguc

SEQ ID NO: 553118 - RNA, 21 nt, Artificial Sequence
  Synthetic
cuccaaauagccaaaacaguc

SEQ ID NO: 553119 - RNA, 22 nt, Artificial Sequence
  Synthetic
acuccaaauagccaaaacaguc

SEQ ID NO: 553120 - RNA, 23 nt, Artificial Sequence
  Synthetic
gacuccaaauagccaaaacaguc

SEQ ID NO: 553121 - RNA, 24 nt, Artificial Sequence
  Synthetic
cgacuccaaauagccaaaacaguc

SEQ ID NO: 553122 - RNA, 18 nt, Artificial Sequence
  Synthetic
aagacuacuguaacaguc

SEQ ID NO: 553123 - RNA, 19 nt, Artificial Sequence
  Synthetic
uaagacuacuguaacaguc

SEQ ID NO: 553124 - RNA, 20 nt, Artificial Sequence
  Synthetic
auaagacuacuguaacaguc

SEQ ID NO: 553125 - RNA, 21 nt, Artificial Sequence
  Synthetic
uauaagacuacuguaacaguc

SEQ ID NO: 553126 - RNA, 22 nt, Artificial Sequence
  Synthetic
auauaagacuacuguaacaguc

SEQ ID NO: 553127 - RNA, 23 nt, Artificial Sequence
  Synthetic
aauauaagacuacuguaacaguc

SEQ ID NO: 553128 - RNA, 24 nt, Artificial Sequence
  Synthetic
uaauauaagacuacuguaacaguc

SEQ ID NO: 553129 - RNA, 18 nt, Artificial Sequence
  Synthetic
caugugacacacacaguc

SEQ ID NO: 553130 - RNA, 19 nt, Artificial Sequence
  Synthetic
ucaugugacacacacaguc

SEQ ID NO: 553131 - RNA, 20 nt, Artificial Sequence
  Synthetic
uucaugugacacacacaguc

SEQ ID NO: 553132 - RNA, 21 nt, Artificial Sequence
  Synthetic
uuucaugugacacacacaguc

SEQ ID NO: 553133 - RNA, 22 nt, Artificial Sequence
  Synthetic
uuuucaugugacacacacaguc

SEQ ID NO: 553134 - RNA, 23 nt, Artificial Sequence
  Synthetic
cuuuucaugugacacacacaguc

SEQ ID NO: 553135 - RNA, 24 nt, Artificial Sequence
  Synthetic
acuuuucaugugacacacacaguc

SEQ ID NO: 553136 - RNA, 18 nt, Artificial Sequence
  Synthetic
gcauuuugugucacaguc

SEQ ID NO: 553137 - RNA, 19 nt, Artificial Sequence
  Synthetic
agcauuuugugucacaguc

SEQ ID NO: 553138 - RNA, 20 nt, Artificial Sequence
  Synthetic
uagcauuuugugucacaguc

SEQ ID NO: 553139 - RNA, 21 nt, Artificial Sequence
  Synthetic
auagcauuuugugucacaguc

SEQ ID NO: 553140 - RNA, 22 nt, Artificial Sequence
  Synthetic
aauagcauuuugugucacaguc

SEQ ID NO: 553141 - RNA, 23 nt, Artificial Sequence
  Synthetic
aaauagcauuuugugucacaguc

SEQ ID NO: 553142 - RNA, 24 nt, Artificial Sequence
  Synthetic
gaaauagcauuuugugucacaguc

SEQ ID NO: 553143 - RNA, 18 nt, Artificial Sequence
  Synthetic
uaauaccuccagacaguc

SEQ ID NO: 553144 - RNA, 19 nt, Artificial Sequence
  Synthetic
cuaauaccuccagacaguc

SEQ ID NO: 553145 - RNA, 20 nt, Artificial Sequence
  Synthetic
ucuaauaccuccagacaguc

SEQ ID NO: 553146 - RNA, 21 nt, Artificial Sequence
  Synthetic
uucuaauaccuccagacaguc

SEQ ID NO: 553147 - RNA, 22 nt, Artificial Sequence
  Synthetic
auucuaauaccuccagacaguc

SEQ ID NO: 553148 - RNA, 23 nt, Artificial Sequence
  Synthetic
aauucuaauaccuccagacaguc

SEQ ID NO: 553149 - RNA, 24 nt, Artificial Sequence
  Synthetic
caauucuaauaccuccagacaguc

SEQ ID NO: 553150 - RNA, 18 nt, Artificial Sequence
  Synthetic
cagggacagaggacaguc

SEQ ID NO: 553151 - RNA, 19 nt, Artificial Sequence
  Synthetic
ccagggacagaggacaguc

SEQ ID NO: 553152 - RNA, 20 nt, Artificial Sequence
  Synthetic
gccagggacagaggacaguc

SEQ ID NO: 553153 - RNA, 21 nt, Artificial Sequence
  Synthetic
agccagggacagaggacaguc

SEQ ID NO: 553154 - RNA, 22 nt, Artificial Sequence
  Synthetic
aagccagggacagaggacaguc

SEQ ID NO: 553155 - RNA, 23 nt, Artificial Sequence
  Synthetic
gaagccagggacagaggacaguc

SEQ ID NO: 553156 - RNA, 24 nt, Artificial Sequence
  Synthetic
agaagccagggacagaggacaguc

SEQ ID NO: 553157 - RNA, 18 nt, Artificial Sequence
  Synthetic
caagagaagccuacaguc

SEQ ID NO: 553158 - RNA, 19 nt, Artificial Sequence
  Synthetic
ucaagagaagccuacaguc

SEQ ID NO: 553159 - RNA, 20 nt, Artificial Sequence
  Synthetic
aucaagagaagccuacaguc

SEQ ID NO: 553160 - RNA, 21 nt, Artificial Sequence
  Synthetic
aaucaagagaagccuacaguc

SEQ ID NO: 553161 - RNA, 22 nt, Artificial Sequence
  Synthetic
uaaucaagagaagccuacaguc

SEQ ID NO: 553162 - RNA, 23 nt, Artificial Sequence
  Synthetic
cuaaucaagagaagccuacaguc

SEQ ID NO: 553163 - RNA, 24 nt, Artificial Sequence
  Synthetic
ucuaaucaagagaagccuacaguc

SEQ ID NO: 553164 - RNA, 18 nt, Artificial Sequence
  Synthetic
auugcugggauuacaguc

SEQ ID NO: 553165 - RNA, 19 nt, Artificial Sequence
  Synthetic
aauugcugggauuacaguc

SEQ ID NO: 553166 - RNA, 20 nt, Artificial Sequence
  Synthetic
aaauugcugggauuacaguc

SEQ ID NO: 553167 - RNA, 21 nt, Artificial Sequence
  Synthetic
caaauugcugggauuacaguc

SEQ ID NO: 553168 - RNA, 22 nt, Artificial Sequence
  Synthetic
ccaaauugcugggauuacaguc

SEQ ID NO: 553169 - RNA, 23 nt, Artificial Sequence
  Synthetic
cccaaauugcugggauuacaguc

SEQ ID NO: 553170 - RNA, 24 nt, Artificial Sequence
  Synthetic
ucccaaauugcugggauuacaguc

SEQ ID NO: 553171 - RNA, 18 nt, Artificial Sequence
  Synthetic
acauugcuuauuacaguc

SEQ ID NO: 553172 - RNA, 19 nt, Artificial Sequence
  Synthetic
uacauugcuuauuacaguc

SEQ ID NO: 553173 - RNA, 20 nt, Artificial Sequence
  Synthetic
auacauugcuuauuacaguc

SEQ ID NO: 553174 - RNA, 21 nt, Artificial Sequence
  Synthetic
aauacauugcuuauuacaguc

SEQ ID NO: 553175 - RNA, 22 nt, Artificial Sequence
  Synthetic
gaauacauugcuuauuacaguc

SEQ ID NO: 553176 - RNA, 23 nt, Artificial Sequence
  Synthetic
ugaauacauugcuuauuacaguc

SEQ ID NO: 553177 - RNA, 24 nt, Artificial Sequence
  Synthetic
augaauacauugcuuauuacaguc

SEQ ID NO: 553178 - RNA, 18 nt, Artificial Sequence
  Synthetic
ggagauaaaagaccaguc

SEQ ID NO: 553179 - RNA, 19 nt, Artificial Sequence
  Synthetic
aggagauaaaagaccaguc

SEQ ID NO: 553180 - RNA, 20 nt, Artificial Sequence
  Synthetic
caggagauaaaagaccaguc

SEQ ID NO: 553181 - RNA, 21 nt, Artificial Sequence
  Synthetic
gcaggagauaaaagaccaguc

SEQ ID NO: 553182 - RNA, 22 nt, Artificial Sequence
  Synthetic
ugcaggagauaaaagaccaguc

SEQ ID NO: 553183 - RNA, 23 nt, Artificial Sequence
  Synthetic
cugcaggagauaaaagaccaguc

SEQ ID NO: 553184 - RNA, 24 nt, Artificial Sequence
  Synthetic
ccugcaggagauaaaagaccaguc

SEQ ID NO: 553185 - RNA, 18 nt, Artificial Sequence
  Synthetic
uuuagaaauuacccaguc

SEQ ID NO: 553186 - RNA, 19 nt, Artificial Sequence
  Synthetic
cuuuagaaauuacccaguc

SEQ ID NO: 553187 - RNA, 20 nt, Artificial Sequence
  Synthetic
ccuuuagaaauuacccaguc

SEQ ID NO: 553188 - RNA, 21 nt, Artificial Sequence
  Synthetic
uccuuuagaaauuacccaguc

SEQ ID NO: 553189 - RNA, 22 nt, Artificial Sequence
  Synthetic
uuccuuuagaaauuacccaguc

SEQ ID NO: 553190 - RNA, 23 nt, Artificial Sequence
  Synthetic
uuuccuuuagaaauuacccaguc

SEQ ID NO: 553191 - RNA, 24 nt, Artificial Sequence
  Synthetic
cuuuccuuuagaaauuacccaguc

SEQ ID NO: 553192 - RNA, 18 nt, Artificial Sequence
  Synthetic
gggaggugucucccaguc

SEQ ID NO: 553193 - RNA, 19 nt, Artificial Sequence
  Synthetic
ugggaggugucucccaguc

SEQ ID NO: 553194 - RNA, 20 nt, Artificial Sequence
  Synthetic
cugggaggugucucccaguc

SEQ ID NO: 553195 - RNA, 21 nt, Artificial Sequence
  Synthetic
gcugggaggugucucccaguc

SEQ ID NO: 553196 - RNA, 22 nt, Artificial Sequence
  Synthetic
ugcugggaggugucucccaguc

SEQ ID NO: 553197 - RNA, 23 nt, Artificial Sequence
  Synthetic
cugcugggaggugucucccaguc

SEQ ID NO: 553198 - RNA, 24 nt, Artificial Sequence
  Synthetic
ccugcugggaggugucucccaguc

SEQ ID NO: 553199 - RNA, 18 nt, Artificial Sequence
  Synthetic
gccaucccugcgccaguc

SEQ ID NO: 553200 - RNA, 19 nt, Artificial Sequence
  Synthetic
ggccaucccugcgccaguc

SEQ ID NO: 553201 - RNA, 20 nt, Artificial Sequence
  Synthetic
cggccaucccugcgccaguc

SEQ ID NO: 553202 - RNA, 21 nt, Artificial Sequence
  Synthetic
gcggccaucccugcgccaguc

SEQ ID NO: 553203 - RNA, 22 nt, Artificial Sequence
  Synthetic
ugcggccaucccugcgccaguc

SEQ ID NO: 553204 - RNA, 23 nt, Artificial Sequence
  Synthetic
augcggccaucccugcgccaguc

SEQ ID NO: 553205 - RNA, 24 nt, Artificial Sequence
  Synthetic
aaugcggccaucccugcgccaguc

SEQ ID NO: 553206 - RNA, 18 nt, Artificial Sequence
  Synthetic
uucaauuagaaagcaguc

SEQ ID NO: 553207 - RNA, 19 nt, Artificial Sequence
  Synthetic
uuucaauuagaaagcaguc

SEQ ID NO: 553208 - RNA, 20 nt, Artificial Sequence
  Synthetic
guuucaauuagaaagcaguc

SEQ ID NO: 553209 - RNA, 21 nt, Artificial Sequence
  Synthetic
uguuucaauuagaaagcaguc

SEQ ID NO: 553210 - RNA, 22 nt, Artificial Sequence
  Synthetic
uuguuucaauuagaaagcaguc

SEQ ID NO: 553211 - RNA, 23 nt, Artificial Sequence
  Synthetic
uuuguuucaauuagaaagcaguc

SEQ ID NO: 553212 - RNA, 24 nt, Artificial Sequence
  Synthetic
uuuuguuucaauuagaaagcaguc

SEQ ID NO: 553213 - RNA, 18 nt, Artificial Sequence
  Synthetic
auuaaagaacaagcaguc

SEQ ID NO: 553214 - RNA, 19 nt, Artificial Sequence
  Synthetic
uauuaaagaacaagcaguc

SEQ ID NO: 553215 - RNA, 20 nt, Artificial Sequence
  Synthetic
uuauuaaagaacaagcaguc

SEQ ID NO: 553216 - RNA, 21 nt, Artificial Sequence
  Synthetic
uuuauuaaagaacaagcaguc

SEQ ID NO: 553217 - RNA, 22 nt, Artificial Sequence
  Synthetic
uuuuauuaaagaacaagcaguc

SEQ ID NO: 553218 - RNA, 23 nt, Artificial Sequence
  Synthetic
uuuuuauuaaagaacaagcaguc

SEQ ID NO: 553219 - RNA, 24 nt, Artificial Sequence
  Synthetic
auuuuuauuaaagaacaagcaguc

SEQ ID NO: 553220 - RNA, 18 nt, Artificial Sequence
  Synthetic
cucauccuagaagcaguc

SEQ ID NO: 553221 - RNA, 19 nt, Artificial Sequence
  Synthetic
acucauccuagaagcaguc

SEQ ID NO: 553222 - RNA, 20 nt, Artificial Sequence
  Synthetic
cacucauccuagaagcaguc

SEQ ID NO: 553223 - RNA, 21 nt, Artificial Sequence
  Synthetic
ccacucauccuagaagcaguc

SEQ ID NO: 553224 - RNA, 22 nt, Artificial Sequence
  Synthetic
gccacucauccuagaagcaguc

SEQ ID NO: 553225 - RNA, 23 nt, Artificial Sequence
  Synthetic
ggccacucauccuagaagcaguc

SEQ ID NO: 553226 - RNA, 24 nt, Artificial Sequence
  Synthetic
aggccacucauccuagaagcaguc

SEQ ID NO: 553227 - RNA, 18 nt, Artificial Sequence
  Synthetic
auguugaugcuagcaguc

SEQ ID NO: 553228 - RNA, 19 nt, Artificial Sequence
  Synthetic
gauguugaugcuagcaguc

SEQ ID NO: 553229 - RNA, 20 nt, Artificial Sequence
  Synthetic
ugauguugaugcuagcaguc

SEQ ID NO: 553230 - RNA, 21 nt, Artificial Sequence
  Synthetic
uugauguugaugcuagcaguc

SEQ ID NO: 553231 - RNA, 22 nt, Artificial Sequence
  Synthetic
guugauguugaugcuagcaguc

SEQ ID NO: 553232 - RNA, 23 nt, Artificial Sequence
  Synthetic
uguugauguugaugcuagcaguc

SEQ ID NO: 553233 - RNA, 24 nt, Artificial Sequence
  Synthetic
uuguugauguugaugcuagcaguc

SEQ ID NO: 553234 - RNA, 18 nt, Artificial Sequence
  Synthetic
uagaaucgugccgcaguc

SEQ ID NO: 553235 - RNA, 19 nt, Artificial Sequence
  Synthetic
guagaaucgugccgcaguc

SEQ ID NO: 553236 - RNA, 20 nt, Artificial Sequence
  Synthetic
aguagaaucgugccgcaguc

SEQ ID NO: 553237 - RNA, 21 nt, Artificial Sequence
  Synthetic
uaguagaaucgugccgcaguc

SEQ ID NO: 553238 - RNA, 22 nt, Artificial Sequence
  Synthetic
auaguagaaucgugccgcaguc

SEQ ID NO: 553239 - RNA, 23 nt, Artificial Sequence
  Synthetic
uauaguagaaucgugccgcaguc

SEQ ID NO: 553240 - RNA, 24 nt, Artificial Sequence
  Synthetic
guauaguagaaucgugccgcaguc

SEQ ID NO: 553241 - RNA, 18 nt, Artificial Sequence
  Synthetic
uaaaccugagaggcaguc

SEQ ID NO: 553242 - RNA, 19 nt, Artificial Sequence
  Synthetic
guaaaccugagaggcaguc

SEQ ID NO: 553243 - RNA, 20 nt, Artificial Sequence
  Synthetic
gguaaaccugagaggcaguc

SEQ ID NO: 553244 - RNA, 21 nt, Artificial Sequence
  Synthetic
agguaaaccugagaggcaguc

SEQ ID NO: 553245 - RNA, 22 nt, Artificial Sequence
  Synthetic
cagguaaaccugagaggcaguc

SEQ ID NO: 553246 - RNA, 23 nt, Artificial Sequence
  Synthetic
ccagguaaaccugagaggcaguc

SEQ ID NO: 553247 - RNA, 24 nt, Artificial Sequence
  Synthetic
cccagguaaaccugagaggcaguc

SEQ ID NO: 553248 - RNA, 18 nt, Artificial Sequence
  Synthetic
augggaagauaggcaguc

SEQ ID NO: 553249 - RNA, 19 nt, Artificial Sequence
  Synthetic
caugggaagauaggcaguc

SEQ ID NO: 553250 - RNA, 20 nt, Artificial Sequence
  Synthetic
acaugggaagauaggcaguc

SEQ ID NO: 553251 - RNA, 21 nt, Artificial Sequence
  Synthetic
aacaugggaagauaggcaguc

SEQ ID NO: 553252 - RNA, 22 nt, Artificial Sequence
  Synthetic
caacaugggaagauaggcaguc

SEQ ID NO: 553253 - RNA, 23 nt, Artificial Sequence
  Synthetic
ccaacaugggaagauaggcaguc

SEQ ID NO: 553254 - RNA, 24 nt, Artificial Sequence
  Synthetic
uccaacaugggaagauaggcaguc

SEQ ID NO: 553255 - RNA, 18 nt, Artificial Sequence
  Synthetic
agggauguccuggcaguc

SEQ ID NO: 553256 - RNA, 19 nt, Artificial Sequence
  Synthetic
aagggauguccuggcaguc

SEQ ID NO: 553257 - RNA, 20 nt, Artificial Sequence
  Synthetic
gaagggauguccuggcaguc

SEQ ID NO: 553258 - RNA, 21 nt, Artificial Sequence
  Synthetic
ggaagggauguccuggcaguc

SEQ ID NO: 553259 - RNA, 22 nt, Artificial Sequence
  Synthetic
uggaagggauguccuggcaguc

SEQ ID NO: 553260 - RNA, 23 nt, Artificial Sequence
  Synthetic
uuggaagggauguccuggcaguc

SEQ ID NO: 553261 - RNA, 24 nt, Artificial Sequence
  Synthetic
guuggaagggauguccuggcaguc

SEQ ID NO: 553262 - RNA, 18 nt, Artificial Sequence
  Synthetic
cacagaggauuggcaguc

SEQ ID NO: 553263 - RNA, 19 nt, Artificial Sequence
  Synthetic
gcacagaggauuggcaguc

SEQ ID NO: 553264 - RNA, 20 nt, Artificial Sequence
  Synthetic
agcacagaggauuggcaguc

SEQ ID NO: 553265 - RNA, 21 nt, Artificial Sequence
  Synthetic
gagcacagaggauuggcaguc

SEQ ID NO: 553266 - RNA, 22 nt, Artificial Sequence
  Synthetic
agagcacagaggauuggcaguc

SEQ ID NO: 553267 - RNA, 23 nt, Artificial Sequence
  Synthetic
uagagcacagaggauuggcaguc

SEQ ID NO: 553268 - RNA, 24 nt, Artificial Sequence
  Synthetic
uuagagcacagaggauuggcaguc

SEQ ID NO: 553269 - RNA, 18 nt, Artificial Sequence
  Synthetic
guuaugcaaucugcaguc

SEQ ID NO: 553270 - RNA, 19 nt, Artificial Sequence
  Synthetic
uguuaugcaaucugcaguc

SEQ ID NO: 553271 - RNA, 20 nt, Artificial Sequence
  Synthetic
cuguuaugcaaucugcaguc

SEQ ID NO: 553272 - RNA, 21 nt, Artificial Sequence
  Synthetic
ucuguuaugcaaucugcaguc

SEQ ID NO: 553273 - RNA, 22 nt, Artificial Sequence
  Synthetic
uucuguuaugcaaucugcaguc

SEQ ID NO: 553274 - RNA, 23 nt, Artificial Sequence
  Synthetic
cuucuguuaugcaaucugcaguc

SEQ ID NO: 553275 - RNA, 24 nt, Artificial Sequence
  Synthetic
ccuucuguuaugcaaucugcaguc

SEQ ID NO: 553276 - RNA, 18 nt, Artificial Sequence
  Synthetic
auuuauuaaaaaucaguc

SEQ ID NO: 553277 - RNA, 19 nt, Artificial Sequence
  Synthetic
uauuuauuaaaaaucaguc

SEQ ID NO: 553278 - RNA, 20 nt, Artificial Sequence
  Synthetic
uuauuuauuaaaaaucaguc

SEQ ID NO: 553279 - RNA, 21 nt, Artificial Sequence
  Synthetic
uuuauuuauuaaaaaucaguc

SEQ ID NO: 553280 - RNA, 22 nt, Artificial Sequence
  Synthetic
uuuuauuuauuaaaaaucaguc

SEQ ID NO: 553281 - RNA, 23 nt, Artificial Sequence
  Synthetic
uuuuuauuuauuaaaaaucaguc

SEQ ID NO: 553282 - RNA, 24 nt, Artificial Sequence
  Synthetic
uuuuuuauuuauuaaaaaucaguc

SEQ ID NO: 553283 - RNA, 18 nt, Artificial Sequence
  Synthetic
uguuggaaauaaucaguc

SEQ ID NO: 553284 - RNA, 19 nt, Artificial Sequence
  Synthetic
uuguuggaaauaaucaguc

SEQ ID NO: 553285 - RNA, 20 nt, Artificial Sequence
  Synthetic
guuguuggaaauaaucaguc

SEQ ID NO: 553286 - RNA, 21 nt, Artificial Sequence
  Synthetic
uguuguuggaaauaaucaguc

SEQ ID NO: 553287 - RNA, 22 nt, Artificial Sequence
  Synthetic
guguuguuggaaauaaucaguc

SEQ ID NO: 553288 - RNA, 23 nt, Artificial Sequence
  Synthetic
aguguuguuggaaauaaucaguc

SEQ ID NO: 553289 - RNA, 24 nt, Artificial Sequence
  Synthetic
caguguuguuggaaauaaucaguc

SEQ ID NO: 553290 - RNA, 18 nt, Artificial Sequence
  Synthetic
augacuguaacaucaguc

SEQ ID NO: 553291 - RNA, 19 nt, Artificial Sequence
  Synthetic
aaugacuguaacaucaguc

SEQ ID NO: 553292 - RNA, 20 nt, Artificial Sequence
  Synthetic
gaaugacuguaacaucaguc

SEQ ID NO: 553293 - RNA, 21 nt, Artificial Sequence
  Synthetic
ggaaugacuguaacaucaguc

SEQ ID NO: 553294 - RNA, 22 nt, Artificial Sequence
  Synthetic
cggaaugacuguaacaucaguc

SEQ ID NO: 553295 - RNA, 23 nt, Artificial Sequence
  Synthetic
gcggaaugacuguaacaucaguc

SEQ ID NO: 553296 - RNA, 24 nt, Artificial Sequence
  Synthetic
ugcggaaugacuguaacaucaguc

SEQ ID NO: 553297 - RNA, 18 nt, Artificial Sequence
  Synthetic
aaagaacaaagaucaguc

SEQ ID NO: 553298 - RNA, 19 nt, Artificial Sequence
  Synthetic
aaaagaacaaagaucaguc

SEQ ID NO: 553299 - RNA, 20 nt, Artificial Sequence
  Synthetic
aaaaagaacaaagaucaguc

SEQ ID NO: 553300 - RNA, 21 nt, Artificial Sequence
  Synthetic
aaaaaagaacaaagaucaguc

SEQ ID NO: 553301 - RNA, 22 nt, Artificial Sequence
  Synthetic
aaaaaaagaacaaagaucaguc

SEQ ID NO: 553302 - RNA, 23 nt, Artificial Sequence
  Synthetic
aaaaaaaagaacaaagaucaguc

SEQ ID NO: 553303 - RNA, 24 nt, Artificial Sequence
  Synthetic
gaaaaaaaagaacaaagaucaguc

SEQ ID NO: 553304 - RNA, 18 nt, Artificial Sequence
  Synthetic
cucagcacuauaucaguc

SEQ ID NO: 553305 - RNA, 19 nt, Artificial Sequence
  Synthetic
gcucagcacuauaucaguc

SEQ ID NO: 553306 - RNA, 20 nt, Artificial Sequence
  Synthetic
ugcucagcacuauaucaguc

SEQ ID NO: 553307 - RNA, 21 nt, Artificial Sequence
  Synthetic
gugcucagcacuauaucaguc

SEQ ID NO: 553308 - RNA, 22 nt, Artificial Sequence
  Synthetic
ugugcucagcacuauaucaguc

SEQ ID NO: 553309 - RNA, 23 nt, Artificial Sequence
  Synthetic
uugugcucagcacuauaucaguc

SEQ ID NO: 553310 - RNA, 24 nt, Artificial Sequence
  Synthetic
uuugugcucagcacuauaucaguc

SEQ ID NO: 553311 - RNA, 18 nt, Artificial Sequence
  Synthetic
cauuugagcuuaucaguc

SEQ ID NO: 553312 - RNA, 19 nt, Artificial Sequence
  Synthetic
acauuugagcuuaucaguc

SEQ ID NO: 553313 - RNA, 20 nt, Artificial Sequence
  Synthetic
uacauuugagcuuaucaguc

SEQ ID NO: 553314 - RNA, 21 nt, Artificial Sequence
  Synthetic
auacauuugagcuuaucaguc

SEQ ID NO: 553315 - RNA, 22 nt, Artificial Sequence
  Synthetic
gauacauuugagcuuaucaguc

SEQ ID NO: 553316 - RNA, 23 nt, Artificial Sequence
  Synthetic
ugauacauuugagcuuaucaguc

SEQ ID NO: 553317 - RNA, 24 nt, Artificial Sequence
  Synthetic
augauacauuugagcuuaucaguc

SEQ ID NO: 553318 - RNA, 18 nt, Artificial Sequence
  Synthetic
accaaagcuaccucaguc

SEQ ID NO: 553319 - RNA, 19 nt, Artificial Sequence
  Synthetic
uaccaaagcuaccucaguc

SEQ ID NO: 553320 - RNA, 20 nt, Artificial Sequence
  Synthetic
uuaccaaagcuaccucaguc

SEQ ID NO: 553321 - RNA, 21 nt, Artificial Sequence
  Synthetic
auuaccaaagcuaccucaguc

SEQ ID NO: 553322 - RNA, 22 nt, Artificial Sequence
  Synthetic
aauuaccaaagcuaccucaguc

SEQ ID NO: 553323 - RNA, 23 nt, Artificial Sequence
  Synthetic
gaauuaccaaagcuaccucaguc

SEQ ID NO: 553324 - RNA, 24 nt, Artificial Sequence
  Synthetic
ugaauuaccaaagcuaccucaguc

SEQ ID NO: 553325 - RNA, 18 nt, Artificial Sequence
  Synthetic
cuuuuccucuccucaguc

SEQ ID NO: 553326 - RNA, 19 nt, Artificial Sequence
  Synthetic
ccuuuuccucuccucaguc

SEQ ID NO: 553327 - RNA, 20 nt, Artificial Sequence
  Synthetic
accuuuuccucuccucaguc

SEQ ID NO: 553328 - RNA, 21 nt, Artificial Sequence
  Synthetic
aaccuuuuccucuccucaguc

SEQ ID NO: 553329 - RNA, 22 nt, Artificial Sequence
  Synthetic
caaccuuuuccucuccucaguc

SEQ ID NO: 553330 - RNA, 23 nt, Artificial Sequence
  Synthetic
acaaccuuuuccucuccucaguc

SEQ ID NO: 553331 - RNA, 24 nt, Artificial Sequence
  Synthetic
aacaaccuuuuccucuccucaguc

SEQ ID NO: 553332 - RNA, 18 nt, Artificial Sequence
  Synthetic
ggcuguugcaggucaguc

SEQ ID NO: 553333 - RNA, 19 nt, Artificial Sequence
  Synthetic
gggcuguugcaggucaguc

SEQ ID NO: 553334 - RNA, 20 nt, Artificial Sequence
  Synthetic
ugggcuguugcaggucaguc

SEQ ID NO: 553335 - RNA, 21 nt, Artificial Sequence
  Synthetic
cugggcuguugcaggucaguc

SEQ ID NO: 553336 - RNA, 22 nt, Artificial Sequence
  Synthetic
ccugggcuguugcaggucaguc

SEQ ID NO: 553337 - RNA, 23 nt, Artificial Sequence
  Synthetic
gccugggcuguugcaggucaguc

SEQ ID NO: 553338 - RNA, 24 nt, Artificial Sequence
  Synthetic
agccugggcuguugcaggucaguc

SEQ ID NO: 553339 - RNA, 18 nt, Artificial Sequence
  Synthetic
cccucuugagggucaguc

SEQ ID NO: 553340 - RNA, 19 nt, Artificial Sequence
  Synthetic
acccucuugagggucaguc

SEQ ID NO: 553341 - RNA, 20 nt, Artificial Sequence
  Synthetic
gacccucuugagggucaguc

SEQ ID NO: 553342 - RNA, 21 nt, Artificial Sequence
  Synthetic
agacccucuugagggucaguc

SEQ ID NO: 553343 - RNA, 22 nt, Artificial Sequence
  Synthetic
uagacccucuugagggucaguc

SEQ ID NO: 553344 - RNA, 23 nt, Artificial Sequence
  Synthetic
guagacccucuugagggucaguc

SEQ ID NO: 553345 - RNA, 24 nt, Artificial Sequence
  Synthetic
gguagacccucuugagggucaguc

SEQ ID NO: 553346 - RNA, 18 nt, Artificial Sequence
  Synthetic
cuccaauaguggucaguc

SEQ ID NO: 553347 - RNA, 19 nt, Artificial Sequence
  Synthetic
gcuccaauaguggucaguc

SEQ ID NO: 553348 - RNA, 20 nt, Artificial Sequence
  Synthetic
ggcuccaauaguggucaguc

SEQ ID NO: 553349 - RNA, 21 nt, Artificial Sequence
  Synthetic
aggcuccaauaguggucaguc

SEQ ID NO: 553350 - RNA, 22 nt, Artificial Sequence
  Synthetic
caggcuccaauaguggucaguc

SEQ ID NO: 553351 - RNA, 23 nt, Artificial Sequence
  Synthetic
acaggcuccaauaguggucaguc

SEQ ID NO: 553352 - RNA, 24 nt, Artificial Sequence
  Synthetic
uacaggcuccaauaguggucaguc

SEQ ID NO: 553353 - RNA, 18 nt, Artificial Sequence
  Synthetic
uuuauaaauuauucaguc

SEQ ID NO: 553354 - RNA, 19 nt, Artificial Sequence
  Synthetic
cuuuauaaauuauucaguc

SEQ ID NO: 553355 - RNA, 20 nt, Artificial Sequence
  Synthetic
ccuuuauaaauuauucaguc

SEQ ID NO: 553356 - RNA, 21 nt, Artificial Sequence
  Synthetic
uccuuuauaaauuauucaguc

SEQ ID NO: 553357 - RNA, 22 nt, Artificial Sequence
  Synthetic
guccuuuauaaauuauucaguc

SEQ ID NO: 553358 - RNA, 23 nt, Artificial Sequence
  Synthetic
uguccuuuauaaauuauucaguc

SEQ ID NO: 553359 - RNA, 24 nt, Artificial Sequence
  Synthetic
cuguccuuuauaaauuauucaguc

SEQ ID NO: 553360 - RNA, 18 nt, Artificial Sequence
  Synthetic
auuugcuuuucuucaguc

SEQ ID NO: 553361 - RNA, 19 nt, Artificial Sequence
  Synthetic
uauuugcuuuucuucaguc

SEQ ID NO: 553362 - RNA, 20 nt, Artificial Sequence
  Synthetic
uuauuugcuuuucuucaguc

SEQ ID NO: 553363 - RNA, 21 nt, Artificial Sequence
  Synthetic
auuauuugcuuuucuucaguc

SEQ ID NO: 553364 - RNA, 22 nt, Artificial Sequence
  Synthetic
uauuauuugcuuuucuucaguc

SEQ ID NO: 553365 - RNA, 23 nt, Artificial Sequence
  Synthetic
uuauuauuugcuuuucuucaguc

SEQ ID NO: 553366 - RNA, 24 nt, Artificial Sequence
  Synthetic
uuuauuauuugcuuuucuucaguc

SEQ ID NO: 553367 - RNA, 20 nt, Artificial Sequence
  Synthetic
uuuaccaaccaaaaagaguc

SEQ ID NO: 553368 - RNA, 21 nt, Artificial Sequence
  Synthetic
uuuuaccaaccaaaaagaguc

SEQ ID NO: 553369 - RNA, 22 nt, Artificial Sequence
  Synthetic
auuuuaccaaccaaaaagaguc

SEQ ID NO: 553370 - RNA, 23 nt, Artificial Sequence
  Synthetic
uauuuuaccaaccaaaaagaguc

SEQ ID NO: 553371 - RNA, 24 nt, Artificial Sequence
  Synthetic
auauuuuaccaaccaaaaagaguc

SEQ ID NO: 553372 - RNA, 18 nt, Artificial Sequence
  Synthetic
ugagaauaaagaagaguc

SEQ ID NO: 553373 - RNA, 19 nt, Artificial Sequence
  Synthetic
uugagaauaaagaagaguc

SEQ ID NO: 553374 - RNA, 20 nt, Artificial Sequence
  Synthetic
uuugagaauaaagaagaguc

SEQ ID NO: 553375 - RNA, 21 nt, Artificial Sequence
  Synthetic
cuuugagaauaaagaagaguc

SEQ ID NO: 553376 - RNA, 22 nt, Artificial Sequence
  Synthetic
ucuuugagaauaaagaagaguc

SEQ ID NO: 553377 - RNA, 23 nt, Artificial Sequence
  Synthetic
uucuuugagaauaaagaagaguc

SEQ ID NO: 553378 - RNA, 24 nt, Artificial Sequence
  Synthetic
uuucuuugagaauaaagaagaguc

SEQ ID NO: 553379 - RNA, 18 nt, Artificial Sequence
  Synthetic
ucaaaggagauaagaguc

SEQ ID NO: 553380 - RNA, 19 nt, Artificial Sequence
  Synthetic
uucaaaggagauaagaguc

SEQ ID NO: 553381 - RNA, 20 nt, Artificial Sequence
  Synthetic
uuucaaaggagauaagaguc

SEQ ID NO: 553382 - RNA, 21 nt, Artificial Sequence
  Synthetic
uuuucaaaggagauaagaguc

SEQ ID NO: 553383 - RNA, 22 nt, Artificial Sequence
  Synthetic
uuuuucaaaggagauaagaguc

SEQ ID NO: 553384 - RNA, 23 nt, Artificial Sequence
  Synthetic
guuuuucaaaggagauaagaguc

SEQ ID NO: 553385 - RNA, 24 nt, Artificial Sequence
  Synthetic
aguuuuucaaaggagauaagaguc

SEQ ID NO: 553386 - RNA, 18 nt, Artificial Sequence
  Synthetic
uuaugaugugacagaguc

SEQ ID NO: 553387 - RNA, 19 nt, Artificial Sequence
  Synthetic
uuuaugaugugacagaguc

SEQ ID NO: 553388 - RNA, 20 nt, Artificial Sequence
  Synthetic
cuuuaugaugugacagaguc

SEQ ID NO: 553389 - RNA, 21 nt, Artificial Sequence
  Synthetic
acuuuaugaugugacagaguc

SEQ ID NO: 553390 - RNA, 22 nt, Artificial Sequence
  Synthetic
gacuuuaugaugugacagaguc

SEQ ID NO: 553391 - RNA, 23 nt, Artificial Sequence
  Synthetic
agacuuuaugaugugacagaguc

SEQ ID NO: 553392 - RNA, 24 nt, Artificial Sequence
  Synthetic
uagacuuuaugaugugacagaguc

SEQ ID NO: 553393 - RNA, 18 nt, Artificial Sequence
  Synthetic
uggggcaugggcagaguc

SEQ ID NO: 553394 - RNA, 19 nt, Artificial Sequence
  Synthetic
auggggcaugggcagaguc

SEQ ID NO: 553395 - RNA, 20 nt, Artificial Sequence
  Synthetic
gauggggcaugggcagaguc

SEQ ID NO: 553396 - RNA, 21 nt, Artificial Sequence
  Synthetic
ggauggggcaugggcagaguc

SEQ ID NO: 553397 - RNA, 22 nt, Artificial Sequence
  Synthetic
aggauggggcaugggcagaguc

SEQ ID NO: 553398 - RNA, 23 nt, Artificial Sequence
  Synthetic
uaggauggggcaugggcagaguc

SEQ ID NO: 553399 - RNA, 24 nt, Artificial Sequence
  Synthetic
guaggauggggcaugggcagaguc

SEQ ID NO: 553400 - RNA, 18 nt, Artificial Sequence
  Synthetic
cauggggccaagagaguc

SEQ ID NO: 553401 - RNA, 19 nt, Artificial Sequence
  Synthetic
ucauggggccaagagaguc

SEQ ID NO: 553402 - RNA, 20 nt, Artificial Sequence
  Synthetic
cucauggggccaagagaguc

SEQ ID NO: 553403 - RNA, 21 nt, Artificial Sequence
  Synthetic
ccucauggggccaagagaguc

SEQ ID NO: 553404 - RNA, 22 nt, Artificial Sequence
  Synthetic
uccucauggggccaagagaguc

SEQ ID NO: 553405 - RNA, 23 nt, Artificial Sequence
  Synthetic
auccucauggggccaagagaguc

SEQ ID NO: 553406 - RNA, 24 nt, Artificial Sequence
  Synthetic
cauccucauggggccaagagaguc

SEQ ID NO: 553407 - RNA, 18 nt, Artificial Sequence
  Synthetic
gcaaauuuguugagaguc

SEQ ID NO: 553408 - RNA, 19 nt, Artificial Sequence
  Synthetic
agcaaauuuguugagaguc

SEQ ID NO: 553409 - RNA, 20 nt, Artificial Sequence
  Synthetic
aagcaaauuuguugagaguc

SEQ ID NO: 553410 - RNA, 21 nt, Artificial Sequence
  Synthetic
aaagcaaauuuguugagaguc

SEQ ID NO: 553411 - RNA, 22 nt, Artificial Sequence
  Synthetic
caaagcaaauuuguugagaguc

SEQ ID NO: 553412 - RNA, 23 nt, Artificial Sequence
  Synthetic
gcaaagcaaauuuguugagaguc

SEQ ID NO: 553413 - RNA, 24 nt, Artificial Sequence
  Synthetic
agcaaagcaaauuuguugagaguc

SEQ ID NO: 553414 - RNA, 18 nt, Artificial Sequence
  Synthetic
caauauauuuauagaguc

SEQ ID NO: 553415 - RNA, 19 nt, Artificial Sequence
  Synthetic
ucaauauauuuauagaguc

SEQ ID NO: 553416 - RNA, 20 nt, Artificial Sequence
  Synthetic
gucaauauauuuauagaguc

SEQ ID NO: 553417 - RNA, 21 nt, Artificial Sequence
  Synthetic
agucaauauauuuauagaguc

SEQ ID NO: 553418 - RNA, 22 nt, Artificial Sequence
  Synthetic
cagucaauauauuuauagaguc

SEQ ID NO: 553419 - RNA, 23 nt, Artificial Sequence
  Synthetic
ucagucaauauauuuauagaguc

SEQ ID NO: 553420 - RNA, 24 nt, Artificial Sequence
  Synthetic
cucagucaauauauuuauagaguc

SEQ ID NO: 553421 - RNA, 18 nt, Artificial Sequence
  Synthetic
gauuaaaaaacuagaguc

SEQ ID NO: 553422 - RNA, 19 nt, Artificial Sequence
  Synthetic
agauuaaaaaacuagaguc

SEQ ID NO: 553423 - RNA, 20 nt, Artificial Sequence
  Synthetic
cagauuaaaaaacuagaguc

SEQ ID NO: 553424 - RNA, 21 nt, Artificial Sequence
  Synthetic
ucagauuaaaaaacuagaguc

SEQ ID NO: 553425 - RNA, 22 nt, Artificial Sequence
  Synthetic
uucagauuaaaaaacuagaguc

SEQ ID NO: 553426 - RNA, 23 nt, Artificial Sequence
  Synthetic
uuucagauuaaaaaacuagaguc

SEQ ID NO: 553427 - RNA, 24 nt, Artificial Sequence
  Synthetic
uuuucagauuaaaaaacuagaguc

SEQ ID NO: 553428 - RNA, 18 nt, Artificial Sequence
  Synthetic
guuacaggaacuagaguc

SEQ ID NO: 553429 - RNA, 19 nt, Artificial Sequence
  Synthetic
uguuacaggaacuagaguc

SEQ ID NO: 553430 - RNA, 20 nt, Artificial Sequence
  Synthetic
uuguuacaggaacuagaguc

SEQ ID NO: 553431 - RNA, 21 nt, Artificial Sequence
  Synthetic
uuuguuacaggaacuagaguc

SEQ ID NO: 553432 - RNA, 22 nt, Artificial Sequence
  Synthetic
auuuguuacaggaacuagaguc

SEQ ID NO: 553433 - RNA, 23 nt, Artificial Sequence
  Synthetic
cauuuguuacaggaacuagaguc

SEQ ID NO: 553434 - RNA, 24 nt, Artificial Sequence
  Synthetic
ucauuuguuacaggaacuagaguc

SEQ ID NO: 553435 - RNA, 18 nt, Artificial Sequence
  Synthetic
acucccugaacuagaguc

SEQ ID NO: 553436 - RNA, 19 nt, Artificial Sequence
  Synthetic
uacucccugaacuagaguc

SEQ ID NO: 553437 - RNA, 20 nt, Artificial Sequence
  Synthetic
auacucccugaacuagaguc

SEQ ID NO: 553438 - RNA, 21 nt, Artificial Sequence
  Synthetic
aauacucccugaacuagaguc

SEQ ID NO: 553439 - RNA, 22 nt, Artificial Sequence
  Synthetic
aaauacucccugaacuagaguc

SEQ ID NO: 553440 - RNA, 23 nt, Artificial Sequence
  Synthetic
uaaauacucccugaacuagaguc

SEQ ID NO: 553441 - RNA, 24 nt, Artificial Sequence
  Synthetic
auaaauacucccugaacuagaguc

SEQ ID NO: 553442 - RNA, 18 nt, Artificial Sequence
  Synthetic
aaauauuuaguuagaguc

SEQ ID NO: 553443 - RNA, 19 nt, Artificial Sequence
  Synthetic
aaaauauuuaguuagaguc

SEQ ID NO: 553444 - RNA, 20 nt, Artificial Sequence
  Synthetic
gaaaauauuuaguuagaguc

SEQ ID NO: 553445 - RNA, 21 nt, Artificial Sequence
  Synthetic
agaaaauauuuaguuagaguc

SEQ ID NO: 553446 - RNA, 22 nt, Artificial Sequence
  Synthetic
gagaaaauauuuaguuagaguc

SEQ ID NO: 553447 - RNA, 23 nt, Artificial Sequence
  Synthetic
ugagaaaauauuuaguuagaguc

SEQ ID NO: 553448 - RNA, 24 nt, Artificial Sequence
  Synthetic
augagaaaauauuuaguuagaguc

SEQ ID NO: 553449 - RNA, 18 nt, Artificial Sequence
  Synthetic
guaugacgcucccgaguc

SEQ ID NO: 553450 - RNA, 19 nt, Artificial Sequence
  Synthetic
uguaugacgcucccgaguc

SEQ ID NO: 553451 - RNA, 20 nt, Artificial Sequence
  Synthetic
auguaugacgcucccgaguc

SEQ ID NO: 553452 - RNA, 21 nt, Artificial Sequence
  Synthetic
cauguaugacgcucccgaguc

SEQ ID NO: 553453 - RNA, 22 nt, Artificial Sequence
  Synthetic
gcauguaugacgcucccgaguc

SEQ ID NO: 553454 - RNA, 23 nt, Artificial Sequence
  Synthetic
agcauguaugacgcucccgaguc

SEQ ID NO: 553455 - RNA, 24 nt, Artificial Sequence
  Synthetic
cagcauguaugacgcucccgaguc

SEQ ID NO: 553456 - RNA, 18 nt, Artificial Sequence
  Synthetic
cugcuaaaaugccgaguc

SEQ ID NO: 553457 - RNA, 19 nt, Artificial Sequence
  Synthetic
gcugcuaaaaugccgaguc

SEQ ID NO: 553458 - RNA, 20 nt, Artificial Sequence
  Synthetic
cgcugcuaaaaugccgaguc

SEQ ID NO: 553459 - RNA, 21 nt, Artificial Sequence
  Synthetic
acgcugcuaaaaugccgaguc

SEQ ID NO: 553460 - RNA, 22 nt, Artificial Sequence
  Synthetic
aacgcugcuaaaaugccgaguc

SEQ ID NO: 553461 - RNA, 23 nt, Artificial Sequence
  Synthetic
aaacgcugcuaaaaugccgaguc

SEQ ID NO: 553462 - RNA, 24 nt, Artificial Sequence
  Synthetic
gaaacgcugcuaaaaugccgaguc

SEQ ID NO: 553463 - RNA, 18 nt, Artificial Sequence
  Synthetic
aaggauaguggaggaguc

SEQ ID NO: 553464 - RNA, 19 nt, Artificial Sequence
  Synthetic
gaaggauaguggaggaguc

SEQ ID NO: 553465 - RNA, 20 nt, Artificial Sequence
  Synthetic
ggaaggauaguggaggaguc

SEQ ID NO: 553466 - RNA, 21 nt, Artificial Sequence
  Synthetic
gggaaggauaguggaggaguc

SEQ ID NO: 553467 - RNA, 22 nt, Artificial Sequence
  Synthetic
ugggaaggauaguggaggaguc

SEQ ID NO: 553468 - RNA, 23 nt, Artificial Sequence
  Synthetic
cugggaaggauaguggaggaguc

SEQ ID NO: 553469 - RNA, 24 nt, Artificial Sequence
  Synthetic
gcugggaaggauaguggaggaguc

SEQ ID NO: 553470 - RNA, 18 nt, Artificial Sequence
  Synthetic
ucuuacuuucuaggaguc

SEQ ID NO: 553471 - RNA, 19 nt, Artificial Sequence
  Synthetic
uucuuacuuucuaggaguc

SEQ ID NO: 553472 - RNA, 20 nt, Artificial Sequence
  Synthetic
uuucuuacuuucuaggaguc

SEQ ID NO: 553473 - RNA, 21 nt, Artificial Sequence
  Synthetic
uuuucuuacuuucuaggaguc

SEQ ID NO: 553474 - RNA, 22 nt, Artificial Sequence
  Synthetic
guuuucuuacuuucuaggaguc

SEQ ID NO: 553475 - RNA, 23 nt, Artificial Sequence
  Synthetic
aguuuucuuacuuucuaggaguc

SEQ ID NO: 553476 - RNA, 24 nt, Artificial Sequence
  Synthetic
uaguuuucuuacuuucuaggaguc

SEQ ID NO: 553477 - RNA, 18 nt, Artificial Sequence
  Synthetic
cuacaaagucauggaguc

SEQ ID NO: 553478 - RNA, 19 nt, Artificial Sequence
  Synthetic
acuacaaagucauggaguc

SEQ ID NO: 553479 - RNA, 20 nt, Artificial Sequence
  Synthetic
cacuacaaagucauggaguc

SEQ ID NO: 553480 - RNA, 21 nt, Artificial Sequence
  Synthetic
acacuacaaagucauggaguc

SEQ ID NO: 553481 - RNA, 22 nt, Artificial Sequence
  Synthetic
uacacuacaaagucauggaguc

SEQ ID NO: 553482 - RNA, 23 nt, Artificial Sequence
  Synthetic
auacacuacaaagucauggaguc

SEQ ID NO: 553483 - RNA, 24 nt, Artificial Sequence
  Synthetic
aauacacuacaaagucauggaguc

SEQ ID NO: 553484 - RNA, 18 nt, Artificial Sequence
  Synthetic
ucaaaauuggcuggaguc

SEQ ID NO: 553485 - RNA, 19 nt, Artificial Sequence
  Synthetic
gucaaaauuggcuggaguc

SEQ ID NO: 553486 - RNA, 20 nt, Artificial Sequence
  Synthetic
ugucaaaauuggcuggaguc

SEQ ID NO: 553487 - RNA, 21 nt, Artificial Sequence
  Synthetic
cugucaaaauuggcuggaguc

SEQ ID NO: 553488 - RNA, 22 nt, Artificial Sequence
  Synthetic
gcugucaaaauuggcuggaguc

SEQ ID NO: 553489 - RNA, 23 nt, Artificial Sequence
  Synthetic
ugcugucaaaauuggcuggaguc

SEQ ID NO: 553490 - RNA, 24 nt, Artificial Sequence
  Synthetic
augcugucaaaauuggcuggaguc

SEQ ID NO: 553491 - RNA, 18 nt, Artificial Sequence
  Synthetic
aguggggacgguggaguc

SEQ ID NO: 553492 - RNA, 19 nt, Artificial Sequence
  Synthetic
aaguggggacgguggaguc

SEQ ID NO: 553493 - RNA, 20 nt, Artificial Sequence
  Synthetic
aaaguggggacgguggaguc

SEQ ID NO: 553494 - RNA, 21 nt, Artificial Sequence
  Synthetic
uaaaguggggacgguggaguc

SEQ ID NO: 553495 - RNA, 22 nt, Artificial Sequence
  Synthetic
guaaaguggggacgguggaguc

SEQ ID NO: 553496 - RNA, 23 nt, Artificial Sequence
  Synthetic
aguaaaguggggacgguggaguc

SEQ ID NO: 553497 - RNA, 24 nt, Artificial Sequence
  Synthetic
caguaaaguggggacgguggaguc

SEQ ID NO: 553498 - RNA, 18 nt, Artificial Sequence
  Synthetic
uacaaggcaugcugaguc

SEQ ID NO: 553499 - RNA, 19 nt, Artificial Sequence
  Synthetic
guacaaggcaugcugaguc

SEQ ID NO: 553500 - RNA, 20 nt, Artificial Sequence
  Synthetic
aguacaaggcaugcugaguc

SEQ ID NO: 553501 - RNA, 21 nt, Artificial Sequence
  Synthetic
gaguacaaggcaugcugaguc

SEQ ID NO: 553502 - RNA, 22 nt, Artificial Sequence
  Synthetic
agaguacaaggcaugcugaguc

SEQ ID NO: 553503 - RNA, 23 nt, Artificial Sequence
  Synthetic
cagaguacaaggcaugcugaguc

SEQ ID NO: 553504 - RNA, 24 nt, Artificial Sequence
  Synthetic
ucagaguacaaggcaugcugaguc

SEQ ID NO: 553505 - RNA, 18 nt, Artificial Sequence
  Synthetic
aagauaaugaucugaguc

SEQ ID NO: 553506 - RNA, 19 nt, Artificial Sequence
  Synthetic
gaagauaaugaucugaguc

SEQ ID NO: 553507 - RNA, 20 nt, Artificial Sequence
  Synthetic
agaagauaaugaucugaguc

SEQ ID NO: 553508 - RNA, 21 nt, Artificial Sequence
  Synthetic
gagaagauaaugaucugaguc

SEQ ID NO: 553509 - RNA, 22 nt, Artificial Sequence
  Synthetic
agagaagauaaugaucugaguc

SEQ ID NO: 553510 - RNA, 23 nt, Artificial Sequence
  Synthetic
cagagaagauaaugaucugaguc

SEQ ID NO: 553511 - RNA, 24 nt, Artificial Sequence
  Synthetic
ccagagaagauaaugaucugaguc

SEQ ID NO: 553512 - RNA, 18 nt, Artificial Sequence
  Synthetic
aagugagagacuugaguc

SEQ ID NO: 553513 - RNA, 19 nt, Artificial Sequence
  Synthetic
caagugagagacuugaguc

SEQ ID NO: 553514 - RNA, 20 nt, Artificial Sequence
  Synthetic
ucaagugagagacuugaguc

SEQ ID NO: 553515 - RNA, 21 nt, Artificial Sequence
  Synthetic
aucaagugagagacuugaguc

SEQ ID NO: 553516 - RNA, 22 nt, Artificial Sequence
  Synthetic
caucaagugagagacuugaguc

SEQ ID NO: 553517 - RNA, 23 nt, Artificial Sequence
  Synthetic
gcaucaagugagagacuugaguc

SEQ ID NO: 553518 - RNA, 24 nt, Artificial Sequence
  Synthetic
ugcaucaagugagagacuugaguc

SEQ ID NO: 553519 - RNA, 18 nt, Artificial Sequence
  Synthetic
gugugagauguuugaguc

SEQ ID NO: 553520 - RNA, 19 nt, Artificial Sequence
  Synthetic
ggugugagauguuugaguc

SEQ ID NO: 553521 - RNA, 20 nt, Artificial Sequence
  Synthetic
uggugugagauguuugaguc

SEQ ID NO: 553522 - RNA, 21 nt, Artificial Sequence
  Synthetic
cuggugugagauguuugaguc

SEQ ID NO: 553523 - RNA, 22 nt, Artificial Sequence
  Synthetic
ccuggugugagauguuugaguc

SEQ ID NO: 553524 - RNA, 23 nt, Artificial Sequence
  Synthetic
gccuggugugagauguuugaguc

SEQ ID NO: 553525 - RNA, 24 nt, Artificial Sequence
  Synthetic
ggccuggugugagauguuugaguc

SEQ ID NO: 553526 - RNA, 18 nt, Artificial Sequence
  Synthetic
gcugauaaacuaauaguc

SEQ ID NO: 553527 - RNA, 19 nt, Artificial Sequence
  Synthetic
ugcugauaaacuaauaguc

SEQ ID NO: 553528 - RNA, 20 nt, Artificial Sequence
  Synthetic
gugcugauaaacuaauaguc

SEQ ID NO: 553529 - RNA, 21 nt, Artificial Sequence
  Synthetic
agugcugauaaacuaauaguc

SEQ ID NO: 553530 - RNA, 22 nt, Artificial Sequence
  Synthetic
cagugcugauaaacuaauaguc

SEQ ID NO: 553531 - RNA, 23 nt, Artificial Sequence
  Synthetic
acagugcugauaaacuaauaguc

SEQ ID NO: 553532 - RNA, 24 nt, Artificial Sequence
  Synthetic
aacagugcugauaaacuaauaguc

SEQ ID NO: 553533 - RNA, 18 nt, Artificial Sequence
  Synthetic
aguaagguaaacauaguc

SEQ ID NO: 553534 - RNA, 19 nt, Artificial Sequence
  Synthetic
aaguaagguaaacauaguc

SEQ ID NO: 553535 - RNA, 20 nt, Artificial Sequence
  Synthetic
gaaguaagguaaacauaguc

SEQ ID NO: 553536 - RNA, 21 nt, Artificial Sequence
  Synthetic
ggaaguaagguaaacauaguc

SEQ ID NO: 553537 - RNA, 22 nt, Artificial Sequence
  Synthetic
aggaaguaagguaaacauaguc

SEQ ID NO: 553538 - RNA, 23 nt, Artificial Sequence
  Synthetic
gaggaaguaagguaaacauaguc

SEQ ID NO: 553539 - RNA, 24 nt, Artificial Sequence
  Synthetic
ggaggaaguaagguaaacauaguc

SEQ ID NO: 553540 - RNA, 18 nt, Artificial Sequence
  Synthetic
caauguuaaaauauaguc

SEQ ID NO: 553541 - RNA, 19 nt, Artificial Sequence
  Synthetic
ucaauguuaaaauauaguc

SEQ ID NO: 553542 - RNA, 20 nt, Artificial Sequence
  Synthetic
aucaauguuaaaauauaguc

SEQ ID NO: 553543 - RNA, 21 nt, Artificial Sequence
  Synthetic
gaucaauguuaaaauauaguc

SEQ ID NO: 553544 - RNA, 22 nt, Artificial Sequence
  Synthetic
ggaucaauguuaaaauauaguc

SEQ ID NO: 553545 - RNA, 23 nt, Artificial Sequence
  Synthetic
aggaucaauguuaaaauauaguc

SEQ ID NO: 553546 - RNA, 24 nt, Artificial Sequence
  Synthetic
caggaucaauguuaaaauauaguc

SEQ ID NO: 553547 - RNA, 18 nt, Artificial Sequence
  Synthetic
ucuguauuccauauaguc

SEQ ID NO: 553548 - RNA, 19 nt, Artificial Sequence
  Synthetic
aucuguauuccauauaguc

SEQ ID NO: 553549 - RNA, 20 nt, Artificial Sequence
  Synthetic
uaucuguauuccauauaguc

SEQ ID NO: 553550 - RNA, 21 nt, Artificial Sequence
  Synthetic
auaucuguauuccauauaguc

SEQ ID NO: 553551 - RNA, 22 nt, Artificial Sequence
  Synthetic
uauaucuguauuccauauaguc

SEQ ID NO: 553552 - RNA, 23 nt, Artificial Sequence
  Synthetic
uuauaucuguauuccauauaguc

SEQ ID NO: 553553 - RNA, 24 nt, Artificial Sequence
  Synthetic
auuauaucuguauuccauauaguc

SEQ ID NO: 553554 - RNA, 18 nt, Artificial Sequence
  Synthetic
uauaugggacuuauaguc

SEQ ID NO: 553555 - RNA, 19 nt, Artificial Sequence
  Synthetic
auauaugggacuuauaguc

SEQ ID NO: 553556 - RNA, 20 nt, Artificial Sequence
  Synthetic
aauauaugggacuuauaguc

SEQ ID NO: 553557 - RNA, 21 nt, Artificial Sequence
  Synthetic
aaauauaugggacuuauaguc

SEQ ID NO: 553558 - RNA, 22 nt, Artificial Sequence
  Synthetic
uaaauauaugggacuuauaguc

SEQ ID NO: 553559 - RNA, 23 nt, Artificial Sequence
  Synthetic
cuaaauauaugggacuuauaguc

SEQ ID NO: 553560 - RNA, 24 nt, Artificial Sequence
  Synthetic
ucuaaauauaugggacuuauaguc

SEQ ID NO: 553561 - RNA, 18 nt, Artificial Sequence
  Synthetic
cuucaugcugagcuaguc

SEQ ID NO: 553562 - RNA, 19 nt, Artificial Sequence
  Synthetic
ucuucaugcugagcuaguc

SEQ ID NO: 553563 - RNA, 20 nt, Artificial Sequence
  Synthetic
uucuucaugcugagcuaguc

SEQ ID NO: 553564 - RNA, 21 nt, Artificial Sequence
  Synthetic
auucuucaugcugagcuaguc

SEQ ID NO: 553565 - RNA, 22 nt, Artificial Sequence
  Synthetic
cauucuucaugcugagcuaguc

SEQ ID NO: 553566 - RNA, 23 nt, Artificial Sequence
  Synthetic
gcauucuucaugcugagcuaguc

SEQ ID NO: 553567 - RNA, 24 nt, Artificial Sequence
  Synthetic
agcauucuucaugcugagcuaguc

SEQ ID NO: 553568 - RNA, 18 nt, Artificial Sequence
  Synthetic
uuccuauucaggcuaguc

SEQ ID NO: 553569 - RNA, 19 nt, Artificial Sequence
  Synthetic
guuccuauucaggcuaguc

SEQ ID NO: 553570 - RNA, 20 nt, Artificial Sequence
  Synthetic
aguuccuauucaggcuaguc

SEQ ID NO: 553571 - RNA, 21 nt, Artificial Sequence
  Synthetic
aaguuccuauucaggcuaguc

SEQ ID NO: 553572 - RNA, 22 nt, Artificial Sequence
  Synthetic
caaguuccuauucaggcuaguc

SEQ ID NO: 553573 - RNA, 23 nt, Artificial Sequence
  Synthetic
acaaguuccuauucaggcuaguc

SEQ ID NO: 553574 - RNA, 24 nt, Artificial Sequence
  Synthetic
cacaaguuccuauucaggcuaguc

SEQ ID NO: 553575 - RNA, 18 nt, Artificial Sequence
  Synthetic
uaguaguaaaugcuaguc

SEQ ID NO: 553576 - RNA, 19 nt, Artificial Sequence
  Synthetic
auaguaguaaaugcuaguc

SEQ ID NO: 553577 - RNA, 20 nt, Artificial Sequence
  Synthetic
uauaguaguaaaugcuaguc

SEQ ID NO: 553578 - RNA, 21 nt, Artificial Sequence
  Synthetic
auauaguaguaaaugcuaguc

SEQ ID NO: 553579 - RNA, 22 nt, Artificial Sequence
  Synthetic
uauauaguaguaaaugcuaguc

SEQ ID NO: 553580 - RNA, 23 nt, Artificial Sequence
  Synthetic
auauauaguaguaaaugcuaguc

SEQ ID NO: 553581 - RNA, 24 nt, Artificial Sequence
  Synthetic
aauauauaguaguaaaugcuaguc

SEQ ID NO: 553582 - RNA, 18 nt, Artificial Sequence
  Synthetic
augccgauacugcuaguc

SEQ ID NO: 553583 - RNA, 19 nt, Artificial Sequence
  Synthetic
gaugccgauacugcuaguc

SEQ ID NO: 553584 - RNA, 20 nt, Artificial Sequence
  Synthetic
ugaugccgauacugcuaguc

SEQ ID NO: 553585 - RNA, 21 nt, Artificial Sequence
  Synthetic
gugaugccgauacugcuaguc

SEQ ID NO: 553586 - RNA, 22 nt, Artificial Sequence
  Synthetic
agugaugccgauacugcuaguc

SEQ ID NO: 553587 - RNA, 23 nt, Artificial Sequence
  Synthetic
aagugaugccgauacugcuaguc

SEQ ID NO: 553588 - RNA, 24 nt, Artificial Sequence
  Synthetic
caagugaugccgauacugcuaguc

SEQ ID NO: 553589 - RNA, 18 nt, Artificial Sequence
  Synthetic
aauuaagagcugcuaguc

SEQ ID NO: 553590 - RNA, 19 nt, Artificial Sequence
  Synthetic
aaauuaagagcugcuaguc

SEQ ID NO: 553591 - RNA, 20 nt, Artificial Sequence
  Synthetic
aaaauuaagagcugcuaguc

SEQ ID NO: 553592 - RNA, 21 nt, Artificial Sequence
  Synthetic
caaaauuaagagcugcuaguc

SEQ ID NO: 553593 - RNA, 22 nt, Artificial Sequence
  Synthetic
ucaaaauuaagagcugcuaguc

SEQ ID NO: 553594 - RNA, 23 nt, Artificial Sequence
  Synthetic
uucaaaauuaagagcugcuaguc

SEQ ID NO: 553595 - RNA, 24 nt, Artificial Sequence
  Synthetic
guucaaaauuaagagcugcuaguc

SEQ ID NO: 553596 - RNA, 18 nt, Artificial Sequence
  Synthetic
aaggauagaagucuaguc

SEQ ID NO: 553597 - RNA, 19 nt, Artificial Sequence
  Synthetic
aaaggauagaagucuaguc

SEQ ID NO: 553598 - RNA, 20 nt, Artificial Sequence
  Synthetic
aaaaggauagaagucuaguc

SEQ ID NO: 553599 - RNA, 21 nt, Artificial Sequence
  Synthetic
gaaaaggauagaagucuaguc

SEQ ID NO: 553600 - RNA, 22 nt, Artificial Sequence
  Synthetic
agaaaaggauagaagucuaguc

SEQ ID NO: 553601 - RNA, 23 nt, Artificial Sequence
  Synthetic
aagaaaaggauagaagucuaguc

SEQ ID NO: 553602 - RNA, 24 nt, Artificial Sequence
  Synthetic
caagaaaaggauagaagucuaguc

SEQ ID NO: 553603 - RNA, 18 nt, Artificial Sequence
  Synthetic
cugaugcaaugucuaguc

SEQ ID NO: 553604 - RNA, 19 nt, Artificial Sequence
  Synthetic
acugaugcaaugucuaguc

SEQ ID NO: 553605 - RNA, 20 nt, Artificial Sequence
  Synthetic
gacugaugcaaugucuaguc

SEQ ID NO: 553606 - RNA, 21 nt, Artificial Sequence
  Synthetic
agacugaugcaaugucuaguc

SEQ ID NO: 553607 - RNA, 22 nt, Artificial Sequence
  Synthetic
cagacugaugcaaugucuaguc

SEQ ID NO: 553608 - RNA, 23 nt, Artificial Sequence
  Synthetic
gcagacugaugcaaugucuaguc

SEQ ID NO: 553609 - RNA, 24 nt, Artificial Sequence
  Synthetic
ggcagacugaugcaaugucuaguc

SEQ ID NO: 553610 - RNA, 18 nt, Artificial Sequence
  Synthetic
uagaaacagaaaguaguc

SEQ ID NO: 553611 - RNA, 19 nt, Artificial Sequence
  Synthetic
auagaaacagaaaguaguc

SEQ ID NO: 553612 - RNA, 20 nt, Artificial Sequence
  Synthetic
cauagaaacagaaaguaguc

SEQ ID NO: 553613 - RNA, 21 nt, Artificial Sequence
  Synthetic
ucauagaaacagaaaguaguc

SEQ ID NO: 553614 - RNA, 22 nt, Artificial Sequence
  Synthetic
uucauagaaacagaaaguaguc

SEQ ID NO: 553615 - RNA, 23 nt, Artificial Sequence
  Synthetic
auucauagaaacagaaaguaguc

SEQ ID NO: 553616 - RNA, 24 nt, Artificial Sequence
  Synthetic
aauucauagaaacagaaaguaguc

SEQ ID NO: 553617 - RNA, 18 nt, Artificial Sequence
  Synthetic
aaguuauuugaaguaguc

SEQ ID NO: 553618 - RNA, 19 nt, Artificial Sequence
  Synthetic
gaaguuauuugaaguaguc

SEQ ID NO: 553619 - RNA, 20 nt, Artificial Sequence
  Synthetic
ggaaguuauuugaaguaguc

SEQ ID NO: 553620 - RNA, 21 nt, Artificial Sequence
  Synthetic
aggaaguuauuugaaguaguc

SEQ ID NO: 553621 - RNA, 22 nt, Artificial Sequence
  Synthetic
uaggaaguuauuugaaguaguc

SEQ ID NO: 553622 - RNA, 23 nt, Artificial Sequence
  Synthetic
cuaggaaguuauuugaaguaguc

SEQ ID NO: 553623 - RNA, 24 nt, Artificial Sequence
  Synthetic
ucuaggaaguuauuugaaguaguc

SEQ ID NO: 553624 - RNA, 18 nt, Artificial Sequence
  Synthetic
cauuauuucauaguaguc

SEQ ID NO: 553625 - RNA, 19 nt, Artificial Sequence
  Synthetic
acauuauuucauaguaguc

SEQ ID NO: 553626 - RNA, 20 nt, Artificial Sequence
  Synthetic
aacauuauuucauaguaguc

SEQ ID NO: 553627 - RNA, 21 nt, Artificial Sequence
  Synthetic
uaacauuauuucauaguaguc

SEQ ID NO: 553628 - RNA, 22 nt, Artificial Sequence
  Synthetic
auaacauuauuucauaguaguc

SEQ ID NO: 553629 - RNA, 23 nt, Artificial Sequence
  Synthetic
aauaacauuauuucauaguaguc

SEQ ID NO: 553630 - RNA, 24 nt, Artificial Sequence
  Synthetic
uaauaacauuauuucauaguaguc

SEQ ID NO: 553631 - RNA, 18 nt, Artificial Sequence
  Synthetic
guacagcaauuuguaguc

SEQ ID NO: 553632 - RNA, 19 nt, Artificial Sequence
  Synthetic
uguacagcaauuuguaguc

SEQ ID NO: 553633 - RNA, 20 nt, Artificial Sequence
  Synthetic
cuguacagcaauuuguaguc

SEQ ID NO: 553634 - RNA, 21 nt, Artificial Sequence
  Synthetic
gcuguacagcaauuuguaguc

SEQ ID NO: 553635 - RNA, 22 nt, Artificial Sequence
  Synthetic
ggcuguacagcaauuuguaguc

SEQ ID NO: 553636 - RNA, 23 nt, Artificial Sequence
  Synthetic
uggcuguacagcaauuuguaguc

SEQ ID NO: 553637 - RNA, 24 nt, Artificial Sequence
  Synthetic
auggcuguacagcaauuuguaguc

SEQ ID NO: 553638 - RNA, 18 nt, Artificial Sequence
  Synthetic
uuauuuuauuaauuaguc

SEQ ID NO: 553639 - RNA, 19 nt, Artificial Sequence
  Synthetic
auuauuuuauuaauuaguc

SEQ ID NO: 553640 - RNA, 20 nt, Artificial Sequence
  Synthetic
cauuauuuuauuaauuaguc

SEQ ID NO: 553641 - RNA, 21 nt, Artificial Sequence
  Synthetic
gcauuauuuuauuaauuaguc

SEQ ID NO: 553642 - RNA, 22 nt, Artificial Sequence
  Synthetic
agcauuauuuuauuaauuaguc

SEQ ID NO: 553643 - RNA, 23 nt, Artificial Sequence
  Synthetic
gagcauuauuuuauuaauuaguc

SEQ ID NO: 553644 - RNA, 24 nt, Artificial Sequence
  Synthetic
ggagcauuauuuuauuaauuaguc

SEQ ID NO: 553645 - RNA, 18 nt, Artificial Sequence
  Synthetic
uaaugccucugauuaguc

SEQ ID NO: 553646 - RNA, 19 nt, Artificial Sequence
  Synthetic
auaaugccucugauuaguc

SEQ ID NO: 553647 - RNA, 20 nt, Artificial Sequence
  Synthetic
aauaaugccucugauuaguc

SEQ ID NO: 553648 - RNA, 21 nt, Artificial Sequence
  Synthetic
aaauaaugccucugauuaguc

SEQ ID NO: 553649 - RNA, 22 nt, Artificial Sequence
  Synthetic
aaaauaaugccucugauuaguc

SEQ ID NO: 553650 - RNA, 23 nt, Artificial Sequence
  Synthetic
aaaaauaaugccucugauuaguc

SEQ ID NO: 553651 - RNA, 24 nt, Artificial Sequence
  Synthetic
aaaaaauaaugccucugauuaguc

SEQ ID NO: 553652 - RNA, 18 nt, Artificial Sequence
  Synthetic
ugcuaaguaaacuuaguc

SEQ ID NO: 553653 - RNA, 19 nt, Artificial Sequence
  Synthetic
uugcuaaguaaacuuaguc

SEQ ID NO: 553654 - RNA, 20 nt, Artificial Sequence
  Synthetic
uuugcuaaguaaacuuaguc

SEQ ID NO: 553655 - RNA, 21 nt, Artificial Sequence
  Synthetic
uuuugcuaaguaaacuuaguc

SEQ ID NO: 553656 - RNA, 22 nt, Artificial Sequence
  Synthetic
guuuugcuaaguaaacuuaguc

SEQ ID NO: 553657 - RNA, 23 nt, Artificial Sequence
  Synthetic
uguuuugcuaaguaaacuuaguc

SEQ ID NO: 553658 - RNA, 24 nt, Artificial Sequence
  Synthetic
uuguuuugcuaaguaaacuuaguc

SEQ ID NO: 553659 - RNA, 18 nt, Artificial Sequence
  Synthetic
aguaagaaggacuuaguc

SEQ ID NO: 553660 - RNA, 19 nt, Artificial Sequence
  Synthetic
uaguaagaaggacuuaguc

SEQ ID NO: 553661 - RNA, 20 nt, Artificial Sequence
  Synthetic
uuaguaagaaggacuuaguc

SEQ ID NO: 553662 - RNA, 21 nt, Artificial Sequence
  Synthetic
guuaguaagaaggacuuaguc

SEQ ID NO: 553663 - RNA, 22 nt, Artificial Sequence
  Synthetic
aguuaguaagaaggacuuaguc

SEQ ID NO: 553664 - RNA, 23 nt, Artificial Sequence
  Synthetic
gaguuaguaagaaggacuuaguc

SEQ ID NO: 553665 - RNA, 24 nt, Artificial Sequence
  Synthetic
ugaguuaguaagaaggacuuaguc

SEQ ID NO: 553666 - RNA, 18 nt, Artificial Sequence
  Synthetic
uuuauugagcgcuuaguc

SEQ ID NO: 553667 - RNA, 19 nt, Artificial Sequence
  Synthetic
auuuauugagcgcuuaguc

SEQ ID NO: 553668 - RNA, 20 nt, Artificial Sequence
  Synthetic
cauuuauugagcgcuuaguc

SEQ ID NO: 553669 - RNA, 21 nt, Artificial Sequence
  Synthetic
acauuuauugagcgcuuaguc

SEQ ID NO: 553670 - RNA, 22 nt, Artificial Sequence
  Synthetic
aacauuuauugagcgcuuaguc

SEQ ID NO: 553671 - RNA, 23 nt, Artificial Sequence
  Synthetic
aaacauuuauugagcgcuuaguc

SEQ ID NO: 553672 - RNA, 24 nt, Artificial Sequence
  Synthetic
uaaacauuuauugagcgcuuaguc

SEQ ID NO: 553673 - RNA, 18 nt, Artificial Sequence
  Synthetic
uuucuuccugguuuaguc

SEQ ID NO: 553674 - RNA, 19 nt, Artificial Sequence
  Synthetic
auuucuuccugguuuaguc

SEQ ID NO: 553675 - RNA, 20 nt, Artificial Sequence
  Synthetic
gauuucuuccugguuuaguc

SEQ ID NO: 553676 - RNA, 21 nt, Artificial Sequence
  Synthetic
cgauuucuuccugguuuaguc

SEQ ID NO: 553677 - RNA, 22 nt, Artificial Sequence
  Synthetic
ucgauuucuuccugguuuaguc

SEQ ID NO: 553678 - RNA, 23 nt, Artificial Sequence
  Synthetic
uucgauuucuuccugguuuaguc

SEQ ID NO: 553679 - RNA, 24 nt, Artificial Sequence
  Synthetic
auucgauuucuuccugguuuaguc

SEQ ID NO: 553680 - RNA, 18 nt, Artificial Sequence
  Synthetic
aaaacuaacauuuuaguc

SEQ ID NO: 553681 - RNA, 19 nt, Artificial Sequence
  Synthetic
uaaaacuaacauuuuaguc

SEQ ID NO: 553682 - RNA, 20 nt, Artificial Sequence
  Synthetic
auaaaacuaacauuuuaguc

SEQ ID NO: 553683 - RNA, 21 nt, Artificial Sequence
  Synthetic
cauaaaacuaacauuuuaguc

SEQ ID NO: 553684 - RNA, 22 nt, Artificial Sequence
  Synthetic
acauaaaacuaacauuuuaguc

SEQ ID NO: 553685 - RNA, 23 nt, Artificial Sequence
  Synthetic
cacauaaaacuaacauuuuaguc

SEQ ID NO: 553686 - RNA, 24 nt, Artificial Sequence
  Synthetic
acacauaaaacuaacauuuuaguc

SEQ ID NO: 553687 - RNA, 21 nt, Artificial Sequence
  Synthetic
auugcuuuugguguuuuaguc

SEQ ID NO: 553688 - RNA, 22 nt, Artificial Sequence
  Synthetic
cauugcuuuugguguuuuaguc

SEQ ID NO: 553689 - RNA, 23 nt, Artificial Sequence
  Synthetic
ccauugcuuuugguguuuuaguc

SEQ ID NO: 553690 - RNA, 24 nt, Artificial Sequence
  Synthetic
gccauugcuuuugguguuuuaguc

SEQ ID NO: 553691 - RNA, 18 nt, Artificial Sequence
  Synthetic
ccaacucuuuacaacguc

SEQ ID NO: 553692 - RNA, 19 nt, Artificial Sequence
  Synthetic
cccaacucuuuacaacguc

SEQ ID NO: 553693 - RNA, 20 nt, Artificial Sequence
  Synthetic
gcccaacucuuuacaacguc

SEQ ID NO: 553694 - RNA, 21 nt, Artificial Sequence
  Synthetic
agcccaacucuuuacaacguc

SEQ ID NO: 553695 - RNA, 22 nt, Artificial Sequence
  Synthetic
aagcccaacucuuuacaacguc

SEQ ID NO: 553696 - RNA, 23 nt, Artificial Sequence
  Synthetic
aaagcccaacucuuuacaacguc

SEQ ID NO: 553697 - RNA, 24 nt, Artificial Sequence
  Synthetic
aaaagcccaacucuuuacaacguc

SEQ ID NO: 553698 - RNA, 18 nt, Artificial Sequence
  Synthetic
ccauaacccccacacguc

SEQ ID NO: 553699 - RNA, 19 nt, Artificial Sequence
  Synthetic
cccauaacccccacacguc

SEQ ID NO: 553700 - RNA, 20 nt, Artificial Sequence
  Synthetic
ucccauaacccccacacguc

SEQ ID NO: 553701 - RNA, 21 nt, Artificial Sequence
  Synthetic
uucccauaacccccacacguc

SEQ ID NO: 553702 - RNA, 22 nt, Artificial Sequence
  Synthetic
guucccauaacccccacacguc

SEQ ID NO: 553703 - RNA, 23 nt, Artificial Sequence
  Synthetic
uguucccauaacccccacacguc

SEQ ID NO: 553704 - RNA, 24 nt, Artificial Sequence
  Synthetic
uuguucccauaacccccacacguc

SEQ ID NO: 553705 - RNA, 18 nt, Artificial Sequence
  Synthetic
uuucgaacucuugacguc

SEQ ID NO: 553706 - RNA, 19 nt, Artificial Sequence
  Synthetic
guuucgaacucuugacguc

SEQ ID NO: 553707 - RNA, 20 nt, Artificial Sequence
  Synthetic
gguuucgaacucuugacguc

SEQ ID NO: 553708 - RNA, 21 nt, Artificial Sequence
  Synthetic
ugguuucgaacucuugacguc

SEQ ID NO: 553709 - RNA, 22 nt, Artificial Sequence
  Synthetic
cugguuucgaacucuugacguc

SEQ ID NO: 553710 - RNA, 23 nt, Artificial Sequence
  Synthetic
gcugguuucgaacucuugacguc

SEQ ID NO: 553711 - RNA, 24 nt, Artificial Sequence
  Synthetic
ggcugguuucgaacucuugacguc

SEQ ID NO: 553712 - RNA, 18 nt, Artificial Sequence
  Synthetic
uuacauagcaaauacguc

SEQ ID NO: 553713 - RNA, 19 nt, Artificial Sequence
  Synthetic
auuacauagcaaauacguc

SEQ ID NO: 553714 - RNA, 20 nt, Artificial Sequence
  Synthetic
cauuacauagcaaauacguc

SEQ ID NO: 553715 - RNA, 21 nt, Artificial Sequence
  Synthetic
ucauuacauagcaaauacguc

SEQ ID NO: 553716 - RNA, 22 nt, Artificial Sequence
  Synthetic
gucauuacauagcaaauacguc

SEQ ID NO: 553717 - RNA, 23 nt, Artificial Sequence
  Synthetic
ugucauuacauagcaaauacguc

SEQ ID NO: 553718 - RNA, 24 nt, Artificial Sequence
  Synthetic
cugucauuacauagcaaauacguc

SEQ ID NO: 553719 - RNA, 18 nt, Artificial Sequence
  Synthetic
ugcagaggaccuuacguc

SEQ ID NO: 553720 - RNA, 19 nt, Artificial Sequence
  Synthetic
augcagaggaccuuacguc

SEQ ID NO: 553721 - RNA, 20 nt, Artificial Sequence
  Synthetic
aaugcagaggaccuuacguc

SEQ ID NO: 553722 - RNA, 21 nt, Artificial Sequence
  Synthetic
aaaugcagaggaccuuacguc

SEQ ID NO: 553723 - RNA, 22 nt, Artificial Sequence
  Synthetic
aaaaugcagaggaccuuacguc

SEQ ID NO: 553724 - RNA, 23 nt, Artificial Sequence
  Synthetic
gaaaaugcagaggaccuuacguc

SEQ ID NO: 553725 - RNA, 24 nt, Artificial Sequence
  Synthetic
ggaaaaugcagaggaccuuacguc

SEQ ID NO: 553726 - RNA, 18 nt, Artificial Sequence
  Synthetic
auauaacaguaggccguc

SEQ ID NO: 553727 - RNA, 19 nt, Artificial Sequence
  Synthetic
aauauaacaguaggccguc

SEQ ID NO: 553728 - RNA, 20 nt, Artificial Sequence
  Synthetic
caauauaacaguaggccguc

SEQ ID NO: 553729 - RNA, 21 nt, Artificial Sequence
  Synthetic
gcaauauaacaguaggccguc

SEQ ID NO: 553730 - RNA, 22 nt, Artificial Sequence
  Synthetic
ggcaauauaacaguaggccguc

SEQ ID NO: 553731 - RNA, 23 nt, Artificial Sequence
  Synthetic
uggcaauauaacaguaggccguc

SEQ ID NO: 553732 - RNA, 24 nt, Artificial Sequence
  Synthetic
cuggcaauauaacaguaggccguc

SEQ ID NO: 553733 - RNA, 18 nt, Artificial Sequence
  Synthetic
uucucacaaagguccguc

SEQ ID NO: 553734 - RNA, 19 nt, Artificial Sequence
  Synthetic
uuucucacaaagguccguc

SEQ ID NO: 553735 - RNA, 20 nt, Artificial Sequence
  Synthetic
uuuucucacaaagguccguc

SEQ ID NO: 553736 - RNA, 21 nt, Artificial Sequence
  Synthetic
uuuuucucacaaagguccguc

SEQ ID NO: 553737 - RNA, 22 nt, Artificial Sequence
  Synthetic
uuuuuucucacaaagguccguc

SEQ ID NO: 553738 - RNA, 23 nt, Artificial Sequence
  Synthetic
uuuuuuucucacaaagguccguc

SEQ ID NO: 553739 - RNA, 24 nt, Artificial Sequence
  Synthetic
uuuuuuuucucacaaagguccguc

SEQ ID NO: 553740 - RNA, 18 nt, Artificial Sequence
  Synthetic
gaugguagcauaagcguc

SEQ ID NO: 553741 - RNA, 19 nt, Artificial Sequence
  Synthetic
agaugguagcauaagcguc

SEQ ID NO: 553742 - RNA, 20 nt, Artificial Sequence
  Synthetic
cagaugguagcauaagcguc

SEQ ID NO: 553743 - RNA, 21 nt, Artificial Sequence
  Synthetic
ucagaugguagcauaagcguc

SEQ ID NO: 553744 - RNA, 22 nt, Artificial Sequence
  Synthetic
uucagaugguagcauaagcguc

SEQ ID NO: 553745 - RNA, 23 nt, Artificial Sequence
  Synthetic
auucagaugguagcauaagcguc

SEQ ID NO: 553746 - RNA, 24 nt, Artificial Sequence
  Synthetic
uauucagaugguagcauaagcguc

SEQ ID NO: 553747 - RNA, 18 nt, Artificial Sequence
  Synthetic
aauacuuugaauagcguc

SEQ ID NO: 553748 - RNA, 19 nt, Artificial Sequence
  Synthetic
aaauacuuugaauagcguc

SEQ ID NO: 553749 - RNA, 20 nt, Artificial Sequence
  Synthetic
aaaauacuuugaauagcguc

SEQ ID NO: 553750 - RNA, 21 nt, Artificial Sequence
  Synthetic
uaaaauacuuugaauagcguc

SEQ ID NO: 553751 - RNA, 22 nt, Artificial Sequence
  Synthetic
guaaaauacuuugaauagcguc

SEQ ID NO: 553752 - RNA, 23 nt, Artificial Sequence
  Synthetic
uguaaaauacuuugaauagcguc

SEQ ID NO: 553753 - RNA, 24 nt, Artificial Sequence
  Synthetic
uuguaaaauacuuugaauagcguc

SEQ ID NO: 553754 - RNA, 18 nt, Artificial Sequence
  Synthetic
uuuuuugaggcuagcguc

SEQ ID NO: 553755 - RNA, 19 nt, Artificial Sequence
  Synthetic
auuuuuugaggcuagcguc

SEQ ID NO: 553756 - RNA, 20 nt, Artificial Sequence
  Synthetic
cauuuuuugaggcuagcguc

SEQ ID NO: 553757 - RNA, 21 nt, Artificial Sequence
  Synthetic
acauuuuuugaggcuagcguc

SEQ ID NO: 553758 - RNA, 22 nt, Artificial Sequence
  Synthetic
gacauuuuuugaggcuagcguc

SEQ ID NO: 553759 - RNA, 23 nt, Artificial Sequence
  Synthetic
agacauuuuuugaggcuagcguc

SEQ ID NO: 553760 - RNA, 24 nt, Artificial Sequence
  Synthetic
gagacauuuuuugaggcuagcguc

SEQ ID NO: 553761 - RNA, 18 nt, Artificial Sequence
  Synthetic
uaguugguauuuaucguc

SEQ ID NO: 553762 - RNA, 19 nt, Artificial Sequence
  Synthetic
uuaguugguauuuaucguc

SEQ ID NO: 553763 - RNA, 20 nt, Artificial Sequence
  Synthetic
uuuaguugguauuuaucguc

SEQ ID NO: 553764 - RNA, 21 nt, Artificial Sequence
  Synthetic
guuuaguugguauuuaucguc

SEQ ID NO: 553765 - RNA, 22 nt, Artificial Sequence
  Synthetic
aguuuaguugguauuuaucguc

SEQ ID NO: 553766 - RNA, 23 nt, Artificial Sequence
  Synthetic
gaguuuaguugguauuuaucguc

SEQ ID NO: 553767 - RNA, 24 nt, Artificial Sequence
  Synthetic
ugaguuuaguugguauuuaucguc

SEQ ID NO: 553768 - RNA, 18 nt, Artificial Sequence
  Synthetic
auguuggccaggcucguc

SEQ ID NO: 553769 - RNA, 19 nt, Artificial Sequence
  Synthetic
cauguuggccaggcucguc

SEQ ID NO: 553770 - RNA, 20 nt, Artificial Sequence
  Synthetic
ccauguuggccaggcucguc

SEQ ID NO: 553771 - RNA, 21 nt, Artificial Sequence
  Synthetic
gccauguuggccaggcucguc

SEQ ID NO: 553772 - RNA, 22 nt, Artificial Sequence
  Synthetic
ugccauguuggccaggcucguc

SEQ ID NO: 553773 - RNA, 23 nt, Artificial Sequence
  Synthetic
uugccauguuggccaggcucguc

SEQ ID NO: 553774 - RNA, 24 nt, Artificial Sequence
  Synthetic
uuugccauguuggccaggcucguc

SEQ ID NO: 553775 - RNA, 18 nt, Artificial Sequence
  Synthetic
ucagacaagaaagucguc

SEQ ID NO: 553776 - RNA, 19 nt, Artificial Sequence
  Synthetic
uucagacaagaaagucguc

SEQ ID NO: 553777 - RNA, 20 nt, Artificial Sequence
  Synthetic
auucagacaagaaagucguc

SEQ ID NO: 553778 - RNA, 21 nt, Artificial Sequence
  Synthetic
cauucagacaagaaagucguc

SEQ ID NO: 553779 - RNA, 22 nt, Artificial Sequence
  Synthetic
acauucagacaagaaagucguc

SEQ ID NO: 553780 - RNA, 23 nt, Artificial Sequence
  Synthetic
aacauucagacaagaaagucguc

SEQ ID NO: 553781 - RNA, 24 nt, Artificial Sequence
  Synthetic
gaacauucagacaagaaagucguc

SEQ ID NO: 553782 - RNA, 18 nt, Artificial Sequence
  Synthetic
uuauacacuagguucguc

SEQ ID NO: 553783 - RNA, 19 nt, Artificial Sequence
  Synthetic
auuauacacuagguucguc

SEQ ID NO: 553784 - RNA, 20 nt, Artificial Sequence
  Synthetic
gauuauacacuagguucguc

SEQ ID NO: 553785 - RNA, 21 nt, Artificial Sequence
  Synthetic
agauuauacacuagguucguc

SEQ ID NO: 553786 - RNA, 22 nt, Artificial Sequence
  Synthetic
gagauuauacacuagguucguc

SEQ ID NO: 553787 - RNA, 23 nt, Artificial Sequence
  Synthetic
ggagauuauacacuagguucguc

SEQ ID NO: 553788 - RNA, 24 nt, Artificial Sequence
  Synthetic
gggagauuauacacuagguucguc

SEQ ID NO: 553789 - RNA, 18 nt, Artificial Sequence
  Synthetic
auuuuguccuaaaagguc

SEQ ID NO: 553790 - RNA, 19 nt, Artificial Sequence
  Synthetic
uauuuuguccuaaaagguc

SEQ ID NO: 553791 - RNA, 20 nt, Artificial Sequence
  Synthetic
auauuuuguccuaaaagguc

SEQ ID NO: 553792 - RNA, 21 nt, Artificial Sequence
  Synthetic
cauauuuuguccuaaaagguc

SEQ ID NO: 553793 - RNA, 22 nt, Artificial Sequence
  Synthetic
acauauuuuguccuaaaagguc

SEQ ID NO: 553794 - RNA, 23 nt, Artificial Sequence
  Synthetic
cacauauuuuguccuaaaagguc

SEQ ID NO: 553795 - RNA, 24 nt, Artificial Sequence
  Synthetic
ucacauauuuuguccuaaaagguc

SEQ ID NO: 553796 - RNA, 18 nt, Artificial Sequence
  Synthetic
acaaagaaaagaaagguc

SEQ ID NO: 553797 - RNA, 19 nt, Artificial Sequence
  Synthetic
aacaaagaaaagaaagguc

SEQ ID NO: 553798 - RNA, 20 nt, Artificial Sequence
  Synthetic
caacaaagaaaagaaagguc

SEQ ID NO: 553799 - RNA, 21 nt, Artificial Sequence
  Synthetic
gcaacaaagaaaagaaagguc

SEQ ID NO: 553800 - RNA, 22 nt, Artificial Sequence
  Synthetic
agcaacaaagaaaagaaagguc

SEQ ID NO: 553801 - RNA, 23 nt, Artificial Sequence
  Synthetic
gagcaacaaagaaaagaaagguc

SEQ ID NO: 553802 - RNA, 24 nt, Artificial Sequence
  Synthetic
agagcaacaaagaaaagaaagguc

SEQ ID NO: 553803 - RNA, 18 nt, Artificial Sequence
  Synthetic
auacacagaggaaagguc

SEQ ID NO: 553804 - RNA, 19 nt, Artificial Sequence
  Synthetic
cauacacagaggaaagguc

SEQ ID NO: 553805 - RNA, 20 nt, Artificial Sequence
  Synthetic
acauacacagaggaaagguc

SEQ ID NO: 553806 - RNA, 21 nt, Artificial Sequence
  Synthetic
cacauacacagaggaaagguc

SEQ ID NO: 553807 - RNA, 22 nt, Artificial Sequence
  Synthetic
gcacauacacagaggaaagguc

SEQ ID NO: 553808 - RNA, 23 nt, Artificial Sequence
  Synthetic
ugcacauacacagaggaaagguc

SEQ ID NO: 553809 - RNA, 24 nt, Artificial Sequence
  Synthetic
augcacauacacagaggaaagguc

SEQ ID NO: 553810 - RNA, 18 nt, Artificial Sequence
  Synthetic
aaaaauaaaauaaagguc

SEQ ID NO: 553811 - RNA, 19 nt, Artificial Sequence
  Synthetic
uaaaaauaaaauaaagguc

SEQ ID NO: 553812 - RNA, 20 nt, Artificial Sequence
  Synthetic
guaaaaauaaaauaaagguc

SEQ ID NO: 553813 - RNA, 21 nt, Artificial Sequence
  Synthetic
gguaaaaauaaaauaaagguc

SEQ ID NO: 553814 - RNA, 22 nt, Artificial Sequence
  Synthetic
ugguaaaaauaaaauaaagguc

SEQ ID NO: 553815 - RNA, 23 nt, Artificial Sequence
  Synthetic
augguaaaaauaaaauaaagguc

SEQ ID NO: 553816 - RNA, 24 nt, Artificial Sequence
  Synthetic
gaugguaaaaauaaaauaaagguc

SEQ ID NO: 553817 - RNA, 18 nt, Artificial Sequence
  Synthetic
cagauggaucacaagguc

SEQ ID NO: 553818 - RNA, 19 nt, Artificial Sequence
  Synthetic
gcagauggaucacaagguc

SEQ ID NO: 553819 - RNA, 20 nt, Artificial Sequence
  Synthetic
ggcagauggaucacaagguc

SEQ ID NO: 553820 - RNA, 21 nt, Artificial Sequence
  Synthetic
aggcagauggaucacaagguc

SEQ ID NO: 553821 - RNA, 22 nt, Artificial Sequence
  Synthetic
gaggcagauggaucacaagguc

SEQ ID NO: 553822 - RNA, 23 nt, Artificial Sequence
  Synthetic
ugaggcagauggaucacaagguc

SEQ ID NO: 553823 - RNA, 24 nt, Artificial Sequence
  Synthetic
cugaggcagauggaucacaagguc

SEQ ID NO: 553824 - RNA, 18 nt, Artificial Sequence
  Synthetic
cggguggaucacaagguc

SEQ ID NO: 553825 - RNA, 19 nt, Artificial Sequence
  Synthetic
gcggguggaucacaagguc

SEQ ID NO: 553826 - RNA, 20 nt, Artificial Sequence
  Synthetic
ggcggguggaucacaagguc

SEQ ID NO: 553827 - RNA, 21 nt, Artificial Sequence
  Synthetic
aggcggguggaucacaagguc

SEQ ID NO: 553828 - RNA, 22 nt, Artificial Sequence
  Synthetic
gaggcggguggaucacaagguc

SEQ ID NO: 553829 - RNA, 23 nt, Artificial Sequence
  Synthetic
cgaggcggguggaucacaagguc

SEQ ID NO: 553830 - RNA, 24 nt, Artificial Sequence
  Synthetic
ccgaggcggguggaucacaagguc

SEQ ID NO: 553831 - RNA, 18 nt, Artificial Sequence
  Synthetic
gagguaagaaucaagguc

SEQ ID NO: 553832 - RNA, 19 nt, Artificial Sequence
  Synthetic
ggagguaagaaucaagguc

SEQ ID NO: 553833 - RNA, 20 nt, Artificial Sequence
  Synthetic
aggagguaagaaucaagguc

SEQ ID NO: 553834 - RNA, 21 nt, Artificial Sequence
  Synthetic
uaggagguaagaaucaagguc

SEQ ID NO: 553835 - RNA, 22 nt, Artificial Sequence
  Synthetic
auaggagguaagaaucaagguc

SEQ ID NO: 553836 - RNA, 23 nt, Artificial Sequence
  Synthetic
uauaggagguaagaaucaagguc

SEQ ID NO: 553837 - RNA, 24 nt, Artificial Sequence
  Synthetic
uuauaggagguaagaaucaagguc

SEQ ID NO: 553838 - RNA, 18 nt, Artificial Sequence
  Synthetic
cuaagaacuuagaagguc

SEQ ID NO: 553839 - RNA, 19 nt, Artificial Sequence
  Synthetic
ucuaagaacuuagaagguc

SEQ ID NO: 553840 - RNA, 20 nt, Artificial Sequence
  Synthetic
uucuaagaacuuagaagguc

SEQ ID NO: 553841 - RNA, 21 nt, Artificial Sequence
  Synthetic
uuucuaagaacuuagaagguc

SEQ ID NO: 553842 - RNA, 22 nt, Artificial Sequence
  Synthetic
auuucuaagaacuuagaagguc

SEQ ID NO: 553843 - RNA, 23 nt, Artificial Sequence
  Synthetic
gauuucuaagaacuuagaagguc

SEQ ID NO: 553844 - RNA, 24 nt, Artificial Sequence
  Synthetic
ugauuucuaagaacuuagaagguc

SEQ ID NO: 553845 - RNA, 18 nt, Artificial Sequence
  Synthetic
cgggcggaucauaagguc

SEQ ID NO: 553846 - RNA, 19 nt, Artificial Sequence
  Synthetic
gcgggcggaucauaagguc

SEQ ID NO: 553847 - RNA, 20 nt, Artificial Sequence
  Synthetic
ggcgggcggaucauaagguc

SEQ ID NO: 553848 - RNA, 21 nt, Artificial Sequence
  Synthetic
aggcgggcggaucauaagguc

SEQ ID NO: 553849 - RNA, 22 nt, Artificial Sequence
  Synthetic
gaggcgggcggaucauaagguc

SEQ ID NO: 553850 - RNA, 23 nt, Artificial Sequence
  Synthetic
cgaggcgggcggaucauaagguc

SEQ ID NO: 553851 - RNA, 24 nt, Artificial Sequence
  Synthetic
ccgaggcgggcggaucauaagguc

SEQ ID NO: 553852 - RNA, 18 nt, Artificial Sequence
  Synthetic
gaagagaaaauuaagguc

SEQ ID NO: 553853 - RNA, 19 nt, Artificial Sequence
  Synthetic
agaagagaaaauuaagguc

SEQ ID NO: 553854 - RNA, 20 nt, Artificial Sequence
  Synthetic
cagaagagaaaauuaagguc

SEQ ID NO: 553855 - RNA, 21 nt, Artificial Sequence
  Synthetic
ccagaagagaaaauuaagguc

SEQ ID NO: 553856 - RNA, 22 nt, Artificial Sequence
  Synthetic
uccagaagagaaaauuaagguc

SEQ ID NO: 553857 - RNA, 23 nt, Artificial Sequence
  Synthetic
uuccagaagagaaaauuaagguc

SEQ ID NO: 553858 - RNA, 24 nt, Artificial Sequence
  Synthetic
uuuccagaagagaaaauuaagguc

SEQ ID NO: 553859 - RNA, 18 nt, Artificial Sequence
  Synthetic
uuuuuuucuagacagguc

SEQ ID NO: 553860 - RNA, 19 nt, Artificial Sequence
  Synthetic
uuuuuuuucuagacagguc

SEQ ID NO: 553861 - RNA, 20 nt, Artificial Sequence
  Synthetic
uuuuuuuuucuagacagguc

SEQ ID NO: 553862 - RNA, 21 nt, Artificial Sequence
  Synthetic
uuuuuuuuuucuagacagguc

SEQ ID NO: 553863 - RNA, 22 nt, Artificial Sequence
  Synthetic
auuuuuuuuuucuagacagguc

SEQ ID NO: 553864 - RNA, 23 nt, Artificial Sequence
  Synthetic
cauuuuuuuuuucuagacagguc

SEQ ID NO: 553865 - RNA, 24 nt, Artificial Sequence
  Synthetic
acauuuuuuuuuucuagacagguc

SEQ ID NO: 553866 - RNA, 18 nt, Artificial Sequence
  Synthetic
uuuucguagcaccagguc

SEQ ID NO: 553867 - RNA, 19 nt, Artificial Sequence
  Synthetic
auuuucguagcaccagguc

SEQ ID NO: 553868 - RNA, 20 nt, Artificial Sequence
  Synthetic
uauuuucguagcaccagguc

SEQ ID NO: 553869 - RNA, 21 nt, Artificial Sequence
  Synthetic
guauuuucguagcaccagguc

SEQ ID NO: 553870 - RNA, 22 nt, Artificial Sequence
  Synthetic
aguauuuucguagcaccagguc

SEQ ID NO: 553871 - RNA, 23 nt, Artificial Sequence
  Synthetic
gaguauuuucguagcaccagguc

SEQ ID NO: 553872 - RNA, 24 nt, Artificial Sequence
  Synthetic
agaguauuuucguagcaccagguc

SEQ ID NO: 553873 - RNA, 18 nt, Artificial Sequence
  Synthetic
uuuuaaugauaccagguc

SEQ ID NO: 553874 - RNA, 19 nt, Artificial Sequence
  Synthetic
cuuuuaaugauaccagguc

SEQ ID NO: 553875 - RNA, 20 nt, Artificial Sequence
  Synthetic
acuuuuaaugauaccagguc

SEQ ID NO: 553876 - RNA, 21 nt, Artificial Sequence
  Synthetic
gacuuuuaaugauaccagguc

SEQ ID NO: 553877 - RNA, 22 nt, Artificial Sequence
  Synthetic
agacuuuuaaugauaccagguc

SEQ ID NO: 553878 - RNA, 23 nt, Artificial Sequence
  Synthetic
aagacuuuuaaugauaccagguc

SEQ ID NO: 553879 - RNA, 24 nt, Artificial Sequence
  Synthetic
caagacuuuuaaugauaccagguc

SEQ ID NO: 553880 - RNA, 18 nt, Artificial Sequence
  Synthetic
aacuugcauagccagguc

SEQ ID NO: 553881 - RNA, 19 nt, Artificial Sequence
  Synthetic
uaacuugcauagccagguc

SEQ ID NO: 553882 - RNA, 20 nt, Artificial Sequence
  Synthetic
auaacuugcauagccagguc

SEQ ID NO: 553883 - RNA, 21 nt, Artificial Sequence
  Synthetic
aauaacuugcauagccagguc

SEQ ID NO: 553884 - RNA, 22 nt, Artificial Sequence
  Synthetic
gaauaacuugcauagccagguc

SEQ ID NO: 553885 - RNA, 23 nt, Artificial Sequence
  Synthetic
agaauaacuugcauagccagguc

SEQ ID NO: 553886 - RNA, 24 nt, Artificial Sequence
  Synthetic
aagaauaacuugcauagccagguc

SEQ ID NO: 553887 - RNA, 18 nt, Artificial Sequence
  Synthetic
ucuccccugaagcagguc

SEQ ID NO: 553888 - RNA, 19 nt, Artificial Sequence
  Synthetic
uucuccccugaagcagguc

SEQ ID NO: 553889 - RNA, 20 nt, Artificial Sequence
  Synthetic
cuucuccccugaagcagguc

SEQ ID NO: 553890 - RNA, 21 nt, Artificial Sequence
  Synthetic
ccuucuccccugaagcagguc

SEQ ID NO: 553891 - RNA, 22 nt, Artificial Sequence
  Synthetic
cccuucuccccugaagcagguc

SEQ ID NO: 553892 - RNA, 23 nt, Artificial Sequence
  Synthetic
ccccuucuccccugaagcagguc

SEQ ID NO: 553893 - RNA, 24 nt, Artificial Sequence
  Synthetic
cccccuucuccccugaagcagguc

SEQ ID NO: 553894 - RNA, 18 nt, Artificial Sequence
  Synthetic
auguuggccaggcagguc

SEQ ID NO: 553895 - RNA, 19 nt, Artificial Sequence
  Synthetic
cauguuggccaggcagguc

SEQ ID NO: 553896 - RNA, 20 nt, Artificial Sequence
  Synthetic
ccauguuggccaggcagguc

SEQ ID NO: 553897 - RNA, 21 nt, Artificial Sequence
  Synthetic
accauguuggccaggcagguc

SEQ ID NO: 553898 - RNA, 22 nt, Artificial Sequence
  Synthetic
caccauguuggccaggcagguc

SEQ ID NO: 553899 - RNA, 23 nt, Artificial Sequence
  Synthetic
ucaccauguuggccaggcagguc

SEQ ID NO: 553900 - RNA, 24 nt, Artificial Sequence
  Synthetic
uucaccauguuggccaggcagguc

SEQ ID NO: 553901 - RNA, 18 nt, Artificial Sequence
  Synthetic
aaaacaaaugugcagguc

SEQ ID NO: 553902 - RNA, 19 nt, Artificial Sequence
  Synthetic
uaaaacaaaugugcagguc

SEQ ID NO: 553903 - RNA, 20 nt, Artificial Sequence
  Synthetic
auaaaacaaaugugcagguc

SEQ ID NO: 553904 - RNA, 21 nt, Artificial Sequence
  Synthetic
aauaaaacaaaugugcagguc

SEQ ID NO: 553905 - RNA, 22 nt, Artificial Sequence
  Synthetic
uaauaaaacaaaugugcagguc

SEQ ID NO: 553906 - RNA, 23 nt, Artificial Sequence
  Synthetic
uuaauaaaacaaaugugcagguc

SEQ ID NO: 553907 - RNA, 24 nt, Artificial Sequence
  Synthetic
uuuaauaaaacaaaugugcagguc

SEQ ID NO: 553908 - RNA, 18 nt, Artificial Sequence
  Synthetic
caacaacggcuucagguc

SEQ ID NO: 553909 - RNA, 19 nt, Artificial Sequence
  Synthetic
ccaacaacggcuucagguc

SEQ ID NO: 553910 - RNA, 20 nt, Artificial Sequence
  Synthetic
cccaacaacggcuucagguc

SEQ ID NO: 553911 - RNA, 21 nt, Artificial Sequence
  Synthetic
ccccaacaacggcuucagguc

SEQ ID NO: 553912 - RNA, 22 nt, Artificial Sequence
  Synthetic
uccccaacaacggcuucagguc

SEQ ID NO: 553913 - RNA, 23 nt, Artificial Sequence
  Synthetic
cuccccaacaacggcuucagguc

SEQ ID NO: 553914 - RNA, 24 nt, Artificial Sequence
  Synthetic
ucuccccaacaacggcuucagguc

SEQ ID NO: 553915 - RNA, 18 nt, Artificial Sequence
  Synthetic
aucuauucccaagagguc

SEQ ID NO: 553916 - RNA, 19 nt, Artificial Sequence
  Synthetic
uaucuauucccaagagguc

SEQ ID NO: 553917 - RNA, 20 nt, Artificial Sequence
  Synthetic
uuaucuauucccaagagguc

SEQ ID NO: 553918 - RNA, 21 nt, Artificial Sequence
  Synthetic
auuaucuauucccaagagguc

SEQ ID NO: 553919 - RNA, 22 nt, Artificial Sequence
  Synthetic
cauuaucuauucccaagagguc

SEQ ID NO: 553920 - RNA, 23 nt, Artificial Sequence
  Synthetic
acauuaucuauucccaagagguc

SEQ ID NO: 553921 - RNA, 24 nt, Artificial Sequence
  Synthetic
aacauuaucuauucccaagagguc

SEQ ID NO: 553922 - RNA, 18 nt, Artificial Sequence
  Synthetic
aucacagacccagagguc

SEQ ID NO: 553923 - RNA, 19 nt, Artificial Sequence
  Synthetic
caucacagacccagagguc

SEQ ID NO: 553924 - RNA, 20 nt, Artificial Sequence
  Synthetic
ccaucacagacccagagguc

SEQ ID NO: 553925 - RNA, 21 nt, Artificial Sequence
  Synthetic
cccaucacagacccagagguc

SEQ ID NO: 553926 - RNA, 22 nt, Artificial Sequence
  Synthetic
ucccaucacagacccagagguc

SEQ ID NO: 553927 - RNA, 23 nt, Artificial Sequence
  Synthetic
cucccaucacagacccagagguc

SEQ ID NO: 553928 - RNA, 24 nt, Artificial Sequence
  Synthetic
ccucccaucacagacccagagguc

SEQ ID NO: 553929 - RNA, 18 nt, Artificial Sequence
  Synthetic
ccuuguggcagagagguc

SEQ ID NO: 553930 - RNA, 19 nt, Artificial Sequence
  Synthetic
uccuuguggcagagagguc

SEQ ID NO: 553931 - RNA, 20 nt, Artificial Sequence
  Synthetic
auccuuguggcagagagguc

SEQ ID NO: 553932 - RNA, 21 nt, Artificial Sequence
  Synthetic
uauccuuguggcagagagguc

SEQ ID NO: 553933 - RNA, 22 nt, Artificial Sequence
  Synthetic
auauccuuguggcagagagguc

SEQ ID NO: 553934 - RNA, 23 nt, Artificial Sequence
  Synthetic
aauauccuuguggcagagagguc

SEQ ID NO: 553935 - RNA, 24 nt, Artificial Sequence
  Synthetic
aaauauccuuguggcagagagguc

SEQ ID NO: 553936 - RNA, 18 nt, Artificial Sequence
  Synthetic
agcauugccuuagagguc

SEQ ID NO: 553937 - RNA, 19 nt, Artificial Sequence
  Synthetic
gagcauugccuuagagguc

SEQ ID NO: 553938 - RNA, 20 nt, Artificial Sequence
  Synthetic
agagcauugccuuagagguc

SEQ ID NO: 553939 - RNA, 21 nt, Artificial Sequence
  Synthetic
aagagcauugccuuagagguc

SEQ ID NO: 553940 - RNA, 22 nt, Artificial Sequence
  Synthetic
gaagagcauugccuuagagguc

SEQ ID NO: 553941 - RNA, 23 nt, Artificial Sequence
  Synthetic
ugaagagcauugccuuagagguc

SEQ ID NO: 553942 - RNA, 24 nt, Artificial Sequence
  Synthetic
uugaagagcauugccuuagagguc

SEQ ID NO: 553943 - RNA, 19 nt, Artificial Sequence
  Synthetic
acaggcagaucacgagguc

SEQ ID NO: 553944 - RNA, 20 nt, Artificial Sequence
  Synthetic
gacaggcagaucacgagguc

SEQ ID NO: 553945 - RNA, 21 nt, Artificial Sequence
  Synthetic
agacaggcagaucacgagguc

SEQ ID NO: 553946 - RNA, 22 nt, Artificial Sequence
  Synthetic
aagacaggcagaucacgagguc

SEQ ID NO: 553947 - RNA, 23 nt, Artificial Sequence
  Synthetic
caagacaggcagaucacgagguc

SEQ ID NO: 553948 - RNA, 24 nt, Artificial Sequence
  Synthetic
ccaagacaggcagaucacgagguc

SEQ ID NO: 553949 - RNA, 22 nt, Artificial Sequence
  Synthetic
aaggugggcagaucacgagguc

SEQ ID NO: 553950 - RNA, 23 nt, Artificial Sequence
  Synthetic
caaggugggcagaucacgagguc

SEQ ID NO: 553951 - RNA, 24 nt, Artificial Sequence
  Synthetic
ccaaggugggcagaucacgagguc

SEQ ID NO: 553952 - RNA, 18 nt, Artificial Sequence
  Synthetic
cgggcggaucacgagguc

SEQ ID NO: 553953 - RNA, 19 nt, Artificial Sequence
  Synthetic
acgggcggaucacgagguc

SEQ ID NO: 553954 - RNA, 20 nt, Artificial Sequence
  Synthetic
gacgggcggaucacgagguc

SEQ ID NO: 553955 - RNA, 21 nt, Artificial Sequence
  Synthetic
agacgggcggaucacgagguc

SEQ ID NO: 553956 - RNA, 22 nt, Artificial Sequence
  Synthetic
gagacgggcggaucacgagguc

SEQ ID NO: 553957 - RNA, 23 nt, Artificial Sequence
  Synthetic
cgagacgggcggaucacgagguc

SEQ ID NO: 553958 - RNA, 24 nt, Artificial Sequence
  Synthetic
ccgagacgggcggaucacgagguc

SEQ ID NO: 553959 - RNA, 23 nt, Artificial Sequence
  Synthetic
cgaggcgggcggaucacgagguc

SEQ ID NO: 553960 - RNA, 24 nt, Artificial Sequence
  Synthetic
ccgaggcgggcggaucacgagguc

SEQ ID NO: 553961 - RNA, 21 nt, Artificial Sequence
  Synthetic
aggcggguggaucacgagguc

SEQ ID NO: 553962 - RNA, 22 nt, Artificial Sequence
  Synthetic
gaggcggguggaucacgagguc

SEQ ID NO: 553963 - RNA, 23 nt, Artificial Sequence
  Synthetic
ugaggcggguggaucacgagguc

SEQ ID NO: 553964 - RNA, 24 nt, Artificial Sequence
  Synthetic
cugaggcggguggaucacgagguc

SEQ ID NO: 553965 - RNA, 21 nt, Artificial Sequence
  Synthetic
agguggguggaucacgagguc

SEQ ID NO: 553966 - RNA, 22 nt, Artificial Sequence
  Synthetic
gagguggguggaucacgagguc

SEQ ID NO: 553967 - RNA, 23 nt, Artificial Sequence
  Synthetic
cgagguggguggaucacgagguc

SEQ ID NO: 553968 - RNA, 24 nt, Artificial Sequence
  Synthetic
ccgagguggguggaucacgagguc

SEQ ID NO: 553969 - RNA, 18 nt, Artificial Sequence
  Synthetic
uaacuuaaaagcgagguc

SEQ ID NO: 553970 - RNA, 19 nt, Artificial Sequence
  Synthetic
uuaacuuaaaagcgagguc

SEQ ID NO: 553971 - RNA, 20 nt, Artificial Sequence
  Synthetic
guuaacuuaaaagcgagguc

SEQ ID NO: 553972 - RNA, 21 nt, Artificial Sequence
  Synthetic
aguuaacuuaaaagcgagguc

SEQ ID NO: 553973 - RNA, 22 nt, Artificial Sequence
  Synthetic
caguuaacuuaaaagcgagguc

SEQ ID NO: 553974 - RNA, 23 nt, Artificial Sequence
  Synthetic
ucaguuaacuuaaaagcgagguc

SEQ ID NO: 553975 - RNA, 24 nt, Artificial Sequence
  Synthetic
cucaguuaacuuaaaagcgagguc

SEQ ID NO: 553976 - RNA, 18 nt, Artificial Sequence
  Synthetic
caggcagaucaugagguc

SEQ ID NO: 553977 - RNA, 19 nt, Artificial Sequence
  Synthetic
gcaggcagaucaugagguc

SEQ ID NO: 553978 - RNA, 20 nt, Artificial Sequence
  Synthetic
ggcaggcagaucaugagguc

SEQ ID NO: 553979 - RNA, 21 nt, Artificial Sequence
  Synthetic
aggcaggcagaucaugagguc

SEQ ID NO: 553980 - RNA, 22 nt, Artificial Sequence
  Synthetic
gaggcaggcagaucaugagguc

SEQ ID NO: 553981 - RNA, 23 nt, Artificial Sequence
  Synthetic
ugaggcaggcagaucaugagguc

SEQ ID NO: 553982 - RNA, 24 nt, Artificial Sequence
  Synthetic
cugaggcaggcagaucaugagguc

SEQ ID NO: 553983 - RNA, 18 nt, Artificial Sequence
  Synthetic
cgggcagaucaugagguc

SEQ ID NO: 553984 - RNA, 19 nt, Artificial Sequence
  Synthetic
gcgggcagaucaugagguc

SEQ ID NO: 553985 - RNA, 20 nt, Artificial Sequence
  Synthetic
ggcgggcagaucaugagguc

SEQ ID NO: 553986 - RNA, 21 nt, Artificial Sequence
  Synthetic
aggcgggcagaucaugagguc

SEQ ID NO: 553987 - RNA, 22 nt, Artificial Sequence
  Synthetic
gaggcgggcagaucaugagguc

SEQ ID NO: 553988 - RNA, 23 nt, Artificial Sequence
  Synthetic
cgaggcgggcagaucaugagguc

SEQ ID NO: 553989 - RNA, 24 nt, Artificial Sequence
  Synthetic
ccgaggcgggcagaucaugagguc

SEQ ID NO: 553990 - RNA, 18 nt, Artificial Sequence
  Synthetic
uggguggaucaugagguc

SEQ ID NO: 553991 - RNA, 19 nt, Artificial Sequence
  Synthetic
guggguggaucaugagguc

SEQ ID NO: 553992 - RNA, 20 nt, Artificial Sequence
  Synthetic
gguggguggaucaugagguc

SEQ ID NO: 553993 - RNA, 21 nt, Artificial Sequence
  Synthetic
agguggguggaucaugagguc

SEQ ID NO: 553994 - RNA, 22 nt, Artificial Sequence
  Synthetic
aagguggguggaucaugagguc

SEQ ID NO: 553995 - RNA, 23 nt, Artificial Sequence
  Synthetic
caagguggguggaucaugagguc

SEQ ID NO: 553996 - RNA, 24 nt, Artificial Sequence
  Synthetic
ccaagguggguggaucaugagguc

SEQ ID NO: 553997 - RNA, 18 nt, Artificial Sequence
  Synthetic
ggcagaucaccugagguc

SEQ ID NO: 553998 - RNA, 19 nt, Artificial Sequence
  Synthetic
gggcagaucaccugagguc

SEQ ID NO: 553999 - RNA, 20 nt, Artificial Sequence
  Synthetic
agggcagaucaccugagguc

SEQ ID NO: 554000 - RNA, 21 nt, Artificial Sequence
  Synthetic
gagggcagaucaccugagguc

SEQ ID NO: 554001 - RNA, 22 nt, Artificial Sequence
  Synthetic
ggagggcagaucaccugagguc

SEQ ID NO: 554002 - RNA, 23 nt, Artificial Sequence
  Synthetic
uggagggcagaucaccugagguc

SEQ ID NO: 554003 - RNA, 24 nt, Artificial Sequence
  Synthetic
guggagggcagaucaccugagguc

SEQ ID NO: 554004 - RNA, 18 nt, Artificial Sequence
  Synthetic
agaggguuaugugagguc

SEQ ID NO: 554005 - RNA, 19 nt, Artificial Sequence
  Synthetic
aagaggguuaugugagguc

SEQ ID NO: 554006 - RNA, 20 nt, Artificial Sequence
  Synthetic
gaagaggguuaugugagguc

SEQ ID NO: 554007 - RNA, 21 nt, Artificial Sequence
  Synthetic
agaagaggguuaugugagguc

SEQ ID NO: 554008 - RNA, 22 nt, Artificial Sequence
  Synthetic
aagaagaggguuaugugagguc

SEQ ID NO: 554009 - RNA, 23 nt, Artificial Sequence
  Synthetic
aaagaagaggguuaugugagguc

SEQ ID NO: 554010 - RNA, 24 nt, Artificial Sequence
  Synthetic
caaagaagaggguuaugugagguc

SEQ ID NO: 554011 - RNA, 18 nt, Artificial Sequence
  Synthetic
gauuugucccuugagguc

SEQ ID NO: 554012 - RNA, 19 nt, Artificial Sequence
  Synthetic
agauuugucccuugagguc

SEQ ID NO: 554013 - RNA, 20 nt, Artificial Sequence
  Synthetic
uagauuugucccuugagguc

SEQ ID NO: 554014 - RNA, 21 nt, Artificial Sequence
  Synthetic
auagauuugucccuugagguc

SEQ ID NO: 554015 - RNA, 22 nt, Artificial Sequence
  Synthetic
uauagauuugucccuugagguc

SEQ ID NO: 554016 - RNA, 23 nt, Artificial Sequence
  Synthetic
uuauagauuugucccuugagguc

SEQ ID NO: 554017 - RNA, 24 nt, Artificial Sequence
  Synthetic
auuauagauuugucccuugagguc

SEQ ID NO: 554018 - RNA, 18 nt, Artificial Sequence
  Synthetic
cucagugacauauagguc

SEQ ID NO: 554019 - RNA, 19 nt, Artificial Sequence
  Synthetic
ucucagugacauauagguc

SEQ ID NO: 554020 - RNA, 20 nt, Artificial Sequence
  Synthetic
gucucagugacauauagguc

SEQ ID NO: 554021 - RNA, 21 nt, Artificial Sequence
  Synthetic
ggucucagugacauauagguc

SEQ ID NO: 554022 - RNA, 22 nt, Artificial Sequence
  Synthetic
aggucucagugacauauagguc

SEQ ID NO: 554023 - RNA, 23 nt, Artificial Sequence
  Synthetic
gaggucucagugacauauagguc

SEQ ID NO: 554024 - RNA, 24 nt, Artificial Sequence
  Synthetic
ugaggucucagugacauauagguc

SEQ ID NO: 554025 - RNA, 18 nt, Artificial Sequence
  Synthetic
caggagcuaugcuagguc

SEQ ID NO: 554026 - RNA, 19 nt, Artificial Sequence
  Synthetic
ccaggagcuaugcuagguc

SEQ ID NO: 554027 - RNA, 20 nt, Artificial Sequence
  Synthetic
gccaggagcuaugcuagguc

SEQ ID NO: 554028 - RNA, 21 nt, Artificial Sequence
  Synthetic
ugccaggagcuaugcuagguc

SEQ ID NO: 554029 - RNA, 22 nt, Artificial Sequence
  Synthetic
uugccaggagcuaugcuagguc

SEQ ID NO: 554030 - RNA, 23 nt, Artificial Sequence
  Synthetic
uuugccaggagcuaugcuagguc

SEQ ID NO: 554031 - RNA, 24 nt, Artificial Sequence
  Synthetic
cuuugccaggagcuaugcuagguc

SEQ ID NO: 554032 - RNA, 18 nt, Artificial Sequence
  Synthetic
auuaguccacaguagguc

SEQ ID NO: 554033 - RNA, 19 nt, Artificial Sequence
  Synthetic
uauuaguccacaguagguc

SEQ ID NO: 554034 - RNA, 20 nt, Artificial Sequence
  Synthetic
uuauuaguccacaguagguc

SEQ ID NO: 554035 - RNA, 21 nt, Artificial Sequence
  Synthetic
uuuauuaguccacaguagguc

SEQ ID NO: 554036 - RNA, 22 nt, Artificial Sequence
  Synthetic
uuuuauuaguccacaguagguc

SEQ ID NO: 554037 - RNA, 23 nt, Artificial Sequence
  Synthetic
uuuuuauuaguccacaguagguc

SEQ ID NO: 554038 - RNA, 24 nt, Artificial Sequence
  Synthetic
auuuuuauuaguccacaguagguc

SEQ ID NO: 554039 - RNA, 18 nt, Artificial Sequence
  Synthetic
gacccuucaucuuagguc

SEQ ID NO: 554040 - RNA, 19 nt, Artificial Sequence
  Synthetic
ugacccuucaucuuagguc

SEQ ID NO: 554041 - RNA, 20 nt, Artificial Sequence
  Synthetic
cugacccuucaucuuagguc

SEQ ID NO: 554042 - RNA, 21 nt, Artificial Sequence
  Synthetic
acugacccuucaucuuagguc

SEQ ID NO: 554043 - RNA, 22 nt, Artificial Sequence
  Synthetic
cacugacccuucaucuuagguc

SEQ ID NO: 554044 - RNA, 23 nt, Artificial Sequence
  Synthetic
ucacugacccuucaucuuagguc

SEQ ID NO: 554045 - RNA, 24 nt, Artificial Sequence
  Synthetic
gucacugacccuucaucuuagguc

SEQ ID NO: 554046 - RNA, 18 nt, Artificial Sequence
  Synthetic
uugcuuuauacuucgguc

SEQ ID NO: 554047 - RNA, 19 nt, Artificial Sequence
  Synthetic
guugcuuuauacuucgguc

SEQ ID NO: 554048 - RNA, 20 nt, Artificial Sequence
  Synthetic
uguugcuuuauacuucgguc

SEQ ID NO: 554049 - RNA, 21 nt, Artificial Sequence
  Synthetic
uuguugcuuuauacuucgguc

SEQ ID NO: 554050 - RNA, 22 nt, Artificial Sequence
  Synthetic
auuguugcuuuauacuucgguc

SEQ ID NO: 554051 - RNA, 23 nt, Artificial Sequence
  Synthetic
cauuguugcuuuauacuucgguc

SEQ ID NO: 554052 - RNA, 24 nt, Artificial Sequence
  Synthetic
ccauuguugcuuuauacuucgguc

SEQ ID NO: 554053 - RNA, 18 nt, Artificial Sequence
  Synthetic
cugaggaugggaaggguc

SEQ ID NO: 554054 - RNA, 19 nt, Artificial Sequence
  Synthetic
ccugaggaugggaaggguc

SEQ ID NO: 554055 - RNA, 20 nt, Artificial Sequence
  Synthetic
accugaggaugggaaggguc

SEQ ID NO: 554056 - RNA, 21 nt, Artificial Sequence
  Synthetic
uaccugaggaugggaaggguc

SEQ ID NO: 554057 - RNA, 22 nt, Artificial Sequence
  Synthetic
uuaccugaggaugggaaggguc

SEQ ID NO: 554058 - RNA, 23 nt, Artificial Sequence
  Synthetic
guuaccugaggaugggaaggguc

SEQ ID NO: 554059 - RNA, 24 nt, Artificial Sequence
  Synthetic
gguuaccugaggaugggaaggguc

SEQ ID NO: 554060 - RNA, 18 nt, Artificial Sequence
  Synthetic
ugauauuugaucaggguc

SEQ ID NO: 554061 - RNA, 19 nt, Artificial Sequence
  Synthetic
augauauuugaucaggguc

SEQ ID NO: 554062 - RNA, 20 nt, Artificial Sequence
  Synthetic
gaugauauuugaucaggguc

SEQ ID NO: 554063 - RNA, 21 nt, Artificial Sequence
  Synthetic
ugaugauauuugaucaggguc

SEQ ID NO: 554064 - RNA, 22 nt, Artificial Sequence
  Synthetic
gugaugauauuugaucaggguc

SEQ ID NO: 554065 - RNA, 23 nt, Artificial Sequence
  Synthetic
agugaugauauuugaucaggguc

SEQ ID NO: 554066 - RNA, 24 nt, Artificial Sequence
  Synthetic
aagugaugauauuugaucaggguc

SEQ ID NO: 554067 - RNA, 18 nt, Artificial Sequence
  Synthetic
gaacccaaagagaggguc

SEQ ID NO: 554068 - RNA, 19 nt, Artificial Sequence
  Synthetic
ugaacccaaagagaggguc

SEQ ID NO: 554069 - RNA, 20 nt, Artificial Sequence
  Synthetic
uugaacccaaagagaggguc

SEQ ID NO: 554070 - RNA, 21 nt, Artificial Sequence
  Synthetic
guugaacccaaagagaggguc

SEQ ID NO: 554071 - RNA, 22 nt, Artificial Sequence
  Synthetic
aguugaacccaaagagaggguc

SEQ ID NO: 554072 - RNA, 23 nt, Artificial Sequence
  Synthetic
uaguugaacccaaagagaggguc

SEQ ID NO: 554073 - RNA, 24 nt, Artificial Sequence
  Synthetic
uuaguugaacccaaagagaggguc

SEQ ID NO: 554074 - RNA, 18 nt, Artificial Sequence
  Synthetic
auugcucaaaggaggguc

SEQ ID NO: 554075 - RNA, 19 nt, Artificial Sequence
  Synthetic
uauugcucaaaggaggguc

SEQ ID NO: 554076 - RNA, 20 nt, Artificial Sequence
  Synthetic
cuauugcucaaaggaggguc

SEQ ID NO: 554077 - RNA, 21 nt, Artificial Sequence
  Synthetic
acuauugcucaaaggaggguc

SEQ ID NO: 554078 - RNA, 22 nt, Artificial Sequence
  Synthetic
cacuauugcucaaaggaggguc

SEQ ID NO: 554079 - RNA, 23 nt, Artificial Sequence
  Synthetic
acacuauugcucaaaggaggguc

SEQ ID NO: 554080 - RNA, 24 nt, Artificial Sequence
  Synthetic
gacacuauugcucaaaggaggguc

SEQ ID NO: 554081 - RNA, 18 nt, Artificial Sequence
  Synthetic
gcucuuuccgcuaggguc

SEQ ID NO: 554082 - RNA, 19 nt, Artificial Sequence
  Synthetic
ugcucuuuccgcuaggguc

SEQ ID NO: 554083 - RNA, 20 nt, Artificial Sequence
  Synthetic
cugcucuuuccgcuaggguc

SEQ ID NO: 554084 - RNA, 21 nt, Artificial Sequence
  Synthetic
gcugcucuuuccgcuaggguc

SEQ ID NO: 554085 - RNA, 22 nt, Artificial Sequence
  Synthetic
agcugcucuuuccgcuaggguc

SEQ ID NO: 554086 - RNA, 23 nt, Artificial Sequence
  Synthetic
aagcugcucuuuccgcuaggguc

SEQ ID NO: 554087 - RNA, 24 nt, Artificial Sequence
  Synthetic
aaagcugcucuuuccgcuaggguc

SEQ ID NO: 554088 - RNA, 18 nt, Artificial Sequence
  Synthetic
uuacuagacucuaggguc

SEQ ID NO: 554089 - RNA, 19 nt, Artificial Sequence
  Synthetic
uuuacuagacucuaggguc

SEQ ID NO: 554090 - RNA, 20 nt, Artificial Sequence
  Synthetic
cuuuacuagacucuaggguc

SEQ ID NO: 554091 - RNA, 21 nt, Artificial Sequence
  Synthetic
acuuuacuagacucuaggguc

SEQ ID NO: 554092 - RNA, 22 nt, Artificial Sequence
  Synthetic
cacuuuacuagacucuaggguc

SEQ ID NO: 554093 - RNA, 23 nt, Artificial Sequence
  Synthetic
acacuuuacuagacucuaggguc

SEQ ID NO: 554094 - RNA, 24 nt, Artificial Sequence
  Synthetic
gacacuuuacuagacucuaggguc

SEQ ID NO: 554095 - RNA, 18 nt, Artificial Sequence
  Synthetic
uuuuagguaagagggguc

SEQ ID NO: 554096 - RNA, 19 nt, Artificial Sequence
  Synthetic
auuuuagguaagagggguc

SEQ ID NO: 554097 - RNA, 20 nt, Artificial Sequence
  Synthetic
aauuuuagguaagagggguc

SEQ ID NO: 554098 - RNA, 21 nt, Artificial Sequence
  Synthetic
gaauuuuagguaagagggguc

SEQ ID NO: 554099 - RNA, 22 nt, Artificial Sequence
  Synthetic
agaauuuuagguaagagggguc

SEQ ID NO: 554100 - RNA, 23 nt, Artificial Sequence
  Synthetic
cagaauuuuagguaagagggguc

SEQ ID NO: 554101 - RNA, 24 nt, Artificial Sequence
  Synthetic
ucagaauuuuagguaagagggguc

SEQ ID NO: 554102 - RNA, 18 nt, Artificial Sequence
  Synthetic
acugggauuaacgggguc

SEQ ID NO: 554103 - RNA, 19 nt, Artificial Sequence
  Synthetic
aacugggauuaacgggguc

SEQ ID NO: 554104 - RNA, 20 nt, Artificial Sequence
  Synthetic
aaacugggauuaacgggguc

SEQ ID NO: 554105 - RNA, 21 nt, Artificial Sequence
  Synthetic
gaaacugggauuaacgggguc

SEQ ID NO: 554106 - RNA, 22 nt, Artificial Sequence
  Synthetic
ugaaacugggauuaacgggguc

SEQ ID NO: 554107 - RNA, 23 nt, Artificial Sequence
  Synthetic
augaaacugggauuaacgggguc

SEQ ID NO: 554108 - RNA, 24 nt, Artificial Sequence
  Synthetic
gaugaaacugggauuaacgggguc

SEQ ID NO: 554109 - RNA, 18 nt, Artificial Sequence
  Synthetic
auccucugaaaugggguc

SEQ ID NO: 554110 - RNA, 19 nt, Artificial Sequence
  Synthetic
gauccucugaaaugggguc

SEQ ID NO: 554111 - RNA, 20 nt, Artificial Sequence
  Synthetic
agauccucugaaaugggguc

SEQ ID NO: 554112 - RNA, 21 nt, Artificial Sequence
  Synthetic
gagauccucugaaaugggguc

SEQ ID NO: 554113 - RNA, 22 nt, Artificial Sequence
  Synthetic
ugagauccucugaaaugggguc

SEQ ID NO: 554114 - RNA, 23 nt, Artificial Sequence
  Synthetic
uugagauccucugaaaugggguc

SEQ ID NO: 554115 - RNA, 24 nt, Artificial Sequence
  Synthetic
auugagauccucugaaaugggguc

SEQ ID NO: 554116 - RNA, 18 nt, Artificial Sequence
  Synthetic
aacgggaagugugggguc

SEQ ID NO: 554117 - RNA, 19 nt, Artificial Sequence
  Synthetic
uaacgggaagugugggguc

SEQ ID NO: 554118 - RNA, 20 nt, Artificial Sequence
  Synthetic
uuaacgggaagugugggguc

SEQ ID NO: 554119 - RNA, 21 nt, Artificial Sequence
  Synthetic
cuuaacgggaagugugggguc

SEQ ID NO: 554120 - RNA, 22 nt, Artificial Sequence
  Synthetic
gcuuaacgggaagugugggguc

SEQ ID NO: 554121 - RNA, 23 nt, Artificial Sequence
  Synthetic
ggcuuaacgggaagugugggguc

SEQ ID NO: 554122 - RNA, 24 nt, Artificial Sequence
  Synthetic
gggcuuaacgggaagugugggguc

SEQ ID NO: 554123 - RNA, 18 nt, Artificial Sequence
  Synthetic
aagaauucaagauggguc

SEQ ID NO: 554124 - RNA, 19 nt, Artificial Sequence
  Synthetic
gaagaauucaagauggguc

SEQ ID NO: 554125 - RNA, 20 nt, Artificial Sequence
  Synthetic
agaagaauucaagauggguc

SEQ ID NO: 554126 - RNA, 21 nt, Artificial Sequence
  Synthetic
aagaagaauucaagauggguc

SEQ ID NO: 554127 - RNA, 22 nt, Artificial Sequence
  Synthetic
gaagaagaauucaagauggguc

SEQ ID NO: 554128 - RNA, 23 nt, Artificial Sequence
  Synthetic
ggaagaagaauucaagauggguc

SEQ ID NO: 554129 - RNA, 24 nt, Artificial Sequence
  Synthetic
uggaagaagaauucaagauggguc

SEQ ID NO: 554130 - RNA, 18 nt, Artificial Sequence
  Synthetic
uuuuaguuauguuggguc

SEQ ID NO: 554131 - RNA, 19 nt, Artificial Sequence
  Synthetic
guuuuaguuauguuggguc

SEQ ID NO: 554132 - RNA, 20 nt, Artificial Sequence
  Synthetic
gguuuuaguuauguuggguc

SEQ ID NO: 554133 - RNA, 21 nt, Artificial Sequence
  Synthetic
agguuuuaguuauguuggguc

SEQ ID NO: 554134 - RNA, 22 nt, Artificial Sequence
  Synthetic
aagguuuuaguuauguuggguc

SEQ ID NO: 554135 - RNA, 23 nt, Artificial Sequence
  Synthetic
gaagguuuuaguuauguuggguc

SEQ ID NO: 554136 - RNA, 24 nt, Artificial Sequence
  Synthetic
ggaagguuuuaguuauguuggguc

SEQ ID NO: 554137 - RNA, 18 nt, Artificial Sequence
  Synthetic
gcgggagguuuuuggguc

SEQ ID NO: 554138 - RNA, 19 nt, Artificial Sequence
  Synthetic
ggcgggagguuuuuggguc

SEQ ID NO: 554139 - RNA, 20 nt, Artificial Sequence
  Synthetic
uggcgggagguuuuuggguc

SEQ ID NO: 554140 - RNA, 21 nt, Artificial Sequence
  Synthetic
cuggcgggagguuuuuggguc

SEQ ID NO: 554141 - RNA, 22 nt, Artificial Sequence
  Synthetic
ccuggcgggagguuuuuggguc

SEQ ID NO: 554142 - RNA, 23 nt, Artificial Sequence
  Synthetic
gccuggcgggagguuuuuggguc

SEQ ID NO: 554143 - RNA, 24 nt, Artificial Sequence
  Synthetic
ggccuggcgggagguuuuuggguc

SEQ ID NO: 554144 - RNA, 18 nt, Artificial Sequence
  Synthetic
aacuggugggaaaugguc

SEQ ID NO: 554145 - RNA, 19 nt, Artificial Sequence
  Synthetic
gaacuggugggaaaugguc

SEQ ID NO: 554146 - RNA, 20 nt, Artificial Sequence
  Synthetic
agaacuggugggaaaugguc

SEQ ID NO: 554147 - RNA, 21 nt, Artificial Sequence
  Synthetic
aagaacuggugggaaaugguc

SEQ ID NO: 554148 - RNA, 22 nt, Artificial Sequence
  Synthetic
uaagaacuggugggaaaugguc

SEQ ID NO: 554149 - RNA, 23 nt, Artificial Sequence
  Synthetic
cuaagaacuggugggaaaugguc

SEQ ID NO: 554150 - RNA, 24 nt, Artificial Sequence
  Synthetic
ccuaagaacuggugggaaaugguc

SEQ ID NO: 554151 - RNA, 18 nt, Artificial Sequence
  Synthetic
acuugcaaauaaaugguc

SEQ ID NO: 554152 - RNA, 19 nt, Artificial Sequence
  Synthetic
cacuugcaaauaaaugguc

SEQ ID NO: 554153 - RNA, 20 nt, Artificial Sequence
  Synthetic
ucacuugcaaauaaaugguc

SEQ ID NO: 554154 - RNA, 21 nt, Artificial Sequence
  Synthetic
aucacuugcaaauaaaugguc

SEQ ID NO: 554155 - RNA, 22 nt, Artificial Sequence
  Synthetic
aaucacuugcaaauaaaugguc

SEQ ID NO: 554156 - RNA, 23 nt, Artificial Sequence
  Synthetic
aaaucacuugcaaauaaaugguc

SEQ ID NO: 554157 - RNA, 24 nt, Artificial Sequence
  Synthetic
aaaaucacuugcaaauaaaugguc

SEQ ID NO: 554158 - RNA, 18 nt, Artificial Sequence
  Synthetic
agaguguauuaaaugguc

SEQ ID NO: 554159 - RNA, 19 nt, Artificial Sequence
  Synthetic
cagaguguauuaaaugguc

SEQ ID NO: 554160 - RNA, 20 nt, Artificial Sequence
  Synthetic
gcagaguguauuaaaugguc

SEQ ID NO: 554161 - RNA, 21 nt, Artificial Sequence
  Synthetic
ggcagaguguauuaaaugguc

SEQ ID NO: 554162 - RNA, 22 nt, Artificial Sequence
  Synthetic
gggcagaguguauuaaaugguc

SEQ ID NO: 554163 - RNA, 23 nt, Artificial Sequence
  Synthetic
ugggcagaguguauuaaaugguc

SEQ ID NO: 554164 - RNA, 24 nt, Artificial Sequence
  Synthetic
augggcagaguguauuaaaugguc

SEQ ID NO: 554165 - RNA, 18 nt, Artificial Sequence
  Synthetic
gaauuucuuucaaugguc

SEQ ID NO: 554166 - RNA, 19 nt, Artificial Sequence
  Synthetic
agaauuucuuucaaugguc

SEQ ID NO: 554167 - RNA, 20 nt, Artificial Sequence
  Synthetic
gagaauuucuuucaaugguc

SEQ ID NO: 554168 - RNA, 21 nt, Artificial Sequence
  Synthetic
ugagaauuucuuucaaugguc

SEQ ID NO: 554169 - RNA, 22 nt, Artificial Sequence
  Synthetic
uugagaauuucuuucaaugguc

SEQ ID NO: 554170 - RNA, 23 nt, Artificial Sequence
  Synthetic
uuugagaauuucuuucaaugguc

SEQ ID NO: 554171 - RNA, 24 nt, Artificial Sequence
  Synthetic
auuugagaauuucuuucaaugguc

SEQ ID NO: 554172 - RNA, 18 nt, Artificial Sequence
  Synthetic
cuguuaauccacaugguc

SEQ ID NO: 554173 - RNA, 19 nt, Artificial Sequence
  Synthetic
ucuguuaauccacaugguc

SEQ ID NO: 554174 - RNA, 20 nt, Artificial Sequence
  Synthetic
aucuguuaauccacaugguc

SEQ ID NO: 554175 - RNA, 21 nt, Artificial Sequence
  Synthetic
aaucuguuaauccacaugguc

SEQ ID NO: 554176 - RNA, 22 nt, Artificial Sequence
  Synthetic
aaaucuguuaauccacaugguc

SEQ ID NO: 554177 - RNA, 23 nt, Artificial Sequence
  Synthetic
aaaaucuguuaauccacaugguc

SEQ ID NO: 554178 - RNA, 24 nt, Artificial Sequence
  Synthetic
gaaaaucuguuaauccacaugguc

SEQ ID NO: 554179 - RNA, 18 nt, Artificial Sequence
  Synthetic
cagugaugacucaugguc

SEQ ID NO: 554180 - RNA, 19 nt, Artificial Sequence
  Synthetic
ccagugaugacucaugguc

SEQ ID NO: 554181 - RNA, 20 nt, Artificial Sequence
  Synthetic
uccagugaugacucaugguc

SEQ ID NO: 554182 - RNA, 21 nt, Artificial Sequence
  Synthetic
uuccagugaugacucaugguc

SEQ ID NO: 554183 - RNA, 22 nt, Artificial Sequence
  Synthetic
auuccagugaugacucaugguc

SEQ ID NO: 554184 - RNA, 23 nt, Artificial Sequence
  Synthetic
aauuccagugaugacucaugguc

SEQ ID NO: 554185 - RNA, 24 nt, Artificial Sequence
  Synthetic
uaauuccagugaugacucaugguc

SEQ ID NO: 554186 - RNA, 18 nt, Artificial Sequence
  Synthetic
auguuggccaggaugguc

SEQ ID NO: 554187 - RNA, 19 nt, Artificial Sequence
  Synthetic
cauguuggccaggaugguc

SEQ ID NO: 554188 - RNA, 20 nt, Artificial Sequence
  Synthetic
ccauguuggccaggaugguc

SEQ ID NO: 554189 - RNA, 21 nt, Artificial Sequence
  Synthetic
accauguuggccaggaugguc

SEQ ID NO: 554190 - RNA, 22 nt, Artificial Sequence
  Synthetic
caccauguuggccaggaugguc

SEQ ID NO: 554191 - RNA, 23 nt, Artificial Sequence
  Synthetic
ucaccauguuggccaggaugguc

SEQ ID NO: 554192 - RNA, 24 nt, Artificial Sequence
  Synthetic
uucaccauguuggccaggaugguc

SEQ ID NO: 554193 - RNA, 20 nt, Artificial Sequence
  Synthetic
ucauguuggccaggaugguc

SEQ ID NO: 554194 - RNA, 21 nt, Artificial Sequence
  Synthetic
aucauguuggccaggaugguc

SEQ ID NO: 554195 - RNA, 22 nt, Artificial Sequence
  Synthetic
caucauguuggccaggaugguc

SEQ ID NO: 554196 - RNA, 23 nt, Artificial Sequence
  Synthetic
ucaucauguuggccaggaugguc

SEQ ID NO: 554197 - RNA, 24 nt, Artificial Sequence
  Synthetic
uucaucauguuggccaggaugguc
